United States Patent Application Publication US 2007/0042381 A1 - sequence listing, part 16

SEQ ID NO: 678800 - RNA, 22 nt, Human
ccacauuuuugauacucucacu

SEQ ID NO: 678801 - RNA, 22 nt, Human
ucacuucuucccuugcacauau

SEQ ID NO: 678802 - RNA, 22 nt, Human
uagcucugaccaagagacugag

SEQ ID NO: 678803 - RNA, 22 nt, Human
uggggaggacgggcgccuuccu

SEQ ID NO: 678804 - RNA, 17 nt, Human
caguccucugcucuaag

SEQ ID NO: 678805 - RNA, 22 nt, Human
cuucuucagaggccagccucug

SEQ ID NO: 678806 - RNA, 22 nt, Human
gcuggaguaucuggggaaggag

SEQ ID NO: 678807 - RNA, 22 nt, Human
cauagaaaucaggugagaaucu

SEQ ID NO: 678808 - RNA, 22 nt, Human
guuauuguccauuuauuuagca

SEQ ID NO: 678809 - RNA, 22 nt, Human
ucucagaaauacuauguuguca

SEQ ID NO: 678810 - RNA, 22 nt, Human
gcuggccugggcagaggcuaug

SEQ ID NO: 678811 - RNA, 22 nt, Human
uaaaugcaguacaaauuguucu

SEQ ID NO: 678812 - RNA, 22 nt, Human
aguggagacaggacagucgaua

SEQ ID NO: 678813 - RNA, 22 nt, Human
gggcccagcccucugcucacug

SEQ ID NO: 678814 - RNA, 19 nt, Human
ucaugcauuucuaagugca

SEQ ID NO: 678815 - RNA, 22 nt, Human
uggaggccauaccuccugacau

SEQ ID NO: 678816 - RNA, 22 nt, Human
cuauggcuguguucaugcuaca

SEQ ID NO: 678817 - RNA, 22 nt, Human
gggugcgguccccacagcccgu

SEQ ID NO: 678818 - RNA, 22 nt, Human
ccaggcuggucugaauuucuag

SEQ ID NO: 678819 - RNA, 22 nt, Human
ccaccaggcucuguccgagcgg

SEQ ID NO: 678820 - RNA, 22 nt, Human
auuauuguuuuaauaguagaga

SEQ ID NO: 678821 - RNA, 22 nt, Human
ucugagaguacgggcugcgcgc

SEQ ID NO: 678822 - RNA, 22 nt, Human
gguaaauuuuauguuauguaua

SEQ ID NO: 678823 - RNA, 22 nt, Human
auguuucuguccuacgagauaa

SEQ ID NO: 678824 - RNA, 22 nt, Human
aguguacaagaccuuauuguug

SEQ ID NO: 678825 - RNA, 22 nt, Human
cagcuuugcaggcuggucagug

SEQ ID NO: 678826 - RNA, 22 nt, Human
aaugggaagccagaagacaagg

SEQ ID NO: 678827 - RNA, 22 nt, Human
uuaauuaugagaaagggaaaag

SEQ ID NO: 678828 - RNA, 22 nt, Human
ggaaggaaguaaaugaugcuau

SEQ ID NO: 678829 - RNA, 22 nt, Human
ugugggacagggacagugauau

SEQ ID NO: 678830 - RNA, 22 nt, Human
cccagcucuaggagugguggca

SEQ ID NO: 678831 - RNA, 22 nt, Human
ccucccugggugacgggcuccu

SEQ ID NO: 678832 - RNA, 23 nt, Human
aaguaacagggauaauagcaguu

SEQ ID NO: 678833 - RNA, 22 nt, Human
guuuaugaauugcauucccuuu

SEQ ID NO: 678834 - RNA, 22 nt, Human
gacagugaguaccucaaaggcc

SEQ ID NO: 678835 - RNA, 22 nt, Human
gaugaaaaauugcugugucaua

SEQ ID NO: 678836 - RNA, 22 nt, Human
aacacugaaacauugauugaca

SEQ ID NO: 678837 - RNA, 22 nt, Human
aauacuauguagccaaaauaau

SEQ ID NO: 678838 - RNA, 22 nt, Human
caggcuggagugcagugucgcc

SEQ ID NO: 678839 - RNA, 22 nt, Human
aaacaugaugucauauaugcca

SEQ ID NO: 678840 - RNA, 22 nt, Human
ugggcagaguugugaugaacug

SEQ ID NO: 678841 - RNA, 22 nt, Human
uucuacaugagaaaauguauuu

SEQ ID NO: 678842 - RNA, 22 nt, Human
guauaggcauuuugauuagagu

SEQ ID NO: 678843 - RNA, 22 nt, Human
cccugacucggcgcgcucccgu

SEQ ID NO: 678844 - RNA, 22 nt, Human
ucccugagcuucaucaggcuuu

SEQ ID NO: 678845 - RNA, 21 nt, Human
ugucacauguggaugguauuu

SEQ ID NO: 678846 - RNA, 22 nt, Human
uuuaagacuuagauuuauuggg

SEQ ID NO: 678847 - RNA, 22 nt, Human
cugaggcaccggcaauguucug

SEQ ID NO: 678848 - RNA, 22 nt, Human
cauccagaccgugccaugcugc

SEQ ID NO: 678849 - RNA, 22 nt, Human
cagaauuauaguugcuuuuuaa

SEQ ID NO: 678850 - RNA, 22 nt, Human
guggcugguuuccugcaugcaa

SEQ ID NO: 678851 - RNA, 22 nt, Human
caacuauagggagagugguuaa

SEQ ID NO: 678852 - RNA, 22 nt, Human
gcccacagaggcaccaccaggc

SEQ ID NO: 678853 - RNA, 19 nt, Human
gcaggauaggcugagacua

SEQ ID NO: 678854 - RNA, 22 nt, Human
uaguuuguagaaaucuagaaau

SEQ ID NO: 678855 - RNA, 18 nt, Human
gucuguguggcuugggga

SEQ ID NO: 678856 - RNA, 22 nt, Human
aaacaguguuuuuaugauuuau

SEQ ID NO: 678857 - RNA, 22 nt, Human
cagcccugcagcuggaucucac

SEQ ID NO: 678858 - RNA, 22 nt, Human
cucuuccuuucccuugagggug

SEQ ID NO: 678859 - RNA, 22 nt, Human
ugaacagaucaauagaacugac

SEQ ID NO: 678860 - RNA, 22 nt, Human
aaacaggcuuccauuagagcaa

SEQ ID NO: 678861 - RNA, 22 nt, Human
agcucugacauugauucucagc

SEQ ID NO: 678862 - RNA, 22 nt, Human
aauucucaggaauuucaucugu

SEQ ID NO: 678863 - RNA, 21 nt, Human
guucuuaguuauauucucaau

SEQ ID NO: 678864 - RNA, 22 nt, Human
gacaggcuuugagucccagaac

SEQ ID NO: 678865 - RNA, 17 nt, Human
ugucuucugaagagagc

SEQ ID NO: 678866 - RNA, 21 nt, Human
gaucucuggaaggagaaagcu

SEQ ID NO: 678867 - RNA, 22 nt, Human
cuucugggcagaaguuuugaga

SEQ ID NO: 678868 - RNA, 22 nt, Human
ucaggagucugugcaguuccac

SEQ ID NO: 678869 - RNA, 22 nt, Human
gacauagucucugucuucaugg

SEQ ID NO: 678870 - RNA, 22 nt, Human
uaccaugauguuugaguuacua

SEQ ID NO: 678871 - RNA, 22 nt, Human
acaaauauuuacugaauccacu

SEQ ID NO: 678872 - RNA, 20 nt, Human
uucugaaagcagcagaggga

SEQ ID NO: 678873 - RNA, 22 nt, Human
aaugugaucgcuuuagaagcuu

SEQ ID NO: 678874 - RNA, 22 nt, Human
cgggggcacccacaaaugagga

SEQ ID NO: 678875 - RNA, 22 nt, Human
ucaggcugaggucaucugcauc

SEQ ID NO: 678876 - RNA, 22 nt, Human
gauacaagacuaauaggaaaca

SEQ ID NO: 678877 - RNA, 21 nt, Human
ugacuuuauuugacagcccag

SEQ ID NO: 678878 - RNA, 22 nt, Human
cugggagaggaaccucgagggu

SEQ ID NO: 678879 - RNA, 19 nt, Human
aaagugaaugcuguuuucu

SEQ ID NO: 678880 - RNA, 22 nt, Human
ggcuggaaaggauauuuuaggu

SEQ ID NO: 678881 - RNA, 22 nt, Human
uguggaugagggagugaacaaa

SEQ ID NO: 678882 - RNA, 22 nt, Human
ccuggccacccagccuuggcca

SEQ ID NO: 678883 - RNA, 22 nt, Human
guuauaaauaccuaauaggauu

SEQ ID NO: 678884 - RNA, 22 nt, Human
ggagcugugcugggugaucagg

SEQ ID NO: 678885 - RNA, 22 nt, Human
cuuccagagcugggcugaccuu

SEQ ID NO: 678886 - RNA, 20 nt, Human
ucagcccagggugagcaucu

SEQ ID NO: 678887 - RNA, 22 nt, Human
uuauugugaggaauaagugaga

SEQ ID NO: 678888 - RNA, 22 nt, Human
cacugcaguuccccagugcgca

SEQ ID NO: 678889 - RNA, 22 nt, Human
cagagcagccuccagggggagc

SEQ ID NO: 678890 - RNA, 22 nt, Human
cagauucuuaauuuaugggauu

SEQ ID NO: 678891 - RNA, 22 nt, Human
uaacaugcuaauuugcagauag

SEQ ID NO: 678892 - RNA, 22 nt, Human
gcccugcccugagccguagacc

SEQ ID NO: 678893 - RNA, 22 nt, Human
aucugcuugaaacuucuuauac

SEQ ID NO: 678894 - RNA, 22 nt, Human
ugagccagucugucugggugaa

SEQ ID NO: 678895 - RNA, 22 nt, Human
aucuuguuauaagagauaaugg

SEQ ID NO: 678896 - RNA, 22 nt, Human
cagucaccaccagguggcagua

SEQ ID NO: 678897 - RNA, 22 nt, Human
aguuuuauggcucaaccuaaua

SEQ ID NO: 678898 - RNA, 22 nt, Human
cugcuuuaauguaagauauacc

SEQ ID NO: 678899 - RNA, 22 nt, Human
caaccucuggaaaguauggaca

SEQ ID NO: 678900 - RNA, 19 nt, Human
agaggcagucuccaacagg

SEQ ID NO: 678901 - RNA, 22 nt, Human
cagcucaaguuucccaggucag

SEQ ID NO: 678902 - RNA, 22 nt, Human
gaaccucuuugugcuucagcuu

SEQ ID NO: 678903 - RNA, 22 nt, Human
ucauucuuuaccaaguugucac

SEQ ID NO: 678904 - RNA, 22 nt, Human
ugugaaaucaauuagcugcaga

SEQ ID NO: 678905 - RNA, 22 nt, Human
auguagaccuuucuuugugauu

SEQ ID NO: 678906 - RNA, 22 nt, Human
uuagccauuuuauacaagugua

SEQ ID NO: 678907 - RNA, 23 nt, Human
ucugggcauaucuagucacaucg

SEQ ID NO: 678908 - RNA, 20 nt, Human
cacucuaaccauauuuccuc

SEQ ID NO: 678909 - RNA, 21 nt, Human
ggcaggugggucucuguugcu

SEQ ID NO: 678910 - RNA, 22 nt, Human
agaauuguaauaauaauagcau

SEQ ID NO: 678911 - RNA, 22 nt, Human
gaauauauuauucagcuuuuca

SEQ ID NO: 678912 - RNA, 22 nt, Human
gccuggcugggcugaaugcuua

SEQ ID NO: 678913 - RNA, 17 nt, Human
augcuccauucagaagc

SEQ ID NO: 678914 - RNA, 22 nt, Human
aaucuuuuaggggauccugagg

SEQ ID NO: 678915 - RNA, 22 nt, Human
gguggcagcgucuaucugacau

SEQ ID NO: 678916 - RNA, 22 nt, Human
uagcaucuccuuaggguaagga

SEQ ID NO: 678917 - RNA, 22 nt, Human
uauguacagggauagaacuuga

SEQ ID NO: 678918 - RNA, 22 nt, Human
ucaauguucugauucuuuugca

SEQ ID NO: 678919 - RNA, 19 nt, Human
cugucccucccagguauga

SEQ ID NO: 678920 - RNA, 22 nt, Human
uuuacacugcuugaacaaucuc

SEQ ID NO: 678921 - RNA, 22 nt, Human
aaacaguuuucucauuuagugu

SEQ ID NO: 678922 - RNA, 22 nt, Human
ugugaaaagggcuuuguacaaa

SEQ ID NO: 678923 - RNA, 22 nt, Human
aaucagcagaagagaggucuua

SEQ ID NO: 678924 - RNA, 22 nt, Human
aaugaacauggacaaguuaaua

SEQ ID NO: 678925 - RNA, 22 nt, Human
auguacauuuagaucauuucug

SEQ ID NO: 678926 - RNA, 22 nt, Human
ccauggagcaccucacagaggc

SEQ ID NO: 678927 - RNA, 22 nt, Human
gcaacuuaggaguuagagcaug

SEQ ID NO: 678928 - RNA, 22 nt, Human
uuagcugaguggugcuggcuca

SEQ ID NO: 678929 - RNA, 22 nt, Human
gggcugugaggugagaacuuac

SEQ ID NO: 678930 - RNA, 22 nt, Human
ugcaaacuauugguagagaugg

SEQ ID NO: 678931 - RNA, 22 nt, Human
cuauuugucaguuuggcuuuaa

SEQ ID NO: 678932 - RNA, 22 nt, Human
ugggaaugugagcauucauuca

SEQ ID NO: 678933 - RNA, 22 nt, Human
aagcacagugggcagagcagcc

SEQ ID NO: 678934 - RNA, 22 nt, Human
uucuccucugcaaugacuggca

SEQ ID NO: 678935 - RNA, 21 nt, Human
auugaaagucaacaaucaguu

SEQ ID NO: 678936 - RNA, 19 nt, Human
ugcuucuggaaugcaaggc

SEQ ID NO: 678937 - RNA, 22 nt, Human
cuguggcucuccaauggaggga

SEQ ID NO: 678938 - RNA, 22 nt, Human
agggaagccaagccuuagagaa

SEQ ID NO: 678939 - RNA, 21 nt, Human
ucugggcagcccaguccugag

SEQ ID NO: 678940 - RNA, 22 nt, Human
uauugcugccucguccaggcug

SEQ ID NO: 678941 - RNA, 22 nt, Human
aaaacugagguuuccugaagaa

SEQ ID NO: 678942 - RNA, 22 nt, Human
uaccuggaauagagucucucca

SEQ ID NO: 678943 - RNA, 22 nt, Human
agugcuguccaguuucacaggu

SEQ ID NO: 678944 - RNA, 22 nt, Human
ucugagaguagagcugccucuu

SEQ ID NO: 678945 - RNA, 22 nt, Human
uugacaaucccuguuagaagug

SEQ ID NO: 678946 - RNA, 22 nt, Human
gugccuggaaugcgccucggcg

SEQ ID NO: 678947 - RNA, 22 nt, Human
ggcaucagcccgguccugggcu

SEQ ID NO: 678948 - RNA, 22 nt, Human
ccaggagccugggccaggcugg

SEQ ID NO: 678949 - RNA, 22 nt, Human
uaucauuuguuauuauuagugg

SEQ ID NO: 678950 - RNA, 22 nt, Human
ccauccuggccucgcuguccac

SEQ ID NO: 678951 - RNA, 22 nt, Human
augguuucacaaacaaaagguu

SEQ ID NO: 678952 - RNA, 22 nt, Human
aggaaacuaauuaguagaauaa

SEQ ID NO: 678953 - RNA, 22 nt, Human
cucuuuaguuugaaauccacau

SEQ ID NO: 678954 - RNA, 22 nt, Human
uguuuucugaugguuaaugagu

SEQ ID NO: 678955 - RNA, 22 nt, Human
cucuggacacuggcaugggguc

SEQ ID NO: 678956 - RNA, 20 nt, Human
ucucugaguuuccuaauuug

SEQ ID NO: 678957 - RNA, 22 nt, Human
uuuacagaaugucaauuucuau

SEQ ID NO: 678958 - RNA, 22 nt, Human
cucugggagaggacacuuggag

SEQ ID NO: 678959 - RNA, 22 nt, Human
aauguauaaccauaggaaauuu

SEQ ID NO: 678960 - RNA, 22 nt, Human
gaagauuggggccucugcaccc

SEQ ID NO: 678961 - RNA, 22 nt, Human
aauuccagcugauugacuuucc

SEQ ID NO: 678962 - RNA, 22 nt, Human
uugccuggagggacauggagac

SEQ ID NO: 678963 - RNA, 22 nt, Human
cagcccuggccccagguggucu

SEQ ID NO: 678964 - RNA, 22 nt, Human
aauguguuaguauugauuuguc

SEQ ID NO: 678965 - RNA, 22 nt, Human
uaaaugcuaucgcauaaaaccu

SEQ ID NO: 678966 - RNA, 22 nt, Human
auccaggcugcgggucucaagu

SEQ ID NO: 678967 - RNA, 22 nt, Human
aacuauacucuguaaaugugcu

SEQ ID NO: 678968 - RNA, 22 nt, Human
gucuggguggcugcuuucagcu

SEQ ID NO: 678969 - RNA, 22 nt, Human
acugaacagccuuucaaacuua

SEQ ID NO: 678970 - RNA, 20 nt, Human
ccugccugccucggcucauu

SEQ ID NO: 678971 - RNA, 22 nt, Human
uggcucuggugcgggcuccugc

SEQ ID NO: 678972 - RNA, 22 nt, Human
acucuggagauggaugucagga

SEQ ID NO: 678973 - RNA, 22 nt, Human
gcagaaguaggcucuguguagg

SEQ ID NO: 678974 - RNA, 22 nt, Human
aauauagauuuacucaagagaa

SEQ ID NO: 678975 - RNA, 21 nt, Human
uccugcagaaugccuuccuac

SEQ ID NO: 678976 - RNA, 22 nt, Human
aaagcagcggugucuuuacugc

SEQ ID NO: 678977 - RNA, 22 nt, Human
aagcacagagaugggcacgccu

SEQ ID NO: 678978 - RNA, 22 nt, Human
acuuagaagaugcaguaaagca

SEQ ID NO: 678979 - RNA, 22 nt, Human
caugucuuuguuaugcucacca

SEQ ID NO: 678980 - RNA, 22 nt, Human
auugucaucgauguuagccagu

SEQ ID NO: 678981 - RNA, 22 nt, Human
cuguggcuuugugucuauugua

SEQ ID NO: 678982 - RNA, 22 nt, Human
aaagcuuucuagcuauguucua

SEQ ID NO: 678983 - RNA, 22 nt, Human
aucaccacuacaaacaucauug

SEQ ID NO: 678984 - RNA, 22 nt, Human
uugcacagaugcacaugguugc

SEQ ID NO: 678985 - RNA, 17 nt, Human
gaaaggaggcaacacug

SEQ ID NO: 678986 - RNA, 22 nt, Human
auaugugugcacauauguauuu

SEQ ID NO: 678987 - RNA, 22 nt, Human
ugagcugcagugagcugagaug

SEQ ID NO: 678988 - RNA, 22 nt, Human
caugaguuuuuuaguucaugca

SEQ ID NO: 678989 - RNA, 23 nt, Human
agcuaaggaagcugaggcacagu

SEQ ID NO: 678990 - RNA, 22 nt, Human
ccagucaaguugacacaccaag

SEQ ID NO: 678991 - RNA, 22 nt, Human
guggcagaguucaggcguuugg

SEQ ID NO: 678992 - RNA, 22 nt, Human
auauguuuuucacagguuuaag

SEQ ID NO: 678993 - RNA, 22 nt, Human
cacuggcauuagucacgaggca

SEQ ID NO: 678994 - RNA, 22 nt, Human
uccagguagauuuauuccagcc

SEQ ID NO: 678995 - RNA, 22 nt, Human
gcagucacagggagauggugac

SEQ ID NO: 678996 - RNA, 22 nt, Human
caaugauguuuagauaaaaucc

SEQ ID NO: 678997 - RNA, 22 nt, Human
uaaaugacauucuuaagucuug

SEQ ID NO: 678998 - RNA, 22 nt, Human
gaacagggaguacggcacauuu

SEQ ID NO: 678999 - RNA, 20 nt, Human
accagguggcugaugacacc

SEQ ID NO: 679000 - RNA, 22 nt, Human
cagucuaccuuucagacauuga

SEQ ID NO: 679001 - RNA, 22 nt, Human
ugggccaggucugugucagcug

SEQ ID NO: 679002 - RNA, 22 nt, Human
cuggaagagcauuugcauaggg

SEQ ID NO: 679003 - RNA, 22 nt, Human
agaucagaaauguaauggcagu

SEQ ID NO: 679004 - RNA, 22 nt, Human
uguuuauuuucaggauggauug

SEQ ID NO: 679005 - RNA, 22 nt, Human
accaggaguaacagugaguggu

SEQ ID NO: 679006 - RNA, 22 nt, Human
cauuuuauguuuauggagugcu

SEQ ID NO: 679007 - RNA, 22 nt, Human
agacacuguguacagaaaaaga

SEQ ID NO: 679008 - RNA, 22 nt, Human
uagacauuuggcaugguuuuca

SEQ ID NO: 679009 - RNA, 22 nt, Human
ugcagggccgcuggaggucaug

SEQ ID NO: 679010 - RNA, 22 nt, Human
uguugcacggccuucacagagc

SEQ ID NO: 679011 - RNA, 21 nt, Human
ccuauugaauauaggaagauu

SEQ ID NO: 679012 - RNA, 22 nt, Human
gaagccagauuaucacaagcca

SEQ ID NO: 679013 - RNA, 22 nt, Human
uagguuuacugaauuaguggaa

SEQ ID NO: 679014 - RNA, 22 nt, Human
ucucaucugcgagcucugccag

SEQ ID NO: 679015 - RNA, 22 nt, Human
cugcccucuagaggaggacuga

SEQ ID NO: 679016 - RNA, 22 nt, Human
aacagcagcuuucaggaucauc

SEQ ID NO: 679017 - RNA, 22 nt, Human
uacuuugucauucuaaccuucc

SEQ ID NO: 679018 - RNA, 22 nt, Human
cagcuucugcuaucgaacaucu

SEQ ID NO: 679019 - RNA, 22 nt, Human
auuucugcuacugcacccuagu

SEQ ID NO: 679020 - RNA, 22 nt, Human
gccuggcagugaugucuuuugg

SEQ ID NO: 679021 - RNA, 17 nt, Human
uaucagaauguguuuac

SEQ ID NO: 679022 - RNA, 22 nt, Human
caucacuguccucagcauucca

SEQ ID NO: 679023 - RNA, 22 nt, Human
aagggcagcuuaaauugguagc

SEQ ID NO: 679024 - RNA, 22 nt, Human
auguggggacucugagagaauu

SEQ ID NO: 679025 - RNA, 22 nt, Human
ccagucagccaagcugcagcgg

SEQ ID NO: 679026 - RNA, 22 nt, Human
cuuucacaguccugacugagcg

SEQ ID NO: 679027 - RNA, 22 nt, Human
accccaggucaucugagagucc

SEQ ID NO: 679028 - RNA, 22 nt, Human
uguacauagaucuugaaaauua

SEQ ID NO: 679029 - RNA, 15 nt, Human
gccccaggaaucaaa

SEQ ID NO: 679030 - RNA, 22 nt, Human
auaaggaaugauguaucaguuu

SEQ ID NO: 679031 - RNA, 22 nt, Human
uuuguaacaaguugaucuggua

SEQ ID NO: 679032 - RNA, 22 nt, Human
aacagcuuugcuucuggagaca

SEQ ID NO: 679033 - RNA, 22 nt, Human
auacacauguuauuguggaagc

SEQ ID NO: 679034 - RNA, 22 nt, Human
ggcuccuguggcaagacagcuu

SEQ ID NO: 679035 - RNA, 22 nt, Human
ccugagcucaaagggugccugg

SEQ ID NO: 679036 - RNA, 22 nt, Human
cagaguggcacucugcuggaug

SEQ ID NO: 679037 - RNA, 22 nt, Human
ugcuuaauguacgugaguguac

SEQ ID NO: 679038 - RNA, 22 nt, Human
gaaucacgguauucugcacggg

SEQ ID NO: 679039 - RNA, 22 nt, Human
ugugaugucagugguaucaaag

SEQ ID NO: 679040 - RNA, 22 nt, Human
ggggccuguagagcuucaggga

SEQ ID NO: 679041 - RNA, 22 nt, Human
aguuuuaugcaguguucugaua

SEQ ID NO: 679042 - RNA, 22 nt, Human
caggaggcagagguugcagcga

SEQ ID NO: 679043 - RNA, 22 nt, Human
gaaaucuuuuaaccauucauuu

SEQ ID NO: 679044 - RNA, 22 nt, Human
uccccagaggaauaugagauug

SEQ ID NO: 679045 - RNA, 23 nt, Human
ucugggcaccuuguugacaugau

SEQ ID NO: 679046 - RNA, 22 nt, Human
cagaucugugguaucucuauuu

SEQ ID NO: 679047 - RNA, 20 nt, Human
uccugagccuccaccauguc

SEQ ID NO: 679048 - RNA, 22 nt, Human
ugcagcagguauggcaagcucc

SEQ ID NO: 679049 - RNA, 22 nt, Human
cagcugcaggcugugcaggaag

SEQ ID NO: 679050 - RNA, 21 nt, Human
cagcacaguacugggucuugc

SEQ ID NO: 679051 - RNA, 22 nt, Human
gaauucugucgcuuacuagaug

SEQ ID NO: 679052 - RNA, 22 nt, Human
uuggcagaauuaaccacugaag

SEQ ID NO: 679053 - RNA, 22 nt, Human
ggccaggcuggucucagacuuc

SEQ ID NO: 679054 - RNA, 22 nt, Human
ucccugugagucaacuaaacaa

SEQ ID NO: 679055 - RNA, 20 nt, Human
gcugggcuaccacuggcccu

SEQ ID NO: 679056 - RNA, 22 nt, Human
gagcugcuggcuccucagguua

SEQ ID NO: 679057 - RNA, 22 nt, Human
gguaacugaggccauauucuga

SEQ ID NO: 679058 - RNA, 22 nt, Human
ugguggcagcaggagggccccu

SEQ ID NO: 679059 - RNA, 22 nt, Human
ggcuggaaggcccuuuguugau

SEQ ID NO: 679060 - RNA, 22 nt, Human
gugcacagaagcagaagcuaga

SEQ ID NO: 679061 - RNA, 19 nt, Human
ccugcugcaccacuuguua

SEQ ID NO: 679062 - RNA, 19 nt, Human
agcccagcuuauuugucag

SEQ ID NO: 679063 - RNA, 22 nt, Human
ugggaacaacaugcacugccac

SEQ ID NO: 679064 - RNA, 22 nt, Human
uagaaucaagcaguagagcaga

SEQ ID NO: 679065 - RNA, 22 nt, Human
gccugagauuggacauuauuua

SEQ ID NO: 679066 - RNA, 22 nt, Human
ugauuucucauauuguucaaaa

SEQ ID NO: 679067 - RNA, 22 nt, Human
uaguuaggaaaguccagggagc

SEQ ID NO: 679068 - RNA, 22 nt, Human
ucacacauacucaugugugagu

SEQ ID NO: 679069 - RNA, 22 nt, Human
auguacaguggaaacuaacaaa

SEQ ID NO: 679070 - RNA, 21 nt, Human
uagcacagcuguagacaguuu

SEQ ID NO: 679071 - RNA, 22 nt, Human
agggcucagaaagcagguuuuc

SEQ ID NO: 679072 - RNA, 22 nt, Human
aaguucaagucuccugaguaua

SEQ ID NO: 679073 - RNA, 22 nt, Human
uuucucugaguuguuacaaaac

SEQ ID NO: 679074 - RNA, 22 nt, Human
gaagaaauguguucaagguagg

SEQ ID NO: 679075 - RNA, 23 nt, Human
ggacccuguggagggugagaguc

SEQ ID NO: 679076 - RNA, 21 nt, Human
gggcuccagagauguagcuuc

SEQ ID NO: 679077 - RNA, 20 nt, Human
cccuggccuguuucaugccc

SEQ ID NO: 679078 - RNA, 22 nt, Human
agcucucccauagggcaagauc

SEQ ID NO: 679079 - RNA, 22 nt, Human
uuauuaggaaaaggucagaugu

SEQ ID NO: 679080 - RNA, 22 nt, Human
gccugggagagggauagugcag

SEQ ID NO: 679081 - RNA, 22 nt, Human
gggaagagugucgguugaagug

SEQ ID NO: 679082 - RNA, 22 nt, Human
ucugccaugcuaacuucaguau

SEQ ID NO: 679083 - RNA, 23 nt, Human
aagaacugcgaauggagaaagua

SEQ ID NO: 679084 - RNA, 22 nt, Human
agcacauucugccuugcuuugc

SEQ ID NO: 679085 - RNA, 22 nt, Human
uuguuuguaaggcucuuagaau

SEQ ID NO: 679086 - RNA, 22 nt, Human
ugcaggaguuccccucugccug

SEQ ID NO: 679087 - RNA, 22 nt, Human
aaggaggcagaacucacaugga

SEQ ID NO: 679088 - RNA, 22 nt, Human
ggcucuagagacucuagagaaa

SEQ ID NO: 679089 - RNA, 22 nt, Human
aucuucaacuugaucauuugaa

SEQ ID NO: 679090 - RNA, 22 nt, Human
uuuaggaaguuucagauaggaa

SEQ ID NO: 679091 - RNA, 22 nt, Human
ucucucagacuccccaugguuu

SEQ ID NO: 679092 - RNA, 19 nt, Human
aggugaggggcaccauguc

SEQ ID NO: 679093 - RNA, 22 nt, Human
aacaguauaugaaauguuagga

SEQ ID NO: 679094 - RNA, 20 nt, Human
acacaugcauagagagagag

SEQ ID NO: 679095 - RNA, 22 nt, Human
uugcaggggaaggagcagagcu

SEQ ID NO: 679096 - RNA, 22 nt, Human
agugugagcuaauagcagagcc

SEQ ID NO: 679097 - RNA, 22 nt, Human
augaaacaugcuuuguggauga

SEQ ID NO: 679098 - RNA, 22 nt, Human
caggaggagcauuagcgucuca

SEQ ID NO: 679099 - RNA, 22 nt, Human
uauuucugucagccagauaugg

SEQ ID NO: 679100 - RNA, 22 nt, Human
ggcucaggcuggagugcagugg

SEQ ID NO: 679101 - RNA, 22 nt, Human
augcacaguaaugagcugguug

SEQ ID NO: 679102 - RNA, 22 nt, Human
uaucacacuagccuauagugga

SEQ ID NO: 679103 - RNA, 22 nt, Human
augaaauggugguuuuccauuu

SEQ ID NO: 679104 - RNA, 23 nt, Human
uuuuccuguggagacaugacugg

SEQ ID NO: 679105 - RNA, 22 nt, Human
cuaguuuaaagcagcugaaagg

SEQ ID NO: 679106 - RNA, 22 nt, Human
gggucuccugagagaagaugcu

SEQ ID NO: 679107 - RNA, 22 nt, Human
gcagguggucacucauccccag

SEQ ID NO: 679108 - RNA, 22 nt, Human
uuacaauugagucuauuguaug

SEQ ID NO: 679109 - RNA, 22 nt, Human
ucacuguauuuggaagggaugg

SEQ ID NO: 679110 - RNA, 22 nt, Human
ccugauucugaugccucaugga

SEQ ID NO: 679111 - RNA, 19 nt, Human
auucagcauucugcacuuc

SEQ ID NO: 679112 - RNA, 22 nt, Human
uccuuuaaacuccuuucaaguc

SEQ ID NO: 679113 - RNA, 22 nt, Human
cagcccugucccugagggaccu

SEQ ID NO: 679114 - RNA, 22 nt, Human
gcacacauucuagccuuuugug

SEQ ID NO: 679115 - RNA, 22 nt, Human
acugaaaaugaauuagaaacag

SEQ ID NO: 679116 - RNA, 22 nt, Human
ccauuuguucgcccagcuccaa

SEQ ID NO: 679117 - RNA, 22 nt, Human
gaccucagugaauggucaugua

SEQ ID NO: 679118 - RNA, 22 nt, Human
uaugcagugguaucauuuuaaa

SEQ ID NO: 679119 - RNA, 22 nt, Human
cuggcagcgugagcagcaucca

SEQ ID NO: 679120 - RNA, 22 nt, Human
gaaacaacuacuauugauuucu

SEQ ID NO: 679121 - RNA, 22 nt, Human
gcuccccagcuuagcccuggcu

SEQ ID NO: 679122 - RNA, 22 nt, Human
uuaugcuaaaugaaucaaguca

SEQ ID NO: 679123 - RNA, 22 nt, Human
gccucccuggcccacagcagcg

SEQ ID NO: 679124 - RNA, 22 nt, Human
ccaagggaaggauguauaugau

SEQ ID NO: 679125 - RNA, 23 nt, Human
agcucugcucgggcaugcccugc

SEQ ID NO: 679126 - RNA, 22 nt, Human
ccaaaggccaagcucagguaaa

SEQ ID NO: 679127 - RNA, 22 nt, Human
aucugagucaaauauuucauuu

SEQ ID NO: 679128 - RNA, 22 nt, Human
ugaacccugaccucuggaagga

SEQ ID NO: 679129 - RNA, 22 nt, Human
ugaggugguucaagagccuugu

SEQ ID NO: 679130 - RNA, 19 nt, Human
ccuuccuccccagggccau

SEQ ID NO: 679131 - RNA, 22 nt, Human
gaacagcuauaaucaucugucc

SEQ ID NO: 679132 - RNA, 22 nt, Human
aauacugucuuucacagauauu

SEQ ID NO: 679133 - RNA, 22 nt, Human
ugcaccauguaaguggccacgu

SEQ ID NO: 679134 - RNA, 22 nt, Human
uguacacauuaagcucuuuaga

SEQ ID NO: 679135 - RNA, 22 nt, Human
gcagggacaaggcagguguucu

SEQ ID NO: 679136 - RNA, 22 nt, Human
cuuccagugcauagguagauca

SEQ ID NO: 679137 - RNA, 22 nt, Human
cagcaggcagccauuucacugu

SEQ ID NO: 679138 - RNA, 22 nt, Human
ucaugcaagaauaauaggaagg

SEQ ID NO: 679139 - RNA, 22 nt, Human
auucauuuagguauucacuuac

SEQ ID NO: 679140 - RNA, 22 nt, Human
ggagccugagcggcccagggcc

SEQ ID NO: 679141 - RNA, 22 nt, Human
gacagcaggugcuugggaaagg

SEQ ID NO: 679142 - RNA, 22 nt, Human
agacuauuaccuaaaagauaca

SEQ ID NO: 679143 - RNA, 22 nt, Human
uuuauucacuggggucugcccg

SEQ ID NO: 679144 - RNA, 22 nt, Human
uguuaaacagcugucuucuuca

SEQ ID NO: 679145 - RNA, 20 nt, Human
gaaucuuuccccaugcaaug

SEQ ID NO: 679146 - RNA, 21 nt, Human
uggcugcacuguggcuuucau

SEQ ID NO: 679147 - RNA, 22 nt, Human
aguguggacuuuuccuaggagg

SEQ ID NO: 679148 - RNA, 22 nt, Human
ugccucugugggccuuccuggc

SEQ ID NO: 679149 - RNA, 21 nt, Human
cacaccaaacaggaacaggga

SEQ ID NO: 679150 - RNA, 22 nt, Human
uggcucagaagaaaagguaaac

SEQ ID NO: 679151 - RNA, 22 nt, Human
cuaggcuggagugcaguggcau

SEQ ID NO: 679152 - RNA, 19 nt, Human
ugggcuuccccagggcaga

SEQ ID NO: 679153 - RNA, 22 nt, Human
gcugucuugaugauuggaugcu

SEQ ID NO: 679154 - RNA, 22 nt, Human
uucugggggaauacagcuauga

SEQ ID NO: 679155 - RNA, 22 nt, Human
augcauauuuucuacuauaucg

SEQ ID NO: 679156 - RNA, 22 nt, Human
aagugucuuaacuccuuuuggg

SEQ ID NO: 679157 - RNA, 22 nt, Human
agggaugggaacuccuccagca

SEQ ID NO: 679158 - RNA, 22 nt, Human
acaguggaaagaacauggauuu

SEQ ID NO: 679159 - RNA, 22 nt, Human
gggcugacucugcacugagcca

SEQ ID NO: 679160 - RNA, 22 nt, Human
aaaucacuaaguuauagugugg

SEQ ID NO: 679161 - RNA, 21 nt, Human
ucccagcugggucagugcugc

SEQ ID NO: 679162 - RNA, 22 nt, Human
auauuuucuggaacuaugccug

SEQ ID NO: 679163 - RNA, 22 nt, Human
ggucagccccugcucaaggccg

SEQ ID NO: 679164 - RNA, 22 nt, Human
aaauguaguauguugcauguau

SEQ ID NO: 679165 - RNA, 22 nt, Human
cuggccagugacugcucacccg

SEQ ID NO: 679166 - RNA, 22 nt, Human
uaaugcuuuguuuugaucuaac

SEQ ID NO: 679167 - RNA, 21 nt, Human
agguuccagcagccagagaau

SEQ ID NO: 679168 - RNA, 22 nt, Human
aaaugugagacugaguuuuccu

SEQ ID NO: 679169 - RNA, 22 nt, Human
aauaauauuccucugugugcgu

SEQ ID NO: 679170 - RNA, 22 nt, Human
ucucuugauauauuacauagag

SEQ ID NO: 679171 - RNA, 22 nt, Human
auaauucagguuuucuggcaca

SEQ ID NO: 679172 - RNA, 17 nt, Human
ggaccagggguugccau

SEQ ID NO: 679173 - RNA, 22 nt, Human
aggaagaggugugcaauggugu

SEQ ID NO: 679174 - RNA, 22 nt, Human
aaaggcaggacugcagcauagg

SEQ ID NO: 679175 - RNA, 22 nt, Human
acauuuaaccaaacuguuuaau

SEQ ID NO: 679176 - RNA, 22 nt, Human
gaggaacccagcugggguugcc

SEQ ID NO: 679177 - RNA, 22 nt, Human
accucuggccuucaggcaucau

SEQ ID NO: 679178 - RNA, 20 nt, Human
aggucugauuccagaaucag

SEQ ID NO: 679179 - RNA, 22 nt, Human
uccuguuuaucugugugacucg

SEQ ID NO: 679180 - RNA, 22 nt, Human
ucaaugauagacaagaucuaag

SEQ ID NO: 679181 - RNA, 22 nt, Human
ugcauguuaagaaaauauugag

SEQ ID NO: 679182 - RNA, 22 nt, Human
aucauucaagugcucuaaaaug

SEQ ID NO: 679183 - RNA, 22 nt, Human
guuucucagcaacuauaugacu

SEQ ID NO: 679184 - RNA, 22 nt, Human
ccucagugugcagcagcaucug

SEQ ID NO: 679185 - RNA, 22 nt, Human
caggagugucuccacacagcaa

SEQ ID NO: 679186 - RNA, 22 nt, Human
ugcuccugagugugcaggagau

SEQ ID NO: 679187 - RNA, 22 nt, Human
gugguaccaguaggucagccau

SEQ ID NO: 679188 - RNA, 22 nt, Human
agccuggcuguaaccucauggu

SEQ ID NO: 679189 - RNA, 22 nt, Human
uaagcauuaacucugcugcaag

SEQ ID NO: 679190 - RNA, 22 nt, Human
ccuggacagggccaggccaugc

SEQ ID NO: 679191 - RNA, 22 nt, Human
gcugucaccaaagcaggcacug

SEQ ID NO: 679192 - RNA, 22 nt, Human
auaggcaagggauacaauauac

SEQ ID NO: 679193 - RNA, 22 nt, Human
gcucaaagaccagacagaggag

SEQ ID NO: 679194 - RNA, 22 nt, Human
agaagagccuggggaccauggc

SEQ ID NO: 679195 - RNA, 22 nt, Human
aauguucucaacaaaaggaagc

SEQ ID NO: 679196 - RNA, 22 nt, Human
ucccuggcagcuguccuuucag

SEQ ID NO: 679197 - RNA, 22 nt, Human
gaaauuaaccaccuuuggcuuu

SEQ ID NO: 679198 - RNA, 22 nt, Human
ucaguugcuagaagggggaacc

SEQ ID NO: 679199 - RNA, 19 nt, Human
uguucagauaugucagcuu

SEQ ID NO: 679200 - RNA, 22 nt, Human
caccagcuacagacuacugugu

SEQ ID NO: 679201 - RNA, 22 nt, Human
acagcagguuacaguggcacag

SEQ ID NO: 679202 - RNA, 18 nt, Human
ucacaugauuacccuggg

SEQ ID NO: 679203 - RNA, 22 nt, Human
gaggaacuuaugauauucuacu

SEQ ID NO: 679204 - RNA, 22 nt, Human
accuggcugguugugauuccca

SEQ ID NO: 679205 - RNA, 18 nt, Human
agcuccuggucucaggga

SEQ ID NO: 679206 - RNA, 20 nt, Human
caguuuaucuuuccggagcu

SEQ ID NO: 679207 - RNA, 22 nt, Human
uuauggagugcuuaccugccag

SEQ ID NO: 679208 - RNA, 22 nt, Human
aagcacagggugucugcauuca

SEQ ID NO: 679209 - RNA, 22 nt, Human
ucaaggaaaagauaacuugaug

SEQ ID NO: 679210 - RNA, 22 nt, Human
agugcuaaugugcaauauagag

SEQ ID NO: 679211 - RNA, 22 nt, Human
aaaggccacacagagcagggag

SEQ ID NO: 679212 - RNA, 22 nt, Human
caagaugaucccugaaggcagc

SEQ ID NO: 679213 - RNA, 22 nt, Human
aggcuccaagagguuaagucac

SEQ ID NO: 679214 - RNA, 22 nt, Human
agcacuguggggaacucacaga

SEQ ID NO: 679215 - RNA, 22 nt, Human
aguacacuggcaaauguggugg

SEQ ID NO: 679216 - RNA, 22 nt, Human
uuucauauuauuccuugagucu

SEQ ID NO: 679217 - RNA, 22 nt, Human
aaguggggccuggugguacagu

SEQ ID NO: 679218 - RNA, 22 nt, Human
gcagcaagaauaauuuggguag

SEQ ID NO: 679219 - RNA, 22 nt, Human
ccucccacauccuagcucugcu

SEQ ID NO: 679220 - RNA, 22 nt, Human
gcucucucgugaacaggugguu

SEQ ID NO: 679221 - RNA, 22 nt, Human
acugugugcuggacaugauguu

SEQ ID NO: 679222 - RNA, 22 nt, Human
acuguacauauggauucuaaga

SEQ ID NO: 679223 - RNA, 22 nt, Human
gccaggcucuugguuauguuuu

SEQ ID NO: 679224 - RNA, 22 nt, Human
uguggcaguauaagagcuagaa

SEQ ID NO: 679225 - RNA, 22 nt, Human
agagccaggacugugucucacu

SEQ ID NO: 679226 - RNA, 22 nt, Human
uacagaaaucacaucgcuuuga

SEQ ID NO: 679227 - RNA, 22 nt, Human
aucuucucauguguaaugaggu

SEQ ID NO: 679228 - RNA, 22 nt, Human
aauaacagugccaugaaauuga

SEQ ID NO: 679229 - RNA, 22 nt, Human
guauuuggucuauuuggcaucc

SEQ ID NO: 679230 - RNA, 22 nt, Human
agaauagaauucucauagaauu

SEQ ID NO: 679231 - RNA, 22 nt, Human
agaggggcccgguucuccgucu

SEQ ID NO: 679232 - RNA, 22 nt, Human
accccccagauaaucccuugag

SEQ ID NO: 679233 - RNA, 22 nt, Human
ucugaaagcccuaguuuguaau

SEQ ID NO: 679234 - RNA, 21 nt, Human
ucaggcugucugcugguucca

SEQ ID NO: 679235 - RNA, 22 nt, Human
caauucaaccuaagugcaucca

SEQ ID NO: 679236 - RNA, 22 nt, Human
uuauccaagcagaagcugcaca

SEQ ID NO: 679237 - RNA, 19 nt, Human
uucaggauugacccuacug

SEQ ID NO: 679238 - RNA, 22 nt, Human
uuccuuccauagcaaaacaugc

SEQ ID NO: 679239 - RNA, 20 nt, Human
agaucuuuucuauagaagug

SEQ ID NO: 679240 - RNA, 22 nt, Human
aaggcagaggaaggucuaguuu

SEQ ID NO: 679241 - RNA, 19 nt, Human
gaaagauuucaguugagga

SEQ ID NO: 679242 - RNA, 22 nt, Human
auuugccucugcuuucaaggau

SEQ ID NO: 679243 - RNA, 22 nt, Human
agauacauugaguuuccuccug

SEQ ID NO: 679244 - RNA, 22 nt, Human
ucacugggagaugugggaaggg

SEQ ID NO: 679245 - RNA, 22 nt, Human
guuugcauaaaguggaugcagg

SEQ ID NO: 679246 - RNA, 22 nt, Human
gacuuuauaaaugagaggcgga

SEQ ID NO: 679247 - RNA, 22 nt, Human
uucuuucccuuccagcagcucc

SEQ ID NO: 679248 - RNA, 22 nt, Human
cuuccuaaaagcuucaagagaa

SEQ ID NO: 679249 - RNA, 22 nt, Human
caaugcaagcaagauggucaca

SEQ ID NO: 679250 - RNA, 22 nt, Human
gaauuuacaaguugaauaacaa

SEQ ID NO: 679251 - RNA, 22 nt, Human
ccugagagagugagcccugaca

SEQ ID NO: 679252 - RNA, 22 nt, Human
cuguauuugaaagaaaagauuu

SEQ ID NO: 679253 - RNA, 22 nt, Human
gagcccgagcgcguacccggcg

SEQ ID NO: 679254 - RNA, 22 nt, Human
aacuucucagccugcaccuggc

SEQ ID NO: 679255 - RNA, 22 nt, Human
caguauuuuuaagcugcuuugu

SEQ ID NO: 679256 - RNA, 23 nt, Human
ugcagguagggcccagcagucuu

SEQ ID NO: 679257 - RNA, 22 nt, Human
ucuaugugcccuuugugugaug

SEQ ID NO: 679258 - RNA, 22 nt, Human
agaaaugaagcaggaguuauua

SEQ ID NO: 679259 - RNA, 22 nt, Human
augauacucuaggugauuuaca

SEQ ID NO: 679260 - RNA, 22 nt, Human
cucugggugggcagcagaugga

SEQ ID NO: 679261 - RNA, 22 nt, Human
augugaaauauuaagccgagga

SEQ ID NO: 679262 - RNA, 22 nt, Human
agcagcuuaucuuggagaggca

SEQ ID NO: 679263 - RNA, 22 nt, Human
uggcucagccauucguguugcc

SEQ ID NO: 679264 - RNA, 22 nt, Human
gagcccaggcagagguugcagu

SEQ ID NO: 679265 - RNA, 23 nt, Human
ucuuuacagcagcaggauuugga

SEQ ID NO: 679266 - RNA, 22 nt, Human
acacucacccucccacugccug

SEQ ID NO: 679267 - RNA, 22 nt, Human
cuuaauuucaaacugcuaguga

SEQ ID NO: 679268 - RNA, 22 nt, Human
gcugggaacacagccaugagag

SEQ ID NO: 679269 - RNA, 22 nt, Human
ccucugaguccucccugguugc

SEQ ID NO: 679270 - RNA, 22 nt, Human
ugggacucacucuuuuggccag

SEQ ID NO: 679271 - RNA, 22 nt, Human
cagaagcaaaugccuugcugag

SEQ ID NO: 679272 - RNA, 22 nt, Human
aagaugaaucaguauguguccu

SEQ ID NO: 679273 - RNA, 20 nt, Human
guguuucaugugauacaaug

SEQ ID NO: 679274 - RNA, 22 nt, Human
gugagcguggucuucugugggu

SEQ ID NO: 679275 - RNA, 22 nt, Human
uugcaggguuaaaguaagguag

SEQ ID NO: 679276 - RNA, 22 nt, Human
ggagccagaaaugcugugguug

SEQ ID NO: 679277 - RNA, 22 nt, Human
acucucugugauggaggccagc

SEQ ID NO: 679278 - RNA, 22 nt, Human
ugucucagaguaucccugaacu

SEQ ID NO: 679279 - RNA, 22 nt, Human
gcccugugguuccaggaagcaa

SEQ ID NO: 679280 - RNA, 22 nt, Human
cagcacccucggaggcugccgu

SEQ ID NO: 679281 - RNA, 22 nt, Human
uucaaugauuuuuagggaucau

SEQ ID NO: 679282 - RNA, 22 nt, Human
agggagcucgaugccugagugu

SEQ ID NO: 679283 - RNA, 22 nt, Human
acuguaaagaaguaaguauggg

SEQ ID NO: 679284 - RNA, 22 nt, Human
cugcuggggaggcgccucgacg

SEQ ID NO: 679285 - RNA, 22 nt, Human
agcacccucagccuuauccaga

SEQ ID NO: 679286 - RNA, 22 nt, Human
ccaaagugcugagauuacaggu

SEQ ID NO: 679287 - RNA, 22 nt, Human
gugauuucagguuuuucauacu

SEQ ID NO: 679288 - RNA, 22 nt, Human
cugugucucccaaggaggguca

SEQ ID NO: 679289 - RNA, 22 nt, Human
uggagagccuucccggcaucgc

SEQ ID NO: 679290 - RNA, 22 nt, Human
uuaagaggugaggccuuuaaga

SEQ ID NO: 679291 - RNA, 22 nt, Human
aucucauuuugguuucuacuua

SEQ ID NO: 679292 - RNA, 22 nt, Human
cugggcccuauggaagaaaggg

SEQ ID NO: 679293 - RNA, 22 nt, Human
cuuuguaagucuuucuccaaga

SEQ ID NO: 679294 - RNA, 22 nt, Human
ucagcacugauguuucagaaga

SEQ ID NO: 679295 - RNA, 22 nt, Human
uuccuggucccguucuucacug

SEQ ID NO: 679296 - RNA, 22 nt, Human
auugauucuguaagucaacaau

SEQ ID NO: 679297 - RNA, 22 nt, Human
aggggcugacuggaaagugcca

SEQ ID NO: 679298 - RNA, 22 nt, Human
aggcagucagcccugcuagggu

SEQ ID NO: 679299 - RNA, 22 nt, Human
ggagcugcuuugaucugaagaa

SEQ ID NO: 679300 - RNA, 22 nt, Human
uggcccugcacccagagcaguu

SEQ ID NO: 679301 - RNA, 22 nt, Human
cagugcaugaaacaauaugcag

SEQ ID NO: 679302 - RNA, 23 nt, Human
uccaagggcuacaaacacagacc

SEQ ID NO: 679303 - RNA, 22 nt, Human
cagcugcccauccugggaaaug

SEQ ID NO: 679304 - RNA, 22 nt, Human
ugacagaguccagaaguagugu

SEQ ID NO: 679305 - RNA, 22 nt, Human
agaaguaggcagggcuguauca

SEQ ID NO: 679306 - RNA, 23 nt, Human
ugggauggauucaccagugugcu

SEQ ID NO: 679307 - RNA, 22 nt, Human
gugguccuuuagaggauguaau

SEQ ID NO: 679308 - RNA, 22 nt, Human
accagcaucaccuggaggccug

SEQ ID NO: 679309 - RNA, 22 nt, Human
ucuaaagaagaggguucugcgg

SEQ ID NO: 679310 - RNA, 22 nt, Human
gcccagagggaagaggugucau

SEQ ID NO: 679311 - RNA, 20 nt, Human
gggugugugcagggccuggu

SEQ ID NO: 679312 - RNA, 22 nt, Human
caaucacuccacaauaugguuc

SEQ ID NO: 679313 - RNA, 22 nt, Human
aaugcuguaaagaugcuaucug

SEQ ID NO: 679314 - RNA, 22 nt, Human
uugccuuguuauucucucagaa

SEQ ID NO: 679315 - RNA, 22 nt, Human
uuuuucuuaaauguggguuggc

SEQ ID NO: 679316 - RNA, 22 nt, Human
cugaauucugccuugaggccuu

SEQ ID NO: 679317 - RNA, 20 nt, Human
caucaacaccuugucagccu

SEQ ID NO: 679318 - RNA, 21 nt, Human
gaaaaccauuugcaucaugag

SEQ ID NO: 679319 - RNA, 22 nt, Human
ugcugcauuuaucuucucaaac

SEQ ID NO: 679320 - RNA, 22 nt, Human
uagacauuuucucaacaucucu

SEQ ID NO: 679321 - RNA, 22 nt, Human
cagaaauaugugccaugccuua

SEQ ID NO: 679322 - RNA, 22 nt, Human
caguggguccugcgucugccag

SEQ ID NO: 679323 - RNA, 17 nt, Human
uuccccugaccaagccu

SEQ ID NO: 679324 - RNA, 22 nt, Human
gccugccugcugucaucugccu

SEQ ID NO: 679325 - RNA, 22 nt, Human
ccugggcaauauagugaggccc

SEQ ID NO: 679326 - RNA, 22 nt, Human
gcuucuuuccuugggcuggaac

SEQ ID NO: 679327 - RNA, 22 nt, Human
uagaacacuugaccacugcucc

SEQ ID NO: 679328 - RNA, 22 nt, Human
gcaaugucugugcuaaaaacug

SEQ ID NO: 679329 - RNA, 22 nt, Human
ugcagaagaauguaggcauaag

SEQ ID NO: 679330 - RNA, 22 nt, Human
aauauccauugggagcaaaugg

SEQ ID NO: 679331 - RNA, 22 nt, Human
ugcagcugugccugaaaaguac

SEQ ID NO: 679332 - RNA, 22 nt, Human
uccuugaaaaucuugguuuaga

SEQ ID NO: 679333 - RNA, 22 nt, Human
uagugaauaguccaaucccgca

SEQ ID NO: 679334 - RNA, 22 nt, Human
aacugcauguguguggcaugau

SEQ ID NO: 679335 - RNA, 22 nt, Human
uacaguguuucccccaggauag

SEQ ID NO: 679336 - RNA, 22 nt, Human
uccaggcaucuguauuuuuuaa

SEQ ID NO: 679337 - RNA, 22 nt, Human
augcaugaaagaauccaagccu

SEQ ID NO: 679338 - RNA, 22 nt, Human
acagaauuaaaguguuugugga

SEQ ID NO: 679339 - RNA, 21 nt, Human
cucugguuugcauuggauuau

SEQ ID NO: 679340 - RNA, 22 nt, Human
ccugaagauccauuauagacac

SEQ ID NO: 679341 - RNA, 22 nt, Human
gugcauauauaugggagggagc

SEQ ID NO: 679342 - RNA, 22 nt, Human
auuuaucaccaguuagcugacu

SEQ ID NO: 679343 - RNA, 22 nt, Human
acuuuacauuugaucucucuaa

SEQ ID NO: 679344 - RNA, 22 nt, Human
uauuucaugugcaccauaauuc

SEQ ID NO: 679345 - RNA, 22 nt, Human
aggcgcugaguaggcaaggagg

SEQ ID NO: 679346 - RNA, 22 nt, Human
cugcagccuccugggguacaug

SEQ ID NO: 679347 - RNA, 22 nt, Human
cagcccuucuuccaaccagcuu

SEQ ID NO: 679348 - RNA, 22 nt, Human
gcagcagaguagacagagcccu

SEQ ID NO: 679349 - RNA, 22 nt, Human
gcagcagagaacacaaugaugg

SEQ ID NO: 679350 - RNA, 22 nt, Human
agaggcugagaaacccucuucu

SEQ ID NO: 679351 - RNA, 22 nt, Human
cuauugaauagcccaaaucauu

SEQ ID NO: 679352 - RNA, 22 nt, Human
ucacugaaccagggaucucuag

SEQ ID NO: 679353 - RNA, 22 nt, Human
uccugggauucugcauuucuaa

SEQ ID NO: 679354 - RNA, 22 nt, Human
ucuuggcucugccacuaauuag

SEQ ID NO: 679355 - RNA, 22 nt, Human
ucaggccuagggagccacacca

SEQ ID NO: 679356 - RNA, 18 nt, Human
aggcaggcggaucacaag

SEQ ID NO: 679357 - RNA, 19 nt, Human
cacacccaugcuugccaag

SEQ ID NO: 679358 - RNA, 22 nt, Human
ucuggcaggguguguauuuaca

SEQ ID NO: 679359 - RNA, 22 nt, Human
caggagauaaaagagaugcuuu

SEQ ID NO: 679360 - RNA, 23 nt, Human
cacuccuguuucuaagccagcau

SEQ ID NO: 679361 - RNA, 22 nt, Human
uggacucaaguccaaguucacg

SEQ ID NO: 679362 - RNA, 22 nt, Human
gggugcaagcaaguggcacaga

SEQ ID NO: 679363 - RNA, 22 nt, Human
caaaaguucucacccagacaug

SEQ ID NO: 679364 - RNA, 19 nt, Human
uccucaggggcucacagac

SEQ ID NO: 679365 - RNA, 22 nt, Human
ggacugagcugacaucuguugg

SEQ ID NO: 679366 - RNA, 22 nt, Human
ucugucauuucaauaugguuaa

SEQ ID NO: 679367 - RNA, 20 nt, Human
ucaaguuuugcuugacaaga

SEQ ID NO: 679368 - RNA, 22 nt, Human
uuucuucuugaguaaccagauu

SEQ ID NO: 679369 - RNA, 22 nt, Human
acacagggggcauucuaggagu

SEQ ID NO: 679370 - RNA, 22 nt, Human
auuucuugauuccaccagugaa

SEQ ID NO: 679371 - RNA, 22 nt, Human
gguacaaaguuagauuuaacuu

SEQ ID NO: 679372 - RNA, 22 nt, Human
ucagaaucuuucuagagucuag

SEQ ID NO: 679373 - RNA, 22 nt, Human
ucuuccagaaugcauucucuuu

SEQ ID NO: 679374 - RNA, 20 nt, Human
agcaaggcuaaaucaugauu

SEQ ID NO: 679375 - RNA, 22 nt, Human
uuggcagagggaccagccuaca

SEQ ID NO: 679376 - RNA, 18 nt, Human
gagcugggagaaggaagg

SEQ ID NO: 679377 - RNA, 22 nt, Human
agcagcaggauuuucguuggga

SEQ ID NO: 679378 - RNA, 22 nt, Human
cugccuuuggggaguuagaggg

SEQ ID NO: 679379 - RNA, 22 nt, Human
gccaaagcccaggagacagcca

SEQ ID NO: 679380 - RNA, 22 nt, Human
uguaaacugcuucucaccaagg

SEQ ID NO: 679381 - RNA, 22 nt, Human
aauuccacagcugcacagaggu

SEQ ID NO: 679382 - RNA, 22 nt, Human
guggucagugguacaguuugaa

SEQ ID NO: 679383 - RNA, 22 nt, Human
ggcacuggaaggaucaugugag

SEQ ID NO: 679384 - RNA, 18 nt, Human
aaguaacagaagagcaca

SEQ ID NO: 679385 - RNA, 22 nt, Human
uuuuaugugucaaagcaguggu

SEQ ID NO: 679386 - RNA, 22 nt, Human
agagagggaauauuugggguau

SEQ ID NO: 679387 - RNA, 22 nt, Human
auccagagacuggggcugggau

SEQ ID NO: 679388 - RNA, 22 nt, Human
auauuuguauuucgugugugua

SEQ ID NO: 679389 - RNA, 22 nt, Human
gacagggaggaaagagacugcu

SEQ ID NO: 679390 - RNA, 23 nt, Human
acuguuggugcagaagugccuug

SEQ ID NO: 679391 - RNA, 22 nt, Human
cgcgcucauuuccgccuccuuc

SEQ ID NO: 679392 - RNA, 22 nt, Human
gaggaagcugcguggcauuuca

SEQ ID NO: 679393 - RNA, 22 nt, Human
ggaggucacaaggugaguaaag

SEQ ID NO: 679394 - RNA, 22 nt, Human
cuacagucuggcaggaauguua

SEQ ID NO: 679395 - RNA, 22 nt, Human
uggaggcaguaacugagcaaca

SEQ ID NO: 679396 - RNA, 22 nt, Human
ucaggagugccaguaccuuuug

SEQ ID NO: 679397 - RNA, 22 nt, Human
guacagaauuaugccaugaggg

SEQ ID NO: 679398 - RNA, 22 nt, Human
augugaaaauccaauggcagca

SEQ ID NO: 679399 - RNA, 22 nt, Human
aaugucuauuugcuacaaagcc

SEQ ID NO: 679400 - RNA, 18 nt, Human
agcaggacuguggggugg

SEQ ID NO: 679401 - RNA, 22 nt, Human
uucauaguguuuccuuccagug

SEQ ID NO: 679402 - RNA, 22 nt, Human
ugguacuuggaggcagaaaaau

SEQ ID NO: 679403 - RNA, 20 nt, Human
uuuaacuggccuucuggcuc

SEQ ID NO: 679404 - RNA, 23 nt, Human
aucuccugagaacccacaguggu

SEQ ID NO: 679405 - RNA, 20 nt, Human
caaggcagaccagagugagu

SEQ ID NO: 679406 - RNA, 22 nt, Human
ggccagguccaguggaaggccc

SEQ ID NO: 679407 - RNA, 18 nt, Human
gucaggcaugaaucuggg

SEQ ID NO: 679408 - RNA, 22 nt, Human
acauuucagauucaugaaguga

SEQ ID NO: 679409 - RNA, 22 nt, Human
agagucagaaagcagacagggg

SEQ ID NO: 679410 - RNA, 22 nt, Human
acagggagugcaauucauauug

SEQ ID NO: 679411 - RNA, 22 nt, Human
ucccagagccucugccacucug

SEQ ID NO: 679412 - RNA, 22 nt, Human
aggaaacagugaacuuggcagg

SEQ ID NO: 679413 - RNA, 22 nt, Human
ugcuccagcaugacccucaaug

SEQ ID NO: 679414 - RNA, 21 nt, Human
gccaccccuggcacaggugcu

SEQ ID NO: 679415 - RNA, 22 nt, Human
gauucuuacuucuaagcaagcu

SEQ ID NO: 679416 - RNA, 22 nt, Human
guacaguaaucccguucuucug

SEQ ID NO: 679417 - RNA, 22 nt, Human
uuuagucugacuauuaccucca

SEQ ID NO: 679418 - RNA, 22 nt, Human
uuagaggacaagaggccuggcu

SEQ ID NO: 679419 - RNA, 22 nt, Human
ggcaggugugagcuguaaagga

SEQ ID NO: 679420 - RNA, 22 nt, Human
agggcuccaggggaccaucagu

SEQ ID NO: 679421 - RNA, 22 nt, Human
cugggagggguagccaauccua

SEQ ID NO: 679422 - RNA, 22 nt, Human
gagaggcccugaagcccacaga

SEQ ID NO: 679423 - RNA, 22 nt, Human
uccaguggguugcugagggagg

SEQ ID NO: 679424 - RNA, 22 nt, Human
acucagaggaaaguugagauug

SEQ ID NO: 679425 - RNA, 22 nt, Human
acaguaauauugaugcucguca

SEQ ID NO: 679426 - RNA, 22 nt, Human
agucuggcuuuuugaugagcuu

SEQ ID NO: 679427 - RNA, 22 nt, Human
agcagcacauggggcuggcaac

SEQ ID NO: 679428 - RNA, 22 nt, Human
aaucagaauuuguccccugagu

SEQ ID NO: 679429 - RNA, 20 nt, Human
gcacaguuugggaaccaugg

SEQ ID NO: 679430 - RNA, 22 nt, Human
augcaauauguguuucuguuua

SEQ ID NO: 679431 - RNA, 22 nt, Human
gagcaggcaaagaugaaaggag

SEQ ID NO: 679432 - RNA, 22 nt, Human
accucuuaauauugcaccuucu

SEQ ID NO: 679433 - RNA, 22 nt, Human
ccagggagcccacaggacaaug

SEQ ID NO: 679434 - RNA, 22 nt, Human
ucuguuuagaugcuuuaucugu

SEQ ID NO: 679435 - RNA, 22 nt, Human
gagcuguggaaggcagggacca

SEQ ID NO: 679436 - RNA, 22 nt, Human
cuucccagaacaauguaggcuu

SEQ ID NO: 679437 - RNA, 22 nt, Human
ccagcuccccucagcagguaau

SEQ ID NO: 679438 - RNA, 22 nt, Human
uuuucuuauagagcuuaaaguu

SEQ ID NO: 679439 - RNA, 22 nt, Human
augcaguguuuggaagcuuaag

SEQ ID NO: 679440 - RNA, 22 nt, Human
ccccacacucuuuacauucaua

SEQ ID NO: 679441 - RNA, 22 nt, Human
uuauucagucugucuagggagu

SEQ ID NO: 679442 - RNA, 22 nt, Human
cauuugugugggaacccaucag

SEQ ID NO: 679443 - RNA, 22 nt, Human
cagagucuggacugcaggcucc

SEQ ID NO: 679444 - RNA, 22 nt, Human
agcagaagaaagccacaugacu

SEQ ID NO: 679445 - RNA, 22 nt, Human
cugcugucaaaggaaauauuug

SEQ ID NO: 679446 - RNA, 22 nt, Human
acaucucagaacugaguaaccg

SEQ ID NO: 679447 - RNA, 22 nt, Human
agcugucaccaggagccggacc

SEQ ID NO: 679448 - RNA, 22 nt, Human
ccaggagagcaggcgugcagcu

SEQ ID NO: 679449 - RNA, 22 nt, Human
agcaggcuccaggcuggccauc

SEQ ID NO: 679450 - RNA, 22 nt, Human
agcucccagcagagcuggccac

SEQ ID NO: 679451 - RNA, 22 nt, Human
uugcaagggcaugugugcgugu

SEQ ID NO: 679452 - RNA, 22 nt, Human
uugcagggcaaauggucagaua

SEQ ID NO: 679453 - RNA, 22 nt, Human
aucuguacaagauuuuaugcgu

SEQ ID NO: 679454 - RNA, 22 nt, Human
gcacagccugucccuguccugg

SEQ ID NO: 679455 - RNA, 22 nt, Human
uaaguggaagguuauaugcuaa

SEQ ID NO: 679456 - RNA, 22 nt, Human
uugaaguccuugccucuugcac

SEQ ID NO: 679457 - RNA, 22 nt, Human
aggcagggaccaguuguuuucu

SEQ ID NO: 679458 - RNA, 22 nt, Human
ggucuggaccauggacgccggg

SEQ ID NO: 679459 - RNA, 22 nt, Human
cucagggaggccucugcugguu

SEQ ID NO: 679460 - RNA, 22 nt, Human
gcccugcucuggucucugcccg

SEQ ID NO: 679461 - RNA, 22 nt, Human
ccucuccagcggccucagggcc

SEQ ID NO: 679462 - RNA, 22 nt, Human
uguguucaagauuaguucuagu

SEQ ID NO: 679463 - RNA, 22 nt, Human
cagcagccauguaccacacuca

SEQ ID NO: 679464 - RNA, 22 nt, Human
ucacacagauugguagagcuga

SEQ ID NO: 679465 - RNA, 22 nt, Human
uuuaccaaaugagacuauuguu

SEQ ID NO: 679466 - RNA, 22 nt, Human
uguaaacaguaggacuaaagag

SEQ ID NO: 679467 - RNA, 22 nt, Human
ccagagaaccaucugcuugagg

SEQ ID NO: 679468 - RNA, 22 nt, Human
uuagcaaacaaaugaaaugguu

SEQ ID NO: 679469 - RNA, 22 nt, Human
uuauucacaugggcucauucua

SEQ ID NO: 679470 - RNA, 22 nt, Human
uugcagggcaucuaugucuggu

SEQ ID NO: 679471 - RNA, 23 nt, Human
agcagcuggggugcucuuuuguc

SEQ ID NO: 679472 - RNA, 22 nt, Human
agaccaagacuauaaugagagg

SEQ ID NO: 679473 - RNA, 22 nt, Human
augcagauguuugguucauugu

SEQ ID NO: 679474 - RNA, 22 nt, Human
cuacugucucaucaguguuauu

SEQ ID NO: 679475 - RNA, 22 nt, Human
agcagaugggagauggagcugc

SEQ ID NO: 679476 - RNA, 22 nt, Human
uuggaaauugcaagugauuugc

SEQ ID NO: 679477 - RNA, 22 nt, Human
aagauguuuuaauauuucgagg

SEQ ID NO: 679478 - RNA, 22 nt, Human
agcaccagagcuaugggccugc

SEQ ID NO: 679479 - RNA, 23 nt, Human
ucuucauggccaucugguucuuc

SEQ ID NO: 679480 - RNA, 22 nt, Human
uggcaggugaaguuguuaggga

SEQ ID NO: 679481 - RNA, 22 nt, Human
gcugggcugcgucggggaagcc

SEQ ID NO: 679482 - RNA, 23 nt, Human
uucuuacaaggcuggcccacuug

SEQ ID NO: 679483 - RNA, 22 nt, Human
agcagcagggacaaaggaacag

SEQ ID NO: 679484 - RNA, 22 nt, Human
ucucagcucagcuuccacagag

SEQ ID NO: 679485 - RNA, 22 nt, Human
ugggcuggcugaggcauucacu

SEQ ID NO: 679486 - RNA, 22 nt, Human
uguuauuaucuguuagguguuc

SEQ ID NO: 679487 - RNA, 22 nt, Human
uaauugucaucguaguaaacau

SEQ ID NO: 679488 - RNA, 22 nt, Human
cugaagcaaaugaaacagcucu

SEQ ID NO: 679489 - RNA, 22 nt, Human
ccugggcucaggcuugggcagc

SEQ ID NO: 679490 - RNA, 21 nt, Human
ugcaguauguauuuguaucca

SEQ ID NO: 679491 - RNA, 22 nt, Human
caaaaccaagaacauucauuuc

SEQ ID NO: 679492 - RNA, 22 nt, Human
acagggucuuagagaucaccug

SEQ ID NO: 679493 - RNA, 22 nt, Human
uuacaugaauacauaaccauuc

SEQ ID NO: 679494 - RNA, 22 nt, Human
uccuuaauauggaagaguucuc

SEQ ID NO: 679495 - RNA, 22 nt, Human
uguuccaucaguuuuugguuga

SEQ ID NO: 679496 - RNA, 22 nt, Human
uuuaaacaucuuguugccuuaa

SEQ ID NO: 679497 - RNA, 22 nt, Human
agugucugaaggauuuggcuuc

SEQ ID NO: 679498 - RNA, 18 nt, Human
gcaggagauggguggggu

SEQ ID NO: 679499 - RNA, 22 nt, Human
uagauuucucauucauagauug

SEQ ID NO: 679500 - RNA, 22 nt, Human
aaugccaguguguugauuccag

SEQ ID NO: 679501 - RNA, 22 nt, Human
uucagaaguuuucaaaacuaag

SEQ ID NO: 679502 - RNA, 23 nt, Human
ugcugggcagagcuggugcugag

SEQ ID NO: 679503 - RNA, 21 nt, Human
ucuggcaggaagacggauggg

SEQ ID NO: 679504 - RNA, 22 nt, Human
ccaaaugcuccacugacuuugg

SEQ ID NO: 679505 - RNA, 22 nt, Human
cuacauuucccagcugccuucc

SEQ ID NO: 679506 - RNA, 22 nt, Human
ccuaggccuuacuuuccugugc

SEQ ID NO: 679507 - RNA, 22 nt, Human
aacuguugcuuguaauaugugc

SEQ ID NO: 679508 - RNA, 22 nt, Human
aggacaguuaguuaggaaguuu

SEQ ID NO: 679509 - RNA, 22 nt, Human
acaggccugugugcacacgagg

SEQ ID NO: 679510 - RNA, 22 nt, Human
agcuggcacagaccaggagauc

SEQ ID NO: 679511 - RNA, 21 nt, Human
agcagacagcccaagaaaauc

SEQ ID NO: 679512 - RNA, 22 nt, Human
aacacagguugcugggccucac

SEQ ID NO: 679513 - RNA, 22 nt, Human
ccccugagauucuggcuuggga

SEQ ID NO: 679514 - RNA, 22 nt, Human
ccagaagcuucuacacaggaga

SEQ ID NO: 679515 - RNA, 22 nt, Human
cagaugcuauguauuauguaug

SEQ ID NO: 679516 - RNA, 22 nt, Human
gcuccagggaacagaauguacu

SEQ ID NO: 679517 - RNA, 18 nt, Human
ugucucaggcugaaacag

SEQ ID NO: 679518 - RNA, 22 nt, Human
agugacaggggaggcaggugug

SEQ ID NO: 679519 - RNA, 20 nt, Human
uggaagacacugaagggcca

SEQ ID NO: 679520 - RNA, 22 nt, Human
ugaggcagaaauuccuguuuuc

SEQ ID NO: 679521 - RNA, 22 nt, Human
uuuuuccaccguacuuccugag

SEQ ID NO: 679522 - RNA, 18 nt, Human
aaagaaggauuggagagc

SEQ ID NO: 679523 - RNA, 22 nt, Human
uuugcaaauaccaugaaacuug

SEQ ID NO: 679524 - RNA, 22 nt, Human
gaggcagagucacaaagagucu

SEQ ID NO: 679525 - RNA, 22 nt, Human
aaagacuaaccaguugucaaaa

SEQ ID NO: 679526 - RNA, 22 nt, Human
uaucagauuuagaggagucaua

SEQ ID NO: 679527 - RNA, 18 nt, Human
ugggcacaaugaacagca

SEQ ID NO: 679528 - RNA, 23 nt, Human
ucauggaaugaauucuucuguua

SEQ ID NO: 679529 - RNA, 22 nt, Human
uagaggaaauuuccaaggugag

SEQ ID NO: 679530 - RNA, 22 nt, Human
aucucugguccaaauguuaccu

SEQ ID NO: 679531 - RNA, 23 nt, Human
uugcuuucaucaugagaugcucc

SEQ ID NO: 679532 - RNA, 22 nt, Human
uaccuggaaauggcuuuaguua

SEQ ID NO: 679533 - RNA, 22 nt, Human
uagcuucugggaguguuuacua

SEQ ID NO: 679534 - RNA, 22 nt, Human
cagccccuuguccgguagccac

SEQ ID NO: 679535 - RNA, 22 nt, Human
aaggcugagccagggccccuau

SEQ ID NO: 679536 - RNA, 22 nt, Human
gcugcccugugguccagcaggu

SEQ ID NO: 679537 - RNA, 22 nt, Human
cacaagaaauaagcugccuuuc

SEQ ID NO: 679538 - RNA, 22 nt, Human
gggaggugauuaggaccaugua

SEQ ID NO: 679539 - RNA, 22 nt, Human
cacagugcaugaugggcagaag

SEQ ID NO: 679540 - RNA, 17 nt, Human
uaaagccagucaaguca

SEQ ID NO: 679541 - RNA, 22 nt, Human
ugacuggauugucauuacgacg

SEQ ID NO: 679542 - RNA, 19 nt, Human
acucaagucuaaugaaauc

SEQ ID NO: 679543 - RNA, 22 nt, Human
cccugaaaguacacugggacgg

SEQ ID NO: 679544 - RNA, 22 nt, Human
ugaggcucagagaagugcuguu

SEQ ID NO: 679545 - RNA, 22 nt, Human
ucucucuucagagauaccuugc

SEQ ID NO: 679546 - RNA, 22 nt, Human
agaguccauauauugauuuguu

SEQ ID NO: 679547 - RNA, 22 nt, Human
uucauuuauucagcagguauuu

SEQ ID NO: 679548 - RNA, 22 nt, Human
cuucuuguuuuagcccucauac

SEQ ID NO: 679549 - RNA, 22 nt, Human
gaaaggccacgugccaagauua

SEQ ID NO: 679550 - RNA, 22 nt, Human
uaagacauaccaaguuguguga

SEQ ID NO: 679551 - RNA, 22 nt, Human
acuuccagcugcccugugugcu

SEQ ID NO: 679552 - RNA, 22 nt, Human
ucuggcuuuuauucaguuggca

SEQ ID NO: 679553 - RNA, 22 nt, Human
ucuggcaucuguuuucauauuu

SEQ ID NO: 679554 - RNA, 22 nt, Human
cauccauagauugagagauggu

SEQ ID NO: 679555 - RNA, 22 nt, Human
uggucugaacacauuuuaggua

SEQ ID NO: 679556 - RNA, 22 nt, Human
agucucagccacacagaccuau

SEQ ID NO: 679557 - RNA, 22 nt, Human
agccccucuccgcccugagucg

SEQ ID NO: 679558 - RNA, 22 nt, Human
auugaacuguagucuucugucu

SEQ ID NO: 679559 - RNA, 22 nt, Human
gagggcugauguugccaccuca

SEQ ID NO: 679560 - RNA, 22 nt, Human
guuuccugcgugugccacucau

SEQ ID NO: 679561 - RNA, 22 nt, Human
gcuuuagauacucccaaugucc

SEQ ID NO: 679562 - RNA, 22 nt, Human
cucccuggaggcccagaccugg

SEQ ID NO: 679563 - RNA, 22 nt, Human
agaaugcaagauaaacuuuauu

SEQ ID NO: 679564 - RNA, 22 nt, Human
ggaggggagucucccaaagccg

SEQ ID NO: 679565 - RNA, 22 nt, Human
acagacagaggcuccaugagga

SEQ ID NO: 679566 - RNA, 22 nt, Human
cccagcaguacccaagcccuug

SEQ ID NO: 679567 - RNA, 22 nt, Human
ggaacacuggcucaauuauauc

SEQ ID NO: 679568 - RNA, 22 nt, Human
uugauucaaccacuuaauaauc

SEQ ID NO: 679569 - RNA, 22 nt, Human
uucucuggaacugaaacaagau

SEQ ID NO: 679570 - RNA, 22 nt, Human
gagcugaacaaauugcgagugg

SEQ ID NO: 679571 - RNA, 22 nt, Human
guagcaucuguuggcugcuccu

SEQ ID NO: 679572 - RNA, 22 nt, Human
ucugggucucagagugaccaug

SEQ ID NO: 679573 - RNA, 22 nt, Human
aaaauucauggcuugggaaaag

SEQ ID NO: 679574 - RNA, 22 nt, Human
gaucauuuacuuguucuggacu

SEQ ID NO: 679575 - RNA, 22 nt, Human
augauauuugcaaugugcuugc

SEQ ID NO: 679576 - RNA, 22 nt, Human
cuucacaaaauauuucauuaua

SEQ ID NO: 679577 - RNA, 22 nt, Human
agguggcuccucccauggcugg

SEQ ID NO: 679578 - RNA, 22 nt, Human
auguggcuuuuccuggguuccu

SEQ ID NO: 679579 - RNA, 22 nt, Human
uccugggcuugcuccuccagcu

SEQ ID NO: 679580 - RNA, 22 nt, Human
gcaaguccuuugcaugcaggga

SEQ ID NO: 679581 - RNA, 23 nt, Human
ugccucugccucccuagucugca

SEQ ID NO: 679582 - RNA, 22 nt, Human
uauuauguagaguaaggguuaa

SEQ ID NO: 679583 - RNA, 22 nt, Human
ugagaguucucucuucaggugg

SEQ ID NO: 679584 - RNA, 22 nt, Human
caaaaugcaucugagaccaggc

SEQ ID NO: 679585 - RNA, 22 nt, Human
ugaaaucuccucuuuauauauc

SEQ ID NO: 679586 - RNA, 23 nt, Human
ggagugcaauggcgccaucucgg

SEQ ID NO: 679587 - RNA, 22 nt, Human
ucucaaaguagcucccacagau

SEQ ID NO: 679588 - RNA, 22 nt, Human
uggucacccacugggacugcgg

SEQ ID NO: 679589 - RNA, 22 nt, Human
auaaagcauuuccccugugugg

SEQ ID NO: 679590 - RNA, 22 nt, Human
cugaacucaugauaugcuuuug

SEQ ID NO: 679591 - RNA, 22 nt, Human
ucauucaucaguugguagagau

SEQ ID NO: 679592 - RNA, 23 nt, Human
ucuguacaauugagaagagaaca

SEQ ID NO: 679593 - RNA, 17 nt, Human
ucagcaaagacaaagga

SEQ ID NO: 679594 - RNA, 22 nt, Human
guaaaauucuagcaucugaaag

SEQ ID NO: 679595 - RNA, 22 nt, Human
ggagcucucuugugguacuccc

SEQ ID NO: 679596 - RNA, 22 nt, Human
auaacagaugugaagugcuaau

SEQ ID NO: 679597 - RNA, 22 nt, Human
uugaaugaccaugaugcaaggg

SEQ ID NO: 679598 - RNA, 22 nt, Human
gugugucuuuauaagaagaggg

SEQ ID NO: 679599 - RNA, 21 nt, Human
aaucugcuucccugugacuug

SEQ ID NO: 679600 - RNA, 22 nt, Human
auugaggcagcauaguucaggg

SEQ ID NO: 679601 - RNA, 19 nt, Human
ccaggccucuggggccugu

SEQ ID NO: 679602 - RNA, 22 nt, Human
uguaggaauggauucuagaagg

SEQ ID NO: 679603 - RNA, 22 nt, Human
cugcucacgccaccguucauca

SEQ ID NO: 679604 - RNA, 22 nt, Human
aauucacaguucugcaccuuac

SEQ ID NO: 679605 - RNA, 22 nt, Human
gcaggaugagugaguacauuua

SEQ ID NO: 679606 - RNA, 22 nt, Human
cagcagguauguuuguucagca

SEQ ID NO: 679607 - RNA, 22 nt, Human
guuuaugaauguuacuauagag

SEQ ID NO: 679608 - RNA, 22 nt, Human
uugcccugcggguccugcgcaa

SEQ ID NO: 679609 - RNA, 22 nt, Human
uucaggauaguggugaguggca

SEQ ID NO: 679610 - RNA, 22 nt, Human
ccaggguugcuuuagauucuga

SEQ ID NO: 679611 - RNA, 22 nt, Human
gccuucugugcuccuggccuuu

SEQ ID NO: 679612 - RNA, 22 nt, Human
acugggaacaaggugcucagcg

SEQ ID NO: 679613 - RNA, 22 nt, Human
uugcaggguacauucuuagaau

SEQ ID NO: 679614 - RNA, 22 nt, Human
ucauguuugcccuaagaaaaag

SEQ ID NO: 679615 - RNA, 22 nt, Human
cuccucagagagcagcuugggg

SEQ ID NO: 679616 - RNA, 22 nt, Human
gaaaguaugccaucuaccucuu

SEQ ID NO: 679617 - RNA, 22 nt, Human
auucuagaacagagguuucuaa

SEQ ID NO: 679618 - RNA, 22 nt, Human
uaacaguauccccauuugcaag

SEQ ID NO: 679619 - RNA, 21 nt, Human
ucacaacuuugaauuucaaua

SEQ ID NO: 679620 - RNA, 22 nt, Human
auguaacauugaauuauauagu

SEQ ID NO: 679621 - RNA, 22 nt, Human
agaaguauucugcauguacuga

SEQ ID NO: 679622 - RNA, 21 nt, Human
ugcaaugcauugacagcagca

SEQ ID NO: 679623 - RNA, 22 nt, Human
acacaugugucugcaugcagug

SEQ ID NO: 679624 - RNA, 22 nt, Human
aauugcauaaauuucauagcau

SEQ ID NO: 679625 - RNA, 22 nt, Human
uuuggacuaucuguguggcuuu

SEQ ID NO: 679626 - RNA, 23 nt, Human
ccucccaccuauuucacuuucuu

SEQ ID NO: 679627 - RNA, 22 nt, Human
acacuaaucuuuuauuugguuu

SEQ ID NO: 679628 - RNA, 22 nt, Human
ucuuggcuaguaccuuccugcc

SEQ ID NO: 679629 - RNA, 22 nt, Human
ugcuuauaauguuacugacaac

SEQ ID NO: 679630 - RNA, 23 nt, Human
agcugggccagguggucagaccu

SEQ ID NO: 679631 - RNA, 23 nt, Human
uaauuagauguugauuccugaga

SEQ ID NO: 679632 - RNA, 22 nt, Human
aagacagcagcaccucucguuu

SEQ ID NO: 679633 - RNA, 22 nt, Human
acagccccagcgcggcgggguc

SEQ ID NO: 679634 - RNA, 22 nt, Human
cugaggggauguuuuugacgga

SEQ ID NO: 679635 - RNA, 22 nt, Human
uggucugaagguggauuugaga

SEQ ID NO: 679636 - RNA, 22 nt, Human
uacagguuacacuuuuaaaagu

SEQ ID NO: 679637 - RNA, 22 nt, Human
auuuaauuaaucauggugaauu

SEQ ID NO: 679638 - RNA, 22 nt, Human
cauuuagagucuugcaauuuua

SEQ ID NO: 679639 - RNA, 22 nt, Human
ugugcccuuuccugcuccucca

SEQ ID NO: 679640 - RNA, 22 nt, Human
ucccaggcuggggccaggugac

SEQ ID NO: 679641 - RNA, 22 nt, Human
uggcuucucugugugagggaga

SEQ ID NO: 679642 - RNA, 22 nt, Human
agaguucugaauuuuauucucu

SEQ ID NO: 679643 - RNA, 22 nt, Human
aaccccaguaccccaggauaug

SEQ ID NO: 679644 - RNA, 18 nt, Human
aggucaggaaagcagagu

SEQ ID NO: 679645 - RNA, 22 nt, Human
ccacagcuagggcaaucugauu

SEQ ID NO: 679646 - RNA, 22 nt, Human
acacugugcuuagaugcugaac

SEQ ID NO: 679647 - RNA, 22 nt, Human
gggaucagacucugggauguag

SEQ ID NO: 679648 - RNA, 20 nt, Human
cacaggaaagcuacucaguu

SEQ ID NO: 679649 - RNA, 22 nt, Human
uuuguuuagaugguaaaucagu

SEQ ID NO: 679650 - RNA, 22 nt, Human
uuuuuauaugaaggauagugcg

SEQ ID NO: 679651 - RNA, 22 nt, Human
gaaauucaaaaugucaguauag

SEQ ID NO: 679652 - RNA, 22 nt, Human
auauuguguguacaaguaguua

SEQ ID NO: 679653 - RNA, 22 nt, Human
gcuggcacagguggaugcuggc

SEQ ID NO: 679654 - RNA, 22 nt, Human
cccaggcagugcugaucccuca

SEQ ID NO: 679655 - RNA, 23 nt, Human
cuggggcuuucaaaucugggcag

SEQ ID NO: 679656 - RNA, 22 nt, Human
uuagugguacucagggagggaa

SEQ ID NO: 679657 - RNA, 22 nt, Human
ccugggaggcggagguugcagg

SEQ ID NO: 679658 - RNA, 22 nt, Human
gcauucuugagguguggacuca

SEQ ID NO: 679659 - RNA, 22 nt, Human
acaucuguuuaacgaaggcauu

SEQ ID NO: 679660 - RNA, 22 nt, Human
aggcacagaauggcauucagug

SEQ ID NO: 679661 - RNA, 22 nt, Human
uucugcuuauucaaaugaucuu

SEQ ID NO: 679662 - RNA, 22 nt, Human
aagcuggauguaggaucccccu

SEQ ID NO: 679663 - RNA, 22 nt, Human
ucagagguaagggcugagagga

SEQ ID NO: 679664 - RNA, 22 nt, Human
cuuuucucugcgggucuuucau

SEQ ID NO: 679665 - RNA, 22 nt, Human
uguuaucugagcaacgucgacg

SEQ ID NO: 679666 - RNA, 22 nt, Human
uggcuccucaucacaguuggug

SEQ ID NO: 679667 - RNA, 22 nt, Human
ggggucugggcuuagcuggaau

SEQ ID NO: 679668 - RNA, 22 nt, Human
agucacagguucuugggauuag

SEQ ID NO: 679669 - RNA, 22 nt, Human
aagugcuuaggucaaaggacau

SEQ ID NO: 679670 - RNA, 22 nt, Human
ccacuugaaacuuaguggcaua

SEQ ID NO: 679671 - RNA, 22 nt, Human
aauguuuggacuggaagguccc

SEQ ID NO: 679672 - RNA, 22 nt, Human
agcagcuggggccugugacgau

SEQ ID NO: 679673 - RNA, 22 nt, Human
ucagauccgagugugccaagga

SEQ ID NO: 679674 - RNA, 22 nt, Human
uauauuaccugccugaucuaua

SEQ ID NO: 679675 - RNA, 19 nt, Human
uuucaggagcuaugcaggg

SEQ ID NO: 679676 - RNA, 22 nt, Human
ucuguucaguugauuagacaga

SEQ ID NO: 679677 - RNA, 22 nt, Human
acuuccagcuagguucugcuaa

SEQ ID NO: 679678 - RNA, 22 nt, Human
gggacaugaagcaucggaggca

SEQ ID NO: 679679 - RNA, 22 nt, Human
aaacucuuuccacgauuacuuu

SEQ ID NO: 679680 - RNA, 22 nt, Human
aggcugugauggauguaaagga

SEQ ID NO: 679681 - RNA, 21 nt, Human
ucuguggcggacucuaggccc

SEQ ID NO: 679682 - RNA, 22 nt, Human
gaaaugcagauucugauucugu

SEQ ID NO: 679683 - RNA, 22 nt, Human
ccucaggcugggcugccccugg

SEQ ID NO: 679684 - RNA, 22 nt, Human
ggccugaggcaauagucagaca

SEQ ID NO: 679685 - RNA, 22 nt, Human
ggcucacgcaauuaucccggcc

SEQ ID NO: 679686 - RNA, 22 nt, Human
aaguugaagcaugaaccaaggu

SEQ ID NO: 679687 - RNA, 22 nt, Human
ucccagagguugagucacuuau

SEQ ID NO: 679688 - RNA, 22 nt, Human
aggauuuggccauggcuucggg

SEQ ID NO: 679689 - RNA, 22 nt, Human
ccugucuggccuuccacggggg

SEQ ID NO: 679690 - RNA, 22 nt, Human
gaugcgggcccgcuccacugcc

SEQ ID NO: 679691 - RNA, 22 nt, Human
cagagcaccagugggagacaag

SEQ ID NO: 679692 - RNA, 22 nt, Human
cccaggcauuuucaacuuuagu

SEQ ID NO: 679693 - RNA, 22 nt, Human
uauacagaacugcacgugcacg

SEQ ID NO: 679694 - RNA, 22 nt, Human
ucacgagggcccugggcagcug

SEQ ID NO: 679695 - RNA, 22 nt, Human
uccagaaaaaguaauuuauuug

SEQ ID NO: 679696 - RNA, 22 nt, Human
agcucccugagaugccacagca

SEQ ID NO: 679697 - RNA, 22 nt, Human
ucacuuuacagaugggaaaacu

SEQ ID NO: 679698 - RNA, 22 nt, Human
ugguacacauguccaaggucag

SEQ ID NO: 679699 - RNA, 22 nt, Human
ucagacuucuacuuugcagagc

SEQ ID NO: 679700 - RNA, 22 nt, Human
uuaaaauuuccccaccauguau

SEQ ID NO: 679701 - RNA, 22 nt, Human
gcccagcgagcagagguggacg

SEQ ID NO: 679702 - RNA, 22 nt, Human
uuaggaaaaucaugagagauga

SEQ ID NO: 679703 - RNA, 22 nt, Human
cagguggggagaguguggagca

SEQ ID NO: 679704 - RNA, 17 nt, Human
gcaaucucagucuccuu

SEQ ID NO: 679705 - RNA, 22 nt, Human
uguacagacuguauuuacaagu

SEQ ID NO: 679706 - RNA, 19 nt, Human
ugauggaauuugacauucc

SEQ ID NO: 679707 - RNA, 22 nt, Human
ccugggcucaccaugccuugga

SEQ ID NO: 679708 - RNA, 22 nt, Human
acauaugcucaucugcauuccc

SEQ ID NO: 679709 - RNA, 21 nt, Human
uucuccuguuuugcaccacag

SEQ ID NO: 679710 - RNA, 19 nt, Human
cuccaggauggcugggcga

SEQ ID NO: 679711 - RNA, 22 nt, Human
cggcuggagcugagaaaggagc

SEQ ID NO: 679712 - RNA, 22 nt, Human
agccagacauggcuccugcucc

SEQ ID NO: 679713 - RNA, 22 nt, Human
uuuaguguagcauucagaguca

SEQ ID NO: 679714 - RNA, 22 nt, Human
agggcccauagaucgucagcuu

SEQ ID NO: 679715 - RNA, 22 nt, Human
ucucuguaagcugccuucucgu

SEQ ID NO: 679716 - RNA, 22 nt, Human
acuuccuugucaggugcaucau

SEQ ID NO: 679717 - RNA, 22 nt, Human
gugaaggacuagcauggagggc

SEQ ID NO: 679718 - RNA, 22 nt, Human
ccuggcagcagcacaugccuuc

SEQ ID NO: 679719 - RNA, 22 nt, Human
ggacagcuccugcacuugagua

SEQ ID NO: 679720 - RNA, 22 nt, Human
gggcaguguggucgugccuuug

SEQ ID NO: 679721 - RNA, 22 nt, Human
gggcuucagauccagggaccuc

SEQ ID NO: 679722 - RNA, 22 nt, Human
uuggaagcgagcacauggagga

SEQ ID NO: 679723 - RNA, 22 nt, Human
uagauaauuuggcaucauauug

SEQ ID NO: 679724 - RNA, 18 nt, Human
ugcauauacugccuaucu

SEQ ID NO: 679725 - RNA, 22 nt, Human
ugaacacugccauauuuaagaa

SEQ ID NO: 679726 - RNA, 20 nt, Human
gaacagucuucugagccaca

SEQ ID NO: 679727 - RNA, 22 nt, Human
aggugccaagaugucacagaca

SEQ ID NO: 679728 - RNA, 22 nt, Human
cuccguuuuugaccggcacuga

SEQ ID NO: 679729 - RNA, 22 nt, Human
gccacagcucacguuccccauu

SEQ ID NO: 679730 - RNA, 22 nt, Human
ccauggccucgcucuacguggg

SEQ ID NO: 679731 - RNA, 22 nt, Human
agagagaggcagcagugcucac

SEQ ID NO: 679732 - RNA, 22 nt, Human
ugccccuucuacccgucucugu

SEQ ID NO: 679733 - RNA, 22 nt, Human
aucaguuuuuauuaauguagcu

SEQ ID NO: 679734 - RNA, 22 nt, Human
ugguggcagcugggacagaggu

SEQ ID NO: 679735 - RNA, 22 nt, Human
ccugccuguacuagagacccag

SEQ ID NO: 679736 - RNA, 22 nt, Human
gagcugugaaaagugccugggg

SEQ ID NO: 679737 - RNA, 22 nt, Human
cuggcucccaugagcucucacg

SEQ ID NO: 679738 - RNA, 22 nt, Human
cccugcacacucgugucuugac

SEQ ID NO: 679739 - RNA, 22 nt, Human
uucuuguuccaugaaagacaga

SEQ ID NO: 679740 - RNA, 22 nt, Human
guuucucaagcuugaaugcaca

SEQ ID NO: 679741 - RNA, 22 nt, Human
cagguaaggucacauucugaag

SEQ ID NO: 679742 - RNA, 22 nt, Human
caggcaccuuugugcaugggca

SEQ ID NO: 679743 - RNA, 22 nt, Human
gggccuccgugugcuggugcuc

SEQ ID NO: 679744 - RNA, 22 nt, Human
agauaaucucuaggcuucaugu

SEQ ID NO: 679745 - RNA, 22 nt, Human
uauaguacacuuagguacuuca

SEQ ID NO: 679746 - RNA, 22 nt, Human
augcaaaagacuauuuguugcu

SEQ ID NO: 679747 - RNA, 22 nt, Human
aggcaaauccagauuuuuccac

SEQ ID NO: 679748 - RNA, 22 nt, Human
uccuggcuggaauuucucacuc

SEQ ID NO: 679749 - RNA, 22 nt, Human
ggccugaaauagcucugagguu

SEQ ID NO: 679750 - RNA, 21 nt, Human
gcagggaccgcgacuucuggg

SEQ ID NO: 679751 - RNA, 22 nt, Human
cugggcucagugucucacuccu

SEQ ID NO: 679752 - RNA, 22 nt, Human
aucuggguuucaaagaagccuu

SEQ ID NO: 679753 - RNA, 22 nt, Human
ugcaguggcgccaucucagcuc

SEQ ID NO: 679754 - RNA, 22 nt, Human
gcacugcagguggguggagagg

SEQ ID NO: 679755 - RNA, 22 nt, Human
ggccucagaccggagcuggcca

SEQ ID NO: 679756 - RNA, 20 nt, Human
agcacuagguguggcaggug

SEQ ID NO: 679757 - RNA, 22 nt, Human
uugaaauauggauugaccuuga

SEQ ID NO: 679758 - RNA, 22 nt, Human
ccacagugaguucuguacucug

SEQ ID NO: 679759 - RNA, 22 nt, Human
ggaaagagggacccagcuuggu

SEQ ID NO: 679760 - RNA, 20 nt, Human
acugcaaaguacucuuucag

SEQ ID NO: 679761 - RNA, 22 nt, Human
ccucagccccugaauggagaga

SEQ ID NO: 679762 - RNA, 22 nt, Human
aaugaugaguucuaauagaccc

SEQ ID NO: 679763 - RNA, 22 nt, Human
cagcucuggggcagagugacua

SEQ ID NO: 679764 - RNA, 22 nt, Human
cucauugcagcugcauuacugu

SEQ ID NO: 679765 - RNA, 22 nt, Human
ucuuugcaucccuuccauaguu

SEQ ID NO: 679766 - RNA, 22 nt, Human
acauuaaacuugcuuggcugua

SEQ ID NO: 679767 - RNA, 22 nt, Human
aaagaucagucugaagcaacau

SEQ ID NO: 679768 - RNA, 22 nt, Human
aguauaaugaaaugugucagua

SEQ ID NO: 679769 - RNA, 22 nt, Human
cagugagguggauggauggccu

SEQ ID NO: 679770 - RNA, 22 nt, Human
augauggaggccgugauggacg

SEQ ID NO: 679771 - RNA, 22 nt, Human
augaacucuugcuuuauuucag

SEQ ID NO: 679772 - RNA, 22 nt, Human
aggaaaaugauauucugcuguu

SEQ ID NO: 679773 - RNA, 22 nt, Human
ucugcuuuagugcaaagucuua

SEQ ID NO: 679774 - RNA, 22 nt, Human
ggaagccagagugcugggcagg

SEQ ID NO: 679775 - RNA, 22 nt, Human
cccagugugguucuuuggagaa

SEQ ID NO: 679776 - RNA, 22 nt, Human
ggcucuggcuacuccacccugu

SEQ ID NO: 679777 - RNA, 22 nt, Human
cugugugugagaagcagguuga

SEQ ID NO: 679778 - RNA, 20 nt, Human
cucuuuugacucuuugcaag

SEQ ID NO: 679779 - RNA, 22 nt, Human
aguguacauucuguuugaggua

SEQ ID NO: 679780 - RNA, 22 nt, Human
uuugauuuacuauaagcagcac

SEQ ID NO: 679781 - RNA, 20 nt, Human
cuggcuggaaacuuagccuu

SEQ ID NO: 679782 - RNA, 22 nt, Human
ugugaauauuuccuucuuugga

SEQ ID NO: 679783 - RNA, 22 nt, Human
cagggccugagggcugcucugc

SEQ ID NO: 679784 - RNA, 22 nt, Human
ucaaaaucaaagauacuugaaa

SEQ ID NO: 679785 - RNA, 22 nt, Human
uuguagcagggaucagaauaca

SEQ ID NO: 679786 - RNA, 22 nt, Human
ugccuggaaggcccaugggaag

SEQ ID NO: 679787 - RNA, 22 nt, Human
gcuguaugaguucauguguaga

SEQ ID NO: 679788 - RNA, 22 nt, Human
ucugggucuuaguuuucuugau

SEQ ID NO: 679789 - RNA, 22 nt, Human
aagacuaaauguguucuaaagu

SEQ ID NO: 679790 - RNA, 22 nt, Human
caggguugauuccuucugaggg

SEQ ID NO: 679791 - RNA, 22 nt, Human
ccagcuccugggucuuagucag

SEQ ID NO: 679792 - RNA, 22 nt, Human
gucccaggugggcuccaccucu

SEQ ID NO: 679793 - RNA, 22 nt, Human
ugccugcugauuggaguugaau

SEQ ID NO: 679794 - RNA, 22 nt, Human
cuucacaguauaggucccugag

SEQ ID NO: 679795 - RNA, 22 nt, Human
acuauuagcauaucaugaaugg

SEQ ID NO: 679796 - RNA, 22 nt, Human
uuguuuuaaccuaguguuuaug

SEQ ID NO: 679797 - RNA, 22 nt, Human
aguauaugccagagagauagcu

SEQ ID NO: 679798 - RNA, 22 nt, Human
guuucaaagggaagacgcugga

SEQ ID NO: 679799 - RNA, 22 nt, Human
auuuaccagcugugcacugaua

SEQ ID NO: 679800 - RNA, 17 nt, Human
cagcucugcagacuucc

SEQ ID NO: 679801 - RNA, 22 nt, Human
augccugucucagggucuguuu

SEQ ID NO: 679802 - RNA, 22 nt, Human
ugugaggauuaaaugcauagug

SEQ ID NO: 679803 - RNA, 22 nt, Human
uguauauauuucuuucauucua

SEQ ID NO: 679804 - RNA, 22 nt, Human
gugccaggugcuaagcugugcu

SEQ ID NO: 679805 - RNA, 22 nt, Human
gaggcacaucacuuggugcauu

SEQ ID NO: 679806 - RNA, 22 nt, Human
ugcucugucaagaaaagaugcc

SEQ ID NO: 679807 - RNA, 20 nt, Human
ugguccugucccacccacuc

SEQ ID NO: 679808 - RNA, 22 nt, Human
cagggcucacucggcuggcguc

SEQ ID NO: 679809 - RNA, 22 nt, Human
cucaggauagcugcgcagccug

SEQ ID NO: 679810 - RNA, 22 nt, Human
aucucucugcccaggggcugug

SEQ ID NO: 679811 - RNA, 22 nt, Human
guaaacaccuguuaaauucaga

SEQ ID NO: 679812 - RNA, 22 nt, Human
gacuauuuauuuacagaaagcu

SEQ ID NO: 679813 - RNA, 22 nt, Human
ccugugcuuuaggccucaaacu

SEQ ID NO: 679814 - RNA, 22 nt, Human
gcagcuguucagcuggccagau

SEQ ID NO: 679815 - RNA, 23 nt, Human
agcagggccagaauacuugcugu

SEQ ID NO: 679816 - RNA, 20 nt, Human
gcuuccuucccagcccccac

SEQ ID NO: 679817 - RNA, 22 nt, Human
aucacaucucaccacugcaacc

SEQ ID NO: 679818 - RNA, 22 nt, Human
ucucuggcccuguuuucuaucu

SEQ ID NO: 679819 - RNA, 22 nt, Human
acugucuccucaucaugccugg

SEQ ID NO: 679820 - RNA, 22 nt, Human
cagcccuccuuucacucccagg

SEQ ID NO: 679821 - RNA, 21 nt, Human
agcuggccugguuugagcucc

SEQ ID NO: 679822 - RNA, 22 nt, Human
cagcuugggucaggugccugcu

SEQ ID NO: 679823 - RNA, 22 nt, Human
aucucagacauguuguccauga

SEQ ID NO: 679824 - RNA, 22 nt, Human
gccagccaguuugcugauggcu

SEQ ID NO: 679825 - RNA, 22 nt, Human
auauuuguaaaauucugugucu

SEQ ID NO: 679826 - RNA, 22 nt, Human
ccuggaaacacaugaugaugaa

SEQ ID NO: 679827 - RNA, 23 nt, Human
ugaaugauuguacugagcuuuua

SEQ ID NO: 679828 - RNA, 22 nt, Human
ccccacaacucauguugaaacu

SEQ ID NO: 679829 - RNA, 19 nt, Human
ugccuggcaccagcuccac

SEQ ID NO: 679830 - RNA, 22 nt, Human
uuucagaggaggaaggcaguua

SEQ ID NO: 679831 - RNA, 22 nt, Human
cuguggcugucucuuucccaug

SEQ ID NO: 679832 - RNA, 22 nt, Human
ucauuucuaucuaugcagcuuc

SEQ ID NO: 679833 - RNA, 22 nt, Human
agguggcagaggacuccuccug

SEQ ID NO: 679834 - RNA, 22 nt, Human
cuccuccacagaccuacugaau

SEQ ID NO: 679835 - RNA, 22 nt, Human
ccacaggaggaacaauuagaug

SEQ ID NO: 679836 - RNA, 23 nt, Human
agguggagcugugcagccggggc

SEQ ID NO: 679837 - RNA, 22 nt, Human
acucaggaaaaauguagugaua

SEQ ID NO: 679838 - RNA, 22 nt, Human
gacauaaaauucaauaauuugu

SEQ ID NO: 679839 - RNA, 22 nt, Human
ucugaugcaauguaagucuugg

SEQ ID NO: 679840 - RNA, 22 nt, Human
uuauuaugguauuucuuugcag

SEQ ID NO: 679841 - RNA, 22 nt, Human
aggccugacuugaauuuagggc

SEQ ID NO: 679842 - RNA, 22 nt, Human
auacauaugaaugauuuggcuc

SEQ ID NO: 679843 - RNA, 21 nt, Human
aaaaagcuggggcaugcaugc

SEQ ID NO: 679844 - RNA, 22 nt, Human
ucacaucuugugauguuuucau

SEQ ID NO: 679845 - RNA, 22 nt, Human
caaaaguaauuaugguuuuugc

SEQ ID NO: 679846 - RNA, 22 nt, Human
caccaggagcaucuaggaggcg

SEQ ID NO: 679847 - RNA, 22 nt, Human
uacacuguuuuuggaaagaaga

SEQ ID NO: 679848 - RNA, 22 nt, Human
augaaaacggaccagagcuauu

SEQ ID NO: 679849 - RNA, 22 nt, Human
uguguuuuaucuauuguaucuu

SEQ ID NO: 679850 - RNA, 22 nt, Human
caggcagcaucagucugcugua

SEQ ID NO: 679851 - RNA, 22 nt, Human
ucucccuucucuggauuccguu

SEQ ID NO: 679852 - RNA, 22 nt, Human
gucucugagcucugagcuggcu

SEQ ID NO: 679853 - RNA, 22 nt, Human
cguggcaguggaaggcugggug

SEQ ID NO: 679854 - RNA, 22 nt, Human
ugaagaaaggugugggauacuc

SEQ ID NO: 679855 - RNA, 22 nt, Human
guucucucucuugccugggugg

SEQ ID NO: 679856 - RNA, 18 nt, Human
uuuauauggauagagacc

SEQ ID NO: 679857 - RNA, 22 nt, Human
agggccugggccagcacccuuu

SEQ ID NO: 679858 - RNA, 22 nt, Human
aggagaaggaagugcaucacua

SEQ ID NO: 679859 - RNA, 22 nt, Human
cauuguauugaggauacuuaag

SEQ ID NO: 679860 - RNA, 22 nt, Human
ucuguaggguaguaguggagau

SEQ ID NO: 679861 - RNA, 22 nt, Human
aaugcauuuuauuauaugugac

SEQ ID NO: 679862 - RNA, 22 nt, Human
uccaggcacuauauauacuuuu

SEQ ID NO: 679863 - RNA, 22 nt, Human
cucaggccauucuuccagcugc

SEQ ID NO: 679864 - RNA, 22 nt, Human
agugcugucuccuucccccggg

SEQ ID NO: 679865 - RNA, 22 nt, Human
uucuggaaguguuagaaucugg

SEQ ID NO: 679866 - RNA, 22 nt, Human
uugcuuggcccauugcuucagu

SEQ ID NO: 679867 - RNA, 22 nt, Human
aaaguacaugcaauucuucuga

SEQ ID NO: 679868 - RNA, 19 nt, Human
aaaugugaugguacaauuc

SEQ ID NO: 679869 - RNA, 22 nt, Human
acagcagccugcagcccugugu

SEQ ID NO: 679870 - RNA, 22 nt, Human
aaguuacuggcaagggcugcag

SEQ ID NO: 679871 - RNA, 22 nt, Human
auugguaagcaagauggcaaua

SEQ ID NO: 679872 - RNA, 22 nt, Human
uaucuacuccucuuucagaugc

SEQ ID NO: 679873 - RNA, 22 nt, Human
guacauuucucuuguucuuauu

SEQ ID NO: 679874 - RNA, 22 nt, Human
uccacacacauuucuaugugca

SEQ ID NO: 679875 - RNA, 22 nt, Human
acuguggccugcuguaugggcu

SEQ ID NO: 679876 - RNA, 19 nt, Human
gcugggugaggucguugga

SEQ ID NO: 679877 - RNA, 22 nt, Human
agcuggggcugcagagaacagg

SEQ ID NO: 679878 - RNA, 21 nt, Human
agacaugugaacuaaagguga

SEQ ID NO: 679879 - RNA, 22 nt, Human
auccuugguaagagaguuggau

SEQ ID NO: 679880 - RNA, 22 nt, Human
uuugcuuuguuuaaaaguggua

SEQ ID NO: 679881 - RNA, 22 nt, Human
acaaaguccugguguauggcca

SEQ ID NO: 679882 - RNA, 22 nt, Human
aaugcauuaaaguuagagacuu

SEQ ID NO: 679883 - RNA, 22 nt, Human
auuaggauuugguauggucaua

SEQ ID NO: 679884 - RNA, 22 nt, Human
uuucaagaacaacauucauuca

SEQ ID NO: 679885 - RNA, 22 nt, Human
uuaugaaagacauuucuguugg

SEQ ID NO: 679886 - RNA, 20 nt, Human
acauaugaaugauagagcca

SEQ ID NO: 679887 - RNA, 23 nt, Human
gcuuuuaaaccugugacugccgc

SEQ ID NO: 679888 - RNA, 22 nt, Human
ugauauguaacuacuccuuaua

SEQ ID NO: 679889 - RNA, 18 nt, Human
uggcugcuuccagguaca

SEQ ID NO: 679890 - RNA, 22 nt, Human
gagccugaugaaacaggcagac

SEQ ID NO: 679891 - RNA, 22 nt, Human
agagacuguggcucuuugaagg

SEQ ID NO: 679892 - RNA, 22 nt, Human
cuuugcaauagaggcacacaug

SEQ ID NO: 679893 - RNA, 22 nt, Human
uaauugcagggagccugggggc

SEQ ID NO: 679894 - RNA, 22 nt, Human
ccugcagagcaggagaggcauc

SEQ ID NO: 679895 - RNA, 22 nt, Human
ugcuggcuacugauggcaggcc

SEQ ID NO: 679896 - RNA, 22 nt, Human
cagugccagagguacuagugga

SEQ ID NO: 679897 - RNA, 22 nt, Human
agauggcuuagccuggcuccca

SEQ ID NO: 679898 - RNA, 22 nt, Human
ucugcugaggccuucccacucc

SEQ ID NO: 679899 - RNA, 22 nt, Human
gaaugauauauuagcagauuuu

SEQ ID NO: 679900 - RNA, 22 nt, Human
uuagaaucuuuagagucucacu

SEQ ID NO: 679901 - RNA, 22 nt, Human
cucucucuuuagaagcgucugg

SEQ ID NO: 679902 - RNA, 22 nt, Human
uguggcuuccacgauggucacc

SEQ ID NO: 679903 - RNA, 22 nt, Human
cucucugugguggcugucccau

SEQ ID NO: 679904 - RNA, 22 nt, Human
aacacaaagaagcugcaggauc

SEQ ID NO: 679905 - RNA, 21 nt, Human
ucuuugcaucaguuguuuucu

SEQ ID NO: 679906 - RNA, 22 nt, Human
aggggcucaguuacuuuggcag

SEQ ID NO: 679907 - RNA, 22 nt, Human
ugccuagggccuaaccagagcc

SEQ ID NO: 679908 - RNA, 22 nt, Human
ugacagacuacugccucuauug

SEQ ID NO: 679909 - RNA, 22 nt, Human
auuuugauaaucauguuagaga

SEQ ID NO: 679910 - RNA, 17 nt, Human
gcuugggcugccuguug

SEQ ID NO: 679911 - RNA, 22 nt, Human
cccagugggucacugcaucuca

SEQ ID NO: 679912 - RNA, 22 nt, Human
ggcacugagaggcucuuccuaa

SEQ ID NO: 679913 - RNA, 20 nt, Human
ccuggcugcauucaggacgg

SEQ ID NO: 679914 - RNA, 22 nt, Human
uguuuaaucuucaggacagucu

SEQ ID NO: 679915 - RNA, 19 nt, Human
gcucuaaaagauuuugaag

SEQ ID NO: 679916 - RNA, 22 nt, Human
agagacaaacacugcaacuucu

SEQ ID NO: 679917 - RNA, 22 nt, Human
cuguacaggugaggagggggcu

SEQ ID NO: 679918 - RNA, 22 nt, Human
uauuauuuuagcacugaggauu

SEQ ID NO: 679919 - RNA, 22 nt, Human
uaucucuaggcugccacuuaaa

SEQ ID NO: 679920 - RNA, 22 nt, Human
acagagacaggcagacagucuu

SEQ ID NO: 679921 - RNA, 21 nt, Human
ucugcacagccccgcaggagg

SEQ ID NO: 679922 - RNA, 22 nt, Human
caugaacaauuugcucacugau

SEQ ID NO: 679923 - RNA, 22 nt, Human
aggagggucauguugaagugua

SEQ ID NO: 679924 - RNA, 22 nt, Human
aaauucuaugucaauguuuauu

SEQ ID NO: 679925 - RNA, 22 nt, Human
ggcagcuguuuguccuccuguu

SEQ ID NO: 679926 - RNA, 22 nt, Human
acugcuuuagaccuagagcucu

SEQ ID NO: 679927 - RNA, 22 nt, Human
acuuuugaacaaacuccucugu

SEQ ID NO: 679928 - RNA, 22 nt, Human
auaguggguacaggggcagaga

SEQ ID NO: 679929 - RNA, 22 nt, Human
ucuuuucuccagaccugggauc

SEQ ID NO: 679930 - RNA, 22 nt, Human
cuggagguaagaggcccugggc

SEQ ID NO: 679931 - RNA, 22 nt, Human
caggcugcggccgugugagcau

SEQ ID NO: 679932 - RNA, 19 nt, Human
aacuagaaagguuuugaga

SEQ ID NO: 679933 - RNA, 22 nt, Human
uuggaaaugcaaauauauugaa

SEQ ID NO: 679934 - RNA, 22 nt, Human
uguaugcacauauauagguaca

SEQ ID NO: 679935 - RNA, 21 nt, Human
ugcccacagcaaaugcagagg

SEQ ID NO: 679936 - RNA, 22 nt, Human
aguggcugauguaggcaguggg

SEQ ID NO: 679937 - RNA, 22 nt, Human
aagcuguggcuuggaggaaaca

SEQ ID NO: 679938 - RNA, 22 nt, Human
ucccuucaauaauucaacauua

SEQ ID NO: 679939 - RNA, 22 nt, Human
cacauucaggauuuuccauguc

SEQ ID NO: 679940 - RNA, 23 nt, Human
caguucccacugucugucacaag

SEQ ID NO: 679941 - RNA, 22 nt, Human
uugcuguguaacuccuggccug

SEQ ID NO: 679942 - RNA, 22 nt, Human
uccugggccaagggcugugagg

SEQ ID NO: 679943 - RNA, 22 nt, Human
aagcugugcaggaacugcuugc

SEQ ID NO: 679944 - RNA, 22 nt, Human
agauggcugauuaacuccaugg

SEQ ID NO: 679945 - RNA, 22 nt, Human
ggccuugauccuccagagcacu

SEQ ID NO: 679946 - RNA, 19 nt, Human
caaggccaccauuucuccg

SEQ ID NO: 679947 - RNA, 22 nt, Human
aaggcugaguaaaacagagaac

SEQ ID NO: 679948 - RNA, 22 nt, Human
gccugccuucggugcgcagcgg

SEQ ID NO: 679949 - RNA, 22 nt, Human
uggcagagagacucuccuugau

SEQ ID NO: 679950 - RNA, 22 nt, Human
uagacacaagagaaggguauaa

SEQ ID NO: 679951 - RNA, 22 nt, Human
aauaucuggagaugcuuuuugu

SEQ ID NO: 679952 - RNA, 22 nt, Human
auguaaacaagguuauugucca

SEQ ID NO: 679953 - RNA, 20 nt, Human
cugcuuaaguaagugacaca

SEQ ID NO: 679954 - RNA, 22 nt, Human
cugggccucaaucucagaguuu

SEQ ID NO: 679955 - RNA, 22 nt, Human
ugugaagagaguaauaaaguca

SEQ ID NO: 679956 - RNA, 21 nt, Human
aguugcugcugcugcagguga

SEQ ID NO: 679957 - RNA, 22 nt, Human
cuucuaacauccuacaaugcaa

SEQ ID NO: 679958 - RNA, 22 nt, Human
cuaagacaugcccugcaugaua

SEQ ID NO: 679959 - RNA, 22 nt, Human
aaaugacacucauucaguguca

SEQ ID NO: 679960 - RNA, 22 nt, Human
ugugcccagacugccucaguga

SEQ ID NO: 679961 - RNA, 22 nt, Human
ucaaaggcaccaaggucacugc

SEQ ID NO: 679962 - RNA, 22 nt, Human
ugagcuguggugggguagagga

SEQ ID NO: 679963 - RNA, 22 nt, Human
cucccagauuccugcuguggga

SEQ ID NO: 679964 - RNA, 22 nt, Human
agccacugcccuuagccauuug

SEQ ID NO: 679965 - RNA, 22 nt, Human
auccuucaaggggcugacagcu

SEQ ID NO: 679966 - RNA, 22 nt, Human
agccuggaguucccaggagaag

SEQ ID NO: 679967 - RNA, 21 nt, Human
acuaugucauuuaagucacug

SEQ ID NO: 679968 - RNA, 22 nt, Human
uccaggauggugacgguggcca

SEQ ID NO: 679969 - RNA, 22 nt, Human
aguuucauguagccauauuuac

SEQ ID NO: 679970 - RNA, 22 nt, Human
gacuuucucuccucccaggugu

SEQ ID NO: 679971 - RNA, 22 nt, Human
cuuuggcugacagguuucuggu

SEQ ID NO: 679972 - RNA, 22 nt, Human
gggcuucucccuaaggacucug

SEQ ID NO: 679973 - RNA, 22 nt, Human
uaauugcucuuggccgugccag

SEQ ID NO: 679974 - RNA, 22 nt, Human
ggcaugaguggcagugggcagu

SEQ ID NO: 679975 - RNA, 22 nt, Human
aggggccucgcaggaccgcucc

SEQ ID NO: 679976 - RNA, 22 nt, Human
ucuacuuucacucauacuuauu

SEQ ID NO: 679977 - RNA, 20 nt, Human
uucacauuucuguagugauu

SEQ ID NO: 679978 - RNA, 22 nt, Human
uagcccagauacaaaucaugau

SEQ ID NO: 679979 - RNA, 23 nt, Human
ugggaccuguuugcccacagaug

SEQ ID NO: 679980 - RNA, 22 nt, Human
uuauauaacucaggugggcuca

SEQ ID NO: 679981 - RNA, 20 nt, Human
cauuucauugugucuucacu

SEQ ID NO: 679982 - RNA, 22 nt, Human
ccauuuggcaagaaagagucau

SEQ ID NO: 679983 - RNA, 22 nt, Human
gccugagagacccauggggcaa

SEQ ID NO: 679984 - RNA, 22 nt, Human
gaggcugggaaguccaagauca

SEQ ID NO: 679985 - RNA, 22 nt, Human
acuucacaaagagaucaucuaa

SEQ ID NO: 679986 - RNA, 22 nt, Human
guuuccuuuuucugcccucaau

SEQ ID NO: 679987 - RNA, 22 nt, Human
agauacaaggcagagaugugca

SEQ ID NO: 679988 - RNA, 22 nt, Human
ucaguaaaugaaugaauauaug

SEQ ID NO: 679989 - RNA, 22 nt, Human
gacuucuccagacugccuggua

SEQ ID NO: 679990 - RNA, 22 nt, Human
ggcaggguguggaguugggaca

SEQ ID NO: 679991 - RNA, 22 nt, Human
aaacagcucaagaaguuacucu

SEQ ID NO: 679992 - RNA, 22 nt, Human
uuagccaugcccuagaagagga

SEQ ID NO: 679993 - RNA, 22 nt, Human
caguacuugggaaugcugggga

SEQ ID NO: 679994 - RNA, 23 nt, Human
aaucacacguuuggccaggaugc

SEQ ID NO: 679995 - RNA, 22 nt, Human
ugccuucucccuuggacccuga

SEQ ID NO: 679996 - RNA, 22 nt, Human
ugggcuccagcaccugugcucu

SEQ ID NO: 679997 - RNA, 22 nt, Human
cuuuuuauaccgugccaguuga

SEQ ID NO: 679998 - RNA, 22 nt, Human
cacugggaccuaggacugagcu

SEQ ID NO: 679999 - RNA, 18 nt, Human
cacaggagccacacucac

SEQ ID NO: 680000 - RNA, 20 nt, Human
aacacaggguuaccaucaga

SEQ ID NO: 680001 - RNA, 22 nt, Human
gggcagcugccagaggccaugg

SEQ ID NO: 680002 - RNA, 22 nt, Human
ugcgauggcguagacaaauccc

SEQ ID NO: 680003 - RNA, 22 nt, Human
uggcagcaauuagcuagagcug

SEQ ID NO: 680004 - RNA, 22 nt, Human
gucacacagagcccugugcuca

SEQ ID NO: 680005 - RNA, 22 nt, Human
cacagcuucugagugaggauuu

SEQ ID NO: 680006 - RNA, 22 nt, Human
ccugcuccaugcucaccaucag

SEQ ID NO: 680007 - RNA, 22 nt, Human
auugcaaagaaauacaugcuua

SEQ ID NO: 680008 - RNA, 22 nt, Human
caggaaauaucucaacacuuua

SEQ ID NO: 680009 - RNA, 21 nt, Human
cuccucaggaccagccacagg

SEQ ID NO: 680010 - RNA, 22 nt, Human
guuuucuuugaaugcuucuaga

SEQ ID NO: 680011 - RNA, 22 nt, Human
aaaguuuacagugcacaugggu

SEQ ID NO: 680012 - RNA, 22 nt, Human
uggaacaaauuuuggggaccuu

SEQ ID NO: 680013 - RNA, 22 nt, Human
uagaacucuggucuucucaucc

SEQ ID NO: 680014 - RNA, 22 nt, Human
cagcaggugggcuuugcggaug

SEQ ID NO: 680015 - RNA, 22 nt, Human
caguccugggcacagcccuggg

SEQ ID NO: 680016 - RNA, 22 nt, Human
gccuggaagugugucgugggaa

SEQ ID NO: 680017 - RNA, 21 nt, Human
ccucucucauuguaaugaagu

SEQ ID NO: 680018 - RNA, 22 nt, Human
gacacagggacgugcucugccu

SEQ ID NO: 680019 - RNA, 20 nt, Human
uaugcaguauguguguauaa

SEQ ID NO: 680020 - RNA, 22 nt, Human
cuauacaguaaccacagugauu

SEQ ID NO: 680021 - RNA, 22 nt, Human
guggcccucagcaguugccaag

SEQ ID NO: 680022 - RNA, 22 nt, Human
ggccucggcccacugcugcggu

SEQ ID NO: 680023 - RNA, 23 nt, Human
uuguuucuuuguauugucucuau

SEQ ID NO: 680024 - RNA, 22 nt, Human
aaucagcuaaauaaacuaguca

SEQ ID NO: 680025 - RNA, 22 nt, Human
auacacagcgaugagaggaggc

SEQ ID NO: 680026 - RNA, 22 nt, Human
aggagcuggaguccaggcaagu

SEQ ID NO: 680027 - RNA, 19 nt, Human
gggcaguggcacuagggag

SEQ ID NO: 680028 - RNA, 22 nt, Human
agcagcuguuuguugaauuggu

SEQ ID NO: 680029 - RNA, 22 nt, Human
cagagcuggggacuguuggaug

SEQ ID NO: 680030 - RNA, 22 nt, Human
ucccagcaggaguccaguuccc

SEQ ID NO: 680031 - RNA, 22 nt, Human
aaaaugcaaaccuaccuacaua

SEQ ID NO: 680032 - RNA, 22 nt, Human
aguguucuucuucaaagcucug

SEQ ID NO: 680033 - RNA, 22 nt, Human
agaggucagagcaggaaaggca

SEQ ID NO: 680034 - RNA, 22 nt, Human
ugguaagggguggaaccagagc

SEQ ID NO: 680035 - RNA, 22 nt, Human
cuagaauacucguauuauuccc

SEQ ID NO: 680036 - RNA, 22 nt, Human
acucucagaggguggcagcaau

SEQ ID NO: 680037 - RNA, 22 nt, Human
cagagcuguccaaacccugaca

SEQ ID NO: 680038 - RNA, 22 nt, Human
agugcaauagcaaagaacaaca

SEQ ID NO: 680039 - RNA, 22 nt, Human
cuuggagauucauugccugaaa

SEQ ID NO: 680040 - RNA, 22 nt, Human
ggcccugcugaguggaguggag

SEQ ID NO: 680041 - RNA, 22 nt, Human
uuugagaaguaauucaagacau

SEQ ID NO: 680042 - RNA, 22 nt, Human
ugugguagucucagggcaguau

SEQ ID NO: 680043 - RNA, 22 nt, Human
acuuaguuaaguauuuuggaaa

SEQ ID NO: 680044 - RNA, 22 nt, Human
cuuggagugaaugggggcaggu

SEQ ID NO: 680045 - RNA, 22 nt, Human
aucacaaaggcugcuucaugau

SEQ ID NO: 680046 - RNA, 22 nt, Human
uggcauccuuuaucugcaggcu

SEQ ID NO: 680047 - RNA, 22 nt, Human
uagaaacauauaggauggcagg

SEQ ID NO: 680048 - RNA, 22 nt, Human
uccauuuuagaagaaaauccac

SEQ ID NO: 680049 - RNA, 22 nt, Human
agccuggcccugcugaacucug

SEQ ID NO: 680050 - RNA, 22 nt, Human
ggccuguccagccugccuggcu

SEQ ID NO: 680051 - RNA, 22 nt, Human
uucaugaaagacagcaacugug

SEQ ID NO: 680052 - RNA, 22 nt, Human
auaacugagagcaaucuuucuu

SEQ ID NO: 680053 - RNA, 22 nt, Human
uuucuacaacacuucugaaucu

SEQ ID NO: 680054 - RNA, 22 nt, Human
uaacagcucuguguggcuguaa

SEQ ID NO: 680055 - RNA, 22 nt, Human
gcuccaggccccagcguuccgc

SEQ ID NO: 680056 - RNA, 22 nt, Human
uuccaggcacaucccaacucca

SEQ ID NO: 680057 - RNA, 22 nt, Human
cauccauagccucaauaaauag

SEQ ID NO: 680058 - RNA, 22 nt, Human
uggagcuggcuuguggaaguug

SEQ ID NO: 680059 - RNA, 22 nt, Human
gcagggugaaggucacauagaa

SEQ ID NO: 680060 - RNA, 22 nt, Human
gcucacugccauucucuagaug

SEQ ID NO: 680061 - RNA, 22 nt, Human
aggcagcagggccacuggcuga

SEQ ID NO: 680062 - RNA, 22 nt, Human
cagcagcucaggcugcuuccca

SEQ ID NO: 680063 - RNA, 22 nt, Human
aauccauaauguugugggguuu

SEQ ID NO: 680064 - RNA, 22 nt, Human
ugagaaggguuggagaaauaau

SEQ ID NO: 680065 - RNA, 22 nt, Human
agacucugcuaagaauauaauu

SEQ ID NO: 680066 - RNA, 22 nt, Human
uuuccuuccuugcuagccugag

SEQ ID NO: 680067 - RNA, 22 nt, Human
aagagaaugacaaggagaaccu

SEQ ID NO: 680068 - RNA, 22 nt, Human
gcagcaagucuaguuuguaggc

SEQ ID NO: 680069 - RNA, 22 nt, Human
gcuccugggcucuaccuugcua

SEQ ID NO: 680070 - RNA, 22 nt, Human
caucuuauaggcagaguucagu

SEQ ID NO: 680071 - RNA, 22 nt, Human
aaagaaauagauggcauuuaaa

SEQ ID NO: 680072 - RNA, 22 nt, Human
ugagacaggcuuccuucuuggg

SEQ ID NO: 680073 - RNA, 20 nt, Human
cuugccaguucccuggcaga

SEQ ID NO: 680074 - RNA, 22 nt, Human
auugacaagugagcugggcugc

SEQ ID NO: 680075 - RNA, 22 nt, Human
auuuugaaaccaaguuauuucc

SEQ ID NO: 680076 - RNA, 22 nt, Human
aggacagcagccauuggcaguc

SEQ ID NO: 680077 - RNA, 22 nt, Human
ugagguuauuuauuaugcauga

SEQ ID NO: 680078 - RNA, 22 nt, Human
guccaagucuuccuucccaaac

SEQ ID NO: 680079 - RNA, 22 nt, Human
cagcagccucaaguuuauuuuc

SEQ ID NO: 680080 - RNA, 22 nt, Human
cuggcaguauuaagagaaguga

SEQ ID NO: 680081 - RNA, 22 nt, Human
aguugcugauucugucugugau

SEQ ID NO: 680082 - RNA, 21 nt, Human
ugcugcugaucgggguuggcu

SEQ ID NO: 680083 - RNA, 22 nt, Human
uggggugccgacagggagggca

SEQ ID NO: 680084 - RNA, 22 nt, Human
cccaggcuucccaaucagaagg

SEQ ID NO: 680085 - RNA, 22 nt, Human
acaaaugugauuguuucugaaa

SEQ ID NO: 680086 - RNA, 22 nt, Human
uaguagcaaaacucaucucuuu

SEQ ID NO: 680087 - RNA, 22 nt, Human
ggcacagagcuccagccuuggc

SEQ ID NO: 680088 - RNA, 22 nt, Human
acuaaauauuugagagguguag

SEQ ID NO: 680089 - RNA, 22 nt, Human
agaguuggccaaaaggggcauu

SEQ ID NO: 680090 - RNA, 22 nt, Human
uuccauugaguaccuggagaca

SEQ ID NO: 680091 - RNA, 22 nt, Human
ggguccaggucuucaggcagag

SEQ ID NO: 680092 - RNA, 22 nt, Human
aagaugcagcuuuacaauaagg

SEQ ID NO: 680093 - RNA, 22 nt, Human
agugcagauuuuuagucagcuu

SEQ ID NO: 680094 - RNA, 22 nt, Human
uaggcugggccugccuuccagg

SEQ ID NO: 680095 - RNA, 22 nt, Human
uaccucucuaaacccagggaca

SEQ ID NO: 680096 - RNA, 23 nt, Human
acugggccagcuacuuagcacug

SEQ ID NO: 680097 - RNA, 22 nt, Human
aguuaacacaaguaagauucca

SEQ ID NO: 680098 - RNA, 22 nt, Human
auagcaaauauuuuaaugagca

SEQ ID NO: 680099 - RNA, 22 nt, Human
ucagaagucuggacugcuucuc

SEQ ID NO: 680100 - RNA, 22 nt, Human
uaucuucaauuuauucaaggag

SEQ ID NO: 680101 - RNA, 22 nt, Human
ugaaagcagauagcucuguugu

SEQ ID NO: 680102 - RNA, 22 nt, Human
cuagagaaaaugauagcaggaa

SEQ ID NO: 680103 - RNA, 18 nt, Human
gcaggugccacugcuguu

SEQ ID NO: 680104 - RNA, 22 nt, Human
gaacuguagagaauacauuucu

SEQ ID NO: 680105 - RNA, 22 nt, Human
accccaggagcugugccuaguc

SEQ ID NO: 680106 - RNA, 22 nt, Human
caugcagugaaauugauaucca

SEQ ID NO: 680107 - RNA, 22 nt, Human
uucugagagagccucucauguu

SEQ ID NO: 680108 - RNA, 22 nt, Human
gagggucccgagcccugucaga

SEQ ID NO: 680109 - RNA, 22 nt, Human
gguggcaucucaguucaugggc

SEQ ID NO: 680110 - RNA, 22 nt, Human
agagcagcugugacauggacag

SEQ ID NO: 680111 - RNA, 22 nt, Human
cagcucucacacuuagcuucua

SEQ ID NO: 680112 - RNA, 22 nt, Human
augagguuuugauuggcacagg

SEQ ID NO: 680113 - RNA, 22 nt, Human
gccguggccagagcccagucuc

SEQ ID NO: 680114 - RNA, 18 nt, Human
aggccagcccugcuacug

SEQ ID NO: 680115 - RNA, 22 nt, Human
cauuuccagcuccugcaucaug

SEQ ID NO: 680116 - RNA, 22 nt, Human
cccagggcccuggacagcuaca

SEQ ID NO: 680117 - RNA, 22 nt, Human
uggggccuuggccucauuagau

SEQ ID NO: 680118 - RNA, 22 nt, Human
ccacccagcagaggaggcaaga

SEQ ID NO: 680119 - RNA, 22 nt, Human
uugagguaauaaacagccauuc

SEQ ID NO: 680120 - RNA, 22 nt, Human
agagcuagaaggaagcauuucu

SEQ ID NO: 680121 - RNA, 22 nt, Human
cagaggccccauuggcugugcg

SEQ ID NO: 680122 - RNA, 22 nt, Human
acugcaucugaaacauggguca

SEQ ID NO: 680123 - RNA, 22 nt, Human
aaugauaccgccaauauuacca

SEQ ID NO: 680124 - RNA, 22 nt, Human
agccacugugcaggagcagugu

SEQ ID NO: 680125 - RNA, 22 nt, Human
ugccacacuccccugcugcagu

SEQ ID NO: 680126 - RNA, 22 nt, Human
ccgcgcgcgugggcguccaggg

SEQ ID NO: 680127 - RNA, 22 nt, Human
uaggccacggaaagcagguugc

SEQ ID NO: 680128 - RNA, 22 nt, Human
uucuuucuuagcaaucuauggu

SEQ ID NO: 680129 - RNA, 22 nt, Human
agagucagacuaagccauggug

SEQ ID NO: 680130 - RNA, 22 nt, Human
cccucaguuuuccagugugggc

SEQ ID NO: 680131 - RNA, 22 nt, Human
cccacccagccuggcugagggg

SEQ ID NO: 680132 - RNA, 22 nt, Human
caaaugcagucccuuuguugcu

SEQ ID NO: 680133 - RNA, 22 nt, Human
ucagauacuagcucucagccuc

SEQ ID NO: 680134 - RNA, 22 nt, Human
uguguguacucuccaguccuga

SEQ ID NO: 680135 - RNA, 22 nt, Human
auggccagucuguuggacagca

SEQ ID NO: 680136 - RNA, 22 nt, Human
cagugggauugggauuggaacc

SEQ ID NO: 680137 - RNA, 22 nt, Human
gaccugccugagcugccucugc

SEQ ID NO: 680138 - RNA, 22 nt, Human
uggcccugaaucaaggccagca

SEQ ID NO: 680139 - RNA, 20 nt, Human
ugcagaagaacguucugguu

SEQ ID NO: 680140 - RNA, 22 nt, Human
gaggcucaacccacagggguug

SEQ ID NO: 680141 - RNA, 22 nt, Human
aggcagcaauugaaaucauugu

SEQ ID NO: 680142 - RNA, 22 nt, Human
augagcucauccgagucacacu

SEQ ID NO: 680143 - RNA, 22 nt, Human
uuugggaagaggaaucucugga

SEQ ID NO: 680144 - RNA, 22 nt, Human
agaagucauuuauguuagauga

SEQ ID NO: 680145 - RNA, 22 nt, Human
cuggcuguuucuccuuugucua

SEQ ID NO: 680146 - RNA, 22 nt, Human
acugugagaguuuuucuaggag

SEQ ID NO: 680147 - RNA, 22 nt, Human
uacaaaguuugagaaugcuuuc

SEQ ID NO: 680148 - RNA, 22 nt, Human
auuacucugucugccucugacc

SEQ ID NO: 680149 - RNA, 23 nt, Human
uggccagguagaggagguaguga

SEQ ID NO: 680150 - RNA, 22 nt, Human
ugacuucaaaggcucuacuccu

SEQ ID NO: 680151 - RNA, 22 nt, Human
agccagccgggggaccacagug

SEQ ID NO: 680152 - RNA, 22 nt, Human
cuuguagaauugaaauggucuc

SEQ ID NO: 680153 - RNA, 22 nt, Human
aagcagcagccugaaguacguc

SEQ ID NO: 680154 - RNA, 22 nt, Human
uccugagcugacacuuggggag

SEQ ID NO: 680155 - RNA, 22 nt, Human
uuuaacccaaauaaccacagga

SEQ ID NO: 680156 - RNA, 22 nt, Human
guuaaaugcauuuuccaagcac

SEQ ID NO: 680157 - RNA, 22 nt, Human
gaccugaaagugugggcgaccu

SEQ ID NO: 680158 - RNA, 22 nt, Human
gaaacugaauauaagaaaggua

SEQ ID NO: 680159 - RNA, 22 nt, Human
ugcuggaauuauagaaaaauag

SEQ ID NO: 680160 - RNA, 22 nt, Human
agaaagcuuaugaaugggcaag

SEQ ID NO: 680161 - RNA, 23 nt, Human
ggacacugugcagaugcuagugc

SEQ ID NO: 680162 - RNA, 22 nt, Human
agcagcuguacuuucaucuguu

SEQ ID NO: 680163 - RNA, 22 nt, Human
ugaggccagugacauauauuaa

SEQ ID NO: 680164 - RNA, 22 nt, Human
uacaaaaggaagagggaucuua

SEQ ID NO: 680165 - RNA, 22 nt, Human
cagcagcaguggcugcagaaca

SEQ ID NO: 680166 - RNA, 22 nt, Human
uuguuaaagaugcagauuccau

SEQ ID NO: 680167 - RNA, 22 nt, Human
caggcagcugcgacaagagagc

SEQ ID NO: 680168 - RNA, 19 nt, Human
gcacaggacaucugaugga

SEQ ID NO: 680169 - RNA, 22 nt, Human
uucacauaaugauacaaagcuu

SEQ ID NO: 680170 - RNA, 22 nt, Human
uuuuagaagugccuauccuaug

SEQ ID NO: 680171 - RNA, 22 nt, Human
acugugcacacaaaaauagauu

SEQ ID NO: 680172 - RNA, 22 nt, Human
uuacacaaagcuccccaaauag

SEQ ID NO: 680173 - RNA, 22 nt, Human
aaagaacaaauuagcuguuuua

SEQ ID NO: 680174 - RNA, 22 nt, Human
ggcucccuggcccuggggacac

SEQ ID NO: 680175 - RNA, 22 nt, Human
agugggcaugaucuggugucug

SEQ ID NO: 680176 - RNA, 22 nt, Human
guacaguagagccagguucagu

SEQ ID NO: 680177 - RNA, 22 nt, Human
ucuuucaauccauucauauguc

SEQ ID NO: 680178 - RNA, 22 nt, Human
cuuuuuuccuaaggcaacauga

SEQ ID NO: 680179 - RNA, 22 nt, Human
cugcaggcccccuuccuggagu

SEQ ID NO: 680180 - RNA, 21 nt, Human
uaucaaggcacuuuuuaaaga

SEQ ID NO: 680181 - RNA, 22 nt, Human
cagcagaguauggcacucaacu

SEQ ID NO: 680182 - RNA, 22 nt, Human
gauauuuugagaaauccuauga

SEQ ID NO: 680183 - RNA, 22 nt, Human
aaucagaaauucuacaucacaa

SEQ ID NO: 680184 - RNA, 21 nt, Human
agccaagccuugggagccagg

SEQ ID NO: 680185 - RNA, 22 nt, Human
guuauucaacuugugucucuua

SEQ ID NO: 680186 - RNA, 22 nt, Human
gagugcuggaggugugaguggg

SEQ ID NO: 680187 - RNA, 22 nt, Human
ugugugcacaugauuugaaaug

SEQ ID NO: 680188 - RNA, 22 nt, Human
cagagcauugagggucugccaa

SEQ ID NO: 680189 - RNA, 22 nt, Human
ggcuccugauaggagaaugcgg

SEQ ID NO: 680190 - RNA, 21 nt, Human
ccuuuacaauuuugcauuccu

SEQ ID NO: 680191 - RNA, 22 nt, Human
caugauuuugucuuguguuaau

SEQ ID NO: 680192 - RNA, 21 nt, Human
gcuauacagaauggccagagg

SEQ ID NO: 680193 - RNA, 22 nt, Human
auuagcuguugugaaaggggug

SEQ ID NO: 680194 - RNA, 22 nt, Human
uucaaacuguguaauuuauaaa

SEQ ID NO: 680195 - RNA, 22 nt, Human
aggcacugaagugguaaaugua

SEQ ID NO: 680196 - RNA, 18 nt, Human
aauuucuuugacaacuua

SEQ ID NO: 680197 - RNA, 22 nt, Human
ggauggcagucugcaugagaaa

SEQ ID NO: 680198 - RNA, 22 nt, Human
aguggcuguccuggcucuaacu

SEQ ID NO: 680199 - RNA, 22 nt, Human
gacuguggcaggcucagcacug

SEQ ID NO: 680200 - RNA, 22 nt, Human
gggaguaaacuauggugaggau

SEQ ID NO: 680201 - RNA, 22 nt, Human
cuggaagagugacuuugcauuu

SEQ ID NO: 680202 - RNA, 22 nt, Human
cugggaggacaacuuggagcuc

SEQ ID NO: 680203 - RNA, 22 nt, Human
ucucuuucuuuguaugucuauu

SEQ ID NO: 680204 - RNA, 22 nt, Human
uuuuguauccucccuuucacug

SEQ ID NO: 680205 - RNA, 22 nt, Human
acagcugcauucuuaacaggaa

SEQ ID NO: 680206 - RNA, 22 nt, Human
agcgugugccucgggguacacg

SEQ ID NO: 680207 - RNA, 21 nt, Human
agacuuugcuugcagagaguc

SEQ ID NO: 680208 - RNA, 22 nt, Human
cccuugcaucccauguguggcc

SEQ ID NO: 680209 - RNA, 22 nt, Human
aagcaaaagguuacacuucugg

SEQ ID NO: 680210 - RNA, 22 nt, Human
ucacuggagaaaaguaauguau

SEQ ID NO: 680211 - RNA, 22 nt, Human
cacccccagcagggaaaggagg

SEQ ID NO: 680212 - RNA, 22 nt, Human
caggccuggagugcaauggcac

SEQ ID NO: 680213 - RNA, 22 nt, Human
gucacuuuauuaauuuugguga

SEQ ID NO: 680214 - RNA, 22 nt, Human
agugucugaaccugcaguggga

SEQ ID NO: 680215 - RNA, 19 nt, Human
cccagccaggucuugcauc

SEQ ID NO: 680216 - RNA, 22 nt, Human
cuuuacuguucuucugugggaa

SEQ ID NO: 680217 - RNA, 22 nt, Human
ugucugcccauucaugggcaca

SEQ ID NO: 680218 - RNA, 22 nt, Human
ucuugaaggggggcaguguuga

SEQ ID NO: 680219 - RNA, 22 nt, Human
ggggcugguggugguuucucca

SEQ ID NO: 680220 - RNA, 22 nt, Human
gcuuccagaaugacuaggaugu

SEQ ID NO: 680221 - RNA, 22 nt, Human
ugaaguuauauauguugaaaau

SEQ ID NO: 680222 - RNA, 22 nt, Human
uccagggcgugugugaaggaaa

SEQ ID NO: 680223 - RNA, 22 nt, Human
gacauccaucauuuccuguuga

SEQ ID NO: 680224 - RNA, 22 nt, Human
agagaggcgaguuaccugugcu

SEQ ID NO: 680225 - RNA, 22 nt, Human
ucccugggaauuaauauuugga

SEQ ID NO: 680226 - RNA, 22 nt, Human
cuggcugccuggagugagggag

SEQ ID NO: 680227 - RNA, 22 nt, Human
aguugaacaguauuugcuucug

SEQ ID NO: 680228 - RNA, 18 nt, Human
gaugggguccaggcauag

SEQ ID NO: 680229 - RNA, 22 nt, Human
uacuuuuuagcacagugugugc

SEQ ID NO: 680230 - RNA, 17 nt, Human
uuauuuuuugggcugag

SEQ ID NO: 680231 - RNA, 22 nt, Human
guacaaaaguuauugcgguuuu

SEQ ID NO: 680232 - RNA, 22 nt, Human
cuguggccuuggaccagcaucu

SEQ ID NO: 680233 - RNA, 22 nt, Human
cuguugcuaaguagugcaggua

SEQ ID NO: 680234 - RNA, 22 nt, Human
aguccaggaaaauaagcuaggu

SEQ ID NO: 680235 - RNA, 22 nt, Human
gcucuggagagccauaggcccu

SEQ ID NO: 680236 - RNA, 22 nt, Human
cagcacugcugcuguacacaca

SEQ ID NO: 680237 - RNA, 22 nt, Human
uucugaaggcuccucaggaaag

SEQ ID NO: 680238 - RNA, 21 nt, Human
aacuuuagaaagacugggaag

SEQ ID NO: 680239 - RNA, 22 nt, Human
agggcgaggagacggaggcaca

SEQ ID NO: 680240 - RNA, 22 nt, Human
ugaggcaggagaaucacaugaa

SEQ ID NO: 680241 - RNA, 22 nt, Human
ggcacugagcugccuuggggca

SEQ ID NO: 680242 - RNA, 22 nt, Human
acugugggagcgcaguggcagc

SEQ ID NO: 680243 - RNA, 22 nt, Human
cucuguagaaacagggcagaag

SEQ ID NO: 680244 - RNA, 22 nt, Human
ucagaggagccaaaguucugag

SEQ ID NO: 680245 - RNA, 22 nt, Human
auacuacauacuauguaaacau

SEQ ID NO: 680246 - RNA, 22 nt, Human
accugccucuaagcagcaggug

SEQ ID NO: 680247 - RNA, 22 nt, Human
uggcuccaaaaacaaaugacau

SEQ ID NO: 680248 - RNA, 22 nt, Human
acuuaaaguuauaauuugcuaa

SEQ ID NO: 680249 - RNA, 18 nt, Human
ucucuaccagaagugacg

SEQ ID NO: 680250 - RNA, 20 nt, Human
ugcugcugcuucacccccau

SEQ ID NO: 680251 - RNA, 22 nt, Human
ucagagaggcaauacuguuuaa

SEQ ID NO: 680252 - RNA, 22 nt, Human
aggcaccgcuccucaguccaga

SEQ ID NO: 680253 - RNA, 22 nt, Human
aaaaaugaaacggcugguuggc

SEQ ID NO: 680254 - RNA, 22 nt, Human
agauaucuggaaaaaauguaug

SEQ ID NO: 680255 - RNA, 22 nt, Human
agcagcauggcugacuaaagac

SEQ ID NO: 680256 - RNA, 22 nt, Human
cccagugugaugagguugcuaa

SEQ ID NO: 680257 - RNA, 22 nt, Human
auuguucuggauauuuacauug

SEQ ID NO: 680258 - RNA, 22 nt, Human
ugcaggaaugagguucucaguu

SEQ ID NO: 680259 - RNA, 22 nt, Human
aaguaugugauacauguuaauu

SEQ ID NO: 680260 - RNA, 22 nt, Human
aggcuucuugagccccacaggc

SEQ ID NO: 680261 - RNA, 22 nt, Human
cagacaggguggguuucugggc

SEQ ID NO: 680262 - RNA, 22 nt, Human
ugaagaauguugcagugagcau

SEQ ID NO: 680263 - RNA, 22 nt, Human
agcacaguuucuuuuccuuguc

SEQ ID NO: 680264 - RNA, 22 nt, Human
aggccagcagacgugggacuga

SEQ ID NO: 680265 - RNA, 22 nt, Human
ccugggugacccgugagcgucc

SEQ ID NO: 680266 - RNA, 22 nt, Human
ucugggcuugguuagggcuguu

SEQ ID NO: 680267 - RNA, 22 nt, Human
uggguccucgucuuccaaggca

SEQ ID NO: 680268 - RNA, 21 nt, Human
aaggcugagacaacucaggag

SEQ ID NO: 680269 - RNA, 22 nt, Human
ugagcccagucugucugacaug

SEQ ID NO: 680270 - RNA, 22 nt, Human
aagcagccagccaucaugcccg

SEQ ID NO: 680271 - RNA, 22 nt, Human
uuauaaagauuguuauguaucu

SEQ ID NO: 680272 - RNA, 22 nt, Human
agaucauuaaccaccuguucug

SEQ ID NO: 680273 - RNA, 22 nt, Human
caggaaaccgcaucccaguggg

SEQ ID NO: 680274 - RNA, 21 nt, Human
agcagacagaugcacgcacac

SEQ ID NO: 680275 - RNA, 22 nt, Human
ugggcucugaagucagucugcu

SEQ ID NO: 680276 - RNA, 22 nt, Human
gcuucagauucuuuucaugucu

SEQ ID NO: 680277 - RNA, 22 nt, Human
uugaggucaaagaagugagugg

SEQ ID NO: 680278 - RNA, 22 nt, Human
ucaggcaccccuugaguagggg

SEQ ID NO: 680279 - RNA, 22 nt, Human
ggcucugguugaccaugauggc

SEQ ID NO: 680280 - RNA, 17 nt, Human
agguggguggaucaccu

SEQ ID NO: 680281 - RNA, 22 nt, Human
agcagggagaccaucucuuccu

SEQ ID NO: 680282 - RNA, 22 nt, Human
ucuguguacgcaggcgugcgcg

SEQ ID NO: 680283 - RNA, 22 nt, Human
gggauagguuuggaagaggugg

SEQ ID NO: 680284 - RNA, 22 nt, Human
accuccugaugagaguaaagga

SEQ ID NO: 680285 - RNA, 22 nt, Human
guguuuauaggagugaaugcug

SEQ ID NO: 680286 - RNA, 22 nt, Human
cagucacagugacaggaugugg

SEQ ID NO: 680287 - RNA, 22 nt, Human
ugagccagcaggccuccagugg

SEQ ID NO: 680288 - RNA, 22 nt, Human
cugaggccccucuugugagcau

SEQ ID NO: 680289 - RNA, 22 nt, Human
uauucacagguucuggggauca

SEQ ID NO: 680290 - RNA, 23 nt, Human
uuugcaaauuggacacaaccaca

SEQ ID NO: 680291 - RNA, 22 nt, Human
cagaaauaaacuucucacaucg

SEQ ID NO: 680292 - RNA, 22 nt, Human
agugacugggcagggcagggcc

SEQ ID NO: 680293 - RNA, 22 nt, Human
ggacugggcaugggugcucugc

SEQ ID NO: 680294 - RNA, 22 nt, Human
cucuccauucccuacaguuuuc

SEQ ID NO: 680295 - RNA, 22 nt, Human
agcagcuggaacauaugaagaa

SEQ ID NO: 680296 - RNA, 22 nt, Human
aggcagagagcaguggccgucu

SEQ ID NO: 680297 - RNA, 21 nt, Human
uucuucaugaugauuaauggc

SEQ ID NO: 680298 - RNA, 22 nt, Human
agaaauguggaucguuuuaaaa

SEQ ID NO: 680299 - RNA, 22 nt, Human
ccagccugaaaugccucauccu

SEQ ID NO: 680300 - RNA, 22 nt, Human
augauauauguguugagcuugc

SEQ ID NO: 680301 - RNA, 20 nt, Human
agagaugggguaucaccgua

SEQ ID NO: 680302 - RNA, 22 nt, Human
cucuccagucaggaacucugac

SEQ ID NO: 680303 - RNA, 22 nt, Human
ugugugaagugauuuuaagucu

SEQ ID NO: 680304 - RNA, 22 nt, Human
aagagagaguuccuaggcaaaa

SEQ ID NO: 680305 - RNA, 22 nt, Human
cuugacuuugccuuuuaaaugu

SEQ ID NO: 680306 - RNA, 22 nt, Human
ggucugugucauaggcugaguu

SEQ ID NO: 680307 - RNA, 22 nt, Human
aucuauucucuacaguagacag

SEQ ID NO: 680308 - RNA, 21 nt, Human
ucacugaagccuaagauguuu

SEQ ID NO: 680309 - RNA, 22 nt, Human
acagaauaguagcuuaaaguca

SEQ ID NO: 680310 - RNA, 22 nt, Human
ucugaaauggggcugaagcacu

SEQ ID NO: 680311 - RNA, 22 nt, Human
gaggguggccuuuagagcccau

SEQ ID NO: 680312 - RNA, 22 nt, Human
ugcuccagugccugccccacag

SEQ ID NO: 680313 - RNA, 22 nt, Human
cagcucccuauggugaggcgac

SEQ ID NO: 680314 - RNA, 22 nt, Human
uuucccucugugccagcuucuc

SEQ ID NO: 680315 - RNA, 22 nt, Human
uucucuugugccaaguuguugc

SEQ ID NO: 680316 - RNA, 22 nt, Human
cuggacaucagugugccuggcu

SEQ ID NO: 680317 - RNA, 22 nt, Human
accagcucagagcaggcuccug

SEQ ID NO: 680318 - RNA, 22 nt, Human
uauuugcuccuuaggcauauuu

SEQ ID NO: 680319 - RNA, 18 nt, Human
ggcugcuccucucccuac

SEQ ID NO: 680320 - RNA, 18 nt, Human
gcacauguaagaguaaag

SEQ ID NO: 680321 - RNA, 22 nt, Human
uggaugagauuaaagugagguu

SEQ ID NO: 680322 - RNA, 22 nt, Human
agggagucaacacaguaauguu

SEQ ID NO: 680323 - RNA, 22 nt, Human
acacuuaaucuuacugaggauc

SEQ ID NO: 680324 - RNA, 22 nt, Human
agagccaggccaggccggggca

SEQ ID NO: 680325 - RNA, 22 nt, Human
agccuggcacugccccauccau

SEQ ID NO: 680326 - RNA, 22 nt, Human
ugacaugaaacuguguugcuac

SEQ ID NO: 680327 - RNA, 22 nt, Human
cuauucuagauuacaguauaaa

SEQ ID NO: 680328 - RNA, 22 nt, Human
uccuucaagaugccacagcuuu

SEQ ID NO: 680329 - RNA, 22 nt, Human
ugcuuccagccuucccaaugcu

SEQ ID NO: 680330 - RNA, 22 nt, Human
ggcccagccuugggguuucuuu

SEQ ID NO: 680331 - RNA, 22 nt, Human
ucagcucuguguacaguuagca

SEQ ID NO: 680332 - RNA, 22 nt, Human
gccagagagacugauacaugcu

SEQ ID NO: 680333 - RNA, 22 nt, Human
agaaugggggcuacaggccaca

SEQ ID NO: 680334 - RNA, 22 nt, Human
agaaacuaagucauaacucuuu

SEQ ID NO: 680335 - RNA, 22 nt, Human
gcucuguacgcaggaugagggg

SEQ ID NO: 680336 - RNA, 22 nt, Human
agcacagauguacuuugagggg

SEQ ID NO: 680337 - RNA, 22 nt, Human
uucuuggaugcccucaugccuu

SEQ ID NO: 680338 - RNA, 22 nt, Human
cucuauuuuucuuggcuagugu

SEQ ID NO: 680339 - RNA, 22 nt, Human
gauggcuucugaaucagggccu

SEQ ID NO: 680340 - RNA, 23 nt, Human
ggagccuggcauaugagacgcau

SEQ ID NO: 680341 - RNA, 22 nt, Human
cccuccagcucaaagcaaccgg

SEQ ID NO: 680342 - RNA, 22 nt, Human
ccaguccuuugagccaguucug

SEQ ID NO: 680343 - RNA, 22 nt, Human
uuauucuguugcuuuuacagua

SEQ ID NO: 680344 - RNA, 22 nt, Human
uggcucagucuggguugacuga

SEQ ID NO: 680345 - RNA, 22 nt, Human
aaauagcuucuaagccuuuuga

SEQ ID NO: 680346 - RNA, 22 nt, Human
cacuguauuauuaggaaugaca

SEQ ID NO: 680347 - RNA, 22 nt, Human
ggccuugggauguggcugcagc

SEQ ID NO: 680348 - RNA, 22 nt, Human
agucagagcaaacuggacagac

SEQ ID NO: 680349 - RNA, 23 nt, Human
aggcuucauccauauuuauugcc

SEQ ID NO: 680350 - RNA, 22 nt, Human
aaucacauuuacauugcuaauu

SEQ ID NO: 680351 - RNA, 23 nt, Human
aacuccugaaucgugagccaucu

SEQ ID NO: 680352 - RNA, 22 nt, Human
gcuccccuugguccuccuggga

SEQ ID NO: 680353 - RNA, 18 nt, Human
uaguggaacugcucuggg

SEQ ID NO: 680354 - RNA, 22 nt, Human
caggcagcugacugucagauau

SEQ ID NO: 680355 - RNA, 22 nt, Human
cacacaguaguaugaggcaaaa

SEQ ID NO: 680356 - RNA, 22 nt, Human
cucugaguuucauuucccuccu

SEQ ID NO: 680357 - RNA, 22 nt, Human
aaacuguuauagcagaaaggac

SEQ ID NO: 680358 - RNA, 22 nt, Human
gauguaaaaacuccuuucgaaa

SEQ ID NO: 680359 - RNA, 22 nt, Human
uaaacagaaugcguaagaagug

SEQ ID NO: 680360 - RNA, 22 nt, Human
ucaggcagagcuguggagcucu

SEQ ID NO: 680361 - RNA, 22 nt, Human
uucugaaugauagucuugaacu

SEQ ID NO: 680362 - RNA, 22 nt, Human
ucaugcuuugguugcuguccuu

SEQ ID NO: 680363 - RNA, 20 nt, Human
auaauuauuuacuuuugugc

SEQ ID NO: 680364 - RNA, 22 nt, Human
aguccagggcucucugugggau

SEQ ID NO: 680365 - RNA, 22 nt, Human
cccaggcuccugcuguguugac

SEQ ID NO: 680366 - RNA, 22 nt, Human
uuccucuguaugcuuugcugcu

SEQ ID NO: 680367 - RNA, 22 nt, Human
ggcucaccauggccucccugcu

SEQ ID NO: 680368 - RNA, 22 nt, Human
uucaagucuuccaugguauucu

SEQ ID NO: 680369 - RNA, 22 nt, Human
acagcaugucuaguuaaauacu

SEQ ID NO: 680370 - RNA, 22 nt, Human
ggcagcaacucauuauuccugu

SEQ ID NO: 680371 - RNA, 22 nt, Human
ggccagcugagcugcugcacag

SEQ ID NO: 680372 - RNA, 22 nt, Human
gcagccacucucauuccacgug

SEQ ID NO: 680373 - RNA, 22 nt, Human
ccauuuuucauaaacuauccaa

SEQ ID NO: 680374 - RNA, 22 nt, Human
ucucccacuggccuuguaugau

SEQ ID NO: 680375 - RNA, 22 nt, Human
uuaagaagguacucaaagaucu

SEQ ID NO: 680376 - RNA, 22 nt, Human
cacucugacacaugaacuugau

SEQ ID NO: 680377 - RNA, 22 nt, Human
ccucugagccugugugcggcac

SEQ ID NO: 680378 - RNA, 21 nt, Human
gugcagaggaauguagggggc

SEQ ID NO: 680379 - RNA, 22 nt, Human
gaaaauuuaauucucuucugug

SEQ ID NO: 680380 - RNA, 22 nt, Human
gcagagccugggggucugcgga

SEQ ID NO: 680381 - RNA, 22 nt, Human
ggaguuggaggcuccagggaac

SEQ ID NO: 680382 - RNA, 22 nt, Human
uauggcuucuuuugcaacuacu

SEQ ID NO: 680383 - RNA, 22 nt, Human
ggcugugcaccauccaccuccc

SEQ ID NO: 680384 - RNA, 22 nt, Human
ccagaucuucuuuucagugucu

SEQ ID NO: 680385 - RNA, 23 nt, Human
augcaacauugccaguaugggca

SEQ ID NO: 680386 - RNA, 22 nt, Human
ccugaaaugacuccagcugagu

SEQ ID NO: 680387 - RNA, 19 nt, Human
caggaacauggagggaggg

SEQ ID NO: 680388 - RNA, 22 nt, Human
aaugaucuacucucauuaucuc

SEQ ID NO: 680389 - RNA, 22 nt, Human
cccaggggagguccucagggaa

SEQ ID NO: 680390 - RNA, 22 nt, Human
uacagaggggacauggaagaca

SEQ ID NO: 680391 - RNA, 22 nt, Human
ugccagaagauucucuaucaga

SEQ ID NO: 680392 - RNA, 22 nt, Human
cugaggaucuaauuauuggguc

SEQ ID NO: 680393 - RNA, 22 nt, Human
aagagacaaugucuuuuggaua

SEQ ID NO: 680394 - RNA, 22 nt, Human
cugggcacagcguugggcucuu

SEQ ID NO: 680395 - RNA, 22 nt, Human
auaaaugugaaaugagcaguua

SEQ ID NO: 680396 - RNA, 22 nt, Human
ucugagcuaauccuguugccga

SEQ ID NO: 680397 - RNA, 22 nt, Human
cacugcuuaguugguaaaugug

SEQ ID NO: 680398 - RNA, 22 nt, Human
gguccugggaagaugcucauga

SEQ ID NO: 680399 - RNA, 22 nt, Human
acucugaaugugcauguaaauc

SEQ ID NO: 680400 - RNA, 22 nt, Human
ggaggcagaacuucccgucagu

SEQ ID NO: 680401 - RNA, 22 nt, Human
cacauuucugugagucaauauu

SEQ ID NO: 680402 - RNA, 22 nt, Human
agaagggcuacacgggcucucc

SEQ ID NO: 680403 - RNA, 20 nt, Human
agcauucauucagcaagccu

SEQ ID NO: 680404 - RNA, 22 nt, Human
cugggccagcaacugcaaugga

SEQ ID NO: 680405 - RNA, 22 nt, Human
ccgggggcgggacgagcuugac

SEQ ID NO: 680406 - RNA, 22 nt, Human
auacuugagguagcaacuuaag

SEQ ID NO: 680407 - RNA, 22 nt, Human
caggcagggagcuggaaaggau

SEQ ID NO: 680408 - RNA, 22 nt, Human
uucaacagacccuucuuucuuu

SEQ ID NO: 680409 - RNA, 22 nt, Human
agagcccugaagcagagcuaaa

SEQ ID NO: 680410 - RNA, 19 nt, Human
uccugaagauuuccucagc

SEQ ID NO: 680411 - RNA, 21 nt, Human
ugguccuucuuuacugccucc

SEQ ID NO: 680412 - RNA, 15 nt, Human
ucugggcugugagca

SEQ ID NO: 680413 - RNA, 22 nt, Human
gcccaaagucacucagcuagga

SEQ ID NO: 680414 - RNA, 22 nt, Human
cuaggcuguaaagagcuaggag

SEQ ID NO: 680415 - RNA, 22 nt, Human
ggucccugccugaggcuggccu

SEQ ID NO: 680416 - RNA, 18 nt, Human
aggccugggaagcugagg

SEQ ID NO: 680417 - RNA, 22 nt, Human
uauguacucuaauuugucucau

SEQ ID NO: 680418 - RNA, 22 nt, Human
acacauuuauggaucgcagaaa

SEQ ID NO: 680419 - RNA, 22 nt, Human
gagagcuguaauagucaugucu

SEQ ID NO: 680420 - RNA, 22 nt, Human
cccccaaggccaggcugagacc

SEQ ID NO: 680421 - RNA, 22 nt, Human
gagggaagaaagaauugaugcg

SEQ ID NO: 680422 - RNA, 22 nt, Human
agcuggcuuugagcugggaggu

SEQ ID NO: 680423 - RNA, 22 nt, Human
auggggcuguucucugcccugc

SEQ ID NO: 680424 - RNA, 22 nt, Human
gaacuaaaagcuaacaucaggc

SEQ ID NO: 680425 - RNA, 18 nt, Human
uggcucuggacuugcucc

SEQ ID NO: 680426 - RNA, 22 nt, Human
ucaggaagggugguccacaggg

SEQ ID NO: 680427 - RNA, 22 nt, Human
gcucuugaccuuggagaacucg

SEQ ID NO: 680428 - RNA, 22 nt, Human
uacaugcuccacuuucuccugu

SEQ ID NO: 680429 - RNA, 22 nt, Human
acagcaguuuagaggacagcca

SEQ ID NO: 680430 - RNA, 22 nt, Human
caagagcucccagaccugggca

SEQ ID NO: 680431 - RNA, 22 nt, Human
augucugucaucuuccaggaag

SEQ ID NO: 680432 - RNA, 18 nt, Human
acagaaauagcugugccu

SEQ ID NO: 680433 - RNA, 22 nt, Human
agaggaaacauagguuuuuaaa

SEQ ID NO: 680434 - RNA, 22 nt, Human
aaacaucaauugcaucucccaa

SEQ ID NO: 680435 - RNA, 22 nt, Human
gcuguccucuuggacucagggc

SEQ ID NO: 680436 - RNA, 22 nt, Human
acauggcaggaaucauguguuu

SEQ ID NO: 680437 - RNA, 22 nt, Human
cucugagcagcggugccgaagu

SEQ ID NO: 680438 - RNA, 22 nt, Human
uucuuggcauuuucccauuugg

SEQ ID NO: 680439 - RNA, 22 nt, Human
uucuccagacccuccugcagac

SEQ ID NO: 680440 - RNA, 22 nt, Human
aagugaguggccuggagaggug

SEQ ID NO: 680441 - RNA, 22 nt, Human
ugugggaaugacgaggaagagg

SEQ ID NO: 680442 - RNA, 22 nt, Human
uaagaaucaguagauauagauu

SEQ ID NO: 680443 - RNA, 22 nt, Human
ggguuccagucugaaacuacag

SEQ ID NO: 680444 - RNA, 22 nt, Human
uacaggguauucaaggguaguu

SEQ ID NO: 680445 - RNA, 21 nt, Human
ucauccauggcuuuugugcuu

SEQ ID NO: 680446 - RNA, 22 nt, Human
ucauucaugaggugcuagugcu

SEQ ID NO: 680447 - RNA, 22 nt, Human
uagauuugugcaagaagggauu

SEQ ID NO: 680448 - RNA, 22 nt, Human
ugacauuuacuauuccugguua

SEQ ID NO: 680449 - RNA, 22 nt, Human
agucaguguucuggguuguaau

SEQ ID NO: 680450 - RNA, 22 nt, Human
agaagcucggguaagcuccauu

SEQ ID NO: 680451 - RNA, 23 nt, Human
auccccugccuugggugaguccc

SEQ ID NO: 680452 - RNA, 20 nt, Human
uggacaggggcauagguugc

SEQ ID NO: 680453 - RNA, 22 nt, Human
uguguuggcugccggcacagga

SEQ ID NO: 680454 - RNA, 22 nt, Human
auucuucaucagagaugcacua

SEQ ID NO: 680455 - RNA, 22 nt, Human
aagcccugggguugcacaaggc

SEQ ID NO: 680456 - RNA, 22 nt, Human
cuggaguucuaugugcuuguga

SEQ ID NO: 680457 - RNA, 22 nt, Human
gagggcugauaaaugcgcaugg

SEQ ID NO: 680458 - RNA, 22 nt, Human
cuuuccaggcugaguuugcuug

SEQ ID NO: 680459 - RNA, 22 nt, Human
gagcccaggaaguggaggcuga

SEQ ID NO: 680460 - RNA, 22 nt, Human
cacugcagaucagaggcugaga

SEQ ID NO: 680461 - RNA, 22 nt, Human
ggaccagagcucgggcuucuca

SEQ ID NO: 680462 - RNA, 20 nt, Human
uuacaaagaggcaucgcuuu

SEQ ID NO: 680463 - RNA, 22 nt, Human
aaguccuuguauacagaaucaa

SEQ ID NO: 680464 - RNA, 22 nt, Human
uugcugcuuucauuuauacagu

SEQ ID NO: 680465 - RNA, 22 nt, Human
auuuaagauugcguauucaugu

SEQ ID NO: 680466 - RNA, 22 nt, Human
aaugcaaagcaagcagagauuu

SEQ ID NO: 680467 - RNA, 18 nt, Human
gucacuguguuucugagc

SEQ ID NO: 680468 - RNA, 22 nt, Human
gucacccacucccugcugcugu

SEQ ID NO: 680469 - RNA, 22 nt, Human
gggcagagacucagaaacagaa

SEQ ID NO: 680470 - RNA, 22 nt, Human
uuggcucuaggaaccaaaguga

SEQ ID NO: 680471 - RNA, 22 nt, Human
uaucagaaaugccuuaaauugg

SEQ ID NO: 680472 - RNA, 22 nt, Human
uauuucacuccgagacucuaug

SEQ ID NO: 680473 - RNA, 17 nt, Human
uuuagaauacaauguuu

SEQ ID NO: 680474 - RNA, 22 nt, Human
ucaggucugggcacaugguaca

SEQ ID NO: 680475 - RNA, 22 nt, Human
uggcagagccuugccaaacucc

SEQ ID NO: 680476 - RNA, 18 nt, Human
gcuuccugaaagcugccc

SEQ ID NO: 680477 - RNA, 22 nt, Human
ccaggaggaugaggggcauaga

SEQ ID NO: 680478 - RNA, 22 nt, Human
agacagcucuggguuccacacu

SEQ ID NO: 680479 - RNA, 22 nt, Human
aggcugcuggcaggcguggacg

SEQ ID NO: 680480 - RNA, 20 nt, Human
ucauggcugcugagagguuc

SEQ ID NO: 680481 - RNA, 22 nt, Human
agcuguuuuccugguuagagac

SEQ ID NO: 680482 - RNA, 22 nt, Human
aggagaucagcuuagggaaggu

SEQ ID NO: 680483 - RNA, 22 nt, Human
ugaguuuugucuugcuagaagu

SEQ ID NO: 680484 - RNA, 22 nt, Human
cagggcaggacagauacauuac

SEQ ID NO: 680485 - RNA, 22 nt, Human
acuucugaagcagagauuuggg

SEQ ID NO: 680486 - RNA, 22 nt, Human
cauuccuggacaaacaucaaaa

SEQ ID NO: 680487 - RNA, 22 nt, Human
acagcagcuaaccccugggcca

SEQ ID NO: 680488 - RNA, 22 nt, Human
acacauccugaccaaguucagg

SEQ ID NO: 680489 - RNA, 22 nt, Human
auugacuuucccuucuccucau

SEQ ID NO: 680490 - RNA, 23 nt, Human
aagcugccuucgcaguuggucug

SEQ ID NO: 680491 - RNA, 22 nt, Human
gcuggcagagacaagaagacua

SEQ ID NO: 680492 - RNA, 22 nt, Human
ugugugggagcacgggcuguug

SEQ ID NO: 680493 - RNA, 22 nt, Human
agaaaggucaaaaucgugacau

SEQ ID NO: 680494 - RNA, 22 nt, Human
gccaccauguagcccauuagag

SEQ ID NO: 680495 - RNA, 22 nt, Human
ugaaacauaaaguuaucuucag

SEQ ID NO: 680496 - RNA, 22 nt, Human
agcagagucuucaagggcaggc

SEQ ID NO: 680497 - RNA, 22 nt, Human
ggggcugagaauucagucucgg

SEQ ID NO: 680498 - RNA, 21 nt, Human
uuggaaucuuaggaguguggg

SEQ ID NO: 680499 - RNA, 22 nt, Human
aggaagcgugggucuggcugga

SEQ ID NO: 680500 - RNA, 22 nt, Human
ucugacaaugaacaaucuauag

SEQ ID NO: 680501 - RNA, 22 nt, Human
uuuguaaccuaaagcaccagau

SEQ ID NO: 680502 - RNA, 22 nt, Human
agcuggccucacugcagaaugc

SEQ ID NO: 680503 - RNA, 22 nt, Human
aggccagacuuuggccaaaucc

SEQ ID NO: 680504 - RNA, 22 nt, Human
agcauacacccuaaacugcuua

SEQ ID NO: 680505 - RNA, 22 nt, Human
ugagagaggaugcccucauauu

SEQ ID NO: 680506 - RNA, 22 nt, Human
gccaggcauucuagaaguagug

SEQ ID NO: 680507 - RNA, 22 nt, Human
acuuccugggcaugcagagucc

SEQ ID NO: 680508 - RNA, 22 nt, Human
guuauguaugagggaaugauua

SEQ ID NO: 680509 - RNA, 19 nt, Human
ggucucagugcagcugcag

SEQ ID NO: 680510 - RNA, 22 nt, Human
uaagagauucuaaagcuacugg

SEQ ID NO: 680511 - RNA, 22 nt, Human
ucacugaaagaaugacauuaug

SEQ ID NO: 680512 - RNA, 22 nt, Human
guucuucaggccauccucccag

SEQ ID NO: 680513 - RNA, 22 nt, Human
uggcugcuagccagagcuucag

SEQ ID NO: 680514 - RNA, 22 nt, Human
gucccucugccugugguucucu

SEQ ID NO: 680515 - RNA, 22 nt, Human
uuugaaaccuaguuauaugacu

SEQ ID NO: 680516 - RNA, 22 nt, Human
ccagaugucccucucagguuug

SEQ ID NO: 680517 - RNA, 22 nt, Human
ccaaggagcugcaggcacuugu

SEQ ID NO: 680518 - RNA, 22 nt, Human
ggcucugggccuccaaggucug

SEQ ID NO: 680519 - RNA, 18 nt, Human
acagugguuugaugugcu

SEQ ID NO: 680520 - RNA, 22 nt, Human
cucuuuguggaacggcaguguc

SEQ ID NO: 680521 - RNA, 18 nt, Human
uuuacucauaggccugac

SEQ ID NO: 680522 - RNA, 22 nt, Human
ccuuuccuuuuuagugugggag

SEQ ID NO: 680523 - RNA, 22 nt, Human
ccuuuucugaaccacuuaaaua

SEQ ID NO: 680524 - RNA, 22 nt, Human
gcugcugccuguagccagggug

SEQ ID NO: 680525 - RNA, 17 nt, Human
aacugcuuuuuuuagcc

SEQ ID NO: 680526 - RNA, 23 nt, Human
cuucuagagucagcuccaaguuu

SEQ ID NO: 680527 - RNA, 22 nt, Human
uguuuucucuugaaaagcaguc

SEQ ID NO: 680528 - RNA, 22 nt, Human
agagcuggagcagccccacugg

SEQ ID NO: 680529 - RNA, 22 nt, Human
aggcauggggcugcagucaggu

SEQ ID NO: 680530 - RNA, 19 nt, Human
cugagagaugcuucacaca

SEQ ID NO: 680531 - RNA, 22 nt, Human
cagagcacugcuuggaggauuu

SEQ ID NO: 680532 - RNA, 22 nt, Human
uggaggugagugugguacagca

SEQ ID NO: 680533 - RNA, 22 nt, Human
agauaaauuccuaagauuucag

SEQ ID NO: 680534 - RNA, 22 nt, Human
ugagcagaggagugacguaggu

SEQ ID NO: 680535 - RNA, 22 nt, Human
uccagacauuuuauagcagucu

SEQ ID NO: 680536 - RNA, 22 nt, Human
cuauuacaaucugcuacuauga

SEQ ID NO: 680537 - RNA, 22 nt, Human
uugaaagaggcaaaguuugauc

SEQ ID NO: 680538 - RNA, 23 nt, Human
caugcaaacacuauugcauuugg

SEQ ID NO: 680539 - RNA, 22 nt, Human
agacacaguguugaaggcuagu

SEQ ID NO: 680540 - RNA, 22 nt, Human
agucacagaaugauggcuccag

SEQ ID NO: 680541 - RNA, 22 nt, Human
augccuguaaucccagugcuuu

SEQ ID NO: 680542 - RNA, 22 nt, Human
ucauccaguucacauggugagu

SEQ ID NO: 680543 - RNA, 22 nt, Human
auuucagaugaccaaauggaaa

SEQ ID NO: 680544 - RNA, 22 nt, Human
uggccucuccuggcagcaucca

SEQ ID NO: 680545 - RNA, 22 nt, Human
augccacauaaccaguucacuu

SEQ ID NO: 680546 - RNA, 22 nt, Human
ggcggccugugggucggccuca

SEQ ID NO: 680547 - RNA, 22 nt, Human
gaacuguguacauuguagauaa

SEQ ID NO: 680548 - RNA, 22 nt, Human
cugaggccugggggcguggacg

SEQ ID NO: 680549 - RNA, 22 nt, Human
agcuaaggaaucagaagagguu

SEQ ID NO: 680550 - RNA, 22 nt, Human
cagguggcuaacggccucauag

SEQ ID NO: 680551 - RNA, 22 nt, Human
uuuuauguaauccuuacugucg

SEQ ID NO: 680552 - RNA, 22 nt, Human
cagcucagugaugccuucacag

SEQ ID NO: 680553 - RNA, 22 nt, Human
gcuucacaggcaaguuaagccu

SEQ ID NO: 680554 - RNA, 19 nt, Human
aggcuucuacccuguccag

SEQ ID NO: 680555 - RNA, 22 nt, Human
uggcagugggaagcuggaaguc

SEQ ID NO: 680556 - RNA, 22 nt, Human
uucaggauuauacucucuuccc

SEQ ID NO: 680557 - RNA, 22 nt, Human
ugugggaugguuuugccagaau

SEQ ID NO: 680558 - RNA, 22 nt, Human
ucagugugaggucuuccacccg

SEQ ID NO: 680559 - RNA, 20 nt, Human
aggagaugauccagagucag

SEQ ID NO: 680560 - RNA, 22 nt, Human
cagccagaggcugcgaggggcc

SEQ ID NO: 680561 - RNA, 22 nt, Human
cagaguggcagucccaggccca

SEQ ID NO: 680562 - RNA, 22 nt, Human
cacaggaaugaacagggaaaga

SEQ ID NO: 680563 - RNA, 22 nt, Human
aggcuucagguuugcuuugcag

SEQ ID NO: 680564 - RNA, 19 nt, Human
ugcucaguggcuaaaagca

SEQ ID NO: 680565 - RNA, 22 nt, Human
cucagaguccccaguggguuug

SEQ ID NO: 680566 - RNA, 22 nt, Human
acacuaguggaaauugauuugu

SEQ ID NO: 680567 - RNA, 22 nt, Human
ugggccacugaggguggucauu

SEQ ID NO: 680568 - RNA, 22 nt, Human
cacuguguaagaagaugggcuu

SEQ ID NO: 680569 - RNA, 23 nt, Human
agaggggagcaucugcuggcuga

SEQ ID NO: 680570 - RNA, 20 nt, Human
caguuuaacuuugagcaguu

SEQ ID NO: 680571 - RNA, 22 nt, Human
ugccauuucuuucaauauucuu

SEQ ID NO: 680572 - RNA, 22 nt, Human
auguuccugguauaucaugacc

SEQ ID NO: 680573 - RNA, 22 nt, Human
cugcagggcuuaccuugcucug

SEQ ID NO: 680574 - RNA, 22 nt, Human
caggcuggaguuaccuuuaggg

SEQ ID NO: 680575 - RNA, 22 nt, Human
auccaaagauggaaagaacuuu

SEQ ID NO: 680576 - RNA, 22 nt, Human
aagucacagaguuggaagucag

SEQ ID NO: 680577 - RNA, 22 nt, Human
auucugucuuuuuaaaauaaua

SEQ ID NO: 680578 - RNA, 21 nt, Human
gucuuucuaccucuauguggc

SEQ ID NO: 680579 - RNA, 22 nt, Human
ucagcugguguuucuucuccuu

SEQ ID NO: 680580 - RNA, 22 nt, Human
ugccugcugcuaagcucuuugu

SEQ ID NO: 680581 - RNA, 22 nt, Human
uuuaucugggauuuugcagucu

SEQ ID NO: 680582 - RNA, 22 nt, Human
uugaagcugccguuuuucucca

SEQ ID NO: 680583 - RNA, 19 nt, Human
gcucagagccaugggggcu

SEQ ID NO: 680584 - RNA, 20 nt, Human
cccugagacgacugagcucc

SEQ ID NO: 680585 - RNA, 22 nt, Human
aucagaaacucuuagagcaggg

SEQ ID NO: 680586 - RNA, 22 nt, Human
uuuaugaacuacagauauaacu

SEQ ID NO: 680587 - RNA, 22 nt, Human
gcuuugcuggaaucaacgaaug

SEQ ID NO: 680588 - RNA, 22 nt, Human
ggcuaggcgggcacauggugga

SEQ ID NO: 680589 - RNA, 22 nt, Human
cauuauuaauucagcacaugcu

SEQ ID NO: 680590 - RNA, 22 nt, Human
aagcaucaacacuauauugaug

SEQ ID NO: 680591 - RNA, 22 nt, Human
gcuggcccagugacccacagug

SEQ ID NO: 680592 - RNA, 22 nt, Human
cugcccugggaguaccuguccu

SEQ ID NO: 680593 - RNA, 22 nt, Human
ucugcuucuccuacuucauggg

SEQ ID NO: 680594 - RNA, 22 nt, Human
aacuuguaggacugcacuguag

SEQ ID NO: 680595 - RNA, 23 nt, Human
uuauugcuuucccugccuuccug

SEQ ID NO: 680596 - RNA, 22 nt, Human
aucuacagccagucugguuugu

SEQ ID NO: 680597 - RNA, 22 nt, Human
cuguccaccuuugauaggcucu

SEQ ID NO: 680598 - RNA, 22 nt, Human
augguguagcugucagucauaa

SEQ ID NO: 680599 - RNA, 22 nt, Human
gugcaaaaggcauugugguuuu

SEQ ID NO: 680600 - RNA, 22 nt, Human
cauuuagacauuugauuugggg

SEQ ID NO: 680601 - RNA, 21 nt, Human
uagcaggauuugguuuauuuu

SEQ ID NO: 680602 - RNA, 22 nt, Human
uuuccacucuggccaccaucuu

SEQ ID NO: 680603 - RNA, 20 nt, Human
aggccaggaaauguaguucu

SEQ ID NO: 680604 - RNA, 22 nt, Human
ucacuuugacagagaaaugaau

SEQ ID NO: 680605 - RNA, 22 nt, Human
cugcagaaaccuuuccugauuu

SEQ ID NO: 680606 - RNA, 18 nt, Human
auuaaggaauucuuuaga

SEQ ID NO: 680607 - RNA, 18 nt, Human
guuuacauuacugaauag

SEQ ID NO: 680608 - RNA, 22 nt, Human
gggagcgggacugcgcaggcuu

SEQ ID NO: 680609 - RNA, 22 nt, Human
caucuuuggagaaacuuccguu

SEQ ID NO: 680610 - RNA, 22 nt, Human
ugagcuguagcagaugcuguug

SEQ ID NO: 680611 - RNA, 22 nt, Human
ucaaauguucccuguacuggcc

SEQ ID NO: 680612 - RNA, 22 nt, Human
acagggcagaaauguugcaucu

SEQ ID NO: 680613 - RNA, 22 nt, Human
cacaguggauugggugaugccc

SEQ ID NO: 680614 - RNA, 22 nt, Human
gcuucuggaggagcugggcuga

SEQ ID NO: 680615 - RNA, 22 nt, Human
ggccccucagcaucugagucag

SEQ ID NO: 680616 - RNA, 22 nt, Human
gaagcagcuaggaucuucauuu

SEQ ID NO: 680617 - RNA, 22 nt, Human
ucuccuaggcuggagugcagug

SEQ ID NO: 680618 - RNA, 22 nt, Human
gacuuaaaggcugaauguagga

SEQ ID NO: 680619 - RNA, 22 nt, Human
uaugcuccaaagacauguugcc

SEQ ID NO: 680620 - RNA, 22 nt, Human
auaaacaguagagaaagguggu

SEQ ID NO: 680621 - RNA, 22 nt, Human
ucaggaagauuaguuuccuacc

SEQ ID NO: 680622 - RNA, 19 nt, Human
gcaucagagcagaaggggu

SEQ ID NO: 680623 - RNA, 22 nt, Human
ugacaguguuggggguaaauuu

SEQ ID NO: 680624 - RNA, 22 nt, Human
acagcuaagggcacaggucacc

SEQ ID NO: 680625 - RNA, 22 nt, Human
caauguuucuuguaaccaguga

SEQ ID NO: 680626 - RNA, 22 nt, Human
ucaggaugacuucaaggaggaa

SEQ ID NO: 680627 - RNA, 22 nt, Human
cauuacagaauauguaaugauc

SEQ ID NO: 680628 - RNA, 22 nt, Human
uagauuaacaguuuuguugaag

SEQ ID NO: 680629 - RNA, 22 nt, Human
aaccuggagcacccucauaucu

SEQ ID NO: 680630 - RNA, 20 nt, Human
cugcugugguccuuuauuuu

SEQ ID NO: 680631 - RNA, 22 nt, Human
gauguacacucagaaaagucau

SEQ ID NO: 680632 - RNA, 22 nt, Human
ucauccagagcuucauaaguaa

SEQ ID NO: 680633 - RNA, 22 nt, Human
agagaugaagggcauuccccag

SEQ ID NO: 680634 - RNA, 22 nt, Human
ugcugccagggcucugcccaca

SEQ ID NO: 680635 - RNA, 22 nt, Human
cugauacacucccuaaaauaua

SEQ ID NO: 680636 - RNA, 20 nt, Human
gcagggcgacacgggggagg

SEQ ID NO: 680637 - RNA, 22 nt, Human
agauaugguuugcauaaauaag

SEQ ID NO: 680638 - RNA, 22 nt, Human
uugaagcaaggcgaaucuugug

SEQ ID NO: 680639 - RNA, 22 nt, Human
cagugaggaugauaauuaaggu

SEQ ID NO: 680640 - RNA, 22 nt, Human
ugggaugagaagugcgaggguu

SEQ ID NO: 680641 - RNA, 22 nt, Human
gccagcaguccugcugugugcc

SEQ ID NO: 680642 - RNA, 19 nt, Human
ccagucuccuugcagcauc

SEQ ID NO: 680643 - RNA, 22 nt, Human
cugggagugucccucugguaau

SEQ ID NO: 680644 - RNA, 19 nt, Human
gcauccauggaggccgcuu

SEQ ID NO: 680645 - RNA, 22 nt, Human
uucagaaaggauaauuggaagg

SEQ ID NO: 680646 - RNA, 19 nt, Human
acacugaauguagaauugg

SEQ ID NO: 680647 - RNA, 22 nt, Human
gagggucccugcucagggccag

SEQ ID NO: 680648 - RNA, 22 nt, Human
caggaggcccggccacagccca

SEQ ID NO: 680649 - RNA, 23 nt, Human
gcugagguccugcugaguggugg

SEQ ID NO: 680650 - RNA, 22 nt, Human
caugcuaaaauaucugaagauu

SEQ ID NO: 680651 - RNA, 22 nt, Human
cuagagcagauugcagaguagg

SEQ ID NO: 680652 - RNA, 22 nt, Human
ggguuccaaugaugagcaagag

SEQ ID NO: 680653 - RNA, 22 nt, Human
cagcuggggcagccacgugcgg

SEQ ID NO: 680654 - RNA, 22 nt, Human
augggcagcugcagcaguggug

SEQ ID NO: 680655 - RNA, 22 nt, Human
aucagaaguugugcaugcaugg

SEQ ID NO: 680656 - RNA, 22 nt, Human
ccuggcucugccguaaccacca

SEQ ID NO: 680657 - RNA, 22 nt, Human
cucuuccaccuccuucaggaga

SEQ ID NO: 680658 - RNA, 22 nt, Human
agcucuuuagagucucccuucu

SEQ ID NO: 680659 - RNA, 22 nt, Human
gguacaaugguucauuuuaugu

SEQ ID NO: 680660 - RNA, 22 nt, Human
ggcagagcuuguuccuucuguu

SEQ ID NO: 680661 - RNA, 22 nt, Human
ugggugccaaccucugguggcc

SEQ ID NO: 680662 - RNA, 22 nt, Human
gaggguggggaauagacugcua

SEQ ID NO: 680663 - RNA, 22 nt, Human
agauggagaccuuggaugaacu

SEQ ID NO: 680664 - RNA, 22 nt, Human
cagagcuuaaaacuccauggaa

SEQ ID NO: 680665 - RNA, 22 nt, Human
uguugacaauaaagucuaccau

SEQ ID NO: 680666 - RNA, 22 nt, Human
acagcuguggccacuugcaucc

SEQ ID NO: 680667 - RNA, 22 nt, Human
caguacuuuucaaccaguauga

SEQ ID NO: 680668 - RNA, 21 nt, Human
uauuugcugccaucuuugagg

SEQ ID NO: 680669 - RNA, 22 nt, Human
cuuucacagcuugaaaaguauu

SEQ ID NO: 680670 - RNA, 22 nt, Human
uacacugugguaaacucaaagu

SEQ ID NO: 680671 - RNA, 22 nt, Human
ugucacuuugccuucuggacuu

SEQ ID NO: 680672 - RNA, 22 nt, Human
acuuucaagaacuucuuuaaug

SEQ ID NO: 680673 - RNA, 22 nt, Human
ugggugagccacaggaguuguc

SEQ ID NO: 680674 - RNA, 22 nt, Human
caguuucuuggaugccaauuuc

SEQ ID NO: 680675 - RNA, 22 nt, Human
gaagacauguggauucuaguuu

SEQ ID NO: 680676 - RNA, 22 nt, Human
cacuuguagaggcauuauucca

SEQ ID NO: 680677 - RNA, 22 nt, Human
cauugcccaguaggaucaccag

SEQ ID NO: 680678 - RNA, 22 nt, Human
aaaggagauaaagggcccuuca

SEQ ID NO: 680679 - RNA, 22 nt, Human
ugucccaguucccaggguugcu

SEQ ID NO: 680680 - RNA, 22 nt, Human
ucccugggcacaaucugcuggc

SEQ ID NO: 680681 - RNA, 22 nt, Human
ugaguacucuucucacuacacc

SEQ ID NO: 680682 - RNA, 22 nt, Human
aguggcugugaaauacauggga

SEQ ID NO: 680683 - RNA, 22 nt, Human
aaagugcagggugcucugguau

SEQ ID NO: 680684 - RNA, 22 nt, Human
acauucaaguuucugcucaugg

SEQ ID NO: 680685 - RNA, 22 nt, Human
gaagaaacugaaagggguuggu

SEQ ID NO: 680686 - RNA, 22 nt, Human
caggcgucacugccacggguau

SEQ ID NO: 680687 - RNA, 20 nt, Human
ugaaggccauuuguuccaga

SEQ ID NO: 680688 - RNA, 22 nt, Human
acccccacggaaggccguacgc

SEQ ID NO: 680689 - RNA, 22 nt, Human
gccuucugaucgcuggacugac

SEQ ID NO: 680690 - RNA, 22 nt, Human
augacacccccacagcauuguu

SEQ ID NO: 680691 - RNA, 22 nt, Human
guuugaaaguucaacaggaaaa

SEQ ID NO: 680692 - RNA, 22 nt, Human
uuauuuauucauucugucuguc

SEQ ID NO: 680693 - RNA, 22 nt, Human
uaaagugcuuaugauaaccaag

SEQ ID NO: 680694 - RNA, 22 nt, Human
ccaggaagguaugggaagaaaa

SEQ ID NO: 680695 - RNA, 22 nt, Human
gcucagugguauucggaaacug

SEQ ID NO: 680696 - RNA, 23 nt, Human
ugguccugccaacggugccccuc

SEQ ID NO: 680697 - RNA, 22 nt, Human
uggaggccaugccagagcccua

SEQ ID NO: 680698 - RNA, 23 nt, Human
aguuuuucugcaugguucuguau

SEQ ID NO: 680699 - RNA, 18 nt, Human
acaggcugugggaauggu

SEQ ID NO: 680700 - RNA, 22 nt, Human
acacuucagcaguaugcuuggg

SEQ ID NO: 680701 - RNA, 22 nt, Human
agcucucuuccagauccacuug

SEQ ID NO: 680702 - RNA, 22 nt, Human
cugccucuauaggaguccacca

SEQ ID NO: 680703 - RNA, 22 nt, Human
ugaugguuuuauuaauaggacc

SEQ ID NO: 680704 - RNA, 22 nt, Human
ggccccagauucugggcugggu

SEQ ID NO: 680705 - RNA, 22 nt, Human
gggcuggaggugagcaggacag

SEQ ID NO: 680706 - RNA, 22 nt, Human
aaacuugauuuagaacuaaggc

SEQ ID NO: 680707 - RNA, 22 nt, Human
uauguggaaaaugcacuuaaaa

SEQ ID NO: 680708 - RNA, 22 nt, Human
auauacuguaggccacuauaag

SEQ ID NO: 680709 - RNA, 22 nt, Human
ggguucccugccuggccacucu

SEQ ID NO: 680710 - RNA, 22 nt, Human
aaagcuuuucaguauguucaug

SEQ ID NO: 680711 - RNA, 22 nt, Human
gccuccugagaagccacaggcu

SEQ ID NO: 680712 - RNA, 22 nt, Human
ucuggggaugagguccagugau

SEQ ID NO: 680713 - RNA, 22 nt, Human
aaaucacugauuaaaguuagaa

SEQ ID NO: 680714 - RNA, 22 nt, Human
uucaugugccagagcugaaaau

SEQ ID NO: 680715 - RNA, 22 nt, Human
gggaggcugccauccuucagga

SEQ ID NO: 680716 - RNA, 22 nt, Human
uucaauucaauucuaaauauau

SEQ ID NO: 680717 - RNA, 20 nt, Human
cagcaaaaugaaaauggauu

SEQ ID NO: 680718 - RNA, 22 nt, Human
ugguccuguagcacuugauuag

SEQ ID NO: 680719 - RNA, 22 nt, Human
cugcuguuucucaaaauuaagu

SEQ ID NO: 680720 - RNA, 22 nt, Human
ugcuauuugugagugucuucgu

SEQ ID NO: 680721 - RNA, 22 nt, Human
guggcucuccauugacauggaa

SEQ ID NO: 680722 - RNA, 22 nt, Human
aggccugagguuccugugcuca

SEQ ID NO: 680723 - RNA, 22 nt, Human
auucaucaacugauagccauag

SEQ ID NO: 680724 - RNA, 21 nt, Human
aggcccuggaggucagagaaa

SEQ ID NO: 680725 - RNA, 22 nt, Human
cagacaaagcggaaacuguuua

SEQ ID NO: 680726 - RNA, 22 nt, Human
aaaugcaaguucauauuuuguu

SEQ ID NO: 680727 - RNA, 22 nt, Human
ccaucuccaaauaccaucacau

SEQ ID NO: 680728 - RNA, 22 nt, Human
auccugcugcuguggacuucuc

SEQ ID NO: 680729 - RNA, 22 nt, Human
ucacaauacucacucaauggcu

SEQ ID NO: 680730 - RNA, 22 nt, Human
gcucagagaaguugugccuggc

SEQ ID NO: 680731 - RNA, 22 nt, Human
agcacuuaaguuaauugaacug

SEQ ID NO: 680732 - RNA, 22 nt, Human
auccauuucuaucuugcugagg

SEQ ID NO: 680733 - RNA, 17 nt, Human
ugcuuucuuccugcccu

SEQ ID NO: 680734 - RNA, 22 nt, Human
auuauuaaagcuacaucaagga

SEQ ID NO: 680735 - RNA, 22 nt, Human
uuguaugaauguauccuaauuu

SEQ ID NO: 680736 - RNA, 22 nt, Human
gcagcugcaauaggcaucaagc

SEQ ID NO: 680737 - RNA, 22 nt, Human
ugauggaaacuuggguaaguca

SEQ ID NO: 680738 - RNA, 22 nt, Human
gagcaugguuccauagguuggu

SEQ ID NO: 680739 - RNA, 22 nt, Human
uccaggccacauggauggcgau

SEQ ID NO: 680740 - RNA, 22 nt, Human
acagcagaucuguggagcuuau

SEQ ID NO: 680741 - RNA, 21 nt, Human
acagacaguccagagaaaaga

SEQ ID NO: 680742 - RNA, 23 nt, Human
gcuugucuagugaauucauaucu

SEQ ID NO: 680743 - RNA, 22 nt, Human
uucacaguggcugugccauuug

SEQ ID NO: 680744 - RNA, 22 nt, Human
uauugcugacuuguucaguguu

SEQ ID NO: 680745 - RNA, 22 nt, Human
ucuuuaauucagcaugaugcgg

SEQ ID NO: 680746 - RNA, 22 nt, Human
uuccccaggugauucucauggc

SEQ ID NO: 680747 - RNA, 22 nt, Human
agacaguaauaaaauagguaag

SEQ ID NO: 680748 - RNA, 22 nt, Human
ggacuugcuaagguggcugaac

SEQ ID NO: 680749 - RNA, 22 nt, Human
ugagccuguggggugacaacca

SEQ ID NO: 680750 - RNA, 22 nt, Human
ucagaaagacgaaacagauggg

SEQ ID NO: 680751 - RNA, 22 nt, Human
uaaacugcuucucucagucugu

SEQ ID NO: 680752 - RNA, 22 nt, Human
cacauacaugcacaccuaaaua

SEQ ID NO: 680753 - RNA, 21 nt, Human
gugcuuuuccuuaauguucuu

SEQ ID NO: 680754 - RNA, 22 nt, Human
acugugcuaucuacugaauuau

SEQ ID NO: 680755 - RNA, 22 nt, Human
agaccaugggcucugaagagca

SEQ ID NO: 680756 - RNA, 19 nt, Human
agcuucuuuggaaacauuu

SEQ ID NO: 680757 - RNA, 22 nt, Human
uguguacagcaugguccagcag

SEQ ID NO: 680758 - RNA, 22 nt, Human
gggcucucaaggcagggcccca

SEQ ID NO: 680759 - RNA, 22 nt, Human
aggucacacaacugucagaggc

SEQ ID NO: 680760 - RNA, 22 nt, Human
cagcugccaagaaucuuuucua

SEQ ID NO: 680761 - RNA, 22 nt, Human
auggaagcugaaaaagacacgg

SEQ ID NO: 680762 - RNA, 22 nt, Human
ugucuguguccaaauuuccucu

SEQ ID NO: 680763 - RNA, 21 nt, Human
ugaaaguuggagucaaaugua

SEQ ID NO: 680764 - RNA, 22 nt, Human
ugcugccaccugguggcugaag

SEQ ID NO: 680765 - RNA, 22 nt, Human
ggaggcucuccuggccuugucu

SEQ ID NO: 680766 - RNA, 22 nt, Human
ccacugagugagcagagcaggg

SEQ ID NO: 680767 - RNA, 22 nt, Human
cccugcagcauucucuaacugg

SEQ ID NO: 680768 - RNA, 22 nt, Human
caggauccuggcugcauggacg

SEQ ID NO: 680769 - RNA, 22 nt, Human
auuucaguguugguuagcaagc

SEQ ID NO: 680770 - RNA, 22 nt, Human
uacauugagaaccacugcuuag

SEQ ID NO: 680771 - RNA, 22 nt, Human
ugugagcuuaggacagggcuau

SEQ ID NO: 680772 - RNA, 22 nt, Human
gcagguggaagcagcagacuca

SEQ ID NO: 680773 - RNA, 22 nt, Human
aaacaucuucucuugauucuuu

SEQ ID NO: 680774 - RNA, 22 nt, Human
auaaaggcaacaccaggguaug

SEQ ID NO: 680775 - RNA, 22 nt, Human
cuuauucagcacuugcucugua

SEQ ID NO: 680776 - RNA, 22 nt, Human
acuauacaccaaaauauuaagg

SEQ ID NO: 680777 - RNA, 23 nt, Human
uccucagcauguuuugucaugua

SEQ ID NO: 680778 - RNA, 22 nt, Human
cagucccagaagagccugggag

SEQ ID NO: 680779 - RNA, 17 nt, Human
aaucagauuucugagga

SEQ ID NO: 680780 - RNA, 22 nt, Human
cagauguaguagcuuuauugca

SEQ ID NO: 680781 - RNA, 22 nt, Human
ucccugagggcagcucaagucc

SEQ ID NO: 680782 - RNA, 22 nt, Human
ggugggagagcuugcuuugaug

SEQ ID NO: 680783 - RNA, 22 nt, Human
aagagguggaacagcaauucgu

SEQ ID NO: 680784 - RNA, 22 nt, Human
aagggcccauucucucagaaaa

SEQ ID NO: 680785 - RNA, 22 nt, Human
gcugucuucacuuccugguuuc

SEQ ID NO: 680786 - RNA, 22 nt, Human
ucaggaaagaagaugcucagug

SEQ ID NO: 680787 - RNA, 22 nt, Human
gaaaauuucugccacaugugug

SEQ ID NO: 680788 - RNA, 22 nt, Human
uggagugggcaauguaggcaag

SEQ ID NO: 680789 - RNA, 22 nt, Human
guuucgucaggcuuauucuauc

SEQ ID NO: 680790 - RNA, 17 nt, Human
cgagggcuugcuggcuc

SEQ ID NO: 680791 - RNA, 22 nt, Human
cagcaggaaagacaucugagca

SEQ ID NO: 680792 - RNA, 22 nt, Human
gugaagcagggaaggaaaggau

SEQ ID NO: 680793 - RNA, 22 nt, Human
aggcacuuuacaaugugugaca

SEQ ID NO: 680794 - RNA, 22 nt, Human
acagcuuuguguuaaugggaag

SEQ ID NO: 680795 - RNA, 22 nt, Human
gucccuggaaaagagcugguga

SEQ ID NO: 680796 - RNA, 22 nt, Human
agaaugucaacagccucucaag

SEQ ID NO: 680797 - RNA, 22 nt, Human
uguccccagcacucacucucca

SEQ ID NO: 680798 - RNA, 22 nt, Human
cagcaagggauaaagaguuacu

SEQ ID NO: 680799 - RNA, 22 nt, Human
gcccagcuggcuuccagcacau

SEQ ID NO: 680800 - RNA, 22 nt, Human
ucagggaagaaaugggacuuua

SEQ ID NO: 680801 - RNA, 22 nt, Human
cagcuaccaugguuuguuccag

SEQ ID NO: 680802 - RNA, 22 nt, Human
acaugccagccucagcagcagu

SEQ ID NO: 680803 - RNA, 22 nt, Human
cuggcuggccggaggcaucccu

SEQ ID NO: 680804 - RNA, 22 nt, Human
gagacagaucucggcuccaugc

SEQ ID NO: 680805 - RNA, 21 nt, Human
uuauacauauguucucugccu

SEQ ID NO: 680806 - RNA, 22 nt, Human
aucccaugagaccacguuggcu

SEQ ID NO: 680807 - RNA, 22 nt, Human
uucucagauauuuacugagcau

SEQ ID NO: 680808 - RNA, 22 nt, Human
agugugucgagggaggguccag

SEQ ID NO: 680809 - RNA, 22 nt, Human
ucugugguggagugggcaugag

SEQ ID NO: 680810 - RNA, 21 nt, Human
agcucacaguucuguccuguc

SEQ ID NO: 680811 - RNA, 22 nt, Human
cagcugcugauggccugacaga

SEQ ID NO: 680812 - RNA, 19 nt, Human
caggacaguuugccaagaa

SEQ ID NO: 680813 - RNA, 22 nt, Human
cccucucagucagagccagaua

SEQ ID NO: 680814 - RNA, 22 nt, Human
uuccaagugucagaucagauuu

SEQ ID NO: 680815 - RNA, 22 nt, Human
uggccuuccuggugacucauga

SEQ ID NO: 680816 - RNA, 22 nt, Human
acagaccuauggcagcugccau

SEQ ID NO: 680817 - RNA, 22 nt, Human
cugcuucugggaugauggagua

SEQ ID NO: 680818 - RNA, 22 nt, Human
uggacaugagcugagugggugu

SEQ ID NO: 680819 - RNA, 22 nt, Human
gaggccacggaagggagcugug

SEQ ID NO: 680820 - RNA, 22 nt, Human
cauaauuauaaacgcaaguuca

SEQ ID NO: 680821 - RNA, 22 nt, Human
uuacagguacuugcugcugaaa

SEQ ID NO: 680822 - RNA, 22 nt, Human
ggagugugggauggagcucagg

SEQ ID NO: 680823 - RNA, 22 nt, Human
gaggcaggcccugaaugaguca

SEQ ID NO: 680824 - RNA, 22 nt, Human
cugggucacccaaaagggccag

SEQ ID NO: 680825 - RNA, 22 nt, Human
gcugcagaucccacccauuccc

SEQ ID NO: 680826 - RNA, 22 nt, Human
augaaaaguucgaucuagaagg

SEQ ID NO: 680827 - RNA, 22 nt, Human
caccacugaauuguucacuuuc

SEQ ID NO: 680828 - RNA, 22 nt, Human
cauggggagacaccuagggaaa

SEQ ID NO: 680829 - RNA, 22 nt, Human
guguccuguuucccugucuaua

SEQ ID NO: 680830 - RNA, 22 nt, Human
auuguucaauguaauaauuuug

SEQ ID NO: 680831 - RNA, 22 nt, Human
augcuccuuggcuucaaagcca

SEQ ID NO: 680832 - RNA, 22 nt, Human
uuauguucagcaucugcuuuau

SEQ ID NO: 680833 - RNA, 22 nt, Human
uugcaaaugugaauaauuacac

SEQ ID NO: 680834 - RNA, 22 nt, Human
auggucuugugagaguaacagu

SEQ ID NO: 680835 - RNA, 22 nt, Human
cggucaggugcagcguuggcac

SEQ ID NO: 680836 - RNA, 22 nt, Human
cagcacaguacaaggcacggau

SEQ ID NO: 680837 - RNA, 23 nt, Human
aucugggcaucuggagugguccu

SEQ ID NO: 680838 - RNA, 19 nt, Human
uuucuguuagaaggauaca

SEQ ID NO: 680839 - RNA, 22 nt, Human
gcauggcuuacagaggcugcag

SEQ ID NO: 680840 - RNA, 22 nt, Human
ggccacaacuugcuccuagccc

SEQ ID NO: 680841 - RNA, 23 nt, Human
uugcagggauggaguucaaaaug

SEQ ID NO: 680842 - RNA, 22 nt, Human
ggggagcuugguuauucaugca

SEQ ID NO: 680843 - RNA, 22 nt, Human
aagucccuggugcuggcugcgc

SEQ ID NO: 680844 - RNA, 22 nt, Human
uuucugcuuucuauccuuguca

SEQ ID NO: 680845 - RNA, 22 nt, Human
ugcauggaguaauugaugcuug

SEQ ID NO: 680846 - RNA, 22 nt, Human
auauuagggucucuaaauucua

SEQ ID NO: 680847 - RNA, 22 nt, Human
cagggcucagaagacagaccuc

SEQ ID NO: 680848 - RNA, 22 nt, Human
agcauuuaccucaaugcaucug

SEQ ID NO: 680849 - RNA, 22 nt, Human
aacagcgucuuuccagcuguuc

SEQ ID NO: 680850 - RNA, 22 nt, Human
uguauucuuaguuuuaaucaga

SEQ ID NO: 680851 - RNA, 20 nt, Human
agcacugucugaccaguggc

SEQ ID NO: 680852 - RNA, 22 nt, Human
ucugagggcuugaggggaagua

SEQ ID NO: 680853 - RNA, 22 nt, Human
aguguuuccugaguguuaucau

SEQ ID NO: 680854 - RNA, 22 nt, Human
acauuguuugagaauacagaug

SEQ ID NO: 680855 - RNA, 22 nt, Human
uggcaugggcaaaccagggaaa

SEQ ID NO: 680856 - RNA, 22 nt, Human
auucuuucaaggaauaguuauu

SEQ ID NO: 680857 - RNA, 20 nt, Human
cuccugugccucucugggcc

SEQ ID NO: 680858 - RNA, 23 nt, Human
gacagagugagaccuugucuuac

SEQ ID NO: 680859 - RNA, 20 nt, Human
agaggcuuucuuguagucag

SEQ ID NO: 680860 - RNA, 22 nt, Human
cucugcuucauccaccacuggc

SEQ ID NO: 680861 - RNA, 22 nt, Human
uagacagauuucuuguuagaca

SEQ ID NO: 680862 - RNA, 22 nt, Human
ugucuguacaaauuuucugugu

SEQ ID NO: 680863 - RNA, 19 nt, Human
ggagccuggagcacgugcc

SEQ ID NO: 680864 - RNA, 22 nt, Human
ugggaguggggcauagaaggua

SEQ ID NO: 680865 - RNA, 22 nt, Human
ccugugucugaccaugcacaug

SEQ ID NO: 680866 - RNA, 22 nt, Human
ccacuguaaccauuaucaccau

SEQ ID NO: 680867 - RNA, 22 nt, Human
uacaaagugagcaaccucuuuu

SEQ ID NO: 680868 - RNA, 22 nt, Human
uuauuguuuggguauaauuuga

SEQ ID NO: 680869 - RNA, 22 nt, Human
guauacauacuucuagauuaaa

SEQ ID NO: 680870 - RNA, 22 nt, Human
ccuuacaccuaaaaugagaguu

SEQ ID NO: 680871 - RNA, 22 nt, Human
caaauguguuuuuucuucuaca

SEQ ID NO: 680872 - RNA, 22 nt, Human
uuucagagaugcagaauucagg

SEQ ID NO: 680873 - RNA, 22 nt, Human
aucccugaaugcuccugacugg

SEQ ID NO: 680874 - RNA, 22 nt, Human
auuaaauuagcaaacugugaaa

SEQ ID NO: 680875 - RNA, 22 nt, Human
uagagcuguaucaaagagccuu

SEQ ID NO: 680876 - RNA, 22 nt, Human
uggcaguggcucagagugcaga

SEQ ID NO: 680877 - RNA, 23 nt, Human
ucauuucagguugcaugguacca

SEQ ID NO: 680878 - RNA, 22 nt, Human
cugccagcagaggccagcgcug

SEQ ID NO: 680879 - RNA, 22 nt, Human
ugagcagagcaggcugcgcccu

SEQ ID NO: 680880 - RNA, 22 nt, Human
cgucugcccgacuguucuucac

SEQ ID NO: 680881 - RNA, 22 nt, Human
ggugccagccuagugcaguggu

SEQ ID NO: 680882 - RNA, 22 nt, Human
ucugggagagucacaggcauug

SEQ ID NO: 680883 - RNA, 22 nt, Human
caggagaaacauaauuuucugg

SEQ ID NO: 680884 - RNA, 22 nt, Human
ucugccugugcuguguuuucau

SEQ ID NO: 680885 - RNA, 22 nt, Human
ugagaagcaguuucaguaagaa

SEQ ID NO: 680886 - RNA, 19 nt, Human
auguaugaggucuucugcu

SEQ ID NO: 680887 - RNA, 22 nt, Human
ggccugagucacaucaggagag

SEQ ID NO: 680888 - RNA, 22 nt, Human
uagggacacugcucaugaguuc

SEQ ID NO: 680889 - RNA, 23 nt, Human
uggcucugugucacauacaggau

SEQ ID NO: 680890 - RNA, 22 nt, Human
agagaugacugauggcugauua

SEQ ID NO: 680891 - RNA, 22 nt, Human
uuacaauguaaggcaugguucu

SEQ ID NO: 680892 - RNA, 21 nt, Human
aaggucuguaaagugacagga

SEQ ID NO: 680893 - RNA, 23 nt, Human
ucauuccacaaauacuuaucuag

SEQ ID NO: 680894 - RNA, 22 nt, Human
gaauguaauagucaguagaaca

SEQ ID NO: 680895 - RNA, 22 nt, Human
uguaagauaugaguacauguaa

SEQ ID NO: 680896 - RNA, 23 nt, Human
auaaugcaaguggugguaaucug

SEQ ID NO: 680897 - RNA, 22 nt, Human
auuagagagagcauauuacugg

SEQ ID NO: 680898 - RNA, 22 nt, Human
auuguauuauaauuaggccaaa

SEQ ID NO: 680899 - RNA, 22 nt, Human
gaaucauucauugcucaauuaa

SEQ ID NO: 680900 - RNA, 22 nt, Human
ugaguaaaaauucuacauuucc

SEQ ID NO: 680901 - RNA, 22 nt, Human
agggcuuguuaacauagagauu

SEQ ID NO: 680902 - RNA, 22 nt, Human
agggcucagaacaaugagugua

SEQ ID NO: 680903 - RNA, 22 nt, Human
aaggggcaugcuuuugccagga

SEQ ID NO: 680904 - RNA, 22 nt, Human
aggcccuggguuagggcccacu

SEQ ID NO: 680905 - RNA, 22 nt, Human
uuuacagugucuuguugacugu

SEQ ID NO: 680906 - RNA, 22 nt, Human
acuggcagaggauagcacuaau

SEQ ID NO: 680907 - RNA, 22 nt, Human
gacagacuaaauggcuguagga

SEQ ID NO: 680908 - RNA, 22 nt, Human
cuggaacaguguuggagcuuga

SEQ ID NO: 680909 - RNA, 22 nt, Human
gcuaggucugugcgcagccgcu

SEQ ID NO: 680910 - RNA, 22 nt, Human
gugcucugccuggggucauggc

SEQ ID NO: 680911 - RNA, 19 nt, Human
caguuuguccagaggggac

SEQ ID NO: 680912 - RNA, 22 nt, Human
gccuggagcccaguguggggcu

SEQ ID NO: 680913 - RNA, 17 nt, Human
gguguauggggagggaa

SEQ ID NO: 680914 - RNA, 22 nt, Human
ucagguuuuucucaaaucaggu

SEQ ID NO: 680915 - RNA, 21 nt, Human
uugcaccaugauaaauucaga

SEQ ID NO: 680916 - RNA, 22 nt, Human
uaaagacacugguuuuaaucau

SEQ ID NO: 680917 - RNA, 22 nt, Human
ugacgucaacugcaaaggccuu

SEQ ID NO: 680918 - RNA, 22 nt, Human
aggcuguguuuaagugguaaug

SEQ ID NO: 680919 - RNA, 22 nt, Human
aacucuuaauuuucaugaaaug

SEQ ID NO: 680920 - RNA, 22 nt, Human
auggcuguuuugugacuucuca

SEQ ID NO: 680921 - RNA, 22 nt, Human
acugggaauggagccugggccu

SEQ ID NO: 680922 - RNA, 22 nt, Human
cagcgcugggguaggagcaccu

SEQ ID NO: 680923 - RNA, 21 nt, Human
accaggcuugugggagggagc

SEQ ID NO: 680924 - RNA, 22 nt, Human
uuaaauuccagccucauaauag

SEQ ID NO: 680925 - RNA, 23 nt, Human
uguuccagauacgccuuuuccuc

SEQ ID NO: 680926 - RNA, 22 nt, Human
ccucacagcaaggauuucagug

SEQ ID NO: 680927 - RNA, 22 nt, Human
cccuagggcuaagcaggacugc

SEQ ID NO: 680928 - RNA, 22 nt, Human
uggagagucucaaggcaggaaa

SEQ ID NO: 680929 - RNA, 22 nt, Human
gccaggaaaagaagcuggugcu

SEQ ID NO: 680930 - RNA, 22 nt, Human
ccaguguuccagagagcugaug

SEQ ID NO: 680931 - RNA, 22 nt, Human
uugcagcugcaguaaauguuca

SEQ ID NO: 680932 - RNA, 22 nt, Human
aagaguuuuuggagugugaguu

SEQ ID NO: 680933 - RNA, 22 nt, Human
ccacagaauucugucuccagga

SEQ ID NO: 680934 - RNA, 19 nt, Human
uuuacaaguucuuuguaug

SEQ ID NO: 680935 - RNA, 22 nt, Human
gaauuguauugauuuuucagag

SEQ ID NO: 680936 - RNA, 22 nt, Human
gccucugggugacgaaagguga

SEQ ID NO: 680937 - RNA, 22 nt, Human
uaucuauaauguuuuacuuccu

SEQ ID NO: 680938 - RNA, 22 nt, Human
ccagugugggcccggccuccuc

SEQ ID NO: 680939 - RNA, 22 nt, Human
cuuuccaggaauccucacagcc

SEQ ID NO: 680940 - RNA, 21 nt, Human
gaaucuuugauuuacauggga

SEQ ID NO: 680941 - RNA, 22 nt, Human
cuucaacuucccuagaugucau

SEQ ID NO: 680942 - RNA, 22 nt, Human
cugccaggccuccgcugucccc

SEQ ID NO: 680943 - RNA, 22 nt, Human
cucccagagaccaagcugagaa

SEQ ID NO: 680944 - RNA, 22 nt, Human
gcugccacgaucucugcuguag

SEQ ID NO: 680945 - RNA, 22 nt, Human
gcagaugcugagauuuauuucu

SEQ ID NO: 680946 - RNA, 23 nt, Human
gcaggugguucgaacagaaguuu

SEQ ID NO: 680947 - RNA, 22 nt, Human
uuugggcugguuugccaugccc

SEQ ID NO: 680948 - RNA, 22 nt, Human
guaaucuguaguaaagcaccau

SEQ ID NO: 680949 - RNA, 21 nt, Human
uccuccuggccaggcggcccc

SEQ ID NO: 680950 - RNA, 22 nt, Human
ucuuugcaguucugauuaaaua

SEQ ID NO: 680951 - RNA, 20 nt, Human
cuuugccuauucucugccug

SEQ ID NO: 680952 - RNA, 22 nt, Human
ucagccagcugugugcuucugc

SEQ ID NO: 680953 - RNA, 22 nt, Human
gaguaauucugguaaaucauug

SEQ ID NO: 680954 - RNA, 22 nt, Human
accugcccagacucagauccua

SEQ ID NO: 680955 - RNA, 22 nt, Human
gaagguuugauccuuauuuaua

SEQ ID NO: 680956 - RNA, 22 nt, Human
gcuucuguggauuggcuggcuu

SEQ ID NO: 680957 - RNA, 22 nt, Human
uguguggcguugcguggcuagg

SEQ ID NO: 680958 - RNA, 22 nt, Human
ggcuggcuugccaagcucaggg

SEQ ID NO: 680959 - RNA, 22 nt, Human
auauguauuuuaacguguaagg

SEQ ID NO: 680960 - RNA, 22 nt, Human
ugcagggaggccccgcagcccu

SEQ ID NO: 680961 - RNA, 22 nt, Human
gucccaggcaggccacuggcag

SEQ ID NO: 680962 - RNA, 22 nt, Human
ucaguugcuaaaugguguagug

SEQ ID NO: 680963 - RNA, 22 nt, Human
gugcagauccugauugcaguuc

SEQ ID NO: 680964 - RNA, 22 nt, Human
ucugaauauguuuaucaucucu

SEQ ID NO: 680965 - RNA, 22 nt, Human
aaaugcagguucuugagccaag

SEQ ID NO: 680966 - RNA, 22 nt, Human
aaaaagucauauucuuguuccu

SEQ ID NO: 680967 - RNA, 22 nt, Human
auucugggugacuacgugauca

SEQ ID NO: 680968 - RNA, 22 nt, Human
ccucagcucuucccugugcaca

SEQ ID NO: 680969 - RNA, 22 nt, Human
uaaaggcuuuuacaggagugca

SEQ ID NO: 680970 - RNA, 22 nt, Human
auccacuccuggaggugcccca

SEQ ID NO: 680971 - RNA, 22 nt, Human
uuucucuugcgauaugcuacac

SEQ ID NO: 680972 - RNA, 22 nt, Human
aauuuauucccgucucugggcu

SEQ ID NO: 680973 - RNA, 22 nt, Human
aucagagacaaaaccagcacuu

SEQ ID NO: 680974 - RNA, 23 nt, Human
augaaaugcuggcucagggaggu

SEQ ID NO: 680975 - RNA, 22 nt, Human
auguccagaguguccuggaaag

SEQ ID NO: 680976 - RNA, 22 nt, Human
caguuaauguccuauacaauag

SEQ ID NO: 680977 - RNA, 22 nt, Human
ugagccagaguggagugugccu

SEQ ID NO: 680978 - RNA, 22 nt, Human
agacauuggcuaaaaguagugu

SEQ ID NO: 680979 - RNA, 22 nt, Human
ucaauaauggcaggauaaauuu

SEQ ID NO: 680980 - RNA, 18 nt, Human
gucugccaacaacuauca

SEQ ID NO: 680981 - RNA, 22 nt, Human
aggaauuccugggaaggcacag

SEQ ID NO: 680982 - RNA, 22 nt, Human
aaacuuauuuuaucacaguuca

SEQ ID NO: 680983 - RNA, 22 nt, Human
gcgaggaggggugcugggcccc

SEQ ID NO: 680984 - RNA, 22 nt, Human
uuucaggaaggugaggcacaug

SEQ ID NO: 680985 - RNA, 22 nt, Human
gaggagccaggaggucucccug

SEQ ID NO: 680986 - RNA, 22 nt, Human
guuuccugacuguggaauuaua

SEQ ID NO: 680987 - RNA, 22 nt, Human
gcacacugugaauuugcauaug

SEQ ID NO: 680988 - RNA, 22 nt, Human
agggaggaguccucaaagucau

SEQ ID NO: 680989 - RNA, 19 nt, Human
cccucuugcacaaagcaaa

SEQ ID NO: 680990 - RNA, 22 nt, Human
acuggggagagucaugccagca

SEQ ID NO: 680991 - RNA, 22 nt, Human
agcauucaaguaauucacuugg

SEQ ID NO: 680992 - RNA, 22 nt, Human
aaugaaugaaccacauauaaca

SEQ ID NO: 680993 - RNA, 21 nt, Human
uucagaaguugagggcagguu

SEQ ID NO: 680994 - RNA, 22 nt, Human
agggccuggaacuggagaccac

SEQ ID NO: 680995 - RNA, 22 nt, Human
ugaggcagcccacuuuccuuag

SEQ ID NO: 680996 - RNA, 22 nt, Human
uuugcauuuguucaaguauuga

SEQ ID NO: 680997 - RNA, 22 nt, Human
uagagaaaagcagggaucagga

SEQ ID NO: 680998 - RNA, 22 nt, Human
uuccugggcaggacgagagucu

SEQ ID NO: 680999 - RNA, 22 nt, Human
ucagggaagagagaucuccuag

SEQ ID NO: 681000 - RNA, 21 nt, Human
aagugccacccacagaugcau

SEQ ID NO: 681001 - RNA, 22 nt, Human
augugucugaccacuguauugg

SEQ ID NO: 681002 - RNA, 22 nt, Human
ucugcuggucaaggcugggucc

SEQ ID NO: 681003 - RNA, 22 nt, Human
cuggaggaauaauggcaucuug

SEQ ID NO: 681004 - RNA, 22 nt, Human
cacucuaagaacacaaaggccc

SEQ ID NO: 681005 - RNA, 22 nt, Human
gugaauaauuuuuuaguauaag

SEQ ID NO: 681006 - RNA, 22 nt, Human
uuuuccugggcuuucuguguaa

SEQ ID NO: 681007 - RNA, 22 nt, Human
uuaaauauuuucagcaggguca

SEQ ID NO: 681008 - RNA, 22 nt, Human
ucacaguacaugauucaguggu

SEQ ID NO: 681009 - RNA, 22 nt, Human
ugaguaauucacaaaacagaug

SEQ ID NO: 681010 - RNA, 22 nt, Human
cugccaccaugccccagcagag

SEQ ID NO: 681011 - RNA, 22 nt, Human
aacaucuucagagaagcuaagu

SEQ ID NO: 681012 - RNA, 22 nt, Human
aggccuguuccuuccugggcac

SEQ ID NO: 681013 - RNA, 22 nt, Human
agccaagcugaucuccugcuga

SEQ ID NO: 681014 - RNA, 16 nt, Human
ccucucuuauuccucc

SEQ ID NO: 681015 - RNA, 22 nt, Human
ggcuucacauagcaaugugagc

SEQ ID NO: 681016 - RNA, 22 nt, Human
uggccaugggauagugcagggg

SEQ ID NO: 681017 - RNA, 22 nt, Human
uggcuggggagccccgacuccc

SEQ ID NO: 681018 - RNA, 22 nt, Human
ugaagcaggugaauggaugucg

SEQ ID NO: 681019 - RNA, 22 nt, Human
cagccuguggcagaggucuaau

SEQ ID NO: 681020 - RNA, 22 nt, Human
cuuauuugagagaaaagaaacu

SEQ ID NO: 681021 - RNA, 22 nt, Human
ggucaggguauaaucaagugag

SEQ ID NO: 681022 - RNA, 22 nt, Human
augagagguuucgucagaggaa

SEQ ID NO: 681023 - RNA, 22 nt, Human
ucacaugcacaucucuggaacc

SEQ ID NO: 681024 - RNA, 22 nt, Human
gcccuuucuucuucuggacugg

SEQ ID NO: 681025 - RNA, 22 nt, Human
gguccuggcagucuuugguugu

SEQ ID NO: 681026 - RNA, 16 nt, Human
gcugcugcuuccugcu

SEQ ID NO: 681027 - RNA, 22 nt, Human
aaauugauuaaaguccgugcuu

SEQ ID NO: 681028 - RNA, 22 nt, Human
uaaagaauaauacccauggagc

SEQ ID NO: 681029 - RNA, 22 nt, Human
aguguuuaaaaauggaaaugca

SEQ ID NO: 681030 - RNA, 18 nt, Human
agcaugagagaggcugug

SEQ ID NO: 681031 - RNA, 22 nt, Human
uacaugcaugucacagaaugaa

SEQ ID NO: 681032 - RNA, 22 nt, Human
gaacuuuaggauuuucacaggu

SEQ ID NO: 681033 - RNA, 22 nt, Human
cagcuuuauuaaugauugucuu

SEQ ID NO: 681034 - RNA, 22 nt, Human
ucaggugguccuaagugccauc

SEQ ID NO: 681035 - RNA, 19 nt, Human
acuggcacacaggggcugc

SEQ ID NO: 681036 - RNA, 22 nt, Human
ugggguaggagucagcgagaga

SEQ ID NO: 681037 - RNA, 22 nt, Human
ucuggcugggugagagcuucuc

SEQ ID NO: 681038 - RNA, 19 nt, Human
auggaaaaugccagacuga

SEQ ID NO: 681039 - RNA, 22 nt, Human
gaccauuugcuaguaaauugca

SEQ ID NO: 681040 - RNA, 22 nt, Human
agcacuagcuuuaagcauucug

SEQ ID NO: 681041 - RNA, 22 nt, Human
ggcaugcaaaugugggugaccu

SEQ ID NO: 681042 - RNA, 22 nt, Human
accagggcacauuccggccaga

SEQ ID NO: 681043 - RNA, 22 nt, Human
uuauuauuggugaguuaaggaa

SEQ ID NO: 681044 - RNA, 20 nt, Human
ucaguuuaaauccuggcuuu

SEQ ID NO: 681045 - RNA, 22 nt, Human
cagugccucaggccagccugca

SEQ ID NO: 681046 - RNA, 22 nt, Human
uugucaagaaaaauggaugaag

SEQ ID NO: 681047 - RNA, 22 nt, Human
ggcuucuccagguacugagcau

SEQ ID NO: 681048 - RNA, 22 nt, Human
uuucuuuccauacauauugcua

SEQ ID NO: 681049 - RNA, 19 nt, Human
gaauguuucugucucuucu

SEQ ID NO: 681050 - RNA, 22 nt, Human
ggaagaaagcacacaaacuuga

SEQ ID NO: 681051 - RNA, 22 nt, Human
gggcuggagagucccacguggg

SEQ ID NO: 681052 - RNA, 19 nt, Human
ucucugcuucucuuggcau

SEQ ID NO: 681053 - RNA, 22 nt, Human
aaaacacugcaaagcugauugg

SEQ ID NO: 681054 - RNA, 22 nt, Human
guggauggcuaguugagaaggg

SEQ ID NO: 681055 - RNA, 22 nt, Human
uaguggaggguguagcugcugg

SEQ ID NO: 681056 - RNA, 22 nt, Human
caaccugaugugcaugccacgg

SEQ ID NO: 681057 - RNA, 22 nt, Human
cccaggcugaugggaugggcca

SEQ ID NO: 681058 - RNA, 22 nt, Human
aaaguucaugguguuauagaaa

SEQ ID NO: 681059 - RNA, 22 nt, Human
uguguaaauggacugugaauua

SEQ ID NO: 681060 - RNA, 22 nt, Human
cauuuaguuuugcaguagcagg

SEQ ID NO: 681061 - RNA, 22 nt, Human
gccuggaguucagccaaguccc

SEQ ID NO: 681062 - RNA, 20 nt, Human
aguaggcaaaggaaagaucu

SEQ ID NO: 681063 - RNA, 22 nt, Human
cugccuugguucccagccagca

SEQ ID NO: 681064 - RNA, 22 nt, Human
ccaaacauuucaaauuuagaga

SEQ ID NO: 681065 - RNA, 22 nt, Human
aggcugccuggcugugagugaa

SEQ ID NO: 681066 - RNA, 22 nt, Human
caggaaauaaaugguaaugcau

SEQ ID NO: 681067 - RNA, 22 nt, Human
cauuucccccucauguugcagc

SEQ ID NO: 681068 - RNA, 22 nt, Human
ucacugaagucuucaaguagga

SEQ ID NO: 681069 - RNA, 19 nt, Human
uugaacacuuucuucaagg

SEQ ID NO: 681070 - RNA, 22 nt, Human
ccagcuugaagaugugcugguu

SEQ ID NO: 681071 - RNA, 22 nt, Human
gccucugcccauccaccaucag

SEQ ID NO: 681072 - RNA, 22 nt, Human
uuucauucauuauacaguagag

SEQ ID NO: 681073 - RNA, 23 nt, Human
acaguuauagcugugaauaacau

SEQ ID NO: 681074 - RNA, 22 nt, Human
caggacagacagaaugccuaac

SEQ ID NO: 681075 - RNA, 22 nt, Human
cagaggucagguuggacauuau

SEQ ID NO: 681076 - RNA, 22 nt, Human
acuguagaggccuggauugagg

SEQ ID NO: 681077 - RNA, 22 nt, Human
agcaggagcugugggaagaugg

SEQ ID NO: 681078 - RNA, 22 nt, Human
cccaggagagaggggauaaagc

SEQ ID NO: 681079 - RNA, 23 nt, Human
uguaacuuugggcauguugcuuc

SEQ ID NO: 681080 - RNA, 22 nt, Human
gcucagagaaagauuagucccu

SEQ ID NO: 681081 - RNA, 21 nt, Human
uccugggggguaggugaguuu

SEQ ID NO: 681082 - RNA, 20 nt, Human
gcagagugugagagggugaa

SEQ ID NO: 681083 - RNA, 22 nt, Human
cuaaaauuaucaagauaauucc

SEQ ID NO: 681084 - RNA, 21 nt, Human
uuucucaccaugguauggaaa

SEQ ID NO: 681085 - RNA, 22 nt, Human
uucguguggagauguuucugca

SEQ ID NO: 681086 - RNA, 22 nt, Human
acacagauuuuacauguuaugc

SEQ ID NO: 681087 - RNA, 22 nt, Human
uuacuuugcuuucucauuacag

SEQ ID NO: 681088 - RNA, 22 nt, Human
gaaagccaucuggcugcuggga

SEQ ID NO: 681089 - RNA, 22 nt, Human
cccaggcugcaugaguccaugg

SEQ ID NO: 681090 - RNA, 22 nt, Human
ugagcaggugagucuagggcag

SEQ ID NO: 681091 - RNA, 22 nt, Human
auguuuccagguucuuccuaug

SEQ ID NO: 681092 - RNA, 22 nt, Human
ucagaacaugaagguuaauuug

SEQ ID NO: 681093 - RNA, 22 nt, Human
caggggcucccugggugccagu

SEQ ID NO: 681094 - RNA, 20 nt, Human
ugacaaagaguaagaggagg

SEQ ID NO: 681095 - RNA, 21 nt, Human
gcucucagcugccugcugguu

SEQ ID NO: 681096 - RNA, 22 nt, Human
uaagagcagaacagcaacauau

SEQ ID NO: 681097 - RNA, 22 nt, Human
acagcucuuaggcagaaccaac

SEQ ID NO: 681098 - RNA, 22 nt, Human
agcucaggcucugcagggacua

SEQ ID NO: 681099 - RNA, 19 nt, Human
guuuuucccagacgaggca

SEQ ID NO: 681100 - RNA, 22 nt, Human
ucuugaagucuuaugguuuaaa

SEQ ID NO: 681101 - RNA, 22 nt, Human
ccucagaggugaacaucagugc

SEQ ID NO: 681102 - RNA, 22 nt, Human
cagagcagaaaccugggugauu

SEQ ID NO: 681103 - RNA, 22 nt, Human
gcuuaaaucccaaugcuagacc

SEQ ID NO: 681104 - RNA, 22 nt, Human
uggacaggugagugacucaggg

SEQ ID NO: 681105 - RNA, 22 nt, Human
uacagagaugugaaaagcucua

SEQ ID NO: 681106 - RNA, 22 nt, Human
gaagcaucagcaauggcuggaa

SEQ ID NO: 681107 - RNA, 22 nt, Human
aggcaggcucaaugcccagucu

SEQ ID NO: 681108 - RNA, 22 nt, Human
uauuugcugacagugcuggagc

SEQ ID NO: 681109 - RNA, 21 nt, Human
cagcuucuucugugaccuggu

SEQ ID NO: 681110 - RNA, 22 nt, Human
uguucuuuggcuucacagcucu

SEQ ID NO: 681111 - RNA, 23 nt, Human
ucagugugcaagaauggagaagc

SEQ ID NO: 681112 - RNA, 23 nt, Human
aggagccaggaaccagcuucccc

SEQ ID NO: 681113 - RNA, 22 nt, Human
acaugaagcaagaaagaugcua

SEQ ID NO: 681114 - RNA, 22 nt, Human
aucuguuauuuacccaucucug

SEQ ID NO: 681115 - RNA, 19 nt, Human
aagagcagggaaagaauug

SEQ ID NO: 681116 - RNA, 22 nt, Human
gaagaggaugacaggagccggu

SEQ ID NO: 681117 - RNA, 22 nt, Human
ucagugugaguaccaugcucag

SEQ ID NO: 681118 - RNA, 22 nt, Human
guguguggaaugcucauuuauu

SEQ ID NO: 681119 - RNA, 22 nt, Human
uauguacaucguugaauucaaa

SEQ ID NO: 681120 - RNA, 22 nt, Human
cugcacagagcagggcagacac

SEQ ID NO: 681121 - RNA, 22 nt, Human
agggagcaugggugaagcaggc

SEQ ID NO: 681122 - RNA, 22 nt, Human
agagccaguuacaacuguggag

SEQ ID NO: 681123 - RNA, 22 nt, Human
ccaucuccaguuuauucuuccu

SEQ ID NO: 681124 - RNA, 23 nt, Human
agcuugcuuuucccaguacugca

SEQ ID NO: 681125 - RNA, 22 nt, Human
gcccagccuccaagcuccaagg

SEQ ID NO: 681126 - RNA, 22 nt, Human
ggucacaaggcagauaauaagg

SEQ ID NO: 681127 - RNA, 22 nt, Human
uuucagaguuaguagagcaugu

SEQ ID NO: 681128 - RNA, 22 nt, Human
aggagcuggccacuaggaugca

SEQ ID NO: 681129 - RNA, 22 nt, Human
gaggagucuaguuuauggcuuc

SEQ ID NO: 681130 - RNA, 22 nt, Human
agcagcauacacaucauguuga

SEQ ID NO: 681131 - RNA, 18 nt, Human
uuuuccuuccaccuugaa

SEQ ID NO: 681132 - RNA, 22 nt, Human
aaugcaguuucauuuguagaau

SEQ ID NO: 681133 - RNA, 22 nt, Human
cacuucaaauauggcuucauga

SEQ ID NO: 681134 - RNA, 22 nt, Human
uuuaugagccucaaaucugagu

SEQ ID NO: 681135 - RNA, 22 nt, Human
ucaaaggagacacaaggagaaa

SEQ ID NO: 681136 - RNA, 22 nt, Human
caggaaccuaaugaaggcucac

SEQ ID NO: 681137 - RNA, 22 nt, Human
aggaaagcuuggcaaacuaaau

SEQ ID NO: 681138 - RNA, 22 nt, Human
cuggcacacagcaggcucucag

SEQ ID NO: 681139 - RNA, 22 nt, Human
ugggccaccugcuuuuuugcau

SEQ ID NO: 681140 - RNA, 22 nt, Human
gugucugcauauucaaacuugu

SEQ ID NO: 681141 - RNA, 22 nt, Human
cccagaggugcuucagaggugc

SEQ ID NO: 681142 - RNA, 22 nt, Human
cuuucugauguaaggaacuagg

SEQ ID NO: 681143 - RNA, 22 nt, Human
ggauugagagcacugguagcug

SEQ ID NO: 681144 - RNA, 22 nt, Human
gcugagaacagagcucugagcu

SEQ ID NO: 681145 - RNA, 22 nt, Human
aaggccaaaguuuucaggcuaa

SEQ ID NO: 681146 - RNA, 21 nt, Human
cauuucaaagagcuggaaauc

SEQ ID NO: 681147 - RNA, 22 nt, Human
aacaaaguacuuuucagugcuu

SEQ ID NO: 681148 - RNA, 22 nt, Human
uugugaaauguuucaaaauagu

SEQ ID NO: 681149 - RNA, 22 nt, Human
uagccaggucacacuguguguu

SEQ ID NO: 681150 - RNA, 22 nt, Human
ccagccccuauccucgcuccac

SEQ ID NO: 681151 - RNA, 22 nt, Human
uuugugaacuuaggcaauuagg

SEQ ID NO: 681152 - RNA, 22 nt, Human
gauaccaaaaucaucuuauagg

SEQ ID NO: 681153 - RNA, 22 nt, Human
auaucaaaauaaacagcaugca

SEQ ID NO: 681154 - RNA, 22 nt, Human
cagagugaaaacugagcucaaa

SEQ ID NO: 681155 - RNA, 22 nt, Human
ugacagggcuagaggcaaugca

SEQ ID NO: 681156 - RNA, 22 nt, Human
gucccugcaucaccacgggacu

SEQ ID NO: 681157 - RNA, 22 nt, Human
gugagagaugcuuucuuaacgc

SEQ ID NO: 681158 - RNA, 22 nt, Human
gggggcggagcacgugaccacg

SEQ ID NO: 681159 - RNA, 22 nt, Human
gaaggccuagggaugcucugcg

SEQ ID NO: 681160 - RNA, 18 nt, Human
aaugcauuuauggagaug

SEQ ID NO: 681161 - RNA, 22 nt, Human
ccugggaacaguggguuggcuc

SEQ ID NO: 681162 - RNA, 22 nt, Human
agccugcuggaccaagcucaug

SEQ ID NO: 681163 - RNA, 16 nt, Human
ccccucaggaaguaca

SEQ ID NO: 681164 - RNA, 22 nt, Human
cuuaacucuacacugcacuuua

SEQ ID NO: 681165 - RNA, 22 nt, Human
ugaagccaaggaugccuuucuc

SEQ ID NO: 681166 - RNA, 22 nt, Human
uucacauuggugauauguuucu

SEQ ID NO: 681167 - RNA, 22 nt, Human
cugugccucaguguccucgagu

SEQ ID NO: 681168 - RNA, 22 nt, Human
ccuccugggacucauuagcacc

SEQ ID NO: 681169 - RNA, 23 nt, Human
cuucacaaucaaaaucaguucug

SEQ ID NO: 681170 - RNA, 20 nt, Human
aucuccugcuaccacccauu

SEQ ID NO: 681171 - RNA, 22 nt, Human
uggaaggggccaggcgcggagu

SEQ ID NO: 681172 - RNA, 22 nt, Human
aaggccaggcagggagcuguga

SEQ ID NO: 681173 - RNA, 22 nt, Human
aucaggauucaguaucuccagc

SEQ ID NO: 681174 - RNA, 22 nt, Human
acuagaaaauuccuagaaacua

SEQ ID NO: 681175 - RNA, 22 nt, Human
uuacaaugagaaaugguuggca

SEQ ID NO: 681176 - RNA, 22 nt, Human
ugcagggaugcuagagguaaga

SEQ ID NO: 681177 - RNA, 20 nt, Human
acucaaaucaccugccucaa

SEQ ID NO: 681178 - RNA, 22 nt, Human
agcauagaauaagcugaaguca

SEQ ID NO: 681179 - RNA, 22 nt, Human
gcagugccuugcuucucugucu

SEQ ID NO: 681180 - RNA, 22 nt, Human
aacauuuauauggguucaugaa

SEQ ID NO: 681181 - RNA, 22 nt, Human
acuugggucaaguagcucacag

SEQ ID NO: 681182 - RNA, 22 nt, Human
ucugaggcccugcaggcagugu

SEQ ID NO: 681183 - RNA, 21 nt, Human
auuuucugugauagcugucuc

SEQ ID NO: 681184 - RNA, 22 nt, Human
aaugauggauuuagacaagcug

SEQ ID NO: 681185 - RNA, 22 nt, Human
agugggagauaacuuaacagcu

SEQ ID NO: 681186 - RNA, 22 nt, Human
gcuuccaucuaugucuucauca

SEQ ID NO: 681187 - RNA, 22 nt, Human
ugcugguccuggagcuggguuc

SEQ ID NO: 681188 - RNA, 22 nt, Human
aaguuacaggagaaagagauca

SEQ ID NO: 681189 - RNA, 22 nt, Human
ucacugugaauguuaucaucuu

SEQ ID NO: 681190 - RNA, 22 nt, Human
ugucccaguuuaucugggacug

SEQ ID NO: 681191 - RNA, 22 nt, Human
augcaggaguuggaaaaaauga

SEQ ID NO: 681192 - RNA, 22 nt, Human
ucaaugucugcggcuagcugga

SEQ ID NO: 681193 - RNA, 22 nt, Human
uuccuguccgcaauggccuggg

SEQ ID NO: 681194 - RNA, 18 nt, Human
acccaggcucaugguccu

SEQ ID NO: 681195 - RNA, 22 nt, Human
ugggagaacacugcucuggaug

SEQ ID NO: 681196 - RNA, 22 nt, Human
gcagaugauguagacagacagu

SEQ ID NO: 681197 - RNA, 22 nt, Human
aucagcugaaaaacaggcagca

SEQ ID NO: 681198 - RNA, 22 nt, Human
aaucagcaggcuucuaaauuuu

SEQ ID NO: 681199 - RNA, 22 nt, Human
guccagagaguaaaggggguaa

SEQ ID NO: 681200 - RNA, 22 nt, Human
cuuuacaggaaaagguggcugu

SEQ ID NO: 681201 - RNA, 23 nt, Human
aauauuccugccauuaaugacuc

SEQ ID NO: 681202 - RNA, 22 nt, Human
uucugccugccccagagaggcc

SEQ ID NO: 681203 - RNA, 23 nt, Human
uguaaacaucacccccuggaguu

SEQ ID NO: 681204 - RNA, 20 nt, Human
uuuagcacauuguacaaaac

SEQ ID NO: 681205 - RNA, 22 nt, Human
aggcagacuuccugcuuggauc

SEQ ID NO: 681206 - RNA, 22 nt, Human
guccagccacccuggaggcacg

SEQ ID NO: 681207 - RNA, 22 nt, Human
agugaccaucuaacgccuguga

SEQ ID NO: 681208 - RNA, 22 nt, Human
acguaguguguuguggaaagag

SEQ ID NO: 681209 - RNA, 22 nt, Human
acccuuugucaagcacagaaga

SEQ ID NO: 681210 - RNA, 22 nt, Human
uuuaauugauucacagucugua

SEQ ID NO: 681211 - RNA, 20 nt, Human
aaagauacuuuuuguaaugg

SEQ ID NO: 681212 - RNA, 22 nt, Human
uuuuucugucucuuacauugca

SEQ ID NO: 681213 - RNA, 22 nt, Human
gcugggcagccuggccgcugcc

SEQ ID NO: 681214 - RNA, 23 nt, Human
uuacuacacaaguaacgauuccc

SEQ ID NO: 681215 - RNA, 22 nt, Human
ucacauaaauuauacaauuuca

SEQ ID NO: 681216 - RNA, 22 nt, Human
uucacauuugaaaggaaagaua

SEQ ID NO: 681217 - RNA, 22 nt, Human
gcuggcaguuuccucaccgagg

SEQ ID NO: 681218 - RNA, 22 nt, Human
ccuggccaguuuccaggcccug

SEQ ID NO: 681219 - RNA, 22 nt, Human
ggcuucaggggucugucugcac

SEQ ID NO: 681220 - RNA, 22 nt, Human
ccugggcucaagugaugguccc

SEQ ID NO: 681221 - RNA, 22 nt, Human
cccccaccguguuccugcucgg

SEQ ID NO: 681222 - RNA, 22 nt, Human
uccuggccuugcuccugaugcc

SEQ ID NO: 681223 - RNA, 22 nt, Human
agaucuuguuaaaugcugccuc

SEQ ID NO: 681224 - RNA, 22 nt, Human
gacaggcuggcaaugcccugcu

SEQ ID NO: 681225 - RNA, 22 nt, Human
ccucaggggugcccacagcugc

SEQ ID NO: 681226 - RNA, 23 nt, Human
uguggcugagaaauugacaacuu

SEQ ID NO: 681227 - RNA, 22 nt, Human
uuaaaagucugaugauuuacau

SEQ ID NO: 681228 - RNA, 22 nt, Human
auucauuugcuauuguguaugg

SEQ ID NO: 681229 - RNA, 21 nt, Human
uuaagaccugcaucaucauua

SEQ ID NO: 681230 - RNA, 22 nt, Human
uguccauggauagagcugcucg

SEQ ID NO: 681231 - RNA, 22 nt, Human
uaaauuauguuccauguccuuu

SEQ ID NO: 681232 - RNA, 22 nt, Human
augaaggcuguguagauggaug

SEQ ID NO: 681233 - RNA, 22 nt, Human
cucagagagggcaccagggcca

SEQ ID NO: 681234 - RNA, 22 nt, Human
agcugagggcaggaugggguga

SEQ ID NO: 681235 - RNA, 22 nt, Human
cagguuggagaucugucuaugg

SEQ ID NO: 681236 - RNA, 22 nt, Human
ucugaggcugucucugggcucc

SEQ ID NO: 681237 - RNA, 22 nt, Human
guguaaacaacagugguuugaa

SEQ ID NO: 681238 - RNA, 21 nt, Human
ugccagcauuaaacagucauu

SEQ ID NO: 681239 - RNA, 22 nt, Human
ccugaguggccaggcagcugug

SEQ ID NO: 681240 - RNA, 22 nt, Human
uuuaugcacacuuagacauggc

SEQ ID NO: 681241 - RNA, 23 nt, Human
ucacuuugauguaauugaaaagc

SEQ ID NO: 681242 - RNA, 22 nt, Human
ucccaggaggugcuuccuagga

SEQ ID NO: 681243 - RNA, 22 nt, Human
gacaagacaccucucuccaucc

SEQ ID NO: 681244 - RNA, 22 nt, Human
gaacuacaguaagaauugaugu

SEQ ID NO: 681245 - RNA, 22 nt, Human
ucacaucuccauguguuguuca

SEQ ID NO: 681246 - RNA, 22 nt, Human
caguucuaucauuuuagagaug

SEQ ID NO: 681247 - RNA, 22 nt, Human
ggagcuguuggcagcuaucuug

SEQ ID NO: 681248 - RNA, 22 nt, Human
caguuuaccuauauguaaauuu

SEQ ID NO: 681249 - RNA, 22 nt, Human
aggggccaccaccaaggaaggu

SEQ ID NO: 681250 - RNA, 22 nt, Human
uucuggaacauagcaagaaguu

SEQ ID NO: 681251 - RNA, 22 nt, Human
ccuggcuguggcggugcucuca

SEQ ID NO: 681252 - RNA, 22 nt, Human
acagaauauuuggcaugcgucu

SEQ ID NO: 681253 - RNA, 20 nt, Human
ucuucagcacuccuuaggua

SEQ ID NO: 681254 - RNA, 22 nt, Human
aggacuguuuuuucuucuaggg

SEQ ID NO: 681255 - RNA, 22 nt, Human
cccuggaguccuggcaguugau

SEQ ID NO: 681256 - RNA, 22 nt, Human
ugggagagcagagaacccucuu

SEQ ID NO: 681257 - RNA, 23 nt, Human
ugcagcucaaagauggguaaaug

SEQ ID NO: 681258 - RNA, 22 nt, Human
uuaucguacgcuucagaaauuu

SEQ ID NO: 681259 - RNA, 22 nt, Human
uuggagaguuaauugacaguua

SEQ ID NO: 681260 - RNA, 22 nt, Human
aacagcagggaugacauggcca

SEQ ID NO: 681261 - RNA, 22 nt, Human
acagcuuuguuuucccugcuga

SEQ ID NO: 681262 - RNA, 22 nt, Human
gaaauauucuugucuuguuuuc

SEQ ID NO: 681263 - RNA, 22 nt, Human
aacacucucuguugguaaggcu

SEQ ID NO: 681264 - RNA, 22 nt, Human
ccaggcauccauugcuuccucu

SEQ ID NO: 681265 - RNA, 22 nt, Human
gcucucuuuuuccagugguggu

SEQ ID NO: 681266 - RNA, 22 nt, Human
gaaaaccaccucccaucaagca

SEQ ID NO: 681267 - RNA, 22 nt, Human
gcauccaggacuauaugaugau

SEQ ID NO: 681268 - RNA, 22 nt, Human
uugaaacuuuucuuggagaaac

SEQ ID NO: 681269 - RNA, 22 nt, Human
ugcaggaaaaauaaauaguguu

SEQ ID NO: 681270 - RNA, 22 nt, Human
cuucagugauauaggcuucucc

SEQ ID NO: 681271 - RNA, 22 nt, Human
guggucccuucuggcccugguc

SEQ ID NO: 681272 - RNA, 22 nt, Human
aauucauauggauaugcuagua

SEQ ID NO: 681273 - RNA, 22 nt, Human
augaucagcaguuuucaguguu

SEQ ID NO: 681274 - RNA, 22 nt, Human
caguccagcucaucaguggcac

SEQ ID NO: 681275 - RNA, 22 nt, Human
uacauaauaaggggcauggugu

SEQ ID NO: 681276 - RNA, 22 nt, Human
ugaagcuuuaggauggguucau

SEQ ID NO: 681277 - RNA, 22 nt, Human
cugugcccaggccccuggggau

SEQ ID NO: 681278 - RNA, 19 nt, Human
ucauugaacauaauuacuu

SEQ ID NO: 681279 - RNA, 22 nt, Human
ccuaagaauuaaugaauacacc

SEQ ID NO: 681280 - RNA, 22 nt, Human
ggccucuguucugcauuccucc

SEQ ID NO: 681281 - RNA, 22 nt, Human
cuggaggaauaaucuccuaccc

SEQ ID NO: 681282 - RNA, 22 nt, Human
cuugcuuuugcugaugauuaag

SEQ ID NO: 681283 - RNA, 22 nt, Human
caugcaguauucaggacaguuc

SEQ ID NO: 681284 - RNA, 22 nt, Human
ccacugcuaacuugcugcagcu

SEQ ID NO: 681285 - RNA, 22 nt, Human
auguacauucuaaguaugugua

SEQ ID NO: 681286 - RNA, 22 nt, Human
guggcuaguuggcagagaacag

SEQ ID NO: 681287 - RNA, 22 nt, Human
acugaauagugcugcauuguac

SEQ ID NO: 681288 - RNA, 22 nt, Human
acaucuguuugagaaaaagaag

SEQ ID NO: 681289 - RNA, 22 nt, Human
aauugcaacagguagacuuuuc

SEQ ID NO: 681290 - RNA, 22 nt, Human
ggcaauuucaugugguuuaaac

SEQ ID NO: 681291 - RNA, 22 nt, Human
cuucuguggauauguucucucu

SEQ ID NO: 681292 - RNA, 22 nt, Human
uagcaaguguuggugaagaugu

SEQ ID NO: 681293 - RNA, 22 nt, Human
cagaggccuauccaguguccau

SEQ ID NO: 681294 - RNA, 22 nt, Human
agguggagugugcagggagagc

SEQ ID NO: 681295 - RNA, 22 nt, Human
ucucagaaggcaagggcugggg

SEQ ID NO: 681296 - RNA, 22 nt, Human
auuugauuuguagauaguguag

SEQ ID NO: 681297 - RNA, 22 nt, Human
agcugcuuguacaugaccacau

SEQ ID NO: 681298 - RNA, 22 nt, Human
auguggcaaugguuagcacugu

SEQ ID NO: 681299 - RNA, 22 nt, Human
aaucagaacgcucgaucuucgg

SEQ ID NO: 681300 - RNA, 22 nt, Human
aggcuccaggcaaaauuucgga

SEQ ID NO: 681301 - RNA, 22 nt, Human
gccagguguccucacagugagg

SEQ ID NO: 681302 - RNA, 22 nt, Human
uggcagcuacagacagagguga

SEQ ID NO: 681303 - RNA, 22 nt, Human
cagauuacuuuguagcagucag

SEQ ID NO: 681304 - RNA, 22 nt, Human
uggagaaggacagccugagaaa

SEQ ID NO: 681305 - RNA, 22 nt, Human
augugcaggauccaggcuccua

SEQ ID NO: 681306 - RNA, 22 nt, Human
uuagagauugguugacagauuu

SEQ ID NO: 681307 - RNA, 22 nt, Human
cagcccugugcggagggcccug

SEQ ID NO: 681308 - RNA, 22 nt, Human
uuaaacagacaguaaaugaaac

SEQ ID NO: 681309 - RNA, 22 nt, Human
ugaaaugagagcacagaauaaa

SEQ ID NO: 681310 - RNA, 22 nt, Human
uggguaggaccagaaaugcacu

SEQ ID NO: 681311 - RNA, 22 nt, Human
gggcaggaugcaguuucagaga

SEQ ID NO: 681312 - RNA, 22 nt, Human
aauggcuuucagcaaggauaga

SEQ ID NO: 681313 - RNA, 22 nt, Human
acaucugaggagaccagccucu

SEQ ID NO: 681314 - RNA, 22 nt, Human
uucacagacauugcagacugaa

SEQ ID NO: 681315 - RNA, 20 nt, Human
gcugagguuucuuccuauau

SEQ ID NO: 681316 - RNA, 22 nt, Human
uuuuacaguuccaugcaaagcg

SEQ ID NO: 681317 - RNA, 22 nt, Human
uccuugaauccuagcauccuau

SEQ ID NO: 681318 - RNA, 22 nt, Human
aggccugucccagcugaggacg

SEQ ID NO: 681319 - RNA, 22 nt, Human
acaguuaagcaguaugaucaca

SEQ ID NO: 681320 - RNA, 21 nt, Human
agcauucaaaagaugccauaa

SEQ ID NO: 681321 - RNA, 22 nt, Human
gcagcuccuuuaggcugcaaag

SEQ ID NO: 681322 - RNA, 22 nt, Human
ugggaggcuuccagaccuugcu

SEQ ID NO: 681323 - RNA, 21 nt, Human
ucaggguucaaaggaacugau

SEQ ID NO: 681324 - RNA, 22 nt, Human
uauguucuaaccuugucuuucc

SEQ ID NO: 681325 - RNA, 22 nt, Human
uagggcugccuauggcuagaua

SEQ ID NO: 681326 - RNA, 22 nt, Human
ggagcauguggggugagcaggg

SEQ ID NO: 681327 - RNA, 22 nt, Human
acacagcuucaaagucuaauuc

SEQ ID NO: 681328 - RNA, 22 nt, Human
uagagagguuugaauuggcugc

SEQ ID NO: 681329 - RNA, 23 nt, Human
aacauacuguuuaauauucacag

SEQ ID NO: 681330 - RNA, 22 nt, Human
cuuaauuacccaaugugguagg

SEQ ID NO: 681331 - RNA, 21 nt, Human
gcagacugcccugcugucccc

SEQ ID NO: 681332 - RNA, 22 nt, Human
aaaucuaggcucauccuggucc

SEQ ID NO: 681333 - RNA, 22 nt, Human
auggccagcaagguagggcaau

SEQ ID NO: 681334 - RNA, 22 nt, Human
gaaggccaguuuugagauaggu

SEQ ID NO: 681335 - RNA, 22 nt, Human
ccagugcgagccugugcuggcc

SEQ ID NO: 681336 - RNA, 22 nt, Human
ugauuauauucuaacuucauaa

SEQ ID NO: 681337 - RNA, 22 nt, Human
ccaggcuccccaggaggcccuu

SEQ ID NO: 681338 - RNA, 22 nt, Human
ucugucaccauucagcuugaau

SEQ ID NO: 681339 - RNA, 22 nt, Human
ccagcugcuugggaaaaugucu

SEQ ID NO: 681340 - RNA, 22 nt, Human
uauggcuuaugcugaacaccug

SEQ ID NO: 681341 - RNA, 21 nt, Human
acugaccacuucugccugucu

SEQ ID NO: 681342 - RNA, 22 nt, Human
agugcagagaccuggucaggca

SEQ ID NO: 681343 - RNA, 18 nt, Human
ugaggccagagugggcau

SEQ ID NO: 681344 - RNA, 22 nt, Human
ccucugugggccgggccugcug

SEQ ID NO: 681345 - RNA, 22 nt, Human
auuccaaacuuaccccagagga

SEQ ID NO: 681346 - RNA, 22 nt, Human
ugagaagcugcuugugcuguau

SEQ ID NO: 681347 - RNA, 21 nt, Human
aggcauggaaauggcacacug

SEQ ID NO: 681348 - RNA, 22 nt, Human
uuggcccuagaugauuaaguug

SEQ ID NO: 681349 - RNA, 21 nt, Human
uggcacagcaagugggcucau

SEQ ID NO: 681350 - RNA, 22 nt, Human
ucaauuaugccauugcaauauu

SEQ ID NO: 681351 - RNA, 22 nt, Human
ccugccugucuuuauccccugu

SEQ ID NO: 681352 - RNA, 22 nt, Human
cuucaaagggucacuauuuauc

SEQ ID NO: 681353 - RNA, 22 nt, Human
aagguacaaaguauuauuuaaa

SEQ ID NO: 681354 - RNA, 22 nt, Human
ggcaccuguguaagaucuggaa

SEQ ID NO: 681355 - RNA, 22 nt, Human
ucauuucagaugcauuuagaau

SEQ ID NO: 681356 - RNA, 22 nt, Human
gaccugaaauuugugguagaac

SEQ ID NO: 681357 - RNA, 18 nt, Human
uucauguuggcuuaggga

SEQ ID NO: 681358 - RNA, 23 nt, Human
agcagugaguaaacagauaggau

SEQ ID NO: 681359 - RNA, 22 nt, Human
uugugugcauaaauucugaugu

SEQ ID NO: 681360 - RNA, 22 nt, Human
cucuagggaagaaugagagccc

SEQ ID NO: 681361 - RNA, 22 nt, Human
gaaaugucaagauauguuugga

SEQ ID NO: 681362 - RNA, 22 nt, Human
gugagccauucuacuccuaacc

SEQ ID NO: 681363 - RNA, 22 nt, Human
gaggccuggagccgccuaggcg

SEQ ID NO: 681364 - RNA, 22 nt, Human
ugacuauuuuuuauagauucca

SEQ ID NO: 681365 - RNA, 22 nt, Human
ccugaguucuuauuuccaguca

SEQ ID NO: 681366 - RNA, 22 nt, Human
ccaggcucaccuggagccccug

SEQ ID NO: 681367 - RNA, 22 nt, Human
gcgggggcggcgcagaccucag

SEQ ID NO: 681368 - RNA, 22 nt, Human
uuaacacugauuguagagacac

SEQ ID NO: 681369 - RNA, 22 nt, Human
aagagggagggcaaaggcacug

SEQ ID NO: 681370 - RNA, 22 nt, Human
acuuugcacuucaauauaacuu

SEQ ID NO: 681371 - RNA, 22 nt, Human
uuuaguuauuguuacaguauga

SEQ ID NO: 681372 - RNA, 22 nt, Human
aaaaaucacuuuuauaggcagc

SEQ ID NO: 681373 - RNA, 21 nt, Human
gagauuuagaaggaucaauuu

SEQ ID NO: 681374 - RNA, 22 nt, Human
acauaugucuauuucauguaaa

SEQ ID NO: 681375 - RNA, 22 nt, Human
ccucccguauauguccugggcu

SEQ ID NO: 681376 - RNA, 22 nt, Human
ugguccuugcuauagagugaua

SEQ ID NO: 681377 - RNA, 22 nt, Human
cuggccucuguguucaccauag

SEQ ID NO: 681378 - RNA, 22 nt, Human
aauguacaaggguuccaguuuu

SEQ ID NO: 681379 - RNA, 22 nt, Human
cagguuccaguugcagggacuu

SEQ ID NO: 681380 - RNA, 22 nt, Human
cugcccugcagcuccacggacu

SEQ ID NO: 681381 - RNA, 19 nt, Human
ucucuauauuuguuucuga

SEQ ID NO: 681382 - RNA, 22 nt, Human
aggccuuuguggagcucauggc

SEQ ID NO: 681383 - RNA, 22 nt, Human
agccagaggaagccuggcccuc

SEQ ID NO: 681384 - RNA, 22 nt, Human
agcccagcuuugaaccauauca

SEQ ID NO: 681385 - RNA, 22 nt, Human
gaaacauaguugagacacugcu

SEQ ID NO: 681386 - RNA, 20 nt, Human
uuuucugugccaagaaaacu

SEQ ID NO: 681387 - RNA, 22 nt, Human
uacaagcugacccugaagauga

SEQ ID NO: 681388 - RNA, 21 nt, Human
auggcucaggccaucaaugga

SEQ ID NO: 681389 - RNA, 22 nt, Human
auuuauguaucuguguagauca

SEQ ID NO: 681390 - RNA, 22 nt, Human
ucgcugaggcugcacggcugcc

SEQ ID NO: 681391 - RNA, 22 nt, Human
guuucauuuacaucuguaggua

SEQ ID NO: 681392 - RNA, 22 nt, Human
gcuuuuuugggaugccugccuu

SEQ ID NO: 681393 - RNA, 22 nt, Human
ugcuauacauguacauauuagu

SEQ ID NO: 681394 - RNA, 22 nt, Human
uugcauugaaaauauauuuuaa

SEQ ID NO: 681395 - RNA, 22 nt, Human
cuucacuggaaucuguaauagu

SEQ ID NO: 681396 - RNA, 22 nt, Human
gggcugcacagaucuucaaggg

SEQ ID NO: 681397 - RNA, 22 nt, Human
ucuaagccaggacugagagacg

SEQ ID NO: 681398 - RNA, 22 nt, Human
gugcucuccagccccacgugga

SEQ ID NO: 681399 - RNA, 22 nt, Human
uacuaaauaguuuaauuccuca

SEQ ID NO: 681400 - RNA, 23 nt, Human
cagaugagguuggcagcaugguc

SEQ ID NO: 681401 - RNA, 18 nt, Human
uaagcaaugacauugcaa

SEQ ID NO: 681402 - RNA, 22 nt, Human
aaaagcaauugcaguucuugcc

SEQ ID NO: 681403 - RNA, 22 nt, Human
cuuuacugccaugcauuuauaa

SEQ ID NO: 681404 - RNA, 19 nt, Human
agaaguuagacauugcaau

SEQ ID NO: 681405 - RNA, 22 nt, Human
ggcugugcccucacauggggca

SEQ ID NO: 681406 - RNA, 22 nt, Human
uagggcugcugcagaugacagg

SEQ ID NO: 681407 - RNA, 22 nt, Human
caagagcuagaaauugguuaga

SEQ ID NO: 681408 - RNA, 22 nt, Human
cuccucucuggaguuaugcaga

SEQ ID NO: 681409 - RNA, 22 nt, Human
ugaggcuugucucagauggggg

SEQ ID NO: 681410 - RNA, 22 nt, Human
aaugagaauguaagugaagaga

SEQ ID NO: 681411 - RNA, 22 nt, Human
ccuggcaguucaucaaauggca

SEQ ID NO: 681412 - RNA, 22 nt, Human
agcuggaaaauccaagaccuug

SEQ ID NO: 681413 - RNA, 22 nt, Human
ugagggcugcuuccagagcuag

SEQ ID NO: 681414 - RNA, 22 nt, Human
gcacugagcuuuggaggagcag

SEQ ID NO: 681415 - RNA, 22 nt, Human
uaucuugagagacaacacagca

SEQ ID NO: 681416 - RNA, 21 nt, Human
agcagaggggacauguuugau

SEQ ID NO: 681417 - RNA, 22 nt, Human
cguguggucccggcaaggcaag

SEQ ID NO: 681418 - RNA, 22 nt, Human
agggucaccaguucauaggcac

SEQ ID NO: 681419 - RNA, 22 nt, Human
cuguuacuaaucuuuucugcua

SEQ ID NO: 681420 - RNA, 22 nt, Human
aguauauugcucuuaaucauag

SEQ ID NO: 681421 - RNA, 22 nt, Human
aaauguucccaauaugaagcug

SEQ ID NO: 681422 - RNA, 22 nt, Human
gacugagggacagggcagugga

SEQ ID NO: 681423 - RNA, 22 nt, Human
gaugcaggauagcuucacccag

SEQ ID NO: 681424 - RNA, 22 nt, Human
agccagugaugaagacucugga

SEQ ID NO: 681425 - RNA, 22 nt, Human
uguuuacuagccaacauggaga

SEQ ID NO: 681426 - RNA, 22 nt, Human
ggcuucaccaggugcaugcaug

SEQ ID NO: 681427 - RNA, 23 nt, Human
acagacaacacugaugagagaaa

SEQ ID NO: 681428 - RNA, 22 nt, Human
aagugccugaccuagccuggag

SEQ ID NO: 681429 - RNA, 22 nt, Human
uugcagcuucuugcaucagaaa

SEQ ID NO: 681430 - RNA, 22 nt, Human
ugcaugcagcauaugaggccuc

SEQ ID NO: 681431 - RNA, 22 nt, Human
acacugacugggacagaagacc

SEQ ID NO: 681432 - RNA, 22 nt, Human
caaguauauuugaacauguaaa

SEQ ID NO: 681433 - RNA, 22 nt, Human
ucucuguagaccugaccagcac

SEQ ID NO: 681434 - RNA, 22 nt, Human
gggcccugcguccggaagucug

SEQ ID NO: 681435 - RNA, 22 nt, Human
gauuucagggugcagaugauga

SEQ ID NO: 681436 - RNA, 22 nt, Human
cccuuccucccaggcuucugug

SEQ ID NO: 681437 - RNA, 19 nt, Human
agcaggccacagggccagc

SEQ ID NO: 681438 - RNA, 22 nt, Human
aaagugauuuaaguaccucagg

SEQ ID NO: 681439 - RNA, 22 nt, Human
cagggccaguucucgcagcagu

SEQ ID NO: 681440 - RNA, 22 nt, Human
acguauauugaaauaucaugag

SEQ ID NO: 681441 - RNA, 22 nt, Human
gaugugugcuuuucgcaguguc

SEQ ID NO: 681442 - RNA, 22 nt, Human
gcagcagcggggccccugcgcg

SEQ ID NO: 681443 - RNA, 22 nt, Human
aggguucagugagguguacucc

SEQ ID NO: 681444 - RNA, 22 nt, Human
caguacaauguugaaaaggagu

SEQ ID NO: 681445 - RNA, 22 nt, Human
cagggucaggaggaucuggcuu

SEQ ID NO: 681446 - RNA, 23 nt, Human
uggcagcuguguaagagaaagca

SEQ ID NO: 681447 - RNA, 22 nt, Human
uauuagaggaaccaagguggag

SEQ ID NO: 681448 - RNA, 22 nt, Human
uggaaauggaucugaugagucu

SEQ ID NO: 681449 - RNA, 22 nt, Human
gagacguggccuuugccugagc

SEQ ID NO: 681450 - RNA, 19 nt, Human
agggagaauuccaagagga

SEQ ID NO: 681451 - RNA, 21 nt, Human
cccugguuccacugucaccgc

SEQ ID NO: 681452 - RNA, 22 nt, Human
gcagcuggugcaaaugucacuc

SEQ ID NO: 681453 - RNA, 18 nt, Human
uccgaggcaccauaaaaa

SEQ ID NO: 681454 - RNA, 22 nt, Human
cuccauggcuuucgcaucugca

SEQ ID NO: 681455 - RNA, 19 nt, Human
uuauucugucagagcacac

SEQ ID NO: 681456 - RNA, 22 nt, Human
gccuguguggaugcgccggugc

SEQ ID NO: 681457 - RNA, 22 nt, Human
aaaguguuuacauugcuauaag

SEQ ID NO: 681458 - RNA, 22 nt, Human
ucccuguggauaucugcagcug

SEQ ID NO: 681459 - RNA, 22 nt, Human
agcccucucuauggcccucuug

SEQ ID NO: 681460 - RNA, 22 nt, Human
uacauuccugggcuccacccua

SEQ ID NO: 681461 - RNA, 22 nt, Human
cacaaaugugcagaaaugugag

SEQ ID NO: 681462 - RNA, 22 nt, Human
cacgcauguggaucagaugaag

SEQ ID NO: 681463 - RNA, 19 nt, Human
uuagggacaugaauucuag

SEQ ID NO: 681464 - RNA, 22 nt, Human
aucaccugcacaaauguguucc

SEQ ID NO: 681465 - RNA, 21 nt, Human
aucccagcacccaggagugca

SEQ ID NO: 681466 - RNA, 22 nt, Human
ucauggaugauagcuucauugc

SEQ ID NO: 681467 - RNA, 22 nt, Human
aggccuuaccauagcuguagca

SEQ ID NO: 681468 - RNA, 22 nt, Human
guggcccugugaacagcgcagu

SEQ ID NO: 681469 - RNA, 22 nt, Human
ccagguccuguuuucaccacag

SEQ ID NO: 681470 - RNA, 22 nt, Human
ggagucugcggcagacacugua

SEQ ID NO: 681471 - RNA, 22 nt, Human
cugaggccagcugcagagcucu

SEQ ID NO: 681472 - RNA, 18 nt, Human
uccagagcuggugcuucu

SEQ ID NO: 681473 - RNA, 22 nt, Human
agcagcucggccagucaccagg

SEQ ID NO: 681474 - RNA, 22 nt, Human
cugucguguucacuguggccua

SEQ ID NO: 681475 - RNA, 22 nt, Human
ugucuagugguuuauaaaauca

SEQ ID NO: 681476 - RNA, 22 nt, Human
uccucggcugggccccaggcuu

SEQ ID NO: 681477 - RNA, 22 nt, Human
ucagacuucaguuuuuaguugu

SEQ ID NO: 681478 - RNA, 22 nt, Human
uuuauugcuagcccuuggucca

SEQ ID NO: 681479 - RNA, 19 nt, Human
ggcuccuggggcucagccc

SEQ ID NO: 681480 - RNA, 22 nt, Human
ucuagagauacauuggucauuu

SEQ ID NO: 681481 - RNA, 22 nt, Human
caauguuuucaacugacaagua

SEQ ID NO: 681482 - RNA, 22 nt, Human
uuucuaaguguguuucauagga

SEQ ID NO: 681483 - RNA, 22 nt, Human
agaaaacagaaagucauuggug

SEQ ID NO: 681484 - RNA, 22 nt, Human
cagugucuacaguggcuggagg

SEQ ID NO: 681485 - RNA, 22 nt, Human
aguguaucaugguuggcagaca

SEQ ID NO: 681486 - RNA, 22 nt, Human
cacgacuuguggaggagcgcgg

SEQ ID NO: 681487 - RNA, 22 nt, Human
agcuggcaaggcaauuuggauu

SEQ ID NO: 681488 - RNA, 22 nt, Human
gugcccugguccccagcauaua

SEQ ID NO: 681489 - RNA, 22 nt, Human
aucuuuuugacauggugauggu

SEQ ID NO: 681490 - RNA, 22 nt, Human
guuucccaaauuguucacaggg

SEQ ID NO: 681491 - RNA, 22 nt, Human
uaaaggcaaauguguguuugug

SEQ ID NO: 681492 - RNA, 22 nt, Human
cacccaggagguugggaagggc

SEQ ID NO: 681493 - RNA, 22 nt, Human
aagauucucccugagauauuua

SEQ ID NO: 681494 - RNA, 22 nt, Human
gccagagagagucccugggccu

SEQ ID NO: 681495 - RNA, 22 nt, Human
gaaucaauugugaagacuauga

SEQ ID NO: 681496 - RNA, 22 nt, Human
auggauaacccaguucauuucu

SEQ ID NO: 681497 - RNA, 20 nt, Human
agaguaacuggcacauaggg

SEQ ID NO: 681498 - RNA, 22 nt, Human
ucugucuccugccagugccucu

SEQ ID NO: 681499 - RNA, 22 nt, Human
cucuggcugucccgaugagcag

SEQ ID NO: 681500 - RNA, 22 nt, Human
ggugaacauugaugugguuaca

SEQ ID NO: 681501 - RNA, 22 nt, Human
gggcacuggccgcccaucccug

SEQ ID NO: 681502 - RNA, 22 nt, Human
ucucaggacuuugggaagcuca

SEQ ID NO: 681503 - RNA, 22 nt, Human
gcccucagcuugauguuguucu

SEQ ID NO: 681504 - RNA, 23 nt, Human
uugcacaguguauacacauauuu

SEQ ID NO: 681505 - RNA, 22 nt, Human
accaucagucauugucaguggg

SEQ ID NO: 681506 - RNA, 22 nt, Human
ugaauacuauuucauaaugugg

SEQ ID NO: 681507 - RNA, 22 nt, Human
ccucucggcagcccaucuuguc

SEQ ID NO: 681508 - RNA, 22 nt, Human
gacaggguuugcaaggacuucg

SEQ ID NO: 681509 - RNA, 22 nt, Human
ugacccugcuucuuggugcagg

SEQ ID NO: 681510 - RNA, 22 nt, Human
acagaggccucggccugcccag

SEQ ID NO: 681511 - RNA, 22 nt, Human
uuuugggugaauuugccaguua

SEQ ID NO: 681512 - RNA, 19 nt, Human
ggccuugcucuguggcagc

SEQ ID NO: 681513 - RNA, 22 nt, Human
cagugcagaggugcaagcaugu

SEQ ID NO: 681514 - RNA, 22 nt, Human
gugcagggcagguguccuucca

SEQ ID NO: 681515 - RNA, 22 nt, Human
auacagaauacuaauuccugag

SEQ ID NO: 681516 - RNA, 22 nt, Human
ggcccagcugggcggggacacg

SEQ ID NO: 681517 - RNA, 23 nt, Human
agggagaugccacaaagaugccc

SEQ ID NO: 681518 - RNA, 22 nt, Human
cucaggccuugaagucuuuucu

SEQ ID NO: 681519 - RNA, 22 nt, Human
aauguguaaaugaggagucuug

SEQ ID NO: 681520 - RNA, 22 nt, Human
gacauucagccaauuacuuucu

SEQ ID NO: 681521 - RNA, 22 nt, Human
uaaaacuagugguugggacuaa

SEQ ID NO: 681522 - RNA, 20 nt, Human
gcccaggaucucugaggcau

SEQ ID NO: 681523 - RNA, 22 nt, Human
aucacaguguagaccuuuuaaa

SEQ ID NO: 681524 - RNA, 22 nt, Human
uggaggaaucagggcuuaggcu

SEQ ID NO: 681525 - RNA, 22 nt, Human
auaacuugauguuauuugucca

SEQ ID NO: 681526 - RNA, 22 nt, Human
uuuuggcacugcgucuacaugg

SEQ ID NO: 681527 - RNA, 23 nt, Human
gggagccauggguggucauggag

SEQ ID NO: 681528 - RNA, 22 nt, Human
aggcccugcggaaaugaucauu

SEQ ID NO: 681529 - RNA, 19 nt, Human
gucaggcacgugagagcau

SEQ ID NO: 681530 - RNA, 22 nt, Human
uggcucugagacacaggcucuc

SEQ ID NO: 681531 - RNA, 22 nt, Human
aggaggcugaacuagggucugg

SEQ ID NO: 681532 - RNA, 22 nt, Human
agauggcugggagcucuguuug

SEQ ID NO: 681533 - RNA, 22 nt, Human
uaugucuuguguuugcuaaucu

SEQ ID NO: 681534 - RNA, 22 nt, Human
uucaguuucaaauccugugaag

SEQ ID NO: 681535 - RNA, 18 nt, Human
ggaaggugaugugaaaag

SEQ ID NO: 681536 - RNA, 22 nt, Human
aaggccugaacaugaggagaug

SEQ ID NO: 681537 - RNA, 22 nt, Human
uuucucauuuagaguggcaggg

SEQ ID NO: 681538 - RNA, 22 nt, Human
aaaugugcuaaaguauuaacau

SEQ ID NO: 681539 - RNA, 22 nt, Human
gcucuggguucugauuuaugag

SEQ ID NO: 681540 - RNA, 22 nt, Human
uuacacaguauccaagguucuu

SEQ ID NO: 681541 - RNA, 22 nt, Human
ugcugccugcuacgagggaaga

SEQ ID NO: 681542 - RNA, 22 nt, Human
ucagggcucagugggauagguc

SEQ ID NO: 681543 - RNA, 22 nt, Human
ucaaucaaagccagauguccuu

SEQ ID NO: 681544 - RNA, 22 nt, Human
gcugggcucuuaucaccuguac

SEQ ID NO: 681545 - RNA, 22 nt, Human
cagacaggcuagccagacucac

SEQ ID NO: 681546 - RNA, 22 nt, Human
uacuuucuagcucuccccaguu

SEQ ID NO: 681547 - RNA, 22 nt, Human
agccagggaaggauaacaagaa

SEQ ID NO: 681548 - RNA, 22 nt, Human
gcacaauaacagccaagguuau

SEQ ID NO: 681549 - RNA, 21 nt, Human
ucaggaagagcuucucccacu

SEQ ID NO: 681550 - RNA, 22 nt, Human
uucuggaaauguugcugaggcc

SEQ ID NO: 681551 - RNA, 22 nt, Human
gggcauggugaugugcaccugu

SEQ ID NO: 681552 - RNA, 22 nt, Human
ucuguacauuuggggaccccag

SEQ ID NO: 681553 - RNA, 22 nt, Human
ggcacagcugaugcagacacac

SEQ ID NO: 681554 - RNA, 20 nt, Human
uacaaaccuccacacuggug

SEQ ID NO: 681555 - RNA, 22 nt, Human
uauacaguaucuuuugaaggca

SEQ ID NO: 681556 - RNA, 20 nt, Human
gcugccuguuucuguaagua

SEQ ID NO: 681557 - RNA, 20 nt, Human
uagagagaggauauuaaagu

SEQ ID NO: 681558 - RNA, 22 nt, Human
gagacagagaucuugcugaguc

SEQ ID NO: 681559 - RNA, 22 nt, Human
ccugagccucuugcacgcucag

SEQ ID NO: 681560 - RNA, 22 nt, Human
cugggcugcagcgggagcgacg

SEQ ID NO: 681561 - RNA, 22 nt, Human
gcugcugugugggagacaggcg

SEQ ID NO: 681562 - RNA, 22 nt, Human
uacuuuggaagaguucauacag

SEQ ID NO: 681563 - RNA, 22 nt, Human
uuccaggauagcuuucaggaau

SEQ ID NO: 681564 - RNA, 22 nt, Human
acagcucuguugccagaucugc

SEQ ID NO: 681565 - RNA, 22 nt, Human
gcuuccagcaccagcagagggg

SEQ ID NO: 681566 - RNA, 22 nt, Human
uccuuugguuguagacaggaau

SEQ ID NO: 681567 - RNA, 22 nt, Human
gggcagcaaaucugagucuggu

SEQ ID NO: 681568 - RNA, 22 nt, Human
ucagcauuccugaagacaagca

SEQ ID NO: 681569 - RNA, 20 nt, Human
cucagaaaagcuaaggagaa

SEQ ID NO: 681570 - RNA, 22 nt, Human
aucuacaggauuuuacagaguu

SEQ ID NO: 681571 - RNA, 22 nt, Human
agauaauuauuuacuucaaagu

SEQ ID NO: 681572 - RNA, 22 nt, Human
ccaguucuaaacauaaagcuaa

SEQ ID NO: 681573 - RNA, 22 nt, Human
cugcugugugaccauggacagg

SEQ ID NO: 681574 - RNA, 22 nt, Human
uuuacaagucuguugaucccaa

SEQ ID NO: 681575 - RNA, 22 nt, Human
uggagaagauuggucaccauuc

SEQ ID NO: 681576 - RNA, 22 nt, Human
cagccucugacaccacagucgu

SEQ ID NO: 681577 - RNA, 22 nt, Human
aaaguuguucaguaagaaacuc

SEQ ID NO: 681578 - RNA, 22 nt, Human
gcagcccaagccugagcauccu

SEQ ID NO: 681579 - RNA, 22 nt, Human
uccucagucucuaaggccucag

SEQ ID NO: 681580 - RNA, 22 nt, Human
cagggccucauccucagagauu

SEQ ID NO: 681581 - RNA, 22 nt, Human
ccucugggccagccuggacccu

SEQ ID NO: 681582 - RNA, 22 nt, Human
uuuaaugugacaucuuuuagag

SEQ ID NO: 681583 - RNA, 22 nt, Human
aaaugcuuguauauuucuuggu

SEQ ID NO: 681584 - RNA, 22 nt, Human
ugcuggagcggaggugagccag

SEQ ID NO: 681585 - RNA, 22 nt, Human
auaguauuuccagaaauagucu

SEQ ID NO: 681586 - RNA, 22 nt, Human
cagcuggcguggagugauugca

SEQ ID NO: 681587 - RNA, 22 nt, Human
cuuaagaagcaagucucagcaa

SEQ ID NO: 681588 - RNA, 22 nt, Human
gcauggcuccugucuuacuccc

SEQ ID NO: 681589 - RNA, 22 nt, Human
ugcuccuggcuccuucccuaac

SEQ ID NO: 681590 - RNA, 22 nt, Human
aggugggguucagucucagccg

SEQ ID NO: 681591 - RNA, 22 nt, Human
aaacugcaauuacuuuugcacc

SEQ ID NO: 681592 - RNA, 22 nt, Human
ucuggcagugagcaacuugaca

SEQ ID NO: 681593 - RNA, 22 nt, Human
aaagcauuacuagacuggauuu

SEQ ID NO: 681594 - RNA, 22 nt, Human
ccuccaggcugguuaucagcug

SEQ ID NO: 681595 - RNA, 22 nt, Human
uguaguaagugcgcaauaaaua

SEQ ID NO: 681596 - RNA, 22 nt, Human
auucauaacggcaaaugucacc

SEQ ID NO: 681597 - RNA, 22 nt, Human
aagaugguguggucaaggacca

SEQ ID NO: 681598 - RNA, 22 nt, Human
guacauguugguuguuuccagu

SEQ ID NO: 681599 - RNA, 22 nt, Human
uuugcuuugacugucagcaagu

SEQ ID NO: 681600 - RNA, 22 nt, Human
aagcaugggaaucccacagggu

SEQ ID NO: 681601 - RNA, 22 nt, Human
uaaaguauaagcauuggaguau

SEQ ID NO: 681602 - RNA, 22 nt, Human
uuacaagauaugugagaacuag

SEQ ID NO: 681603 - RNA, 22 nt, Human
uggcucugucaaacugcacaca

SEQ ID NO: 681604 - RNA, 21 nt, Human
ucagggcagugggagguuccu

SEQ ID NO: 681605 - RNA, 22 nt, Human
uccuuaaaugugaucuagauuu

SEQ ID NO: 681606 - RNA, 22 nt, Human
ucuggaaucagaccuaauccca

SEQ ID NO: 681607 - RNA, 22 nt, Human
uguacaccugucuuuacacaua

SEQ ID NO: 681608 - RNA, 22 nt, Human
gauggcuucucucuagcuuggu

SEQ ID NO: 681609 - RNA, 22 nt, Human
ggaaaucaugggagaguuggaa

SEQ ID NO: 681610 - RNA, 18 nt, Human
gaaagaugaacuuuuuuc

SEQ ID NO: 681611 - RNA, 22 nt, Human
ucugguaaccuuuaucccuccu

SEQ ID NO: 681612 - RNA, 22 nt, Human
auguuuuauguuccacucaagg

SEQ ID NO: 681613 - RNA, 21 nt, Human
guguuuccuguuuauggcuug

SEQ ID NO: 681614 - RNA, 17 nt, Human
uagcagcaguaauugug

SEQ ID NO: 681615 - RNA, 22 nt, Human
uauuucauucuuuaucaggagc

SEQ ID NO: 681616 - RNA, 22 nt, Human
ugcagggagggcccagcaaucu

SEQ ID NO: 681617 - RNA, 22 nt, Human
ucugugcugcccaacuucucaa

SEQ ID NO: 681618 - RNA, 22 nt, Human
uagacauuauguauuaaguucu

SEQ ID NO: 681619 - RNA, 22 nt, Human
cuuuucuucucacggcugucag

SEQ ID NO: 681620 - RNA, 22 nt, Human
cuggcccugucagcacagaauc

SEQ ID NO: 681621 - RNA, 22 nt, Human
cacaugaauucacauguauuuu

SEQ ID NO: 681622 - RNA, 22 nt, Human
auuacaguucuacacauccuuu

SEQ ID NO: 681623 - RNA, 22 nt, Human
gugugagggacagagaaagggg

SEQ ID NO: 681624 - RNA, 22 nt, Human
agcaguguuggugggagcaucu

SEQ ID NO: 681625 - RNA, 22 nt, Human
aacuacagcaucuauacaaaua

SEQ ID NO: 681626 - RNA, 19 nt, Human
ucagaacucagaaugugua

SEQ ID NO: 681627 - RNA, 22 nt, Human
aggagcuucagagagaaccugg

SEQ ID NO: 681628 - RNA, 22 nt, Human
uaauacagauacaaaggaggac

SEQ ID NO: 681629 - RNA, 22 nt, Human
cagaaagcuugguacaauaugc

SEQ ID NO: 681630 - RNA, 22 nt, Human
ugaauggauauaacaacagugu

SEQ ID NO: 681631 - RNA, 22 nt, Human
ugggagaaagaacccugaguga

SEQ ID NO: 681632 - RNA, 22 nt, Human
cgcuaggauuaggauuaauccu

SEQ ID NO: 681633 - RNA, 22 nt, Human
cccuggaguccggagcucaccu

SEQ ID NO: 681634 - RNA, 22 nt, Human
cagacagaggcuguaugagggc

SEQ ID NO: 681635 - RNA, 22 nt, Human
ggguuaaaacaggaagaucagc

SEQ ID NO: 681636 - RNA, 20 nt, Human
acacuguucuucacacauuu

SEQ ID NO: 681637 - RNA, 22 nt, Human
uucuuagugguagucaucuuug

SEQ ID NO: 681638 - RNA, 22 nt, Human
cccuugggcuuccacccagccc

SEQ ID NO: 681639 - RNA, 22 nt, Human
aaagauguuaugaaauaacuau

SEQ ID NO: 681640 - RNA, 22 nt, Human
ugucuccugagagcuggacaga

SEQ ID NO: 681641 - RNA, 22 nt, Human
guuuuauaguucgggaccuguu

SEQ ID NO: 681642 - RNA, 23 nt, Human
uggaggcaggaugcuaaggaguc

SEQ ID NO: 681643 - RNA, 22 nt, Human
gaagguccagcguggccaaguc

SEQ ID NO: 681644 - RNA, 22 nt, Human
ccagcccuugagauggaaggga

SEQ ID NO: 681645 - RNA, 22 nt, Human
uaguugaagagaugaaugacca

SEQ ID NO: 681646 - RNA, 22 nt, Human
ucugcugacauuuaugaauaga

SEQ ID NO: 681647 - RNA, 22 nt, Human
ccucuacuuaccacucagccag

SEQ ID NO: 681648 - RNA, 22 nt, Human
auuguaaguagaaauguuaugg

SEQ ID NO: 681649 - RNA, 22 nt, Human
aucauuuuuaagagacucuucu

SEQ ID NO: 681650 - RNA, 22 nt, Human
uaugaaugcuccaguaacuuuc

SEQ ID NO: 681651 - RNA, 22 nt, Human
uaugauaugcacuuuaucagaa

SEQ ID NO: 681652 - RNA, 21 nt, Human
ugacauuuaguagcauuguca

SEQ ID NO: 681653 - RNA, 22 nt, Human
accuagcugaggagugugagug

SEQ ID NO: 681654 - RNA, 22 nt, Human
auaauuuaauuuucacaguggu

SEQ ID NO: 681655 - RNA, 22 nt, Human
aagcaaaggaaagcugacuuuu

SEQ ID NO: 681656 - RNA, 22 nt, Human
ugugguuuacuguggcgcugcu

SEQ ID NO: 681657 - RNA, 22 nt, Human
guaaacaucagccacucuauuu

SEQ ID NO: 681658 - RNA, 22 nt, Human
ccugaggcuuaaucugucccaa

SEQ ID NO: 681659 - RNA, 22 nt, Human
guggucagaauggagcccagga

SEQ ID NO: 681660 - RNA, 22 nt, Human
uuuacaaggcaguuauuuuccu

SEQ ID NO: 681661 - RNA, 22 nt, Human
acuuagcagaguugaauguacu

SEQ ID NO: 681662 - RNA, 22 nt, Human
gagaaagauguaggcugggagg

SEQ ID NO: 681663 - RNA, 20 nt, Human
gaagcagcuucauguagaca

SEQ ID NO: 681664 - RNA, 22 nt, Human
auuugcagauucugucagguuu

SEQ ID NO: 681665 - RNA, 19 nt, Human
ugucuccucaugcaagugu

SEQ ID NO: 681666 - RNA, 20 nt, Human
ugggagaagaacacuggaac

SEQ ID NO: 681667 - RNA, 22 nt, Human
uugauuuguaggaauggagacc

SEQ ID NO: 681668 - RNA, 21 nt, Human
ucacaucuauguuaagcaaac

SEQ ID NO: 681669 - RNA, 22 nt, Human
ucucccaagugaccaggaaaga

SEQ ID NO: 681670 - RNA, 22 nt, Human
uccagcugccaaccgggccccg

SEQ ID NO: 681671 - RNA, 22 nt, Human
cccagaggggucgucugagggg

SEQ ID NO: 681672 - RNA, 22 nt, Human
uguuuacuuuuaauuaccuguc

SEQ ID NO: 681673 - RNA, 22 nt, Human
ucucagccucaccucuauggag

SEQ ID NO: 681674 - RNA, 22 nt, Human
agcccuggcagagccagguagu

SEQ ID NO: 681675 - RNA, 22 nt, Human
ucuuaacuaucauuugaacacc

SEQ ID NO: 681676 - RNA, 22 nt, Human
gcucucucccuaggcaagugag

SEQ ID NO: 681677 - RNA, 22 nt, Human
auugauaaauugcaauggggcu

SEQ ID NO: 681678 - RNA, 22 nt, Human
aucacaaaggguuuucucugag

SEQ ID NO: 681679 - RNA, 22 nt, Human
gggagggaucugcuaggcaaug

SEQ ID NO: 681680 - RNA, 22 nt, Human
uuuccuugccuccuguccuucu

SEQ ID NO: 681681 - RNA, 22 nt, Human
uagaggugucacuuugggaagu

SEQ ID NO: 681682 - RNA, 22 nt, Human
cacacugucuuuaugagcugua

SEQ ID NO: 681683 - RNA, 21 nt, Human
uucauaaaccauucucaugca

SEQ ID NO: 681684 - RNA, 22 nt, Human
aaggccuucuaccaaggcuggg

SEQ ID NO: 681685 - RNA, 22 nt, Human
gaaagcacauacuauaaaucac

SEQ ID NO: 681686 - RNA, 22 nt, Human
uagcugggacuacuggcccugc

SEQ ID NO: 681687 - RNA, 22 nt, Human
gugucuguuauacagaggagac

SEQ ID NO: 681688 - RNA, 23 nt, Human
gaaguucuuucuucucaugcugu

SEQ ID NO: 681689 - RNA, 22 nt, Human
uugcugaaaacaguggguauug

SEQ ID NO: 681690 - RNA, 22 nt, Human
uugaggucuucaggaucaggcu

SEQ ID NO: 681691 - RNA, 22 nt, Human
aguccuggcauggaauuguccc

SEQ ID NO: 681692 - RNA, 22 nt, Human
aggcucugggcucuagauuuug

SEQ ID NO: 681693 - RNA, 22 nt, Human
ucccaagagcucugggauaagg

SEQ ID NO: 681694 - RNA, 22 nt, Human
guggcagagccuugcggcuuug

SEQ ID NO: 681695 - RNA, 22 nt, Human
ucugcugcugaccaacacugug

SEQ ID NO: 681696 - RNA, 22 nt, Human
aaagccauugaacuguacuuua

SEQ ID NO: 681697 - RNA, 22 nt, Human
ucaaaggcugcuugucuucugg

SEQ ID NO: 681698 - RNA, 22 nt, Human
ugcccaagauccuacauccuga

SEQ ID NO: 681699 - RNA, 22 nt, Human
aaauuucaagcaaaguagcuau

SEQ ID NO: 681700 - RNA, 22 nt, Human
cugcagggagaggggacagccu

SEQ ID NO: 681701 - RNA, 17 nt, Human
gcuucuggagcuucugu

SEQ ID NO: 681702 - RNA, 22 nt, Human
cuauuuggauguuagccucagu

SEQ ID NO: 681703 - RNA, 22 nt, Human
uaaaggccagggccugagugcu

SEQ ID NO: 681704 - RNA, 22 nt, Human
cggggcuuggaccagccacccc

SEQ ID NO: 681705 - RNA, 22 nt, Human
uuucuuauacuauauugucauc

SEQ ID NO: 681706 - RNA, 22 nt, Human
uguuaucagagagaggugcugu

SEQ ID NO: 681707 - RNA, 22 nt, Human
uuucuucagagagagcuuuccc

SEQ ID NO: 681708 - RNA, 22 nt, Human
gggguccucggagccugggucu

SEQ ID NO: 681709 - RNA, 22 nt, Human
uguaaugagaaagagagugaau

SEQ ID NO: 681710 - RNA, 21 nt, Human
agcuggcagauauggugucug

SEQ ID NO: 681711 - RNA, 20 nt, Human
ucccucagcacuucuaccuc

SEQ ID NO: 681712 - RNA, 22 nt, Human
acacuggguaacauaucuguua

SEQ ID NO: 681713 - RNA, 22 nt, Human
auucuuaauuccaaagacugag

SEQ ID NO: 681714 - RNA, 22 nt, Human
aacaggcaacaguugacucuga

SEQ ID NO: 681715 - RNA, 22 nt, Human
gcuccuggcuccaggcagccaa

SEQ ID NO: 681716 - RNA, 22 nt, Human
ugagaauuuuuggcagaaacaa

SEQ ID NO: 681717 - RNA, 22 nt, Human
gaagauuugaaacacauagaca

SEQ ID NO: 681718 - RNA, 22 nt, Human
aggucaugauccauuggugagu

SEQ ID NO: 681719 - RNA, 22 nt, Human
gcagugcugaucccauggcaga

SEQ ID NO: 681720 - RNA, 22 nt, Human
cauugcuuauuucagcuaaagu

SEQ ID NO: 681721 - RNA, 22 nt, Human
acauugaauuucacuuuuguac

SEQ ID NO: 681722 - RNA, 22 nt, Human
ggagaaggcgaagucauucuuu

SEQ ID NO: 681723 - RNA, 22 nt, Human
uauucuugucuuuuccagaaau

SEQ ID NO: 681724 - RNA, 20 nt, Human
gcccaagguccagaaggggg

SEQ ID NO: 681725 - RNA, 22 nt, Human
ggccagguaagagugcagccgc

SEQ ID NO: 681726 - RNA, 22 nt, Human
uggacagcuugcagagccaccc

SEQ ID NO: 681727 - RNA, 22 nt, Human
agaagcauuggaccaggggccc

SEQ ID NO: 681728 - RNA, 22 nt, Human
gcuggcugaguucugucgucug

SEQ ID NO: 681729 - RNA, 22 nt, Human
augucuuucgcaucaguagcua

SEQ ID NO: 681730 - RNA, 22 nt, Human
ucaggugggaccugcuaggaca

SEQ ID NO: 681731 - RNA, 22 nt, Human
gcauggaugggaguggacagau

SEQ ID NO: 681732 - RNA, 20 nt, Human
ccagguggugccuggagagg

SEQ ID NO: 681733 - RNA, 22 nt, Human
agugacaugcucucaggcauaa

SEQ ID NO: 681734 - RNA, 22 nt, Human
uagaagcaccacucaucacgug

SEQ ID NO: 681735 - RNA, 22 nt, Human
gucaaacaaauuaacauaucca

SEQ ID NO: 681736 - RNA, 22 nt, Human
gacaguuuaagcaccuaauauu

SEQ ID NO: 681737 - RNA, 22 nt, Human
guuucuuaccacuuggaccucu

SEQ ID NO: 681738 - RNA, 22 nt, Human
ugugugugugcgcgcacgcaua

SEQ ID NO: 681739 - RNA, 22 nt, Human
ggcuuuuguuucagcucugcua

SEQ ID NO: 681740 - RNA, 22 nt, Human
cccucccaagcacucugacaua

SEQ ID NO: 681741 - RNA, 20 nt, Human
cacaggccccaagaccugua

SEQ ID NO: 681742 - RNA, 22 nt, Human
uguuuagacucaaaauugaaag

SEQ ID NO: 681743 - RNA, 22 nt, Human
guucuccauucagcuuccugug

SEQ ID NO: 681744 - RNA, 22 nt, Human
gcagacuggucuucagccuugg

SEQ ID NO: 681745 - RNA, 22 nt, Human
gagucagacagggucacccaga

SEQ ID NO: 681746 - RNA, 22 nt, Human
ggcacugagaacaggcugacuu

SEQ ID NO: 681747 - RNA, 22 nt, Human
gccuggcuggucacugccuggc

SEQ ID NO: 681748 - RNA, 22 nt, Human
ucccugcuuucuugugagggga

SEQ ID NO: 681749 - RNA, 22 nt, Human
agcuccugauucucagagauag

SEQ ID NO: 681750 - RNA, 19 nt, Human
ccaggaccuuuccaggguc

SEQ ID NO: 681751 - RNA, 22 nt, Human
ucaacauacauacauggucagg

SEQ ID NO: 681752 - RNA, 22 nt, Human
ugggacaggaggccucuggaga

SEQ ID NO: 681753 - RNA, 22 nt, Human
ugcauuaugcuacccagaagcu

SEQ ID NO: 681754 - RNA, 22 nt, Human
agcaacagcccugagguucaug

SEQ ID NO: 681755 - RNA, 22 nt, Human
uuggagggucuuccacagccau

SEQ ID NO: 681756 - RNA, 22 nt, Human
gggaggagugaagauucaccug

SEQ ID NO: 681757 - RNA, 18 nt, Human
ugucugcuucuccaacuc

SEQ ID NO: 681758 - RNA, 22 nt, Human
cacuucuguugccuugugcaau

SEQ ID NO: 681759 - RNA, 22 nt, Human
cugucucucuaggacacugggg

SEQ ID NO: 681760 - RNA, 22 nt, Human
gugaggauacuuaagagaacac

SEQ ID NO: 681761 - RNA, 22 nt, Human
cagggcuugaaucaaggaaguc

SEQ ID NO: 681762 - RNA, 21 nt, Human
cuggaucugucaucgaguuuu

SEQ ID NO: 681763 - RNA, 22 nt, Human
uuugucuuggccucaguuuucu

SEQ ID NO: 681764 - RNA, 22 nt, Human
caguccagagcccaccagagga

SEQ ID NO: 681765 - RNA, 22 nt, Human
uagaucauuagcgggggugaga

SEQ ID NO: 681766 - RNA, 22 nt, Human
gcugccuguguggccacucacu

SEQ ID NO: 681767 - RNA, 22 nt, Human
gggcuagaaauucugcagugga

SEQ ID NO: 681768 - RNA, 22 nt, Human
uguccagaucaaugcccacaug

SEQ ID NO: 681769 - RNA, 23 nt, Human
cauguuuuucuaucucagcgugu

SEQ ID NO: 681770 - RNA, 22 nt, Human
acauugaaagcauauuaucucc

SEQ ID NO: 681771 - RNA, 22 nt, Human
aaggcagccuuuugaguugauu

SEQ ID NO: 681772 - RNA, 22 nt, Human
agccuucuaggaugucaucugc

SEQ ID NO: 681773 - RNA, 22 nt, Human
gcucucuuuaaacugcauggcu

SEQ ID NO: 681774 - RNA, 22 nt, Human
caaauguaaauucuuuugaagc

SEQ ID NO: 681775 - RNA, 22 nt, Human
cucuucuugcuagacugagugc

SEQ ID NO: 681776 - RNA, 22 nt, Human
acagaugaggcccaucagucug

SEQ ID NO: 681777 - RNA, 22 nt, Human
ccaggucuaucaaguugggcuc

SEQ ID NO: 681778 - RNA, 20 nt, Human
ugugugcaucuguauguauu

SEQ ID NO: 681779 - RNA, 22 nt, Human
uggggagaggaauuugaaugau

SEQ ID NO: 681780 - RNA, 21 nt, Human
acaaugcauggaacucauggc

SEQ ID NO: 681781 - RNA, 22 nt, Human
guacaauagucccuguuuggau

SEQ ID NO: 681782 - RNA, 18 nt, Human
gguggcggggauggaggu

SEQ ID NO: 681783 - RNA, 22 nt, Human
aucuggaguagaaaaaucgcuu

SEQ ID NO: 681784 - RNA, 22 nt, Human
cugucugcaggauaguacccuc

SEQ ID NO: 681785 - RNA, 22 nt, Human
uccccaggaaauucugauucuu

SEQ ID NO: 681786 - RNA, 22 nt, Human
ggcuccaggguaccccuggaug

SEQ ID NO: 681787 - RNA, 22 nt, Human
ucagaaaagagaaaaucuuaua

SEQ ID NO: 681788 - RNA, 22 nt, Human
aagaguuucugauucaguaggu

SEQ ID NO: 681789 - RNA, 22 nt, Human
agguauuuuauagauaaguaaa

SEQ ID NO: 681790 - RNA, 22 nt, Human
ggcagggcuugucucugugaug

SEQ ID NO: 681791 - RNA, 22 nt, Human
ggggcagagucuggacuguugu

SEQ ID NO: 681792 - RNA, 22 nt, Human
aaugaacaacacugaaggaaga

SEQ ID NO: 681793 - RNA, 22 nt, Human
gcaucuaauccaguccagcauc

SEQ ID NO: 681794 - RNA, 20 nt, Human
cacaagagaauacacacugg

SEQ ID NO: 681795 - RNA, 22 nt, Human
ucuguccauucagaauggcccu

SEQ ID NO: 681796 - RNA, 22 nt, Human
agggacuugaugucagggagau

SEQ ID NO: 681797 - RNA, 17 nt, Human
gugaagagucauugaau

SEQ ID NO: 681798 - RNA, 21 nt, Human
ccacugcucuucccuagggcc

SEQ ID NO: 681799 - RNA, 22 nt, Human
uucauugaaauacagucuugac

SEQ ID NO: 681800 - RNA, 22 nt, Human
uucauuuuuaccgcgugucaaa

SEQ ID NO: 681801 - RNA, 22 nt, Human
uuuccuaagguagugauaauuu

SEQ ID NO: 681802 - RNA, 23 nt, Human
acagggcuuaucugucacucauc

SEQ ID NO: 681803 - RNA, 22 nt, Human
ggagugucagaaacaguguccu

SEQ ID NO: 681804 - RNA, 22 nt, Human
uuccuacauuuguacaauaaga

SEQ ID NO: 681805 - RNA, 22 nt, Human
auagagauggguuuaguuauaa

SEQ ID NO: 681806 - RNA, 22 nt, Human
acugggccuugugugucucauc

SEQ ID NO: 681807 - RNA, 22 nt, Human
cugggaagaagugggcuacauu

SEQ ID NO: 681808 - RNA, 22 nt, Human
cugugggaacacugaggacuuc

SEQ ID NO: 681809 - RNA, 22 nt, Human
cucagaaaggugccauuuaugu

SEQ ID NO: 681810 - RNA, 20 nt, Human
gagcugugcucucaggagcc

SEQ ID NO: 681811 - RNA, 22 nt, Human
uagcagcaaagcaggaucugcu

SEQ ID NO: 681812 - RNA, 20 nt, Human
guacacauauauguaugugu

SEQ ID NO: 681813 - RNA, 22 nt, Human
aggcaguggcugagaccagggg

SEQ ID NO: 681814 - RNA, 22 nt, Human
ugaauccuaauucuaucacuua

SEQ ID NO: 681815 - RNA, 18 nt, Human
gccugggaggaggaaaug

SEQ ID NO: 681816 - RNA, 22 nt, Human
cucauucuuucacagucugugg

SEQ ID NO: 681817 - RNA, 22 nt, Human
ucugagagcuguagaagccuau

SEQ ID NO: 681818 - RNA, 22 nt, Human
gacagcagcauguuuacaggcc

SEQ ID NO: 681819 - RNA, 22 nt, Human
ccucugggcggagaucugcugc

SEQ ID NO: 681820 - RNA, 22 nt, Human
uacaagucauuggaugaggaau

SEQ ID NO: 681821 - RNA, 21 nt, Human
uccagcucuuauguucaugaa

SEQ ID NO: 681822 - RNA, 22 nt, Human
gugaagguggggagccucaguu

SEQ ID NO: 681823 - RNA, 22 nt, Human
cuguauucaagcuucugcccaa

SEQ ID NO: 681824 - RNA, 22 nt, Human
aguggccaauaugucaugcucu

SEQ ID NO: 681825 - RNA, 23 nt, Human
ucucuggccuuugaucagguuga

SEQ ID NO: 681826 - RNA, 22 nt, Human
gaggcuaagcacuggcauuucu

SEQ ID NO: 681827 - RNA, 22 nt, Human
uccagcuggccuaacuucaggg

SEQ ID NO: 681828 - RNA, 22 nt, Human
ccccucucccucacuuaucaau

SEQ ID NO: 681829 - RNA, 22 nt, Human
augaggucacaguguuuggcau

SEQ ID NO: 681830 - RNA, 22 nt, Human
aaaugaccagaauacaggcuuc

SEQ ID NO: 681831 - RNA, 22 nt, Human
uucacagccucugccccaggca

SEQ ID NO: 681832 - RNA, 22 nt, Human
agggucugacuccucuggcaag

SEQ ID NO: 681833 - RNA, 22 nt, Human
cacuggggugggccugguagag

SEQ ID NO: 681834 - RNA, 22 nt, Human
gggcuggcaggaccugggcuga

SEQ ID NO: 681835 - RNA, 22 nt, Human
augagacuaccuguaauguggc

SEQ ID NO: 681836 - RNA, 22 nt, Human
ugccaggcuguccugggccugg

SEQ ID NO: 681837 - RNA, 22 nt, Human
ucugaaagaaagauuuuguuuc

SEQ ID NO: 681838 - RNA, 22 nt, Human
auuucuuaucugaggucuacau

SEQ ID NO: 681839 - RNA, 22 nt, Human
ugauggaaauguucuguaucug

SEQ ID NO: 681840 - RNA, 22 nt, Human
ccagaggaucaguacuggcugg

SEQ ID NO: 681841 - RNA, 22 nt, Human
gcuuccaggggcugugggcuga

SEQ ID NO: 681842 - RNA, 22 nt, Human
ccuuuggcccugagagaugauu

SEQ ID NO: 681843 - RNA, 22 nt, Human
gacacagagcucacagucuccu

SEQ ID NO: 681844 - RNA, 22 nt, Human
gaguaagagcuggcuuuggugu

SEQ ID NO: 681845 - RNA, 22 nt, Human
ucagggagccuggacuucaagg

SEQ ID NO: 681846 - RNA, 22 nt, Human
aauucaaagccgcuugggaauc

SEQ ID NO: 681847 - RNA, 22 nt, Human
cuuggccugcccagccagaagg

SEQ ID NO: 681848 - RNA, 22 nt, Human
agagauguucauucagcauguu

SEQ ID NO: 681849 - RNA, 22 nt, Human
uaugcacgucuauuuaugaaga

SEQ ID NO: 681850 - RNA, 22 nt, Human
gcugcugugaauuuuuuaaaug

SEQ ID NO: 681851 - RNA, 19 nt, Human
ccagcagaagccacuccug

SEQ ID NO: 681852 - RNA, 17 nt, Human
ugcaggcuguuauagcc

SEQ ID NO: 681853 - RNA, 22 nt, Human
uggaggccaaggcaggcggauc

SEQ ID NO: 681854 - RNA, 22 nt, Human
gccuggcucccucugcagcucc

SEQ ID NO: 681855 - RNA, 22 nt, Human
auaaugcagcuuuucaauggcc

SEQ ID NO: 681856 - RNA, 22 nt, Human
cgcaccacugaauuccagccug

SEQ ID NO: 681857 - RNA, 22 nt, Human
ccaguggacaauuucugaggaa

SEQ ID NO: 681858 - RNA, 22 nt, Human
uguaucaaaccaaauuaauucu

SEQ ID NO: 681859 - RNA, 19 nt, Human
caggaaugagguaauggcu

SEQ ID NO: 681860 - RNA, 23 nt, Human
uuuuauugauauguagcuguugu

SEQ ID NO: 681861 - RNA, 22 nt, Human
gaauugcuagcgcaccaauucu

SEQ ID NO: 681862 - RNA, 22 nt, Human
auguuuauuguuuuaagcugcu

SEQ ID NO: 681863 - RNA, 17 nt, Human
auuucccagcagugcua

SEQ ID NO: 681864 - RNA, 22 nt, Human
ggcuggaacuucuucuggcauu

SEQ ID NO: 681865 - RNA, 22 nt, Human
cacagguccuuccugcccuggg

SEQ ID NO: 681866 - RNA, 22 nt, Human
uacucagagucauugcccuucu

SEQ ID NO: 681867 - RNA, 22 nt, Human
cugcugacucauuuucaacacu

SEQ ID NO: 681868 - RNA, 22 nt, Human
cugagaaauacccaagucuggu

SEQ ID NO: 681869 - RNA, 19 nt, Human
uuugauaucugaauuaugc

SEQ ID NO: 681870 - RNA, 22 nt, Human
uggcucaggggucuggcucugu

SEQ ID NO: 681871 - RNA, 22 nt, Human
agcaggcagcugggggaguuga

SEQ ID NO: 681872 - RNA, 23 nt, Human
aauaucaaggugauguucccaga

SEQ ID NO: 681873 - RNA, 22 nt, Human
cuuggccagacagggagcucca

SEQ ID NO: 681874 - RNA, 22 nt, Human
ucagccuccuaauuuccuguga

SEQ ID NO: 681875 - RNA, 22 nt, Human
gcucugagaggugcagcaguaa

SEQ ID NO: 681876 - RNA, 22 nt, Human
ccaugaguagcgauuucauuuu

SEQ ID NO: 681877 - RNA, 22 nt, Human
ccagugcacagccaggcaggug

SEQ ID NO: 681878 - RNA, 22 nt, Human
gaagaucaagugucauucugug

SEQ ID NO: 681879 - RNA, 22 nt, Human
gcagcccaggagcaggcgaccc

SEQ ID NO: 681880 - RNA, 22 nt, Human
ucaguguucagggaccaggucc

SEQ ID NO: 681881 - RNA, 22 nt, Human
uggcucagagccuugagagcug

SEQ ID NO: 681882 - RNA, 22 nt, Human
gagcuuuaggagaaggagguca

SEQ ID NO: 681883 - RNA, 22 nt, Human
uuuaucugauauucagcgauuu

SEQ ID NO: 681884 - RNA, 22 nt, Human
uuccuucccucaguggcugaag

SEQ ID NO: 681885 - RNA, 22 nt, Human
cagaggcugaugugggaugggc

SEQ ID NO: 681886 - RNA, 22 nt, Human
cagagcucagagcugccaggca

SEQ ID NO: 681887 - RNA, 22 nt, Human
agacaacuagaaaacuagacag

SEQ ID NO: 681888 - RNA, 22 nt, Human
ucuacaguagaaagaucccagu

SEQ ID NO: 681889 - RNA, 22 nt, Human
uccaggcuaauuuugcauuguu

SEQ ID NO: 681890 - RNA, 22 nt, Human
acccaggguagagugcaguggc

SEQ ID NO: 681891 - RNA, 22 nt, Human
cuugcugucccuugguaugaac

SEQ ID NO: 681892 - RNA, 22 nt, Human
auaagaugagaucagcuuucug

SEQ ID NO: 681893 - RNA, 22 nt, Human
aagguagcuugcuuccugagua

SEQ ID NO: 681894 - RNA, 22 nt, Human
uuuauuaauuagugacccaaug

SEQ ID NO: 681895 - RNA, 22 nt, Human
aaagcagcagcaccugcauuuc

SEQ ID NO: 681896 - RNA, 22 nt, Human
ucaggaaguauaaucagauuca

SEQ ID NO: 681897 - RNA, 22 nt, Human
agaggcaaggcaggauucuucu

SEQ ID NO: 681898 - RNA, 22 nt, Human
agacaaagaaaccguagaagca

SEQ ID NO: 681899 - RNA, 22 nt, Human
cuccucugucuggcccugagcc

SEQ ID NO: 681900 - RNA, 22 nt, Human
uuuuuagaguguuaccaguaua

SEQ ID NO: 681901 - RNA, 19 nt, Human
caucuggaugauucuccug

SEQ ID NO: 681902 - RNA, 22 nt, Human
uaugcauucagagguugggugu

SEQ ID NO: 681903 - RNA, 22 nt, Human
uggcuggcaaggcuggagucag

SEQ ID NO: 681904 - RNA, 22 nt, Human
uauguucuaggaaugguugaug

SEQ ID NO: 681905 - RNA, 22 nt, Human
aguuugaaaguauugacagaag

SEQ ID NO: 681906 - RNA, 22 nt, Human
ugggaauugaggugauugugag

SEQ ID NO: 681907 - RNA, 22 nt, Human
ugugaacuuacuguccccacag

SEQ ID NO: 681908 - RNA, 17 nt, Human
uaaagaucagccaugua

SEQ ID NO: 681909 - RNA, 22 nt, Human
gucuccugaggcauccauugaa

SEQ ID NO: 681910 - RNA, 22 nt, Human
cucugugguaaaauagcaguau

SEQ ID NO: 681911 - RNA, 22 nt, Human
ugcugccacauuuaaagagggg

SEQ ID NO: 681912 - RNA, 23 nt, Human
ugccuccaccgagggccaggcau

SEQ ID NO: 681913 - RNA, 23 nt, Human
agagggugcaacauggggaucua

SEQ ID NO: 681914 - RNA, 22 nt, Human
uguuuucaagucaaggccaaau

SEQ ID NO: 681915 - RNA, 22 nt, Human
gagcccuguaggaaucucucaa

SEQ ID NO: 681916 - RNA, 22 nt, Human
ccagucccagcucugccaugcu

SEQ ID NO: 681917 - RNA, 22 nt, Human
gagucacaaagccuuucuuauu

SEQ ID NO: 681918 - RNA, 22 nt, Human
cuucuucauguauugauagucu

SEQ ID NO: 681919 - RNA, 22 nt, Human
uuuuuccuuagggguuacucac

SEQ ID NO: 681920 - RNA, 22 nt, Human
auguguguguuuaauccucaaa

SEQ ID NO: 681921 - RNA, 23 nt, Human
aaccugaacuagggucuugcaua

SEQ ID NO: 681922 - RNA, 22 nt, Human
ugccauggccuagaccugugau

SEQ ID NO: 681923 - RNA, 22 nt, Human
uguccugugcacuguagcaugu

SEQ ID NO: 681924 - RNA, 22 nt, Human
caggaggccaacugugggacuu

SEQ ID NO: 681925 - RNA, 22 nt, Human
aggcuccacggucacuggcucu

SEQ ID NO: 681926 - RNA, 22 nt, Human
agaacagguucaggguauaaaa

SEQ ID NO: 681927 - RNA, 22 nt, Human
guucucuaucauuagugaauuu

SEQ ID NO: 681928 - RNA, 22 nt, Human
gcuuccuggagggagagagcug

SEQ ID NO: 681929 - RNA, 22 nt, Human
ccuguguucuaauccaucucag

SEQ ID NO: 681930 - RNA, 22 nt, Human
aggaggaggcuggaguacaccc

SEQ ID NO: 681931 - RNA, 22 nt, Human
aguguuuauuuacagaugguuu

SEQ ID NO: 681932 - RNA, 22 nt, Human
uacugaaauggcagauauauaa

SEQ ID NO: 681933 - RNA, 22 nt, Human
cauuccagcucucauacucugg

SEQ ID NO: 681934 - RNA, 22 nt, Human
acuugguugaugucauaagguu

SEQ ID NO: 681935 - RNA, 22 nt, Human
uaagaagcuucugcuaaugccu

SEQ ID NO: 681936 - RNA, 22 nt, Human
cagguccaguaaaaagaguccu

SEQ ID NO: 681937 - RNA, 22 nt, Human
gugaggacuaguggguuugugc

SEQ ID NO: 681938 - RNA, 22 nt, Human
ugcagcuguaacagaggccuca

SEQ ID NO: 681939 - RNA, 22 nt, Human
gagguagcucuuacucucuccg

SEQ ID NO: 681940 - RNA, 22 nt, Human
uaacagaagagcaggcagcccu

SEQ ID NO: 681941 - RNA, 22 nt, Human
ggucgugaauugaaucaguggc

SEQ ID NO: 681942 - RNA, 22 nt, Human
accugugcaaagacuggucagg

SEQ ID NO: 681943 - RNA, 22 nt, Human
cggagaggugggggcagcaucu

SEQ ID NO: 681944 - RNA, 22 nt, Human
gcucccugaaaagaacaaaguc

SEQ ID NO: 681945 - RNA, 22 nt, Human
uguuauuucuuugccauaucuu

SEQ ID NO: 681946 - RNA, 22 nt, Human
ugaguggaguagugaaugcauu

SEQ ID NO: 681947 - RNA, 22 nt, Human
gugugccuuaagcucuauagac

SEQ ID NO: 681948 - RNA, 22 nt, Human
gaagagcauuugcccaggcugu

SEQ ID NO: 681949 - RNA, 22 nt, Human
aguccggggucuggacaccugg

SEQ ID NO: 681950 - RNA, 19 nt, Human
ucugucacuggggguauuc

SEQ ID NO: 681951 - RNA, 20 nt, Human
ugcaggaauuugcauuccuu

SEQ ID NO: 681952 - RNA, 22 nt, Human
ucccagaggcuccagucucuau

SEQ ID NO: 681953 - RNA, 23 nt, Human
uuuauagcagcaugauuuauaau

SEQ ID NO: 681954 - RNA, 22 nt, Human
ccucuauguacacauuuccagc

SEQ ID NO: 681955 - RNA, 22 nt, Human
aguuaacucauuuuauaaugcc

SEQ ID NO: 681956 - RNA, 22 nt, Human
gcuuugcuagcacugcgcuucc

SEQ ID NO: 681957 - RNA, 22 nt, Human
ccuucucuaccaugugaggaaa

SEQ ID NO: 681958 - RNA, 22 nt, Human
gaugugugugcccugggccugc

SEQ ID NO: 681959 - RNA, 22 nt, Human
uuauucaguuuguguagaggug

SEQ ID NO: 681960 - RNA, 22 nt, Human
guuuuagauaaagcuguccuug

SEQ ID NO: 681961 - RNA, 22 nt, Human
gccugagaaggacacagcaggu

SEQ ID NO: 681962 - RNA, 22 nt, Human
cggggugggaauagaccugucu

SEQ ID NO: 681963 - RNA, 22 nt, Human
ucuguggcuuccuauuucuugg

SEQ ID NO: 681964 - RNA, 22 nt, Human
uggccagugauuaaugacgcuu

SEQ ID NO: 681965 - RNA, 22 nt, Human
auagaauguauuauaguacaga

SEQ ID NO: 681966 - RNA, 20 nt, Human
aggcugucauuucuggcagg

SEQ ID NO: 681967 - RNA, 22 nt, Human
uggauuaguuucaaggcagcaa

SEQ ID NO: 681968 - RNA, 22 nt, Human
gacuuuaucuuguccuuccugc

SEQ ID NO: 681969 - RNA, 22 nt, Human
agugauggcaucggguccagca

SEQ ID NO: 681970 - RNA, 22 nt, Human
aacaucuuuuuguuugcugaaa

SEQ ID NO: 681971 - RNA, 20 nt, Human
ugacaacaaaaugguaauuu

SEQ ID NO: 681972 - RNA, 22 nt, Human
cagguggggcagcugugggagc

SEQ ID NO: 681973 - RNA, 22 nt, Human
cagguuuacaaaguaaagugug

SEQ ID NO: 681974 - RNA, 22 nt, Human
uuggaacaugccgggguccagg

SEQ ID NO: 681975 - RNA, 21 nt, Human
auauuuuuguuuggacuguca

SEQ ID NO: 681976 - RNA, 22 nt, Human
uguauacauacauaugugugug

SEQ ID NO: 681977 - RNA, 22 nt, Human
ggcccuguccuggcugucuccg

SEQ ID NO: 681978 - RNA, 22 nt, Human
aacuguaaggcuuagaacagca

SEQ ID NO: 681979 - RNA, 22 nt, Human
ucccuggguccugcuugcucuc

SEQ ID NO: 681980 - RNA, 22 nt, Human
aguggaauguagaaaaaagaug

SEQ ID NO: 681981 - RNA, 22 nt, Human
ccugguggaaggugagugaggc

SEQ ID NO: 681982 - RNA, 22 nt, Human
agggagcucaguuggaagcggu

SEQ ID NO: 681983 - RNA, 22 nt, Human
cgggcagugcccagcggggcag

SEQ ID NO: 681984 - RNA, 22 nt, Human
aagcauuucaauauaauauuca

SEQ ID NO: 681985 - RNA, 22 nt, Human
uuaaacagguuuuugaauggcc

SEQ ID NO: 681986 - RNA, 21 nt, Human
gaauggcucgcgcgccacacu

SEQ ID NO: 681987 - RNA, 22 nt, Human
aaguuuauguucuuugaaggca

SEQ ID NO: 681988 - RNA, 22 nt, Human
aaaaccugauugaauucuauuu

SEQ ID NO: 681989 - RNA, 22 nt, Human
cucagcccggugcucgugccac

SEQ ID NO: 681990 - RNA, 21 nt, Human
ugcccuggggcucuucccuca

SEQ ID NO: 681991 - RNA, 22 nt, Human
ugaaccaggaggcagccagcac

SEQ ID NO: 681992 - RNA, 22 nt, Human
ucucagagcuucaguuauuuuc

SEQ ID NO: 681993 - RNA, 22 nt, Human
agucucuuuaaucacagugucu

SEQ ID NO: 681994 - RNA, 22 nt, Human
cccaccaguacagaugguagau

SEQ ID NO: 681995 - RNA, 22 nt, Human
uggcucagaacuacuucuaguu

SEQ ID NO: 681996 - RNA, 22 nt, Human
uuaaaugucaauagauugcuug

SEQ ID NO: 681997 - RNA, 22 nt, Human
guuuuuccuugcugaggacccg

SEQ ID NO: 681998 - RNA, 22 nt, Human
aucuuucucugcacuauacaau

SEQ ID NO: 681999 - RNA, 19 nt, Human
ucucuggcuugucugccug

SEQ ID NO: 682000 - RNA, 22 nt, Human
uccucugcuccaucuuuacugu

SEQ ID NO: 682001 - RNA, 22 nt, Human
agagaaaugauuccugggcaga

SEQ ID NO: 682002 - RNA, 22 nt, Human
cauauaaauacaacauguguua

SEQ ID NO: 682003 - RNA, 22 nt, Human
guccagccacucaccuuccagc

SEQ ID NO: 682004 - RNA, 22 nt, Human
gggaaggagguggaccugcccc

SEQ ID NO: 682005 - RNA, 22 nt, Human
ugaagccacacuagcuuguccu

SEQ ID NO: 682006 - RNA, 22 nt, Human
agagugauggguugugcugacc

SEQ ID NO: 682007 - RNA, 22 nt, Human
guacauuuugagguuaaaacaa

SEQ ID NO: 682008 - RNA, 22 nt, Human
ucaugcauauuuguaguaguuc

SEQ ID NO: 682009 - RNA, 22 nt, Human
uccaggcugugcgcaccgugug

SEQ ID NO: 682010 - RNA, 22 nt, Human
ccugggagguggauguugcggu

SEQ ID NO: 682011 - RNA, 22 nt, Human
cagaauuucagugauguuuucu

SEQ ID NO: 682012 - RNA, 22 nt, Human
uagaaacucacguuaucauugc

SEQ ID NO: 682013 - RNA, 22 nt, Human
caaauuuaagugaggucuuugu

SEQ ID NO: 682014 - RNA, 22 nt, Human
uucugcuuagagggcauuugca

SEQ ID NO: 682015 - RNA, 22 nt, Human
uaacaucuuaacuggauacuuc

SEQ ID NO: 682016 - RNA, 22 nt, Human
aguggcagagaccccagccagc

SEQ ID NO: 682017 - RNA, 19 nt, Human
guguacagcucagugaauu

SEQ ID NO: 682018 - RNA, 22 nt, Human
gaauugcuucugguauguuacu

SEQ ID NO: 682019 - RNA, 23 nt, Human
uuuauacaagaaaccgcuggccu

SEQ ID NO: 682020 - RNA, 22 nt, Human
aauacuuuugaacugaaaggca

SEQ ID NO: 682021 - RNA, 22 nt, Human
ccagaaaguucagcugugaaug

SEQ ID NO: 682022 - RNA, 22 nt, Human
cuuacaguacuucuaauaugau

SEQ ID NO: 682023 - RNA, 22 nt, Human
ucagaaauguaagcugaugacu

SEQ ID NO: 682024 - RNA, 22 nt, Human
auccuugaaugacucugcccuc

SEQ ID NO: 682025 - RNA, 22 nt, Human
ugggagcacucuuugggaagca

SEQ ID NO: 682026 - RNA, 22 nt, Human
uaaggaaagugccaugauuucu

SEQ ID NO: 682027 - RNA, 22 nt, Human
uugaggcccggcaggccgagcg

SEQ ID NO: 682028 - RNA, 22 nt, Human
gaagggugcauggagggaaguc

SEQ ID NO: 682029 - RNA, 22 nt, Human
gcaggguccauggaggcagccc

SEQ ID NO: 682030 - RNA, 22 nt, Human
cuuuguauucaguugggcugug

SEQ ID NO: 682031 - RNA, 22 nt, Human
ugguaaggucuucacucagauu

SEQ ID NO: 682032 - RNA, 22 nt, Human
uagcacaggucuuguugccauu

SEQ ID NO: 682033 - RNA, 22 nt, Human
ccugggcagguguggcuucccc

SEQ ID NO: 682034 - RNA, 21 nt, Human
uacauugacuacaaauaaagc

SEQ ID NO: 682035 - RNA, 22 nt, Human
gcuuuacaacaaauugaauaug

SEQ ID NO: 682036 - RNA, 22 nt, Human
uuauuuccacaaugugguaggg

SEQ ID NO: 682037 - RNA, 22 nt, Human
gauuucuuuagguguaauagug

SEQ ID NO: 682038 - RNA, 22 nt, Human
gucuggaaauuuaagguaugag

SEQ ID NO: 682039 - RNA, 22 nt, Human
uuugcaaaauuauucccagcau

SEQ ID NO: 682040 - RNA, 18 nt, Human
aguuuuuaggaagaaaug

SEQ ID NO: 682041 - RNA, 20 nt, Human
gugcuuccucgcaaguugca

SEQ ID NO: 682042 - RNA, 18 nt, Human
acauuucuaugcuucugg

SEQ ID NO: 682043 - RNA, 22 nt, Human
cuucagaauuccucagccucag

SEQ ID NO: 682044 - RNA, 22 nt, Human
gaggcccagcagcgcaggucuu

SEQ ID NO: 682045 - RNA, 22 nt, Human
ucucuucuaacacuagaaauuc

SEQ ID NO: 682046 - RNA, 21 nt, Human
aucaccagcagaagcugcaga

SEQ ID NO: 682047 - RNA, 22 nt, Human
aguguuguaugggaugacugcu

SEQ ID NO: 682048 - RNA, 22 nt, Human
caggcacaauuauuucccuuuc

SEQ ID NO: 682049 - RNA, 22 nt, Human
cucagaauuacaucccauuuua

SEQ ID NO: 682050 - RNA, 22 nt, Human
cacuguacagcauuaacaaggc

SEQ ID NO: 682051 - RNA, 20 nt, Human
gucagaggacccuagagcga

SEQ ID NO: 682052 - RNA, 22 nt, Human
ccugagcaaaggaaggaugacu

SEQ ID NO: 682053 - RNA, 22 nt, Human
ccaugcugacccugugcaggca

SEQ ID NO: 682054 - RNA, 22 nt, Human
gauuuuucaguauaaaauauau

SEQ ID NO: 682055 - RNA, 22 nt, Human
ucccaagacgaugugcuuggcc

SEQ ID NO: 682056 - RNA, 22 nt, Human
augggcagaguggggacaggaa

SEQ ID NO: 682057 - RNA, 22 nt, Human
ugccugcuuguguaccugguga

SEQ ID NO: 682058 - RNA, 22 nt, Human
cagagguacagccauugaagau

SEQ ID NO: 682059 - RNA, 22 nt, Human
auuauuuagaaaucgauugaaa

SEQ ID NO: 682060 - RNA, 22 nt, Human
ugggcuucauaauugguccuag

SEQ ID NO: 682061 - RNA, 22 nt, Human
ggcagcagcaagguuggagcug

SEQ ID NO: 682062 - RNA, 22 nt, Human
acagagcugggugcccccugga

SEQ ID NO: 682063 - RNA, 19 nt, Human
cagaaauagcgaaguguaa

SEQ ID NO: 682064 - RNA, 22 nt, Human
uagauucuugaaccagugccuc

SEQ ID NO: 682065 - RNA, 22 nt, Human
cccagggguauccauggagaag

SEQ ID NO: 682066 - RNA, 22 nt, Human
agccaggaucacccggggcugu

SEQ ID NO: 682067 - RNA, 22 nt, Human
aaagccaguuugucucuuuaaa

SEQ ID NO: 682068 - RNA, 22 nt, Human
cagggggcagcguagaaaauga

SEQ ID NO: 682069 - RNA, 22 nt, Human
agauacauugcacgaugcagau

SEQ ID NO: 682070 - RNA, 22 nt, Human
uguucagaacaaagguaaauga

SEQ ID NO: 682071 - RNA, 22 nt, Human
guccugggcaugcagggcuuuc

SEQ ID NO: 682072 - RNA, 18 nt, Human
aaaaagugcucaggccua

SEQ ID NO: 682073 - RNA, 22 nt, Human
ccuuccuuucagggcuaugccu

SEQ ID NO: 682074 - RNA, 22 nt, Human
ucccugggacggccuuuuggag

SEQ ID NO: 682075 - RNA, 22 nt, Human
auggccagcaaguucagaauuu

SEQ ID NO: 682076 - RNA, 22 nt, Human
gacauaaaguucuugcuugaau

SEQ ID NO: 682077 - RNA, 22 nt, Human
uggagguguggagucaaaggga

SEQ ID NO: 682078 - RNA, 22 nt, Human
aggcugagcugguagugaguac

SEQ ID NO: 682079 - RNA, 22 nt, Human
ggcagcugggucacaccgaucu

SEQ ID NO: 682080 - RNA, 15 nt, Human
uaacuuuuuugggcu

SEQ ID NO: 682081 - RNA, 18 nt, Human
aucucccauuggccaagg

SEQ ID NO: 682082 - RNA, 18 nt, Human
uuguagcaaauggcagug

SEQ ID NO: 682083 - RNA, 22 nt, Human
ggcaggaauaaauuauggacuu

SEQ ID NO: 682084 - RNA, 22 nt, Human
ucaggcagaaaaaucacuaauu

SEQ ID NO: 682085 - RNA, 22 nt, Human
gaggagcugggcugagaggguc

SEQ ID NO: 682086 - RNA, 19 nt, Human
ggcuggaguggccaucugu

SEQ ID NO: 682087 - RNA, 22 nt, Human
auucuggguuuuugucuucugu

SEQ ID NO: 682088 - RNA, 22 nt, Human
uuuacacugugaaacagguauc

SEQ ID NO: 682089 - RNA, 22 nt, Human
gcaaggcagcgcggaguagcua

SEQ ID NO: 682090 - RNA, 22 nt, Human
agacaaggcuggaguuuaggca

SEQ ID NO: 682091 - RNA, 22 nt, Human
agggacuggcucucugagcagg

SEQ ID NO: 682092 - RNA, 23 nt, Human
uauuacaauuggucuuauuaaga

SEQ ID NO: 682093 - RNA, 17 nt, Human
ugggccaguagaaggga

SEQ ID NO: 682094 - RNA, 22 nt, Human
guuacagugagaagauagccua

SEQ ID NO: 682095 - RNA, 22 nt, Human
gccagcugagaaaucauugaua

SEQ ID NO: 682096 - RNA, 22 nt, Human
ccuuucuacagaugccucuugc

SEQ ID NO: 682097 - RNA, 22 nt, Human
gaggcugccccuuccucagcug

SEQ ID NO: 682098 - RNA, 22 nt, Human
uauuaaagggaaguuaugcaug

SEQ ID NO: 682099 - RNA, 22 nt, Human
augucacaugagagcgcagcac

SEQ ID NO: 682100 - RNA, 22 nt, Human
auggaaauggagugugcuugcu

SEQ ID NO: 682101 - RNA, 22 nt, Human
agcugcugguuuaagggauggg

SEQ ID NO: 682102 - RNA, 22 nt, Human
ccuggcagcccagagcgccgcu

SEQ ID NO: 682103 - RNA, 22 nt, Human
ucucacagugcaggucugucuc

SEQ ID NO: 682104 - RNA, 22 nt, Human
uuugacauggaauaacucauuu

SEQ ID NO: 682105 - RNA, 22 nt, Human
uuuaucuggacugugauauaaa

SEQ ID NO: 682106 - RNA, 21 nt, Human
ugcuuugcagguggauuuagu

SEQ ID NO: 682107 - RNA, 22 nt, Human
cagggccaaguuggugccuuuu

SEQ ID NO: 682108 - RNA, 22 nt, Human
auccugucuuuguuuuaaauau

SEQ ID NO: 682109 - RNA, 19 nt, Human
caggauuguuuaaagcuuu

SEQ ID NO: 682110 - RNA, 22 nt, Human
gugcccugacacaccuggugug

SEQ ID NO: 682111 - RNA, 21 nt, Human
ccuggagacaaagacagggug

SEQ ID NO: 682112 - RNA, 22 nt, Human
ucaaaggaaacgugguccuggc

SEQ ID NO: 682113 - RNA, 22 nt, Human
agagcggggauaguuaauauuc

SEQ ID NO: 682114 - RNA, 22 nt, Human
aaugucuuuuaaccucuggacu

SEQ ID NO: 682115 - RNA, 21 nt, Human
cagagguggccugaccucuga

SEQ ID NO: 682116 - RNA, 22 nt, Human
cagagaaacucagauagcugau

SEQ ID NO: 682117 - RNA, 22 nt, Human
aacauggaggcagacagacgug

SEQ ID NO: 682118 - RNA, 22 nt, Human
uucccauuugugguagugaauu

SEQ ID NO: 682119 - RNA, 22 nt, Human
uggcacugagcagccgcggcag

SEQ ID NO: 682120 - RNA, 22 nt, Human
acccaggcuagagugcaguggu

SEQ ID NO: 682121 - RNA, 17 nt, Human
uccagcccugcccgacg

SEQ ID NO: 682122 - RNA, 22 nt, Human
guccuucagcuuuaucugaaca

SEQ ID NO: 682123 - RNA, 22 nt, Human
ugugcacaggaagcuauucucu

SEQ ID NO: 682124 - RNA, 22 nt, Human
agggacacgagguccugcuggg

SEQ ID NO: 682125 - RNA, 21 nt, Human
gcucaggcucagguucagguu

SEQ ID NO: 682126 - RNA, 22 nt, Human
aagcacuuagaagagugccugc

SEQ ID NO: 682127 - RNA, 22 nt, Human
ucaggggcugugcauuucccag

SEQ ID NO: 682128 - RNA, 21 nt, Human
ugaaaucugaugggacaaaug

SEQ ID NO: 682129 - RNA, 22 nt, Human
uuucuucuaggacuaauaagag

SEQ ID NO: 682130 - RNA, 23 nt, Human
ugcgugugugcugaggggcgucc

SEQ ID NO: 682131 - RNA, 22 nt, Human
cuggcccuaugagccuccugau

SEQ ID NO: 682132 - RNA, 22 nt, Human
gcccccucuuuggagccagcca

SEQ ID NO: 682133 - RNA, 22 nt, Human
gggacaggcaaagguaugcuuc

SEQ ID NO: 682134 - RNA, 23 nt, Human
agggccugauggcucccgcuggc

SEQ ID NO: 682135 - RNA, 22 nt, Human
acauagcauaaagaaugacucu

SEQ ID NO: 682136 - RNA, 19 nt, Human
uaccagccuccugccugau

SEQ ID NO: 682137 - RNA, 22 nt, Human
aaagaguuuggagacaagauca

SEQ ID NO: 682138 - RNA, 22 nt, Human
uuuagagacccucugcuauuuu

SEQ ID NO: 682139 - RNA, 21 nt, Human
agcuauuucagauuugagagc

SEQ ID NO: 682140 - RNA, 22 nt, Human
cugcagggagcagauggcgugu

SEQ ID NO: 682141 - RNA, 22 nt, Human
caguucuggaggcuccacaucu

SEQ ID NO: 682142 - RNA, 22 nt, Human
cccuuuaauuccaacacaggaa

SEQ ID NO: 682143 - RNA, 22 nt, Human
aggcucucucugccccugggac

SEQ ID NO: 682144 - RNA, 20 nt, Human
ucauaaagaggaaauaaaua

SEQ ID NO: 682145 - RNA, 22 nt, Human
gccugugcuuaacugacgugag

SEQ ID NO: 682146 - RNA, 22 nt, Human
gagcuuuaagggauaaaaugau

SEQ ID NO: 682147 - RNA, 22 nt, Human
aggggucuuuaggaacgucggg

SEQ ID NO: 682148 - RNA, 22 nt, Human
agagucaguuagcgaauacuua

SEQ ID NO: 682149 - RNA, 22 nt, Human
uguuuacaaggagaauuugagg

SEQ ID NO: 682150 - RNA, 22 nt, Human
uggguaaacaauguuugccuaa

SEQ ID NO: 682151 - RNA, 22 nt, Human
cuggggaggcagggcugccccu

SEQ ID NO: 682152 - RNA, 22 nt, Human
gcaggcugaguugggaaaccaa

SEQ ID NO: 682153 - RNA, 21 nt, Human
ccuggcuccagaacuuccggu

SEQ ID NO: 682154 - RNA, 22 nt, Human
uuucccaguucccugcucuaua

SEQ ID NO: 682155 - RNA, 20 nt, Human
guuuagcauggcagugaaag

SEQ ID NO: 682156 - RNA, 22 nt, Human
ucuggcaggucaaucauucuuu

SEQ ID NO: 682157 - RNA, 22 nt, Human
acacugaauaauugagaguuga

SEQ ID NO: 682158 - RNA, 22 nt, Human
uauuaaguaucuugaugacaaa

SEQ ID NO: 682159 - RNA, 22 nt, Human
ucagugcuuuugagaagcuccu

SEQ ID NO: 682160 - RNA, 22 nt, Human
acauuucagugagcuauugaag

SEQ ID NO: 682161 - RNA, 22 nt, Human
gaagaagcauucugcuguuuug

SEQ ID NO: 682162 - RNA, 20 nt, Human
acauagaucagugauugaca

SEQ ID NO: 682163 - RNA, 22 nt, Human
ugagcuguuucucugguggcuu

SEQ ID NO: 682164 - RNA, 22 nt, Human
ugcugcauagcagcuccugaaa

SEQ ID NO: 682165 - RNA, 22 nt, Human
caggcccucaggcaagggcucu

SEQ ID NO: 682166 - RNA, 20 nt, Human
ccagauggucccugugaaaa

SEQ ID NO: 682167 - RNA, 22 nt, Human
uuagagaugucccaaaaugaag

SEQ ID NO: 682168 - RNA, 22 nt, Human
aguauuucuucauaugauuacu

SEQ ID NO: 682169 - RNA, 22 nt, Human
auacacauuacuuucugucuga

SEQ ID NO: 682170 - RNA, 22 nt, Human
aaggccauguaggaggcaugcg

SEQ ID NO: 682171 - RNA, 22 nt, Human
aguuuucugcuaaaccagcuaa

SEQ ID NO: 682172 - RNA, 22 nt, Human
acagaguuguaaacauuuacca

SEQ ID NO: 682173 - RNA, 21 nt, Human
cuggaggguagaguugggcug

SEQ ID NO: 682174 - RNA, 22 nt, Human
agaugguuaucuaagugaaaaa

SEQ ID NO: 682175 - RNA, 22 nt, Human
guuucucuuugaagccuggcug

SEQ ID NO: 682176 - RNA, 22 nt, Human
gcuagccugcaguggcuauggu

SEQ ID NO: 682177 - RNA, 22 nt, Human
cccaagggaugcuugaguaguu

SEQ ID NO: 682178 - RNA, 22 nt, Human
ugaugcuucacgcugaauaugc

SEQ ID NO: 682179 - RNA, 22 nt, Human
cugggaggauacacaagaucag

SEQ ID NO: 682180 - RNA, 22 nt, Human
ugcagggccccucugcaugagu

SEQ ID NO: 682181 - RNA, 22 nt, Human
uuauugcaaaggaagagcuuga

SEQ ID NO: 682182 - RNA, 22 nt, Human
ucagcuuuuuacaugugaaaua

SEQ ID NO: 682183 - RNA, 22 nt, Human
cauaacugggagauccaagggu

SEQ ID NO: 682184 - RNA, 22 nt, Human
gcagggacgcagcacucuccgu

SEQ ID NO: 682185 - RNA, 22 nt, Human
cagcccugucuaugacugauga

SEQ ID NO: 682186 - RNA, 22 nt, Human
guacugcuguaaauauucuuca

SEQ ID NO: 682187 - RNA, 22 nt, Human
ugcugaugcuguucuguuagga

SEQ ID NO: 682188 - RNA, 22 nt, Human
ugcuuucagauaucuguuucaa

SEQ ID NO: 682189 - RNA, 22 nt, Human
cugccuggccacaacccagggu

SEQ ID NO: 682190 - RNA, 22 nt, Human
uguccauggagaagcucagggc

SEQ ID NO: 682191 - RNA, 22 nt, Human
cucugaggcuccaugcaggcuu

SEQ ID NO: 682192 - RNA, 22 nt, Human
aauugugcauuuuuaaaucacg

SEQ ID NO: 682193 - RNA, 22 nt, Human
gcucccaguucccaaagugacc

SEQ ID NO: 682194 - RNA, 22 nt, Human
cagcagcaacaacggaagccuu

SEQ ID NO: 682195 - RNA, 22 nt, Human
cauuucaauacuaucugagaau

SEQ ID NO: 682196 - RNA, 22 nt, Human
uagcagcucacagccucccauu

SEQ ID NO: 682197 - RNA, 22 nt, Human
uucagaauauuuguuuuacaug

SEQ ID NO: 682198 - RNA, 22 nt, Human
ccagaggagaugccuccucugu

SEQ ID NO: 682199 - RNA, 22 nt, Human
ggaguuggugagcaccaggcuu

SEQ ID NO: 682200 - RNA, 22 nt, Human
ggaguaaggcucagaggaaaug

SEQ ID NO: 682201 - RNA, 22 nt, Human
agcccagcggagcgggcccggg

SEQ ID NO: 682202 - RNA, 22 nt, Human
aguuuucacacucaccaaaagg

SEQ ID NO: 682203 - RNA, 22 nt, Human
uuuucauuuacauuagggaaga

SEQ ID NO: 682204 - RNA, 22 nt, Human
aaauuauuauaggcagagcuga

SEQ ID NO: 682205 - RNA, 22 nt, Human
aacuucagggggcacauucaag

SEQ ID NO: 682206 - RNA, 22 nt, Human
ggucagaacaaggguaaauaaa

SEQ ID NO: 682207 - RNA, 22 nt, Human
ugccagccagguucugaggcua

SEQ ID NO: 682208 - RNA, 19 nt, Human
gcuucccaccagccagccc

SEQ ID NO: 682209 - RNA, 22 nt, Human
uaggcagaauuguugaaugaag

SEQ ID NO: 682210 - RNA, 22 nt, Human
uccuggcacauugcaggggcuc

SEQ ID NO: 682211 - RNA, 20 nt, Human
ugcccuguggaggggaaagg

SEQ ID NO: 682212 - RNA, 22 nt, Human
aaauugcugaccaaguauauuc

SEQ ID NO: 682213 - RNA, 22 nt, Human
caagaaauguuuacugagcauc

SEQ ID NO: 682214 - RNA, 23 nt, Human
uuucaacuccugccauuauuucu

SEQ ID NO: 682215 - RNA, 22 nt, Human
aggcugagccacggggcuggcu

SEQ ID NO: 682216 - RNA, 22 nt, Human
uucuuuggcuuacgucuggccu

SEQ ID NO: 682217 - RNA, 21 nt, Human
acaugcauagagagauuucug

SEQ ID NO: 682218 - RNA, 22 nt, Human
ugcaguccuggugaggggacau

SEQ ID NO: 682219 - RNA, 22 nt, Human
ccugagugaccugaggucuagu

SEQ ID NO: 682220 - RNA, 22 nt, Human
cacaggaacuuacuggccacuu

SEQ ID NO: 682221 - RNA, 19 nt, Human
gauuucuacaaaugucaga

SEQ ID NO: 682222 - RNA, 22 nt, Human
aagggcuccaagagguagcugg

SEQ ID NO: 682223 - RNA, 22 nt, Human
gcagugauuggaucagagaugg

SEQ ID NO: 682224 - RNA, 22 nt, Human
gccucuggucccucaugcugug

SEQ ID NO: 682225 - RNA, 22 nt, Human
cuuucacauaauugaccuugaa

SEQ ID NO: 682226 - RNA, 22 nt, Human
ggaggagacaguaaaaagcacg

SEQ ID NO: 682227 - RNA, 22 nt, Human
ccagugcuuccaggaauacggu

SEQ ID NO: 682228 - RNA, 22 nt, Human
ggcucucuccuuggcuuucaga

SEQ ID NO: 682229 - RNA, 22 nt, Human
ucacaugccacagaugaggcaa

SEQ ID NO: 682230 - RNA, 22 nt, Human
ucacagaagagcauuaagauga

SEQ ID NO: 682231 - RNA, 22 nt, Human
cagugcagaggccagggaggau

SEQ ID NO: 682232 - RNA, 21 nt, Human
uaucagaagagaaagaaugau

SEQ ID NO: 682233 - RNA, 22 nt, Human
uugcuauaaaugguuucauauu

SEQ ID NO: 682234 - RNA, 21 nt, Human
acagcaagccuuccuuucagg

SEQ ID NO: 682235 - RNA, 22 nt, Human
uccccaggagcaaugauucagu

SEQ ID NO: 682236 - RNA, 22 nt, Human
ucauguuucucuuacagcagcu

SEQ ID NO: 682237 - RNA, 20 nt, Human
cagggacagcaguggguuuu

SEQ ID NO: 682238 - RNA, 22 nt, Human
auauuaguguagguagcuaaua

SEQ ID NO: 682239 - RNA, 22 nt, Human
ugucaacagauacuagagagcu

SEQ ID NO: 682240 - RNA, 22 nt, Human
ugggccacaguucaccaauccc

SEQ ID NO: 682241 - RNA, 22 nt, Human
agacucugggauuuugaaagca

SEQ ID NO: 682242 - RNA, 22 nt, Human
aguggcuguaggcuaugagaga

SEQ ID NO: 682243 - RNA, 23 nt, Human
ugcuggagacaagugugagaagg

SEQ ID NO: 682244 - RNA, 23 nt, Human
ucagcccacaucuagucauuagc

SEQ ID NO: 682245 - RNA, 22 nt, Human
ugccacaguuguuugugcucua

SEQ ID NO: 682246 - RNA, 22 nt, Human
auaauuaucucagacacuuguu

SEQ ID NO: 682247 - RNA, 22 nt, Human
uggcuucuaaaguuucuuuuag

SEQ ID NO: 682248 - RNA, 22 nt, Human
uugcuucuuagauauuccucuc

SEQ ID NO: 682249 - RNA, 22 nt, Human
augcaaugguauauggucaccu

SEQ ID NO: 682250 - RNA, 22 nt, Human
uuacagaacugcccuaguuggc

SEQ ID NO: 682251 - RNA, 22 nt, Human
caagaagccgagcuacaggcuc

SEQ ID NO: 682252 - RNA, 22 nt, Human
aacugaaaguuucaccugaggu

SEQ ID NO: 682253 - RNA, 22 nt, Human
agacaugugguauaaucagggg

SEQ ID NO: 682254 - RNA, 22 nt, Human
acugucuucaaaugaauauauu

SEQ ID NO: 682255 - RNA, 20 nt, Human
uggguccugcacauucucca

SEQ ID NO: 682256 - RNA, 22 nt, Human
cugggagcuuguuaggaaugca

SEQ ID NO: 682257 - RNA, 22 nt, Human
caucucugagaccucagcuggg

SEQ ID NO: 682258 - RNA, 22 nt, Human
ucagaacauuacauuuugagcu

SEQ ID NO: 682259 - RNA, 23 nt, Human
cuucuggcucuauaucagaauuc

SEQ ID NO: 682260 - RNA, 22 nt, Human
caggucagcuggugccccaggu

SEQ ID NO: 682261 - RNA, 22 nt, Human
ccucugcucugguccaugugcu

SEQ ID NO: 682262 - RNA, 22 nt, Human
cacaggaaaauaaaagaucuaa

SEQ ID NO: 682263 - RNA, 22 nt, Human
uggcucagaggggaagugguuu

SEQ ID NO: 682264 - RNA, 22 nt, Human
gucuuauaguacaauuugaagu

SEQ ID NO: 682265 - RNA, 22 nt, Human
uguguguguaaaagcauuuaua

SEQ ID NO: 682266 - RNA, 22 nt, Human
ccagagacuggcugagagaucu

SEQ ID NO: 682267 - RNA, 22 nt, Human
cuguccuggccgcccuugugag

SEQ ID NO: 682268 - RNA, 22 nt, Human
aaugacaauggcagagguagaa

SEQ ID NO: 682269 - RNA, 22 nt, Human
cagaggccccagaacuagcucu

SEQ ID NO: 682270 - RNA, 22 nt, Human
acaguccuuguuucggucagau

SEQ ID NO: 682271 - RNA, 21 nt, Human
aaauguguuccauaaugcuuu

SEQ ID NO: 682272 - RNA, 22 nt, Human
gauuucaccugaucuugucauc

SEQ ID NO: 682273 - RNA, 22 nt, Human
ugcuggaagggucggcgugggc

SEQ ID NO: 682274 - RNA, 22 nt, Human
uacacagaaauuguguagggau

SEQ ID NO: 682275 - RNA, 22 nt, Human
gcagcagagaccccaggaagga

SEQ ID NO: 682276 - RNA, 22 nt, Human
ccagcaucagucagauuuugcu

SEQ ID NO: 682277 - RNA, 22 nt, Human
gcuguuuccagacaaugucuuu

SEQ ID NO: 682278 - RNA, 22 nt, Human
aggcucaguucacgucaacuuu

SEQ ID NO: 682279 - RNA, 22 nt, Human
uugauuuuuccagcuucuagag

SEQ ID NO: 682280 - RNA, 22 nt, Human
cuucccugguguuagcccaaug

SEQ ID NO: 682281 - RNA, 22 nt, Human
acagggcagagggcaguuggua

SEQ ID NO: 682282 - RNA, 23 nt, Human
ccuggcuggauucucugcauuca

SEQ ID NO: 682283 - RNA, 22 nt, Human
cacagaggcucaaagccaggug

SEQ ID NO: 682284 - RNA, 22 nt, Human
auucugaauucugagccuuuca

SEQ ID NO: 682285 - RNA, 22 nt, Human
ggucuggauaauuccaguaccu

SEQ ID NO: 682286 - RNA, 22 nt, Human
aguuagaaaguaaaucauuuga

SEQ ID NO: 682287 - RNA, 22 nt, Human
uuccucucgcucuccggggccc

SEQ ID NO: 682288 - RNA, 18 nt, Human
caugggugacagguggau

SEQ ID NO: 682289 - RNA, 22 nt, Human
uguuuacaagccacuuguuaag

SEQ ID NO: 682290 - RNA, 22 nt, Human
uagcaggguaaauguagaugga

SEQ ID NO: 682291 - RNA, 22 nt, Human
ucugccuggccuggagggcaca

SEQ ID NO: 682292 - RNA, 22 nt, Human
cuggagggacuuucucacggau

SEQ ID NO: 682293 - RNA, 22 nt, Human
gggugggugguccgcagacaua

SEQ ID NO: 682294 - RNA, 22 nt, Human
agucugggcauuuaggauguug

SEQ ID NO: 682295 - RNA, 22 nt, Human
gcucccagcauugcugcugaau

SEQ ID NO: 682296 - RNA, 22 nt, Human
uuucuuuugaauaguguguggu

SEQ ID NO: 682297 - RNA, 22 nt, Human
acagagucucaaaccuacaaag

SEQ ID NO: 682298 - RNA, 22 nt, Human
caguuuauauucuagugcuguu

SEQ ID NO: 682299 - RNA, 22 nt, Human
ggcaaagccuuacucuaacuga

SEQ ID NO: 682300 - RNA, 22 nt, Human
aaggaaauacaacauguauuca

SEQ ID NO: 682301 - RNA, 22 nt, Human
ugggccuguugccugaguccau

SEQ ID NO: 682302 - RNA, 22 nt, Human
uugucugaaucuggagcucucu

SEQ ID NO: 682303 - RNA, 20 nt, Human
aggguucccuuguucagcag

SEQ ID NO: 682304 - RNA, 22 nt, Human
cagcuccagcccaggcagcucc

SEQ ID NO: 682305 - RNA, 22 nt, Human
cagccagagaaagggcacugcc

SEQ ID NO: 682306 - RNA, 22 nt, Human
uugggcagugauuaguucauga

SEQ ID NO: 682307 - RNA, 22 nt, Human
aaggucugaguuuugccaggcc

SEQ ID NO: 682308 - RNA, 22 nt, Human
ucucagcucuuuuuucacagaa

SEQ ID NO: 682309 - RNA, 22 nt, Human
ugugaaaggggucacagggaaa

SEQ ID NO: 682310 - RNA, 22 nt, Human
uuucacacugcagcaucagaga

SEQ ID NO: 682311 - RNA, 22 nt, Human
ucugccuguaccucuuuuuugc

SEQ ID NO: 682312 - RNA, 19 nt, Human
ucugacacuuacacacccc

SEQ ID NO: 682313 - RNA, 22 nt, Human
uugucgggcuuacgcagggcca

SEQ ID NO: 682314 - RNA, 22 nt, Human
uauugucaagaaguuuauagug

SEQ ID NO: 682315 - RNA, 22 nt, Human
uccuccagcccucuaggaaaau

SEQ ID NO: 682316 - RNA, 22 nt, Human
aagcaggcuugguguggccgcu

SEQ ID NO: 682317 - RNA, 18 nt, Human
ggugaggcggcggccagc

SEQ ID NO: 682318 - RNA, 22 nt, Human
cccagccuacucugccauagca

SEQ ID NO: 682319 - RNA, 22 nt, Human
acggcaggcucagagcuggaau

SEQ ID NO: 682320 - RNA, 22 nt, Human
aaauugcuugagauuagucucc

SEQ ID NO: 682321 - RNA, 17 nt, Human
ggcagcugccacuuuuu

SEQ ID NO: 682322 - RNA, 22 nt, Human
ggugucugaugguggcuucuca

SEQ ID NO: 682323 - RNA, 22 nt, Human
auguauuugcgagguuaggaaa

SEQ ID NO: 682324 - RNA, 22 nt, Human
uagaauugaguuucacuguucc

SEQ ID NO: 682325 - RNA, 22 nt, Human
guggcagagugcgguucugacc

SEQ ID NO: 682326 - RNA, 22 nt, Human
agagaugaaaaguggagacugg

SEQ ID NO: 682327 - RNA, 22 nt, Human
agagaaaugggguaaucuuuca

SEQ ID NO: 682328 - RNA, 22 nt, Human
aaaauugucgaacaguaguaac

SEQ ID NO: 682329 - RNA, 22 nt, Human
ucugcacaucccccaaaguauu

SEQ ID NO: 682330 - RNA, 22 nt, Human
ugcauuccacagaagggaaaac

SEQ ID NO: 682331 - RNA, 22 nt, Human
auuugccuuacugaagaaggag

SEQ ID NO: 682332 - RNA, 22 nt, Human
uauguguauguucauucaugca

SEQ ID NO: 682333 - RNA, 22 nt, Human
aguuaacaaguuggcaaucaac

SEQ ID NO: 682334 - RNA, 22 nt, Human
uagaucauauuuguggagaaaa

SEQ ID NO: 682335 - RNA, 22 nt, Human
auggcugcaucauccugguuga

SEQ ID NO: 682336 - RNA, 22 nt, Human
augcagggucuccgugugacga

SEQ ID NO: 682337 - RNA, 22 nt, Human
guuaaccaaggcaccaagugua

SEQ ID NO: 682338 - RNA, 22 nt, Human
uagcauaacagguaagagugag

SEQ ID NO: 682339 - RNA, 22 nt, Human
uuucuaaggugagguagaaaau

SEQ ID NO: 682340 - RNA, 22 nt, Human
cuggagcugccagacgggcaca

SEQ ID NO: 682341 - RNA, 22 nt, Human
agguccugucuuaucucuguaa

SEQ ID NO: 682342 - RNA, 22 nt, Human
ccuggcucuucagagguuccua

SEQ ID NO: 682343 - RNA, 22 nt, Human
agcagggcaugaauaaggguuu

SEQ ID NO: 682344 - RNA, 22 nt, Human
auguguuaaugagcaaugaccu

SEQ ID NO: 682345 - RNA, 22 nt, Human
uucuaugccauguucagcuacu

SEQ ID NO: 682346 - RNA, 22 nt, Human
cugcccugacugaccuuuugaa

SEQ ID NO: 682347 - RNA, 22 nt, Human
agagacagaucugagggaccuc

SEQ ID NO: 682348 - RNA, 22 nt, Human
auacagguggacuucaguuagu

SEQ ID NO: 682349 - RNA, 22 nt, Human
gcugugcugcgggaggauuccg

SEQ ID NO: 682350 - RNA, 22 nt, Human
ucacagucggugacuucuugcu

SEQ ID NO: 682351 - RNA, 22 nt, Human
caggcaggagaggaggauuucu

SEQ ID NO: 682352 - RNA, 22 nt, Human
aaauaguaaagugguagccauc

SEQ ID NO: 682353 - RNA, 22 nt, Human
cucugggcugccuuuuagcucu

SEQ ID NO: 682354 - RNA, 22 nt, Human
agcauucuguggucuucuaugg

SEQ ID NO: 682355 - RNA, 22 nt, Human
ugaucaguguugguucuaucua

SEQ ID NO: 682356 - RNA, 22 nt, Human
agccaggcuacuccuugcugac

SEQ ID NO: 682357 - RNA, 22 nt, Human
auuaguaaaacauuguauaugu

SEQ ID NO: 682358 - RNA, 20 nt, Human
ggaagccagggugcagggga

SEQ ID NO: 682359 - RNA, 21 nt, Human
agcagcagggaagccucaucc

SEQ ID NO: 682360 - RNA, 22 nt, Human
gcaaagcaaucaggaguagcau

SEQ ID NO: 682361 - RNA, 22 nt, Human
aaacuuuaaauuuguaccucug

SEQ ID NO: 682362 - RNA, 22 nt, Human
uuucagacucaucucaagcuuu

SEQ ID NO: 682363 - RNA, 22 nt, Human
aauuaguauugcgauucauuag

SEQ ID NO: 682364 - RNA, 22 nt, Human
uucugaggcacuggcucuccca

SEQ ID NO: 682365 - RNA, 23 nt, Human
uugcuuccacuguaaguggagaa

SEQ ID NO: 682366 - RNA, 22 nt, Human
ggcaggaagaggagggugaacu

SEQ ID NO: 682367 - RNA, 22 nt, Human
ucugccccugcugggcacagag

SEQ ID NO: 682368 - RNA, 22 nt, Human
ucugcuucacuuccccaagcuu

SEQ ID NO: 682369 - RNA, 22 nt, Human
ucaggggagguugaaucgucuc

SEQ ID NO: 682370 - RNA, 22 nt, Human
gaaccuguuuauguuaccugcg

SEQ ID NO: 682371 - RNA, 22 nt, Human
ucucaguguuaucuaucugccu

SEQ ID NO: 682372 - RNA, 22 nt, Human
ccaggguggcguagaugcuggg

SEQ ID NO: 682373 - RNA, 22 nt, Human
cagcaacuuaggcagaacaucu

SEQ ID NO: 682374 - RNA, 22 nt, Human
ugcucuagcucauaggacucau

SEQ ID NO: 682375 - RNA, 22 nt, Human
gaauacacgaauagagcauggu

SEQ ID NO: 682376 - RNA, 22 nt, Human
uacaguuuguauggucaggaau

SEQ ID NO: 682377 - RNA, 22 nt, Human
aggcuggagguuuguugcggcu

SEQ ID NO: 682378 - RNA, 22 nt, Human
uuagcuuuggauugcauuuagu

SEQ ID NO: 682379 - RNA, 22 nt, Human
acucugggcuguuaggagcugu

SEQ ID NO: 682380 - RNA, 22 nt, Human
uaaaacaccuguagugucugcc

SEQ ID NO: 682381 - RNA, 22 nt, Human
caugagagauccuucaugagag

SEQ ID NO: 682382 - RNA, 20 nt, Human
agcaccuguguagaagcauc

SEQ ID NO: 682383 - RNA, 20 nt, Human
cuaucuccuggcgugccuuc

SEQ ID NO: 682384 - RNA, 22 nt, Human
caagccagucagcucaguagau

SEQ ID NO: 682385 - RNA, 22 nt, Human
ucauaugucacucaugggcaua

SEQ ID NO: 682386 - RNA, 22 nt, Human
uuuugcaaugagaugcuuguca

SEQ ID NO: 682387 - RNA, 20 nt, Human
cguguguggcuauuuugggu

SEQ ID NO: 682388 - RNA, 22 nt, Human
aaggaaucacuucuuuaaauga

SEQ ID NO: 682389 - RNA, 20 nt, Human
auucuacaagaauaagcaug

SEQ ID NO: 682390 - RNA, 22 nt, Human
ugggcagccaucccagccucuc

SEQ ID NO: 682391 - RNA, 22 nt, Human
aagcagaggaccgacggaggga

SEQ ID NO: 682392 - RNA, 22 nt, Human
augacauuuauacagugagcuu

SEQ ID NO: 682393 - RNA, 22 nt, Human
uugcagcaaggucaugaaaugu

SEQ ID NO: 682394 - RNA, 22 nt, Human
caggacagugcagguccauccu

SEQ ID NO: 682395 - RNA, 22 nt, Human
ucaggagaacuuccuucuaccc

SEQ ID NO: 682396 - RNA, 22 nt, Human
uuugcaguuucauugcugaaau

SEQ ID NO: 682397 - RNA, 22 nt, Human
ucagagaaauaauugcugaguu

SEQ ID NO: 682398 - RNA, 22 nt, Human
uggccguguuagauguuuggcu

SEQ ID NO: 682399 - RNA, 22 nt, Human
caggcuuuacuuucucucugaa

SEQ ID NO: 682400 - RNA, 22 nt, Human
gaaguauuauagcauauuagcc

SEQ ID NO: 682401 - RNA, 20 nt, Human
aaggcacuaugucugcuagc

SEQ ID NO: 682402 - RNA, 22 nt, Human
acaguucaagacaucaguauga

SEQ ID NO: 682403 - RNA, 22 nt, Human
acauagaacuucccagugagca

SEQ ID NO: 682404 - RNA, 22 nt, Human
auauuuguugaguucuuaugau

SEQ ID NO: 682405 - RNA, 22 nt, Human
aguuaaacucuaguagauacaa

SEQ ID NO: 682406 - RNA, 22 nt, Human
cagcuguguaaacacaugugua

SEQ ID NO: 682407 - RNA, 22 nt, Human
ugugugagacaauuggcugugg

SEQ ID NO: 682408 - RNA, 22 nt, Human
cuggggaugggaccuggcauaa

SEQ ID NO: 682409 - RNA, 21 nt, Human
ccagcucugccuccaguuggu

SEQ ID NO: 682410 - RNA, 22 nt, Human
ucaguugcaccugcaugguacu

SEQ ID NO: 682411 - RNA, 22 nt, Human
cugggcugucaguuuuguuuua

SEQ ID NO: 682412 - RNA, 22 nt, Human
ucccagggacaccaagcuguuu

SEQ ID NO: 682413 - RNA, 22 nt, Human
agauacaucauuuauaccuuca

SEQ ID NO: 682414 - RNA, 22 nt, Human
auguguaaugugguauuuuaau

SEQ ID NO: 682415 - RNA, 23 nt, Human
gugcucuucaguuuuagggucau

SEQ ID NO: 682416 - RNA, 22 nt, Human
ucacagagcacguaucaugccu

SEQ ID NO: 682417 - RNA, 22 nt, Human
gugcugaaauggaccucaggaa

SEQ ID NO: 682418 - RNA, 22 nt, Human
caggagcucacagucuuugggu

SEQ ID NO: 682419 - RNA, 22 nt, Human
ugaacaugcuguugauggccug

SEQ ID NO: 682420 - RNA, 22 nt, Human
gggauauguuuagguguuggag

SEQ ID NO: 682421 - RNA, 19 nt, Human
uccugcagaccagaccugu

SEQ ID NO: 682422 - RNA, 22 nt, Human
gcuggccuuugaggaagcugcg

SEQ ID NO: 682423 - RNA, 22 nt, Human
auucagaaagauaugccugguu

SEQ ID NO: 682424 - RNA, 22 nt, Human
guuucagauuugguuucagaag

SEQ ID NO: 682425 - RNA, 22 nt, Human
gaggagggagaauuaggcuuaa

SEQ ID NO: 682426 - RNA, 20 nt, Human
ucacaugcauauucguuucu

SEQ ID NO: 682427 - RNA, 22 nt, Human
ucucacacaacauguuacuuug

SEQ ID NO: 682428 - RNA, 22 nt, Human
cagcuugggaguuugguuuuau

SEQ ID NO: 682429 - RNA, 22 nt, Human
uaggcauuuaagauggauaagg

SEQ ID NO: 682430 - RNA, 22 nt, Human
cuuucuggacaagacagaggga

SEQ ID NO: 682431 - RNA, 22 nt, Human
cacuccaggucccaguuccugg

SEQ ID NO: 682432 - RNA, 22 nt, Human
aguccaugcugucuacagaauc

SEQ ID NO: 682433 - RNA, 22 nt, Human
gaggccauaagaaguucuuggg

SEQ ID NO: 682434 - RNA, 21 nt, Human
gccuucacucccagaguuugu

SEQ ID NO: 682435 - RNA, 22 nt, Human
ugugauuauuugauuaacaugu

SEQ ID NO: 682436 - RNA, 22 nt, Human
uucauugagcuguacacuuagg

SEQ ID NO: 682437 - RNA, 22 nt, Human
ggaccaggccagccucccugcg

SEQ ID NO: 682438 - RNA, 22 nt, Human
ucaguguguaauucuuuguuuc

SEQ ID NO: 682439 - RNA, 22 nt, Human
gaggccacauuacuuggugggu

SEQ ID NO: 682440 - RNA, 22 nt, Human
cugggccagaagacauuuagga

SEQ ID NO: 682441 - RNA, 22 nt, Human
gcauguaaucacucuaggaagg

SEQ ID NO: 682442 - RNA, 22 nt, Human
aaguacaugcuguaaugauugg

SEQ ID NO: 682443 - RNA, 22 nt, Human
gcucugcugaagccccuugcau

SEQ ID NO: 682444 - RNA, 22 nt, Human
cuggggacugaaggauguugcu

SEQ ID NO: 682445 - RNA, 22 nt, Human
cugugggcauuugagugugggu

SEQ ID NO: 682446 - RNA, 23 nt, Human
aggcccaacucugugagggcugc

SEQ ID NO: 682447 - RNA, 22 nt, Human
ucaaggaagggauauucuugaa

SEQ ID NO: 682448 - RNA, 22 nt, Human
ucagggaaaccuaaggaagcca

SEQ ID NO: 682449 - RNA, 21 nt, Human
gcagagaaugaacuuuggcuu

SEQ ID NO: 682450 - RNA, 22 nt, Human
gaauggcuaucggauuauuagg

SEQ ID NO: 682451 - RNA, 22 nt, Human
uguacaaaacaagaugggggua

SEQ ID NO: 682452 - RNA, 22 nt, Human
ucugggcugguugugcuugcuu

SEQ ID NO: 682453 - RNA, 22 nt, Human
uauaauuuuucuguggccaguu

SEQ ID NO: 682454 - RNA, 22 nt, Human
cuacuguaauagaugaauuuga

SEQ ID NO: 682455 - RNA, 22 nt, Human
aaauuguaggaucacaugaccu

SEQ ID NO: 682456 - RNA, 22 nt, Human
cagcuggcgccuggggaccaga

SEQ ID NO: 682457 - RNA, 22 nt, Human
gggggaagaaagaacauggcau

SEQ ID NO: 682458 - RNA, 22 nt, Human
uugucacuagugaagaaucagg

SEQ ID NO: 682459 - RNA, 22 nt, Human
ucccugggguuccuccagccac

SEQ ID NO: 682460 - RNA, 22 nt, Human
uguuugaacugaauaacauagu

SEQ ID NO: 682461 - RNA, 22 nt, Human
uugcuuuaucuaagcauggcca

SEQ ID NO: 682462 - RNA, 22 nt, Human
uuugaaaucuaaucaaggaaca

SEQ ID NO: 682463 - RNA, 22 nt, Human
uuagaucauuuuagcuaaaugg

SEQ ID NO: 682464 - RNA, 22 nt, Human
ucucacugggucacagcagagg

SEQ ID NO: 682465 - RNA, 19 nt, Human
gaggcccaugagggugcuc

SEQ ID NO: 682466 - RNA, 22 nt, Human
ucagagucauugcaaguagaag

SEQ ID NO: 682467 - RNA, 22 nt, Human
aauuauacaugaaggcauuaua

SEQ ID NO: 682468 - RNA, 23 nt, Human
uucuggauguucuagucugagag

SEQ ID NO: 682469 - RNA, 22 nt, Human
ccaaucuuguuuucuacaucca

SEQ ID NO: 682470 - RNA, 22 nt, Human
uuucuucuugauuuaaacaggg

SEQ ID NO: 682471 - RNA, 22 nt, Human
uuucucccuccacuacaggcuc

SEQ ID NO: 682472 - RNA, 22 nt, Human
gacugaggugaccuaggacuac

SEQ ID NO: 682473 - RNA, 22 nt, Human
cugugccuggggggcagagcug

SEQ ID NO: 682474 - RNA, 17 nt, Human
augcucuauagucagug

SEQ ID NO: 682475 - RNA, 22 nt, Human
aacaggcaauuuaggacucuuu

SEQ ID NO: 682476 - RNA, 22 nt, Human
ugcccucagaauugcucccugc

SEQ ID NO: 682477 - RNA, 22 nt, Human
agccucugucaagcuuuucaaa

SEQ ID NO: 682478 - RNA, 22 nt, Human
ucauuucaaugauacuacuaag

SEQ ID NO: 682479 - RNA, 22 nt, Human
caucaaagggccuguggugcag

SEQ ID NO: 682480 - RNA, 22 nt, Human
gcccagaacagugucacauguc

SEQ ID NO: 682481 - RNA, 22 nt, Human
ucagacuuuuaaagacugaaug

SEQ ID NO: 682482 - RNA, 22 nt, Human
agccagcuaagggaagcaugau

SEQ ID NO: 682483 - RNA, 22 nt, Human
cugaggaguuuggguuguucaa

SEQ ID NO: 682484 - RNA, 22 nt, Human
ugguggcagagcaagagcugga

SEQ ID NO: 682485 - RNA, 22 nt, Human
cagcaucuggauuuccuccacu

SEQ ID NO: 682486 - RNA, 22 nt, Human
aagacauuguggagauguugcu

SEQ ID NO: 682487 - RNA, 21 nt, Human
gccugggaaaucugggaagcc

SEQ ID NO: 682488 - RNA, 22 nt, Human
agucuuacaugagaaagaaccu

SEQ ID NO: 682489 - RNA, 22 nt, Human
gagcugggaagauagcuugagc

SEQ ID NO: 682490 - RNA, 22 nt, Human
aaaggccaauaaagacaagcug

SEQ ID NO: 682491 - RNA, 22 nt, Human
aacagcaauagcacuauucauu

SEQ ID NO: 682492 - RNA, 22 nt, Human
gaugagaauguuuaucaaaugc

SEQ ID NO: 682493 - RNA, 22 nt, Human
aggaagcccaagucucaucuuc

SEQ ID NO: 682494 - RNA, 22 nt, Human
cugcauccuaaccuccaugcag

SEQ ID NO: 682495 - RNA, 22 nt, Human
ucucuggcuuagguugagugca

SEQ ID NO: 682496 - RNA, 20 nt, Human
ggauggccggaccagagccu

SEQ ID NO: 682497 - RNA, 21 nt, Human
aaggcuggagaugcaggucug

SEQ ID NO: 682498 - RNA, 22 nt, Human
ugcauguguuugccacagugag

SEQ ID NO: 682499 - RNA, 19 nt, Human
agcugucugcugcuuuugu

SEQ ID NO: 682500 - RNA, 22 nt, Human
uaugcucuccucccagucccag

SEQ ID NO: 682501 - RNA, 22 nt, Human
agaagaaacugucggggauauu

SEQ ID NO: 682502 - RNA, 22 nt, Human
uuuccauauuuaaucaaaauaa

SEQ ID NO: 682503 - RNA, 22 nt, Human
gcagggcagccacaggcccccu

SEQ ID NO: 682504 - RNA, 23 nt, Human
gggggcgugucauggagggccac

SEQ ID NO: 682505 - RNA, 23 nt, Human
ccuccccuucccacagcugggug

SEQ ID NO: 682506 - RNA, 22 nt, Human
caguaugauugccaguucuauc

SEQ ID NO: 682507 - RNA, 18 nt, Human
uaaaccagaugacaguug

SEQ ID NO: 682508 - RNA, 22 nt, Human
aggccuccugcagggaugagug

SEQ ID NO: 682509 - RNA, 22 nt, Human
gcaauacaguugaagagauuga

SEQ ID NO: 682510 - RNA, 22 nt, Human
aaguuucauuguucauguaaca

SEQ ID NO: 682511 - RNA, 22 nt, Human
aggugcuggaguagaagaaaaa

SEQ ID NO: 682512 - RNA, 17 nt, Human
uccagcuccucauuguu

SEQ ID NO: 682513 - RNA, 22 nt, Human
ucacaucucccuggaggacaca

SEQ ID NO: 682514 - RNA, 22 nt, Human
aaaaauacuucacuucugggug

SEQ ID NO: 682515 - RNA, 22 nt, Human
auccccagggagugagcugucu

SEQ ID NO: 682516 - RNA, 21 nt, Human
aguacaucucaaauguaaauc

SEQ ID NO: 682517 - RNA, 22 nt, Human
ucuuuuaucuguuguguaacaa

SEQ ID NO: 682518 - RNA, 22 nt, Human
aaaucuuucccuuuacuaucca

SEQ ID NO: 682519 - RNA, 22 nt, Human
uuuuagaaauacugauuuagug

SEQ ID NO: 682520 - RNA, 22 nt, Human
caagggcagcagccucaagcgg

SEQ ID NO: 682521 - RNA, 22 nt, Human
aucauugaguaaaaugaauaca

SEQ ID NO: 682522 - RNA, 22 nt, Human
uccuugaagaaugauucuugga

SEQ ID NO: 682523 - RNA, 22 nt, Human
acagacauuuucuguauugccu

SEQ ID NO: 682524 - RNA, 22 nt, Human
ucacuaaugagcuaaggaaaag

SEQ ID NO: 682525 - RNA, 23 nt, Human
ugcacaggacggccuuauaagua

SEQ ID NO: 682526 - RNA, 22 nt, Human
ugcaagggcuuagggggcugug

SEQ ID NO: 682527 - RNA, 22 nt, Human
auaacuuaaugggucaugcucu

SEQ ID NO: 682528 - RNA, 22 nt, Human
uacagcuuaaaaaagccaacuu

SEQ ID NO: 682529 - RNA, 22 nt, Human
cacaugcuuagauuucagugga

SEQ ID NO: 682530 - RNA, 22 nt, Human
uacagccucaucacgggagcug

SEQ ID NO: 682531 - RNA, 22 nt, Human
cugcccauucaaccagcuacag

SEQ ID NO: 682532 - RNA, 22 nt, Human
agcagggcagcuuuuuucagaa

SEQ ID NO: 682533 - RNA, 22 nt, Human
uggggcuggcacagucucuauu

SEQ ID NO: 682534 - RNA, 22 nt, Human
uggcuggggccugaauccugca

SEQ ID NO: 682535 - RNA, 22 nt, Human
gucuucuguucugugaggcuuc

SEQ ID NO: 682536 - RNA, 22 nt, Human
agcacaauauggguuuuauagu

SEQ ID NO: 682537 - RNA, 22 nt, Human
agggcagagcacugaauuggga

SEQ ID NO: 682538 - RNA, 19 nt, Human
caugagcugcucacuuccc

SEQ ID NO: 682539 - RNA, 22 nt, Human
aggacacaccagguccagcugu

SEQ ID NO: 682540 - RNA, 22 nt, Human
gcuguucccauguggggcucag

SEQ ID NO: 682541 - RNA, 20 nt, Human
auucacaggcacaaaacccu

SEQ ID NO: 682542 - RNA, 19 nt, Human
ugaagcaggcagagaagau

SEQ ID NO: 682543 - RNA, 22 nt, Human
ugcauugagauuuuaaaauuca

SEQ ID NO: 682544 - RNA, 22 nt, Human
uugcuucauuaaguucucacag

SEQ ID NO: 682545 - RNA, 22 nt, Human
uguggcauacacaugagguggu

SEQ ID NO: 682546 - RNA, 22 nt, Human
ggcagaggaggggugaauuugc

SEQ ID NO: 682547 - RNA, 22 nt, Human
agugcaaagcagccuguacacc

SEQ ID NO: 682548 - RNA, 22 nt, Human
acauugaucagccucccaugca

SEQ ID NO: 682549 - RNA, 22 nt, Human
cccaggcagccugcagggaagg

SEQ ID NO: 682550 - RNA, 22 nt, Human
cugucagcuucuccuggccaga

SEQ ID NO: 682551 - RNA, 22 nt, Human
gggcuggggcucaauaauuugu

SEQ ID NO: 682552 - RNA, 22 nt, Human
uucaaagauaauguagcauuuu

SEQ ID NO: 682553 - RNA, 19 nt, Human
aggaaaggaucaaaauagc

SEQ ID NO: 682554 - RNA, 18 nt, Human
auauucaagaagacagag

SEQ ID NO: 682555 - RNA, 22 nt, Human
cucagugugagugagaagugca

SEQ ID NO: 682556 - RNA, 22 nt, Human
uuucaauaacaaagcucauuuu

SEQ ID NO: 682557 - RNA, 22 nt, Human
ccuaugccugucacucugcgcu

SEQ ID NO: 682558 - RNA, 22 nt, Human
uugcugugucauuuguuuaauc

SEQ ID NO: 682559 - RNA, 22 nt, Human
auucuacugcaaauccugacca

SEQ ID NO: 682560 - RNA, 22 nt, Human
gacauugaguauuucuuuucuc

SEQ ID NO: 682561 - RNA, 22 nt, Human
ugcugaggaaaaaugugacucu

SEQ ID NO: 682562 - RNA, 22 nt, Human
uacagaguauuuuuaauauggu

SEQ ID NO: 682563 - RNA, 23 nt, Human
uggcuccaugaaaauuacgagga

SEQ ID NO: 682564 - RNA, 20 nt, Human
caggcagaggaugcugacca

SEQ ID NO: 682565 - RNA, 21 nt, Human
uacauugaagaaugggaauga

SEQ ID NO: 682566 - RNA, 22 nt, Human
aaucuguuuaguucugcguaug

SEQ ID NO: 682567 - RNA, 22 nt, Human
uuggccaaauaaucuugcagau

SEQ ID NO: 682568 - RNA, 22 nt, Human
gaauggcauagcuuucuuuaca

SEQ ID NO: 682569 - RNA, 22 nt, Human
uuuauauagagauuugugcaug

SEQ ID NO: 682570 - RNA, 22 nt, Human
cccagcaucuccaggcauggcc

SEQ ID NO: 682571 - RNA, 22 nt, Human
gaggaaugucagcacaggccuc

SEQ ID NO: 682572 - RNA, 22 nt, Human
gagggggcgaacagaagcaagg

SEQ ID NO: 682573 - RNA, 22 nt, Human
cauaauuaggcaguugaucauu

SEQ ID NO: 682574 - RNA, 22 nt, Human
augaaaacagccuccugugaua

SEQ ID NO: 682575 - RNA, 22 nt, Human
uguuaugaacuucuagaaaaca

SEQ ID NO: 682576 - RNA, 22 nt, Human
aagauuauggcagauaacaauu

SEQ ID NO: 682577 - RNA, 22 nt, Human
cuguccuccggccaccuacagu

SEQ ID NO: 682578 - RNA, 22 nt, Human
ucuaccacucaugcuacuuacu

SEQ ID NO: 682579 - RNA, 22 nt, Human
aucuggagcaagauuaagagau

SEQ ID NO: 682580 - RNA, 22 nt, Human
aguucuuauugaauagaaauca

SEQ ID NO: 682581 - RNA, 22 nt, Human
uggcuucuuuguagaaauugaa

SEQ ID NO: 682582 - RNA, 22 nt, Human
caguuucuucuauuuugaacua

SEQ ID NO: 682583 - RNA, 21 nt, Human
ucugccugagacuuugcuggu

SEQ ID NO: 682584 - RNA, 22 nt, Human
uuagcuuuucucuauguuggcu

SEQ ID NO: 682585 - RNA, 22 nt, Human
aaaugcacaaaguaaguguaau

SEQ ID NO: 682586 - RNA, 22 nt, Human
ggugugucugccaggaacugca

SEQ ID NO: 682587 - RNA, 22 nt, Human
ggagaaugauauauagcucagu

SEQ ID NO: 682588 - RNA, 22 nt, Human
guggaaauaguuugguuauaga

SEQ ID NO: 682589 - RNA, 22 nt, Human
augcuguguggucaaguuaauu

SEQ ID NO: 682590 - RNA, 22 nt, Human
agacagcacuuuuguauggggg

SEQ ID NO: 682591 - RNA, 22 nt, Human
ucagaagccuugauuaucuaga

SEQ ID NO: 682592 - RNA, 22 nt, Human
aagagcauggaauggagaucca

SEQ ID NO: 682593 - RNA, 22 nt, Human
acaucucaugaaugauaaauca

SEQ ID NO: 682594 - RNA, 22 nt, Human
ccagggagcggggcugggucuc

SEQ ID NO: 682595 - RNA, 23 nt, Human
uaggggaaaaaucuucugcaauu

SEQ ID NO: 682596 - RNA, 22 nt, Human
uauuuaaaaagaggccagcugg

SEQ ID NO: 682597 - RNA, 22 nt, Human
ggcacagcacagagcacaugua

SEQ ID NO: 682598 - RNA, 22 nt, Human
gaggcuuucacaagguuaguuc

SEQ ID NO: 682599 - RNA, 23 nt, Human
aacagccaacuuuagcggguggc

SEQ ID NO: 682600 - RNA, 22 nt, Human
gaaauugucagugauaugauac

SEQ ID NO: 682601 - RNA, 22 nt, Human
aggcuauuuccacucuucucau

SEQ ID NO: 682602 - RNA, 22 nt, Human
uuaucucucacuuuuaaggaca

SEQ ID NO: 682603 - RNA, 22 nt, Human
cuucuucaauagcaagcgcaua

SEQ ID NO: 682604 - RNA, 22 nt, Human
guuuuauaauugcuucauaaga

SEQ ID NO: 682605 - RNA, 22 nt, Human
uggcugugaauggcaaauaauc

SEQ ID NO: 682606 - RNA, 22 nt, Human
uuauugacugaaaugagaguga

SEQ ID NO: 682607 - RNA, 22 nt, Human
ccugggcucgcgcacuucaccc

SEQ ID NO: 682608 - RNA, 22 nt, Human
ugaggggccagaccccaccuag

SEQ ID NO: 682609 - RNA, 22 nt, Human
acaugucuguaauuauuuuagg

SEQ ID NO: 682610 - RNA, 19 nt, Human
ugcuuaccaucugugcugg

SEQ ID NO: 682611 - RNA, 22 nt, Human
uacagucaacauugaugaugau

SEQ ID NO: 682612 - RNA, 22 nt, Human
aagguccaugacucggcauagu

SEQ ID NO: 682613 - RNA, 20 nt, Human
aacucagagaugaaaaagac

SEQ ID NO: 682614 - RNA, 22 nt, Human
cucaguuuccucuucuguugaa

SEQ ID NO: 682615 - RNA, 22 nt, Human
gucggccacgcaggugcgguag

SEQ ID NO: 682616 - RNA, 22 nt, Human
gagacugggggcuuggccuuuu

SEQ ID NO: 682617 - RNA, 22 nt, Human
aaugauccuacacauggaauuc

SEQ ID NO: 682618 - RNA, 22 nt, Human
cagggggcuguggcuguccagu

SEQ ID NO: 682619 - RNA, 22 nt, Human
agaaagugccucccuugggagc

SEQ ID NO: 682620 - RNA, 21 nt, Human
gagagcuaacagugacagcuc

SEQ ID NO: 682621 - RNA, 22 nt, Human
uuaacaaggugacugcauuaaa

SEQ ID NO: 682622 - RNA, 22 nt, Human
aauauagcucacuauaccaugg

SEQ ID NO: 682623 - RNA, 22 nt, Human
uuaaauauuauguugucugcaa

SEQ ID NO: 682624 - RNA, 19 nt, Human
gacuuuggaaaugcuguuu

SEQ ID NO: 682625 - RNA, 22 nt, Human
auuccuugcacaucagauaguu

SEQ ID NO: 682626 - RNA, 22 nt, Human
aggggauggagcuggaaggcag

SEQ ID NO: 682627 - RNA, 22 nt, Human
ugauuacaaaagauuguuugaa

SEQ ID NO: 682628 - RNA, 19 nt, Human
ggcucucccuugagagagc

SEQ ID NO: 682629 - RNA, 18 nt, Human
cuugagcuaagggacccc

SEQ ID NO: 682630 - RNA, 21 nt, Human
ugagccaggcugacggcugug

SEQ ID NO: 682631 - RNA, 22 nt, Human
agguaagguuuggaggcagugg

SEQ ID NO: 682632 - RNA, 21 nt, Human
agacagacugccugacccacg

SEQ ID NO: 682633 - RNA, 22 nt, Human
acagggcuuagaacuuggccuc

SEQ ID NO: 682634 - RNA, 22 nt, Human
cucugggcuuguugaccugcac

SEQ ID NO: 682635 - RNA, 22 nt, Human
aguuccauccuuccacugcccu

SEQ ID NO: 682636 - RNA, 22 nt, Human
cuucuucaucuguaaaacuugg

SEQ ID NO: 682637 - RNA, 19 nt, Human
caggaugaucccaugacac

SEQ ID NO: 682638 - RNA, 22 nt, Human
uuugaagaagcugaccuauuuu

SEQ ID NO: 682639 - RNA, 22 nt, Human
cuucaggaguaguuaccuagca

SEQ ID NO: 682640 - RNA, 22 nt, Human
aggcaggagugacccugacagg

SEQ ID NO: 682641 - RNA, 22 nt, Human
aagcacaucucaaacuucaucu

SEQ ID NO: 682642 - RNA, 22 nt, Human
aggaaacuaaggcucagugaag

SEQ ID NO: 682643 - RNA, 22 nt, Human
aucugcuuuugagaauuuacuu

SEQ ID NO: 682644 - RNA, 23 nt, Human
ugcugcccugccuucagcucucc

SEQ ID NO: 682645 - RNA, 22 nt, Human
ccaaaggcggaacugagucucu

SEQ ID NO: 682646 - RNA, 22 nt, Human
cuggcuuugaaaugcauuucag

SEQ ID NO: 682647 - RNA, 22 nt, Human
accaugaugcauccuuaaggaa

SEQ ID NO: 682648 - RNA, 22 nt, Human
uucuguaucucuguguuucuug

SEQ ID NO: 682649 - RNA, 22 nt, Human
uauagauagacugacgauacag

SEQ ID NO: 682650 - RNA, 22 nt, Human
aguuuguacugaauucaauuua

SEQ ID NO: 682651 - RNA, 22 nt, Human
acaugauuucagggaauucuca

SEQ ID NO: 682652 - RNA, 22 nt, Human
uacauacauauucauacaggug

SEQ ID NO: 682653 - RNA, 20 nt, Human
agcaggaaaagugccagucu

SEQ ID NO: 682654 - RNA, 22 nt, Human
uaccugaaccaagcccagcucu

SEQ ID NO: 682655 - RNA, 18 nt, Human
guuaacaauuacuaacgc

SEQ ID NO: 682656 - RNA, 22 nt, Human
agagccccucgguggagggguc

SEQ ID NO: 682657 - RNA, 21 nt, Human
cagaggcugagagggcaaucu

SEQ ID NO: 682658 - RNA, 22 nt, Human
uuauuagggugguuuauguucu

SEQ ID NO: 682659 - RNA, 22 nt, Human
cauggcuucaaagccuuuggca

SEQ ID NO: 682660 - RNA, 22 nt, Human
aagccagggauuccugagggag

SEQ ID NO: 682661 - RNA, 22 nt, Human
ggggcagauggaacagagcaca

SEQ ID NO: 682662 - RNA, 22 nt, Human
aaggguccagcaccucggcucc

SEQ ID NO: 682663 - RNA, 22 nt, Human
gccucccuccaccacugcaggu

SEQ ID NO: 682664 - RNA, 22 nt, Human
acaaacugaauggguuuucugu

SEQ ID NO: 682665 - RNA, 22 nt, Human
aauagaggagcuuuggacuccc

SEQ ID NO: 682666 - RNA, 20 nt, Human
ucagcucuuagaggucgcuu

SEQ ID NO: 682667 - RNA, 22 nt, Human
aacaagaagggaaggcaugauu

SEQ ID NO: 682668 - RNA, 18 nt, Human
gcagugccagccucuccu

SEQ ID NO: 682669 - RNA, 22 nt, Human
uuaauggaugcggcugcgugac

SEQ ID NO: 682670 - RNA, 18 nt, Human
gcuucucauuucuaagca

SEQ ID NO: 682671 - RNA, 22 nt, Human
caauguaucaagaagcaucagu

SEQ ID NO: 682672 - RNA, 18 nt, Human
ugcagcauguucccauaa

SEQ ID NO: 682673 - RNA, 22 nt, Human
acaaucauuccguucacaacag

SEQ ID NO: 682674 - RNA, 22 nt, Human
uguucccauggauaucugcaua

SEQ ID NO: 682675 - RNA, 22 nt, Human
agcagugggugacagagcugag

SEQ ID NO: 682676 - RNA, 22 nt, Human
caguccagccaguagggugugg

SEQ ID NO: 682677 - RNA, 22 nt, Human
auauaguuggguuucauucuac

SEQ ID NO: 682678 - RNA, 22 nt, Human
acugccugagcuauuggaaaag

SEQ ID NO: 682679 - RNA, 22 nt, Human
cuggccccaucuggagucugag

SEQ ID NO: 682680 - RNA, 18 nt, Human
uggccccuuaucaguccu

SEQ ID NO: 682681 - RNA, 22 nt, Human
gugccugggacacgagauuuuc

SEQ ID NO: 682682 - RNA, 22 nt, Human
uugauucugcugaucucggacg

SEQ ID NO: 682683 - RNA, 22 nt, Human
cagcugccacaccucuuucucu

SEQ ID NO: 682684 - RNA, 22 nt, Human
ucugucugaggaguuuuugacc

SEQ ID NO: 682685 - RNA, 22 nt, Human
acacuuuacagcuuccuuugca

SEQ ID NO: 682686 - RNA, 20 nt, Human
uuucagagugucuuuccauu

SEQ ID NO: 682687 - RNA, 23 nt, Human
ggaggucagugccugagggugag

SEQ ID NO: 682688 - RNA, 22 nt, Human
acauugaauucaaaauuacuga

SEQ ID NO: 682689 - RNA, 22 nt, Human
acucuggguucuuucacuugac

SEQ ID NO: 682690 - RNA, 22 nt, Human
ggcuggaaacucagguaggguu

SEQ ID NO: 682691 - RNA, 22 nt, Human
cacacaugguuccgcaggaugc

SEQ ID NO: 682692 - RNA, 22 nt, Human
acacuuuacagaauguuuugau

SEQ ID NO: 682693 - RNA, 22 nt, Human
ggcuucucagcacacuguccac

SEQ ID NO: 682694 - RNA, 22 nt, Human
ugagccccggaguuucaggcug

SEQ ID NO: 682695 - RNA, 22 nt, Human
cuggccacugcgggccucugcc

SEQ ID NO: 682696 - RNA, 22 nt, Human
agcaugaaaacaugaaacagca

SEQ ID NO: 682697 - RNA, 22 nt, Human
uauauucugauuccaucugugu

SEQ ID NO: 682698 - RNA, 22 nt, Human
cugcauaugauagaugccuugc

SEQ ID NO: 682699 - RNA, 22 nt, Human
aacacauggcaagagcaggaaa

SEQ ID NO: 682700 - RNA, 22 nt, Human
uugcugccugaggagcaacacu

SEQ ID NO: 682701 - RNA, 23 nt, Human
ccuucuguuaaccaucugggggg

SEQ ID NO: 682702 - RNA, 20 nt, Human
gaggagccaccuugagcugg

SEQ ID NO: 682703 - RNA, 22 nt, Human
auggccagcuagcacuugcauu

SEQ ID NO: 682704 - RNA, 22 nt, Human
cagagcugauuggauccagaga

SEQ ID NO: 682705 - RNA, 22 nt, Human
agcccagcaaagggguuugaga

SEQ ID NO: 682706 - RNA, 22 nt, Human
acaaaguuauucuuucagagga

SEQ ID NO: 682707 - RNA, 22 nt, Human
uucuccaggccgcgcagggggc

SEQ ID NO: 682708 - RNA, 22 nt, Human
cagcaagggauaaacaaggacg

SEQ ID NO: 682709 - RNA, 22 nt, Human
gagagaaaagggggaauugauu

SEQ ID NO: 682710 - RNA, 19 nt, Human
augagcuggcauuucaggu

SEQ ID NO: 682711 - RNA, 22 nt, Human
ugcaucagaguuugcugcugcu

SEQ ID NO: 682712 - RNA, 22 nt, Human
ucucugugacauuucugagccu

SEQ ID NO: 682713 - RNA, 22 nt, Human
aagggaugcaggaaagaagguu

SEQ ID NO: 682714 - RNA, 22 nt, Human
ggggacaguuaaagaccaagac

SEQ ID NO: 682715 - RNA, 21 nt, Human
gggcagcagcagcaacaaggg

SEQ ID NO: 682716 - RNA, 22 nt, Human
aggucauuuuugccuucuauuu

SEQ ID NO: 682717 - RNA, 22 nt, Human
ucucagaguaauucuuuaaggu

SEQ ID NO: 682718 - RNA, 22 nt, Human
ccagucaguucugauuaugugg

SEQ ID NO: 682719 - RNA, 22 nt, Human
cccaggucccggggccagcugc

SEQ ID NO: 682720 - RNA, 22 nt, Human
gaguccuuaauacacuggugga

SEQ ID NO: 682721 - RNA, 22 nt, Human
ccaggcagagugcuccagaaag

SEQ ID NO: 682722 - RNA, 22 nt, Human
aaauauacuagaugaugaccca

SEQ ID NO: 682723 - RNA, 22 nt, Human
aggcuggaucucuguugccuuc

SEQ ID NO: 682724 - RNA, 22 nt, Human
cugccacuuucacccagugcuc

SEQ ID NO: 682725 - RNA, 22 nt, Human
ccagguaccagucaaaucugua

SEQ ID NO: 682726 - RNA, 22 nt, Human
uguagaaggcuauagacuagga

SEQ ID NO: 682727 - RNA, 22 nt, Human
gcugaagagcaaggcugggucu

SEQ ID NO: 682728 - RNA, 22 nt, Human
ggcuucaauguauucacauuca

SEQ ID NO: 682729 - RNA, 22 nt, Human
uccagucaucucccuucacauu

SEQ ID NO: 682730 - RNA, 22 nt, Human
gcuucuaucccuccacugcacu

SEQ ID NO: 682731 - RNA, 22 nt, Human
cccaggcugugcaaacuucaaa

SEQ ID NO: 682732 - RNA, 22 nt, Human
gcuguuccugcuuagaggucgg

SEQ ID NO: 682733 - RNA, 22 nt, Human
acaucugagcaacagaacacua

SEQ ID NO: 682734 - RNA, 22 nt, Human
acagaugagagacaaugugcua

SEQ ID NO: 682735 - RNA, 22 nt, Human
acucuacagaaugaauaccugu

SEQ ID NO: 682736 - RNA, 22 nt, Human
cugcagucagcuuuuaagaucu

SEQ ID NO: 682737 - RNA, 22 nt, Human
aacacauauuuauauaugcaca

SEQ ID NO: 682738 - RNA, 22 nt, Human
uugcauuucccauugaguaaug

SEQ ID NO: 682739 - RNA, 22 nt, Human
ugggauaucugucagcagcuuc

SEQ ID NO: 682740 - RNA, 22 nt, Human
uuagagccaguuacaaggucaa

SEQ ID NO: 682741 - RNA, 22 nt, Human
uuccaccauucaugcuaauauu

SEQ ID NO: 682742 - RNA, 22 nt, Human
guuucuguugcucagauaaugc

SEQ ID NO: 682743 - RNA, 22 nt, Human
uagagguauaccaaaaaggcau

SEQ ID NO: 682744 - RNA, 22 nt, Human
ggcgguggcgugaagguggcug

SEQ ID NO: 682745 - RNA, 22 nt, Human
ucacaguaaaagcauggaagag

SEQ ID NO: 682746 - RNA, 22 nt, Human
ucugucacaauuugcuuacucu

SEQ ID NO: 682747 - RNA, 23 nt, Human
guggagagauuaguaauucaccc

SEQ ID NO: 682748 - RNA, 22 nt, Human
acaucuguccucugcagagcuc

SEQ ID NO: 682749 - RNA, 18 nt, Human
gcaaggcucaggccaggc

SEQ ID NO: 682750 - RNA, 22 nt, Human
cuggagaaacaucaggcauagg

SEQ ID NO: 682751 - RNA, 22 nt, Human
agcagcaggcuagggaacugcu

SEQ ID NO: 682752 - RNA, 22 nt, Human
ggccuucugccuuucagcaaug

SEQ ID NO: 682753 - RNA, 22 nt, Human
cuuccuagcuucagagucuguu

SEQ ID NO: 682754 - RNA, 22 nt, Human
guggcccuuuguuuugauaccu

SEQ ID NO: 682755 - RNA, 22 nt, Human
ugagagcugccacgugaccaug

SEQ ID NO: 682756 - RNA, 22 nt, Human
ucacaggcuccagggccuggau

SEQ ID NO: 682757 - RNA, 22 nt, Human
uccaagcucucuaugccaugau

SEQ ID NO: 682758 - RNA, 19 nt, Human
gggacuggaggauguggag

SEQ ID NO: 682759 - RNA, 22 nt, Human
uauuugaaaguguacaaaaacu

SEQ ID NO: 682760 - RNA, 22 nt, Human
aggcugcucugcgaagucagcu

SEQ ID NO: 682761 - RNA, 19 nt, Human
ucagggcaguccggucccc

SEQ ID NO: 682762 - RNA, 22 nt, Human
ugccugaggagucagggcaggu

SEQ ID NO: 682763 - RNA, 22 nt, Human
gaacugucauuggggacaucag

SEQ ID NO: 682764 - RNA, 22 nt, Human
caggauugaaugcuucucccug

SEQ ID NO: 682765 - RNA, 22 nt, Human
agcaucagcagacucucagcua

SEQ ID NO: 682766 - RNA, 22 nt, Human
ucuucagcagggccucucugag

SEQ ID NO: 682767 - RNA, 22 nt, Human
uuucaaauggagucgugaaaug

SEQ ID NO: 682768 - RNA, 22 nt, Human
uggcaaagaugaagcauuucgu

SEQ ID NO: 682769 - RNA, 22 nt, Human
ucugcugcacaaauucaucucu

SEQ ID NO: 682770 - RNA, 22 nt, Human
uuagaaaggaaucuucauuuca

SEQ ID NO: 682771 - RNA, 22 nt, Human
ucaaccucuggagaaaucagga

SEQ ID NO: 682772 - RNA, 22 nt, Human
cuuauuucuccauccagaguca

SEQ ID NO: 682773 - RNA, 22 nt, Human
ggcagugaaugaaacagaggcu

SEQ ID NO: 682774 - RNA, 22 nt, Human
acacuucucccaucuccuguug

SEQ ID NO: 682775 - RNA, 23 nt, Human
uaccugaaguaagcauucaucca

SEQ ID NO: 682776 - RNA, 22 nt, Human
ugcaagagcuguggcaaaagca

SEQ ID NO: 682777 - RNA, 22 nt, Human
uccuuuaaagaacugugcuuuu

SEQ ID NO: 682778 - RNA, 22 nt, Human
gaaugaauagguguccagaugg

SEQ ID NO: 682779 - RNA, 22 nt, Human
auuaaaguugaaauugaacuga

SEQ ID NO: 682780 - RNA, 19 nt, Human
auuuccaagaauuggagag

SEQ ID NO: 682781 - RNA, 22 nt, Human
ggggaggaagcuggaacacggg

SEQ ID NO: 682782 - RNA, 20 nt, Human
aguguacagacacuagaaau

SEQ ID NO: 682783 - RNA, 22 nt, Human
augagcagaugcuccugccucu

SEQ ID NO: 682784 - RNA, 22 nt, Human
ccauuuggaggucauuaggaca

SEQ ID NO: 682785 - RNA, 23 nt, Human
uccuccugagugagagugccagc

SEQ ID NO: 682786 - RNA, 22 nt, Human
ugcauuguugaccaguugugca

SEQ ID NO: 682787 - RNA, 22 nt, Human
uugauacaggcucuauuucauc

SEQ ID NO: 682788 - RNA, 22 nt, Human
ugcccugucuaagcugucagua

SEQ ID NO: 682789 - RNA, 22 nt, Human
cucagagggaggacugggcugg

SEQ ID NO: 682790 - RNA, 22 nt, Human
guuuauaugugugccacucuua

SEQ ID NO: 682791 - RNA, 21 nt, Human
ccuucucuugcuucagcuuca

SEQ ID NO: 682792 - RNA, 22 nt, Human
acagccuguuugaucuggugcu

SEQ ID NO: 682793 - RNA, 22 nt, Human
ucacuugaccucuugaacuccu

SEQ ID NO: 682794 - RNA, 22 nt, Human
caacagcucagacacgggaccu

SEQ ID NO: 682795 - RNA, 20 nt, Human
cauuuguuagcuuucuacug

SEQ ID NO: 682796 - RNA, 22 nt, Human
ucucucagaggccaggguccug

SEQ ID NO: 682797 - RNA, 22 nt, Human
augucugcuuuccuuuuaauca

SEQ ID NO: 682798 - RNA, 22 nt, Human
auccuugagccuuaucuuuugu

SEQ ID NO: 682799 - RNA, 23 nt, Human
aggaugugcauaugaccuaauca

SEQ ID NO: 682800 - RNA, 22 nt, Human
gcaggguauaauacuuagguga

SEQ ID NO: 682801 - RNA, 22 nt, Human
ucagcaaaggcaauucauuauu

SEQ ID NO: 682802 - RNA, 18 nt, Human
ggcucagcaggcucucuc

SEQ ID NO: 682803 - RNA, 22 nt, Human
ugaucuuuucaaagacaagcuu

SEQ ID NO: 682804 - RNA, 22 nt, Human
gauuuaaaguagaccuuuguuu

SEQ ID NO: 682805 - RNA, 22 nt, Human
cuacaacauuaugcuuucuguc

SEQ ID NO: 682806 - RNA, 23 nt, Human
aaacuugcuauggcugaaaucau

SEQ ID NO: 682807 - RNA, 22 nt, Human
ccugggaaagugaggucauuau

SEQ ID NO: 682808 - RNA, 22 nt, Human
accuccccucaccaaucugguu

SEQ ID NO: 682809 - RNA, 22 nt, Human
uucauggaguugagaaggcuaa

SEQ ID NO: 682810 - RNA, 22 nt, Human
uggggagauuguuaaauuuaga

SEQ ID NO: 682811 - RNA, 22 nt, Human
guucuucacauuucauugagga

SEQ ID NO: 682812 - RNA, 22 nt, Human
ucccagccauuccuuuaggugu

SEQ ID NO: 682813 - RNA, 22 nt, Human
gcugagagaaaagugagguucu

SEQ ID NO: 682814 - RNA, 22 nt, Human
cuguauauaauguaugcauggg

SEQ ID NO: 682815 - RNA, 21 nt, Human
caaagccaggcaacucucucc

SEQ ID NO: 682816 - RNA, 22 nt, Human
caguuccuaugggcaaaacaca

SEQ ID NO: 682817 - RNA, 23 nt, Human
gcccugcccuuagcacacucaca

SEQ ID NO: 682818 - RNA, 22 nt, Human
auauuugugguuuuuggcuccu

SEQ ID NO: 682819 - RNA, 22 nt, Human
aggugggcacaccucccuucuc

SEQ ID NO: 682820 - RNA, 22 nt, Human
ugagaauuugcauuucuaacaa

SEQ ID NO: 682821 - RNA, 22 nt, Human
ccuaggaacccccaggcuucug

SEQ ID NO: 682822 - RNA, 22 nt, Human
agcuucuagcccauccagcagg

SEQ ID NO: 682823 - RNA, 22 nt, Human
ggcagcuggccuccucgcccac

SEQ ID NO: 682824 - RNA, 22 nt, Human
gaacacuugcuguuaauaagug

SEQ ID NO: 682825 - RNA, 22 nt, Human
cuguccagucuuuagcaagcug

SEQ ID NO: 682826 - RNA, 22 nt, Human
uuugcacuagcauuuguccaug

SEQ ID NO: 682827 - RNA, 22 nt, Human
aacaaugaggaucuguucugag

SEQ ID NO: 682828 - RNA, 22 nt, Human
aaacucaaguuucuuaauguca

SEQ ID NO: 682829 - RNA, 22 nt, Human
aaccagcucugcaaaaugucau

SEQ ID NO: 682830 - RNA, 23 nt, Human
ucugccagugugugccaggagcc

SEQ ID NO: 682831 - RNA, 19 nt, Human
ugccagcauuaggcugaag

SEQ ID NO: 682832 - RNA, 22 nt, Human
ucuuccuugccuugcuucauca

SEQ ID NO: 682833 - RNA, 22 nt, Human
ccuggggcuuucuuuguaucau

SEQ ID NO: 682834 - RNA, 22 nt, Human
uggcagaaguacacaagcaugc

SEQ ID NO: 682835 - RNA, 17 nt, Human
cacugugggggcauuua

SEQ ID NO: 682836 - RNA, 22 nt, Human
ccacugccuauuugcagggccc

SEQ ID NO: 682837 - RNA, 22 nt, Human
ggccaccuggcugugggggcag

SEQ ID NO: 682838 - RNA, 22 nt, Human
cagcaccagcauauuccagggc

SEQ ID NO: 682839 - RNA, 22 nt, Human
agggacuauuuacccaucucac

SEQ ID NO: 682840 - RNA, 22 nt, Human
ucuuugcacugugcaagcagaa

SEQ ID NO: 682841 - RNA, 22 nt, Human
uguauguaaaguuuguaauaga

SEQ ID NO: 682842 - RNA, 16 nt, Human
gucucuucccugcuga

SEQ ID NO: 682843 - RNA, 18 nt, Human
ugugccucugcaggacgu

SEQ ID NO: 682844 - RNA, 22 nt, Human
uuuaacagaugcuaugucuacc

SEQ ID NO: 682845 - RNA, 22 nt, Human
acacacugagugccauaggacc

SEQ ID NO: 682846 - RNA, 22 nt, Human
gcccaggaaauaaaagugggcu

SEQ ID NO: 682847 - RNA, 22 nt, Human
gucccucugcucuagagagcca

SEQ ID NO: 682848 - RNA, 22 nt, Human
agaacaguuuguuggagacugu

SEQ ID NO: 682849 - RNA, 22 nt, Human
uucaaugagcccggggccauag

SEQ ID NO: 682850 - RNA, 22 nt, Human
gggggagcuacaggucccuugg

SEQ ID NO: 682851 - RNA, 22 nt, Human
uguucuagcaacacaguuuugg

SEQ ID NO: 682852 - RNA, 22 nt, Human
aagaacagauucagccugaacu

SEQ ID NO: 682853 - RNA, 22 nt, Human
gcaagcagaucuccggagggaa

SEQ ID NO: 682854 - RNA, 22 nt, Human
uggcaguguauagguggcuccu

SEQ ID NO: 682855 - RNA, 22 nt, Human
caucuggguucucagauggaua

SEQ ID NO: 682856 - RNA, 22 nt, Human
uuccaagucacccuuaggguca

SEQ ID NO: 682857 - RNA, 21 nt, Human
ugagcaaaauuuagagugaug

SEQ ID NO: 682858 - RNA, 22 nt, Human
auuuguucagcauugaauuugg

SEQ ID NO: 682859 - RNA, 22 nt, Human
cuuucacuuuaaucugacaccu

SEQ ID NO: 682860 - RNA, 22 nt, Human
acucccuuuucuacuucuaccc

SEQ ID NO: 682861 - RNA, 22 nt, Human
gacagccaugcacuucugcugu

SEQ ID NO: 682862 - RNA, 22 nt, Human
gaaucucaggaagaucucugca

SEQ ID NO: 682863 - RNA, 22 nt, Human
guguaugauuucaaauggcuag

SEQ ID NO: 682864 - RNA, 22 nt, Human
cuuucccagaguaguugaugcu

SEQ ID NO: 682865 - RNA, 22 nt, Human
uggccuggcugcccugucugga

SEQ ID NO: 682866 - RNA, 21 nt, Human
uuuauguacuucauagaguag

SEQ ID NO: 682867 - RNA, 22 nt, Human
gcauucuuuuuaggagguuccu

SEQ ID NO: 682868 - RNA, 22 nt, Human
gagcuguuugugacaggcugug

SEQ ID NO: 682869 - RNA, 22 nt, Human
accagugggaaguggaaaauga

SEQ ID NO: 682870 - RNA, 22 nt, Human
ucuuuucuggacucugcaugga

SEQ ID NO: 682871 - RNA, 17 nt, Human
ggucugugucuagggaa

SEQ ID NO: 682872 - RNA, 22 nt, Human
aggagccaugagugacaucaca

SEQ ID NO: 682873 - RNA, 22 nt, Human
agcaggcaccagggcucguccu

SEQ ID NO: 682874 - RNA, 22 nt, Human
ucugccuggcucauggcaguga

SEQ ID NO: 682875 - RNA, 22 nt, Human
uaggaaggaggccaucuuggcg

SEQ ID NO: 682876 - RNA, 22 nt, Human
gccugcuucucagucagcuugg

SEQ ID NO: 682877 - RNA, 22 nt, Human
gcuccugggcccugggcuaacu

SEQ ID NO: 682878 - RNA, 22 nt, Human
aauacuuugccaaguucgaaga

SEQ ID NO: 682879 - RNA, 18 nt, Human
acucugggaccuguuauu

SEQ ID NO: 682880 - RNA, 21 nt, Human
ugggagagggcucagcuaccc

SEQ ID NO: 682881 - RNA, 22 nt, Human
auuaguguuguaagaagcugcc

SEQ ID NO: 682882 - RNA, 22 nt, Human
gcugcagcagaaguucucagag

SEQ ID NO: 682883 - RNA, 22 nt, Human
aauauagaaucacuuuccuuca

SEQ ID NO: 682884 - RNA, 23 nt, Human
gcuugccugguguguggcugacc

SEQ ID NO: 682885 - RNA, 22 nt, Human
aguguuucuggcaaaugaaagu

SEQ ID NO: 682886 - RNA, 22 nt, Human
ucccagugggugacuggaggcu

SEQ ID NO: 682887 - RNA, 23 nt, Human
aagcccugaagguuucaggcccu

SEQ ID NO: 682888 - RNA, 22 nt, Human
guguccugaucaauugagcugg

SEQ ID NO: 682889 - RNA, 22 nt, Human
uguauauucugccuaaaagcuu

SEQ ID NO: 682890 - RNA, 22 nt, Human
uccuucaaaaguugagagagcc

SEQ ID NO: 682891 - RNA, 22 nt, Human
cagagacagggcagggagugug

SEQ ID NO: 682892 - RNA, 22 nt, Human
uaucgguaagauggaaaucagg

SEQ ID NO: 682893 - RNA, 22 nt, Human
uaguacagaaaaccucaggguc

SEQ ID NO: 682894 - RNA, 22 nt, Human
ggccccugcggacugccuagag

SEQ ID NO: 682895 - RNA, 22 nt, Human
ugauuucccucaucauaacaga

SEQ ID NO: 682896 - RNA, 22 nt, Human
cauuaugugggaaaauguucuu

SEQ ID NO: 682897 - RNA, 22 nt, Human
gcugugagggcuucugaggcau

SEQ ID NO: 682898 - RNA, 22 nt, Human
agggcacagccuaaagccuaug

SEQ ID NO: 682899 - RNA, 22 nt, Human
cccagagauguccugagugaua

SEQ ID NO: 682900 - RNA, 22 nt, Human
ucucuucacaugcuugcuccaa

SEQ ID NO: 682901 - RNA, 22 nt, Human
cgcugcagaagcguguucagga

SEQ ID NO: 682902 - RNA, 22 nt, Human
agugucugcggcggggaggcgg

SEQ ID NO: 682903 - RNA, 22 nt, Human
aagauguugucguuagugauga

SEQ ID NO: 682904 - RNA, 22 nt, Human
guuauacuuaugugcaaaaaua

SEQ ID NO: 682905 - RNA, 22 nt, Human
gugcauuacauguaauaaaaua

SEQ ID NO: 682906 - RNA, 22 nt, Human
cagggugcauacccaugcauac

SEQ ID NO: 682907 - RNA, 22 nt, Human
gugcaugcaaauuacuguaaag

SEQ ID NO: 682908 - RNA, 22 nt, Human
ucuguuucuccaacauugugag

SEQ ID NO: 682909 - RNA, 22 nt, Human
ucuucuaguaggccaagaagcu

SEQ ID NO: 682910 - RNA, 22 nt, Human
uuugaauguuggauugacuuag

SEQ ID NO: 682911 - RNA, 20 nt, Human
gaauguuucacuugcuccau

SEQ ID NO: 682912 - RNA, 22 nt, Human
ucccuuuggauccaagcuuaug

SEQ ID NO: 682913 - RNA, 22 nt, Human
gagcaacacauugaaugaggau

SEQ ID NO: 682914 - RNA, 22 nt, Human
uggcuaugacuucguacugucu

SEQ ID NO: 682915 - RNA, 22 nt, Human
gacaaagagaaguaacaguacc

SEQ ID NO: 682916 - RNA, 22 nt, Human
gagugugguaugcucugaggcu

SEQ ID NO: 682917 - RNA, 18 nt, Human
guccauggccuccaccca

SEQ ID NO: 682918 - RNA, 22 nt, Human
ugcuuugggucucucuaguuuc

SEQ ID NO: 682919 - RNA, 22 nt, Human
acauuauagcuuugaguuugga

SEQ ID NO: 682920 - RNA, 22 nt, Human
agguaacuagcauuagcuucug

SEQ ID NO: 682921 - RNA, 22 nt, Human
ugagucacagccuugccuuggu

SEQ ID NO: 682922 - RNA, 22 nt, Human
uuuuaaguuggauugcuaagua

SEQ ID NO: 682923 - RNA, 22 nt, Human
uacagugacuggacuuugucau

SEQ ID NO: 682924 - RNA, 22 nt, Human
cagggagaucuuggcuccuggu

SEQ ID NO: 682925 - RNA, 22 nt, Human
ccaggaaggaagcagggguuuc

SEQ ID NO: 682926 - RNA, 22 nt, Human
uaccaggucugugcagguguca

SEQ ID NO: 682927 - RNA, 22 nt, Human
uaacagcaaccacagugcuggu

SEQ ID NO: 682928 - RNA, 22 nt, Human
cugggccacagacucaaggcag

SEQ ID NO: 682929 - RNA, 22 nt, Human
ucccugagcugagcucaacagc

SEQ ID NO: 682930 - RNA, 22 nt, Human
cugcauguuuacauuuuugaga

SEQ ID NO: 682931 - RNA, 22 nt, Human
ucacugaaaguaauucuaguga

SEQ ID NO: 682932 - RNA, 22 nt, Human
acaagauaaggugucagugugu

SEQ ID NO: 682933 - RNA, 22 nt, Human
uggcagguggagacagcagagc

SEQ ID NO: 682934 - RNA, 22 nt, Human
uuaagcauggaagugaaauaau

SEQ ID NO: 682935 - RNA, 22 nt, Human
agucacaauaccgugugucagu

SEQ ID NO: 682936 - RNA, 22 nt, Human
gggugggcccagcccagagaag

SEQ ID NO: 682937 - RNA, 21 nt, Human
ucauuuuuauugcuaccuugc

SEQ ID NO: 682938 - RNA, 22 nt, Human
uaagacaccucucugcccuuca

SEQ ID NO: 682939 - RNA, 22 nt, Human
aaggccauuauucugauauauu

SEQ ID NO: 682940 - RNA, 22 nt, Human
uuuccuguucuaguuguugcca

SEQ ID NO: 682941 - RNA, 22 nt, Human
augucuguucauuauuaacugc

SEQ ID NO: 682942 - RNA, 22 nt, Human
gcaggcugugaggcucagaugg

SEQ ID NO: 682943 - RNA, 22 nt, Human
gacagggccgcagauggagacu

SEQ ID NO: 682944 - RNA, 22 nt, Human
guucuucagcauuagaagucau

SEQ ID NO: 682945 - RNA, 22 nt, Human
aaggccagacaggaccacaucu

SEQ ID NO: 682946 - RNA, 22 nt, Human
cuagaucagcuaacuuuccagu

SEQ ID NO: 682947 - RNA, 22 nt, Human
uugauucaucuucuaauaccca

SEQ ID NO: 682948 - RNA, 20 nt, Human
gcugaggagcagugugguug

SEQ ID NO: 682949 - RNA, 22 nt, Human
aguccagaccccggcagcuggu

SEQ ID NO: 682950 - RNA, 22 nt, Human
uucaagugaggcugucuuuaga

SEQ ID NO: 682951 - RNA, 22 nt, Human
uuugcagucuggccugcuuugg

SEQ ID NO: 682952 - RNA, 22 nt, Human
caguauauuuuagagaaguccc

SEQ ID NO: 682953 - RNA, 19 nt, Human
uucccaggaaaggggugca

SEQ ID NO: 682954 - RNA, 22 nt, Human
ugggauguggccaugguucucu

SEQ ID NO: 682955 - RNA, 22 nt, Human
caguguuuguggaauucaggug

SEQ ID NO: 682956 - RNA, 22 nt, Human
aggcugaggcagguggaucacu

SEQ ID NO: 682957 - RNA, 22 nt, Human
uggggguguccuggugcacaca

SEQ ID NO: 682958 - RNA, 17 nt, Human
ugauucaacuagaaacu

SEQ ID NO: 682959 - RNA, 22 nt, Human
acaggccauaaaggcaggcccu

SEQ ID NO: 682960 - RNA, 22 nt, Human
augauacaagcaaaacuaauca

SEQ ID NO: 682961 - RNA, 22 nt, Human
caugcuguguguuuuagcucca

SEQ ID NO: 682962 - RNA, 22 nt, Human
gauauucaaguggaauuauucu

SEQ ID NO: 682963 - RNA, 22 nt, Human
caagacuuagagcaucuugaaa

SEQ ID NO: 682964 - RNA, 18 nt, Human
gggcuuuacagaguggag

SEQ ID NO: 682965 - RNA, 22 nt, Human
uugauuuucaauucauugacaa

SEQ ID NO: 682966 - RNA, 22 nt, Human
acugcuucacugcgucuuaucu

SEQ ID NO: 682967 - RNA, 22 nt, Human
ccccacaguccgugaggagcca

SEQ ID NO: 682968 - RNA, 22 nt, Human
guagcagaaucagugcuacaga

SEQ ID NO: 682969 - RNA, 22 nt, Human
cucccucacacccuugcccaga

SEQ ID NO: 682970 - RNA, 22 nt, Human
ggagcagccacgucucagggca

SEQ ID NO: 682971 - RNA, 22 nt, Human
cagcaggggugucauuguaguu

SEQ ID NO: 682972 - RNA, 22 nt, Human
auggcuuucagauggugaaaga

SEQ ID NO: 682973 - RNA, 22 nt, Human
cugcuucaaggaaaugaaucgg

SEQ ID NO: 682974 - RNA, 22 nt, Human
gcauacagagaggauguggcau

SEQ ID NO: 682975 - RNA, 22 nt, Human
cuguggcuucugggucaguuca

SEQ ID NO: 682976 - RNA, 19 nt, Human
agcaaccugucagagaugc

SEQ ID NO: 682977 - RNA, 22 nt, Human
gcucccugacucaguuccugag

SEQ ID NO: 682978 - RNA, 22 nt, Human
gagcugguccacaaucugcagg

SEQ ID NO: 682979 - RNA, 22 nt, Human
ccacugagcaguagcugcgucg

SEQ ID NO: 682980 - RNA, 22 nt, Human
ucuuggccccaacccucuauuu

SEQ ID NO: 682981 - RNA, 22 nt, Human
caguggagugggacuggucuga

SEQ ID NO: 682982 - RNA, 22 nt, Human
uguggcagcugcugcaggagcu

SEQ ID NO: 682983 - RNA, 22 nt, Human
acucuuacucccucaggcacug

SEQ ID NO: 682984 - RNA, 22 nt, Human
ccacuguuggcccgaagggguc

SEQ ID NO: 682985 - RNA, 22 nt, Human
cagcacaguuucccccaugagc

SEQ ID NO: 682986 - RNA, 22 nt, Human
cagggagcuuucccaggacccu

SEQ ID NO: 682987 - RNA, 22 nt, Human
uguggacugugcugccacagug

SEQ ID NO: 682988 - RNA, 21 nt, Human
uccagggcgggcgcacggaga

SEQ ID NO: 682989 - RNA, 22 nt, Human
uuccuuacauucauauggcuuc

SEQ ID NO: 682990 - RNA, 22 nt, Human
uuucaaacuuaaauaccuuucc

SEQ ID NO: 682991 - RNA, 22 nt, Human
aucuuccuucacuuucucccac

SEQ ID NO: 682992 - RNA, 22 nt, Human
gagggcugugaaggagcggguu

SEQ ID NO: 682993 - RNA, 22 nt, Human
aaguggagucccuacaaccagc

SEQ ID NO: 682994 - RNA, 17 nt, Human
cuaggcuuggcagcucg

SEQ ID NO: 682995 - RNA, 22 nt, Human
uuucuaggucuuccauacugcc

SEQ ID NO: 682996 - RNA, 22 nt, Human
gaaugcaaauauauggaucagu

SEQ ID NO: 682997 - RNA, 22 nt, Human
cuuuggaugacuggugcagguu

SEQ ID NO: 682998 - RNA, 22 nt, Human
acagcagagugugagauagcca

SEQ ID NO: 682999 - RNA, 22 nt, Human
cugcuuggaguccuccagcacc

SEQ ID NO: 683000 - RNA, 22 nt, Human
uccugaagaggcuacacugcuu

SEQ ID NO: 683001 - RNA, 22 nt, Human
acucuucauacagucaucuaau

SEQ ID NO: 683002 - RNA, 22 nt, Human
uaugcauacaaugagauauucc

SEQ ID NO: 683003 - RNA, 18 nt, Human
cccacacagcaguagcuc

SEQ ID NO: 683004 - RNA, 22 nt, Human
agaaaguucugugaguuguuca

SEQ ID NO: 683005 - RNA, 22 nt, Human
ccagagccucaacacagguccu

SEQ ID NO: 683006 - RNA, 18 nt, Human
uauaaacacacuuagguu

SEQ ID NO: 683007 - RNA, 22 nt, Human
ccuaagaucugguaugugacag

SEQ ID NO: 683008 - RNA, 22 nt, Human
aggaagcucauuuugacauauc

SEQ ID NO: 683009 - RNA, 22 nt, Human
uuugagaaaggggauuuaauuc

SEQ ID NO: 683010 - RNA, 22 nt, Human
uaccagcucacacaaucuuugu

SEQ ID NO: 683011 - RNA, 22 nt, Human
ugggagaacccagggucaggcu

SEQ ID NO: 683012 - RNA, 22 nt, Human
auuuagcaccuccaucucaaca

SEQ ID NO: 683013 - RNA, 22 nt, Human
accuggauuuugcuuagacaug

SEQ ID NO: 683014 - RNA, 22 nt, Human
caggcccagcccagcccuucga

SEQ ID NO: 683015 - RNA, 21 nt, Human
uucaaaguuugccuaaagauu

SEQ ID NO: 683016 - RNA, 22 nt, Human
cauuauauuacagcacuguuaa

SEQ ID NO: 683017 - RNA, 22 nt, Human
cuggggcuguaggaggacuuau

SEQ ID NO: 683018 - RNA, 18 nt, Human
ggguggugugcucuucgc

SEQ ID NO: 683019 - RNA, 22 nt, Human
ugcugcuagcuguauugcaaga

SEQ ID NO: 683020 - RNA, 22 nt, Human
ugaggggagaagcagcagccug

SEQ ID NO: 683021 - RNA, 22 nt, Human
agucaguugcaaacaucaggca

SEQ ID NO: 683022 - RNA, 18 nt, Human
uauuucccaauggaaaca

SEQ ID NO: 683023 - RNA, 22 nt, Human
agcccccaggagucuccacgcc

SEQ ID NO: 683024 - RNA, 22 nt, Human
uccuucccaggugucgccgccu

SEQ ID NO: 683025 - RNA, 22 nt, Human
cucacuguccaacaggcuuuac

SEQ ID NO: 683026 - RNA, 18 nt, Human
cccaggcuuugugggucu

SEQ ID NO: 683027 - RNA, 22 nt, Human
uccuggugcugacacccauagc

SEQ ID NO: 683028 - RNA, 22 nt, Human
uuauaggaaaaguucuagaaaa

SEQ ID NO: 683029 - RNA, 22 nt, Human
acuauaaccuguuagaauagau

SEQ ID NO: 683030 - RNA, 22 nt, Human
uguaguguggccuaucuuugcc

SEQ ID NO: 683031 - RNA, 22 nt, Human
cuucagcaccucagcuggagag

SEQ ID NO: 683032 - RNA, 22 nt, Human
agugcagcaugaagcacaugug

SEQ ID NO: 683033 - RNA, 22 nt, Human
ucaggcucaggaauguguuuau

SEQ ID NO: 683034 - RNA, 22 nt, Human
cugggcuggagugcaauggcgc

SEQ ID NO: 683035 - RNA, 22 nt, Human
agggagcuucuggccucagccu

SEQ ID NO: 683036 - RNA, 22 nt, Human
cccacuccuggagcuagggcuc

SEQ ID NO: 683037 - RNA, 22 nt, Human
cgcuuuggauuucgcuuuccaa

SEQ ID NO: 683038 - RNA, 22 nt, Human
gauacauuucaaggaggacugg

SEQ ID NO: 683039 - RNA, 22 nt, Human
aagaaacaaccacugcucuccu

SEQ ID NO: 683040 - RNA, 21 nt, Human
gggugcuguggucaugcagga

SEQ ID NO: 683041 - RNA, 22 nt, Human
guguguggcauguccuauuuug

SEQ ID NO: 683042 - RNA, 22 nt, Human
acagauuuguucuuuugggcua

SEQ ID NO: 683043 - RNA, 22 nt, Human
cuacacuugcaugagucuugaa

SEQ ID NO: 683044 - RNA, 22 nt, Human
uccauuuuguagguaugcuaca

SEQ ID NO: 683045 - RNA, 22 nt, Human
ggagccaggcaaucuguacuuu

SEQ ID NO: 683046 - RNA, 22 nt, Human
aggacaaucucuccuuuaucag

SEQ ID NO: 683047 - RNA, 22 nt, Human
ugugccuggcauucugggcuuc

SEQ ID NO: 683048 - RNA, 22 nt, Human
agaccaugaccugccacuaagc

SEQ ID NO: 683049 - RNA, 22 nt, Human
augcuuuuccaggagaaauaua

SEQ ID NO: 683050 - RNA, 22 nt, Human
guucaucucacagauaggcagu

SEQ ID NO: 683051 - RNA, 22 nt, Human
agauggggcagaauggagccau

SEQ ID NO: 683052 - RNA, 19 nt, Human
uccuucacuucuuaccagg

SEQ ID NO: 683053 - RNA, 22 nt, Human
uaggaacacacauguguagcug

SEQ ID NO: 683054 - RNA, 22 nt, Human
gauggugcaauuaucgugcaug

SEQ ID NO: 683055 - RNA, 22 nt, Human
ugcucugguaacucacuuccau

SEQ ID NO: 683056 - RNA, 22 nt, Human
acucauugggaaagugcucucu

SEQ ID NO: 683057 - RNA, 22 nt, Human
uaauacauuaccuaaccucucu

SEQ ID NO: 683058 - RNA, 22 nt, Human
auuucuacaguacacaugcauu

SEQ ID NO: 683059 - RNA, 22 nt, Human
agcuucuccaucugcccagaga

SEQ ID NO: 683060 - RNA, 22 nt, Human
cagucuuuguucccauuacuga

SEQ ID NO: 683061 - RNA, 22 nt, Human
cuggcccugccagagaucaaca

SEQ ID NO: 683062 - RNA, 22 nt, Human
gagaagucauuugaccaccuag

SEQ ID NO: 683063 - RNA, 20 nt, Human
ugagccagucaagcuacauu

SEQ ID NO: 683064 - RNA, 22 nt, Human
ccaggaucugauauugggcucc

SEQ ID NO: 683065 - RNA, 22 nt, Human
agagggcauuaacucugucuug

SEQ ID NO: 683066 - RNA, 19 nt, Human
gcauuucauuuaaccauca

SEQ ID NO: 683067 - RNA, 22 nt, Human
cugugcacuaaccacacccacg

SEQ ID NO: 683068 - RNA, 20 nt, Human
guccagaguaaugugcugac

SEQ ID NO: 683069 - RNA, 22 nt, Human
aagaggagggcagauucaaggc

SEQ ID NO: 683070 - RNA, 22 nt, Human
uggggccacacugaucucccag

SEQ ID NO: 683071 - RNA, 22 nt, Human
ccugugugguagccagcggugc

SEQ ID NO: 683072 - RNA, 22 nt, Human
cuggaaggcagagguugcagug

SEQ ID NO: 683073 - RNA, 22 nt, Human
aagcuguuguucauccugaauu

SEQ ID NO: 683074 - RNA, 22 nt, Human
acacugaaggcuacaagguuga

SEQ ID NO: 683075 - RNA, 22 nt, Human
gaaguugauagaguacaugauu

SEQ ID NO: 683076 - RNA, 22 nt, Human
uuucacaacguuguggugagag

SEQ ID NO: 683077 - RNA, 22 nt, Human
ucuggagaagcccagggagcug

SEQ ID NO: 683078 - RNA, 22 nt, Human
uucuuaaagaggcaaaacacag

SEQ ID NO: 683079 - RNA, 21 nt, Human
ucugggcugcugcugcccauc

SEQ ID NO: 683080 - RNA, 22 nt, Human
uucaacaucaagaaugcaugga

SEQ ID NO: 683081 - RNA, 22 nt, Human
cagcagccuggagggggccacg

SEQ ID NO: 683082 - RNA, 22 nt, Human
ucucugugaauggcgucaccug

SEQ ID NO: 683083 - RNA, 22 nt, Human
aguugcagacgcagagauguug

SEQ ID NO: 683084 - RNA, 22 nt, Human
ggcuggcaccugcccuccgcug

SEQ ID NO: 683085 - RNA, 22 nt, Human
cagcugagcugccagacuacug

SEQ ID NO: 683086 - RNA, 22 nt, Human
aucaggaagccagucuaaugga

SEQ ID NO: 683087 - RNA, 22 nt, Human
ggcagcuguuggcucucuagga

SEQ ID NO: 683088 - RNA, 22 nt, Human
caugcggcucuuuccaaaccgg

SEQ ID NO: 683089 - RNA, 22 nt, Human
uauguagagauaaaauccaaau

SEQ ID NO: 683090 - RNA, 22 nt, Human
ggcuggaauguguggaugugau

SEQ ID NO: 683091 - RNA, 22 nt, Human
cuucuguguuaaaugagucuuu

SEQ ID NO: 683092 - RNA, 19 nt, Human
cagcucaguuugauucucu

SEQ ID NO: 683093 - RNA, 22 nt, Human
uccugcagagacagaggccuca

SEQ ID NO: 683094 - RNA, 22 nt, Human
ucacugugauucuguauggauu

SEQ ID NO: 683095 - RNA, 23 nt, Human
uuauuuggauuuuaguggaaaga

SEQ ID NO: 683096 - RNA, 22 nt, Human
gcuggcugggacagauuccauu

SEQ ID NO: 683097 - RNA, 20 nt, Human
aacuccuagccucaagugau

SEQ ID NO: 683098 - RNA, 22 nt, Human
uccagacucacucaugugacua

SEQ ID NO: 683099 - RNA, 22 nt, Human
ggagaagcaggugcuuuggguc

SEQ ID NO: 683100 - RNA, 22 nt, Human
gguggccuuucaguggaucagg

SEQ ID NO: 683101 - RNA, 22 nt, Human
aucguuuacccugagugauugc

SEQ ID NO: 683102 - RNA, 22 nt, Human
agucagugaaugguguaugcua

SEQ ID NO: 683103 - RNA, 22 nt, Human
uuuauauauggcuggucuggau

SEQ ID NO: 683104 - RNA, 22 nt, Human
uaguggagaaguggagucugug

SEQ ID NO: 683105 - RNA, 22 nt, Human
ucugaggucauuccaaggacau

SEQ ID NO: 683106 - RNA, 22 nt, Human
gaggucagucagaccaggguuu

SEQ ID NO: 683107 - RNA, 22 nt, Human
ccucggagcgggucagagaggg

SEQ ID NO: 683108 - RNA, 22 nt, Human
gauauacaauccacaguugauu

SEQ ID NO: 683109 - RNA, 22 nt, Human
aacauuguuuucccuauaucca

SEQ ID NO: 683110 - RNA, 22 nt, Human
uauucuggguaccaaacuucaa

SEQ ID NO: 683111 - RNA, 22 nt, Human
accacuguacagcagauauagu

SEQ ID NO: 683112 - RNA, 22 nt, Human
gggcuaaguggaucagucagga

SEQ ID NO: 683113 - RNA, 22 nt, Human
ucccucagagggcaagcgcaga

SEQ ID NO: 683114 - RNA, 22 nt, Human
aguccaagaucaaggugucaac

SEQ ID NO: 683115 - RNA, 22 nt, Human
acacagccaggguaguaaggcu

SEQ ID NO: 683116 - RNA, 22 nt, Human
ucaucccuaaggacagcucugc

SEQ ID NO: 683117 - RNA, 22 nt, Human
ucucucccaaaucugcagauag

SEQ ID NO: 683118 - RNA, 22 nt, Human
auuguucaaagugcuuugcaug

SEQ ID NO: 683119 - RNA, 22 nt, Human
acagcagggggagcuguuggac

SEQ ID NO: 683120 - RNA, 22 nt, Human
gcucuggcagcugauauuagga

SEQ ID NO: 683121 - RNA, 22 nt, Human
caaagcaggcuugucaaauugc

SEQ ID NO: 683122 - RNA, 22 nt, Human
aucagcaaggcaaucacugcag

SEQ ID NO: 683123 - RNA, 22 nt, Human
aggacagcagugcuggcacuug

SEQ ID NO: 683124 - RNA, 22 nt, Human
ccucuuccacugggccccaucc

SEQ ID NO: 683125 - RNA, 22 nt, Human
aauaauguugacgauagucuua

SEQ ID NO: 683126 - RNA, 22 nt, Human
aaauguguuucgaaaacuggug

SEQ ID NO: 683127 - RNA, 22 nt, Human
cuguuuuaugaagggaaugaga

SEQ ID NO: 683128 - RNA, 22 nt, Human
uaaggcaccauaauauauuuaa

SEQ ID NO: 683129 - RNA, 22 nt, Human
ugcuuaccucuggcuguuuucc

SEQ ID NO: 683130 - RNA, 22 nt, Human
auuguucauguaugaauaaaua

SEQ ID NO: 683131 - RNA, 22 nt, Human
aauagcauccuguaucucuucc

SEQ ID NO: 683132 - RNA, 22 nt, Human
agguucuugacucuaccuucca

SEQ ID NO: 683133 - RNA, 22 nt, Human
uaaaacagcagggcagagaagu

SEQ ID NO: 683134 - RNA, 22 nt, Human
gcacccagggcaggaagugagg

SEQ ID NO: 683135 - RNA, 20 nt, Human
accagagacuggggacaagu

SEQ ID NO: 683136 - RNA, 22 nt, Human
ucacagacuguguugcuacuca

SEQ ID NO: 683137 - RNA, 18 nt, Human
agacuuugaguuagaggg

SEQ ID NO: 683138 - RNA, 22 nt, Human
ccccagcacaggcuccucagau

SEQ ID NO: 683139 - RNA, 22 nt, Human
gagucuguaugucuuccaugca

SEQ ID NO: 683140 - RNA, 22 nt, Human
cagagacaggagugcucccagu

SEQ ID NO: 683141 - RNA, 22 nt, Human
aaguccagcucuaaauaucuga

SEQ ID NO: 683142 - RNA, 22 nt, Human
agggucccgaaggagacagcaa

SEQ ID NO: 683143 - RNA, 19 nt, Human
ccugaggugggguggaagg

SEQ ID NO: 683144 - RNA, 22 nt, Human
ugccaggcauguaguagacuug

SEQ ID NO: 683145 - RNA, 22 nt, Human
agguuuucacaggaaguauguu

SEQ ID NO: 683146 - RNA, 22 nt, Human
aauuaauauuuguggaauuaau

SEQ ID NO: 683147 - RNA, 22 nt, Human
cuguggcacauguggcaaggcc

SEQ ID NO: 683148 - RNA, 22 nt, Human
cucagcuagggaagguuagcuu

SEQ ID NO: 683149 - RNA, 22 nt, Human
ucaggauccauagacucccaaa

SEQ ID NO: 683150 - RNA, 22 nt, Human
ccacagaaugaugacacuucag

SEQ ID NO: 683151 - RNA, 23 nt, Human
gaggaaagaauauagaugcaauc

SEQ ID NO: 683152 - RNA, 22 nt, Human
aggccacagguggaagccagag

SEQ ID NO: 683153 - RNA, 22 nt, Human
gaacacagucaagggcugcugu

SEQ ID NO: 683154 - RNA, 22 nt, Human
aggucagcugugugugcaugag

SEQ ID NO: 683155 - RNA, 22 nt, Human
acagccagucaucucagcaggg

SEQ ID NO: 683156 - RNA, 22 nt, Human
cucugcccgcggaugccacguc

SEQ ID NO: 683157 - RNA, 22 nt, Human
ggcuggaaguccaagaucaagg

SEQ ID NO: 683158 - RNA, 21 nt, Human
ccauaaucuuaggaucaaaau

SEQ ID NO: 683159 - RNA, 22 nt, Human
uaacuacauuucacugcaauua

SEQ ID NO: 683160 - RNA, 22 nt, Human
uucagcaaggcaugugcaggag

SEQ ID NO: 683161 - RNA, 22 nt, Human
acagauacagggacuugguauu

SEQ ID NO: 683162 - RNA, 22 nt, Human
gccugggaaaugguggggucag

SEQ ID NO: 683163 - RNA, 22 nt, Human
cagagacaccccagaaaauaag

SEQ ID NO: 683164 - RNA, 22 nt, Human
ugggcuucugauguugagugcu

SEQ ID NO: 683165 - RNA, 22 nt, Human
agaaauguccagggcuaggauc

SEQ ID NO: 683166 - RNA, 22 nt, Human
uuggcagggcaucagacacgug

SEQ ID NO: 683167 - RNA, 22 nt, Human
gagucacauuaauuuaauuuua

SEQ ID NO: 683168 - RNA, 22 nt, Human
cagcaacaugugguaguguagg

SEQ ID NO: 683169 - RNA, 23 nt, Human
ccagggagugcuacuaucaagcc

SEQ ID NO: 683170 - RNA, 22 nt, Human
agcaggaaggcuuuggggguuc

SEQ ID NO: 683171 - RNA, 22 nt, Human
cugugucuuccucugcccaggc

SEQ ID NO: 683172 - RNA, 22 nt, Human
uggcuucugagcauugaaacgu

SEQ ID NO: 683173 - RNA, 20 nt, Human
uuuccacuguaauguaugau

SEQ ID NO: 683174 - RNA, 22 nt, Human
cacagaaauuauuaggaugcuu

SEQ ID NO: 683175 - RNA, 22 nt, Human
cuaaggaaauaugucacuugcu

SEQ ID NO: 683176 - RNA, 22 nt, Human
ccccagcacucugacucuuacc

SEQ ID NO: 683177 - RNA, 22 nt, Human
ugggcuuccuggagccugugcu

SEQ ID NO: 683178 - RNA, 22 nt, Human
agccuagguuuccgauucucuu

SEQ ID NO: 683179 - RNA, 22 nt, Human
agcacuuuccuggcaaaugugg

SEQ ID NO: 683180 - RNA, 22 nt, Human
ugggggcuagaacccagggauu

SEQ ID NO: 683181 - RNA, 22 nt, Human
cuuugauuccaggcacauguuu

SEQ ID NO: 683182 - RNA, 22 nt, Human
caguuuuacccaagcuuauuuu

SEQ ID NO: 683183 - RNA, 21 nt, Human
aaaggccauaaucacggagca

SEQ ID NO: 683184 - RNA, 22 nt, Human
gcugucccgaaccccugguaau

SEQ ID NO: 683185 - RNA, 17 nt, Human
augcacauguaagagga

SEQ ID NO: 683186 - RNA, 22 nt, Human
aguggcugagugacugugacuc

SEQ ID NO: 683187 - RNA, 22 nt, Human
cagugagagagaacgcauucau

SEQ ID NO: 683188 - RNA, 22 nt, Human
aagggcagaauagagaagaugg

SEQ ID NO: 683189 - RNA, 22 nt, Human
auuugucuagugguauucacgu

SEQ ID NO: 683190 - RNA, 22 nt, Human
ggacacaggcagcugggugggu

SEQ ID NO: 683191 - RNA, 22 nt, Human
cagcaggcccagaguuucaugg

SEQ ID NO: 683192 - RNA, 22 nt, Human
augaacagaggaauagaauucu

SEQ ID NO: 683193 - RNA, 22 nt, Human
gcugggccagagcagcagcacu

SEQ ID NO: 683194 - RNA, 22 nt, Human
uuaaagccugacuguggacuac

SEQ ID NO: 683195 - RNA, 22 nt, Human
caauuucaucuugugcuucaau

SEQ ID NO: 683196 - RNA, 21 nt, Human
uuguaaagguuuagaagaaug

SEQ ID NO: 683197 - RNA, 22 nt, Human
cacacagugggaaaaccugaag

SEQ ID NO: 683198 - RNA, 22 nt, Human
uaucuuagggaauuaacuaaaa

SEQ ID NO: 683199 - RNA, 22 nt, Human
uggaacaaaauauuuauguuug

SEQ ID NO: 683200 - RNA, 22 nt, Human
ccauuccaugugcuacacauaa

SEQ ID NO: 683201 - RNA, 22 nt, Human
ucucuuaaaagauuuuaaugac

SEQ ID NO: 683202 - RNA, 22 nt, Human
uggcaugaguauaggcuucuca

SEQ ID NO: 683203 - RNA, 22 nt, Human
aaagccaaaugaaagaugguuc

SEQ ID NO: 683204 - RNA, 20 nt, Human
gggaguggugguagccugug

SEQ ID NO: 683205 - RNA, 22 nt, Human
cuagaaauacaggcacgugcca

SEQ ID NO: 683206 - RNA, 22 nt, Human
auuuagacacaaaagugccaug

SEQ ID NO: 683207 - RNA, 22 nt, Human
guguaacuuuuauucaugcucu

SEQ ID NO: 683208 - RNA, 22 nt, Human
gcagugguggagcuuacauauc

SEQ ID NO: 683209 - RNA, 22 nt, Human
ugccuggguccaggccaagccu

SEQ ID NO: 683210 - RNA, 22 nt, Human
uuacacagugaauuuacucaag

SEQ ID NO: 683211 - RNA, 18 nt, Human
guaggucaguaccaagca

SEQ ID NO: 683212 - RNA, 22 nt, Human
aagauaauguucuagcugucag

SEQ ID NO: 683213 - RNA, 21 nt, Human
accaucuuccaugcauuauau

SEQ ID NO: 683214 - RNA, 22 nt, Human
ugcauuaauuuuugccagguuc

SEQ ID NO: 683215 - RNA, 22 nt, Human
gggcccuggauuuaagcaugga

SEQ ID NO: 683216 - RNA, 22 nt, Human
ccuguguggccaggcuggaguc

SEQ ID NO: 683217 - RNA, 22 nt, Human
uauauuauaagcccuuucagaa

SEQ ID NO: 683218 - RNA, 22 nt, Human
uuucucaaggugucauguauuu

SEQ ID NO: 683219 - RNA, 22 nt, Human
uuguggggaggauuugaugaga

SEQ ID NO: 683220 - RNA, 22 nt, Human
ugucaugaugugcacaccacag

SEQ ID NO: 683221 - RNA, 18 nt, Human
gaaagccaugcagcagug

SEQ ID NO: 683222 - RNA, 22 nt, Human
uaugcacaccuggguccuuguc

SEQ ID NO: 683223 - RNA, 22 nt, Human
uagauacauacauuuuaaaaug

SEQ ID NO: 683224 - RNA, 22 nt, Human
aagcagcuggaagaguaagaug

SEQ ID NO: 683225 - RNA, 22 nt, Human
ccuggcaggcuggggacagugc

SEQ ID NO: 683226 - RNA, 22 nt, Human
ucauuuucacacauaaauagca

SEQ ID NO: 683227 - RNA, 17 nt, Human
ccagagaugccucaggc

SEQ ID NO: 683228 - RNA, 22 nt, Human
uuugacaauuagguagaaaaag

SEQ ID NO: 683229 - RNA, 22 nt, Human
aguaacaaagugggagaaugau

SEQ ID NO: 683230 - RNA, 22 nt, Human
uaacuugaacauggagaguaag

SEQ ID NO: 683231 - RNA, 22 nt, Human
acaugucuuuuaaagucuaaua

SEQ ID NO: 683232 - RNA, 22 nt, Human
aggacacaugcacacccugcgu

SEQ ID NO: 683233 - RNA, 22 nt, Human
auuucaacagaguuugaaggca

SEQ ID NO: 683234 - RNA, 22 nt, Human
ucucugugucucauguuccuau

SEQ ID NO: 683235 - RNA, 22 nt, Human
uccaggcuacuuggauuccugg

SEQ ID NO: 683236 - RNA, 22 nt, Human
ccagcuuucucagaggcuucua

SEQ ID NO: 683237 - RNA, 22 nt, Human
acucaggaaaugagaggcucuc

SEQ ID NO: 683238 - RNA, 22 nt, Human
aacauuaagauggcggaacagu

SEQ ID NO: 683239 - RNA, 22 nt, Human
uaugguagaaaaacugaguccc

SEQ ID NO: 683240 - RNA, 22 nt, Human
agacccugguaaacacuccagg

SEQ ID NO: 683241 - RNA, 22 nt, Human
aucaggauucaccccagagcug

SEQ ID NO: 683242 - RNA, 22 nt, Human
aaauccuuuucuauacagcaua

SEQ ID NO: 683243 - RNA, 20 nt, Human
gaugucuuggucacaguggc

SEQ ID NO: 683244 - RNA, 22 nt, Human
ggcagcucugcuccacaugagu

SEQ ID NO: 683245 - RNA, 22 nt, Human
gaggccuggcucugcccuccug

SEQ ID NO: 683246 - RNA, 22 nt, Human
uuucuaaucuuuaguuacaaaa

SEQ ID NO: 683247 - RNA, 21 nt, Human
uggaaugaggcugagcagugc

SEQ ID NO: 683248 - RNA, 22 nt, Human
cgcuggaaauugccguuggcuu

SEQ ID NO: 683249 - RNA, 23 nt, Human
uccagucuccugaaaggcagcgu

SEQ ID NO: 683250 - RNA, 22 nt, Human
aguccuggugacacuccucuuc

SEQ ID NO: 683251 - RNA, 22 nt, Human
cagcaugcccagacugagcuaa

SEQ ID NO: 683252 - RNA, 22 nt, Human
uaggcagaaaggaaggcaaguu

SEQ ID NO: 683253 - RNA, 22 nt, Human
guuugugucaaugacuucugca

SEQ ID NO: 683254 - RNA, 19 nt, Human
ugggccucacaaugcuccc

SEQ ID NO: 683255 - RNA, 22 nt, Human
aauacagaugagcuucugccuc

SEQ ID NO: 683256 - RNA, 22 nt, Human
caugcuuccuccaaacuacccu

SEQ ID NO: 683257 - RNA, 22 nt, Human
ugguggagggaacuauuuccag

SEQ ID NO: 683258 - RNA, 22 nt, Human
auacagaagccuguauuucugg

SEQ ID NO: 683259 - RNA, 17 nt, Human
gcucccugaggacagcu

SEQ ID NO: 683260 - RNA, 20 nt, Human
gcuccaggucagagaggacg

SEQ ID NO: 683261 - RNA, 22 nt, Human
uugcugccuugucucagggucu

SEQ ID NO: 683262 - RNA, 22 nt, Human
cugagcucagucccagcucuac

SEQ ID NO: 683263 - RNA, 22 nt, Human
uugaggucccaaacccacugag

SEQ ID NO: 683264 - RNA, 23 nt, Human
aaaugugagggaaaaucuuucug

SEQ ID NO: 683265 - RNA, 22 nt, Human
aaggugugaagagaugggaaga

SEQ ID NO: 683266 - RNA, 22 nt, Human
ugaagcuuguauuuaaauaagu

SEQ ID NO: 683267 - RNA, 22 nt, Human
cagagacaggaaucagcugcag

SEQ ID NO: 683268 - RNA, 22 nt, Human
uucuggagccgggccugggcag

SEQ ID NO: 683269 - RNA, 22 nt, Human
ccuuccuugagaagcaauuccu

SEQ ID NO: 683270 - RNA, 22 nt, Human
agacuggauagcuuuggacuug

SEQ ID NO: 683271 - RNA, 22 nt, Human
cuuugaauugccguuucaucug

SEQ ID NO: 683272 - RNA, 22 nt, Human
uugcuuuuaauuaaucauugcu

SEQ ID NO: 683273 - RNA, 22 nt, Human
uuccauccuaauaaaagaaguu

SEQ ID NO: 683274 - RNA, 22 nt, Human
gcucaaggcaggcagacaugag

SEQ ID NO: 683275 - RNA, 22 nt, Human
cuuggagaauccugguuauuca

SEQ ID NO: 683276 - RNA, 22 nt, Human
gccacagacagagagucuagug

SEQ ID NO: 683277 - RNA, 23 nt, Human
agccuucaggcaaugucaguaga

SEQ ID NO: 683278 - RNA, 22 nt, Human
gucuggaggcacuuucucauga

SEQ ID NO: 683279 - RNA, 22 nt, Human
acagugcaaauaggacugucuu

SEQ ID NO: 683280 - RNA, 21 nt, Human
uagggcaggcauuggaagaga

SEQ ID NO: 683281 - RNA, 22 nt, Human
ccuggagaggcgcugcagagga

SEQ ID NO: 683282 - RNA, 22 nt, Human
augcaacaggucagccaggaag

SEQ ID NO: 683283 - RNA, 22 nt, Human
cuguuuuccuggguuccaugag

SEQ ID NO: 683284 - RNA, 22 nt, Human
ucuucccaaugcaaaguaggac

SEQ ID NO: 683285 - RNA, 19 nt, Human
cugauguuccagagaagcu

SEQ ID NO: 683286 - RNA, 22 nt, Human
gucuccuggaaauaugcccaua

SEQ ID NO: 683287 - RNA, 23 nt, Human
aggggcagcaaguuuugguguua

SEQ ID NO: 683288 - RNA, 22 nt, Human
uuuuuuccagcuucuagaggcc

SEQ ID NO: 683289 - RNA, 22 nt, Human
ugucaugggucuaaacauugau

SEQ ID NO: 683290 - RNA, 22 nt, Human
auugaaagaguuuucugcugca

SEQ ID NO: 683291 - RNA, 22 nt, Human
uuggacucugggauucuggauu

SEQ ID NO: 683292 - RNA, 22 nt, Human
gugucagaaacaggaaggggaa

SEQ ID NO: 683293 - RNA, 22 nt, Human
uucaguuugaauucuguagaac

SEQ ID NO: 683294 - RNA, 21 nt, Human
uucauuuguuauagacaaagu

SEQ ID NO: 683295 - RNA, 22 nt, Human
cagacugggagucaggaagaag

SEQ ID NO: 683296 - RNA, 22 nt, Human
caggacagcucaacaccuccuc

SEQ ID NO: 683297 - RNA, 22 nt, Human
cagccacagcugggugccugac

SEQ ID NO: 683298 - RNA, 22 nt, Human
ucagaagaagguauauuuauac

SEQ ID NO: 683299 - RNA, 22 nt, Human
uggcaggcagugugggagcugg

SEQ ID NO: 683300 - RNA, 22 nt, Human
ucugaggccuugggacagaagu

SEQ ID NO: 683301 - RNA, 22 nt, Human
uggguuaacaguuuauaccaga

SEQ ID NO: 683302 - RNA, 22 nt, Human
uacaaugagcuguacaucucca

SEQ ID NO: 683303 - RNA, 22 nt, Human
agacaucucccaugcauuuuua

SEQ ID NO: 683304 - RNA, 22 nt, Human
aaguuuuauuggcuauagcacu

SEQ ID NO: 683305 - RNA, 22 nt, Human
uguacagacuuugcagugugca

SEQ ID NO: 683306 - RNA, 22 nt, Human
aauguuuuauagcucaagcaau

SEQ ID NO: 683307 - RNA, 22 nt, Human
uuccaaauggagaagaugaguu

SEQ ID NO: 683308 - RNA, 22 nt, Human
uuaaacuauagcuugaugugaa

SEQ ID NO: 683309 - RNA, 22 nt, Human
uuacaacauauuuagcuugauu

SEQ ID NO: 683310 - RNA, 22 nt, Human
gguggcagagaggagguaguuu

SEQ ID NO: 683311 - RNA, 22 nt, Human
gauaaaauaacuauggaauacu

SEQ ID NO: 683312 - RNA, 22 nt, Human
uaugagaaauugcugauauuug

SEQ ID NO: 683313 - RNA, 22 nt, Human
cucucugcaaguuuugaaauag

SEQ ID NO: 683314 - RNA, 22 nt, Human
aaggcugauuagacugauagcu

SEQ ID NO: 683315 - RNA, 22 nt, Human
gcaguccucucauuggccuccu

SEQ ID NO: 683316 - RNA, 20 nt, Human
cacaugcuguguguuucucu

SEQ ID NO: 683317 - RNA, 22 nt, Human
augucuguuuucauaucagaua

SEQ ID NO: 683318 - RNA, 17 nt, Human
ugaaggccaugaccacg

SEQ ID NO: 683319 - RNA, 22 nt, Human
gaggccugguagccgagcccca

SEQ ID NO: 683320 - RNA, 22 nt, Human
ccagucugcagccccuggggac

SEQ ID NO: 683321 - RNA, 22 nt, Human
agguggcuguauucagcuguaa

SEQ ID NO: 683322 - RNA, 18 nt, Human
auccuugaugagaggucu

SEQ ID NO: 683323 - RNA, 22 nt, Human
ucccugagagcacuggggagcc

SEQ ID NO: 683324 - RNA, 22 nt, Human
uaaagccauacugaaagccacu

SEQ ID NO: 683325 - RNA, 22 nt, Human
acuggaaaauucaaaugggguc

SEQ ID NO: 683326 - RNA, 22 nt, Human
aaguccagaacuccugugauag

SEQ ID NO: 683327 - RNA, 22 nt, Human
ugaguccaucgcagggaagugg

SEQ ID NO: 683328 - RNA, 22 nt, Human
uccuucaaagcuccuagugagc

SEQ ID NO: 683329 - RNA, 20 nt, Human
ccagagcugauggcugcccg

SEQ ID NO: 683330 - RNA, 20 nt, Human
agugugcauuuagagucugc

SEQ ID NO: 683331 - RNA, 22 nt, Human
acaguguucaaaccacuaggcu

SEQ ID NO: 683332 - RNA, 22 nt, Human
agacuguuaauuucaauuaaaa

SEQ ID NO: 683333 - RNA, 22 nt, Human
gugaauaugaucuuauuuggaa

SEQ ID NO: 683334 - RNA, 22 nt, Human
uucugcagcaugaggcuggagc

SEQ ID NO: 683335 - RNA, 22 nt, Human
aaacuguaagugccucaagguc

SEQ ID NO: 683336 - RNA, 22 nt, Human
cgagugucccuaccauuuccua

SEQ ID NO: 683337 - RNA, 22 nt, Human
gaauguuucauguguauguuag

SEQ ID NO: 683338 - RNA, 22 nt, Human
gcucagccgaacuucagagcag

SEQ ID NO: 683339 - RNA, 19 nt, Human
gacuucugauguccagaug

SEQ ID NO: 683340 - RNA, 22 nt, Human
uuuaaaugcuuuaagcaagggu

SEQ ID NO: 683341 - RNA, 22 nt, Human
uauguccugcuacucucucaug

SEQ ID NO: 683342 - RNA, 22 nt, Human
uucuugaaucacuuuagagaua

SEQ ID NO: 683343 - RNA, 22 nt, Human
gugcaaauuccacuggaaagcu

SEQ ID NO: 683344 - RNA, 22 nt, Human
cuggcucaccuccgcuccagca

SEQ ID NO: 683345 - RNA, 22 nt, Human
gggcacugugcugggugcuuua

SEQ ID NO: 683346 - RNA, 18 nt, Human
cuuucagauggauaugcu

SEQ ID NO: 683347 - RNA, 23 nt, Human
agcuccagcugacgugggcagcc

SEQ ID NO: 683348 - RNA, 22 nt, Human
ggaagccaggccaaugagaaca

SEQ ID NO: 683349 - RNA, 22 nt, Human
cugagggccgggacccaguuuc

SEQ ID NO: 683350 - RNA, 22 nt, Human
uccagagccccagucuaguggg

SEQ ID NO: 683351 - RNA, 22 nt, Human
caguagccuuauuuggaucauu

SEQ ID NO: 683352 - RNA, 22 nt, Human
aguggcaguggaaagcacacgg

SEQ ID NO: 683353 - RNA, 22 nt, Human
guacuuuaagacuccaguagca

SEQ ID NO: 683354 - RNA, 22 nt, Human
agaagugccauacuguggucca

SEQ ID NO: 683355 - RNA, 22 nt, Human
aagguacaggguauuagauuau

SEQ ID NO: 683356 - RNA, 22 nt, Human
ccuccacugcuucccagcuuug

SEQ ID NO: 683357 - RNA, 22 nt, Human
cagagcugcagauugaaggcau

SEQ ID NO: 683358 - RNA, 22 nt, Human
agaugcagauuuggauucagga

SEQ ID NO: 683359 - RNA, 22 nt, Human
uuuugaaagggugauuuggcuu

SEQ ID NO: 683360 - RNA, 22 nt, Human
guggccuuuucaaguaggguau

SEQ ID NO: 683361 - RNA, 22 nt, Human
ugcccagcacccagcaugaugc

SEQ ID NO: 683362 - RNA, 23 nt, Human
uccagggcaguggcugggucugc

SEQ ID NO: 683363 - RNA, 22 nt, Human
agcaucuggccugguuacuuuu

SEQ ID NO: 683364 - RNA, 22 nt, Human
uggagagcagggcuggaguuca

SEQ ID NO: 683365 - RNA, 22 nt, Human
aaauguucuaaauuacauguga

SEQ ID NO: 683366 - RNA, 22 nt, Human
cuuggcuguaaaaucagaggcu

SEQ ID NO: 683367 - RNA, 22 nt, Human
gcaauaaacauguuugaugcgc

SEQ ID NO: 683368 - RNA, 22 nt, Human
agguuucuaugcuguuuaucuu

SEQ ID NO: 683369 - RNA, 22 nt, Human
ucaccaaggcauuuucacagca

SEQ ID NO: 683370 - RNA, 22 nt, Human
ucauacaucuguccuggagcuc

SEQ ID NO: 683371 - RNA, 22 nt, Human
ugaguaaaagugaaucuuaugu

SEQ ID NO: 683372 - RNA, 22 nt, Human
ccucccuuccccaguagucaag

SEQ ID NO: 683373 - RNA, 22 nt, Human
ugggcugcccaagguggccaug

SEQ ID NO: 683374 - RNA, 22 nt, Human
ucauggggugacagaagggagg

SEQ ID NO: 683375 - RNA, 22 nt, Human
cccagugugguugugaauucug

SEQ ID NO: 683376 - RNA, 20 nt, Human
uuugaauguaaagcauguca

SEQ ID NO: 683377 - RNA, 22 nt, Human
ucugauuccagugacccuagga

SEQ ID NO: 683378 - RNA, 22 nt, Human
cuaauguaucauggcucucagc

SEQ ID NO: 683379 - RNA, 22 nt, Human
agccaggacagggcagcucgcu

SEQ ID NO: 683380 - RNA, 22 nt, Human
gaggcucugugaugugccaggc

SEQ ID NO: 683381 - RNA, 22 nt, Human
gaggagggcaguuccucuuuua

SEQ ID NO: 683382 - RNA, 22 nt, Human
uuuaagcagagaaaugauguau

SEQ ID NO: 683383 - RNA, 22 nt, Human
uaacuucagcgaguucucuuaa

SEQ ID NO: 683384 - RNA, 22 nt, Human
ggcucugggucuguggggagcg

SEQ ID NO: 683385 - RNA, 22 nt, Human
agcagaaagcuuauuuugacug

SEQ ID NO: 683386 - RNA, 20 nt, Human
cuugaacugauucuauuucc

SEQ ID NO: 683387 - RNA, 22 nt, Human
uucaccagagguuagaauauuu

SEQ ID NO: 683388 - RNA, 22 nt, Human
ugcuuuauuggaaccucauccu

SEQ ID NO: 683389 - RNA, 23 nt, Human
uuguccuucugaaauauaucugg

SEQ ID NO: 683390 - RNA, 21 nt, Human
agaauuaaauuggauuugugu

SEQ ID NO: 683391 - RNA, 22 nt, Human
guacaaauugauacagguuuuc

SEQ ID NO: 683392 - RNA, 22 nt, Human
aggcaguucucguguguguccc

SEQ ID NO: 683393 - RNA, 22 nt, Human
ugaaagaacuagcaucuucaag

SEQ ID NO: 683394 - RNA, 22 nt, Human
aauagcaucuucugagacaaag

SEQ ID NO: 683395 - RNA, 22 nt, Human
gacccugguguccagguccugc

SEQ ID NO: 683396 - RNA, 22 nt, Human
aacagcuuugagcaguucugua

SEQ ID NO: 683397 - RNA, 22 nt, Human
uauuuuaaagacugccagccua

SEQ ID NO: 683398 - RNA, 22 nt, Human
auaaaaucagaguuggauugga

SEQ ID NO: 683399 - RNA, 22 nt, Human
aaaggccaccaacaugaagcau

SEQ ID NO: 683400 - RNA, 22 nt, Human
augguggacgggagacaggacu

SEQ ID NO: 683401 - RNA, 22 nt, Human
guuaaugucuuccuauucuaca

SEQ ID NO: 683402 - RNA, 22 nt, Human
cuacagcuggccuuggaaaacu

SEQ ID NO: 683403 - RNA, 22 nt, Human
caguauuuauggcuugaguauu

SEQ ID NO: 683404 - RNA, 22 nt, Human
cugcagcuuauuugcuguguga

SEQ ID NO: 683405 - RNA, 22 nt, Human
ugcugcugauggcaccuaggca

SEQ ID NO: 683406 - RNA, 22 nt, Human
cugaagagacuggagggggcau

SEQ ID NO: 683407 - RNA, 22 nt, Human
uuguccuuaccucaaucuggaa

SEQ ID NO: 683408 - RNA, 22 nt, Human
cuuaacagagagaaguguugcu

SEQ ID NO: 683409 - RNA, 22 nt, Human
uacuguuucaagcccucacaga

SEQ ID NO: 683410 - RNA, 22 nt, Human
ugccacuggcucaauggugcag

SEQ ID NO: 683411 - RNA, 22 nt, Human
uauaggaaaggaguggucacaa

SEQ ID NO: 683412 - RNA, 22 nt, Human
uggcccuucaaauucccuaguc

SEQ ID NO: 683413 - RNA, 22 nt, Human
gccuggcugagguggggaggca

SEQ ID NO: 683414 - RNA, 22 nt, Human
agcaguugagugggaaucaggc

SEQ ID NO: 683415 - RNA, 20 nt, Human
uacauucaaaacaaacucug

SEQ ID NO: 683416 - RNA, 22 nt, Human
gagaggaacucccagugccugg

SEQ ID NO: 683417 - RNA, 22 nt, Human
gaguccuuccagcaggcauuua

SEQ ID NO: 683418 - RNA, 22 nt, Human
gcuuauuuucaccuucucucag

SEQ ID NO: 683419 - RNA, 22 nt, Human
gcugccuuuugcuccucccacc

SEQ ID NO: 683420 - RNA, 22 nt, Human
aggccaccacccuaucuccugg

SEQ ID NO: 683421 - RNA, 22 nt, Human
ccuucaaggcaaggagggcugg

SEQ ID NO: 683422 - RNA, 22 nt, Human
agaagcugccuacaugaccagc

SEQ ID NO: 683423 - RNA, 22 nt, Human
uacaugcucaguaacuuucagu

SEQ ID NO: 683424 - RNA, 22 nt, Human
agcaggcuacuccuguguucgu

SEQ ID NO: 683425 - RNA, 22 nt, Human
agacaggcaugaggcuggauug

SEQ ID NO: 683426 - RNA, 22 nt, Human
agaguaaauaggagaugacagc

SEQ ID NO: 683427 - RNA, 22 nt, Human
uuaaugacaucauaggugaagu

SEQ ID NO: 683428 - RNA, 22 nt, Human
caggcucacuuucucagucaca

SEQ ID NO: 683429 - RNA, 23 nt, Human
ccagucucuuuccaaaaucacau

SEQ ID NO: 683430 - RNA, 22 nt, Human
ugagugugcuaggugucucggu

SEQ ID NO: 683431 - RNA, 22 nt, Human
uuucauagccuucuaaugaguu

SEQ ID NO: 683432 - RNA, 22 nt, Human
uacaccauucccagguggauuu

SEQ ID NO: 683433 - RNA, 22 nt, Human
gcucuuccauuucucuugaacu

SEQ ID NO: 683434 - RNA, 22 nt, Human
auguggcuuaguuaggugcccc

SEQ ID NO: 683435 - RNA, 22 nt, Human
cucuguaccuggcauagcaacc

SEQ ID NO: 683436 - RNA, 22 nt, Human
aggucccugcagcagacugcca

SEQ ID NO: 683437 - RNA, 19 nt, Human
uagcugccuguuaccucca

SEQ ID NO: 683438 - RNA, 23 nt, Human
uccagagcucaugcucucaacca

SEQ ID NO: 683439 - RNA, 22 nt, Human
caauuucucgaacucuaaucca

SEQ ID NO: 683440 - RNA, 22 nt, Human
aggcugugaaauguggcaagga

SEQ ID NO: 683441 - RNA, 22 nt, Human
cucaaauccccguuccucauuc

SEQ ID NO: 683442 - RNA, 22 nt, Human
cacagagauggucuggcaggug

SEQ ID NO: 683443 - RNA, 22 nt, Human
uaguuucuggguuggcuucuac

SEQ ID NO: 683444 - RNA, 18 nt, Human
cagaggagagacauucag

SEQ ID NO: 683445 - RNA, 22 nt, Human
acagauauuaugguuucuccuu

SEQ ID NO: 683446 - RNA, 22 nt, Human
gucugaggucauuagcucucuu

SEQ ID NO: 683447 - RNA, 22 nt, Human
caguucucugugccucgcuggg

SEQ ID NO: 683448 - RNA, 20 nt, Human
aggaaagccugugugagucu

SEQ ID NO: 683449 - RNA, 22 nt, Human
aauguuuucugacugcuaacuu

SEQ ID NO: 683450 - RNA, 22 nt, Human
ucccucagaugagcuccuagca

SEQ ID NO: 683451 - RNA, 23 nt, Human
uguaacaauuucauauacaugca

SEQ ID NO: 683452 - RNA, 23 nt, Human
ucuuuccuaaugaaacagugaaa

SEQ ID NO: 683453 - RNA, 22 nt, Human
ggguaggaugguagaagggacc

SEQ ID NO: 683454 - RNA, 22 nt, Human
uacauucugguggagaaaguaa

SEQ ID NO: 683455 - RNA, 22 nt, Human
cuguggcucuuuaguugagcac

SEQ ID NO: 683456 - RNA, 22 nt, Human
gcugccugauuuacauagugaa

SEQ ID NO: 683457 - RNA, 22 nt, Human
uggugcaggaguuggcagggac

SEQ ID NO: 683458 - RNA, 21 nt, Human
uacuacagucucuuuaucagu

SEQ ID NO: 683459 - RNA, 22 nt, Human
ggcaggagcucuccaguuugcc

SEQ ID NO: 683460 - RNA, 22 nt, Human
gcuuuacacagaugaauauuuc

SEQ ID NO: 683461 - RNA, 22 nt, Human
guaugucaugagccuugugcgu

SEQ ID NO: 683462 - RNA, 22 nt, Human
uuugcauaggauggacauuuua

SEQ ID NO: 683463 - RNA, 22 nt, Human
acaaugcuguugagacauucuu

SEQ ID NO: 683464 - RNA, 22 nt, Human
caggccagcuuccugacauccu

SEQ ID NO: 683465 - RNA, 22 nt, Human
ugugucuggaccggggaggagc

SEQ ID NO: 683466 - RNA, 22 nt, Human
auacugaaggcauucagauaac

SEQ ID NO: 683467 - RNA, 22 nt, Human
augcauguauuaucuagaugag

SEQ ID NO: 683468 - RNA, 22 nt, Human
cuggaagggaaaucucuuggca

SEQ ID NO: 683469 - RNA, 20 nt, Human
gucugaggagcagugggaaa

SEQ ID NO: 683470 - RNA, 22 nt, Human
aacuuuuucugggauggagggu

SEQ ID NO: 683471 - RNA, 22 nt, Human
aggcuccagucugaaccuuggg

SEQ ID NO: 683472 - RNA, 22 nt, Human
agugggagaaugaauaagggcc

SEQ ID NO: 683473 - RNA, 22 nt, Human
agcccagcaguaagauuagaga

SEQ ID NO: 683474 - RNA, 22 nt, Human
ccaggaggggucucugucuccc

SEQ ID NO: 683475 - RNA, 22 nt, Human
uaugaacuuuaagcucuguguc

SEQ ID NO: 683476 - RNA, 22 nt, Human
gggcuuaaggccagugugcuuu

SEQ ID NO: 683477 - RNA, 22 nt, Human
auguccagcucaugauacuauc

SEQ ID NO: 683478 - RNA, 22 nt, Human
uucugccugauguagucauacc

SEQ ID NO: 683479 - RNA, 22 nt, Human
ccaguucuuucugugugcaaca

SEQ ID NO: 683480 - RNA, 22 nt, Human
aaugcacauauauguguauaca

SEQ ID NO: 683481 - RNA, 22 nt, Human
uugaaguuguaguucagugaag

SEQ ID NO: 683482 - RNA, 18 nt, Human
acacugcagcagucugcu

SEQ ID NO: 683483 - RNA, 22 nt, Human
ucagaggaccuuacugagaacc

SEQ ID NO: 683484 - RNA, 22 nt, Human
agccugcuugagaguccuggcu

SEQ ID NO: 683485 - RNA, 22 nt, Human
uuugauuuucagcaauaguggc

SEQ ID NO: 683486 - RNA, 22 nt, Human
ggcuuccaagguccucuccacc

SEQ ID NO: 683487 - RNA, 22 nt, Human
cagugcagacguggagggggca

SEQ ID NO: 683488 - RNA, 22 nt, Human
gugggugcggggagccgaggcg

SEQ ID NO: 683489 - RNA, 22 nt, Human
ugcauuuaugucucccaccagc

SEQ ID NO: 683490 - RNA, 22 nt, Human
cugccuugucuuguuuucaggg

SEQ ID NO: 683491 - RNA, 22 nt, Human
uucugaauuucuguguaucuua

SEQ ID NO: 683492 - RNA, 22 nt, Human
ugucuacaaacguguacacauu

SEQ ID NO: 683493 - RNA, 22 nt, Human
gcagcccaggacccuggacaga

SEQ ID NO: 683494 - RNA, 22 nt, Human
ggcugccccaugggcugggcug

SEQ ID NO: 683495 - RNA, 22 nt, Human
ucucucagaacugcagcugcag

SEQ ID NO: 683496 - RNA, 20 nt, Human
agauggugaaggccagggag

SEQ ID NO: 683497 - RNA, 22 nt, Human
uagaaacacagaucugguguca

SEQ ID NO: 683498 - RNA, 22 nt, Human
gugugccacugccugaggaccc

SEQ ID NO: 683499 - RNA, 22 nt, Human
uuguauucuuuaugacuucccu

SEQ ID NO: 683500 - RNA, 22 nt, Human
uccuuggaggucaacgggacgg

SEQ ID NO: 683501 - RNA, 22 nt, Human
ucagugugcacaugguagcagu

SEQ ID NO: 683502 - RNA, 22 nt, Human
caggguggaauggaaugcuggc

SEQ ID NO: 683503 - RNA, 22 nt, Human
aaucacuuguaaggaauucaau

SEQ ID NO: 683504 - RNA, 22 nt, Human
acaugcuuugcacuuacaucau

SEQ ID NO: 683505 - RNA, 22 nt, Human
gcuuugugaauuauuacucaca

SEQ ID NO: 683506 - RNA, 22 nt, Human
ccagguggugaaagugggcccu

SEQ ID NO: 683507 - RNA, 20 nt, Human
ucauuacagugcuaagaugu

SEQ ID NO: 683508 - RNA, 22 nt, Human
guggcaugaaagcaucugugau

SEQ ID NO: 683509 - RNA, 22 nt, Human
auaagacacgccccacucacuc

SEQ ID NO: 683510 - RNA, 22 nt, Human
uaaucucuuuaugagaagaagg

SEQ ID NO: 683511 - RNA, 18 nt, Human
uuaaguuuuacugcuuua

SEQ ID NO: 683512 - RNA, 22 nt, Human
agauauuaggaggauucauaau

SEQ ID NO: 683513 - RNA, 22 nt, Human
gcacucugugaucugcagagcc

SEQ ID NO: 683514 - RNA, 22 nt, Human
cuggcucuucuggguucugugu

SEQ ID NO: 683515 - RNA, 22 nt, Human
uauggcuugucuuuauaccagg

SEQ ID NO: 683516 - RNA, 22 nt, Human
agcaggugccagguguacccgc

SEQ ID NO: 683517 - RNA, 22 nt, Human
uucucagaaaauguagagaaaa

SEQ ID NO: 683518 - RNA, 22 nt, Human
agccacaccuguccugccagcu

SEQ ID NO: 683519 - RNA, 22 nt, Human
gugcacaaucuucauauggcgu

SEQ ID NO: 683520 - RNA, 22 nt, Human
ugcuguguucaccaauaugugu

SEQ ID NO: 683521 - RNA, 22 nt, Human
ugggccuggguuccuccugggc

SEQ ID NO: 683522 - RNA, 22 nt, Human
gggaggagcugagugugugugc

SEQ ID NO: 683523 - RNA, 22 nt, Human
agugacuucuccuaaugucaua

SEQ ID NO: 683524 - RNA, 22 nt, Human
gucaccagugcuaagaggugga

SEQ ID NO: 683525 - RNA, 22 nt, Human
uauguuuauacuuugauguacu

SEQ ID NO: 683526 - RNA, 22 nt, Human
aaagugcugggauuacaggugu

SEQ ID NO: 683527 - RNA, 15 nt, Human
ugggcagaucacuug

SEQ ID NO: 683528 - RNA, 22 nt, Human
uggggagucgcugcagagcgau

SEQ ID NO: 683529 - RNA, 22 nt, Human
cagcaaggacugggcaugugaa

SEQ ID NO: 683530 - RNA, 22 nt, Human
cuuugcagauuuguuuagugcu

SEQ ID NO: 683531 - RNA, 22 nt, Human
acugcagagcuuuucaguugag

SEQ ID NO: 683532 - RNA, 22 nt, Human
agacagugcuaucccaucugug

SEQ ID NO: 683533 - RNA, 22 nt, Human
gugaauaauauuguuuauaaaa

SEQ ID NO: 683534 - RNA, 22 nt, Human
augcuucuguguauguuucagg

SEQ ID NO: 683535 - RNA, 22 nt, Human
aaucacacaaaggcaacuuuug

SEQ ID NO: 683536 - RNA, 22 nt, Human
cugggacauauugcuaguguug

SEQ ID NO: 683537 - RNA, 22 nt, Human
gauggcuuaagaguaaaaggca

SEQ ID NO: 683538 - RNA, 22 nt, Human
uauaggaaguauucaaagacug

SEQ ID NO: 683539 - RNA, 22 nt, Human
aggcuugggucagaaggcuugu

SEQ ID NO: 683540 - RNA, 23 nt, Human
ucacagagcauacugcauuuugc

SEQ ID NO: 683541 - RNA, 22 nt, Human
caaaugcagauucaggaguucu

SEQ ID NO: 683542 - RNA, 22 nt, Human
ugagcagagucgcuccagagug

SEQ ID NO: 683543 - RNA, 22 nt, Human
uacaauagggcuuuuguuuaug

SEQ ID NO: 683544 - RNA, 22 nt, Human
ugagaacugaggauuugaauuc

SEQ ID NO: 683545 - RNA, 22 nt, Human
aagcugaggucaaguagcuagu

SEQ ID NO: 683546 - RNA, 22 nt, Human
ugacaucuuugaucucauuuag

SEQ ID NO: 683547 - RNA, 22 nt, Human
uccuagaaucuuuguaagauug

SEQ ID NO: 683548 - RNA, 22 nt, Human
gauucacucauauuuuacguuu

SEQ ID NO: 683549 - RNA, 22 nt, Human
aaagcaaugcuuguggaaugua

SEQ ID NO: 683550 - RNA, 22 nt, Human
aaauugcauuuuaaagguagau

SEQ ID NO: 683551 - RNA, 22 nt, Human
gacucagauuuagaggguaaga

SEQ ID NO: 683552 - RNA, 22 nt, Human
augugcaguugguggccaggag

SEQ ID NO: 683553 - RNA, 22 nt, Human
ucucugaguauccugaacugcc

SEQ ID NO: 683554 - RNA, 22 nt, Human
cuauuuguaaagugccuggugu

SEQ ID NO: 683555 - RNA, 20 nt, Human
uuuuagcacuuguuauggug

SEQ ID NO: 683556 - RNA, 22 nt, Human
uucucacaguaccuaacaugua

SEQ ID NO: 683557 - RNA, 22 nt, Human
uacacuuuucugguuacucuug

SEQ ID NO: 683558 - RNA, 22 nt, Human
acuauauacacauuaucuuguu

SEQ ID NO: 683559 - RNA, 22 nt, Human
caagauggguguugugaugguu

SEQ ID NO: 683560 - RNA, 22 nt, Human
acuguacaugcaucuugucuau

SEQ ID NO: 683561 - RNA, 22 nt, Human
uauuuuacaugauccagaguug

SEQ ID NO: 683562 - RNA, 16 nt, Human
gcccaggacgggaggc

SEQ ID NO: 683563 - RNA, 22 nt, Human
uagacuuuucaaaaucuagacc

SEQ ID NO: 683564 - RNA, 22 nt, Human
uuuucacacaaggugauaaguu

SEQ ID NO: 683565 - RNA, 22 nt, Human
uucuacagacuauaacugugau

SEQ ID NO: 683566 - RNA, 22 nt, Human
gaggagaaagcagugauuugug

SEQ ID NO: 683567 - RNA, 22 nt, Human
ugaggcuaaaggugaccagauu

SEQ ID NO: 683568 - RNA, 22 nt, Human
cugcugcccuagacccaguccu

SEQ ID NO: 683569 - RNA, 22 nt, Human
auggacucacuaauuccuccac

SEQ ID NO: 683570 - RNA, 22 nt, Human
cuuccucacggugcaacaggaa

SEQ ID NO: 683571 - RNA, 22 nt, Human
auuucucacccuaccucacucc

SEQ ID NO: 683572 - RNA, 22 nt, Human
cacguuuuaugacagaagaagc

SEQ ID NO: 683573 - RNA, 22 nt, Human
gggauggggucaacauguaccu

SEQ ID NO: 683574 - RNA, 22 nt, Human
aagauguuaggaaaguuagggu

SEQ ID NO: 683575 - RNA, 22 nt, Human
augcauauaauggccagaacaa

SEQ ID NO: 683576 - RNA, 22 nt, Human
ccccacagccgccagcagggag

SEQ ID NO: 683577 - RNA, 22 nt, Human
gcacaugacuuugaggaaacca

SEQ ID NO: 683578 - RNA, 22 nt, Human
ggucccugcugaagccuuggug

SEQ ID NO: 683579 - RNA, 22 nt, Human
uacagcuuuucauauuuguguu

SEQ ID NO: 683580 - RNA, 22 nt, Human
uuuacuguuuuauauuguccag

SEQ ID NO: 683581 - RNA, 22 nt, Human
aaauacaguggcagcagauaau

SEQ ID NO: 683582 - RNA, 22 nt, Human
cauucccuuggggaguucaugc

SEQ ID NO: 683583 - RNA, 22 nt, Human
ucccugucucccuugagacuag

SEQ ID NO: 683584 - RNA, 22 nt, Human
aucggggaaaagggaggcugug

SEQ ID NO: 683585 - RNA, 20 nt, Human
caaaagcaaugaaguuauga

SEQ ID NO: 683586 - RNA, 22 nt, Human
uaaaauagccagugccccucug

SEQ ID NO: 683587 - RNA, 22 nt, Human
caaauuuaaguuagaaagcaau

SEQ ID NO: 683588 - RNA, 22 nt, Human
acuagacaucgagcuacagagu

SEQ ID NO: 683589 - RNA, 22 nt, Human
cacuggaggucaguggagcacu

SEQ ID NO: 683590 - RNA, 22 nt, Human
ggaggacaggggcugcagcaca

SEQ ID NO: 683591 - RNA, 21 nt, Human
ugaaaugagaaugcugagcac

SEQ ID NO: 683592 - RNA, 22 nt, Human
uugaacaaucaaaagaauucau

SEQ ID NO: 683593 - RNA, 22 nt, Human
cagagacccuaggcaggugaca

SEQ ID NO: 683594 - RNA, 22 nt, Human
gggcuggagaugcuuauggaga

SEQ ID NO: 683595 - RNA, 22 nt, Human
uaaauuagggacuuuaguuaau

SEQ ID NO: 683596 - RNA, 22 nt, Human
uugcugugaaaccaugggaagu

SEQ ID NO: 683597 - RNA, 23 nt, Human
ggcuuugcucuggguucuagggu

SEQ ID NO: 683598 - RNA, 22 nt, Human
cuggcuguuuucaauguugaug

SEQ ID NO: 683599 - RNA, 22 nt, Human
uggaggaaaauuacuggggucu

SEQ ID NO: 683600 - RNA, 22 nt, Human
uccugccucuugccuucuucac

SEQ ID NO: 683601 - RNA, 22 nt, Human
aggcaguguggagggcuguugc

SEQ ID NO: 683602 - RNA, 22 nt, Human
caggauagaaaggccauggagu

SEQ ID NO: 683603 - RNA, 22 nt, Human
ugcauacuuguauguguuacau

SEQ ID NO: 683604 - RNA, 22 nt, Human
agcuguccuggcucaggcugug

SEQ ID NO: 683605 - RNA, 18 nt, Human
caggucugucugccuccc

SEQ ID NO: 683606 - RNA, 22 nt, Human
cagugggugaugaguccugggg

SEQ ID NO: 683607 - RNA, 22 nt, Human
gauuuacagguuagguccugua

SEQ ID NO: 683608 - RNA, 22 nt, Human
uauuaugcaaauauuccuaccu

SEQ ID NO: 683609 - RNA, 22 nt, Human
cuuacgugauaacuucucaaaa

SEQ ID NO: 683610 - RNA, 22 nt, Human
uguguuaauuccacaaacauuc

SEQ ID NO: 683611 - RNA, 22 nt, Human
gcugccuuuuaaagccucgcuu

SEQ ID NO: 683612 - RNA, 22 nt, Human
cugaggaaaguauugccuggug

SEQ ID NO: 683613 - RNA, 17 nt, Human
auuuacauugucaccga

SEQ ID NO: 683614 - RNA, 22 nt, Human
caagauggacauaaggagagaa

SEQ ID NO: 683615 - RNA, 17 nt, Human
gagauuuucguccugaa

SEQ ID NO: 683616 - RNA, 22 nt, Human
ggccuugguaaugggggacugu

SEQ ID NO: 683617 - RNA, 22 nt, Human
cucugaaagacaagcucucauu

SEQ ID NO: 683618 - RNA, 22 nt, Human
uuuagacagcaucuggugacuu

SEQ ID NO: 683619 - RNA, 22 nt, Human
ugauucaguugguuuuguucag

SEQ ID NO: 683620 - RNA, 22 nt, Human
caugagauaauuuuucuccagu

SEQ ID NO: 683621 - RNA, 22 nt, Human
uggcuucuugacuucuuggcug

SEQ ID NO: 683622 - RNA, 22 nt, Human
gcacacaggggaguucucagaa

SEQ ID NO: 683623 - RNA, 22 nt, Human
accuggcacauucuaccacagu

SEQ ID NO: 683624 - RNA, 22 nt, Human
aggcucugccaauuccuuccuc

SEQ ID NO: 683625 - RNA, 22 nt, Human
gugugggaaggcuaggaugcug

SEQ ID NO: 683626 - RNA, 22 nt, Human
uagugucuucaggagauaugag

SEQ ID NO: 683627 - RNA, 22 nt, Human
ugucccugccugcccacucugu

SEQ ID NO: 683628 - RNA, 22 nt, Human
aaauucacucuguuccucaugg

SEQ ID NO: 683629 - RNA, 17 nt, Human
gggugggcacugcuggc

SEQ ID NO: 683630 - RNA, 22 nt, Human
gagcuagggguagucaggagac

SEQ ID NO: 683631 - RNA, 22 nt, Human
uauuuggaauagcuugcuaaug

SEQ ID NO: 683632 - RNA, 22 nt, Human
ucaaagcacacuuagugguaga

SEQ ID NO: 683633 - RNA, 22 nt, Human
ggaccaucucuagccagagcuu

SEQ ID NO: 683634 - RNA, 22 nt, Human
gcccuuacaggguggucagcca

SEQ ID NO: 683635 - RNA, 22 nt, Human
gugcuuuaaagacaguuaugcu

SEQ ID NO: 683636 - RNA, 22 nt, Human
augaaauucaucugagaaugcu

SEQ ID NO: 683637 - RNA, 23 nt, Human
ucacugcuacucagccugagauu

SEQ ID NO: 683638 - RNA, 22 nt, Human
uuugacaguaauaaagcacaag

SEQ ID NO: 683639 - RNA, 22 nt, Human
uuacauguuuacggauacacuu

SEQ ID NO: 683640 - RNA, 22 nt, Human
guacacaggcagcccagugcug

SEQ ID NO: 683641 - RNA, 22 nt, Human
guugugaauagugccgcaauaa

SEQ ID NO: 683642 - RNA, 22 nt, Human
cucauuaaaggaaaucaccugc

SEQ ID NO: 683643 - RNA, 22 nt, Human
gccuggcugaggccucugcuaa

SEQ ID NO: 683644 - RNA, 22 nt, Human
ggagccuggcccggcccuuggc

SEQ ID NO: 683645 - RNA, 22 nt, Human
agucagacauaauucuaacauu

SEQ ID NO: 683646 - RNA, 22 nt, Human
uucucuguggauugggugagag

SEQ ID NO: 683647 - RNA, 22 nt, Human
auaaagcaauagauuguguaau

SEQ ID NO: 683648 - RNA, 21 nt, Human
aacauugguucaaauaaaacu

SEQ ID NO: 683649 - RNA, 20 nt, Human
aggcucaggguguuuaggaa

SEQ ID NO: 683650 - RNA, 22 nt, Human
auuuuacuuaguguaaugucca

SEQ ID NO: 683651 - RNA, 22 nt, Human
uccagagcaugcagaucaucaa

SEQ ID NO: 683652 - RNA, 22 nt, Human
ucaguugccaguauuuuauaua

SEQ ID NO: 683653 - RNA, 22 nt, Human
cagcuggcugcggugaggggac

SEQ ID NO: 683654 - RNA, 22 nt, Human
auguuucaucaguaagguuuug

SEQ ID NO: 683655 - RNA, 19 nt, Human
uucacauuuugcucugagg

SEQ ID NO: 683656 - RNA, 22 nt, Human
gccugcuuugugccugaucuuu

SEQ ID NO: 683657 - RNA, 22 nt, Human
auacagggacauccaguuuuuc

SEQ ID NO: 683658 - RNA, 19 nt, Human
aaaguugagaaacaaugga

SEQ ID NO: 683659 - RNA, 22 nt, Human
acauaugaguacuauacagugc

SEQ ID NO: 683660 - RNA, 22 nt, Human
ggcccagcacagugcuuggggg

SEQ ID NO: 683661 - RNA, 22 nt, Human
caguguuuaaucauugugaauu

SEQ ID NO: 683662 - RNA, 22 nt, Human
gggcuccaaccccagugaacuc

SEQ ID NO: 683663 - RNA, 22 nt, Human
ccugugggcccuggacagagac

SEQ ID NO: 683664 - RNA, 22 nt, Human
gccaggagaaaaggcgaaugau

SEQ ID NO: 683665 - RNA, 22 nt, Human
ccucugugcuuuguccagccuc

SEQ ID NO: 683666 - RNA, 22 nt, Human
gaugcaaaccuuacauggaccu

SEQ ID NO: 683667 - RNA, 22 nt, Human
gcacagggcugccaggcggcuu

SEQ ID NO: 683668 - RNA, 22 nt, Human
gggucagagccguaacaggacu

SEQ ID NO: 683669 - RNA, 22 nt, Human
gaggcuggaauauuagaaaugu

SEQ ID NO: 683670 - RNA, 17 nt, Human
gggagaugaagggauau

SEQ ID NO: 683671 - RNA, 22 nt, Human
cuagggagacucgcaggacuca

SEQ ID NO: 683672 - RNA, 22 nt, Human
aacaaugcaguuaaugggaaga

SEQ ID NO: 683673 - RNA, 22 nt, Human
agaaaguuguuuuagccaaacc

SEQ ID NO: 683674 - RNA, 22 nt, Human
cagcuacacaccagaacuauua

SEQ ID NO: 683675 - RNA, 22 nt, Human
uuucacaggaugcuguuuuaua

SEQ ID NO: 683676 - RNA, 22 nt, Human
gcugggaguuacugucuccuuu

SEQ ID NO: 683677 - RNA, 22 nt, Human
auggaauugaagacagcauagg

SEQ ID NO: 683678 - RNA, 22 nt, Human
ucugaggccuuggcagcuaagg

SEQ ID NO: 683679 - RNA, 22 nt, Human
uuggaaaggagauucuauugug

SEQ ID NO: 683680 - RNA, 22 nt, Human
uuguuaaaaauagauuuccagg

SEQ ID NO: 683681 - RNA, 22 nt, Human
cauuaucucuucuauaugcuag

SEQ ID NO: 683682 - RNA, 22 nt, Human
ccacccacaaccagcuggcugu

SEQ ID NO: 683683 - RNA, 22 nt, Human
gcuggccuccugcuagauggaa

SEQ ID NO: 683684 - RNA, 22 nt, Human
agggagccagaguugggagcuc

SEQ ID NO: 683685 - RNA, 23 nt, Human
uccuaacucaauucagggguguc

SEQ ID NO: 683686 - RNA, 22 nt, Human
cccuggagaggacucaccccug

SEQ ID NO: 683687 - RNA, 22 nt, Human
caggcacuggggaugcugggau

SEQ ID NO: 683688 - RNA, 22 nt, Human
aucaucuggguuaaugugcuca

SEQ ID NO: 683689 - RNA, 22 nt, Human
uaugacagcaaauauccaugag

SEQ ID NO: 683690 - RNA, 22 nt, Human
ugcacuacugugauacacagcc

SEQ ID NO: 683691 - RNA, 22 nt, Human
cagccacucucagacaguccca

SEQ ID NO: 683692 - RNA, 22 nt, Human
ucuccuugacaggcaggcagac

SEQ ID NO: 683693 - RNA, 22 nt, Human
ugucucuuuggguuccucuugg

SEQ ID NO: 683694 - RNA, 22 nt, Human
uuagcaguucauugauuaucgu

SEQ ID NO: 683695 - RNA, 22 nt, Human
acugaggacagugaggagggcu

SEQ ID NO: 683696 - RNA, 21 nt, Human
gcaggguccuuuccauuccua

SEQ ID NO: 683697 - RNA, 22 nt, Human
agaaacuguguuacuagaaugu

SEQ ID NO: 683698 - RNA, 22 nt, Human
acacagugccaaauugcaguua

SEQ ID NO: 683699 - RNA, 22 nt, Human
uguagcuuuauauuguguuggg

SEQ ID NO: 683700 - RNA, 22 nt, Human
auucagacuaugaacacgucag

SEQ ID NO: 683701 - RNA, 22 nt, Human
auauggaaauagcaauaugguu

SEQ ID NO: 683702 - RNA, 22 nt, Human
ggguaggccagaagggccugga

SEQ ID NO: 683703 - RNA, 22 nt, Human
aggcaaauuauuguaugcaguu

SEQ ID NO: 683704 - RNA, 21 nt, Human
ggccugaguauaggacaggcc

SEQ ID NO: 683705 - RNA, 22 nt, Human
accugaggccuccccagcagac

SEQ ID NO: 683706 - RNA, 22 nt, Human
ugucaauguguacaggagcuca

SEQ ID NO: 683707 - RNA, 21 nt, Human
agcuuccugcagugggagguc

SEQ ID NO: 683708 - RNA, 22 nt, Human
acugcccucccaucuauugcaa

SEQ ID NO: 683709 - RNA, 22 nt, Human
ugaauauguauuucuuauuuac

SEQ ID NO: 683710 - RNA, 22 nt, Human
ugucugcugcccuggagccugg

SEQ ID NO: 683711 - RNA, 22 nt, Human
cugggcucaaauccuggcccug

SEQ ID NO: 683712 - RNA, 22 nt, Human
uacagaauguguaucauuacca

SEQ ID NO: 683713 - RNA, 22 nt, Human
ucuggcugcugcgugagugcuu

SEQ ID NO: 683714 - RNA, 22 nt, Human
cuucccaguucugcuugagggg

SEQ ID NO: 683715 - RNA, 22 nt, Human
ugccugccaggcaaccugggag

SEQ ID NO: 683716 - RNA, 22 nt, Human
ggccucagggucacucuguaga

SEQ ID NO: 683717 - RNA, 22 nt, Human
caggaaauuuauguucuacuua

SEQ ID NO: 683718 - RNA, 22 nt, Human
uaggaagguguuuuuaaggagc

SEQ ID NO: 683719 - RNA, 22 nt, Human
agucauauggcuauuuaguggg

SEQ ID NO: 683720 - RNA, 22 nt, Human
uggaaacuaacaacagagcaga

SEQ ID NO: 683721 - RNA, 22 nt, Human
uuccucagccaaggcugggauc

SEQ ID NO: 683722 - RNA, 22 nt, Human
ugagcaagacccggccucugcc

SEQ ID NO: 683723 - RNA, 22 nt, Human
ugaguuauaaugaauauuugaa

SEQ ID NO: 683724 - RNA, 22 nt, Human
guucuuaagaccacaauaaaaa

SEQ ID NO: 683725 - RNA, 22 nt, Human
cugagcaggauauucacagcag

SEQ ID NO: 683726 - RNA, 22 nt, Human
gaggcugaauggccagaagcca

SEQ ID NO: 683727 - RNA, 20 nt, Human
acaugaacagggcuacagca

SEQ ID NO: 683728 - RNA, 22 nt, Human
ucugggagguaaccaugcugau

SEQ ID NO: 683729 - RNA, 22 nt, Human
aaucgcuugguaauuuuaaaag

SEQ ID NO: 683730 - RNA, 22 nt, Human
cauugcacaucugagaagagau

SEQ ID NO: 683731 - RNA, 22 nt, Human
aauacaguaauuuugaugaguu

SEQ ID NO: 683732 - RNA, 22 nt, Human
acuaguauucuuggucuuguau

SEQ ID NO: 683733 - RNA, 22 nt, Human
cuggcucugagcccaccuccag

SEQ ID NO: 683734 - RNA, 22 nt, Human
auggcucugcugggcaaagcaa

SEQ ID NO: 683735 - RNA, 22 nt, Human
cugagggccugaggaccuagau

SEQ ID NO: 683736 - RNA, 22 nt, Human
acaccuggucuuugcaugagca

SEQ ID NO: 683737 - RNA, 22 nt, Human
gcccugugagucaugcggcaga

SEQ ID NO: 683738 - RNA, 22 nt, Human
gagguuucacuguguuguccag

SEQ ID NO: 683739 - RNA, 22 nt, Human
uagaggccugaaagaaugauca

SEQ ID NO: 683740 - RNA, 22 nt, Human
gaaauguguuguucauuucuaa

SEQ ID NO: 683741 - RNA, 22 nt, Human
gguguugggagagcugguuuug

SEQ ID NO: 683742 - RNA, 22 nt, Human
gcacacaguagggauucaauga

SEQ ID NO: 683743 - RNA, 19 nt, Human
gccugccuggguuucugag

SEQ ID NO: 683744 - RNA, 22 nt, Human
uguucacaagaugucuguggcu

SEQ ID NO: 683745 - RNA, 22 nt, Human
gaggagcuucagaggaaucuua

SEQ ID NO: 683746 - RNA, 22 nt, Human
ccuuuauucaauuaguccuaau

SEQ ID NO: 683747 - RNA, 22 nt, Human
ggcugcucacgcagcccucccu

SEQ ID NO: 683748 - RNA, 21 nt, Human
cucuuugggaucuuuggaaag

SEQ ID NO: 683749 - RNA, 22 nt, Human
agaguguggaaauguucagagu

SEQ ID NO: 683750 - RNA, 22 nt, Human
gagcuaaggcacaggcaggcuu

SEQ ID NO: 683751 - RNA, 22 nt, Human
gcagagaugagcuaucaggaca

SEQ ID NO: 683752 - RNA, 22 nt, Human
gugagacucgccuuuguguagc

SEQ ID NO: 683753 - RNA, 22 nt, Human
ggcugcugugaccucaggugau

SEQ ID NO: 683754 - RNA, 22 nt, Human
agccuggaauuaaggaaaugca

SEQ ID NO: 683755 - RNA, 22 nt, Human
gggacaggccccucgcuagcuu

SEQ ID NO: 683756 - RNA, 19 nt, Human
ggacagggggagcuuuuau

SEQ ID NO: 683757 - RNA, 22 nt, Human
ggcuugagacccgggagccaga

SEQ ID NO: 683758 - RNA, 19 nt, Human
uucuguguuaauuccuuua

SEQ ID NO: 683759 - RNA, 22 nt, Human
ucaggugggcguuccggugcgg

SEQ ID NO: 683760 - RNA, 22 nt, Human
uuuuucaugagacuagaaguca

SEQ ID NO: 683761 - RNA, 22 nt, Human
gccugggagggcagcagugugg

SEQ ID NO: 683762 - RNA, 22 nt, Human
gccaggcaugggcuucugggcg

SEQ ID NO: 683763 - RNA, 22 nt, Human
auguacacuuuggaagagucac

SEQ ID NO: 683764 - RNA, 22 nt, Human
auaaauaucacuguugucccuc

SEQ ID NO: 683765 - RNA, 22 nt, Human
caauaacugcuaaauucccugu

SEQ ID NO: 683766 - RNA, 22 nt, Human
cauucaucuaucaaaugguacc

SEQ ID NO: 683767 - RNA, 18 nt, Human
ugccagccgacuggccug

SEQ ID NO: 683768 - RNA, 22 nt, Human
ugaggcauuaaagggaggucaa

SEQ ID NO: 683769 - RNA, 21 nt, Human
agcagccauuucacagagacu

SEQ ID NO: 683770 - RNA, 22 nt, Human
uuuaaucuauucccuaaacacc

SEQ ID NO: 683771 - RNA, 22 nt, Human
caguccuugcuaugacccugag

SEQ ID NO: 683772 - RNA, 22 nt, Human
aagguauuuucuaauguauacu

SEQ ID NO: 683773 - RNA, 22 nt, Human
cuggcaucuagugcguugaggu

SEQ ID NO: 683774 - RNA, 22 nt, Human
ucuuuuuauauugacaaaaggu

SEQ ID NO: 683775 - RNA, 22 nt, Human
ccucacaguuuggcuaacugug

SEQ ID NO: 683776 - RNA, 22 nt, Human
cuacaguaugaaaccuuuacuc

SEQ ID NO: 683777 - RNA, 22 nt, Human
aauauuugaacagucacugagu

SEQ ID NO: 683778 - RNA, 22 nt, Human
cagagguguacagagggaggcc

SEQ ID NO: 683779 - RNA, 22 nt, Human
uggaggaugccauccaggauac

SEQ ID NO: 683780 - RNA, 22 nt, Human
cuaacuuuagcuuagauuauca

SEQ ID NO: 683781 - RNA, 22 nt, Human
ucugccugcuaacuccugcacc

SEQ ID NO: 683782 - RNA, 22 nt, Human
aaaugcagaaugauuucaucua

SEQ ID NO: 683783 - RNA, 22 nt, Human
cugggugaauuugaaggaaagg

SEQ ID NO: 683784 - RNA, 22 nt, Human
cugcucuaauaucagauagacu

SEQ ID NO: 683785 - RNA, 21 nt, Human
aaggggcaaacccaggacacc

SEQ ID NO: 683786 - RNA, 22 nt, Human
uguacaauggcuauaauacccu

SEQ ID NO: 683787 - RNA, 22 nt, Human
agaguggccuggccuggggcau

SEQ ID NO: 683788 - RNA, 22 nt, Human
caucugcugacuugacaaguac

SEQ ID NO: 683789 - RNA, 22 nt, Human
gggaggguguucucccaagaac

SEQ ID NO: 683790 - RNA, 22 nt, Human
ugugugugacucauacuagaac

SEQ ID NO: 683791 - RNA, 22 nt, Human
uucacaaacuucaugauggcac

SEQ ID NO: 683792 - RNA, 22 nt, Human
uaguauuuaaucacuuuugucu

SEQ ID NO: 683793 - RNA, 21 nt, Human
gcucugccacuuaccagauuu

SEQ ID NO: 683794 - RNA, 21 nt, Human
aggcugugacuuacacuaucu

SEQ ID NO: 683795 - RNA, 22 nt, Human
uggagguggggcucaggaaucu

SEQ ID NO: 683796 - RNA, 22 nt, Human
aacauuuguuuggcuucaauua

SEQ ID NO: 683797 - RNA, 22 nt, Human
ucucugagcgcauuccuccggc

SEQ ID NO: 683798 - RNA, 19 nt, Human
ucucagaggaaaaauugcu

SEQ ID NO: 683799 - RNA, 22 nt, Human
agggcagaggcggacacggaag

SEQ ID NO: 683800 - RNA, 22 nt, Human
cagggcuggauuucauuucuag

SEQ ID NO: 683801 - RNA, 22 nt, Human
agccccagccccucucucacaa

SEQ ID NO: 683802 - RNA, 22 nt, Human
cagaggcaaaagagguggaggu

SEQ ID NO: 683803 - RNA, 22 nt, Human
uggcugccaauggcuuggaaag

SEQ ID NO: 683804 - RNA, 21 nt, Human
ucacaggucaaugugugaagg

SEQ ID NO: 683805 - RNA, 22 nt, Human
auaugaaguuacagguaagaaa

SEQ ID NO: 683806 - RNA, 22 nt, Human
auucuuauuuaaauagagucug

SEQ ID NO: 683807 - RNA, 22 nt, Human
aaugcaaccugcugaucugaca

SEQ ID NO: 683808 - RNA, 22 nt, Human
caaugauugcuauuuacauaaa

SEQ ID NO: 683809 - RNA, 22 nt, Human
ccuggcacaugauagaugcuca

SEQ ID NO: 683810 - RNA, 22 nt, Human
uauuucugauugcucaugaggc

SEQ ID NO: 683811 - RNA, 22 nt, Human
gauaaugugccgauaauuucua

SEQ ID NO: 683812 - RNA, 22 nt, Human
aaucucuucccaguaaaaaugg

SEQ ID NO: 683813 - RNA, 22 nt, Human
cccaggcagaauuaguguuuca

SEQ ID NO: 683814 - RNA, 22 nt, Human
aggaaaauggaccagaguuguu

SEQ ID NO: 683815 - RNA, 22 nt, Human
agggcugccugacuccagagcc

SEQ ID NO: 683816 - RNA, 22 nt, Human
agaaagcagucccuuccgaccg

SEQ ID NO: 683817 - RNA, 22 nt, Human
aaagccagguugugugcaggaa

SEQ ID NO: 683818 - RNA, 22 nt, Human
cacaggaggcaaugguaagauu

SEQ ID NO: 683819 - RNA, 22 nt, Human
ugaaggcauuugaguuggugag

SEQ ID NO: 683820 - RNA, 22 nt, Human
ugcacaguaaacaugacuggag

SEQ ID NO: 683821 - RNA, 22 nt, Human
aagcauuuugccacuugaaguu

SEQ ID NO: 683822 - RNA, 21 nt, Human
agcucccuguuuccucacucu

SEQ ID NO: 683823 - RNA, 22 nt, Human
agggcagaaguacagacacuua

SEQ ID NO: 683824 - RNA, 22 nt, Human
gggagggaaggaccuuaugaau

SEQ ID NO: 683825 - RNA, 22 nt, Human
gggcugagugucccaggccgaa

SEQ ID NO: 683826 - RNA, 22 nt, Human
aguuauaugugaaaacacguau

SEQ ID NO: 683827 - RNA, 22 nt, Human
cuuucuagacuguccagaugau

SEQ ID NO: 683828 - RNA, 22 nt, Human
cuuugguucuguccuucccaga

SEQ ID NO: 683829 - RNA, 22 nt, Human
uucuggaaggcagggagaaccc

SEQ ID NO: 683830 - RNA, 23 nt, Human
gccuucagcucgggaaggcuccc

SEQ ID NO: 683831 - RNA, 18 nt, Human
acccucuggcuucugagc

SEQ ID NO: 683832 - RNA, 22 nt, Human
augggaggcaggcucagaaccg

SEQ ID NO: 683833 - RNA, 22 nt, Human
gugccugugccaggggugugcu

SEQ ID NO: 683834 - RNA, 22 nt, Human
acacuucauuuacauuauaggc

SEQ ID NO: 683835 - RNA, 23 nt, Human
aggagccaugaguuggauauguu

SEQ ID NO: 683836 - RNA, 22 nt, Human
cuuccagucuuuucaguggagu

SEQ ID NO: 683837 - RNA, 22 nt, Human
ugccucugggugaccaaggagc

SEQ ID NO: 683838 - RNA, 22 nt, Human
uuucagccagugaugcugaaga

SEQ ID NO: 683839 - RNA, 22 nt, Human
gcagcccaagagacucuguuga

SEQ ID NO: 683840 - RNA, 22 nt, Human
caucuggcagacccugccuccg

SEQ ID NO: 683841 - RNA, 22 nt, Human
agguaucaacagcagagucuga

SEQ ID NO: 683842 - RNA, 22 nt, Human
ucacaagagcuggacugucuuu

SEQ ID NO: 683843 - RNA, 22 nt, Human
ucuggaauugcugugugaguuc

SEQ ID NO: 683844 - RNA, 22 nt, Human
uagacacaucuucauccacaau

SEQ ID NO: 683845 - RNA, 22 nt, Human
uggcugagaccaucagggugua

SEQ ID NO: 683846 - RNA, 22 nt, Human
gcccucuggugggugagccccg

SEQ ID NO: 683847 - RNA, 22 nt, Human
ugaagggcaaccccaggcccag

SEQ ID NO: 683848 - RNA, 22 nt, Human
gcagcagcucaguucugggagg

SEQ ID NO: 683849 - RNA, 22 nt, Human
ucuagguggaugaggaacauag

SEQ ID NO: 683850 - RNA, 22 nt, Human
cugaauaauauuccauuaugag

SEQ ID NO: 683851 - RNA, 22 nt, Human
uggccagcccucuucccacacu

SEQ ID NO: 683852 - RNA, 22 nt, Human
uuacuaguauaugucaagcaac

SEQ ID NO: 683853 - RNA, 22 nt, Human
agacagcaugagccugcugaug

SEQ ID NO: 683854 - RNA, 22 nt, Human
uccuggccacccgacagaaguc

SEQ ID NO: 683855 - RNA, 22 nt, Human
uuggggagguugccacauucca

SEQ ID NO: 683856 - RNA, 22 nt, Human
agugcugagugauugcaaagga

SEQ ID NO: 683857 - RNA, 22 nt, Human
ucuuugaauuucugacugucuu

SEQ ID NO: 683858 - RNA, 22 nt, Human
uauuuguuccagagauaaaaau

SEQ ID NO: 683859 - RNA, 22 nt, Human
ggagagcuagugccugccagua

SEQ ID NO: 683860 - RNA, 22 nt, Human
auacaaucaucauuauauuccc

SEQ ID NO: 683861 - RNA, 22 nt, Human
cacaggcuuuuuuggcugaugu

SEQ ID NO: 683862 - RNA, 22 nt, Human
ucucccaaccucuggugggugc

SEQ ID NO: 683863 - RNA, 22 nt, Human
ucagauuucagcuaaagggaug

SEQ ID NO: 683864 - RNA, 22 nt, Human
cuuuccuagaaauauauacuua

SEQ ID NO: 683865 - RNA, 22 nt, Human
cagccacucggccauaaaggcu

SEQ ID NO: 683866 - RNA, 21 nt, Human
aggcccagcuuuccucuugcu

SEQ ID NO: 683867 - RNA, 22 nt, Human
agaaggcugagacugggaugaa

SEQ ID NO: 683868 - RNA, 22 nt, Human
uuugaugaugaugauaaaguuu

SEQ ID NO: 683869 - RNA, 22 nt, Human
gaaagcaaguugacugcagaau

SEQ ID NO: 683870 - RNA, 22 nt, Human
agaaaguuaucacaaaauugag

SEQ ID NO: 683871 - RNA, 20 nt, Human
acccuccacuguucacugug

SEQ ID NO: 683872 - RNA, 22 nt, Human
cagcuuucuuuccauaagguuu

SEQ ID NO: 683873 - RNA, 22 nt, Human
cucuguggcuugccuuucuguc

SEQ ID NO: 683874 - RNA, 21 nt, Human
caagacauaugaguacucugg

SEQ ID NO: 683875 - RNA, 22 nt, Human
ccucaggccucugccucauugg

SEQ ID NO: 683876 - RNA, 22 nt, Human
guccuuggcuguggcuguaaug

SEQ ID NO: 683877 - RNA, 22 nt, Human
aaaaugagccaugaaccaacca

SEQ ID NO: 683878 - RNA, 22 nt, Human
ccagggucucugcugccugaga

SEQ ID NO: 683879 - RNA, 22 nt, Human
ugccugucagggggagugggaa

SEQ ID NO: 683880 - RNA, 22 nt, Human
uguguggauucaucucaaagag

SEQ ID NO: 683881 - RNA, 22 nt, Human
uuuuaguuguacugucaacagu

SEQ ID NO: 683882 - RNA, 22 nt, Human
auuagauauuugcuguuggauu

SEQ ID NO: 683883 - RNA, 22 nt, Human
ucugaggucacagauuucaaga

SEQ ID NO: 683884 - RNA, 22 nt, Human
acagugauuauuaguugguggu

SEQ ID NO: 683885 - RNA, 22 nt, Human
uucugcuucugugugucccagg

SEQ ID NO: 683886 - RNA, 22 nt, Human
ucaggacagguucgggugggua

SEQ ID NO: 683887 - RNA, 22 nt, Human
guuuguuuuaagauaggaugga

SEQ ID NO: 683888 - RNA, 22 nt, Human
caggacaucgucaucaugggga

SEQ ID NO: 683889 - RNA, 19 nt, Human
uccagcagugcuugaaauc

SEQ ID NO: 683890 - RNA, 22 nt, Human
cugcaaauaggggugugaauaa

SEQ ID NO: 683891 - RNA, 22 nt, Human
agugggaauuucagugcuaaaa

SEQ ID NO: 683892 - RNA, 22 nt, Human
caggccucuuccaugcagcagc

SEQ ID NO: 683893 - RNA, 22 nt, Human
agagaagacuuacagccacagu

SEQ ID NO: 683894 - RNA, 22 nt, Human
ucucugagaucagccacugacu

SEQ ID NO: 683895 - RNA, 22 nt, Human
cgccucagccguggucaucuuc

SEQ ID NO: 683896 - RNA, 22 nt, Human
ugaggcucagaagugccaagug

SEQ ID NO: 683897 - RNA, 22 nt, Human
agugauuuugcuuugaagugac

SEQ ID NO: 683898 - RNA, 22 nt, Human
cucagaggggaugcuuggagaa

SEQ ID NO: 683899 - RNA, 22 nt, Human
guggaaggaauuaacagacuag

SEQ ID NO: 683900 - RNA, 22 nt, Human
aauaacugcacuuguugaaugc

SEQ ID NO: 683901 - RNA, 20 nt, Human
cgugcugugaccuugagcau

SEQ ID NO: 683902 - RNA, 22 nt, Human
aggcccagacucagcggggcgg

SEQ ID NO: 683903 - RNA, 22 nt, Human
cagagucagagcuccauggagu

SEQ ID NO: 683904 - RNA, 22 nt, Human
uguggcuguguccaccugcugc

SEQ ID NO: 683905 - RNA, 22 nt, Human
aagguccuguagccacagagcc

SEQ ID NO: 683906 - RNA, 21 nt, Human
ggaaaacuuuccuugucugaa

SEQ ID NO: 683907 - RNA, 22 nt, Human
ucaggcucugagcugaugcuaa

SEQ ID NO: 683908 - RNA, 22 nt, Human
agcucccagaaggcccugcgcc

SEQ ID NO: 683909 - RNA, 22 nt, Human
ccuggccucagacagagggugg

SEQ ID NO: 683910 - RNA, 22 nt, Human
gcuugccuggcauuucuggggc

SEQ ID NO: 683911 - RNA, 21 nt, Human
gccuccagccagauggccucc

SEQ ID NO: 683912 - RNA, 22 nt, Human
cuguacagaguucugaguguac

SEQ ID NO: 683913 - RNA, 20 nt, Human
gccaccucucuagcaguaga

SEQ ID NO: 683914 - RNA, 22 nt, Human
gugggcuggagcaaugauuuca

SEQ ID NO: 683915 - RNA, 22 nt, Human
ucaggcugcaguggcaaaagac

SEQ ID NO: 683916 - RNA, 19 nt, Human
gaggagcuaucggagacag

SEQ ID NO: 683917 - RNA, 22 nt, Human
uguagauuuuggagucuacaag

SEQ ID NO: 683918 - RNA, 22 nt, Human
gugcccaggcccaaggcaccac

SEQ ID NO: 683919 - RNA, 22 nt, Human
aagcccuguuaggcacugggga

SEQ ID NO: 683920 - RNA, 22 nt, Human
cagaguggugcaagggcagugu

SEQ ID NO: 683921 - RNA, 22 nt, Human
auggcugcagccggcccugcgc

SEQ ID NO: 683922 - RNA, 22 nt, Human
augagguuauauuuaauucacu

SEQ ID NO: 683923 - RNA, 22 nt, Human
cccugcagagggaugggggcag

SEQ ID NO: 683924 - RNA, 22 nt, Human
uaucacacucggaaaucuagga

SEQ ID NO: 683925 - RNA, 19 nt, Human
acccagggguuuaugugug

SEQ ID NO: 683926 - RNA, 15 nt, Human
ccaggcucugcacuc

SEQ ID NO: 683927 - RNA, 18 nt, Human
cugaggcccagagagggc

SEQ ID NO: 683928 - RNA, 22 nt, Human
aagugucugacacaaaauaugu

SEQ ID NO: 683929 - RNA, 22 nt, Human
auguuaccucuauuagaauauu

SEQ ID NO: 683930 - RNA, 21 nt, Human
gugugaguagcaugugucuca

SEQ ID NO: 683931 - RNA, 22 nt, Human
acuuccuguguuggucuugcug

SEQ ID NO: 683932 - RNA, 22 nt, Human
agaaaacuugcucgagccuguu

SEQ ID NO: 683933 - RNA, 22 nt, Human
cuguuauuccccuugcuguggu

SEQ ID NO: 683934 - RNA, 22 nt, Human
caaacauuuugagugguuucug

SEQ ID NO: 683935 - RNA, 22 nt, Human
auugcuuuuaagcaccaccuaa

SEQ ID NO: 683936 - RNA, 22 nt, Human
cuagaaaaauacuuuauuguga

SEQ ID NO: 683937 - RNA, 22 nt, Human
uuccugguuugccuggaaucca

SEQ ID NO: 683938 - RNA, 22 nt, Human
ccucuucagcaaaguucggccc

SEQ ID NO: 683939 - RNA, 21 nt, Human
ugacagcacaugcaaucggag

SEQ ID NO: 683940 - RNA, 22 nt, Human
ccaauacuuagauuaaaauagu

SEQ ID NO: 683941 - RNA, 22 nt, Human
ucucaccauggugcuugcuuau

SEQ ID NO: 683942 - RNA, 22 nt, Human
caaauaagcaauuccauucuuc

SEQ ID NO: 683943 - RNA, 22 nt, Human
aggagacagccaggggccugag

SEQ ID NO: 683944 - RNA, 22 nt, Human
uaaaauuugucccugaguguug

SEQ ID NO: 683945 - RNA, 22 nt, Human
ccaggcuuuaagagguggaaac

SEQ ID NO: 683946 - RNA, 22 nt, Human
acagggcuugugacaacuuuaa

SEQ ID NO: 683947 - RNA, 22 nt, Human
uagucucugcuuugcccuuggc

SEQ ID NO: 683948 - RNA, 18 nt, Human
auguggcuagugcuacug

SEQ ID NO: 683949 - RNA, 22 nt, Human
ccacugucugcaggccucagca

SEQ ID NO: 683950 - RNA, 22 nt, Human
ucagacaguuugcagugugccu

SEQ ID NO: 683951 - RNA, 22 nt, Human
uagcauuuauggucaugugucc

SEQ ID NO: 683952 - RNA, 17 nt, Human
uuacaacgucaucucug

SEQ ID NO: 683953 - RNA, 22 nt, Human
ucugucauccaggcuggaauau

SEQ ID NO: 683954 - RNA, 22 nt, Human
ggcacagcaagaagggaaauga

SEQ ID NO: 683955 - RNA, 22 nt, Human
cuccuugguguaguacugagca

SEQ ID NO: 683956 - RNA, 22 nt, Human
gaggcucagagggagcaugguc

SEQ ID NO: 683957 - RNA, 22 nt, Human
accagccagccacaguggcucc

SEQ ID NO: 683958 - RNA, 22 nt, Human
aaacucucauuuuagugcacug

SEQ ID NO: 683959 - RNA, 22 nt, Human
ggccaccugggaucucauccug

SEQ ID NO: 683960 - RNA, 18 nt, Human
auccugggagcagacagc

SEQ ID NO: 683961 - RNA, 22 nt, Human
agcuauguauaaauaggccacu

SEQ ID NO: 683962 - RNA, 22 nt, Human
augucaccuucgguggcacggu

SEQ ID NO: 683963 - RNA, 22 nt, Human
gcugccugaagugucuacacug

SEQ ID NO: 683964 - RNA, 19 nt, Human
acagagggcaacugagaaa

SEQ ID NO: 683965 - RNA, 22 nt, Human
cuggucugggaugagggaugua

SEQ ID NO: 683966 - RNA, 22 nt, Human
uuugcaaagugacuauuauaug

SEQ ID NO: 683967 - RNA, 22 nt, Human
uauucucagugcuauaaguaga

SEQ ID NO: 683968 - RNA, 22 nt, Human
cuggcugaauccuagucucaua

SEQ ID NO: 683969 - RNA, 22 nt, Human
uugaaugaagggaugaccgaag

SEQ ID NO: 683970 - RNA, 21 nt, Human
ucccaagcugcuggcucagcu

SEQ ID NO: 683971 - RNA, 20 nt, Human
guggagaggcuggcgggacu

SEQ ID NO: 683972 - RNA, 22 nt, Human
aagugaauggggcagacuucag

SEQ ID NO: 683973 - RNA, 22 nt, Human
gucuuguccauuccaugcugcu

SEQ ID NO: 683974 - RNA, 22 nt, Human
gcaggcugaguauuacccuagu

SEQ ID NO: 683975 - RNA, 22 nt, Human
uguccaggcggccuugccuguu

SEQ ID NO: 683976 - RNA, 21 nt, Human
cugccuugaaugguacuggga

SEQ ID NO: 683977 - RNA, 22 nt, Human
uauuaaauuauggauuuaggag

SEQ ID NO: 683978 - RNA, 22 nt, Human
aggaagccuggcauuaaaaagc

SEQ ID NO: 683979 - RNA, 22 nt, Human
ggagcuguugcgcaugcgcucg

SEQ ID NO: 683980 - RNA, 22 nt, Human
cagagccccuggguugggagcu

SEQ ID NO: 683981 - RNA, 22 nt, Human
aaauuauucaaaaagcuguguu

SEQ ID NO: 683982 - RNA, 22 nt, Human
cagggcacggagaagucacccc

SEQ ID NO: 683983 - RNA, 22 nt, Human
gccagccagggaagggagagac

SEQ ID NO: 683984 - RNA, 22 nt, Human
auuuucacccugaauauauuga

SEQ ID NO: 683985 - RNA, 22 nt, Human
cacuucagguucuggcagggcg

SEQ ID NO: 683986 - RNA, 22 nt, Human
aaguuuagcgcucucucaagga

SEQ ID NO: 683987 - RNA, 22 nt, Human
aaggccugggaggccucucuuc

SEQ ID NO: 683988 - RNA, 22 nt, Human
gcauucaggguucacggucaac

SEQ ID NO: 683989 - RNA, 22 nt, Human
cuucuucuuuugugggugguaa

SEQ ID NO: 683990 - RNA, 22 nt, Human
uggcuucaggguugucuucagc

SEQ ID NO: 683991 - RNA, 22 nt, Human
guauuuuauggcaugcaguggc

SEQ ID NO: 683992 - RNA, 22 nt, Human
agcaauagauaaaacauuuacc

SEQ ID NO: 683993 - RNA, 22 nt, Human
agcauuauguccaugcuaaauu

SEQ ID NO: 683994 - RNA, 22 nt, Human
uagauuucaggagacaaaaugg

SEQ ID NO: 683995 - RNA, 22 nt, Human
caggagugagaugcgaucacuu

SEQ ID NO: 683996 - RNA, 21 nt, Human
gcagggacaaagcuucaggag

SEQ ID NO: 683997 - RNA, 22 nt, Human
uccaggccccugccugggccug

SEQ ID NO: 683998 - RNA, 22 nt, Human
agacagaacagaauaauuguug

SEQ ID NO: 683999 - RNA, 22 nt, Human
aaacaggcuugcaacauguuuu

SEQ ID NO: 684000 - RNA, 17 nt, Human
aguguggcccugguuaa

SEQ ID NO: 684001 - RNA, 23 nt, Human
ucucccucaugccuaggccuggg

SEQ ID NO: 684002 - RNA, 20 nt, Human
aggaagcugagauguagagg

SEQ ID NO: 684003 - RNA, 22 nt, Human
augacagcauucaagacauaga

SEQ ID NO: 684004 - RNA, 22 nt, Human
caccugagugucaguauucuca

SEQ ID NO: 684005 - RNA, 22 nt, Human
agcacagacuggucccaggucu

SEQ ID NO: 684006 - RNA, 22 nt, Human
agugucugcaaaaugaaagagc

SEQ ID NO: 684007 - RNA, 23 nt, Human
aaauugucguaagguggagaugu

SEQ ID NO: 684008 - RNA, 22 nt, Human
cuggaagguucuuugugugccu

SEQ ID NO: 684009 - RNA, 22 nt, Human
auuuacaggacagcuuggcauu

SEQ ID NO: 684010 - RNA, 22 nt, Human
ccccucagguacccgugcagca

SEQ ID NO: 684011 - RNA, 22 nt, Human
augcaaauuaacauauaguaga

SEQ ID NO: 684012 - RNA, 22 nt, Human
uuucaggauuaguuuaagcagg

SEQ ID NO: 684013 - RNA, 22 nt, Human
uggcuguagaacaguggauauu

SEQ ID NO: 684014 - RNA, 22 nt, Human
uugccuguuugagagcuguguu

SEQ ID NO: 684015 - RNA, 22 nt, Human
gcuggcagaauuucuucuugcu

SEQ ID NO: 684016 - RNA, 22 nt, Human
cccucuccuggcugcauggagc

SEQ ID NO: 684017 - RNA, 22 nt, Human
uggcuucaguuucccagucugg

SEQ ID NO: 684018 - RNA, 22 nt, Human
uugaaaggcacaggcaccuggg

SEQ ID NO: 684019 - RNA, 21 nt, Human
ugggcgcuugaccucugcacu

SEQ ID NO: 684020 - RNA, 22 nt, Human
uguugaagauaaaguucucauu

SEQ ID NO: 684021 - RNA, 22 nt, Human
aggucaaaaugcuuuucagguc

SEQ ID NO: 684022 - RNA, 22 nt, Human
cugcuuuaauuuagacaaggca

SEQ ID NO: 684023 - RNA, 22 nt, Human
ccuggcugagggaccucgggua

SEQ ID NO: 684024 - RNA, 22 nt, Human
ugggagcaaaugacugggagau

SEQ ID NO: 684025 - RNA, 18 nt, Human
uggcuucagaguaaaaug

SEQ ID NO: 684026 - RNA, 22 nt, Human
gcagcccaauggacugagacag

SEQ ID NO: 684027 - RNA, 22 nt, Human
aggcaggugggagugauuccuu

SEQ ID NO: 684028 - RNA, 22 nt, Human
aaaugguaagacaacacauuau

SEQ ID NO: 684029 - RNA, 22 nt, Human
aggaagcucggagagggcaaau

SEQ ID NO: 684030 - RNA, 22 nt, Human
agucaguuaaacuuuguaaagu

SEQ ID NO: 684031 - RNA, 22 nt, Human
ugcauguguuucccagcaagcu

SEQ ID NO: 684032 - RNA, 22 nt, Human
augucccuugucugugaugucu

SEQ ID NO: 684033 - RNA, 22 nt, Human
uggccagcuuugacuguaaacc

SEQ ID NO: 684034 - RNA, 22 nt, Human
uuucauuacguguuugacuugu

SEQ ID NO: 684035 - RNA, 23 nt, Human
ccuccucauaucuuugacuagug

SEQ ID NO: 684036 - RNA, 22 nt, Human
acuuuucuuaucagaaaggcca

SEQ ID NO: 684037 - RNA, 22 nt, Human
agcugcuccaauuuuuaccauu

SEQ ID NO: 684038 - RNA, 22 nt, Human
ucacaugcuguguguggagauc

SEQ ID NO: 684039 - RNA, 22 nt, Human
uguuuacaaggaguuuauauug

SEQ ID NO: 684040 - RNA, 22 nt, Human
agcuaagauuuauuaaaggccc

SEQ ID NO: 684041 - RNA, 22 nt, Human
aauuucuccaagaaugcuuaga

SEQ ID NO: 684042 - RNA, 22 nt, Human
ggugagagaaaagaaacacugu

SEQ ID NO: 684043 - RNA, 22 nt, Human
aacuggcauaugaacuuguucu

SEQ ID NO: 684044 - RNA, 22 nt, Human
cauugcuuugugcauauuuaaa

SEQ ID NO: 684045 - RNA, 22 nt, Human
gcacaggaugauggguugaggg

SEQ ID NO: 684046 - RNA, 22 nt, Human
uagggcaguuauaacauuagug

SEQ ID NO: 684047 - RNA, 22 nt, Human
aaucauugcuccuuucucuggu

SEQ ID NO: 684048 - RNA, 22 nt, Human
agcagcagugacagccgaaagc

SEQ ID NO: 684049 - RNA, 22 nt, Human
uagaggcuacuagaggcaccug

SEQ ID NO: 684050 - RNA, 22 nt, Human
gcaaagcacacccucagaguuu

SEQ ID NO: 684051 - RNA, 22 nt, Human
ucaggcagguggcuggcuaugg

SEQ ID NO: 684052 - RNA, 22 nt, Human
uggaauaugcaauugcauuuca

SEQ ID NO: 684053 - RNA, 17 nt, Human
ugccugccagcauugga

SEQ ID NO: 684054 - RNA, 22 nt, Human
gggugcagugguucacgccugu

SEQ ID NO: 684055 - RNA, 19 nt, Human
agaaauagccuuccuuguc

SEQ ID NO: 684056 - RNA, 22 nt, Human
uuugcagugucagcuucugugu

SEQ ID NO: 684057 - RNA, 21 nt, Human
ccauccacugagugguucccu

SEQ ID NO: 684058 - RNA, 22 nt, Human
ugcaggugugugcaagggaggg

SEQ ID NO: 684059 - RNA, 20 nt, Human
ugcagcagaagcccaugcuc

SEQ ID NO: 684060 - RNA, 19 nt, Human
aggguuacccgcugccacc

SEQ ID NO: 684061 - RNA, 22 nt, Human
cagaaaacaaaccuauccugag

SEQ ID NO: 684062 - RNA, 22 nt, Human
aaauaggagcuuaagcacuucu

SEQ ID NO: 684063 - RNA, 22 nt, Human
aagugcuuggagcauaccuguu

SEQ ID NO: 684064 - RNA, 22 nt, Human
agcaaugacuggcuauaugauu

SEQ ID NO: 684065 - RNA, 22 nt, Human
ccacaggggucucuguagcuga

SEQ ID NO: 684066 - RNA, 22 nt, Human
uacaaaacagugcucugguccu

SEQ ID NO: 684067 - RNA, 22 nt, Human
gaggggaagacuucuggacagu

SEQ ID NO: 684068 - RNA, 22 nt, Human
gagcccagauuggaauuuccca

SEQ ID NO: 684069 - RNA, 22 nt, Human
caaggcagcguuccuuucugga

SEQ ID NO: 684070 - RNA, 22 nt, Human
cuggcacaaaagaaaacugcca

SEQ ID NO: 684071 - RNA, 22 nt, Human
cagcaucuguuggauggauaag

SEQ ID NO: 684072 - RNA, 22 nt, Human
gugaggacugguaaggacugca

SEQ ID NO: 684073 - RNA, 22 nt, Human
uccccaggggcaucucucugcu

SEQ ID NO: 684074 - RNA, 22 nt, Human
ucaggaaauacaagugacauca

SEQ ID NO: 684075 - RNA, 21 nt, Human
acaggcucacgauccauuucu

SEQ ID NO: 684076 - RNA, 22 nt, Human
ucuggcucaggagcuguguuca

SEQ ID NO: 684077 - RNA, 21 nt, Human
ggcuccugcuuugugaggggc

SEQ ID NO: 684078 - RNA, 22 nt, Human
ugugauuucaucugaggccagg

SEQ ID NO: 684079 - RNA, 22 nt, Human
uuucuagcuguaggaagcugag

SEQ ID NO: 684080 - RNA, 22 nt, Human
gaggcacaauacaugucucaag

SEQ ID NO: 684081 - RNA, 22 nt, Human
caggaaaugaacaggaaugaac

SEQ ID NO: 684082 - RNA, 22 nt, Human
uucagacuuuguggggcccucc

SEQ ID NO: 684083 - RNA, 22 nt, Human
ggagaggcgaugagucacagcc

SEQ ID NO: 684084 - RNA, 22 nt, Human
gcucgaccgccagaaacuuccu

SEQ ID NO: 684085 - RNA, 22 nt, Human
uugauucagagaagauuggccc

SEQ ID NO: 684086 - RNA, 22 nt, Human
gccuggcuaauuuugguauuuu

SEQ ID NO: 684087 - RNA, 22 nt, Human
aaagucugagcagaauuucuca

SEQ ID NO: 684088 - RNA, 22 nt, Human
uaggggugggauccaggaauua

SEQ ID NO: 684089 - RNA, 22 nt, Human
gaacaguaacugucugcugugu

SEQ ID NO: 684090 - RNA, 22 nt, Human
uacagcuucagugugccccagu

SEQ ID NO: 684091 - RNA, 22 nt, Human
auaugcaagcacauagaauacu

SEQ ID NO: 684092 - RNA, 22 nt, Human
guaagaggagugggaagccuca

SEQ ID NO: 684093 - RNA, 22 nt, Human
ucagaggccuaugucuacaacu

SEQ ID NO: 684094 - RNA, 22 nt, Human
agaaaugcaguuucaagacaaa

SEQ ID NO: 684095 - RNA, 22 nt, Human
cccucugccugcgcccuggugu

SEQ ID NO: 684096 - RNA, 22 nt, Human
ucuaccacuaagugugcuuuga

SEQ ID NO: 684097 - RNA, 22 nt, Human
ggagcagagcugggcuuggcug

SEQ ID NO: 684098 - RNA, 22 nt, Human
ucacagcacauggaccgagucc

SEQ ID NO: 684099 - RNA, 22 nt, Human
ugcaugguaaccaggaugucua

SEQ ID NO: 684100 - RNA, 22 nt, Human
uucuggaauacuaaguuccuuu

SEQ ID NO: 684101 - RNA, 17 nt, Human
ucccaggaacagggaau

SEQ ID NO: 684102 - RNA, 22 nt, Human
ugaggcagcaauugauuauuca

SEQ ID NO: 684103 - RNA, 22 nt, Human
caaggcugucuccagcuuccaa

SEQ ID NO: 684104 - RNA, 22 nt, Human
acagugacguuuauuugagacg

SEQ ID NO: 684105 - RNA, 22 nt, Human
ugcuggggguagcucugcguag

SEQ ID NO: 684106 - RNA, 18 nt, Human
acaggccucaguccugca

SEQ ID NO: 684107 - RNA, 22 nt, Human
uggcccugaggacccagugugg

SEQ ID NO: 684108 - RNA, 22 nt, Human
agggcuuugagaauaguggaac

SEQ ID NO: 684109 - RNA, 22 nt, Human
aaguucaagagugacauauuag

SEQ ID NO: 684110 - RNA, 22 nt, Human
ucucucugagcccugcuuuuuc

SEQ ID NO: 684111 - RNA, 22 nt, Human
uggcuucuugucuaauuuguua

SEQ ID NO: 684112 - RNA, 22 nt, Human
acauacuugaagcaagugauca

SEQ ID NO: 684113 - RNA, 17 nt, Human
ucuguucaugcauaccu

SEQ ID NO: 684114 - RNA, 22 nt, Human
uguauguauacacugaucauca

SEQ ID NO: 684115 - RNA, 22 nt, Human
ucugacagggccaaacaugaca

SEQ ID NO: 684116 - RNA, 22 nt, Human
uagcaaggcuuccaaugaacag

SEQ ID NO: 684117 - RNA, 22 nt, Human
gcucccuguucucagccaugau

SEQ ID NO: 684118 - RNA, 22 nt, Human
ccaggagcaacuugaaggcaag

SEQ ID NO: 684119 - RNA, 22 nt, Human
uuacuuuggcaaacuccugccc

SEQ ID NO: 684120 - RNA, 22 nt, Human
uauggcuuccaggcuggccagg

SEQ ID NO: 684121 - RNA, 22 nt, Human
caggaagccuuccuugucugcu

SEQ ID NO: 684122 - RNA, 22 nt, Human
guuacaauguucuucaguucug

SEQ ID NO: 684123 - RNA, 22 nt, Human
uacagcuuauccagcuugauag

SEQ ID NO: 684124 - RNA, 22 nt, Human
ccuuccagaggcgugacacccu

SEQ ID NO: 684125 - RNA, 22 nt, Human
auuuuuccaauuaggauaaaga

SEQ ID NO: 684126 - RNA, 22 nt, Human
cugggcugcaguuccugguccu

SEQ ID NO: 684127 - RNA, 22 nt, Human
uagagcugaguugacuccauuu

SEQ ID NO: 684128 - RNA, 22 nt, Human
ucucagagaucuuucugcaugu

SEQ ID NO: 684129 - RNA, 22 nt, Human
ccucaugguacuuacuguagcu

SEQ ID NO: 684130 - RNA, 22 nt, Human
uggaagacaguugaugggaguu

SEQ ID NO: 684131 - RNA, 22 nt, Human
ugcacaggccuugaagggagag

SEQ ID NO: 684132 - RNA, 20 nt, Human
ucacaucuggcagcugauga

SEQ ID NO: 684133 - RNA, 22 nt, Human
uaauguuuccagucuaugaugg

SEQ ID NO: 684134 - RNA, 22 nt, Human
gcaggagcugcucuccugacga

SEQ ID NO: 684135 - RNA, 22 nt, Human
cagagggcuucagguucaggau

SEQ ID NO: 684136 - RNA, 22 nt, Human
ugcaggagcugugcggugaggg

SEQ ID NO: 684137 - RNA, 22 nt, Human
uuaaagcaaccaucaauuugga

SEQ ID NO: 684138 - RNA, 22 nt, Human
uauguacauguuaaagggcaaa

SEQ ID NO: 684139 - RNA, 22 nt, Human
agcagggguggaagguagcuuu

SEQ ID NO: 684140 - RNA, 22 nt, Human
gagacacacauucuggagagaa

SEQ ID NO: 684141 - RNA, 22 nt, Human
ggaugcugcuaucaggcuucga

SEQ ID NO: 684142 - RNA, 23 nt, Human
agcugcaagacucccugucugag

SEQ ID NO: 684143 - RNA, 22 nt, Human
aguacaaagugcuccugguucu

SEQ ID NO: 684144 - RNA, 22 nt, Human
uccuggccucgcuguccaccuu

SEQ ID NO: 684145 - RNA, 22 nt, Human
gugccugguuuggggaauguuc

SEQ ID NO: 684146 - RNA, 22 nt, Human
uggcacagacagaucaggaguc

SEQ ID NO: 684147 - RNA, 21 nt, Human
acucccugcauaagugauuua

SEQ ID NO: 684148 - RNA, 22 nt, Human
uuacaacugaagcuaaugugcu

SEQ ID NO: 684149 - RNA, 22 nt, Human
gucugccuuuaucaucuccuua

SEQ ID NO: 684150 - RNA, 22 nt, Human
uaacagaauagcagaaacagaa

SEQ ID NO: 684151 - RNA, 22 nt, Human
agagucagucacuggcacuuug

SEQ ID NO: 684152 - RNA, 22 nt, Human
ucacaugcccuguauuuaccag

SEQ ID NO: 684153 - RNA, 22 nt, Human
auauauaucgaguucaugucuc

SEQ ID NO: 684154 - RNA, 19 nt, Human
cuucauucuucagcuuuug

SEQ ID NO: 684155 - RNA, 18 nt, Human
acauuucuaggugaaagc

SEQ ID NO: 684156 - RNA, 22 nt, Human
aaaagccaagguccucuucaga

SEQ ID NO: 684157 - RNA, 22 nt, Human
uauguacaugauuucauuugcu

SEQ ID NO: 684158 - RNA, 22 nt, Human
agugucuuacaugaauugauuu

SEQ ID NO: 684159 - RNA, 22 nt, Human
uacacccuucuccugagugugu

SEQ ID NO: 684160 - RNA, 22 nt, Human
uacauauucaacguucaguauu

SEQ ID NO: 684161 - RNA, 22 nt, Human
ucuguagagacgaauguguuau

SEQ ID NO: 684162 - RNA, 22 nt, Human
gcaggguaggugacagguaguc

SEQ ID NO: 684163 - RNA, 22 nt, Human
aaagguuuucaucacagcaaga

SEQ ID NO: 684164 - RNA, 22 nt, Human
agaguuuggugaagcaauuuga

SEQ ID NO: 684165 - RNA, 22 nt, Human
gcugaggccaguuuaaugagga

SEQ ID NO: 684166 - RNA, 22 nt, Human
ucaaggagcccacagucuaaug

SEQ ID NO: 684167 - RNA, 22 nt, Human
acuguacuuuucuuggcuagau

SEQ ID NO: 684168 - RNA, 22 nt, Human
uguagaaguaggagucaucuca

SEQ ID NO: 684169 - RNA, 22 nt, Human
aucagaagaaauggaugugacu

SEQ ID NO: 684170 - RNA, 22 nt, Human
ugcacagagcuggacuccgcgg

SEQ ID NO: 684171 - RNA, 22 nt, Human
ucuuggaacccuaugugauuuc

SEQ ID NO: 684172 - RNA, 22 nt, Human
gaggcuccgguaguagccuuga

SEQ ID NO: 684173 - RNA, 22 nt, Human
cccugugucuucuugccuuugu

SEQ ID NO: 684174 - RNA, 22 nt, Human
gaagcgcggcgucggcgugggu

SEQ ID NO: 684175 - RNA, 22 nt, Human
aauuuauauguaauuaggcaca

SEQ ID NO: 684176 - RNA, 21 nt, Human
ugcaggagucugugagucagg

SEQ ID NO: 684177 - RNA, 22 nt, Human
aucccucagccaccuuugagga

SEQ ID NO: 684178 - RNA, 22 nt, Human
gaguuauuggguggaaagguag

SEQ ID NO: 684179 - RNA, 22 nt, Human
ucaauucuagagccuuacauug

SEQ ID NO: 684180 - RNA, 22 nt, Human
uucucugccucacaggucuaag

SEQ ID NO: 684181 - RNA, 22 nt, Human
gagaacuucaggauuauucaag

SEQ ID NO: 684182 - RNA, 22 nt, Human
gggcuucuauucuggcacaaga

SEQ ID NO: 684183 - RNA, 22 nt, Human
gcuggauuggagcaauagaguc

SEQ ID NO: 684184 - RNA, 21 nt, Human
guagggacagagaguugguga

SEQ ID NO: 684185 - RNA, 22 nt, Human
gauacagaaaggcugcauugag

SEQ ID NO: 684186 - RNA, 22 nt, Human
cucuuuggucgcaucauccauu

SEQ ID NO: 684187 - RNA, 22 nt, Human
auucagcauuggcaccauggau

SEQ ID NO: 684188 - RNA, 22 nt, Human
uuccuugaaaguuugaacugac

SEQ ID NO: 684189 - RNA, 22 nt, Human
agagucaguaacauauauggua

SEQ ID NO: 684190 - RNA, 22 nt, Human
cucuguguuccggguugcugcu

SEQ ID NO: 684191 - RNA, 22 nt, Human
uucauucuuuuacaugugaaua

SEQ ID NO: 684192 - RNA, 22 nt, Human
cagcuggguggcucuucugcuc

SEQ ID NO: 684193 - RNA, 22 nt, Human
uggaaggcaacggagugagcug

SEQ ID NO: 684194 - RNA, 22 nt, Human
uggugaagucagcggagcccgg

SEQ ID NO: 684195 - RNA, 20 nt, Human
caggaugauuggacacgaug

SEQ ID NO: 684196 - RNA, 22 nt, Human
aaugugaaaccgcacagaauaa

SEQ ID NO: 684197 - RNA, 19 nt, Human
acaagggcaggcaagguga

SEQ ID NO: 684198 - RNA, 22 nt, Human
cagcaguucaauccagugcacg

SEQ ID NO: 684199 - RNA, 22 nt, Human
cagucugggacugagcuccacc

SEQ ID NO: 684200 - RNA, 22 nt, Human
ucugcguugcucacgcugggag

SEQ ID NO: 684201 - RNA, 22 nt, Human
cuccaaguauguuaaaaucuaa

SEQ ID NO: 684202 - RNA, 22 nt, Human
aggaaacuguccccucauccua

SEQ ID NO: 684203 - RNA, 22 nt, Human
ugcugcagggauuucagagaca

SEQ ID NO: 684204 - RNA, 22 nt, Human
ucugaguuuaggaccaggcuga

SEQ ID NO: 684205 - RNA, 22 nt, Human
uccccaggggccugggcacagu

SEQ ID NO: 684206 - RNA, 22 nt, Human
caggugagaggcgguccugcau

SEQ ID NO: 684207 - RNA, 22 nt, Human
cagggacauaagaggaacaugg

SEQ ID NO: 684208 - RNA, 22 nt, Human
gggcugacauauuuggugcucu

SEQ ID NO: 684209 - RNA, 22 nt, Human
aagaugguuucuguagguuuau

SEQ ID NO: 684210 - RNA, 22 nt, Human
ugcaacaaggccucauuucuug

SEQ ID NO: 684211 - RNA, 22 nt, Human
acccagggccacagcccgcagu

SEQ ID NO: 684212 - RNA, 23 nt, Human
aguucacugagguugaccacugg

SEQ ID NO: 684213 - RNA, 22 nt, Human
ucuuugaacuuggcugaucucu

SEQ ID NO: 684214 - RNA, 22 nt, Human
cagggcugugcccaucuucccc

SEQ ID NO: 684215 - RNA, 22 nt, Human
guguucugcagaccagcaucau

SEQ ID NO: 684216 - RNA, 22 nt, Human
guggugcaugcaugcauaugua

SEQ ID NO: 684217 - RNA, 22 nt, Human
uuacaaagagaaguuguagaau

SEQ ID NO: 684218 - RNA, 22 nt, Human
aaggaugcagggacccaaggcu

SEQ ID NO: 684219 - RNA, 22 nt, Human
ucucaguggaucucagaauuuu

SEQ ID NO: 684220 - RNA, 22 nt, Human
uacaguaguaucuucauuuguu

SEQ ID NO: 684221 - RNA, 22 nt, Human
uggugcagucauuggcccaggg

SEQ ID NO: 684222 - RNA, 22 nt, Human
ggaagccaugagggacaguucu

SEQ ID NO: 684223 - RNA, 22 nt, Human
cagauggcaacagcucugugac

SEQ ID NO: 684224 - RNA, 22 nt, Human
augaucucauucuuucaaaggg

SEQ ID NO: 684225 - RNA, 22 nt, Human
ccuggcucuucugugucagccc

SEQ ID NO: 684226 - RNA, 22 nt, Human
acagaaguggcuucaaagagca

SEQ ID NO: 684227 - RNA, 22 nt, Human
ggcucugcgcgguaaagugacu

SEQ ID NO: 684228 - RNA, 22 nt, Human
gggcagguggagggcccagcca

SEQ ID NO: 684229 - RNA, 23 nt, Human
aucccuucuccaguguggugagg

SEQ ID NO: 684230 - RNA, 22 nt, Human
cucaggcacgggucagugagcg

SEQ ID NO: 684231 - RNA, 22 nt, Human
uuauucugccaggagcgucagu

SEQ ID NO: 684232 - RNA, 22 nt, Human
ugcuuaauccaaccuggcugac

SEQ ID NO: 684233 - RNA, 22 nt, Human
gaacuggguccuugagucuaga

SEQ ID NO: 684234 - RNA, 22 nt, Human
cuaggcagggugcugugccaug

SEQ ID NO: 684235 - RNA, 22 nt, Human
uaaugcucacccugcaucaggc

SEQ ID NO: 684236 - RNA, 22 nt, Human
agggggcuggagacaccuccuc

SEQ ID NO: 684237 - RNA, 22 nt, Human
caguccagaguaccccaagaag

SEQ ID NO: 684238 - RNA, 21 nt, Human
uauuuaguuuuacaaaugugg

SEQ ID NO: 684239 - RNA, 22 nt, Human
uucuauguguugacaagccuga

SEQ ID NO: 684240 - RNA, 22 nt, Human
gaccugagauuuugaggcucau

SEQ ID NO: 684241 - RNA, 22 nt, Human
ggcugagaaggagugggugagg

SEQ ID NO: 684242 - RNA, 22 nt, Human
uagaaacucaggauacucuucc

SEQ ID NO: 684243 - RNA, 22 nt, Human
ucauugaaaacucagcaucuac

SEQ ID NO: 684244 - RNA, 23 nt, Human
cugaaauaccagaaaaucagugu

SEQ ID NO: 684245 - RNA, 22 nt, Human
guggcugcagcggcuguggaga

SEQ ID NO: 684246 - RNA, 22 nt, Human
caggcuugggagcagagccacu

SEQ ID NO: 684247 - RNA, 22 nt, Human
uucuggaaaagaaaguuaagau

SEQ ID NO: 684248 - RNA, 22 nt, Human
gccucucucuacccaguaugau

SEQ ID NO: 684249 - RNA, 22 nt, Human
cuugugaaaugccagauaaucu

SEQ ID NO: 684250 - RNA, 22 nt, Human
ccugaagaauucaaauccagau

SEQ ID NO: 684251 - RNA, 22 nt, Human
ggcuggguucugagaaagagua

SEQ ID NO: 684252 - RNA, 22 nt, Human
cugaugcuauaagccacagugg

SEQ ID NO: 684253 - RNA, 22 nt, Human
aguccugggucuggagaaugga

SEQ ID NO: 684254 - RNA, 22 nt, Human
aauaugcauuaacuguguacau

SEQ ID NO: 684255 - RNA, 22 nt, Human
gucuuauuagguuaacccugcu

SEQ ID NO: 684256 - RNA, 22 nt, Human
agugaggcuaauaggcaauggu

SEQ ID NO: 684257 - RNA, 22 nt, Human
gcuuccuguaggcagguccaag

SEQ ID NO: 684258 - RNA, 22 nt, Human
cagcuacagaggccacauggcu

SEQ ID NO: 684259 - RNA, 22 nt, Human
uuuccaauaaggucaccuuccu

SEQ ID NO: 684260 - RNA, 22 nt, Human
gacccagccugguuuuuauagg

SEQ ID NO: 684261 - RNA, 22 nt, Human
cugaugcucuggauguagucaa

SEQ ID NO: 684262 - RNA, 22 nt, Human
agugaguuuagggugcaggugu

SEQ ID NO: 684263 - RNA, 22 nt, Human
uagaaaguagccacuuacagag

SEQ ID NO: 684264 - RNA, 22 nt, Human
augcagaugguggauggagaaa

SEQ ID NO: 684265 - RNA, 22 nt, Human
acucugcuugggccauaucugg

SEQ ID NO: 684266 - RNA, 22 nt, Human
aauauuucuguagcuauguucu

SEQ ID NO: 684267 - RNA, 19 nt, Human
uucacauuuuuguggcacu

SEQ ID NO: 684268 - RNA, 22 nt, Human
uggugggcacagugcccaggcu

SEQ ID NO: 684269 - RNA, 22 nt, Human
gcuggugguaaggaggaaaaag

SEQ ID NO: 684270 - RNA, 22 nt, Human
gaagggugugauuugccugaga

SEQ ID NO: 684271 - RNA, 22 nt, Human
uagugcauaccuaacauuuuug

SEQ ID NO: 684272 - RNA, 22 nt, Human
agcugggagcagagccacagcc

SEQ ID NO: 684273 - RNA, 22 nt, Human
aagcagcaacaaacuggauaaa

SEQ ID NO: 684274 - RNA, 22 nt, Human
uguacaaagguacuuugauguu

SEQ ID NO: 684275 - RNA, 22 nt, Human
gcuuuagaaauguaggagauac

SEQ ID NO: 684276 - RNA, 22 nt, Human
uacauguacaugcauagguaga

SEQ ID NO: 684277 - RNA, 22 nt, Human
auuguggugucaguuauaggca

SEQ ID NO: 684278 - RNA, 22 nt, Human
agcagccaguucucugugguag

SEQ ID NO: 684279 - RNA, 22 nt, Human
acaggacagucuaguaacagua

SEQ ID NO: 684280 - RNA, 22 nt, Human
gucuggaaauucaauuuaaugc

SEQ ID NO: 684281 - RNA, 22 nt, Human
cuugaaucuucugaguauuugc

SEQ ID NO: 684282 - RNA, 22 nt, Human
ccugagagggggcccuagaaau

SEQ ID NO: 684283 - RNA, 22 nt, Human
uaacuuugagaacuuucuggug

SEQ ID NO: 684284 - RNA, 22 nt, Human
aacacugauggaaaguauguuu

SEQ ID NO: 684285 - RNA, 22 nt, Human
cugugccaggcccgggugggug

SEQ ID NO: 684286 - RNA, 23 nt, Human
cagcccugaaaucgaggugacac

SEQ ID NO: 684287 - RNA, 22 nt, Human
ucccccacucuaaaggagccuu

SEQ ID NO: 684288 - RNA, 22 nt, Human
uaucaaaguuguccugugaagu

SEQ ID NO: 684289 - RNA, 22 nt, Human
gggaggucagggugccugcugg

SEQ ID NO: 684290 - RNA, 22 nt, Human
uaaaugauuuauguaugugaaa

SEQ ID NO: 684291 - RNA, 20 nt, Human
cuaggcagcgagugacugag

SEQ ID NO: 684292 - RNA, 22 nt, Human
gggacacagguaucucaaauga

SEQ ID NO: 684293 - RNA, 22 nt, Human
caccacuggaggucuuggcuuu

SEQ ID NO: 684294 - RNA, 22 nt, Human
uggaauaacucaccaaggucau

SEQ ID NO: 684295 - RNA, 22 nt, Human
aaaaccacaauuacuuuugcac

SEQ ID NO: 684296 - RNA, 22 nt, Human
auaauuuaaauuaguaugugau

SEQ ID NO: 684297 - RNA, 22 nt, Human
aaaaguguccagauuaugaaga

SEQ ID NO: 684298 - RNA, 22 nt, Human
aaagccaggguccaggccugcc

SEQ ID NO: 684299 - RNA, 22 nt, Human
augcugggaagacaagguggag

SEQ ID NO: 684300 - RNA, 19 nt, Human
ucucaauguucagaaagcu

SEQ ID NO: 684301 - RNA, 22 nt, Human
caagggccuccaccuugcucgu

SEQ ID NO: 684302 - RNA, 22 nt, Human
uagcuggucuuuaagcauguaa

SEQ ID NO: 684303 - RNA, 22 nt, Human
guauuuccucgcuugugggauu

SEQ ID NO: 684304 - RNA, 22 nt, Human
uucagagagaccaaguggcgug

SEQ ID NO: 684305 - RNA, 19 nt, Human
uggaaaauggauugaauca

SEQ ID NO: 684306 - RNA, 22 nt, Human
gaagcugcguguagccauacuu

SEQ ID NO: 684307 - RNA, 22 nt, Human
gaauggaaacugggagauggcc

SEQ ID NO: 684308 - RNA, 22 nt, Human
cagggccuuguucaggagugaa

SEQ ID NO: 684309 - RNA, 22 nt, Human
auugcuguggaaauauaagaug

SEQ ID NO: 684310 - RNA, 22 nt, Human
uggaaggagcuaaggaccuggg

SEQ ID NO: 684311 - RNA, 22 nt, Human
cugggcugagcuguggaaacuc

SEQ ID NO: 684312 - RNA, 21 nt, Human
ugucagaaauaagcaugugau

SEQ ID NO: 684313 - RNA, 22 nt, Human
ccacugauucugccaggucucu

SEQ ID NO: 684314 - RNA, 21 nt, Human
uggcggggacuuguggcugcc

SEQ ID NO: 684315 - RNA, 22 nt, Human
aggccucugagcagcacucaug

SEQ ID NO: 684316 - RNA, 22 nt, Human
gggcaggugccagcucccuguc

SEQ ID NO: 684317 - RNA, 22 nt, Human
uuuagaaugugacuguauuuga

SEQ ID NO: 684318 - RNA, 22 nt, Human
uucauugauuuaacaaacaagu

SEQ ID NO: 684319 - RNA, 22 nt, Human
uaggccaacguggaagggucca

SEQ ID NO: 684320 - RNA, 22 nt, Human
acaaaauuuuuagacaaggcuu

SEQ ID NO: 684321 - RNA, 22 nt, Human
cuagagaaaaagcuuagguacg

SEQ ID NO: 684322 - RNA, 22 nt, Human
gcuggccucuacaggccggcca

SEQ ID NO: 684323 - RNA, 22 nt, Human
gugcuaggauuacaggcauggg

SEQ ID NO: 684324 - RNA, 22 nt, Human
cagaccccgaguuugcagaguu

SEQ ID NO: 684325 - RNA, 22 nt, Human
agagcaaauagagaagccagcu

SEQ ID NO: 684326 - RNA, 21 nt, Human
ucauuugugaucugauuucca

SEQ ID NO: 684327 - RNA, 22 nt, Human
gcuguucuuugcaucucuggug

SEQ ID NO: 684328 - RNA, 22 nt, Human
ugggagcaggcugaugauaggu

SEQ ID NO: 684329 - RNA, 23 nt, Human
uccaggcaugagcucuggaugga

SEQ ID NO: 684330 - RNA, 22 nt, Human
uggcacagcccagagcucuuga

SEQ ID NO: 684331 - RNA, 22 nt, Human
gccuggaaucaugcagggguua

SEQ ID NO: 684332 - RNA, 22 nt, Human
cugcugugccucuuuucacgug

SEQ ID NO: 684333 - RNA, 22 nt, Human
uuucucaaccucaacacuauuu

SEQ ID NO: 684334 - RNA, 23 nt, Human
gcagaaauucucacacugaggcc

SEQ ID NO: 684335 - RNA, 22 nt, Human
gaggcagccagagguucucauu

SEQ ID NO: 684336 - RNA, 22 nt, Human
cagcuucccagcucacucauaa

SEQ ID NO: 684337 - RNA, 22 nt, Human
cucaguccagggaccggccucc

SEQ ID NO: 684338 - RNA, 22 nt, Human
ugaacuuuguaguaauggagau

SEQ ID NO: 684339 - RNA, 22 nt, Human
cuccugagaauuuucaguugga

SEQ ID NO: 684340 - RNA, 22 nt, Human
uccuggcucggcuuggggacuu

SEQ ID NO: 684341 - RNA, 22 nt, Human
acugagagaacgggcugcuccc

SEQ ID NO: 684342 - RNA, 22 nt, Human
agcacaaugugaaaagagcucu

SEQ ID NO: 684343 - RNA, 22 nt, Human
aggcagccugguuugaauggaa

SEQ ID NO: 684344 - RNA, 22 nt, Human
aagggacccuggaucaaaugga

SEQ ID NO: 684345 - RNA, 22 nt, Human
uuggucccucauggacacauga

SEQ ID NO: 684346 - RNA, 21 nt, Human
aaucauacaaaacaugucagg

SEQ ID NO: 684347 - RNA, 22 nt, Human
auaaagcauacuuuguaugacu

SEQ ID NO: 684348 - RNA, 22 nt, Human
acaaggcugugggagaaccucu

SEQ ID NO: 684349 - RNA, 22 nt, Human
uguugguaggauuugcuucagc

SEQ ID NO: 684350 - RNA, 22 nt, Human
augcuauguaacuggcagauag

SEQ ID NO: 684351 - RNA, 22 nt, Human
caggcaggagccagggauucca

SEQ ID NO: 684352 - RNA, 22 nt, Human
cugcaggaggauccugagagug

SEQ ID NO: 684353 - RNA, 22 nt, Human
auauuauaaguuauuucaaguu

SEQ ID NO: 684354 - RNA, 22 nt, Human
gagcacagcagggcucugggug

SEQ ID NO: 684355 - RNA, 22 nt, Human
cagggccugcuuccuucuuguu

SEQ ID NO: 684356 - RNA, 22 nt, Human
uagcuguuacccauaaaagcca

SEQ ID NO: 684357 - RNA, 22 nt, Human
uggaaccuaaaaaugucauugc

SEQ ID NO: 684358 - RNA, 22 nt, Human
ggauaaagucuuuagguggaca

SEQ ID NO: 684359 - RNA, 22 nt, Human
ccauagugaauugucucagacg

SEQ ID NO: 684360 - RNA, 22 nt, Human
ccucccugucuaccuguugugg

SEQ ID NO: 684361 - RNA, 19 nt, Human
auguacccagugucaaucc

SEQ ID NO: 684362 - RNA, 22 nt, Human
agucccaguucgguucuuccuc

SEQ ID NO: 684363 - RNA, 22 nt, Human
ugcuucuggaguaacaggguga

SEQ ID NO: 684364 - RNA, 22 nt, Human
gcuccagaugaaugcacuuguu

SEQ ID NO: 684365 - RNA, 20 nt, Human
uaugaaguguucuucuggua

SEQ ID NO: 684366 - RNA, 22 nt, Human
cugcccaucgucauuuaauaaa

SEQ ID NO: 684367 - RNA, 21 nt, Human
gcucuguuauuuucuaugcag

SEQ ID NO: 684368 - RNA, 23 nt, Human
ucccuggaggcagguccagggcc

SEQ ID NO: 684369 - RNA, 22 nt, Human
ugagagugaaaugucacauguc

SEQ ID NO: 684370 - RNA, 22 nt, Human
aguguuuacauauaaggcccuu

SEQ ID NO: 684371 - RNA, 22 nt, Human
auucaacuguaaacuuguucac

SEQ ID NO: 684372 - RNA, 22 nt, Human
ccucuaggauguggcuggagga

SEQ ID NO: 684373 - RNA, 22 nt, Human
agcauaaguugguacagccacu

SEQ ID NO: 684374 - RNA, 22 nt, Human
ugugcccaacgugcagguuugu

SEQ ID NO: 684375 - RNA, 22 nt, Human
caucacauuuaaggggaaggac

SEQ ID NO: 684376 - RNA, 22 nt, Human
gagucccaggauaugugcuguu

SEQ ID NO: 684377 - RNA, 22 nt, Human
ucagcauaucuugagcuucaug

SEQ ID NO: 684378 - RNA, 22 nt, Human
cagccaggccuggugaccaaag

SEQ ID NO: 684379 - RNA, 22 nt, Human
gcuggcuugauaguuucugcuu

SEQ ID NO: 684380 - RNA, 22 nt, Human
uccuggggcucaugggauuugu

SEQ ID NO: 684381 - RNA, 22 nt, Human
cagcugugagcagccaguugcc

SEQ ID NO: 684382 - RNA, 22 nt, Human
ugcauuuauggaguuaccucau

SEQ ID NO: 684383 - RNA, 16 nt, Human
ggguggucuuggagac

SEQ ID NO: 684384 - RNA, 22 nt, Human
aggaaauguaguccucaucucc

SEQ ID NO: 684385 - RNA, 22 nt, Human
auaaaagaaguuuugguacuug

SEQ ID NO: 684386 - RNA, 22 nt, Human
acugcaauuauuuguucaccaa

SEQ ID NO: 684387 - RNA, 22 nt, Human
uuuaucugaggaaagcagacaa

SEQ ID NO: 684388 - RNA, 20 nt, Human
gaaggaagggggcaagguga

SEQ ID NO: 684389 - RNA, 22 nt, Human
gucauagguucaaaaggcagau

SEQ ID NO: 684390 - RNA, 22 nt, Human
gggggcugaggcuguucugagg

SEQ ID NO: 684391 - RNA, 17 nt, Human
gcacagugauauuauuu

SEQ ID NO: 684392 - RNA, 20 nt, Human
cacauuaaggaaaacaacug

SEQ ID NO: 684393 - RNA, 22 nt, Human
cacuaaauguuucaauguggga

SEQ ID NO: 684394 - RNA, 22 nt, Human
uugugggcuugccuggcucuug

SEQ ID NO: 684395 - RNA, 22 nt, Human
ucaaaaauuuucugaggaugag

SEQ ID NO: 684396 - RNA, 22 nt, Human
aggcugugaguuuugucucaga

SEQ ID NO: 684397 - RNA, 22 nt, Human
acuuggcuuuaguaguaacuga

SEQ ID NO: 684398 - RNA, 22 nt, Human
gaaguggaagccaucggcaguc

SEQ ID NO: 684399 - RNA, 22 nt, Human
gagcccagggcaggcaaggcag

SEQ ID NO: 684400 - RNA, 22 nt, Human
ucugccuuccccauaaucugau

SEQ ID NO: 684401 - RNA, 20 nt, Human
aaagcauuuacuugugauug

SEQ ID NO: 684402 - RNA, 20 nt, Human
uccugccacaccucaguugc

SEQ ID NO: 684403 - RNA, 22 nt, Human
aagagcaguguuuuacucagcu

SEQ ID NO: 684404 - RNA, 22 nt, Human
guggacacaggagagagaacug

SEQ ID NO: 684405 - RNA, 22 nt, Human
gcuucucuucgccuagguccuu

SEQ ID NO: 684406 - RNA, 22 nt, Human
uugcaucagaaaauaugggaag

SEQ ID NO: 684407 - RNA, 22 nt, Human
cagggccagccauccugcuggg

SEQ ID NO: 684408 - RNA, 22 nt, Human
cccaggcugauguucagcgggu

SEQ ID NO: 684409 - RNA, 22 nt, Human
ggcagcugcaaaucugcucugu

SEQ ID NO: 684410 - RNA, 22 nt, Human
aagcaacucccuccucauuuuu

SEQ ID NO: 684411 - RNA, 22 nt, Human
uauggcuuuuaaggagaucuga

SEQ ID NO: 684412 - RNA, 22 nt, Human
ccagcccaugcccuuauagcau

SEQ ID NO: 684413 - RNA, 22 nt, Human
cuggggugucucgucugccauu

SEQ ID NO: 684414 - RNA, 22 nt, Human
aaagucaagguuuagacuagag

SEQ ID NO: 684415 - RNA, 22 nt, Human
gccuagggugcucagggacgag

SEQ ID NO: 684416 - RNA, 22 nt, Human
ugugucugaacaugcuuuguaa

SEQ ID NO: 684417 - RNA, 18 nt, Human
cgugaguggaggcugcgg

SEQ ID NO: 684418 - RNA, 22 nt, Human
uacagauacagaucuagauaca

SEQ ID NO: 684419 - RNA, 22 nt, Human
guuguacagcauccagugcaga

SEQ ID NO: 684420 - RNA, 22 nt, Human
ugcagcuggaacuuagaggaga

SEQ ID NO: 684421 - RNA, 22 nt, Human
ugucccucugaggcuucccugg

SEQ ID NO: 684422 - RNA, 22 nt, Human
aggagccaaauuuuagacucug

SEQ ID NO: 684423 - RNA, 22 nt, Human
aggcagcaugcucugcuucuac

SEQ ID NO: 684424 - RNA, 22 nt, Human
agagaaauucucaguggaagau

SEQ ID NO: 684425 - RNA, 22 nt, Human
ccagcugucugguuccagagcc

SEQ ID NO: 684426 - RNA, 22 nt, Human
gaauacaugauacaugaacugc

SEQ ID NO: 684427 - RNA, 22 nt, Human
uauaaguaguuguugaagacuu

SEQ ID NO: 684428 - RNA, 22 nt, Human
gcagcacaaaguccccagggac

SEQ ID NO: 684429 - RNA, 22 nt, Human
cauguguaaggcucacaggcag

SEQ ID NO: 684430 - RNA, 19 nt, Human
ugucacugucauggcccag

SEQ ID NO: 684431 - RNA, 18 nt, Human
uaagaagguggcuccagc

SEQ ID NO: 684432 - RNA, 22 nt, Human
uuccacucuacucuggccaguc

SEQ ID NO: 684433 - RNA, 22 nt, Human
uggaggccagagguacugggac

SEQ ID NO: 684434 - RNA, 22 nt, Human
gaaggacccucuggggucucag

SEQ ID NO: 684435 - RNA, 22 nt, Human
gccucacugcagccccaggaag

SEQ ID NO: 684436 - RNA, 22 nt, Human
cuguggcucugcagucccaaca

SEQ ID NO: 684437 - RNA, 22 nt, Human
agagcacugagugagcaaggcc

SEQ ID NO: 684438 - RNA, 22 nt, Human
uuguuuuaacgacucagcuugu

SEQ ID NO: 684439 - RNA, 22 nt, Human
gagcaguaggagaacccugagc

SEQ ID NO: 684440 - RNA, 22 nt, Human
aauuuucacagugcugugagau

SEQ ID NO: 684441 - RNA, 22 nt, Human
aacaucugggcccugauuuugg

SEQ ID NO: 684442 - RNA, 21 nt, Human
guuauugaccuccaggcuggc

SEQ ID NO: 684443 - RNA, 22 nt, Human
ccaguguucugguguucauuuc

SEQ ID NO: 684444 - RNA, 22 nt, Human
auccagugagugcagcuguugu

SEQ ID NO: 684445 - RNA, 21 nt, Human
agcaacucugacuagaugagg

SEQ ID NO: 684446 - RNA, 22 nt, Human
cagcacagcuggcucuggaagc

SEQ ID NO: 684447 - RNA, 22 nt, Human
aagcugugaagagcaagugagg

SEQ ID NO: 684448 - RNA, 22 nt, Human
agaaauguuuauggcugccuau

SEQ ID NO: 684449 - RNA, 20 nt, Human
caggugagcagaucugggug

SEQ ID NO: 684450 - RNA, 22 nt, Human
cugucuguucagauucauuacu

SEQ ID NO: 684451 - RNA, 22 nt, Human
cugucuuuuacuaucauuuacu

SEQ ID NO: 684452 - RNA, 22 nt, Human
cuguuuauggagguaaggcauc

SEQ ID NO: 684453 - RNA, 22 nt, Human
aggaauucaagaccagcugggc

SEQ ID NO: 684454 - RNA, 22 nt, Human
acacaaugcauauuuuuccaga

SEQ ID NO: 684455 - RNA, 22 nt, Human
gaagguuuacugaagauuuaaa

SEQ ID NO: 684456 - RNA, 22 nt, Human
uauuugucaccuauggcugucc

SEQ ID NO: 684457 - RNA, 22 nt, Human
gagcacccuaccugccacugag

SEQ ID NO: 684458 - RNA, 22 nt, Human
aggggacauuuagcaaugacua

SEQ ID NO: 684459 - RNA, 22 nt, Human
aagcgccacgagaagcuggacc

SEQ ID NO: 684460 - RNA, 22 nt, Human
gguagcaagcgcuugcccugcg

SEQ ID NO: 684461 - RNA, 19 nt, Human
uaauauacagacccaucug

SEQ ID NO: 684462 - RNA, 22 nt, Human
caacacugacaauggacugauu

SEQ ID NO: 684463 - RNA, 22 nt, Human
uggggugaggcagccacauuua

SEQ ID NO: 684464 - RNA, 22 nt, Human
gaacaucuuauccauuuccucu

SEQ ID NO: 684465 - RNA, 22 nt, Human
uaaggcauuagagugaaagcaa

SEQ ID NO: 684466 - RNA, 22 nt, Human
augucagaaucuacauucuacu

SEQ ID NO: 684467 - RNA, 22 nt, Human
gguaaaaaucacaaauacuuua

SEQ ID NO: 684468 - RNA, 22 nt, Human
uugugaauagugccgcaauaaa

SEQ ID NO: 684469 - RNA, 22 nt, Human
ggguuccuccaguuccuagagc

SEQ ID NO: 684470 - RNA, 22 nt, Human
aacuguggacuugagacugaug

SEQ ID NO: 684471 - RNA, 22 nt, Human
gucauauacacugcauguaauc

SEQ ID NO: 684472 - RNA, 22 nt, Human
ggucaaagggugagauggcagg

SEQ ID NO: 684473 - RNA, 22 nt, Human
cuagucacuguaauaaucugcu

SEQ ID NO: 684474 - RNA, 22 nt, Human
acaaugucaccucucauguuuu

SEQ ID NO: 684475 - RNA, 22 nt, Human
uaagaguaucuauuaaguacuu

SEQ ID NO: 684476 - RNA, 22 nt, Human
aaaggcuuugagaaguccugca

SEQ ID NO: 684477 - RNA, 22 nt, Human
ccugaguggugcuaagcagaua

SEQ ID NO: 684478 - RNA, 23 nt, Human
agacaaaagccucagucuuaggc

SEQ ID NO: 684479 - RNA, 18 nt, Human
uacaaacuccuugaaggc

SEQ ID NO: 684480 - RNA, 22 nt, Human
auguuauuucaaaauucccuug

SEQ ID NO: 684481 - RNA, 22 nt, Human
gcugggcagugagugaguccuu

SEQ ID NO: 684482 - RNA, 22 nt, Human
augugaaacugaagcauccaua

SEQ ID NO: 684483 - RNA, 22 nt, Human
cugggcagagcuaacaccugag

SEQ ID NO: 684484 - RNA, 22 nt, Human
ucuucaugaccucuguguuuua

SEQ ID NO: 684485 - RNA, 22 nt, Human
ggcaggcaaggcagccugguga

SEQ ID NO: 684486 - RNA, 22 nt, Human
uuauuuugagagaaugugugcu

SEQ ID NO: 684487 - RNA, 22 nt, Human
aacucaaagaugcaugacgcuu

SEQ ID NO: 684488 - RNA, 22 nt, Human
agcagagcccuuccauggccuu

SEQ ID NO: 684489 - RNA, 22 nt, Human
gcucaggccucacuccauuugg

SEQ ID NO: 684490 - RNA, 22 nt, Human
auaaguuugucuuuguaaagau

SEQ ID NO: 684491 - RNA, 21 nt, Human
cagcccagagcaguggggcca

SEQ ID NO: 684492 - RNA, 22 nt, Human
auaagaggaauuacagaagagg

SEQ ID NO: 684493 - RNA, 21 nt, Human
aggagcugugugcuuccuuuc

SEQ ID NO: 684494 - RNA, 22 nt, Human
auguucauuugacaaguaguga

SEQ ID NO: 684495 - RNA, 22 nt, Human
agcagggcuggauuuggcaaga

SEQ ID NO: 684496 - RNA, 22 nt, Human
auucaagauuaauucuauguca

SEQ ID NO: 684497 - RNA, 22 nt, Human
aaauaauuauagcgagucuauc

SEQ ID NO: 684498 - RNA, 22 nt, Human
guuuuucuuugugugaagacaa

SEQ ID NO: 684499 - RNA, 22 nt, Human
gacagagugcagggcuagaaga

SEQ ID NO: 684500 - RNA, 22 nt, Human
uguggaaugggagugagaagac

SEQ ID NO: 684501 - RNA, 18 nt, Human
guuuggcauaacugaugc

SEQ ID NO: 684502 - RNA, 22 nt, Human
agucacugagauggugaggcua

SEQ ID NO: 684503 - RNA, 22 nt, Human
uggagcagcugaacagaguuga

SEQ ID NO: 684504 - RNA, 22 nt, Human
aagagcaacuuggaaacacuca

SEQ ID NO: 684505 - RNA, 22 nt, Human
ugccaggcuuuggucaaaggcu

SEQ ID NO: 684506 - RNA, 22 nt, Human
uuuccuggcucuguggccuugu

SEQ ID NO: 684507 - RNA, 22 nt, Human
uacaggcacugaaaugcuuauu

SEQ ID NO: 684508 - RNA, 22 nt, Human
gaaucucaguggaagcaggaag

SEQ ID NO: 684509 - RNA, 22 nt, Human
gucugccauguggagaaagcca

SEQ ID NO: 684510 - RNA, 22 nt, Human
gaaagcacuaaaagagaauccu

SEQ ID NO: 684511 - RNA, 22 nt, Human
uggcccugugugcaggcugcac

SEQ ID NO: 684512 - RNA, 23 nt, Human
ugagcaucacaggagaaccaggc

SEQ ID NO: 684513 - RNA, 19 nt, Human
aguuauugaucuauucagg

SEQ ID NO: 684514 - RNA, 22 nt, Human
aggcacugcagauuacaggcgc

SEQ ID NO: 684515 - RNA, 22 nt, Human
ucaaagcaucagucaauuuagg

SEQ ID NO: 684516 - RNA, 22 nt, Human
acagacauucagcuaagucuau

SEQ ID NO: 684517 - RNA, 22 nt, Human
gcacggcaagacggggccuccu

SEQ ID NO: 684518 - RNA, 22 nt, Human
cggcugugucuucacaggagcc

SEQ ID NO: 684519 - RNA, 22 nt, Human
uaaagugcagauugugauucag

SEQ ID NO: 684520 - RNA, 22 nt, Human
cgccgccugcugcagcagcugu

SEQ ID NO: 684521 - RNA, 22 nt, Human
agcugccuguccuaggccauca

SEQ ID NO: 684522 - RNA, 19 nt, Human
agccuggagggcuggucac

SEQ ID NO: 684523 - RNA, 22 nt, Human
uuguuggugaauaggguggaau

SEQ ID NO: 684524 - RNA, 22 nt, Human
cuggccuuuagccccagugucu

SEQ ID NO: 684525 - RNA, 22 nt, Human
agcuacagucggaaggacagac

SEQ ID NO: 684526 - RNA, 22 nt, Human
ccacagaaaguugucuagagua

SEQ ID NO: 684527 - RNA, 22 nt, Human
gggguagggugauugugaagua

SEQ ID NO: 684528 - RNA, 22 nt, Human
ugcccagcacugugccagucac

SEQ ID NO: 684529 - RNA, 22 nt, Human
gcccucagcauccucagggcca

SEQ ID NO: 684530 - RNA, 22 nt, Human
cccaggagaugcacuccauugg

SEQ ID NO: 684531 - RNA, 22 nt, Human
uaauuuuaugacaguguauuuu

SEQ ID NO: 684532 - RNA, 22 nt, Human
uugggccacuuuaguuuccuua

SEQ ID NO: 684533 - RNA, 22 nt, Human
cuuauuagugucugucugaguu

SEQ ID NO: 684534 - RNA, 22 nt, Human
uuuaaccugucaauuugcaugc

SEQ ID NO: 684535 - RNA, 22 nt, Human
uggcucagcgcggccuggucuu

SEQ ID NO: 684536 - RNA, 21 nt, Human
uccuuccuugagguccuuucc

SEQ ID NO: 684537 - RNA, 23 nt, Human
uucaaagcuuaagcucuuuccac

SEQ ID NO: 684538 - RNA, 22 nt, Human
uuccaauccaaacuucaccuuu

SEQ ID NO: 684539 - RNA, 22 nt, Human
augaauauguacacaucuguca

SEQ ID NO: 684540 - RNA, 23 nt, Human
ggcagccucugacucugcuuugc

SEQ ID NO: 684541 - RNA, 22 nt, Human
gcuuccaguaaguugcugccau

SEQ ID NO: 684542 - RNA, 22 nt, Human
ugugcuucaucacuucucaguu

SEQ ID NO: 684543 - RNA, 20 nt, Human
uggcuuuaaguuuuuugcua

SEQ ID NO: 684544 - RNA, 22 nt, Human
acacaugaggaugaggggauca

SEQ ID NO: 684545 - RNA, 22 nt, Human
agagcugagaauguggcuuccu

SEQ ID NO: 684546 - RNA, 22 nt, Human
gacagcaaccucaugagaaacu

SEQ ID NO: 684547 - RNA, 22 nt, Human
uuacaggggacauuggggacau

SEQ ID NO: 684548 - RNA, 22 nt, Human
gaggcccaggucaagcagccac

SEQ ID NO: 684549 - RNA, 22 nt, Human
uuucucuccccaaguggaauug

SEQ ID NO: 684550 - RNA, 22 nt, Human
agcucuccacacauaggacuag

SEQ ID NO: 684551 - RNA, 22 nt, Human
aauaauuuugagagccuggaaa

SEQ ID NO: 684552 - RNA, 22 nt, Human
cagagucucugggaggcugggu

SEQ ID NO: 684553 - RNA, 21 nt, Human
ucugccagcugaagaggugga

SEQ ID NO: 684554 - RNA, 22 nt, Human
aucuuuagauuagaaacucuaa

SEQ ID NO: 684555 - RNA, 22 nt, Human
ugguccuuguaggcauuugagc

SEQ ID NO: 684556 - RNA, 22 nt, Human
cacagcuuguuuagugacucac

SEQ ID NO: 684557 - RNA, 22 nt, Human
agcaacuagccaggaugcagag

SEQ ID NO: 684558 - RNA, 22 nt, Human
ugccaggcugcccuccagucug

SEQ ID NO: 684559 - RNA, 22 nt, Human
agggccaggaucacagccaaga

SEQ ID NO: 684560 - RNA, 22 nt, Human
cacaugugugcugaggacugug

SEQ ID NO: 684561 - RNA, 22 nt, Human
aaguacagccagcacccagacu

SEQ ID NO: 684562 - RNA, 19 nt, Human
ccaccagugugaucuaaga

SEQ ID NO: 684563 - RNA, 22 nt, Human
aauguguuuauuuagugauuua

SEQ ID NO: 684564 - RNA, 19 nt, Human
uucccagagccaugaguga

SEQ ID NO: 684565 - RNA, 22 nt, Human
ggggauggugggaaggcaaucu

SEQ ID NO: 684566 - RNA, 22 nt, Human
uggugaucagucaacugucuuc

SEQ ID NO: 684567 - RNA, 22 nt, Human
uuacagcagugggaaggaguca

SEQ ID NO: 684568 - RNA, 22 nt, Human
augcauugucaggcaauuucau

SEQ ID NO: 684569 - RNA, 22 nt, Human
ugaugagguggauucaaagcag

SEQ ID NO: 684570 - RNA, 22 nt, Human
cucaucugcucuuauuaucuua

SEQ ID NO: 684571 - RNA, 22 nt, Human
uaaugaacaauauaucaauagc

SEQ ID NO: 684572 - RNA, 22 nt, Human
cucaucaccacauauaacaaag

SEQ ID NO: 684573 - RNA, 22 nt, Human
guggccaugugcuugcagggua

SEQ ID NO: 684574 - RNA, 20 nt, Human
gagcagcuguuugcauugca

SEQ ID NO: 684575 - RNA, 22 nt, Human
guggcccacuuacgucaugugu

SEQ ID NO: 684576 - RNA, 22 nt, Human
gacaggcaauuaccagcgccca

SEQ ID NO: 684577 - RNA, 22 nt, Human
gggcagguguuuccaaggugag

SEQ ID NO: 684578 - RNA, 22 nt, Human
gaagagcugucagaaaagcuaa

SEQ ID NO: 684579 - RNA, 22 nt, Human
agagguagaaaauaauggagag

SEQ ID NO: 684580 - RNA, 22 nt, Human
gccggggcuggggagagacaug

SEQ ID NO: 684581 - RNA, 22 nt, Human
caccagcugcaacaccaucucc

SEQ ID NO: 684582 - RNA, 20 nt, Human
augugagggguugaaguggg

SEQ ID NO: 684583 - RNA, 22 nt, Human
ucuuuagaguuaacaauaauga

SEQ ID NO: 684584 - RNA, 22 nt, Human
gagaggcagaggccugaaaccg

SEQ ID NO: 684585 - RNA, 21 nt, Human
ugcaggcugugcgcuccugcc

SEQ ID NO: 684586 - RNA, 22 nt, Human
aagauacaccaagagccuagua

SEQ ID NO: 684587 - RNA, 22 nt, Human
ugcuuaaacauacuauuuauau

SEQ ID NO: 684588 - RNA, 22 nt, Human
gaggucugggauggggccugaa

SEQ ID NO: 684589 - RNA, 22 nt, Human
aaauuaagggugagaagaguug

SEQ ID NO: 684590 - RNA, 16 nt, Human
gggggugagagagagu

SEQ ID NO: 684591 - RNA, 22 nt, Human
caggccugucugcacaugaggc

SEQ ID NO: 684592 - RNA, 22 nt, Human
ugagccaggcuccaugccaccu

SEQ ID NO: 684593 - RNA, 23 nt, Human
aauagcugguaaugauagcacaa

SEQ ID NO: 684594 - RNA, 20 nt, Human
gcaaggcacagugaggaggg

SEQ ID NO: 684595 - RNA, 22 nt, Human
aaaggcuccuucucccaugacc

SEQ ID NO: 684596 - RNA, 22 nt, Human
ugaagcagcaaaugaugggaga

SEQ ID NO: 684597 - RNA, 22 nt, Human
ggaggggagguccagcugaucu

SEQ ID NO: 684598 - RNA, 22 nt, Human
acaguacaagcaaugcauuuuu

SEQ ID NO: 684599 - RNA, 22 nt, Human
uaagacuuaggucgaguuuggc

SEQ ID NO: 684600 - RNA, 22 nt, Human
uccuggaguggagucuguuguu

SEQ ID NO: 684601 - RNA, 22 nt, Human
ccuugguuuccaggaugaggcu

SEQ ID NO: 684602 - RNA, 22 nt, Human
caggguggggcuggcuaucaaa

SEQ ID NO: 684603 - RNA, 22 nt, Human
aagggcugggucugguuaaccc

SEQ ID NO: 684604 - RNA, 22 nt, Human
cauugucauucuaugcuauuca

SEQ ID NO: 684605 - RNA, 22 nt, Human
ucccaggacuuccaguuggagg

SEQ ID NO: 684606 - RNA, 22 nt, Human
ccagcaggagacuagcaacaua

SEQ ID NO: 684607 - RNA, 22 nt, Human
ccugccagggccuuggaagaaa

SEQ ID NO: 684608 - RNA, 22 nt, Human
agugcuggagggaggcagguuc

SEQ ID NO: 684609 - RNA, 20 nt, Human
aggcuccuccaggaugugug

SEQ ID NO: 684610 - RNA, 19 nt, Human
uggggccuccugucccugg

SEQ ID NO: 684611 - RNA, 22 nt, Human
augucuggaggucaucugguua

SEQ ID NO: 684612 - RNA, 22 nt, Human
aaacaauguugucuccaagagg

SEQ ID NO: 684613 - RNA, 22 nt, Human
gcccacucuggagccuguuccc

SEQ ID NO: 684614 - RNA, 22 nt, Human
gagggugguggcuuaaggugcu

SEQ ID NO: 684615 - RNA, 22 nt, Human
cagcacaugcucaucagggaag

SEQ ID NO: 684616 - RNA, 22 nt, Human
uggagucugugaugcucugggu

SEQ ID NO: 684617 - RNA, 22 nt, Human
auuuuagcaaaugcaagaugga

SEQ ID NO: 684618 - RNA, 22 nt, Human
cagggcuuuccugagaagugau

SEQ ID NO: 684619 - RNA, 22 nt, Human
guggcaggagugggccuugaag

SEQ ID NO: 684620 - RNA, 21 nt, Human
aggucagcccagcucuggaag

SEQ ID NO: 684621 - RNA, 22 nt, Human
accauacauuaaaugacuuuca

SEQ ID NO: 684622 - RNA, 22 nt, Human
uuggcuucccagagcuuacgcu

SEQ ID NO: 684623 - RNA, 22 nt, Human
uuucuagaucaaacuuuuauau

SEQ ID NO: 684624 - RNA, 22 nt, Human
agcagugugcuucguuucauga

SEQ ID NO: 684625 - RNA, 22 nt, Human
uuccugagcaccagacacugca

SEQ ID NO: 684626 - RNA, 22 nt, Human
ggcuguggacacugagcucaga

SEQ ID NO: 684627 - RNA, 22 nt, Human
aagacagcauugcugagggcuu

SEQ ID NO: 684628 - RNA, 22 nt, Human
cagagccaucccagccuguggu

SEQ ID NO: 684629 - RNA, 22 nt, Human
aaaaggcuaauccagagcaacu

SEQ ID NO: 684630 - RNA, 22 nt, Human
ugugcuuacuuugaauuauaua

SEQ ID NO: 684631 - RNA, 22 nt, Human
ugguuccaguuuucaauagagc

SEQ ID NO: 684632 - RNA, 22 nt, Human
agcugguuagcaaucuaaguga

SEQ ID NO: 684633 - RNA, 21 nt, Human
agucuggggaagggaucccag

SEQ ID NO: 684634 - RNA, 17 nt, Human
ccagcugcucccucaga

SEQ ID NO: 684635 - RNA, 22 nt, Human
guggagccaggaucuccgcaca

SEQ ID NO: 684636 - RNA, 22 nt, Human
uuuacaaggcagaacugauuaa

SEQ ID NO: 684637 - RNA, 22 nt, Human
cauucacaaagcugauugaugg

SEQ ID NO: 684638 - RNA, 22 nt, Human
ggcugugcugagggggaagccc

SEQ ID NO: 684639 - RNA, 22 nt, Human
ggagccagcagggugacacuga

SEQ ID NO: 684640 - RNA, 22 nt, Human
cugcaggauucucccaguugga

SEQ ID NO: 684641 - RNA, 21 nt, Human
gauuucacuuaccuucauuua

SEQ ID NO: 684642 - RNA, 22 nt, Human
cuggcugugugucuucauucag

SEQ ID NO: 684643 - RNA, 17 nt, Human
cucacggaggaugaauc

SEQ ID NO: 684644 - RNA, 22 nt, Human
gcacccugucaaaauggaccaa

SEQ ID NO: 684645 - RNA, 22 nt, Human
uggcuucaucugcagcacugcc

SEQ ID NO: 684646 - RNA, 22 nt, Human
gaugcuggccuggccaucuggg

SEQ ID NO: 684647 - RNA, 22 nt, Human
cagugcuauaauccagugucgu

SEQ ID NO: 684648 - RNA, 22 nt, Human
cuuccugaaucuuccauguaua

SEQ ID NO: 684649 - RNA, 22 nt, Human
gaagcuguguugauggcaugga

SEQ ID NO: 684650 - RNA, 22 nt, Human
ucuucccuaaucaccaucuuca

SEQ ID NO: 684651 - RNA, 22 nt, Human
uccucuccaugucucacgccac

SEQ ID NO: 684652 - RNA, 22 nt, Human
augguuuguaacccaauacucc

SEQ ID NO: 684653 - RNA, 22 nt, Human
cacauacauucauguuacucua

SEQ ID NO: 684654 - RNA, 22 nt, Human
uugauacauuuuuaggauaaac

SEQ ID NO: 684655 - RNA, 22 nt, Human
cugagguggccucugccgggga

SEQ ID NO: 684656 - RNA, 23 nt, Human
ucucugaguuguacuuucccuug

SEQ ID NO: 684657 - RNA, 20 nt, Human
ucuguaggcaaguuagcagg

SEQ ID NO: 684658 - RNA, 22 nt, Human
agcacuguuaugggaugacuua

SEQ ID NO: 684659 - RNA, 22 nt, Human
gugggcagugugucaguaucuu

SEQ ID NO: 684660 - RNA, 22 nt, Human
gucagaaaaagcaaggcugggc

SEQ ID NO: 684661 - RNA, 21 nt, Human
ugucugccccuguuuaccaga

SEQ ID NO: 684662 - RNA, 18 nt, Human
gcucuggcucaccuccag

SEQ ID NO: 684663 - RNA, 22 nt, Human
ucugugugaccauaagccagcu

SEQ ID NO: 684664 - RNA, 20 nt, Human
uagauccgcaguaaaacuuu

SEQ ID NO: 684665 - RNA, 22 nt, Human
cuuccugaacaaugccaucaau

SEQ ID NO: 684666 - RNA, 22 nt, Human
gaucgauucagugugccuaccc

SEQ ID NO: 684667 - RNA, 22 nt, Human
gcuggccugggcucaagaccag

SEQ ID NO: 684668 - RNA, 22 nt, Human
acagaacugggggcacagauag

SEQ ID NO: 684669 - RNA, 22 nt, Human
augcuacgaaugagagcauaua

SEQ ID NO: 684670 - RNA, 22 nt, Human
auuauaggcuugagccaccgug

SEQ ID NO: 684671 - RNA, 23 nt, Human
agugcucccaggaccuggggcag

SEQ ID NO: 684672 - RNA, 22 nt, Human
ugugccaagaucaaacuuuucu

SEQ ID NO: 684673 - RNA, 22 nt, Human
ucucuccuguguucugauguuu

SEQ ID NO: 684674 - RNA, 22 nt, Human
gggcacagccuaacuauggaga

SEQ ID NO: 684675 - RNA, 22 nt, Human
ggccacagaacagcuacaggac

SEQ ID NO: 684676 - RNA, 22 nt, Human
agcagguuuaaacucuaaugca

SEQ ID NO: 684677 - RNA, 22 nt, Human
cagugcuggagauggguggaac

SEQ ID NO: 684678 - RNA, 21 nt, Human
cagugguuuauaaacaacaga

SEQ ID NO: 684679 - RNA, 22 nt, Human
cucuggagcauuucaccuacau

SEQ ID NO: 684680 - RNA, 22 nt, Human
aaauacagaguuauggaccuca

SEQ ID NO: 684681 - RNA, 22 nt, Human
agggcuccuaugccccauggac

SEQ ID NO: 684682 - RNA, 22 nt, Human
ugugucaggagauagcaaaggg

SEQ ID NO: 684683 - RNA, 22 nt, Human
uaacuucuggaaaugcaucugc

SEQ ID NO: 684684 - RNA, 22 nt, Human
aauguuuucucugugaacacau

SEQ ID NO: 684685 - RNA, 22 nt, Human
cagacaugauguaagcagaggc

SEQ ID NO: 684686 - RNA, 23 nt, Human
uagagcauugcugaggccucccu

SEQ ID NO: 684687 - RNA, 22 nt, Human
ucuuagcaaauuuucuuugccu

SEQ ID NO: 684688 - RNA, 19 nt, Human
ucauuuacgguuuugauga

SEQ ID NO: 684689 - RNA, 22 nt, Human
ggagcuggagaguacagaguuu

SEQ ID NO: 684690 - RNA, 22 nt, Human
ugggagcuccuggagggcagga

SEQ ID NO: 684691 - RNA, 22 nt, Human
ggccuuggguauagguggguau

SEQ ID NO: 684692 - RNA, 22 nt, Human
aaacugagaccgaaagggguag

SEQ ID NO: 684693 - RNA, 22 nt, Human
uggcaucuuugucccagaagcu

SEQ ID NO: 684694 - RNA, 22 nt, Human
cagcuacacuucuggguguguc

SEQ ID NO: 684695 - RNA, 22 nt, Human
uucugaauucaugagauuuggg

SEQ ID NO: 684696 - RNA, 22 nt, Human
uuauuuacuggauggccuuggg

SEQ ID NO: 684697 - RNA, 22 nt, Human
ugaacacacaccuauguacaaa

SEQ ID NO: 684698 - RNA, 22 nt, Human
gcuguacauuuguguacacuug

SEQ ID NO: 684699 - RNA, 22 nt, Human
aggggcacuucucaggcugugg

SEQ ID NO: 684700 - RNA, 22 nt, Human
cuggcagcugcccgagaugccc

SEQ ID NO: 684701 - RNA, 21 nt, Human
gcagaggcacggcaccaaggg

SEQ ID NO: 684702 - RNA, 22 nt, Human
uguuguagcuugacagcagcca

SEQ ID NO: 684703 - RNA, 22 nt, Human
gaggcagaaguugcagugagca

SEQ ID NO: 684704 - RNA, 22 nt, Human
guaucuuucccaccaaucacaa

SEQ ID NO: 684705 - RNA, 22 nt, Human
uguccuggagugcuugggggaa

SEQ ID NO: 684706 - RNA, 22 nt, Human
gggaccuggucuagcacugagc

SEQ ID NO: 684707 - RNA, 22 nt, Human
acagagcuguacuacuuacuga

SEQ ID NO: 684708 - RNA, 22 nt, Human
gagagagaagugggugucaccu

SEQ ID NO: 684709 - RNA, 22 nt, Human
gcugagccccccugcguggguc

SEQ ID NO: 684710 - RNA, 22 nt, Human
uggcagauuguaggcaguuagg

SEQ ID NO: 684711 - RNA, 22 nt, Human
gcagggaccagggccagaucca

SEQ ID NO: 684712 - RNA, 21 nt, Human
uguuuacucccugcaagcacg

SEQ ID NO: 684713 - RNA, 20 nt, Human
accucugcaucaauccuuug

SEQ ID NO: 684714 - RNA, 22 nt, Human
acacauuuagcaccagguuuau

SEQ ID NO: 684715 - RNA, 22 nt, Human
ggcccagagucugcaauggagu

SEQ ID NO: 684716 - RNA, 16 nt, Human
ggugggaggugaggug

SEQ ID NO: 684717 - RNA, 22 nt, Human
gaggccaggggccuggagauga

SEQ ID NO: 684718 - RNA, 22 nt, Human
uagaggagggcuguucuucagu

SEQ ID NO: 684719 - RNA, 22 nt, Human
gauacuuuguggaauccuggau

SEQ ID NO: 684720 - RNA, 23 nt, Human
agugucugagugcaggcugugca

SEQ ID NO: 684721 - RNA, 22 nt, Human
auguaacacccacuuuuauagc

SEQ ID NO: 684722 - RNA, 22 nt, Human
ugcagagauuuggcucuuaaag

SEQ ID NO: 684723 - RNA, 22 nt, Human
uccauaagcagguucuuccuga

SEQ ID NO: 684724 - RNA, 22 nt, Human
gcuggcuggcgggugcguccuc

SEQ ID NO: 684725 - RNA, 22 nt, Human
acucagagaaacagcagggugu

SEQ ID NO: 684726 - RNA, 22 nt, Human
agcuguggccagaugugagcgg

SEQ ID NO: 684727 - RNA, 22 nt, Human
caggugguugagagcuguaggc

SEQ ID NO: 684728 - RNA, 22 nt, Human
acccaggacuuggcaaccucau

SEQ ID NO: 684729 - RNA, 22 nt, Human
gcaagcagacugggccccugug

SEQ ID NO: 684730 - RNA, 22 nt, Human
cagugcagucaaggaagaacca

SEQ ID NO: 684731 - RNA, 22 nt, Human
auuugauuagcuguguaauuuu

SEQ ID NO: 684732 - RNA, 22 nt, Human
auacaaguggccacuugaauuc

SEQ ID NO: 684733 - RNA, 22 nt, Human
gacucugcuacaggccgagguu

SEQ ID NO: 684734 - RNA, 22 nt, Human
uacugccugggggagacagcug

SEQ ID NO: 684735 - RNA, 22 nt, Human
cuggccugggagcugcuagcgu

SEQ ID NO: 684736 - RNA, 22 nt, Human
uuuccaagcugucuuggcccac

SEQ ID NO: 684737 - RNA, 22 nt, Human
ccauccuggccuugcuguccac

SEQ ID NO: 684738 - RNA, 22 nt, Human
uauuaaagagagaaucaucauc

SEQ ID NO: 684739 - RNA, 22 nt, Human
ucaaugacugguccaagguggc

SEQ ID NO: 684740 - RNA, 22 nt, Human
uccuggcccucugcaaacgcca

SEQ ID NO: 684741 - RNA, 22 nt, Human
gggaucaguuaaggagaguuuu

SEQ ID NO: 684742 - RNA, 22 nt, Human
ugaaggugagcauuugcugauu

SEQ ID NO: 684743 - RNA, 22 nt, Human
ugcagcuggauuuaucuuuucc

SEQ ID NO: 684744 - RNA, 17 nt, Human
ccaggcuccaucacugu

SEQ ID NO: 684745 - RNA, 22 nt, Human
uauuuuacuauuuggcaaaguc

SEQ ID NO: 684746 - RNA, 19 nt, Human
uuacaugacauaugaagga

SEQ ID NO: 684747 - RNA, 22 nt, Human
aggcaguuguugcugagcagcu

SEQ ID NO: 684748 - RNA, 20 nt, Human
uccagggcaacuagagugug

SEQ ID NO: 684749 - RNA, 22 nt, Human
acuuagaauuaaauauuuuugg

SEQ ID NO: 684750 - RNA, 22 nt, Human
uuacaguagauuuugaaugugg

SEQ ID NO: 684751 - RNA, 22 nt, Human
accaggcccgcugcuauggugg

SEQ ID NO: 684752 - RNA, 22 nt, Human
aagucaaagcuuucagaggaaa

SEQ ID NO: 684753 - RNA, 21 nt, Human
uccuucaguucugcacuuucu

SEQ ID NO: 684754 - RNA, 22 nt, Human
ugggagagcacugcagccccgg

SEQ ID NO: 684755 - RNA, 22 nt, Human
uacuuugaauuaaauauuucag

SEQ ID NO: 684756 - RNA, 22 nt, Human
uggagguacauaaugagagggu

SEQ ID NO: 684757 - RNA, 22 nt, Human
auugucuucugucuuaggugau

SEQ ID NO: 684758 - RNA, 22 nt, Human
acauucuuccagcuggcuguug

SEQ ID NO: 684759 - RNA, 22 nt, Human
gaugucuuucuaauacuggcuu

SEQ ID NO: 684760 - RNA, 22 nt, Human
ugaggaagaacaagaauuuaga

SEQ ID NO: 684761 - RNA, 22 nt, Human
ggcuuuugaauuccaaggcauu

SEQ ID NO: 684762 - RNA, 22 nt, Human
uaacguuugauaacuucuguuc

SEQ ID NO: 684763 - RNA, 23 nt, Human
auggucagaauuuuccagcugag

SEQ ID NO: 684764 - RNA, 22 nt, Human
cacacauuucagaugcuacaau

SEQ ID NO: 684765 - RNA, 22 nt, Human
acaccauacucauguugguucc

SEQ ID NO: 684766 - RNA, 22 nt, Human
uagugauuaaaggcagaauguu

SEQ ID NO: 684767 - RNA, 22 nt, Human
gucccuuggcucacaaacagcu

SEQ ID NO: 684768 - RNA, 22 nt, Human
uuugcauuccugccugcauuca

SEQ ID NO: 684769 - RNA, 22 nt, Human
acuuuacuccccaacauaaaug

SEQ ID NO: 684770 - RNA, 22 nt, Human
agagugagggggcacugagacg

SEQ ID NO: 684771 - RNA, 22 nt, Human
gaguauauaauuaauuggucug

SEQ ID NO: 684772 - RNA, 22 nt, Human
cccugcagccggccagcucauu

SEQ ID NO: 684773 - RNA, 22 nt, Human
aucugggcauggaggaaagaga

SEQ ID NO: 684774 - RNA, 22 nt, Human
gugugcaggccacaggccaggg

SEQ ID NO: 684775 - RNA, 22 nt, Human
aagguauuauugucuauguacu

SEQ ID NO: 684776 - RNA, 20 nt, Human
aagcuggguaggagaggagc

SEQ ID NO: 684777 - RNA, 22 nt, Human
ggaggguccccagcagcaugaa

SEQ ID NO: 684778 - RNA, 22 nt, Human
cucagccaugucaugccuaccu

SEQ ID NO: 684779 - RNA, 22 nt, Human
gcaggcucuucuuucugcccag

SEQ ID NO: 684780 - RNA, 22 nt, Human
ggugggagccaacacccuucug

SEQ ID NO: 684781 - RNA, 20 nt, Human
gguagcagcugcugucaucc

SEQ ID NO: 684782 - RNA, 22 nt, Human
ucugaaguucuuaaauuaguuu

SEQ ID NO: 684783 - RNA, 22 nt, Human
cacuguggcaaccugugcccaa

SEQ ID NO: 684784 - RNA, 22 nt, Human
uuuugcuuaaucuagauuuugc

SEQ ID NO: 684785 - RNA, 22 nt, Human
gugaacucagucucucuugcua

SEQ ID NO: 684786 - RNA, 18 nt, Human
ggcagccuggacaugcuc

SEQ ID NO: 684787 - RNA, 22 nt, Human
acaaggcaauuccuggugaauu

SEQ ID NO: 684788 - RNA, 22 nt, Human
aagggcuguaagccaaguaaag

SEQ ID NO: 684789 - RNA, 22 nt, Human
auguuucaugacugagcaaaau

SEQ ID NO: 684790 - RNA, 22 nt, Human
uucauacuguuuaaguucuguu

SEQ ID NO: 684791 - RNA, 22 nt, Human
gcauacaaagguuuacaacuga

SEQ ID NO: 684792 - RNA, 22 nt, Human
gaaauagaagcugccaauuucu

SEQ ID NO: 684793 - RNA, 22 nt, Human
cuggcccucagacucaugggca

SEQ ID NO: 684794 - RNA, 23 nt, Human
ugggagcucaagggaggcugccc

SEQ ID NO: 684795 - RNA, 22 nt, Human
uccaucagauucccuccugaga

SEQ ID NO: 684796 - RNA, 22 nt, Human
agggucaggagacacuggcaac

SEQ ID NO: 684797 - RNA, 22 nt, Human
ccucuguccuggggaguggagc

SEQ ID NO: 684798 - RNA, 22 nt, Human
aaacucaugccauuaauccuuu

SEQ ID NO: 684799 - RNA, 22 nt, Human
gaaggcacugaacuccuucugg

SEQ ID NO: 684800 - RNA, 22 nt, Human
cagggcagugaagaacacacgu

SEQ ID NO: 684801 - RNA, 19 nt, Human
ccuugccugucccugcagc

SEQ ID NO: 684802 - RNA, 22 nt, Human
acagaacugcagacagugccaa

SEQ ID NO: 684803 - RNA, 17 nt, Human
uuuucucucuuggauuc

SEQ ID NO: 684804 - RNA, 22 nt, Human
uuuccaagauaauacacagaaa

SEQ ID NO: 684805 - RNA, 22 nt, Human
acagaggccucguagguacaac

SEQ ID NO: 684806 - RNA, 22 nt, Human
gcaggauugggcagagggugaa

SEQ ID NO: 684807 - RNA, 22 nt, Human
cuggguauaggaaacaguuaag

SEQ ID NO: 684808 - RNA, 22 nt, Human
cugguccaguggaugcugaggg

SEQ ID NO: 684809 - RNA, 22 nt, Human
gugugcacagagcuccaguguu

SEQ ID NO: 684810 - RNA, 22 nt, Human
cagcuuuggcccagucgggagg

SEQ ID NO: 684811 - RNA, 22 nt, Human
cagcuccuaugaguaugauucc

SEQ ID NO: 684812 - RNA, 22 nt, Human
gcucgguggccagccugaggcc

SEQ ID NO: 684813 - RNA, 22 nt, Human
cugcaguacaagaagcaucucu

SEQ ID NO: 684814 - RNA, 22 nt, Human
uggguagggacuuagcuggcug

SEQ ID NO: 684815 - RNA, 22 nt, Human
acugagguuguaguaggaauuc

SEQ ID NO: 684816 - RNA, 17 nt, Human
cucuuuauaaagaguua

SEQ ID NO: 684817 - RNA, 22 nt, Human
cuuauugaaagccccugugccu

SEQ ID NO: 684818 - RNA, 22 nt, Human
cauugaaagagauaaagccuuu

SEQ ID NO: 684819 - RNA, 22 nt, Human
aagucccugugggguggaggcu

SEQ ID NO: 684820 - RNA, 23 nt, Human
cugccugcuggggagacagaucu

SEQ ID NO: 684821 - RNA, 22 nt, Human
gggggacuaacuggauccugga

SEQ ID NO: 684822 - RNA, 22 nt, Human
agauggggcugaaaguuccaau

SEQ ID NO: 684823 - RNA, 22 nt, Human
uggccucuuaggacauccucua

SEQ ID NO: 684824 - RNA, 22 nt, Human
uggccccugaggagcgucagcc

SEQ ID NO: 684825 - RNA, 22 nt, Human
uguggcagauuuuauaaauugc

SEQ ID NO: 684826 - RNA, 23 nt, Human
aggcccugccugucccucuuuuu

SEQ ID NO: 684827 - RNA, 22 nt, Human
caguuuaggagagacgcguucu

SEQ ID NO: 684828 - RNA, 22 nt, Human
gggagccagcagggcauggagc

SEQ ID NO: 684829 - RNA, 22 nt, Human
aaaagaguguuucaacuuuggc

SEQ ID NO: 684830 - RNA, 21 nt, Human
ucuguggcagcaugaugaggu

SEQ ID NO: 684831 - RNA, 22 nt, Human
auggaguucugccagcgcugcu

SEQ ID NO: 684832 - RNA, 22 nt, Human
uggcagagaauaaaucuugacu

SEQ ID NO: 684833 - RNA, 22 nt, Human
ugucucagaauggcucauaaua

SEQ ID NO: 684834 - RNA, 17 nt, Human
gacagcugggcgcacgc

SEQ ID NO: 684835 - RNA, 22 nt, Human
cugcugugcacccaggaaggcu

SEQ ID NO: 684836 - RNA, 22 nt, Human
gggcucagucggcaagccccuu

SEQ ID NO: 684837 - RNA, 22 nt, Human
uuccagagugacugugccacuu

SEQ ID NO: 684838 - RNA, 22 nt, Human
aggaaguuaguaaauuaugugc

SEQ ID NO: 684839 - RNA, 22 nt, Human
gacuggccuggagaugcagcug

SEQ ID NO: 684840 - RNA, 22 nt, Human
uuugcuuguucaagauuucugu

SEQ ID NO: 684841 - RNA, 22 nt, Human
ggcuagggacuccuccucaggg

SEQ ID NO: 684842 - RNA, 22 nt, Human
aaagaaucguguguaguuugaa

SEQ ID NO: 684843 - RNA, 22 nt, Human
ggacagcguggcugguggaggg

SEQ ID NO: 684844 - RNA, 22 nt, Human
cauuuaaugccuuugccaucca

SEQ ID NO: 684845 - RNA, 18 nt, Human
acucugcggaggccccag

SEQ ID NO: 684846 - RNA, 22 nt, Human
gaggcucagggaaacagcgcag

SEQ ID NO: 684847 - RNA, 22 nt, Human
uuguuaaaggcaaaacaagcac

SEQ ID NO: 684848 - RNA, 22 nt, Human
ugcaggaguuaagugcucuccu

SEQ ID NO: 684849 - RNA, 22 nt, Human
uggccuguggcuuaaggucugu

SEQ ID NO: 684850 - RNA, 22 nt, Human
uggcaggcaaguucagcuccac

SEQ ID NO: 684851 - RNA, 22 nt, Human
cagcucucacacccuccuccca

SEQ ID NO: 684852 - RNA, 22 nt, Human
cauuuauucaugaucuguagcu

SEQ ID NO: 684853 - RNA, 22 nt, Human
ucaugguauauuucacucuuua

SEQ ID NO: 684854 - RNA, 22 nt, Human
gagucacauacuauguaauaga

SEQ ID NO: 684855 - RNA, 22 nt, Human
auuacaaaagaagggagaaggu

SEQ ID NO: 684856 - RNA, 22 nt, Human
gcuccaggugaauccucucacc

SEQ ID NO: 684857 - RNA, 22 nt, Human
agggaucagcagaggguguggu

SEQ ID NO: 684858 - RNA, 22 nt, Human
cuauuuauguccaaguguuuua

SEQ ID NO: 684859 - RNA, 22 nt, Human
acauuugucuggcuagaaaguu

SEQ ID NO: 684860 - RNA, 22 nt, Human
ucucccagaggaucccagugga

SEQ ID NO: 684861 - RNA, 22 nt, Human
cuuuaugaaaaccagauugggg

SEQ ID NO: 684862 - RNA, 22 nt, Human
aggaagugaaagggaaggaguu

SEQ ID NO: 684863 - RNA, 22 nt, Human
guggccucuguuggcuccuagg

SEQ ID NO: 684864 - RNA, 22 nt, Human
acucacuagagguagaucccug

SEQ ID NO: 684865 - RNA, 22 nt, Human
cugcuuuaagaaugaguguaag

SEQ ID NO: 684866 - RNA, 20 nt, Human
ucuggggaugaggucuagga

SEQ ID NO: 684867 - RNA, 21 nt, Human
ugcagagauaucugaagcaga

SEQ ID NO: 684868 - RNA, 22 nt, Human
ucugggaggggcugccauugcu

SEQ ID NO: 684869 - RNA, 23 nt, Human
ucuggaauccucccccuugguuc

SEQ ID NO: 684870 - RNA, 22 nt, Human
uaagaacagugucugucucaca

SEQ ID NO: 684871 - RNA, 22 nt, Human
guaacauuauucaugagauaca

SEQ ID NO: 684872 - RNA, 22 nt, Human
aauuuuacauaggggauauggg

SEQ ID NO: 684873 - RNA, 22 nt, Human
uagaaaucagguuuuuagaaag

SEQ ID NO: 684874 - RNA, 22 nt, Human
agcaacauugagacugcaguug

SEQ ID NO: 684875 - RNA, 22 nt, Human
uuaacauuuaguguaccccugu

SEQ ID NO: 684876 - RNA, 22 nt, Human
cugcagcagaauaaucugcuca

SEQ ID NO: 684877 - RNA, 22 nt, Human
uuagaaaaaacgucuucuagug

SEQ ID NO: 684878 - RNA, 22 nt, Human
ucucagaacuuuauauguauca

SEQ ID NO: 684879 - RNA, 21 nt, Human
agugacagaggaaggugcaua

SEQ ID NO: 684880 - RNA, 22 nt, Human
cuugcucacaguaccuggcuug

SEQ ID NO: 684881 - RNA, 22 nt, Human
auuauggauggaggcauuaguc

SEQ ID NO: 684882 - RNA, 22 nt, Human
gucugaggcgaggccugagaac

SEQ ID NO: 684883 - RNA, 22 nt, Human
uuccagcccgcgacuuguucag

SEQ ID NO: 684884 - RNA, 22 nt, Human
ucucaggcuccugacauauaug

SEQ ID NO: 684885 - RNA, 22 nt, Human
ucagcccagggacagaggcccc

SEQ ID NO: 684886 - RNA, 19 nt, Human
ucauuuguuaguagaaguu

SEQ ID NO: 684887 - RNA, 22 nt, Human
agauuucugucaccuucuaugc

SEQ ID NO: 684888 - RNA, 22 nt, Human
auguaaggcugccuaugacacu

SEQ ID NO: 684889 - RNA, 23 nt, Human
uuuguacauugaggaggcagaau

SEQ ID NO: 684890 - RNA, 22 nt, Human
ucugagaggauuccugucccga

SEQ ID NO: 684891 - RNA, 22 nt, Human
ggugaggguaaauauaggcaaa

SEQ ID NO: 684892 - RNA, 22 nt, Human
aauaagauugacacaaguaccu

SEQ ID NO: 684893 - RNA, 22 nt, Human
cuuucacagcugugcuuaugau

SEQ ID NO: 684894 - RNA, 19 nt, Human
ccugccugagcugucccuc

SEQ ID NO: 684895 - RNA, 22 nt, Human
cucucugucuuggcauuugguc

SEQ ID NO: 684896 - RNA, 22 nt, Human
caggcacugcacuaccacuuuu

SEQ ID NO: 684897 - RNA, 22 nt, Human
cugugagugacccuggucagca

SEQ ID NO: 684898 - RNA, 22 nt, Human
agaaauguacgauguuaugcag

SEQ ID NO: 684899 - RNA, 22 nt, Human
uuaaagcugcugaauccuauuu

SEQ ID NO: 684900 - RNA, 22 nt, Human
gacccuggggaccaucuagccc

SEQ ID NO: 684901 - RNA, 20 nt, Human
uucaaaguguaugauaugca

SEQ ID NO: 684902 - RNA, 22 nt, Human
aggugggcuuggugccaacaug

SEQ ID NO: 684903 - RNA, 22 nt, Human
caaccucauagaaagaaaaugu

SEQ ID NO: 684904 - RNA, 22 nt, Human
auaaccugagauugagcugccu

SEQ ID NO: 684905 - RNA, 22 nt, Human
auauuguugacuauaagaguaa

SEQ ID NO: 684906 - RNA, 22 nt, Human
cuggucccugcagugugcuggg

SEQ ID NO: 684907 - RNA, 19 nt, Human
ugcuauuugaagaagugua

SEQ ID NO: 684908 - RNA, 22 nt, Human
uuagucaauagugaauauagag

SEQ ID NO: 684909 - RNA, 22 nt, Human
cugccugcaggacaccucgcua

SEQ ID NO: 684910 - RNA, 22 nt, Human
gcagggcuccacuguggccaag

SEQ ID NO: 684911 - RNA, 22 nt, Human
ucuauaaauuaugcagucucag

SEQ ID NO: 684912 - RNA, 22 nt, Human
gcucucuggaggccauggacag

SEQ ID NO: 684913 - RNA, 22 nt, Human
gcugggcuucucaaugcugccu

SEQ ID NO: 684914 - RNA, 22 nt, Human
agggcagcugugagccacugug

SEQ ID NO: 684915 - RNA, 22 nt, Human
ucagaacauuaaggauuugaag

SEQ ID NO: 684916 - RNA, 22 nt, Human
uaacacauuuuccucauacgga

SEQ ID NO: 684917 - RNA, 22 nt, Human
augugugcaaugcuauuuuggc

SEQ ID NO: 684918 - RNA, 22 nt, Human
ucucccucucagauuuauucac

SEQ ID NO: 684919 - RNA, 22 nt, Human
auggcucauuuaucuugcagcc

SEQ ID NO: 684920 - RNA, 22 nt, Human
auacaaagcuaaauaugguuuc

SEQ ID NO: 684921 - RNA, 22 nt, Human
cuggaacaaguggccuugcaag

SEQ ID NO: 684922 - RNA, 22 nt, Human
ugugugcaggcacugugccaga

SEQ ID NO: 684923 - RNA, 17 nt, Human
uccagagaggcuucccu

SEQ ID NO: 684924 - RNA, 22 nt, Human
ucuguuccuggucucuggagcu

SEQ ID NO: 684925 - RNA, 22 nt, Human
ugugucuguccucgguugaugc

SEQ ID NO: 684926 - RNA, 22 nt, Human
caggaaagggaugggcugccac

SEQ ID NO: 684927 - RNA, 22 nt, Human
ugauggaaauauguaaucuggu

SEQ ID NO: 684928 - RNA, 22 nt, Human
aaaauaaguugguccuguccuu

SEQ ID NO: 684929 - RNA, 22 nt, Human
gcacuugagccaaugcuaguag

SEQ ID NO: 684930 - RNA, 22 nt, Human
agugaaaugauaguguaaauac

SEQ ID NO: 684931 - RNA, 22 nt, Human
aaguucccgaggaccacaguug

SEQ ID NO: 684932 - RNA, 22 nt, Human
gaacuaaauuugacagacaaca

SEQ ID NO: 684933 - RNA, 22 nt, Human
cugcagcuuucgcuccaucagc

SEQ ID NO: 684934 - RNA, 23 nt, Human
ugcaggguguuccugccuuugcu

SEQ ID NO: 684935 - RNA, 22 nt, Human
cugagcugacaucuuccucuuu

SEQ ID NO: 684936 - RNA, 22 nt, Human
caggugaaucacuugaguccag

SEQ ID NO: 684937 - RNA, 22 nt, Human
gccacagcagggcccucucagg

SEQ ID NO: 684938 - RNA, 22 nt, Human
aggaagugcuaagagaacauca

SEQ ID NO: 684939 - RNA, 18 nt, Human
uguuccaaggaaggaauc

SEQ ID NO: 684940 - RNA, 22 nt, Human
gcuuugaagacuuuuccagggu

SEQ ID NO: 684941 - RNA, 22 nt, Human
acagggcuccuagguggugugc

SEQ ID NO: 684942 - RNA, 22 nt, Human
gucugagcacccuggccuguca

SEQ ID NO: 684943 - RNA, 22 nt, Human
ucauugcaagcucauuuaucug

SEQ ID NO: 684944 - RNA, 22 nt, Human
aaguauuauuuaacaaauuugu

SEQ ID NO: 684945 - RNA, 22 nt, Human
ccuugcuguuagccuacauuau

SEQ ID NO: 684946 - RNA, 22 nt, Human
uacacagauaugugaucaauca

SEQ ID NO: 684947 - RNA, 22 nt, Human
aauguguaugaggaagagagaa

SEQ ID NO: 684948 - RNA, 22 nt, Human
ggagcagagcauuucacagccu

SEQ ID NO: 684949 - RNA, 22 nt, Human
ugggagagaauaaucaauaggu

SEQ ID NO: 684950 - RNA, 22 nt, Human
uccaagaguauaguuuauuggc

SEQ ID NO: 684951 - RNA, 22 nt, Human
cucaggacggccgggggagccu

SEQ ID NO: 684952 - RNA, 22 nt, Human
aagaaugugcuaaugaaaacuu

SEQ ID NO: 684953 - RNA, 22 nt, Human
ccauucaauaccuuagagaaaa

SEQ ID NO: 684954 - RNA, 22 nt, Human
aggcuccagcagccagaggaag

SEQ ID NO: 684955 - RNA, 22 nt, Human
accuacauggcuuuaaguaagu

SEQ ID NO: 684956 - RNA, 22 nt, Human
uuccuuugggaaaucacuaagg

SEQ ID NO: 684957 - RNA, 22 nt, Human
gugcaaaaguaauugcuguuuu

SEQ ID NO: 684958 - RNA, 22 nt, Human
uuauuauuccccaagucauuau

SEQ ID NO: 684959 - RNA, 22 nt, Human
ucugggugucacuccugccugc

SEQ ID NO: 684960 - RNA, 22 nt, Human
caaaugcauagaaagaugaaac

SEQ ID NO: 684961 - RNA, 22 nt, Human
ucuaagcagaacugaagcucug

SEQ ID NO: 684962 - RNA, 22 nt, Human
ggccuuccagggaagacagggc

SEQ ID NO: 684963 - RNA, 22 nt, Human
cauuugugcuuuuauaaaauag

SEQ ID NO: 684964 - RNA, 22 nt, Human
aaaccacacuuagcaguuucgu

SEQ ID NO: 684965 - RNA, 22 nt, Human
acacaggggcucggcugggugc

SEQ ID NO: 684966 - RNA, 23 nt, Human
auuugaaacuuucuuguuuccag

SEQ ID NO: 684967 - RNA, 23 nt, Human
agggaaaguaguaauggccuuug

SEQ ID NO: 684968 - RNA, 22 nt, Human
gccuggcagggcccggacggca

SEQ ID NO: 684969 - RNA, 22 nt, Human
caguuucuguggucucuuuuca

SEQ ID NO: 684970 - RNA, 22 nt, Human
gggaagccaugcucagagguac

SEQ ID NO: 684971 - RNA, 22 nt, Human
cacaugggcguaauguccaugg

SEQ ID NO: 684972 - RNA, 22 nt, Human
aaugacagagcacugaacuugg

SEQ ID NO: 684973 - RNA, 22 nt, Human
ugcaggcuguaaucugaggcua

SEQ ID NO: 684974 - RNA, 22 nt, Human
agagucauaguuuaacuuuugu

SEQ ID NO: 684975 - RNA, 22 nt, Human
auguggcugaucgcagagcucu

SEQ ID NO: 684976 - RNA, 22 nt, Human
cuggagcugguauagggacaaa

SEQ ID NO: 684977 - RNA, 22 nt, Human
uccagauggauuuaagaccuaa

SEQ ID NO: 684978 - RNA, 21 nt, Human
uccagcugcacaagcaugggg

SEQ ID NO: 684979 - RNA, 22 nt, Human
uucauuuguccaaauacuaugu

SEQ ID NO: 684980 - RNA, 22 nt, Human
ugacaccuugcuaaauggcacc

SEQ ID NO: 684981 - RNA, 22 nt, Human
ucagugcacccaauucucucca

SEQ ID NO: 684982 - RNA, 20 nt, Human
ggcagggagggauacugagg

SEQ ID NO: 684983 - RNA, 22 nt, Human
cucucuaacgacauucccauuc

SEQ ID NO: 684984 - RNA, 22 nt, Human
auuggcaaugucccggcugcug

SEQ ID NO: 684985 - RNA, 22 nt, Human
cagaugagaguggccaggguuc

SEQ ID NO: 684986 - RNA, 22 nt, Human
cagcaaucgggugauaugcaau

SEQ ID NO: 684987 - RNA, 22 nt, Human
gagucagaaaguagugugccua

SEQ ID NO: 684988 - RNA, 22 nt, Human
ugggccucuguuuccucaucug

SEQ ID NO: 684989 - RNA, 22 nt, Human
acuuccuuuugggaaacuguuu

SEQ ID NO: 684990 - RNA, 22 nt, Human
ggucugaaucacugugccuauc

SEQ ID NO: 684991 - RNA, 19 nt, Human
cugugcaggccgggcugag

SEQ ID NO: 684992 - RNA, 22 nt, Human
ucacaucucuguuuucuaaauc

SEQ ID NO: 684993 - RNA, 18 nt, Human
caaagcucacguuccauc

SEQ ID NO: 684994 - RNA, 22 nt, Human
aggccagaaaaagacagcucca

SEQ ID NO: 684995 - RNA, 22 nt, Human
gaguuuagguucaugaacgagu

SEQ ID NO: 684996 - RNA, 22 nt, Human
uggccucaccacuagcugggug

SEQ ID NO: 684997 - RNA, 22 nt, Human
ugcuuuauuuuaaauaugccau

SEQ ID NO: 684998 - RNA, 21 nt, Human
augacagaugcugcagaucgu

SEQ ID NO: 684999 - RNA, 22 nt, Human
acuaguauuagacuaaaaguca

SEQ ID NO: 685000 - RNA, 22 nt, Human
uccucagucacgguagcacauu

SEQ ID NO: 685001 - RNA, 22 nt, Human
cggcuucaguaauuccaugucc

SEQ ID NO: 685002 - RNA, 22 nt, Human
acuucacacagcaaauuuaucu

SEQ ID NO: 685003 - RNA, 22 nt, Human
cuggcugcauuggcaagucaau

SEQ ID NO: 685004 - RNA, 19 nt, Human
cccacaggaggacauaugg

SEQ ID NO: 685005 - RNA, 18 nt, Human
acuucccagaugagggga

SEQ ID NO: 685006 - RNA, 22 nt, Human
aaagguuuuauucugagcucug

SEQ ID NO: 685007 - RNA, 22 nt, Human
agcucucaagauaagaaagaac

SEQ ID NO: 685008 - RNA, 22 nt, Human
guucuucagcccucagguccua

SEQ ID NO: 685009 - RNA, 22 nt, Human
ccucuugccaaucagcuacaga

SEQ ID NO: 685010 - RNA, 22 nt, Human
agcagcagugugguuuggggaa

SEQ ID NO: 685011 - RNA, 22 nt, Human
cuguguguccucggacgaguuu

SEQ ID NO: 685012 - RNA, 22 nt, Human
gaagccacagagauuguggggg

SEQ ID NO: 685013 - RNA, 22 nt, Human
aaguguuucaauaauuuggacc

SEQ ID NO: 685014 - RNA, 22 nt, Human
gcugcccaguucugcugcugcc

SEQ ID NO: 685015 - RNA, 22 nt, Human
ugauuuaggaaacagcuacagg

SEQ ID NO: 685016 - RNA, 22 nt, Human
ggcuuccagcugggccuuggag

SEQ ID NO: 685017 - RNA, 22 nt, Human
ggcuuugcuuaacgugcuucua

SEQ ID NO: 685018 - RNA, 22 nt, Human
acaugaaaugcagccuguaacc

SEQ ID NO: 685019 - RNA, 22 nt, Human
ucugacagguugggauauggaa

SEQ ID NO: 685020 - RNA, 22 nt, Human
ccugcagcuguaggagaaggcg

SEQ ID NO: 685021 - RNA, 22 nt, Human
aaaaguauaggguuuggaguca

SEQ ID NO: 685022 - RNA, 22 nt, Human
aucccugagguuccuccugagc

SEQ ID NO: 685023 - RNA, 19 nt, Human
cugcuucaggcgccuugcc

SEQ ID NO: 685024 - RNA, 22 nt, Human
auggcccuguuuaugguaaggc

SEQ ID NO: 685025 - RNA, 22 nt, Human
caguguuuagcacagugcuugg

SEQ ID NO: 685026 - RNA, 22 nt, Human
ucauaaagcauuucagcuuuug

SEQ ID NO: 685027 - RNA, 19 nt, Human
gcuuuuauugcucaggugc

SEQ ID NO: 685028 - RNA, 22 nt, Human
cuucaguguucccaucuguaaa

SEQ ID NO: 685029 - RNA, 19 nt, Human
cuucuucuuggcagccaag

SEQ ID NO: 685030 - RNA, 19 nt, Human
ggcugggcccuguuucucc

SEQ ID NO: 685031 - RNA, 22 nt, Human
uguuuucaugguuaugugucua

SEQ ID NO: 685032 - RNA, 22 nt, Human
cucauaaagugagaauaugacc

SEQ ID NO: 685033 - RNA, 23 nt, Human
auauuuccagguuagugagguaa

SEQ ID NO: 685034 - RNA, 22 nt, Human
ugcagggccuucuagaccaugg

SEQ ID NO: 685035 - RNA, 23 nt, Human
uccuccagaggcccuccuuggcc

SEQ ID NO: 685036 - RNA, 22 nt, Human
ucuagaaacagguuucuagaaa

SEQ ID NO: 685037 - RNA, 22 nt, Human
acagagagcugugauugaguua

SEQ ID NO: 685038 - RNA, 22 nt, Human
ugaaccagagucuccagugguu

SEQ ID NO: 685039 - RNA, 22 nt, Human
cagaaauauuuauugagugaca

SEQ ID NO: 685040 - RNA, 22 nt, Human
uggcuucagagucugaguucuu

SEQ ID NO: 685041 - RNA, 22 nt, Human
aacccagccguguagcugccgc

SEQ ID NO: 685042 - RNA, 22 nt, Human
ugacaucugggcccucagcuaa

SEQ ID NO: 685043 - RNA, 21 nt, Human
cugggcuggcaggcauuaccu

SEQ ID NO: 685044 - RNA, 22 nt, Human
cuggccaguuguccuggcuugg

SEQ ID NO: 685045 - RNA, 22 nt, Human
gcuggcagaagagcugguucaa

SEQ ID NO: 685046 - RNA, 22 nt, Human
aaugaccagcgccugcagaggg

SEQ ID NO: 685047 - RNA, 21 nt, Human
cucagaccacagcucacaccc

SEQ ID NO: 685048 - RNA, 22 nt, Human
gcuuccugauauucauacuguu

SEQ ID NO: 685049 - RNA, 22 nt, Human
gucaccuugaacaggcuacuca

SEQ ID NO: 685050 - RNA, 22 nt, Human
agauauacacccauaucacaua

SEQ ID NO: 685051 - RNA, 22 nt, Human
acacagcuagugaguggcagag

SEQ ID NO: 685052 - RNA, 20 nt, Human
uucucuagccuuccccuggg

SEQ ID NO: 685053 - RNA, 22 nt, Human
auuguuaaaguaauaaccaugg

SEQ ID NO: 685054 - RNA, 22 nt, Human
uauugcugaugcugaagggaag

SEQ ID NO: 685055 - RNA, 22 nt, Human
agagaauacaaagaagauaugu

SEQ ID NO: 685056 - RNA, 22 nt, Human
uucaaaucccugcuccacuauu

SEQ ID NO: 685057 - RNA, 22 nt, Human
uuuauuuggcauccagggagaa

SEQ ID NO: 685058 - RNA, 22 nt, Human
ucuaccuauuucuucuauuggu

SEQ ID NO: 685059 - RNA, 22 nt, Human
gugagucuguggaccgggcacu

SEQ ID NO: 685060 - RNA, 22 nt, Human
cagaggauuauuucagaaucua

SEQ ID NO: 685061 - RNA, 22 nt, Human
ugcauacuuuuaaugacuguuu

SEQ ID NO: 685062 - RNA, 22 nt, Human
uacagcuuuugcagcuguuuug

SEQ ID NO: 685063 - RNA, 22 nt, Human
caugaaaucugaguauguuucc

SEQ ID NO: 685064 - RNA, 22 nt, Human
gccagguggcugagugacugag

SEQ ID NO: 685065 - RNA, 22 nt, Human
cugcaggacugaaagaugaggu

SEQ ID NO: 685066 - RNA, 22 nt, Human
uggcccaaagcagcccagcagg

SEQ ID NO: 685067 - RNA, 22 nt, Human
ggcugugggugugacaggccuc

SEQ ID NO: 685068 - RNA, 22 nt, Human
ugaggcccagccgcccugagag

SEQ ID NO: 685069 - RNA, 23 nt, Human
uccucccaaauuucagccucauu

SEQ ID NO: 685070 - RNA, 22 nt, Human
ggcacuuggaucuuaguugggg

SEQ ID NO: 685071 - RNA, 22 nt, Human
aaagacuugggagcaguaugcu

SEQ ID NO: 685072 - RNA, 22 nt, Human
ggcucccucaccaccaucacau

SEQ ID NO: 685073 - RNA, 22 nt, Human
guacauuucauuuaaaugaugu

SEQ ID NO: 685074 - RNA, 22 nt, Human
gauggauacuauaggaggcaca

SEQ ID NO: 685075 - RNA, 22 nt, Human
gccaggcagcugggagggugcc

SEQ ID NO: 685076 - RNA, 22 nt, Human
ggcucucuggaggagcucaccc

SEQ ID NO: 685077 - RNA, 22 nt, Human
uauguacaguccuuaacuuaaa

SEQ ID NO: 685078 - RNA, 22 nt, Human
uccuccagugucuggggccuug

SEQ ID NO: 685079 - RNA, 22 nt, Human
aaagguuugaggugggaagagg

SEQ ID NO: 685080 - RNA, 22 nt, Human
gcuucucucaggagcaucagcc

SEQ ID NO: 685081 - RNA, 22 nt, Human
cacuugaaauauuaggggugau

SEQ ID NO: 685082 - RNA, 22 nt, Human
caacuuuucugugaauuuaagu

SEQ ID NO: 685083 - RNA, 22 nt, Human
uuuagggaaauugaggguuaag

SEQ ID NO: 685084 - RNA, 22 nt, Human
ugagaucauuuauuuaccuuuc

SEQ ID NO: 685085 - RNA, 21 nt, Human
uugcuuauggcacugcuuugc

SEQ ID NO: 685086 - RNA, 22 nt, Human
uucagaauauccguuuaaguuu

SEQ ID NO: 685087 - RNA, 22 nt, Human
agcagcucagaggcaccagggc

SEQ ID NO: 685088 - RNA, 22 nt, Human
aacauguaucgcuuuuuaauau

SEQ ID NO: 685089 - RNA, 20 nt, Human
agauuauuccuaagauuucu

SEQ ID NO: 685090 - RNA, 22 nt, Human
ucuauccugcuuagaaguaugu

SEQ ID NO: 685091 - RNA, 23 nt, Human
ugcagggcaaguuagagacccca

SEQ ID NO: 685092 - RNA, 22 nt, Human
acaucuuugcucuuauagagcu

SEQ ID NO: 685093 - RNA, 20 nt, Human
uccuggccucccuggggcuc

SEQ ID NO: 685094 - RNA, 22 nt, Human
uuuccagauuaagauaccacuu

SEQ ID NO: 685095 - RNA, 22 nt, Human
uucagagcuggugucuacagcu

SEQ ID NO: 685096 - RNA, 22 nt, Human
cgugagcaaaauggacacuccc

SEQ ID NO: 685097 - RNA, 22 nt, Human
uuacagaagagaaagaauucag

SEQ ID NO: 685098 - RNA, 22 nt, Human
auguccugguccuccaccaugg

SEQ ID NO: 685099 - RNA, 23 nt, Human
agaauuucuaacucuagcucugu

SEQ ID NO: 685100 - RNA, 22 nt, Human
gcuucagauuccucuucuguaa

SEQ ID NO: 685101 - RNA, 22 nt, Human
aggacagugguguucuggagug

SEQ ID NO: 685102 - RNA, 22 nt, Human
cacacaugguagcagguacaag

SEQ ID NO: 685103 - RNA, 22 nt, Human
uacacauuacauaauacuaucu

SEQ ID NO: 685104 - RNA, 22 nt, Human
acucagagauauggugguugau

SEQ ID NO: 685105 - RNA, 22 nt, Human
aagccacucacaauaacugucc

SEQ ID NO: 685106 - RNA, 22 nt, Human
aagcugaugucccaguuugaag

SEQ ID NO: 685107 - RNA, 22 nt, Human
guccucuccaggaggcucugau

SEQ ID NO: 685108 - RNA, 22 nt, Human
uacacagaagccagaaggccug

SEQ ID NO: 685109 - RNA, 22 nt, Human
uucccuggggaaggugaccuuu

SEQ ID NO: 685110 - RNA, 21 nt, Human
ucauuguugcaugguaggggg

SEQ ID NO: 685111 - RNA, 22 nt, Human
agagcugauuugauuacagugc

SEQ ID NO: 685112 - RNA, 21 nt, Human
ggccagcagcguccacugugg

SEQ ID NO: 685113 - RNA, 22 nt, Human
uaccugagguaaggaugaugag

SEQ ID NO: 685114 - RNA, 22 nt, Human
uuuuagaaguucacuuggguuu

SEQ ID NO: 685115 - RNA, 16 nt, Human
gcuccugggcccucga

SEQ ID NO: 685116 - RNA, 22 nt, Human
ugcagugggccggaggccaggg

SEQ ID NO: 685117 - RNA, 19 nt, Human
cucagagaggggcagugcc

SEQ ID NO: 685118 - RNA, 21 nt, Human
ucucuggaauuagaccauguu

SEQ ID NO: 685119 - RNA, 22 nt, Human
aguccuggccccaaggaaggau

SEQ ID NO: 685120 - RNA, 17 nt, Human
aauugucagcaguagcu

SEQ ID NO: 685121 - RNA, 22 nt, Human
agaguucugcucuucucaguga

SEQ ID NO: 685122 - RNA, 22 nt, Human
gcugucagcgcccaaggagcuc

SEQ ID NO: 685123 - RNA, 22 nt, Human
aaugcaaugcagcaccuccuug

SEQ ID NO: 685124 - RNA, 22 nt, Human
uaaugaauaaacuugagaguca

SEQ ID NO: 685125 - RNA, 22 nt, Human
ugagaacauacaaacagagaaa

SEQ ID NO: 685126 - RNA, 22 nt, Human
aauggcaaaguguuuucauacc

SEQ ID NO: 685127 - RNA, 22 nt, Human
caggggaagaugccaagggaga

SEQ ID NO: 685128 - RNA, 22 nt, Human
gcagccugaugaucuggguugu

SEQ ID NO: 685129 - RNA, 22 nt, Human
ugggaaugggccuagaaggcug

SEQ ID NO: 685130 - RNA, 22 nt, Human
augaggccauggcugucacuaa

SEQ ID NO: 685131 - RNA, 22 nt, Human
uacacacuuacuggagaugaag

SEQ ID NO: 685132 - RNA, 22 nt, Human
ucaguaauuaccuaugacucga

SEQ ID NO: 685133 - RNA, 22 nt, Human
aagggcuguagacaagauugcu

SEQ ID NO: 685134 - RNA, 18 nt, Human
ggccucuggacuggcagc

SEQ ID NO: 685135 - RNA, 22 nt, Human
uuucucugcugccugugucgau

SEQ ID NO: 685136 - RNA, 22 nt, Human
caggcugacaacugagcauuuu

SEQ ID NO: 685137 - RNA, 22 nt, Human
caacagcuggaggcuuggcccg

SEQ ID NO: 685138 - RNA, 21 nt, Human
augucuguucuuucuggcagg

SEQ ID NO: 685139 - RNA, 22 nt, Human
uuucuacaugucaauccaaacc

SEQ ID NO: 685140 - RNA, 22 nt, Human
uaaccaaagggccuaaggaaug

SEQ ID NO: 685141 - RNA, 22 nt, Human
cagagggcugcccugaguucgu

SEQ ID NO: 685142 - RNA, 22 nt, Human
cugggaugucuauagaacacuu

SEQ ID NO: 685143 - RNA, 22 nt, Human
gcccugagauucuuggauucug

SEQ ID NO: 685144 - RNA, 17 nt, Human
gaaagguccuagaaauc

SEQ ID NO: 685145 - RNA, 22 nt, Human
cauguuaaguguuugauaacca

SEQ ID NO: 685146 - RNA, 22 nt, Human
cugaaggacacgugaggagcca

SEQ ID NO: 685147 - RNA, 22 nt, Human
auacaugugugagcgaagaugu

SEQ ID NO: 685148 - RNA, 22 nt, Human
uccugaauugaacucaguuaau

SEQ ID NO: 685149 - RNA, 22 nt, Human
agcagcauuaugauauaucuua

SEQ ID NO: 685150 - RNA, 22 nt, Human
cuuuugauugagcaguuucaaa

SEQ ID NO: 685151 - RNA, 22 nt, Human
guggccaguggugggcgcccug

SEQ ID NO: 685152 - RNA, 22 nt, Human
uucagggcagacagaagagaug

SEQ ID NO: 685153 - RNA, 22 nt, Human
gggaaggagguggcuugaagug

SEQ ID NO: 685154 - RNA, 22 nt, Human
uagcaucuugauuucagaccag

SEQ ID NO: 685155 - RNA, 22 nt, Human
cacugccugcuggcugucacuu

SEQ ID NO: 685156 - RNA, 22 nt, Human
uggcagauuuaacauuggaacu

SEQ ID NO: 685157 - RNA, 22 nt, Human
ucaguuuccucaucuacaaaag

SEQ ID NO: 685158 - RNA, 22 nt, Human
uuauguaugaauauaguagaag

SEQ ID NO: 685159 - RNA, 22 nt, Human
ucccugggacucagacauggaa

SEQ ID NO: 685160 - RNA, 22 nt, Human
ucauuguauucagaacugaaga

SEQ ID NO: 685161 - RNA, 17 nt, Human
ucauuucaguaaaucca

SEQ ID NO: 685162 - RNA, 22 nt, Human
caggagccagaggcggauggag

SEQ ID NO: 685163 - RNA, 22 nt, Human
cagagggaccagaacauacugu

SEQ ID NO: 685164 - RNA, 22 nt, Human
gagaagggauauggcuucuuga

SEQ ID NO: 685165 - RNA, 21 nt, Human
caugggguugcuauagcaaaa

SEQ ID NO: 685166 - RNA, 22 nt, Human
aucauugaauugcuuuguucuu

SEQ ID NO: 685167 - RNA, 22 nt, Human
gcagcauuaccaagacauggca

SEQ ID NO: 685168 - RNA, 22 nt, Human
acagguguagcaggagcaucaa

SEQ ID NO: 685169 - RNA, 22 nt, Human
aggcugcccugccgccaguggg

SEQ ID NO: 685170 - RNA, 22 nt, Human
auacaguagggaccaugucuga

SEQ ID NO: 685171 - RNA, 22 nt, Human
cugagcugggagccuggcacca

SEQ ID NO: 685172 - RNA, 22 nt, Human
uuucagacaggcucagagccgu

SEQ ID NO: 685173 - RNA, 22 nt, Human
ggacagugcgagacacaguaac

SEQ ID NO: 685174 - RNA, 22 nt, Human
ccaggcccaccuuggccacuua

SEQ ID NO: 685175 - RNA, 21 nt, Human
uuauaggcugggguuugcuuu

SEQ ID NO: 685176 - RNA, 22 nt, Human
caaggcagcccgcugaaccaca

SEQ ID NO: 685177 - RNA, 22 nt, Human
cugggaagaagggacaacagcg

SEQ ID NO: 685178 - RNA, 22 nt, Human
cuuuuacaguggaccugccauu

SEQ ID NO: 685179 - RNA, 22 nt, Human
cuggacucauccauagagguga

SEQ ID NO: 685180 - RNA, 22 nt, Human
ucucgacagccuggcacagugg

SEQ ID NO: 685181 - RNA, 22 nt, Human
ggugggugagcccugggagcug

SEQ ID NO: 685182 - RNA, 22 nt, Human
acgaugaugaaagagaacauuc

SEQ ID NO: 685183 - RNA, 22 nt, Human
cuuggaggaugugcggcugccc

SEQ ID NO: 685184 - RNA, 20 nt, Human
caacaugagcaagugaacug

SEQ ID NO: 685185 - RNA, 22 nt, Human
ugagagacacacugugcaugua

SEQ ID NO: 685186 - RNA, 22 nt, Human
gcuggccccgagugcuacgcuc

SEQ ID NO: 685187 - RNA, 22 nt, Human
ugcacaggugagacucaggaag

SEQ ID NO: 685188 - RNA, 22 nt, Human
ucagacagggcuucucaaacuu

SEQ ID NO: 685189 - RNA, 22 nt, Human
ggcugcaggaacgacggagggg

SEQ ID NO: 685190 - RNA, 22 nt, Human
agaaggccuaacuugggggcaa

SEQ ID NO: 685191 - RNA, 22 nt, Human
uguccugcaacugaaggagaag

SEQ ID NO: 685192 - RNA, 22 nt, Human
gugugggaauggcggucgugca

SEQ ID NO: 685193 - RNA, 22 nt, Human
ggccaaggcucuugagggcuga

SEQ ID NO: 685194 - RNA, 22 nt, Human
gagcagagaauccagcuaagug

SEQ ID NO: 685195 - RNA, 22 nt, Human
agacaucuugcacacauauacu

SEQ ID NO: 685196 - RNA, 22 nt, Human
caugaggauccaggugacaggc

SEQ ID NO: 685197 - RNA, 22 nt, Human
ucuaacucugccaggacacaga

SEQ ID NO: 685198 - RNA, 19 nt, Human
uguguucauucaucagagg

SEQ ID NO: 685199 - RNA, 22 nt, Human
aagauguaucaguuaagucuuc

SEQ ID NO: 685200 - RNA, 22 nt, Human
uucaguguuuguagagauaacu

SEQ ID NO: 685201 - RNA, 22 nt, Human
acuuuuugcuggucucuuccau

SEQ ID NO: 685202 - RNA, 23 nt, Human
ggcuugagcuggaacagcuuggu

SEQ ID NO: 685203 - RNA, 22 nt, Human
gucagcagugucagcucugggg

SEQ ID NO: 685204 - RNA, 22 nt, Human
gcugaaggaggcucugguacua

SEQ ID NO: 685205 - RNA, 22 nt, Human
uauuacagcuuugauuaucugg

SEQ ID NO: 685206 - RNA, 22 nt, Human
ugucuccaugugauaguggccu

SEQ ID NO: 685207 - RNA, 22 nt, Human
agccuguccagaggacagggcu

SEQ ID NO: 685208 - RNA, 22 nt, Human
ucagagaauuguuuaauggaau

SEQ ID NO: 685209 - RNA, 22 nt, Human
aaaaccacaaugacuuuugcag

SEQ ID NO: 685210 - RNA, 22 nt, Human
uuccccaguagugacaaucaaa

SEQ ID NO: 685211 - RNA, 22 nt, Human
cuuugauauaaguauacauagu

SEQ ID NO: 685212 - RNA, 22 nt, Human
caggcagcauuuacucugauga

SEQ ID NO: 685213 - RNA, 22 nt, Human
agcuccagaaagguacacacag

SEQ ID NO: 685214 - RNA, 22 nt, Human
augugucuugcggcaguuggua

SEQ ID NO: 685215 - RNA, 22 nt, Human
ggcucccuguucuauucccugg

SEQ ID NO: 685216 - RNA, 22 nt, Human
cuguauuucccacauucucuau

SEQ ID NO: 685217 - RNA, 22 nt, Human
augcaagagcaauaugguaugc

SEQ ID NO: 685218 - RNA, 22 nt, Human
gcuaggaaucggacccaggaag

SEQ ID NO: 685219 - RNA, 22 nt, Human
caaagauaugacauggaaaaug

SEQ ID NO: 685220 - RNA, 22 nt, Human
aacaauaacuagacaugccaug

SEQ ID NO: 685221 - RNA, 22 nt, Human
aauugucuugaaagcaacacuu

SEQ ID NO: 685222 - RNA, 20 nt, Human
cuuccaccagggccgcugau

SEQ ID NO: 685223 - RNA, 22 nt, Human
uggagccagagcgcagccuggg

SEQ ID NO: 685224 - RNA, 22 nt, Human
uccuuuaugugaguuguuuccc

SEQ ID NO: 685225 - RNA, 23 nt, Human
ucugugccaguuuccaugucugu

SEQ ID NO: 685226 - RNA, 22 nt, Human
gccuccccaaagugcugacagc

SEQ ID NO: 685227 - RNA, 22 nt, Human
cugcaguaaccacuguaggugu

SEQ ID NO: 685228 - RNA, 22 nt, Human
cauggcuucugaucaaggaacu

SEQ ID NO: 685229 - RNA, 21 nt, Human
aauucccagaaacagcacaag

SEQ ID NO: 685230 - RNA, 22 nt, Human
cuguaacuuaaugagaggcaga

SEQ ID NO: 685231 - RNA, 22 nt, Human
cucuuuuaugugacguguguga

SEQ ID NO: 685232 - RNA, 19 nt, Human
gggcaaagugaucguccug

SEQ ID NO: 685233 - RNA, 22 nt, Human
cagcuauugguccacagguaug

SEQ ID NO: 685234 - RNA, 22 nt, Human
ccucucaguauugaacuuuaua

SEQ ID NO: 685235 - RNA, 22 nt, Human
cucugcauuuuaacagaugauu

SEQ ID NO: 685236 - RNA, 22 nt, Human
aagacaaugcauuacuaagaag

SEQ ID NO: 685237 - RNA, 22 nt, Human
cuggagucacucauguagcugc

SEQ ID NO: 685238 - RNA, 22 nt, Human
uuuguuauaacaauaaaaaguc

SEQ ID NO: 685239 - RNA, 22 nt, Human
ugucugcagaagauggcauggg

SEQ ID NO: 685240 - RNA, 22 nt, Human
gcugucugggaggccuccacuu

SEQ ID NO: 685241 - RNA, 17 nt, Human
uggaaggcuucaauauu

SEQ ID NO: 685242 - RNA, 22 nt, Human
agaggccaaagaaucuacaaga

SEQ ID NO: 685243 - RNA, 22 nt, Human
ugugugacccccagugaagccu

SEQ ID NO: 685244 - RNA, 22 nt, Human
aacaaugccugaugaccuccug

SEQ ID NO: 685245 - RNA, 22 nt, Human
ugaggaugagaugagauaacac

SEQ ID NO: 685246 - RNA, 22 nt, Human
uuaggaaacgcugcuauugacu

SEQ ID NO: 685247 - RNA, 22 nt, Human
aaggcugaaagaccuugaaccu

SEQ ID NO: 685248 - RNA, 22 nt, Human
agaugugguuauucucuuccuu

SEQ ID NO: 685249 - RNA, 22 nt, Human
aggagcuaauucauaagccacu

SEQ ID NO: 685250 - RNA, 22 nt, Human
uguggggugugguccaggcauc

SEQ ID NO: 685251 - RNA, 18 nt, Human
ggagcccagaggacagga

SEQ ID NO: 685252 - RNA, 20 nt, Human
ugugggcccuuggcuggcaa

SEQ ID NO: 685253 - RNA, 18 nt, Human
uagagggggccugggcau

SEQ ID NO: 685254 - RNA, 22 nt, Human
accaccccaaaugaaccucugu

SEQ ID NO: 685255 - RNA, 22 nt, Human
auaugaguuucccacuucugga

SEQ ID NO: 685256 - RNA, 22 nt, Human
ucaggcucucagaccaacagca

SEQ ID NO: 685257 - RNA, 22 nt, Human
cucagagccaguuagcaggugc

SEQ ID NO: 685258 - RNA, 22 nt, Human
ugucucugcuuuccuugcaggg

SEQ ID NO: 685259 - RNA, 18 nt, Human
aaguuccacaagagaucu

SEQ ID NO: 685260 - RNA, 19 nt, Human
ggacuguugccaggccucu

SEQ ID NO: 685261 - RNA, 22 nt, Human
auguuucccuucugauuuggga

SEQ ID NO: 685262 - RNA, 22 nt, Human
uccaggcuuuuucaugcugucu

SEQ ID NO: 685263 - RNA, 22 nt, Human
cugucagagauggggagucaga

SEQ ID NO: 685264 - RNA, 22 nt, Human
ccagcccuguaaggaugaggca

SEQ ID NO: 685265 - RNA, 22 nt, Human
auagcaauuaagcuccagaauu

SEQ ID NO: 685266 - RNA, 22 nt, Human
guuucuaaauguucugaguuuu

SEQ ID NO: 685267 - RNA, 22 nt, Human
acugugagcagcgaccugagga

SEQ ID NO: 685268 - RNA, 22 nt, Human
agguggagacccagagaaggcg

SEQ ID NO: 685269 - RNA, 22 nt, Human
auguauaugaagcuaguauuuu

SEQ ID NO: 685270 - RNA, 22 nt, Human
acaugcacugcucaggguuccg

SEQ ID NO: 685271 - RNA, 22 nt, Human
agucacucugcuacaugacagc

SEQ ID NO: 685272 - RNA, 22 nt, Human
aaacucuaguaaaauguauuca

SEQ ID NO: 685273 - RNA, 22 nt, Human
guuuugaauacuacuagaacuu

SEQ ID NO: 685274 - RNA, 22 nt, Human
uccaggcaucccccaggacaga

SEQ ID NO: 685275 - RNA, 22 nt, Human
gcuggggccucugugagguuaa

SEQ ID NO: 685276 - RNA, 22 nt, Human
acuuuauuuccuauugcaucca

SEQ ID NO: 685277 - RNA, 18 nt, Human
aaugaaauguacaccuuu

SEQ ID NO: 685278 - RNA, 22 nt, Human
uaugugugcauguauacauuaa

SEQ ID NO: 685279 - RNA, 22 nt, Human
uggagcugaggggaaugcugag

SEQ ID NO: 685280 - RNA, 22 nt, Human
ugcagcuguuacggacccuguc

SEQ ID NO: 685281 - RNA, 22 nt, Human
uggcucagcuuuccccaucugg

SEQ ID NO: 685282 - RNA, 22 nt, Human
ucuuaauucugugucuucacua

SEQ ID NO: 685283 - RNA, 22 nt, Human
gagccucguggcggccacugcg

SEQ ID NO: 685284 - RNA, 22 nt, Human
ccagaauccaaaacguuuugag

SEQ ID NO: 685285 - RNA, 22 nt, Human
gcuuccaggcuuccuaccuuug

SEQ ID NO: 685286 - RNA, 18 nt, Human
ggacccagggccucaccc

SEQ ID NO: 685287 - RNA, 22 nt, Human
uugcugagcaguguuuaauugu

SEQ ID NO: 685288 - RNA, 19 nt, Human
agaagcugugaaaugaagg

SEQ ID NO: 685289 - RNA, 22 nt, Human
ucccagggucaguggugaggcc

SEQ ID NO: 685290 - RNA, 22 nt, Human
caggcccaugagggcagccaca

SEQ ID NO: 685291 - RNA, 22 nt, Human
agcuguuuaaaugacuuacuuu

SEQ ID NO: 685292 - RNA, 22 nt, Human
cagaaauggagcccaggaaucu

SEQ ID NO: 685293 - RNA, 22 nt, Human
cacugugcuccuuccuuagcac

SEQ ID NO: 685294 - RNA, 22 nt, Human
ucugugauagguggcauaguga

SEQ ID NO: 685295 - RNA, 22 nt, Human
aaauuccagaaacucaguauau

SEQ ID NO: 685296 - RNA, 22 nt, Human
ugagcuaggugugcagauauga

SEQ ID NO: 685297 - RNA, 22 nt, Human
cugugaccuccaggaaggggug

SEQ ID NO: 685298 - RNA, 22 nt, Human
gcacacaguacuauaugcuaca

SEQ ID NO: 685299 - RNA, 22 nt, Human
auggaugaguccuugagacaca

SEQ ID NO: 685300 - RNA, 22 nt, Human
gagagagaaaaugacuccggac

SEQ ID NO: 685301 - RNA, 21 nt, Human
cagagcugaaggguguagugu

SEQ ID NO: 685302 - RNA, 22 nt, Human
cccugcagaaccacagacaaac

SEQ ID NO: 685303 - RNA, 22 nt, Human
cccuccauuaaaacagaccuau

SEQ ID NO: 685304 - RNA, 22 nt, Human
gcaguacuuuaagggaugaagc

SEQ ID NO: 685305 - RNA, 22 nt, Human
auggaacugagcuugccaaacu

SEQ ID NO: 685306 - RNA, 17 nt, Human
agccugggaaggaguga

SEQ ID NO: 685307 - RNA, 22 nt, Human
uacagugauagagaguagcuau

SEQ ID NO: 685308 - RNA, 22 nt, Human
ggcagcuggguuggccagaaac

SEQ ID NO: 685309 - RNA, 22 nt, Human
agggcucagcaucucauucugu

SEQ ID NO: 685310 - RNA, 22 nt, Human
uuauugagcaccuacuaugugu

SEQ ID NO: 685311 - RNA, 22 nt, Human
ugcaccugagaggucucugagg

SEQ ID NO: 685312 - RNA, 22 nt, Human
augugcuuuaaagaagccagcu

SEQ ID NO: 685313 - RNA, 22 nt, Human
uacauccaaaugaauuagaauu

SEQ ID NO: 685314 - RNA, 22 nt, Human
aggcugcucaguagauggagcu

SEQ ID NO: 685315 - RNA, 22 nt, Human
uuuagguuuuuucacguggcua

SEQ ID NO: 685316 - RNA, 22 nt, Human
ucagacugaucaucuaucagau

SEQ ID NO: 685317 - RNA, 22 nt, Human
cacagguaauagccuaggcuau

SEQ ID NO: 685318 - RNA, 22 nt, Human
gaggccagaguuccccgaguca

SEQ ID NO: 685319 - RNA, 22 nt, Human
caguggggaggccaggauagaa

SEQ ID NO: 685320 - RNA, 22 nt, Human
ucaagaugaaagauguagccau

SEQ ID NO: 685321 - RNA, 22 nt, Human
aaacucuucauauacauaugcu

SEQ ID NO: 685322 - RNA, 22 nt, Human
aauaauauuugaagcuucaaag

SEQ ID NO: 685323 - RNA, 22 nt, Human
uauaguuaguuucauaaucaug

SEQ ID NO: 685324 - RNA, 22 nt, Human
gccagagggauuccuggugugu

SEQ ID NO: 685325 - RNA, 22 nt, Human
cagggacaauggcagagccuga

SEQ ID NO: 685326 - RNA, 22 nt, Human
aggagucagauuguuugaaugu

SEQ ID NO: 685327 - RNA, 23 nt, Human
uggagaugccccacucccugucu

SEQ ID NO: 685328 - RNA, 22 nt, Human
cugcugccugacaauuuagguu

SEQ ID NO: 685329 - RNA, 22 nt, Human
ugugaaaucacaggcuauuuag

SEQ ID NO: 685330 - RNA, 22 nt, Human
uuacaacugggcuugucagcuu

SEQ ID NO: 685331 - RNA, 22 nt, Human
ugguccauguccuccaucucuc

SEQ ID NO: 685332 - RNA, 22 nt, Human
accuguggaucagauucuugua

SEQ ID NO: 685333 - RNA, 22 nt, Human
agcaaagcugauuaagagcaca

SEQ ID NO: 685334 - RNA, 22 nt, Human
uccagagcugggucugugcuca

SEQ ID NO: 685335 - RNA, 22 nt, Human
gugcaaaaguaauugcgguuuu

SEQ ID NO: 685336 - RNA, 22 nt, Human
cagcugggcuaagaguagaggc

SEQ ID NO: 685337 - RNA, 22 nt, Human
guaaacaaacucucaggccagu

SEQ ID NO: 685338 - RNA, 19 nt, Human
acccucugccacaagccuc

SEQ ID NO: 685339 - RNA, 22 nt, Human
guguggcugugggagauguuca

SEQ ID NO: 685340 - RNA, 22 nt, Human
gaauguccuccuggaucacucc

SEQ ID NO: 685341 - RNA, 22 nt, Human
gaggaggaggaaguggaaccca

SEQ ID NO: 685342 - RNA, 22 nt, Human
aaacacagggauauauauucca

SEQ ID NO: 685343 - RNA, 22 nt, Human
auaggaaugugauuuauaaaug

SEQ ID NO: 685344 - RNA, 22 nt, Human
gucauucuuaacaacucaguag

SEQ ID NO: 685345 - RNA, 19 nt, Human
gacucacaccuuccgcugu

SEQ ID NO: 685346 - RNA, 22 nt, Human
aaggucugcuuguuuucuugag

SEQ ID NO: 685347 - RNA, 22 nt, Human
acuguaacacaaugguaucugu

SEQ ID NO: 685348 - RNA, 22 nt, Human
ugacucucccaaguuugaggga

SEQ ID NO: 685349 - RNA, 22 nt, Human
cuguggcuggccuuauugcugc

SEQ ID NO: 685350 - RNA, 22 nt, Human
cugguccuaaagcccuacucca

SEQ ID NO: 685351 - RNA, 22 nt, Human
aguccuggguccagcagguccu

SEQ ID NO: 685352 - RNA, 22 nt, Human
acacauuuucuaacagggauca

SEQ ID NO: 685353 - RNA, 22 nt, Human
ggccaccuuaaguuaaggauau

SEQ ID NO: 685354 - RNA, 22 nt, Human
aaugaugguauugaugagcuaa

SEQ ID NO: 685355 - RNA, 22 nt, Human
aaguggaggccgaguucacgca

SEQ ID NO: 685356 - RNA, 22 nt, Human
uacaaugcauucguugucucgg

SEQ ID NO: 685357 - RNA, 22 nt, Human
uaaauguguaaaccuccauuac

SEQ ID NO: 685358 - RNA, 22 nt, Human
cccugccuuguuggagccuaug

SEQ ID NO: 685359 - RNA, 22 nt, Human
cacagugaagcaugcagacauc

SEQ ID NO: 685360 - RNA, 22 nt, Human
gucaccagcaccaaugccacau

SEQ ID NO: 685361 - RNA, 22 nt, Human
uuuguugacaucccuguacuuu

SEQ ID NO: 685362 - RNA, 22 nt, Human
aaggucuguggccaccucuggg

SEQ ID NO: 685363 - RNA, 21 nt, Human
agugucugagcgcugcuucug

SEQ ID NO: 685364 - RNA, 22 nt, Human
agggagcugagcugugagcagc

SEQ ID NO: 685365 - RNA, 22 nt, Human
aaagcucuuaaugagauuaucc

SEQ ID NO: 685366 - RNA, 22 nt, Human
aaguggcaguucaggaagcaga

SEQ ID NO: 685367 - RNA, 22 nt, Human
cugggaagcuucgagcaggaaa

SEQ ID NO: 685368 - RNA, 22 nt, Human
guaggagcucauggggccagga

SEQ ID NO: 685369 - RNA, 22 nt, Human
gguguccucacuauagcaaguc

SEQ ID NO: 685370 - RNA, 22 nt, Human
uaggcagauguuaacaggaaaa

SEQ ID NO: 685371 - RNA, 22 nt, Human
cagcaucucugccugccugcaa

SEQ ID NO: 685372 - RNA, 23 nt, Human
acucacaaagcaggaucauguug

SEQ ID NO: 685373 - RNA, 22 nt, Human
cagcuuuaccaauauuuggaaa

SEQ ID NO: 685374 - RNA, 20 nt, Human
cucaguaaaagcacaggguc

SEQ ID NO: 685375 - RNA, 22 nt, Human
gcagccaggcuacagcgggcuu

SEQ ID NO: 685376 - RNA, 22 nt, Human
guccucagcaccagaacuaggg

SEQ ID NO: 685377 - RNA, 22 nt, Human
aguuuagaaaaucuguuucuuc

SEQ ID NO: 685378 - RNA, 22 nt, Human
aggcaguguguagcuggaagag

SEQ ID NO: 685379 - RNA, 22 nt, Human
cugggcccacgagggcucuggg

SEQ ID NO: 685380 - RNA, 22 nt, Human
uuuagggaugucagaacaggga

SEQ ID NO: 685381 - RNA, 18 nt, Human
uggagccauugccaccau

SEQ ID NO: 685382 - RNA, 22 nt, Human
ugaggacauuggucaggacaug

SEQ ID NO: 685383 - RNA, 22 nt, Human
uaucaucugcaaagcacaucua

SEQ ID NO: 685384 - RNA, 22 nt, Human
cccucaggugaaaggaaaaauu

SEQ ID NO: 685385 - RNA, 22 nt, Human
auaaacugaagggaacacugag

SEQ ID NO: 685386 - RNA, 22 nt, Human
ugcugaggagggcacccggggg

SEQ ID NO: 685387 - RNA, 19 nt, Human
agggccaggauucuggaac

SEQ ID NO: 685388 - RNA, 22 nt, Human
cuggaucuguccccuuuuuguu

SEQ ID NO: 685389 - RNA, 22 nt, Human
acucaucaacuguuacaaaugu

SEQ ID NO: 685390 - RNA, 22 nt, Human
uuggacugaaucuuucucacac

SEQ ID NO: 685391 - RNA, 22 nt, Human
uucuggagacccagcaacaggg

SEQ ID NO: 685392 - RNA, 21 nt, Human
gcuggcuggcugaccggccuu

SEQ ID NO: 685393 - RNA, 22 nt, Human
aggaccagugagucuggcaagu

SEQ ID NO: 685394 - RNA, 22 nt, Human
gcucugagagagcaaagucacc

SEQ ID NO: 685395 - RNA, 22 nt, Human
ucagaaauuuaggcuggacuug

SEQ ID NO: 685396 - RNA, 22 nt, Human
ucaagaaggagacuccacugug

SEQ ID NO: 685397 - RNA, 22 nt, Human
ucagcuccagaguugcacagug

SEQ ID NO: 685398 - RNA, 22 nt, Human
gcucgcgccgcaccgguccacc

SEQ ID NO: 685399 - RNA, 22 nt, Human
cgcucuggagaauaguagcuuu

SEQ ID NO: 685400 - RNA, 22 nt, Human
acagguacauacuugggaucca

SEQ ID NO: 685401 - RNA, 18 nt, Human
guuuugaauugucuuaca

SEQ ID NO: 685402 - RNA, 22 nt, Human
gggacuucauagcuaggcacuu

SEQ ID NO: 685403 - RNA, 22 nt, Human
cugugugcugaaaugcagugag

SEQ ID NO: 685404 - RNA, 22 nt, Human
aauuacacagggaucacuuuuu

SEQ ID NO: 685405 - RNA, 22 nt, Human
agaggcagccguauuucaaagg

SEQ ID NO: 685406 - RNA, 22 nt, Human
ggcugcuggauuguguaucugu

SEQ ID NO: 685407 - RNA, 22 nt, Human
uucacaguggcuuaggcuaugg

SEQ ID NO: 685408 - RNA, 22 nt, Human
gcaauacaguagguuuauuggu

SEQ ID NO: 685409 - RNA, 22 nt, Human
aggaaucaggagaugagcacgg

SEQ ID NO: 685410 - RNA, 22 nt, Human
ggucagagggugggcugccugu

SEQ ID NO: 685411 - RNA, 22 nt, Human
guaugaaguaagauauuguuca

SEQ ID NO: 685412 - RNA, 22 nt, Human
cggccaggcacaguggcccacg

SEQ ID NO: 685413 - RNA, 22 nt, Human
cugcugucgccgagcugcaugc

SEQ ID NO: 685414 - RNA, 22 nt, Human
guggguggaucaugaggucagg

SEQ ID NO: 685415 - RNA, 22 nt, Human
auguaauuuauguuauccauaa

SEQ ID NO: 685416 - RNA, 22 nt, Human
aauaugugagguauguucagug

SEQ ID NO: 685417 - RNA, 22 nt, Human
acagggcagagugaaaugcuau

SEQ ID NO: 685418 - RNA, 22 nt, Human
ggucagaacaagcaaauaauag

SEQ ID NO: 685419 - RNA, 23 nt, Human
aagagcuauacauucaccuggua

SEQ ID NO: 685420 - RNA, 22 nt, Human
gggcagugucgaggucuggucc

SEQ ID NO: 685421 - RNA, 22 nt, Human
uggacagcgaaagugccuggga

SEQ ID NO: 685422 - RNA, 22 nt, Human
caaugggagcagaaauuguuug

SEQ ID NO: 685423 - RNA, 22 nt, Human
cauuucaaacaguuacagcugc

SEQ ID NO: 685424 - RNA, 18 nt, Human
acagcagguuucauucuu

SEQ ID NO: 685425 - RNA, 22 nt, Human
ucauuauucucuuuaauguucu

SEQ ID NO: 685426 - RNA, 22 nt, Human
aagaacauugauauugucuaug

SEQ ID NO: 685427 - RNA, 23 nt, Human
cucccuggcccuugggagaccug

SEQ ID NO: 685428 - RNA, 22 nt, Human
ucuguagcauucaccagcccug

SEQ ID NO: 685429 - RNA, 22 nt, Human
aagcagaugcguuggagcaguu

SEQ ID NO: 685430 - RNA, 22 nt, Human
ugcuuccacuaaugagcugugu

SEQ ID NO: 685431 - RNA, 22 nt, Human
gagaaguuguaggagaauuuug

SEQ ID NO: 685432 - RNA, 23 nt, Human
aacuuugccaggagacagcacag

SEQ ID NO: 685433 - RNA, 22 nt, Human
acuguggauaagucagagaugu

SEQ ID NO: 685434 - RNA, 22 nt, Human
gcuggcuuugcacugggugcau

SEQ ID NO: 685435 - RNA, 22 nt, Human
cacuugaaugagaauuuccugg

SEQ ID NO: 685436 - RNA, 22 nt, Human
agacaaugucaaggugaucauc

SEQ ID NO: 685437 - RNA, 19 nt, Human
uacauuuguguacacuugu

SEQ ID NO: 685438 - RNA, 23 nt, Human
auuuacagguuaaaugaaaucag

SEQ ID NO: 685439 - RNA, 22 nt, Human
cugagaauuacucugaugagua

SEQ ID NO: 685440 - RNA, 22 nt, Human
ugaaguauccaucuuguucuag

SEQ ID NO: 685441 - RNA, 22 nt, Human
uaaugucuaugggccagauaau

SEQ ID NO: 685442 - RNA, 22 nt, Human
ugagaugguugaccagagagca

SEQ ID NO: 685443 - RNA, 22 nt, Human
gccagagcuucccccgagugug

SEQ ID NO: 685444 - RNA, 22 nt, Human
cugaccugcuaagccccugucc

SEQ ID NO: 685445 - RNA, 18 nt, Human
cagaagcaggcagugcag

SEQ ID NO: 685446 - RNA, 22 nt, Human
ucagaagcaagcuucuacuucu

SEQ ID NO: 685447 - RNA, 23 nt, Human
ucuucaugcccaggccuuggugc

SEQ ID NO: 685448 - RNA, 22 nt, Human
gacccucauugucaccgugagc

SEQ ID NO: 685449 - RNA, 22 nt, Human
agagaaaagccaucccagccaa

SEQ ID NO: 685450 - RNA, 22 nt, Human
uucuaaauggggauccuuucug

SEQ ID NO: 685451 - RNA, 22 nt, Human
gcacacaggcaguuuccagcca

SEQ ID NO: 685452 - RNA, 22 nt, Human
aggaggccgauuucagaggucg

SEQ ID NO: 685453 - RNA, 22 nt, Human
ugggcuuuaucaugggucuggu

SEQ ID NO: 685454 - RNA, 22 nt, Human
agcaauagacacaagauggaua

SEQ ID NO: 685455 - RNA, 22 nt, Human
cugugucccaguaccuugggua

SEQ ID NO: 685456 - RNA, 22 nt, Human
acuucaaaugugacaaugugaa

SEQ ID NO: 685457 - RNA, 22 nt, Human
gggaggcuggcucuggccacag

SEQ ID NO: 685458 - RNA, 23 nt, Human
uugaaggagaaagcuuucuuggu

SEQ ID NO: 685459 - RNA, 22 nt, Human
cgaguccaggguuaggaguccg

SEQ ID NO: 685460 - RNA, 22 nt, Human
caguggaaacuaugcugcugga

SEQ ID NO: 685461 - RNA, 22 nt, Human
ugugauucaagaaaguaaaaug

SEQ ID NO: 685462 - RNA, 22 nt, Human
agcagccucuguagaggucucc

SEQ ID NO: 685463 - RNA, 22 nt, Human
cuggagaacuaguuaaacacgu

SEQ ID NO: 685464 - RNA, 22 nt, Human
acagccagggcauugucgccga

SEQ ID NO: 685465 - RNA, 22 nt, Human
ugcuuugaaagauaauacuguc

SEQ ID NO: 685466 - RNA, 22 nt, Human
ugucauuuccugaaugcugagu

SEQ ID NO: 685467 - RNA, 22 nt, Human
cugcaggcauuuauucaugcaa

SEQ ID NO: 685468 - RNA, 22 nt, Human
ggcugccuucccugagccccgg

SEQ ID NO: 685469 - RNA, 22 nt, Human
gcccagggcagggcaagaguga

SEQ ID NO: 685470 - RNA, 22 nt, Human
ccucuggucccagcucugcugc

SEQ ID NO: 685471 - RNA, 22 nt, Human
augggaugcauggcuguggcca

SEQ ID NO: 685472 - RNA, 22 nt, Human
gcuuucugccugggcuccauuu

SEQ ID NO: 685473 - RNA, 22 nt, Human
gcaggcaauuuuggaaggucag

SEQ ID NO: 685474 - RNA, 22 nt, Human
aauaucuucuaaggauagaacu

SEQ ID NO: 685475 - RNA, 22 nt, Human
ucugucugacuaccaugaggca

SEQ ID NO: 685476 - RNA, 23 nt, Human
ggacacugcuauaaaggaucugc

SEQ ID NO: 685477 - RNA, 22 nt, Human
ucaaaccugcugucuuguucau

SEQ ID NO: 685478 - RNA, 22 nt, Human
gcugugauguggagggugcuga

SEQ ID NO: 685479 - RNA, 22 nt, Human
ccaggaggcaauaucaagucca

SEQ ID NO: 685480 - RNA, 22 nt, Human
agcuaaugaaauauuuucugau

SEQ ID NO: 685481 - RNA, 22 nt, Human
auuccuugggcugccuuauuau

SEQ ID NO: 685482 - RNA, 22 nt, Human
aggcacaggaaugucauccagu

SEQ ID NO: 685483 - RNA, 22 nt, Human
cuuccuucugaagcauagaagc

SEQ ID NO: 685484 - RNA, 22 nt, Human
uggcuucauguaguuugaguug

SEQ ID NO: 685485 - RNA, 22 nt, Human
gccacagguacuaugggagaga

SEQ ID NO: 685486 - RNA, 22 nt, Human
cacaggugcuccucggggagcu

SEQ ID NO: 685487 - RNA, 22 nt, Human
cuggggacgucgggcaguguuc

SEQ ID NO: 685488 - RNA, 20 nt, Human
cgcauaguuuccaucauucc

SEQ ID NO: 685489 - RNA, 22 nt, Human
ugacacaguugucgacucuaca

SEQ ID NO: 685490 - RNA, 22 nt, Human
aggccucugcuggaaagaguug

SEQ ID NO: 685491 - RNA, 22 nt, Human
ugcccuccacaguggcuccacc

SEQ ID NO: 685492 - RNA, 19 nt, Human
guuuucugaucuugccccc

SEQ ID NO: 685493 - RNA, 22 nt, Human
auccccagaaaauaggugccua

SEQ ID NO: 685494 - RNA, 22 nt, Human
gcaugagacuagcucaugagca

SEQ ID NO: 685495 - RNA, 22 nt, Human
ggcuagaaacucaggcaagaaa

SEQ ID NO: 685496 - RNA, 22 nt, Human
ugcaggcuggaggagggacuaa

SEQ ID NO: 685497 - RNA, 22 nt, Human
cucucuggguccucuuuuauag

SEQ ID NO: 685498 - RNA, 22 nt, Human
ucccugggucauucucuggcac

SEQ ID NO: 685499 - RNA, 22 nt, Human
cugccagucuaugcugcucggc

SEQ ID NO: 685500 - RNA, 23 nt, Human
ucugagggagugggcaguggcac

SEQ ID NO: 685501 - RNA, 22 nt, Human
acucagaguuugcguuccauac

SEQ ID NO: 685502 - RNA, 22 nt, Human
caggcccugccuugagggaccu

SEQ ID NO: 685503 - RNA, 22 nt, Human
aagacuuucucccaaauccuca

SEQ ID NO: 685504 - RNA, 22 nt, Human
uauuucuguuuauuuguacauc

SEQ ID NO: 685505 - RNA, 22 nt, Human
gcugccuuuagggggugcucag

SEQ ID NO: 685506 - RNA, 22 nt, Human
gccugcagggugaugggcugcc

SEQ ID NO: 685507 - RNA, 22 nt, Human
ugcuggggagugauugaccauc

SEQ ID NO: 685508 - RNA, 22 nt, Human
gcaguaaguuaauagugcuggu

SEQ ID NO: 685509 - RNA, 22 nt, Human
cagcuuuccccgugccucagcc

SEQ ID NO: 685510 - RNA, 22 nt, Human
cagaauuugaaguaauauucca

SEQ ID NO: 685511 - RNA, 20 nt, Human
uuucuugucggcuguugcug

SEQ ID NO: 685512 - RNA, 22 nt, Human
uacauguuauuucacuauuggu

SEQ ID NO: 685513 - RNA, 22 nt, Human
ugaguccauugauggauaguga

SEQ ID NO: 685514 - RNA, 22 nt, Human
ucagauuuuccacagacuggaa

SEQ ID NO: 685515 - RNA, 17 nt, Human
uccuggcaguccccugg

SEQ ID NO: 685516 - RNA, 22 nt, Human
caggcuugauuauucagacaau

SEQ ID NO: 685517 - RNA, 22 nt, Human
uucuggcaucugggggaggccu

SEQ ID NO: 685518 - RNA, 22 nt, Human
gggcucuggacccaggcaagag

SEQ ID NO: 685519 - RNA, 22 nt, Human
ugcuccuauccuccugcugaca

SEQ ID NO: 685520 - RNA, 22 nt, Human
aaagcaaugggucuaagguaaa

SEQ ID NO: 685521 - RNA, 22 nt, Human
cuuugccauguugccugcagaa

SEQ ID NO: 685522 - RNA, 22 nt, Human
cauagcaacagcaucaagucaa

SEQ ID NO: 685523 - RNA, 22 nt, Human
acaguuuauguaaagcugccaa

SEQ ID NO: 685524 - RNA, 22 nt, Human
cucagggacuuggauccuggcc

SEQ ID NO: 685525 - RNA, 22 nt, Human
acaugcaugugaauauggacac

SEQ ID NO: 685526 - RNA, 22 nt, Human
ugggaccuguuacauugaguua

SEQ ID NO: 685527 - RNA, 22 nt, Human
aagauguuacucaaccaggaua

SEQ ID NO: 685528 - RNA, 21 nt, Human
cagugccccagcuacaaaagg

SEQ ID NO: 685529 - RNA, 22 nt, Human
aaacagcaauuacuuuugcacc

SEQ ID NO: 685530 - RNA, 22 nt, Human
gaggugcuuccuuugggcucug

SEQ ID NO: 685531 - RNA, 22 nt, Human
cauuuacagcagacugaugaaa

SEQ ID NO: 685532 - RNA, 22 nt, Human
ugcuugugugagggccugggag

SEQ ID NO: 685533 - RNA, 22 nt, Human
uuuguacauuucacuccauugu

SEQ ID NO: 685534 - RNA, 22 nt, Human
uacaugaaauaggauucuggag

SEQ ID NO: 685535 - RNA, 22 nt, Human
uggcuucauucagcaugacagu

SEQ ID NO: 685536 - RNA, 22 nt, Human
acauguguauagccuguauaga

SEQ ID NO: 685537 - RNA, 22 nt, Human
uggcuuucgcuauagagcacgg

SEQ ID NO: 685538 - RNA, 22 nt, Human
uucugcauuauacacaaccuaa

SEQ ID NO: 685539 - RNA, 22 nt, Human
cuccaggcccacgucgaggagg

SEQ ID NO: 685540 - RNA, 22 nt, Human
ugagcuuacuucuguacacaga

SEQ ID NO: 685541 - RNA, 22 nt, Human
uuucuauugaucuaauaaacau

SEQ ID NO: 685542 - RNA, 22 nt, Human
aagaggaauggguguguuuaug

SEQ ID NO: 685543 - RNA, 22 nt, Human
ucauacaagaucacuuuggcca

SEQ ID NO: 685544 - RNA, 23 nt, Human
uauuagggccaggacuggcaaau

SEQ ID NO: 685545 - RNA, 22 nt, Human
guugaaacuuaguugaaauuua

SEQ ID NO: 685546 - RNA, 22 nt, Human
caggaggcaggugcauuuugag

SEQ ID NO: 685547 - RNA, 22 nt, Human
cagguccagucacuggucugca

SEQ ID NO: 685548 - RNA, 22 nt, Human
augagauaggaacaaacuuaca

SEQ ID NO: 685549 - RNA, 18 nt, Human
cugcugcaggcacucagg

SEQ ID NO: 685550 - RNA, 22 nt, Human
augaugguaaauucaguauccg

SEQ ID NO: 685551 - RNA, 22 nt, Human
caaagaagagauuuacagagcu

SEQ ID NO: 685552 - RNA, 22 nt, Human
aaucuucacucauucagaguug

SEQ ID NO: 685553 - RNA, 22 nt, Human
ucagauauagucauuuaaauaa

SEQ ID NO: 685554 - RNA, 22 nt, Human
aggacccagaggcagaggacgu

SEQ ID NO: 685555 - RNA, 22 nt, Human
uuucuuaaauauuugcaggaca

SEQ ID NO: 685556 - RNA, 22 nt, Human
ggcugcaguuugucuuuugcuu

SEQ ID NO: 685557 - RNA, 23 nt, Human
aaaaucuucugccuaugaagaaa

SEQ ID NO: 685558 - RNA, 22 nt, Human
uccagggagauacuggcugcca

SEQ ID NO: 685559 - RNA, 17 nt, Human
agaacuguaguagcucc

SEQ ID NO: 685560 - RNA, 22 nt, Human
aacuguauacaauugucagaca

SEQ ID NO: 685561 - RNA, 18 nt, Human
cucauguguggucccagc

SEQ ID NO: 685562 - RNA, 22 nt, Human
gcagcuggcucugggaaaaacu

SEQ ID NO: 685563 - RNA, 22 nt, Human
auacacacaaucagguuuugua

SEQ ID NO: 685564 - RNA, 22 nt, Human
ggagcuguguuauccauuccca

SEQ ID NO: 685565 - RNA, 22 nt, Human
guagacagcaaccaaaccaggu

SEQ ID NO: 685566 - RNA, 22 nt, Human
cacugacuccaaaaauaaagaa

SEQ ID NO: 685567 - RNA, 21 nt, Human
ccagccucagaucagggagcu

SEQ ID NO: 685568 - RNA, 22 nt, Human
aggagcugcagauucugccuug

SEQ ID NO: 685569 - RNA, 22 nt, Human
ucagagaaggcugagucacggc

SEQ ID NO: 685570 - RNA, 23 nt, Human
gccuggccaccccagggcugcuu

SEQ ID NO: 685571 - RNA, 22 nt, Human
ucuucacaggagccugccugcc

SEQ ID NO: 685572 - RNA, 22 nt, Human
cagucucugugccagauccugg

SEQ ID NO: 685573 - RNA, 22 nt, Human
aucugcuuccugggcuccauga

SEQ ID NO: 685574 - RNA, 20 nt, Human
uucagggcuuuggggacacc

SEQ ID NO: 685575 - RNA, 22 nt, Human
uccugguggucugugcuucuuc

SEQ ID NO: 685576 - RNA, 22 nt, Human
gcucagugcaucauuccaggcu

SEQ ID NO: 685577 - RNA, 22 nt, Human
ucuggcucucauacucgccagu

SEQ ID NO: 685578 - RNA, 22 nt, Human
uguuuacuuaaauguuuucaua

SEQ ID NO: 685579 - RNA, 22 nt, Human
acaguuuaucgauucaccuacc

SEQ ID NO: 685580 - RNA, 22 nt, Human
gcuccagcucuguucuggggaa

SEQ ID NO: 685581 - RNA, 22 nt, Human
ugcagcugcuugauucaucuug

SEQ ID NO: 685582 - RNA, 22 nt, Human
guuugcauuucuugaacuauau

SEQ ID NO: 685583 - RNA, 22 nt, Human
cugccuggacagcucuuaccuu

SEQ ID NO: 685584 - RNA, 22 nt, Human
gcucccugugcucugagugaua

SEQ ID NO: 685585 - RNA, 22 nt, Human
ccauuggagaguuuuaagaagg

SEQ ID NO: 685586 - RNA, 22 nt, Human
cuaguugcucuccuuuaaaccu

SEQ ID NO: 685587 - RNA, 22 nt, Human
gcuggccauggccugcgccauc

SEQ ID NO: 685588 - RNA, 22 nt, Human
augucagaagcuggaugacagc

SEQ ID NO: 685589 - RNA, 22 nt, Human
aggcucaggugccucauucaca

SEQ ID NO: 685590 - RNA, 22 nt, Human
gcauugaaauggcaaaaagaga

SEQ ID NO: 685591 - RNA, 22 nt, Human
agcugaaauucacaaggaucca

SEQ ID NO: 685592 - RNA, 22 nt, Human
uucugggaugugaaugguuuaa

SEQ ID NO: 685593 - RNA, 22 nt, Human
uucaguuuucuuuagaauguag

SEQ ID NO: 685594 - RNA, 22 nt, Human
ucccacacuacacgguuguugg

SEQ ID NO: 685595 - RNA, 22 nt, Human
cagcuccugccugggcagcugu

SEQ ID NO: 685596 - RNA, 22 nt, Human
agagagcucugaugggagguga

SEQ ID NO: 685597 - RNA, 22 nt, Human
gacaugcauuaagacacacuga

SEQ ID NO: 685598 - RNA, 19 nt, Human
aggcaccuugauggcuucc

SEQ ID NO: 685599 - RNA, 22 nt, Human
cuucugcaauaaguuuuggucc

SEQ ID NO: 685600 - RNA, 22 nt, Human
ucacuguagugagcagaauaua

SEQ ID NO: 685601 - RNA, 17 nt, Human
uuguguguaguucugau

SEQ ID NO: 685602 - RNA, 22 nt, Human
cauacuuugggauaagagugga

SEQ ID NO: 685603 - RNA, 22 nt, Human
uccugggguuuagagggaagug

SEQ ID NO: 685604 - RNA, 22 nt, Human
gcucagagaauuuacugcugcc

SEQ ID NO: 685605 - RNA, 22 nt, Human
auggcugugaaaugguaggugg

SEQ ID NO: 685606 - RNA, 22 nt, Human
aucucuuaugucacauaaacca

SEQ ID NO: 685607 - RNA, 22 nt, Human
cacacuguugaggacgagaugu

SEQ ID NO: 685608 - RNA, 22 nt, Human
caaaaguaauugugguuuuugc

SEQ ID NO: 685609 - RNA, 22 nt, Human
aaagagcauggaaaguucagga

SEQ ID NO: 685610 - RNA, 22 nt, Human
aauuucagagguagagauucua

SEQ ID NO: 685611 - RNA, 22 nt, Human
ggggccaguaggagugauguac

SEQ ID NO: 685612 - RNA, 22 nt, Human
uggcccucguccgacagguggg

SEQ ID NO: 685613 - RNA, 18 nt, Human
cacccuccgcggcugccc

SEQ ID NO: 685614 - RNA, 22 nt, Human
guuccagguggucacagagcuc

SEQ ID NO: 685615 - RNA, 20 nt, Human
gcugcucgcugcagucacuc

SEQ ID NO: 685616 - RNA, 22 nt, Human
acauuuagaguucuuuacucca

SEQ ID NO: 685617 - RNA, 22 nt, Human
ucuuuguuuguacuguuagaau

SEQ ID NO: 685618 - RNA, 22 nt, Human
gcagggugacguugcccaccuc

SEQ ID NO: 685619 - RNA, 22 nt, Human
aagucacagaacccauuguaac

SEQ ID NO: 685620 - RNA, 23 nt, Human
caggaaauguucuugaagccuga

SEQ ID NO: 685621 - RNA, 22 nt, Human
agugggucagagagcuccagau

SEQ ID NO: 685622 - RNA, 19 nt, Human
ugcuccaggccuugccgca

SEQ ID NO: 685623 - RNA, 22 nt, Human
acuaagugggacauuuacuagg

SEQ ID NO: 685624 - RNA, 22 nt, Human
uguguuccuucgucuucccuuc

SEQ ID NO: 685625 - RNA, 22 nt, Human
ccaucugacugccacccaggcc

SEQ ID NO: 685626 - RNA, 22 nt, Human
ucucugagcucaggagcugcag

SEQ ID NO: 685627 - RNA, 22 nt, Human
ugagacaguaucgccccaaggc

SEQ ID NO: 685628 - RNA, 22 nt, Human
uucuggagccccaagaucugua

SEQ ID NO: 685629 - RNA, 22 nt, Human
cacuggcugagcuucucuaggg

SEQ ID NO: 685630 - RNA, 22 nt, Human
gacugugggaagacuguagguu

SEQ ID NO: 685631 - RNA, 22 nt, Human
aggcaguuuauccccagagccu

SEQ ID NO: 685632 - RNA, 22 nt, Human
ggcuccagguacguaugggagg

SEQ ID NO: 685633 - RNA, 22 nt, Human
ugcucaguccuccugcagugcc

SEQ ID NO: 685634 - RNA, 22 nt, Human
ucuugauuuugugaauaaguug

SEQ ID NO: 685635 - RNA, 22 nt, Human
ccagaggaauugggaaacaugu

SEQ ID NO: 685636 - RNA, 22 nt, Human
aagcuguguaaguugcuugguu

SEQ ID NO: 685637 - RNA, 23 nt, Human
gcagacagagcagacuaagacaa

SEQ ID NO: 685638 - RNA, 22 nt, Human
gcauggccuugugcuccuucuc

SEQ ID NO: 685639 - RNA, 22 nt, Human
gggagucagugaaggagucaga

SEQ ID NO: 685640 - RNA, 22 nt, Human
uuauucagcagggacuuccuuu

SEQ ID NO: 685641 - RNA, 22 nt, Human
uggccugucuuguugugcuaga

SEQ ID NO: 685642 - RNA, 22 nt, Human
gcaggcagccacgauucccuug

SEQ ID NO: 685643 - RNA, 22 nt, Human
gauuuuaucgucauccuucugg

SEQ ID NO: 685644 - RNA, 22 nt, Human
cuggcuuucugcacagaauugg

SEQ ID NO: 685645 - RNA, 22 nt, Human
accaggaguugggggugggacc

SEQ ID NO: 685646 - RNA, 18 nt, Human
gggcaagcggcugucacc

SEQ ID NO: 685647 - RNA, 22 nt, Human
agcuggcuucucugcagacauu

SEQ ID NO: 685648 - RNA, 22 nt, Human
uagcagcucacuaacucugcgu

SEQ ID NO: 685649 - RNA, 22 nt, Human
ugagcagaaaagaaugcugagc

SEQ ID NO: 685650 - RNA, 21 nt, Human
ucuaugcaagacccuaguccu

SEQ ID NO: 685651 - RNA, 22 nt, Human
cuucuuugugccuauuggugac

SEQ ID NO: 685652 - RNA, 22 nt, Human
ucuucagaagaucacaucagug

SEQ ID NO: 685653 - RNA, 22 nt, Human
acacagugucuuagguaguguc

SEQ ID NO: 685654 - RNA, 22 nt, Human
ucucugucucccguguguccgg

SEQ ID NO: 685655 - RNA, 22 nt, Human
gcuguggcuuucuguuucuguu

SEQ ID NO: 685656 - RNA, 22 nt, Human
augugucucuaaaauuuaguaa

SEQ ID NO: 685657 - RNA, 22 nt, Human
augugcuuuauuaaguaaaaau

SEQ ID NO: 685658 - RNA, 22 nt, Human
ugccaggauggccagggggcca

SEQ ID NO: 685659 - RNA, 22 nt, Human
uguaacugccauguagccuguc

SEQ ID NO: 685660 - RNA, 22 nt, Human
cacugaaauauuaauaucuuau

SEQ ID NO: 685661 - RNA, 22 nt, Human
uaaugcacagaauugacauggg

SEQ ID NO: 685662 - RNA, 22 nt, Human
uuuaucugucauuucccauauc

SEQ ID NO: 685663 - RNA, 18 nt, Human
agcuggcccuggcugccg

SEQ ID NO: 685664 - RNA, 22 nt, Human
ugcaggugugguuccucagcca

SEQ ID NO: 685665 - RNA, 22 nt, Human
uccgguccggguacuccucucu

SEQ ID NO: 685666 - RNA, 22 nt, Human
ggaggaagcccucggugcccca

SEQ ID NO: 685667 - RNA, 23 nt, Human
cuugggcuagagacuuagcagug

SEQ ID NO: 685668 - RNA, 22 nt, Human
uuacaagacacugcugacacag

SEQ ID NO: 685669 - RNA, 22 nt, Human
uuucagagcugagaugccacag

SEQ ID NO: 685670 - RNA, 22 nt, Human
cccuggacuguucagggccuga

SEQ ID NO: 685671 - RNA, 22 nt, Human
agaaguuuugggaaauacugau

SEQ ID NO: 685672 - RNA, 22 nt, Human
gaaacauacgauuuaggagaaa

SEQ ID NO: 685673 - RNA, 22 nt, Human
uagcaucaugaucagaacuguu

SEQ ID NO: 685674 - RNA, 22 nt, Human
uuugcugaauagauuguaaacu

SEQ ID NO: 685675 - RNA, 22 nt, Human
ggccagggaggagaggccccug

SEQ ID NO: 685676 - RNA, 22 nt, Human
ugaagauuuccaccaaaucaca

SEQ ID NO: 685677 - RNA, 22 nt, Human
ucccagaguuuccuguguccca

SEQ ID NO: 685678 - RNA, 22 nt, Human
cugagggaugggcugggccgcc

SEQ ID NO: 685679 - RNA, 19 nt, Human
gggaugggcccucacccuc

SEQ ID NO: 685680 - RNA, 22 nt, Human
aauuaagucacacaccuaaacc

SEQ ID NO: 685681 - RNA, 22 nt, Human
uggccaggcuggucuggaacgc

SEQ ID NO: 685682 - RNA, 22 nt, Human
agggacucgguugagugccccu

SEQ ID NO: 685683 - RNA, 22 nt, Human
cuggagagggagcccuggcagu

SEQ ID NO: 685684 - RNA, 22 nt, Human
agggcugggcugcuuguuguca

SEQ ID NO: 685685 - RNA, 23 nt, Human
aggauggguggcaauagaaagac

SEQ ID NO: 685686 - RNA, 23 nt, Human
ugcagagggacugaagccagcuu

SEQ ID NO: 685687 - RNA, 22 nt, Human
cuuccugaggugcugagcacag

SEQ ID NO: 685688 - RNA, 22 nt, Human
aguuacaaacacuaucaguucu

SEQ ID NO: 685689 - RNA, 22 nt, Human
cauauuaaggucuguaaggggu

SEQ ID NO: 685690 - RNA, 22 nt, Human
aaugauguauuaguacaacaca

SEQ ID NO: 685691 - RNA, 22 nt, Human
gaggcuguucaguguccagcuu

SEQ ID NO: 685692 - RNA, 22 nt, Human
gcaggggcugagcaccagcggg

SEQ ID NO: 685693 - RNA, 22 nt, Human
caucuguagcuccaugacaauu

SEQ ID NO: 685694 - RNA, 23 nt, Human
aagcaaugcugagccaguucuga

SEQ ID NO: 685695 - RNA, 22 nt, Human
gagccagcgccuugccucuggg

SEQ ID NO: 685696 - RNA, 22 nt, Human
aggcagcagccacaaggccuga

SEQ ID NO: 685697 - RNA, 22 nt, Human
ugcaugcacgugcuauguauga

SEQ ID NO: 685698 - RNA, 22 nt, Human
uagcagaaccagcagucaauuu

SEQ ID NO: 685699 - RNA, 22 nt, Human
uucucuaggaguucugggauca

SEQ ID NO: 685700 - RNA, 22 nt, Human
accugaaacucaacuuuaucuc

SEQ ID NO: 685701 - RNA, 22 nt, Human
uacauacaagauguguuuaaaa

SEQ ID NO: 685702 - RNA, 22 nt, Human
ugccuggguucccaccccaaag

SEQ ID NO: 685703 - RNA, 22 nt, Human
gacacaugaccauaaaugcuaa

SEQ ID NO: 685704 - RNA, 21 nt, Human
ccaggcuccugaggcugguca

SEQ ID NO: 685705 - RNA, 22 nt, Human
uaagacaugagacucagccagu

SEQ ID NO: 685706 - RNA, 22 nt, Human
acaguaaacaaugcagcaaauu

SEQ ID NO: 685707 - RNA, 22 nt, Human
uuaaagcacuaaaugaugaggg

SEQ ID NO: 685708 - RNA, 22 nt, Human
caccucaggcagcaaagucuca

SEQ ID NO: 685709 - RNA, 22 nt, Human
uggaggagaauuuauggucgaa

SEQ ID NO: 685710 - RNA, 23 nt, Human
caugccaguuugugcaggcagau

SEQ ID NO: 685711 - RNA, 23 nt, Human
gacacaggagcacccagcugagc

SEQ ID NO: 685712 - RNA, 22 nt, Human
cagugccaugaugcagagcaau

SEQ ID NO: 685713 - RNA, 22 nt, Human
ucagccaugucaggggaaugac

SEQ ID NO: 685714 - RNA, 22 nt, Human
aaacaacaauccaaugggagcu

SEQ ID NO: 685715 - RNA, 22 nt, Human
acucugccaucccaggugcugu

SEQ ID NO: 685716 - RNA, 22 nt, Human
cacuaagauuuaaaguauuagu

SEQ ID NO: 685717 - RNA, 22 nt, Human
augaaacaacagacuuggucaa

SEQ ID NO: 685718 - RNA, 22 nt, Human
aggaucauauaagcuccagcua

SEQ ID NO: 685719 - RNA, 22 nt, Human
uuucaaagaccauuaacuauca

SEQ ID NO: 685720 - RNA, 22 nt, Human
guuaguggguuacucucagccc

SEQ ID NO: 685721 - RNA, 22 nt, Human
cugcaguuugcuaagagacaaa

SEQ ID NO: 685722 - RNA, 22 nt, Human
aggucacaggguugaaguacuu

SEQ ID NO: 685723 - RNA, 19 nt, Human
acugccugaggcucacagg

SEQ ID NO: 685724 - RNA, 21 nt, Human
acacagcugccggagacggau

SEQ ID NO: 685725 - RNA, 22 nt, Human
guggcgaggggagguccuggcg

SEQ ID NO: 685726 - RNA, 22 nt, Human
cugugcuggagaugggccagag

SEQ ID NO: 685727 - RNA, 22 nt, Human
uucauacauuuuuacuaacagc

SEQ ID NO: 685728 - RNA, 22 nt, Human
acauuccugaggaaauacauuc

SEQ ID NO: 685729 - RNA, 22 nt, Human
uaugaguuuaaggcuaaaauag

SEQ ID NO: 685730 - RNA, 22 nt, Human
acaaaggcauagugaauguuuu

SEQ ID NO: 685731 - RNA, 22 nt, Human
acagcagagaacuuuagagggu

SEQ ID NO: 685732 - RNA, 22 nt, Human
accaaggaagaaucuauuugag

SEQ ID NO: 685733 - RNA, 22 nt, Human
agggccaaguccaggaccucgg

SEQ ID NO: 685734 - RNA, 23 nt, Human
agaugaaagcuucccaucacagu

SEQ ID NO: 685735 - RNA, 22 nt, Human
agcugccuggccggagccacug

SEQ ID NO: 685736 - RNA, 23 nt, Human
ugaugggaaggaacgacuaccac

SEQ ID NO: 685737 - RNA, 22 nt, Human
ugucaaauuuuuauugcaguau

SEQ ID NO: 685738 - RNA, 22 nt, Human
agucucuuaaugggcagaaagu

SEQ ID NO: 685739 - RNA, 22 nt, Human
aguguauucugcaugggagacu

SEQ ID NO: 685740 - RNA, 22 nt, Human
gggcugagagcuggaaucugag

SEQ ID NO: 685741 - RNA, 22 nt, Human
aggcuggcuggcaggggacaca

SEQ ID NO: 685742 - RNA, 22 nt, Human
ucuggcucaaaauacguacucu

SEQ ID NO: 685743 - RNA, 22 nt, Human
aauucaguugugucugaccucg

SEQ ID NO: 685744 - RNA, 22 nt, Human
aucuccgccaucgcgaacgccu

SEQ ID NO: 685745 - RNA, 22 nt, Human
ugagcagcuacuguguucaggg

SEQ ID NO: 685746 - RNA, 22 nt, Human
caggucucuuuugucacaccac

SEQ ID NO: 685747 - RNA, 21 nt, Human
guuuaugaaucuuguccugcu

SEQ ID NO: 685748 - RNA, 22 nt, Human
cagucagagucacaguaauuug

SEQ ID NO: 685749 - RNA, 22 nt, Human
gugcacaucgugcagguuuguu

SEQ ID NO: 685750 - RNA, 22 nt, Human
uuucauagcugaaaauguugaa

SEQ ID NO: 685751 - RNA, 22 nt, Human
cagcugguguccagggaagugg

SEQ ID NO: 685752 - RNA, 22 nt, Human
ucccagauuccugcucuuauau

SEQ ID NO: 685753 - RNA, 22 nt, Human
ugccuucaaucaggauggucuc

SEQ ID NO: 685754 - RNA, 22 nt, Human
caagaaacuuuauucugccaua

SEQ ID NO: 685755 - RNA, 22 nt, Human
gagcuaagaccugagggcaagu

SEQ ID NO: 685756 - RNA, 22 nt, Human
agcauauucaugccagacuacu

SEQ ID NO: 685757 - RNA, 18 nt, Human
aucuuuccauagcauguu

SEQ ID NO: 685758 - RNA, 22 nt, Human
cucagcccagcccaggaccagg

SEQ ID NO: 685759 - RNA, 22 nt, Human
cuggagaacagagcuguuuaga

SEQ ID NO: 685760 - RNA, 22 nt, Human
acaugaucugacuugcuuuuua

SEQ ID NO: 685761 - RNA, 19 nt, Human
ggaagagaggaaaggugga

SEQ ID NO: 685762 - RNA, 22 nt, Human
ugauggcuuauggagagagcaa

SEQ ID NO: 685763 - RNA, 22 nt, Human
uuucacaucaugggauggaagc

SEQ ID NO: 685764 - RNA, 22 nt, Human
aagauguugcauuagaauaccu

SEQ ID NO: 685765 - RNA, 22 nt, Human
cuguuguaucauuuguucacau

SEQ ID NO: 685766 - RNA, 22 nt, Human
ccagggaagucacauugucuag

SEQ ID NO: 685767 - RNA, 22 nt, Human
uuaggaagagcuuucaaucacu

SEQ ID NO: 685768 - RNA, 22 nt, Human
ucagggacagggugcugcugcg

SEQ ID NO: 685769 - RNA, 22 nt, Human
ucaugcaacggcucgcugagcc

SEQ ID NO: 685770 - RNA, 22 nt, Human
ucucagucuuugcaaggaugcu

SEQ ID NO: 685771 - RNA, 22 nt, Human
auguaucaacaaauuguacagu

SEQ ID NO: 685772 - RNA, 22 nt, Human
cguucucucaugaucuucccga

SEQ ID NO: 685773 - RNA, 22 nt, Human
agcaagcagaaaugccauggca

SEQ ID NO: 685774 - RNA, 22 nt, Human
ucagcucuguuuugaguggaac

SEQ ID NO: 685775 - RNA, 22 nt, Human
ggcuguggccagcggggcugag

SEQ ID NO: 685776 - RNA, 22 nt, Human
uggagcuggaagaauguagacg

SEQ ID NO: 685777 - RNA, 22 nt, Human
accuuagaaaaucaaaauuaga

SEQ ID NO: 685778 - RNA, 22 nt, Human
ucccaggaugugcgugccgccg

SEQ ID NO: 685779 - RNA, 22 nt, Human
aaacuugagucacuucucuucc

SEQ ID NO: 685780 - RNA, 22 nt, Human
gaacacugaggacacugagaau

SEQ ID NO: 685781 - RNA, 22 nt, Human
agggcccuagggaaugagacau

SEQ ID NO: 685782 - RNA, 22 nt, Human
uccagguaggccaagacagcua

SEQ ID NO: 685783 - RNA, 22 nt, Human
agaggcugcaggcuggaaauca

SEQ ID NO: 685784 - RNA, 22 nt, Human
ugcauaacuagaguaauuacag

SEQ ID NO: 685785 - RNA, 22 nt, Human
auaucuuuguaugguucagcag

SEQ ID NO: 685786 - RNA, 22 nt, Human
ccuguccuccaagagcacaucu

SEQ ID NO: 685787 - RNA, 22 nt, Human
gguccuugggucuccuguguuu

SEQ ID NO: 685788 - RNA, 22 nt, Human
cuccccaccuucgcggucccug

SEQ ID NO: 685789 - RNA, 22 nt, Human
ucucugggucucaguuuguaca

SEQ ID NO: 685790 - RNA, 22 nt, Human
aucaauuuugaggauacaagaa

SEQ ID NO: 685791 - RNA, 22 nt, Human
ggugucugugauggcauauaac

SEQ ID NO: 685792 - RNA, 21 nt, Human
aauugaagauguggagccauu

SEQ ID NO: 685793 - RNA, 22 nt, Human
gagcccaggcugggguucagag

SEQ ID NO: 685794 - RNA, 22 nt, Human
aauguuacaguuuuaauucuga

SEQ ID NO: 685795 - RNA, 22 nt, Human
cuaguccacuguccugccucca

SEQ ID NO: 685796 - RNA, 22 nt, Human
aagucagaaaucaucuagugua

SEQ ID NO: 685797 - RNA, 22 nt, Human
ucagagcagcauuuuacaggau

SEQ ID NO: 685798 - RNA, 22 nt, Human
aaauggugagggaauugaacag

SEQ ID NO: 685799 - RNA, 22 nt, Human
acauucuguuuccccaaagaga

SEQ ID NO: 685800 - RNA, 22 nt, Human
aaaguuacacgacuauuuaugu

SEQ ID NO: 685801 - RNA, 22 nt, Human
uuaugcaacaggugagcagaca

SEQ ID NO: 685802 - RNA, 22 nt, Human
uuauuuugguaaauguuugccu

SEQ ID NO: 685803 - RNA, 22 nt, Human
gagaggucaucucccaucagca

SEQ ID NO: 685804 - RNA, 22 nt, Human
uggucucugagccuuccugugg

SEQ ID NO: 685805 - RNA, 22 nt, Human
ccuagaugggauggcggccggg

SEQ ID NO: 685806 - RNA, 22 nt, Human
agaaaggaggaagaaugaccuc

SEQ ID NO: 685807 - RNA, 22 nt, Human
cuucucucggugcaucccucac

SEQ ID NO: 685808 - RNA, 22 nt, Human
uuuaagaaguuauguuauaaau

SEQ ID NO: 685809 - RNA, 22 nt, Human
uaauuuaauccaaguguuacau

SEQ ID NO: 685810 - RNA, 22 nt, Human
gcucccuuaguccuugccggga

SEQ ID NO: 685811 - RNA, 22 nt, Human
uugcaaauguuauacugccagu

SEQ ID NO: 685812 - RNA, 22 nt, Human
gagcugcuuccagaguugagug

SEQ ID NO: 685813 - RNA, 22 nt, Human
acccuccccaagaggucgugcc

SEQ ID NO: 685814 - RNA, 22 nt, Human
ucuggagauaagcagcaaugaa

SEQ ID NO: 685815 - RNA, 22 nt, Human
cagcuucuuacgagcugguacu

SEQ ID NO: 685816 - RNA, 22 nt, Human
uucauauuugaaacagaaguua

SEQ ID NO: 685817 - RNA, 22 nt, Human
caagacaugcaauugccacuuu

SEQ ID NO: 685818 - RNA, 22 nt, Human
gagggccaacuagcaccacuuu

SEQ ID NO: 685819 - RNA, 22 nt, Human
gccugcuguugagggaagagcu

SEQ ID NO: 685820 - RNA, 19 nt, Human
ugcagcugucucuauauua

SEQ ID NO: 685821 - RNA, 22 nt, Human
ggucucauguccuaugugcuua

SEQ ID NO: 685822 - RNA, 22 nt, Human
cagcaggaccauugaggcauca

SEQ ID NO: 685823 - RNA, 19 nt, Human
uuucuaagcuaaaugcuuc

SEQ ID NO: 685824 - RNA, 22 nt, Human
gagguggcugcuugcugggaaa

SEQ ID NO: 685825 - RNA, 22 nt, Human
aacuuuucauuccaaaggugcu

SEQ ID NO: 685826 - RNA, 22 nt, Human
ucagugaaaugcauauucuucg

SEQ ID NO: 685827 - RNA, 22 nt, Human
uugguuaaaaucaaauuaauca

SEQ ID NO: 685828 - RNA, 22 nt, Human
gguguagcucugugucccacug

SEQ ID NO: 685829 - RNA, 22 nt, Human
agaugcugugucuguucccuug

SEQ ID NO: 685830 - RNA, 19 nt, Human
cugggucuuauucugugaa

SEQ ID NO: 685831 - RNA, 22 nt, Human
aagcaaagugcuuugccuccag

SEQ ID NO: 685832 - RNA, 22 nt, Human
uggcugagggcacuaugaagcc

SEQ ID NO: 685833 - RNA, 22 nt, Human
aaggggugagcagaggcuucgc

SEQ ID NO: 685834 - RNA, 21 nt, Human
uucuacaggaugaaugaaaac

SEQ ID NO: 685835 - RNA, 22 nt, Human
ccagggcagugggagaaggugc

SEQ ID NO: 685836 - RNA, 22 nt, Human
uaacauuacggacaucugucag

SEQ ID NO: 685837 - RNA, 22 nt, Human
cagagacagccugggagggaca

SEQ ID NO: 685838 - RNA, 22 nt, Human
auuuaugagcugaaccaugaaa

SEQ ID NO: 685839 - RNA, 22 nt, Human
gcugcuccgucugagcucuggu

SEQ ID NO: 685840 - RNA, 22 nt, Human
gcuuuagaucugacuuucugug

SEQ ID NO: 685841 - RNA, 22 nt, Human
gcugcuuucuguuaggaauugg

SEQ ID NO: 685842 - RNA, 22 nt, Human
augagguggucuucaguagguc

SEQ ID NO: 685843 - RNA, 22 nt, Human
cauggaacaaggaagauguuug

SEQ ID NO: 685844 - RNA, 22 nt, Human
agggcugagugggagagaguug

SEQ ID NO: 685845 - RNA, 22 nt, Human
agugcguggaccccuggcugcu

SEQ ID NO: 685846 - RNA, 22 nt, Human
uuugaaauaugaggcauuauga

SEQ ID NO: 685847 - RNA, 22 nt, Human
uauagugcauuauuuacaguaa

SEQ ID NO: 685848 - RNA, 20 nt, Human
ggaagcuguggguccccagg

SEQ ID NO: 685849 - RNA, 22 nt, Human
auaacagugaccucucagcacc

SEQ ID NO: 685850 - RNA, 22 nt, Human
agacuaaauaguuacagguagg

SEQ ID NO: 685851 - RNA, 22 nt, Human
aucaggaagaauuggaugcuac

SEQ ID NO: 685852 - RNA, 22 nt, Human
ucucagaguuuacggggcugaa

SEQ ID NO: 685853 - RNA, 19 nt, Human
ugguggcaaugucagcuaa

SEQ ID NO: 685854 - RNA, 22 nt, Human
uacaguuucccagcagaugcaa

SEQ ID NO: 685855 - RNA, 22 nt, Human
cugccuguggguacaaguggaa

SEQ ID NO: 685856 - RNA, 22 nt, Human
cuaggcacuuguaaggccgcuc

SEQ ID NO: 685857 - RNA, 22 nt, Human
gagguggcgcgccaucccugcc

SEQ ID NO: 685858 - RNA, 22 nt, Human
agggggcucagcauggauggag

SEQ ID NO: 685859 - RNA, 22 nt, Human
ugccuggaucugaggacccauu

SEQ ID NO: 685860 - RNA, 22 nt, Human
augucaaacacaacaccagugg

SEQ ID NO: 685861 - RNA, 22 nt, Human
aaacucaagucuaugaacaagg

SEQ ID NO: 685862 - RNA, 22 nt, Human
aaauacugcugcuauuccuuuu

SEQ ID NO: 685863 - RNA, 22 nt, Human
ugucugaacugcacugaaagac

SEQ ID NO: 685864 - RNA, 22 nt, Human
uugccugcuacggucuucacug

SEQ ID NO: 685865 - RNA, 19 nt, Human
caggagagcaugcacuuug

SEQ ID NO: 685866 - RNA, 22 nt, Human
gcuuccuugggaaaauuagaug

SEQ ID NO: 685867 - RNA, 22 nt, Human
cugcccaggggagugcugucgg

SEQ ID NO: 685868 - RNA, 22 nt, Human
ggcuggccucuacagggaggca

SEQ ID NO: 685869 - RNA, 22 nt, Human
cagcucaggcacuggcgcggga

SEQ ID NO: 685870 - RNA, 22 nt, Human
gaccagcucucugaagaaagag

SEQ ID NO: 685871 - RNA, 22 nt, Human
cagugucucaguuucacuugaa

SEQ ID NO: 685872 - RNA, 18 nt, Human
accugccuguucuucucu

SEQ ID NO: 685873 - RNA, 22 nt, Human
cugcagaggccucgccuccucu

SEQ ID NO: 685874 - RNA, 22 nt, Human
ucaggaucggccuuuuuuuaag

SEQ ID NO: 685875 - RNA, 22 nt, Human
uagcagaaccagucagugagcc

SEQ ID NO: 685876 - RNA, 22 nt, Human
ucugaagacauaugauauggug

SEQ ID NO: 685877 - RNA, 22 nt, Human
aagcacaggggaaauaaguugu

SEQ ID NO: 685878 - RNA, 22 nt, Human
cuauauuuggugagggaugucu

SEQ ID NO: 685879 - RNA, 22 nt, Human
cugcacacauauggcuucucuc

SEQ ID NO: 685880 - RNA, 22 nt, Human
cagcuggcugcaugaugccaaa

SEQ ID NO: 685881 - RNA, 22 nt, Human
aguuuguaaacuugagcuagcc

SEQ ID NO: 685882 - RNA, 22 nt, Human
ucauuuacuguaggcaaaaauu

SEQ ID NO: 685883 - RNA, 22 nt, Human
cuguccugcaguugggggcagg

SEQ ID NO: 685884 - RNA, 22 nt, Human
cagcuccugaggacugcuggga

SEQ ID NO: 685885 - RNA, 22 nt, Human
ucucuggguugagaacuaggac

SEQ ID NO: 685886 - RNA, 22 nt, Human
ucuccaggugaaacuugcaggg

SEQ ID NO: 685887 - RNA, 22 nt, Human
gccagcuggaaaucugcuugaa

SEQ ID NO: 685888 - RNA, 22 nt, Human
gggccaagggugcguggcagga

SEQ ID NO: 685889 - RNA, 22 nt, Human
cugagcagccccaccagccauu

SEQ ID NO: 685890 - RNA, 22 nt, Human
uccaggcauguggccaguacuc

SEQ ID NO: 685891 - RNA, 18 nt, Human
uccaaaaucauguauuuu

SEQ ID NO: 685892 - RNA, 22 nt, Human
auguaauaggguaacauaacau

SEQ ID NO: 685893 - RNA, 22 nt, Human
ucugggcaauggaugcacucac

SEQ ID NO: 685894 - RNA, 22 nt, Human
ggccucugccccagccacaccu

SEQ ID NO: 685895 - RNA, 22 nt, Human
auuucucacucacaguccaugu

SEQ ID NO: 685896 - RNA, 22 nt, Human
uagcaggaaaccuguguugagg

SEQ ID NO: 685897 - RNA, 22 nt, Human
ggaagaaaugcucuucuaugcg

SEQ ID NO: 685898 - RNA, 21 nt, Human
ugucacauugucccugcugcu

SEQ ID NO: 685899 - RNA, 22 nt, Human
ugagguaggugguaagagauac

SEQ ID NO: 685900 - RNA, 22 nt, Human
auacaugcuuggguguagugcg

SEQ ID NO: 685901 - RNA, 22 nt, Human
uacauguuugguaaaugauggc

SEQ ID NO: 685902 - RNA, 22 nt, Human
aacacagcuaauuucugucaau

SEQ ID NO: 685903 - RNA, 21 nt, Human
agacaaugcuguaaaauucag

SEQ ID NO: 685904 - RNA, 22 nt, Human
aagaguuucuuuauuaaccuuu

SEQ ID NO: 685905 - RNA, 22 nt, Human
aauggcaagcugaacucagaag

SEQ ID NO: 685906 - RNA, 22 nt, Human
uuuguaugaacugguauguagg

SEQ ID NO: 685907 - RNA, 22 nt, Human
agcugccucugaacuuuaauuc

SEQ ID NO: 685908 - RNA, 22 nt, Human
aggcaagauuaggaccagaaga

SEQ ID NO: 685909 - RNA, 21 nt, Human
ggagucauuagucauuuccuu

SEQ ID NO: 685910 - RNA, 22 nt, Human
gauuuccaggacgggagguggg

SEQ ID NO: 685911 - RNA, 22 nt, Human
uucuucuugaaacuuuagguug

SEQ ID NO: 685912 - RNA, 22 nt, Human
ggagggacccacugcggugacc

SEQ ID NO: 685913 - RNA, 22 nt, Human
aggccagcucuacccuuggacu

SEQ ID NO: 685914 - RNA, 22 nt, Human
uagaagugaaagacuugauguc

SEQ ID NO: 685915 - RNA, 22 nt, Human
ugacacagauuagagacauacc

SEQ ID NO: 685916 - RNA, 22 nt, Human
uccggggcuuccccgcagugcc

SEQ ID NO: 685917 - RNA, 22 nt, Human
aguuacuuucugaucagugugu

SEQ ID NO: 685918 - RNA, 22 nt, Human
ucaguuuuuguuugccagauag

SEQ ID NO: 685919 - RNA, 22 nt, Human
guuccucaguuguaaaaaaugu

SEQ ID NO: 685920 - RNA, 22 nt, Human
uauugauucugucccaaguuga

SEQ ID NO: 685921 - RNA, 22 nt, Human
ugcagcagccucaucugguuuc

SEQ ID NO: 685922 - RNA, 22 nt, Human
cuauggucuggaccgagguccu

SEQ ID NO: 685923 - RNA, 22 nt, Human
agaauauugaaaguucuugaca

SEQ ID NO: 685924 - RNA, 22 nt, Human
acauuucuccuugcaggaguca

SEQ ID NO: 685925 - RNA, 22 nt, Human
agcagagcaugcuaagugacuc

SEQ ID NO: 685926 - RNA, 22 nt, Human
acaguccuguugucaaagcaau

SEQ ID NO: 685927 - RNA, 22 nt, Human
ucagaagucacuuaggaaaggg

SEQ ID NO: 685928 - RNA, 22 nt, Human
ccaggacccugcaaacccuguu

SEQ ID NO: 685929 - RNA, 22 nt, Human
gucuggcauucuuccuggagaa

SEQ ID NO: 685930 - RNA, 22 nt, Human
accucaguucaauucaguuaga

SEQ ID NO: 685931 - RNA, 22 nt, Human
ggccaggcugcugggaccccgc

SEQ ID NO: 685932 - RNA, 22 nt, Human
uaucaauugggccaaaugguac

SEQ ID NO: 685933 - RNA, 22 nt, Human
gggcagucacagugcuggagca

SEQ ID NO: 685934 - RNA, 22 nt, Human
uuucaacagaauaugaucagag

SEQ ID NO: 685935 - RNA, 22 nt, Human
aaggaacugaugcucaaagaau

SEQ ID NO: 685936 - RNA, 23 nt, Human
ugccucaguggaaugugagggug

SEQ ID NO: 685937 - RNA, 22 nt, Human
ugcuaggaauacacagagcaau

SEQ ID NO: 685938 - RNA, 22 nt, Human
gugucuuaggguugcacagagu

SEQ ID NO: 685939 - RNA, 22 nt, Human
uauuggauugagacauuuuaga

SEQ ID NO: 685940 - RNA, 22 nt, Human
agugucagccugggcaaggaac

SEQ ID NO: 685941 - RNA, 22 nt, Human
ggcagccaguagggccagccug

SEQ ID NO: 685942 - RNA, 22 nt, Human
gcacugaugcaaaaaucacuca

SEQ ID NO: 685943 - RNA, 22 nt, Human
accagggcacaggagucugaag

SEQ ID NO: 685944 - RNA, 22 nt, Human
aagaaacugaaaguggcuucau

SEQ ID NO: 685945 - RNA, 22 nt, Human
gggcucugggucgugucuccau

SEQ ID NO: 685946 - RNA, 22 nt, Human
agugguggagagaugaggacac

SEQ ID NO: 685947 - RNA, 22 nt, Human
ggcuggugaguucagagaaccc

SEQ ID NO: 685948 - RNA, 22 nt, Human
gaaaguauuuacauuaacaucu

SEQ ID NO: 685949 - RNA, 22 nt, Human
uaucagcgugcaaaucuuugga

SEQ ID NO: 685950 - RNA, 22 nt, Human
ugcauuccacacccauagagau

SEQ ID NO: 685951 - RNA, 20 nt, Human
ucaucagauagguuaguaca

SEQ ID NO: 685952 - RNA, 22 nt, Human
ugugaagauuuggcaugcagaa

SEQ ID NO: 685953 - RNA, 18 nt, Human
cauguguucuacaucagu

SEQ ID NO: 685954 - RNA, 22 nt, Human
uuucaaaggaggcugagaggau

SEQ ID NO: 685955 - RNA, 22 nt, Human
uuucacaggaguuguaccauuu

SEQ ID NO: 685956 - RNA, 22 nt, Human
gaauugcuaaccaauucaaaau

SEQ ID NO: 685957 - RNA, 22 nt, Human
gagagacuggaaugggcugugg

SEQ ID NO: 685958 - RNA, 22 nt, Human
ggcuguggucauuaggagguug

SEQ ID NO: 685959 - RNA, 22 nt, Human
agaggcugucucauauuuugua

SEQ ID NO: 685960 - RNA, 21 nt, Human
acuccaaacaaguuaagcugu

SEQ ID NO: 685961 - RNA, 22 nt, Human
ugucucugugcauuugugcuuc

SEQ ID NO: 685962 - RNA, 22 nt, Human
uaaugucuuuaagagcauuggg

SEQ ID NO: 685963 - RNA, 22 nt, Human
aaagauuauggcauugaaauac

SEQ ID NO: 685964 - RNA, 22 nt, Human
uugauuuugccugaucugagag

SEQ ID NO: 685965 - RNA, 22 nt, Human
ggccaagguggagaaggcacug

SEQ ID NO: 685966 - RNA, 22 nt, Human
acaacuucaauugggauucucc

SEQ ID NO: 685967 - RNA, 22 nt, Human
uugaaugaggaagagcacuggc

SEQ ID NO: 685968 - RNA, 23 nt, Human
uaugugcauauguguaagaauac

SEQ ID NO: 685969 - RNA, 22 nt, Human
agagcccugugguucugguaag

SEQ ID NO: 685970 - RNA, 22 nt, Human
uuuuaagaugcuaguauuucag

SEQ ID NO: 685971 - RNA, 22 nt, Human
guuccuuguaauuuguuaagga

SEQ ID NO: 685972 - RNA, 22 nt, Human
gcaggagugacauggaugugga

SEQ ID NO: 685973 - RNA, 23 nt, Human
augauguuuuugguagucaaaug

SEQ ID NO: 685974 - RNA, 22 nt, Human
auuuguacucaggaauucugcu

SEQ ID NO: 685975 - RNA, 18 nt, Human
agaguguucucagugaaa

SEQ ID NO: 685976 - RNA, 22 nt, Human
auugcuaaugugcgaaugugua

SEQ ID NO: 685977 - RNA, 22 nt, Human
aagccaggaauggagucuucgc

SEQ ID NO: 685978 - RNA, 22 nt, Human
ugagaggcgcucacucucaggu

SEQ ID NO: 685979 - RNA, 22 nt, Human
aauuauccaccuuugcaugauu

SEQ ID NO: 685980 - RNA, 22 nt, Human
ccuucucuacuccugaugcaug

SEQ ID NO: 685981 - RNA, 23 nt, Human
aggaggccugaaacugaggcuga

SEQ ID NO: 685982 - RNA, 22 nt, Human
uaaauuaaagauuggagaagga

SEQ ID NO: 685983 - RNA, 22 nt, Human
acaauguagaggcugaaagcaa

SEQ ID NO: 685984 - RNA, 22 nt, Human
ucccugcucagcucaccuggca

SEQ ID NO: 685985 - RNA, 22 nt, Human
aggaugugaguggacacagucc

SEQ ID NO: 685986 - RNA, 22 nt, Human
acacugguguaguuuucugcag

SEQ ID NO: 685987 - RNA, 22 nt, Human
guugaaaguggagaaccugguu

SEQ ID NO: 685988 - RNA, 22 nt, Human
uggugacagcauggaagaagug

SEQ ID NO: 685989 - RNA, 22 nt, Human
agagagaggggcgagcaaacac

SEQ ID NO: 685990 - RNA, 23 nt, Human
gcuaggugcuuccacacgugcug

SEQ ID NO: 685991 - RNA, 22 nt, Human
gcucucuguuauuaagaucuuu

SEQ ID NO: 685992 - RNA, 22 nt, Human
agcuggugugccaguuccaguu

SEQ ID NO: 685993 - RNA, 22 nt, Human
aagucacacugcugggaacucu

SEQ ID NO: 685994 - RNA, 22 nt, Human
uaaguuccuggaaggcaaggau

SEQ ID NO: 685995 - RNA, 22 nt, Human
auuauccaacacccaguuacau

SEQ ID NO: 685996 - RNA, 22 nt, Human
ugcagaacgggucuucuagcac

SEQ ID NO: 685997 - RNA, 22 nt, Human
ugagaguauuuuggcauuauca

SEQ ID NO: 685998 - RNA, 22 nt, Human
acucagagaauaucuagaagga

SEQ ID NO: 685999 - RNA, 22 nt, Human
cauggcagagaaggggaacugg

SEQ ID NO: 686000 - RNA, 18 nt, Human
cuuggagaacuaaugaua

SEQ ID NO: 686001 - RNA, 19 nt, Human
acaugcauauggacaguug

SEQ ID NO: 686002 - RNA, 22 nt, Human
caaugcacauggacaucaggcu

SEQ ID NO: 686003 - RNA, 22 nt, Human
aggcagugagugugacuucaca

SEQ ID NO: 686004 - RNA, 22 nt, Human
agcuuguuagaaauguagacuc

SEQ ID NO: 686005 - RNA, 21 nt, Human
aguuacauguauagauaaagu

SEQ ID NO: 686006 - RNA, 22 nt, Human
gacuuuaaguaagucaaggagc

SEQ ID NO: 686007 - RNA, 22 nt, Human
cccucgccgcagcugcuucccg

SEQ ID NO: 686008 - RNA, 19 nt, Human
aauguuuaagagaaaaagg

SEQ ID NO: 686009 - RNA, 22 nt, Human
accaugggucagccaccucagc

SEQ ID NO: 686010 - RNA, 22 nt, Human
uaaguuugugucucuguuacuu

SEQ ID NO: 686011 - RNA, 22 nt, Human
cgcauacauagaaacacacaga

SEQ ID NO: 686012 - RNA, 22 nt, Human
ccaggaggcagagguuguagug

SEQ ID NO: 686013 - RNA, 23 nt, Human
gcagugugaauccaguguuucag

SEQ ID NO: 686014 - RNA, 22 nt, Human
ugagcagacucugcagagccac

SEQ ID NO: 686015 - RNA, 22 nt, Human
uuccaagugcccauauuucauc

SEQ ID NO: 686016 - RNA, 22 nt, Human
cauaaaguagcagagcaugacu

SEQ ID NO: 686017 - RNA, 22 nt, Human
gccuucccaagacgccugaguu

SEQ ID NO: 686018 - RNA, 22 nt, Human
gaaagugcucucucuauacaca

SEQ ID NO: 686019 - RNA, 20 nt, Human
uuacagaaaugauguuauuu

SEQ ID NO: 686020 - RNA, 22 nt, Human
agaugaaaauacgugacuuuaa

SEQ ID NO: 686021 - RNA, 22 nt, Human
ugaggagaaaugcucagagcca

SEQ ID NO: 686022 - RNA, 22 nt, Human
gcagaaggucaaagcaagaugu

SEQ ID NO: 686023 - RNA, 22 nt, Human
gcccugugagauuagaacagca

SEQ ID NO: 686024 - RNA, 22 nt, Human
aagauucuacaaacucugguaa

SEQ ID NO: 686025 - RNA, 22 nt, Human
uuggcacagagcugcagccugg

SEQ ID NO: 686026 - RNA, 22 nt, Human
cugccucucaggucccugagau

SEQ ID NO: 686027 - RNA, 22 nt, Human
aaauaagaggacagauguuugg

SEQ ID NO: 686028 - RNA, 22 nt, Human
gaaugcaaagcucucuauguua

SEQ ID NO: 686029 - RNA, 22 nt, Human
aggcugaaaacgagauggcaau

SEQ ID NO: 686030 - RNA, 22 nt, Human
ggcagccaugcacgcugccugg

SEQ ID NO: 686031 - RNA, 22 nt, Human
aaucuuaaagaauauucuacca

SEQ ID NO: 686032 - RNA, 22 nt, Human
cguauuuagaaggcugcugaaa

SEQ ID NO: 686033 - RNA, 22 nt, Human
ucagcugaaguggagaagcaga

SEQ ID NO: 686034 - RNA, 22 nt, Human
ccucagugaccuauugcauuca

SEQ ID NO: 686035 - RNA, 22 nt, Human
aaacuuuuauaaagcugcagau

SEQ ID NO: 686036 - RNA, 22 nt, Human
cugcagcugugagugcuggaug

SEQ ID NO: 686037 - RNA, 22 nt, Human
aggcccaguguggcuuccugga

SEQ ID NO: 686038 - RNA, 22 nt, Human
gcugaguugaaagcagaggaua

SEQ ID NO: 686039 - RNA, 22 nt, Human
ggaugcugacuuuggagcaugg

SEQ ID NO: 686040 - RNA, 22 nt, Human
ucacagcaguaaagaaaacacu

SEQ ID NO: 686041 - RNA, 16 nt, Human
ugcuggggcgccgucc

SEQ ID NO: 686042 - RNA, 22 nt, Human
aaauucauauguugaaaugcua

SEQ ID NO: 686043 - RNA, 22 nt, Human
caguggaagacucagcucuccc

SEQ ID NO: 686044 - RNA, 22 nt, Human
uucuucugugaggugugugccu

SEQ ID NO: 686045 - RNA, 22 nt, Human
aacacuucucaucacugcaagc

SEQ ID NO: 686046 - RNA, 22 nt, Human
acugcugcagguccagccccuu

SEQ ID NO: 686047 - RNA, 22 nt, Human
aaauaguuuagcucucauuuca

SEQ ID NO: 686048 - RNA, 22 nt, Human
aaacuguaagagaauaaacuac

SEQ ID NO: 686049 - RNA, 22 nt, Human
aggaccagccuccaggucucuu

SEQ ID NO: 686050 - RNA, 22 nt, Human
uggcuucuuugugacagcucuu

SEQ ID NO: 686051 - RNA, 22 nt, Human
aacagauaaguauaucuaugua

SEQ ID NO: 686052 - RNA, 22 nt, Human
gaugaaauucagaauugagggg

SEQ ID NO: 686053 - RNA, 22 nt, Human
uaacuuuaugacaugucuugcu

SEQ ID NO: 686054 - RNA, 22 nt, Human
ccaagaggaccuugccagggca

SEQ ID NO: 686055 - RNA, 22 nt, Human
uaugacuauagggcuuaguguu

SEQ ID NO: 686056 - RNA, 22 nt, Human
aacucaguguguuucuuaguau

SEQ ID NO: 686057 - RNA, 23 nt, Human
uggcagugaucaaaagcuuacau

SEQ ID NO: 686058 - RNA, 22 nt, Human
uaagaacuucggacauguuauc

SEQ ID NO: 686059 - RNA, 20 nt, Human
aaaugcuguaauguuuggga

SEQ ID NO: 686060 - RNA, 22 nt, Human
aagaguuuaugauauaacaugu

SEQ ID NO: 686061 - RNA, 22 nt, Human
caguguucccugaacauauguu

SEQ ID NO: 686062 - RNA, 22 nt, Human
ccagagaggcaaaacuccuucc

SEQ ID NO: 686063 - RNA, 22 nt, Human
auaucuuucaaagccaaaagua

SEQ ID NO: 686064 - RNA, 22 nt, Human
auguggcucacauagcuggaaa

SEQ ID NO: 686065 - RNA, 22 nt, Human
aucugucuaugauauagucugu

SEQ ID NO: 686066 - RNA, 22 nt, Human
uaaaucagccuuugcuauuuua

SEQ ID NO: 686067 - RNA, 22 nt, Human
uuccaggaacaaacucaccuua

SEQ ID NO: 686068 - RNA, 22 nt, Human
uuccagaggcuucagggaagaa

SEQ ID NO: 686069 - RNA, 21 nt, Human
ugggacagugauggcuccucc

SEQ ID NO: 686070 - RNA, 22 nt, Human
gacuagggaaucauucuuggau

SEQ ID NO: 686071 - RNA, 18 nt, Human
uccauuguucuacuguga

SEQ ID NO: 686072 - RNA, 22 nt, Human
cccuggagugugacgaggcauu

SEQ ID NO: 686073 - RNA, 22 nt, Human
ucaaaaguuucacauagagaua

SEQ ID NO: 686074 - RNA, 22 nt, Human
caauguguguguuuuucucaac

SEQ ID NO: 686075 - RNA, 22 nt, Human
uuucuauaaaaagugcuaggau

SEQ ID NO: 686076 - RNA, 22 nt, Human
gggcuggcgggaaaggcaauuc

SEQ ID NO: 686077 - RNA, 22 nt, Human
auuuguaauuucuuaucugugu

SEQ ID NO: 686078 - RNA, 22 nt, Human
aaagcagagaucauggcuugua

SEQ ID NO: 686079 - RNA, 19 nt, Human
gccugcagaaaaggcaggg

SEQ ID NO: 686080 - RNA, 22 nt, Human
acaggcagguaauuuacauauu

SEQ ID NO: 686081 - RNA, 23 nt, Human
ugaggcugauugauuuuugcuca

SEQ ID NO: 686082 - RNA, 22 nt, Human
ccugugaggucuugcaugugaa

SEQ ID NO: 686083 - RNA, 22 nt, Human
ugugcccauuacacagaggcau

SEQ ID NO: 686084 - RNA, 22 nt, Human
gauuccugcuauucacagggcu

SEQ ID NO: 686085 - RNA, 22 nt, Human
uggacauguaaaggcucaaggu

SEQ ID NO: 686086 - RNA, 22 nt, Human
ugcagugguugagagcccagac

SEQ ID NO: 686087 - RNA, 22 nt, Human
agcugcuuagaguccucaggau

SEQ ID NO: 686088 - RNA, 22 nt, Human
gagcaccucaauuugcuauuug

SEQ ID NO: 686089 - RNA, 22 nt, Human
ugcagagauagaacuacuuucu

SEQ ID NO: 686090 - RNA, 22 nt, Human
acauaccauacauggugagaug

SEQ ID NO: 686091 - RNA, 22 nt, Human
gaaagggcaugggcaugacaac

SEQ ID NO: 686092 - RNA, 21 nt, Human
uauacagcaaagucuggagca

SEQ ID NO: 686093 - RNA, 22 nt, Human
auccucuguggauuacaccuag

SEQ ID NO: 686094 - RNA, 22 nt, Human
uagugucuuccaggacauggua

SEQ ID NO: 686095 - RNA, 22 nt, Human
uauaagaaauugccaaccuguu

SEQ ID NO: 686096 - RNA, 22 nt, Human
ggcagcaguccauggcccaagg

SEQ ID NO: 686097 - RNA, 22 nt, Human
auuucccagggcccucauaguu

SEQ ID NO: 686098 - RNA, 22 nt, Human
acauuuuucuaggaggcaaggu

SEQ ID NO: 686099 - RNA, 22 nt, Human
uccugugccuccaccugcuccg

SEQ ID NO: 686100 - RNA, 22 nt, Human
guauaucagacacucauaugua

SEQ ID NO: 686101 - RNA, 20 nt, Human
aucccucuuccuagaguccc

SEQ ID NO: 686102 - RNA, 22 nt, Human
ucagcuucaaauuuggugaagu

SEQ ID NO: 686103 - RNA, 22 nt, Human
uucucuuuugugaugugagaug

SEQ ID NO: 686104 - RNA, 22 nt, Human
ucaauucuaguggagagaguuu

SEQ ID NO: 686105 - RNA, 22 nt, Human
gaggcuccuccuuacauuuacc

SEQ ID NO: 686106 - RNA, 22 nt, Human
aguauguugaguuuugcuuuag

SEQ ID NO: 686107 - RNA, 17 nt, Human
aggggagagugggaaga

SEQ ID NO: 686108 - RNA, 22 nt, Human
cacaaugucugguaggccacuu

SEQ ID NO: 686109 - RNA, 22 nt, Human
ccucaggggucacugugaggag

SEQ ID NO: 686110 - RNA, 20 nt, Human
ggaccagguggggcgguggc

SEQ ID NO: 686111 - RNA, 22 nt, Human
cuccuggccacguucuugcugg

SEQ ID NO: 686112 - RNA, 22 nt, Human
ucagacaggcuucuuucucccu

SEQ ID NO: 686113 - RNA, 22 nt, Human
caaagggaaacgcagugucaag

SEQ ID NO: 686114 - RNA, 22 nt, Human
cuguuuauacucaaaagauaca

SEQ ID NO: 686115 - RNA, 22 nt, Human
acagucuuuagaguauuguccu

SEQ ID NO: 686116 - RNA, 22 nt, Human
gaccugcccacucugaggacau

SEQ ID NO: 686117 - RNA, 22 nt, Human
ugccuuuaggggccucucccuc

SEQ ID NO: 686118 - RNA, 22 nt, Human
augacaauacuucaauaagcug

SEQ ID NO: 686119 - RNA, 22 nt, Human
ugaagauugugcuuggccugua

SEQ ID NO: 686120 - RNA, 23 nt, Human
acaacaggaaaucagaccugaac

SEQ ID NO: 686121 - RNA, 22 nt, Human
ucagauuuccuugcaguuugga

SEQ ID NO: 686122 - RNA, 22 nt, Human
gauguagacacuuggaggcuua

SEQ ID NO: 686123 - RNA, 22 nt, Human
uggacucagugcugccauuccc

SEQ ID NO: 686124 - RNA, 22 nt, Human
gauauguauugaaugaucauuu

SEQ ID NO: 686125 - RNA, 22 nt, Human
auaguguguuagugacauaggc

SEQ ID NO: 686126 - RNA, 22 nt, Human
uagcacugagucuagcuuugga

SEQ ID NO: 686127 - RNA, 22 nt, Human
caguccuuggcaaguucucagu

SEQ ID NO: 686128 - RNA, 22 nt, Human
gaguggggcguggauccagcgu

SEQ ID NO: 686129 - RNA, 21 nt, Human
ucugggcccaugcugccucac

SEQ ID NO: 686130 - RNA, 22 nt, Human
ccagaggggcugagcaggucac

SEQ ID NO: 686131 - RNA, 22 nt, Human
cauuauauuuuacugcauggga

SEQ ID NO: 686132 - RNA, 22 nt, Human
ugcaaaaacugcaauugcuuuu

SEQ ID NO: 686133 - RNA, 22 nt, Human
caggcaagcacggugaaccugg

SEQ ID NO: 686134 - RNA, 22 nt, Human
ggccaggcacugugugagauau

SEQ ID NO: 686135 - RNA, 22 nt, Human
aaagcugguuauucugaggcag

SEQ ID NO: 686136 - RNA, 22 nt, Human
agagguauauauucuccauauu

SEQ ID NO: 686137 - RNA, 22 nt, Human
cauacauuuugcauauuuacca

SEQ ID NO: 686138 - RNA, 22 nt, Human
cugacuguuugcugaaaggucu

SEQ ID NO: 686139 - RNA, 22 nt, Human
ucuucauucucgccuuugucgu

SEQ ID NO: 686140 - RNA, 19 nt, Human
augauggucccauucaccu

SEQ ID NO: 686141 - RNA, 22 nt, Human
aguuucuugaagacugauguuu

SEQ ID NO: 686142 - RNA, 22 nt, Human
acugaaauggggacaguccuua

SEQ ID NO: 686143 - RNA, 22 nt, Human
uuucuuuuacaguguggcuauu

SEQ ID NO: 686144 - RNA, 22 nt, Human
ggcaggagaaaggucucuucuu

SEQ ID NO: 686145 - RNA, 22 nt, Human
uguacagugccaugcaguuugc

SEQ ID NO: 686146 - RNA, 22 nt, Human
guacaauuccugucaagcuggc

SEQ ID NO: 686147 - RNA, 22 nt, Human
gggggcuagagagaugaaauau

SEQ ID NO: 686148 - RNA, 22 nt, Human
acaauagucaaugcacgucauu

SEQ ID NO: 686149 - RNA, 22 nt, Human
uggcauguggcaauguugggau

SEQ ID NO: 686150 - RNA, 22 nt, Human
auaagagucuuguuuucuuauu

SEQ ID NO: 686151 - RNA, 22 nt, Human
uauauugaccaguacaauuggu

SEQ ID NO: 686152 - RNA, 22 nt, Human
uaggguacaugugcacaacaug

SEQ ID NO: 686153 - RNA, 22 nt, Human
uugaaacauuaccuguauuucc

SEQ ID NO: 686154 - RNA, 22 nt, Human
aaugcacauauauuuccuuauu

SEQ ID NO: 686155 - RNA, 22 nt, Human
ugauuuuuagcuauucugaaga

SEQ ID NO: 686156 - RNA, 22 nt, Human
uguccuggggcgacuuggggcc

SEQ ID NO: 686157 - RNA, 22 nt, Human
cagcuugggggcgcuggccuca

SEQ ID NO: 686158 - RNA, 22 nt, Human
uucaaagaauuuugagaccuga

SEQ ID NO: 686159 - RNA, 22 nt, Human
ugcauauccacaccuuaucucu

SEQ ID NO: 686160 - RNA, 22 nt, Human
auuuucucacaauccuaugggg

SEQ ID NO: 686161 - RNA, 22 nt, Human
caggagaggaggcuacuucuua

SEQ ID NO: 686162 - RNA, 17 nt, Human
aaccagcuguccccucc

SEQ ID NO: 686163 - RNA, 22 nt, Human
uuguauuucgaugcacguguag

SEQ ID NO: 686164 - RNA, 22 nt, Human
auuuacucgugcuucauugaau

SEQ ID NO: 686165 - RNA, 22 nt, Human
cuuguggagugccugcugcagu

SEQ ID NO: 686166 - RNA, 18 nt, Human
auauccaauaaugaacac

SEQ ID NO: 686167 - RNA, 22 nt, Human
agguccacaguucagcugccca

SEQ ID NO: 686168 - RNA, 22 nt, Human
gcacauauguaaauagcugccu

SEQ ID NO: 686169 - RNA, 22 nt, Human
aacucuugaauucccuugaaga

SEQ ID NO: 686170 - RNA, 22 nt, Human
gagggaaagguuaauacaugau

SEQ ID NO: 686171 - RNA, 22 nt, Human
agaaaagggcaggagggauaca

SEQ ID NO: 686172 - RNA, 22 nt, Human
ucagagcugugcuucaggaaag

SEQ ID NO: 686173 - RNA, 22 nt, Human
ggcggggucugagcgccgcgcc

SEQ ID NO: 686174 - RNA, 22 nt, Human
caaaugauagagccgauuauca

SEQ ID NO: 686175 - RNA, 22 nt, Human
ucccucagaaauucucucugaa

SEQ ID NO: 686176 - RNA, 20 nt, Human
uagauguuuccugucauaaa

SEQ ID NO: 686177 - RNA, 22 nt, Human
ucaguguugugcacauacaaaa

SEQ ID NO: 686178 - RNA, 22 nt, Human
cucucuuucauuggucgccuug

SEQ ID NO: 686179 - RNA, 19 nt, Human
agaguauugaauuugcccu

SEQ ID NO: 686180 - RNA, 23 nt, Human
gaguguucauagcaggcucuugc

SEQ ID NO: 686181 - RNA, 22 nt, Human
uucuaauuauucccuuguccca

SEQ ID NO: 686182 - RNA, 22 nt, Human
cagacuuucaaggagugaaggc

SEQ ID NO: 686183 - RNA, 22 nt, Human
uggcuucauuauuguuuuuccu

SEQ ID NO: 686184 - RNA, 22 nt, Human
uaguuaaagcccuaaauugaua

SEQ ID NO: 686185 - RNA, 22 nt, Human
cagagcccauccuauacucucc

SEQ ID NO: 686186 - RNA, 22 nt, Human
agggugccugcugcagguucag

SEQ ID NO: 686187 - RNA, 22 nt, Human
agaacuuuuggagacuuuuagu

SEQ ID NO: 686188 - RNA, 22 nt, Human
ugugugucagucuuguuuaggg

SEQ ID NO: 686189 - RNA, 22 nt, Human
auggggagagccucugucccca

SEQ ID NO: 686190 - RNA, 21 nt, Human
gcuggagagccaggcaggggc

SEQ ID NO: 686191 - RNA, 22 nt, Human
gcugaggcucaauccccuucug

SEQ ID NO: 686192 - RNA, 22 nt, Human
cugcugugcaacauugcaccua

SEQ ID NO: 686193 - RNA, 22 nt, Human
cacaguauuuguuuuucugagu

SEQ ID NO: 686194 - RNA, 22 nt, Human
cuguuuauaaauagaggggagu

SEQ ID NO: 686195 - RNA, 22 nt, Human
uauuaugaggcuuagggaugac

SEQ ID NO: 686196 - RNA, 22 nt, Human
aguggguacugggcaggcagag

SEQ ID NO: 686197 - RNA, 22 nt, Human
cagagucccagaugccccuccu

SEQ ID NO: 686198 - RNA, 21 nt, Human
aaugucauugaauggugagac

SEQ ID NO: 686199 - RNA, 22 nt, Human
ucuccuuucuuuuaaaauguca

SEQ ID NO: 686200 - RNA, 22 nt, Human
uucuucaauuauuggaaagaaa

SEQ ID NO: 686201 - RNA, 22 nt, Human
cuggccuggcaggggaccucua

SEQ ID NO: 686202 - RNA, 22 nt, Human
cagcucugcugguggugccagg

SEQ ID NO: 686203 - RNA, 22 nt, Human
aagucacuugauuguugacaga

SEQ ID NO: 686204 - RNA, 22 nt, Human
uucuguguucugugcaaugagc

SEQ ID NO: 686205 - RNA, 22 nt, Human
gaauuugugcucaggaagauua

SEQ ID NO: 686206 - RNA, 22 nt, Human
ccacagugaguuagauugacca

SEQ ID NO: 686207 - RNA, 22 nt, Human
uuccuuuagugucauauacuuu

SEQ ID NO: 686208 - RNA, 22 nt, Human
gggcugagaaguugaucccaag

SEQ ID NO: 686209 - RNA, 22 nt, Human
uuucaucuucccagagaccuug

SEQ ID NO: 686210 - RNA, 22 nt, Human
acauucuacaguuaaccauuag

SEQ ID NO: 686211 - RNA, 22 nt, Human
uucugaaaugagauauaaggua

SEQ ID NO: 686212 - RNA, 22 nt, Human
ugcugcuccccagcacacagca

SEQ ID NO: 686213 - RNA, 21 nt, Human
ugcuugucugccuagaggcuu

SEQ ID NO: 686214 - RNA, 22 nt, Human
uguuugaauuuugcuaacgugu

SEQ ID NO: 686215 - RNA, 22 nt, Human
uacaugcuucuauaugugaagu

SEQ ID NO: 686216 - RNA, 22 nt, Human
gucugggcaagggagauggcgc

SEQ ID NO: 686217 - RNA, 22 nt, Human
cugcaucucaggagacgggucu

SEQ ID NO: 686218 - RNA, 23 nt, Human
ucugaagaugcuguuuccaguga

SEQ ID NO: 686219 - RNA, 22 nt, Human
ccuuuaaguccucuuuuauauu

SEQ ID NO: 686220 - RNA, 22 nt, Human
uugacuuuauguguauguuuac

SEQ ID NO: 686221 - RNA, 22 nt, Human
gcccaggaguucaagucuagug

SEQ ID NO: 686222 - RNA, 22 nt, Human
caggguugcaugcaucuguggg

SEQ ID NO: 686223 - RNA, 22 nt, Human
cccuuuaaguccuggaacaaag

SEQ ID NO: 686224 - RNA, 22 nt, Human
acugccugugucccuucagugc

SEQ ID NO: 686225 - RNA, 22 nt, Human
cauggaaugguugaaugacgaa

SEQ ID NO: 686226 - RNA, 22 nt, Human
ucaaagcacuggggaaagccug

SEQ ID NO: 686227 - RNA, 22 nt, Human
auuagcauugcuacucucaaga

SEQ ID NO: 686228 - RNA, 22 nt, Human
ucagcaucacgugguccgagaa

SEQ ID NO: 686229 - RNA, 22 nt, Human
uagcucuucauuucaucugauu

SEQ ID NO: 686230 - RNA, 22 nt, Human
uucuguggucucccaugucugu

SEQ ID NO: 686231 - RNA, 22 nt, Human
agucuggauuuagaggugggcc

SEQ ID NO: 686232 - RNA, 22 nt, Human
guagggacccacagucuauauu

SEQ ID NO: 686233 - RNA, 17 nt, Human
gcuguaguuugauaaga

SEQ ID NO: 686234 - RNA, 22 nt, Human
cagaugaauaaaugaugaggua

SEQ ID NO: 686235 - RNA, 22 nt, Human
uuaggaaaggaacauugaaacg

SEQ ID NO: 686236 - RNA, 18 nt, Human
gcccguguggagaccaug

SEQ ID NO: 686237 - RNA, 22 nt, Human
gcagggcucagccgcucccacc

SEQ ID NO: 686238 - RNA, 22 nt, Human
gcaggaagaggcucgaagcccc

SEQ ID NO: 686239 - RNA, 21 nt, Human
ugacauuuccaauauaaagcc

SEQ ID NO: 686240 - RNA, 22 nt, Human
aaagccagcaaggugaguuuca

SEQ ID NO: 686241 - RNA, 22 nt, Human
auaaggaaaauuggagaaauug

SEQ ID NO: 686242 - RNA, 22 nt, Human
agcuggguguagggcuggacaa

SEQ ID NO: 686243 - RNA, 22 nt, Human
gguggcggccacuucagcccug

SEQ ID NO: 686244 - RNA, 22 nt, Human
uuuggcuuuagugccuucugau

SEQ ID NO: 686245 - RNA, 22 nt, Human
gccuauuuuauuaugcauguaa

SEQ ID NO: 686246 - RNA, 21 nt, Human
agaggaagugauuggucuggc

SEQ ID NO: 686247 - RNA, 19 nt, Human
cuugaaaugagacugaagg

SEQ ID NO: 686248 - RNA, 22 nt, Human
agcaccugucaaguccaggcug

SEQ ID NO: 686249 - RNA, 23 nt, Human
ccaggccucucagagggugugcc

SEQ ID NO: 686250 - RNA, 22 nt, Human
agggcgggcucaucacaugcuc

SEQ ID NO: 686251 - RNA, 23 nt, Human
aagauguauuuuuaccaaauguc

SEQ ID NO: 686252 - RNA, 22 nt, Human
cuggaaagugucuccauccugg

SEQ ID NO: 686253 - RNA, 22 nt, Human
aaaguuuccugcuaagugcuau

SEQ ID NO: 686254 - RNA, 22 nt, Human
gugcugagaguuuauuaugaua

SEQ ID NO: 686255 - RNA, 22 nt, Human
ucauugaagcauuuuguguauu

SEQ ID NO: 686256 - RNA, 22 nt, Human
guauauauuggauaaaccagag

SEQ ID NO: 686257 - RNA, 22 nt, Human
gcuuccuaaaugcacagggcag

SEQ ID NO: 686258 - RNA, 22 nt, Human
uguguacaggacagaaaggagg

SEQ ID NO: 686259 - RNA, 23 nt, Human
agaguuuguuucuaaugagugag

SEQ ID NO: 686260 - RNA, 22 nt, Human
caggccagguggcaggcaaaac

SEQ ID NO: 686261 - RNA, 22 nt, Human
caucugaauuugccuuaguuuc

SEQ ID NO: 686262 - RNA, 22 nt, Human
gugggggacccaggugcugucc

SEQ ID NO: 686263 - RNA, 22 nt, Human
cagccuguagaauacaguaaau

SEQ ID NO: 686264 - RNA, 22 nt, Human
gacuugggcuugggcguggguu

SEQ ID NO: 686265 - RNA, 18 nt, Human
ggguccugugggagacag

SEQ ID NO: 686266 - RNA, 22 nt, Human
ugguccagaagauauucaacca

SEQ ID NO: 686267 - RNA, 22 nt, Human
ggauguugauugaauggccauu

SEQ ID NO: 686268 - RNA, 22 nt, Human
aauaucugucucuaaugcauau

SEQ ID NO: 686269 - RNA, 22 nt, Human
auggcugugagacaaagagcug

SEQ ID NO: 686270 - RNA, 20 nt, Human
gagggcucguggauggauaa

SEQ ID NO: 686271 - RNA, 22 nt, Human
gcugaaaugccuuguaaauauu

SEQ ID NO: 686272 - RNA, 22 nt, Human
uggcucaggagggaucuuugcu

SEQ ID NO: 686273 - RNA, 22 nt, Human
ucacaauuuggauacagcuaug

SEQ ID NO: 686274 - RNA, 22 nt, Human
aacaaugccaacagcaugcugg

SEQ ID NO: 686275 - RNA, 22 nt, Human
uaaguuucuccaaagcacagaa

SEQ ID NO: 686276 - RNA, 22 nt, Human
ucuacagggucagaguuucaug

SEQ ID NO: 686277 - RNA, 18 nt, Human
cuccuuggagaagaggcc

SEQ ID NO: 686278 - RNA, 21 nt, Human
agacacugguuuagcauucau

SEQ ID NO: 686279 - RNA, 23 nt, Human
auccucucuccaucccacugugc

SEQ ID NO: 686280 - RNA, 22 nt, Human
aguagaaucagccucuugaugg

SEQ ID NO: 686281 - RNA, 23 nt, Human
uugaaagguagcuggcagcuaga

SEQ ID NO: 686282 - RNA, 22 nt, Human
guggcugcuguccucucugguu

SEQ ID NO: 686283 - RNA, 21 nt, Human
acagauauuucauugaacauu

SEQ ID NO: 686284 - RNA, 22 nt, Human
ugcagcauauagcuuagugaug

SEQ ID NO: 686285 - RNA, 22 nt, Human
uacccugcuagcuagcaucucu

SEQ ID NO: 686286 - RNA, 22 nt, Human
uccuccagaccacuucugugcg

SEQ ID NO: 686287 - RNA, 22 nt, Human
aauaaugagcuugucuaauugu

SEQ ID NO: 686288 - RNA, 22 nt, Human
gcugaagcccacguggcuugua

SEQ ID NO: 686289 - RNA, 22 nt, Human
uggcccuuugggugcaggggca

SEQ ID NO: 686290 - RNA, 22 nt, Human
aaucacauuacagcauaucugu

SEQ ID NO: 686291 - RNA, 22 nt, Human
uucaguuucuucccugugaaau

SEQ ID NO: 686292 - RNA, 22 nt, Human
cccaguggagauaggagugugg

SEQ ID NO: 686293 - RNA, 22 nt, Human
cucugggaaagauugugcaggc

SEQ ID NO: 686294 - RNA, 23 nt, Human
aaggaucucugagaucauggcuu

SEQ ID NO: 686295 - RNA, 22 nt, Human
gagcugggcuggcuuccucccu

SEQ ID NO: 686296 - RNA, 18 nt, Human
gaggccugagaaccaggu

SEQ ID NO: 686297 - RNA, 22 nt, Human
gcagaagguuguuugggaaagg

SEQ ID NO: 686298 - RNA, 22 nt, Human
aucuucccaggcuggggagagg

SEQ ID NO: 686299 - RNA, 22 nt, Human
augccagggucauccccugggu

SEQ ID NO: 686300 - RNA, 22 nt, Human
auuucuuuucaagagggugcuu

SEQ ID NO: 686301 - RNA, 19 nt, Human
cuuugccacugauaggagu

SEQ ID NO: 686302 - RNA, 20 nt, Human
auguccuguugcugccccag

SEQ ID NO: 686303 - RNA, 22 nt, Human
aaaggaaugagcuucuguuagg

SEQ ID NO: 686304 - RNA, 22 nt, Human
cucugauuuccuuauucuguca

SEQ ID NO: 686305 - RNA, 22 nt, Human
acuggggugaaauuggaguguc

SEQ ID NO: 686306 - RNA, 22 nt, Human
uccagcuggggacaugggcuuc

SEQ ID NO: 686307 - RNA, 22 nt, Human
caggaaaugggucguuuuauaa

SEQ ID NO: 686308 - RNA, 22 nt, Human
cuccauauguucaguuaugcag

SEQ ID NO: 686309 - RNA, 22 nt, Human
caguugcagaggcagagugcua

SEQ ID NO: 686310 - RNA, 22 nt, Human
uagugauugcugauauuccauu

SEQ ID NO: 686311 - RNA, 22 nt, Human
uuuaguuuuaacugaaagcuau

SEQ ID NO: 686312 - RNA, 22 nt, Human
auggaauuuggagauuaggcau

SEQ ID NO: 686313 - RNA, 22 nt, Human
ucuuccuuguaagggcuuuaga

SEQ ID NO: 686314 - RNA, 22 nt, Human
ugggccacuugaaaguggaugu

SEQ ID NO: 686315 - RNA, 22 nt, Human
uucuuacauauuuucauauggu

SEQ ID NO: 686316 - RNA, 22 nt, Human
gcaggccuuuaucccugccuca

SEQ ID NO: 686317 - RNA, 22 nt, Human
cauagauuuuagguuagaucga

SEQ ID NO: 686318 - RNA, 22 nt, Human
auucuugauauagauaguuaau

SEQ ID NO: 686319 - RNA, 20 nt, Human
ccuuucuggagugcuguuca

SEQ ID NO: 686320 - RNA, 23 nt, Human
ugcagcaaccuuggaagcauuuc

SEQ ID NO: 686321 - RNA, 22 nt, Human
aucucugcuagccuucuucagg

SEQ ID NO: 686322 - RNA, 19 nt, Human
caucaaguggaguaucucg

SEQ ID NO: 686323 - RNA, 20 nt, Human
ggaggucaaaugaugagaag

SEQ ID NO: 686324 - RNA, 22 nt, Human
acugucacuccaacugagucgu

SEQ ID NO: 686325 - RNA, 21 nt, Human
aagagacauuucucaucagca

SEQ ID NO: 686326 - RNA, 19 nt, Human
uggaacacucaaacugggu

SEQ ID NO: 686327 - RNA, 22 nt, Human
auacacauauguguguauaugu

SEQ ID NO: 686328 - RNA, 22 nt, Human
cuaagguuggcaguggaauugg

SEQ ID NO: 686329 - RNA, 22 nt, Human
cugcuccaguagccccaugugg

SEQ ID NO: 686330 - RNA, 23 nt, Human
agugcuggagaagcuucuggcuu

SEQ ID NO: 686331 - RNA, 17 nt, Human
ugacuuaacagcaaggc

SEQ ID NO: 686332 - RNA, 22 nt, Human
ugcuccuggaugagguacucca

SEQ ID NO: 686333 - RNA, 17 nt, Human
gagaguguauuggaugc

SEQ ID NO: 686334 - RNA, 22 nt, Human
agaggcaggaagagcugauuuu

SEQ ID NO: 686335 - RNA, 23 nt, Human
aacacauugcuaauuacauucaa

SEQ ID NO: 686336 - RNA, 22 nt, Human
cagcccugaguuagcccacgga

SEQ ID NO: 686337 - RNA, 22 nt, Human
uagaugauggaaaaaagcaaua

SEQ ID NO: 686338 - RNA, 22 nt, Human
guaauugaaauugccuuggguu

SEQ ID NO: 686339 - RNA, 22 nt, Human
uacaugcauguguguaaauaua

SEQ ID NO: 686340 - RNA, 22 nt, Human
guuauucuaccacuauguacag

SEQ ID NO: 686341 - RNA, 22 nt, Human
guuuuucucugaaauaguugac

SEQ ID NO: 686342 - RNA, 22 nt, Human
gaguccugaauccuguggcaac

SEQ ID NO: 686343 - RNA, 22 nt, Human
uggcugagguuaugcugguugu

SEQ ID NO: 686344 - RNA, 22 nt, Human
guuucuaagcacaugugagugu

SEQ ID NO: 686345 - RNA, 22 nt, Human
uuccugcuuccuggccucacaa

SEQ ID NO: 686346 - RNA, 22 nt, Human
cccugaggggaguggugaggug

SEQ ID NO: 686347 - RNA, 22 nt, Human
uccugaagccugagugaugacu

SEQ ID NO: 686348 - RNA, 22 nt, Human
gcugagguuucaggaguggcag

SEQ ID NO: 686349 - RNA, 19 nt, Human
cagcuggaaucaucugagg

SEQ ID NO: 686350 - RNA, 19 nt, Human
ugcagcucagggcaggggc

SEQ ID NO: 686351 - RNA, 22 nt, Human
cauaucccauuggccaggacau

SEQ ID NO: 686352 - RNA, 22 nt, Human
cacaugcauaccuauguguaua

SEQ ID NO: 686353 - RNA, 22 nt, Human
augccaauaaauguuaauaucu

SEQ ID NO: 686354 - RNA, 22 nt, Human
agggcccuaaggaaggcacaca

SEQ ID NO: 686355 - RNA, 22 nt, Human
gggcacagaagucuaagacauc

SEQ ID NO: 686356 - RNA, 22 nt, Human
gcucaaauuucagacucaugaa

SEQ ID NO: 686357 - RNA, 22 nt, Human
gcaggagccagggauuccagga

SEQ ID NO: 686358 - RNA, 22 nt, Human
uuaggucuguuuauaaaacagu

SEQ ID NO: 686359 - RNA, 19 nt, Human
ccugauggagcuggugcaa

SEQ ID NO: 686360 - RNA, 23 nt, Human
uucuaagguaugguuuauaccug

SEQ ID NO: 686361 - RNA, 22 nt, Human
uguguauucugagguagguaua

SEQ ID NO: 686362 - RNA, 22 nt, Human
acuguccuuuuaaugcagccgu

SEQ ID NO: 686363 - RNA, 22 nt, Human
acuuccagaauuagaauuuaag

SEQ ID NO: 686364 - RNA, 22 nt, Human
guggcuauauuugaggauacgu

SEQ ID NO: 686365 - RNA, 22 nt, Human
uuauuaggaacucaggauuuuu

SEQ ID NO: 686366 - RNA, 18 nt, Human
gggcuguguucaugccca

SEQ ID NO: 686367 - RNA, 22 nt, Human
aacuccagggucaccauucaca

SEQ ID NO: 686368 - RNA, 22 nt, Human
caggccaaagaucccauugaca

SEQ ID NO: 686369 - RNA, 22 nt, Human
cuucacauguuggaguccuuug

SEQ ID NO: 686370 - RNA, 22 nt, Human
gcaccaugacagugaggagaac

SEQ ID NO: 686371 - RNA, 22 nt, Human
ucuuggcuauccaaguuaucca

SEQ ID NO: 686372 - RNA, 22 nt, Human
cauuucaccuuagagaauuauu

SEQ ID NO: 686373 - RNA, 22 nt, Human
ucugcagcgugcaggcuggugc

SEQ ID NO: 686374 - RNA, 22 nt, Human
agggcuuuguggcagucacuau

SEQ ID NO: 686375 - RNA, 22 nt, Human
uggccaguggacuaaguucuga

SEQ ID NO: 686376 - RNA, 22 nt, Human
cacaguggcuuugcuggucucg

SEQ ID NO: 686377 - RNA, 22 nt, Human
uccaagaaguuuauguuguuuc

SEQ ID NO: 686378 - RNA, 22 nt, Human
aauguuacacagguauaaucag

SEQ ID NO: 686379 - RNA, 22 nt, Human
aagagagaccaugggggacagg

SEQ ID NO: 686380 - RNA, 22 nt, Human
aggagcagauugguaagaucau

SEQ ID NO: 686381 - RNA, 22 nt, Human
caaagggcggcugucggagggu

SEQ ID NO: 686382 - RNA, 23 nt, Human
aaacugcaucucugagccucagc

SEQ ID NO: 686383 - RNA, 23 nt, Human
acaggaggggacagguggccgug

SEQ ID NO: 686384 - RNA, 22 nt, Human
ugcccagccaauuuguuauguu

SEQ ID NO: 686385 - RNA, 22 nt, Human
cgugucuguaugucaaucagcu

SEQ ID NO: 686386 - RNA, 22 nt, Human
aggacuccauguguccuggaga

SEQ ID NO: 686387 - RNA, 22 nt, Human
gcacaccuuagaggggagcugc

SEQ ID NO: 686388 - RNA, 22 nt, Human
cacagaugaaguaaacaacucu

SEQ ID NO: 686389 - RNA, 22 nt, Human
acacagaguauuuagaaggggu

SEQ ID NO: 686390 - RNA, 22 nt, Human
cuccaggcgcuuaccaagcgcu

SEQ ID NO: 686391 - RNA, 22 nt, Human
acugggcuguuccuuauuucua

SEQ ID NO: 686392 - RNA, 19 nt, Human
ugaaacaaacuuaaaagga

SEQ ID NO: 686393 - RNA, 19 nt, Human
ggccugcccaaugucugcu

SEQ ID NO: 686394 - RNA, 22 nt, Human
aucagcaggugcugguggagac

SEQ ID NO: 686395 - RNA, 22 nt, Human
ucuguugguucuguuucucuga

SEQ ID NO: 686396 - RNA, 22 nt, Human
aaggcagcagugcacgacugau

SEQ ID NO: 686397 - RNA, 22 nt, Human
ucauggagacuuugagccuguu

SEQ ID NO: 686398 - RNA, 22 nt, Human
gacuuuauuuuaacggagauuc

SEQ ID NO: 686399 - RNA, 22 nt, Human
cuuucaacuacauacaggcgau

SEQ ID NO: 686400 - RNA, 22 nt, Human
cagggcagaaggcacucuacuc

SEQ ID NO: 686401 - RNA, 22 nt, Human
ucauugcagcuucagguguuca

SEQ ID NO: 686402 - RNA, 22 nt, Human
aggcaagcauugggaacagggc

SEQ ID NO: 686403 - RNA, 22 nt, Human
cuguggggaaaggguccugcuc

SEQ ID NO: 686404 - RNA, 22 nt, Human
cuccacggcccauugggcagga

SEQ ID NO: 686405 - RNA, 22 nt, Human
gcugcccugcaucugugccuuc

SEQ ID NO: 686406 - RNA, 22 nt, Human
ccacugucuuuuccaggcugaa

SEQ ID NO: 686407 - RNA, 22 nt, Human
gaacauuuaugaugcaauaccu

SEQ ID NO: 686408 - RNA, 22 nt, Human
ccuggcugggguagaagugagg

SEQ ID NO: 686409 - RNA, 22 nt, Human
cagucucucugaaguauuaaga

SEQ ID NO: 686410 - RNA, 22 nt, Human
agcgggcucaaguggccagcag

SEQ ID NO: 686411 - RNA, 22 nt, Human
gcuccaggagagggaagcagau

SEQ ID NO: 686412 - RNA, 22 nt, Human
guugcugcaaaggaguguaggu

SEQ ID NO: 686413 - RNA, 22 nt, Human
acaaugaaaaaauuuacugugg

SEQ ID NO: 686414 - RNA, 22 nt, Human
ugggcugaacuucaucugauga

SEQ ID NO: 686415 - RNA, 23 nt, Human
ccuucagaagaaguaacaggggc

SEQ ID NO: 686416 - RNA, 19 nt, Human
cauaaauguacaagauaca

SEQ ID NO: 686417 - RNA, 22 nt, Human
uaagucauaagucaugauguua

SEQ ID NO: 686418 - RNA, 22 nt, Human
gauguucuagaagugugguguu

SEQ ID NO: 686419 - RNA, 22 nt, Human
aaagccaagcugggaaggcagg

SEQ ID NO: 686420 - RNA, 22 nt, Human
acaugaaacuguugcauuagaa

SEQ ID NO: 686421 - RNA, 22 nt, Human
uugugcagaguugccuuuauuu

SEQ ID NO: 686422 - RNA, 22 nt, Human
ugugcucuugucugugacuaac

SEQ ID NO: 686423 - RNA, 22 nt, Human
acacauauaccacuguaaauga

SEQ ID NO: 686424 - RNA, 22 nt, Human
acaagugugugcaguuuguaaa

SEQ ID NO: 686425 - RNA, 22 nt, Human
uuccuuguuuguagcucuggga

SEQ ID NO: 686426 - RNA, 22 nt, Human
agcugggcugaugacucauguu

SEQ ID NO: 686427 - RNA, 22 nt, Human
uucaacuaauguuuauuuuaug

SEQ ID NO: 686428 - RNA, 22 nt, Human
gcaugcauuucacuagguaugu

SEQ ID NO: 686429 - RNA, 22 nt, Human
gaaggccacuuuguguugagaa

SEQ ID NO: 686430 - RNA, 22 nt, Human
ccugucuguccuuugcauucuu

SEQ ID NO: 686431 - RNA, 22 nt, Human
ucucucagauggggcacuagua

SEQ ID NO: 686432 - RNA, 22 nt, Human
uucagggcaugagggacacauc

SEQ ID NO: 686433 - RNA, 22 nt, Human
ggaugcaggggcagcagagccu

SEQ ID NO: 686434 - RNA, 22 nt, Human
gccaggaauggagagguggccu

SEQ ID NO: 686435 - RNA, 21 nt, Human
ugcuccaggagggggcagucc

SEQ ID NO: 686436 - RNA, 22 nt, Human
uucuuuguaaagccacaguccu

SEQ ID NO: 686437 - RNA, 22 nt, Human
aggaaauugucuuuuuccuugu

SEQ ID NO: 686438 - RNA, 22 nt, Human
gcaugagguucuuggccagcau

SEQ ID NO: 686439 - RNA, 22 nt, Human
ugaaauucauuguuuuaugugu

SEQ ID NO: 686440 - RNA, 22 nt, Human
ugaaacaaguuuaagggaucua

SEQ ID NO: 686441 - RNA, 22 nt, Human
uggggugugcucagagcagggg

SEQ ID NO: 686442 - RNA, 22 nt, Human
uggggccagagcugcagggagc

SEQ ID NO: 686443 - RNA, 22 nt, Human
cuccaggccauggcugcggagg

SEQ ID NO: 686444 - RNA, 22 nt, Human
ugcaaggaagggacagcugaga

SEQ ID NO: 686445 - RNA, 23 nt, Human
uagaaugucauucaaugauaugg

SEQ ID NO: 686446 - RNA, 22 nt, Human
auugcuuuguacaugccuagca

SEQ ID NO: 686447 - RNA, 22 nt, Human
aagggagcggggagacccuaug

SEQ ID NO: 686448 - RNA, 22 nt, Human
gcuacagguauauagaugaaac

SEQ ID NO: 686449 - RNA, 22 nt, Human
gguccugaggggagcugaaggu

SEQ ID NO: 686450 - RNA, 22 nt, Human
augguguagcaugugauaugac

SEQ ID NO: 686451 - RNA, 22 nt, Human
ggccuuggugccauggccaguu

SEQ ID NO: 686452 - RNA, 22 nt, Human
gggagcagccugccucccaccu

SEQ ID NO: 686453 - RNA, 22 nt, Human
uggggccuggucagagcugcac

SEQ ID NO: 686454 - RNA, 22 nt, Human
aggcggcugguguccugcaggu

SEQ ID NO: 686455 - RNA, 22 nt, Human
acugcauuaucaccaagaugua

SEQ ID NO: 686456 - RNA, 22 nt, Human
acucaaguagauauuaacaaaa

SEQ ID NO: 686457 - RNA, 22 nt, Human
aauacuuuccuauauaaggugc

SEQ ID NO: 686458 - RNA, 22 nt, Human
aucuaagauuuugcuaagauca

SEQ ID NO: 686459 - RNA, 22 nt, Human
gauggguggguucugugagagg

SEQ ID NO: 686460 - RNA, 21 nt, Human
ugucacuuuaagcuagcucua

SEQ ID NO: 686461 - RNA, 22 nt, Human
cagagcugagucuucaagguug

SEQ ID NO: 686462 - RNA, 18 nt, Human
gcucugugaccuugagca

SEQ ID NO: 686463 - RNA, 22 nt, Human
uggcuucagacuucugcuacgu

SEQ ID NO: 686464 - RNA, 22 nt, Human
acccuccacuuuaucugucuuu

SEQ ID NO: 686465 - RNA, 22 nt, Human
uauuccaacugucauagucaua

SEQ ID NO: 686466 - RNA, 22 nt, Human
agucuggguggcugagcuacag

SEQ ID NO: 686467 - RNA, 22 nt, Human
guccagggccccgagcaccagg

SEQ ID NO: 686468 - RNA, 22 nt, Human
ugauuaacugucuauuaaucau

SEQ ID NO: 686469 - RNA, 22 nt, Human
ggagcccuucuauuccauggag

SEQ ID NO: 686470 - RNA, 22 nt, Human
uggagagcaaugaggggcaggc

SEQ ID NO: 686471 - RNA, 22 nt, Human
uccuggaguugugcagugcaca

SEQ ID NO: 686472 - RNA, 22 nt, Human
gugcuuggaccaggucaucuuc

SEQ ID NO: 686473 - RNA, 22 nt, Human
uuucaacaucaccuagcaguuc

SEQ ID NO: 686474 - RNA, 22 nt, Human
auggcaggauacccaguccggc

SEQ ID NO: 686475 - RNA, 22 nt, Human
acuucaaaaugaguuuccuggu

SEQ ID NO: 686476 - RNA, 22 nt, Human
uacacuuauaacucugugugug

SEQ ID NO: 686477 - RNA, 23 nt, Human
uaaauuaccuuuccagugcaggg

SEQ ID NO: 686478 - RNA, 22 nt, Human
ucugcccacugcucugcugccc

SEQ ID NO: 686479 - RNA, 22 nt, Human
aaaucucaggccucuauuuacu

SEQ ID NO: 686480 - RNA, 22 nt, Human
gcuucuguggugcaucuuugcu

SEQ ID NO: 686481 - RNA, 23 nt, Human
ccagggagguugauugguuaccc

SEQ ID NO: 686482 - RNA, 22 nt, Human
cuccagugcgucuuaguaaacc

SEQ ID NO: 686483 - RNA, 22 nt, Human
gagcuuggugaugccuccuggu

SEQ ID NO: 686484 - RNA, 22 nt, Human
ccauuugucaccucugcacucc

SEQ ID NO: 686485 - RNA, 22 nt, Human
ggucugaguggggccugagauu

SEQ ID NO: 686486 - RNA, 21 nt, Human
aguacaaaaauuccuuucuca

SEQ ID NO: 686487 - RNA, 19 nt, Human
uucuccagggacuuaggga

SEQ ID NO: 686488 - RNA, 22 nt, Human
ugccaggcgauugcuaucagca

SEQ ID NO: 686489 - RNA, 22 nt, Human
uacccagcuucaagucaggacu

SEQ ID NO: 686490 - RNA, 22 nt, Human
cauccugacuguaacuaagaga

SEQ ID NO: 686491 - RNA, 22 nt, Human
uacagggcaugugcagacacau

SEQ ID NO: 686492 - RNA, 22 nt, Human
gccaggcaggugucggagcccu

SEQ ID NO: 686493 - RNA, 22 nt, Human
agacccagagggcugcugggag

SEQ ID NO: 686494 - RNA, 22 nt, Human
ggcugcugggaauaugccagcu

SEQ ID NO: 686495 - RNA, 22 nt, Human
agaauguagucuuggagauuua

SEQ ID NO: 686496 - RNA, 22 nt, Human
aguauauggggaauugcauaau

SEQ ID NO: 686497 - RNA, 22 nt, Human
ugcccagccccuaucccuggga

SEQ ID NO: 686498 - RNA, 22 nt, Human
uaugugcauaugcauacacaca

SEQ ID NO: 686499 - RNA, 22 nt, Human
ugcugugguucccagaguggau

SEQ ID NO: 686500 - RNA, 22 nt, Human
aaggagaauuuggcuugugaug

SEQ ID NO: 686501 - RNA, 22 nt, Human
uuaucuuagaggugauuguauu

SEQ ID NO: 686502 - RNA, 22 nt, Human
guuccgcuucauauuuggaguc

SEQ ID NO: 686503 - RNA, 22 nt, Human
uccaggugacagagacaggaua

SEQ ID NO: 686504 - RNA, 22 nt, Human
agucugccaagccagaucaugu

SEQ ID NO: 686505 - RNA, 22 nt, Human
gcccagugguaaaagcaggccu

SEQ ID NO: 686506 - RNA, 23 nt, Human
agcugggcaaggauccgggcucc

SEQ ID NO: 686507 - RNA, 22 nt, Human
auauagguuaucauauuugccc

SEQ ID NO: 686508 - RNA, 22 nt, Human
gagguggcuccaggagcaaugc

SEQ ID NO: 686509 - RNA, 22 nt, Human
acacaucagaaauaugaaugag

SEQ ID NO: 686510 - RNA, 22 nt, Human
acagaauuaucaggaaauguua

SEQ ID NO: 686511 - RNA, 22 nt, Human
uaaugagaauucuuuuugggua

SEQ ID NO: 686512 - RNA, 22 nt, Human
gucagggcacagugacagcucc

SEQ ID NO: 686513 - RNA, 22 nt, Human
uagauucugacccucuuuuuac

SEQ ID NO: 686514 - RNA, 22 nt, Human
uuuacagucucuauagucaaaa

SEQ ID NO: 686515 - RNA, 22 nt, Human
gauuauuuugugcaauaaucgg

SEQ ID NO: 686516 - RNA, 22 nt, Human
uuuaguguagccuaagcagaau

SEQ ID NO: 686517 - RNA, 22 nt, Human
uucccucucuccagggcugccu

SEQ ID NO: 686518 - RNA, 22 nt, Human
uucagaacaaccaugguuagau

SEQ ID NO: 686519 - RNA, 22 nt, Human
gauucuuaugagugaacuuuac

SEQ ID NO: 686520 - RNA, 22 nt, Human
uaacaacaugcaauuuaaccuu

SEQ ID NO: 686521 - RNA, 22 nt, Human
agaacagugcugauaaaucaua

SEQ ID NO: 686522 - RNA, 22 nt, Human
uggaccccagacaagccagggu

SEQ ID NO: 686523 - RNA, 22 nt, Human
auuacacuuguucaucaucacc

SEQ ID NO: 686524 - RNA, 22 nt, Human
aaguuuuugguagagaaaagua

SEQ ID NO: 686525 - RNA, 22 nt, Human
uuguuacacauaauaacauuuu

SEQ ID NO: 686526 - RNA, 22 nt, Human
acacauauucauauguacuuac

SEQ ID NO: 686527 - RNA, 22 nt, Human
acccaggagcaggcugggcagu

SEQ ID NO: 686528 - RNA, 22 nt, Human
ucacugugcucucuagauaggc

SEQ ID NO: 686529 - RNA, 22 nt, Human
gggcccugggauucagagcaag

SEQ ID NO: 686530 - RNA, 22 nt, Human
acugggccuugccauggcagcc

SEQ ID NO: 686531 - RNA, 22 nt, Human
agcaggugaucgcgugugcucc

SEQ ID NO: 686532 - RNA, 22 nt, Human
aaugaacauauaaagagaucuu

SEQ ID NO: 686533 - RNA, 22 nt, Human
aguggcugccaagauauaauuc

SEQ ID NO: 686534 - RNA, 22 nt, Human
cuguggggccaaauucuccucu

SEQ ID NO: 686535 - RNA, 20 nt, Human
cuggggaggaggauguguuc

SEQ ID NO: 686536 - RNA, 22 nt, Human
augcacaucuuacagaugcaga

SEQ ID NO: 686537 - RNA, 22 nt, Human
uggucaaaaaggccuagacaca

SEQ ID NO: 686538 - RNA, 17 nt, Human
aggaaagucugcugucc

SEQ ID NO: 686539 - RNA, 22 nt, Human
uagaagauaagacaagugcugc

SEQ ID NO: 686540 - RNA, 22 nt, Human
caggagcuggauaggaccacaa

SEQ ID NO: 686541 - RNA, 22 nt, Human
agcagucaggccucagagccgu

SEQ ID NO: 686542 - RNA, 22 nt, Human
aauauacuauacuacuuucugg

SEQ ID NO: 686543 - RNA, 22 nt, Human
auuaaagacagcagauggaugg

SEQ ID NO: 686544 - RNA, 22 nt, Human
auuucagaguagaucguuauuu

SEQ ID NO: 686545 - RNA, 23 nt, Human
gcccugacugcggccucccacuc

SEQ ID NO: 686546 - RNA, 22 nt, Human
aggugggcccagugggcuccag

SEQ ID NO: 686547 - RNA, 22 nt, Human
augugcaauggugucaccacau

SEQ ID NO: 686548 - RNA, 22 nt, Human
guacuuccagccaagugagaca

SEQ ID NO: 686549 - RNA, 22 nt, Human
caagcaggaugaagcccaggga

SEQ ID NO: 686550 - RNA, 18 nt, Human
gcugggguugagcucucc

SEQ ID NO: 686551 - RNA, 22 nt, Human
aguaacacuuggaaugauagca

SEQ ID NO: 686552 - RNA, 22 nt, Human
uucaaaucacuuuggagcuuaa

SEQ ID NO: 686553 - RNA, 22 nt, Human
aagguuuccagugauauugugg

SEQ ID NO: 686554 - RNA, 20 nt, Human
auucagaauaggcauguaaa

SEQ ID NO: 686555 - RNA, 22 nt, Human
uucauuuaauuuguguauuaac

SEQ ID NO: 686556 - RNA, 22 nt, Human
ggaagcugaggcccagugaagg

SEQ ID NO: 686557 - RNA, 22 nt, Human
aaaauggucucagcuggcacca

SEQ ID NO: 686558 - RNA, 22 nt, Human
acccucagcuucuuggauuaau

SEQ ID NO: 686559 - RNA, 22 nt, Human
cucagggacaaggggagacccc

SEQ ID NO: 686560 - RNA, 22 nt, Human
cugaagcugaaaacuuccagca

SEQ ID NO: 686561 - RNA, 22 nt, Human
auguggaaugaacaaaggaggc

SEQ ID NO: 686562 - RNA, 22 nt, Human
auugacuagagucacaguugca

SEQ ID NO: 686563 - RNA, 23 nt, Human
acagaaaucauuuguaagguacc

SEQ ID NO: 686564 - RNA, 22 nt, Human
aagccacuuucagcugucucag

SEQ ID NO: 686565 - RNA, 22 nt, Human
cauuuccuuccugcugcuccuc

SEQ ID NO: 686566 - RNA, 22 nt, Human
cuggccagagguuccucugccc

SEQ ID NO: 686567 - RNA, 22 nt, Human
gcagauggcugagccugcagau

SEQ ID NO: 686568 - RNA, 21 nt, Human
caucuuagguuguacauauau

SEQ ID NO: 686569 - RNA, 22 nt, Human
auacacugguuuaugauauugu

SEQ ID NO: 686570 - RNA, 18 nt, Human
ccagugccaagaguggca

SEQ ID NO: 686571 - RNA, 22 nt, Human
agcuguuggaguaaagcacuua

SEQ ID NO: 686572 - RNA, 22 nt, Human
gaaguuuagaagugacagguuu

SEQ ID NO: 686573 - RNA, 22 nt, Human
uucuaaugaaaguggaccaugg

SEQ ID NO: 686574 - RNA, 22 nt, Human
uucaggagugucaggagugccu

SEQ ID NO: 686575 - RNA, 20 nt, Human
ccuguggagcugccuccucc

SEQ ID NO: 686576 - RNA, 22 nt, Human
uugaaaacagcguagauucaca

SEQ ID NO: 686577 - RNA, 22 nt, Human
guacuuuaaaucaauguagauu

SEQ ID NO: 686578 - RNA, 22 nt, Human
aggcagaaccagcugggacuuu

SEQ ID NO: 686579 - RNA, 22 nt, Human
cagaucugcuccucuguccaug

SEQ ID NO: 686580 - RNA, 22 nt, Human
ucucuuaauuuuggaauagugu

SEQ ID NO: 686581 - RNA, 22 nt, Human
cacugcagcaccaugcagggcu

SEQ ID NO: 686582 - RNA, 22 nt, Human
gaacugaagacuuuuacuguac

SEQ ID NO: 686583 - RNA, 22 nt, Human
guguuauuagagcauuaauuuu

SEQ ID NO: 686584 - RNA, 22 nt, Human
ccuggcugucguuuugugaaau

SEQ ID NO: 686585 - RNA, 22 nt, Human
cuucuguggauguuggaugcau

SEQ ID NO: 686586 - RNA, 22 nt, Human
cagcugagaaggucugaucagg

SEQ ID NO: 686587 - RNA, 22 nt, Human
accagagagccuaggcugggca

SEQ ID NO: 686588 - RNA, 23 nt, Human
ugaauuuggaacucagagaauua

SEQ ID NO: 686589 - RNA, 22 nt, Human
aaacagcuuucagaaucucuca

SEQ ID NO: 686590 - RNA, 22 nt, Human
cuuaggaacgcucugccuagug

SEQ ID NO: 686591 - RNA, 19 nt, Human
aggcuuggcuagauuuacu

SEQ ID NO: 686592 - RNA, 22 nt, Human
agaguggcuugcucagcuagca

SEQ ID NO: 686593 - RNA, 22 nt, Human
uuaucacuuaugagcuuuuugc

SEQ ID NO: 686594 - RNA, 22 nt, Human
ugcauuuguaacauucaagaau

SEQ ID NO: 686595 - RNA, 22 nt, Human
cagaaaauagaguuucucugag

SEQ ID NO: 686596 - RNA, 21 nt, Human
auuucauggugcuuuuaagaa

SEQ ID NO: 686597 - RNA, 22 nt, Human
auucugggcaagccuucuuaua

SEQ ID NO: 686598 - RNA, 22 nt, Human
aaggcucugcaaaaccuccaag

SEQ ID NO: 686599 - RNA, 22 nt, Human
aagaugcaugcugaagcuggcu

SEQ ID NO: 686600 - RNA, 22 nt, Human
ugcagggcauaggguccaguuu

SEQ ID NO: 686601 - RNA, 22 nt, Human
ggccucagagaaggcugugcgg

SEQ ID NO: 686602 - RNA, 22 nt, Human
cucuccuugcagauggcugccu

SEQ ID NO: 686603 - RNA, 22 nt, Human
uuugaaguucccccauaucaga

SEQ ID NO: 686604 - RNA, 22 nt, Human
aaagcagguuaugaccauggcc

SEQ ID NO: 686605 - RNA, 22 nt, Human
uuguaagagagaauugcaaauu

SEQ ID NO: 686606 - RNA, 22 nt, Human
gccagaggggcucgaaggcgcg

SEQ ID NO: 686607 - RNA, 22 nt, Human
ggcaggagcucagguugguucc

SEQ ID NO: 686608 - RNA, 22 nt, Human
uugaaggacauccuauuucuag

SEQ ID NO: 686609 - RNA, 22 nt, Human
cuuucuugcauaauuugaaacc

SEQ ID NO: 686610 - RNA, 22 nt, Human
aucccagauggaggcuggucac

SEQ ID NO: 686611 - RNA, 22 nt, Human
aaaugcacaggagaaccaauuc

SEQ ID NO: 686612 - RNA, 17 nt, Human
uuuuguucaucuucaaa

SEQ ID NO: 686613 - RNA, 22 nt, Human
gacauuuguaucuuaggggaaa

SEQ ID NO: 686614 - RNA, 22 nt, Human
gagggcaccagaagagccagau

SEQ ID NO: 686615 - RNA, 22 nt, Human
uccagcuccugaguucacugcu

SEQ ID NO: 686616 - RNA, 22 nt, Human
cuuucucaaugccggaaggcac

SEQ ID NO: 686617 - RNA, 22 nt, Human
auugcugaacuuauaaaugaau

SEQ ID NO: 686618 - RNA, 22 nt, Human
cagcccuguccaaugucugcuc

SEQ ID NO: 686619 - RNA, 22 nt, Human
uguugagacugagggagucagc

SEQ ID NO: 686620 - RNA, 22 nt, Human
auaugacauaaaaucauuuuug

SEQ ID NO: 686621 - RNA, 23 nt, Human
cagagcugauuaaacuuaaucuc

SEQ ID NO: 686622 - RNA, 22 nt, Human
gaagcuccguacuaugacuuuu

SEQ ID NO: 686623 - RNA, 22 nt, Human
cuuucucuugagcaagagcugu

SEQ ID NO: 686624 - RNA, 22 nt, Human
cacccugcuacaaagccuccug

SEQ ID NO: 686625 - RNA, 22 nt, Human
cagaguaaaccugucaucaaga

SEQ ID NO: 686626 - RNA, 22 nt, Human
augcccugcucucgggaaggga

SEQ ID NO: 686627 - RNA, 22 nt, Human
gagcuaagaacugugccaggug

SEQ ID NO: 686628 - RNA, 22 nt, Human
gagccaagggcgugcuggagag

SEQ ID NO: 686629 - RNA, 22 nt, Human
uguccugugucuaggggucuuc

SEQ ID NO: 686630 - RNA, 22 nt, Human
ggaagaaaucugguuaagagau

SEQ ID NO: 686631 - RNA, 22 nt, Human
ugcuucgcccccuggugcagcu

SEQ ID NO: 686632 - RNA, 22 nt, Human
uauuaauucuugccaauucucc

SEQ ID NO: 686633 - RNA, 22 nt, Human
uguacaguguagucaugagguu

SEQ ID NO: 686634 - RNA, 22 nt, Human
cagucccagacauaguaaggga

SEQ ID NO: 686635 - RNA, 22 nt, Human
ucaggccagcaccaucccuauc

SEQ ID NO: 686636 - RNA, 22 nt, Human
ucuggcuuucauuuguuuaaag

SEQ ID NO: 686637 - RNA, 22 nt, Human
uuggugaguauggacacagaga

SEQ ID NO: 686638 - RNA, 22 nt, Human
ugcucuggaaauaaaugauuua

SEQ ID NO: 686639 - RNA, 22 nt, Human
ugcaugauguuaaacaucaggu

SEQ ID NO: 686640 - RNA, 22 nt, Human
cugaaggaagcagaagcgaggu

SEQ ID NO: 686641 - RNA, 22 nt, Human
ugccaggcuccggaacgacagu

SEQ ID NO: 686642 - RNA, 22 nt, Human
aguccugaugcucuggcaggag

SEQ ID NO: 686643 - RNA, 19 nt, Human
ugggaugaugcagaaggua

SEQ ID NO: 686644 - RNA, 22 nt, Human
uauuucagucacuucuucucug

SEQ ID NO: 686645 - RNA, 22 nt, Human
cuuggggauuuuaaagaccucu

SEQ ID NO: 686646 - RNA, 22 nt, Human
uuuuuguucccagagaauuugu

SEQ ID NO: 686647 - RNA, 22 nt, Human
aggucagcugcugauaggcagc

SEQ ID NO: 686648 - RNA, 22 nt, Human
ugcccaggcuccucgcagccuu

SEQ ID NO: 686649 - RNA, 20 nt, Human
uuucaaaggcaccuaugaag

SEQ ID NO: 686650 - RNA, 22 nt, Human
ugaaaaacugaauaguugagua

SEQ ID NO: 686651 - RNA, 22 nt, Human
cuaccugaaaagguugugguga

SEQ ID NO: 686652 - RNA, 22 nt, Human
aaucaggagugugcacuuugau

SEQ ID NO: 686653 - RNA, 22 nt, Human
uggguggcggccugguucugag

SEQ ID NO: 686654 - RNA, 22 nt, Human
uggagucacagugaccugaguc

SEQ ID NO: 686655 - RNA, 22 nt, Human
aguuuaaaucauguuuuguaac

SEQ ID NO: 686656 - RNA, 22 nt, Human
gugggcagugccugacggauga

SEQ ID NO: 686657 - RNA, 22 nt, Human
gagagcuguguucauucuacca

SEQ ID NO: 686658 - RNA, 22 nt, Human
gggucaggccucaaggugggcu

SEQ ID NO: 686659 - RNA, 22 nt, Human
aaguggagagcccuggaggucu

SEQ ID NO: 686660 - RNA, 22 nt, Human
gugcaaaagcaauugcaguuuu

SEQ ID NO: 686661 - RNA, 22 nt, Human
uggacauguccggccagacaau

SEQ ID NO: 686662 - RNA, 22 nt, Human
uagaauguggagguaacagacu

SEQ ID NO: 686663 - RNA, 23 nt, Human
ugggaauugcaggggguucugcc

SEQ ID NO: 686664 - RNA, 22 nt, Human
uaucuaagagagucaauauuua

SEQ ID NO: 686665 - RNA, 21 nt, Human
acaaacugaaaugaguuuccu

SEQ ID NO: 686666 - RNA, 22 nt, Human
cagaggcauacucccagucuug

SEQ ID NO: 686667 - RNA, 22 nt, Human
cagaggugcuggagugaguccu

SEQ ID NO: 686668 - RNA, 22 nt, Human
aggcaggcccugggccaucccg

SEQ ID NO: 686669 - RNA, 22 nt, Human
uucuagcuuuuugcaccaaggu

SEQ ID NO: 686670 - RNA, 22 nt, Human
uagguucagcuuucauccugaa

SEQ ID NO: 686671 - RNA, 22 nt, Human
aagauaaguaacgagccucagu

SEQ ID NO: 686672 - RNA, 22 nt, Human
aagucaauuaguaaacuuggaa

SEQ ID NO: 686673 - RNA, 22 nt, Human
guuugcauauuugcacaggaau

SEQ ID NO: 686674 - RNA, 22 nt, Human
agaaccucuggauacaguuuaa

SEQ ID NO: 686675 - RNA, 22 nt, Human
ugcuucugacugggucaguuga

SEQ ID NO: 686676 - RNA, 19 nt, Human
gcaggaaaugagugauugc

SEQ ID NO: 686677 - RNA, 19 nt, Human
aggugcuggugaggguguu

SEQ ID NO: 686678 - RNA, 22 nt, Human
uccauuggucucugugcccagg

SEQ ID NO: 686679 - RNA, 22 nt, Human
gaaaaugugccuuuggguauug

SEQ ID NO: 686680 - RNA, 22 nt, Human
uuauagaugccuugaguaaaug

SEQ ID NO: 686681 - RNA, 22 nt, Human
uuaugacagaaaugaaaagcug

SEQ ID NO: 686682 - RNA, 22 nt, Human
uugagcccaggaggccugggug

SEQ ID NO: 686683 - RNA, 22 nt, Human
gccacagucaggacggggagag

SEQ ID NO: 686684 - RNA, 22 nt, Human
aauaucagcucugucacuuacu

SEQ ID NO: 686685 - RNA, 22 nt, Human
gggcacagagggucuugaagaa

SEQ ID NO: 686686 - RNA, 22 nt, Human
ucugccaccaacugucacuaca

SEQ ID NO: 686687 - RNA, 22 nt, Human
uucacccuggaccagaaauugg

SEQ ID NO: 686688 - RNA, 22 nt, Human
uugacacaguuuucucauuaag

SEQ ID NO: 686689 - RNA, 22 nt, Human
cagaaaggacagagugagggug

SEQ ID NO: 686690 - RNA, 22 nt, Human
ugucaaaaugacuuuacuacag

SEQ ID NO: 686691 - RNA, 22 nt, Human
ggacaggugcaaagggcacaug

SEQ ID NO: 686692 - RNA, 22 nt, Human
uaaugcuucaauuuccuugauu

SEQ ID NO: 686693 - RNA, 22 nt, Human
cuuucucuuacccaaggaucug

SEQ ID NO: 686694 - RNA, 22 nt, Human
gaggcagcuuggggcugugggu

SEQ ID NO: 686695 - RNA, 22 nt, Human
cugucucugauaagcucgaggg

SEQ ID NO: 686696 - RNA, 22 nt, Human
gaggccugcagcguggucccug

SEQ ID NO: 686697 - RNA, 20 nt, Human
uucuaauuugauggaguagc

SEQ ID NO: 686698 - RNA, 22 nt, Human
ucacauguuaggucgggcaagg

SEQ ID NO: 686699 - RNA, 22 nt, Human
cauuucugggagacaugcuaga

SEQ ID NO: 686700 - RNA, 22 nt, Human
cugggagaucuguugggacugg

SEQ ID NO: 686701 - RNA, 22 nt, Human
gaggccaggaggaucucucuaa

SEQ ID NO: 686702 - RNA, 22 nt, Human
ucuguggcacgauugcacugca

SEQ ID NO: 686703 - RNA, 17 nt, Human
ugaacuuuagguggagc

SEQ ID NO: 686704 - RNA, 22 nt, Human
ccucuggcucacagcaccaacu

SEQ ID NO: 686705 - RNA, 22 nt, Human
gugacagagugagacccugucu

SEQ ID NO: 686706 - RNA, 23 nt, Human
uuguuuuuagagguggcaugaga

SEQ ID NO: 686707 - RNA, 22 nt, Human
uacacccacauugagcauggga

SEQ ID NO: 686708 - RNA, 22 nt, Human
cacagcuaccugcaugccugcu

SEQ ID NO: 686709 - RNA, 21 nt, Human
gggaagacugucaggauuccu

SEQ ID NO: 686710 - RNA, 22 nt, Human
gugcaugcacacaugugugagg

SEQ ID NO: 686711 - RNA, 22 nt, Human
ucugccugccgagaacaccuac

SEQ ID NO: 686712 - RNA, 22 nt, Human
aagagcuggauugugcugcaga

SEQ ID NO: 686713 - RNA, 22 nt, Human
gcuggccucaucacugacuucu

SEQ ID NO: 686714 - RNA, 22 nt, Human
cagacugagggcaucacauacg

SEQ ID NO: 686715 - RNA, 22 nt, Human
cucccagccuucgccagucuga

SEQ ID NO: 686716 - RNA, 22 nt, Human
uuggaauuugcuucagcuaaua

SEQ ID NO: 686717 - RNA, 22 nt, Human
uggggacacagagccaaacuau

SEQ ID NO: 686718 - RNA, 22 nt, Human
gaggcagaggaagguggucucu

SEQ ID NO: 686719 - RNA, 22 nt, Human
gugcagcucaguugaaaugcag

SEQ ID NO: 686720 - RNA, 22 nt, Human
agacccagaaagcagcugcauu

SEQ ID NO: 686721 - RNA, 22 nt, Human
auuaagggccaauccuccagcc

SEQ ID NO: 686722 - RNA, 22 nt, Human
acaaacuaccuacagauguuca

SEQ ID NO: 686723 - RNA, 22 nt, Human
gcagcuuucuugcccuaaucuu

SEQ ID NO: 686724 - RNA, 22 nt, Human
ggcugcccucugcugacugcaa

SEQ ID NO: 686725 - RNA, 22 nt, Human
ucacaguuuccauaggucagca

SEQ ID NO: 686726 - RNA, 22 nt, Human
gcaggccuuggcaaugagccug

SEQ ID NO: 686727 - RNA, 22 nt, Human
aggggcuuguggaguugcuggu

SEQ ID NO: 686728 - RNA, 22 nt, Human
cuucuuuaauguauacaaaaga

SEQ ID NO: 686729 - RNA, 22 nt, Human
cucagacaaaugauuaagguua

SEQ ID NO: 686730 - RNA, 22 nt, Human
agagggaaaaacucaugucauu

SEQ ID NO: 686731 - RNA, 22 nt, Human
uucagaaacaucaguggaugga

SEQ ID NO: 686732 - RNA, 22 nt, Human
gucagaaaacuucccuuugagu

SEQ ID NO: 686733 - RNA, 22 nt, Human
accugccuucucaaggacauga

SEQ ID NO: 686734 - RNA, 22 nt, Human
auggaucacagugccgugggug

SEQ ID NO: 686735 - RNA, 22 nt, Human
uuugaaaguguuuacuugggaa

SEQ ID NO: 686736 - RNA, 23 nt, Human
cugggccuauggucugaauccaa

SEQ ID NO: 686737 - RNA, 22 nt, Human
cugagaggcagccagagaaaau

SEQ ID NO: 686738 - RNA, 22 nt, Human
uucagugcuaaaaagucucaag

SEQ ID NO: 686739 - RNA, 22 nt, Human
gaaugucuucuguucccagcug

SEQ ID NO: 686740 - RNA, 22 nt, Human
acuuuagauauuccucuguaca

SEQ ID NO: 686741 - RNA, 22 nt, Human
uccaaaaaacguuugaauaguu

SEQ ID NO: 686742 - RNA, 22 nt, Human
uacagggguaacaguggggaau

SEQ ID NO: 686743 - RNA, 19 nt, Human
gaauguuuguauucagcgc

SEQ ID NO: 686744 - RNA, 22 nt, Human
gaggcaguaauugugggcaaua

SEQ ID NO: 686745 - RNA, 23 nt, Human
aggcugccagaaauuggguaagg

SEQ ID NO: 686746 - RNA, 22 nt, Human
uucuaagcucugaaauaaaucu

SEQ ID NO: 686747 - RNA, 22 nt, Human
ggacaggccuggcacaguacug

SEQ ID NO: 686748 - RNA, 22 nt, Human
ccaggagcgcgugaacaggcug

SEQ ID NO: 686749 - RNA, 22 nt, Human
ucugucacucuagagauggcag

SEQ ID NO: 686750 - RNA, 22 nt, Human
ucauacaggcucaagcuauacg

SEQ ID NO: 686751 - RNA, 22 nt, Human
gcuggcugcuguugagacuugu

SEQ ID NO: 686752 - RNA, 18 nt, Human
uggagggcuugcugcagc

SEQ ID NO: 686753 - RNA, 22 nt, Human
agcagguguagggcucuuugua

SEQ ID NO: 686754 - RNA, 22 nt, Human
caugaauuuauauuauuaguga

SEQ ID NO: 686755 - RNA, 22 nt, Human
cccaggcucccaggugggacaa

SEQ ID NO: 686756 - RNA, 22 nt, Human
uuuggucuuuuguaaguuaucu

SEQ ID NO: 686757 - RNA, 22 nt, Human
gcugggcuggccgccgagaucg

SEQ ID NO: 686758 - RNA, 21 nt, Human
uuagcaguuguugauuuccag

SEQ ID NO: 686759 - RNA, 22 nt, Human
cagacagaccugcaagggcaca

SEQ ID NO: 686760 - RNA, 22 nt, Human
ugaaagcucugucaucauuccu

SEQ ID NO: 686761 - RNA, 22 nt, Human
auggauaauggugauaguugca

SEQ ID NO: 686762 - RNA, 19 nt, Human
ucguggggaggugggcagc

SEQ ID NO: 686763 - RNA, 22 nt, Human
uuccugguccuauuauauacac

SEQ ID NO: 686764 - RNA, 22 nt, Human
aagcauuuggcaugaaacucuu

SEQ ID NO: 686765 - RNA, 23 nt, Human
aggcuggcuucaggagccucucc

SEQ ID NO: 686766 - RNA, 22 nt, Human
augggcuguccuaguccagccc

SEQ ID NO: 686767 - RNA, 22 nt, Human
ugucugaacaaacucugccucc

SEQ ID NO: 686768 - RNA, 22 nt, Human
cuuauucauauauucucgguag

SEQ ID NO: 686769 - RNA, 22 nt, Human
ugcuuaaaguaguggauuguua

SEQ ID NO: 686770 - RNA, 22 nt, Human
cagcuguuccuggaaggagacc

SEQ ID NO: 686771 - RNA, 22 nt, Human
gacugggggcagccgcaccagu

SEQ ID NO: 686772 - RNA, 22 nt, Human
ucccuguaguucguggucuuug

SEQ ID NO: 686773 - RNA, 22 nt, Human
acuguuggcuucugguagugac

SEQ ID NO: 686774 - RNA, 22 nt, Human
uggcuucacccguccuccccac

SEQ ID NO: 686775 - RNA, 22 nt, Human
uccaucugguggcuuccuuuug

SEQ ID NO: 686776 - RNA, 22 nt, Human
aauguauguguauaucaaauca

SEQ ID NO: 686777 - RNA, 22 nt, Human
gcucugugguggggcagaguuu

SEQ ID NO: 686778 - RNA, 22 nt, Human
gcuuugggggcugcagugcgug

SEQ ID NO: 686779 - RNA, 22 nt, Human
aggcucuggaguuagccaggca

SEQ ID NO: 686780 - RNA, 22 nt, Human
acugggcaccaucaugagauag

SEQ ID NO: 686781 - RNA, 22 nt, Human
guggaaaacugagaaaauugcu

SEQ ID NO: 686782 - RNA, 22 nt, Human
uccugaaguauggguauggagu

SEQ ID NO: 686783 - RNA, 22 nt, Human
auaaagucaaggcauuuuauga

SEQ ID NO: 686784 - RNA, 22 nt, Human
ccuggcaguggugaagaagagg

SEQ ID NO: 686785 - RNA, 22 nt, Human
cuugggaaugcuaacagaugac

SEQ ID NO: 686786 - RNA, 22 nt, Human
caagauuugacuucgugguuug

SEQ ID NO: 686787 - RNA, 21 nt, Human
ccuggcacuggccugcugagc

SEQ ID NO: 686788 - RNA, 18 nt, Human
uccagcaggucugaggug

SEQ ID NO: 686789 - RNA, 22 nt, Human
uaugcuuugcaauuggaaaagg

SEQ ID NO: 686790 - RNA, 22 nt, Human
ugugaagaucaggguccuagag

SEQ ID NO: 686791 - RNA, 22 nt, Human
ccuggcucaguguugaaggggu

SEQ ID NO: 686792 - RNA, 22 nt, Human
uaggacuuggugacucucaaug

SEQ ID NO: 686793 - RNA, 22 nt, Human
gggagagcgcgcuagggccgag

SEQ ID NO: 686794 - RNA, 22 nt, Human
gccaccuguaagccauuaggcc

SEQ ID NO: 686795 - RNA, 22 nt, Human
augcacauuguagccacacaau

SEQ ID NO: 686796 - RNA, 22 nt, Human
agagcuggaaucagaccucagg

SEQ ID NO: 686797 - RNA, 22 nt, Human
acucacagucccuguaggagug

SEQ ID NO: 686798 - RNA, 22 nt, Human
acuucauguuucuauuagcuca

SEQ ID NO: 686799 - RNA, 22 nt, Human
agauggagucucacucuuguug

SEQ ID NO: 686800 - RNA, 22 nt, Human
aagauucucagaaaaaggcuau

SEQ ID NO: 686801 - RNA, 22 nt, Human
accuugggcaaccugcuccugc

SEQ ID NO: 686802 - RNA, 22 nt, Human
ucuguaucuaauuuuacaguag

SEQ ID NO: 686803 - RNA, 22 nt, Human
uuuagguuaaucaacaaacauu

SEQ ID NO: 686804 - RNA, 22 nt, Human
aauaaucucccuuuuuguaugu

SEQ ID NO: 686805 - RNA, 22 nt, Human
aauaauaagauacuaagggagu

SEQ ID NO: 686806 - RNA, 22 nt, Human
uaucuuugcaaauaucucuaag

SEQ ID NO: 686807 - RNA, 22 nt, Human
auucacacauacucauguguga

SEQ ID NO: 686808 - RNA, 22 nt, Human
uaugaacuuuugaugugacaug

SEQ ID NO: 686809 - RNA, 22 nt, Human
cacaggaauaagucaaacuuca

SEQ ID NO: 686810 - RNA, 23 nt, Human
ucuguggcuccuucaggcugcug

SEQ ID NO: 686811 - RNA, 22 nt, Human
uaaagugcagacucccggaaac

SEQ ID NO: 686812 - RNA, 22 nt, Human
aaaucccacucagaaacugcca

SEQ ID NO: 686813 - RNA, 22 nt, Human
uguacacugcaggaugcauugc

SEQ ID NO: 686814 - RNA, 22 nt, Human
gggcuccagccaggugucccca

SEQ ID NO: 686815 - RNA, 19 nt, Human
agacaaguuuccagaagcc

SEQ ID NO: 686816 - RNA, 22 nt, Human
agggacagucuacuguucacug

SEQ ID NO: 686817 - RNA, 22 nt, Human
aaguccugaaacuucuuucuga

SEQ ID NO: 686818 - RNA, 22 nt, Human
cagagacaguuucacagggucu

SEQ ID NO: 686819 - RNA, 22 nt, Human
cagggcuuugaacaggcaucaa

SEQ ID NO: 686820 - RNA, 22 nt, Human
auuuuacuacuccaauuaauga

SEQ ID NO: 686821 - RNA, 22 nt, Human
ugcagggccuugggucuuucuu

SEQ ID NO: 686822 - RNA, 20 nt, Human
aaugaaguuauuaaugaugu

SEQ ID NO: 686823 - RNA, 22 nt, Human
cauguacauucuguagauggag

SEQ ID NO: 686824 - RNA, 22 nt, Human
gaagcacauggcugugagcaac

SEQ ID NO: 686825 - RNA, 22 nt, Human
ugauauggcuaaagaaaguuuc

SEQ ID NO: 686826 - RNA, 21 nt, Human
ucuuuccugcccaguugcccu

SEQ ID NO: 686827 - RNA, 22 nt, Human
uuggagugacagaugaggaaac

SEQ ID NO: 686828 - RNA, 22 nt, Human
acccugggagggagaaaucaga

SEQ ID NO: 686829 - RNA, 22 nt, Human
ugugucucuccuggaagcacgu

SEQ ID NO: 686830 - RNA, 22 nt, Human
gugcauauaugugcagcaucaa

SEQ ID NO: 686831 - RNA, 22 nt, Human
acaugauauuaaugucuuauuu

SEQ ID NO: 686832 - RNA, 22 nt, Human
ccacuuucugagggaacagcag

SEQ ID NO: 686833 - RNA, 19 nt, Human
aagagucacaggcagcccu

SEQ ID NO: 686834 - RNA, 22 nt, Human
cuccccacauuucucccugucu

SEQ ID NO: 686835 - RNA, 22 nt, Human
auggcaccuuccccagagcuca

SEQ ID NO: 686836 - RNA, 22 nt, Human
cuuuuguuaggagaaaacauca

SEQ ID NO: 686837 - RNA, 22 nt, Human
aguguacauguuuacagcaucu

SEQ ID NO: 686838 - RNA, 22 nt, Human
agcagggcuccauuucacugcc

SEQ ID NO: 686839 - RNA, 22 nt, Human
ugauuacacuauuugggaauag

SEQ ID NO: 686840 - RNA, 22 nt, Human
uccagggacagcgcuggagcua

SEQ ID NO: 686841 - RNA, 22 nt, Human
acaucuucacugguuucuggaa

SEQ ID NO: 686842 - RNA, 22 nt, Human
acuuuacaaacuccucacuguu

SEQ ID NO: 686843 - RNA, 22 nt, Human
aacucuugggcugcaugcuguu

SEQ ID NO: 686844 - RNA, 22 nt, Human
uguuccuaaauaugaauggaga

SEQ ID NO: 686845 - RNA, 22 nt, Human
cagcuggcuccaccucugggcu

SEQ ID NO: 686846 - RNA, 23 nt, Human
uuuuccagaaucgacucuguaga

SEQ ID NO: 686847 - RNA, 22 nt, Human
augaccccuaaaauuuacuguc

SEQ ID NO: 686848 - RNA, 22 nt, Human
uaagaugacuacuuaccacuga

SEQ ID NO: 686849 - RNA, 22 nt, Human
gcuggcugagcacugguuuaua

SEQ ID NO: 686850 - RNA, 22 nt, Human
aggaaauguacaaaugaagaug

SEQ ID NO: 686851 - RNA, 22 nt, Human
ucaguaaaugagcaaaaauuuc

SEQ ID NO: 686852 - RNA, 22 nt, Human
ugaacuuuuauuugaugacagg

SEQ ID NO: 686853 - RNA, 22 nt, Human
aggucaaagaaccuagcuauag

SEQ ID NO: 686854 - RNA, 21 nt, Human
aacugagaccagcuaaagugg

SEQ ID NO: 686855 - RNA, 22 nt, Human
auaaaaguuuccaaucaugccu

SEQ ID NO: 686856 - RNA, 22 nt, Human
gagguuggugaggggacacggu

SEQ ID NO: 686857 - RNA, 22 nt, Human
caagaacauugugaucacuuca

SEQ ID NO: 686858 - RNA, 18 nt, Human
ggccugaggauuucagca

SEQ ID NO: 686859 - RNA, 22 nt, Human
caagggcucuuuugaggaaugu

SEQ ID NO: 686860 - RNA, 22 nt, Human
cauauucaagggguaaggcaaa

SEQ ID NO: 686861 - RNA, 22 nt, Human
aguuucacagaauaugaagguu

SEQ ID NO: 686862 - RNA, 22 nt, Human
ucacuggggccaugugagggac

SEQ ID NO: 686863 - RNA, 22 nt, Human
ggucccugaagaggccuggggu

SEQ ID NO: 686864 - RNA, 22 nt, Human
ggcugccuacuuucccagaguu

SEQ ID NO: 686865 - RNA, 22 nt, Human
ggcagcauugccaauccagaca

SEQ ID NO: 686866 - RNA, 22 nt, Human
caugucaauaaauauaacugca

SEQ ID NO: 686867 - RNA, 22 nt, Human
gauccuugcacuugacuuggca

SEQ ID NO: 686868 - RNA, 22 nt, Human
agggccagccgacuuccagccu

SEQ ID NO: 686869 - RNA, 22 nt, Human
gcagaugguggaggcaagaggc

SEQ ID NO: 686870 - RNA, 22 nt, Human
ugcugggcuaggguggagcucu

SEQ ID NO: 686871 - RNA, 22 nt, Human
agaaggcaucagaaguguguag

SEQ ID NO: 686872 - RNA, 22 nt, Human
aagcacagauugcugcauccau

SEQ ID NO: 686873 - RNA, 22 nt, Human
aggaaugguuauggggauagua

SEQ ID NO: 686874 - RNA, 22 nt, Human
aauguuuaauguuagugguaau

SEQ ID NO: 686875 - RNA, 20 nt, Human
agaaacagcacaauucuguu

SEQ ID NO: 686876 - RNA, 22 nt, Human
gcaguaggagggacaacuaccu

SEQ ID NO: 686877 - RNA, 21 nt, Human
ucaggaguggagagaauuggu

SEQ ID NO: 686878 - RNA, 22 nt, Human
gagggaauggugugcaagaggu

SEQ ID NO: 686879 - RNA, 22 nt, Human
ugaggaagugguuguaugguuu

SEQ ID NO: 686880 - RNA, 22 nt, Human
uccugccaggagugcuggcccu

SEQ ID NO: 686881 - RNA, 23 nt, Human
uggauaaagcugugcugcauagg

SEQ ID NO: 686882 - RNA, 22 nt, Human
acuucauguaguccaucagguu

SEQ ID NO: 686883 - RNA, 22 nt, Human
accagaaggaccagaggcaagg

SEQ ID NO: 686884 - RNA, 22 nt, Human
gcaaagcagucuucugugccua

SEQ ID NO: 686885 - RNA, 20 nt, Human
cugagcccccagccugcagg

SEQ ID NO: 686886 - RNA, 22 nt, Human
acaauuugaggcuacucaauug

SEQ ID NO: 686887 - RNA, 22 nt, Human
cuucuuuguucuguugucucac

SEQ ID NO: 686888 - RNA, 22 nt, Human
uucauuuguggugaaugaagug

SEQ ID NO: 686889 - RNA, 19 nt, Human
agugaguggggaaggcccu

SEQ ID NO: 686890 - RNA, 22 nt, Human
uuccagaauuuuguucugcuug

SEQ ID NO: 686891 - RNA, 22 nt, Human
ugaaacaaaauuaagauucucg

SEQ ID NO: 686892 - RNA, 22 nt, Human
aauauuuuugaggcccuguuau

SEQ ID NO: 686893 - RNA, 22 nt, Human
ugggccucaucuucaaugaguc

SEQ ID NO: 686894 - RNA, 22 nt, Human
gcacauacugcaaagauuacua

SEQ ID NO: 686895 - RNA, 22 nt, Human
ucccugaaccacuagugaugag

SEQ ID NO: 686896 - RNA, 22 nt, Human
agcugucuggaaguuccucaug

SEQ ID NO: 686897 - RNA, 22 nt, Human
gggcuuggcucauaaguggaug

SEQ ID NO: 686898 - RNA, 22 nt, Human
uugacaaaguuuaguaauaauc

SEQ ID NO: 686899 - RNA, 22 nt, Human
ugguuuuaaaagauguuugaga

SEQ ID NO: 686900 - RNA, 22 nt, Human
aggccucugggucuccucugac

SEQ ID NO: 686901 - RNA, 22 nt, Human
cgggcacugccuuuguugauuu

SEQ ID NO: 686902 - RNA, 22 nt, Human
ggagcagcacugccacacagag

SEQ ID NO: 686903 - RNA, 22 nt, Human
gcccugagaagaagucggaggg

SEQ ID NO: 686904 - RNA, 22 nt, Human
uuuaagagcauuugcaauuuau

SEQ ID NO: 686905 - RNA, 22 nt, Human
ucucaguccaaaugagagguug

SEQ ID NO: 686906 - RNA, 22 nt, Human
gcagaagucagaccaucugaau

SEQ ID NO: 686907 - RNA, 22 nt, Human
ugcccaaggucaccuaguuagu

SEQ ID NO: 686908 - RNA, 22 nt, Human
ugaaagcuguccacuaggcugu

SEQ ID NO: 686909 - RNA, 22 nt, Human
augcaugagcuuugugauccug

SEQ ID NO: 686910 - RNA, 22 nt, Human
ugcccuggcacacacacagcug

SEQ ID NO: 686911 - RNA, 22 nt, Human
caggugagcucuaucuagggag

SEQ ID NO: 686912 - RNA, 18 nt, Human
uggcagccagcugcuccu

SEQ ID NO: 686913 - RNA, 21 nt, Human
gcugcagggcccagggcaccc

SEQ ID NO: 686914 - RNA, 22 nt, Human
cucugugaaccccuccuuucuu

SEQ ID NO: 686915 - RNA, 18 nt, Human
uccugcagcuucuaugua

SEQ ID NO: 686916 - RNA, 22 nt, Human
uauuacaauuuacauugcacuu

SEQ ID NO: 686917 - RNA, 23 nt, Human
ugucuuuguuaggacuguguuua

SEQ ID NO: 686918 - RNA, 22 nt, Human
gcugggcucauuugugugucug

SEQ ID NO: 686919 - RNA, 22 nt, Human
gaugaagccccaguguaaguaa

SEQ ID NO: 686920 - RNA, 22 nt, Human
ucccuccuuaauaagaggucug

SEQ ID NO: 686921 - RNA, 18 nt, Human
cauuguuuccagaagacc

SEQ ID NO: 686922 - RNA, 22 nt, Human
agaagccauucucaguuccuga

SEQ ID NO: 686923 - RNA, 22 nt, Human
ucugggcugaaaugaaggccuu

SEQ ID NO: 686924 - RNA, 22 nt, Human
uaggacaguagcuggugcacag

SEQ ID NO: 686925 - RNA, 22 nt, Human
aguucucagcuuaguaugcugu

SEQ ID NO: 686926 - RNA, 22 nt, Human
agaggcaacauggggaacagau

SEQ ID NO: 686927 - RNA, 22 nt, Human
cucuuuuagagaugaaaauugg

SEQ ID NO: 686928 - RNA, 22 nt, Human
aacauaucauaggaugucauug

SEQ ID NO: 686929 - RNA, 21 nt, Human
gcugggccuguacuugcccug

SEQ ID NO: 686930 - RNA, 22 nt, Human
uucauugaaauguuucuagcug

SEQ ID NO: 686931 - RNA, 22 nt, Human
gggcuaggcuuggccagcacug

SEQ ID NO: 686932 - RNA, 22 nt, Human
cguccccucguucccacuuugg

SEQ ID NO: 686933 - RNA, 22 nt, Human
acauugagugcuccauaaauca

SEQ ID NO: 686934 - RNA, 22 nt, Human
uaauaguuucauaaugugcuuc

SEQ ID NO: 686935 - RNA, 22 nt, Human
agccacuguaaggggaauugcc

SEQ ID NO: 686936 - RNA, 22 nt, Human
aaggaugauugguaaugacacu

SEQ ID NO: 686937 - RNA, 22 nt, Human
cccagaaugauucagcgacagu

SEQ ID NO: 686938 - RNA, 18 nt, Human
ggcacuggugaugcagag

SEQ ID NO: 686939 - RNA, 22 nt, Human
gggugaggccuugcugccauca

SEQ ID NO: 686940 - RNA, 22 nt, Human
ucuauuaaugauucaauagugu

SEQ ID NO: 686941 - RNA, 22 nt, Human
aggcuggaguguagcagugcag

SEQ ID NO: 686942 - RNA, 22 nt, Human
ccaggagagcauugcacagagg

SEQ ID NO: 686943 - RNA, 22 nt, Human
auacaucuugucagauucaugu

SEQ ID NO: 686944 - RNA, 22 nt, Human
augcugaauaguucacucuucu

SEQ ID NO: 686945 - RNA, 22 nt, Human
aucccccucuuggauggcggca

SEQ ID NO: 686946 - RNA, 22 nt, Human
cagccaugagucuaagcaguuu

SEQ ID NO: 686947 - RNA, 22 nt, Human
gucccuggguagcucaguggcu

SEQ ID NO: 686948 - RNA, 18 nt, Human
uacugguccuuuuaugau

SEQ ID NO: 686949 - RNA, 22 nt, Human
ugagaauuacaaaugagucaca

SEQ ID NO: 686950 - RNA, 22 nt, Human
aagcaugguuucugacgucaug

SEQ ID NO: 686951 - RNA, 22 nt, Human
aggcaggcucaggcccaugcuu

SEQ ID NO: 686952 - RNA, 22 nt, Human
gaaaguuucucacacaugcaga

SEQ ID NO: 686953 - RNA, 22 nt, Human
uggccugcagcucucagggaag

SEQ ID NO: 686954 - RNA, 22 nt, Human
acaggcagcaaaaucagccuca

SEQ ID NO: 686955 - RNA, 22 nt, Human
uuaugagacuguuuuacacacu

SEQ ID NO: 686956 - RNA, 22 nt, Human
uucuuccucagcagggcugccu

SEQ ID NO: 686957 - RNA, 22 nt, Human
acagucuacuaaacaucaucag

SEQ ID NO: 686958 - RNA, 22 nt, Human
aguuauuuuggaaaaugaguca

SEQ ID NO: 686959 - RNA, 22 nt, Human
acccccaagaggggccuucagc

SEQ ID NO: 686960 - RNA, 22 nt, Human
ucugggugcccuuugcucuguu

SEQ ID NO: 686961 - RNA, 22 nt, Human
cccuuccuugugacuggugggg

SEQ ID NO: 686962 - RNA, 22 nt, Human
ucugagcucaagugacaguuag

SEQ ID NO: 686963 - RNA, 22 nt, Human
cccaggaggcagagcuugcagu

SEQ ID NO: 686964 - RNA, 22 nt, Human
ccacaggaccagaggagaucac

SEQ ID NO: 686965 - RNA, 22 nt, Human
caguccugcuggccuucccugg

SEQ ID NO: 686966 - RNA, 22 nt, Human
aaauacuggcaagugcuaauuc

SEQ ID NO: 686967 - RNA, 22 nt, Human
uguaugcaaauuuauuagcaca

SEQ ID NO: 686968 - RNA, 22 nt, Human
agcacacugaccugaagccuug

SEQ ID NO: 686969 - RNA, 22 nt, Human
gcucagaggguuuuggccaagu

SEQ ID NO: 686970 - RNA, 22 nt, Human
aaagugcugggauuacaagugu

SEQ ID NO: 686971 - RNA, 22 nt, Human
cagagagagugggguguggauu

SEQ ID NO: 686972 - RNA, 22 nt, Human
gcccucaggcagggagucuuuc

SEQ ID NO: 686973 - RNA, 22 nt, Human
auucccaccaacaauguacagg

SEQ ID NO: 686974 - RNA, 22 nt, Human
ucaagagauugaauaauaacug

SEQ ID NO: 686975 - RNA, 22 nt, Human
ccuuucugauggccucccagcc

SEQ ID NO: 686976 - RNA, 22 nt, Human
ggcaggcauggggucugccauu

SEQ ID NO: 686977 - RNA, 22 nt, Human
ugugugaauggauuauucuauu

SEQ ID NO: 686978 - RNA, 22 nt, Human
acccuggccugguucaugugau

SEQ ID NO: 686979 - RNA, 22 nt, Human
acuuuuaaggggccuugauuua

SEQ ID NO: 686980 - RNA, 22 nt, Human
ggcugccagcacugguguagag

SEQ ID NO: 686981 - RNA, 22 nt, Human
aggcugaggagggauguugcuu

SEQ ID NO: 686982 - RNA, 22 nt, Human
agugcuuauaccaaagacucuu

SEQ ID NO: 686983 - RNA, 22 nt, Human
uauuuugaaagucuguuuugaa

SEQ ID NO: 686984 - RNA, 22 nt, Human
ggcaggugcaccugagccaucu

SEQ ID NO: 686985 - RNA, 22 nt, Human
ugcagaagcagagaguugccaa

SEQ ID NO: 686986 - RNA, 22 nt, Human
cuacuucugugaugaaacuaca

SEQ ID NO: 686987 - RNA, 22 nt, Human
agcaaggauuauccugggaagg

SEQ ID NO: 686988 - RNA, 22 nt, Human
cccuccucucccuaagagucac

SEQ ID NO: 686989 - RNA, 22 nt, Human
uaacaaagguugccaaacuaag

SEQ ID NO: 686990 - RNA, 22 nt, Human
aaagacuaagaagaguauuauu

SEQ ID NO: 686991 - RNA, 22 nt, Human
cugacuguugcuguugaugagg

SEQ ID NO: 686992 - RNA, 22 nt, Human
gagcuggggcggauacucagcu

SEQ ID NO: 686993 - RNA, 22 nt, Human
uuucuguuaggcaucauuuuaa

SEQ ID NO: 686994 - RNA, 22 nt, Human
acaugaaugcagccauaacacu

SEQ ID NO: 686995 - RNA, 22 nt, Human
ggcucucugaggaaacccuucc

SEQ ID NO: 686996 - RNA, 22 nt, Human
gugccugcugcagagucgcugu

SEQ ID NO: 686997 - RNA, 22 nt, Human
gacuguccagaauuccuaggug

SEQ ID NO: 686998 - RNA, 22 nt, Human
gcugugugcucacguaguggaa

SEQ ID NO: 686999 - RNA, 22 nt, Human
caaggccaguuucuccuaguca

SEQ ID NO: 687000 - RNA, 22 nt, Human
ucugaauaguucuauuuuaaag

SEQ ID NO: 687001 - RNA, 22 nt, Human
guguccugagugaggccuggcc

SEQ ID NO: 687002 - RNA, 22 nt, Human
agcuccuggacgaacagggagu

SEQ ID NO: 687003 - RNA, 22 nt, Human
ccagcagaagcucccgcugggu

SEQ ID NO: 687004 - RNA, 22 nt, Human
uuguuuaaagaacuucugacuu

SEQ ID NO: 687005 - RNA, 22 nt, Human
gggcucugggaugcucuuagag

SEQ ID NO: 687006 - RNA, 22 nt, Human
aaucaagaggcgauggauggaa

SEQ ID NO: 687007 - RNA, 22 nt, Human
acagugaucaguuacugucugu

SEQ ID NO: 687008 - RNA, 21 nt, Human
gugucaugguugacuuuggca

SEQ ID NO: 687009 - RNA, 22 nt, Human
auuuuaugacacgauucuucca

SEQ ID NO: 687010 - RNA, 22 nt, Human
caucucuguguccccagagcuu

SEQ ID NO: 687011 - RNA, 22 nt, Human
gcagcugccccgacugugaguc

SEQ ID NO: 687012 - RNA, 22 nt, Human
ggcugcuggggacgugggagag

SEQ ID NO: 687013 - RNA, 22 nt, Human
cagagggucaccaggaagugca

SEQ ID NO: 687014 - RNA, 22 nt, Human
ccagaucccuguuugccucugg

SEQ ID NO: 687015 - RNA, 22 nt, Human
uaugcauuuuauagugcaaagc

SEQ ID NO: 687016 - RNA, 22 nt, Human
uuugugaauggaauccacagac

SEQ ID NO: 687017 - RNA, 22 nt, Human
aggccaagugcugggacaggug

SEQ ID NO: 687018 - RNA, 22 nt, Human
uacaaagaguuuggucucuaga

SEQ ID NO: 687019 - RNA, 22 nt, Human
gcaauagacuguuuuuauuguu

SEQ ID NO: 687020 - RNA, 22 nt, Human
cccaggaccauccuucugugcc

SEQ ID NO: 687021 - RNA, 22 nt, Human
ugagugagcuggggagccggug

SEQ ID NO: 687022 - RNA, 22 nt, Human
agugucugccugggaggagcau

SEQ ID NO: 687023 - RNA, 22 nt, Human
cgaggcagaggcugaaacggcu

SEQ ID NO: 687024 - RNA, 22 nt, Human
uaguuuaggauccaaucuaaga

SEQ ID NO: 687025 - RNA, 22 nt, Human
gaggaugugucuggucugggca

SEQ ID NO: 687026 - RNA, 19 nt, Human
augaggaacugaggcucag

SEQ ID NO: 687027 - RNA, 22 nt, Human
caggaaugccaaccagugcaug

SEQ ID NO: 687028 - RNA, 22 nt, Human
cagcucuuccuagccaugccac

SEQ ID NO: 687029 - RNA, 22 nt, Human
ugauugaagaggugaggaaguu

SEQ ID NO: 687030 - RNA, 21 nt, Human
ucugggugcuaguguuugcuu

SEQ ID NO: 687031 - RNA, 21 nt, Human
gggcagaggggccuccugggu

SEQ ID NO: 687032 - RNA, 22 nt, Human
caaggccagggaauuuuucugg

SEQ ID NO: 687033 - RNA, 22 nt, Human
ccaaaguccuuucuccaccugc

SEQ ID NO: 687034 - RNA, 22 nt, Human
caguaugcaguugaaaauaagc

SEQ ID NO: 687035 - RNA, 22 nt, Human
uaggaacaacugcagguacaag

SEQ ID NO: 687036 - RNA, 22 nt, Human
uuucagacaucacauggguuug

SEQ ID NO: 687037 - RNA, 22 nt, Human
aagugugggacuagggcuccag

SEQ ID NO: 687038 - RNA, 22 nt, Human
gaagaggcuuuccuagggcaag

SEQ ID NO: 687039 - RNA, 22 nt, Human
aggcccuggacacucaagccgg

SEQ ID NO: 687040 - RNA, 22 nt, Human
cuucugugaagagcagaaccau

SEQ ID NO: 687041 - RNA, 22 nt, Human
auuuagucuguaacaguacagu

SEQ ID NO: 687042 - RNA, 20 nt, Human
aucuugggacagggcacaug

SEQ ID NO: 687043 - RNA, 20 nt, Human
uggagcuguaaucuugucug

SEQ ID NO: 687044 - RNA, 22 nt, Human
ugcauuucuuuugaguauaugc

SEQ ID NO: 687045 - RNA, 22 nt, Human
aggcucccaagcacugacccca

SEQ ID NO: 687046 - RNA, 20 nt, Human
cucuucaaauauuuuauucu

SEQ ID NO: 687047 - RNA, 22 nt, Human
uagggcuauaagagaauaagac

SEQ ID NO: 687048 - RNA, 22 nt, Human
acauuuagaugguguuauagua

SEQ ID NO: 687049 - RNA, 22 nt, Human
gacaauuucucaauauagaaac

SEQ ID NO: 687050 - RNA, 22 nt, Human
ggggauggaggcgugugguccu

SEQ ID NO: 687051 - RNA, 22 nt, Human
uuaggaauauuuucugaguagu

SEQ ID NO: 687052 - RNA, 22 nt, Human
cucuuaaugaccuuaauucaag

SEQ ID NO: 687053 - RNA, 22 nt, Human
aacaccuucuccuugcaggcca

SEQ ID NO: 687054 - RNA, 18 nt, Human
ggaagaaaaggaacucag

SEQ ID NO: 687055 - RNA, 22 nt, Human
cauuuuauccucugggaagcua

SEQ ID NO: 687056 - RNA, 20 nt, Human
auuuuggugaacacagcuuc

SEQ ID NO: 687057 - RNA, 22 nt, Human
gccacuguccugugccugugcu

SEQ ID NO: 687058 - RNA, 22 nt, Human
cugguuccaggauggaucuuuc

SEQ ID NO: 687059 - RNA, 22 nt, Human
aacuucauuccuuuuuaugacu

SEQ ID NO: 687060 - RNA, 22 nt, Human
acauucugucaacagugagcag

SEQ ID NO: 687061 - RNA, 22 nt, Human
ccaugcacaccagcaggcagac

SEQ ID NO: 687062 - RNA, 22 nt, Human
cccagaggaggcaaagcucugu

SEQ ID NO: 687063 - RNA, 23 nt, Human
auuuccuacuauaaaagagguaa

SEQ ID NO: 687064 - RNA, 22 nt, Human
gccccuccauccaucaccgggg

SEQ ID NO: 687065 - RNA, 22 nt, Human
ggcccucuuuuauccaucauaa

SEQ ID NO: 687066 - RNA, 22 nt, Human
acauuacacugugguccuguuc

SEQ ID NO: 687067 - RNA, 19 nt, Human
cuauacagccucugaggaa

SEQ ID NO: 687068 - RNA, 22 nt, Human
aggaauauuacuuugcuuuuau

SEQ ID NO: 687069 - RNA, 23 nt, Human
ccacucucccaccauaucuguau

SEQ ID NO: 687070 - RNA, 22 nt, Human
uuuaacagguaaaguaaaugug

SEQ ID NO: 687071 - RNA, 22 nt, Human
uauggguauuauugguaagaau

SEQ ID NO: 687072 - RNA, 22 nt, Human
cugcugugaguuuggaggucua

SEQ ID NO: 687073 - RNA, 22 nt, Human
uguucauucgcuauugucuaug

SEQ ID NO: 687074 - RNA, 22 nt, Human
ucagaguuggccuuucuguauu

SEQ ID NO: 687075 - RNA, 22 nt, Human
agcagaggacaguucuuaggaa

SEQ ID NO: 687076 - RNA, 22 nt, Human
ucuuccuauggggcugcaggaa

SEQ ID NO: 687077 - RNA, 22 nt, Human
aagcugccaaugguaagcugcu

SEQ ID NO: 687078 - RNA, 22 nt, Human
ccaguacaucgcauggugacca

SEQ ID NO: 687079 - RNA, 23 nt, Human
aagugguuuugaacccggacccu

SEQ ID NO: 687080 - RNA, 22 nt, Human
uugccaggagacaaagugggcc

SEQ ID NO: 687081 - RNA, 22 nt, Human
augagaaggacauaaauuauag

SEQ ID NO: 687082 - RNA, 22 nt, Human
uuaaaggcaugguuagacaugg

SEQ ID NO: 687083 - RNA, 21 nt, Human
gcucccuggcugugugaccug

SEQ ID NO: 687084 - RNA, 22 nt, Human
guacaguaguaaaagugaauga

SEQ ID NO: 687085 - RNA, 22 nt, Human
aacugaggucuccagugcagaa

SEQ ID NO: 687086 - RNA, 22 nt, Human
uaauuggauguucucuggaagc

SEQ ID NO: 687087 - RNA, 20 nt, Human
accaggcccggugucuccuc

SEQ ID NO: 687088 - RNA, 20 nt, Human
acacacagagacaugcgcau

SEQ ID NO: 687089 - RNA, 22 nt, Human
aaagaauacuccuuuugccuug

SEQ ID NO: 687090 - RNA, 22 nt, Human
agguuuauaggaaauuuguucc

SEQ ID NO: 687091 - RNA, 22 nt, Human
cugaauauuagucaugucugau

SEQ ID NO: 687092 - RNA, 22 nt, Human
gaagccagccuugucugccucu

SEQ ID NO: 687093 - RNA, 22 nt, Human
auuuccuauacaguuguccaua

SEQ ID NO: 687094 - RNA, 22 nt, Human
ucucuggaauuuugagagugac

SEQ ID NO: 687095 - RNA, 22 nt, Human
ccugaggacacacgcugcagga

SEQ ID NO: 687096 - RNA, 22 nt, Human
gugagagauugauuguagcggc

SEQ ID NO: 687097 - RNA, 22 nt, Human
ucagagaguuuucacuagggug

SEQ ID NO: 687098 - RNA, 18 nt, Human
gcugugugcaccugauaa

SEQ ID NO: 687099 - RNA, 22 nt, Human
ccuccaaguuugacucaggaca

SEQ ID NO: 687100 - RNA, 22 nt, Human
gaacaaaucccuuccugucucc

SEQ ID NO: 687101 - RNA, 22 nt, Human
uaaagcuagaauuguuccagca

SEQ ID NO: 687102 - RNA, 22 nt, Human
ucacaucugaaaaaauauugag

SEQ ID NO: 687103 - RNA, 22 nt, Human
aacacuuuccguagguuuagua

SEQ ID NO: 687104 - RNA, 22 nt, Human
auuuacaguuuagcauuucaag

SEQ ID NO: 687105 - RNA, 19 nt, Human
acagagcucucugcuucug

SEQ ID NO: 687106 - RNA, 22 nt, Human
ugcuggcuuugcgagaugcauu

SEQ ID NO: 687107 - RNA, 21 nt, Human
guuuacaaggcuuugcuccug

SEQ ID NO: 687108 - RNA, 22 nt, Human
gaucagaauuuacuuauaauug

SEQ ID NO: 687109 - RNA, 20 nt, Human
uuccuuuucgccucucuccc

SEQ ID NO: 687110 - RNA, 19 nt, Human
agggucaggacaaggacuu

SEQ ID NO: 687111 - RNA, 22 nt, Human
ugcuggaaagagaguuucaaug

SEQ ID NO: 687112 - RNA, 22 nt, Human
uccaugugccaaggggcagagg

SEQ ID NO: 687113 - RNA, 21 nt, Human
aggcagcaggauccagggaca

SEQ ID NO: 687114 - RNA, 22 nt, Human
agggucaacacuuuaaacauau

SEQ ID NO: 687115 - RNA, 22 nt, Human
auggaauuaaaagucaaguaau

SEQ ID NO: 687116 - RNA, 22 nt, Human
gauggcacacagacauccccgc

SEQ ID NO: 687117 - RNA, 22 nt, Human
ccuggccuggcacucccucugc

SEQ ID NO: 687118 - RNA, 22 nt, Human
auucuucaccugagucagucua

SEQ ID NO: 687119 - RNA, 22 nt, Human
caccagaguuguccaaaugauu

SEQ ID NO: 687120 - RNA, 22 nt, Human
gcacacagauuaggaaacagaa

SEQ ID NO: 687121 - RNA, 22 nt, Human
cacugugcuccuaacuagcugu

SEQ ID NO: 687122 - RNA, 22 nt, Human
uucugacacauuacuacaugga

SEQ ID NO: 687123 - RNA, 22 nt, Human
uggcaggcggagguugcaguga

SEQ ID NO: 687124 - RNA, 22 nt, Human
gcaggaguguauuugcauguaa

SEQ ID NO: 687125 - RNA, 22 nt, Human
uccagggacacagaguccuucu

SEQ ID NO: 687126 - RNA, 22 nt, Human
ucucugugugugugacagcauu

SEQ ID NO: 687127 - RNA, 22 nt, Human
caccacuucauaggcuuuaagg

SEQ ID NO: 687128 - RNA, 22 nt, Human
uguggcucucaugcacucccag

SEQ ID NO: 687129 - RNA, 22 nt, Human
aaggagcuaugcauaacugauc

SEQ ID NO: 687130 - RNA, 22 nt, Human
cuggcccugcuccgcgccgcgg

SEQ ID NO: 687131 - RNA, 22 nt, Human
gcaguccauugacagaggucuu

SEQ ID NO: 687132 - RNA, 22 nt, Human
agccaguagaucgggaggaugu

SEQ ID NO: 687133 - RNA, 22 nt, Human
aggagccaggaaaccugcucug

SEQ ID NO: 687134 - RNA, 21 nt, Human
gacaaugcagucuuuuuugga

SEQ ID NO: 687135 - RNA, 22 nt, Human
gggcagagagcuggaacuccuu

SEQ ID NO: 687136 - RNA, 22 nt, Human
ccugugucaccggaacggagga

SEQ ID NO: 687137 - RNA, 22 nt, Human
uucacagagaguaugcagagaa

SEQ ID NO: 687138 - RNA, 22 nt, Human
cuuucuuugcagugagccagag

SEQ ID NO: 687139 - RNA, 22 nt, Human
aaaugugugcacaaagacagcu

SEQ ID NO: 687140 - RNA, 21 nt, Human
cacuugaaugguguuuuacaa

SEQ ID NO: 687141 - RNA, 22 nt, Human
cugggcucugcggugucgcucu

SEQ ID NO: 687142 - RNA, 22 nt, Human
uaaucuguguaccuucaucgga

SEQ ID NO: 687143 - RNA, 22 nt, Human
agguucagaugacuuuuaugcu

SEQ ID NO: 687144 - RNA, 22 nt, Human
ugauagaaaaugcugucaagcu

SEQ ID NO: 687145 - RNA, 22 nt, Human
aagaggcgccggguacguggcg

SEQ ID NO: 687146 - RNA, 22 nt, Human
aaauccuaaaaguuugacuuaa

SEQ ID NO: 687147 - RNA, 22 nt, Human
aaaaaccuuucccauacuaaga

SEQ ID NO: 687148 - RNA, 22 nt, Human
agcuggagccagugugaggcuu

SEQ ID NO: 687149 - RNA, 22 nt, Human
ggcugccugugcccaggcacac

SEQ ID NO: 687150 - RNA, 22 nt, Human
cacaauuauagaagaaagcaua

SEQ ID NO: 687151 - RNA, 22 nt, Human
gucuggaguggggccugagaau

SEQ ID NO: 687152 - RNA, 22 nt, Human
cccaggauggggcugcaguuau

SEQ ID NO: 687153 - RNA, 17 nt, Human
uggaagcuucauguugg

SEQ ID NO: 687154 - RNA, 22 nt, Human
aauucagaagcacaaaaccuag

SEQ ID NO: 687155 - RNA, 22 nt, Human
ugcucuggggagcuccucugcg

SEQ ID NO: 687156 - RNA, 22 nt, Human
gggucagcgauuucaggggcag

SEQ ID NO: 687157 - RNA, 22 nt, Human
ggcuuuauuaacucauccguaa

SEQ ID NO: 687158 - RNA, 22 nt, Human
gaaguucugguguaugugauaa

SEQ ID NO: 687159 - RNA, 22 nt, Human
agacagacacaugguaacagau

SEQ ID NO: 687160 - RNA, 22 nt, Human
guuguuuugcaggauccuuaca

SEQ ID NO: 687161 - RNA, 23 nt, Human
uuggcagcgggucaggcuguggg

SEQ ID NO: 687162 - RNA, 22 nt, Human
caggagcaggcccaaggacaca

SEQ ID NO: 687163 - RNA, 22 nt, Human
ucuuggcugucuuugaaguuag

SEQ ID NO: 687164 - RNA, 22 nt, Human
uaaauucacuccugguagaccu

SEQ ID NO: 687165 - RNA, 22 nt, Human
gagucugaugucccccaggcca

SEQ ID NO: 687166 - RNA, 22 nt, Human
aucagugcauccugccacaaag

SEQ ID NO: 687167 - RNA, 22 nt, Human
gcacagcagccgaaaugcccuu

SEQ ID NO: 687168 - RNA, 22 nt, Human
gcacaguugugacaaccaucgc

SEQ ID NO: 687169 - RNA, 22 nt, Human
aaagugcaaucaguuagaccau

SEQ ID NO: 687170 - RNA, 22 nt, Human
uggguagagcaggcuggggcuu

SEQ ID NO: 687171 - RNA, 22 nt, Human
acguuuucagccuuaauguaga

SEQ ID NO: 687172 - RNA, 22 nt, Human
ugguuauaaaaguccucucauu

SEQ ID NO: 687173 - RNA, 22 nt, Human
gaagcuucuggcauuucucaaa

SEQ ID NO: 687174 - RNA, 20 nt, Human
ccuguguggccagcugaggc

SEQ ID NO: 687175 - RNA, 22 nt, Human
ugacaccacaacuagccauuga

SEQ ID NO: 687176 - RNA, 22 nt, Human
acacaggagauauguaauggcu

SEQ ID NO: 687177 - RNA, 22 nt, Human
agaaugauaaugccaugaugga

SEQ ID NO: 687178 - RNA, 22 nt, Human
auuuccauacacccauuucuga

SEQ ID NO: 687179 - RNA, 22 nt, Human
ucaguguucgcucagggacucc

SEQ ID NO: 687180 - RNA, 22 nt, Human
agcacuauuccaaugauccaau

SEQ ID NO: 687181 - RNA, 22 nt, Human
aagauuucucuccuggaaagca

SEQ ID NO: 687182 - RNA, 22 nt, Human
uucaggaugaaagugugcaaca

SEQ ID NO: 687183 - RNA, 22 nt, Human
gggcucagcugggcgugcuggu

SEQ ID NO: 687184 - RNA, 22 nt, Human
ccugccagccagaucacucgcc

SEQ ID NO: 687185 - RNA, 22 nt, Human
cugggccucucagcucccgcgg

SEQ ID NO: 687186 - RNA, 22 nt, Human
gggccugaaaccuucagggcuu

SEQ ID NO: 687187 - RNA, 22 nt, Human
caggaacaauguaagucucauu

SEQ ID NO: 687188 - RNA, 22 nt, Human
acaauucuggguauuuauauag

SEQ ID NO: 687189 - RNA, 23 nt, Human
aucuguguguggguagggaugau

SEQ ID NO: 687190 - RNA, 22 nt, Human
gugaauaacuuucuauguuaau

SEQ ID NO: 687191 - RNA, 22 nt, Human
gagaacaggcucuggagucaga

SEQ ID NO: 687192 - RNA, 22 nt, Human
uucaagcagggauuggugaugg

SEQ ID NO: 687193 - RNA, 22 nt, Human
gggcacaguacuccaaucaacu

SEQ ID NO: 687194 - RNA, 22 nt, Human
cuggggcuucaaugcuucggug

SEQ ID NO: 687195 - RNA, 22 nt, Human
uauuuucaucuuguccuuggau

SEQ ID NO: 687196 - RNA, 22 nt, Human
acuuucugugguuaccagggag

SEQ ID NO: 687197 - RNA, 22 nt, Human
uuaucuuggguaacuuugugca

SEQ ID NO: 687198 - RNA, 22 nt, Human
aaagcaugcuacuuuauauagg

SEQ ID NO: 687199 - RNA, 22 nt, Human
uggacaggcaagcaagacauac

SEQ ID NO: 687200 - RNA, 22 nt, Human
aucugucaagauagacucugca

SEQ ID NO: 687201 - RNA, 22 nt, Human
aggcaggcagggcucacugucu

SEQ ID NO: 687202 - RNA, 22 nt, Human
acaguguuuuaugagaauuguu

SEQ ID NO: 687203 - RNA, 22 nt, Human
ucauaaagugaaggaugauggg

SEQ ID NO: 687204 - RNA, 22 nt, Human
ccagcugguuaaaauagagaaa

SEQ ID NO: 687205 - RNA, 22 nt, Human
caguuuccugaagagaaagaau

SEQ ID NO: 687206 - RNA, 18 nt, Human
uauauucugugcccuggu

SEQ ID NO: 687207 - RNA, 22 nt, Human
uucauagugcuuaauuugauaa

SEQ ID NO: 687208 - RNA, 22 nt, Human
uggaaggcuaggugcuaggccc

SEQ ID NO: 687209 - RNA, 22 nt, Human
gauguacaagauuguaggaaug

SEQ ID NO: 687210 - RNA, 22 nt, Human
cacaaugcagcauguaaaugca

SEQ ID NO: 687211 - RNA, 21 nt, Human
ccugaaauucucacuagcuua

SEQ ID NO: 687212 - RNA, 20 nt, Human
gaugagacccaugcaugaga

SEQ ID NO: 687213 - RNA, 22 nt, Human
caccagggcagcagccuagucu

SEQ ID NO: 687214 - RNA, 22 nt, Human
acagaucacuugacuaaaauga

SEQ ID NO: 687215 - RNA, 20 nt, Human
gggguuggcuggcacaggga

SEQ ID NO: 687216 - RNA, 22 nt, Human
cacagugcacuaagcuccgggg

SEQ ID NO: 687217 - RNA, 22 nt, Human
cucuccaguuauagcugauuug

SEQ ID NO: 687218 - RNA, 22 nt, Human
ggcagugagaggucuccugguc

SEQ ID NO: 687219 - RNA, 22 nt, Human
uuuaauuauguuaagccacuga

SEQ ID NO: 687220 - RNA, 22 nt, Human
guguuaauuauuggugaauaga

SEQ ID NO: 687221 - RNA, 18 nt, Human
uggcagcaggaagccauu

SEQ ID NO: 687222 - RNA, 22 nt, Human
agcaucaguacuaaucuggcca

SEQ ID NO: 687223 - RNA, 20 nt, Human
aaccugaggcaguguuccag

SEQ ID NO: 687224 - RNA, 22 nt, Human
acuuuucucccuccugccuuca

SEQ ID NO: 687225 - RNA, 20 nt, Human
aggacagcagcugccacuug

SEQ ID NO: 687226 - RNA, 22 nt, Human
ccccgcccugcgcggggauaac

SEQ ID NO: 687227 - RNA, 22 nt, Human
cccugagcauucaugugagcuu

SEQ ID NO: 687228 - RNA, 22 nt, Human
ggcaggagauaaaauauuaguu

SEQ ID NO: 687229 - RNA, 22 nt, Human
uuaaauuagucaagcuucucug

SEQ ID NO: 687230 - RNA, 22 nt, Human
cccacacucugagaaaugcuga

SEQ ID NO: 687231 - RNA, 22 nt, Human
ccuaggcuggcugucuucaggu

SEQ ID NO: 687232 - RNA, 22 nt, Human
ucuucuuuuauuucaagggugu

SEQ ID NO: 687233 - RNA, 22 nt, Human
uggcuuccaaauuaucccuaga

SEQ ID NO: 687234 - RNA, 22 nt, Human
gccauccucugagcacuaggca

SEQ ID NO: 687235 - RNA, 22 nt, Human
gugcagugacccuggagagcug

SEQ ID NO: 687236 - RNA, 22 nt, Human
cucugcaggggaggcaugcacu

SEQ ID NO: 687237 - RNA, 22 nt, Human
uugccaccgucauggccauuau

SEQ ID NO: 687238 - RNA, 22 nt, Human
cugcccugagucaugccagaug

SEQ ID NO: 687239 - RNA, 22 nt, Human
agauuucucuuucccuggcuga

SEQ ID NO: 687240 - RNA, 22 nt, Human
ugcugcacaauuggaaaguauc

SEQ ID NO: 687241 - RNA, 22 nt, Human
uggcugcagugcuugagauguc

SEQ ID NO: 687242 - RNA, 22 nt, Human
ucugaggucuaugacuuugcuu

SEQ ID NO: 687243 - RNA, 22 nt, Human
acagauguuacaguaugaucuc

SEQ ID NO: 687244 - RNA, 22 nt, Human
acagggugacuuugugacagau

SEQ ID NO: 687245 - RNA, 22 nt, Human
acgcuucugguucuggcuuuag

SEQ ID NO: 687246 - RNA, 22 nt, Human
cuggagccccagacagggagag

SEQ ID NO: 687247 - RNA, 22 nt, Human
cacaggcagccuuguagaagaa

SEQ ID NO: 687248 - RNA, 22 nt, Human
cugcaggcaucuaacugugggc

SEQ ID NO: 687249 - RNA, 22 nt, Human
gcagguggaucaccacgucagg

SEQ ID NO: 687250 - RNA, 17 nt, Human
uuugaaaggaugucagu

SEQ ID NO: 687251 - RNA, 22 nt, Human
cuguuauuugagaguguugaau

SEQ ID NO: 687252 - RNA, 22 nt, Human
uugaagcaggaaaauuucuauu

SEQ ID NO: 687253 - RNA, 22 nt, Human
aggagccaaggaaaacaguauu

SEQ ID NO: 687254 - RNA, 22 nt, Human
aggcagcagugauaagauagga

SEQ ID NO: 687255 - RNA, 22 nt, Human
aaaggcauggauagugaauuca

SEQ ID NO: 687256 - RNA, 22 nt, Human
agcagguuguuuuguggccagg

SEQ ID NO: 687257 - RNA, 20 nt, Human
ugugccuggcuuuguccuga

SEQ ID NO: 687258 - RNA, 22 nt, Human
gcucucuugacagcuugcuguu

SEQ ID NO: 687259 - RNA, 22 nt, Human
aauguuauuguccuuuccaaaa

SEQ ID NO: 687260 - RNA, 22 nt, Human
ggugaagguggaacgcagagca

SEQ ID NO: 687261 - RNA, 22 nt, Human
cuauuaaauacucuucaaauug

SEQ ID NO: 687262 - RNA, 20 nt, Human
ucacaggagggaaggcaggu

SEQ ID NO: 687263 - RNA, 22 nt, Human
aaacagagggccacugaggcuc

SEQ ID NO: 687264 - RNA, 22 nt, Human
uauuuuguaauuggucauagcu

SEQ ID NO: 687265 - RNA, 22 nt, Human
uggauucaaauuucagcucugu

SEQ ID NO: 687266 - RNA, 22 nt, Human
ucaggcugcuggccagcaggcu

SEQ ID NO: 687267 - RNA, 22 nt, Human
uccuggcuccugaucugucacu

SEQ ID NO: 687268 - RNA, 22 nt, Human
agaucacagucaauugcaaguu

SEQ ID NO: 687269 - RNA, 22 nt, Human
gugcagguggauuugggcucaa

SEQ ID NO: 687270 - RNA, 22 nt, Human
guacaaaugcagguuuguuaca

SEQ ID NO: 687271 - RNA, 22 nt, Human
ggcugggcugcggcuguaccug

SEQ ID NO: 687272 - RNA, 22 nt, Human
ccagagugacgugaagugugaa

SEQ ID NO: 687273 - RNA, 22 nt, Human
cugcuuuagacggcuuucgcug

SEQ ID NO: 687274 - RNA, 19 nt, Human
agcuagugcucagcuguca

SEQ ID NO: 687275 - RNA, 19 nt, Human
ugcccaggccagguugggc

SEQ ID NO: 687276 - RNA, 21 nt, Human
agccagcaacacagcaucucc

SEQ ID NO: 687277 - RNA, 22 nt, Human
ucuaaagagaguggguacaugu

SEQ ID NO: 687278 - RNA, 22 nt, Human
uaauacacacucucauuccuaa

SEQ ID NO: 687279 - RNA, 22 nt, Human
gcuguguaggauccuguuguau

SEQ ID NO: 687280 - RNA, 22 nt, Human
gugcaaacaucauagaguguac

SEQ ID NO: 687281 - RNA, 22 nt, Human
augaacaaugacuacauauuga

SEQ ID NO: 687282 - RNA, 22 nt, Human
ucaagacagauggguaacuugg

SEQ ID NO: 687283 - RNA, 22 nt, Human
ugcuuuauucccuucugaugug

SEQ ID NO: 687284 - RNA, 22 nt, Human
uggcucugggaaugggaagaug

SEQ ID NO: 687285 - RNA, 21 nt, Human
uucccuucugguuuugagaga

SEQ ID NO: 687286 - RNA, 20 nt, Human
agcugccuucauuuucuaga

SEQ ID NO: 687287 - RNA, 23 nt, Human
uggcagagacccagaaucuacau

SEQ ID NO: 687288 - RNA, 22 nt, Human
agaguggguuauaggcagacuu

SEQ ID NO: 687289 - RNA, 22 nt, Human
uacaugcaauuaagagggugaa

SEQ ID NO: 687290 - RNA, 22 nt, Human
uuggaacucguguuacuuguau

SEQ ID NO: 687291 - RNA, 22 nt, Human
gucaggaaguggcauuggagaa

SEQ ID NO: 687292 - RNA, 22 nt, Human
gugacucuccacuaguaugaaa

SEQ ID NO: 687293 - RNA, 22 nt, Human
caggcacacugucuacacugag

SEQ ID NO: 687294 - RNA, 22 nt, Human
agacaauggcuaaguaaccugu

SEQ ID NO: 687295 - RNA, 22 nt, Human
uaguuaauucuuuaagaacaag

SEQ ID NO: 687296 - RNA, 22 nt, Human
gucccugacacccggguggagg

SEQ ID NO: 687297 - RNA, 22 nt, Human
acaguuaccacuuagcaguuac

SEQ ID NO: 687298 - RNA, 22 nt, Human
gaaaggccagcucacagaugag

SEQ ID NO: 687299 - RNA, 22 nt, Human
ugcucugcacaucccucacaaa

SEQ ID NO: 687300 - RNA, 22 nt, Human
gagcaucugugguccaucagaa

SEQ ID NO: 687301 - RNA, 22 nt, Human
ucaggagcuauggacugucaaa

SEQ ID NO: 687302 - RNA, 16 nt, Human
agguggagaaguucac

SEQ ID NO: 687303 - RNA, 22 nt, Human
ccucaaauuggcauuaauuaag

SEQ ID NO: 687304 - RNA, 22 nt, Human
gaucacaucuuuaugaguauuu

SEQ ID NO: 687305 - RNA, 22 nt, Human
gcuuaaauuguuuguggauagu

SEQ ID NO: 687306 - RNA, 22 nt, Human
ggcuucccaaggagccaggaug

SEQ ID NO: 687307 - RNA, 22 nt, Human
uggcuucuaguuugaggaaaaa

SEQ ID NO: 687308 - RNA, 22 nt, Human
gaugaggaaaccaaggcucagg

SEQ ID NO: 687309 - RNA, 22 nt, Human
ugcugaggaauuugguuuaugu

SEQ ID NO: 687310 - RNA, 22 nt, Human
gaggccacgguuuuccuugggg

SEQ ID NO: 687311 - RNA, 22 nt, Human
acaggagcaacagacuaagaca

SEQ ID NO: 687312 - RNA, 22 nt, Human
cugcaaaauuguucuuugcucc

SEQ ID NO: 687313 - RNA, 21 nt, Human
ugcuuucagacucuuacagaa

SEQ ID NO: 687314 - RNA, 22 nt, Human
guggcauugacauguaaacagu

SEQ ID NO: 687315 - RNA, 22 nt, Human
aggaguguugaguuggguuuug

SEQ ID NO: 687316 - RNA, 22 nt, Human
gcuucauuucucucuguagacc

SEQ ID NO: 687317 - RNA, 22 nt, Human
uccaugaggaccaaauucguag

SEQ ID NO: 687318 - RNA, 22 nt, Human
uccugggcagaaugggauggcu

SEQ ID NO: 687319 - RNA, 22 nt, Human
ccuccagggcagacggggagca

SEQ ID NO: 687320 - RNA, 22 nt, Human
ugcuuuuuaguacugucuuauu

SEQ ID NO: 687321 - RNA, 22 nt, Human
cuucaccuccuccucugugggc

SEQ ID NO: 687322 - RNA, 22 nt, Human
gcagcagcugacagugggugcc

SEQ ID NO: 687323 - RNA, 22 nt, Human
cucuggaggccuaaggaagugg

SEQ ID NO: 687324 - RNA, 22 nt, Human
aguguuuaacuucguccugaag

SEQ ID NO: 687325 - RNA, 22 nt, Human
caaaccaguaggaagucuauua

SEQ ID NO: 687326 - RNA, 22 nt, Human
uuugacaagagggcaucuucag

SEQ ID NO: 687327 - RNA, 22 nt, Human
agaaguauaacuauuugcuuuc

SEQ ID NO: 687328 - RNA, 22 nt, Human
aagacacuaagcuuucaggaua

SEQ ID NO: 687329 - RNA, 22 nt, Human
agaggggcucauauccugucau

SEQ ID NO: 687330 - RNA, 22 nt, Human
cagaucuguuugccagaucagc

SEQ ID NO: 687331 - RNA, 22 nt, Human
cccagccucuguuugcuccucu

SEQ ID NO: 687332 - RNA, 22 nt, Human
cuagauaagguggcuuggaauu

SEQ ID NO: 687333 - RNA, 22 nt, Human
agaguuauauugguugagaauu

SEQ ID NO: 687334 - RNA, 22 nt, Human
ucuugcuucugcucaaggggag

SEQ ID NO: 687335 - RNA, 22 nt, Human
gcagccaggaagccuuucccuc

SEQ ID NO: 687336 - RNA, 22 nt, Human
uugcaucauuuccuggccgugu

SEQ ID NO: 687337 - RNA, 22 nt, Human
cuggcuuugaggauccccucuu

SEQ ID NO: 687338 - RNA, 22 nt, Human
ucagcaggggccguugggugga

SEQ ID NO: 687339 - RNA, 22 nt, Human
guccuggugagguagugggagg

SEQ ID NO: 687340 - RNA, 22 nt, Human
gagccaggguuugaaacuagac

SEQ ID NO: 687341 - RNA, 22 nt, Human
auuuccaugaauucccacucau

SEQ ID NO: 687342 - RNA, 22 nt, Human
cguuugaaagccuuuguacacu

SEQ ID NO: 687343 - RNA, 19 nt, Human
gugggacagacauuacaua

SEQ ID NO: 687344 - RNA, 22 nt, Human
cucuuugccuaacuguuuucaa

SEQ ID NO: 687345 - RNA, 22 nt, Human
ucucaggaauagaguggcagca

SEQ ID NO: 687346 - RNA, 22 nt, Human
gcagggggauggaguugaaaug

SEQ ID NO: 687347 - RNA, 22 nt, Human
ugaggcaggagaauggcgggaa

SEQ ID NO: 687348 - RNA, 18 nt, Human
ucagucuauuguauaaga

SEQ ID NO: 687349 - RNA, 22 nt, Human
augacaccauauuagccuagag

SEQ ID NO: 687350 - RNA, 22 nt, Human
guaauccaaaguaacauuaaac

SEQ ID NO: 687351 - RNA, 22 nt, Human
uucagacaguuuucagauucau

SEQ ID NO: 687352 - RNA, 22 nt, Human
gacuggggcucuagccaggccu

SEQ ID NO: 687353 - RNA, 22 nt, Human
cugaaggauuuaguucuuugcu

SEQ ID NO: 687354 - RNA, 22 nt, Human
agaguuugaauuuugaaaagau

SEQ ID NO: 687355 - RNA, 22 nt, Human
uguuauuauguuuccagagccu

SEQ ID NO: 687356 - RNA, 22 nt, Human
uagggcaguuucauguuaucuu

SEQ ID NO: 687357 - RNA, 22 nt, Human
ucagaauuagagcucuucuuga

SEQ ID NO: 687358 - RNA, 17 nt, Human
ucuggccuuccugaacu

SEQ ID NO: 687359 - RNA, 22 nt, Human
gcuggcagacugggggcagaac

SEQ ID NO: 687360 - RNA, 22 nt, Human
uccagcucaaagugcuccuguc

SEQ ID NO: 687361 - RNA, 22 nt, Human
auguggcucagcaggcucccgu

SEQ ID NO: 687362 - RNA, 18 nt, Human
ugcaggcugggguuccuc

SEQ ID NO: 687363 - RNA, 22 nt, Human
acuuuagaaaagcauccauaga

SEQ ID NO: 687364 - RNA, 22 nt, Human
augaaauguauucagauaugua

SEQ ID NO: 687365 - RNA, 22 nt, Human
acuuucuuaggcuguauaaaug

SEQ ID NO: 687366 - RNA, 22 nt, Human
uggcuucuggcuggugagaaau

SEQ ID NO: 687367 - RNA, 22 nt, Human
caucugugccggguguuuguca

SEQ ID NO: 687368 - RNA, 22 nt, Human
ucucugugggcuuuggacuuga

SEQ ID NO: 687369 - RNA, 22 nt, Human
ucugggccuauagaagucuacc

SEQ ID NO: 687370 - RNA, 21 nt, Human
uacugagaccucacagugugc

SEQ ID NO: 687371 - RNA, 21 nt, Human
ugcugccuguggguguuuacc

SEQ ID NO: 687372 - RNA, 20 nt, Human
ggggcagguuuuuauggcua

SEQ ID NO: 687373 - RNA, 22 nt, Human
ugagauaacucugauuuauguu

SEQ ID NO: 687374 - RNA, 19 nt, Human
gagcaacauauguaaacuc

SEQ ID NO: 687375 - RNA, 22 nt, Human
uaaaggccuaguaaguugagac

SEQ ID NO: 687376 - RNA, 22 nt, Human
aauaacuugaagaucucuucca

SEQ ID NO: 687377 - RNA, 22 nt, Human
gaugagaaggcucagauccaaa

SEQ ID NO: 687378 - RNA, 22 nt, Human
uuucuaucugagaagauaucua

SEQ ID NO: 687379 - RNA, 22 nt, Human
gcugagaaaugcagacaugcug

SEQ ID NO: 687380 - RNA, 20 nt, Human
agcugguccccaagccucuc

SEQ ID NO: 687381 - RNA, 18 nt, Human
ccagggagcuuauuagga

SEQ ID NO: 687382 - RNA, 19 nt, Human
ucaucucacagggccuggc

SEQ ID NO: 687383 - RNA, 22 nt, Human
gggaccuggcgagggucacaca

SEQ ID NO: 687384 - RNA, 22 nt, Human
aguggcuguuccaggugaggac

SEQ ID NO: 687385 - RNA, 20 nt, Human
auuaggauuuuaggucauca

SEQ ID NO: 687386 - RNA, 22 nt, Human
uuccaaauguuggacaacugua

SEQ ID NO: 687387 - RNA, 22 nt, Human
ucuggagaacuugcaagaggau

SEQ ID NO: 687388 - RNA, 22 nt, Human
cggaucaugugaccuuugagug

SEQ ID NO: 687389 - RNA, 22 nt, Human
uagcuccuccccauccagguuc

SEQ ID NO: 687390 - RNA, 22 nt, Human
aggcacugaauauccaguaaaa

SEQ ID NO: 687391 - RNA, 22 nt, Human
ugaagcaguuacuggguguuaa

SEQ ID NO: 687392 - RNA, 22 nt, Human
ccagcuccaaguuugggcauca

SEQ ID NO: 687393 - RNA, 22 nt, Human
cucagaggguacaggugaaccc

SEQ ID NO: 687394 - RNA, 22 nt, Human
ccaggagguggagauugcagug

SEQ ID NO: 687395 - RNA, 22 nt, Human
cccaggagguggaguucacagu

SEQ ID NO: 687396 - RNA, 22 nt, Human
uggcccuucugagcacagggcc

SEQ ID NO: 687397 - RNA, 22 nt, Human
gccaguggucagugggagggug

SEQ ID NO: 687398 - RNA, 22 nt, Human
gggaccagugucugugagaaaa

SEQ ID NO: 687399 - RNA, 22 nt, Human
agugucugcgggcagaggagcg

SEQ ID NO: 687400 - RNA, 22 nt, Human
aguacacagaguuauuuugugu

SEQ ID NO: 687401 - RNA, 22 nt, Human
uccucuccauauuuucugauuu

SEQ ID NO: 687402 - RNA, 23 nt, Human
acacuucacccauugugauagga

SEQ ID NO: 687403 - RNA, 22 nt, Human
caggugcagcuggauggaagcc

SEQ ID NO: 687404 - RNA, 22 nt, Human
auguaucagaaauagcauuggc

SEQ ID NO: 687405 - RNA, 22 nt, Human
aucaucuugcuuucuguuuacu

SEQ ID NO: 687406 - RNA, 22 nt, Human
augcuuaaugaggguauauaug

SEQ ID NO: 687407 - RNA, 22 nt, Human
gaauuugaaaagugaugggaau

SEQ ID NO: 687408 - RNA, 22 nt, Human
gcagagcaguacucucuugacu

SEQ ID NO: 687409 - RNA, 22 nt, Human
agucuucagagaaauuaacucu

SEQ ID NO: 687410 - RNA, 22 nt, Human
gaccacagaggugugggagaga

SEQ ID NO: 687411 - RNA, 22 nt, Human
acauguguggacaugaaucuac

SEQ ID NO: 687412 - RNA, 22 nt, Human
cuggggacuugcagacacaauu

SEQ ID NO: 687413 - RNA, 22 nt, Human
uuugggacuggagcuuggagag

SEQ ID NO: 687414 - RNA, 22 nt, Human
ugauggcuccuucauuaugggu

SEQ ID NO: 687415 - RNA, 22 nt, Human
agcuccugggccaagcccaugc

SEQ ID NO: 687416 - RNA, 22 nt, Human
caaauucaaauuucaucagugu

SEQ ID NO: 687417 - RNA, 22 nt, Human
uccugagagucaagaaugcagg

SEQ ID NO: 687418 - RNA, 22 nt, Human
ccuucuggaugugcuaaggaag

SEQ ID NO: 687419 - RNA, 18 nt, Human
ggagcccagaggugaguu

SEQ ID NO: 687420 - RNA, 22 nt, Human
gcccaggaagccaccgggaagu

SEQ ID NO: 687421 - RNA, 22 nt, Human
uucccagacuccacacugaggc

SEQ ID NO: 687422 - RNA, 22 nt, Human
uuauguugggaaaagucagauu

SEQ ID NO: 687423 - RNA, 22 nt, Human
acaauagaaauaauuaagcaca

SEQ ID NO: 687424 - RNA, 21 nt, Human
ucaguucucugccugugcuug

SEQ ID NO: 687425 - RNA, 22 nt, Human
auucacagggggagaaggguau

SEQ ID NO: 687426 - RNA, 22 nt, Human
uagaugaccuuguguuaggcaa

SEQ ID NO: 687427 - RNA, 22 nt, Human
ugcccagucuccgggccagccc

SEQ ID NO: 687428 - RNA, 22 nt, Human
gcuuaguggugugcaaaggggu

SEQ ID NO: 687429 - RNA, 22 nt, Human
ugccucagaguugucccuacca

SEQ ID NO: 687430 - RNA, 22 nt, Human
uggaaggcacugggagaagacu

SEQ ID NO: 687431 - RNA, 22 nt, Human
uuucuucucacccaggacagag

SEQ ID NO: 687432 - RNA, 22 nt, Human
gcucaggagcugacagccucaa

SEQ ID NO: 687433 - RNA, 23 nt, Human
uuuggacuugugacucuucuccu

SEQ ID NO: 687434 - RNA, 19 nt, Human
ggcagguagagggccaguc

SEQ ID NO: 687435 - RNA, 22 nt, Human
agcccagcugcuauguaccugg

SEQ ID NO: 687436 - RNA, 22 nt, Human
ugacagggacaguggagaugga

SEQ ID NO: 687437 - RNA, 22 nt, Human
auauggcuguugguagccaaca

SEQ ID NO: 687438 - RNA, 22 nt, Human
aagcagaacugggaaguagugg

SEQ ID NO: 687439 - RNA, 22 nt, Human
cauagaaacugagacaaggauu

SEQ ID NO: 687440 - RNA, 22 nt, Human
auugcauuguauuguaaauguu

SEQ ID NO: 687441 - RNA, 22 nt, Human
aaagggccaauggagagugugg

SEQ ID NO: 687442 - RNA, 21 nt, Human
gcaaggccuaucauggcagcu

SEQ ID NO: 687443 - RNA, 22 nt, Human
ugggccacggggguggagagcu

SEQ ID NO: 687444 - RNA, 22 nt, Human
acagcaggcacacaaggauaga

SEQ ID NO: 687445 - RNA, 22 nt, Human
auuugucaaaacacagagaaca

SEQ ID NO: 687446 - RNA, 22 nt, Human
augaaguuccaguauaugcagu

SEQ ID NO: 687447 - RNA, 22 nt, Human
gcucugaaucaaucagauaagg

SEQ ID NO: 687448 - RNA, 22 nt, Human
gauggguagccuuucaauagca

SEQ ID NO: 687449 - RNA, 22 nt, Human
auguuuaaggaacugguuugcu

SEQ ID NO: 687450 - RNA, 22 nt, Human
aaccaguacuuuacacagcucu

SEQ ID NO: 687451 - RNA, 21 nt, Human
ccugggccaaauucccuggac

SEQ ID NO: 687452 - RNA, 22 nt, Human
aggcucuauaccgcugggaguu

SEQ ID NO: 687453 - RNA, 22 nt, Human
caugcauggucaugcugggacu

SEQ ID NO: 687454 - RNA, 22 nt, Human
uucugagccagagucaguuaug

SEQ ID NO: 687455 - RNA, 22 nt, Human
aggcugguaguauuuagucaca

SEQ ID NO: 687456 - RNA, 22 nt, Human
acagugucuccugguacccagu

SEQ ID NO: 687457 - RNA, 22 nt, Human
ggagaccuuaaggugcuuccua

SEQ ID NO: 687458 - RNA, 22 nt, Human
ugucucugguauuaggugaaaa

SEQ ID NO: 687459 - RNA, 22 nt, Human
aacagcagcaugacagcugggu

SEQ ID NO: 687460 - RNA, 22 nt, Human
agcugguaaguggcagagauuc

SEQ ID NO: 687461 - RNA, 22 nt, Human
aucugggagucuuggcucugcu

SEQ ID NO: 687462 - RNA, 22 nt, Human
cuugagaagagauuuauauuug

SEQ ID NO: 687463 - RNA, 22 nt, Human
caucuuuaaaggggagacaccc

SEQ ID NO: 687464 - RNA, 22 nt, Human
cuuaaagucuauccuuucuaga

SEQ ID NO: 687465 - RNA, 22 nt, Human
uaauuacagagguuugccaguu

SEQ ID NO: 687466 - RNA, 22 nt, Human
ugugugcauucacaugcaugcc

SEQ ID NO: 687467 - RNA, 22 nt, Human
ggcugcuggccagccuaggagu

SEQ ID NO: 687468 - RNA, 22 nt, Human
aaaugccucauuuucucucacu

SEQ ID NO: 687469 - RNA, 18 nt, Human
uuaagagcugaaagggga

SEQ ID NO: 687470 - RNA, 22 nt, Human
uaauugcuauuuaaugugguga

SEQ ID NO: 687471 - RNA, 22 nt, Human
uuagcauucucauuugcauaaa

SEQ ID NO: 687472 - RNA, 22 nt, Human
ccuggcagguggagguugcagu

SEQ ID NO: 687473 - RNA, 22 nt, Human
acauuuauuacucagguuguug

SEQ ID NO: 687474 - RNA, 22 nt, Human
gaacauacaagaauuaaguaca

SEQ ID NO: 687475 - RNA, 22 nt, Human
ucuuggcuggucauuuaaaauc

SEQ ID NO: 687476 - RNA, 22 nt, Human
uuacuuuaucuccuagauucca

SEQ ID NO: 687477 - RNA, 22 nt, Human
ccugugcccucagccuggcucu

SEQ ID NO: 687478 - RNA, 23 nt, Human
uggcuucugccccauucucucca

SEQ ID NO: 687479 - RNA, 22 nt, Human
gcugugagugagcugccuaggc

SEQ ID NO: 687480 - RNA, 22 nt, Human
caaggucacauaacuugucaaa

SEQ ID NO: 687481 - RNA, 22 nt, Human
agggcagccauugagggauucu

SEQ ID NO: 687482 - RNA, 22 nt, Human
aaagaacuauuaacgaggaagc

SEQ ID NO: 687483 - RNA, 22 nt, Human
ccacccugagccgcaagagcag

SEQ ID NO: 687484 - RNA, 22 nt, Human
uuuguuaauucuuauguuagag

SEQ ID NO: 687485 - RNA, 22 nt, Human
uacacugagaugacuuugguuu

SEQ ID NO: 687486 - RNA, 17 nt, Human
ugacaaugacaagcacu

SEQ ID NO: 687487 - RNA, 22 nt, Human
acaugaucuuauguagaagauc

SEQ ID NO: 687488 - RNA, 22 nt, Human
agugaaauccuggucaacaggu

SEQ ID NO: 687489 - RNA, 22 nt, Human
auuucuugccccugcucccuga

SEQ ID NO: 687490 - RNA, 22 nt, Human
uucacaggugacuggggauaac

SEQ ID NO: 687491 - RNA, 22 nt, Human
auacaaguucucauguguaucu

SEQ ID NO: 687492 - RNA, 22 nt, Human
auuuguagugaagugaaaauaa

SEQ ID NO: 687493 - RNA, 23 nt, Human
ugggaguguugggaucucugcuc

SEQ ID NO: 687494 - RNA, 22 nt, Human
acagugcugucuaucucacuaa

SEQ ID NO: 687495 - RNA, 16 nt, Human
ucauccaugacagcuc

SEQ ID NO: 687496 - RNA, 22 nt, Human
cuggagaccucuccugagagug

SEQ ID NO: 687497 - RNA, 22 nt, Human
cccagggauguggcagauguua

SEQ ID NO: 687498 - RNA, 22 nt, Human
ccuuucuuuuauccaccagcca

SEQ ID NO: 687499 - RNA, 21 nt, Human
aagguagcauggguugcagcc

SEQ ID NO: 687500 - RNA, 22 nt, Human
caagaaauuucuuaagaacuaa

SEQ ID NO: 687501 - RNA, 22 nt, Human
gagucaggcacugcugcugcuc

SEQ ID NO: 687502 - RNA, 21 nt, Human
ucuggcccucacagucacacc

SEQ ID NO: 687503 - RNA, 22 nt, Human
ggcagccuugacuagugacuua

SEQ ID NO: 687504 - RNA, 22 nt, Human
cccacacaaaucauggggagaa

SEQ ID NO: 687505 - RNA, 22 nt, Human
agagcugugcuuugcaccacgu

SEQ ID NO: 687506 - RNA, 22 nt, Human
acgaauaaaucuauuucacaca

SEQ ID NO: 687507 - RNA, 22 nt, Human
uccugggaugacuuuugaaaug

SEQ ID NO: 687508 - RNA, 22 nt, Human
uauacauguuuuacauaaguga

SEQ ID NO: 687509 - RNA, 22 nt, Human
ggugcccaccugucuuccugga

SEQ ID NO: 687510 - RNA, 22 nt, Human
uacauuccuucguuuagagauu

SEQ ID NO: 687511 - RNA, 22 nt, Human
uagagcagauagugaaacagaa

SEQ ID NO: 687512 - RNA, 19 nt, Human
gaacaaacuuaaacuuuuc

SEQ ID NO: 687513 - RNA, 22 nt, Human
ugcuaugugacugcuucagauu

SEQ ID NO: 687514 - RNA, 16 nt, Human
aggaggggaauuagga

SEQ ID NO: 687515 - RNA, 22 nt, Human
cucuggcugccucucaggccug

SEQ ID NO: 687516 - RNA, 22 nt, Human
uaacagaagaaaacauauugga

SEQ ID NO: 687517 - RNA, 22 nt, Human
uaccuugggguuuuguugcucu

SEQ ID NO: 687518 - RNA, 22 nt, Human
cacuugaguucuuaauagucag

SEQ ID NO: 687519 - RNA, 22 nt, Human
guuuaacauuguaccaacaccu

SEQ ID NO: 687520 - RNA, 22 nt, Human
caaaugaagguggugggucauu

SEQ ID NO: 687521 - RNA, 22 nt, Human
caagcagagguuuauguauuag

SEQ ID NO: 687522 - RNA, 22 nt, Human
cauucuaucuuggacuggaucu

SEQ ID NO: 687523 - RNA, 22 nt, Human
ggggaaaggccauggcaagaac

SEQ ID NO: 687524 - RNA, 22 nt, Human
auucucuguggugaugcuggug

SEQ ID NO: 687525 - RNA, 22 nt, Human
gaggaggcuguuucucugcauu

SEQ ID NO: 687526 - RNA, 22 nt, Human
aagucucagaaaacuagugugg

SEQ ID NO: 687527 - RNA, 20 nt, Human
agaagcauucaaagaaaacu

SEQ ID NO: 687528 - RNA, 22 nt, Human
ggcaggcaccagcucagcaaua

SEQ ID NO: 687529 - RNA, 22 nt, Human
ucagauuucugaaagcccucuc

SEQ ID NO: 687530 - RNA, 22 nt, Human
gcucccaggaugaggagccagg

SEQ ID NO: 687531 - RNA, 22 nt, Human
gcugaggcaaaccaagaaugua

SEQ ID NO: 687532 - RNA, 22 nt, Human
gaaccagcagacuuugacaggu

SEQ ID NO: 687533 - RNA, 18 nt, Human
ugcugcccaacucucccc

SEQ ID NO: 687534 - RNA, 17 nt, Human
uggcucugaggcugaau

SEQ ID NO: 687535 - RNA, 21 nt, Human
uauugcuuguaggucauccug

SEQ ID NO: 687536 - RNA, 22 nt, Human
ccugggucccaucccagaguga

SEQ ID NO: 687537 - RNA, 22 nt, Human
ucaaaagaaacaccauguuccu

SEQ ID NO: 687538 - RNA, 22 nt, Human
aaaccuauuggcaagaauaaua

SEQ ID NO: 687539 - RNA, 22 nt, Human
uaaaugugucuauggacccgcc

SEQ ID NO: 687540 - RNA, 22 nt, Human
ucacagaaaucuguuuuuucua

SEQ ID NO: 687541 - RNA, 22 nt, Human
ccacaguaaauggauucagacc

SEQ ID NO: 687542 - RNA, 22 nt, Human
gcuuucuguggugauguaaagg

SEQ ID NO: 687543 - RNA, 23 nt, Human
uugcuuagagaccuccucaucag

SEQ ID NO: 687544 - RNA, 22 nt, Human
gauuuccaugauugggccagaa

SEQ ID NO: 687545 - RNA, 22 nt, Human
cugcuucacccugccugagaac

SEQ ID NO: 687546 - RNA, 21 nt, Human
ggauggauagggaagagauuu

SEQ ID NO: 687547 - RNA, 22 nt, Human
auuccuucuaaaacgcugcccu

SEQ ID NO: 687548 - RNA, 22 nt, Human
uuaaacaccugucuaguguagc

SEQ ID NO: 687549 - RNA, 22 nt, Human
aucugcauguaucucucugcau

SEQ ID NO: 687550 - RNA, 22 nt, Human
gugcgggccuggggguuucucu

SEQ ID NO: 687551 - RNA, 22 nt, Human
ggcaagauccaaggggcuagga

SEQ ID NO: 687552 - RNA, 22 nt, Human
ugagccugcugucgcuggaccc

SEQ ID NO: 687553 - RNA, 22 nt, Human
uuaauacagaagcaagacacug

SEQ ID NO: 687554 - RNA, 22 nt, Human
ugcagugugaccuguagcgagc

SEQ ID NO: 687555 - RNA, 22 nt, Human
ccucagggaaugggaggcuggg

SEQ ID NO: 687556 - RNA, 22 nt, Human
ucuuucuucagcccuguaagau

SEQ ID NO: 687557 - RNA, 22 nt, Human
ugaguucuucacauuaccuacg

SEQ ID NO: 687558 - RNA, 22 nt, Human
agggucagguuaagggagucau

SEQ ID NO: 687559 - RNA, 22 nt, Human
gagccagagauccaggauggcu

SEQ ID NO: 687560 - RNA, 22 nt, Human
augaggucaucuugaaguaggg

SEQ ID NO: 687561 - RNA, 22 nt, Human
ucagaacauucucauugacugc

SEQ ID NO: 687562 - RNA, 22 nt, Human
aggaaggguggauaguaacgug

SEQ ID NO: 687563 - RNA, 22 nt, Human
ccagggcugcugggggaguuga

SEQ ID NO: 687564 - RNA, 22 nt, Human
gugcuguugccuggcugcacgg

SEQ ID NO: 687565 - RNA, 22 nt, Human
uauuucaggggguacaagaaga

SEQ ID NO: 687566 - RNA, 22 nt, Human
gaaugaguagaguauaaacaaa

SEQ ID NO: 687567 - RNA, 20 nt, Human
ucaaagacaagcucucaucc

SEQ ID NO: 687568 - RNA, 22 nt, Human
auaaauucucugauguauagua

SEQ ID NO: 687569 - RNA, 18 nt, Human
ucacugugugucuugggu

SEQ ID NO: 687570 - RNA, 22 nt, Human
ucacaugucaaaaacuacauaa

SEQ ID NO: 687571 - RNA, 22 nt, Human
uguuggcagugcuacagucagu

SEQ ID NO: 687572 - RNA, 22 nt, Human
cuucacagucuuuauuuccucc

SEQ ID NO: 687573 - RNA, 22 nt, Human
ucucccaguggugcagaaagca

SEQ ID NO: 687574 - RNA, 22 nt, Human
agaauuguugggguaauaaaag

SEQ ID NO: 687575 - RNA, 22 nt, Human
ugcccacaggaagacaccagcg

SEQ ID NO: 687576 - RNA, 21 nt, Human
ccugcugugaucuuagugagu

SEQ ID NO: 687577 - RNA, 22 nt, Human
agaccucuggauagaugugagg

SEQ ID NO: 687578 - RNA, 21 nt, Human
aaucagaggcuuccuaguugg

SEQ ID NO: 687579 - RNA, 22 nt, Human
aaugucugugccuuaaaacuuc

SEQ ID NO: 687580 - RNA, 22 nt, Human
auuuagaacuuuguuugccaau

SEQ ID NO: 687581 - RNA, 22 nt, Human
ucccaggaauccguccucuaga

SEQ ID NO: 687582 - RNA, 22 nt, Human
aaaacuaaauacgcuuugccuc

SEQ ID NO: 687583 - RNA, 22 nt, Human
cucauauucagucacugaugca

SEQ ID NO: 687584 - RNA, 22 nt, Human
uuuguccuauaauccucuuaca

SEQ ID NO: 687585 - RNA, 22 nt, Human
uaacaucuuuagcagcucgaac

SEQ ID NO: 687586 - RNA, 22 nt, Human
aauuauacaauugucaaguucu

SEQ ID NO: 687587 - RNA, 22 nt, Human
uaaggccaaguucauauacaac

SEQ ID NO: 687588 - RNA, 22 nt, Human
uuauggaaaacuccagagagua

SEQ ID NO: 687589 - RNA, 22 nt, Human
ggcuucagaggagaagagggug

SEQ ID NO: 687590 - RNA, 22 nt, Human
auggggcugggauucuccucgg

SEQ ID NO: 687591 - RNA, 22 nt, Human
uuaaauaguaggucuauuuugg

SEQ ID NO: 687592 - RNA, 22 nt, Human
aaacuguugugguuuaucauua

SEQ ID NO: 687593 - RNA, 22 nt, Human
uuuauuuauaagccacuugcug

SEQ ID NO: 687594 - RNA, 22 nt, Human
guaaaacugcagaacuuggagg

SEQ ID NO: 687595 - RNA, 22 nt, Human
aaugggcuuuggccaguaggag

SEQ ID NO: 687596 - RNA, 22 nt, Human
cacuugaaguuugggggacucu

SEQ ID NO: 687597 - RNA, 22 nt, Human
auggcaguguuucaguuuuugg

SEQ ID NO: 687598 - RNA, 23 nt, Human
uguuacaagcaccacagguggcu

SEQ ID NO: 687599 - RNA, 23 nt, Human
gugcucugcggucugcuagucug

SEQ ID NO: 687600 - RNA, 22 nt, Human
ugacaagucacuguucuucaau

SEQ ID NO: 687601 - RNA, 22 nt, Human
ggccuguguccuccuugcccug

SEQ ID NO: 687602 - RNA, 22 nt, Human
gugcauuuaggucacaugaugu

SEQ ID NO: 687603 - RNA, 22 nt, Human
ccucuucuagguuucagccugc

SEQ ID NO: 687604 - RNA, 22 nt, Human
auguacaccaggugaagaugaa

SEQ ID NO: 687605 - RNA, 22 nt, Human
ccuggagcuuuuccauccugga

SEQ ID NO: 687606 - RNA, 22 nt, Human
augcaaaauuaccauucuguuc

SEQ ID NO: 687607 - RNA, 22 nt, Human
gagguggcagaggccuggaccu

SEQ ID NO: 687608 - RNA, 22 nt, Human
caggaaaugaaagcuagcuaau

SEQ ID NO: 687609 - RNA, 22 nt, Human
gagagacagcagaacgugcagc

SEQ ID NO: 687610 - RNA, 22 nt, Human
cacaguuucuauaggucagaau

SEQ ID NO: 687611 - RNA, 22 nt, Human
agcagggcagguaaggaucaga

SEQ ID NO: 687612 - RNA, 22 nt, Human
cucaggauauugggcuggagca

SEQ ID NO: 687613 - RNA, 22 nt, Human
uaaaugugagugaugcggugaa

SEQ ID NO: 687614 - RNA, 22 nt, Human
cugaagauuuuugguaaucaug

SEQ ID NO: 687615 - RNA, 22 nt, Human
ugcuuucaccuguuugcaccca

SEQ ID NO: 687616 - RNA, 22 nt, Human
ugaggacauuaggaagugaagg

SEQ ID NO: 687617 - RNA, 22 nt, Human
uagaaguuucaaaagacuucau

SEQ ID NO: 687618 - RNA, 22 nt, Human
gugggaugcaguggugaguggc

SEQ ID NO: 687619 - RNA, 22 nt, Human
ccaggagcuauguacacacuau

SEQ ID NO: 687620 - RNA, 22 nt, Human
cccaggcuggagugcaauggca

SEQ ID NO: 687621 - RNA, 22 nt, Human
ucauaacaggcugagaggauuu

SEQ ID NO: 687622 - RNA, 22 nt, Human
uuacaagauaaccugaugcugu

SEQ ID NO: 687623 - RNA, 22 nt, Human
auggccagccugguacuuggca

SEQ ID NO: 687624 - RNA, 22 nt, Human
uugggcugaucuguggaagaag

SEQ ID NO: 687625 - RNA, 22 nt, Human
ucugugcugagcucugagaugu

SEQ ID NO: 687626 - RNA, 22 nt, Human
acaguggcuuuugugucugcag

SEQ ID NO: 687627 - RNA, 22 nt, Human
cagcaguguggaagcugagggg

SEQ ID NO: 687628 - RNA, 22 nt, Human
uacagauaggaggaaucugaaa

SEQ ID NO: 687629 - RNA, 22 nt, Human
gaccagcugguccuguccuggg

SEQ ID NO: 687630 - RNA, 22 nt, Human
gugcuuuacuguguugccuuua

SEQ ID NO: 687631 - RNA, 22 nt, Human
ccacugggggcugcucccaggu

SEQ ID NO: 687632 - RNA, 22 nt, Human
ugagacuuggcacugaggaacu

SEQ ID NO: 687633 - RNA, 23 nt, Human
gagaacagccacagagagcugug

SEQ ID NO: 687634 - RNA, 22 nt, Human
acuuagcauuauguaauuacua

SEQ ID NO: 687635 - RNA, 23 nt, Human
gcucugccacuuaauagcugugu

SEQ ID NO: 687636 - RNA, 22 nt, Human
uguaaaaggaaaucaaagcacu

SEQ ID NO: 687637 - RNA, 22 nt, Human
cauucugagucacucuuuagca

SEQ ID NO: 687638 - RNA, 22 nt, Human
aaacugcaauuauuuuugcaau

SEQ ID NO: 687639 - RNA, 22 nt, Human
ccuggguccacccugugaagua

SEQ ID NO: 687640 - RNA, 22 nt, Human
ugauggaagagcuaacaauauc

SEQ ID NO: 687641 - RNA, 22 nt, Human
ugagugccugaacauagaguag

SEQ ID NO: 687642 - RNA, 21 nt, Human
agauuguauggaggugagagg

SEQ ID NO: 687643 - RNA, 22 nt, Human
cagaggcugcucuggguggcau

SEQ ID NO: 687644 - RNA, 22 nt, Human
uacacagggaaaggucucagag

SEQ ID NO: 687645 - RNA, 19 nt, Human
ggcagcuggacgcuguuca

SEQ ID NO: 687646 - RNA, 22 nt, Human
uagaagcacagguuaaaggcau

SEQ ID NO: 687647 - RNA, 22 nt, Human
aagggggcgaagacgugauuga

SEQ ID NO: 687648 - RNA, 22 nt, Human
cagggcaguuuuacuucucucu

SEQ ID NO: 687649 - RNA, 23 nt, Human
ugaguguguucccugugagauuu

SEQ ID NO: 687650 - RNA, 22 nt, Human
aagauauuuuagaacauucacu

SEQ ID NO: 687651 - RNA, 22 nt, Human
gagaaagggaacuuacagagug

SEQ ID NO: 687652 - RNA, 22 nt, Human
cagcuauauuguuuucuacugu

SEQ ID NO: 687653 - RNA, 22 nt, Human
uuuguugugaacagaauaauau

SEQ ID NO: 687654 - RNA, 19 nt, Human
ggaccagcuuucaggaggc

SEQ ID NO: 687655 - RNA, 22 nt, Human
uggcucagagcagggacucugg

SEQ ID NO: 687656 - RNA, 21 nt, Human
cccaggagaagaaaagaugca

SEQ ID NO: 687657 - RNA, 22 nt, Human
acucuuuuaugcauuccuucag

SEQ ID NO: 687658 - RNA, 22 nt, Human
ucagcccaggaaugagccuucu

SEQ ID NO: 687659 - RNA, 22 nt, Human
auggauaaauacuuggugguau

SEQ ID NO: 687660 - RNA, 22 nt, Human
ugaggaaguugaucucaucagu

SEQ ID NO: 687661 - RNA, 22 nt, Human
gggacgagccccaggcuggagg

SEQ ID NO: 687662 - RNA, 22 nt, Human
cacaguaucccucuuucucccc

SEQ ID NO: 687663 - RNA, 22 nt, Human
uugcagggaaauagaaauaaac

SEQ ID NO: 687664 - RNA, 18 nt, Human
ucaguccuccauagagcu

SEQ ID NO: 687665 - RNA, 22 nt, Human
caaugcuucaggcuccuuauag

SEQ ID NO: 687666 - RNA, 22 nt, Human
uugaacuaauagguaucuugua

SEQ ID NO: 687667 - RNA, 22 nt, Human
ugagacagucaccaggcaggcc

SEQ ID NO: 687668 - RNA, 22 nt, Human
cacauuuagagguuagcauggu

SEQ ID NO: 687669 - RNA, 22 nt, Human
gcuccucugucaaaugagagug

SEQ ID NO: 687670 - RNA, 22 nt, Human
aagcuucagugugagcauguaa

SEQ ID NO: 687671 - RNA, 22 nt, Human
gugcagguguuuuggcugccag

SEQ ID NO: 687672 - RNA, 22 nt, Human
ccuggcuccagcugccuguccu

SEQ ID NO: 687673 - RNA, 22 nt, Human
ugagugccuacggcacaggcgc

SEQ ID NO: 687674 - RNA, 22 nt, Human
uguuaauggcugaagacauccu

SEQ ID NO: 687675 - RNA, 22 nt, Human
cuuccagaggaacucugcagug

SEQ ID NO: 687676 - RNA, 22 nt, Human
auugcuuacuaaucaucuucag

SEQ ID NO: 687677 - RNA, 22 nt, Human
caaguuuucuggguucagagca

SEQ ID NO: 687678 - RNA, 22 nt, Human
aaauuauuacaagcuaguuggc

SEQ ID NO: 687679 - RNA, 22 nt, Human
uccaggcuggagugcaguggcg

SEQ ID NO: 687680 - RNA, 22 nt, Human
cccaggaggcagaaguugcagu

SEQ ID NO: 687681 - RNA, 22 nt, Human
uauucuuguauacuacaaucuu

SEQ ID NO: 687682 - RNA, 22 nt, Human
ugcagcugaaccuagagucugu

SEQ ID NO: 687683 - RNA, 22 nt, Human
ucugugccuucucccagacuua

SEQ ID NO: 687684 - RNA, 22 nt, Human
caucagcagucacaugaugcug

SEQ ID NO: 687685 - RNA, 22 nt, Human
uucauucccaagaguaaacaua

SEQ ID NO: 687686 - RNA, 22 nt, Human
cuauuacugacuucuguauuua

SEQ ID NO: 687687 - RNA, 22 nt, Human
agcuguugcagggaucagcacc

SEQ ID NO: 687688 - RNA, 22 nt, Human
ugaguccauguggaggggaggu

SEQ ID NO: 687689 - RNA, 22 nt, Human
ucugaacaugaugucaucugga

SEQ ID NO: 687690 - RNA, 22 nt, Human
cagcagagaugagauuccuaua

SEQ ID NO: 687691 - RNA, 22 nt, Human
uuucauggcuaggacuagagug

SEQ ID NO: 687692 - RNA, 22 nt, Human
ucuccugcuucaacugauggac

SEQ ID NO: 687693 - RNA, 22 nt, Human
augcuuggcguuucacuuccug

SEQ ID NO: 687694 - RNA, 22 nt, Human
agaacucucgcuggaucagacu

SEQ ID NO: 687695 - RNA, 22 nt, Human
uucaggaugacaccauguccag

SEQ ID NO: 687696 - RNA, 22 nt, Human
aagaaaugcugauguuggaugg

SEQ ID NO: 687697 - RNA, 19 nt, Human
ggucacagggguuacaagg

SEQ ID NO: 687698 - RNA, 22 nt, Human
ugucacaucaggugguggcugu

SEQ ID NO: 687699 - RNA, 21 nt, Human
agcagaggcagaauguaugca

SEQ ID NO: 687700 - RNA, 19 nt, Human
ugugucucuguguagccug

SEQ ID NO: 687701 - RNA, 22 nt, Human
uagcagaggcaaggaugugaau

SEQ ID NO: 687702 - RNA, 22 nt, Human
gcuggcucugccccaccuguuc

SEQ ID NO: 687703 - RNA, 22 nt, Human
uuauugugucuugguuuaucuu

SEQ ID NO: 687704 - RNA, 22 nt, Human
uacuaaaugauuaagcaggaau

SEQ ID NO: 687705 - RNA, 22 nt, Human
ccagcuuguuugaagcucguca

SEQ ID NO: 687706 - RNA, 22 nt, Human
ccucucuuggauguggaugggu

SEQ ID NO: 687707 - RNA, 19 nt, Human
aaggacacaacagagauag

SEQ ID NO: 687708 - RNA, 22 nt, Human
ucugagccaaaauaaacagcau

SEQ ID NO: 687709 - RNA, 22 nt, Human
gugcuggcugccaggaggcugc

SEQ ID NO: 687710 - RNA, 22 nt, Human
ccuggcugcuauagcagcaugu

SEQ ID NO: 687711 - RNA, 22 nt, Human
aagaguuuucucugauggcauu

SEQ ID NO: 687712 - RNA, 22 nt, Human
ggugccacauaaauggagagag

SEQ ID NO: 687713 - RNA, 22 nt, Human
gcugucugccgcaggcugccac

SEQ ID NO: 687714 - RNA, 22 nt, Human
ugggcaggggcccugcuuccgu

SEQ ID NO: 687715 - RNA, 22 nt, Human
auauugaacccuacagacugua

SEQ ID NO: 687716 - RNA, 22 nt, Human
ugaagacaagaaaacacugggg

SEQ ID NO: 687717 - RNA, 22 nt, Human
uccuccaggauaaaauguguug

SEQ ID NO: 687718 - RNA, 22 nt, Human
ugggggagcgacagacauaauu

SEQ ID NO: 687719 - RNA, 22 nt, Human
gccucaguuuauacaccuguaa

SEQ ID NO: 687720 - RNA, 22 nt, Human
ccaggacaaguguggccauggc

SEQ ID NO: 687721 - RNA, 20 nt, Human
gcccuggagccuuguccugg

SEQ ID NO: 687722 - RNA, 22 nt, Human
uuuauugcauacacaaauguca

SEQ ID NO: 687723 - RNA, 22 nt, Human
ccugggcuucugucuagauguu

SEQ ID NO: 687724 - RNA, 22 nt, Human
ggagucaccugggaggacuggg

SEQ ID NO: 687725 - RNA, 22 nt, Human
acacuuugaagauggaaacuug

SEQ ID NO: 687726 - RNA, 22 nt, Human
uccuagaauagugugucuggag

SEQ ID NO: 687727 - RNA, 22 nt, Human
uugaaauauuugggaguguuug

SEQ ID NO: 687728 - RNA, 22 nt, Human
aaaguguagagugccucaaaau

SEQ ID NO: 687729 - RNA, 22 nt, Human
agugaaauggaugcugcuacug

SEQ ID NO: 687730 - RNA, 20 nt, Human
gcagcagacagacaggggac

SEQ ID NO: 687731 - RNA, 22 nt, Human
aaggccagaguacuagaggcug

SEQ ID NO: 687732 - RNA, 22 nt, Human
guuaaauaaccucauguccguu

SEQ ID NO: 687733 - RNA, 22 nt, Human
ccaggcagggcucaaggaaccu

SEQ ID NO: 687734 - RNA, 22 nt, Human
ucucauugguauauacaugugu

SEQ ID NO: 687735 - RNA, 22 nt, Human
auacuaagcucauuacauuuug

SEQ ID NO: 687736 - RNA, 22 nt, Human
aggaaagugaauguuauuuugc

SEQ ID NO: 687737 - RNA, 22 nt, Human
aggagggagaugcccauccugg

SEQ ID NO: 687738 - RNA, 22 nt, Human
gcccaggaucugcucagaucau

SEQ ID NO: 687739 - RNA, 22 nt, Human
acccaggauaaucuguguaucu

SEQ ID NO: 687740 - RNA, 21 nt, Human
aggggaaguagaguuuugauu

SEQ ID NO: 687741 - RNA, 22 nt, Human
uuugacaaauccuucagcaaug

SEQ ID NO: 687742 - RNA, 22 nt, Human
uaguguggccccaagaggaucu

SEQ ID NO: 687743 - RNA, 22 nt, Human
uguuacugauuugauauacagu

SEQ ID NO: 687744 - RNA, 22 nt, Human
cugcuguggccagccaggucaa

SEQ ID NO: 687745 - RNA, 22 nt, Human
gggcugugugcccacuucccau

SEQ ID NO: 687746 - RNA, 22 nt, Human
cugugccucccuuuacuuugag

SEQ ID NO: 687747 - RNA, 22 nt, Human
auacacuguucacuagaucuuc

SEQ ID NO: 687748 - RNA, 22 nt, Human
auuuguuuaucgucgauuguag

SEQ ID NO: 687749 - RNA, 22 nt, Human
agggacacacuccaguguuauu

SEQ ID NO: 687750 - RNA, 21 nt, Human
ucugcauuuuagcaagaucuc

SEQ ID NO: 687751 - RNA, 22 nt, Human
uaagagcacugaagucuucuua

SEQ ID NO: 687752 - RNA, 22 nt, Human
cagagucaguauugaauugaaa

SEQ ID NO: 687753 - RNA, 22 nt, Human
uucaguaugcugaaugauuuuu

SEQ ID NO: 687754 - RNA, 22 nt, Human
aggaaugauaguaaaagagaau

SEQ ID NO: 687755 - RNA, 22 nt, Human
ggacauggagcuccauggaggc

SEQ ID NO: 687756 - RNA, 22 nt, Human
acguuuuauucccaugcagcau

SEQ ID NO: 687757 - RNA, 22 nt, Human
ccuggcucccccaucauagcug

SEQ ID NO: 687758 - RNA, 22 nt, Human
auauacuuuucacuaauggcua

SEQ ID NO: 687759 - RNA, 22 nt, Human
ucccugaguguauguggugaac

SEQ ID NO: 687760 - RNA, 22 nt, Human
aggcccaguuauccuacuuguu

SEQ ID NO: 687761 - RNA, 22 nt, Human
aucuuucuauuucuaaaaacua

SEQ ID NO: 687762 - RNA, 22 nt, Human
aggugggacccguggggugcga

SEQ ID NO: 687763 - RNA, 22 nt, Human
ugcuggagaacugcucuguguu

SEQ ID NO: 687764 - RNA, 22 nt, Human
gacacugaccccaagcuguccu

SEQ ID NO: 687765 - RNA, 21 nt, Human
ggucuuccaaauaaggagaaa

SEQ ID NO: 687766 - RNA, 18 nt, Human
uccauccucugcucuuca

SEQ ID NO: 687767 - RNA, 22 nt, Human
agaaggcuuaaaacauggaaua

SEQ ID NO: 687768 - RNA, 22 nt, Human
agaguuuguaguggugaaugua

SEQ ID NO: 687769 - RNA, 22 nt, Human
ccacgcucauccucucugagag

SEQ ID NO: 687770 - RNA, 22 nt, Human
ugaguacuuuauguuaguuauu

SEQ ID NO: 687771 - RNA, 22 nt, Human
aacugcaaucacuuuugcacca

SEQ ID NO: 687772 - RNA, 22 nt, Human
aauugaaagaagugggauugcc

SEQ ID NO: 687773 - RNA, 22 nt, Human
ugcaaaggaggaugggaaagaa

SEQ ID NO: 687774 - RNA, 22 nt, Human
aacacugugcuccccaggcugu

SEQ ID NO: 687775 - RNA, 22 nt, Human
guccuucauaucauggauuaua

SEQ ID NO: 687776 - RNA, 20 nt, Human
agugugucucggagguaagu

SEQ ID NO: 687777 - RNA, 17 nt, Human
gccuuccuuccuccaca

SEQ ID NO: 687778 - RNA, 22 nt, Human
augcaugagaauaucccaugcu

SEQ ID NO: 687779 - RNA, 20 nt, Human
cagaugggacguggaggagu

SEQ ID NO: 687780 - RNA, 22 nt, Human
ggaaggaaagcagcuuggcccu

SEQ ID NO: 687781 - RNA, 22 nt, Human
agcagcagaggucagaaaggua

SEQ ID NO: 687782 - RNA, 17 nt, Human
uaugcuuuucuucucca

SEQ ID NO: 687783 - RNA, 22 nt, Human
ucaggaguuucagguguaagug

SEQ ID NO: 687784 - RNA, 22 nt, Human
aaucaacauuguuuuaagucaa

SEQ ID NO: 687785 - RNA, 22 nt, Human
uuaguuaauugacuauguugca

SEQ ID NO: 687786 - RNA, 22 nt, Human
agguacauuugauaaaaauagc

SEQ ID NO: 687787 - RNA, 22 nt, Human
aggucagacagggugucuuucu

SEQ ID NO: 687788 - RNA, 23 nt, Human
acuuggaagcagugaacaacuuu

SEQ ID NO: 687789 - RNA, 22 nt, Human
aggcuccauucaugugaaggca

SEQ ID NO: 687790 - RNA, 22 nt, Human
aucaaaguuucccagaaguugu

SEQ ID NO: 687791 - RNA, 22 nt, Human
aaugcauuccacugagauuugu

SEQ ID NO: 687792 - RNA, 22 nt, Human
ugucuuaaacuugugggacuuc

SEQ ID NO: 687793 - RNA, 22 nt, Human
ucucaucuucauugucucccau

SEQ ID NO: 687794 - RNA, 20 nt, Human
aggcugaguucuaugcacuu

SEQ ID NO: 687795 - RNA, 22 nt, Human
gcugcagggggugggcgucucc

SEQ ID NO: 687796 - RNA, 22 nt, Human
cuauugaggacauaaggacucu

SEQ ID NO: 687797 - RNA, 22 nt, Human
uugucagccagcucgcacucuu

SEQ ID NO: 687798 - RNA, 22 nt, Human
auaucaguaucuauguauuugu

SEQ ID NO: 687799 - RNA, 22 nt, Human
ccugaggaugccagcaugggug

SEQ ID NO: 687800 - RNA, 22 nt, Human
cacaggguuguucugaggauuc

SEQ ID NO: 687801 - RNA, 22 nt, Human
agaaaggucacuuagccucagc

SEQ ID NO: 687802 - RNA, 22 nt, Human
uggggccugcacaggcugaaug

SEQ ID NO: 687803 - RNA, 20 nt, Human
auaaaauaacugccacaaga

SEQ ID NO: 687804 - RNA, 22 nt, Human
cuucaaggaagccacguuggga

SEQ ID NO: 687805 - RNA, 22 nt, Human
caaggccaguucaccaagggca

SEQ ID NO: 687806 - RNA, 22 nt, Human
gcauugaaccaucuagauuucu

SEQ ID NO: 687807 - RNA, 19 nt, Human
caguggagauuggaggagg

SEQ ID NO: 687808 - RNA, 22 nt, Human
uuucuggaaacuguaaagagga

SEQ ID NO: 687809 - RNA, 22 nt, Human
uucacacucucacucccugacc

SEQ ID NO: 687810 - RNA, 22 nt, Human
uccuucaccucaagcuuuugaa

SEQ ID NO: 687811 - RNA, 22 nt, Human
cuugaaagcuuugcgucuucua

SEQ ID NO: 687812 - RNA, 22 nt, Human
cugggcuccacucccacagugu

SEQ ID NO: 687813 - RNA, 22 nt, Human
gggcauggccaggugagggguc

SEQ ID NO: 687814 - RNA, 20 nt, Human
ucacuguaauugccuacauu

SEQ ID NO: 687815 - RNA, 22 nt, Human
guguagcauauagcaagagcau

SEQ ID NO: 687816 - RNA, 22 nt, Human
gggcuucauucaggcagaauuu

SEQ ID NO: 687817 - RNA, 22 nt, Human
aaauguuuaaguguaggagcaa

SEQ ID NO: 687818 - RNA, 22 nt, Human
auuacaagggucugacuggagg

SEQ ID NO: 687819 - RNA, 17 nt, Human
uggucuggaagaacuga

SEQ ID NO: 687820 - RNA, 23 nt, Human
uccuugggccugcccagaguggu

SEQ ID NO: 687821 - RNA, 22 nt, Human
ucccagggugaaaugcaguagg

SEQ ID NO: 687822 - RNA, 22 nt, Human
aaagguucucuuguucauuauu

SEQ ID NO: 687823 - RNA, 22 nt, Human
ggccagcauauagagugaagua

SEQ ID NO: 687824 - RNA, 22 nt, Human
cagaggggauaacagguguaga

SEQ ID NO: 687825 - RNA, 23 nt, Human
ucucaguuccagaggcuacaagu

SEQ ID NO: 687826 - RNA, 22 nt, Human
ggccucuggcaggcaggcccuc

SEQ ID NO: 687827 - RNA, 22 nt, Human
aucuuccaggugccggggguca

SEQ ID NO: 687828 - RNA, 22 nt, Human
aggcccuauucaauggggccca

SEQ ID NO: 687829 - RNA, 22 nt, Human
uggcagcaaguucuugggaggu

SEQ ID NO: 687830 - RNA, 22 nt, Human
aaauccuaauaaugcacuagug

SEQ ID NO: 687831 - RNA, 22 nt, Human
ccagcugcucucuucuccgcca

SEQ ID NO: 687832 - RNA, 22 nt, Human
ucagagaguuagugucuuagcu

SEQ ID NO: 687833 - RNA, 22 nt, Human
agcagggcuuugucucugugaa

SEQ ID NO: 687834 - RNA, 22 nt, Human
ucuccauaggcaguucauaaca

SEQ ID NO: 687835 - RNA, 22 nt, Human
ggacaggugugaggcuggcaca

SEQ ID NO: 687836 - RNA, 22 nt, Human
aagcuggcucugaugucagaau

SEQ ID NO: 687837 - RNA, 22 nt, Human
uagugucugaaugcaccuguuu

SEQ ID NO: 687838 - RNA, 22 nt, Human
cagcucugaagaaaggugucua

SEQ ID NO: 687839 - RNA, 22 nt, Human
aagggcucucugcauugaaauu

SEQ ID NO: 687840 - RNA, 21 nt, Human
uugagcagaaauguguaugcc

SEQ ID NO: 687841 - RNA, 22 nt, Human
gaggucugccuucaggagaguu

SEQ ID NO: 687842 - RNA, 22 nt, Human
aggucucacuuuguggaaguga

SEQ ID NO: 687843 - RNA, 22 nt, Human
gugugagcagaaaccaugagua

SEQ ID NO: 687844 - RNA, 22 nt, Human
auuccaauuguacuugcuuuua

SEQ ID NO: 687845 - RNA, 23 nt, Human
ccaagcuucuaaugcugcugagc

SEQ ID NO: 687846 - RNA, 22 nt, Human
gcuucuugccuguguagagaau

SEQ ID NO: 687847 - RNA, 22 nt, Human
cugcagagcagccaguccccca

SEQ ID NO: 687848 - RNA, 22 nt, Human
uggcuguguuaccacuucaugu

SEQ ID NO: 687849 - RNA, 22 nt, Human
cagcagauuugggaaacacugu

SEQ ID NO: 687850 - RNA, 22 nt, Human
aacaguguuuuucuucagcacu

SEQ ID NO: 687851 - RNA, 22 nt, Human
uuagggcaggcaugagagaacu

SEQ ID NO: 687852 - RNA, 22 nt, Human
ggaaacauuccaagaguugaaa

SEQ ID NO: 687853 - RNA, 22 nt, Human
gugccuggagcuaauguguaua

SEQ ID NO: 687854 - RNA, 22 nt, Human
uggcuggaguauaggaguagga

SEQ ID NO: 687855 - RNA, 20 nt, Human
ugccaggcacggagugcaug

SEQ ID NO: 687856 - RNA, 22 nt, Human
cuguugcaugacugugcaugcu

SEQ ID NO: 687857 - RNA, 22 nt, Human
cuggagauaagcagucccaggc

SEQ ID NO: 687858 - RNA, 22 nt, Human
gcagagauuggugcacugauga

SEQ ID NO: 687859 - RNA, 22 nt, Human
cucucccuagguuagcggucag

SEQ ID NO: 687860 - RNA, 22 nt, Human
uggcucucagcucccagcagcc

SEQ ID NO: 687861 - RNA, 22 nt, Human
accucugcaacccuggaauggg

SEQ ID NO: 687862 - RNA, 22 nt, Human
agggagcagcagccacaggaug

SEQ ID NO: 687863 - RNA, 22 nt, Human
uccagagcucugggcauagcug

SEQ ID NO: 687864 - RNA, 22 nt, Human
uggaggcaggggauacagguca

SEQ ID NO: 687865 - RNA, 22 nt, Human
gucuuuuucuacgauagcgccu

SEQ ID NO: 687866 - RNA, 22 nt, Human
ucaugguucaugaguguccuuu

SEQ ID NO: 687867 - RNA, 19 nt, Human
ggaaacaggggccagagga

SEQ ID NO: 687868 - RNA, 22 nt, Human
aaggccuugccugacagcacca

SEQ ID NO: 687869 - RNA, 21 nt, Human
aggcagaaagagcccaggcug

SEQ ID NO: 687870 - RNA, 22 nt, Human
ugcugcuuuggaacuccacagg

SEQ ID NO: 687871 - RNA, 22 nt, Human
ccucacacaguuaucucuucau

SEQ ID NO: 687872 - RNA, 22 nt, Human
ucaucagaggcaucuggcaagg

SEQ ID NO: 687873 - RNA, 22 nt, Human
cgcugggcagguccacuuguua

SEQ ID NO: 687874 - RNA, 22 nt, Human
aacaaauguguggcaguguggg

SEQ ID NO: 687875 - RNA, 22 nt, Human
auucuuggagcagucaaagaag

SEQ ID NO: 687876 - RNA, 21 nt, Human
gaagccaagacaggaucaagg

SEQ ID NO: 687877 - RNA, 22 nt, Human
uuuccauauuuggucuuuggga

SEQ ID NO: 687878 - RNA, 22 nt, Human
cacugcaguaacucuaggacug

SEQ ID NO: 687879 - RNA, 22 nt, Human
ucccugagacucuggaguguaa

SEQ ID NO: 687880 - RNA, 22 nt, Human
uacucugcaaguugaagguggc

SEQ ID NO: 687881 - RNA, 22 nt, Human
uuccuaacucuggcaccuaguc

SEQ ID NO: 687882 - RNA, 22 nt, Human
aaucuuucccuauuaaaugugg

SEQ ID NO: 687883 - RNA, 22 nt, Human
cugagggguauccaagggguaa

SEQ ID NO: 687884 - RNA, 16 nt, Human
uggcacagagcagaua

SEQ ID NO: 687885 - RNA, 22 nt, Human
gugagagaauuugaguuaaauu

SEQ ID NO: 687886 - RNA, 22 nt, Human
ugggcuuaggucggaggcggcc

SEQ ID NO: 687887 - RNA, 22 nt, Human
uugcuuugccaccagaagucua

SEQ ID NO: 687888 - RNA, 22 nt, Human
uuugcaaaccggagcucugcaa

SEQ ID NO: 687889 - RNA, 22 nt, Human
cucaggauucucgacacucaca

SEQ ID NO: 687890 - RNA, 22 nt, Human
cagccuucugaaugaacguacu

SEQ ID NO: 687891 - RNA, 22 nt, Human
cugagcugggcucucuugaggg

SEQ ID NO: 687892 - RNA, 22 nt, Human
ucaaaacaacacucagguguaa

SEQ ID NO: 687893 - RNA, 22 nt, Human
caguggucccugagguugcugg

SEQ ID NO: 687894 - RNA, 22 nt, Human
cuucugggugccugugaguguu

SEQ ID NO: 687895 - RNA, 22 nt, Human
auauguauugagugccaacugu

SEQ ID NO: 687896 - RNA, 22 nt, Human
ccuggcuggauggagccccugg

SEQ ID NO: 687897 - RNA, 22 nt, Human
cugggccuggcguuccaggcug

SEQ ID NO: 687898 - RNA, 22 nt, Human
uggccugcagaggcuguggggc

SEQ ID NO: 687899 - RNA, 22 nt, Human
aguacaugcagaacuaacagau

SEQ ID NO: 687900 - RNA, 18 nt, Human
ggagcugggccccacucc

SEQ ID NO: 687901 - RNA, 22 nt, Human
gugagguccuaauagacaucga

SEQ ID NO: 687902 - RNA, 22 nt, Human
cuccagcugcuggucugagacu

SEQ ID NO: 687903 - RNA, 22 nt, Human
guuauucugcacaccuuuaaaa

SEQ ID NO: 687904 - RNA, 22 nt, Human
acaguaguacacaucuaugucc

SEQ ID NO: 687905 - RNA, 22 nt, Human
gacagcaacacaugcuuagugc

SEQ ID NO: 687906 - RNA, 22 nt, Human
uucauuacauucaaaaggcauu

SEQ ID NO: 687907 - RNA, 22 nt, Human
aaaaauagaaggauugacugag

SEQ ID NO: 687908 - RNA, 22 nt, Human
ggacucagcagccaggaguggc

SEQ ID NO: 687909 - RNA, 22 nt, Human
ucacauacugaaaguccaguga

SEQ ID NO: 687910 - RNA, 22 nt, Human
ggccucacccaucggugccuuu

SEQ ID NO: 687911 - RNA, 22 nt, Human
ucucaugccuggaauuaucauu

SEQ ID NO: 687912 - RNA, 22 nt, Human
aagcagccacuggccaguuaua

SEQ ID NO: 687913 - RNA, 22 nt, Human
gcauuuuugaucccacuaggau

SEQ ID NO: 687914 - RNA, 21 nt, Human
cagaggcaggcucugugugug

SEQ ID NO: 687915 - RNA, 22 nt, Human
ggcauggcucggagucagaaca

SEQ ID NO: 687916 - RNA, 22 nt, Human
cucaggaggaugacugccuugg

SEQ ID NO: 687917 - RNA, 22 nt, Human
cucccuccucaaauaucuuugu

SEQ ID NO: 687918 - RNA, 22 nt, Human
agaagccauugaagcagaccuc

SEQ ID NO: 687919 - RNA, 22 nt, Human
ucagccuccgaaagugcuggga

SEQ ID NO: 687920 - RNA, 22 nt, Human
uucaucauugccagucuuuaaa

SEQ ID NO: 687921 - RNA, 22 nt, Human
uauucccauuccacuuaucaag

SEQ ID NO: 687922 - RNA, 22 nt, Human
ccaugcuaggaacucucaggga

SEQ ID NO: 687923 - RNA, 23 nt, Human
aaagugcaguugaggaaucauag

SEQ ID NO: 687924 - RNA, 22 nt, Human
acuuuucaaaugggaaacucag

SEQ ID NO: 687925 - RNA, 22 nt, Human
gcagaccucaggacaucauuag

SEQ ID NO: 687926 - RNA, 22 nt, Human
aggaaaaugaaacagcaacugu

SEQ ID NO: 687927 - RNA, 22 nt, Human
auggcuccagcugguagagauu

SEQ ID NO: 687928 - RNA, 22 nt, Human
aaugccguguuucuuacguuca

SEQ ID NO: 687929 - RNA, 22 nt, Human
gcaaggcuuugugaauuuuaaa

SEQ ID NO: 687930 - RNA, 22 nt, Human
aacacagguucauucugugagg

SEQ ID NO: 687931 - RNA, 22 nt, Human
agauguaacgguagguggcauu

SEQ ID NO: 687932 - RNA, 20 nt, Human
ccaaggauuggcaagcagca

SEQ ID NO: 687933 - RNA, 22 nt, Human
aggaucuugcuguagaggauag

SEQ ID NO: 687934 - RNA, 22 nt, Human
agucaggagauauuuugauaug

SEQ ID NO: 687935 - RNA, 22 nt, Human
ggcggcccugcacgugcugagg

SEQ ID NO: 687936 - RNA, 22 nt, Human
agcaccaggucgcuggcacgcu

SEQ ID NO: 687937 - RNA, 22 nt, Human
agugucugugcuuugcagcaaa

SEQ ID NO: 687938 - RNA, 22 nt, Human
uccuggcccuguggccugcagu

SEQ ID NO: 687939 - RNA, 22 nt, Human
aaagguuuuuauuuauccugga

SEQ ID NO: 687940 - RNA, 22 nt, Human
uccaggaauagaucagagauuu

SEQ ID NO: 687941 - RNA, 22 nt, Human
uccuucaagugcaguaccugag

SEQ ID NO: 687942 - RNA, 22 nt, Human
uacaggguauagguacagauga

SEQ ID NO: 687943 - RNA, 22 nt, Human
ucagcaggguuugacuucuaau

SEQ ID NO: 687944 - RNA, 22 nt, Human
uuaguacauugauucauuaugu

SEQ ID NO: 687945 - RNA, 22 nt, Human
aggcuccagucuccucuggcag

SEQ ID NO: 687946 - RNA, 22 nt, Human
caggaggaaacuggauucacuu

SEQ ID NO: 687947 - RNA, 22 nt, Human
gcugagaaucaagauggagagg

SEQ ID NO: 687948 - RNA, 22 nt, Human
gcuggagguggugagaaaaggu

SEQ ID NO: 687949 - RNA, 22 nt, Human
aaagcuguuaaaugcauaaugc

SEQ ID NO: 687950 - RNA, 22 nt, Human
uggcaaaggaaaugauuuaaga

SEQ ID NO: 687951 - RNA, 22 nt, Human
uucuuacuaguauguuucagca

SEQ ID NO: 687952 - RNA, 22 nt, Human
ucccagccugacagugcaucaa

SEQ ID NO: 687953 - RNA, 22 nt, Human
ucacauuuuuuacuggacuuaa

SEQ ID NO: 687954 - RNA, 22 nt, Human
uggcccagugcuuaugcucuga

SEQ ID NO: 687955 - RNA, 22 nt, Human
cuggccagcauuuuugcuuuag

SEQ ID NO: 687956 - RNA, 22 nt, Human
aggcucagcaucugauucauau

SEQ ID NO: 687957 - RNA, 22 nt, Human
guggugaagcauugagaaguca

SEQ ID NO: 687958 - RNA, 17 nt, Human
aggcuggccuucacagu

SEQ ID NO: 687959 - RNA, 22 nt, Human
aggagcagcccacuccuguccu

SEQ ID NO: 687960 - RNA, 22 nt, Human
ugcauuuuugauaacuguguac

SEQ ID NO: 687961 - RNA, 22 nt, Human
ucuggcuucaguaggguucacu

SEQ ID NO: 687962 - RNA, 22 nt, Human
gugccagcucuccccacaucug

SEQ ID NO: 687963 - RNA, 22 nt, Human
ccccaccuugcaauuguucccu

SEQ ID NO: 687964 - RNA, 22 nt, Human
uggaauaaugaccacagaaaca

SEQ ID NO: 687965 - RNA, 22 nt, Human
acuggaagccaguugacaauca

SEQ ID NO: 687966 - RNA, 22 nt, Human
uucuuuccuugccucagugaag

SEQ ID NO: 687967 - RNA, 22 nt, Human
gucugguauucaauuauuauuu

SEQ ID NO: 687968 - RNA, 22 nt, Human
cagccccagcacuuagcugagu

SEQ ID NO: 687969 - RNA, 22 nt, Human
caauuucauggauaaaagaugu

SEQ ID NO: 687970 - RNA, 22 nt, Human
cacacaugaaucccuaguaccu

SEQ ID NO: 687971 - RNA, 22 nt, Human
aaacagacugcacugccaguca

SEQ ID NO: 687972 - RNA, 22 nt, Human
cauugcugugggcauuugcugc

SEQ ID NO: 687973 - RNA, 22 nt, Human
uuauuuguggcauaugagacga

SEQ ID NO: 687974 - RNA, 22 nt, Human
ucccuguguguauauaaacggu

SEQ ID NO: 687975 - RNA, 20 nt, Human
gagagcuggggaugaggcug

SEQ ID NO: 687976 - RNA, 22 nt, Human
guucacagaaggccagauggua

SEQ ID NO: 687977 - RNA, 22 nt, Human
auggaacaucagguuaagaaau

SEQ ID NO: 687978 - RNA, 22 nt, Human
ucucuguagcagcuuccuuccu

SEQ ID NO: 687979 - RNA, 22 nt, Human
ggcagcuguggacgucgucauu

SEQ ID NO: 687980 - RNA, 22 nt, Human
ccugcccacuccaggagcaacu

SEQ ID NO: 687981 - RNA, 22 nt, Human
agaguccauaugugggaggagu

SEQ ID NO: 687982 - RNA, 23 nt, Human
uggcagugcccagggagaugauc

SEQ ID NO: 687983 - RNA, 22 nt, Human
ccauuuuugacagaaggccuaa

SEQ ID NO: 687984 - RNA, 22 nt, Human
agccaaggucgccccagggcaa

SEQ ID NO: 687985 - RNA, 22 nt, Human
gaggagaggcuggacgcgguga

SEQ ID NO: 687986 - RNA, 22 nt, Human
uggcugagugaacauguccauu

SEQ ID NO: 687987 - RNA, 22 nt, Human
agcagagugccccaucacaagg

SEQ ID NO: 687988 - RNA, 22 nt, Human
uacaauacuuaaccuauuuugc

SEQ ID NO: 687989 - RNA, 22 nt, Human
ucccagcuuagauuugcucauu

SEQ ID NO: 687990 - RNA, 22 nt, Human
uagaaugugccuggaauacagu

SEQ ID NO: 687991 - RNA, 22 nt, Human
aaaguuugagugauuugacaca

SEQ ID NO: 687992 - RNA, 22 nt, Human
agcugcucuucauuucccccca

SEQ ID NO: 687993 - RNA, 22 nt, Human
ccagcccugaacccugcugcau

SEQ ID NO: 687994 - RNA, 23 nt, Human
gaauaguuuuagaaauuggagaa

SEQ ID NO: 687995 - RNA, 22 nt, Human
augcguguuuguauacacacaa

SEQ ID NO: 687996 - RNA, 22 nt, Human
uggcagaggaaaaagucacugg

SEQ ID NO: 687997 - RNA, 22 nt, Human
aaauacucucaauaaagaaagu

SEQ ID NO: 687998 - RNA, 22 nt, Human
auacagucagacuuuagccauu

SEQ ID NO: 687999 - RNA, 22 nt, Human
cccaggaaauagccaggaggug

SEQ ID NO: 688000 - RNA, 22 nt, Human
uccagcuccucuacccgaugcg

SEQ ID NO: 688001 - RNA, 22 nt, Human
ucaguugccuccauagucaucc

SEQ ID NO: 688002 - RNA, 22 nt, Human
auagaucauugauacuugcauc

SEQ ID NO: 688003 - RNA, 22 nt, Human
cacacagcuagugacaggagaa

SEQ ID NO: 688004 - RNA, 22 nt, Human
cugcaggagugaaagcaggccu

SEQ ID NO: 688005 - RNA, 22 nt, Human
agggcuuuggcccccugcugca

SEQ ID NO: 688006 - RNA, 22 nt, Human
uugugaaaagccgcaaguauag

SEQ ID NO: 688007 - RNA, 22 nt, Human
ugguggagaccucgcuaacccc

SEQ ID NO: 688008 - RNA, 22 nt, Human
uacaugguuggcccauucuucu

SEQ ID NO: 688009 - RNA, 22 nt, Human
aauccacuaaugaagaaugggc

SEQ ID NO: 688010 - RNA, 22 nt, Human
cacagagaccccuucuggggcc

SEQ ID NO: 688011 - RNA, 22 nt, Human
ucagacuugacuuuguaaguuu

SEQ ID NO: 688012 - RNA, 22 nt, Human
uacuuccagcaaucugcauauu

SEQ ID NO: 688013 - RNA, 22 nt, Human
aaguauacuuaggcauaauggu

SEQ ID NO: 688014 - RNA, 22 nt, Human
cccuggauuuacaucauucuga

SEQ ID NO: 688015 - RNA, 19 nt, Human
ucagggccaugagcgccac

SEQ ID NO: 688016 - RNA, 22 nt, Human
caugaucugguccuacuguggg

SEQ ID NO: 688017 - RNA, 22 nt, Human
aaugauugucauuccaaaaagu

SEQ ID NO: 688018 - RNA, 22 nt, Human
ccuggguccuggcagccuccug

SEQ ID NO: 688019 - RNA, 22 nt, Human
uuccucuuuagggcuggccagg

SEQ ID NO: 688020 - RNA, 20 nt, Human
aggagaccaagccaagugga

SEQ ID NO: 688021 - RNA, 22 nt, Human
uagcugagaggccaauugaacu

SEQ ID NO: 688022 - RNA, 22 nt, Human
cuaggccaguuaggaagagaag

SEQ ID NO: 688023 - RNA, 19 nt, Human
cgcagguggaaggagccgc

SEQ ID NO: 688024 - RNA, 22 nt, Human
acaggcugccuaccaaguauca

SEQ ID NO: 688025 - RNA, 22 nt, Human
aucauguacuugacaaauaugu

SEQ ID NO: 688026 - RNA, 22 nt, Human
ugccagagaguggcuggguguc

SEQ ID NO: 688027 - RNA, 22 nt, Human
aauacuuaugugaccucauuuu

SEQ ID NO: 688028 - RNA, 22 nt, Human
gaacacugacauuuuccugacu

SEQ ID NO: 688029 - RNA, 22 nt, Human
cucuauuuauggcaucuuuaug

SEQ ID NO: 688030 - RNA, 22 nt, Human
accuccccugacucgaaaccca

SEQ ID NO: 688031 - RNA, 22 nt, Human
gccuggugcuaugagggccagc

SEQ ID NO: 688032 - RNA, 22 nt, Human
cuccagugucucagagcagaug

SEQ ID NO: 688033 - RNA, 22 nt, Human
cauuucuaagaagaucugggua

SEQ ID NO: 688034 - RNA, 22 nt, Human
ugucuucagcaaaugccuuucu

SEQ ID NO: 688035 - RNA, 22 nt, Human
uacaguaaucuggacaugauuu

SEQ ID NO: 688036 - RNA, 22 nt, Human
ucccacaggggcucuguggguu

SEQ ID NO: 688037 - RNA, 22 nt, Human
ucacagaaaagcugagcaucag

SEQ ID NO: 688038 - RNA, 22 nt, Human
cuggccaauauagggaaaucuu

SEQ ID NO: 688039 - RNA, 22 nt, Human
gugcccuggagggguugaaggg

SEQ ID NO: 688040 - RNA, 22 nt, Human
cacuguucuuuuuguaguccaa

SEQ ID NO: 688041 - RNA, 22 nt, Human
uaaccagcaugaaaucugcagc

SEQ ID NO: 688042 - RNA, 22 nt, Human
ucucagucuuuuugguuacuca

SEQ ID NO: 688043 - RNA, 22 nt, Human
ucccccuccaauugccauguua

SEQ ID NO: 688044 - RNA, 22 nt, Human
uuccaggaugcugcugcuuuuu

SEQ ID NO: 688045 - RNA, 20 nt, Human
gagagcuggaaauaaagucc

SEQ ID NO: 688046 - RNA, 22 nt, Human
gugcaaaaauaauugugguuuu

SEQ ID NO: 688047 - RNA, 22 nt, Human
aacugcaauuacuuuugcgcca

SEQ ID NO: 688048 - RNA, 22 nt, Human
guuccugagaaauaaagagaga

SEQ ID NO: 688049 - RNA, 19 nt, Human
aaaaacuuaguccagaaag

SEQ ID NO: 688050 - RNA, 22 nt, Human
auaauggccgggggcugaaugc

SEQ ID NO: 688051 - RNA, 22 nt, Human
guguaauuauauaaagaucuac

SEQ ID NO: 688052 - RNA, 22 nt, Human
ccagagggagccaccagggugu

SEQ ID NO: 688053 - RNA, 22 nt, Human
agaggggcagggucuccggauu

SEQ ID NO: 688054 - RNA, 19 nt, Human
aaagcagaggagcaucuga

SEQ ID NO: 688055 - RNA, 22 nt, Human
ugucagugguagacccagaggu

SEQ ID NO: 688056 - RNA, 22 nt, Human
guagcagguauucuggugugag

SEQ ID NO: 688057 - RNA, 22 nt, Human
gcuuucugauugcgaaaacaaa

SEQ ID NO: 688058 - RNA, 22 nt, Human
ugagaaucauccagaggcuucu

SEQ ID NO: 688059 - RNA, 20 nt, Human
gcucaguggagaaaugcacc

SEQ ID NO: 688060 - RNA, 21 nt, Human
ugggauagaaauauggcugcu

SEQ ID NO: 688061 - RNA, 22 nt, Human
ccaggagcaggagcuggacaga

SEQ ID NO: 688062 - RNA, 22 nt, Human
cacugucuucaguuucacugca

SEQ ID NO: 688063 - RNA, 22 nt, Human
uucagagaagcaaaggcagauu

SEQ ID NO: 688064 - RNA, 22 nt, Human
aguccaaggccauacaguugug

SEQ ID NO: 688065 - RNA, 22 nt, Human
ucucagagagaugaaacuucca

SEQ ID NO: 688066 - RNA, 22 nt, Human
accugggaaagccguggaaagg

SEQ ID NO: 688067 - RNA, 22 nt, Human
cucagagcaaugaacaugcaaa

SEQ ID NO: 688068 - RNA, 22 nt, Human
ucagaagcauccauuucaccac

SEQ ID NO: 688069 - RNA, 22 nt, Human
ucugcuguucauucuuuuagcu

SEQ ID NO: 688070 - RNA, 22 nt, Human
gcuccaggaggcucccgcgucu

SEQ ID NO: 688071 - RNA, 22 nt, Human
ugacauuuuuauaagagucaaa

SEQ ID NO: 688072 - RNA, 22 nt, Human
gcacccaugcucuugucucagg

SEQ ID NO: 688073 - RNA, 22 nt, Human
gcagugugaugcuuccagccac

SEQ ID NO: 688074 - RNA, 22 nt, Human
cuguaaauggaacuauguagua

SEQ ID NO: 688075 - RNA, 22 nt, Human
uuaggaaaagaagacauuucua

SEQ ID NO: 688076 - RNA, 22 nt, Human
uuacauaguuaaauaguacagc

SEQ ID NO: 688077 - RNA, 22 nt, Human
ggcuccuggggaggugagcuug

SEQ ID NO: 688078 - RNA, 21 nt, Human
aguguaggucauuagcuguug

SEQ ID NO: 688079 - RNA, 22 nt, Human
caggccugacccugagcuucac

SEQ ID NO: 688080 - RNA, 22 nt, Human
ucuugguuaggggaaauaggca

SEQ ID NO: 688081 - RNA, 22 nt, Human
accugcagcuaaagauguaggg

SEQ ID NO: 688082 - RNA, 22 nt, Human
gacccugaggaugcaccagcag

SEQ ID NO: 688083 - RNA, 22 nt, Human
cgcaacagagcagguuugauga

SEQ ID NO: 688084 - RNA, 18 nt, Human
ugggccugcauccuaguc

SEQ ID NO: 688085 - RNA, 22 nt, Human
aacauugauugcaucuguucac

SEQ ID NO: 688086 - RNA, 22 nt, Human
gcaccugcaggaugagccaggg

SEQ ID NO: 688087 - RNA, 22 nt, Human
uccugcagaucaaagccuuuga

SEQ ID NO: 688088 - RNA, 21 nt, Human
ggccuuggcgggggccgaauu

SEQ ID NO: 688089 - RNA, 22 nt, Human
cgccggcuugaggcaggcggca

SEQ ID NO: 688090 - RNA, 22 nt, Human
guggcagcggcccaggccgucu

SEQ ID NO: 688091 - RNA, 22 nt, Human
ggagggaaugucuagcauucuu

SEQ ID NO: 688092 - RNA, 22 nt, Human
ucuucaguauuuggauaacauu

SEQ ID NO: 688093 - RNA, 22 nt, Human
guuuuauuggaacacagccaug

SEQ ID NO: 688094 - RNA, 22 nt, Human
aauccgauucguguacauuaau

SEQ ID NO: 688095 - RNA, 22 nt, Human
augcuguguauuuuacucuuuc

SEQ ID NO: 688096 - RNA, 22 nt, Human
auggccaagcaugccuguggcc

SEQ ID NO: 688097 - RNA, 22 nt, Human
uuucuugacugcuuaggaaugc

SEQ ID NO: 688098 - RNA, 22 nt, Human
agaauacaguaugcaaaaagau

SEQ ID NO: 688099 - RNA, 22 nt, Human
agacacagcaauaacuacuguu

SEQ ID NO: 688100 - RNA, 22 nt, Human
gagucaggaugcaaggggaugg

SEQ ID NO: 688101 - RNA, 22 nt, Human
ggcccuguuagagcucccacaa

SEQ ID NO: 688102 - RNA, 22 nt, Human
uccauuauacuucugauucaaa

SEQ ID NO: 688103 - RNA, 22 nt, Human
caggcugaggcaguaggguuug

SEQ ID NO: 688104 - RNA, 22 nt, Human
gagagcuggccagcuucaguau

SEQ ID NO: 688105 - RNA, 22 nt, Human
aauauuucuggugcuucucacu

SEQ ID NO: 688106 - RNA, 22 nt, Human
uuuccucuuccgagggggaggc

SEQ ID NO: 688107 - RNA, 22 nt, Human
gcagaguucucuuccagcuaac

SEQ ID NO: 688108 - RNA, 22 nt, Human
aaaguauucuugacuguuuuuc

SEQ ID NO: 688109 - RNA, 22 nt, Human
acaugcauacaagcacauguag

SEQ ID NO: 688110 - RNA, 22 nt, Human
gguaguucuucauggguuucau

SEQ ID NO: 688111 - RNA, 22 nt, Human
cugagcuucagugcacugggag

SEQ ID NO: 688112 - RNA, 22 nt, Human
gagcccagucugcuccugcgcc

SEQ ID NO: 688113 - RNA, 22 nt, Human
acagcuugucugguuucagguc

SEQ ID NO: 688114 - RNA, 22 nt, Human
ugcagccaucuuucuuggagga

SEQ ID NO: 688115 - RNA, 22 nt, Human
cuggcucuucagugcuugguuc

SEQ ID NO: 688116 - RNA, 22 nt, Human
ccccucugcaaauagccaggcu

SEQ ID NO: 688117 - RNA, 22 nt, Human
gggcugcuugcuggagacagac

SEQ ID NO: 688118 - RNA, 22 nt, Human
gacauucauuaagccuuucugu

SEQ ID NO: 688119 - RNA, 22 nt, Human
ggaaagcucagaucuuguugga

SEQ ID NO: 688120 - RNA, 20 nt, Human
uguuucugacgguaggagag

SEQ ID NO: 688121 - RNA, 22 nt, Human
aucaaaguccaucagaagguag

SEQ ID NO: 688122 - RNA, 22 nt, Human
aggguccuucuguuccugagca

SEQ ID NO: 688123 - RNA, 22 nt, Human
agacaaguucugugggucaccu

SEQ ID NO: 688124 - RNA, 22 nt, Human
cguggcugguggaccugagggc

SEQ ID NO: 688125 - RNA, 22 nt, Human
aaugucuuucucauaacagaua

SEQ ID NO: 688126 - RNA, 22 nt, Human
ucccucagauuggcaauuagau

SEQ ID NO: 688127 - RNA, 22 nt, Human
ggacugggucacuaagauagua

SEQ ID NO: 688128 - RNA, 22 nt, Human
gcagggaagacccggagcagcg

SEQ ID NO: 688129 - RNA, 22 nt, Human
aggagaggucucccuuccccag

SEQ ID NO: 688130 - RNA, 22 nt, Human
ugggguagggaaaagaagucga

SEQ ID NO: 688131 - RNA, 22 nt, Human
ucugaauagagagagguccuuu

SEQ ID NO: 688132 - RNA, 22 nt, Human
ugcaaagaagccuuugccuucu

SEQ ID NO: 688133 - RNA, 22 nt, Human
aaugcaaauucuagggcccuau

SEQ ID NO: 688134 - RNA, 22 nt, Human
acccugccgugggcugcuugug

SEQ ID NO: 688135 - RNA, 22 nt, Human
guguuaaaugcaaucacaugca

SEQ ID NO: 688136 - RNA, 22 nt, Human
ggcagacacucaaaagcuggga

SEQ ID NO: 688137 - RNA, 22 nt, Human
gugaggugaguagugagaagcc

SEQ ID NO: 688138 - RNA, 22 nt, Human
uugcuguaccaaagauuccuga

SEQ ID NO: 688139 - RNA, 17 nt, Human
uaaauacacaaggguau

SEQ ID NO: 688140 - RNA, 22 nt, Human
guucugcuuaaauuauugaucc

SEQ ID NO: 688141 - RNA, 22 nt, Human
agccaagcacucaacuccugga

SEQ ID NO: 688142 - RNA, 22 nt, Human
auuucuacugugagaaacauga

SEQ ID NO: 688143 - RNA, 22 nt, Human
ucuguucuuuccaacaagacag

SEQ ID NO: 688144 - RNA, 22 nt, Human
ugucauauguaauauguucauu

SEQ ID NO: 688145 - RNA, 22 nt, Human
aagcacugugccucauaucuga

SEQ ID NO: 688146 - RNA, 22 nt, Human
ugcuuaauacguauuugcugga

SEQ ID NO: 688147 - RNA, 22 nt, Human
aaagaacuaccuguaugauauu

SEQ ID NO: 688148 - RNA, 22 nt, Human
uuuagcacgguaacacauaaag

SEQ ID NO: 688149 - RNA, 22 nt, Human
uagggcaggugaagaaaagcua

SEQ ID NO: 688150 - RNA, 22 nt, Human
gauccuggcacagguugguccc

SEQ ID NO: 688151 - RNA, 22 nt, Human
uuccagaauugggagccuugag

SEQ ID NO: 688152 - RNA, 22 nt, Human
uggggaggauaugugaguuauu

SEQ ID NO: 688153 - RNA, 22 nt, Human
guccucugcccaggucaagguu

SEQ ID NO: 688154 - RNA, 22 nt, Human
agcugagauuaugcucuucuca

SEQ ID NO: 688155 - RNA, 22 nt, Human
aggugcaguggcucaugccugu

SEQ ID NO: 688156 - RNA, 22 nt, Human
ucuggagaagcagugagaguca

SEQ ID NO: 688157 - RNA, 22 nt, Human
uuagauaaauugcaacuugauu

SEQ ID NO: 688158 - RNA, 22 nt, Human
agaggcccucucugcucagucu

SEQ ID NO: 688159 - RNA, 22 nt, Human
ugcagccaauucauucauucuu

SEQ ID NO: 688160 - RNA, 21 nt, Human
ggccucagccaccuggcucug

SEQ ID NO: 688161 - RNA, 22 nt, Human
gccugcagacguguuuuccuca

SEQ ID NO: 688162 - RNA, 22 nt, Human
acuguggggugaggcccaagaa

SEQ ID NO: 688163 - RNA, 22 nt, Human
ccugagggcgccgagcucccag

SEQ ID NO: 688164 - RNA, 22 nt, Human
guuaugauggcaccacugcacu

SEQ ID NO: 688165 - RNA, 22 nt, Human
gagggcuuccauggggagcccc

SEQ ID NO: 688166 - RNA, 22 nt, Human
acauacaucaaguaucacaaga

SEQ ID NO: 688167 - RNA, 22 nt, Human
cuacauuuacacaguuaggcuu

SEQ ID NO: 688168 - RNA, 22 nt, Human
aagcuguuggcagauagcucug

SEQ ID NO: 688169 - RNA, 22 nt, Human
cucaccaggaacagcugcggag

SEQ ID NO: 688170 - RNA, 22 nt, Human
gaugucuuugccaugcaugugu

SEQ ID NO: 688171 - RNA, 22 nt, Human
cucugugggggagaggcagcug

SEQ ID NO: 688172 - RNA, 21 nt, Human
uacagcaccgaguaggcccuc

SEQ ID NO: 688173 - RNA, 22 nt, Human
caggccaauaaaugugauggcc

SEQ ID NO: 688174 - RNA, 22 nt, Human
uucuggcuucaucugacaagcc

SEQ ID NO: 688175 - RNA, 22 nt, Human
auuauggagaaauauguacagg

SEQ ID NO: 688176 - RNA, 22 nt, Human
ugugugaguaaggcugagagag

SEQ ID NO: 688177 - RNA, 22 nt, Human
gagagucacugucugcauuucc

SEQ ID NO: 688178 - RNA, 22 nt, Human
acugauuaugcguacucucuac

SEQ ID NO: 688179 - RNA, 22 nt, Human
ugguuaaaaugcagauucagua

SEQ ID NO: 688180 - RNA, 22 nt, Human
gguuggacacuagguaggagcg

SEQ ID NO: 688181 - RNA, 22 nt, Human
cauaaugugugucauacagacu

SEQ ID NO: 688182 - RNA, 22 nt, Human
aagauacauuaugucucucuga

SEQ ID NO: 688183 - RNA, 22 nt, Human
gaggagaagggcacggagaaaa

SEQ ID NO: 688184 - RNA, 22 nt, Human
accaggaacucacccgcagagg

SEQ ID NO: 688185 - RNA, 22 nt, Human
auuauagggaauucuagaaguc

SEQ ID NO: 688186 - RNA, 22 nt, Human
caggcugcuccaggguaggaaa

SEQ ID NO: 688187 - RNA, 22 nt, Human
acccucagacagcuguggccag

SEQ ID NO: 688188 - RNA, 22 nt, Human
uagauguuaagcuucuagaagg

SEQ ID NO: 688189 - RNA, 22 nt, Human
gaccacuggggugagggccauc

SEQ ID NO: 688190 - RNA, 22 nt, Human
ggagggguggucaccuggcagg

SEQ ID NO: 688191 - RNA, 22 nt, Human
gaaagguuucaucuacuuuuca

SEQ ID NO: 688192 - RNA, 17 nt, Human
ggcugugccaggugaga

SEQ ID NO: 688193 - RNA, 22 nt, Human
acugggaaauugcccuaguucu

SEQ ID NO: 688194 - RNA, 22 nt, Human
uccuuguaacguugggcugggg

SEQ ID NO: 688195 - RNA, 22 nt, Human
accaggggugucaacagcauuu

SEQ ID NO: 688196 - RNA, 21 nt, Human
aaagaaucauggguaauuuca

SEQ ID NO: 688197 - RNA, 22 nt, Human
gagcugguucuguccagggaau

SEQ ID NO: 688198 - RNA, 22 nt, Human
ccagcauccaugcucccucggg

SEQ ID NO: 688199 - RNA, 22 nt, Human
agaagucaaguggucuaugaaa

SEQ ID NO: 688200 - RNA, 22 nt, Human
agaaguaugugagaaauuaucc

SEQ ID NO: 688201 - RNA, 22 nt, Human
ucagugugauuaggcuaucuga

SEQ ID NO: 688202 - RNA, 22 nt, Human
aagggagaggagggucuuguug

SEQ ID NO: 688203 - RNA, 19 nt, Human
auacaguaagguguuugcc

SEQ ID NO: 688204 - RNA, 22 nt, Human
guuauucuagugcucagccauu

SEQ ID NO: 688205 - RNA, 22 nt, Human
guccucagucaguuuggugggg

SEQ ID NO: 688206 - RNA, 22 nt, Human
uuggcaauucaccaaggcucgc

SEQ ID NO: 688207 - RNA, 17 nt, Human
gaggccaaggcaggcgg

SEQ ID NO: 688208 - RNA, 22 nt, Human
agacaaaggauuaaugaugaug

SEQ ID NO: 688209 - RNA, 22 nt, Human
agugccaggagcaaggagcucc

SEQ ID NO: 688210 - RNA, 22 nt, Human
gagaacaaggaagagucggcag

SEQ ID NO: 688211 - RNA, 22 nt, Human
ucaggaaagaguguauccauca

SEQ ID NO: 688212 - RNA, 22 nt, Human
ucuuucuugguauaaagcaggg

SEQ ID NO: 688213 - RNA, 22 nt, Human
ugcuuugcagugucuaacagaa

SEQ ID NO: 688214 - RNA, 22 nt, Human
agaggccccaugggauggcggu

SEQ ID NO: 688215 - RNA, 22 nt, Human
aaucugaagggagauacaugua

SEQ ID NO: 688216 - RNA, 22 nt, Human
uagcacuuguguuaugccuugu

SEQ ID NO: 688217 - RNA, 22 nt, Human
aacagacauauuuuuaauaugc

SEQ ID NO: 688218 - RNA, 22 nt, Human
acagguggaggcuuuaggaggu

SEQ ID NO: 688219 - RNA, 22 nt, Human
cauguucagugacaguuauuga

SEQ ID NO: 688220 - RNA, 22 nt, Human
ugccuucucuucccugggagcu

SEQ ID NO: 688221 - RNA, 22 nt, Human
aaugaacaggugaaugucagau

SEQ ID NO: 688222 - RNA, 22 nt, Human
gcugcuguguuggagagggacu

SEQ ID NO: 688223 - RNA, 22 nt, Human
cucccagaaaauucucagacaa

SEQ ID NO: 688224 - RNA, 22 nt, Human
uuauucacucauuaaagcagga

SEQ ID NO: 688225 - RNA, 22 nt, Human
gacuugggcugagggccagcag

SEQ ID NO: 688226 - RNA, 22 nt, Human
gcaggugaugugaugugagcau

SEQ ID NO: 688227 - RNA, 22 nt, Human
caggaagugugaggguggugua

SEQ ID NO: 688228 - RNA, 22 nt, Human
uccaugcucuugucuagccucc

SEQ ID NO: 688229 - RNA, 17 nt, Human
ucacaucacacaagcaa

SEQ ID NO: 688230 - RNA, 17 nt, Human
auacaguuuauuuuaca

SEQ ID NO: 688231 - RNA, 22 nt, Human
cuggaggacagaggccaugucu

SEQ ID NO: 688232 - RNA, 22 nt, Human
gcuggagaggggucacucugag

SEQ ID NO: 688233 - RNA, 22 nt, Human
aaggaagagaauccuucucaga

SEQ ID NO: 688234 - RNA, 22 nt, Human
cugagaagguguggagaugggc

SEQ ID NO: 688235 - RNA, 23 nt, Human
uguguguguauucuacgcaaggu

SEQ ID NO: 688236 - RNA, 22 nt, Human
cugcagagcuugucuggaugug

SEQ ID NO: 688237 - RNA, 22 nt, Human
ucacagcacccugaggugcugg

SEQ ID NO: 688238 - RNA, 22 nt, Human
ucaugcagagccagucaggaua

SEQ ID NO: 688239 - RNA, 22 nt, Human
acaauagacaaagugaauggcu

SEQ ID NO: 688240 - RNA, 18 nt, Human
auuuuucccagauggaua

SEQ ID NO: 688241 - RNA, 22 nt, Human
ccagagguuccaggcuagggag

SEQ ID NO: 688242 - RNA, 22 nt, Human
uuuagugagugugaaucaaaug

SEQ ID NO: 688243 - RNA, 23 nt, Human
aguggggaaucaacagauucuuu

SEQ ID NO: 688244 - RNA, 22 nt, Human
aggcuucuacguggucccaggg

SEQ ID NO: 688245 - RNA, 22 nt, Human
auguuuccuguuggauuggccc

SEQ ID NO: 688246 - RNA, 22 nt, Human
gccuugcugauuaccuuccuuu

SEQ ID NO: 688247 - RNA, 22 nt, Human
acuucaaauuuucagaagaaau

SEQ ID NO: 688248 - RNA, 21 nt, Human
agcugcagucaagccagaggu

SEQ ID NO: 688249 - RNA, 22 nt, Human
ccugggcuuugcuggcaaggcc

SEQ ID NO: 688250 - RNA, 22 nt, Human
uuccagggcuaauuccugugga

SEQ ID NO: 688251 - RNA, 22 nt, Human
agggguggccugccuuacuccc

SEQ ID NO: 688252 - RNA, 21 nt, Human
auccauucuccgguuaaugag

SEQ ID NO: 688253 - RNA, 22 nt, Human
guuuccuguggccacagaauaa

SEQ ID NO: 688254 - RNA, 22 nt, Human
gauucauguuauagagagucag

SEQ ID NO: 688255 - RNA, 22 nt, Human
uaauaauuggcaauguugagca

SEQ ID NO: 688256 - RNA, 22 nt, Human
aacauauaaacucuuaaguuca

SEQ ID NO: 688257 - RNA, 22 nt, Human
agcugccauccuguucagcacc

SEQ ID NO: 688258 - RNA, 22 nt, Human
ugguggccgaagcccucucuca

SEQ ID NO: 688259 - RNA, 22 nt, Human
ucuccugacaugucuggaggaa

SEQ ID NO: 688260 - RNA, 22 nt, Human
ugaggccagccacagccacccu

SEQ ID NO: 688261 - RNA, 22 nt, Human
gcuuccagagagccccgccugg

SEQ ID NO: 688262 - RNA, 23 nt, Human
aggcaagaacggguuguucaccc

SEQ ID NO: 688263 - RNA, 22 nt, Human
guuucuuagacauaugccauga

SEQ ID NO: 688264 - RNA, 22 nt, Human
aauuuuaucucuaagcaggcuu

SEQ ID NO: 688265 - RNA, 22 nt, Human
gucugcugacagagcauggacc

SEQ ID NO: 688266 - RNA, 22 nt, Human
aggagugggggcgagaaguuaa

SEQ ID NO: 688267 - RNA, 22 nt, Human
ucucuuuguggccaggagagga

SEQ ID NO: 688268 - RNA, 22 nt, Human
uggccuggaaaaaugcagaugg

SEQ ID NO: 688269 - RNA, 22 nt, Human
cacaggagauugaucuauuggu

SEQ ID NO: 688270 - RNA, 18 nt, Human
uuuccuuguaugaacaua

SEQ ID NO: 688271 - RNA, 22 nt, Human
uuugacagugaugauauauaca

SEQ ID NO: 688272 - RNA, 22 nt, Human
uugaaugaaugguccauauaga

SEQ ID NO: 688273 - RNA, 22 nt, Human
aacaugcucuggauugcuguga

SEQ ID NO: 688274 - RNA, 22 nt, Human
acccucagcuggagauugaauu

SEQ ID NO: 688275 - RNA, 22 nt, Human
aaggcagguauugaugccacag

SEQ ID NO: 688276 - RNA, 22 nt, Human
gaagaggcaauugaauaagcua

SEQ ID NO: 688277 - RNA, 22 nt, Human
uuaauugguaaccucuggacua

SEQ ID NO: 688278 - RNA, 22 nt, Human
cugcaguucucaauuucuauug

SEQ ID NO: 688279 - RNA, 22 nt, Human
augucucucucugagugccaga

SEQ ID NO: 688280 - RNA, 22 nt, Human
gcaccugggcaaggauucagag

SEQ ID NO: 688281 - RNA, 22 nt, Human
ggcuuuauauuguuugagcaga

SEQ ID NO: 688282 - RNA, 22 nt, Human
uugggaaauauggauuguuauu

SEQ ID NO: 688283 - RNA, 22 nt, Human
ugacaauugcagacacagaagu

SEQ ID NO: 688284 - RNA, 22 nt, Human
gggagcugguuccugcccucca

SEQ ID NO: 688285 - RNA, 22 nt, Human
uuacuuuagaucauacugugug

SEQ ID NO: 688286 - RNA, 22 nt, Human
cauuugaaaauacucuuuucca

SEQ ID NO: 688287 - RNA, 22 nt, Human
ggguggcagcuguugccaaggu

SEQ ID NO: 688288 - RNA, 22 nt, Human
ugcauacacaagcauacaugua

SEQ ID NO: 688289 - RNA, 22 nt, Human
ugugcuaaggcagucuaucaca

SEQ ID NO: 688290 - RNA, 22 nt, Human
gaaauauugggacucagagcuu

SEQ ID NO: 688291 - RNA, 22 nt, Human
uaguauaucuuuaguacauagu

SEQ ID NO: 688292 - RNA, 22 nt, Human
uuccugggccuuaaaucuuuug

SEQ ID NO: 688293 - RNA, 22 nt, Human
cacaguuugguauagaagugau

SEQ ID NO: 688294 - RNA, 22 nt, Human
ugugccagaauguuuuuauaca

SEQ ID NO: 688295 - RNA, 22 nt, Human
aggagaguucacacuggucaga

SEQ ID NO: 688296 - RNA, 22 nt, Human
ggguaaaggucgcccucaaggu

SEQ ID NO: 688297 - RNA, 22 nt, Human
gccugggauagaggcaaugcau

SEQ ID NO: 688298 - RNA, 22 nt, Human
acaauauaguccaugagcaugc

SEQ ID NO: 688299 - RNA, 20 nt, Human
auucacaaagccaguguugc

SEQ ID NO: 688300 - RNA, 22 nt, Human
acugcugagcacacaagagugu

SEQ ID NO: 688301 - RNA, 22 nt, Human
augugacaauauuuggucuuau

SEQ ID NO: 688302 - RNA, 22 nt, Human
cuuggcuccaaucccagcucug

SEQ ID NO: 688303 - RNA, 22 nt, Human
uguccccuuuaccuccgcagcc

SEQ ID NO: 688304 - RNA, 22 nt, Human
uuccagaaaucuuucagcucaa

SEQ ID NO: 688305 - RNA, 22 nt, Human
caggaaagagagcuauucacuu

SEQ ID NO: 688306 - RNA, 22 nt, Human
ccaggagaagcaucugagugua

SEQ ID NO: 688307 - RNA, 22 nt, Human
uccagcucuggcuuggcuagcu

SEQ ID NO: 688308 - RNA, 22 nt, Human
uugcucuguccagccagcaggu

SEQ ID NO: 688309 - RNA, 22 nt, Human
acagcagaccccagugccaugg

SEQ ID NO: 688310 - RNA, 22 nt, Human
cuggcacacaguaggcaccaau

SEQ ID NO: 688311 - RNA, 22 nt, Human
ccuuggcuugcacacggccacc

SEQ ID NO: 688312 - RNA, 22 nt, Human
auguucuuccaaaucuguaaca

SEQ ID NO: 688313 - RNA, 22 nt, Human
aaagauucgagcgauguauaaa

SEQ ID NO: 688314 - RNA, 22 nt, Human
uaaucacugggcguuugguacu

SEQ ID NO: 688315 - RNA, 22 nt, Human
ucacuuaaaaauucuaguuaug

SEQ ID NO: 688316 - RNA, 22 nt, Human
uuuauauguuuguacaauuaag

SEQ ID NO: 688317 - RNA, 22 nt, Human
ugagcccagaagcccacucggc

SEQ ID NO: 688318 - RNA, 22 nt, Human
aaagacauggcaagagaugggg

SEQ ID NO: 688319 - RNA, 22 nt, Human
uugccuagaguugcacaucugg

SEQ ID NO: 688320 - RNA, 22 nt, Human
guuaaggcugagcaggacacug

SEQ ID NO: 688321 - RNA, 22 nt, Human
acagugaaugagaauggagaaa

SEQ ID NO: 688322 - RNA, 22 nt, Human
gugcagacccacguccagggcc

SEQ ID NO: 688323 - RNA, 22 nt, Human
uccagucucuacucugagauaa

SEQ ID NO: 688324 - RNA, 22 nt, Human
cugcgugcaugucugcgugcau

SEQ ID NO: 688325 - RNA, 22 nt, Human
cugucuccgcccucuugguagg

SEQ ID NO: 688326 - RNA, 22 nt, Human
caaagucccagcugcuuagaga

SEQ ID NO: 688327 - RNA, 21 nt, Human
uacuguauagauguguucuug

SEQ ID NO: 688328 - RNA, 18 nt, Human
gagcugagaagaggaugc

SEQ ID NO: 688329 - RNA, 22 nt, Human
ucucugagaaguuccuuuguga

SEQ ID NO: 688330 - RNA, 22 nt, Human
ccccagccagcuuguaguagaa

SEQ ID NO: 688331 - RNA, 22 nt, Human
ccagagggcaaaaugaagcuua

SEQ ID NO: 688332 - RNA, 22 nt, Human
ucaggagcagggucuguuacca

SEQ ID NO: 688333 - RNA, 21 nt, Human
uagcagaaacaguucaggcca

SEQ ID NO: 688334 - RNA, 22 nt, Human
gagaggcugcauaugcacacug

SEQ ID NO: 688335 - RNA, 22 nt, Human
ugguuucuggguuugucuagga

SEQ ID NO: 688336 - RNA, 22 nt, Human
acuaaauuugucaaugacacuu

SEQ ID NO: 688337 - RNA, 22 nt, Human
uggccagccauaaaagaaccca

SEQ ID NO: 688338 - RNA, 22 nt, Human
caggugggcugccucuccagcu

SEQ ID NO: 688339 - RNA, 22 nt, Human
ugguuccucagggcagcuguac

SEQ ID NO: 688340 - RNA, 22 nt, Human
ggaaaugguggaggaaggcuua

SEQ ID NO: 688341 - RNA, 22 nt, Human
agcagaacauuuucagggcugu

SEQ ID NO: 688342 - RNA, 22 nt, Human
agguaaaaugagucuccauuau

SEQ ID NO: 688343 - RNA, 22 nt, Human
ucuugagaaauaauuaaacaug

SEQ ID NO: 688344 - RNA, 22 nt, Human
gaggcagcaugguaccuuggag

SEQ ID NO: 688345 - RNA, 23 nt, Human
gcucacagaauguugaagggaau

SEQ ID NO: 688346 - RNA, 22 nt, Human
agucccuggauugucucuguca

SEQ ID NO: 688347 - RNA, 22 nt, Human
agugucugaucaguugacuaga

SEQ ID NO: 688348 - RNA, 22 nt, Human
gaggccagggaugcaaugagag

SEQ ID NO: 688349 - RNA, 22 nt, Human
auucuucaccauggauaauuug

SEQ ID NO: 688350 - RNA, 22 nt, Human
cucuucuguaccucggccucca

SEQ ID NO: 688351 - RNA, 22 nt, Human
ucaguaaaguucuuucuugcug

SEQ ID NO: 688352 - RNA, 22 nt, Human
acaugucuaaguacucaacaaa

SEQ ID NO: 688353 - RNA, 22 nt, Human
gaguuuauucaggaaauagcca

SEQ ID NO: 688354 - RNA, 22 nt, Human
ucuuuaauguacuuucuuucac

SEQ ID NO: 688355 - RNA, 22 nt, Human
aauucccauuugcagaaaauca

SEQ ID NO: 688356 - RNA, 22 nt, Human
ugaggcuuggagaggucaggga

SEQ ID NO: 688357 - RNA, 22 nt, Human
agaaggcuggccauggugcccu

SEQ ID NO: 688358 - RNA, 22 nt, Human
ugcugaggcuagaccuggaagu

SEQ ID NO: 688359 - RNA, 22 nt, Human
aagcuuccugaaugcucauuua

SEQ ID NO: 688360 - RNA, 22 nt, Human
aggaauuugagugcuguaggaa

SEQ ID NO: 688361 - RNA, 22 nt, Human
cagucuuagaggugacugugga

SEQ ID NO: 688362 - RNA, 22 nt, Human
cacacuugugaccgauauaaug

SEQ ID NO: 688363 - RNA, 22 nt, Human
gugaggggucuggacgcacagu

SEQ ID NO: 688364 - RNA, 22 nt, Human
uaaaaguauacuuucaaaggag

SEQ ID NO: 688365 - RNA, 18 nt, Human
uaaaggaagugggagagg

SEQ ID NO: 688366 - RNA, 22 nt, Human
gcaguaguuuauggcuaaaccu

SEQ ID NO: 688367 - RNA, 22 nt, Human
uuuacagcuucuauacuaugug

SEQ ID NO: 688368 - RNA, 22 nt, Human
gccacagggcagaugcgcagag

SEQ ID NO: 688369 - RNA, 22 nt, Human
augacaaauucagaccauagca

SEQ ID NO: 688370 - RNA, 19 nt, Human
agcugggcuuacucacucg

SEQ ID NO: 688371 - RNA, 22 nt, Human
gggaaggcaggccucuguugga

SEQ ID NO: 688372 - RNA, 20 nt, Human
uuuauuggccuuucaggaac

SEQ ID NO: 688373 - RNA, 22 nt, Human
auacaguguacuauuuagcagu

SEQ ID NO: 688374 - RNA, 22 nt, Human
ccaggguuggucucucugaggu

SEQ ID NO: 688375 - RNA, 22 nt, Human
aaggugaaacuggaagcuggcc

SEQ ID NO: 688376 - RNA, 22 nt, Human
gaaaugauuuuaguuuaucaug

SEQ ID NO: 688377 - RNA, 20 nt, Human
cccagggguuguggugagga

SEQ ID NO: 688378 - RNA, 22 nt, Human
aucugaagaggucauggcugac

SEQ ID NO: 688379 - RNA, 22 nt, Human
cagcucugccaucaucugccuu

SEQ ID NO: 688380 - RNA, 22 nt, Human
acagcugacauuggcagcuauu

SEQ ID NO: 688381 - RNA, 22 nt, Human
aggaccugacuggcuccugcuu

SEQ ID NO: 688382 - RNA, 22 nt, Human
cggggcuguagcacagcugagc

SEQ ID NO: 688383 - RNA, 22 nt, Human
guauauaucggcacuauuuuaa

SEQ ID NO: 688384 - RNA, 22 nt, Human
ccaggcacucacggggcacugg

SEQ ID NO: 688385 - RNA, 22 nt, Human
uugaaagggauauaucuuucug

SEQ ID NO: 688386 - RNA, 22 nt, Human
auuaauaaaauaccacuuuguu

SEQ ID NO: 688387 - RNA, 22 nt, Human
guggacagcuucuaggugccag

SEQ ID NO: 688388 - RNA, 22 nt, Human
aagaguuucuuacuggcaucua

SEQ ID NO: 688389 - RNA, 23 nt, Human
acagggcauugcuggccucgagg

SEQ ID NO: 688390 - RNA, 22 nt, Human
ucuuucuuaaauagguggauug

SEQ ID NO: 688391 - RNA, 22 nt, Human
uucuccaagguucauauuuauc

SEQ ID NO: 688392 - RNA, 22 nt, Human
ucacaguucaacuaguucagau

SEQ ID NO: 688393 - RNA, 22 nt, Human
ccuucauugcaucuuuaagaga

SEQ ID NO: 688394 - RNA, 22 nt, Human
uggcugagugauauuugcaaag

SEQ ID NO: 688395 - RNA, 22 nt, Human
uguacacacacguguguaucua

SEQ ID NO: 688396 - RNA, 22 nt, Human
ugagccugguugcagugucugg

SEQ ID NO: 688397 - RNA, 19 nt, Human
cagguggcgcucuacaggg

SEQ ID NO: 688398 - RNA, 22 nt, Human
acacauguuuguguagucaguu

SEQ ID NO: 688399 - RNA, 22 nt, Human
cucuccagucauauucucaguc

SEQ ID NO: 688400 - RNA, 22 nt, Human
cugccccaccccaaccugaggu

SEQ ID NO: 688401 - RNA, 22 nt, Human
gguccaggaucaaggcaucacc

SEQ ID NO: 688402 - RNA, 22 nt, Human
ucagggaccaccacucacccag

SEQ ID NO: 688403 - RNA, 22 nt, Human
cuggaguuagaguagacacuga

SEQ ID NO: 688404 - RNA, 22 nt, Human
auguuuccauagaagucacagu

SEQ ID NO: 688405 - RNA, 22 nt, Human
uagcagcaauuucagaaguuug

SEQ ID NO: 688406 - RNA, 22 nt, Human
ucaccuuagcuagaggaagaga

SEQ ID NO: 688407 - RNA, 22 nt, Human
cuguaguugggcauuauaauag

SEQ ID NO: 688408 - RNA, 22 nt, Human
ggggcuuuugcacgugggaggc

SEQ ID NO: 688409 - RNA, 22 nt, Human
caggcacagaguuauucauuua

SEQ ID NO: 688410 - RNA, 22 nt, Human
augaggcacaucacagccaaug

SEQ ID NO: 688411 - RNA, 22 nt, Human
gcacccagggacuuggcuggcc

SEQ ID NO: 688412 - RNA, 22 nt, Human
uggcuuccuggacagaugcggu

SEQ ID NO: 688413 - RNA, 19 nt, Human
agagauccagcuucuagcu

SEQ ID NO: 688414 - RNA, 22 nt, Human
aaaucagacacagugaaaguua

SEQ ID NO: 688415 - RNA, 22 nt, Human
ucugcgccgcauguguucuuuc

SEQ ID NO: 688416 - RNA, 22 nt, Human
uuagaaagcuuuccauagucaa

SEQ ID NO: 688417 - RNA, 22 nt, Human
gcccugagggucuggguuccca

SEQ ID NO: 688418 - RNA, 22 nt, Human
uauggaaauaauuagacaagug

SEQ ID NO: 688419 - RNA, 22 nt, Human
gcuggccuucugcagaguucug

SEQ ID NO: 688420 - RNA, 22 nt, Human
gaggggcaaugagggaaagagu

SEQ ID NO: 688421 - RNA, 22 nt, Human
aagaagcaugagaagauuuuau

SEQ ID NO: 688422 - RNA, 22 nt, Human
ccuguguggaaggcaggaggcc

SEQ ID NO: 688423 - RNA, 22 nt, Human
ucacaguauaaccucauauagg

SEQ ID NO: 688424 - RNA, 22 nt, Human
uuagaauuauuguuuccuucua

SEQ ID NO: 688425 - RNA, 20 nt, Human
uaacaguaagugauguuaca

SEQ ID NO: 688426 - RNA, 22 nt, Human
uucaaaauuguucuaagcucug

SEQ ID NO: 688427 - RNA, 19 nt, Human
ugugacugguugucucgcu

SEQ ID NO: 688428 - RNA, 22 nt, Human
caggauggucuucauuuggcuc

SEQ ID NO: 688429 - RNA, 21 nt, Human
augcaucuaucuucuacucca

SEQ ID NO: 688430 - RNA, 22 nt, Human
agcacugcuuuagagccucugc

SEQ ID NO: 688431 - RNA, 22 nt, Human
uccuugagaggacagagccaua

SEQ ID NO: 688432 - RNA, 22 nt, Human
cagcuucuccggccuggugcgg

SEQ ID NO: 688433 - RNA, 22 nt, Human
uugaaaguuaucuagauucuga

SEQ ID NO: 688434 - RNA, 20 nt, Human
cacaggcuauaugagagcca

SEQ ID NO: 688435 - RNA, 17 nt, Human
cugggccucugcccuuu

SEQ ID NO: 688436 - RNA, 22 nt, Human
cuacagaagaaacuaucacuau

SEQ ID NO: 688437 - RNA, 22 nt, Human
acauuucacuguucacagcagg

SEQ ID NO: 688438 - RNA, 20 nt, Human
cugggcugcccagcuauggg

SEQ ID NO: 688439 - RNA, 22 nt, Human
ugcaaacacuucaacgugcauc

SEQ ID NO: 688440 - RNA, 22 nt, Human
auucaaaguacuagcuauuuuu

SEQ ID NO: 688441 - RNA, 20 nt, Human
cccuggagagaagcuccacg

SEQ ID NO: 688442 - RNA, 22 nt, Human
cugccagggaggcugggaaguu

SEQ ID NO: 688443 - RNA, 22 nt, Human
cugaggugaugucaaauggguu

SEQ ID NO: 688444 - RNA, 21 nt, Human
aaaaugugagcgugaugcuua

SEQ ID NO: 688445 - RNA, 22 nt, Human
accagggcugggauaggucagg

SEQ ID NO: 688446 - RNA, 22 nt, Human
gcccugggauuggguggaggcu

SEQ ID NO: 688447 - RNA, 22 nt, Human
ugugcuucucuuucucacuuaa

SEQ ID NO: 688448 - RNA, 22 nt, Human
uggcuuccccuaccuuccaauu

SEQ ID NO: 688449 - RNA, 22 nt, Human
gcuggcucaagugugcuuccca

SEQ ID NO: 688450 - RNA, 21 nt, Human
gagacagacuuucguccccug

SEQ ID NO: 688451 - RNA, 22 nt, Human
uggaacaauucuugaagggaau

SEQ ID NO: 688452 - RNA, 22 nt, Human
caguagacacauuaauauggaa

SEQ ID NO: 688453 - RNA, 22 nt, Human
gauggucuuugucucugauaag

SEQ ID NO: 688454 - RNA, 22 nt, Human
ggugaggggagagugaaagaaa

SEQ ID NO: 688455 - RNA, 22 nt, Human
ugcaggaaucagaggggaagcg

SEQ ID NO: 688456 - RNA, 22 nt, Human
ucacuugacccuucucuagccu

SEQ ID NO: 688457 - RNA, 22 nt, Human
gcacacagaacauuuggauccu

SEQ ID NO: 688458 - RNA, 22 nt, Human
agggcuggcaagggauugaaau

SEQ ID NO: 688459 - RNA, 22 nt, Human
acugcaucugaacugugaaugg

SEQ ID NO: 688460 - RNA, 22 nt, Human
uuuaauguauucuuuggaacca

SEQ ID NO: 688461 - RNA, 22 nt, Human
uuaacauuguccuuagcagauu

SEQ ID NO: 688462 - RNA, 17 nt, Human
aaaauucuguaaagagg

SEQ ID NO: 688463 - RNA, 22 nt, Human
cugcagcuccucucugugcccc

SEQ ID NO: 688464 - RNA, 22 nt, Human
acaguguuacuugauaguguau

SEQ ID NO: 688465 - RNA, 23 nt, Human
cuuuuaacuagaguaucagcugc

SEQ ID NO: 688466 - RNA, 22 nt, Human
caggucuuuguugcagcaugga

SEQ ID NO: 688467 - RNA, 22 nt, Human
gauacagcucuggccagaugug

SEQ ID NO: 688468 - RNA, 22 nt, Human
ucauccaugucagagcauguau

SEQ ID NO: 688469 - RNA, 22 nt, Human
uagagcaguguuguccaucaga

SEQ ID NO: 688470 - RNA, 22 nt, Human
gagaccaggaaguacagcagcc

SEQ ID NO: 688471 - RNA, 22 nt, Human
gagcacagauccuggagccaca

SEQ ID NO: 688472 - RNA, 22 nt, Human
ucagcaaaggaccagcacaggc

SEQ ID NO: 688473 - RNA, 22 nt, Human
augcuccucgagugucucacag

SEQ ID NO: 688474 - RNA, 22 nt, Human
ggguggagagaaagaaacguga

SEQ ID NO: 688475 - RNA, 22 nt, Human
ucaguccucucuggguuucuua

SEQ ID NO: 688476 - RNA, 22 nt, Human
aagggugcaaagcacucuagcu

SEQ ID NO: 688477 - RNA, 22 nt, Human
aguagcaauggcucugagcuau

SEQ ID NO: 688478 - RNA, 22 nt, Human
gaggaaggagggaaagcgcgcg

SEQ ID NO: 688479 - RNA, 21 nt, Human
auggaaauuggcaaaugcuac

SEQ ID NO: 688480 - RNA, 22 nt, Human
agcagacucuucuccuggggcu

SEQ ID NO: 688481 - RNA, 22 nt, Human
gagcuggucaguuucagggcca

SEQ ID NO: 688482 - RNA, 22 nt, Human
uggagcccagacacuggcauug

SEQ ID NO: 688483 - RNA, 22 nt, Human
aauagauucaugguuaagagca

SEQ ID NO: 688484 - RNA, 22 nt, Human
cagagguauugcaaaagccuag

SEQ ID NO: 688485 - RNA, 22 nt, Human
aggauggaauuagguagcaagu

SEQ ID NO: 688486 - RNA, 22 nt, Human
gcuuggcucuaagacaccuauu

SEQ ID NO: 688487 - RNA, 22 nt, Human
agagcuccgugccuggcugcca

SEQ ID NO: 688488 - RNA, 22 nt, Human
auaucacaguaguuguuuaguu

SEQ ID NO: 688489 - RNA, 22 nt, Human
uaccagcaucacagcauguugg

SEQ ID NO: 688490 - RNA, 22 nt, Human
ugcaggcucaucucaagaguag

SEQ ID NO: 688491 - RNA, 22 nt, Human
gcugagguggcugccuuaguaa

SEQ ID NO: 688492 - RNA, 22 nt, Human
auguuauuaaaguacagauucu

SEQ ID NO: 688493 - RNA, 22 nt, Human
gcugggugucacggggcucgug

SEQ ID NO: 688494 - RNA, 22 nt, Human
ccuuggaggacugcugcuucuu

SEQ ID NO: 688495 - RNA, 22 nt, Human
agcugugccuauucguggcaag

SEQ ID NO: 688496 - RNA, 22 nt, Human
ccagaggcagacuuacacucca

SEQ ID NO: 688497 - RNA, 22 nt, Human
gggaggaaaugugcagcgaauu

SEQ ID NO: 688498 - RNA, 22 nt, Human
ugagacagucccaugaucugca

SEQ ID NO: 688499 - RNA, 22 nt, Human
cugaggccuggugaggugguga

SEQ ID NO: 688500 - RNA, 22 nt, Human
ugacaauacagagagagcaaaa

SEQ ID NO: 688501 - RNA, 19 nt, Human
uccaggcugagagucagcu

SEQ ID NO: 688502 - RNA, 22 nt, Human
augugugguuuguaaaugauuu

SEQ ID NO: 688503 - RNA, 22 nt, Human
cuuccucuguggccagagugua

SEQ ID NO: 688504 - RNA, 22 nt, Human
aaggcaggagcuguaucuuauu

SEQ ID NO: 688505 - RNA, 22 nt, Human
uucuguuugccauauauaguag

SEQ ID NO: 688506 - RNA, 22 nt, Human
gcuuagcagucacacauuguuc

SEQ ID NO: 688507 - RNA, 22 nt, Human
gggggccagucaucucccaaga

SEQ ID NO: 688508 - RNA, 17 nt, Human
guccuacccauggucua

SEQ ID NO: 688509 - RNA, 22 nt, Human
ugcauggaggaagaugaaugca

SEQ ID NO: 688510 - RNA, 22 nt, Human
gucugccugggacgcugggagu

SEQ ID NO: 688511 - RNA, 22 nt, Human
ugucucuucccacucagacccc

SEQ ID NO: 688512 - RNA, 22 nt, Human
uguguguauaauaaugucugca

SEQ ID NO: 688513 - RNA, 20 nt, Human
aggcagcugggaaaugaggg

SEQ ID NO: 688514 - RNA, 22 nt, Human
aauucagagacucauucuggag

SEQ ID NO: 688515 - RNA, 17 nt, Human
ggaacaaauacuaugca

SEQ ID NO: 688516 - RNA, 23 nt, Human
uccaggcugggacuucaacuggc

SEQ ID NO: 688517 - RNA, 22 nt, Human
aaagcagagguugcagugagcu

SEQ ID NO: 688518 - RNA, 22 nt, Human
aaggaacucuagagccuugaac

SEQ ID NO: 688519 - RNA, 22 nt, Human
accagcauccuuccuauuaaca

SEQ ID NO: 688520 - RNA, 22 nt, Human
ugcaauaacuacuuuaauguug

SEQ ID NO: 688521 - RNA, 21 nt, Human
cccaggugggaugguugccuc

SEQ ID NO: 688522 - RNA, 22 nt, Human
uaaaaugcacagcaguugaaag

SEQ ID NO: 688523 - RNA, 22 nt, Human
ccacccagccagaugcaggaag

SEQ ID NO: 688524 - RNA, 19 nt, Human
uaagguuuaccagcaaaau

SEQ ID NO: 688525 - RNA, 22 nt, Human
gugaccaucaucucagcuaguu

SEQ ID NO: 688526 - RNA, 22 nt, Human
cggggacacacuggcagcuccu

SEQ ID NO: 688527 - RNA, 22 nt, Human
aucagcaagcaugguuaggugu

SEQ ID NO: 688528 - RNA, 22 nt, Human
agaaucaaggugaagcccacag

SEQ ID NO: 688529 - RNA, 22 nt, Human
cuugagguuuugacucagcuuu

SEQ ID NO: 688530 - RNA, 22 nt, Human
agcagucauuuuaggucaugca

SEQ ID NO: 688531 - RNA, 22 nt, Human
uuucucuuaaugucucugugcu

SEQ ID NO: 688532 - RNA, 22 nt, Human
uacaguagaaucuuauagccca

SEQ ID NO: 688533 - RNA, 22 nt, Human
acaugaaguggucagaucaaac

SEQ ID NO: 688534 - RNA, 22 nt, Human
aggauuugaaauauuuaguaaa

SEQ ID NO: 688535 - RNA, 22 nt, Human
cucaaguaagaaacagaauugg

SEQ ID NO: 688536 - RNA, 22 nt, Human
uaccaguaauaguaugugagau

SEQ ID NO: 688537 - RNA, 22 nt, Human
cauaaaauggcuuguucuuuaa

SEQ ID NO: 688538 - RNA, 23 nt, Human
cucccuggaguuucuggaagaug

SEQ ID NO: 688539 - RNA, 22 nt, Human
gcagaugcugcuccucucuaga

SEQ ID NO: 688540 - RNA, 22 nt, Human
aagagccagugggaaagucuug

SEQ ID NO: 688541 - RNA, 22 nt, Human
uugaggucaaguaaccacugga

SEQ ID NO: 688542 - RNA, 22 nt, Human
caaggcuaagcuuuggcuuucu

SEQ ID NO: 688543 - RNA, 22 nt, Human
ucuucauguauuugacaaccau

SEQ ID NO: 688544 - RNA, 22 nt, Human
agcuuugggccacuggcuggau

SEQ ID NO: 688545 - RNA, 22 nt, Human
cagaucaagcuguauggucaga

SEQ ID NO: 688546 - RNA, 22 nt, Human
ucucaggagccacagcgggagu

SEQ ID NO: 688547 - RNA, 22 nt, Human
aaauuauucucauguguuucuu

SEQ ID NO: 688548 - RNA, 22 nt, Human
ccugaggcuccaccuccagaga

SEQ ID NO: 688549 - RNA, 22 nt, Human
uacaugaccuagacuugcuaaa

SEQ ID NO: 688550 - RNA, 22 nt, Human
gaagaaauugaauucaugagcu

SEQ ID NO: 688551 - RNA, 23 nt, Human
aaaugcagggucgcagguuacag

SEQ ID NO: 688552 - RNA, 22 nt, Human
uccgggggugguagauuuccuu

SEQ ID NO: 688553 - RNA, 23 nt, Human
uuacuuuugcaccaaccuaauau

SEQ ID NO: 688554 - RNA, 22 nt, Human
aacauuuguuucguuaugugaa

SEQ ID NO: 688555 - RNA, 22 nt, Human
aggaccuguagggccugcaucc

SEQ ID NO: 688556 - RNA, 22 nt, Human
caggcacagugggguccucucu

SEQ ID NO: 688557 - RNA, 22 nt, Human
cagcuucuguuuauugugugcc

SEQ ID NO: 688558 - RNA, 22 nt, Human
caucacuguccaaaguucaguu

SEQ ID NO: 688559 - RNA, 22 nt, Human
cagcuccagccgacuguaagaa

SEQ ID NO: 688560 - RNA, 20 nt, Human
uuuauugagcacguacugug

SEQ ID NO: 688561 - RNA, 22 nt, Human
acaggccucccauccggagccc

SEQ ID NO: 688562 - RNA, 22 nt, Human
ccacccaugugacuaccucaug

SEQ ID NO: 688563 - RNA, 22 nt, Human
uggagugaaguaaagaggacaa

SEQ ID NO: 688564 - RNA, 22 nt, Human
ucagaggaaaggucagauggcu

SEQ ID NO: 688565 - RNA, 22 nt, Human
gacauguauuagucaugcacag

SEQ ID NO: 688566 - RNA, 22 nt, Human
cgcaggugaaagaggcugggca

SEQ ID NO: 688567 - RNA, 22 nt, Human
aagagauguggaaucauuuaca

SEQ ID NO: 688568 - RNA, 22 nt, Human
ccauguacaugaacacggcggc

SEQ ID NO: 688569 - RNA, 22 nt, Human
ucuucacaaagcuguuguuaaa

SEQ ID NO: 688570 - RNA, 22 nt, Human
ucuuaaaaguaugccaauugga

SEQ ID NO: 688571 - RNA, 22 nt, Human
auccaugauuaguaggauaaag

SEQ ID NO: 688572 - RNA, 22 nt, Human
ccugcuccugcuauucuucugg

SEQ ID NO: 688573 - RNA, 22 nt, Human
cagugucugguuggcucuacgu

SEQ ID NO: 688574 - RNA, 22 nt, Human
ccugggcucugucagaauuggg

SEQ ID NO: 688575 - RNA, 22 nt, Human
uuccaggggcagcagugauggu

SEQ ID NO: 688576 - RNA, 22 nt, Human
ucaagcaaguguuugguguaaa

SEQ ID NO: 688577 - RNA, 22 nt, Human
ccauggcuucuuucucugccag

SEQ ID NO: 688578 - RNA, 22 nt, Human
cucagccugugaagagcagagg

SEQ ID NO: 688579 - RNA, 22 nt, Human
agccagcaggugagugcagccu

SEQ ID NO: 688580 - RNA, 22 nt, Human
augcuuuggccaaugagaagug

SEQ ID NO: 688581 - RNA, 22 nt, Human
caggcacucagucuggaucccu

SEQ ID NO: 688582 - RNA, 22 nt, Human
ugucccaguuuugcagguuaga

SEQ ID NO: 688583 - RNA, 22 nt, Human
ggugcaggcgguggggcaagua

SEQ ID NO: 688584 - RNA, 22 nt, Human
uuucaucuaacacuacauaggg

SEQ ID NO: 688585 - RNA, 22 nt, Human
uuguacauucuauggguuugga

SEQ ID NO: 688586 - RNA, 22 nt, Human
acacuuguggccuuucuaguaa

SEQ ID NO: 688587 - RNA, 22 nt, Human
cugugggcgccugucagccuca

SEQ ID NO: 688588 - RNA, 23 nt, Human
gaacauucauugguugcuuuaga

SEQ ID NO: 688589 - RNA, 22 nt, Human
ggugcccagcaagcuuucaaug

SEQ ID NO: 688590 - RNA, 22 nt, Human
cuaguaaaucagaagcuguggg

SEQ ID NO: 688591 - RNA, 22 nt, Human
ucacacgugagguucuauccug

SEQ ID NO: 688592 - RNA, 22 nt, Human
cuucagcagccucuugcauaaa

SEQ ID NO: 688593 - RNA, 22 nt, Human
uggucaaauuuagucucuggaa

SEQ ID NO: 688594 - RNA, 18 nt, Human
acacacacaccuguguau

SEQ ID NO: 688595 - RNA, 22 nt, Human
aaggcccuggcaggaagcagga

SEQ ID NO: 688596 - RNA, 22 nt, Human
uggagguggaguuggaaacuga

SEQ ID NO: 688597 - RNA, 22 nt, Human
gguggggagucaggcauucuug

SEQ ID NO: 688598 - RNA, 22 nt, Human
aggccugaaggaagaugagcug

SEQ ID NO: 688599 - RNA, 22 nt, Human
acauuucuuugcuagacagcag

SEQ ID NO: 688600 - RNA, 22 nt, Human
ugaguaauaaacugucuugcuc

SEQ ID NO: 688601 - RNA, 20 nt, Human
ggcagcaggaguuuccucuu

SEQ ID NO: 688602 - RNA, 22 nt, Human
uuacacguguguguaucuguau

SEQ ID NO: 688603 - RNA, 22 nt, Human
gccucuggggcagcugagucau

SEQ ID NO: 688604 - RNA, 20 nt, Human
agcuacaaugcgaagcuggc

SEQ ID NO: 688605 - RNA, 22 nt, Human
aguggcaggaaaguggaagaga

SEQ ID NO: 688606 - RNA, 22 nt, Human
uuggccagugaaccaggccugg

SEQ ID NO: 688607 - RNA, 23 nt, Human
uuucauguuggcaugacugacuu

SEQ ID NO: 688608 - RNA, 22 nt, Human
gcucagugaaacaucaaauagu

SEQ ID NO: 688609 - RNA, 22 nt, Human
uguaugaagccagaaucuguuu

SEQ ID NO: 688610 - RNA, 22 nt, Human
ccacaggacaguuaaugugcag

SEQ ID NO: 688611 - RNA, 22 nt, Human
agccugugagggaugcugcagu

SEQ ID NO: 688612 - RNA, 22 nt, Human
ccagcagagggcgcuucacacc

SEQ ID NO: 688613 - RNA, 22 nt, Human
uguucaaguggauguggcuuuu

SEQ ID NO: 688614 - RNA, 22 nt, Human
ccaguguguuuaaugcauucca

SEQ ID NO: 688615 - RNA, 22 nt, Human
aauucagagacaugaagugaca

SEQ ID NO: 688616 - RNA, 22 nt, Human
cauuuagagaguaaaaauuagc

SEQ ID NO: 688617 - RNA, 22 nt, Human
aggaaaaauaaggcagcagggc

SEQ ID NO: 688618 - RNA, 22 nt, Human
acugcacagucccagaggaugc

SEQ ID NO: 688619 - RNA, 20 nt, Human
cuuuggcaaugagaacaggg

SEQ ID NO: 688620 - RNA, 22 nt, Human
acauucucuccaugucuucuuu

SEQ ID NO: 688621 - RNA, 22 nt, Human
gagagagaggugcugccaggca

SEQ ID NO: 688622 - RNA, 20 nt, Human
gaggcugcggacugcuggac

SEQ ID NO: 688623 - RNA, 19 nt, Human
accaggccucagaggcccu

SEQ ID NO: 688624 - RNA, 22 nt, Human
acucuuauucccucagaaauau

SEQ ID NO: 688625 - RNA, 22 nt, Human
acaaguucugggaauuaggaca

SEQ ID NO: 688626 - RNA, 22 nt, Human
guacaagaggagaaaauggagu

SEQ ID NO: 688627 - RNA, 22 nt, Human
ugcaaauacaaaaugguacagc

SEQ ID NO: 688628 - RNA, 22 nt, Human
agcagcauguaugagggugaac

SEQ ID NO: 688629 - RNA, 21 nt, Human
aggagcuguguuagcuggucg

SEQ ID NO: 688630 - RNA, 22 nt, Human
agucacaggguacacaaggauu

SEQ ID NO: 688631 - RNA, 22 nt, Human
uucuauaugacuucuaggcagg

SEQ ID NO: 688632 - RNA, 22 nt, Human
gccuggugugcgccgcgcagcu

SEQ ID NO: 688633 - RNA, 22 nt, Human
agggagguaggagcuucuagcu

SEQ ID NO: 688634 - RNA, 22 nt, Human
cccagagaucuuguccuuucca

SEQ ID NO: 688635 - RNA, 22 nt, Human
acaugugcucuugcuguacagc

SEQ ID NO: 688636 - RNA, 22 nt, Human
cagacacagauaugcauauggc

SEQ ID NO: 688637 - RNA, 22 nt, Human
acuguuacagagcaggaaauug

SEQ ID NO: 688638 - RNA, 20 nt, Human
caggcuccgcaggacuaggg

SEQ ID NO: 688639 - RNA, 22 nt, Human
cagugucaggaucaguauauuu

SEQ ID NO: 688640 - RNA, 22 nt, Human
auugagaaaauucgagcaaguu

SEQ ID NO: 688641 - RNA, 22 nt, Human
uggguuaaaaguugaaugaauu

SEQ ID NO: 688642 - RNA, 22 nt, Human
ucccugcuuggaaugacccuua

SEQ ID NO: 688643 - RNA, 22 nt, Human
acaguguugaggugcuuguuuc

SEQ ID NO: 688644 - RNA, 22 nt, Human
gaggagggagcuggaagcucuu

SEQ ID NO: 688645 - RNA, 22 nt, Human
aucuguuguuuuucaccaccca

SEQ ID NO: 688646 - RNA, 22 nt, Human
caccagacagguguaugcauau

SEQ ID NO: 688647 - RNA, 22 nt, Human
acagcucugggugcaggaggug

SEQ ID NO: 688648 - RNA, 22 nt, Human
agucuauuuuugguucuucggg

SEQ ID NO: 688649 - RNA, 22 nt, Human
gauuuauugucccuguccugcu

SEQ ID NO: 688650 - RNA, 22 nt, Human
ugaaggagaauuaauaggcauu

SEQ ID NO: 688651 - RNA, 22 nt, Human
uccugccauuugcuuuuucucc

SEQ ID NO: 688652 - RNA, 22 nt, Human
uccccaccuacacacugcuccu

SEQ ID NO: 688653 - RNA, 22 nt, Human
aaaaaaucagaucuuugguuaa

SEQ ID NO: 688654 - RNA, 22 nt, Human
uacagugucccuuuuucagaca

SEQ ID NO: 688655 - RNA, 22 nt, Human
aguggaccagaagacugaagcu

SEQ ID NO: 688656 - RNA, 22 nt, Human
cuguggcugaguuccuuauguu

SEQ ID NO: 688657 - RNA, 22 nt, Human
cagcagcaaggugaggguggag

SEQ ID NO: 688658 - RNA, 22 nt, Human
cugacucugacaggacuugugg

SEQ ID NO: 688659 - RNA, 22 nt, Human
acgggcagacagagcuacucgc

SEQ ID NO: 688660 - RNA, 22 nt, Human
cacaggccaguaagacuguguu

SEQ ID NO: 688661 - RNA, 22 nt, Human
caucauauauuucuacaagugc

SEQ ID NO: 688662 - RNA, 23 nt, Human
ucucaagccagaccaggccucgc

SEQ ID NO: 688663 - RNA, 22 nt, Human
uuguuuaaaauguagcaagaaa

SEQ ID NO: 688664 - RNA, 22 nt, Human
uuauguaauuuguuugcucuuc

SEQ ID NO: 688665 - RNA, 22 nt, Human
aggaaaaaagucugugauuaua

SEQ ID NO: 688666 - RNA, 22 nt, Human
ugucacaaggccaugaaaagaa

SEQ ID NO: 688667 - RNA, 22 nt, Human
aaguuucauguggagguagacu

SEQ ID NO: 688668 - RNA, 22 nt, Human
acaauggcaugcuagcaaaugg

SEQ ID NO: 688669 - RNA, 22 nt, Human
cagcagugcuucagugugagau

SEQ ID NO: 688670 - RNA, 22 nt, Human
ggcuuaagaugguagcuuugag

SEQ ID NO: 688671 - RNA, 22 nt, Human
ucuccuggcauuugguugagua

SEQ ID NO: 688672 - RNA, 22 nt, Human
gcuggcuuuguggucucuccuc

SEQ ID NO: 688673 - RNA, 23 nt, Human
aucucucuuuauucuuggggaua

SEQ ID NO: 688674 - RNA, 22 nt, Human
acaaggagagcacacaugggga

SEQ ID NO: 688675 - RNA, 22 nt, Human
ugcucauugcugauuuacaugu

SEQ ID NO: 688676 - RNA, 22 nt, Human
auaaagcuaagacuuacaugaa

SEQ ID NO: 688677 - RNA, 22 nt, Human
ggauccagaggugaagauggga

SEQ ID NO: 688678 - RNA, 22 nt, Human
cuggagagaauguggaaugauu

SEQ ID NO: 688679 - RNA, 22 nt, Human
cuggggcaucauccauucuuuc

SEQ ID NO: 688680 - RNA, 22 nt, Human
ugcccagcuauuccuuucuuag

SEQ ID NO: 688681 - RNA, 22 nt, Human
acagggcuccuugggcugacac

SEQ ID NO: 688682 - RNA, 22 nt, Human
uugguuuagcaacuuccugugu

SEQ ID NO: 688683 - RNA, 22 nt, Human
agggaugguggagguugcaagu

SEQ ID NO: 688684 - RNA, 22 nt, Human
augcugugaaaaagaaggcuga

SEQ ID NO: 688685 - RNA, 22 nt, Human
cagcacuguucccagaccacug

SEQ ID NO: 688686 - RNA, 22 nt, Human
cuccucaguugucccauggaga

SEQ ID NO: 688687 - RNA, 22 nt, Human
uugccuauuguucuuacauguu

SEQ ID NO: 688688 - RNA, 22 nt, Human
aggcuagacuuuggcgaagcac

SEQ ID NO: 688689 - RNA, 18 nt, Human
ucucuuuccucaguggag

SEQ ID NO: 688690 - RNA, 22 nt, Human
uuucuugaccacuauguugaua

SEQ ID NO: 688691 - RNA, 22 nt, Human
ccuuucucuuugcugaucaugu

SEQ ID NO: 688692 - RNA, 22 nt, Human
cacaggaccaauucacauucca

SEQ ID NO: 688693 - RNA, 22 nt, Human
acuuuuuuauaaggaagaagau

SEQ ID NO: 688694 - RNA, 22 nt, Human
uggaaguggcagaaaaugaaca

SEQ ID NO: 688695 - RNA, 23 nt, Human
aggcugcagaagaauagggucau

SEQ ID NO: 688696 - RNA, 22 nt, Human
uaaccugaacacacaauaggga

SEQ ID NO: 688697 - RNA, 22 nt, Human
auuaauuuuucugacagccaca

SEQ ID NO: 688698 - RNA, 23 nt, Human
ucucaagaggaagcagggcucau

SEQ ID NO: 688699 - RNA, 22 nt, Human
gccagggaacccaagggccuca

SEQ ID NO: 688700 - RNA, 22 nt, Human
gaggcugcuguuagcccugggc

SEQ ID NO: 688701 - RNA, 22 nt, Human
ccucaaauagcccccagucuag

SEQ ID NO: 688702 - RNA, 22 nt, Human
uauuucuuuucgugacuuauug

SEQ ID NO: 688703 - RNA, 23 nt, Human
acaaaguaauuccugcuuccaaa

SEQ ID NO: 688704 - RNA, 22 nt, Human
cugggagaucuccugagggcag

SEQ ID NO: 688705 - RNA, 22 nt, Human
uuaaaggaauugaguuucuugu

SEQ ID NO: 688706 - RNA, 22 nt, Human
ucaagaugaaccaggacauuca

SEQ ID NO: 688707 - RNA, 22 nt, Human
uccaggucuuccuauuccaggu

SEQ ID NO: 688708 - RNA, 22 nt, Human
gacagguaaagaugguggcagg

SEQ ID NO: 688709 - RNA, 22 nt, Human
agaagugguguguggccgagcu

SEQ ID NO: 688710 - RNA, 22 nt, Human
gggggggucuucagaccucaga

SEQ ID NO: 688711 - RNA, 22 nt, Human
cuucuuuaccaagagauagagu

SEQ ID NO: 688712 - RNA, 22 nt, Human
agugauauuagcaaaugguuau

SEQ ID NO: 688713 - RNA, 22 nt, Human
gaaauaagaguccaugccaggu

SEQ ID NO: 688714 - RNA, 22 nt, Human
cagaaacuagauuuagacacaa

SEQ ID NO: 688715 - RNA, 16 nt, Human
ugggaccuguggccaa

SEQ ID NO: 688716 - RNA, 22 nt, Human
auguuuauggagcagguauuag

SEQ ID NO: 688717 - RNA, 22 nt, Human
aggugccugggagcucccugag

SEQ ID NO: 688718 - RNA, 22 nt, Human
ggcucuguggcuggccaugaug

SEQ ID NO: 688719 - RNA, 22 nt, Human
cuucaagaagacagcagagcau

SEQ ID NO: 688720 - RNA, 22 nt, Human
acucuuuaacagacuuugaucu

SEQ ID NO: 688721 - RNA, 22 nt, Human
uggggcuggggaucuugagccu

SEQ ID NO: 688722 - RNA, 22 nt, Human
gcagcccagguguagcucuuug

SEQ ID NO: 688723 - RNA, 22 nt, Human
auauauuuuuugagacagaguc

SEQ ID NO: 688724 - RNA, 18 nt, Human
uggaagcuggugagcaga

SEQ ID NO: 688725 - RNA, 22 nt, Human
ugcaggaauagcuacagagcug

SEQ ID NO: 688726 - RNA, 22 nt, Human
uuauucagugcauauauuaaaa

SEQ ID NO: 688727 - RNA, 22 nt, Human
aaguguguauuuuucuucagug

SEQ ID NO: 688728 - RNA, 22 nt, Human
uuccauaaugagauucccagcc

SEQ ID NO: 688729 - RNA, 22 nt, Human
cagagccacugucugccaggca

SEQ ID NO: 688730 - RNA, 22 nt, Human
aauagcuuaguccugauucugu

SEQ ID NO: 688731 - RNA, 22 nt, Human
ccugaagcaaggguaggcaggu

SEQ ID NO: 688732 - RNA, 22 nt, Human
cagccacguagcccuuggccgu

SEQ ID NO: 688733 - RNA, 22 nt, Human
gugccuuuucuucauaguuacu

SEQ ID NO: 688734 - RNA, 22 nt, Human
uuauaacaacaguuuacuuuaa

SEQ ID NO: 688735 - RNA, 22 nt, Human
ugccugugcccuucuuggcauu

SEQ ID NO: 688736 - RNA, 22 nt, Human
acucucagggacagggucuggg

SEQ ID NO: 688737 - RNA, 18 nt, Human
gauggguaaaggcauaaa

SEQ ID NO: 688738 - RNA, 22 nt, Human
ucaggccuuucuucagagcuuc

SEQ ID NO: 688739 - RNA, 22 nt, Human
cuucuggggauggagcccagaa

SEQ ID NO: 688740 - RNA, 22 nt, Human
gugauuuugagaccuauauagu

SEQ ID NO: 688741 - RNA, 22 nt, Human
ucauguuuuaaugccuuuuucu

SEQ ID NO: 688742 - RNA, 22 nt, Human
caaacauucaaguacaagucuu

SEQ ID NO: 688743 - RNA, 22 nt, Human
gacuucaaaucaugcuaaaccu

SEQ ID NO: 688744 - RNA, 22 nt, Human
agaagccaauucugugugaguc

SEQ ID NO: 688745 - RNA, 20 nt, Human
uuucaguuaucuugaccuuc

SEQ ID NO: 688746 - RNA, 22 nt, Human
ccagagguuacuuugccuugga

SEQ ID NO: 688747 - RNA, 22 nt, Human
cuuuggaagugaccacaauccu

SEQ ID NO: 688748 - RNA, 22 nt, Human
agagguucaaacuucauaauuu

SEQ ID NO: 688749 - RNA, 22 nt, Human
cacaugcuagaauaaaucucca

SEQ ID NO: 688750 - RNA, 22 nt, Human
auuccagugugcaugguacaca

SEQ ID NO: 688751 - RNA, 23 nt, Human
uggaauguuucuuguacugaaug

SEQ ID NO: 688752 - RNA, 19 nt, Human
agggccugcagcucaagcu

SEQ ID NO: 688753 - RNA, 22 nt, Human
ugguccugucucaaggagccuu

SEQ ID NO: 688754 - RNA, 22 nt, Human
caggcaugagccaggccccucc

SEQ ID NO: 688755 - RNA, 22 nt, Human
uucacuuauagggauguuauug

SEQ ID NO: 688756 - RNA, 22 nt, Human
ccauggcucuuaccuuguuaua

SEQ ID NO: 688757 - RNA, 22 nt, Human
uuuagugcuuugcuauucaugg

SEQ ID NO: 688758 - RNA, 22 nt, Human
guggccucugugcuccugccua

SEQ ID NO: 688759 - RNA, 22 nt, Human
uggcugaguucuccaggaguag

SEQ ID NO: 688760 - RNA, 22 nt, Human
ccaggaaguaugacccaacaga

SEQ ID NO: 688761 - RNA, 22 nt, Human
gaaaauguuuccuguuauuugc

SEQ ID NO: 688762 - RNA, 22 nt, Human
uuuaaauucugucugccgcuua

SEQ ID NO: 688763 - RNA, 22 nt, Human
uucguuuucuaggaccaacaga

SEQ ID NO: 688764 - RNA, 17 nt, Human
gcagugaaaagagauca

SEQ ID NO: 688765 - RNA, 22 nt, Human
aguguaggguggucagagcaga

SEQ ID NO: 688766 - RNA, 22 nt, Human
gacagugcauuuccuggcaugg

SEQ ID NO: 688767 - RNA, 22 nt, Human
agcuguguggugucugacagcu

SEQ ID NO: 688768 - RNA, 18 nt, Human
ccagagcuggcuccucgc

SEQ ID NO: 688769 - RNA, 22 nt, Human
uucugcugagugggcaggugca

SEQ ID NO: 688770 - RNA, 22 nt, Human
gcugaguggagcagucagcgcu

SEQ ID NO: 688771 - RNA, 22 nt, Human
ugagcuucaaaauaugugaauc

SEQ ID NO: 688772 - RNA, 22 nt, Human
uucaguauauuacucuugucaa

SEQ ID NO: 688773 - RNA, 22 nt, Human
uucaucauuacagucauguuau

SEQ ID NO: 688774 - RNA, 22 nt, Human
uauucagugacaggguauuaug

SEQ ID NO: 688775 - RNA, 22 nt, Human
caggcacaguuccaagcauuuu

SEQ ID NO: 688776 - RNA, 22 nt, Human
ucugagcuucugcauuuccaac

SEQ ID NO: 688777 - RNA, 22 nt, Human
uucugggcacacaggcccuggu

SEQ ID NO: 688778 - RNA, 20 nt, Human
gcaacuagggagacacagcu

SEQ ID NO: 688779 - RNA, 22 nt, Human
aauagcaaaugcucauuugaaa

SEQ ID NO: 688780 - RNA, 22 nt, Human
aggcauuacaucuaaauauuua

SEQ ID NO: 688781 - RNA, 22 nt, Human
agcaucagagagaaguuaacua

SEQ ID NO: 688782 - RNA, 22 nt, Human
uaggaauugaaaaguggucuga

SEQ ID NO: 688783 - RNA, 20 nt, Human
ugcuccaggaacacuggccg

SEQ ID NO: 688784 - RNA, 22 nt, Human
uucugaggaggagcaaaaacuc

SEQ ID NO: 688785 - RNA, 22 nt, Human
gagggggcucccugaagccagu

SEQ ID NO: 688786 - RNA, 20 nt, Human
auagacaaagacaugccaga

SEQ ID NO: 688787 - RNA, 22 nt, Human
acuguuuaguaaauugaaaugg

SEQ ID NO: 688788 - RNA, 22 nt, Human
uguaguccaggaauugugucug

SEQ ID NO: 688789 - RNA, 22 nt, Human
aacaucaggaucuuguuacagu

SEQ ID NO: 688790 - RNA, 22 nt, Human
auauagacagaugacagggaua

SEQ ID NO: 688791 - RNA, 21 nt, Human
acagugugcuucucucccucc

SEQ ID NO: 688792 - RNA, 22 nt, Human
acuaaaugagauacugucuuca

SEQ ID NO: 688793 - RNA, 20 nt, Human
uagcagcagaaagaacuuag

SEQ ID NO: 688794 - RNA, 22 nt, Human
aggugcugugcuaugcacuugu

SEQ ID NO: 688795 - RNA, 18 nt, Human
aauugcauuuguuuccuu

SEQ ID NO: 688796 - RNA, 22 nt, Human
caagagugaaacucugucucaa

SEQ ID NO: 688797 - RNA, 22 nt, Human
cccagagcugagucugauauau

SEQ ID NO: 688798 - RNA, 22 nt, Human
ucagaagcagaaaauagguggg

SEQ ID NO: 688799 - RNA, 22 nt, Human
ucaggcugaaaggacuccaguu

SEQ ID NO: 688800 - RNA, 18 nt, Human
uggccuggagacaacucu

SEQ ID NO: 688801 - RNA, 22 nt, Human
gaggcugguucugaaguacugu

SEQ ID NO: 688802 - RNA, 22 nt, Human
gagccagggcugugagcugagc

SEQ ID NO: 688803 - RNA, 22 nt, Human
cccaggagauaacguucccaag

SEQ ID NO: 688804 - RNA, 22 nt, Human
gagguggugguggaggcauagc

SEQ ID NO: 688805 - RNA, 22 nt, Human
ccuggguacgcagggcuccucu

SEQ ID NO: 688806 - RNA, 22 nt, Human
agugaauucuccacccaguagg

SEQ ID NO: 688807 - RNA, 22 nt, Human
aaggaaaucuuuguaacaucuu

SEQ ID NO: 688808 - RNA, 22 nt, Human
agaucuauuagcaaacugccau

SEQ ID NO: 688809 - RNA, 22 nt, Human
gagcccugacacugagggaguu

SEQ ID NO: 688810 - RNA, 22 nt, Human
ucaggaaauggacaucuuugcu

SEQ ID NO: 688811 - RNA, 23 nt, Human
aucuuacauauuuagcaccugaa

SEQ ID NO: 688812 - RNA, 22 nt, Human
aaacagucgucuuaauaguauu

SEQ ID NO: 688813 - RNA, 22 nt, Human
agauaauguucugauccauuuc

SEQ ID NO: 688814 - RNA, 22 nt, Human
guucacaggguuaggaaucacu

SEQ ID NO: 688815 - RNA, 22 nt, Human
uuugauugucaccuaccuugca

SEQ ID NO: 688816 - RNA, 22 nt, Human
ucugguaauaggcaauagcuug

SEQ ID NO: 688817 - RNA, 22 nt, Human
uggucagguaccucuggcuguc

SEQ ID NO: 688818 - RNA, 22 nt, Human
ugguuaaguccagaaaggaagc

SEQ ID NO: 688819 - RNA, 22 nt, Human
agcuagggcuuucguagacagu

SEQ ID NO: 688820 - RNA, 22 nt, Human
uacaaagucacauugaaaugaa

SEQ ID NO: 688821 - RNA, 22 nt, Human
gaaaucugcuucuugcauagua

SEQ ID NO: 688822 - RNA, 22 nt, Human
uuagugcaauucagagaacaau

SEQ ID NO: 688823 - RNA, 22 nt, Human
ugucucugcugcaccuucuggg

SEQ ID NO: 688824 - RNA, 22 nt, Human
aggaguuuauccgagggcauaa

SEQ ID NO: 688825 - RNA, 18 nt, Human
accuccccauuuucugaa

SEQ ID NO: 688826 - RNA, 22 nt, Human
ugagcagggacuuugaguguag

SEQ ID NO: 688827 - RNA, 18 nt, Human
acaaaugugucacaggaa

SEQ ID NO: 688828 - RNA, 22 nt, Human
guagcuauuuaugauacucaug

SEQ ID NO: 688829 - RNA, 22 nt, Human
augcaaaauaaggcagaaacau

SEQ ID NO: 688830 - RNA, 22 nt, Human
cacagugcaaucggccacaaau

SEQ ID NO: 688831 - RNA, 22 nt, Human
ugcuuaauauugugauguaaua

SEQ ID NO: 688832 - RNA, 22 nt, Human
ugccugucuucaggagugucac

SEQ ID NO: 688833 - RNA, 22 nt, Human
uaccauaacguaaugaacuuga

SEQ ID NO: 688834 - RNA, 22 nt, Human
gaauagauuauacuugaagcau

SEQ ID NO: 688835 - RNA, 22 nt, Human
acauuguagacuuuucauaugu

SEQ ID NO: 688836 - RNA, 22 nt, Human
gcuggcuguaucaccuggccag

SEQ ID NO: 688837 - RNA, 22 nt, Human
caguauuuguuacagcauuagc

SEQ ID NO: 688838 - RNA, 21 nt, Human
cuguccucagauguggacgag

SEQ ID NO: 688839 - RNA, 22 nt, Human
uacuccacacgcuauuauaaug

SEQ ID NO: 688840 - RNA, 22 nt, Human
ucuguucuuaaagcauucuugc

SEQ ID NO: 688841 - RNA, 22 nt, Human
uaucugcaucugcauguguauu

SEQ ID NO: 688842 - RNA, 21 nt, Human
acugugauaaugcuuuuucug

SEQ ID NO: 688843 - RNA, 22 nt, Human
guggaagguaaugcagcuuacu

SEQ ID NO: 688844 - RNA, 22 nt, Human
agagagaacacccucggcaugg

SEQ ID NO: 688845 - RNA, 22 nt, Human
ucccauugccauagauaggaca

SEQ ID NO: 688846 - RNA, 17 nt, Human
gcugccaccuuuggagc

SEQ ID NO: 688847 - RNA, 22 nt, Human
gcugagcacagcaaagagacaa

SEQ ID NO: 688848 - RNA, 22 nt, Human
aaggcuggucagauguggugaa

SEQ ID NO: 688849 - RNA, 22 nt, Human
augcauauuucuuggagcaccu

SEQ ID NO: 688850 - RNA, 22 nt, Human
gggccccaagaaccuccuccug

SEQ ID NO: 688851 - RNA, 22 nt, Human
ucuuuccuaggugauaugcaau

SEQ ID NO: 688852 - RNA, 22 nt, Human
caugggagcuaucuccaucacu

SEQ ID NO: 688853 - RNA, 22 nt, Human
guaaagaaggcaaccugguuau

SEQ ID NO: 688854 - RNA, 22 nt, Human
uaggcuucccgcucacaugccc

SEQ ID NO: 688855 - RNA, 22 nt, Human
uaacaacugaggaagaggcaga

SEQ ID NO: 688856 - RNA, 23 nt, Human
ccacaggcacagaggcuugcauc

SEQ ID NO: 688857 - RNA, 20 nt, Human
agugaguuaucagcuacagu

SEQ ID NO: 688858 - RNA, 22 nt, Human
acagcuugaaucuuaagcucuu

SEQ ID NO: 688859 - RNA, 22 nt, Human
uuuuaucugugacaucuggcag

SEQ ID NO: 688860 - RNA, 22 nt, Human
ucaucugucugagagacuucug

SEQ ID NO: 688861 - RNA, 23 nt, Human
uaaauugaugguauggguuaagc

SEQ ID NO: 688862 - RNA, 22 nt, Human
ccaaggagcaaguuuacaccug

SEQ ID NO: 688863 - RNA, 22 nt, Human
uuucuucaauugcuaacaagga

SEQ ID NO: 688864 - RNA, 22 nt, Human
ucugaaauuuuaguuauagaaa

SEQ ID NO: 688865 - RNA, 19 nt, Human
acuucaaaucuuagagaaa

SEQ ID NO: 688866 - RNA, 22 nt, Human
cucagcucuuuauacuagcugu

SEQ ID NO: 688867 - RNA, 22 nt, Human
agaggcacuguucuuagcgacu

SEQ ID NO: 688868 - RNA, 21 nt, Human
ugaagggcagccucaggcucc

SEQ ID NO: 688869 - RNA, 21 nt, Human
gagacagcccagugccagggc

SEQ ID NO: 688870 - RNA, 22 nt, Human
uacaguuuacaugagaggaagc

SEQ ID NO: 688871 - RNA, 22 nt, Human
cuguggcuggccugucugacau

SEQ ID NO: 688872 - RNA, 22 nt, Human
uuuauucugugcuacaugaaga

SEQ ID NO: 688873 - RNA, 22 nt, Human
gcagccucugcaguucaggagg

SEQ ID NO: 688874 - RNA, 20 nt, Human
ucucuucaggagguccaugu

SEQ ID NO: 688875 - RNA, 22 nt, Human
acuuggagggagcuggguggaa

SEQ ID NO: 688876 - RNA, 22 nt, Human
cagauggaaggcauagagguuu

SEQ ID NO: 688877 - RNA, 22 nt, Human
cagcucuuuauugccaauauuc

SEQ ID NO: 688878 - RNA, 22 nt, Human
uauaacacucagaaagaaucau

SEQ ID NO: 688879 - RNA, 22 nt, Human
uacauugugucucuaucuaguc

SEQ ID NO: 688880 - RNA, 22 nt, Human
gggugcaggggacccuagggac

SEQ ID NO: 688881 - RNA, 22 nt, Human
auauuugucaucugccuuaguu

SEQ ID NO: 688882 - RNA, 19 nt, Human
uuuauuugagacaugccuu

SEQ ID NO: 688883 - RNA, 22 nt, Human
uuaauacagucuccagaaguaa

SEQ ID NO: 688884 - RNA, 22 nt, Human
uagcuacaaucacuguccuuug

SEQ ID NO: 688885 - RNA, 22 nt, Human
agcuggcacuagcguuuccaag

SEQ ID NO: 688886 - RNA, 22 nt, Human
guucacacuuuugauaugugaa

SEQ ID NO: 688887 - RNA, 22 nt, Human
aaacugaauucccaagggcaug

SEQ ID NO: 688888 - RNA, 22 nt, Human
auuaauugggaacuuguugaaa

SEQ ID NO: 688889 - RNA, 22 nt, Human
gccucugcugcaagccugguug

SEQ ID NO: 688890 - RNA, 22 nt, Human
ugucuuuaguuuuacugucugg

SEQ ID NO: 688891 - RNA, 22 nt, Human
ccucaguguguuuggggugagg

SEQ ID NO: 688892 - RNA, 22 nt, Human
uguauuugguguauuuaaugag

SEQ ID NO: 688893 - RNA, 22 nt, Human
agcagggcugugcuccuuccga

SEQ ID NO: 688894 - RNA, 22 nt, Human
auuaacaugcagccagacacac

SEQ ID NO: 688895 - RNA, 22 nt, Human
gcgccuggcacacagcaagggc

SEQ ID NO: 688896 - RNA, 22 nt, Human
cugaggagaccaucaacuaauu

SEQ ID NO: 688897 - RNA, 22 nt, Human
uucuucaaugugcccuguuuuc

SEQ ID NO: 688898 - RNA, 22 nt, Human
gaauugcuugcugagauuaaag

SEQ ID NO: 688899 - RNA, 22 nt, Human
acacuucaccccugcucccagu

SEQ ID NO: 688900 - RNA, 22 nt, Human
ccugccugguguaagucuaagg

SEQ ID NO: 688901 - RNA, 23 nt, Human
uccaggcugaaggagcagauuuu

SEQ ID NO: 688902 - RNA, 22 nt, Human
gggcucugugguugugcuuugu

SEQ ID NO: 688903 - RNA, 22 nt, Human
uuauagaaggagcauucacuua

SEQ ID NO: 688904 - RNA, 23 nt, Human
ggaaaaacacugugucuuggcag

SEQ ID NO: 688905 - RNA, 22 nt, Human
gccucugcucucagguagccuc

SEQ ID NO: 688906 - RNA, 22 nt, Human
agaauucugacaauagaauugg

SEQ ID NO: 688907 - RNA, 22 nt, Human
ggcugcuccuuuacccuggcag

SEQ ID NO: 688908 - RNA, 23 nt, Human
ugaauuuuggcauauucugaaau

SEQ ID NO: 688909 - RNA, 22 nt, Human
gaaacagcuagaaagccauugg

SEQ ID NO: 688910 - RNA, 22 nt, Human
gccaccuguuucgcuugcccag

SEQ ID NO: 688911 - RNA, 22 nt, Human
aggcacugauucuguuuuccau

SEQ ID NO: 688912 - RNA, 22 nt, Human
uuuagaaauugcagagugggug

SEQ ID NO: 688913 - RNA, 22 nt, Human
cuagaauugcauucuaugaaua

SEQ ID NO: 688914 - RNA, 22 nt, Human
cggcagcaucgaaacuacauuc

SEQ ID NO: 688915 - RNA, 22 nt, Human
agcacauguauucuccuugaau

SEQ ID NO: 688916 - RNA, 22 nt, Human
aggucaccauggcaugcuccac

SEQ ID NO: 688917 - RNA, 22 nt, Human
auuuguucauggguuguuaugc

SEQ ID NO: 688918 - RNA, 22 nt, Human
aaguaacaugggaacaucugaa

SEQ ID NO: 688919 - RNA, 20 nt, Human
ggagcuggcauccagccucu

SEQ ID NO: 688920 - RNA, 22 nt, Human
ucaucacauaugucaugauuug

SEQ ID NO: 688921 - RNA, 22 nt, Human
agcuuccuugaauucuguagaa

SEQ ID NO: 688922 - RNA, 22 nt, Human
cuagugugucuaugucuguucc

SEQ ID NO: 688923 - RNA, 22 nt, Human
uaugaagauauaucugaucucu

SEQ ID NO: 688924 - RNA, 22 nt, Human
ggcucugcccgcggcugcccac

SEQ ID NO: 688925 - RNA, 19 nt, Human
ucugcccacaagaaaggga

SEQ ID NO: 688926 - RNA, 22 nt, Human
augcuguccacucuugguguuu

SEQ ID NO: 688927 - RNA, 22 nt, Human
uggcuggagccccucaagagca

SEQ ID NO: 688928 - RNA, 22 nt, Human
guucucucugcuuccaagaugg

SEQ ID NO: 688929 - RNA, 22 nt, Human
agggcagccaugagccuucagg

SEQ ID NO: 688930 - RNA, 22 nt, Human
aucuuugugcuaauguaguucu

SEQ ID NO: 688931 - RNA, 22 nt, Human
ccugcagaugugggacagcugu

SEQ ID NO: 688932 - RNA, 22 nt, Human
acuauucaagugcucauucaga

SEQ ID NO: 688933 - RNA, 22 nt, Human
agcacauuuaaguaugaaauau

SEQ ID NO: 688934 - RNA, 22 nt, Human
auuaaauacugcaggcuaagca

SEQ ID NO: 688935 - RNA, 22 nt, Human
aggaaacauugauauugggaaa

SEQ ID NO: 688936 - RNA, 19 nt, Human
agacagagcucaguggguu

SEQ ID NO: 688937 - RNA, 22 nt, Human
gcaguguuacuuggaguacuaa

SEQ ID NO: 688938 - RNA, 22 nt, Human
uggucaguugcaucagagaagu

SEQ ID NO: 688939 - RNA, 22 nt, Human
ugaagauuuucggguacuugau

SEQ ID NO: 688940 - RNA, 22 nt, Human
gggcugacaaucucuuuacuua

SEQ ID NO: 688941 - RNA, 19 nt, Human
gagggcuugauggacccga

SEQ ID NO: 688942 - RNA, 22 nt, Human
agguguguauaaacauacauau

SEQ ID NO: 688943 - RNA, 22 nt, Human
cccaaggccucuccuuggcuug

SEQ ID NO: 688944 - RNA, 22 nt, Human
auuaagugacuaaaguaaugcu

SEQ ID NO: 688945 - RNA, 22 nt, Human
gggguggagaugguggcccuuu

SEQ ID NO: 688946 - RNA, 22 nt, Human
gaugucugccaaagaaucaagc

SEQ ID NO: 688947 - RNA, 22 nt, Human
agaucgauuucauauccucuua

SEQ ID NO: 688948 - RNA, 22 nt, Human
auugaaagcauggauuuggauu

SEQ ID NO: 688949 - RNA, 22 nt, Human
ccugugucuuccccacuggugu

SEQ ID NO: 688950 - RNA, 22 nt, Human
cccaggcuaguaugauaucagu

SEQ ID NO: 688951 - RNA, 22 nt, Human
uccuaggguaaucagcauacau

SEQ ID NO: 688952 - RNA, 22 nt, Human
ugccugugcccuuugcugggag

SEQ ID NO: 688953 - RNA, 22 nt, Human
gagcuuugcuggaagccugggg

SEQ ID NO: 688954 - RNA, 22 nt, Human
uugcaaauuauauaagggaugc

SEQ ID NO: 688955 - RNA, 22 nt, Human
aggcugaggcgggaggaucacu

SEQ ID NO: 688956 - RNA, 19 nt, Human
cuguacagguugcuucugg

SEQ ID NO: 688957 - RNA, 22 nt, Human
agggcaguucagccacaggcuc

SEQ ID NO: 688958 - RNA, 22 nt, Human
gcucuucucagauuguacacuc

SEQ ID NO: 688959 - RNA, 22 nt, Human
cagcaggcuguggaaauccugg

SEQ ID NO: 688960 - RNA, 22 nt, Human
cagggcuccccgcaccgcagcc

SEQ ID NO: 688961 - RNA, 22 nt, Human
augucuuucuuauggucuguug

SEQ ID NO: 688962 - RNA, 22 nt, Human
uggcagugccccuugaccagug

SEQ ID NO: 688963 - RNA, 22 nt, Human
cugcugcugagagcucagccug

SEQ ID NO: 688964 - RNA, 22 nt, Human
gugcauuauucuuaccuuucuu

SEQ ID NO: 688965 - RNA, 22 nt, Human
ucacauugaauggaagaauaga

SEQ ID NO: 688966 - RNA, 22 nt, Human
ugcagagguuugugguguugcu

SEQ ID NO: 688967 - RNA, 22 nt, Human
gugcccugaugcaauugucuca

SEQ ID NO: 688968 - RNA, 23 nt, Human
agccccucauggugucuagacag

SEQ ID NO: 688969 - RNA, 22 nt, Human
uccccaaguaaagauccugaga

SEQ ID NO: 688970 - RNA, 23 nt, Human
cuacaagagcaagcauggacaag

SEQ ID NO: 688971 - RNA, 18 nt, Human
caaauucucauugauuuc

SEQ ID NO: 688972 - RNA, 21 nt, Human
ucaaagcacauauuugcacau

SEQ ID NO: 688973 - RNA, 22 nt, Human
ccucagucauuggccuacacuu

SEQ ID NO: 688974 - RNA, 22 nt, Human
cagccacuggugccaggcuguu

SEQ ID NO: 688975 - RNA, 22 nt, Human
cugaaggggguuucacugagcu

SEQ ID NO: 688976 - RNA, 22 nt, Human
agagacacaucauauaaguaua

SEQ ID NO: 688977 - RNA, 22 nt, Human
ggcggguguaaguaggacagcg

SEQ ID NO: 688978 - RNA, 22 nt, Human
cagcccacgucagggccacuca

SEQ ID NO: 688979 - RNA, 22 nt, Human
guggcaacaaaagagccuagug

SEQ ID NO: 688980 - RNA, 22 nt, Human
ccagggucacaaauaacugcag

SEQ ID NO: 688981 - RNA, 22 nt, Human
aagauuucugcuuuuggaggca

SEQ ID NO: 688982 - RNA, 22 nt, Human
cugagcugggaguagagacucu

SEQ ID NO: 688983 - RNA, 22 nt, Human
aaucagaacuucucaggguggg

SEQ ID NO: 688984 - RNA, 22 nt, Human
acuugcaucuuagagacucacc

SEQ ID NO: 688985 - RNA, 22 nt, Human
uuugaauggacugagaaucuug

SEQ ID NO: 688986 - RNA, 22 nt, Human
gggugccacagagcuuccacuu

SEQ ID NO: 688987 - RNA, 22 nt, Human
aaugcacauguuguaauaaaua

SEQ ID NO: 688988 - RNA, 22 nt, Human
uaacauguucagacuaccugug

SEQ ID NO: 688989 - RNA, 22 nt, Human
ugacauuucagauaugguauuu

SEQ ID NO: 688990 - RNA, 22 nt, Human
ggacuucuaagugccagacacu

SEQ ID NO: 688991 - RNA, 22 nt, Human
gcagaggccaggccaccagcaa

SEQ ID NO: 688992 - RNA, 22 nt, Human
acauacuuuguccuuaacguac

SEQ ID NO: 688993 - RNA, 22 nt, Human
cugggccugguguggcaccugc

SEQ ID NO: 688994 - RNA, 22 nt, Human
ucucaaauguaaagcaugauuu

SEQ ID NO: 688995 - RNA, 22 nt, Human
cagguuucuaguucuaagaaua

SEQ ID NO: 688996 - RNA, 22 nt, Human
gagcagcagguggcugugaugg

SEQ ID NO: 688997 - RNA, 22 nt, Human
gcuuuaaugcaauuucaccuca

SEQ ID NO: 688998 - RNA, 22 nt, Human
gaggcagcuuaggguacugacu

SEQ ID NO: 688999 - RNA, 22 nt, Human
agcaacaggguggucuucagaa

SEQ ID NO: 689000 - RNA, 22 nt, Human
uuaggauuugaaaaggggcaga

SEQ ID NO: 689001 - RNA, 19 nt, Human
cagcaagaaugaaggcaua

SEQ ID NO: 689002 - RNA, 22 nt, Human
ccuugggagaaauugcagaguc

SEQ ID NO: 689003 - RNA, 22 nt, Human
acuuugcaauacuuaauacaaa

SEQ ID NO: 689004 - RNA, 22 nt, Human
agcccugcacaggucuguggcu

SEQ ID NO: 689005 - RNA, 22 nt, Human
uaagagcauaggcuugaaaaua

SEQ ID NO: 689006 - RNA, 18 nt, Human
augggcagguaagaucca

SEQ ID NO: 689007 - RNA, 22 nt, Human
uuuugagauggagucuugcucu

SEQ ID NO: 689008 - RNA, 22 nt, Human
auccuuaauuuacuugcaucuu

SEQ ID NO: 689009 - RNA, 22 nt, Human
auuugcuugacuauggcuugca

SEQ ID NO: 689010 - RNA, 22 nt, Human
agguacagggugaaaguuuaug

SEQ ID NO: 689011 - RNA, 22 nt, Human
caggaggaggugagguagaacu

SEQ ID NO: 689012 - RNA, 22 nt, Human
uuuucaagggcagggaaaucau

SEQ ID NO: 689013 - RNA, 22 nt, Human
gagagcuaacuaccuggaaaug

SEQ ID NO: 689014 - RNA, 22 nt, Human
cucuggcuucuaccuugcaguu

SEQ ID NO: 689015 - RNA, 22 nt, Human
acauagcagaggacugagcaga

SEQ ID NO: 689016 - RNA, 22 nt, Human
gcucagagaaaacuggggcuug

SEQ ID NO: 689017 - RNA, 22 nt, Human
ucucuggggaaaaggcugauac

SEQ ID NO: 689018 - RNA, 22 nt, Human
aacaugcucuguuucuuggaug

SEQ ID NO: 689019 - RNA, 22 nt, Human
aauagauacuacuuagauguag

SEQ ID NO: 689020 - RNA, 22 nt, Human
uggcuaugguauugauggguuu

SEQ ID NO: 689021 - RNA, 22 nt, Human
aucaguauccugcaguuucuau

SEQ ID NO: 689022 - RNA, 22 nt, Human
uggcucuguugugcugagccag

SEQ ID NO: 689023 - RNA, 22 nt, Human
ucuacaagucaagucuaucaag

SEQ ID NO: 689024 - RNA, 21 nt, Human
agcaccuuacagcuauaaugg

SEQ ID NO: 689025 - RNA, 21 nt, Human
cuguccaguaauuccuggcac

SEQ ID NO: 689026 - RNA, 19 nt, Human
aaguugaucauuuugacag

SEQ ID NO: 689027 - RNA, 22 nt, Human
agccaccucuaucuugggcucc

SEQ ID NO: 689028 - RNA, 22 nt, Human
uucuuacauuacuuuacaugug

SEQ ID NO: 689029 - RNA, 22 nt, Human
gggcaguugauggaggucugga

SEQ ID NO: 689030 - RNA, 22 nt, Human
gcucagagaaucagcagacacc

SEQ ID NO: 689031 - RNA, 22 nt, Human
cugcuuuggcucagugacauca

SEQ ID NO: 689032 - RNA, 22 nt, Human
cccuccaggccugucauguucc

SEQ ID NO: 689033 - RNA, 22 nt, Human
agaaaucuuggagucuguggua

SEQ ID NO: 689034 - RNA, 22 nt, Human
gauuuggcuuggaugauuaaac

SEQ ID NO: 689035 - RNA, 22 nt, Human
gcagaagggaauaaggagcuuu

SEQ ID NO: 689036 - RNA, 22 nt, Human
ccaagggaaaccgagaggcugg

SEQ ID NO: 689037 - RNA, 22 nt, Human
ggcaccagggcaagggucuuuc

SEQ ID NO: 689038 - RNA, 18 nt, Human
gagaaggccacuuguuuu

SEQ ID NO: 689039 - RNA, 22 nt, Human
ggggaggccaguggaccguccc

SEQ ID NO: 689040 - RNA, 22 nt, Human
auggcuccuucugugcaguuuu

SEQ ID NO: 689041 - RNA, 22 nt, Human
cuagccagaugauucccaaaua

SEQ ID NO: 689042 - RNA, 22 nt, Human
cacagucacauaucuaugugug

SEQ ID NO: 689043 - RNA, 22 nt, Human
ggccucucuccagucagugcag

SEQ ID NO: 689044 - RNA, 22 nt, Human
cuuuugcacccagaguuauuug

SEQ ID NO: 689045 - RNA, 16 nt, Human
agaggccuugaggaag

SEQ ID NO: 689046 - RNA, 22 nt, Human
ucauaaaguucuaagaauugua

SEQ ID NO: 689047 - RNA, 22 nt, Human
gagcaaugcccuucaccagccc

SEQ ID NO: 689048 - RNA, 22 nt, Human
ugcagggacaggcucuggggau

SEQ ID NO: 689049 - RNA, 22 nt, Human
uaagcugugggagauuggcaua

SEQ ID NO: 689050 - RNA, 22 nt, Human
ggagaaggaauauuggaguagg

SEQ ID NO: 689051 - RNA, 22 nt, Human
agcccuagagcuggaggucagu

SEQ ID NO: 689052 - RNA, 22 nt, Human
acagcagggucacauucccucu

SEQ ID NO: 689053 - RNA, 22 nt, Human
uccaggcauaagccuugagugu

SEQ ID NO: 689054 - RNA, 22 nt, Human
ccuucugucucccucauauuga

SEQ ID NO: 689055 - RNA, 22 nt, Human
aucuuugaugacuaaugcuuug

SEQ ID NO: 689056 - RNA, 22 nt, Human
uuaauuaaauucaugagcauug

SEQ ID NO: 689057 - RNA, 22 nt, Human
guuuacaugcaugcaagaauga

SEQ ID NO: 689058 - RNA, 22 nt, Human
uauaggaaacauacgugacuag

SEQ ID NO: 689059 - RNA, 22 nt, Human
uccagcccuccugggaucacag

SEQ ID NO: 689060 - RNA, 22 nt, Human
agugcaaagggaucagauuggg

SEQ ID NO: 689061 - RNA, 23 nt, Human
ugauugaaaugaggaguauuugu

SEQ ID NO: 689062 - RNA, 22 nt, Human
gaaaagagaacaucugaggauc

SEQ ID NO: 689063 - RNA, 22 nt, Human
agccaaucauccucagacucuc

SEQ ID NO: 689064 - RNA, 22 nt, Human
cugacaaaggcaaggcaggggg

SEQ ID NO: 689065 - RNA, 22 nt, Human
ucagcccugaggacagaggcag

SEQ ID NO: 689066 - RNA, 22 nt, Human
gcaagacaauggagcauaaacg

SEQ ID NO: 689067 - RNA, 19 nt, Human
uaugaagaauguggcaaag

SEQ ID NO: 689068 - RNA, 22 nt, Human
gaugaaaaaagacgagcauaua

SEQ ID NO: 689069 - RNA, 22 nt, Human
gugcuuuuccuuauuuggugcu

SEQ ID NO: 689070 - RNA, 22 nt, Human
agggugcagguguggagucuag

SEQ ID NO: 689071 - RNA, 23 nt, Human
gaagugucugagcuguauuuuuc

SEQ ID NO: 689072 - RNA, 22 nt, Human
acccaggcgggagugcaguguc

SEQ ID NO: 689073 - RNA, 22 nt, Human
cuacuagaucaguaugccucaa

SEQ ID NO: 689074 - RNA, 22 nt, Human
aauguuaugugguucaacuuaa

SEQ ID NO: 689075 - RNA, 22 nt, Human
aagcaggagaugcaggaaugua

SEQ ID NO: 689076 - RNA, 23 nt, Human
cauguguaauuucugguugggug

SEQ ID NO: 689077 - RNA, 22 nt, Human
augaaacaaggguauuuucucu

SEQ ID NO: 689078 - RNA, 22 nt, Human
uuauuugcugauuucaguuuca

SEQ ID NO: 689079 - RNA, 22 nt, Human
cagcugucuaaguugagcagga

SEQ ID NO: 689080 - RNA, 21 nt, Human
acacugcuguagcauauuggg

SEQ ID NO: 689081 - RNA, 22 nt, Human
uacauuaacuuacguccacaug

SEQ ID NO: 689082 - RNA, 22 nt, Human
aagcuucaaugagauaauuguu

SEQ ID NO: 689083 - RNA, 22 nt, Human
gcuggagcggguucgggccgcu

SEQ ID NO: 689084 - RNA, 22 nt, Human
cugcacugcugaucccaggucu

SEQ ID NO: 689085 - RNA, 22 nt, Human
caggcggccaugaucuggcagg

SEQ ID NO: 689086 - RNA, 22 nt, Human
ccuuuagaauucugccccuccu

SEQ ID NO: 689087 - RNA, 22 nt, Human
uccaggauugucagccagaagg

SEQ ID NO: 689088 - RNA, 22 nt, Human
uucaacugggcggaucugagaa

SEQ ID NO: 689089 - RNA, 21 nt, Human
ccugucuuggacugaggcacc

SEQ ID NO: 689090 - RNA, 22 nt, Human
cccugcagaucuaggguccuuc

SEQ ID NO: 689091 - RNA, 22 nt, Human
uuguguacagguguuuccaagu

SEQ ID NO: 689092 - RNA, 22 nt, Human
caucacagguccugaugacauu

SEQ ID NO: 689093 - RNA, 22 nt, Human
guauuucuagaaugguagcacu

SEQ ID NO: 689094 - RNA, 19 nt, Human
caaaugggacaggaaggca

SEQ ID NO: 689095 - RNA, 22 nt, Human
acuucacagguuuucauaaaac

SEQ ID NO: 689096 - RNA, 22 nt, Human
uaaggcagccgcucagagaggu

SEQ ID NO: 689097 - RNA, 22 nt, Human
gugggagcuucaucaagcaguu

SEQ ID NO: 689098 - RNA, 22 nt, Human
ucagaagguacugaagacaugg

SEQ ID NO: 689099 - RNA, 22 nt, Human
guggccuggauagacuccaucu

SEQ ID NO: 689100 - RNA, 22 nt, Human
caugagaagggguggaguuaga

SEQ ID NO: 689101 - RNA, 22 nt, Human
gugugggcugcagaggcacagc

SEQ ID NO: 689102 - RNA, 22 nt, Human
ggacccagcucugagacccugc

SEQ ID NO: 689103 - RNA, 22 nt, Human
guauacagauacuuagacgugc

SEQ ID NO: 689104 - RNA, 22 nt, Human
uguccaggaauugacccugcaa

SEQ ID NO: 689105 - RNA, 22 nt, Human
aaauccuaaggagaauaugauu

SEQ ID NO: 689106 - RNA, 22 nt, Human
acaccaaaguagaauuaaugua

SEQ ID NO: 689107 - RNA, 22 nt, Human
aggucuaacugauagaauucau

SEQ ID NO: 689108 - RNA, 22 nt, Human
guugaggagcaagcaugugucu

SEQ ID NO: 689109 - RNA, 22 nt, Human
auuugucuuugagugcccugcu

SEQ ID NO: 689110 - RNA, 22 nt, Human
cugcucuagguuccugcauaug

SEQ ID NO: 689111 - RNA, 22 nt, Human
agcagccuugugacuccggggu

SEQ ID NO: 689112 - RNA, 22 nt, Human
agaacuguccccagagagcacu

SEQ ID NO: 689113 - RNA, 21 nt, Human
uauuuaucucaggcuaucuuu

SEQ ID NO: 689114 - RNA, 22 nt, Human
ugcugccuugaccuccugggcu

SEQ ID NO: 689115 - RNA, 19 nt, Human
uagggcuggccgggcggug

SEQ ID NO: 689116 - RNA, 22 nt, Human
uugaaucauuacaauagauaag

SEQ ID NO: 689117 - RNA, 22 nt, Human
cagaggccuuucuacagugaua

SEQ ID NO: 689118 - RNA, 22 nt, Human
auuacaguaaaugcuacaggca

SEQ ID NO: 689119 - RNA, 22 nt, Human
auacagaauucacuacaguuuc

SEQ ID NO: 689120 - RNA, 22 nt, Human
ugugucaauuuucauuccuacu

SEQ ID NO: 689121 - RNA, 22 nt, Human
ugccuacauuccuugcuuaugg

SEQ ID NO: 689122 - RNA, 22 nt, Human
aaacauuguacauucuguagcu

SEQ ID NO: 689123 - RNA, 22 nt, Human
cagugguuuaggucaaggggag

SEQ ID NO: 689124 - RNA, 22 nt, Human
aagcagccaccucaucuccacu

SEQ ID NO: 689125 - RNA, 22 nt, Human
caaguuuacaauguguaugugu

SEQ ID NO: 689126 - RNA, 22 nt, Human
ucaaugcaaucauuggacaagu

SEQ ID NO: 689127 - RNA, 18 nt, Human
cuggcauucuucccugga

SEQ ID NO: 689128 - RNA, 22 nt, Human
cuggauggucccaugagcagcu

SEQ ID NO: 689129 - RNA, 21 nt, Human
uccuuauauuugaauacuuua

SEQ ID NO: 689130 - RNA, 22 nt, Human
ucugccaggcuuggugcuagau

SEQ ID NO: 689131 - RNA, 22 nt, Human
aaggcuuuugggaauuuucaac

SEQ ID NO: 689132 - RNA, 21 nt, Human
uguuacaguccaaauguuugu

SEQ ID NO: 689133 - RNA, 22 nt, Human
acaauucugaugguuucccagu

SEQ ID NO: 689134 - RNA, 22 nt, Human
gagccuccuccuggugugccga

SEQ ID NO: 689135 - RNA, 22 nt, Human
uacucaaaaaguuaugaaucau

SEQ ID NO: 689136 - RNA, 22 nt, Human
cacagcccccuugacacucugg

SEQ ID NO: 689137 - RNA, 22 nt, Human
cuggcugcuuguagacucgacu

SEQ ID NO: 689138 - RNA, 22 nt, Human
cuggucaccagguagcauugua

SEQ ID NO: 689139 - RNA, 22 nt, Human
gagguggcuccuucagggaaua

SEQ ID NO: 689140 - RNA, 22 nt, Human
uccaggugccggggacugaggc

SEQ ID NO: 689141 - RNA, 22 nt, Human
gcucugccuggucgcgugcugg

SEQ ID NO: 689142 - RNA, 19 nt, Human
cacagggagaccacauguc

SEQ ID NO: 689143 - RNA, 22 nt, Human
uggcauugcuucugaaguggag

SEQ ID NO: 689144 - RNA, 22 nt, Human
cagucuggcucagcacaaaggg

SEQ ID NO: 689145 - RNA, 22 nt, Human
cagugguuuccaaacuuguucc

SEQ ID NO: 689146 - RNA, 22 nt, Human
caugaauauuuaguauuuacuu

SEQ ID NO: 689147 - RNA, 22 nt, Human
acauuucuaucauccuguaaug

SEQ ID NO: 689148 - RNA, 22 nt, Human
aucauaaaccacuuuguaaucu

SEQ ID NO: 689149 - RNA, 23 nt, Human
auuuuuagccucucugagcugag

SEQ ID NO: 689150 - RNA, 21 nt, Human
guggcccugguguggcugcac

SEQ ID NO: 689151 - RNA, 22 nt, Human
cuggccugaggucggcuguagg

SEQ ID NO: 689152 - RNA, 22 nt, Human
cucagacccccagagcugcuaa

SEQ ID NO: 689153 - RNA, 22 nt, Human
cucuccagaauuauuacuauua

SEQ ID NO: 689154 - RNA, 22 nt, Human
uucuaacuggugcagugcugca

SEQ ID NO: 689155 - RNA, 22 nt, Human
auagaagcugauaaacuacuuc

SEQ ID NO: 689156 - RNA, 22 nt, Human
auaaauuuauaauuguuuccug

SEQ ID NO: 689157 - RNA, 21 nt, Human
aggaggccaguacugcugaac

SEQ ID NO: 689158 - RNA, 22 nt, Human
agauccugccaauggaagcagg

SEQ ID NO: 689159 - RNA, 22 nt, Human
cacaguuugggucuccggggca

SEQ ID NO: 689160 - RNA, 22 nt, Human
ucagcauuucagaaguggcaua

SEQ ID NO: 689161 - RNA, 21 nt, Human
gcaacuuaucgcauucugcag

SEQ ID NO: 689162 - RNA, 21 nt, Human
uauuucuuugacucucucccu

SEQ ID NO: 689163 - RNA, 22 nt, Human
guuccugggaggcaugggcugg

SEQ ID NO: 689164 - RNA, 22 nt, Human
uugcuuccucuaguuucuugaa

SEQ ID NO: 689165 - RNA, 22 nt, Human
accuccagcuuuuuagagacau

SEQ ID NO: 689166 - RNA, 22 nt, Human
aaacacaagaggcaggguacag

SEQ ID NO: 689167 - RNA, 22 nt, Human
uuguauuuuuuccuggcggugg

SEQ ID NO: 689168 - RNA, 22 nt, Human
cuuagaaaucgaacucagguua

SEQ ID NO: 689169 - RNA, 22 nt, Human
uuucuaaaauagauuuuauggu

SEQ ID NO: 689170 - RNA, 22 nt, Human
cugaaaagugucuguugaguua

SEQ ID NO: 689171 - RNA, 22 nt, Human
uccuggaguuuguaaggugagc

SEQ ID NO: 689172 - RNA, 22 nt, Human
ucaguuuucaauuucaucagag

SEQ ID NO: 689173 - RNA, 22 nt, Human
uuccauuuuucuaacucucaga

SEQ ID NO: 689174 - RNA, 22 nt, Human
aggcggugcuguggacagugac

SEQ ID NO: 689175 - RNA, 18 nt, Human
ugacagaaccuggagccu

SEQ ID NO: 689176 - RNA, 22 nt, Human
uuccaagguguucugcugguuu

SEQ ID NO: 689177 - RNA, 22 nt, Human
augcuggucugcagaguuggga

SEQ ID NO: 689178 - RNA, 22 nt, Human
uggauggauugacgaaggcagc

SEQ ID NO: 689179 - RNA, 23 nt, Human
ucucaggacacacaugucuauca

SEQ ID NO: 689180 - RNA, 22 nt, Human
uuaaaauuauggcccauuugga

SEQ ID NO: 689181 - RNA, 22 nt, Human
ugaaaaacacuaauuggaaagc

SEQ ID NO: 689182 - RNA, 22 nt, Human
aagaggcugaaugagaaaguac

SEQ ID NO: 689183 - RNA, 22 nt, Human
acaugcuaaaucugagaugcuu

SEQ ID NO: 689184 - RNA, 22 nt, Human
uaugacaggcaugagauccuaa

SEQ ID NO: 689185 - RNA, 22 nt, Human
ugcuggaaugagucggggaggg

SEQ ID NO: 689186 - RNA, 22 nt, Human
ugugaaauauuggcaauuucau

SEQ ID NO: 689187 - RNA, 22 nt, Human
acugcccuguaacugccaggua

SEQ ID NO: 689188 - RNA, 22 nt, Human
uuggcuuuagaccugagacugu

SEQ ID NO: 689189 - RNA, 22 nt, Human
uuuccaaaguugccauaagcuu

SEQ ID NO: 689190 - RNA, 18 nt, Human
aggugcccuccuuacacu

SEQ ID NO: 689191 - RNA, 22 nt, Human
acagggcuuagaaaucuguugc

SEQ ID NO: 689192 - RNA, 22 nt, Human
aaaugcucuggggauaagacug

SEQ ID NO: 689193 - RNA, 20 nt, Human
ugaaaaggucaggagacaug

SEQ ID NO: 689194 - RNA, 22 nt, Human
ucaggcuguuagccaccuccuc

SEQ ID NO: 689195 - RNA, 22 nt, Human
ggaggccagaaucuguguugga

SEQ ID NO: 689196 - RNA, 22 nt, Human
auucacaauuagaaguagauaa

SEQ ID NO: 689197 - RNA, 22 nt, Human
agcagcaaagaauaggcccucu

SEQ ID NO: 689198 - RNA, 22 nt, Human
uccaggcaaaaaccaacuacag

SEQ ID NO: 689199 - RNA, 23 nt, Human
agcagcaaaaauuuaucuuucug

SEQ ID NO: 689200 - RNA, 22 nt, Human
agagauggauguuauuaugggu

SEQ ID NO: 689201 - RNA, 22 nt, Human
gacaguuuagguucaaaucuca

SEQ ID NO: 689202 - RNA, 17 nt, Human
agcccccacucccaagu

SEQ ID NO: 689203 - RNA, 22 nt, Human
ggcuuccuccuuccugcuguca

SEQ ID NO: 689204 - RNA, 22 nt, Human
cuaaaugccuuuccuaccuaac

SEQ ID NO: 689205 - RNA, 22 nt, Human
gugaguguuaacccacugcuuc

SEQ ID NO: 689206 - RNA, 22 nt, Human
cagauuccaguuuguggcuccc

SEQ ID NO: 689207 - RNA, 22 nt, Human
uccuggagauaauugcagugaa

SEQ ID NO: 689208 - RNA, 22 nt, Human
agacacagugcugggugcugag

SEQ ID NO: 689209 - RNA, 22 nt, Human
uccaggucuggccugcuaggca

SEQ ID NO: 689210 - RNA, 22 nt, Human
ccccgcgcguugucccgcaggu

SEQ ID NO: 689211 - RNA, 22 nt, Human
ugugaggauaaaaaggaaggag

SEQ ID NO: 689212 - RNA, 22 nt, Human
auuauucaaucauauuaaaagu

SEQ ID NO: 689213 - RNA, 22 nt, Human
agagaugaaaaggguacugagg

SEQ ID NO: 689214 - RNA, 22 nt, Human
gacagaagaggaacuuggacag

SEQ ID NO: 689215 - RNA, 22 nt, Human
uggcucuguggauguucugacc

SEQ ID NO: 689216 - RNA, 22 nt, Human
ugaauuuaucaaagauucuuaa

SEQ ID NO: 689217 - RNA, 22 nt, Human
caagccucagaaucuucuccau

SEQ ID NO: 689218 - RNA, 22 nt, Human
cuagaaacgccuuuagcacaac

SEQ ID NO: 689219 - RNA, 22 nt, Human
uuuagcauccaagguuaugacu

SEQ ID NO: 689220 - RNA, 22 nt, Human
ucuuucucucuaaucaagcaca

SEQ ID NO: 689221 - RNA, 22 nt, Human
gccaggucgucuccauguccaa

SEQ ID NO: 689222 - RNA, 22 nt, Human
uaacauuugcugucuccuaugu

SEQ ID NO: 689223 - RNA, 22 nt, Human
ucagaacagaagaaggaacacg

SEQ ID NO: 689224 - RNA, 22 nt, Human
acacauuucuaaauuuuuaccg

SEQ ID NO: 689225 - RNA, 22 nt, Human
ugccaggcccagcuccagagcu

SEQ ID NO: 689226 - RNA, 22 nt, Human
aaucaguucuacaucuuaucca

SEQ ID NO: 689227 - RNA, 22 nt, Human
uuauggagcagacagcugguca

SEQ ID NO: 689228 - RNA, 22 nt, Human
cugaagccacgauagcuuccua

SEQ ID NO: 689229 - RNA, 22 nt, Human
gugaaccucugaaaggcaguga

SEQ ID NO: 689230 - RNA, 22 nt, Human
agagaccuuccugacuccagag

SEQ ID NO: 689231 - RNA, 22 nt, Human
caugucuuucucaucacaucua

SEQ ID NO: 689232 - RNA, 22 nt, Human
auuaagaucauuguagaagauu

SEQ ID NO: 689233 - RNA, 22 nt, Human
gaggugaguggggucuccaggg

SEQ ID NO: 689234 - RNA, 22 nt, Human
aacagaguuucaaauaacaucu

SEQ ID NO: 689235 - RNA, 22 nt, Human
cauuugcaaaccaacaagauga

SEQ ID NO: 689236 - RNA, 22 nt, Human
auucaccuguuaguaaaaaucu

SEQ ID NO: 689237 - RNA, 22 nt, Human
aaggcauaggacaaaucaguga

SEQ ID NO: 689238 - RNA, 22 nt, Human
uuauuccagugggugguuucuc

SEQ ID NO: 689239 - RNA, 22 nt, Human
aaggcuguuuauuagaaaaagu

SEQ ID NO: 689240 - RNA, 22 nt, Human
uuucaguuuuugcucgauguau

SEQ ID NO: 689241 - RNA, 22 nt, Human
cugggcagcacaucaucguauc

SEQ ID NO: 689242 - RNA, 22 nt, Human
acuucuugggacccuggcaccg

SEQ ID NO: 689243 - RNA, 19 nt, Human
ggcuggcaagugacagugu

SEQ ID NO: 689244 - RNA, 16 nt, Human
ccuuucucugccuucc

SEQ ID NO: 689245 - RNA, 22 nt, Human
caaaugaauauuuccauggguu

SEQ ID NO: 689246 - RNA, 23 nt, Human
ucucauuucccuugaucuaucuu

SEQ ID NO: 689247 - RNA, 22 nt, Human
agagaaggguguagccugggcc

SEQ ID NO: 689248 - RNA, 22 nt, Human
acuauucacagauucaguguuc

SEQ ID NO: 689249 - RNA, 22 nt, Human
acagcauaaucacuucuuucuu

SEQ ID NO: 689250 - RNA, 22 nt, Human
uggcugagagcaauugacucug

SEQ ID NO: 689251 - RNA, 22 nt, Human
gaauuuugcuuuuaugucaagu

SEQ ID NO: 689252 - RNA, 22 nt, Human
uacagccuccacaggccaagug

SEQ ID NO: 689253 - RNA, 22 nt, Human
gagacauggcaaaagcacuggu

SEQ ID NO: 689254 - RNA, 22 nt, Human
agcauuuaauccuacauagauc

SEQ ID NO: 689255 - RNA, 22 nt, Human
ggugggcacauucagucucugu

SEQ ID NO: 689256 - RNA, 22 nt, Human
acugggccgaaauggacagaau

SEQ ID NO: 689257 - RNA, 22 nt, Human
gaaacaauuuuuguugucuaag

SEQ ID NO: 689258 - RNA, 22 nt, Human
caggacaguuugcuuugcccug

SEQ ID NO: 689259 - RNA, 20 nt, Human
uggucuggagccagugagga

SEQ ID NO: 689260 - RNA, 22 nt, Human
gaugcauugcaucgaguagcuu

SEQ ID NO: 689261 - RNA, 22 nt, Human
gaaaugcagaaccugagaccau

SEQ ID NO: 689262 - RNA, 22 nt, Human
acacuuuaucucaucucagaca

SEQ ID NO: 689263 - RNA, 22 nt, Human
uuguauuccagccaccacaggc

SEQ ID NO: 689264 - RNA, 22 nt, Human
agguauuuaugagagcacauau

SEQ ID NO: 689265 - RNA, 23 nt, Human
aaagacugaggaaagucucuguc

SEQ ID NO: 689266 - RNA, 19 nt, Human
auucucugguuugcuggcu

SEQ ID NO: 689267 - RNA, 22 nt, Human
cucccugaguuuguggcuaagu

SEQ ID NO: 689268 - RNA, 20 nt, Human
accuuucaaaugauucagca

SEQ ID NO: 689269 - RNA, 22 nt, Human
aucuuggggacugucucuugua

SEQ ID NO: 689270 - RNA, 22 nt, Human
cagaagucuuucuguuucaccu

SEQ ID NO: 689271 - RNA, 22 nt, Human
aaguguuuggggaucauuuuaa

SEQ ID NO: 689272 - RNA, 22 nt, Human
gcagagauuaugccauggaaag

SEQ ID NO: 689273 - RNA, 22 nt, Human
ugauucuguaaacaugucuuua

SEQ ID NO: 689274 - RNA, 22 nt, Human
gcaggcugccaccuucugaguu

SEQ ID NO: 689275 - RNA, 22 nt, Human
aggaaucugugguuuuaacagg

SEQ ID NO: 689276 - RNA, 22 nt, Human
guggucaucuggguuuguggca

SEQ ID NO: 689277 - RNA, 22 nt, Human
ccagcucaucucagugaaaugc

SEQ ID NO: 689278 - RNA, 22 nt, Human
aguugcugcuucucucuagaga

SEQ ID NO: 689279 - RNA, 22 nt, Human
ggccagaggccacagcuguguc

SEQ ID NO: 689280 - RNA, 22 nt, Human
agucagagacccuagaucuaau

SEQ ID NO: 689281 - RNA, 22 nt, Human
cuagggagggauguuggcauga

SEQ ID NO: 689282 - RNA, 22 nt, Human
agcuuuaucacaauauuggcua

SEQ ID NO: 689283 - RNA, 22 nt, Human
aucuggggagguaucuguaguc

SEQ ID NO: 689284 - RNA, 19 nt, Human
ucagugugacuuggucagu

SEQ ID NO: 689285 - RNA, 22 nt, Human
ugaggagccacucuagcaguca

SEQ ID NO: 689286 - RNA, 22 nt, Human
cugccccugcucauggcugucc

SEQ ID NO: 689287 - RNA, 22 nt, Human
gccccagaaggggaaagccugg

SEQ ID NO: 689288 - RNA, 22 nt, Human
ggucacagcuuuuucagcagca

SEQ ID NO: 689289 - RNA, 22 nt, Human
gcuuucaaggaauuugguauuu

SEQ ID NO: 689290 - RNA, 22 nt, Human
gggaagagggagcuggaaugau

SEQ ID NO: 689291 - RNA, 22 nt, Human
ugggcagaaaucaguaucagau

SEQ ID NO: 689292 - RNA, 22 nt, Human
agagcuggggcauaaaugccac

SEQ ID NO: 689293 - RNA, 22 nt, Human
auuuagagaauaagacauaaau

SEQ ID NO: 689294 - RNA, 22 nt, Human
agugacagcugggaaggugaaa

SEQ ID NO: 689295 - RNA, 22 nt, Human
uucucccugccaaagcugccuc

SEQ ID NO: 689296 - RNA, 22 nt, Human
uaggcucacauagcacuaagug

SEQ ID NO: 689297 - RNA, 22 nt, Human
uucuaguccuagaaacuacaug

SEQ ID NO: 689298 - RNA, 22 nt, Human
cugggccuagaggaagcugaca

SEQ ID NO: 689299 - RNA, 22 nt, Human
uuucagagucuggcugcagccu

SEQ ID NO: 689300 - RNA, 22 nt, Human
gggcaaaaccugggcaucauga

SEQ ID NO: 689301 - RNA, 22 nt, Human
gggaagcagcauugugcuggcu

SEQ ID NO: 689302 - RNA, 22 nt, Human
uggaaauagcuccaguuucauu

SEQ ID NO: 689303 - RNA, 22 nt, Human
ucugacugaaccaauuauuuac

SEQ ID NO: 689304 - RNA, 18 nt, Human
uggagcugagggcaaugc

SEQ ID NO: 689305 - RNA, 23 nt, Human
uggggagaguuacccuggaagcg

SEQ ID NO: 689306 - RNA, 20 nt, Human
auguuaaauagcauuuagag

SEQ ID NO: 689307 - RNA, 22 nt, Human
aggcuguguccucauuuuauau

SEQ ID NO: 689308 - RNA, 22 nt, Human
uaaugcaaggaauuccaaguag

SEQ ID NO: 689309 - RNA, 22 nt, Human
aucaggauggguuuggcuuagg

SEQ ID NO: 689310 - RNA, 22 nt, Human
uucuaccuacccucugcauaca

SEQ ID NO: 689311 - RNA, 22 nt, Human
aggagccauggaggugaggcgg

SEQ ID NO: 689312 - RNA, 22 nt, Human
ucugucaucaaauaugcuuucu

SEQ ID NO: 689313 - RNA, 22 nt, Human
acugagcauggcucacagagag

SEQ ID NO: 689314 - RNA, 22 nt, Human
uugcccuuguggaguuuacaug

SEQ ID NO: 689315 - RNA, 22 nt, Human
uccagucaacuuaaucucuuua

SEQ ID NO: 689316 - RNA, 22 nt, Human
ccugauucugccacuacuagcc

SEQ ID NO: 689317 - RNA, 22 nt, Human
auagauacauuagguaacuugu

SEQ ID NO: 689318 - RNA, 22 nt, Human
agauaaaaugguucaaaggcua

SEQ ID NO: 689319 - RNA, 22 nt, Human
cuguuguauuuccaacuaugua

SEQ ID NO: 689320 - RNA, 22 nt, Human
ugucccacugacuucacaucca

SEQ ID NO: 689321 - RNA, 22 nt, Human
agucugucuacuuaaagucugu

SEQ ID NO: 689322 - RNA, 22 nt, Human
aagcccugccacccauucacug

SEQ ID NO: 689323 - RNA, 22 nt, Human
ccugccagcauggcuuaucucc

SEQ ID NO: 689324 - RNA, 19 nt, Human
gucucuggauuucaggucc

SEQ ID NO: 689325 - RNA, 22 nt, Human
uuuaaggaugaugugauauaua

SEQ ID NO: 689326 - RNA, 22 nt, Human
guaagaggaucaaggcggugca

SEQ ID NO: 689327 - RNA, 22 nt, Human
aauuucagaccauuugcaauua

SEQ ID NO: 689328 - RNA, 22 nt, Human
aaggaaaggaugagcaugcauu

SEQ ID NO: 689329 - RNA, 22 nt, Human
gaagcaaagagcuagugccgcu

SEQ ID NO: 689330 - RNA, 22 nt, Human
cugcccugugaggguccuuggg

SEQ ID NO: 689331 - RNA, 22 nt, Human
cccagcuccaagggacagcgaa

SEQ ID NO: 689332 - RNA, 22 nt, Human
ugccaggcccucccacagauua

SEQ ID NO: 689333 - RNA, 22 nt, Human
uuuggcaagugggaaauuagua

SEQ ID NO: 689334 - RNA, 22 nt, Human
uucagaggggcuaaguacuugc

SEQ ID NO: 689335 - RNA, 22 nt, Human
uucagcaucuacauauuuagaa

SEQ ID NO: 689336 - RNA, 18 nt, Human
acagugauuguucuaugc

SEQ ID NO: 689337 - RNA, 22 nt, Human
ugucuuaauuuggaugauguuu

SEQ ID NO: 689338 - RNA, 22 nt, Human
gcaugauagcuaacuccccuca

SEQ ID NO: 689339 - RNA, 22 nt, Human
uugcaacuucucccaucacucu

SEQ ID NO: 689340 - RNA, 23 nt, Human
uggcaaggaaugggauggagacu

SEQ ID NO: 689341 - RNA, 22 nt, Human
ugacaauggauauuaguugugg

SEQ ID NO: 689342 - RNA, 22 nt, Human
cugcuacaccggaauagugaca

SEQ ID NO: 689343 - RNA, 22 nt, Human
cugagggccuucuaugcugagc

SEQ ID NO: 689344 - RNA, 20 nt, Human
ucuaauuaaaauugucuagu

SEQ ID NO: 689345 - RNA, 22 nt, Human
auguuuauuuugcagaguaggg

SEQ ID NO: 689346 - RNA, 22 nt, Human
uuaaagucuauguacuacacuu

SEQ ID NO: 689347 - RNA, 22 nt, Human
gugggcaguggggucuucugcc

SEQ ID NO: 689348 - RNA, 22 nt, Human
ugugcuauuacacauuuauuua

SEQ ID NO: 689349 - RNA, 22 nt, Human
ggcagggaggaggugaaaguga

SEQ ID NO: 689350 - RNA, 22 nt, Human
agagugaaggccagguuacagu

SEQ ID NO: 689351 - RNA, 22 nt, Human
guucuugccagcauccucaggu

SEQ ID NO: 689352 - RNA, 22 nt, Human
ccagaacugggcaacagaaagu

SEQ ID NO: 689353 - RNA, 22 nt, Human
auugagaauccauuugagauga

SEQ ID NO: 689354 - RNA, 22 nt, Human
guggcccaggcacccugaugac

SEQ ID NO: 689355 - RNA, 22 nt, Human
uagcauuccuuguggcuucuga

SEQ ID NO: 689356 - RNA, 22 nt, Human
gcugaauaauucuuuguugugg

SEQ ID NO: 689357 - RNA, 22 nt, Human
agcuguggggcaggcagcgagg

SEQ ID NO: 689358 - RNA, 22 nt, Human
cuggagggcuggacuaaggaaa

SEQ ID NO: 689359 - RNA, 22 nt, Human
uuuguagaacuguagaacaaug

SEQ ID NO: 689360 - RNA, 23 nt, Human
cuguuauauucuagggagcugca

SEQ ID NO: 689361 - RNA, 20 nt, Human
agccaaaggagaacagugcu

SEQ ID NO: 689362 - RNA, 22 nt, Human
ggcaccuggagguuuacuggau

SEQ ID NO: 689363 - RNA, 22 nt, Human
gucaggauuuuaaaaucccagu

SEQ ID NO: 689364 - RNA, 22 nt, Human
aagggaggggauguaagccugg

SEQ ID NO: 689365 - RNA, 22 nt, Human
ggcaggugacggggaugaguau

SEQ ID NO: 689366 - RNA, 22 nt, Human
cccuaggggcaaugauggugcu

SEQ ID NO: 689367 - RNA, 22 nt, Human
agaggucuaugcuaggggaacu

SEQ ID NO: 689368 - RNA, 22 nt, Human
guggucaucuaacuaaauuuuc

SEQ ID NO: 689369 - RNA, 22 nt, Human
gcacaauggaccgugugcucug

SEQ ID NO: 689370 - RNA, 22 nt, Human
cugggaaauauaauaaaguggu

SEQ ID NO: 689371 - RNA, 22 nt, Human
uagggguguuucgagagagguu

SEQ ID NO: 689372 - RNA, 22 nt, Human
ucagaguguuuuacuaaacaag

SEQ ID NO: 689373 - RNA, 22 nt, Human
gggagggccaggcucacccagg

SEQ ID NO: 689374 - RNA, 22 nt, Human
ccugagccgagcgcucuuucuc

SEQ ID NO: 689375 - RNA, 22 nt, Human
ccaggagagcagaagcccaggc

SEQ ID NO: 689376 - RNA, 22 nt, Human
ucagcacuuggauuucagagau

SEQ ID NO: 689377 - RNA, 22 nt, Human
cugucuguacugagaguucugu

SEQ ID NO: 689378 - RNA, 22 nt, Human
cugaagccaugugcucacuggu

SEQ ID NO: 689379 - RNA, 22 nt, Human
caaagaccauguggccugaaaa

SEQ ID NO: 689380 - RNA, 22 nt, Human
agguggcaugagacuguaccag

SEQ ID NO: 689381 - RNA, 22 nt, Human
agcuccugauacaugcaggaau

SEQ ID NO: 689382 - RNA, 22 nt, Human
gugcaugugucuuuauaguagc

SEQ ID NO: 689383 - RNA, 22 nt, Human
gggaucugaguugucaggaagg

SEQ ID NO: 689384 - RNA, 22 nt, Human
cuggccaggcucucacgugguc

SEQ ID NO: 689385 - RNA, 22 nt, Human
uuucaguuguccuguuaauagc

SEQ ID NO: 689386 - RNA, 22 nt, Human
uugcaccauuucacuuccauua

SEQ ID NO: 689387 - RNA, 22 nt, Human
uaaugucuagaucagaccucga

SEQ ID NO: 689388 - RNA, 22 nt, Human
cccaugccuucugacucacagg

SEQ ID NO: 689389 - RNA, 21 nt, Human
uccagcuccugccacuccuua

SEQ ID NO: 689390 - RNA, 22 nt, Human
uccuccagcuguauccugccug

SEQ ID NO: 689391 - RNA, 22 nt, Human
uuaggaaaauggaguccuuuua

SEQ ID NO: 689392 - RNA, 22 nt, Human
caggaaggaaaggguguggaga

SEQ ID NO: 689393 - RNA, 22 nt, Human
agaacaaaucgauggaagccug

SEQ ID NO: 689394 - RNA, 22 nt, Human
uacaugaauguuucaauauugu

SEQ ID NO: 689395 - RNA, 22 nt, Human
cucuccuuugaagcaacuguau

SEQ ID NO: 689396 - RNA, 22 nt, Human
cguccauauucaugagcugagu

SEQ ID NO: 689397 - RNA, 23 nt, Human
agauuuggaaagcugaguggcgu

SEQ ID NO: 689398 - RNA, 22 nt, Human
ucaguuaacaacuauuuauuga

SEQ ID NO: 689399 - RNA, 22 nt, Human
aagcagaguuagcuugucaccu

SEQ ID NO: 689400 - RNA, 22 nt, Human
ggccuuggauccaagcugcggc

SEQ ID NO: 689401 - RNA, 22 nt, Human
aggaucauguggucauuccuga

SEQ ID NO: 689402 - RNA, 22 nt, Human
guuaacauucaauuaaacaguc

SEQ ID NO: 689403 - RNA, 22 nt, Human
gaaaguuuauagguuauauaau

SEQ ID NO: 689404 - RNA, 22 nt, Human
ucagaggcuucuggccagucug

SEQ ID NO: 689405 - RNA, 22 nt, Human
gggaggaaagagaaguggucca

SEQ ID NO: 689406 - RNA, 22 nt, Human
uuacuguucauguuguacacuu

SEQ ID NO: 689407 - RNA, 22 nt, Human
uggagcugccuggcaccuacag

SEQ ID NO: 689408 - RNA, 22 nt, Human
cugaaaggagagcugcaaggau

SEQ ID NO: 689409 - RNA, 22 nt, Human
aaaugguaguagcauuccauau

SEQ ID NO: 689410 - RNA, 22 nt, Human
ucuggaguggacccagagcacu

SEQ ID NO: 689411 - RNA, 22 nt, Human
gagggugggccagauaugaggg

SEQ ID NO: 689412 - RNA, 20 nt, Human
uccaugcaguuuccauacag

SEQ ID NO: 689413 - RNA, 22 nt, Human
gcacagcaauuucuauaagcuc

SEQ ID NO: 689414 - RNA, 22 nt, Human
cccugcugucccucaguccugc

SEQ ID NO: 689415 - RNA, 22 nt, Human
uagaguccuucauucugugcag

SEQ ID NO: 689416 - RNA, 22 nt, Human
ugcagcuuuaagcuuucaucag

SEQ ID NO: 689417 - RNA, 22 nt, Human
accagggccgcgggcgacuagc

SEQ ID NO: 689418 - RNA, 22 nt, Human
aacugcuuaucuuugguagaug

SEQ ID NO: 689419 - RNA, 22 nt, Human
auuuaacuuucagccccucuuc

SEQ ID NO: 689420 - RNA, 22 nt, Human
gaggcagccucaguggaccucg

SEQ ID NO: 689421 - RNA, 22 nt, Human
cagcuguuguguaucaggcaga

SEQ ID NO: 689422 - RNA, 22 nt, Human
gccuggagacaaggacaaaggg

SEQ ID NO: 689423 - RNA, 22 nt, Human
aaagcugccaaggagaauacua

SEQ ID NO: 689424 - RNA, 22 nt, Human
ucugcgcugccuugauccuugg

SEQ ID NO: 689425 - RNA, 22 nt, Human
cacaguuucaauaauuauucuu

SEQ ID NO: 689426 - RNA, 22 nt, Human
acucuguacuuucuuguugugu

SEQ ID NO: 689427 - RNA, 19 nt, Human
gcaggcccagucgggcugg

SEQ ID NO: 689428 - RNA, 22 nt, Human
uguggaagaacuucuugcuugg

SEQ ID NO: 689429 - RNA, 22 nt, Human
ccaaagugcugggauucaggca

SEQ ID NO: 689430 - RNA, 22 nt, Human
cagcagaaauggauuuugagau

SEQ ID NO: 689431 - RNA, 22 nt, Human
ugcaugcauguuuuuacccaca

SEQ ID NO: 689432 - RNA, 22 nt, Human
acuuuuugcauaguaagugucu

SEQ ID NO: 689433 - RNA, 18 nt, Human
gagcagaggcucaacugg

SEQ ID NO: 689434 - RNA, 22 nt, Human
uucucugaguacguuucagugu

SEQ ID NO: 689435 - RNA, 22 nt, Human
aggcagggucuugcuauguugc

SEQ ID NO: 689436 - RNA, 22 nt, Human
gggccugcagguucugagaggc

SEQ ID NO: 689437 - RNA, 22 nt, Human
agucucuuacccaagcagaaug

SEQ ID NO: 689438 - RNA, 22 nt, Human
ccugcagguuucccccggacgg

SEQ ID NO: 689439 - RNA, 22 nt, Human
aggcuucccagcugagcucagc

SEQ ID NO: 689440 - RNA, 22 nt, Human
gugcugcagagucucgugccgc

SEQ ID NO: 689441 - RNA, 21 nt, Human
agauccagugccauaaggccc

SEQ ID NO: 689442 - RNA, 22 nt, Human
gaguccugcuuucaauucuuuu

SEQ ID NO: 689443 - RNA, 22 nt, Human
ugaugacagcaaaaaaugcuag

SEQ ID NO: 689444 - RNA, 22 nt, Human
cucugagggcucgagggacgcg

SEQ ID NO: 689445 - RNA, 22 nt, Human
ugccugggguuggcaaacugcu

SEQ ID NO: 689446 - RNA, 22 nt, Human
ggacauggaaaucggcuugcuc

SEQ ID NO: 689447 - RNA, 22 nt, Human
gcugggcaccucucccagauug

SEQ ID NO: 689448 - RNA, 22 nt, Human
uacuuacauaaaaacugaaugu

SEQ ID NO: 689449 - RNA, 22 nt, Human
ggauacaagguguucuaucacu

SEQ ID NO: 689450 - RNA, 22 nt, Human
ucccagaggucucugcugguuc

SEQ ID NO: 689451 - RNA, 22 nt, Human
ugcuaucucuauauccauuuau

SEQ ID NO: 689452 - RNA, 22 nt, Human
ccucugagagaaggccuucagc

SEQ ID NO: 689453 - RNA, 22 nt, Human
aaggcauggcaggguuuacaca

SEQ ID NO: 689454 - RNA, 22 nt, Human
ugcugagacaccuaagguaaau

SEQ ID NO: 689455 - RNA, 22 nt, Human
ucaucugucccaggcuuuuuuc

SEQ ID NO: 689456 - RNA, 22 nt, Human
acguuaaacauuuagcauagua

SEQ ID NO: 689457 - RNA, 22 nt, Human
uuuggcacauucugucacauuc

SEQ ID NO: 689458 - RNA, 22 nt, Human
ugccuuuucuguagcucuggaa

SEQ ID NO: 689459 - RNA, 22 nt, Human
uccaggaggcucugguugacgu

SEQ ID NO: 689460 - RNA, 22 nt, Human
gccuuuccugcucuggcauuca

SEQ ID NO: 689461 - RNA, 22 nt, Human
cagcagcucacugaauaaugac

SEQ ID NO: 689462 - RNA, 22 nt, Human
uacagaccaguaguucucagcg

SEQ ID NO: 689463 - RNA, 22 nt, Human
uuacuuuagggauguuuugcuu

SEQ ID NO: 689464 - RNA, 20 nt, Human
gcuguugccaguacagaugg

SEQ ID NO: 689465 - RNA, 18 nt, Human
guggaggguucucagaau

SEQ ID NO: 689466 - RNA, 23 nt, Human
gugcuugaaagaugcagaauuaa

SEQ ID NO: 689467 - RNA, 21 nt, Human
uucagcaagcacucuggacac

SEQ ID NO: 689468 - RNA, 22 nt, Human
gcacagcccugagcgcaugucu

SEQ ID NO: 689469 - RNA, 19 nt, Human
ucuagacaccaaaguuguc

SEQ ID NO: 689470 - RNA, 22 nt, Human
aguaugaaaguuaaucaauuua

SEQ ID NO: 689471 - RNA, 20 nt, Human
agccagccacuuccugcucc

SEQ ID NO: 689472 - RNA, 22 nt, Human
ugcacagaugcuaggaggugaa

SEQ ID NO: 689473 - RNA, 22 nt, Human
ggcugcucuucuuggcgaccuc

SEQ ID NO: 689474 - RNA, 22 nt, Human
uggcugucagucgccugcauuc

SEQ ID NO: 689475 - RNA, 22 nt, Human
ucagcugcauaagucaccuugc

SEQ ID NO: 689476 - RNA, 22 nt, Human
aaaguuuuauucaagcauuagu

SEQ ID NO: 689477 - RNA, 22 nt, Human
uccuucagugucccgcucaggu

SEQ ID NO: 689478 - RNA, 22 nt, Human
ggucuccugaggcugccacacc

SEQ ID NO: 689479 - RNA, 22 nt, Human
aggaugggccugggauaugcuu

SEQ ID NO: 689480 - RNA, 22 nt, Human
agcucugcuucuugggaagaug

SEQ ID NO: 689481 - RNA, 22 nt, Human
uacauacauguauguguguauu

SEQ ID NO: 689482 - RNA, 22 nt, Human
aaagcaggcagcaggcuggauu

SEQ ID NO: 689483 - RNA, 22 nt, Human
aagccaugcaagccacaaggug

SEQ ID NO: 689484 - RNA, 16 nt, Human
agcagaggugagugaa

SEQ ID NO: 689485 - RNA, 22 nt, Human
gcagagaguugggcugcgccag

SEQ ID NO: 689486 - RNA, 22 nt, Human
aaaauaugacugugcuccuuaa

SEQ ID NO: 689487 - RNA, 22 nt, Human
cagguggguguaugaaugcaaa

SEQ ID NO: 689488 - RNA, 23 nt, Human
acaugcaaaaaucacagucuccu

SEQ ID NO: 689489 - RNA, 22 nt, Human
auacauuagcucauaugauuaa

SEQ ID NO: 689490 - RNA, 22 nt, Human
auggcugcucuggauggagucc

SEQ ID NO: 689491 - RNA, 22 nt, Human
accuucaagaaacauuuccuug

SEQ ID NO: 689492 - RNA, 22 nt, Human
cugccuuggcccuaguucaugg

SEQ ID NO: 689493 - RNA, 22 nt, Human
ccucucauagucuguauccuuu

SEQ ID NO: 689494 - RNA, 22 nt, Human
cugcaccacagccugaggcagc

SEQ ID NO: 689495 - RNA, 22 nt, Human
gcagugaaaaagugcacccugu

SEQ ID NO: 689496 - RNA, 22 nt, Human
aaacugaggaguuagacuaggg

SEQ ID NO: 689497 - RNA, 22 nt, Human
ccagaggaugcuggucagccuc

SEQ ID NO: 689498 - RNA, 22 nt, Human
acugcuuacaaaaggaaagaau

SEQ ID NO: 689499 - RNA, 22 nt, Human
caagucugucugcuccugugug

SEQ ID NO: 689500 - RNA, 20 nt, Human
cucugcugcgcaucccacuu

SEQ ID NO: 689501 - RNA, 22 nt, Human
agaagugagugugacucagcag

SEQ ID NO: 689502 - RNA, 22 nt, Human
ugggccugugaugcugggcuau

SEQ ID NO: 689503 - RNA, 21 nt, Human
ugcaguucaagucaaucuacu

SEQ ID NO: 689504 - RNA, 22 nt, Human
acuguaaaaugagauauguaua

SEQ ID NO: 689505 - RNA, 21 nt, Human
guuuuaagggagaaaaccuag

SEQ ID NO: 689506 - RNA, 22 nt, Human
gagggccaaagagcaagagccu

SEQ ID NO: 689507 - RNA, 20 nt, Human
uacccuggcuaugcuucuga

SEQ ID NO: 689508 - RNA, 22 nt, Human
ggcuguccaccuaccaugccgg

SEQ ID NO: 689509 - RNA, 22 nt, Human
ucucagagccuaacuaaccuaa

SEQ ID NO: 689510 - RNA, 22 nt, Human
uucuuuucuuggcaggaguaga

SEQ ID NO: 689511 - RNA, 22 nt, Human
guaauugaacauuaaguugaag

SEQ ID NO: 689512 - RNA, 22 nt, Human
agcagcugccacuggaauagga

SEQ ID NO: 689513 - RNA, 22 nt, Human
aaugacaagacauagucucuga

SEQ ID NO: 689514 - RNA, 22 nt, Human
gcaaauugcuagcuuucucugc

SEQ ID NO: 689515 - RNA, 20 nt, Human
ccagagcagccacugaaguu

SEQ ID NO: 689516 - RNA, 22 nt, Human
aguucacugcuuaagccuuuga

SEQ ID NO: 689517 - RNA, 22 nt, Human
uauucagaggugaaguagggag

SEQ ID NO: 689518 - RNA, 22 nt, Human
uccacagugguggaauuguuca

SEQ ID NO: 689519 - RNA, 21 nt, Human
ugggugggcagagucucuuca

SEQ ID NO: 689520 - RNA, 22 nt, Human
cugcagaauggggccaagugga

SEQ ID NO: 689521 - RNA, 22 nt, Human
uggcagcaguagccaccccagc

SEQ ID NO: 689522 - RNA, 22 nt, Human
uuucuacauuuguaaccagauu

SEQ ID NO: 689523 - RNA, 21 nt, Human
cacacaguggagugcccuugc

SEQ ID NO: 689524 - RNA, 22 nt, Human
ugaacauugucacauuccuagc

SEQ ID NO: 689525 - RNA, 22 nt, Human
ugcauuuaagaaaacaugaguc

SEQ ID NO: 689526 - RNA, 22 nt, Human
uacuauuuuugcaacguauaca

SEQ ID NO: 689527 - RNA, 22 nt, Human
uuauuucauauaauguuaucaa

SEQ ID NO: 689528 - RNA, 22 nt, Human
auccgcuuaucucagcuggcag

SEQ ID NO: 689529 - RNA, 22 nt, Human
gggccugggaacuugcauuuag

SEQ ID NO: 689530 - RNA, 22 nt, Human
gagcuuggaugucuuuuguuca

SEQ ID NO: 689531 - RNA, 22 nt, Human
gaagugucuccguuuuuaaagg

SEQ ID NO: 689532 - RNA, 22 nt, Human
ucucugggaucagguggcccag

SEQ ID NO: 689533 - RNA, 22 nt, Human
auucuucauaccuacugagguu

SEQ ID NO: 689534 - RNA, 22 nt, Human
uugaucaaaucagcuacugagg

SEQ ID NO: 689535 - RNA, 22 nt, Human
gcucagagggaacaaggggcug

SEQ ID NO: 689536 - RNA, 22 nt, Human
aggcagggcucauuucuuaggc

SEQ ID NO: 689537 - RNA, 22 nt, Human
cuuggcuggaacuccugagaaa

SEQ ID NO: 689538 - RNA, 22 nt, Human
aaagcuguaaugcaugcuuucu

SEQ ID NO: 689539 - RNA, 22 nt, Human
auuuugcuggucugaauuacuu

SEQ ID NO: 689540 - RNA, 22 nt, Human
ggucccuggggaacuaggcugu

SEQ ID NO: 689541 - RNA, 22 nt, Human
agaugacagccaaggagaugaa

SEQ ID NO: 689542 - RNA, 22 nt, Human
cacaaacaucaauccuguuuuc

SEQ ID NO: 689543 - RNA, 22 nt, Human
ggcagugcaaggcagccuggau

SEQ ID NO: 689544 - RNA, 22 nt, Human
ggcugugccucuggcagcacau

SEQ ID NO: 689545 - RNA, 21 nt, Human
agaguaauuccugcuggaaag

SEQ ID NO: 689546 - RNA, 22 nt, Human
gagccaagcaccacauuaaguu

SEQ ID NO: 689547 - RNA, 22 nt, Human
uagcauuccaucacucagcacc

SEQ ID NO: 689548 - RNA, 22 nt, Human
uaacucuagucccaggcaugaa

SEQ ID NO: 689549 - RNA, 22 nt, Human
aaggaagguucauagucaaaga

SEQ ID NO: 689550 - RNA, 22 nt, Human
ugucuggacagagauucucaau

SEQ ID NO: 689551 - RNA, 22 nt, Human
ggcuccaggagaugcugggcag

SEQ ID NO: 689552 - RNA, 22 nt, Human
cuguagagaaagcauggaagcu

SEQ ID NO: 689553 - RNA, 22 nt, Human
uuaagugucauaauuuccaaga

SEQ ID NO: 689554 - RNA, 22 nt, Human
aggcuaugauauuauugagaca

SEQ ID NO: 689555 - RNA, 22 nt, Human
aaagcaaacagaaccccaagcu

SEQ ID NO: 689556 - RNA, 22 nt, Human
ugaagcagauggucuggucauu

SEQ ID NO: 689557 - RNA, 22 nt, Human
gauccguugcaaccaauuagca

SEQ ID NO: 689558 - RNA, 22 nt, Human
ucuuucagcucuucaggaccca

SEQ ID NO: 689559 - RNA, 22 nt, Human
agccagaggccagccugccuca

SEQ ID NO: 689560 - RNA, 22 nt, Human
cuggagcucagcccagguucca

SEQ ID NO: 689561 - RNA, 22 nt, Human
gagaggggcgcgcagcucgcga

SEQ ID NO: 689562 - RNA, 22 nt, Human
caggcacacauccgugagagau

SEQ ID NO: 689563 - RNA, 22 nt, Human
agauacaacucagaaguguggu

SEQ ID NO: 689564 - RNA, 22 nt, Human
gcagaagcccggucagcgcacg

SEQ ID NO: 689565 - RNA, 22 nt, Human
aagaaugucucuggugaggcgc

SEQ ID NO: 689566 - RNA, 22 nt, Human
agauuuuggcuggcuggagaga

SEQ ID NO: 689567 - RNA, 17 nt, Human
ggcuuccagguggcucu

SEQ ID NO: 689568 - RNA, 22 nt, Human
cuuaagauuugagauaccuaau

SEQ ID NO: 689569 - RNA, 22 nt, Human
cuguacaggucaaugauaagau

SEQ ID NO: 689570 - RNA, 22 nt, Human
gagccaggaggcagagacugca

SEQ ID NO: 689571 - RNA, 22 nt, Human
ccaggaacaaagccccauccac

SEQ ID NO: 689572 - RNA, 22 nt, Human
aggccacaguacuuugcagacc

SEQ ID NO: 689573 - RNA, 21 nt, Human
agaaaaguauuugaaucaaga

SEQ ID NO: 689574 - RNA, 20 nt, Human
acagcagccuugcuagaaac

SEQ ID NO: 689575 - RNA, 22 nt, Human
uccugggccuguacuccauccg

SEQ ID NO: 689576 - RNA, 22 nt, Human
caguauuuccucuucuuaacuu

SEQ ID NO: 689577 - RNA, 22 nt, Human
aaaauagcagggaugugggaaa

SEQ ID NO: 689578 - RNA, 22 nt, Human
cagggagcucugggccggacuc

SEQ ID NO: 689579 - RNA, 22 nt, Human
cuuggagagggagaaaaauaac

SEQ ID NO: 689580 - RNA, 22 nt, Human
uucaggauucugugucugacaa

SEQ ID NO: 689581 - RNA, 20 nt, Human
ugccuggccuuucucugccc

SEQ ID NO: 689582 - RNA, 22 nt, Human
cauuguuaccaucuuuuaccua

SEQ ID NO: 689583 - RNA, 22 nt, Human
agacgagggccuggcacacagu

SEQ ID NO: 689584 - RNA, 22 nt, Human
auacuguuuugugacuuaucuu

SEQ ID NO: 689585 - RNA, 22 nt, Human
cauguaguccuaaugcugguga

SEQ ID NO: 689586 - RNA, 23 nt, Human
agagagaguuugugucagguacc

SEQ ID NO: 689587 - RNA, 22 nt, Human
gugugucagguacugugcuagg

SEQ ID NO: 689588 - RNA, 22 nt, Human
cuggcugugcugacugagaggg

SEQ ID NO: 689589 - RNA, 22 nt, Human
cugccuuggaaaaugugguaau

SEQ ID NO: 689590 - RNA, 22 nt, Human
ucugagcugcagaguggggugg

SEQ ID NO: 689591 - RNA, 22 nt, Human
gaauuuuaaguguucgccucuu

SEQ ID NO: 689592 - RNA, 22 nt, Human
ggucugaggugggacccaggaa

SEQ ID NO: 689593 - RNA, 22 nt, Human
aguccagaucaugcagcaaacc

SEQ ID NO: 689594 - RNA, 22 nt, Human
uucugaugauggcggcuggagc

SEQ ID NO: 689595 - RNA, 22 nt, Human
uuuaacauguucaagaaacaua

SEQ ID NO: 689596 - RNA, 18 nt, Human
acacaggcugacagcacc

SEQ ID NO: 689597 - RNA, 22 nt, Human
gccagguugcugacgacgaucu

SEQ ID NO: 689598 - RNA, 22 nt, Human
ucugugcggucuguguuaugaa

SEQ ID NO: 689599 - RNA, 19 nt, Human
auaaauaaaaagugggaga

SEQ ID NO: 689600 - RNA, 22 nt, Human
uucaaacaaaacuguucccaua

SEQ ID NO: 689601 - RNA, 20 nt, Human
agagugagacuccaucucag

SEQ ID NO: 689602 - RNA, 22 nt, Human
aguagacauuuugcaacaucug

SEQ ID NO: 689603 - RNA, 22 nt, Human
gucugggcuccuggcaggcagc

SEQ ID NO: 689604 - RNA, 22 nt, Human
ucauugauaaaguacugcuuuu

SEQ ID NO: 689605 - RNA, 22 nt, Human
cugugcaguaggucagggcugg

SEQ ID NO: 689606 - RNA, 22 nt, Human
aagcaguuacuauuuacuauua

SEQ ID NO: 689607 - RNA, 22 nt, Human
ucacugcaaucucugccuucca

SEQ ID NO: 689608 - RNA, 22 nt, Human
agugcagaguacauuuguggca

SEQ ID NO: 689609 - RNA, 22 nt, Human
agagaacauauuuuguaugauu

SEQ ID NO: 689610 - RNA, 22 nt, Human
cagcucuggcgucagggagcga

SEQ ID NO: 689611 - RNA, 22 nt, Human
uaacaguaaaguaaguuagcuu

SEQ ID NO: 689612 - RNA, 22 nt, Human
gagcuaagcuauguuaugcagc

SEQ ID NO: 689613 - RNA, 22 nt, Human
acacugaguuuuaccaggcaca

SEQ ID NO: 689614 - RNA, 22 nt, Human
agggguuggacauaagacagaa

SEQ ID NO: 689615 - RNA, 23 nt, Human
cuguccaggauucuugagagaac

SEQ ID NO: 689616 - RNA, 22 nt, Human
ccaggccuucugaggacacucu

SEQ ID NO: 689617 - RNA, 22 nt, Human
ugcagcucauugcuggggucug

SEQ ID NO: 689618 - RNA, 18 nt, Human
cugucagcagcuucacga

SEQ ID NO: 689619 - RNA, 22 nt, Human
acauuaaauuucauagugauua

SEQ ID NO: 689620 - RNA, 22 nt, Human
ucccaggugaugcugaggccac

SEQ ID NO: 689621 - RNA, 22 nt, Human
acuucaugcuuuagagagauga

SEQ ID NO: 689622 - RNA, 22 nt, Human
aaggacagagagccauuccaga

SEQ ID NO: 689623 - RNA, 22 nt, Human
uugucugcauuguuucuauggg

SEQ ID NO: 689624 - RNA, 22 nt, Human
cuugacacugucacucaggcca

SEQ ID NO: 689625 - RNA, 22 nt, Human
auauacacuccacugauacagg

SEQ ID NO: 689626 - RNA, 22 nt, Human
auucagaaacucugggcagaac

SEQ ID NO: 689627 - RNA, 22 nt, Human
ggagggagcagagaacccaacc

SEQ ID NO: 689628 - RNA, 22 nt, Human
acuuugcagguacaugagcauc

SEQ ID NO: 689629 - RNA, 22 nt, Human
accagugucuuauugaccaucu

SEQ ID NO: 689630 - RNA, 22 nt, Human
cuguuauuuaugcugcuccauu

SEQ ID NO: 689631 - RNA, 22 nt, Human
uuacaucuaaacugugaacaau

SEQ ID NO: 689632 - RNA, 22 nt, Human
uggcuuucucccccagcuucuc

SEQ ID NO: 689633 - RNA, 22 nt, Human
agcaccuccgugcagcguggcc

SEQ ID NO: 689634 - RNA, 22 nt, Human
cuauuuuccgcagcaggaagua

SEQ ID NO: 689635 - RNA, 19 nt, Human
agaggcaagggcucaugac

SEQ ID NO: 689636 - RNA, 22 nt, Human
agccuauuccaggaugagcuca

SEQ ID NO: 689637 - RNA, 22 nt, Human
uucugugcccauuuuaaaaugg

SEQ ID NO: 689638 - RNA, 22 nt, Human
ucauguacauguaagucagaaa

SEQ ID NO: 689639 - RNA, 22 nt, Human
gggggucccaagcugggcugcu

SEQ ID NO: 689640 - RNA, 22 nt, Human
cccagagcuccgguccugccca

SEQ ID NO: 689641 - RNA, 22 nt, Human
ucagccagaggcuucuugguuu

SEQ ID NO: 689642 - RNA, 22 nt, Human
agacacugccacuucuguuccc

SEQ ID NO: 689643 - RNA, 22 nt, Human
ugacaaugauuagguagcuucu

SEQ ID NO: 689644 - RNA, 22 nt, Human
ccucugccugcacaucauccug

SEQ ID NO: 689645 - RNA, 22 nt, Human
aucuggcucgcuaggcucuggg

SEQ ID NO: 689646 - RNA, 22 nt, Human
aggugucuucagggugagacag

SEQ ID NO: 689647 - RNA, 22 nt, Human
gccagguguaguggccacaccu

SEQ ID NO: 689648 - RNA, 22 nt, Human
uagagcugcuggacuguaacag

SEQ ID NO: 689649 - RNA, 22 nt, Human
cuggcagcaguuaugaaacaau

SEQ ID NO: 689650 - RNA, 22 nt, Human
ucccagugagaugaaacaggua

SEQ ID NO: 689651 - RNA, 22 nt, Human
ugauuuuacuuagcaugauguu

SEQ ID NO: 689652 - RNA, 22 nt, Human
cucaggaugaaagucaugguga

SEQ ID NO: 689653 - RNA, 22 nt, Human
aacuccucacugccucuggcac

SEQ ID NO: 689654 - RNA, 22 nt, Human
uaguggagaggauguggagaaa

SEQ ID NO: 689655 - RNA, 22 nt, Human
ucaggcagagggagaagccaag

SEQ ID NO: 689656 - RNA, 22 nt, Human
cauggaacuguauaaaggcacu

SEQ ID NO: 689657 - RNA, 22 nt, Human
uggcagggugccaguugcgagu

SEQ ID NO: 689658 - RNA, 22 nt, Human
gcaugcaugguuugugacugug

SEQ ID NO: 689659 - RNA, 22 nt, Human
ugucccaggccucauguugcca

SEQ ID NO: 689660 - RNA, 22 nt, Human
aggcugcguuagccucacuccc

SEQ ID NO: 689661 - RNA, 22 nt, Human
caggaacaacucccagcaucuc

SEQ ID NO: 689662 - RNA, 22 nt, Human
uucaucaauguguuuaauaaug

SEQ ID NO: 689663 - RNA, 22 nt, Human
gaaucuuuuuucuugccaggca

SEQ ID NO: 689664 - RNA, 22 nt, Human
uacagugucuggauaucaaagg

SEQ ID NO: 689665 - RNA, 19 nt, Human
uggcauguuuggcuaagga

SEQ ID NO: 689666 - RNA, 22 nt, Human
ucucccucuuugucugcuuugg

SEQ ID NO: 689667 - RNA, 22 nt, Human
cugacagauacuuaugacauaa

SEQ ID NO: 689668 - RNA, 22 nt, Human
auaucacagcucuuucauugcu

SEQ ID NO: 689669 - RNA, 22 nt, Human
aggaggcugggcacaguggccu

SEQ ID NO: 689670 - RNA, 22 nt, Human
gucucagaccacccucuuuggc

SEQ ID NO: 689671 - RNA, 22 nt, Human
acuccaaggccacaugcauucc

SEQ ID NO: 689672 - RNA, 22 nt, Human
gcuaugcaggagccuaaugaca

SEQ ID NO: 689673 - RNA, 22 nt, Human
uagguucagcuuccacugccua

SEQ ID NO: 689674 - RNA, 22 nt, Human
ggggcuguuuuuggaauggcug

SEQ ID NO: 689675 - RNA, 20 nt, Human
ucagagaaggagcuuuccug

SEQ ID NO: 689676 - RNA, 22 nt, Human
ucucucaggaggcagguuccua

SEQ ID NO: 689677 - RNA, 22 nt, Human
ccaaaauauuagugcuuaagua

SEQ ID NO: 689678 - RNA, 19 nt, Human
ccucugcgcuguccugcuc

SEQ ID NO: 689679 - RNA, 22 nt, Human
auuucccaugugaaucaauugg

SEQ ID NO: 689680 - RNA, 22 nt, Human
gaagcagcugccagagaugucu

SEQ ID NO: 689681 - RNA, 22 nt, Human
gaggguuggugcaaaugggaug

SEQ ID NO: 689682 - RNA, 22 nt, Human
ucucuagacauggggaauguca

SEQ ID NO: 689683 - RNA, 22 nt, Human
ugcacaggaggcuguggagaag

SEQ ID NO: 689684 - RNA, 22 nt, Human
gugagcagaacagguggcuucu

SEQ ID NO: 689685 - RNA, 22 nt, Human
aaagacauauuucuaaguuuau

SEQ ID NO: 689686 - RNA, 22 nt, Human
ugaaugaugcaguauaaugaua

SEQ ID NO: 689687 - RNA, 22 nt, Human
uggcaguaaagcuggaaaagug

SEQ ID NO: 689688 - RNA, 23 nt, Human
uucauugagcuguucuugaggau

SEQ ID NO: 689689 - RNA, 22 nt, Human
gcuucucaauucucacccucca

SEQ ID NO: 689690 - RNA, 22 nt, Human
cauucacucagcgaugccagua

SEQ ID NO: 689691 - RNA, 22 nt, Human
ugucauuuggacuuugguauua

SEQ ID NO: 689692 - RNA, 22 nt, Human
cccaggcaggagugugguggcu

SEQ ID NO: 689693 - RNA, 22 nt, Human
ccucagagguucugugugggaa

SEQ ID NO: 689694 - RNA, 21 nt, Human
gauaaagcagcuugccuaagg

SEQ ID NO: 689695 - RNA, 19 nt, Human
ggaaggugacaguggugaa

SEQ ID NO: 689696 - RNA, 17 nt, Human
agcaggcugcagaggcc

SEQ ID NO: 689697 - RNA, 22 nt, Human
aggggaugauccucccgcagcg

SEQ ID NO: 689698 - RNA, 18 nt, Human
ucccucagaauuauagaa

SEQ ID NO: 689699 - RNA, 22 nt, Human
gcccucagcaggaaagaucaac

SEQ ID NO: 689700 - RNA, 22 nt, Human
cuccucacuuuccagacugggc

SEQ ID NO: 689701 - RNA, 22 nt, Human
guucugucacacacugguacuu

SEQ ID NO: 689702 - RNA, 22 nt, Human
cucugggguuaagcuuccaugg

SEQ ID NO: 689703 - RNA, 22 nt, Human
gaagaagccucuguggaucuga

SEQ ID NO: 689704 - RNA, 22 nt, Human
ugucagacacagccagagacug

SEQ ID NO: 689705 - RNA, 22 nt, Human
caggcaaggacucugguaauuu

SEQ ID NO: 689706 - RNA, 22 nt, Human
uuggaaggcccugccuagcagg

SEQ ID NO: 689707 - RNA, 22 nt, Human
uggcggggcagcucuggcuucu

SEQ ID NO: 689708 - RNA, 22 nt, Human
aagcaaagacaguuugagugga

SEQ ID NO: 689709 - RNA, 22 nt, Human
caggcagagcugaagauagaug

SEQ ID NO: 689710 - RNA, 22 nt, Human
cacauaaguggguuccauugca

SEQ ID NO: 689711 - RNA, 17 nt, Human
uggccagagcaggcccc

SEQ ID NO: 689712 - RNA, 22 nt, Human
ccugucugagccagggugggca

SEQ ID NO: 689713 - RNA, 22 nt, Human
agcaggggcaggguuuugugcu

SEQ ID NO: 689714 - RNA, 22 nt, Human
aacuccagggggucaauauuua

SEQ ID NO: 689715 - RNA, 22 nt, Human
auguggcuaguggacacaguau

SEQ ID NO: 689716 - RNA, 22 nt, Human
ugucuguauugaggugcauauu

SEQ ID NO: 689717 - RNA, 22 nt, Human
acacaaugauucacaagcagca

SEQ ID NO: 689718 - RNA, 22 nt, Human
augaggcagaaaaaagucggag

SEQ ID NO: 689719 - RNA, 18 nt, Human
uggagcaggaagccuggc

SEQ ID NO: 689720 - RNA, 22 nt, Human
uguucucacuggaugcuucaca

SEQ ID NO: 689721 - RNA, 22 nt, Human
ugccuguguugauuacuuuguc

SEQ ID NO: 689722 - RNA, 22 nt, Human
ugauaaacuuagaaagaauguu

SEQ ID NO: 689723 - RNA, 22 nt, Human
aaucauccugaagucaauaaag

SEQ ID NO: 689724 - RNA, 22 nt, Human
gagcccagcugcggcccucagc

SEQ ID NO: 689725 - RNA, 22 nt, Human
uaacauuuaaauuuuucacaua

SEQ ID NO: 689726 - RNA, 22 nt, Human
aggcucugaguagagcugccag

SEQ ID NO: 689727 - RNA, 21 nt, Human
agcaggcuuuggaguggggcu

SEQ ID NO: 689728 - RNA, 22 nt, Human
acuauuuacucaaaugagguug

SEQ ID NO: 689729 - RNA, 22 nt, Human
auuaaauuuucacuaggcuccc

SEQ ID NO: 689730 - RNA, 22 nt, Human
gauaccagacagggagggagaa

SEQ ID NO: 689731 - RNA, 22 nt, Human
aagugucuaacugguuacuucu

SEQ ID NO: 689732 - RNA, 22 nt, Human
gaugggggccagggccugcuuu

SEQ ID NO: 689733 - RNA, 19 nt, Human
cgcagagggcuucugagag

SEQ ID NO: 689734 - RNA, 22 nt, Human
ugggccacaagccaugggacca

SEQ ID NO: 689735 - RNA, 20 nt, Human
aaagagaagccucaccuugu

SEQ ID NO: 689736 - RNA, 22 nt, Human
uggcccagcugcagauggugga

SEQ ID NO: 689737 - RNA, 22 nt, Human
uggacugauuuucauuuuaaau

SEQ ID NO: 689738 - RNA, 22 nt, Human
ugaggcucagaaauguaaguuu

SEQ ID NO: 689739 - RNA, 22 nt, Human
ugucugagcuggggcagacaga

SEQ ID NO: 689740 - RNA, 18 nt, Human
ugcucuggucucacuugg

SEQ ID NO: 689741 - RNA, 22 nt, Human
ggugugaauuuugaccuuuuaa

SEQ ID NO: 689742 - RNA, 22 nt, Human
uuaguuaggauuuggugguaua

SEQ ID NO: 689743 - RNA, 22 nt, Human
caugcugagcacauucuguauu

SEQ ID NO: 689744 - RNA, 22 nt, Human
uggggacauagccagucuggcu

SEQ ID NO: 689745 - RNA, 22 nt, Human
acugcacacuuagcaucuggga

SEQ ID NO: 689746 - RNA, 22 nt, Human
cuguccuugcuggccagguaug

SEQ ID NO: 689747 - RNA, 22 nt, Human
caugugugucuccaccagcugc

SEQ ID NO: 689748 - RNA, 22 nt, Human
agagaggcauucggugauccca

SEQ ID NO: 689749 - RNA, 22 nt, Human
uaagcauauuccagucaugucc

SEQ ID NO: 689750 - RNA, 22 nt, Human
aaaaguuuaagacucauucuag

SEQ ID NO: 689751 - RNA, 22 nt, Human
aagacaugacugcacagccaaa

SEQ ID NO: 689752 - RNA, 22 nt, Human
gagacugcauuguccaaggguu

SEQ ID NO: 689753 - RNA, 22 nt, Human
agcuggguggugcugagccuug

SEQ ID NO: 689754 - RNA, 22 nt, Human
gaggcuagagcaggggcucaau

SEQ ID NO: 689755 - RNA, 22 nt, Human
aaagucauguaaugauaugauu

SEQ ID NO: 689756 - RNA, 22 nt, Human
ucucaucucggaucagaaguga

SEQ ID NO: 689757 - RNA, 22 nt, Human
ugcagaagaccuuccagggcug

SEQ ID NO: 689758 - RNA, 22 nt, Human
acuagaaccagaggaggcaggu

SEQ ID NO: 689759 - RNA, 22 nt, Human
uggagcagccuuuucuaagcaa

SEQ ID NO: 689760 - RNA, 22 nt, Human
aggcugucaucuuugcaggcag

SEQ ID NO: 689761 - RNA, 22 nt, Human
gugcuuccccaagccacagccu

SEQ ID NO: 689762 - RNA, 22 nt, Human
ggaaaacugaggcucucagcag

SEQ ID NO: 689763 - RNA, 22 nt, Human
gcugcaggcgccugcggucucu

SEQ ID NO: 689764 - RNA, 22 nt, Human
cagcagcccuuuggcugaacug

SEQ ID NO: 689765 - RNA, 22 nt, Human
ucuagcuuggcguuugccuucu

SEQ ID NO: 689766 - RNA, 22 nt, Human
cuucuggguauuccagauaccu

SEQ ID NO: 689767 - RNA, 22 nt, Human
guggguggaucaccugagguca

SEQ ID NO: 689768 - RNA, 22 nt, Human
acacuaaaugagucuacaguac

SEQ ID NO: 689769 - RNA, 22 nt, Human
agaucacauaauuuccugugac

SEQ ID NO: 689770 - RNA, 22 nt, Human
ugaggccacaguaucagaacag

SEQ ID NO: 689771 - RNA, 22 nt, Human
uauucugcuucccguggcacaa

SEQ ID NO: 689772 - RNA, 22 nt, Human
agcugugugugaauuuggccua

SEQ ID NO: 689773 - RNA, 22 nt, Human
ugucauggugcuauuuaauuag

SEQ ID NO: 689774 - RNA, 22 nt, Human
guguggcugaaaucaaggcagg

SEQ ID NO: 689775 - RNA, 22 nt, Human
gacaaucagccauauccagggu

SEQ ID NO: 689776 - RNA, 22 nt, Human
uggaaggcgucucgaaggccua

SEQ ID NO: 689777 - RNA, 22 nt, Human
ggaggccaaggcagguggauca

SEQ ID NO: 689778 - RNA, 22 nt, Human
cagggacagccuugggguggcg

SEQ ID NO: 689779 - RNA, 23 nt, Human
cacauauagcagccacuaagguc

SEQ ID NO: 689780 - RNA, 22 nt, Human
auagcagaaaccaagcuucuuc

SEQ ID NO: 689781 - RNA, 22 nt, Human
gagcucuguguggcuugggugg

SEQ ID NO: 689782 - RNA, 22 nt, Human
agagucugaggcagcugcagcc

SEQ ID NO: 689783 - RNA, 22 nt, Human
ggccagcaggcccugugauccu

SEQ ID NO: 689784 - RNA, 22 nt, Human
uagcaacaccaucuggugagaa

SEQ ID NO: 689785 - RNA, 22 nt, Human
ccuucagccuuuguuuaucaga

SEQ ID NO: 689786 - RNA, 22 nt, Human
agccugguuuaagcauuuuaua

SEQ ID NO: 689787 - RNA, 22 nt, Human
ggcuggcacugaggagagcucu

SEQ ID NO: 689788 - RNA, 22 nt, Human
aggcuccuuauggcuuuggggu

SEQ ID NO: 689789 - RNA, 20 nt, Human
aaacauucauguacaaguga

SEQ ID NO: 689790 - RNA, 22 nt, Human
ugcccaagguggccuuuuacuc

SEQ ID NO: 689791 - RNA, 22 nt, Human
uuucucauagucaugccucuua

SEQ ID NO: 689792 - RNA, 22 nt, Human
aaauacagauuccagggucuua

SEQ ID NO: 689793 - RNA, 20 nt, Human
aauacuaaacacaaagcagu

SEQ ID NO: 689794 - RNA, 22 nt, Human
cuucugggcauucagcugcaca

SEQ ID NO: 689795 - RNA, 22 nt, Human
uuaccaauucagacaucucuuc

SEQ ID NO: 689796 - RNA, 20 nt, Human
cagaagcaaggcagguaccu

SEQ ID NO: 689797 - RNA, 22 nt, Human
agaccaagugcaggugccacua

SEQ ID NO: 689798 - RNA, 22 nt, Human
cuggaggcacccuuagagaggc

SEQ ID NO: 689799 - RNA, 22 nt, Human
ugcaaacauccgacugaaagcc

SEQ ID NO: 689800 - RNA, 22 nt, Human
uccaggcugacgcagcuauuua

SEQ ID NO: 689801 - RNA, 22 nt, Human
ggaaggaagugaccaggauauc

SEQ ID NO: 689802 - RNA, 22 nt, Human
gccuggcucacagagcagccuu

SEQ ID NO: 689803 - RNA, 20 nt, Human
cugaaccaaggcuuucucag

SEQ ID NO: 689804 - RNA, 22 nt, Human
ccucuggaucuuucuccacacu

SEQ ID NO: 689805 - RNA, 22 nt, Human
cacagcaaagacacucucaacu

SEQ ID NO: 689806 - RNA, 22 nt, Human
cugggagaggcugcuccgcucu

SEQ ID NO: 689807 - RNA, 22 nt, Human
caggcagagucagauuagacuu

SEQ ID NO: 689808 - RNA, 20 nt, Human
uacauauuauaucagcugca

SEQ ID NO: 689809 - RNA, 22 nt, Human
gggccagccuacugcuagaccc

SEQ ID NO: 689810 - RNA, 22 nt, Human
ccacuggcauccagcugccauc

SEQ ID NO: 689811 - RNA, 22 nt, Human
gugagagcugcuccagaucucu

SEQ ID NO: 689812 - RNA, 22 nt, Human
guguccuuauuucugucucuca

SEQ ID NO: 689813 - RNA, 22 nt, Human
gucugagaaucuugcauaucau

SEQ ID NO: 689814 - RNA, 22 nt, Human
ugaagugggggaacgagaguuc

SEQ ID NO: 689815 - RNA, 19 nt, Human
ccucugugggagucaguga

SEQ ID NO: 689816 - RNA, 22 nt, Human
cucucuggaccucaacuauuuu

SEQ ID NO: 689817 - RNA, 22 nt, Human
augcuugaaaaccccaugaaua

SEQ ID NO: 689818 - RNA, 22 nt, Human
aaccuguucccugguccuugac

SEQ ID NO: 689819 - RNA, 22 nt, Human
cauaguaaauaaugcagaugau

SEQ ID NO: 689820 - RNA, 22 nt, Human
gaggccaggaagcccaagauca

SEQ ID NO: 689821 - RNA, 23 nt, Human
ugguggcuugugguggccaccag

SEQ ID NO: 689822 - RNA, 22 nt, Human
ccaggguugcagggagccagca

SEQ ID NO: 689823 - RNA, 20 nt, Human
ugggcaccagaugggaugcc

SEQ ID NO: 689824 - RNA, 22 nt, Human
acugauggcccaccuuggucuc

SEQ ID NO: 689825 - RNA, 22 nt, Human
uaggcagagguaugguaaggac

SEQ ID NO: 689826 - RNA, 22 nt, Human
ggagggaguuucauuccugccc

SEQ ID NO: 689827 - RNA, 22 nt, Human
uauguuaaauguuugauguuua

SEQ ID NO: 689828 - RNA, 19 nt, Human
ugggccugcaucugggucu

SEQ ID NO: 689829 - RNA, 22 nt, Human
aaaggagaguagguuacuccau

SEQ ID NO: 689830 - RNA, 22 nt, Human
auaugagagaggaaagauuuua

SEQ ID NO: 689831 - RNA, 18 nt, Human
uggcugcuggaguagggu

SEQ ID NO: 689832 - RNA, 21 nt, Human
ccccucauacacucuccuugc

SEQ ID NO: 689833 - RNA, 22 nt, Human
caggcagaaugagauuacuuca

SEQ ID NO: 689834 - RNA, 22 nt, Human
cagcaccccuccuggcuaugaa

SEQ ID NO: 689835 - RNA, 22 nt, Human
caacagagcaguugaucaggaa

SEQ ID NO: 689836 - RNA, 22 nt, Human
caaggagaaaacggcuucugaa

SEQ ID NO: 689837 - RNA, 22 nt, Human
ugcugccuuucugaauggugga

SEQ ID NO: 689838 - RNA, 22 nt, Human
ccugggcuguaccugugcgcgg

SEQ ID NO: 689839 - RNA, 22 nt, Human
acuuccugcaaucguccacucc

SEQ ID NO: 689840 - RNA, 22 nt, Human
cccagcuccuuacagggccgaa

SEQ ID NO: 689841 - RNA, 22 nt, Human
acucuggcccuccugcugccag

SEQ ID NO: 689842 - RNA, 22 nt, Human
cugggucucuuaccaugugacu

SEQ ID NO: 689843 - RNA, 22 nt, Human
ggcugcacgccucucagcuugc

SEQ ID NO: 689844 - RNA, 22 nt, Human
agagagcucuggcugggugacc

SEQ ID NO: 689845 - RNA, 22 nt, Human
ucucagaggcccgacguucucc

SEQ ID NO: 689846 - RNA, 22 nt, Human
auugaaagauauacuguucuca

SEQ ID NO: 689847 - RNA, 22 nt, Human
auuucucugccucagcuucugc

SEQ ID NO: 689848 - RNA, 22 nt, Human
ugauaaacagcugaugaagacc

SEQ ID NO: 689849 - RNA, 22 nt, Human
aaaggcacuggauagcugggga

SEQ ID NO: 689850 - RNA, 22 nt, Human
uguggguuuaagaggcagcaug

SEQ ID NO: 689851 - RNA, 22 nt, Human
gaggcauggccugaggcuagga

SEQ ID NO: 689852 - RNA, 22 nt, Human
ugaacacauuuucuucaguaga

SEQ ID NO: 689853 - RNA, 22 nt, Human
cuaagaaggaggaaaagugcca

SEQ ID NO: 689854 - RNA, 22 nt, Human
cuggcugaggucaccaguagcu

SEQ ID NO: 689855 - RNA, 22 nt, Human
gcagcccauaacauuugaggcc

SEQ ID NO: 689856 - RNA, 22 nt, Human
cagggccauuggaacaaagagg

SEQ ID NO: 689857 - RNA, 21 nt, Human
aaugaaguggcuauuuugagg

SEQ ID NO: 689858 - RNA, 20 nt, Human
agugcauggagggagagggc

SEQ ID NO: 689859 - RNA, 22 nt, Human
uaauacaucauucaucuaagga

SEQ ID NO: 689860 - RNA, 22 nt, Human
ucucagaaaaaggagaaacugg

SEQ ID NO: 689861 - RNA, 22 nt, Human
aaauugcugacacuugaccauu

SEQ ID NO: 689862 - RNA, 22 nt, Human
ucacugcucagucuguacuaca

SEQ ID NO: 689863 - RNA, 22 nt, Human
uacauacagccaaguaugaagu

SEQ ID NO: 689864 - RNA, 22 nt, Human
gaagaaggugccagaggcuuac

SEQ ID NO: 689865 - RNA, 22 nt, Human
uuggcagggccaggcucucucu

SEQ ID NO: 689866 - RNA, 22 nt, Human
uccccacucucuccuggagcuu

SEQ ID NO: 689867 - RNA, 20 nt, Human
ugggucugcuuggcuucagu

SEQ ID NO: 689868 - RNA, 22 nt, Human
acuguggggugcgaggcaguga

SEQ ID NO: 689869 - RNA, 22 nt, Human
acuaaaugcugcauaaaugcuu

SEQ ID NO: 689870 - RNA, 22 nt, Human
uccuccaguggcccaguccuuc

SEQ ID NO: 689871 - RNA, 22 nt, Human
gggagaaaugucuggccugcug

SEQ ID NO: 689872 - RNA, 22 nt, Human
gguggcucucuuaagggcagcg

SEQ ID NO: 689873 - RNA, 22 nt, Human
gggcucugcgcucagcuccagc

SEQ ID NO: 689874 - RNA, 22 nt, Human
agaauuuaggaugcaugugaau

SEQ ID NO: 689875 - RNA, 22 nt, Human
ugccuguguggggucugccgcc

SEQ ID NO: 689876 - RNA, 23 nt, Human
agcuaacagaucgacaaaguaua

SEQ ID NO: 689877 - RNA, 22 nt, Human
ccugagcugacucuccuuucag

SEQ ID NO: 689878 - RNA, 19 nt, Human
acuggcaguuucugcaugg

SEQ ID NO: 689879 - RNA, 22 nt, Human
uggcucugcgucuguucguggg

SEQ ID NO: 689880 - RNA, 22 nt, Human
uuggaaagggaggaauguagac

SEQ ID NO: 689881 - RNA, 22 nt, Human
cagaggcacagcuucuuuuaau

SEQ ID NO: 689882 - RNA, 22 nt, Human
ugcaggugucugggggcaacag

SEQ ID NO: 689883 - RNA, 21 nt, Human
ccaggguccagcugccauggu

SEQ ID NO: 689884 - RNA, 22 nt, Human
cuggaaugccucccugucagag

SEQ ID NO: 689885 - RNA, 22 nt, Human
ucaguuaccugacagugguuau

SEQ ID NO: 689886 - RNA, 22 nt, Human
cagauaacacaaagaaaugggc

SEQ ID NO: 689887 - RNA, 22 nt, Human
acauuacauaagauuguaaccu

SEQ ID NO: 689888 - RNA, 22 nt, Human
gagcugaggccagagucuucug

SEQ ID NO: 689889 - RNA, 22 nt, Human
accaggagccauagagucaggc

SEQ ID NO: 689890 - RNA, 22 nt, Human
acacuuuguuguggcauauacg

SEQ ID NO: 689891 - RNA, 22 nt, Human
gaggcugguuugccuuuuggca

SEQ ID NO: 689892 - RNA, 22 nt, Human
gccagggaggcuguaggguccu

SEQ ID NO: 689893 - RNA, 22 nt, Human
cuuguguuguacauucuauggg

SEQ ID NO: 689894 - RNA, 22 nt, Human
cugugccuuuguagcugugccu

SEQ ID NO: 689895 - RNA, 22 nt, Human
uggcuaggaauccaugacucuc

SEQ ID NO: 689896 - RNA, 22 nt, Human
uggcuccucuucuggguguccc

SEQ ID NO: 689897 - RNA, 22 nt, Human
ggccugugagaaucaaggaaaa

SEQ ID NO: 689898 - RNA, 22 nt, Human
aaagucacaguuuaggggauau

SEQ ID NO: 689899 - RNA, 22 nt, Human
uuuacucuugcuacacaacugu

SEQ ID NO: 689900 - RNA, 22 nt, Human
cuucuucaaccugaaaguuuca

SEQ ID NO: 689901 - RNA, 22 nt, Human
gcugcaggcggccgugguggcg

SEQ ID NO: 689902 - RNA, 22 nt, Human
uuuguuugccacacaaaacagu

SEQ ID NO: 689903 - RNA, 22 nt, Human
ggagcaaaugccaagugggagg

SEQ ID NO: 689904 - RNA, 22 nt, Human
auuuccaguccuaaugaucugg

SEQ ID NO: 689905 - RNA, 22 nt, Human
gccucagagggcagggugguga

SEQ ID NO: 689906 - RNA, 22 nt, Human
aggugggugccuauguauguau

SEQ ID NO: 689907 - RNA, 20 nt, Human
cuccugggacugcugguuau

SEQ ID NO: 689908 - RNA, 22 nt, Human
gguggcaggcccugagcauccc

SEQ ID NO: 689909 - RNA, 18 nt, Human
uuuuaauuucaggggugg

SEQ ID NO: 689910 - RNA, 19 nt, Human
aguuuauuauaggugauuc

SEQ ID NO: 689911 - RNA, 22 nt, Human
uauuuuugccucucagauaaaa

SEQ ID NO: 689912 - RNA, 22 nt, Human
aaagugcugaaauuacaggggu

SEQ ID NO: 689913 - RNA, 22 nt, Human
uugagcaagaguaggaacugaa

SEQ ID NO: 689914 - RNA, 23 nt, Human
uaugaacugcauugcuggugugu

SEQ ID NO: 689915 - RNA, 22 nt, Human
cagagccucucagaggucagac

SEQ ID NO: 689916 - RNA, 22 nt, Human
auuucacaaaccauccugauuu

SEQ ID NO: 689917 - RNA, 20 nt, Human
agcugcucucauccagaccu

SEQ ID NO: 689918 - RNA, 22 nt, Human
aaguccaugaucaagauguggc

SEQ ID NO: 689919 - RNA, 22 nt, Human
ccuggcugcuuucacuauggag

SEQ ID NO: 689920 - RNA, 22 nt, Human
ugccugugggugaugauuugau

SEQ ID NO: 689921 - RNA, 22 nt, Human
ugcucccugcucagagaggcca

SEQ ID NO: 689922 - RNA, 22 nt, Human
gcugucuggguugagggcccug

SEQ ID NO: 689923 - RNA, 22 nt, Human
auuuacagccuugaaaacagca

SEQ ID NO: 689924 - RNA, 22 nt, Human
cuuuaccacaaggacagaacuu

SEQ ID NO: 689925 - RNA, 22 nt, Human
acuucccacacccuguuuucuc

SEQ ID NO: 689926 - RNA, 22 nt, Human
uguucuuucaguuagacacagu

SEQ ID NO: 689927 - RNA, 21 nt, Human
agaagccuggguggagguggg

SEQ ID NO: 689928 - RNA, 22 nt, Human
gcuucucuuaaugccuggcuuu

SEQ ID NO: 689929 - RNA, 22 nt, Human
accuccauggcucaguuucaga

SEQ ID NO: 689930 - RNA, 22 nt, Human
aggcuuauagcuuauauuuaag

SEQ ID NO: 689931 - RNA, 22 nt, Human
cuggaagugggguuggcuugaa

SEQ ID NO: 689932 - RNA, 23 nt, Human
aagauacagguguggaaugguuu

SEQ ID NO: 689933 - RNA, 22 nt, Human
agagcagcuggggcagagacca

SEQ ID NO: 689934 - RNA, 23 nt, Human
ugauggaaaugaucugggucugu

SEQ ID NO: 689935 - RNA, 22 nt, Human
aaccuguaaauccaaacaaucu

SEQ ID NO: 689936 - RNA, 22 nt, Human
cacugucuguguguccuugggg

SEQ ID NO: 689937 - RNA, 22 nt, Human
aauggccuuugagaugaaaggg

SEQ ID NO: 689938 - RNA, 22 nt, Human
ugaguucuaguggcugcagauu

SEQ ID NO: 689939 - RNA, 21 nt, Human
uuuaucaucacgagcuugagc

SEQ ID NO: 689940 - RNA, 22 nt, Human
gaaguagaaagccucguaaaua

SEQ ID NO: 689941 - RNA, 23 nt, Human
cacaccuguuaagaagagugccu

SEQ ID NO: 689942 - RNA, 22 nt, Human
agagagccugaguggcagcuau

SEQ ID NO: 689943 - RNA, 22 nt, Human
acaaacaucuugaccucagauu

SEQ ID NO: 689944 - RNA, 21 nt, Human
gggagggauggaaaugauguu

SEQ ID NO: 689945 - RNA, 22 nt, Human
gccuccggaguugcagugucuu

SEQ ID NO: 689946 - RNA, 22 nt, Human
caacauuugaguaaagaaaugg

SEQ ID NO: 689947 - RNA, 22 nt, Human
cacaugcaucugucauguuugg

SEQ ID NO: 689948 - RNA, 22 nt, Human
aaacucuggggguggagcccag

SEQ ID NO: 689949 - RNA, 22 nt, Human
ugaguagagaauucagcuaagg

SEQ ID NO: 689950 - RNA, 22 nt, Human
aggucaagggagcugagggcca

SEQ ID NO: 689951 - RNA, 22 nt, Human
gccuaaggauaugcuuugcuug

SEQ ID NO: 689952 - RNA, 23 nt, Human
aggcagcagguuguccaggguga

SEQ ID NO: 689953 - RNA, 22 nt, Human
ugggagcucugagccugcuaug

SEQ ID NO: 689954 - RNA, 22 nt, Human
cuaaacauguuggugcuuuaaa

SEQ ID NO: 689955 - RNA, 22 nt, Human
uaaaacugaauacauacugagg

SEQ ID NO: 689956 - RNA, 23 nt, Human
ggacagggcccugcccuauggcc

SEQ ID NO: 689957 - RNA, 22 nt, Human
gggaagggcuccuuuuauugca

SEQ ID NO: 689958 - RNA, 22 nt, Human
cagccagaucaaacucagaugu

SEQ ID NO: 689959 - RNA, 22 nt, Human
acagacagauuuugucugaugu

SEQ ID NO: 689960 - RNA, 22 nt, Human
uuuuauauggcacauugguugg

SEQ ID NO: 689961 - RNA, 22 nt, Human
ggagcccuugcugaccuuccaa

SEQ ID NO: 689962 - RNA, 22 nt, Human
aucuggguucaccaugcuccug

SEQ ID NO: 689963 - RNA, 22 nt, Human
uuggcuucuguuuuggcucugu

SEQ ID NO: 689964 - RNA, 22 nt, Human
gagaacacaugcagacugggua

SEQ ID NO: 689965 - RNA, 22 nt, Human
ucaagaguuggucaaauccaaa

SEQ ID NO: 689966 - RNA, 22 nt, Human
ugucuaaaugcaauggauuucc

SEQ ID NO: 689967 - RNA, 22 nt, Human
uuauggcauauuccucauugua

SEQ ID NO: 689968 - RNA, 19 nt, Human
aagaggcaacccucgagcc

SEQ ID NO: 689969 - RNA, 22 nt, Human
cucagggaauugaaucuccuug

SEQ ID NO: 689970 - RNA, 22 nt, Human
ccaagcuucuuuccuacuacag

SEQ ID NO: 689971 - RNA, 19 nt, Human
aucugccuguuaucacaua

SEQ ID NO: 689972 - RNA, 22 nt, Human
cuuccucugcggcgccgggcgc

SEQ ID NO: 689973 - RNA, 22 nt, Human
cuuuaauucucaggugcacaua

SEQ ID NO: 689974 - RNA, 22 nt, Human
uuacacuaagcuacuucuauau

SEQ ID NO: 689975 - RNA, 22 nt, Human
cagugucucccccagguucugu

SEQ ID NO: 689976 - RNA, 22 nt, Human
gccaggagcccugggcaaguuc

SEQ ID NO: 689977 - RNA, 22 nt, Human
gcagagugaagcaguauggaaa

SEQ ID NO: 689978 - RNA, 22 nt, Human
uccagcaugaaggggcuuuuau

SEQ ID NO: 689979 - RNA, 16 nt, Human
cuccucuccuucagga

SEQ ID NO: 689980 - RNA, 22 nt, Human
aguccaagauuagggugacagc

SEQ ID NO: 689981 - RNA, 21 nt, Human
aguucacaggaacaagcaggg

SEQ ID NO: 689982 - RNA, 20 nt, Human
aguggcagggaaauggaaag

SEQ ID NO: 689983 - RNA, 22 nt, Human
ggccuggccuccagaugugggc

SEQ ID NO: 689984 - RNA, 22 nt, Human
agguccugacuccacguucuag

SEQ ID NO: 689985 - RNA, 22 nt, Human
augcaguagauaggcacuuuua

SEQ ID NO: 689986 - RNA, 17 nt, Human
uccaagccagcuugccu

SEQ ID NO: 689987 - RNA, 22 nt, Human
ugccuaacuccaccaggcaggu

SEQ ID NO: 689988 - RNA, 22 nt, Human
uguuccaugucuuuguaggacu

SEQ ID NO: 689989 - RNA, 22 nt, Human
ugagguaaauagaaaaaccaug

SEQ ID NO: 689990 - RNA, 21 nt, Human
ucacagacuggucagugaggc

SEQ ID NO: 689991 - RNA, 22 nt, Human
ccuccucuggugcugccaaccc

SEQ ID NO: 689992 - RNA, 22 nt, Human
acacuguguuuacauagagaau

SEQ ID NO: 689993 - RNA, 22 nt, Human
guggcucucgccagccugcggg

SEQ ID NO: 689994 - RNA, 22 nt, Human
acuccaggguuuugcaccugga

SEQ ID NO: 689995 - RNA, 22 nt, Human
uccuccugccuuugcuucuugu

SEQ ID NO: 689996 - RNA, 22 nt, Human
ugagcagagcaguaacaggagc

SEQ ID NO: 689997 - RNA, 18 nt, Human
ccaguaccuccuccucuc

SEQ ID NO: 689998 - RNA, 22 nt, Human
cccagagcugggugggcagcgg

SEQ ID NO: 689999 - RNA, 22 nt, Human
ccuggaagauucaccacuacca

SEQ ID NO: 690000 - RNA, 22 nt, Human
aacacagggcagcugcugggaa

SEQ ID NO: 690001 - RNA, 22 nt, Human
ugcuccacugugcguggccaua

SEQ ID NO: 690002 - RNA, 22 nt, Human
aguggcaguaacauuccacaau

SEQ ID NO: 690003 - RNA, 22 nt, Human
acuuuaauuaaugaacuguggc

SEQ ID NO: 690004 - RNA, 22 nt, Human
gcuggacaggccacauggagga

SEQ ID NO: 690005 - RNA, 22 nt, Human
uuuggaauuccauuucugcauu

SEQ ID NO: 690006 - RNA, 22 nt, Human
acauucuaacauuguacagaua

SEQ ID NO: 690007 - RNA, 22 nt, Human
uggagguccugcaggauggcac

SEQ ID NO: 690008 - RNA, 22 nt, Human
acauucuuaacaguuaaaaacu

SEQ ID NO: 690009 - RNA, 22 nt, Human
ugcagcagagugggccugggug

SEQ ID NO: 690010 - RNA, 22 nt, Human
ugcagggcuacaggacuacaac

SEQ ID NO: 690011 - RNA, 22 nt, Human
auugaaaguccuaucuaaggga

SEQ ID NO: 690012 - RNA, 22 nt, Human
gugagguccugagaggcuugug

SEQ ID NO: 690013 - RNA, 22 nt, Human
cuguccuccagacgacaguccc

SEQ ID NO: 690014 - RNA, 21 nt, Human
ugcagacagggacagaaugga

SEQ ID NO: 690015 - RNA, 22 nt, Human
caggugacccucucaccugcuu

SEQ ID NO: 690016 - RNA, 22 nt, Human
cccagagcugagggggcacguu

SEQ ID NO: 690017 - RNA, 22 nt, Human
gcaguaugaguguuuuagacau

SEQ ID NO: 690018 - RNA, 22 nt, Human
cuuauguaugcuacuuuguggu

SEQ ID NO: 690019 - RNA, 22 nt, Human
aaugagcuagaccugcuuccuc

SEQ ID NO: 690020 - RNA, 22 nt, Human
uggaagcagugauucuugucug

SEQ ID NO: 690021 - RNA, 22 nt, Human
auuucuguaacuuaugaaaguu

SEQ ID NO: 690022 - RNA, 22 nt, Human
uaacuucucugagccucauucc

SEQ ID NO: 690023 - RNA, 22 nt, Human
auacaugauacuuaguacguag

SEQ ID NO: 690024 - RNA, 22 nt, Human
uuaacuauuauuagcaucuuug

SEQ ID NO: 690025 - RNA, 22 nt, Human
gacagguggguucucguaucug

SEQ ID NO: 690026 - RNA, 22 nt, Human
aagccuaggccuacucugguuu

SEQ ID NO: 690027 - RNA, 22 nt, Human
uucagugucccuaguagaaguu

SEQ ID NO: 690028 - RNA, 22 nt, Human
aacaugaagguaggaugguuuu

SEQ ID NO: 690029 - RNA, 22 nt, Human
auguuucuaaaacuugcauggc

SEQ ID NO: 690030 - RNA, 22 nt, Human
aaacauugagcacuugcuauuu

SEQ ID NO: 690031 - RNA, 22 nt, Human
cagugugccugaaucaaguguu

SEQ ID NO: 690032 - RNA, 22 nt, Human
aaauuccugucauuugcacuuu

SEQ ID NO: 690033 - RNA, 22 nt, Human
uguccagugauucucaugagcc

SEQ ID NO: 690034 - RNA, 22 nt, Human
gccagcugccaaguugugagau

SEQ ID NO: 690035 - RNA, 22 nt, Human
cuuuuaagggauaauaagaugu

SEQ ID NO: 690036 - RNA, 22 nt, Human
cccaggugcugaaggaggccgc

SEQ ID NO: 690037 - RNA, 22 nt, Human
ugaggugggugucaggucagag

SEQ ID NO: 690038 - RNA, 22 nt, Human
aacaugcuugcuuagaaucagc

SEQ ID NO: 690039 - RNA, 22 nt, Human
gccaggcagauaugugagcuua

SEQ ID NO: 690040 - RNA, 22 nt, Human
guggccagucccgaugcuuguu

SEQ ID NO: 690041 - RNA, 20 nt, Human
uaucuaaaugcuuacauuac

SEQ ID NO: 690042 - RNA, 22 nt, Human
augggaggcagcagagcccagc

SEQ ID NO: 690043 - RNA, 22 nt, Human
cuguacuuuugcaggucacagc

SEQ ID NO: 690044 - RNA, 22 nt, Human
acaagauagguugagucuagcc

SEQ ID NO: 690045 - RNA, 22 nt, Human
acaggcuguacuucuaaucauc

SEQ ID NO: 690046 - RNA, 22 nt, Human
cuucuuggugauggcuuaccug

SEQ ID NO: 690047 - RNA, 22 nt, Human
caucuuuaacaauuuacaaugu

SEQ ID NO: 690048 - RNA, 22 nt, Human
aaauagaaaccaacaaggucag

SEQ ID NO: 690049 - RNA, 22 nt, Human
agaggcacuaagggaagagcag

SEQ ID NO: 690050 - RNA, 19 nt, Human
uguugccagguaucauguu

SEQ ID NO: 690051 - RNA, 22 nt, Human
ggucugccacaagauuuuugag

SEQ ID NO: 690052 - RNA, 22 nt, Human
acagauuuauugaagcugcugc

SEQ ID NO: 690053 - RNA, 21 nt, Human
aucagcaaaugccugucuccc

SEQ ID NO: 690054 - RNA, 22 nt, Human
agcugccaaguuggaguagcaa

SEQ ID NO: 690055 - RNA, 22 nt, Human
acucucugguauuggcaaguuu

SEQ ID NO: 690056 - RNA, 22 nt, Human
cccuggaggaagaaacaauggc

SEQ ID NO: 690057 - RNA, 22 nt, Human
uagcaguuaaucugagccaaga

SEQ ID NO: 690058 - RNA, 22 nt, Human
acagaugaggaauuuauuuggu

SEQ ID NO: 690059 - RNA, 20 nt, Human
ggcugcccacuccagaguac

SEQ ID NO: 690060 - RNA, 22 nt, Human
uccugaggaaaguucaugaaug

SEQ ID NO: 690061 - RNA, 22 nt, Human
guucacauggcauuuucacauc

SEQ ID NO: 690062 - RNA, 22 nt, Human
uuuuccuuucaucaggacaaag

SEQ ID NO: 690063 - RNA, 22 nt, Human
uuugugugguggauacugggua

SEQ ID NO: 690064 - RNA, 22 nt, Human
aguuuauagcccagauucaugg

SEQ ID NO: 690065 - RNA, 22 nt, Human
cuccaggacucaggccccuggg

SEQ ID NO: 690066 - RNA, 21 nt, Human
acacugagugaauuagcacau

SEQ ID NO: 690067 - RNA, 23 nt, Human
gggauauggaccuuggaggaguc

SEQ ID NO: 690068 - RNA, 22 nt, Human
cuucccagaccuuagagugcag

SEQ ID NO: 690069 - RNA, 22 nt, Human
gaaugauauuauuucgugcugg

SEQ ID NO: 690070 - RNA, 22 nt, Human
ucgugaggcucugcaucgcaca

SEQ ID NO: 690071 - RNA, 22 nt, Human
aguaacaagugccaacguuaga

SEQ ID NO: 690072 - RNA, 22 nt, Human
aaauccuuuggaggacaugaug

SEQ ID NO: 690073 - RNA, 22 nt, Human
agcaguggcugaagauguuccu

SEQ ID NO: 690074 - RNA, 22 nt, Human
uuaaguauauccauuugacugg

SEQ ID NO: 690075 - RNA, 22 nt, Human
uugaauuagacuuugcuacagg

SEQ ID NO: 690076 - RNA, 22 nt, Human
gacauacagcccucucccuggu

SEQ ID NO: 690077 - RNA, 22 nt, Human
auagauuagcccuauaguuuua

SEQ ID NO: 690078 - RNA, 22 nt, Human
cuuauauuugucaacuuuacaa

SEQ ID NO: 690079 - RNA, 22 nt, Human
auauguuacucuuucaagcaga

SEQ ID NO: 690080 - RNA, 22 nt, Human
aggccucagcucagugugacag

SEQ ID NO: 690081 - RNA, 22 nt, Human
acaggaguggagaggugccucu

SEQ ID NO: 690082 - RNA, 22 nt, Human
ggugcucaagagggcauccucu

SEQ ID NO: 690083 - RNA, 22 nt, Human
aggggagaauuucaacucaggu

SEQ ID NO: 690084 - RNA, 22 nt, Human
guggggcuaaaaacugugcagu

SEQ ID NO: 690085 - RNA, 22 nt, Human
aacugaaacggugaucuuuuaa

SEQ ID NO: 690086 - RNA, 22 nt, Human
gaauccuugguuuuaagcaaua

SEQ ID NO: 690087 - RNA, 19 nt, Human
uuaugaauagcuucaucca

SEQ ID NO: 690088 - RNA, 22 nt, Human
ggggugggguuacucauugugc

SEQ ID NO: 690089 - RNA, 22 nt, Human
cuugucugggcagcuugggagu

SEQ ID NO: 690090 - RNA, 22 nt, Human
ucuuuaagggauguucugcuuu

SEQ ID NO: 690091 - RNA, 22 nt, Human
ugacauuucgguguaugugaug

SEQ ID NO: 690092 - RNA, 22 nt, Human
augugucuucuaagccaagccu

SEQ ID NO: 690093 - RNA, 22 nt, Human
uucaggaucacuaaacccucca

SEQ ID NO: 690094 - RNA, 22 nt, Human
ugacauaaugcuuugaaguugc

SEQ ID NO: 690095 - RNA, 22 nt, Human
aaaguggucaccuucucauuuc

SEQ ID NO: 690096 - RNA, 22 nt, Human
uaagguuucuaguuucuaaacu

SEQ ID NO: 690097 - RNA, 22 nt, Human
aguuugaauugaaaugcagaug

SEQ ID NO: 690098 - RNA, 22 nt, Human
acauuuguauauaugcagcaua

SEQ ID NO: 690099 - RNA, 21 nt, Human
uucagcuuaugugucacuugc

SEQ ID NO: 690100 - RNA, 22 nt, Human
aguuagaauggauguugagagc

SEQ ID NO: 690101 - RNA, 22 nt, Human
gaggcuggggucugccuuucug

SEQ ID NO: 690102 - RNA, 22 nt, Human
uugauucaaaacaggagguagg

SEQ ID NO: 690103 - RNA, 21 nt, Human
uaaaugugagcagggcugggc

SEQ ID NO: 690104 - RNA, 22 nt, Human
cacaauuacuuuugcaccaaca

SEQ ID NO: 690105 - RNA, 22 nt, Human
aggaagccaagccugacacuca

SEQ ID NO: 690106 - RNA, 22 nt, Human
acacuuugauagauaaugcagg

SEQ ID NO: 690107 - RNA, 17 nt, Human
ccugagugggagaggaa

SEQ ID NO: 690108 - RNA, 22 nt, Human
ucagcaggugcuuuguuuacuc

SEQ ID NO: 690109 - RNA, 22 nt, Human
aauucaaucuaagaaaugauca

SEQ ID NO: 690110 - RNA, 22 nt, Human
auacaaagcuuucugucuggua

SEQ ID NO: 690111 - RNA, 22 nt, Human
uggcaguggcaucaccccaaua

SEQ ID NO: 690112 - RNA, 22 nt, Human
gcagcaucaauccaugcuucuc

SEQ ID NO: 690113 - RNA, 22 nt, Human
uggcucaguuuagcagcucagu

SEQ ID NO: 690114 - RNA, 22 nt, Human
acauauguauauguacacaguc

SEQ ID NO: 690115 - RNA, 18 nt, Human
ugugguggagcugccuuc

SEQ ID NO: 690116 - RNA, 22 nt, Human
acugagguuucauuuuaucgcu

SEQ ID NO: 690117 - RNA, 22 nt, Human
cagauucugaagucuagcugcu

SEQ ID NO: 690118 - RNA, 22 nt, Human
ugagugcucuguaugugccaga

SEQ ID NO: 690119 - RNA, 22 nt, Human
ccaccuccaccuauugccagcc

SEQ ID NO: 690120 - RNA, 22 nt, Human
gggcccuggggccugauuugca

SEQ ID NO: 690121 - RNA, 22 nt, Human
auguguauuuauuuggggcuua

SEQ ID NO: 690122 - RNA, 22 nt, Human
auuuuaacccucuuauauauac

SEQ ID NO: 690123 - RNA, 22 nt, Human
cccaguggggaaauagcuagcu

SEQ ID NO: 690124 - RNA, 22 nt, Human
aacaacuugcguucagagaugu

SEQ ID NO: 690125 - RNA, 22 nt, Human
guucacauguggucaugcuguc

SEQ ID NO: 690126 - RNA, 20 nt, Human
cuguggugagcaggagagua

SEQ ID NO: 690127 - RNA, 22 nt, Human
uggcugccaugacgccugggga

SEQ ID NO: 690128 - RNA, 22 nt, Human
aagagaaagcagacuuugucau

SEQ ID NO: 690129 - RNA, 22 nt, Human
ucuguguaagaccagugcuggg

SEQ ID NO: 690130 - RNA, 22 nt, Human
cuggcuccugaggcuuggcccc

SEQ ID NO: 690131 - RNA, 22 nt, Human
cgugggaggaaaaaugggcuuc

SEQ ID NO: 690132 - RNA, 22 nt, Human
auaauaucgcuccuuuuuuuga

SEQ ID NO: 690133 - RNA, 22 nt, Human
acuggagucagggaaaaagugu

SEQ ID NO: 690134 - RNA, 22 nt, Human
gcccaagaguuaagucucugcu

SEQ ID NO: 690135 - RNA, 22 nt, Human
ugacucaguacaucuggaguug

SEQ ID NO: 690136 - RNA, 22 nt, Human
uacagcauugcauuuuccuuug

SEQ ID NO: 690137 - RNA, 22 nt, Human
uuguguaacuugagcaaacaca

SEQ ID NO: 690138 - RNA, 22 nt, Human
uuccauacgacugaggucucgg

SEQ ID NO: 690139 - RNA, 22 nt, Human
ccucugcacuucaccuuagcuc

SEQ ID NO: 690140 - RNA, 22 nt, Human
ugaggcagucacccccuccugc

SEQ ID NO: 690141 - RNA, 22 nt, Human
agcucagcacugucagcacucc

SEQ ID NO: 690142 - RNA, 22 nt, Human
gugcugaggauacagcugugaa

SEQ ID NO: 690143 - RNA, 22 nt, Human
cauuuagucaaggacacguggc

SEQ ID NO: 690144 - RNA, 22 nt, Human
ucuagcugaggguaggagaccu

SEQ ID NO: 690145 - RNA, 20 nt, Human
augcaucugguaucuuuccu

SEQ ID NO: 690146 - RNA, 22 nt, Human
cauucauuugcccaguaaguca

SEQ ID NO: 690147 - RNA, 22 nt, Human
augaaauuuuaauuauaccucu

SEQ ID NO: 690148 - RNA, 22 nt, Human
uuucaagcauaacugggaagag

SEQ ID NO: 690149 - RNA, 22 nt, Human
ucugaagagucaucuuugggug

SEQ ID NO: 690150 - RNA, 22 nt, Human
ccacccagaccagggaucuggg

SEQ ID NO: 690151 - RNA, 22 nt, Human
cggcugaggaucuccaggccug

SEQ ID NO: 690152 - RNA, 22 nt, Human
uucuaugauucauuuagaaguu

SEQ ID NO: 690153 - RNA, 22 nt, Human
gagugugggucucagcuuuaag

SEQ ID NO: 690154 - RNA, 22 nt, Human
guuguaaauacagcagauaauu

SEQ ID NO: 690155 - RNA, 22 nt, Human
uccuggauggagcugcccucgc

SEQ ID NO: 690156 - RNA, 22 nt, Human
cugugcuugacagugggaagca

SEQ ID NO: 690157 - RNA, 22 nt, Human
agugaauguccccgcgggucag

SEQ ID NO: 690158 - RNA, 22 nt, Human
ggagaguuguuuuugccuagau

SEQ ID NO: 690159 - RNA, 22 nt, Human
caggcuucaugaauuaugcacc

SEQ ID NO: 690160 - RNA, 22 nt, Human
gccuggaguacuccuugaagug

SEQ ID NO: 690161 - RNA, 22 nt, Human
cugaggcacccaucuucuccug

SEQ ID NO: 690162 - RNA, 22 nt, Human
aaggcuguuugagcacuggagc

SEQ ID NO: 690163 - RNA, 22 nt, Human
uuugcauuucucguaaggaaac

SEQ ID NO: 690164 - RNA, 22 nt, Human
gugcugcucacaucuggaggua

SEQ ID NO: 690165 - RNA, 22 nt, Human
ucagauuuccuguugaagaagu

SEQ ID NO: 690166 - RNA, 22 nt, Human
gacaggaauguguggaugcgga

SEQ ID NO: 690167 - RNA, 18 nt, Human
ucacauuauaauguaaca

SEQ ID NO: 690168 - RNA, 22 nt, Human
ccugggugucaugggcagcugg

SEQ ID NO: 690169 - RNA, 22 nt, Human
acagaagaccagagagcuaacu

SEQ ID NO: 690170 - RNA, 22 nt, Human
uguaccacucuacuaaggguuc

SEQ ID NO: 690171 - RNA, 22 nt, Human
cugauacauaguagcaugucau

SEQ ID NO: 690172 - RNA, 20 nt, Human
acacaguagaugagugacug

SEQ ID NO: 690173 - RNA, 22 nt, Human
uccaagaacccaagcgaaugcc

SEQ ID NO: 690174 - RNA, 22 nt, Human
caggaagagaacauggaggcug

SEQ ID NO: 690175 - RNA, 22 nt, Human
uucauucaucacaugcagcugg

SEQ ID NO: 690176 - RNA, 22 nt, Human
ugcuucuggaaacaguggcugu

SEQ ID NO: 690177 - RNA, 22 nt, Human
uucuucaguuugguaaauguaa

SEQ ID NO: 690178 - RNA, 22 nt, Human
uccucugaaaucuagauuguga

SEQ ID NO: 690179 - RNA, 22 nt, Human
aauacauguuuucuacuauucu

SEQ ID NO: 690180 - RNA, 22 nt, Human
ugccacaccaacaucuuucagc

SEQ ID NO: 690181 - RNA, 22 nt, Human
cacacagacagcucucugaaga

SEQ ID NO: 690182 - RNA, 21 nt, Human
agucucucuaauaaaugcuug

SEQ ID NO: 690183 - RNA, 22 nt, Human
ggucaucuguaauucuguuccu

SEQ ID NO: 690184 - RNA, 22 nt, Human
agagccaggaaguggcgugggg

SEQ ID NO: 690185 - RNA, 22 nt, Human
uguccuggagacacaagguggu

SEQ ID NO: 690186 - RNA, 22 nt, Human
ugucaucuacccguuaggcuuu

SEQ ID NO: 690187 - RNA, 22 nt, Human
agcauacaggucugaaacagcu

SEQ ID NO: 690188 - RNA, 22 nt, Human
ccagaagucaaguaagaugaag

SEQ ID NO: 690189 - RNA, 22 nt, Human
ucuuagcaugcauguauaaaua

SEQ ID NO: 690190 - RNA, 22 nt, Human
acuucuuuucaaaucaugcaaa

SEQ ID NO: 690191 - RNA, 22 nt, Human
acauuuguaggacagaggaaga

SEQ ID NO: 690192 - RNA, 18 nt, Human
agggccagcugugaguag

SEQ ID NO: 690193 - RNA, 22 nt, Human
ucagaguuucaggauacaaaua

SEQ ID NO: 690194 - RNA, 22 nt, Human
cuuucucugugugguaaagggc

SEQ ID NO: 690195 - RNA, 22 nt, Human
acagcuugcaugcagaggcacu

SEQ ID NO: 690196 - RNA, 22 nt, Human
cuagagaauugucuugagaguu

SEQ ID NO: 690197 - RNA, 17 nt, Human
cagaggagcuuuggggg

SEQ ID NO: 690198 - RNA, 22 nt, Human
aggcuucagcagcccucucuug

SEQ ID NO: 690199 - RNA, 22 nt, Human
uccuuugguaguuuucuuaaag

SEQ ID NO: 690200 - RNA, 22 nt, Human
ucucuaaagccuggaagaggag

SEQ ID NO: 690201 - RNA, 22 nt, Human
gagggggcuagcgcagugccca

SEQ ID NO: 690202 - RNA, 22 nt, Human
ugucuuuuauaacugacauaua

SEQ ID NO: 690203 - RNA, 22 nt, Human
ugugugccugagccgugccugg

SEQ ID NO: 690204 - RNA, 22 nt, Human
gcaagagcgcucucuuucauua

SEQ ID NO: 690205 - RNA, 18 nt, Human
gggaagaggaucuggccc

SEQ ID NO: 690206 - RNA, 22 nt, Human
gcuucuguauuuauuguccuuu

SEQ ID NO: 690207 - RNA, 22 nt, Human
uacugaaauagcacucugaugc

SEQ ID NO: 690208 - RNA, 22 nt, Human
cacauuccugagcuucgaccug

SEQ ID NO: 690209 - RNA, 22 nt, Human
aggguggaagauggcacuaucu

SEQ ID NO: 690210 - RNA, 22 nt, Human
cugggaaguagaaucagaugag

SEQ ID NO: 690211 - RNA, 22 nt, Human
aacgugcaccaggaggucauga

SEQ ID NO: 690212 - RNA, 22 nt, Human
aaaccugauagauuuucagaau

SEQ ID NO: 690213 - RNA, 22 nt, Human
uucacaaaacacuauuuucugg

SEQ ID NO: 690214 - RNA, 22 nt, Human
ggccuuggaguccuccacugga

SEQ ID NO: 690215 - RNA, 22 nt, Human
acugcuuccuggauggccagca

SEQ ID NO: 690216 - RNA, 22 nt, Human
auucugggaacuuugucucuca

SEQ ID NO: 690217 - RNA, 22 nt, Human
aucagaagcuuguagucucucu

SEQ ID NO: 690218 - RNA, 22 nt, Human
aaacaguaaguucuaguauuau

SEQ ID NO: 690219 - RNA, 22 nt, Human
uaagagcuaggauuuuaaauca

SEQ ID NO: 690220 - RNA, 22 nt, Human
gugccuggacccucuuuccgga

SEQ ID NO: 690221 - RNA, 22 nt, Human
agcugggcagacugcagugguu

SEQ ID NO: 690222 - RNA, 22 nt, Human
uccaggcuagagugcaguggcc

SEQ ID NO: 690223 - RNA, 22 nt, Human
aguuagugugauggagguacga

SEQ ID NO: 690224 - RNA, 22 nt, Human
ugcugagggagcaucaaagaaa

SEQ ID NO: 690225 - RNA, 22 nt, Human
aaggagcucccggcagaccagg

SEQ ID NO: 690226 - RNA, 22 nt, Human
aagcagcauaauugcuauuuua

SEQ ID NO: 690227 - RNA, 22 nt, Human
cucccagguuccgacgccucuu

SEQ ID NO: 690228 - RNA, 22 nt, Human
auacuuuggucacuauuauugg

SEQ ID NO: 690229 - RNA, 22 nt, Human
gcacugugacccagagcaggug

SEQ ID NO: 690230 - RNA, 22 nt, Human
ugucuguauaucacuuuugucc

SEQ ID NO: 690231 - RNA, 22 nt, Human
ucuaagaauacucauaucuucu

SEQ ID NO: 690232 - RNA, 22 nt, Human
ggaagcuguuccuguguggcca

SEQ ID NO: 690233 - RNA, 22 nt, Human
uuauggaauaaccuuucugaaa

SEQ ID NO: 690234 - RNA, 22 nt, Human
gcugaggccucagaaggcugag

SEQ ID NO: 690235 - RNA, 22 nt, Human
auggaagcagacagguaauucc

SEQ ID NO: 690236 - RNA, 22 nt, Human
cuggagagggagcuguuggaag

SEQ ID NO: 690237 - RNA, 22 nt, Human
gagcaucugaugagauuggauu

SEQ ID NO: 690238 - RNA, 22 nt, Human
gugugugccaucaagagcuuuc

SEQ ID NO: 690239 - RNA, 20 nt, Human
gcuggcugaacugaaagcaa

SEQ ID NO: 690240 - RNA, 22 nt, Human
uuguuucuucaggcuuuuagga

SEQ ID NO: 690241 - RNA, 19 nt, Human
cagcaaacacuguaaaugg

SEQ ID NO: 690242 - RNA, 22 nt, Human
ccaggucuuugacuaauaugcu

SEQ ID NO: 690243 - RNA, 22 nt, Human
uucagcaccacuuccagagaag

SEQ ID NO: 690244 - RNA, 22 nt, Human
aaggcaauuggcuuguauaaga

SEQ ID NO: 690245 - RNA, 22 nt, Human
gaauuguacgcuuuacauaggu

SEQ ID NO: 690246 - RNA, 20 nt, Human
uacacuaaguaugaagugcu

SEQ ID NO: 690247 - RNA, 22 nt, Human
ugguuucaugagaugagaauuu

SEQ ID NO: 690248 - RNA, 22 nt, Human
cuugguaaaacugucuuaaauu

SEQ ID NO: 690249 - RNA, 22 nt, Human
aguaugaaccuggguucuggau

SEQ ID NO: 690250 - RNA, 22 nt, Human
ucuauguccuuucucccauucc

SEQ ID NO: 690251 - RNA, 22 nt, Human
gcuucugccuugcacuuuguca

SEQ ID NO: 690252 - RNA, 22 nt, Human
gggcagcaugaggacccucauc

SEQ ID NO: 690253 - RNA, 22 nt, Human
uaguuuaggaauuaugagggug

SEQ ID NO: 690254 - RNA, 22 nt, Human
ggucagaauuaggucuagagua

SEQ ID NO: 690255 - RNA, 22 nt, Human
gugcaaaaguaauggcaguuuu

SEQ ID NO: 690256 - RNA, 22 nt, Human
ucagccagagguggaugaguca

SEQ ID NO: 690257 - RNA, 16 nt, Human
cagcccaggggcgggc

SEQ ID NO: 690258 - RNA, 22 nt, Human
ggcuggaauagagacugacugg

SEQ ID NO: 690259 - RNA, 22 nt, Human
gcaggcucccuugcagagcagg

SEQ ID NO: 690260 - RNA, 22 nt, Human
uucuucaguguagcaacuguau

SEQ ID NO: 690261 - RNA, 22 nt, Human
augggcucuaugucuaggagau

SEQ ID NO: 690262 - RNA, 22 nt, Human
auuauuucagucagacacuggc

SEQ ID NO: 690263 - RNA, 22 nt, Human
acugacauuuuucccuaagcau

SEQ ID NO: 690264 - RNA, 22 nt, Human
ugaaaguuauuacugaugaugu

SEQ ID NO: 690265 - RNA, 22 nt, Human
agagcaucuaacacauaagccu

SEQ ID NO: 690266 - RNA, 22 nt, Human
uguguucaaugacuucaucuuu

SEQ ID NO: 690267 - RNA, 22 nt, Human
uagcagugccaggauuuugcug

SEQ ID NO: 690268 - RNA, 22 nt, Human
auuugccuuggugauuuguaaa

SEQ ID NO: 690269 - RNA, 22 nt, Human
uacaacagacaggaauaagauu

SEQ ID NO: 690270 - RNA, 22 nt, Human
aaaugcugcagcuaguguguuu

SEQ ID NO: 690271 - RNA, 22 nt, Human
uagggagaggaagcaggccgcu

SEQ ID NO: 690272 - RNA, 19 nt, Human
agaaaucucgagauuuguu

SEQ ID NO: 690273 - RNA, 22 nt, Human
aguuuuucugcuggucucacua

SEQ ID NO: 690274 - RNA, 22 nt, Human
uccuggaggacagaggcaucuc

SEQ ID NO: 690275 - RNA, 22 nt, Human
auuaacagaauuuuacaugcuu

SEQ ID NO: 690276 - RNA, 22 nt, Human
gacggagcugguugcugcggcu

SEQ ID NO: 690277 - RNA, 22 nt, Human
uccugggcgagguacuggggcu

SEQ ID NO: 690278 - RNA, 22 nt, Human
caagcagagagguuagaacaca

SEQ ID NO: 690279 - RNA, 17 nt, Human
cuccuggcagccucagg

SEQ ID NO: 690280 - RNA, 22 nt, Human
cugcguguuccugaagcgcgcu

SEQ ID NO: 690281 - RNA, 22 nt, Human
cccagcaugcacgcugacacuc

SEQ ID NO: 690282 - RNA, 22 nt, Human
uuucacagaaaggauaacauua

SEQ ID NO: 690283 - RNA, 22 nt, Human
cuguaacucugccaagaaggcu

SEQ ID NO: 690284 - RNA, 22 nt, Human
ucauggaaggaugcccugcaag

SEQ ID NO: 690285 - RNA, 22 nt, Human
gcagcaggcacuuaccguugcu

SEQ ID NO: 690286 - RNA, 22 nt, Human
aagagaugcuuuacaucggaug

SEQ ID NO: 690287 - RNA, 22 nt, Human
cgggcuuccuccagggaagugc

SEQ ID NO: 690288 - RNA, 22 nt, Human
ggcucaggccagaccacgacuc

SEQ ID NO: 690289 - RNA, 19 nt, Human
cugcucagagcagcuccag

SEQ ID NO: 690290 - RNA, 20 nt, Human
ugaagauuuuguguuuagaa

SEQ ID NO: 690291 - RNA, 22 nt, Human
agacagggucuugaucagagcu

SEQ ID NO: 690292 - RNA, 22 nt, Human
uccuuccugcucuaacauucag

SEQ ID NO: 690293 - RNA, 22 nt, Human
acagcuguguuuuauaaucagc

SEQ ID NO: 690294 - RNA, 22 nt, Human
caaagucauaaaacuuguaagu

SEQ ID NO: 690295 - RNA, 22 nt, Human
acugggcugguuaguuuuacua

SEQ ID NO: 690296 - RNA, 22 nt, Human
auucucaguucacuaguuucuu

SEQ ID NO: 690297 - RNA, 22 nt, Human
cccuggcagaaugucucugggc

SEQ ID NO: 690298 - RNA, 22 nt, Human
uaucaucuuguugucaugcagc

SEQ ID NO: 690299 - RNA, 23 nt, Human
aacaauagguuuuggcagaauag

SEQ ID NO: 690300 - RNA, 22 nt, Human
cugagaaagugaggguuaaaca

SEQ ID NO: 690301 - RNA, 22 nt, Human
uggcuccaugauaguucuuaca

SEQ ID NO: 690302 - RNA, 22 nt, Human
uggagccagcgagccgaggcgg

SEQ ID NO: 690303 - RNA, 22 nt, Human
cacuaguccugguuucaugcua

SEQ ID NO: 690304 - RNA, 22 nt, Human
gaaauugucugugcccaagucu

SEQ ID NO: 690305 - RNA, 22 nt, Human
uuuauguuugacaaugaucugg

SEQ ID NO: 690306 - RNA, 22 nt, Human
ccacagauuauuucuaaacagg

SEQ ID NO: 690307 - RNA, 22 nt, Human
gagaguucuugccuggguauua

SEQ ID NO: 690308 - RNA, 22 nt, Human
ggcaaaaaguucccaucagugu

SEQ ID NO: 690309 - RNA, 22 nt, Human
gucuaaacuuagggaucgaaca

SEQ ID NO: 690310 - RNA, 22 nt, Human
ugugccuuuaaggggagcugag

SEQ ID NO: 690311 - RNA, 22 nt, Human
ccucucucuccugcacacacac

SEQ ID NO: 690312 - RNA, 22 nt, Human
acaggcacuuugacaugccauc

SEQ ID NO: 690313 - RNA, 22 nt, Human
caggcagagugagguggucuaa

SEQ ID NO: 690314 - RNA, 22 nt, Human
ggagccuguggcugcuugaagc

SEQ ID NO: 690315 - RNA, 22 nt, Human
ucagcagugcagggugaggcag

SEQ ID NO: 690316 - RNA, 22 nt, Human
ucuccucugugccacagcuugg

SEQ ID NO: 690317 - RNA, 23 nt, Human
ugggccuggccucccaguccagc

SEQ ID NO: 690318 - RNA, 22 nt, Human
uccuguggucuggaaggaaugg

SEQ ID NO: 690319 - RNA, 22 nt, Human
cagcauggggaucacuguaggc

SEQ ID NO: 690320 - RNA, 22 nt, Human
uauguuuuucaagugcacacua

SEQ ID NO: 690321 - RNA, 22 nt, Human
agguuggccucagggaggcucu

SEQ ID NO: 690322 - RNA, 22 nt, Human
acuccagggcuucuaugauggu

SEQ ID NO: 690323 - RNA, 22 nt, Human
auguguaaaaagugcuuaauau

SEQ ID NO: 690324 - RNA, 22 nt, Human
cuucuugcaauuuucaucuuau

SEQ ID NO: 690325 - RNA, 22 nt, Human
ccagucuguucucaccucugag

SEQ ID NO: 690326 - RNA, 22 nt, Human
uggcucucugggagguccuggc

SEQ ID NO: 690327 - RNA, 22 nt, Human
uaucauaaguuaauuaaacagu

SEQ ID NO: 690328 - RNA, 20 nt, Human
ggacuacaauuugcagugug

SEQ ID NO: 690329 - RNA, 22 nt, Human
gagaauuuucuaguaguuucau

SEQ ID NO: 690330 - RNA, 22 nt, Human
uuacacuuuaaauccagcuugu

SEQ ID NO: 690331 - RNA, 22 nt, Human
guguuuaaugcagaugugggug

SEQ ID NO: 690332 - RNA, 22 nt, Human
uaucagaacacauguuuugcag

SEQ ID NO: 690333 - RNA, 22 nt, Human
uccagaguuguaaguguugaca

SEQ ID NO: 690334 - RNA, 22 nt, Human
uggccugggucacaccaggguc

SEQ ID NO: 690335 - RNA, 22 nt, Human
cuggcagucugccucuucacug

SEQ ID NO: 690336 - RNA, 22 nt, Human
ccuggcuucucugcauuguucu

SEQ ID NO: 690337 - RNA, 22 nt, Human
uuauuuccaguccagaaauuua

SEQ ID NO: 690338 - RNA, 22 nt, Human
aagaaagguguguuugcagaug

SEQ ID NO: 690339 - RNA, 22 nt, Human
acuguuucugccacaauagccc

SEQ ID NO: 690340 - RNA, 22 nt, Human
gcagcuggagaaauaccacccu

SEQ ID NO: 690341 - RNA, 22 nt, Human
cacacaggagagugcuggaggu

SEQ ID NO: 690342 - RNA, 22 nt, Human
uaccugaaguaacaaugaauau

SEQ ID NO: 690343 - RNA, 20 nt, Human
cagcacagagcuuggcucua

SEQ ID NO: 690344 - RNA, 20 nt, Human
gaauuuuaugaacacuacca

SEQ ID NO: 690345 - RNA, 22 nt, Human
agcccggcuuccccgguugcua

SEQ ID NO: 690346 - RNA, 22 nt, Human
uuacacuuaucuagagccaugg

SEQ ID NO: 690347 - RNA, 22 nt, Human
agguggcagagugacaggcuga

SEQ ID NO: 690348 - RNA, 22 nt, Human
gcugggcuuguggccagcuggg

SEQ ID NO: 690349 - RNA, 23 nt, Human
uggcacagcaggugugcuuuguu

SEQ ID NO: 690350 - RNA, 18 nt, Human
ucugaaggaaugauucca

SEQ ID NO: 690351 - RNA, 22 nt, Human
agucacacuucguaucucuagc

SEQ ID NO: 690352 - RNA, 22 nt, Human
aacccuggggcugcucugccug

SEQ ID NO: 690353 - RNA, 22 nt, Human
uuaguaauguguuaauaugaau

SEQ ID NO: 690354 - RNA, 22 nt, Human
gagagaaagccccugcaucccu

SEQ ID NO: 690355 - RNA, 22 nt, Human
uuugaaaggaaguuaauacuuu

SEQ ID NO: 690356 - RNA, 18 nt, Human
cucaggcagagaagcuuu

SEQ ID NO: 690357 - RNA, 22 nt, Human
uggcugccgacuggcucuuggc

SEQ ID NO: 690358 - RNA, 22 nt, Human
cauggcuucuaagugauaacgu

SEQ ID NO: 690359 - RNA, 22 nt, Human
auaugggucaugugauguucaa

SEQ ID NO: 690360 - RNA, 22 nt, Human
agaggaauaugggugcacuaga

SEQ ID NO: 690361 - RNA, 22 nt, Human
aaauagacacaugcguucauau

SEQ ID NO: 690362 - RNA, 22 nt, Human
acauugaagugucuggccuccu

SEQ ID NO: 690363 - RNA, 22 nt, Human
gacaugcugaauaacuauauga

SEQ ID NO: 690364 - RNA, 22 nt, Human
aauguucagcgagggaugcuag

SEQ ID NO: 690365 - RNA, 19 nt, Human
ucuggcuccgccucuuagu

SEQ ID NO: 690366 - RNA, 22 nt, Human
uucuggagaggaacagaaaggu

SEQ ID NO: 690367 - RNA, 22 nt, Human
gaauauuuguaauuacuguuga

SEQ ID NO: 690368 - RNA, 22 nt, Human
auguaucagauaaagcaugugg

SEQ ID NO: 690369 - RNA, 22 nt, Human
ccuuuggcugcauagggaaggg

SEQ ID NO: 690370 - RNA, 22 nt, Human
ccccucuggucaaccagucaca

SEQ ID NO: 690371 - RNA, 22 nt, Human
cuuaguuugcaugauuauggag

SEQ ID NO: 690372 - RNA, 22 nt, Human
cugccugugugugccugcagaa

SEQ ID NO: 690373 - RNA, 21 nt, Human
aagcuuggcugauguuauugg

SEQ ID NO: 690374 - RNA, 22 nt, Human
uaucuguuccaggcacucagcu

SEQ ID NO: 690375 - RNA, 22 nt, Human
agagccuguacuuuucugugaa

SEQ ID NO: 690376 - RNA, 22 nt, Human
agcucuaucaccugucaguugc

SEQ ID NO: 690377 - RNA, 22 nt, Human
ccugaaacaguccuugcccuca

SEQ ID NO: 690378 - RNA, 21 nt, Human
ucauggauuuucucugcuuuu

SEQ ID NO: 690379 - RNA, 22 nt, Human
uugaaagauauguuaaucuuuc

SEQ ID NO: 690380 - RNA, 22 nt, Human
ccucagacgcaggccuaugggc

SEQ ID NO: 690381 - RNA, 22 nt, Human
uuuuaagaggaggcuguuugaa

SEQ ID NO: 690382 - RNA, 22 nt, Human
cagaggaagcagacacaucuug

SEQ ID NO: 690383 - RNA, 22 nt, Human
caauguuuacuggggacccaga

SEQ ID NO: 690384 - RNA, 22 nt, Human
uagcuuuaaugaguugguaaga

SEQ ID NO: 690385 - RNA, 22 nt, Human
ggagugaaguggcgcgaucucg

SEQ ID NO: 690386 - RNA, 22 nt, Human
auguguuugguuauaugguauu

SEQ ID NO: 690387 - RNA, 22 nt, Human
uuucugcacauuucuaaaguug

SEQ ID NO: 690388 - RNA, 22 nt, Human
agaugcugaauuauugugcuuu

SEQ ID NO: 690389 - RNA, 22 nt, Human
uguauauuguucugucucuuca

SEQ ID NO: 690390 - RNA, 22 nt, Human
uagaaacucucacgagugaaac

SEQ ID NO: 690391 - RNA, 22 nt, Human
cugucaggggcggguggagcgg

SEQ ID NO: 690392 - RNA, 22 nt, Human
uggcagauacccaggcaaaugg

SEQ ID NO: 690393 - RNA, 22 nt, Human
cuuuacaaauuagcucucggga

SEQ ID NO: 690394 - RNA, 19 nt, Human
acacuguagauauagcuau

SEQ ID NO: 690395 - RNA, 22 nt, Human
uucaaaaugcacaaagggcuag

SEQ ID NO: 690396 - RNA, 22 nt, Human
agcugccaccucugccuuuggg

SEQ ID NO: 690397 - RNA, 20 nt, Human
uucuaacuacucucccuuug

SEQ ID NO: 690398 - RNA, 22 nt, Human
auucacaaaaugauauagauac

SEQ ID NO: 690399 - RNA, 22 nt, Human
aauuggcaagcagauuuccacu

SEQ ID NO: 690400 - RNA, 22 nt, Human
ucauaaugacaaacauacucag

SEQ ID NO: 690401 - RNA, 22 nt, Human
aagcagagguagggugugcagu

SEQ ID NO: 690402 - RNA, 22 nt, Human
ccucaggccugccagagcccca

SEQ ID NO: 690403 - RNA, 22 nt, Human
gacccuccacucacugcugugu

SEQ ID NO: 690404 - RNA, 21 nt, Human
ugcuucucuagaucaacuacu

SEQ ID NO: 690405 - RNA, 22 nt, Human
agaagccacugcucccagugag

SEQ ID NO: 690406 - RNA, 22 nt, Human
ucagaacaucccagauaguaga

SEQ ID NO: 690407 - RNA, 22 nt, Human
auucugccucacaggcagcugg

SEQ ID NO: 690408 - RNA, 19 nt, Human
gaguuauugccagggcaug

SEQ ID NO: 690409 - RNA, 22 nt, Human
augcacuuaaauaacauaacuu

SEQ ID NO: 690410 - RNA, 22 nt, Human
aacaggcuccuugugaauggau

SEQ ID NO: 690411 - RNA, 22 nt, Human
ccugggcagggagaccaggcuc

SEQ ID NO: 690412 - RNA, 23 nt, Human
ugcuggaagguccaauuugcuca

SEQ ID NO: 690413 - RNA, 22 nt, Human
agagcacaggcucaccauuguu

SEQ ID NO: 690414 - RNA, 20 nt, Human
ucacauccucucccaacaug

SEQ ID NO: 690415 - RNA, 22 nt, Human
uuuagaguccaaguucuucacu

SEQ ID NO: 690416 - RNA, 22 nt, Human
uugugucugggggagugacauc

SEQ ID NO: 690417 - RNA, 22 nt, Human
ucagcccagaccaccucauugc

SEQ ID NO: 690418 - RNA, 22 nt, Human
ggucuagaucaagaacagaacu

SEQ ID NO: 690419 - RNA, 22 nt, Human
uucaaacacuguuggcacuggg

SEQ ID NO: 690420 - RNA, 22 nt, Human
ucaaacuguuuacagugagaua

SEQ ID NO: 690421 - RNA, 22 nt, Human
agagaugguagaacagucauaa

SEQ ID NO: 690422 - RNA, 22 nt, Human
ggaggagguggguuaaguugua

SEQ ID NO: 690423 - RNA, 22 nt, Human
caaagugcugggauuagugcug

SEQ ID NO: 690424 - RNA, 22 nt, Human
gugcaccagucacaugggcaga

SEQ ID NO: 690425 - RNA, 22 nt, Human
aaucugaaaguauggagcagua

SEQ ID NO: 690426 - RNA, 22 nt, Human
uaggcaggugugcacugcccac

SEQ ID NO: 690427 - RNA, 22 nt, Human
gugugcagcagagacaggacuc

SEQ ID NO: 690428 - RNA, 22 nt, Human
ccucagagguuuucauucugua

SEQ ID NO: 690429 - RNA, 22 nt, Human
accugggaggcggagguugcag

SEQ ID NO: 690430 - RNA, 19 nt, Human
gcugaacaagucagcaacc

SEQ ID NO: 690431 - RNA, 22 nt, Human
acugaggucagggguaugugau

SEQ ID NO: 690432 - RNA, 19 nt, Human
ucacagacagagcaaucac

SEQ ID NO: 690433 - RNA, 22 nt, Human
gaagucugcugcucaggaguuu

SEQ ID NO: 690434 - RNA, 22 nt, Human
aggucacaggcuuugaaaucaa

SEQ ID NO: 690435 - RNA, 22 nt, Human
cuguguguuuauaucauuuccu

SEQ ID NO: 690436 - RNA, 22 nt, Human
agcugccucagcaacacagacc

SEQ ID NO: 690437 - RNA, 22 nt, Human
ugagagagccugaaucucuuac

SEQ ID NO: 690438 - RNA, 22 nt, Human
uccagcuuauagguagauuuaa

SEQ ID NO: 690439 - RNA, 22 nt, Human
uagcagaggcugucugacuuaa

SEQ ID NO: 690440 - RNA, 22 nt, Human
gaaacaaucaucaugugauuug

SEQ ID NO: 690441 - RNA, 22 nt, Human
aguguccccuacagaggcauuc

SEQ ID NO: 690442 - RNA, 22 nt, Human
aucaaaguucguaacugauaac

SEQ ID NO: 690443 - RNA, 22 nt, Human
agcaguaagacuuuuuucugug

SEQ ID NO: 690444 - RNA, 22 nt, Human
ggcugcuguuucagagacuguu

SEQ ID NO: 690445 - RNA, 22 nt, Human
augacaauggacauaguuaaaa

SEQ ID NO: 690446 - RNA, 22 nt, Human
auagacaugcaacacuuuuuac

SEQ ID NO: 690447 - RNA, 22 nt, Human
cacugucuuuugugaagacaau

SEQ ID NO: 690448 - RNA, 22 nt, Human
cagcucugguccagggagggca

SEQ ID NO: 690449 - RNA, 22 nt, Human
uaacacuguaaaccuagauguu

SEQ ID NO: 690450 - RNA, 22 nt, Human
cuccagugagugagcaggcgac

SEQ ID NO: 690451 - RNA, 22 nt, Human
uccccuccucuccugauauggg

SEQ ID NO: 690452 - RNA, 22 nt, Human
cccuccagugucccagugggga

SEQ ID NO: 690453 - RNA, 22 nt, Human
auugagcaccuacaguauuacc

SEQ ID NO: 690454 - RNA, 22 nt, Human
gccagccacuucccagacuggc

SEQ ID NO: 690455 - RNA, 22 nt, Human
uguggcaggcauucugaggcug

SEQ ID NO: 690456 - RNA, 22 nt, Human
caggcaccaauagggaucgugg

SEQ ID NO: 690457 - RNA, 22 nt, Human
ugagauucuguucagaaaaaug

SEQ ID NO: 690458 - RNA, 19 nt, Human
uagaggagaagggaagugg

SEQ ID NO: 690459 - RNA, 19 nt, Human
cucugggcaagucacuuaa

SEQ ID NO: 690460 - RNA, 22 nt, Human
ugauuuaugaccaaguuagaau

SEQ ID NO: 690461 - RNA, 22 nt, Human
aaguaacuuauuugcaaacagg

SEQ ID NO: 690462 - RNA, 22 nt, Human
ggacaggguaaguacuagugug

SEQ ID NO: 690463 - RNA, 22 nt, Human
acugugugaaacaucaaugugu

SEQ ID NO: 690464 - RNA, 22 nt, Human
gccagcugaaauuucaguucug

SEQ ID NO: 690465 - RNA, 22 nt, Human
agugucugccaacugcaugguc

SEQ ID NO: 690466 - RNA, 22 nt, Human
ugugcucuggaguugccuucac

SEQ ID NO: 690467 - RNA, 22 nt, Human
gcauugaaggacuuccauuaua

SEQ ID NO: 690468 - RNA, 22 nt, Human
guggccaacucaauguuuuuca

SEQ ID NO: 690469 - RNA, 22 nt, Human
uaaccugcugugcuggucaguc

SEQ ID NO: 690470 - RNA, 22 nt, Human
aauucagugucuggcacugcug

SEQ ID NO: 690471 - RNA, 22 nt, Human
uuacaacuugcagaggauguug

SEQ ID NO: 690472 - RNA, 22 nt, Human
acauuuuaauaugcuuagugug

SEQ ID NO: 690473 - RNA, 22 nt, Human
guuuauuggguauuguggagcc

SEQ ID NO: 690474 - RNA, 22 nt, Human
ggcagagcgcaugcgucgcaga

SEQ ID NO: 690475 - RNA, 22 nt, Human
uauuaauaagugacuacuagcu

SEQ ID NO: 690476 - RNA, 22 nt, Human
ggcugcucggcagcuccugagc

SEQ ID NO: 690477 - RNA, 22 nt, Human
cuccuggggcacuuagaagcaa

SEQ ID NO: 690478 - RNA, 22 nt, Human
uggcuucagaucugccccggag

SEQ ID NO: 690479 - RNA, 22 nt, Human
cuuauuugaauguaugaguuuu

SEQ ID NO: 690480 - RNA, 22 nt, Human
uuucaguuugaaggaaaggcca

SEQ ID NO: 690481 - RNA, 22 nt, Human
gcaugcauuacaugggauaugc

SEQ ID NO: 690482 - RNA, 22 nt, Human
cuguggcucauucuugguggca

SEQ ID NO: 690483 - RNA, 22 nt, Human
uuguaacagguacuaaauaacu

SEQ ID NO: 690484 - RNA, 22 nt, Human
gggcugcuguagagaacauguu

SEQ ID NO: 690485 - RNA, 22 nt, Human
uguuccuucacagcaguggaca

SEQ ID NO: 690486 - RNA, 22 nt, Human
aagugugugagccugucaggcu

SEQ ID NO: 690487 - RNA, 22 nt, Human
ucagucccaagguccugaggug

SEQ ID NO: 690488 - RNA, 22 nt, Human
gggcacaggaauuugggaugug

SEQ ID NO: 690489 - RNA, 23 nt, Human
uugauacagaagaaucaguuugu

SEQ ID NO: 690490 - RNA, 22 nt, Human
cagccagguucaaguccuuaua

SEQ ID NO: 690491 - RNA, 22 nt, Human
acacagggaggaggugcugugc

SEQ ID NO: 690492 - RNA, 20 nt, Human
aacaguaccauuuaucucag

SEQ ID NO: 690493 - RNA, 22 nt, Human
uggcaggaagcaucuauagguc

SEQ ID NO: 690494 - RNA, 22 nt, Human
cugcuuuuucuaggaggacaau

SEQ ID NO: 690495 - RNA, 22 nt, Human
cuccucagcugggaggaguccc

SEQ ID NO: 690496 - RNA, 22 nt, Human
ggguggugagauguagcugaug

SEQ ID NO: 690497 - RNA, 22 nt, Human
uggcuccagguugaacuuuggg

SEQ ID NO: 690498 - RNA, 22 nt, Human
agagaagagcaaugauaaauuu

SEQ ID NO: 690499 - RNA, 22 nt, Human
uugaggaguguuuagggugagg

SEQ ID NO: 690500 - RNA, 22 nt, Human
accucucaggucuuccucauau

SEQ ID NO: 690501 - RNA, 22 nt, Human
acugugggucccagcugugucu

SEQ ID NO: 690502 - RNA, 22 nt, Human
ucacaggccuggggcagagggc

SEQ ID NO: 690503 - RNA, 22 nt, Human
agccaggcuaaaugagccauga

SEQ ID NO: 690504 - RNA, 19 nt, Human
agcauagacuucucaggaa

SEQ ID NO: 690505 - RNA, 22 nt, Human
aaacuccugggcucaagcaguu

SEQ ID NO: 690506 - RNA, 22 nt, Human
ucuccugaagaccaugugcacu

SEQ ID NO: 690507 - RNA, 20 nt, Human
uguauucuucuccuuccucc

SEQ ID NO: 690508 - RNA, 22 nt, Human
augucugcuauucauagggaaa

SEQ ID NO: 690509 - RNA, 22 nt, Human
acuguaaugguggauccauguc

SEQ ID NO: 690510 - RNA, 22 nt, Human
uuacacugacagcugaaaagca

SEQ ID NO: 690511 - RNA, 22 nt, Human
uucaguuucuaaagauguuccu

SEQ ID NO: 690512 - RNA, 22 nt, Human
ccucugugacaaacaguccugg

SEQ ID NO: 690513 - RNA, 22 nt, Human
auccauucuaugugaaaugucc

SEQ ID NO: 690514 - RNA, 22 nt, Human
accugggaaaaggaguggccau

SEQ ID NO: 690515 - RNA, 22 nt, Human
ggcuaggcaggcucagagccua

SEQ ID NO: 690516 - RNA, 22 nt, Human
uaacauguuuguacacugaaac

SEQ ID NO: 690517 - RNA, 22 nt, Human
ggaaggaacaaacccugugugg

SEQ ID NO: 690518 - RNA, 22 nt, Human
ucacccaggguguuuggugucu

SEQ ID NO: 690519 - RNA, 22 nt, Human
gaggcuggacgugcauuucuac

SEQ ID NO: 690520 - RNA, 22 nt, Human
ggaagcagccugaagccaaggg

SEQ ID NO: 690521 - RNA, 22 nt, Human
uagcauuuggcaccaguuauuu

SEQ ID NO: 690522 - RNA, 22 nt, Human
ugcuucaggagaugucaccaug

SEQ ID NO: 690523 - RNA, 22 nt, Human
aucccucagcagacagcaaaau

SEQ ID NO: 690524 - RNA, 19 nt, Human
cuuauuucugguuuugggu

SEQ ID NO: 690525 - RNA, 22 nt, Human
uugaaugaagucccuuuuuacu

SEQ ID NO: 690526 - RNA, 22 nt, Human
uggcugucagcugccuggugcg

SEQ ID NO: 690527 - RNA, 22 nt, Human
gggaccagaggcugugcacaau

SEQ ID NO: 690528 - RNA, 23 nt, Human
ccucuccagacacugggccuugu

SEQ ID NO: 690529 - RNA, 22 nt, Human
acagcuuguaucccaauggagc

SEQ ID NO: 690530 - RNA, 22 nt, Human
uacaugcucuucaaggacucau

SEQ ID NO: 690531 - RNA, 22 nt, Human
auucugcacauccaagaacagg

SEQ ID NO: 690532 - RNA, 22 nt, Human
cagcuccugcagcugcugccgu

SEQ ID NO: 690533 - RNA, 22 nt, Human
ucagggaauaaguagaugagug

SEQ ID NO: 690534 - RNA, 22 nt, Human
ugggaggugauuaaauuauggg

SEQ ID NO: 690535 - RNA, 22 nt, Human
uccagccaaucagagcugaggc

SEQ ID NO: 690536 - RNA, 22 nt, Human
ggaagauucaguuaucucauga

SEQ ID NO: 690537 - RNA, 22 nt, Human
auggcagaaaggcaugugggcc

SEQ ID NO: 690538 - RNA, 22 nt, Human
ggucugaauauagaacuuaagu

SEQ ID NO: 690539 - RNA, 22 nt, Human
cugugacagagcuugagugaga

SEQ ID NO: 690540 - RNA, 22 nt, Human
ucuagcaagcucgugcucaagg

SEQ ID NO: 690541 - RNA, 22 nt, Human
aaaugucagaagcuuuacuucu

SEQ ID NO: 690542 - RNA, 22 nt, Human
ccaggcagagggaauagcaagu

SEQ ID NO: 690543 - RNA, 22 nt, Human
uguaaagaaauagcauuuguag

SEQ ID NO: 690544 - RNA, 22 nt, Human
agacagcauuucuagcaccagg

SEQ ID NO: 690545 - RNA, 21 nt, Human
cugcucugacagugaggccag

SEQ ID NO: 690546 - RNA, 22 nt, Human
cagcaucuguauccuaggcuga

SEQ ID NO: 690547 - RNA, 22 nt, Human
gacaugggaugagaugaagcau

SEQ ID NO: 690548 - RNA, 22 nt, Human
ugucaaaaagcugggacaagca

SEQ ID NO: 690549 - RNA, 22 nt, Human
cccuggcauaaaacuucuccag

SEQ ID NO: 690550 - RNA, 22 nt, Human
aaugaacagugggugagguacc

SEQ ID NO: 690551 - RNA, 22 nt, Human
ucugaggaagcagcaggaagug

SEQ ID NO: 690552 - RNA, 22 nt, Human
cacauugaaccauauauuagug

SEQ ID NO: 690553 - RNA, 22 nt, Human
gagggguggcccuggcguguac

SEQ ID NO: 690554 - RNA, 22 nt, Human
cagccugacuauggcugcaggu

SEQ ID NO: 690555 - RNA, 22 nt, Human
aaguacaucaaauguuuggcua

SEQ ID NO: 690556 - RNA, 22 nt, Human
gcggggggaggaacaucuugca

SEQ ID NO: 690557 - RNA, 22 nt, Human
aggcuaaaagagaaucauuuag

SEQ ID NO: 690558 - RNA, 22 nt, Human
ucaugcaaggcugaaacauggu

SEQ ID NO: 690559 - RNA, 22 nt, Human
aagcagagagcagaauuaaguu

SEQ ID NO: 690560 - RNA, 22 nt, Human
ggcuuguugaaacacagauugu

SEQ ID NO: 690561 - RNA, 22 nt, Human
gcuauuuauuaaaauggugaag

SEQ ID NO: 690562 - RNA, 22 nt, Human
ccacaugcucucucuccagguu

SEQ ID NO: 690563 - RNA, 22 nt, Human
cacuucaaccucugaguccugg

SEQ ID NO: 690564 - RNA, 22 nt, Human
aguaugaagaugaugaaaaaua

SEQ ID NO: 690565 - RNA, 22 nt, Human
uaauguguccugaaagcuucug

SEQ ID NO: 690566 - RNA, 19 nt, Human
agcagccauagacaauaug

SEQ ID NO: 690567 - RNA, 22 nt, Human
gaaagguugggugaauggugga

SEQ ID NO: 690568 - RNA, 22 nt, Human
ucaccacuaggaauuguguagu

SEQ ID NO: 690569 - RNA, 22 nt, Human
cacugaagcuuucauucucuug

SEQ ID NO: 690570 - RNA, 22 nt, Human
cacagccuugagcgaggacaag

SEQ ID NO: 690571 - RNA, 23 nt, Human
agacuggggcauaagaagauggc

SEQ ID NO: 690572 - RNA, 22 nt, Human
gcuuggaaguaggauugggaga

SEQ ID NO: 690573 - RNA, 22 nt, Human
cuggcuaugugguuagacauaa

SEQ ID NO: 690574 - RNA, 18 nt, Human
acccugggcaauucacuc

SEQ ID NO: 690575 - RNA, 22 nt, Human
uggauggguugaaaugugagcc

SEQ ID NO: 690576 - RNA, 22 nt, Human
ggggacugaggcacugaaggug

SEQ ID NO: 690577 - RNA, 22 nt, Human
ggcccaucucuugcucuggguu

SEQ ID NO: 690578 - RNA, 22 nt, Human
acacuucaugcauucuucacuc

SEQ ID NO: 690579 - RNA, 22 nt, Human
auagccaggagaugauggggga

SEQ ID NO: 690580 - RNA, 22 nt, Human
uagugaaagucaaagacagcua

SEQ ID NO: 690581 - RNA, 22 nt, Human
uuuguggaacucucuucuugca

SEQ ID NO: 690582 - RNA, 22 nt, Human
uuuaguaccaucauuugccucu

SEQ ID NO: 690583 - RNA, 22 nt, Human
aacauuucuucugaaacugagu

SEQ ID NO: 690584 - RNA, 22 nt, Human
ucagaguguggugagaugugca

SEQ ID NO: 690585 - RNA, 22 nt, Human
auuuccaauuucauccaugucc

SEQ ID NO: 690586 - RNA, 22 nt, Human
aggucucccaagggccagggag

SEQ ID NO: 690587 - RNA, 22 nt, Human
ggaugcaggaacacagcgaccu

SEQ ID NO: 690588 - RNA, 22 nt, Human
uccaggcccgagaugggcugga

SEQ ID NO: 690589 - RNA, 22 nt, Human
uccauucuuuugcugucuuccu

SEQ ID NO: 690590 - RNA, 22 nt, Human
uucccagagauaagacgucuua

SEQ ID NO: 690591 - RNA, 22 nt, Human
agaggagcugggaggcccucgu

SEQ ID NO: 690592 - RNA, 22 nt, Human
aaaggccacacugcucuuucuc

SEQ ID NO: 690593 - RNA, 19 nt, Human
cuugccuguuccuacagcu

SEQ ID NO: 690594 - RNA, 22 nt, Human
cuguucaugcugauucuguaug

SEQ ID NO: 690595 - RNA, 22 nt, Human
uguuucuugagaguauuacccu

SEQ ID NO: 690596 - RNA, 22 nt, Human
gauggcaggcaggugaguagag

SEQ ID NO: 690597 - RNA, 22 nt, Human
gaguagaaggaaguuaucuacc

SEQ ID NO: 690598 - RNA, 22 nt, Human
aaugcuuauaacguuagaaugu

SEQ ID NO: 690599 - RNA, 22 nt, Human
uuuauucuugagagugagaaga

SEQ ID NO: 690600 - RNA, 22 nt, Human
augacaaaggcugaaagggaaa

SEQ ID NO: 690601 - RNA, 22 nt, Human
ucuggcuccaccuccuuuacua

SEQ ID NO: 690602 - RNA, 22 nt, Human
uucuccugaguucccaggucua

SEQ ID NO: 690603 - RNA, 22 nt, Human
cuugugcauuucauuccucagg

SEQ ID NO: 690604 - RNA, 22 nt, Human
uucucugggguucaguaucucu

SEQ ID NO: 690605 - RNA, 22 nt, Human
gaagaagagauaauggggagca

SEQ ID NO: 690606 - RNA, 22 nt, Human
uuuuccuucaccucuugagccu

SEQ ID NO: 690607 - RNA, 22 nt, Human
cuccaaggugguuauuugagau

SEQ ID NO: 690608 - RNA, 22 nt, Human
cuggccagaagcaccuuuggcg

SEQ ID NO: 690609 - RNA, 22 nt, Human
agggacaugaggaugaucuaga

SEQ ID NO: 690610 - RNA, 22 nt, Human
cagcuguugucucucacauauu

SEQ ID NO: 690611 - RNA, 22 nt, Human
uuagcaaaguuugccaucuagu

SEQ ID NO: 690612 - RNA, 19 nt, Human
gcagacagguccagagagg

SEQ ID NO: 690613 - RNA, 22 nt, Human
uggcagcauguuauguaaggaa

SEQ ID NO: 690614 - RNA, 22 nt, Human
cucaacaugccuacucagucug

SEQ ID NO: 690615 - RNA, 21 nt, Human
ggucuucaaagcuuuuacgau

SEQ ID NO: 690616 - RNA, 22 nt, Human
acuguucauuuguccuguaucu

SEQ ID NO: 690617 - RNA, 22 nt, Human
aaggccagcuggagggaugagg

SEQ ID NO: 690618 - RNA, 22 nt, Human
aagcugccagcugagcugaggc

SEQ ID NO: 690619 - RNA, 22 nt, Human
gcaggagcuggaaagugauguu

SEQ ID NO: 690620 - RNA, 22 nt, Human
ugugaaauugaaugcccauugc

SEQ ID NO: 690621 - RNA, 23 nt, Human
ugagugugaaaauccuggagaug

SEQ ID NO: 690622 - RNA, 22 nt, Human
gcaggagucacugacuuggucc

SEQ ID NO: 690623 - RNA, 22 nt, Human
gaggccugcuuuggcacucugg

SEQ ID NO: 690624 - RNA, 22 nt, Human
gccucagcuguugcaggggccc

SEQ ID NO: 690625 - RNA, 22 nt, Human
uuauacccuccauaccuggccu

SEQ ID NO: 690626 - RNA, 19 nt, Human
gcaggcacagcccugggug

SEQ ID NO: 690627 - RNA, 22 nt, Human
gacacagaugaucaggugugga

SEQ ID NO: 690628 - RNA, 22 nt, Human
uagaaugagaaaguguagcagg

SEQ ID NO: 690629 - RNA, 22 nt, Human
cuguguauugaaaaaggguuaa

SEQ ID NO: 690630 - RNA, 20 nt, Human
cucuuuacaugucucuuccu

SEQ ID NO: 690631 - RNA, 19 nt, Human
ggagaagcaucuagaaaua

SEQ ID NO: 690632 - RNA, 22 nt, Human
uccaagucuuccuucccaaacc

SEQ ID NO: 690633 - RNA, 19 nt, Human
caagacaaagcccaucuuc

SEQ ID NO: 690634 - RNA, 22 nt, Human
agcaggaacucagggaguucuc

SEQ ID NO: 690635 - RNA, 22 nt, Human
agcagccagaaauccagaggug

SEQ ID NO: 690636 - RNA, 22 nt, Human
augcauaugcaucuguguacau

SEQ ID NO: 690637 - RNA, 20 nt, Human
gagacagcaaaagccucucc

SEQ ID NO: 690638 - RNA, 22 nt, Human
cugagaauguuuucugauugau

SEQ ID NO: 690639 - RNA, 22 nt, Human
auucugcaugguggugucucug

SEQ ID NO: 690640 - RNA, 22 nt, Human
gcugccaugccacagcacucac

SEQ ID NO: 690641 - RNA, 22 nt, Human
cauguaaaaaauuaggucaucu

SEQ ID NO: 690642 - RNA, 22 nt, Human
cugcccugcuugaugacagcga

SEQ ID NO: 690643 - RNA, 22 nt, Human
caguccuugcucaaagucuaca

SEQ ID NO: 690644 - RNA, 22 nt, Human
aagcacugagcacaguggcuga

SEQ ID NO: 690645 - RNA, 22 nt, Human
guccuucagcaccucccucggc

SEQ ID NO: 690646 - RNA, 22 nt, Human
uuugcugaacuaaaauucugaa

SEQ ID NO: 690647 - RNA, 22 nt, Human
gagugcugcuaaugcaagggug

SEQ ID NO: 690648 - RNA, 22 nt, Human
aaggagggaaagcagugcuucu

SEQ ID NO: 690649 - RNA, 22 nt, Human
ugacugugccgugccccuagga

SEQ ID NO: 690650 - RNA, 23 nt, Human
ggcuggugcccuuggccagucgg

SEQ ID NO: 690651 - RNA, 22 nt, Human
uccagagccuucgauaagaaga

SEQ ID NO: 690652 - RNA, 22 nt, Human
aacuuucucuggauggcuuccu

SEQ ID NO: 690653 - RNA, 22 nt, Human
guggggaggcauucuucucccu

SEQ ID NO: 690654 - RNA, 22 nt, Human
ucccaaagcuacucuucugacu

SEQ ID NO: 690655 - RNA, 22 nt, Human
augagguccagggaaguuaaau

SEQ ID NO: 690656 - RNA, 19 nt, Human
uccaggcauccuucaggcu

SEQ ID NO: 690657 - RNA, 22 nt, Human
cagugacagcaagcagugcugg

SEQ ID NO: 690658 - RNA, 22 nt, Human
aaaaagguugauccagauuagg

SEQ ID NO: 690659 - RNA, 22 nt, Human
ugugaaaugcuauuuccaugag

SEQ ID NO: 690660 - RNA, 22 nt, Human
gcucucugaggugcuggcagag

SEQ ID NO: 690661 - RNA, 22 nt, Human
uacacucuuaggaauugguuau

SEQ ID NO: 690662 - RNA, 22 nt, Human
uaggaaggccugucacuacuug

SEQ ID NO: 690663 - RNA, 22 nt, Human
guguuuaugagugaccuugucu

SEQ ID NO: 690664 - RNA, 22 nt, Human
ugucugagugugccugggcauu

SEQ ID NO: 690665 - RNA, 22 nt, Human
acacauggucuacuucuucuca

SEQ ID NO: 690666 - RNA, 22 nt, Human
auugcaaaauuguccuguggaa

SEQ ID NO: 690667 - RNA, 22 nt, Human
augaggcacguguuacuggccu

SEQ ID NO: 690668 - RNA, 22 nt, Human
cagagccaggccugcccucuuu

SEQ ID NO: 690669 - RNA, 22 nt, Human
uauuguucuucacuggucuuau

SEQ ID NO: 690670 - RNA, 22 nt, Human
gggcugagucugcugccuguca

SEQ ID NO: 690671 - RNA, 22 nt, Human
cucuuuccucgaugggcuccug

SEQ ID NO: 690672 - RNA, 22 nt, Human
acauggagaccagauggaagua

SEQ ID NO: 690673 - RNA, 22 nt, Human
uccaguggcaccuuggcccuca

SEQ ID NO: 690674 - RNA, 22 nt, Human
accccaagacaguagaagagaa

SEQ ID NO: 690675 - RNA, 22 nt, Human
aaauuauuaugccccucuauaa

SEQ ID NO: 690676 - RNA, 22 nt, Human
gcagcuguguaaugagcccaca

SEQ ID NO: 690677 - RNA, 22 nt, Human
cauaugaagaugucuuuuugua

SEQ ID NO: 690678 - RNA, 22 nt, Human
uggggaagcacuuugaacuuaa

SEQ ID NO: 690679 - RNA, 22 nt, Human
ugccccagacucugcucaccuc

SEQ ID NO: 690680 - RNA, 22 nt, Human
uagauacacacacagucaugug

SEQ ID NO: 690681 - RNA, 22 nt, Human
aaugcuuugauugauuaaaaca

SEQ ID NO: 690682 - RNA, 22 nt, Human
cuagggccaaaggcugugaugc

SEQ ID NO: 690683 - RNA, 22 nt, Human
ugcaggugcuccgggggugccc

SEQ ID NO: 690684 - RNA, 22 nt, Human
ucucuguggcaacuacuuagcu

SEQ ID NO: 690685 - RNA, 22 nt, Human
uucaaugagcccaagaacguga

SEQ ID NO: 690686 - RNA, 22 nt, Human
aaaaucacaagcuugggucacu

SEQ ID NO: 690687 - RNA, 22 nt, Human
ccucugugucuugguuucaaga

SEQ ID NO: 690688 - RNA, 22 nt, Human
ccaaauauuaacaaaguaauuu

SEQ ID NO: 690689 - RNA, 22 nt, Human
uuuuccagagcugucucuugca

SEQ ID NO: 690690 - RNA, 22 nt, Human
guuuguaugaauguuuuaugcu

SEQ ID NO: 690691 - RNA, 22 nt, Human
uggaauuaucugaagugauuug

SEQ ID NO: 690692 - RNA, 22 nt, Human
aagcuuuuuggauuugcuucag

SEQ ID NO: 690693 - RNA, 22 nt, Human
uccaugagacagauacuguaag

SEQ ID NO: 690694 - RNA, 22 nt, Human
uuauggcuucugugaagaauuu

SEQ ID NO: 690695 - RNA, 22 nt, Human
gaguccuuuguuccuugccaca

SEQ ID NO: 690696 - RNA, 22 nt, Human
aggaauuuuacaucucagagag

SEQ ID NO: 690697 - RNA, 22 nt, Human
agauucaggacuggccacagcc

SEQ ID NO: 690698 - RNA, 20 nt, Human
uccugcagucgcuagcgccc

SEQ ID NO: 690699 - RNA, 22 nt, Human
aauuucuugggagcucagagaa

SEQ ID NO: 690700 - RNA, 22 nt, Human
gccacugaacauuagagcuagu

SEQ ID NO: 690701 - RNA, 22 nt, Human
uaacuuugaagggaauuuuacu

SEQ ID NO: 690702 - RNA, 22 nt, Human
cugguucccagcaggaguguag

SEQ ID NO: 690703 - RNA, 22 nt, Human
cugcagggcuguggucuggagu

SEQ ID NO: 690704 - RNA, 22 nt, Human
agcaacugggcucauuuuuuaa

SEQ ID NO: 690705 - RNA, 22 nt, Human
ggucagaaggcaguuaaacaaa

SEQ ID NO: 690706 - RNA, 22 nt, Human
uggaggccaggaaggcagcgag

SEQ ID NO: 690707 - RNA, 22 nt, Human
auucacaguauggacgaaauga

SEQ ID NO: 690708 - RNA, 22 nt, Human
ucacacuggcagugcugaaggc

SEQ ID NO: 690709 - RNA, 22 nt, Human
uguucuuuucucuaaacugaua

SEQ ID NO: 690710 - RNA, 22 nt, Human
caggaaaaaugccaggagucag

SEQ ID NO: 690711 - RNA, 22 nt, Human
agagcugccgagcuggggccau

SEQ ID NO: 690712 - RNA, 22 nt, Human
gaugucuuuuuccaggcucuuu

SEQ ID NO: 690713 - RNA, 19 nt, Human
augacagaguugauaagug

SEQ ID NO: 690714 - RNA, 22 nt, Human
uaaugcuucuguuaggaucuuc

SEQ ID NO: 690715 - RNA, 22 nt, Human
uaaaacuucucauuuuuauggu

SEQ ID NO: 690716 - RNA, 22 nt, Human
cccaggaacagggcucagaccc

SEQ ID NO: 690717 - RNA, 22 nt, Human
cuaguuguuuaauauugauuga

SEQ ID NO: 690718 - RNA, 22 nt, Human
caaggaaaacagaugaucaaca

SEQ ID NO: 690719 - RNA, 22 nt, Human
augugugcgggaaggaaaguga

SEQ ID NO: 690720 - RNA, 22 nt, Human
gugcgccagcucaaggggaggc

SEQ ID NO: 690721 - RNA, 22 nt, Human
acagauauaaacuauaguagug

SEQ ID NO: 690722 - RNA, 22 nt, Human
gggccuuggcgaaguguggugg

SEQ ID NO: 690723 - RNA, 22 nt, Human
cuccucccugcgauugcucugc

SEQ ID NO: 690724 - RNA, 22 nt, Human
cuccccagcauucugacuuccu

SEQ ID NO: 690725 - RNA, 22 nt, Human
agcaucuguugaauauaauauu

SEQ ID NO: 690726 - RNA, 22 nt, Human
caggguacagaguuuucuaaac

SEQ ID NO: 690727 - RNA, 22 nt, Human
uaaaggcagccacugagcucaa

SEQ ID NO: 690728 - RNA, 22 nt, Human
aaggucagagcaggaaggaguc

SEQ ID NO: 690729 - RNA, 22 nt, Human
guuccaaauuuggaucuuuagg

SEQ ID NO: 690730 - RNA, 22 nt, Human
uaggcuccugaggacuccaugc

SEQ ID NO: 690731 - RNA, 22 nt, Human
agaaaguuuugugcuauauaug

SEQ ID NO: 690732 - RNA, 22 nt, Human
cucugcaacuucuagcaguguc

SEQ ID NO: 690733 - RNA, 22 nt, Human
caggauggagaguuguugguug

SEQ ID NO: 690734 - RNA, 22 nt, Human
acuaaggaauaugacaaacuca

SEQ ID NO: 690735 - RNA, 22 nt, Human
auacaugaucacuguauuauaa

SEQ ID NO: 690736 - RNA, 22 nt, Human
agcugggcuuggccaggucgcu

SEQ ID NO: 690737 - RNA, 22 nt, Human
aaacacugugggacaucuuacu

SEQ ID NO: 690738 - RNA, 22 nt, Human
aauacagaggggucacaauuca

SEQ ID NO: 690739 - RNA, 22 nt, Human
agguccaguugccagaauggcc

SEQ ID NO: 690740 - RNA, 22 nt, Human
uuggaagcaguguacacuguac

SEQ ID NO: 690741 - RNA, 22 nt, Human
cugcccucgggcccucccauag

SEQ ID NO: 690742 - RNA, 22 nt, Human
ugucugugacagaccuuugcua

SEQ ID NO: 690743 - RNA, 22 nt, Human
ugguggcacugacaucagacac

SEQ ID NO: 690744 - RNA, 22 nt, Human
acaguagucucaggaauaggca

SEQ ID NO: 690745 - RNA, 17 nt, Human
ggagaucuggcagaggg

SEQ ID NO: 690746 - RNA, 22 nt, Human
cauuuggauuuugaagagagua

SEQ ID NO: 690747 - RNA, 22 nt, Human
ucagggcccagagcucaggcaa

SEQ ID NO: 690748 - RNA, 22 nt, Human
cacagggcagaggguccguggc

SEQ ID NO: 690749 - RNA, 22 nt, Human
aggacagaccuaggacuggagc

SEQ ID NO: 690750 - RNA, 22 nt, Human
cagaaagaccugggcucaagag

SEQ ID NO: 690751 - RNA, 22 nt, Human
guggccagcaagugcugccucu

SEQ ID NO: 690752 - RNA, 22 nt, Human
cucugagaugauaccuucugga

SEQ ID NO: 690753 - RNA, 22 nt, Human
uucaggauucuuucagacuggg

SEQ ID NO: 690754 - RNA, 22 nt, Human
uccagcuguugauauucuaggu

SEQ ID NO: 690755 - RNA, 22 nt, Human
acacacuguaaggacuaucacu

SEQ ID NO: 690756 - RNA, 22 nt, Human
uuuguguguauauguauauaga

SEQ ID NO: 690757 - RNA, 22 nt, Human
gauagucaccucccuuaacuuu

SEQ ID NO: 690758 - RNA, 23 nt, Human
uguguuuaccugaggaucuuguu

SEQ ID NO: 690759 - RNA, 22 nt, Human
aaauaaguaaugucuuccuuuu

SEQ ID NO: 690760 - RNA, 23 nt, Human
aagaauaaaugacauuaaaggug

SEQ ID NO: 690761 - RNA, 22 nt, Human
uuuuagcacuaagugauaugcu

SEQ ID NO: 690762 - RNA, 22 nt, Human
agugucugcucagacagcuaca

SEQ ID NO: 690763 - RNA, 22 nt, Human
acccaggguuugagcucugcag

SEQ ID NO: 690764 - RNA, 22 nt, Human
gugagcagagaucgcgugauug

SEQ ID NO: 690765 - RNA, 22 nt, Human
agcagccuugcaggggucgcac

SEQ ID NO: 690766 - RNA, 22 nt, Human
guccuggggauacagaagugaa

SEQ ID NO: 690767 - RNA, 22 nt, Human
uuguguuucuggccaagaugga

SEQ ID NO: 690768 - RNA, 22 nt, Human
auuguacagcucugagaggggg

SEQ ID NO: 690769 - RNA, 19 nt, Human
uuugucucugaauaauauu

SEQ ID NO: 690770 - RNA, 22 nt, Human
uuccuggguugugcauuguaca

SEQ ID NO: 690771 - RNA, 22 nt, Human
aucaggaaagaaaagcuuggcg

SEQ ID NO: 690772 - RNA, 22 nt, Human
gcuguacaggguuauccuuucc

SEQ ID NO: 690773 - RNA, 22 nt, Human
gaggccuguagucauggaugua

SEQ ID NO: 690774 - RNA, 22 nt, Human
ucugcagaagccauggccuugc

SEQ ID NO: 690775 - RNA, 22 nt, Human
cugcuuucuuguugcaucuuaa

SEQ ID NO: 690776 - RNA, 22 nt, Human
gccacauuagcccucaccaucu

SEQ ID NO: 690777 - RNA, 22 nt, Human
cagggacaggggagaaaagaug

SEQ ID NO: 690778 - RNA, 22 nt, Human
uccaggucccagacugggcagc

SEQ ID NO: 690779 - RNA, 22 nt, Human
uagaaagcuggaggaauucuuu

SEQ ID NO: 690780 - RNA, 22 nt, Human
guggcuuccaagacuaagucac

SEQ ID NO: 690781 - RNA, 22 nt, Human
auuggaaguauuucaucaaaag

SEQ ID NO: 690782 - RNA, 20 nt, Human
uacaguguauguauuuaggc

SEQ ID NO: 690783 - RNA, 22 nt, Human
auuagcuauaugcuaugugcca

SEQ ID NO: 690784 - RNA, 22 nt, Human
acacaucuauauugcaucugca

SEQ ID NO: 690785 - RNA, 22 nt, Human
uucaggccuaauuucuagcccc

SEQ ID NO: 690786 - RNA, 22 nt, Human
agaagucaauaguuguuugaug

SEQ ID NO: 690787 - RNA, 17 nt, Human
caauuucauagguuuug

SEQ ID NO: 690788 - RNA, 22 nt, Human
agguuuaugccuuggagcuggg

SEQ ID NO: 690789 - RNA, 22 nt, Human
cuaggaaugguaccucuuacaa

SEQ ID NO: 690790 - RNA, 22 nt, Human
ggcuaggcucaccuggagaguu

SEQ ID NO: 690791 - RNA, 22 nt, Human
agcuaaggaacucuguaacacc

SEQ ID NO: 690792 - RNA, 22 nt, Human
ugucucugugagaucugacgau

SEQ ID NO: 690793 - RNA, 22 nt, Human
uagaaacagauguuuuugaaga

SEQ ID NO: 690794 - RNA, 22 nt, Human
uuugaaaguccuaggagagucc

SEQ ID NO: 690795 - RNA, 22 nt, Human
uuguguguguaacuuuaugaga

SEQ ID NO: 690796 - RNA, 22 nt, Human
agcagggaagccuccagaaccu

SEQ ID NO: 690797 - RNA, 22 nt, Human
gaaauguaggcauaauuauuuu

SEQ ID NO: 690798 - RNA, 22 nt, Human
uggcccugcugggucagagcug

SEQ ID NO: 690799 - RNA, 21 nt, Human
agcugugguuuuacaucuuuu

SEQ ID NO: 690800 - RNA, 22 nt, Human
cugcauguguuucugcuggguu

SEQ ID NO: 690801 - RNA, 20 nt, Human
ugugagaggguggcuugccc

SEQ ID NO: 690802 - RNA, 22 nt, Human
uuuacacauaccucuuuaaagu

SEQ ID NO: 690803 - RNA, 22 nt, Human
uuggaaaagcguucucuguagc

SEQ ID NO: 690804 - RNA, 22 nt, Human
gcacuggggucauagccuccag

SEQ ID NO: 690805 - RNA, 22 nt, Human
ugaaggagggaagaaggcucug

SEQ ID NO: 690806 - RNA, 22 nt, Human
ugaaucaauugucuuaagacau

SEQ ID NO: 690807 - RNA, 22 nt, Human
cagaugagcaugggcacaagca

SEQ ID NO: 690808 - RNA, 22 nt, Human
cccacucccuacgacacgcucc

SEQ ID NO: 690809 - RNA, 22 nt, Human
uuauauguuucuguuuggaggc

SEQ ID NO: 690810 - RNA, 22 nt, Human
gacagcuucuagaaauggucac

SEQ ID NO: 690811 - RNA, 22 nt, Human
uaauacuuuugccuuguauuca

SEQ ID NO: 690812 - RNA, 22 nt, Human
cugcaguuugaccuuguuuucu

SEQ ID NO: 690813 - RNA, 22 nt, Human
acagaaauauucguggugcuug

SEQ ID NO: 690814 - RNA, 22 nt, Human
auccagucaaaauuaguaaggu

SEQ ID NO: 690815 - RNA, 22 nt, Human
uccuucagaaaaccucagucuu

SEQ ID NO: 690816 - RNA, 22 nt, Human
caggccaauuucuugucauuua

SEQ ID NO: 690817 - RNA, 22 nt, Human
accauggaccauaguuccuauu

SEQ ID NO: 690818 - RNA, 22 nt, Human
uggucaggggcuucugagcugu

SEQ ID NO: 690819 - RNA, 22 nt, Human
cuccacagccccuccaguggca

SEQ ID NO: 690820 - RNA, 22 nt, Human
agucuggccuugccuugucgag

SEQ ID NO: 690821 - RNA, 22 nt, Human
gggagaaguggaaaucucauua

SEQ ID NO: 690822 - RNA, 22 nt, Human
agccucuguagaaagcagugug

SEQ ID NO: 690823 - RNA, 22 nt, Human
gagggucuuaccuaagcagggu

SEQ ID NO: 690824 - RNA, 22 nt, Human
cugagaggggaccaggguguuu

SEQ ID NO: 690825 - RNA, 22 nt, Human
cuuggcugaacuccaggaugca

SEQ ID NO: 690826 - RNA, 22 nt, Human
ugcacugaauaguagacuguac

SEQ ID NO: 690827 - RNA, 22 nt, Human
uuucugugaauuauaaaauuug

SEQ ID NO: 690828 - RNA, 22 nt, Human
cuuuggcucaugguuuuaucca

SEQ ID NO: 690829 - RNA, 22 nt, Human
aaacuacuaugggaauguacuu

SEQ ID NO: 690830 - RNA, 22 nt, Human
acaguauaacuccaugccaccc

SEQ ID NO: 690831 - RNA, 22 nt, Human
accugagcaugccaggagagug

SEQ ID NO: 690832 - RNA, 18 nt, Human
augcuucugauagaagca

SEQ ID NO: 690833 - RNA, 21 nt, Human
uugcacagaaaaccauagaga

SEQ ID NO: 690834 - RNA, 22 nt, Human
cagggcaguaccgcccucuggc

SEQ ID NO: 690835 - RNA, 22 nt, Human
ggaggaugccaagcugugcaca

SEQ ID NO: 690836 - RNA, 22 nt, Human
uuuucugugauucugagguugg

SEQ ID NO: 690837 - RNA, 22 nt, Human
uagcagggccaggcugggaacc

SEQ ID NO: 690838 - RNA, 22 nt, Human
auuaucacauggacuuugcuuu

SEQ ID NO: 690839 - RNA, 23 nt, Human
auugugagauuacuaucacacug

SEQ ID NO: 690840 - RNA, 22 nt, Human
uaucacaucaauguuuuaaaau

SEQ ID NO: 690841 - RNA, 22 nt, Human
ucugggugaugaaaugcacugu

SEQ ID NO: 690842 - RNA, 22 nt, Human
uucugccaaaggcuuuguuuug

SEQ ID NO: 690843 - RNA, 22 nt, Human
cagcagaguaauucucaccucu

SEQ ID NO: 690844 - RNA, 22 nt, Human
cagacaggcaggugcugcuuug

SEQ ID NO: 690845 - RNA, 22 nt, Human
agguggagugaaggaaaggcag

SEQ ID NO: 690846 - RNA, 22 nt, Human
aggagaggaaucauuauuacaa

SEQ ID NO: 690847 - RNA, 22 nt, Human
agggcagauggaacuuccccga

SEQ ID NO: 690848 - RNA, 22 nt, Human
agaagaaagauugaagguuccu

SEQ ID NO: 690849 - RNA, 22 nt, Human
ucaggagcagcaugggugagag

SEQ ID NO: 690850 - RNA, 22 nt, Human
acaguguuguggcucuuaauag

SEQ ID NO: 690851 - RNA, 22 nt, Human
gaagcagcuuucuggugaggag

SEQ ID NO: 690852 - RNA, 22 nt, Human
ccugagacaugaaccaggcucc

SEQ ID NO: 690853 - RNA, 22 nt, Human
gacagucugggcacacaugaaa

SEQ ID NO: 690854 - RNA, 22 nt, Human
cuauacagagcauccuuaacuu

SEQ ID NO: 690855 - RNA, 22 nt, Human
agcucacagaaauccugcagga

SEQ ID NO: 690856 - RNA, 22 nt, Human
ggguccagggccaguggcugag

SEQ ID NO: 690857 - RNA, 22 nt, Human
uggcuucauucuguaguuaaaa

SEQ ID NO: 690858 - RNA, 22 nt, Human
cagggaugucucuggaagggag

SEQ ID NO: 690859 - RNA, 22 nt, Human
agcaguguucaaugauacacug

SEQ ID NO: 690860 - RNA, 22 nt, Human
uccagggccaagucauggaacc

SEQ ID NO: 690861 - RNA, 22 nt, Human
ggucacccaugaucacaucacc

SEQ ID NO: 690862 - RNA, 21 nt, Human
aggaauguguauauauacaau

SEQ ID NO: 690863 - RNA, 22 nt, Human
uacaagauguacuaaaaauuau

SEQ ID NO: 690864 - RNA, 22 nt, Human
cuguugucuccucucagauuau

SEQ ID NO: 690865 - RNA, 22 nt, Human
cuuugcuugacacugugauugu

SEQ ID NO: 690866 - RNA, 22 nt, Human
uuauucaucagugcauuaauuu

SEQ ID NO: 690867 - RNA, 22 nt, Human
uaauuuaugaugcaaagaaaag

SEQ ID NO: 690868 - RNA, 22 nt, Human
cugugcacuucucuuuauuugu

SEQ ID NO: 690869 - RNA, 22 nt, Human
ugauuaaauuaauuaagaugag

SEQ ID NO: 690870 - RNA, 22 nt, Human
caaaaguaaucguggcuuuugc

SEQ ID NO: 690871 - RNA, 22 nt, Human
gggaggcgccgaggguagcuaa

SEQ ID NO: 690872 - RNA, 22 nt, Human
caucagcaggcaacacucuugg

SEQ ID NO: 690873 - RNA, 22 nt, Human
aagcccaguuucacacugagac

SEQ ID NO: 690874 - RNA, 22 nt, Human
uguggcuuuugcuagcuuugca

SEQ ID NO: 690875 - RNA, 22 nt, Human
auuuuucucuuuccacugagau

SEQ ID NO: 690876 - RNA, 22 nt, Human
aucacaaucccucucucugaua

SEQ ID NO: 690877 - RNA, 22 nt, Human
aggcaguuguagagagggcucu

SEQ ID NO: 690878 - RNA, 22 nt, Human
ccugugguuuacucuguggcua

SEQ ID NO: 690879 - RNA, 22 nt, Human
ugucucugugacuccuuccgcc

SEQ ID NO: 690880 - RNA, 22 nt, Human
cagcacaguagaguaguuguaa

SEQ ID NO: 690881 - RNA, 22 nt, Human
ugcgcaggagcucugccaggag

SEQ ID NO: 690882 - RNA, 22 nt, Human
uggcuuggugagcagaguguag

SEQ ID NO: 690883 - RNA, 22 nt, Human
caaacuuucaguuauaacauga

SEQ ID NO: 690884 - RNA, 22 nt, Human
aacuuuuagacuuggguauaaa

SEQ ID NO: 690885 - RNA, 22 nt, Human
cagugugugacucuggggguac

SEQ ID NO: 690886 - RNA, 16 nt, Human
aggcuccaagagcugu

SEQ ID NO: 690887 - RNA, 22 nt, Human
gaggucaaggucaagagacaga

SEQ ID NO: 690888 - RNA, 22 nt, Human
ucuguggcgcauaguugucucu

SEQ ID NO: 690889 - RNA, 19 nt, Human
ccaggacuuugcagacacu

SEQ ID NO: 690890 - RNA, 21 nt, Human
ugaauaaagcugcugucgaua

SEQ ID NO: 690891 - RNA, 22 nt, Human
ggcuuuauuucacuguaccaua

SEQ ID NO: 690892 - RNA, 22 nt, Human
gccaagagaaugugagagaaau

SEQ ID NO: 690893 - RNA, 22 nt, Human
cugggccaagaaguuguguaug

SEQ ID NO: 690894 - RNA, 22 nt, Human
cccacccugggaagcuaggcag

SEQ ID NO: 690895 - RNA, 22 nt, Human
uuuuaaaggauacucuugucua

SEQ ID NO: 690896 - RNA, 21 nt, Human
ugacaggcacccuggcuguga

SEQ ID NO: 690897 - RNA, 22 nt, Human
aacaggagaggggaauguagag

SEQ ID NO: 690898 - RNA, 22 nt, Human
gcucugggauuaccagccuuag

SEQ ID NO: 690899 - RNA, 22 nt, Human
gcagagcugcagcgaggccugg

SEQ ID NO: 690900 - RNA, 22 nt, Human
ugaaaaggaguccuuguuuuca

SEQ ID NO: 690901 - RNA, 22 nt, Human
ugccuggguugacucuuagcug

SEQ ID NO: 690902 - RNA, 22 nt, Human
uauuaacaugaacugacuuuuc

SEQ ID NO: 690903 - RNA, 22 nt, Human
uucacguuguugaagaaaauac

SEQ ID NO: 690904 - RNA, 22 nt, Human
ccugccuggcacauaguacucu

SEQ ID NO: 690905 - RNA, 22 nt, Human
aaacuucaaggauuugcaaauc

SEQ ID NO: 690906 - RNA, 22 nt, Human
gcagcaggauggccaauugcca

SEQ ID NO: 690907 - RNA, 22 nt, Human
cagaacauucacucauaugugg

SEQ ID NO: 690908 - RNA, 22 nt, Human
cugugucuaaucaggucaguca

SEQ ID NO: 690909 - RNA, 22 nt, Human
aggcauggacauuucggcagcu

SEQ ID NO: 690910 - RNA, 22 nt, Human
gcauggccauggcacuauggac

SEQ ID NO: 690911 - RNA, 22 nt, Human
gcagcucucuggccugcccugg

SEQ ID NO: 690912 - RNA, 21 nt, Human
gucauccaccucucgggcucu

SEQ ID NO: 690913 - RNA, 21 nt, Human
ggcuaggaugcugggguuucc

SEQ ID NO: 690914 - RNA, 19 nt, Human
gcuggcuggaggagggaca

SEQ ID NO: 690915 - RNA, 22 nt, Human
ggaggccuagaaaagugguucu

SEQ ID NO: 690916 - RNA, 22 nt, Human
cuguaggagugggaauuuauug

SEQ ID NO: 690917 - RNA, 22 nt, Human
uuucacagaggaggaagcugag

SEQ ID NO: 690918 - RNA, 22 nt, Human
ucagaaaauaacuguuaguuug

SEQ ID NO: 690919 - RNA, 22 nt, Human
cagcuucuaccaucaggaaauu

SEQ ID NO: 690920 - RNA, 22 nt, Human
auggcauucacauuuccagaga

SEQ ID NO: 690921 - RNA, 22 nt, Human
ugggcaucauggacagcagagg

SEQ ID NO: 690922 - RNA, 22 nt, Human
ccacuugaaauaucuuuguucu

SEQ ID NO: 690923 - RNA, 22 nt, Human
uguacuugcuuauuagaaaucu

SEQ ID NO: 690924 - RNA, 22 nt, Human
uaaaaguuuuaguuguacauaa

SEQ ID NO: 690925 - RNA, 23 nt, Human
cuagggcaguauuucacagacac

SEQ ID NO: 690926 - RNA, 22 nt, Human
gccaccugugugggccuuugug

SEQ ID NO: 690927 - RNA, 22 nt, Human
agaagcauuauaacaugcaagg

SEQ ID NO: 690928 - RNA, 22 nt, Human
uacaggauaucacuucauuucu

SEQ ID NO: 690929 - RNA, 22 nt, Human
aggcaauccccugaggauacuu

SEQ ID NO: 690930 - RNA, 22 nt, Human
aguuuuauaaaggcaccucagu

SEQ ID NO: 690931 - RNA, 22 nt, Human
gggaggaaggcuugggugagua

SEQ ID NO: 690932 - RNA, 22 nt, Human
aggacacuugagaguccaguca

SEQ ID NO: 690933 - RNA, 21 nt, Human
uuacauucagaggaguggaag

SEQ ID NO: 690934 - RNA, 22 nt, Human
aaagaaauaccuuucucagcuu

SEQ ID NO: 690935 - RNA, 22 nt, Human
ccuggcuuagagguugccuuuc

SEQ ID NO: 690936 - RNA, 22 nt, Human
aggcgugggaggaucugaggcc

SEQ ID NO: 690937 - RNA, 20 nt, Human
aguggcaggcgaucauuacu

SEQ ID NO: 690938 - RNA, 22 nt, Human
cuccugccaccgcgguguccug

SEQ ID NO: 690939 - RNA, 22 nt, Human
gccagaugccguaaagaugggc

SEQ ID NO: 690940 - RNA, 22 nt, Human
gggaccugaggagggguuucag

SEQ ID NO: 690941 - RNA, 22 nt, Human
ucucaaauucccuuuuccuccu

SEQ ID NO: 690942 - RNA, 22 nt, Human
uaggcuggaggaagcagugccu

SEQ ID NO: 690943 - RNA, 15 nt, Human
uaccagcugauccgu

SEQ ID NO: 690944 - RNA, 22 nt, Human
gaggguggaucagccugauugg

SEQ ID NO: 690945 - RNA, 22 nt, Human
uucugggaacaaaguggagugg

SEQ ID NO: 690946 - RNA, 22 nt, Human
acagccuuggguucucuggggg

SEQ ID NO: 690947 - RNA, 22 nt, Human
ccacagggcacagacaggaagc

SEQ ID NO: 690948 - RNA, 22 nt, Human
cugcuuuaauggaaaguguuuu

SEQ ID NO: 690949 - RNA, 22 nt, Human
aggcaguggcuuuuguuguguu

SEQ ID NO: 690950 - RNA, 22 nt, Human
cacacaugagucuccccauugg

SEQ ID NO: 690951 - RNA, 22 nt, Human
gagcagcuguucugacuugucu

SEQ ID NO: 690952 - RNA, 22 nt, Human
gaggggaaaguucugcacaagg

SEQ ID NO: 690953 - RNA, 22 nt, Human
ucaggagguccgcccgggaggg

SEQ ID NO: 690954 - RNA, 22 nt, Human
aagccaggccauucucugguuc

SEQ ID NO: 690955 - RNA, 23 nt, Human
acauuucaauacugagggucuga

SEQ ID NO: 690956 - RNA, 22 nt, Human
agcuagggcaaauaugagauac

SEQ ID NO: 690957 - RNA, 22 nt, Human
uuucucucugacugggagcuga

SEQ ID NO: 690958 - RNA, 22 nt, Human
ugagugaauucaaguaaagggc

SEQ ID NO: 690959 - RNA, 19 nt, Human
ggcagugagaagacuccug

SEQ ID NO: 690960 - RNA, 22 nt, Human
cagggacauuuccaagagaauu

SEQ ID NO: 690961 - RNA, 22 nt, Human
uacagagacccacaagagacug

SEQ ID NO: 690962 - RNA, 22 nt, Human
guuacaguuugggcuugauuca

SEQ ID NO: 690963 - RNA, 22 nt, Human
uaaagcuagaaggugcuguaca

SEQ ID NO: 690964 - RNA, 22 nt, Human
gugacgugaggggcuccuguug

SEQ ID NO: 690965 - RNA, 22 nt, Human
uguuuuguucacugcauugucc

SEQ ID NO: 690966 - RNA, 22 nt, Human
ucauuuucaaguuugaacagga

SEQ ID NO: 690967 - RNA, 22 nt, Human
ucagccuacacuccaacagcau

SEQ ID NO: 690968 - RNA, 23 nt, Human
uuauaagaagcaucacaggaaga

SEQ ID NO: 690969 - RNA, 22 nt, Human
cacuggugacuucugagcugga

SEQ ID NO: 690970 - RNA, 22 nt, Human
agggugcagucacaggaaaugu

SEQ ID NO: 690971 - RNA, 20 nt, Human
aggagccauugacugcagca

SEQ ID NO: 690972 - RNA, 22 nt, Human
uagggagaugcaagggacggag

SEQ ID NO: 690973 - RNA, 22 nt, Human
augagcauccagaacagugccu

SEQ ID NO: 690974 - RNA, 22 nt, Human
ucagccagggggagagaaugga

SEQ ID NO: 690975 - RNA, 22 nt, Human
ugugaggcuaccugccaggguc

SEQ ID NO: 690976 - RNA, 22 nt, Human
gccugcuggaggagccucaggg

SEQ ID NO: 690977 - RNA, 22 nt, Human
uuaaaccauaguuuaacauaag

SEQ ID NO: 690978 - RNA, 22 nt, Human
uagcaucuguucuuucauuaaa

SEQ ID NO: 690979 - RNA, 17 nt, Human
gcacugaacaauccugu

SEQ ID NO: 690980 - RNA, 22 nt, Human
caacagaccuggauucaaaaac

SEQ ID NO: 690981 - RNA, 22 nt, Human
uggaagaccagacuucccgaac

SEQ ID NO: 690982 - RNA, 22 nt, Human
caagacaagaucuaagcaugcu

SEQ ID NO: 690983 - RNA, 22 nt, Human
cugucaccucugcccuuugccc

SEQ ID NO: 690984 - RNA, 21 nt, Human
ccugugccagucuauguguuc

SEQ ID NO: 690985 - RNA, 22 nt, Human
auucacaguuacugcugaacca

SEQ ID NO: 690986 - RNA, 22 nt, Human
agacaaauuuccugcaaugaag

SEQ ID NO: 690987 - RNA, 22 nt, Human
ccuggcagaaagaguuacaccu

SEQ ID NO: 690988 - RNA, 22 nt, Human
caccagcuaauuaaaacagcag

SEQ ID NO: 690989 - RNA, 22 nt, Human
uguguuaauuuauugccucaga

SEQ ID NO: 690990 - RNA, 22 nt, Human
ugccagccuggccugagucuuu

SEQ ID NO: 690991 - RNA, 22 nt, Human
gugauugcccagcaccauuguu

SEQ ID NO: 690992 - RNA, 22 nt, Human
ccaggaaggcaggccuccccgc

SEQ ID NO: 690993 - RNA, 22 nt, Human
gagugucugaauuagagcacaa

SEQ ID NO: 690994 - RNA, 22 nt, Human
aacaggaccccgcguggugucu

SEQ ID NO: 690995 - RNA, 22 nt, Human
ggccaggaacuuuugggauggg

SEQ ID NO: 690996 - RNA, 22 nt, Human
cagcuggaucccugcagaacuu

SEQ ID NO: 690997 - RNA, 22 nt, Human
ucucaaauuugcuggaccagua

SEQ ID NO: 690998 - RNA, 22 nt, Human
agauuucuguggucauguaaug

SEQ ID NO: 690999 - RNA, 22 nt, Human
acagguguggggcugugguacu

SEQ ID NO: 691000 - RNA, 23 nt, Human
auacugaaacuguuguuuaucug

SEQ ID NO: 691001 - RNA, 22 nt, Human
cccaggaugucgaggcugcagu

SEQ ID NO: 691002 - RNA, 22 nt, Human
gauacagacaccacucuuuucc

SEQ ID NO: 691003 - RNA, 22 nt, Human
cugugcuuucaggccgcugugu

SEQ ID NO: 691004 - RNA, 22 nt, Human
uggcuucuggccaggcacagga

SEQ ID NO: 691005 - RNA, 19 nt, Human
gacuacagggggaagaagu

SEQ ID NO: 691006 - RNA, 22 nt, Human
ggcuucaaaaccuaucuuugau

SEQ ID NO: 691007 - RNA, 22 nt, Human
caaggccaagguuuugugaacu

SEQ ID NO: 691008 - RNA, 22 nt, Human
ggaagggguuaggggucccuga

SEQ ID NO: 691009 - RNA, 21 nt, Human
ugggggagaauugguugcuuu

SEQ ID NO: 691010 - RNA, 22 nt, Human
aaggcagcaagaauuccagguu

SEQ ID NO: 691011 - RNA, 22 nt, Human
uucuugaaggggauauaaauag

SEQ ID NO: 691012 - RNA, 22 nt, Human
gcucugagaggaugcugagcag

SEQ ID NO: 691013 - RNA, 22 nt, Human
gaagcaauuuagaaucagaagc

SEQ ID NO: 691014 - RNA, 23 nt, Human
aucaaaggauguagagaagaagc

SEQ ID NO: 691015 - RNA, 22 nt, Human
uguuuuccuccugguuucugcc

SEQ ID NO: 691016 - RNA, 17 nt, Human
cauguguaugugggagu

SEQ ID NO: 691017 - RNA, 22 nt, Human
gcugcaggagauuuugagaguc

SEQ ID NO: 691018 - RNA, 22 nt, Human
cuggacaaccacucagccucag

SEQ ID NO: 691019 - RNA, 22 nt, Human
ucagauuucuucuugcaacggc

SEQ ID NO: 691020 - RNA, 22 nt, Human
ucuacaggguaaggggcuugcc

SEQ ID NO: 691021 - RNA, 22 nt, Human
ugacacagggaaagcggaucca

SEQ ID NO: 691022 - RNA, 22 nt, Human
gcucagagcuugaaguuccacu

SEQ ID NO: 691023 - RNA, 22 nt, Human
aucauguuggcucugacaaaaa

SEQ ID NO: 691024 - RNA, 22 nt, Human
ugcaucugauucucaggcagaa

SEQ ID NO: 691025 - RNA, 22 nt, Human
gagguucacuuccugaaauagc

SEQ ID NO: 691026 - RNA, 22 nt, Human
caaagagguuuugagggcagcu

SEQ ID NO: 691027 - RNA, 22 nt, Human
gcagcuuucuaagcuuuauugc

SEQ ID NO: 691028 - RNA, 22 nt, Human
ccucugggggcuuccuuacccu

SEQ ID NO: 691029 - RNA, 22 nt, Human
ucuccaggggcugcugugccac

SEQ ID NO: 691030 - RNA, 19 nt, Human
uucugcuguuccuaggcug

SEQ ID NO: 691031 - RNA, 19 nt, Human
auaaggcaggaggaaauuu

SEQ ID NO: 691032 - RNA, 22 nt, Human
gagcagugagugaauguugccu

SEQ ID NO: 691033 - RNA, 22 nt, Human
agaaaaguuuaaaucuuggcac

SEQ ID NO: 691034 - RNA, 17 nt, Human
agcagaagucagaggga

SEQ ID NO: 691035 - RNA, 23 nt, Human
caugucugcuuucaugcuacaac

SEQ ID NO: 691036 - RNA, 22 nt, Human
acagcagggguggaauaaacgu

SEQ ID NO: 691037 - RNA, 22 nt, Human
ugggaagguacacgggaaagag

SEQ ID NO: 691038 - RNA, 22 nt, Human
cuccaggccccuggccuucugc

SEQ ID NO: 691039 - RNA, 22 nt, Human
gugaaggaguuaucagugguua

SEQ ID NO: 691040 - RNA, 22 nt, Human
ggaggccagggacccagucagc

SEQ ID NO: 691041 - RNA, 22 nt, Human
cgucccaguuccagccgcgcug

SEQ ID NO: 691042 - RNA, 22 nt, Human
cccccagucugaacagcagcug

SEQ ID NO: 691043 - RNA, 22 nt, Human
auagaugguauuuagacuagcg

SEQ ID NO: 691044 - RNA, 20 nt, Human
agggucaguagcacagagcu

SEQ ID NO: 691045 - RNA, 22 nt, Human
cuuccuugugguccuucucauu

SEQ ID NO: 691046 - RNA, 21 nt, Human
uucaaugaaaacaaagugagg

SEQ ID NO: 691047 - RNA, 22 nt, Human
ggcugaaacagauuucaagaca

SEQ ID NO: 691048 - RNA, 22 nt, Human
cagcagcugcaaauggaaacag

SEQ ID NO: 691049 - RNA, 22 nt, Human
guagaggacauuugacaugaug

SEQ ID NO: 691050 - RNA, 22 nt, Human
cucagcaagacccccaccgugu

SEQ ID NO: 691051 - RNA, 22 nt, Human
uagagagcuguuugaaagcagg

SEQ ID NO: 691052 - RNA, 22 nt, Human
guccccucauuuuagagaaaga

SEQ ID NO: 691053 - RNA, 22 nt, Human
ugucuuaauaugugcauucugu

SEQ ID NO: 691054 - RNA, 17 nt, Human
uggcgcucccagggugc

SEQ ID NO: 691055 - RNA, 22 nt, Human
acuguggcaaaagaacauugga

SEQ ID NO: 691056 - RNA, 22 nt, Human
gcaaugauauugaagugaugaa

SEQ ID NO: 691057 - RNA, 22 nt, Human
gacagugaacagguucccacug

SEQ ID NO: 691058 - RNA, 23 nt, Human
accuggcugcucaaccugcaggg

SEQ ID NO: 691059 - RNA, 21 nt, Human
gucagcagauccagcacuugu

SEQ ID NO: 691060 - RNA, 22 nt, Human
cauaggaagccaucucagucac

SEQ ID NO: 691061 - RNA, 22 nt, Human
aaguguggggucucagagcuga

SEQ ID NO: 691062 - RNA, 22 nt, Human
ggucucuucaggagcuugagcg

SEQ ID NO: 691063 - RNA, 22 nt, Human
guccagccaggcugcagcaccc

SEQ ID NO: 691064 - RNA, 22 nt, Human
cucagagggucuccuccagaau

SEQ ID NO: 691065 - RNA, 22 nt, Human
uggcgugcccuccagacuuggc

SEQ ID NO: 691066 - RNA, 22 nt, Human
aggagcugagucagcccgacag

SEQ ID NO: 691067 - RNA, 22 nt, Human
acuggaggggaaaaugguagua

SEQ ID NO: 691068 - RNA, 22 nt, Human
uggguccuaaaugcagucacau

SEQ ID NO: 691069 - RNA, 19 nt, Human
ucuuuagccagagcucugg

SEQ ID NO: 691070 - RNA, 22 nt, Human
gcagagcauguccucaggacag

SEQ ID NO: 691071 - RNA, 22 nt, Human
caggguggaagcuguagagugg

SEQ ID NO: 691072 - RNA, 22 nt, Human
uccagcccuguggcuuccaccc

SEQ ID NO: 691073 - RNA, 22 nt, Human
uccucauacauaucucagucuu

SEQ ID NO: 691074 - RNA, 22 nt, Human
cgaggaggaaacgcggagaacu

SEQ ID NO: 691075 - RNA, 22 nt, Human
agcugauuccacuuuuucccca

SEQ ID NO: 691076 - RNA, 22 nt, Human
acaguuugcccugacauucucc

SEQ ID NO: 691077 - RNA, 22 nt, Human
ugaagguggaagggugguucug

SEQ ID NO: 691078 - RNA, 22 nt, Human
aacuuccuucuaguucauaugu

SEQ ID NO: 691079 - RNA, 19 nt, Human
ugagugucacgucagugcc

SEQ ID NO: 691080 - RNA, 22 nt, Human
auuuuguugagguaauugucaa

SEQ ID NO: 691081 - RNA, 22 nt, Human
cacccaggcuggauugcagugg

SEQ ID NO: 691082 - RNA, 22 nt, Human
uguauuugaaacagugcauggg

SEQ ID NO: 691083 - RNA, 22 nt, Human
aggguggggugcuacaucuuua

SEQ ID NO: 691084 - RNA, 22 nt, Human
auucuccaucaccacuggcacu

SEQ ID NO: 691085 - RNA, 22 nt, Human
acucugaaccagagaucauacc

SEQ ID NO: 691086 - RNA, 22 nt, Human
aggcucaggcaggaauggcgga

SEQ ID NO: 691087 - RNA, 23 nt, Human
ucugggcugagacuuggaagguc

SEQ ID NO: 691088 - RNA, 22 nt, Human
gggcaugguggugcacaccugu

SEQ ID NO: 691089 - RNA, 22 nt, Human
ucugcaggaucagagccagagg

SEQ ID NO: 691090 - RNA, 22 nt, Human
auuuguaacacgugacagguug

SEQ ID NO: 691091 - RNA, 22 nt, Human
uccagaugcugcacauuccuga

SEQ ID NO: 691092 - RNA, 22 nt, Human
auggaauuugcaauaacaggau

SEQ ID NO: 691093 - RNA, 22 nt, Human
cuugcacagaacucuuagaggu

SEQ ID NO: 691094 - RNA, 23 nt, Human
uuggcaaagccuaugaaguccuc

SEQ ID NO: 691095 - RNA, 22 nt, Human
gcuuuacaugagaugaggacaa

SEQ ID NO: 691096 - RNA, 21 nt, Human
ugaaggggccaucacaaaggc

SEQ ID NO: 691097 - RNA, 22 nt, Human
uccucaggcggugaggaggggc

SEQ ID NO: 691098 - RNA, 18 nt, Human
uaagagcagacuguaggc

SEQ ID NO: 691099 - RNA, 22 nt, Human
ccucuggcuuacuguuggguuu

SEQ ID NO: 691100 - RNA, 22 nt, Human
guguacauagaauugugcuuug

SEQ ID NO: 691101 - RNA, 22 nt, Human
gugacucuuaccuacccagccu

SEQ ID NO: 691102 - RNA, 22 nt, Human
uaucagcaggccaaagcugcaa

SEQ ID NO: 691103 - RNA, 22 nt, Human
ccugucacgaugacugcacucu

SEQ ID NO: 691104 - RNA, 22 nt, Human
auauacaugggaauauguggag

SEQ ID NO: 691105 - RNA, 22 nt, Human
acaagguuugguaccacaucca

SEQ ID NO: 691106 - RNA, 22 nt, Human
uggagcagagaugggagcccaa

SEQ ID NO: 691107 - RNA, 22 nt, Human
aauguuuucauuauccuaacug

SEQ ID NO: 691108 - RNA, 22 nt, Human
uugaaugagaaguuauugccau

SEQ ID NO: 691109 - RNA, 20 nt, Human
ugucauucuucuuucacagg

SEQ ID NO: 691110 - RNA, 22 nt, Human
guaucuuugucuucauguugga

SEQ ID NO: 691111 - RNA, 18 nt, Human
ugagaggcagguagagga

SEQ ID NO: 691112 - RNA, 22 nt, Human
gcugagucuugagcacugagca

SEQ ID NO: 691113 - RNA, 22 nt, Human
ggcugcccucggggucgcaggc

SEQ ID NO: 691114 - RNA, 22 nt, Human
acauuuaaguuaaaaccucagu

SEQ ID NO: 691115 - RNA, 19 nt, Human
cugucugugcagagaugug

SEQ ID NO: 691116 - RNA, 22 nt, Human
acugaagcuuggguggaacuua

SEQ ID NO: 691117 - RNA, 22 nt, Human
ugguuagucaguaccugagugu

SEQ ID NO: 691118 - RNA, 22 nt, Human
gccuacaguuggcugagggccu

SEQ ID NO: 691119 - RNA, 22 nt, Human
cuucugcacugaccuuuugucc

SEQ ID NO: 691120 - RNA, 20 nt, Human
cgcccaggagggcccaugug

SEQ ID NO: 691121 - RNA, 22 nt, Human
ggcaggcuguucaccugcuuuu

SEQ ID NO: 691122 - RNA, 22 nt, Human
uaaggcaauggcauucuugaca

SEQ ID NO: 691123 - RNA, 22 nt, Human
cagguccaagagauccuccuac

SEQ ID NO: 691124 - RNA, 22 nt, Human
uaaagguaguuuuaaaggugcu

SEQ ID NO: 691125 - RNA, 22 nt, Human
ggccucugcccucacuccuguc

SEQ ID NO: 691126 - RNA, 22 nt, Human
augaggcccaaacauuacaaau

SEQ ID NO: 691127 - RNA, 22 nt, Human
uucaguuucguuaucuaugaga

SEQ ID NO: 691128 - RNA, 22 nt, Human
aggcacagguggacuucacagu

SEQ ID NO: 691129 - RNA, 22 nt, Human
aauugcuuuucaaggguacagc

SEQ ID NO: 691130 - RNA, 22 nt, Human
uauaaauuauuaggcugcuaaa

SEQ ID NO: 691131 - RNA, 22 nt, Human
aauaaacaaauccuuccuuccc

SEQ ID NO: 691132 - RNA, 22 nt, Human
aaagcaaugaugguagacacgu

SEQ ID NO: 691133 - RNA, 22 nt, Human
uccaggcucccucaggaugcac

SEQ ID NO: 691134 - RNA, 22 nt, Human
acacauuugggcuccuacauaa

SEQ ID NO: 691135 - RNA, 22 nt, Human
gaagaagguggcccagggguag

SEQ ID NO: 691136 - RNA, 22 nt, Human
aggaauagaccacuucacugag

SEQ ID NO: 691137 - RNA, 22 nt, Human
ucuaauugaaucuaagcauguu

SEQ ID NO: 691138 - RNA, 21 nt, Human
ucuggggaagacaucuaggau

SEQ ID NO: 691139 - RNA, 22 nt, Human
ucugggaaauagaggacccuag

SEQ ID NO: 691140 - RNA, 22 nt, Human
ucugaacagcauggaaucauuu

SEQ ID NO: 691141 - RNA, 22 nt, Human
gucuuugcugucuuugcucuca

SEQ ID NO: 691142 - RNA, 22 nt, Human
gggcaggagagaacagucaugg

SEQ ID NO: 691143 - RNA, 18 nt, Human
agggaucaucacugcagc

SEQ ID NO: 691144 - RNA, 22 nt, Human
aggcuucagacaaauguuaugg

SEQ ID NO: 691145 - RNA, 22 nt, Human
gugggaugguagguagguaaua

SEQ ID NO: 691146 - RNA, 22 nt, Human
aagauucagccaaauuguucau

SEQ ID NO: 691147 - RNA, 22 nt, Human
aaauugaaugauuaagugguga

SEQ ID NO: 691148 - RNA, 22 nt, Human
aggcaagugcauuagaagagca

SEQ ID NO: 691149 - RNA, 22 nt, Human
agaaagugugucauacuaagug

SEQ ID NO: 691150 - RNA, 22 nt, Human
acuguaaagguuuguagcccag

SEQ ID NO: 691151 - RNA, 22 nt, Human
auauccagcagcaggugaguau

SEQ ID NO: 691152 - RNA, 22 nt, Human
cacuuggaggcccccugugccc

SEQ ID NO: 691153 - RNA, 22 nt, Human
ggacaaaaaucagccaucucua

SEQ ID NO: 691154 - RNA, 22 nt, Human
ugggcacuguagcuggugcugg

SEQ ID NO: 691155 - RNA, 22 nt, Human
aucucagaaacauaucuaaucc

SEQ ID NO: 691156 - RNA, 22 nt, Human
aaucagcaguuggaauuagaua

SEQ ID NO: 691157 - RNA, 23 nt, Human
ugacaguguauuugacuauaugg

SEQ ID NO: 691158 - RNA, 22 nt, Human
cuugcuggugguguuuucuaug

SEQ ID NO: 691159 - RNA, 22 nt, Human
uuuacauagugcuuucccacua

SEQ ID NO: 691160 - RNA, 22 nt, Human
agauacaugucaagagacuuau

SEQ ID NO: 691161 - RNA, 22 nt, Human
cucaggauuuacuaauuucaag

SEQ ID NO: 691162 - RNA, 22 nt, Human
uaugcaacaucugguagaaauc

SEQ ID NO: 691163 - RNA, 22 nt, Human
ccaggagacaaagaugacugcu

SEQ ID NO: 691164 - RNA, 22 nt, Human
acaaagugcugacauuacaggc

SEQ ID NO: 691165 - RNA, 22 nt, Human
agcugugggccugggagagcug

SEQ ID NO: 691166 - RNA, 22 nt, Human
uuuacagugagagcuuagugag

SEQ ID NO: 691167 - RNA, 22 nt, Human
uggggccugaaagguucucgcc

SEQ ID NO: 691168 - RNA, 22 nt, Human
aggcucagacaggaaaaguaac

SEQ ID NO: 691169 - RNA, 22 nt, Human
gggcugaguuccugccucacuc

SEQ ID NO: 691170 - RNA, 22 nt, Human
uugccaggcuuguuucuaggcu

SEQ ID NO: 691171 - RNA, 22 nt, Human
caguggucugugcuucuguaca

SEQ ID NO: 691172 - RNA, 22 nt, Human
cagcuguugugauccauuuacg

SEQ ID NO: 691173 - RNA, 22 nt, Human
cauucucugaucuucacauacc

SEQ ID NO: 691174 - RNA, 22 nt, Human
uauucauaguaaacaaaagugg

SEQ ID NO: 691175 - RNA, 22 nt, Human
cagguggucaggcagaugggcu

SEQ ID NO: 691176 - RNA, 22 nt, Human
gaggccugguuugcaugagaau

SEQ ID NO: 691177 - RNA, 20 nt, Human
agacaggagcccccauucag

SEQ ID NO: 691178 - RNA, 22 nt, Human
ucugccugcgcucacggggccg

SEQ ID NO: 691179 - RNA, 22 nt, Human
gagcucagccugaggccuggcu

SEQ ID NO: 691180 - RNA, 22 nt, Human
agugcuuuauguuguugugcaa

SEQ ID NO: 691181 - RNA, 22 nt, Human
acacugcagcaucagcuacgga

SEQ ID NO: 691182 - RNA, 18 nt, Human
auaugcuugagcuaagga

SEQ ID NO: 691183 - RNA, 22 nt, Human
guggcaguggagacccgagccu

SEQ ID NO: 691184 - RNA, 22 nt, Human
agcaccaggccauggggucccu

SEQ ID NO: 691185 - RNA, 22 nt, Human
acaagcaugggcuuugacauca

SEQ ID NO: 691186 - RNA, 22 nt, Human
acaaugcagccuauggauccag

SEQ ID NO: 691187 - RNA, 22 nt, Human
auucaucagcuaauggacauuu

SEQ ID NO: 691188 - RNA, 22 nt, Human
uccaaagagcuuaggagagaaa

SEQ ID NO: 691189 - RNA, 22 nt, Human
ucugccuguucccgauuccaug

SEQ ID NO: 691190 - RNA, 22 nt, Human
cagugcccuuccaggacugcag

SEQ ID NO: 691191 - RNA, 20 nt, Human
ggcucugcuugugagcagcc

SEQ ID NO: 691192 - RNA, 22 nt, Human
aucaaagguaucuaugcugucu

SEQ ID NO: 691193 - RNA, 22 nt, Human
auaucagaaauaguaagcagag

SEQ ID NO: 691194 - RNA, 21 nt, Human
uccagccuuucccucacuucc

SEQ ID NO: 691195 - RNA, 22 nt, Human
caguguuuguugagaaaggcaa

SEQ ID NO: 691196 - RNA, 22 nt, Human
aaauuucuugaggcucucuagc

SEQ ID NO: 691197 - RNA, 22 nt, Human
agauggcugggcucguccgcag

SEQ ID NO: 691198 - RNA, 22 nt, Human
augugcaauuauuaagaagaga

SEQ ID NO: 691199 - RNA, 21 nt, Human
agacagcagauagucgaaagg

SEQ ID NO: 691200 - RNA, 23 nt, Human
uuuuagugacuccuuuaucugcc

SEQ ID NO: 691201 - RNA, 22 nt, Human
uuguacagggaaguaauacaag

SEQ ID NO: 691202 - RNA, 18 nt, Human
aacuaaagaucuuuaagc

SEQ ID NO: 691203 - RNA, 22 nt, Human
guaccagucucugugggcaccu

SEQ ID NO: 691204 - RNA, 22 nt, Human
ucauuuguucucauucucuacu

SEQ ID NO: 691205 - RNA, 22 nt, Human
cugcuugggguuaggguguccu

SEQ ID NO: 691206 - RNA, 22 nt, Human
agaaacucuggaagaacuuuua

SEQ ID NO: 691207 - RNA, 20 nt, Human
ccugugugguuugcacuaca

SEQ ID NO: 691208 - RNA, 22 nt, Human
acuguggcucaucaggcuggug

SEQ ID NO: 691209 - RNA, 22 nt, Human
aggcacugguccauuuucugca

SEQ ID NO: 691210 - RNA, 22 nt, Human
uucucuccuacccaguauccau

SEQ ID NO: 691211 - RNA, 22 nt, Human
gccaaugacagucucaguucug

SEQ ID NO: 691212 - RNA, 22 nt, Human
ccccagccagcaggaccucuga

SEQ ID NO: 691213 - RNA, 22 nt, Human
caucuuaaauuaaagcuuaagg

SEQ ID NO: 691214 - RNA, 22 nt, Human
ucaggcuguaaauggugugggu

SEQ ID NO: 691215 - RNA, 22 nt, Human
uaacucuuuacuauacauuuau

SEQ ID NO: 691216 - RNA, 21 nt, Human
gccauuguuuucuaccuggag

SEQ ID NO: 691217 - RNA, 22 nt, Human
aauuguacaagccuugugccau

SEQ ID NO: 691218 - RNA, 22 nt, Human
ggcagauggaaugagcugucua

SEQ ID NO: 691219 - RNA, 21 nt, Human
ucugugccucaacccucaucu

SEQ ID NO: 691220 - RNA, 22 nt, Human
cacccaggcuggagugcagggg

SEQ ID NO: 691221 - RNA, 22 nt, Human
gggugcugggaggcugacaucu

SEQ ID NO: 691222 - RNA, 22 nt, Human
uguguacagcaggauuucucaa

SEQ ID NO: 691223 - RNA, 22 nt, Human
cggggcugacagcaggugugcu

SEQ ID NO: 691224 - RNA, 22 nt, Human
gaggcagagguuguugcaguga

SEQ ID NO: 691225 - RNA, 22 nt, Human
caguuauaggagccauuguaua

SEQ ID NO: 691226 - RNA, 22 nt, Human
ucccagaggacuguuggugcua

SEQ ID NO: 691227 - RNA, 23 nt, Human
agcagcccaauggcaagcucugg

SEQ ID NO: 691228 - RNA, 22 nt, Human
augaaagaugauuuaaaguacu

SEQ ID NO: 691229 - RNA, 22 nt, Human
ucucacaccgucccuaaaccau

SEQ ID NO: 691230 - RNA, 22 nt, Human
ucugaaaauguugacuuuguuu

SEQ ID NO: 691231 - RNA, 22 nt, Human
uauugacaauaggcaacugagg

SEQ ID NO: 691232 - RNA, 22 nt, Human
auuauuguugcggcuguuaccg

SEQ ID NO: 691233 - RNA, 21 nt, Human
agggcagauuagcuguaagag

SEQ ID NO: 691234 - RNA, 22 nt, Human
uauaauuuuaagugguaaauua

SEQ ID NO: 691235 - RNA, 22 nt, Human
uuaaucuucagggacucuugcu

SEQ ID NO: 691236 - RNA, 22 nt, Human
auacaacuuuaucuguaaugag

SEQ ID NO: 691237 - RNA, 22 nt, Human
ucuauaaagggccagauaguag

SEQ ID NO: 691238 - RNA, 22 nt, Human
ugacaaauacaauaagaucugu

SEQ ID NO: 691239 - RNA, 22 nt, Human
cuuugauucagacuuugucggc

SEQ ID NO: 691240 - RNA, 22 nt, Human
aacuccagcucacacagugacc

SEQ ID NO: 691241 - RNA, 20 nt, Human
gaggcccagagaggugaagc

SEQ ID NO: 691242 - RNA, 22 nt, Human
uguacaaauucauugaacugua

SEQ ID NO: 691243 - RNA, 22 nt, Human
aaucacauugaaucugcuaccu

SEQ ID NO: 691244 - RNA, 22 nt, Human
auggauaaucaugaacuuugag

SEQ ID NO: 691245 - RNA, 22 nt, Human
aaacaugaguuaaaaguaacug

SEQ ID NO: 691246 - RNA, 22 nt, Human
cuggaugcugagagguaccaag

SEQ ID NO: 691247 - RNA, 22 nt, Human
caaggccauauugccuguaugu

SEQ ID NO: 691248 - RNA, 23 nt, Human
ucaucuguaaguaucuguggagu

SEQ ID NO: 691249 - RNA, 22 nt, Human
uauaagugacagauuauccaaa

SEQ ID NO: 691250 - RNA, 22 nt, Human
ugucucugaagcccccuccuuu

SEQ ID NO: 691251 - RNA, 22 nt, Human
auuucagugucuucuucucccu

SEQ ID NO: 691252 - RNA, 22 nt, Human
ggccucagaaauagaguaaaau

SEQ ID NO: 691253 - RNA, 22 nt, Human
augguacaauuuucauuugugg

SEQ ID NO: 691254 - RNA, 22 nt, Human
ugccugccuaggaagcugugaa

SEQ ID NO: 691255 - RNA, 22 nt, Human
gcuggcuggaggugaggaagaa

SEQ ID NO: 691256 - RNA, 22 nt, Human
agacaaaccuuguuuuaugaug

SEQ ID NO: 691257 - RNA, 22 nt, Human
aucagguagauuuaauauucug

SEQ ID NO: 691258 - RNA, 22 nt, Human
cauggcugaacacucagugacu

SEQ ID NO: 691259 - RNA, 22 nt, Human
ccugggcaacauagggagaccc

SEQ ID NO: 691260 - RNA, 22 nt, Human
uggagaguggauaugggagcaa

SEQ ID NO: 691261 - RNA, 22 nt, Human
uuguguaaaugucugucuuucu

SEQ ID NO: 691262 - RNA, 22 nt, Human
uuuaauaucucacacuuccaug

SEQ ID NO: 691263 - RNA, 19 nt, Human
cagaguacaccagauagga

SEQ ID NO: 691264 - RNA, 19 nt, Human
ccaggcuuuaugcaaauac

SEQ ID NO: 691265 - RNA, 22 nt, Human
agugaccaaucaugguuagauu

SEQ ID NO: 691266 - RNA, 22 nt, Human
gugcugugugauccaugcuggc

SEQ ID NO: 691267 - RNA, 22 nt, Human
ugguagggacacuaugcagaaa

SEQ ID NO: 691268 - RNA, 22 nt, Human
uuuccacacugcagccagcaaa

SEQ ID NO: 691269 - RNA, 22 nt, Human
acaaaggcagagaauucaacau

SEQ ID NO: 691270 - RNA, 22 nt, Human
uuguuuggaacuuggugccacc

SEQ ID NO: 691271 - RNA, 22 nt, Human
aggcugagauagguggaucauu

SEQ ID NO: 691272 - RNA, 22 nt, Human
uggcucaguuucugcccagcug

SEQ ID NO: 691273 - RNA, 22 nt, Human
uuuagcaauuagaauccagcau

SEQ ID NO: 691274 - RNA, 22 nt, Human
auuucagagaaugaaccuaauc

SEQ ID NO: 691275 - RNA, 22 nt, Human
aguggcucuugggucacugggc

SEQ ID NO: 691276 - RNA, 20 nt, Human
ugcucuggggguggagagac

SEQ ID NO: 691277 - RNA, 22 nt, Human
gcucuugaaaaucaaaagggaa

SEQ ID NO: 691278 - RNA, 21 nt, Human
ugaugaggucauagcacccuc

SEQ ID NO: 691279 - RNA, 22 nt, Human
cuggagauuaaguucucagcca

SEQ ID NO: 691280 - RNA, 22 nt, Human
gcaaagcaucaguagaaauguu

SEQ ID NO: 691281 - RNA, 22 nt, Human
guguuaaugaaaaacaacucau

SEQ ID NO: 691282 - RNA, 22 nt, Human
guucauuuaugauguaacaugu

SEQ ID NO: 691283 - RNA, 18 nt, Human
gugaagcuuuauugaaug

SEQ ID NO: 691284 - RNA, 22 nt, Human
auuuuuuagaaccuggccugau

SEQ ID NO: 691285 - RNA, 22 nt, Human
ggcugccuggaccuccucuuuc

SEQ ID NO: 691286 - RNA, 22 nt, Human
ucagagaguccuggucauuugc

SEQ ID NO: 691287 - RNA, 22 nt, Human
uaaacauuuguuauucuuguuu

SEQ ID NO: 691288 - RNA, 22 nt, Human
ucuucucuguggccugguggug

SEQ ID NO: 691289 - RNA, 22 nt, Human
ucugagcauugaauuuucuucc

SEQ ID NO: 691290 - RNA, 21 nt, Human
uucugcugugccaugccucug

SEQ ID NO: 691291 - RNA, 22 nt, Human
uguguaaaaucugauuaauacu

SEQ ID NO: 691292 - RNA, 22 nt, Human
aggaggggcaaugauagucugg

SEQ ID NO: 691293 - RNA, 22 nt, Human
ucuuggagacucuuguauauuu

SEQ ID NO: 691294 - RNA, 20 nt, Human
aggcacaguuccuaguuggg

SEQ ID NO: 691295 - RNA, 19 nt, Human
uucuuuccacaucuucucu

SEQ ID NO: 691296 - RNA, 22 nt, Human
agcaggcaggaggcuacuaagg

SEQ ID NO: 691297 - RNA, 22 nt, Human
ugcaggagccuuggacuugaaa

SEQ ID NO: 691298 - RNA, 21 nt, Human
cuuaacauuuuaaaugaaagg

SEQ ID NO: 691299 - RNA, 22 nt, Human
agaggaggaagagcuuuaaaau

SEQ ID NO: 691300 - RNA, 22 nt, Human
uggcuuccgccgcgggccucgg

SEQ ID NO: 691301 - RNA, 22 nt, Human
caucuucauuuuguccaguacu

SEQ ID NO: 691302 - RNA, 22 nt, Human
cucugggcggcccaggccaacc

SEQ ID NO: 691303 - RNA, 22 nt, Human
gcugagaguguaggauguuuac

SEQ ID NO: 691304 - RNA, 22 nt, Human
cauccugacaagaaagccagaa

SEQ ID NO: 691305 - RNA, 22 nt, Human
uccagguagggaauaaauguca

SEQ ID NO: 691306 - RNA, 22 nt, Human
ucugucacccagagugcagugg

SEQ ID NO: 691307 - RNA, 22 nt, Human
cacaauuuccuugcuucacuuu

SEQ ID NO: 691308 - RNA, 22 nt, Human
ccagggcugguggcugcagagg

SEQ ID NO: 691309 - RNA, 22 nt, Human
uaaguucucaauacauuguagc

SEQ ID NO: 691310 - RNA, 22 nt, Human
ggcagagcagccccaggguuug

SEQ ID NO: 691311 - RNA, 22 nt, Human
aggcccaaaagaaaccacuggg

SEQ ID NO: 691312 - RNA, 22 nt, Human
caggaacaugucuccaauuaga

SEQ ID NO: 691313 - RNA, 22 nt, Human
cccaggguugccugccucugcu

SEQ ID NO: 691314 - RNA, 22 nt, Human
ccuggcugcccauggacccucu

SEQ ID NO: 691315 - RNA, 22 nt, Human
uggaaacaucucugccuuuauu

SEQ ID NO: 691316 - RNA, 22 nt, Human
auuccaaagacagaagcagcug

SEQ ID NO: 691317 - RNA, 18 nt, Human
agagcagcggcaucacac

SEQ ID NO: 691318 - RNA, 20 nt, Human
gcugccagugccugaugcuu

SEQ ID NO: 691319 - RNA, 22 nt, Human
aggacuggugccagacaaggua

SEQ ID NO: 691320 - RNA, 22 nt, Human
cacugucugagcuggugauuag

SEQ ID NO: 691321 - RNA, 22 nt, Human
uauaagaaacaaggcaaauuuu

SEQ ID NO: 691322 - RNA, 22 nt, Human
augugucuggcauggaaagugu

SEQ ID NO: 691323 - RNA, 22 nt, Human
aucaggaacguucauggacugu

SEQ ID NO: 691324 - RNA, 22 nt, Human
aucaggaugaagcuguagcgaa

SEQ ID NO: 691325 - RNA, 22 nt, Human
cagccagaggggccagagucgg

SEQ ID NO: 691326 - RNA, 22 nt, Human
uuguauuucuuccggucucauu

SEQ ID NO: 691327 - RNA, 22 nt, Human
uaggaugacugauagugauucc

SEQ ID NO: 691328 - RNA, 22 nt, Human
gagguggcaauuuaaugcaguc

SEQ ID NO: 691329 - RNA, 22 nt, Human
uccaugccaggcagucgaugca

SEQ ID NO: 691330 - RNA, 22 nt, Human
acagauuuuaaauuuguaguug

SEQ ID NO: 691331 - RNA, 23 nt, Human
auuucccauugugucagcagagc

SEQ ID NO: 691332 - RNA, 22 nt, Human
uggcuuccuguguaaugaggug

SEQ ID NO: 691333 - RNA, 22 nt, Human
uguaacaaaauaccuuggauug

SEQ ID NO: 691334 - RNA, 22 nt, Human
auugucauuccagucauuguua

SEQ ID NO: 691335 - RNA, 22 nt, Human
ucauaagcuagcugcaccauau

SEQ ID NO: 691336 - RNA, 22 nt, Human
cccaaccagaaauugacagaga

SEQ ID NO: 691337 - RNA, 22 nt, Human
ugcaggagcuuggcucuguccc

SEQ ID NO: 691338 - RNA, 22 nt, Human
gaguaggaauguucugccaucu

SEQ ID NO: 691339 - RNA, 18 nt, Human
cccucuugcacaaagcaa

SEQ ID NO: 691340 - RNA, 22 nt, Human
cagggcuggauccuccagacuc

SEQ ID NO: 691341 - RNA, 22 nt, Human
gccuggcuccuaagagcacaac

SEQ ID NO: 691342 - RNA, 19 nt, Human
aucaccugguguuuccuug

SEQ ID NO: 691343 - RNA, 22 nt, Human
acacacaacucauuguguaaua

SEQ ID NO: 691344 - RNA, 22 nt, Human
aucuuuaauuuggaucagggcc

SEQ ID NO: 691345 - RNA, 22 nt, Human
uaugucaugggucaaaaugaag

SEQ ID NO: 691346 - RNA, 22 nt, Human
agaccuggugauagcuguccua

SEQ ID NO: 691347 - RNA, 22 nt, Human
uugaucuuggacuuuccagccu

SEQ ID NO: 691348 - RNA, 22 nt, Human
ggagacucucauugucaagcuu

SEQ ID NO: 691349 - RNA, 22 nt, Human
cuguaugugaaaaugucaagug

SEQ ID NO: 691350 - RNA, 22 nt, Human
uucagcagguggugaguucugc

SEQ ID NO: 691351 - RNA, 22 nt, Human
ugagauaauaaacaucuccuua

SEQ ID NO: 691352 - RNA, 22 nt, Human
gcccuucugcuguuagguagcc

SEQ ID NO: 691353 - RNA, 22 nt, Human
uauauagaaaagcagauguugg

SEQ ID NO: 691354 - RNA, 22 nt, Human
ggagggcaucaaucaggccugg

SEQ ID NO: 691355 - RNA, 22 nt, Human
acagagcagguccagaagugcc

SEQ ID NO: 691356 - RNA, 22 nt, Human
uaggaaccagagcacucugggc

SEQ ID NO: 691357 - RNA, 22 nt, Human
cugagccaaaaagcagagcuug

SEQ ID NO: 691358 - RNA, 22 nt, Human
uucuugauuucaugcaguuaag

SEQ ID NO: 691359 - RNA, 22 nt, Human
uauuaucauuaacuguugaauu

SEQ ID NO: 691360 - RNA, 21 nt, Human
uuucacaaaaguaugugacaa

SEQ ID NO: 691361 - RNA, 22 nt, Human
ggaagcacugaggcagagaggg

SEQ ID NO: 691362 - RNA, 22 nt, Human
cacauauaugggccccugaggg

SEQ ID NO: 691363 - RNA, 22 nt, Human
uacauggguagguuaagucaua

SEQ ID NO: 691364 - RNA, 22 nt, Human
agaguuugggugggacagcuug

SEQ ID NO: 691365 - RNA, 22 nt, Human
gaaauacagaaagggcugaaug

SEQ ID NO: 691366 - RNA, 22 nt, Human
ucacugaauuucaagcuagugg

SEQ ID NO: 691367 - RNA, 23 nt, Human
uucauguggaccuagaggccugu

SEQ ID NO: 691368 - RNA, 21 nt, Human
agcucagccgggcacaguggc

SEQ ID NO: 691369 - RNA, 22 nt, Human
uuagugugcauggaugccucaa

SEQ ID NO: 691370 - RNA, 21 nt, Human
uccucugcagugagguggccu

SEQ ID NO: 691371 - RNA, 22 nt, Human
uggcuucauucuccugugaaua

SEQ ID NO: 691372 - RNA, 22 nt, Human
acacugugacggaaauaaagaa

SEQ ID NO: 691373 - RNA, 22 nt, Human
aagugcugggauuacagguguc

SEQ ID NO: 691374 - RNA, 22 nt, Human
uugccugugucagcagguggaa

SEQ ID NO: 691375 - RNA, 22 nt, Human
agcaguccuucuuuagagagcc

SEQ ID NO: 691376 - RNA, 23 nt, Human
guccucuggagagaaaggcagua

SEQ ID NO: 691377 - RNA, 22 nt, Human
auccuuuauaagacuuguauuc

SEQ ID NO: 691378 - RNA, 22 nt, Human
uucugggcucacagagcagcag

SEQ ID NO: 691379 - RNA, 22 nt, Human
agugcgugggcaggcauggaag

SEQ ID NO: 691380 - RNA, 23 nt, Human
cucagaggccuguccaggguggu

SEQ ID NO: 691381 - RNA, 22 nt, Human
cuuggucauuucuuguccuguu

SEQ ID NO: 691382 - RNA, 23 nt, Human
aacugucuugcaagugugauacc

SEQ ID NO: 691383 - RNA, 22 nt, Human
gaaaucugcggugaggccugag

SEQ ID NO: 691384 - RNA, 18 nt, Human
agcuuagcauacuuuucc

SEQ ID NO: 691385 - RNA, 22 nt, Human
gcagcucuggggcaggccugag

SEQ ID NO: 691386 - RNA, 22 nt, Human
ucuugcacuucaugaauauguu

SEQ ID NO: 691387 - RNA, 22 nt, Human
uuuuagaaucagguugucuggg

SEQ ID NO: 691388 - RNA, 20 nt, Human
gcuggcagaugucuugagau

SEQ ID NO: 691389 - RNA, 22 nt, Human
uagggugggcaguucuugggga

SEQ ID NO: 691390 - RNA, 22 nt, Human
agggacacuugcuuucaggccc

SEQ ID NO: 691391 - RNA, 22 nt, Human
ggaugggaacuugguagggcau

SEQ ID NO: 691392 - RNA, 23 nt, Human
cucaacauccauucuugcccuuc

SEQ ID NO: 691393 - RNA, 22 nt, Human
cugcaucuguuagauuaucacc

SEQ ID NO: 691394 - RNA, 22 nt, Human
ugaccaggauacugcagggaug

SEQ ID NO: 691395 - RNA, 22 nt, Human
ugggaugagcuauauagaaagu

SEQ ID NO: 691396 - RNA, 22 nt, Human
cuacacuuugguugacuuugug

SEQ ID NO: 691397 - RNA, 20 nt, Human
gaaauguacacauuaccaca

SEQ ID NO: 691398 - RNA, 22 nt, Human
ucagaggacagcagcuaaauaa

SEQ ID NO: 691399 - RNA, 22 nt, Human
auucuucuugagucuuggacuc

SEQ ID NO: 691400 - RNA, 22 nt, Human
caaagcuggaaaaggaggcugg

SEQ ID NO: 691401 - RNA, 22 nt, Human
cuaaagcauucucagauuuugc

SEQ ID NO: 691402 - RNA, 22 nt, Human
cugggcaccaggcaugacaggg

SEQ ID NO: 691403 - RNA, 22 nt, Human
aucgaauaauugcauucuauaa

SEQ ID NO: 691404 - RNA, 19 nt, Human
cugcuuuaggccuuaaaag

SEQ ID NO: 691405 - RNA, 22 nt, Human
aguuuucuuucaucuaucagca

SEQ ID NO: 691406 - RNA, 22 nt, Human
gagggcugccacguugggcgag

SEQ ID NO: 691407 - RNA, 22 nt, Human
aucagaagugauguguguuauu

SEQ ID NO: 691408 - RNA, 22 nt, Human
ugcccuugaggacagcucccag

SEQ ID NO: 691409 - RNA, 22 nt, Human
acauggaaaacuaacugcuuuu

SEQ ID NO: 691410 - RNA, 20 nt, Human
gacaacagaguaccaggaag

SEQ ID NO: 691411 - RNA, 22 nt, Human
aucagcagugucuaccucggug

SEQ ID NO: 691412 - RNA, 22 nt, Human
ccugcucagcuguccucacgcu

SEQ ID NO: 691413 - RNA, 22 nt, Human
aaacagauugaaauucguagua

SEQ ID NO: 691414 - RNA, 23 nt, Human
ucauaaauauuagcacaguagga

SEQ ID NO: 691415 - RNA, 22 nt, Human
gugugccaacaaaagacagugc

SEQ ID NO: 691416 - RNA, 22 nt, Human
uuggcagaugagaccagggguu

SEQ ID NO: 691417 - RNA, 22 nt, Human
gggcugugugcaguacgggucc

SEQ ID NO: 691418 - RNA, 22 nt, Human
caggacagguguucuagaucag

SEQ ID NO: 691419 - RNA, 22 nt, Human
auccagagacccaaggacagaa

SEQ ID NO: 691420 - RNA, 22 nt, Human
ugugaggacauuggaggacuca

SEQ ID NO: 691421 - RNA, 22 nt, Human
ugcugcagaaauucugugagga

SEQ ID NO: 691422 - RNA, 22 nt, Human
uucaguuccuugugcgaauucc

SEQ ID NO: 691423 - RNA, 22 nt, Human
uccucuuuaaaugcuuuuaucu

SEQ ID NO: 691424 - RNA, 22 nt, Human
gacagcuguggagaggcaugug

SEQ ID NO: 691425 - RNA, 22 nt, Human
gcuguggcggcagcagcuggug

SEQ ID NO: 691426 - RNA, 22 nt, Human
acacagaugauguuccaggaac

SEQ ID NO: 691427 - RNA, 22 nt, Human
agagucuguuacuuguccccua

SEQ ID NO: 691428 - RNA, 22 nt, Human
gcucccacugcagcccugagcc

SEQ ID NO: 691429 - RNA, 22 nt, Human
aagucagagcaacugagacauu

SEQ ID NO: 691430 - RNA, 22 nt, Human
ugcuuccugaggccgucuucuc

SEQ ID NO: 691431 - RNA, 22 nt, Human
gcuucagaaauaucaucauuau

SEQ ID NO: 691432 - RNA, 23 nt, Human
augaggucagccauaagacggaa

SEQ ID NO: 691433 - RNA, 22 nt, Human
gugcacacaagcaaugcacuua

SEQ ID NO: 691434 - RNA, 22 nt, Human
uguuuaagugcugguaggguug

SEQ ID NO: 691435 - RNA, 22 nt, Human
cuuugaaaacuuaaauaacagc

SEQ ID NO: 691436 - RNA, 20 nt, Human
uaguauuugcauaaggauag

SEQ ID NO: 691437 - RNA, 22 nt, Human
cauaauaucuccgauuacuugc

SEQ ID NO: 691438 - RNA, 22 nt, Human
aaagcaguauaguggaagggcu

SEQ ID NO: 691439 - RNA, 22 nt, Human
gucacccugcuggcuguucagc

SEQ ID NO: 691440 - RNA, 22 nt, Human
agggcaguucaacuucauagug

SEQ ID NO: 691441 - RNA, 22 nt, Human
cacacaugcauguaagaccucu

SEQ ID NO: 691442 - RNA, 22 nt, Human
ccuguuuauugugaagaaccca

SEQ ID NO: 691443 - RNA, 22 nt, Human
uucugcaugaacaguuuauucc

SEQ ID NO: 691444 - RNA, 22 nt, Human
aaaugcacagagccuuagagau

SEQ ID NO: 691445 - RNA, 22 nt, Human
gguacagaauaaaaauccuaca

SEQ ID NO: 691446 - RNA, 22 nt, Human
caggcaagcaaggggucuugaa

SEQ ID NO: 691447 - RNA, 22 nt, Human
aaacuguguaugcagagagcau

SEQ ID NO: 691448 - RNA, 22 nt, Human
guguggcuagaagugucuuguu

SEQ ID NO: 691449 - RNA, 22 nt, Human
uccuuccaugguggggcugcuu

SEQ ID NO: 691450 - RNA, 22 nt, Human
gagcaacacgcaguaguauacg

SEQ ID NO: 691451 - RNA, 22 nt, Human
acauggugugcugagaaugaca

SEQ ID NO: 691452 - RNA, 22 nt, Human
caagagcugaggcuggagaggu

SEQ ID NO: 691453 - RNA, 22 nt, Human
ccugguggcuucuggguggacg

SEQ ID NO: 691454 - RNA, 22 nt, Human
gucagcucauccaucccggugg

SEQ ID NO: 691455 - RNA, 22 nt, Human
ugugugaauagcaguggcuggu

SEQ ID NO: 691456 - RNA, 22 nt, Human
gacuuuaaagguucugcugcuu

SEQ ID NO: 691457 - RNA, 22 nt, Human
augggcaacagcagucacaaug

SEQ ID NO: 691458 - RNA, 16 nt, Human
aggcucagaggcugga

SEQ ID NO: 691459 - RNA, 22 nt, Human
uaaccuuuguucaauguaagau

SEQ ID NO: 691460 - RNA, 22 nt, Human
gugacagaguuuuagaucucau

SEQ ID NO: 691461 - RNA, 22 nt, Human
aagugggaauagaaaugaaggu

SEQ ID NO: 691462 - RNA, 19 nt, Human
aaaggcaguggguggcgug

SEQ ID NO: 691463 - RNA, 22 nt, Human
uuuggccucaugaauuucuugc

SEQ ID NO: 691464 - RNA, 18 nt, Human
agagaugguguagaguuu

SEQ ID NO: 691465 - RNA, 22 nt, Human
gcugcuggagcuuugcagaagg

SEQ ID NO: 691466 - RNA, 22 nt, Human
uugauuucuauucagauguaga

SEQ ID NO: 691467 - RNA, 19 nt, Human
agagacugccaccagcugu

SEQ ID NO: 691468 - RNA, 22 nt, Human
cccgacuagcugggauuacagg

SEQ ID NO: 691469 - RNA, 21 nt, Human
ucagagagucacagugaacug

SEQ ID NO: 691470 - RNA, 22 nt, Human
aauguguuuaguuaaugaguug

SEQ ID NO: 691471 - RNA, 22 nt, Human
agcuaaggacaguugauuuaga

SEQ ID NO: 691472 - RNA, 22 nt, Human
cagagcaguccuugucaaucag

SEQ ID NO: 691473 - RNA, 22 nt, Human
cuguacauaugucuccagagug

SEQ ID NO: 691474 - RNA, 18 nt, Human
ucuggaacaacuucaugu

SEQ ID NO: 691475 - RNA, 22 nt, Human
caaaucauggcucuagcuuaca

SEQ ID NO: 691476 - RNA, 23 nt, Human
agcaguaacuucagaaacaucag

SEQ ID NO: 691477 - RNA, 22 nt, Human
uuuacacagaggacacugggcu

SEQ ID NO: 691478 - RNA, 22 nt, Human
agcaucugugauauuuuguuau

SEQ ID NO: 691479 - RNA, 22 nt, Human
auuguacaaugcugagguuugg

SEQ ID NO: 691480 - RNA, 22 nt, Human
ucaggaagccgguuaaauagau

SEQ ID NO: 691481 - RNA, 22 nt, Human
acuuucauuuguaauaaacuuc

SEQ ID NO: 691482 - RNA, 20 nt, Human
agcaaagccuuuagaguuug

SEQ ID NO: 691483 - RNA, 22 nt, Human
auagacauauggcuuuguuucu

SEQ ID NO: 691484 - RNA, 22 nt, Human
auaaagauuucuuuuucucuac

SEQ ID NO: 691485 - RNA, 22 nt, Human
uaauccacaauagagauuaucu

SEQ ID NO: 691486 - RNA, 22 nt, Human
agggccagcuagagcccucgcc

SEQ ID NO: 691487 - RNA, 22 nt, Human
uacaaugcugugcauguaaugg

SEQ ID NO: 691488 - RNA, 22 nt, Human
gcugggucagaaucucccugug

SEQ ID NO: 691489 - RNA, 22 nt, Human
cuuaauuuaagccuagaaugca

SEQ ID NO: 691490 - RNA, 22 nt, Human
cuaaaaauccacacuaggugaa

SEQ ID NO: 691491 - RNA, 22 nt, Human
cugucuguuucaaaagugguua

SEQ ID NO: 691492 - RNA, 22 nt, Human
caguaacaggcucugugguaua

SEQ ID NO: 691493 - RNA, 22 nt, Human
ggaaggggucaccuccugauga

SEQ ID NO: 691494 - RNA, 22 nt, Human
gaaaccucuuagccucucuuug

SEQ ID NO: 691495 - RNA, 22 nt, Human
gguggaaggcagcagucucagg

SEQ ID NO: 691496 - RNA, 22 nt, Human
uauguggccauucuguuugugu

SEQ ID NO: 691497 - RNA, 22 nt, Human
gaggcuccagcgacaccuaggc

SEQ ID NO: 691498 - RNA, 23 nt, Human
agcaccaggaacagugugguccu

SEQ ID NO: 691499 - RNA, 22 nt, Human
ccagagagaaaauggagggcca

SEQ ID NO: 691500 - RNA, 21 nt, Human
cacucucccaauccuugcuga

SEQ ID NO: 691501 - RNA, 22 nt, Human
ugaacauuaguugaguaaaguc

SEQ ID NO: 691502 - RNA, 22 nt, Human
cagccagggagcaaagaguuga

SEQ ID NO: 691503 - RNA, 22 nt, Human
ucauguaaauguggaugcuucc

SEQ ID NO: 691504 - RNA, 22 nt, Human
acacauagaaaauaaauaguua

SEQ ID NO: 691505 - RNA, 22 nt, Human
cuggggcugugggagacaaggc

SEQ ID NO: 691506 - RNA, 22 nt, Human
ucuacaaugagaaaugaucagu

SEQ ID NO: 691507 - RNA, 22 nt, Human
ccagggcuuuaucugccuuuga

SEQ ID NO: 691508 - RNA, 22 nt, Human
aacagaauauuuugccuuucuc

SEQ ID NO: 691509 - RNA, 22 nt, Human
gcccugcucuuuugcccaccca

SEQ ID NO: 691510 - RNA, 22 nt, Human
aggcaagcccccagugaggcuc

SEQ ID NO: 691511 - RNA, 22 nt, Human
aaaguguaaggaauuuaaguaa

SEQ ID NO: 691512 - RNA, 22 nt, Human
uaaggaagucacaagaaucgcu

SEQ ID NO: 691513 - RNA, 22 nt, Human
agcccaggaguccuuaaggacc

SEQ ID NO: 691514 - RNA, 18 nt, Human
auugcuuuuguaccaacc

SEQ ID NO: 691515 - RNA, 22 nt, Human
auggcagagggauugaacagcu

SEQ ID NO: 691516 - RNA, 19 nt, Human
cuuugcaggggauggguga

SEQ ID NO: 691517 - RNA, 22 nt, Human
gcucagggcuaaggcugagggg

SEQ ID NO: 691518 - RNA, 22 nt, Human
gacagccaacuggggagggcau

SEQ ID NO: 691519 - RNA, 21 nt, Human
ugcacagccauacccuccuug

SEQ ID NO: 691520 - RNA, 20 nt, Human
uggccaccugcgucccagcc

SEQ ID NO: 691521 - RNA, 22 nt, Human
gaguaauuccaauauaaaucac

SEQ ID NO: 691522 - RNA, 22 nt, Human
gugucccagcagcacauuggcu

SEQ ID NO: 691523 - RNA, 22 nt, Human
cuguguggccucaagccagccu

SEQ ID NO: 691524 - RNA, 22 nt, Human
ccugcccacugcccggucagcc

SEQ ID NO: 691525 - RNA, 22 nt, Human
uaagcauaagauacaugagaca

SEQ ID NO: 691526 - RNA, 22 nt, Human
augcugagauccucaggccaga

SEQ ID NO: 691527 - RNA, 22 nt, Human
uucugaaaggcaugucagguag

SEQ ID NO: 691528 - RNA, 22 nt, Human
uacugugguuacugcuauuaga

SEQ ID NO: 691529 - RNA, 19 nt, Human
gcgggcggcgccugcgagg

SEQ ID NO: 691530 - RNA, 22 nt, Human
gucugccucagccgggggccgc

SEQ ID NO: 691531 - RNA, 22 nt, Human
guguggccguguauccauggcu

SEQ ID NO: 691532 - RNA, 22 nt, Human
uuuccagagcugagaaggcuug

SEQ ID NO: 691533 - RNA, 22 nt, Human
ucaggaauccagacagggcaca

SEQ ID NO: 691534 - RNA, 22 nt, Human
uauuuagaacagacaauagaaa

SEQ ID NO: 691535 - RNA, 22 nt, Human
uuucuccuugugucuccuuuga

SEQ ID NO: 691536 - RNA, 22 nt, Human
uugcauugaaugcacauuuuua

SEQ ID NO: 691537 - RNA, 21 nt, Human
aggagccauguggucugaugg

SEQ ID NO: 691538 - RNA, 22 nt, Human
aaggcugguggauuaugagguc

SEQ ID NO: 691539 - RNA, 22 nt, Human
guggggcaguggccugggagca

SEQ ID NO: 691540 - RNA, 22 nt, Human
auggccaccauuuaaugaagcu

SEQ ID NO: 691541 - RNA, 22 nt, Human
agagcugcaccuaugcagaccu

SEQ ID NO: 691542 - RNA, 22 nt, Human
agaaaaugugaacuugugaauu

SEQ ID NO: 691543 - RNA, 22 nt, Human
aauaagaucuuaaagguuauau

SEQ ID NO: 691544 - RNA, 22 nt, Human
aaggacaggcuaaccugacauu

SEQ ID NO: 691545 - RNA, 22 nt, Human
ccucuccuugcacccgucccgc

SEQ ID NO: 691546 - RNA, 19 nt, Human
aagagggaaagugcuaugc

SEQ ID NO: 691547 - RNA, 22 nt, Human
uuucuuccuuaccuuacuagag

SEQ ID NO: 691548 - RNA, 22 nt, Human
caguccugaauacuggacggug

SEQ ID NO: 691549 - RNA, 22 nt, Human
agccaggacaucucuagcugcu

SEQ ID NO: 691550 - RNA, 22 nt, Human
acaugaggugcuauaggucuac

SEQ ID NO: 691551 - RNA, 22 nt, Human
uuuguuaaauauuuauugagug

SEQ ID NO: 691552 - RNA, 22 nt, Human
uugagcucccgcuucuucuuug

SEQ ID NO: 691553 - RNA, 22 nt, Human
ccuggcagcauugguagagauu

SEQ ID NO: 691554 - RNA, 22 nt, Human
cugaggaugguguggucuucuc

SEQ ID NO: 691555 - RNA, 22 nt, Human
uagcaggguuuugaagaggguu

SEQ ID NO: 691556 - RNA, 23 nt, Human
uccuccuuuugcuugugcuuccc

SEQ ID NO: 691557 - RNA, 22 nt, Human
uacagcuaggcaaaaaugacau

SEQ ID NO: 691558 - RNA, 22 nt, Human
auacauuagugaacaaaagaga

SEQ ID NO: 691559 - RNA, 22 nt, Human
uccaguuucauagcuaaggaac

SEQ ID NO: 691560 - RNA, 22 nt, Human
uguucuaugcucuuuaagguga

SEQ ID NO: 691561 - RNA, 22 nt, Human
aaguguuuuguaaacagaaaag

SEQ ID NO: 691562 - RNA, 22 nt, Human
uauuuccaccuauuauuuucug

SEQ ID NO: 691563 - RNA, 22 nt, Human
ggccacugcccuggcuacaccg

SEQ ID NO: 691564 - RNA, 22 nt, Human
ccuccacaggagcugcagugcu

SEQ ID NO: 691565 - RNA, 20 nt, Human
ccccuucaucuacagccuga

SEQ ID NO: 691566 - RNA, 22 nt, Human
ugccugccaggugcuucuucau

SEQ ID NO: 691567 - RNA, 20 nt, Human
cgcccagugcgguucugacc

SEQ ID NO: 691568 - RNA, 22 nt, Human
aucaggauagucuguaaauugu

SEQ ID NO: 691569 - RNA, 17 nt, Human
aguuuauuuagccuucu

SEQ ID NO: 691570 - RNA, 22 nt, Human
acauaugugcuuauauccauga

SEQ ID NO: 691571 - RNA, 22 nt, Human
cauuacaaccccaaauuacaaa

SEQ ID NO: 691572 - RNA, 22 nt, Human
uaaguucauuagacuacagaua

SEQ ID NO: 691573 - RNA, 21 nt, Human
uggccucccacacuuccaugg

SEQ ID NO: 691574 - RNA, 22 nt, Human
uauuaacauuuuaugaaaauaa

SEQ ID NO: 691575 - RNA, 22 nt, Human
uuuauuggaugggucagcucua

SEQ ID NO: 691576 - RNA, 22 nt, Human
ucccacugugaauccaaggccu

SEQ ID NO: 691577 - RNA, 22 nt, Human
gugcauugcgaugcagacgacc

SEQ ID NO: 691578 - RNA, 22 nt, Human
ugagggagagggcgaaaaugaa

SEQ ID NO: 691579 - RNA, 22 nt, Human
uucucuuaucuggcauuauugg

SEQ ID NO: 691580 - RNA, 22 nt, Human
cuagcacugagaauagugcaua

SEQ ID NO: 691581 - RNA, 19 nt, Human
ccaggucuggggccagauu

SEQ ID NO: 691582 - RNA, 22 nt, Human
ugcagguggauucaauguggga

SEQ ID NO: 691583 - RNA, 22 nt, Human
ucagggcacaggccuguggguu

SEQ ID NO: 691584 - RNA, 22 nt, Human
uaaaaccaggucuugggauuua

SEQ ID NO: 691585 - RNA, 22 nt, Human
uaggggaggggaucaugugcug

SEQ ID NO: 691586 - RNA, 22 nt, Human
ugagugaaaaauuugccuggag

SEQ ID NO: 691587 - RNA, 22 nt, Human
uuuauaguagcaugauuuauaa

SEQ ID NO: 691588 - RNA, 21 nt, Human
cacuccacuuagaacaggguu

SEQ ID NO: 691589 - RNA, 22 nt, Human
ggaagagggaaccacgacugua

SEQ ID NO: 691590 - RNA, 22 nt, Human
agacauaaacuuacugaaauac

SEQ ID NO: 691591 - RNA, 22 nt, Human
uuuuaugagaaugcgccacuug

SEQ ID NO: 691592 - RNA, 22 nt, Human
gagaugcaagcaagucuauuuu

SEQ ID NO: 691593 - RNA, 22 nt, Human
uuuaaaaccaaagaaagccucu

SEQ ID NO: 691594 - RNA, 22 nt, Human
aguggccacugacuuggaaauc

SEQ ID NO: 691595 - RNA, 23 nt, Human
aggcaguggugguaacaugucaa

SEQ ID NO: 691596 - RNA, 22 nt, Human
ggccucucugagagcagacguu

SEQ ID NO: 691597 - RNA, 22 nt, Human
gagguccugucugagaauggag

SEQ ID NO: 691598 - RNA, 20 nt, Human
acauaugugugcauaucuuu

SEQ ID NO: 691599 - RNA, 22 nt, Human
cacuccagccucagugacagag

SEQ ID NO: 691600 - RNA, 22 nt, Human
aucugccugagucuagguuuuc

SEQ ID NO: 691601 - RNA, 18 nt, Human
ccaauguuggccccaagg

SEQ ID NO: 691602 - RNA, 22 nt, Human
acuguauuuggauauaagaucu

SEQ ID NO: 691603 - RNA, 22 nt, Human
aaagauuuaugaaguucaauua

SEQ ID NO: 691604 - RNA, 21 nt, Human
ucccucagaagguagccaagc

SEQ ID NO: 691605 - RNA, 22 nt, Human
uagcuguuauuuugcuacccau

SEQ ID NO: 691606 - RNA, 22 nt, Human
auguuuacugaaaagauuucaa

SEQ ID NO: 691607 - RNA, 22 nt, Human
guagcugauccugaggacaggg

SEQ ID NO: 691608 - RNA, 22 nt, Human
ugaaguccuagaacuccuggua

SEQ ID NO: 691609 - RNA, 22 nt, Human
cauuucaaguaacagauugcuu

SEQ ID NO: 691610 - RNA, 22 nt, Human
ucugaauaauguccuuguauca

SEQ ID NO: 691611 - RNA, 22 nt, Human
ccugaggcuugggaguuccgcc

SEQ ID NO: 691612 - RNA, 22 nt, Human
gccaugcuugguaugcugugag

SEQ ID NO: 691613 - RNA, 22 nt, Human
cacugggcguguccugggugag

SEQ ID NO: 691614 - RNA, 22 nt, Human
gguggaaggccuggaaggaggc

SEQ ID NO: 691615 - RNA, 22 nt, Human
gacauucaacuuugaugauuau

SEQ ID NO: 691616 - RNA, 22 nt, Human
cuucuugguugguuucauucca

SEQ ID NO: 691617 - RNA, 22 nt, Human
gacugaaccucaaauuuggcuc

SEQ ID NO: 691618 - RNA, 22 nt, Human
ucacacagcuccuuuccuuagu

SEQ ID NO: 691619 - RNA, 22 nt, Human
acaaauuauagaaaauugagcu

SEQ ID NO: 691620 - RNA, 22 nt, Human
ggccaggaggcaggggcucaau

SEQ ID NO: 691621 - RNA, 22 nt, Human
ugggugggagcgcccugucugg

SEQ ID NO: 691622 - RNA, 22 nt, Human
gguggcaucucuuuccagauuu

SEQ ID NO: 691623 - RNA, 22 nt, Human
guuacacacaauauauccuaaa

SEQ ID NO: 691624 - RNA, 22 nt, Human
aaccaggugacucauggugagc

SEQ ID NO: 691625 - RNA, 22 nt, Human
caguguggagggagagagccug

SEQ ID NO: 691626 - RNA, 22 nt, Human
uccagcccucagccaaguggaa

SEQ ID NO: 691627 - RNA, 22 nt, Human
uacacagggagagauuggaaac

SEQ ID NO: 691628 - RNA, 23 nt, Human
ugcccucccaaugcuucggucac

SEQ ID NO: 691629 - RNA, 22 nt, Human
uaaccuggggccugaagaccau

SEQ ID NO: 691630 - RNA, 22 nt, Human
agucucagaaaagaagcaugga

SEQ ID NO: 691631 - RNA, 22 nt, Human
uccagucaugguguccucacaa

SEQ ID NO: 691632 - RNA, 22 nt, Human
ucaggaauuuuguucuguaucc

SEQ ID NO: 691633 - RNA, 22 nt, Human
aagaugauagaucugucaaugu

SEQ ID NO: 691634 - RNA, 22 nt, Human
ccagaagucaggaaugagucuu

SEQ ID NO: 691635 - RNA, 22 nt, Human
ucugucuuagccaucucaggcu

SEQ ID NO: 691636 - RNA, 22 nt, Human
aaucucuugguucagaagccuc

SEQ ID NO: 691637 - RNA, 22 nt, Human
uaaggccaccguuauagaacca

SEQ ID NO: 691638 - RNA, 22 nt, Human
ggugucuaugauucaguuuaug

SEQ ID NO: 691639 - RNA, 22 nt, Human
uggcucuggauuaaucuaggaa

SEQ ID NO: 691640 - RNA, 22 nt, Human
aguggcaucaaaucaagguuug

SEQ ID NO: 691641 - RNA, 22 nt, Human
ugagggaggcccuuugagcaga

SEQ ID NO: 691642 - RNA, 22 nt, Human
uuaaagaauagugccccuauug

SEQ ID NO: 691643 - RNA, 22 nt, Human
uguuugaguucuagcgcauuua

SEQ ID NO: 691644 - RNA, 22 nt, Human
uuccaggacucguucuggcuca

SEQ ID NO: 691645 - RNA, 22 nt, Human
guguuaaauuucuaauuuguga

SEQ ID NO: 691646 - RNA, 22 nt, Human
uuugaacucagcuucagacaac

SEQ ID NO: 691647 - RNA, 22 nt, Human
agacuuuaaugugcaaaugaaa

SEQ ID NO: 691648 - RNA, 22 nt, Human
uuuccccagguagauagauaau

SEQ ID NO: 691649 - RNA, 22 nt, Human
aggcugaggcuggcagcuccag

SEQ ID NO: 691650 - RNA, 22 nt, Human
aauuaggggaggacguaucaua

SEQ ID NO: 691651 - RNA, 22 nt, Human
aggccagcgcugcuagcucccg

SEQ ID NO: 691652 - RNA, 22 nt, Human
gggaggcucagugguguccucu

SEQ ID NO: 691653 - RNA, 20 nt, Human
acucauuuccagcaucugau

SEQ ID NO: 691654 - RNA, 22 nt, Human
ucugaggccuucagcaugaauc

SEQ ID NO: 691655 - RNA, 22 nt, Human
uuugaagcagaugguuaagcuu

SEQ ID NO: 691656 - RNA, 22 nt, Human
aauccacuuugugccccucucu

SEQ ID NO: 691657 - RNA, 22 nt, Human
uuucucugccaguuauuuuccu

SEQ ID NO: 691658 - RNA, 22 nt, Human
ugcaaauggagcauguauaaga

SEQ ID NO: 691659 - RNA, 22 nt, Human
gcauccagagguagccacugug

SEQ ID NO: 691660 - RNA, 22 nt, Human
auauuucuggggguguguuucu

SEQ ID NO: 691661 - RNA, 22 nt, Human
ggagagagagauuguguuuauu

SEQ ID NO: 691662 - RNA, 20 nt, Human
ucaaggacucccugggaaga

SEQ ID NO: 691663 - RNA, 22 nt, Human
ugugaaauguguguauaauuaa

SEQ ID NO: 691664 - RNA, 22 nt, Human
cagccacuguggucuagcugca

SEQ ID NO: 691665 - RNA, 21 nt, Human
aucucuucaaggcugauuuac

SEQ ID NO: 691666 - RNA, 22 nt, Human
caguguacuuggaauguaacag

SEQ ID NO: 691667 - RNA, 22 nt, Human
uauacacaggaaucugugaaaa

SEQ ID NO: 691668 - RNA, 22 nt, Human
aggagggcuaggaaaaccagga

SEQ ID NO: 691669 - RNA, 22 nt, Human
uggcuuccagagcugcuccacc

SEQ ID NO: 691670 - RNA, 22 nt, Human
ucuuaaguaccuccuuuaucac

SEQ ID NO: 691671 - RNA, 22 nt, Human
ugucaagucuaguugcuggcuu

SEQ ID NO: 691672 - RNA, 22 nt, Human
cuuuuuacucuguugucucagc

SEQ ID NO: 691673 - RNA, 22 nt, Human
ucccugugaaucagaagcaggu

SEQ ID NO: 691674 - RNA, 22 nt, Human
uugauacauagcacaguuuagg

SEQ ID NO: 691675 - RNA, 22 nt, Human
cugccuucaucucugagcuggg

SEQ ID NO: 691676 - RNA, 19 nt, Human
uucuaaguuuugcuugcug

SEQ ID NO: 691677 - RNA, 22 nt, Human
acauuuuucacauuuguagggu

SEQ ID NO: 691678 - RNA, 22 nt, Human
ucuuuuauccuacauuuagcuc

SEQ ID NO: 691679 - RNA, 22 nt, Human
uuagaaucuaacauucuuaucu

SEQ ID NO: 691680 - RNA, 22 nt, Human
ggcuacagaggccgugagccug

SEQ ID NO: 691681 - RNA, 22 nt, Human
gugugcgcgcucauaggugugu

SEQ ID NO: 691682 - RNA, 22 nt, Human
uacagccucacauuuacuuaca

SEQ ID NO: 691683 - RNA, 22 nt, Human
aguaaacacgugggguuucuuu

SEQ ID NO: 691684 - RNA, 19 nt, Human
gacaggacgaagggaaguu

SEQ ID NO: 691685 - RNA, 22 nt, Human
ucaggaaugaggauaaacauug

SEQ ID NO: 691686 - RNA, 22 nt, Human
aaggagcuuguucgccuuccuc

SEQ ID NO: 691687 - RNA, 22 nt, Human
uuccaagaagucaacagguagu

SEQ ID NO: 691688 - RNA, 22 nt, Human
auugcagcuggucaggguaauu

SEQ ID NO: 691689 - RNA, 22 nt, Human
ucccagcugcugagauagugcu

SEQ ID NO: 691690 - RNA, 22 nt, Human
caugauggaugugcacuucgcu

SEQ ID NO: 691691 - RNA, 22 nt, Human
guguggggcucagugggaaugu

SEQ ID NO: 691692 - RNA, 22 nt, Human
ugagauaacuauucugucaacu

SEQ ID NO: 691693 - RNA, 22 nt, Human
agauguuuuggagacacuaacc

SEQ ID NO: 691694 - RNA, 18 nt, Human
agugucuggauauuuggg

SEQ ID NO: 691695 - RNA, 22 nt, Human
aaggacuccaauucuuucaucu

SEQ ID NO: 691696 - RNA, 22 nt, Human
ugagcccuccaaacccaggauu

SEQ ID NO: 691697 - RNA, 21 nt, Human
ccuggcagaagccugauaugc

SEQ ID NO: 691698 - RNA, 22 nt, Human
ugccucccucucugccacugga

SEQ ID NO: 691699 - RNA, 19 nt, Human
caggacagacuucaaagcc

SEQ ID NO: 691700 - RNA, 22 nt, Human
ccacagcaugcaggccugacac

SEQ ID NO: 691701 - RNA, 22 nt, Human
acauuaccuggcauuugaucuu

SEQ ID NO: 691702 - RNA, 23 nt, Human
cagaucauauauccagcuguaag

SEQ ID NO: 691703 - RNA, 22 nt, Human
gcucccaccaggcagaccuacc

SEQ ID NO: 691704 - RNA, 21 nt, Human
ucucuucccaucaggacacua

SEQ ID NO: 691705 - RNA, 22 nt, Human
ggagggagcauccccuugcuga

SEQ ID NO: 691706 - RNA, 22 nt, Human
cucagcaacccuagaacauuug

SEQ ID NO: 691707 - RNA, 22 nt, Human
uugcaaaaaccacaauuacuuu

SEQ ID NO: 691708 - RNA, 17 nt, Human
gcacauguguucuuuua

SEQ ID NO: 691709 - RNA, 22 nt, Human
uuuuauucuaaguaugauggga

SEQ ID NO: 691710 - RNA, 22 nt, Human
ugcuugcuaugcauccugaacu

SEQ ID NO: 691711 - RNA, 23 nt, Human
aaaggcaggccuaggacauauug

SEQ ID NO: 691712 - RNA, 22 nt, Human
gaaauguaugucuucccccauu

SEQ ID NO: 691713 - RNA, 22 nt, Human
ugugcacauauacucauauucc

SEQ ID NO: 691714 - RNA, 22 nt, Human
uacuagaaugccacuguuagug

SEQ ID NO: 691715 - RNA, 22 nt, Human
gucccugcccuccugggacuca

SEQ ID NO: 691716 - RNA, 22 nt, Human
uucagcaacauuuguugagugc

SEQ ID NO: 691717 - RNA, 22 nt, Human
cuuccuagugucuacuuuggag

SEQ ID NO: 691718 - RNA, 22 nt, Human
uaaccugacugcucuuuagaau

SEQ ID NO: 691719 - RNA, 18 nt, Human
aagcugggaaggagacag

SEQ ID NO: 691720 - RNA, 22 nt, Human
gugcuguacuucuguguugaag

SEQ ID NO: 691721 - RNA, 15 nt, Human
ccaggcugggugagc

SEQ ID NO: 691722 - RNA, 22 nt, Human
ugaauagauggugacaguauga

SEQ ID NO: 691723 - RNA, 22 nt, Human
cuggaaagaccugcuugcuuuu

SEQ ID NO: 691724 - RNA, 22 nt, Human
uacaaaggaguagagaaggcuu

SEQ ID NO: 691725 - RNA, 22 nt, Human
ucuuccucaauguaacaacccc

SEQ ID NO: 691726 - RNA, 22 nt, Human
gaugcaaagauaaaacagacgc

SEQ ID NO: 691727 - RNA, 22 nt, Human
uguaaucaugcaucaguuaguu

SEQ ID NO: 691728 - RNA, 22 nt, Human
gaugaugaggccaugaggcagg

SEQ ID NO: 691729 - RNA, 22 nt, Human
ggcuucagauuucucaguuguu

SEQ ID NO: 691730 - RNA, 20 nt, Human
uuucuggguacucucccucu

SEQ ID NO: 691731 - RNA, 22 nt, Human
ugagacaguaauuguauaguuu

SEQ ID NO: 691732 - RNA, 22 nt, Human
ccaagaugagcuggcuccaugg

SEQ ID NO: 691733 - RNA, 22 nt, Human
guaggaagcucugaggcuaguu

SEQ ID NO: 691734 - RNA, 22 nt, Human
aaaguuugaaugauauauuagu

SEQ ID NO: 691735 - RNA, 22 nt, Human
cuuuaacaaaugacucuugucu

SEQ ID NO: 691736 - RNA, 22 nt, Human
guucaaauuuucuaggugggug

SEQ ID NO: 691737 - RNA, 22 nt, Human
guguacugcaaaugcugcugcc

SEQ ID NO: 691738 - RNA, 22 nt, Human
gaaauuaagcaggggucugugg

SEQ ID NO: 691739 - RNA, 22 nt, Human
cucagaaaucccacucugugua

SEQ ID NO: 691740 - RNA, 22 nt, Human
aagacugucugggacaagauga

SEQ ID NO: 691741 - RNA, 22 nt, Human
uuuauuauccaguguugucaug

SEQ ID NO: 691742 - RNA, 22 nt, Human
aguggcugcuucugguugcucc

SEQ ID NO: 691743 - RNA, 22 nt, Human
ugagcuggucacuccuucugaa

SEQ ID NO: 691744 - RNA, 22 nt, Human
uuguuauaaagacuaaauaugu

SEQ ID NO: 691745 - RNA, 22 nt, Human
auacaugugugugcauacaugu

SEQ ID NO: 691746 - RNA, 22 nt, Human
cugccugcucuauccaggccug

SEQ ID NO: 691747 - RNA, 22 nt, Human
agucagugacuuuugcugagag

SEQ ID NO: 691748 - RNA, 22 nt, Human
aaucauugagacaaauuagcuu

SEQ ID NO: 691749 - RNA, 22 nt, Human
ugaaauguugguaauuuuauau

SEQ ID NO: 691750 - RNA, 22 nt, Human
gccaguggagacugaaacccau

SEQ ID NO: 691751 - RNA, 22 nt, Human
cucagcaagauuaagcagcuug

SEQ ID NO: 691752 - RNA, 22 nt, Human
cuguauaucaugguuuugcagu

SEQ ID NO: 691753 - RNA, 22 nt, Human
uaucuguuaggaucagagcugg

SEQ ID NO: 691754 - RNA, 22 nt, Human
ggcugugcagggcagagucuca

SEQ ID NO: 691755 - RNA, 22 nt, Human
auagaacucgggcuuuggaauc

SEQ ID NO: 691756 - RNA, 22 nt, Human
aaaugcuagggagaaacucucc

SEQ ID NO: 691757 - RNA, 22 nt, Human
cuggcugacaccuugauagcag

SEQ ID NO: 691758 - RNA, 22 nt, Human
ccuaaggaccagggcuuccagc

SEQ ID NO: 691759 - RNA, 22 nt, Human
ugauacagagaaagcaucuuuu

SEQ ID NO: 691760 - RNA, 22 nt, Human
uggccugguuauauugcuauca

SEQ ID NO: 691761 - RNA, 22 nt, Human
augccuggauuugggacucaaa

SEQ ID NO: 691762 - RNA, 22 nt, Human
acagaguuguguuuguacaacg

SEQ ID NO: 691763 - RNA, 22 nt, Human
ucugugauaguuuuucagcuau

SEQ ID NO: 691764 - RNA, 21 nt, Human
ucaacccuugcgucaccaagc

SEQ ID NO: 691765 - RNA, 22 nt, Human
caggagccgccaggcacguugg

SEQ ID NO: 691766 - RNA, 19 nt, Human
ucuggagcugaugcaggug

SEQ ID NO: 691767 - RNA, 22 nt, Human
auuguaacaacaauaguuuagg

SEQ ID NO: 691768 - RNA, 22 nt, Human
caaguucauuguagcauuauug

SEQ ID NO: 691769 - RNA, 22 nt, Human
uuccagggcagcaagugaaugg

SEQ ID NO: 691770 - RNA, 22 nt, Human
augaagauuucccagagacaug

SEQ ID NO: 691771 - RNA, 22 nt, Human
uucucuacuugagauuuuaaug

SEQ ID NO: 691772 - RNA, 22 nt, Human
caggguagacaguaggugucug

SEQ ID NO: 691773 - RNA, 22 nt, Human
gaggcacugagagugggggaug

SEQ ID NO: 691774 - RNA, 22 nt, Human
ucacacagguuugcaaugauuu

SEQ ID NO: 691775 - RNA, 22 nt, Human
gcuggagguagggagguccugu

SEQ ID NO: 691776 - RNA, 22 nt, Human
auuaaaugauggcaugucuuau

SEQ ID NO: 691777 - RNA, 18 nt, Human
acaaauguagugucuuaa

SEQ ID NO: 691778 - RNA, 22 nt, Human
ucaugacaugugaauugaauau

SEQ ID NO: 691779 - RNA, 22 nt, Human
ccaugcugugacacaguaguua

SEQ ID NO: 691780 - RNA, 22 nt, Human
gaggugaaaguuauucauuuau

SEQ ID NO: 691781 - RNA, 22 nt, Human
uagcacagcuucuugaugucac

SEQ ID NO: 691782 - RNA, 22 nt, Human
aagaaagugaugagcuacagau

SEQ ID NO: 691783 - RNA, 22 nt, Human
auucuacaaaagaacuggaucu

SEQ ID NO: 691784 - RNA, 22 nt, Human
gaggcagcugaagcuucaaaga

SEQ ID NO: 691785 - RNA, 22 nt, Human
gacagcagggaaaguccagacc

SEQ ID NO: 691786 - RNA, 22 nt, Human
agcaccaggcuguuggaagccc

SEQ ID NO: 691787 - RNA, 22 nt, Human
auacauacauguaugcacauac

SEQ ID NO: 691788 - RNA, 22 nt, Human
gaucuugagcaaguugcauccc

SEQ ID NO: 691789 - RNA, 22 nt, Human
aagugcaaugaauagcugcaau

SEQ ID NO: 691790 - RNA, 22 nt, Human
ucuaguuaauuccuuugguguu

SEQ ID NO: 691791 - RNA, 22 nt, Human
ccaggccaaauucagucagcag

SEQ ID NO: 691792 - RNA, 22 nt, Human
aagaacaguugggaggugagcc

SEQ ID NO: 691793 - RNA, 22 nt, Human
aaacacuuuagaaagggacuug

SEQ ID NO: 691794 - RNA, 22 nt, Human
aguggcagaagucacuggguag

SEQ ID NO: 691795 - RNA, 21 nt, Human
ugacaacagaacugggcaagc

SEQ ID NO: 691796 - RNA, 22 nt, Human
ccugggccuugaccucgugggc

SEQ ID NO: 691797 - RNA, 22 nt, Human
guccuggggaauacagaagccg

SEQ ID NO: 691798 - RNA, 22 nt, Human
ccucuguggcccugacucucuu

SEQ ID NO: 691799 - RNA, 22 nt, Human
cuggaucuaaagguggauguag

SEQ ID NO: 691800 - RNA, 22 nt, Human
ucccagcagcauagcucagaau

SEQ ID NO: 691801 - RNA, 22 nt, Human
gggucuggagggcagcccuucu

SEQ ID NO: 691802 - RNA, 22 nt, Human
agccuccuggaguuucugggau

SEQ ID NO: 691803 - RNA, 16 nt, Human
uuucucucugcuauuu

SEQ ID NO: 691804 - RNA, 22 nt, Human
ccugggucccagccaggcuuug

SEQ ID NO: 691805 - RNA, 22 nt, Human
ggcuuuauguuuuucauguggu

SEQ ID NO: 691806 - RNA, 21 nt, Human
ucagucccuggguguguccca

SEQ ID NO: 691807 - RNA, 22 nt, Human
auugaaagauaggcuacugugg

SEQ ID NO: 691808 - RNA, 20 nt, Human
acccagcucugugcccuggg

SEQ ID NO: 691809 - RNA, 22 nt, Human
gcucuaacuauuaagaggucau

SEQ ID NO: 691810 - RNA, 21 nt, Human
aguccaggaggaggccagguu

SEQ ID NO: 691811 - RNA, 21 nt, Human
ggagcugcaggagccgaaggc

SEQ ID NO: 691812 - RNA, 22 nt, Human
agcaccaucagaugcaauaucu

SEQ ID NO: 691813 - RNA, 22 nt, Human
ucccauguuagguguuucuguu

SEQ ID NO: 691814 - RNA, 22 nt, Human
uaggaaacaaaguggaugaaau

SEQ ID NO: 691815 - RNA, 22 nt, Human
uucuuggaaauacauucaauaa

SEQ ID NO: 691816 - RNA, 22 nt, Human
uggcuccagcguccacguccug

SEQ ID NO: 691817 - RNA, 22 nt, Human
cuagggcuagacagacgcaugu

SEQ ID NO: 691818 - RNA, 22 nt, Human
uauuugcugaaucugauucaga

SEQ ID NO: 691819 - RNA, 22 nt, Human
ggcccugaagugauugugaguu

SEQ ID NO: 691820 - RNA, 22 nt, Human
acaggccugacacacagagggc

SEQ ID NO: 691821 - RNA, 23 nt, Human
gcugccaaggaggcaggggugcc

SEQ ID NO: 691822 - RNA, 22 nt, Human
gggccugccauugcugccccag

SEQ ID NO: 691823 - RNA, 22 nt, Human
uuacauguacaaacaauucuua

SEQ ID NO: 691824 - RNA, 20 nt, Human
cuuagcuucuaagguucugg

SEQ ID NO: 691825 - RNA, 22 nt, Human
gaggucaggugaggaauuaaga

SEQ ID NO: 691826 - RNA, 19 nt, Human
ugugaaagcuaguguucuu

SEQ ID NO: 691827 - RNA, 22 nt, Human
uuggagcccugaggaucuggau

SEQ ID NO: 691828 - RNA, 22 nt, Human
gcuggggagcaagaguagugag

SEQ ID NO: 691829 - RNA, 18 nt, Human
ccuggcagccaugcgcgc

SEQ ID NO: 691830 - RNA, 22 nt, Human
caggccaggguugagaagagaa

SEQ ID NO: 691831 - RNA, 22 nt, Human
ucagaaguuucaaucccagcug

SEQ ID NO: 691832 - RNA, 22 nt, Human
gacaggcuuagggagggugcuc

SEQ ID NO: 691833 - RNA, 22 nt, Human
auguuuuuaaauagacuuacag

SEQ ID NO: 691834 - RNA, 22 nt, Human
agaggcuccaccuucucugucc

SEQ ID NO: 691835 - RNA, 23 nt, Human
uuccugagugcuggagagagugc

SEQ ID NO: 691836 - RNA, 18 nt, Human
cccugagaugaugcugug

SEQ ID NO: 691837 - RNA, 22 nt, Human
aaaguguugggaagaaagugca

SEQ ID NO: 691838 - RNA, 22 nt, Human
ucuccucuauuucuguauguau

SEQ ID NO: 691839 - RNA, 21 nt, Human
acucaucuuuuuggagaccag

SEQ ID NO: 691840 - RNA, 22 nt, Human
agugaguggauguaggaauugg

SEQ ID NO: 691841 - RNA, 22 nt, Human
acucacagcagacuaugaggga

SEQ ID NO: 691842 - RNA, 22 nt, Human
uaaguugauuauaaccacugga

SEQ ID NO: 691843 - RNA, 22 nt, Human
aaacacaucauucaugucguca

SEQ ID NO: 691844 - RNA, 22 nt, Human
aggggagcaacauagucacucu

SEQ ID NO: 691845 - RNA, 22 nt, Human
ggagucugagcuuguguccugg

SEQ ID NO: 691846 - RNA, 22 nt, Human
augucacaggcaacaagauugc

SEQ ID NO: 691847 - RNA, 22 nt, Human
ccugacaguccuuuucuagugu

SEQ ID NO: 691848 - RNA, 22 nt, Human
uuucacagauccuacagcuugu

SEQ ID NO: 691849 - RNA, 22 nt, Human
accucccucgccguccacucug

SEQ ID NO: 691850 - RNA, 22 nt, Human
cugagugauagcgauggggaac

SEQ ID NO: 691851 - RNA, 22 nt, Human
ggcagcccaccagcccacgucu

SEQ ID NO: 691852 - RNA, 22 nt, Human
ccugucucuguuaccacauuug

SEQ ID NO: 691853 - RNA, 19 nt, Human
uuacaugacacuccagccu

SEQ ID NO: 691854 - RNA, 22 nt, Human
caccuggauauguuucagcuug

SEQ ID NO: 691855 - RNA, 22 nt, Human
aagggcugcaauccaaaacacu

SEQ ID NO: 691856 - RNA, 21 nt, Human
uuacacacugcuucuagaaug

SEQ ID NO: 691857 - RNA, 22 nt, Human
aaaccucuccacuacaugacag

SEQ ID NO: 691858 - RNA, 22 nt, Human
ucugcugugucccuggucuccu

SEQ ID NO: 691859 - RNA, 17 nt, Human
uggcagcugaaagcucu

SEQ ID NO: 691860 - RNA, 16 nt, Human
ggggaaggcaagaggg

SEQ ID NO: 691861 - RNA, 17 nt, Human
cuggagcuguguaaccu

SEQ ID NO: 691862 - RNA, 22 nt, Human
uuucuaguucucugccaaaaaa

SEQ ID NO: 691863 - RNA, 22 nt, Human
ugaggaagcaaaggcuugugug

SEQ ID NO: 691864 - RNA, 22 nt, Human
ggcaggcaacggaccacuaguc

SEQ ID NO: 691865 - RNA, 22 nt, Human
caagauguggugggcugaguuu

SEQ ID NO: 691866 - RNA, 22 nt, Human
gcacacuuaauacucacugugc

SEQ ID NO: 691867 - RNA, 22 nt, Human
ggcagauguuauaugaucugag

SEQ ID NO: 691868 - RNA, 22 nt, Human
aaugguuucaaacacacuaagu

SEQ ID NO: 691869 - RNA, 22 nt, Human
uagcauaauuuguagaaaauca

SEQ ID NO: 691870 - RNA, 22 nt, Human
cuaaaccuuugugcuugcaauu

SEQ ID NO: 691871 - RNA, 22 nt, Human
gucaaacagccuccuguucuaa

SEQ ID NO: 691872 - RNA, 22 nt, Human
uugguuuugggauguacaaagg

SEQ ID NO: 691873 - RNA, 22 nt, Human
cuuggcaugcagcaggcacuca

SEQ ID NO: 691874 - RNA, 22 nt, Human
aacagccacugauacugaauag

SEQ ID NO: 691875 - RNA, 22 nt, Human
cacagggcaccaguuggccauc

SEQ ID NO: 691876 - RNA, 22 nt, Human
gagcagagucuauuuccacacu

SEQ ID NO: 691877 - RNA, 22 nt, Human
ugguccagucguuccuuuccuu

SEQ ID NO: 691878 - RNA, 22 nt, Human
cagauaggaaaagcuaggcaua

SEQ ID NO: 691879 - RNA, 22 nt, Human
cugccuggaaggagcaagggga

SEQ ID NO: 691880 - RNA, 22 nt, Human
cugggccugggaggccaggucu

SEQ ID NO: 691881 - RNA, 22 nt, Human
uaggugagggagcauugugaga

SEQ ID NO: 691882 - RNA, 22 nt, Human
caugggggucuggacaacaggc

SEQ ID NO: 691883 - RNA, 22 nt, Human
uaacucuuccaacacuccuucc

SEQ ID NO: 691884 - RNA, 22 nt, Human
uccuccccugcccaugaggagg

SEQ ID NO: 691885 - RNA, 22 nt, Human
uuuaggcagaacauggacuuug

SEQ ID NO: 691886 - RNA, 22 nt, Human
ucauuucugagccuuccaugau

SEQ ID NO: 691887 - RNA, 22 nt, Human
aaagcaauagaggguaagacug

SEQ ID NO: 691888 - RNA, 22 nt, Human
uaacuguugugcgggucucugg

SEQ ID NO: 691889 - RNA, 22 nt, Human
gacugaaauuauaccaaguggu

SEQ ID NO: 691890 - RNA, 22 nt, Human
gcugaggguaacacuucgggau

SEQ ID NO: 691891 - RNA, 22 nt, Human
gagucuggcccugaugcaucau

SEQ ID NO: 691892 - RNA, 22 nt, Human
cagaaauaucaguugaaagugc

SEQ ID NO: 691893 - RNA, 22 nt, Human
gcuccucuccucggagucgggg

SEQ ID NO: 691894 - RNA, 22 nt, Human
ucucugugacagcuggguaugu

SEQ ID NO: 691895 - RNA, 22 nt, Human
cucuggagcaccgggcuaucca

SEQ ID NO: 691896 - RNA, 22 nt, Human
aaaagggacuacucucagcucc

SEQ ID NO: 691897 - RNA, 22 nt, Human
cugugcuuaccugcccagguga

SEQ ID NO: 691898 - RNA, 22 nt, Human
agaggauguucuaggcacucau

SEQ ID NO: 691899 - RNA, 22 nt, Human
cugccugcguugccucgugccu

SEQ ID NO: 691900 - RNA, 22 nt, Human
ucugcugguuccgaauuaggcc

SEQ ID NO: 691901 - RNA, 22 nt, Human
ggagugaagcaaauaaugcugg

SEQ ID NO: 691902 - RNA, 22 nt, Human
uuccuggugguggugacagcac

SEQ ID NO: 691903 - RNA, 22 nt, Human
cauggccagcccugagguucag

SEQ ID NO: 691904 - RNA, 22 nt, Human
uggagggcaugcuguccauggg

SEQ ID NO: 691905 - RNA, 20 nt, Human
ccaauguuuacagauuacuu

SEQ ID NO: 691906 - RNA, 22 nt, Human
aaguuuaguuaaguaaacucuu

SEQ ID NO: 691907 - RNA, 20 nt, Human
ccaggcacugucccaugcag

SEQ ID NO: 691908 - RNA, 22 nt, Human
ucuaacauugaauggcugauua

SEQ ID NO: 691909 - RNA, 22 nt, Human
caaacuauuguucacaagacaa

SEQ ID NO: 691910 - RNA, 22 nt, Human
cugggagcuagcucugagcuga

SEQ ID NO: 691911 - RNA, 23 nt, Human
gcucaggcaucauucuuccuggc

SEQ ID NO: 691912 - RNA, 22 nt, Human
uuucucugggcacucuccaaac

SEQ ID NO: 691913 - RNA, 22 nt, Human
aucaguuuguauaugaaacacu

SEQ ID NO: 691914 - RNA, 22 nt, Human
ugggcugaggggccuugaugac

SEQ ID NO: 691915 - RNA, 22 nt, Human
auauagaauacacagggaaagu

SEQ ID NO: 691916 - RNA, 22 nt, Human
uguuuacugcauucuauuugcu

SEQ ID NO: 691917 - RNA, 22 nt, Human
cuggcuuguuuuaagaauacaa

SEQ ID NO: 691918 - RNA, 22 nt, Human
gggaagugagcuggaaucaagg

SEQ ID NO: 691919 - RNA, 22 nt, Human
guuuauaaauucugcuuuuguu

SEQ ID NO: 691920 - RNA, 22 nt, Human
gugggcuuugcuggauccuucc

SEQ ID NO: 691921 - RNA, 22 nt, Human
uuugacaacacguuauuugccu

SEQ ID NO: 691922 - RNA, 22 nt, Human
ggauuagcuuuuguucuugacu

SEQ ID NO: 691923 - RNA, 22 nt, Human
uggcuccaccgccgcggagcuc

SEQ ID NO: 691924 - RNA, 22 nt, Human
ggcugcuggcagauguaguuua

SEQ ID NO: 691925 - RNA, 21 nt, Human
ucacuggaauacaauugauuu

SEQ ID NO: 691926 - RNA, 22 nt, Human
uaggccaccaggguuccauuua

SEQ ID NO: 691927 - RNA, 22 nt, Human
aggcuucagaugaccuuagcau

SEQ ID NO: 691928 - RNA, 22 nt, Human
gggccccuugcugcucugcugg

SEQ ID NO: 691929 - RNA, 22 nt, Human
agggagccuuccuggcuguggu

SEQ ID NO: 691930 - RNA, 22 nt, Human
ucuacacuguagaauuauaagg

SEQ ID NO: 691931 - RNA, 19 nt, Human
gccaggccuggaccugcag

SEQ ID NO: 691932 - RNA, 22 nt, Human
uggauuucuccagcucuccauu

SEQ ID NO: 691933 - RNA, 22 nt, Human
acagcagucuuaacacauugca

SEQ ID NO: 691934 - RNA, 22 nt, Human
cuccacucuggggugggugaga

SEQ ID NO: 691935 - RNA, 22 nt, Human
ugaggugccacccaagagccuu

SEQ ID NO: 691936 - RNA, 22 nt, Human
cuacauuuuaauaagcugcuua

SEQ ID NO: 691937 - RNA, 22 nt, Human
gggcuccaacggugagcaugga

SEQ ID NO: 691938 - RNA, 22 nt, Human
acacagggcugcgccugacccc

SEQ ID NO: 691939 - RNA, 22 nt, Human
caaggccagagccagcgauaag

SEQ ID NO: 691940 - RNA, 22 nt, Human
uuuagcaaagguaggguucaga

SEQ ID NO: 691941 - RNA, 22 nt, Human
aagcaauaggguaaucuacuca

SEQ ID NO: 691942 - RNA, 22 nt, Human
gggagcuguaguccagauaccg

SEQ ID NO: 691943 - RNA, 22 nt, Human
ccauggaucuggaucuaucuuu

SEQ ID NO: 691944 - RNA, 22 nt, Human
cuugcaggcagggccuccugga

SEQ ID NO: 691945 - RNA, 22 nt, Human
gccacagggaggcguuuucagg

SEQ ID NO: 691946 - RNA, 22 nt, Human
gcaggcaguuugcuuuucccuc

SEQ ID NO: 691947 - RNA, 22 nt, Human
uagcaagaucgugucucuaaaa

SEQ ID NO: 691948 - RNA, 22 nt, Human
uggcagaguuggagguggaaga

SEQ ID NO: 691949 - RNA, 22 nt, Human
cuggcccuggcuggagcccagg

SEQ ID NO: 691950 - RNA, 22 nt, Human
uugagcaucuuauagaaagagc

SEQ ID NO: 691951 - RNA, 22 nt, Human
cucugcugcccaugaugguaua

SEQ ID NO: 691952 - RNA, 22 nt, Human
uuauuugauuaguaaaccugua

SEQ ID NO: 691953 - RNA, 22 nt, Human
gcagccagccccucugaccucu

SEQ ID NO: 691954 - RNA, 22 nt, Human
cgccuggaaccucuaggaccag

SEQ ID NO: 691955 - RNA, 22 nt, Human
cagcaccuguuagcauuaaaua

SEQ ID NO: 691956 - RNA, 22 nt, Human
agcuaacaugacuagaagcuuc

SEQ ID NO: 691957 - RNA, 18 nt, Human
auugagcaugacagaccu

SEQ ID NO: 691958 - RNA, 22 nt, Human
uucaggacuaggggcuucaagg

SEQ ID NO: 691959 - RNA, 22 nt, Human
cuguuuccaccuucauggcuaa

SEQ ID NO: 691960 - RNA, 22 nt, Human
ucugggccuuggaguggggaga

SEQ ID NO: 691961 - RNA, 22 nt, Human
cagauggccagaggcagcugca

SEQ ID NO: 691962 - RNA, 22 nt, Human
agcagggcacuggaaggcacug

SEQ ID NO: 691963 - RNA, 22 nt, Human
ggccuuggugcucuguguugca

SEQ ID NO: 691964 - RNA, 22 nt, Human
ggugggacagguaggaguggcu

SEQ ID NO: 691965 - RNA, 22 nt, Human
uccuucaugaugcuuagcagag

SEQ ID NO: 691966 - RNA, 22 nt, Human
uuguacauaaugaaaggaggcu

SEQ ID NO: 691967 - RNA, 22 nt, Human
aucaggauccaccuugagccug

SEQ ID NO: 691968 - RNA, 22 nt, Human
uuugacauuauccuguuacugg

SEQ ID NO: 691969 - RNA, 22 nt, Human
ucucagagauucagggagaagu

SEQ ID NO: 691970 - RNA, 22 nt, Human
acacagauauuguacuugaucc

SEQ ID NO: 691971 - RNA, 22 nt, Human
cugcaugucacucugcuguccc

SEQ ID NO: 691972 - RNA, 22 nt, Human
aaauacuguccaccauggagca

SEQ ID NO: 691973 - RNA, 22 nt, Human
guucagauuugacugguuucuc

SEQ ID NO: 691974 - RNA, 22 nt, Human
ugaaagcagugauuucuccuuc

SEQ ID NO: 691975 - RNA, 22 nt, Human
auagacauggucuuuugucauu

SEQ ID NO: 691976 - RNA, 22 nt, Human
uugacuguuaagacuuggcucu

SEQ ID NO: 691977 - RNA, 19 nt, Human
ccuggcucugagcccagcc

SEQ ID NO: 691978 - RNA, 23 nt, Human
ugcuggagaagcaaaguucugag

SEQ ID NO: 691979 - RNA, 18 nt, Human
uccagucccagcucugcc

SEQ ID NO: 691980 - RNA, 22 nt, Human
uccaggcuggagugcaguggca

SEQ ID NO: 691981 - RNA, 19 nt, Human
aggguccagggagcggcuc

SEQ ID NO: 691982 - RNA, 22 nt, Human
gcugggaaguggcagagcugga

SEQ ID NO: 691983 - RNA, 22 nt, Human
ucuguuagcugucaaaguguuu

SEQ ID NO: 691984 - RNA, 22 nt, Human
gagcuaggcuagggggagucgc

SEQ ID NO: 691985 - RNA, 22 nt, Human
aauggcaguaguugcaugagag

SEQ ID NO: 691986 - RNA, 22 nt, Human
aucugaaaagcuuuaaugagcu

SEQ ID NO: 691987 - RNA, 22 nt, Human
uuggaggacuaguuaagagacc

SEQ ID NO: 691988 - RNA, 19 nt, Human
acucuguuguacuugaggg

SEQ ID NO: 691989 - RNA, 22 nt, Human
acugggcuguaaagagaggcaa

SEQ ID NO: 691990 - RNA, 22 nt, Human
cugggcuggauaauucuuugcu

SEQ ID NO: 691991 - RNA, 22 nt, Human
ggagccugggcauuaguaauuu

SEQ ID NO: 691992 - RNA, 20 nt, Human
aaaguucauguuugcacuuu

SEQ ID NO: 691993 - RNA, 18 nt, Human
ggcuggaagcuguugcug

SEQ ID NO: 691994 - RNA, 22 nt, Human
gcuggcuguguuccuucugcca

SEQ ID NO: 691995 - RNA, 22 nt, Human
ucucagggaccaugaugaugac

SEQ ID NO: 691996 - RNA, 22 nt, Human
uauggguaucuguacugauugu

SEQ ID NO: 691997 - RNA, 20 nt, Human
agcugcagaacccacuggac

SEQ ID NO: 691998 - RNA, 17 nt, Human
gcacucccccaccuccu

SEQ ID NO: 691999 - RNA, 22 nt, Human
ucagagguucuucucaguggcc

SEQ ID NO: 692000 - RNA, 22 nt, Human
caccaucagcagcaggugucaa

SEQ ID NO: 692001 - RNA, 22 nt, Human
agcuguauuugugaauauuuaa

SEQ ID NO: 692002 - RNA, 18 nt, Human
cuccugggcugcagaugc

SEQ ID NO: 692003 - RNA, 22 nt, Human
gaggaacaugaggugaccuggg

SEQ ID NO: 692004 - RNA, 22 nt, Human
auguaaacuuuaccagcucuga

SEQ ID NO: 692005 - RNA, 22 nt, Human
ggcaggugugagaucgaggcca

SEQ ID NO: 692006 - RNA, 22 nt, Human
gugcuggcuggggcaucaggca

SEQ ID NO: 692007 - RNA, 22 nt, Human
ccagcugcuaucaugccauuuc

SEQ ID NO: 692008 - RNA, 22 nt, Human
uggagggaacccaggcugcucu

SEQ ID NO: 692009 - RNA, 22 nt, Human
gcagcaguggcugcagguccca

SEQ ID NO: 692010 - RNA, 22 nt, Human
acauucacaagccuacaagguu

SEQ ID NO: 692011 - RNA, 22 nt, Human
uguuuacuggaccagggagggg

SEQ ID NO: 692012 - RNA, 22 nt, Human
cagauagcaaauggguaagcua

SEQ ID NO: 692013 - RNA, 20 nt, Human
ugggccuguggcagaagucu

SEQ ID NO: 692014 - RNA, 22 nt, Human
aguugcagccuucaggagaccc

SEQ ID NO: 692015 - RNA, 22 nt, Human
cauucacagagggggaagcauc

SEQ ID NO: 692016 - RNA, 22 nt, Human
cagcacugugauaacugagcca

SEQ ID NO: 692017 - RNA, 22 nt, Human
ugacaaacucuuugagaacaag

SEQ ID NO: 692018 - RNA, 22 nt, Human
uuuuugaaggcugaugugauua

SEQ ID NO: 692019 - RNA, 22 nt, Human
accccucagcucuucgugcccc

SEQ ID NO: 692020 - RNA, 22 nt, Human
gccugcagcaugcuaggucuug

SEQ ID NO: 692021 - RNA, 22 nt, Human
uuccuggggugaagauauuuuu

SEQ ID NO: 692022 - RNA, 22 nt, Human
gccaggugagaggacugaggcu

SEQ ID NO: 692023 - RNA, 22 nt, Human
acacagaguuauuaugugaacu

SEQ ID NO: 692024 - RNA, 22 nt, Human
augcacaauuaggauauagcuu

SEQ ID NO: 692025 - RNA, 22 nt, Human
aggcucuaaggagggcugucua

SEQ ID NO: 692026 - RNA, 22 nt, Human
uucugguuuaagaaagugcugg

SEQ ID NO: 692027 - RNA, 22 nt, Human
cuuugcagcaauuucuguuaaa

SEQ ID NO: 692028 - RNA, 21 nt, Human
agacuucuagaagugagauag

SEQ ID NO: 692029 - RNA, 22 nt, Human
ggcuguguuucuguuugacauu

SEQ ID NO: 692030 - RNA, 22 nt, Human
auguacauagcaucaucuagga

SEQ ID NO: 692031 - RNA, 22 nt, Human
acagagacugggaugccugccu

SEQ ID NO: 692032 - RNA, 23 nt, Human
gccagccagaauuucuccacugu

SEQ ID NO: 692033 - RNA, 20 nt, Human
gaaauguaucucuugauucu

SEQ ID NO: 692034 - RNA, 22 nt, Human
ggcugcagggcagcuggugugg

SEQ ID NO: 692035 - RNA, 22 nt, Human
cagcuguucuugggacagacag

SEQ ID NO: 692036 - RNA, 22 nt, Human
ccaccugugcuugguacuccau

SEQ ID NO: 692037 - RNA, 22 nt, Human
ucuucuguuuuagauugcauac

SEQ ID NO: 692038 - RNA, 22 nt, Human
uaccucucggggucuguuugug

SEQ ID NO: 692039 - RNA, 18 nt, Human
uccugccugcgggcuccc

SEQ ID NO: 692040 - RNA, 22 nt, Human
ucuauuuucuugccaaaacugc

SEQ ID NO: 692041 - RNA, 22 nt, Human
aaaugcauucuguuuucacuag

SEQ ID NO: 692042 - RNA, 22 nt, Human
agggccugacacccuugccagc

SEQ ID NO: 692043 - RNA, 22 nt, Human
cuacaguacuggaugcucagcc

SEQ ID NO: 692044 - RNA, 22 nt, Human
ucauuuguggaagugauugugg

SEQ ID NO: 692045 - RNA, 22 nt, Human
gcugcuucagggacgugccagc

SEQ ID NO: 692046 - RNA, 22 nt, Human
agcaugaagacuucagagcuag

SEQ ID NO: 692047 - RNA, 22 nt, Human
ugcacguauggcaguggagccc

SEQ ID NO: 692048 - RNA, 22 nt, Human
aaguuugagagccuuuaguaua

SEQ ID NO: 692049 - RNA, 22 nt, Human
ucugccugaaauucacauguaa

SEQ ID NO: 692050 - RNA, 22 nt, Human
gguggcucccacccagcuuuga

SEQ ID NO: 692051 - RNA, 22 nt, Human
guugaaaaugacuuuauaccau

SEQ ID NO: 692052 - RNA, 23 nt, Human
uagcaaaguuguuugggaaauuu

SEQ ID NO: 692053 - RNA, 22 nt, Human
gucugggcuuagggacauggca

SEQ ID NO: 692054 - RNA, 22 nt, Human
gccuggagggucccucucugga

SEQ ID NO: 692055 - RNA, 22 nt, Human
uuacaauuacuugaucucagcu

SEQ ID NO: 692056 - RNA, 22 nt, Human
agugcuccugccagcuuucugg

SEQ ID NO: 692057 - RNA, 22 nt, Human
aacaauaauugcgguucucuau

SEQ ID NO: 692058 - RNA, 22 nt, Human
aauaacuucaguucuuacauua

SEQ ID NO: 692059 - RNA, 22 nt, Human
augugcuguaauccauugaagg

SEQ ID NO: 692060 - RNA, 19 nt, Human
cuguggcugaccucuggcc

SEQ ID NO: 692061 - RNA, 20 nt, Human
cugggcucaagugagccucc

SEQ ID NO: 692062 - RNA, 22 nt, Human
uucuugauuagucucaugccaa

SEQ ID NO: 692063 - RNA, 22 nt, Human
ucaggcuuccaggcucugcuga

SEQ ID NO: 692064 - RNA, 22 nt, Human
agggguaguaggauaacaaauu

SEQ ID NO: 692065 - RNA, 22 nt, Human
gccuccugguugcuucuccaac

SEQ ID NO: 692066 - RNA, 22 nt, Human
uacugucuaauaagauugaugg

SEQ ID NO: 692067 - RNA, 22 nt, Human
ucauuuauuugacuuuggagug

SEQ ID NO: 692068 - RNA, 22 nt, Human
gcaauguuaagaucacaccugg

SEQ ID NO: 692069 - RNA, 22 nt, Human
ucauccuggagaagcuccuucg

SEQ ID NO: 692070 - RNA, 19 nt, Human
agcagguggguaagaaaau

SEQ ID NO: 692071 - RNA, 22 nt, Human
uucaacuuuaugcauauguauu

SEQ ID NO: 692072 - RNA, 22 nt, Human
gcuggugccuuguuguuguuac

SEQ ID NO: 692073 - RNA, 22 nt, Human
aggcuucaguauucaccgcaug

SEQ ID NO: 692074 - RNA, 20 nt, Human
cugcugcccugucagccucu

SEQ ID NO: 692075 - RNA, 22 nt, Human
gguuucagcccugcuguuccug

SEQ ID NO: 692076 - RNA, 22 nt, Human
uccuuagagacaagaccaguuu

SEQ ID NO: 692077 - RNA, 21 nt, Human
gccagcugggucuugcaggag

SEQ ID NO: 692078 - RNA, 22 nt, Human
agaaauguggaggaacagggcu

SEQ ID NO: 692079 - RNA, 22 nt, Human
cuuguagaccccuggacucacg

SEQ ID NO: 692080 - RNA, 22 nt, Human
aggaagguaaugaacugaggag

SEQ ID NO: 692081 - RNA, 22 nt, Human
ugcauuggucuuaaucuucagg

SEQ ID NO: 692082 - RNA, 22 nt, Human
guuuggggucugcagagcggcg

SEQ ID NO: 692083 - RNA, 22 nt, Human
agcugguaugaacaggauagga

SEQ ID NO: 692084 - RNA, 23 nt, Human
ucacaggggccagcgcucugugg

SEQ ID NO: 692085 - RNA, 22 nt, Human
uccacauuauguuucuccuuuc

SEQ ID NO: 692086 - RNA, 22 nt, Human
ugugcagagcggggaagagcac

SEQ ID NO: 692087 - RNA, 22 nt, Human
accaaggagacaaagguguauu

SEQ ID NO: 692088 - RNA, 22 nt, Human
ugggccagcugaagugccgccc

SEQ ID NO: 692089 - RNA, 22 nt, Human
gaaggaagauucuguuggaauc

SEQ ID NO: 692090 - RNA, 22 nt, Human
ccugggcuguugcaucauccuu

SEQ ID NO: 692091 - RNA, 22 nt, Human
guacauuuauuuuugcagcaua

SEQ ID NO: 692092 - RNA, 22 nt, Human
aucugggcucgaauccuagcuc

SEQ ID NO: 692093 - RNA, 22 nt, Human
caccugaauggaacuuugaacc

SEQ ID NO: 692094 - RNA, 22 nt, Human
uccuccccucagggcaacggau

SEQ ID NO: 692095 - RNA, 22 nt, Human
guaaauguugcauuuaugggua

SEQ ID NO: 692096 - RNA, 18 nt, Human
ugcacuagaugcuggcag

SEQ ID NO: 692097 - RNA, 23 nt, Human
auggacaggguuucagggucaca

SEQ ID NO: 692098 - RNA, 22 nt, Human
ggaauaaagaaucugguucccc

SEQ ID NO: 692099 - RNA, 22 nt, Human
gggcuucucugggaguccuggu

SEQ ID NO: 692100 - RNA, 22 nt, Human
uagccuucucaagacaaaguug

SEQ ID NO: 692101 - RNA, 22 nt, Human
uguaaaagacauuucuaagcaa

SEQ ID NO: 692102 - RNA, 22 nt, Human
agcucacaguguccuuccucaa

SEQ ID NO: 692103 - RNA, 17 nt, Human
ccacagccuggcacuug

SEQ ID NO: 692104 - RNA, 18 nt, Human
ucucugaauauuuuaugu

SEQ ID NO: 692105 - RNA, 22 nt, Human
uccagcagugcucaggacucac

SEQ ID NO: 692106 - RNA, 22 nt, Human
ggcuuagcaacuccugaggcuc

SEQ ID NO: 692107 - RNA, 22 nt, Human
uuucacauuagauaugucauuu

SEQ ID NO: 692108 - RNA, 22 nt, Human
uggauaaauggugcuaucaccc

SEQ ID NO: 692109 - RNA, 22 nt, Human
gcauuggcauuucuccagcgga

SEQ ID NO: 692110 - RNA, 22 nt, Human
cuggagucucuucuguagcuac

SEQ ID NO: 692111 - RNA, 22 nt, Human
cagggccagcgcccaggcccag

SEQ ID NO: 692112 - RNA, 22 nt, Human
cuggccuuuuguuucuggagaa

SEQ ID NO: 692113 - RNA, 22 nt, Human
caguauaaugcccccugugggg

SEQ ID NO: 692114 - RNA, 22 nt, Human
cuucccuuccccucacggagac

SEQ ID NO: 692115 - RNA, 22 nt, Human
augaacaguaugcaacaugauu

SEQ ID NO: 692116 - RNA, 22 nt, Human
ccagaggcuggcaagggcuccu

SEQ ID NO: 692117 - RNA, 18 nt, Human
gccuucagacugcaugcu

SEQ ID NO: 692118 - RNA, 22 nt, Human
augauucagcccaauuuuucua

SEQ ID NO: 692119 - RNA, 21 nt, Human
uggaaacagcgccaucugccg

SEQ ID NO: 692120 - RNA, 22 nt, Human
cuuuguagcugcuucugauuua

SEQ ID NO: 692121 - RNA, 22 nt, Human
ccacuccccacgugcugucaga

SEQ ID NO: 692122 - RNA, 22 nt, Human
uccgaggccaaagcugugaaua

SEQ ID NO: 692123 - RNA, 22 nt, Human
cugccucuuaaguggauggagu

SEQ ID NO: 692124 - RNA, 22 nt, Human
cuguuuccugucuucucacuau

SEQ ID NO: 692125 - RNA, 22 nt, Human
ugguuuggguaguuauuauuau

SEQ ID NO: 692126 - RNA, 22 nt, Human
ugcuggaggggaugccuucacu

SEQ ID NO: 692127 - RNA, 22 nt, Human
ggcugcagcccucgccuagcca

SEQ ID NO: 692128 - RNA, 21 nt, Human
aguuacaaguuuauucagagg

SEQ ID NO: 692129 - RNA, 22 nt, Human
ucucugaagcuguuguagucuc

SEQ ID NO: 692130 - RNA, 22 nt, Human
aucaaauacaaagggcauaagg

SEQ ID NO: 692131 - RNA, 22 nt, Human
uccuggcuccuggagaccugcu

SEQ ID NO: 692132 - RNA, 22 nt, Human
ugcagggcuaagucagagccug

SEQ ID NO: 692133 - RNA, 22 nt, Human
cuggcccagucucagaguguca

SEQ ID NO: 692134 - RNA, 22 nt, Human
acucaggcacucagcccucgcc

SEQ ID NO: 692135 - RNA, 22 nt, Human
uggaggcauuugauguucauaa

SEQ ID NO: 692136 - RNA, 17 nt, Human
ugcagcugauggggaaa

SEQ ID NO: 692137 - RNA, 22 nt, Human
agaaaugugagccccuuaucaa

SEQ ID NO: 692138 - RNA, 22 nt, Human
uucacaaagcugguuccuucug

SEQ ID NO: 692139 - RNA, 22 nt, Human
aaaugacauuaggauccugcau

SEQ ID NO: 692140 - RNA, 22 nt, Human
cuguguagccucaugugggcuu

SEQ ID NO: 692141 - RNA, 22 nt, Human
caggcugccgugaagcaggccu

SEQ ID NO: 692142 - RNA, 22 nt, Human
uguguauauauguuuaagucau

SEQ ID NO: 692143 - RNA, 22 nt, Human
cagagcuggcucugcauguaca

SEQ ID NO: 692144 - RNA, 22 nt, Human
uacuaguuucuaccuuacagaa

SEQ ID NO: 692145 - RNA, 22 nt, Human
caguguaucauuagugugauga

SEQ ID NO: 692146 - RNA, 22 nt, Human
uauccaauucaccauugauggg

SEQ ID NO: 692147 - RNA, 22 nt, Human
ugaaacagucuccagacuugga

SEQ ID NO: 692148 - RNA, 22 nt, Human
aacaggggugggugcuacugga

SEQ ID NO: 692149 - RNA, 22 nt, Human
ccugggucuugguucaugcucu

SEQ ID NO: 692150 - RNA, 22 nt, Human
guucacagggauccuuguugaa

SEQ ID NO: 692151 - RNA, 23 nt, Human
agcagcccugggaccuggccugc

SEQ ID NO: 692152 - RNA, 22 nt, Human
agggaagaagcugguaguaggu

SEQ ID NO: 692153 - RNA, 22 nt, Human
uuucuucucugauuaaggcuca

SEQ ID NO: 692154 - RNA, 22 nt, Human
ucacacuuuauuuauuucaugc

SEQ ID NO: 692155 - RNA, 19 nt, Human
agcuuuuacuaacagcaga

SEQ ID NO: 692156 - RNA, 22 nt, Human
cccaagcagggugcagaggcau

SEQ ID NO: 692157 - RNA, 22 nt, Human
gcacagagcuuguuuacauuug

SEQ ID NO: 692158 - RNA, 22 nt, Human
gggaugaauugagucagaaggg

SEQ ID NO: 692159 - RNA, 22 nt, Human
uggcuucuauugcuguggcauu

SEQ ID NO: 692160 - RNA, 22 nt, Human
gagacacaaucucauuuacauu

SEQ ID NO: 692161 - RNA, 22 nt, Human
ugccagggugucaggagagcua

SEQ ID NO: 692162 - RNA, 22 nt, Human
gcucugugagccacuugaugua

SEQ ID NO: 692163 - RNA, 22 nt, Human
ggcaagggacggccgugagaca

SEQ ID NO: 692164 - RNA, 22 nt, Human
ugcaaaugcccauuuauuuucu

SEQ ID NO: 692165 - RNA, 22 nt, Human
aagcacagacucccucugagug

SEQ ID NO: 692166 - RNA, 22 nt, Human
uugaauaauguguauguuguua

SEQ ID NO: 692167 - RNA, 22 nt, Human
augaagcuaaacccugcagcca

SEQ ID NO: 692168 - RNA, 22 nt, Human
ugccugucuuuccucccucgua

SEQ ID NO: 692169 - RNA, 22 nt, Human
gcugccagcucacucuccugag

SEQ ID NO: 692170 - RNA, 22 nt, Human
acagcagguagcuuugugccuc

SEQ ID NO: 692171 - RNA, 22 nt, Human
agaaauguacacgacacccaga

SEQ ID NO: 692172 - RNA, 22 nt, Human
uaggccuaguuacugcuuacuu

SEQ ID NO: 692173 - RNA, 22 nt, Human
uggcagugggaauggacaaaca

SEQ ID NO: 692174 - RNA, 22 nt, Human
uaauugucuuagucugugcagg

SEQ ID NO: 692175 - RNA, 22 nt, Human
ugccuaggcuggaaugcagugg

SEQ ID NO: 692176 - RNA, 22 nt, Human
gagacagcagggccagggccug

SEQ ID NO: 692177 - RNA, 22 nt, Human
cagggugguaccagcaucuagu

SEQ ID NO: 692178 - RNA, 22 nt, Human
acuucauucauuuucacgaaug

SEQ ID NO: 692179 - RNA, 22 nt, Human
uccauggggcccaggaugagag

SEQ ID NO: 692180 - RNA, 22 nt, Human
ugaaaguauuugauuucuauua

SEQ ID NO: 692181 - RNA, 22 nt, Human
gcagcuggggccacacuuaggc

SEQ ID NO: 692182 - RNA, 20 nt, Human
cagaaggucuaagcuuuaga

SEQ ID NO: 692183 - RNA, 22 nt, Human
uccacccccagacagcugguga

SEQ ID NO: 692184 - RNA, 21 nt, Human
ugcugaugucagagaagcaag

SEQ ID NO: 692185 - RNA, 22 nt, Human
cugcggugggcugggcuguccc

SEQ ID NO: 692186 - RNA, 22 nt, Human
aucuuauguuguauucaaaauc

SEQ ID NO: 692187 - RNA, 22 nt, Human
ucugggcccugagauguucuuc

SEQ ID NO: 692188 - RNA, 22 nt, Human
cuucauuuggagaacugugcuu

SEQ ID NO: 692189 - RNA, 22 nt, Human
cagaaaaccugacucuagaacu

SEQ ID NO: 692190 - RNA, 22 nt, Human
cagcaggcucugaguggcugcc

SEQ ID NO: 692191 - RNA, 22 nt, Human
cagugggacaugggcacugggc

SEQ ID NO: 692192 - RNA, 22 nt, Human
uuuuggcucugcagguuugcac

SEQ ID NO: 692193 - RNA, 23 nt, Human
aguaacaugcaaauaacagucug

SEQ ID NO: 692194 - RNA, 22 nt, Human
ggcaguguccuugcagcucuac

SEQ ID NO: 692195 - RNA, 20 nt, Human
agcuucugcugccuuucggc

SEQ ID NO: 692196 - RNA, 22 nt, Human
agcugcuuagagucucuucuua

SEQ ID NO: 692197 - RNA, 19 nt, Human
agcagcagcaccagggauu

SEQ ID NO: 692198 - RNA, 22 nt, Human
uuucaaaguaaggauuuucauc

SEQ ID NO: 692199 - RNA, 22 nt, Human
aagauggucuugagauauuaua

SEQ ID NO: 692200 - RNA, 22 nt, Human
ucagcuuugccaccagcuguaa

SEQ ID NO: 692201 - RNA, 22 nt, Human
ucugggcuggugcucaugaauu

SEQ ID NO: 692202 - RNA, 23 nt, Human
ucugggaauuggcuguccacagg

SEQ ID NO: 692203 - RNA, 22 nt, Human
aagaucaagaucagagaacagc

SEQ ID NO: 692204 - RNA, 22 nt, Human
gaauguuuuucaaaccuguggc

SEQ ID NO: 692205 - RNA, 22 nt, Human
uuucaaagucaauaucauuacc

SEQ ID NO: 692206 - RNA, 22 nt, Human
cccaguuguugccggcucugga

SEQ ID NO: 692207 - RNA, 22 nt, Human
agaggaagcugagaugccucuu

SEQ ID NO: 692208 - RNA, 20 nt, Human
cucagcucuucagggcaagu

SEQ ID NO: 692209 - RNA, 22 nt, Human
acaacaggguaaggcaggccau

SEQ ID NO: 692210 - RNA, 22 nt, Human
agcaccuccuuagcuaugacca

SEQ ID NO: 692211 - RNA, 22 nt, Human
caguacauuucauaugauucua

SEQ ID NO: 692212 - RNA, 22 nt, Human
ugauggaauggaggacaugugg

SEQ ID NO: 692213 - RNA, 22 nt, Human
ucaugcaguuugaaguucaggg

SEQ ID NO: 692214 - RNA, 22 nt, Human
aguacaaugucugacacaguag

SEQ ID NO: 692215 - RNA, 16 nt, Human
gaaggagauucagaaa

SEQ ID NO: 692216 - RNA, 22 nt, Human
ggcaggaggaagaguuagcacc

SEQ ID NO: 692217 - RNA, 19 nt, Human
auuuacugccuaaaaucuc

SEQ ID NO: 692218 - RNA, 22 nt, Human
ucaguguuuuuaaagcaauaua

SEQ ID NO: 692219 - RNA, 22 nt, Human
ggaacuggguuagggucucuuc

SEQ ID NO: 692220 - RNA, 22 nt, Human
uuuuagauuauaagucuaauuc

SEQ ID NO: 692221 - RNA, 22 nt, Human
aggaagcugggaaacugacauu

SEQ ID NO: 692222 - RNA, 22 nt, Human
ccugagaggcccucucacuguc

SEQ ID NO: 692223 - RNA, 20 nt, Human
agguuccuuuguggagaauu

SEQ ID NO: 692224 - RNA, 22 nt, Human
acagcagaguggagaugagcac

SEQ ID NO: 692225 - RNA, 22 nt, Human
ccccacuuugaguagcacuuga

SEQ ID NO: 692226 - RNA, 22 nt, Human
ugagagguaggaaaugaacaag

SEQ ID NO: 692227 - RNA, 22 nt, Human
uccccuccaacuccaacuaugg

SEQ ID NO: 692228 - RNA, 22 nt, Human
aaggauuuuuggaaugagaugg

SEQ ID NO: 692229 - RNA, 22 nt, Human
uuaagaauggaaugaggaauuu

SEQ ID NO: 692230 - RNA, 19 nt, Human
ccagagcccgccagauggg

SEQ ID NO: 692231 - RNA, 22 nt, Human
aacaaaguguacuuccauacug

SEQ ID NO: 692232 - RNA, 22 nt, Human
uccucagucucucaaaugaggc

SEQ ID NO: 692233 - RNA, 18 nt, Human
auuuugaacaaugcugua

SEQ ID NO: 692234 - RNA, 22 nt, Human
cccacacacuggcugcugccaa

SEQ ID NO: 692235 - RNA, 22 nt, Human
agacagcauggagcugauaaca

SEQ ID NO: 692236 - RNA, 22 nt, Human
caggggccaggcugucugcugu

SEQ ID NO: 692237 - RNA, 22 nt, Human
agcauauaggaaauguugaauc

SEQ ID NO: 692238 - RNA, 22 nt, Human
ggguagggugacuuaggcuggc

SEQ ID NO: 692239 - RNA, 18 nt, Human
acaaaggucugcaagacc

SEQ ID NO: 692240 - RNA, 22 nt, Human
augccuuauuccaacaaucuag

SEQ ID NO: 692241 - RNA, 22 nt, Human
guggagcccugguagggacccc

SEQ ID NO: 692242 - RNA, 22 nt, Human
uccaccagcuucuucaccagcu

SEQ ID NO: 692243 - RNA, 22 nt, Human
gacaggcagaccugugcccugg

SEQ ID NO: 692244 - RNA, 22 nt, Human
ucagugcagugaaagguuuacu

SEQ ID NO: 692245 - RNA, 22 nt, Human
gcguuuaagugaugaucgucuu

SEQ ID NO: 692246 - RNA, 22 nt, Human
ggacaggcugcaucugagcaug

SEQ ID NO: 692247 - RNA, 19 nt, Human
ggcugccuccugggagauu

SEQ ID NO: 692248 - RNA, 22 nt, Human
uuaugcuguuaggaaaaucaaa

SEQ ID NO: 692249 - RNA, 22 nt, Human
uuacacuugaaaacaggauuua

SEQ ID NO: 692250 - RNA, 21 nt, Human
ggcacugagccagauggacuc

SEQ ID NO: 692251 - RNA, 22 nt, Human
aaggccagccugagagcuaaca

SEQ ID NO: 692252 - RNA, 22 nt, Human
gugcaggagcucccgcaguggu

SEQ ID NO: 692253 - RNA, 22 nt, Human
cagcugguuggaagggagcuga

SEQ ID NO: 692254 - RNA, 22 nt, Human
aaagugcugggauuacaggccu

SEQ ID NO: 692255 - RNA, 22 nt, Human
acacagaguccuuacugaggua

SEQ ID NO: 692256 - RNA, 22 nt, Human
accaggcacuccugaggucuga

SEQ ID NO: 692257 - RNA, 22 nt, Human
ggugcucaaggugacaggacau

SEQ ID NO: 692258 - RNA, 22 nt, Human
aaguuuaguggugguguuccau

SEQ ID NO: 692259 - RNA, 22 nt, Human
ugaggaacugccagacuguuuu

SEQ ID NO: 692260 - RNA, 22 nt, Human
uuguuucagcccagaucuuuac

SEQ ID NO: 692261 - RNA, 22 nt, Human
caaugacauggauaaucauauu

SEQ ID NO: 692262 - RNA, 22 nt, Human
cucagacauuuguagaaagugc

SEQ ID NO: 692263 - RNA, 22 nt, Human
cuugggcucagcaccgugugga

SEQ ID NO: 692264 - RNA, 22 nt, Human
augcuggcagccgagugcucca

SEQ ID NO: 692265 - RNA, 22 nt, Human
uuacacacaauuagcauaguaa

SEQ ID NO: 692266 - RNA, 22 nt, Human
ccugaguuaguugcugugucuc

SEQ ID NO: 692267 - RNA, 22 nt, Human
ugucuccaccaucaucuuacca

SEQ ID NO: 692268 - RNA, 22 nt, Human
gagccaccuucaacucaggaau

SEQ ID NO: 692269 - RNA, 22 nt, Human
augcaaaugucaccacuucuaa

SEQ ID NO: 692270 - RNA, 22 nt, Human
uuuugagauggugucucgcucc

SEQ ID NO: 692271 - RNA, 22 nt, Human
ugagcuccggcauauggaauua

SEQ ID NO: 692272 - RNA, 22 nt, Human
uccaggcauaaugcccaguggu

SEQ ID NO: 692273 - RNA, 21 nt, Human
gcccagaagacuggcucugcc

SEQ ID NO: 692274 - RNA, 22 nt, Human
uuccucagcuguuugggcucau

SEQ ID NO: 692275 - RNA, 22 nt, Human
cugagcugcuuugcuuuugggg

SEQ ID NO: 692276 - RNA, 21 nt, Human
agaugcagugacccacugggg

SEQ ID NO: 692277 - RNA, 22 nt, Human
guuugaaagaccaauuagauuu

SEQ ID NO: 692278 - RNA, 22 nt, Human
cugggccuuuaccuacggaguu

SEQ ID NO: 692279 - RNA, 22 nt, Human
ggcaccagggaaggaaggcugg

SEQ ID NO: 692280 - RNA, 22 nt, Human
gauaaacacugaugauaugggg

SEQ ID NO: 692281 - RNA, 22 nt, Human
uuugcaaauaaauaagugcucg

SEQ ID NO: 692282 - RNA, 22 nt, Human
gaaggcuggcuuucugagagca

SEQ ID NO: 692283 - RNA, 22 nt, Human
uuuucagugguaucuuuguaaa

SEQ ID NO: 692284 - RNA, 22 nt, Human
gcccaggauggagaauaguggu

SEQ ID NO: 692285 - RNA, 22 nt, Human
aggcuggguaccugucauaugc

SEQ ID NO: 692286 - RNA, 22 nt, Human
agagcauccauuuuugucacau

SEQ ID NO: 692287 - RNA, 22 nt, Human
uacagaaauacagucaggccua

SEQ ID NO: 692288 - RNA, 22 nt, Human
agugugaguuugguugagacuu

SEQ ID NO: 692289 - RNA, 22 nt, Human
cagccucuguggcugccacacc

SEQ ID NO: 692290 - RNA, 22 nt, Human
ugcugaugaguccuucuaucgc

SEQ ID NO: 692291 - RNA, 22 nt, Human
uggugcugccaccuccucugcu

SEQ ID NO: 692292 - RNA, 22 nt, Human
gcagccacuaguuuuccuguuu

SEQ ID NO: 692293 - RNA, 22 nt, Human
ggcucuucuacuucagaugggg

SEQ ID NO: 692294 - RNA, 22 nt, Human
uuuucuguaagaggacuuuaau

SEQ ID NO: 692295 - RNA, 22 nt, Human
cagcccuuuccuucucagcuuu

SEQ ID NO: 692296 - RNA, 22 nt, Human
ugcugggauauagcuucuaggg

SEQ ID NO: 692297 - RNA, 22 nt, Human
ggaggggaggauuaaugacaaa

SEQ ID NO: 692298 - RNA, 22 nt, Human
ucagugucuugggcuugaaugc

SEQ ID NO: 692299 - RNA, 22 nt, Human
cuccauggaaccggggcugcuu

SEQ ID NO: 692300 - RNA, 23 nt, Human
ugccagggcccugugugcaaugc

SEQ ID NO: 692301 - RNA, 21 nt, Human
ccagagccugagaggauuaug

SEQ ID NO: 692302 - RNA, 22 nt, Human
uaaagagcacgcuuuucucucu

SEQ ID NO: 692303 - RNA, 22 nt, Human
auguauaugcaugcauucaaag

SEQ ID NO: 692304 - RNA, 22 nt, Human
ugcccaaguccuccaccgaggu

SEQ ID NO: 692305 - RNA, 22 nt, Human
gccacagggauuguuuugugag

SEQ ID NO: 692306 - RNA, 22 nt, Human
cagcauuggguuaccuuuguuu

SEQ ID NO: 692307 - RNA, 22 nt, Human
ccucuucaccucgggcacacug

SEQ ID NO: 692308 - RNA, 22 nt, Human
cacccaggcaaggauucugcaa

SEQ ID NO: 692309 - RNA, 22 nt, Human
uggcagagcaaaaagauagaau

SEQ ID NO: 692310 - RNA, 22 nt, Human
uagcuccuggugagccuacucu

SEQ ID NO: 692311 - RNA, 22 nt, Human
caguaacauuucaagguagagg

SEQ ID NO: 692312 - RNA, 22 nt, Human
ucaaaguuuguggcaauuuauu

SEQ ID NO: 692313 - RNA, 22 nt, Human
uggcacagagggacccagcagc

SEQ ID NO: 692314 - RNA, 22 nt, Human
uaagagaugcuuuucuaaauaa

SEQ ID NO: 692315 - RNA, 22 nt, Human
agagcuggacgucugagcccua

SEQ ID NO: 692316 - RNA, 22 nt, Human
ucagcucugccuguggaggcac

SEQ ID NO: 692317 - RNA, 22 nt, Human
aauccauucagaaauugggaau

SEQ ID NO: 692318 - RNA, 22 nt, Human
cagaggccaguggacaagggcc

SEQ ID NO: 692319 - RNA, 22 nt, Human
aagaggaaaugauugacuauau

SEQ ID NO: 692320 - RNA, 22 nt, Human
uacauguauguguacgugcaug

SEQ ID NO: 692321 - RNA, 22 nt, Human
ucaggcuguagggccccuggag

SEQ ID NO: 692322 - RNA, 22 nt, Human
uugauacaggccuucuagauga

SEQ ID NO: 692323 - RNA, 22 nt, Human
agaggccagcuagcgggccauc

SEQ ID NO: 692324 - RNA, 19 nt, Human
cugugcccuaugacuugua

SEQ ID NO: 692325 - RNA, 22 nt, Human
auguaugcuuugauuuuagaug

SEQ ID NO: 692326 - RNA, 23 nt, Human
uccuuuaaugcuggaauggcuag

SEQ ID NO: 692327 - RNA, 19 nt, Human
ugggaaaguaacauacaaa

SEQ ID NO: 692328 - RNA, 22 nt, Human
cccuggcuuggcacucuccacu

SEQ ID NO: 692329 - RNA, 19 nt, Human
ugcuuugcucuuggacuca

SEQ ID NO: 692330 - RNA, 22 nt, Human
augcucugggcuuuugaagugg

SEQ ID NO: 692331 - RNA, 22 nt, Human
agcagagcugggauccuggguc

SEQ ID NO: 692332 - RNA, 22 nt, Human
aucuacauguugauuuaaagaa

SEQ ID NO: 692333 - RNA, 23 nt, Human
ugauagaugucauggucuugagu

SEQ ID NO: 692334 - RNA, 23 nt, Human
ucagagagcuguugagagcugcc

SEQ ID NO: 692335 - RNA, 19 nt, Human
uuguccagaaaggcauugc

SEQ ID NO: 692336 - RNA, 22 nt, Human
aguguuagauucuuacucaguu

SEQ ID NO: 692337 - RNA, 22 nt, Human
gcugaggacaucauggaaggaa

SEQ ID NO: 692338 - RNA, 22 nt, Human
uccuucagcuuauuucuuagga

SEQ ID NO: 692339 - RNA, 22 nt, Human
gugccaggcccagggagcgggg

SEQ ID NO: 692340 - RNA, 22 nt, Human
gacagacagggguucuccugga

SEQ ID NO: 692341 - RNA, 22 nt, Human
aacacugaagccguuaaaccuu

SEQ ID NO: 692342 - RNA, 22 nt, Human
cacugugucuggagugagcugg

SEQ ID NO: 692343 - RNA, 22 nt, Human
aaauuucuggaagugucagagu

SEQ ID NO: 692344 - RNA, 22 nt, Human
augaguugaagcuacaagaggc

SEQ ID NO: 692345 - RNA, 22 nt, Human
ugaggcccucugggcugguccu

SEQ ID NO: 692346 - RNA, 16 nt, Human
caauacauggcauuuc

SEQ ID NO: 692347 - RNA, 22 nt, Human
ucucccacagucucccauggcu

SEQ ID NO: 692348 - RNA, 22 nt, Human
agcagccauagauagcaugcaa

SEQ ID NO: 692349 - RNA, 22 nt, Human
ugaggcugacaaaagaugaggu

SEQ ID NO: 692350 - RNA, 22 nt, Human
caacacagggguuaugccaugg

SEQ ID NO: 692351 - RNA, 22 nt, Human
agcagaacugaugagacuugag

SEQ ID NO: 692352 - RNA, 22 nt, Human
gccaggacccuggagggcaucu

SEQ ID NO: 692353 - RNA, 22 nt, Human
cccaggagauggagguugcagu

SEQ ID NO: 692354 - RNA, 22 nt, Human
ggcuggagugggcuccagaguu

SEQ ID NO: 692355 - RNA, 19 nt, Human
acacauguaacaguuuuuc

SEQ ID NO: 692356 - RNA, 22 nt, Human
ugaggcaggaggauugcaggau

SEQ ID NO: 692357 - RNA, 22 nt, Human
gccagccugugggggcucugug

SEQ ID NO: 692358 - RNA, 22 nt, Human
agauauguuacugcaucauggg

SEQ ID NO: 692359 - RNA, 22 nt, Human
uugcagaggcaaaaaugaacuc

SEQ ID NO: 692360 - RNA, 22 nt, Human
gaguuaguauguucuguaagua

SEQ ID NO: 692361 - RNA, 22 nt, Human
uucagaaaucgaguuucauguc

SEQ ID NO: 692362 - RNA, 22 nt, Human
aaguauauuuagcugagcuugu

SEQ ID NO: 692363 - RNA, 22 nt, Human
agggaagggcagggucuaugca

SEQ ID NO: 692364 - RNA, 22 nt, Human
ggacugaggcccacuugaggga

SEQ ID NO: 692365 - RNA, 21 nt, Human
ugucaguuauaaucaccacag

SEQ ID NO: 692366 - RNA, 22 nt, Human
gugccagcaguuauggugauuu

SEQ ID NO: 692367 - RNA, 22 nt, Human
uguguuaacacugcaugauaau

SEQ ID NO: 692368 - RNA, 22 nt, Human
aacugcaguuacuuuugcacca

SEQ ID NO: 692369 - RNA, 22 nt, Human
ggaacacucgucaaauagcggg

SEQ ID NO: 692370 - RNA, 22 nt, Human
gccaggacugagaaugggagca

SEQ ID NO: 692371 - RNA, 22 nt, Human
augaagcagaauuucccacucu

SEQ ID NO: 692372 - RNA, 22 nt, Human
uuucugaaaucucuuuugagga

SEQ ID NO: 692373 - RNA, 20 nt, Human
cuguggcaucugucauggug

SEQ ID NO: 692374 - RNA, 22 nt, Human
uaaccuggggcgguuucccaau

SEQ ID NO: 692375 - RNA, 22 nt, Human
uagcauuaaagguaagacauua

SEQ ID NO: 692376 - RNA, 22 nt, Human
gcacagagggcagugagccucu

SEQ ID NO: 692377 - RNA, 23 nt, Human
acagaagccaggagccgcugggc

SEQ ID NO: 692378 - RNA, 22 nt, Human
gaaucuuaccucucuauuguug

SEQ ID NO: 692379 - RNA, 22 nt, Human
aacagcagcaaguaagcagguc

SEQ ID NO: 692380 - RNA, 22 nt, Human
uacaaacucuuuauauuucaua

SEQ ID NO: 692381 - RNA, 22 nt, Human
uccuucuucaugaagauauaug

SEQ ID NO: 692382 - RNA, 22 nt, Human
uccauugucuuugguccuagcc

SEQ ID NO: 692383 - RNA, 22 nt, Human
ccugagcaaaggcccagaggga

SEQ ID NO: 692384 - RNA, 22 nt, Human
auuagcuuaucccauuucugaa

SEQ ID NO: 692385 - RNA, 22 nt, Human
ucagaggcuuccuuccucggag

SEQ ID NO: 692386 - RNA, 22 nt, Human
gggcuccuggcagucaugcuca

SEQ ID NO: 692387 - RNA, 22 nt, Human
ggcagcucugugucugggaagc

SEQ ID NO: 692388 - RNA, 22 nt, Human
uaaguuuccagauuguaagucc

SEQ ID NO: 692389 - RNA, 22 nt, Human
gaaaugugggucaugacccauu

SEQ ID NO: 692390 - RNA, 22 nt, Human
acaggcugccacuugcauccaa

SEQ ID NO: 692391 - RNA, 21 nt, Human
cccugcaggccagggcugagc

SEQ ID NO: 692392 - RNA, 22 nt, Human
auuauuguacuuucaauaaggu

SEQ ID NO: 692393 - RNA, 22 nt, Human
auggcuucgaguauauacauag

SEQ ID NO: 692394 - RNA, 22 nt, Human
ugagcccuggagcccucuguua

SEQ ID NO: 692395 - RNA, 22 nt, Human
uaggcuggaacuuaggcagagg

SEQ ID NO: 692396 - RNA, 22 nt, Human
acaucuauuuuuuucuguccau

SEQ ID NO: 692397 - RNA, 22 nt, Human
caggcccagugaucagggcucu

SEQ ID NO: 692398 - RNA, 22 nt, Human
cagaggcuggcggccgccccga

SEQ ID NO: 692399 - RNA, 22 nt, Human
guuguacagcauuccauauagg

SEQ ID NO: 692400 - RNA, 22 nt, Human
uuugaacaugcugcaugauaau

SEQ ID NO: 692401 - RNA, 22 nt, Human
uacaugacauuucuuucuguuc

SEQ ID NO: 692402 - RNA, 22 nt, Human
cuguggaguuccaucaggggag

SEQ ID NO: 692403 - RNA, 18 nt, Human
ugugaacacauuuuucug

SEQ ID NO: 692404 - RNA, 22 nt, Human
aggcagcuaagauggauaauga

SEQ ID NO: 692405 - RNA, 18 nt, Human
ggcagccuacccacuugu

SEQ ID NO: 692406 - RNA, 22 nt, Human
agaaggaaggcugagugcugau

SEQ ID NO: 692407 - RNA, 22 nt, Human
auucacaaagucacccuuacac

SEQ ID NO: 692408 - RNA, 20 nt, Human
uuuggcuucaagugcauugc

SEQ ID NO: 692409 - RNA, 22 nt, Human
ucagcuucagaucagcuagaga

SEQ ID NO: 692410 - RNA, 22 nt, Human
acacugugacaagaaagagcug

SEQ ID NO: 692411 - RNA, 22 nt, Human
gucuccagaagccuagacagcc

SEQ ID NO: 692412 - RNA, 22 nt, Human
ccugggcuuacgaccucugacu

SEQ ID NO: 692413 - RNA, 22 nt, Human
aucuauuaugcugagaaacugu

SEQ ID NO: 692414 - RNA, 22 nt, Human
gagaugacaugccuguuguagg

SEQ ID NO: 692415 - RNA, 22 nt, Human
ugagccagccucagaagucacg

SEQ ID NO: 692416 - RNA, 20 nt, Human
cucucuggaaggugggagcc

SEQ ID NO: 692417 - RNA, 22 nt, Human
ggugccguugaggaaguaacug

SEQ ID NO: 692418 - RNA, 22 nt, Human
cccagcuugcucaccauuccca

SEQ ID NO: 692419 - RNA, 22 nt, Human
auucuucaucacuaccuuguga

SEQ ID NO: 692420 - RNA, 22 nt, Human
ggaguuccagaaucugcuuuuu

SEQ ID NO: 692421 - RNA, 22 nt, Human
uguggccagccacaggcauggu

SEQ ID NO: 692422 - RNA, 22 nt, Human
cugucuggaaugcaguacauag

SEQ ID NO: 692423 - RNA, 23 nt, Human
ggcugggagcuccgggugcacgu

SEQ ID NO: 692424 - RNA, 22 nt, Human
aggguagguguaagauagcccu

SEQ ID NO: 692425 - RNA, 22 nt, Human
ucccucagcucauauuuaugcc

SEQ ID NO: 692426 - RNA, 22 nt, Human
uuaaaguucauuaaaugagcca

SEQ ID NO: 692427 - RNA, 22 nt, Human
aacuguaagaaauaaaauucug

SEQ ID NO: 692428 - RNA, 22 nt, Human
cuuugcagugauuguucuugga

SEQ ID NO: 692429 - RNA, 19 nt, Human
agcuuuggacuugcauuuc

SEQ ID NO: 692430 - RNA, 22 nt, Human
gggcugaugaugagcagaggug

SEQ ID NO: 692431 - RNA, 22 nt, Human
ucuuggauuuuaauggaucaaa

SEQ ID NO: 692432 - RNA, 22 nt, Human
uucauuuucuuucacgcugcug

SEQ ID NO: 692433 - RNA, 22 nt, Human
ucuuuacaagucacauuuucug

SEQ ID NO: 692434 - RNA, 22 nt, Human
uggccuggaagagaggucgagg

SEQ ID NO: 692435 - RNA, 22 nt, Human
aaugccuuuccacuggguauca

SEQ ID NO: 692436 - RNA, 22 nt, Human
acuggagacugugucuuuugau

SEQ ID NO: 692437 - RNA, 22 nt, Human
uuuacagaagagaaggaugcuu

SEQ ID NO: 692438 - RNA, 22 nt, Human
uagcagcuccauuucucuggca

SEQ ID NO: 692439 - RNA, 22 nt, Human
caggaguuucuauuguuccaaa

SEQ ID NO: 692440 - RNA, 22 nt, Human
ccuaguccccaggaggucagug

SEQ ID NO: 692441 - RNA, 22 nt, Human
ucauaauuguauacauuuaugg

SEQ ID NO: 692442 - RNA, 22 nt, Human
cugccuuugugaucaguucuuu

SEQ ID NO: 692443 - RNA, 22 nt, Human
ggucugcccacuacucuccauu

SEQ ID NO: 692444 - RNA, 22 nt, Human
agugucaacugucuacagggag

SEQ ID NO: 692445 - RNA, 22 nt, Human
cuggcagugacauugcaggugc

SEQ ID NO: 692446 - RNA, 22 nt, Human
uggcuaauggcauuuccugggu

SEQ ID NO: 692447 - RNA, 22 nt, Human
ugaagcuggaagcaugcagacu

SEQ ID NO: 692448 - RNA, 22 nt, Human
cccagcagugguucucaaacuu

SEQ ID NO: 692449 - RNA, 22 nt, Human
acuuccaaauaccaucacauug

SEQ ID NO: 692450 - RNA, 22 nt, Human
ugcagaaaucacauuuaacccu

SEQ ID NO: 692451 - RNA, 22 nt, Human
uccacaggcugaggcccuucug

SEQ ID NO: 692452 - RNA, 22 nt, Human
accagggcggcuugaggaggca

SEQ ID NO: 692453 - RNA, 22 nt, Human
gaaggcaagaucucaguggagg

SEQ ID NO: 692454 - RNA, 22 nt, Human
cuaaagaagcuagcaaucuaua

SEQ ID NO: 692455 - RNA, 22 nt, Human
uuucuuauauucugucauuguu

SEQ ID NO: 692456 - RNA, 22 nt, Human
ggucuggauuuugaacaaaauu

SEQ ID NO: 692457 - RNA, 22 nt, Human
gccagcuguaucuuuggccagc

SEQ ID NO: 692458 - RNA, 21 nt, Human
uccagggaacuucucaggaau

SEQ ID NO: 692459 - RNA, 22 nt, Human
gacaggcaguuuuccagaucag

SEQ ID NO: 692460 - RNA, 20 nt, Human
uccaugaguuagagacuaua

SEQ ID NO: 692461 - RNA, 22 nt, Human
guccuagagauccgggagggga

SEQ ID NO: 692462 - RNA, 22 nt, Human
gguggcaggcuggcauuggcaa

SEQ ID NO: 692463 - RNA, 22 nt, Human
gaggcuggaggucaaagaugaa

SEQ ID NO: 692464 - RNA, 22 nt, Human
uucauguaauuccauaagguaa

SEQ ID NO: 692465 - RNA, 22 nt, Human
gauuucaguggcugucucaaau

SEQ ID NO: 692466 - RNA, 22 nt, Human
gaguggggcccacugcugggug

SEQ ID NO: 692467 - RNA, 22 nt, Human
agaauguguuuuaacaugggaa

SEQ ID NO: 692468 - RNA, 22 nt, Human
uuucaggccauagcacagggaa

SEQ ID NO: 692469 - RNA, 23 nt, Human
ugauuacaggaaguucaaguguu

SEQ ID NO: 692470 - RNA, 22 nt, Human
agcagagcggggccuccggaag

SEQ ID NO: 692471 - RNA, 22 nt, Human
guccccuggcccccagcgucgg

SEQ ID NO: 692472 - RNA, 22 nt, Human
aagucacacaguuaacaugagg

SEQ ID NO: 692473 - RNA, 22 nt, Human
aaaugcaugugcuauagaugug

SEQ ID NO: 692474 - RNA, 22 nt, Human
uuuuauguuccugaagcuaucu

SEQ ID NO: 692475 - RNA, 22 nt, Human
gcucucugccauaugaggauac

SEQ ID NO: 692476 - RNA, 22 nt, Human
gucacagaucucuugagucaag

SEQ ID NO: 692477 - RNA, 19 nt, Human
uuuaaagugacugguauuu

SEQ ID NO: 692478 - RNA, 22 nt, Human
aggugagaaaacgaggguugca

SEQ ID NO: 692479 - RNA, 22 nt, Human
caagguuuacuuuaugauccag

SEQ ID NO: 692480 - RNA, 22 nt, Human
aagggugguguaggagaucaaa

SEQ ID NO: 692481 - RNA, 22 nt, Human
ggaagcugguaauuguugggac

SEQ ID NO: 692482 - RNA, 22 nt, Human
ugcacaggugguccaucugcac

SEQ ID NO: 692483 - RNA, 22 nt, Human
gaaagugcaugugcccaccauu

SEQ ID NO: 692484 - RNA, 22 nt, Human
gaccacagcuacaagggcaagg

SEQ ID NO: 692485 - RNA, 21 nt, Human
aggaguugagugcacaguugg

SEQ ID NO: 692486 - RNA, 22 nt, Human
cagagauaccauugcuaaaauu

SEQ ID NO: 692487 - RNA, 22 nt, Human
cggaagagggacagcgccagcc

SEQ ID NO: 692488 - RNA, 22 nt, Human
gccucccuguucuuccacaaua

SEQ ID NO: 692489 - RNA, 22 nt, Human
uccuggaggcacucgcuggggc

SEQ ID NO: 692490 - RNA, 22 nt, Human
ugucauuuucuaaucuguuguc

SEQ ID NO: 692491 - RNA, 22 nt, Human
uguggaaaguggucuaagcaca

SEQ ID NO: 692492 - RNA, 22 nt, Human
uagaaauggguuacauuuagag

SEQ ID NO: 692493 - RNA, 22 nt, Human
aaguccagugauacuggcagga

SEQ ID NO: 692494 - RNA, 22 nt, Human
caugccagggcuugcugccugg

SEQ ID NO: 692495 - RNA, 22 nt, Human
uuucugcaaacuuccacgucuc

SEQ ID NO: 692496 - RNA, 22 nt, Human
uuucaguuuaaguaacugcuau

SEQ ID NO: 692497 - RNA, 22 nt, Human
ugaggccaagccuccucugcca

SEQ ID NO: 692498 - RNA, 22 nt, Human
caggcuugugucucagcugcag

SEQ ID NO: 692499 - RNA, 22 nt, Human
agaguuugggguaugauuguuu

SEQ ID NO: 692500 - RNA, 20 nt, Human
uauggcuugcagccacccuu

SEQ ID NO: 692501 - RNA, 22 nt, Human
gcagggcugauggcuucccuca

SEQ ID NO: 692502 - RNA, 22 nt, Human
gguguggggagguucugcuucu

SEQ ID NO: 692503 - RNA, 22 nt, Human
cagcacauaagccgaagacugu

SEQ ID NO: 692504 - RNA, 17 nt, Human
cacaacuggcugauuga

SEQ ID NO: 692505 - RNA, 22 nt, Human
auacaacugcucucagauaagu

SEQ ID NO: 692506 - RNA, 22 nt, Human
agagcagacauccuugucuugu

SEQ ID NO: 692507 - RNA, 22 nt, Human
gcccagcccugaggucacagcu

SEQ ID NO: 692508 - RNA, 22 nt, Human
agccagcacggcgccauggagu

SEQ ID NO: 692509 - RNA, 20 nt, Human
ucuauuuguaaagggcugug

SEQ ID NO: 692510 - RNA, 22 nt, Human
ccugugacgugucuccuggcac

SEQ ID NO: 692511 - RNA, 22 nt, Human
ugccaggggaccuagggauguc

SEQ ID NO: 692512 - RNA, 22 nt, Human
uguggcuggauugauuuuaccu

SEQ ID NO: 692513 - RNA, 19 nt, Human
ggccuggcuaucccugcug

SEQ ID NO: 692514 - RNA, 22 nt, Human
aguuuuaagaugcgcuucuguu

SEQ ID NO: 692515 - RNA, 22 nt, Human
augggaggaucacuugaggcca

SEQ ID NO: 692516 - RNA, 22 nt, Human
agcagggcuggggcacgagcca

SEQ ID NO: 692517 - RNA, 22 nt, Human
guccagcccgggcuccgccagc

SEQ ID NO: 692518 - RNA, 22 nt, Human
uacccagauucacaagccaagg

SEQ ID NO: 692519 - RNA, 22 nt, Human
ccagcuccacugucagaugaga

SEQ ID NO: 692520 - RNA, 22 nt, Human
uccugggacuuucaaggcuagg

SEQ ID NO: 692521 - RNA, 22 nt, Human
ugaauaugcuuugcaauccuaa

SEQ ID NO: 692522 - RNA, 22 nt, Human
aucugggucacaguggcaucua

SEQ ID NO: 692523 - RNA, 22 nt, Human
caaagggcauuuuagugaacug

SEQ ID NO: 692524 - RNA, 22 nt, Human
caggcuccucacucaugcuccc

SEQ ID NO: 692525 - RNA, 22 nt, Human
uagucagauauaugacuuacgu

SEQ ID NO: 692526 - RNA, 22 nt, Human
ucaauuuuaugaaacaaaguga

SEQ ID NO: 692527 - RNA, 22 nt, Human
uuuagacauuugugguuugcaa

SEQ ID NO: 692528 - RNA, 23 nt, Human
uugaggcaaacauguaaguagga

SEQ ID NO: 692529 - RNA, 22 nt, Human
augccacugacauggacaauuu

SEQ ID NO: 692530 - RNA, 22 nt, Human
ccuaacuucacuucauugaagu

SEQ ID NO: 692531 - RNA, 22 nt, Human
aauuucagauauuaaagaauga

SEQ ID NO: 692532 - RNA, 22 nt, Human
aagcagcauuguaaccaaugcc

SEQ ID NO: 692533 - RNA, 22 nt, Human
auacuacacuaugcauggaugu

SEQ ID NO: 692534 - RNA, 22 nt, Human
uugcugaagugaagguauguuu

SEQ ID NO: 692535 - RNA, 22 nt, Human
uggaaagaauuccuaugguuca

SEQ ID NO: 692536 - RNA, 22 nt, Human
ggcagggagagcaugcugauaa

SEQ ID NO: 692537 - RNA, 22 nt, Human
gagaacucagacgcaggucaug

SEQ ID NO: 692538 - RNA, 22 nt, Human
cuggagcuaggaaguccaagau

SEQ ID NO: 692539 - RNA, 22 nt, Human
aaauaauguuaggccuuugcuc

SEQ ID NO: 692540 - RNA, 22 nt, Human
augugauucccacugaaucacu

SEQ ID NO: 692541 - RNA, 22 nt, Human
agacaguggaucgggaugcacu

SEQ ID NO: 692542 - RNA, 22 nt, Human
aaacagucugaugccaucugcc

SEQ ID NO: 692543 - RNA, 22 nt, Human
agcagggcuugccgcuuguccu

SEQ ID NO: 692544 - RNA, 22 nt, Human
uggcccuguguccugcugccag

SEQ ID NO: 692545 - RNA, 22 nt, Human
uacaauguuccuagcaggaaag

SEQ ID NO: 692546 - RNA, 22 nt, Human
caccuguuguuuauucaucucu

SEQ ID NO: 692547 - RNA, 22 nt, Human
agagccagcaacucuagcccug

SEQ ID NO: 692548 - RNA, 22 nt, Human
cuucuguguagaaagguagccc

SEQ ID NO: 692549 - RNA, 22 nt, Human
uccuaacuccacuagccuuggg

SEQ ID NO: 692550 - RNA, 22 nt, Human
aagcaucuuagaccugaguucc

SEQ ID NO: 692551 - RNA, 22 nt, Human
gggggcucugacucccucagcu

SEQ ID NO: 692552 - RNA, 22 nt, Human
cuuauguaaaacggaaagggaa

SEQ ID NO: 692553 - RNA, 20 nt, Human
ugcuccaucuaaagugauua

SEQ ID NO: 692554 - RNA, 22 nt, Human
aaaacugaaccuugagaucuuu

SEQ ID NO: 692555 - RNA, 21 nt, Human
agagucugcauuucugacaag

SEQ ID NO: 692556 - RNA, 22 nt, Human
aagagcaucaaugacucgcagu

SEQ ID NO: 692557 - RNA, 22 nt, Human
gcugcugggucccucugugcca

SEQ ID NO: 692558 - RNA, 22 nt, Human
auucacacuguauacacaggau

SEQ ID NO: 692559 - RNA, 22 nt, Human
aaacacugcaggguuuacuuga

SEQ ID NO: 692560 - RNA, 22 nt, Human
augcuaaauguuaauguuaccu

SEQ ID NO: 692561 - RNA, 22 nt, Human
cauucaguggaguauuauucag

SEQ ID NO: 692562 - RNA, 22 nt, Human
cuaguguuuauuaaucaugagg

SEQ ID NO: 692563 - RNA, 18 nt, Human
gauggaaaguguaugagu

SEQ ID NO: 692564 - RNA, 22 nt, Human
agauccauccagcacucuugcc

SEQ ID NO: 692565 - RNA, 22 nt, Human
uaguuaaaauaauggagauguu

SEQ ID NO: 692566 - RNA, 22 nt, Human
ccaauucaccuccuaugcacau

SEQ ID NO: 692567 - RNA, 22 nt, Human
augggaagguuuugagagcggg

SEQ ID NO: 692568 - RNA, 22 nt, Human
caacacugauuauggcugagcu

SEQ ID NO: 692569 - RNA, 22 nt, Human
aucugaaaagccucuuacuccu

SEQ ID NO: 692570 - RNA, 22 nt, Human
ugacauuuaaucccuaaauauu

SEQ ID NO: 692571 - RNA, 22 nt, Human
cugugcuuccaggauggcagcu

SEQ ID NO: 692572 - RNA, 22 nt, Human
uggcugugaacaaagagaauaa

SEQ ID NO: 692573 - RNA, 22 nt, Human
gcugccagggaggugguggagg

SEQ ID NO: 692574 - RNA, 22 nt, Human
uagcauuuauuccagauuugga

SEQ ID NO: 692575 - RNA, 22 nt, Human
cagcaucuucuagauccaggcu

SEQ ID NO: 692576 - RNA, 22 nt, Human
gcacaugagaagcuggcgaugc

SEQ ID NO: 692577 - RNA, 20 nt, Human
cagggcucugggccuggccu

SEQ ID NO: 692578 - RNA, 22 nt, Human
agaaugugggggaaaagagugu

SEQ ID NO: 692579 - RNA, 22 nt, Human
gugcuuucugcaugguuccuac

SEQ ID NO: 692580 - RNA, 22 nt, Human
aaaguuucaauagaggaagugg

SEQ ID NO: 692581 - RNA, 21 nt, Human
acuuuacaauuuacauaguga

SEQ ID NO: 692582 - RNA, 22 nt, Human
ugcuggaacuuagcaugcucuc

SEQ ID NO: 692583 - RNA, 22 nt, Human
cuacaaaaguaauugugguuuu

SEQ ID NO: 692584 - RNA, 22 nt, Human
aguauggggcugugugugcaca

SEQ ID NO: 692585 - RNA, 22 nt, Human
cccaguguuccuugaggggcug

SEQ ID NO: 692586 - RNA, 22 nt, Human
gcuggcagucccaucagcuggg

SEQ ID NO: 692587 - RNA, 22 nt, Human
ucaguuccuguugcacagcauc

SEQ ID NO: 692588 - RNA, 22 nt, Human
uuuucucagcugcacuguauua

SEQ ID NO: 692589 - RNA, 22 nt, Human
ccauucugagucuuaugucuuu

SEQ ID NO: 692590 - RNA, 22 nt, Human
aaaugcaugguaaaugauugcc

SEQ ID NO: 692591 - RNA, 22 nt, Human
ucugagccaccugagcccaugg

SEQ ID NO: 692592 - RNA, 22 nt, Human
uaaguaacugcauaauuaaauu

SEQ ID NO: 692593 - RNA, 22 nt, Human
gcauggccuugcuguaguggua

SEQ ID NO: 692594 - RNA, 22 nt, Human
ucuuuagagcacgggaaaaaca

SEQ ID NO: 692595 - RNA, 22 nt, Human
ucagauuuaugaauauacuaug

SEQ ID NO: 692596 - RNA, 22 nt, Human
cccagcuugucugauucagccu

SEQ ID NO: 692597 - RNA, 22 nt, Human
gacacaugucagacggacaccc

SEQ ID NO: 692598 - RNA, 22 nt, Human
uugcauauccuccaacacaugg

SEQ ID NO: 692599 - RNA, 22 nt, Human
uccuucagcucucuauuuagau

SEQ ID NO: 692600 - RNA, 22 nt, Human
aaugagauggaauucccgccua

SEQ ID NO: 692601 - RNA, 22 nt, Human
uuaagguugagcucacuuuuau

SEQ ID NO: 692602 - RNA, 22 nt, Human
uggcucacuuccguggagaggu

SEQ ID NO: 692603 - RNA, 22 nt, Human
uccagugaucuagggagcugga

SEQ ID NO: 692604 - RNA, 22 nt, Human
acggggcuagagaagguuucuu

SEQ ID NO: 692605 - RNA, 22 nt, Human
ggcucugcuucagaaggcucau

SEQ ID NO: 692606 - RNA, 21 nt, Human
gccacugcacuccagccuggg

SEQ ID NO: 692607 - RNA, 22 nt, Human
cacagcaggcacuauacagggc

SEQ ID NO: 692608 - RNA, 22 nt, Human
agaggagguggugaugcuuuaa

SEQ ID NO: 692609 - RNA, 22 nt, Human
uggcuuucccccagcccaguug

SEQ ID NO: 692610 - RNA, 21 nt, Human
auucuuugaugugcaauaagu

SEQ ID NO: 692611 - RNA, 19 nt, Human
ccagagucaugucuccccc

SEQ ID NO: 692612 - RNA, 22 nt, Human
ucucacacuucuguguugcaca

SEQ ID NO: 692613 - RNA, 22 nt, Human
uuccuggaaauuaugcucaccu

SEQ ID NO: 692614 - RNA, 22 nt, Human
ucgugcaaaccugacacagcca

SEQ ID NO: 692615 - RNA, 22 nt, Human
auggcccuaucaccuuugcuuc

SEQ ID NO: 692616 - RNA, 22 nt, Human
ugggguagguaugaaaacuagg

SEQ ID NO: 692617 - RNA, 22 nt, Human
aauaagaauuuacuugucaaga

SEQ ID NO: 692618 - RNA, 22 nt, Human
aauagaauguaaucuaauacau

SEQ ID NO: 692619 - RNA, 22 nt, Human
acagaucaccuguuagccaaaa

SEQ ID NO: 692620 - RNA, 22 nt, Human
uuacauguucucauacacagag

SEQ ID NO: 692621 - RNA, 22 nt, Human
uuucaggacaccuuuaaaaacg

SEQ ID NO: 692622 - RNA, 22 nt, Human
guagggagcccagagcccagug

SEQ ID NO: 692623 - RNA, 22 nt, Human
acuacaguacuauaucuauagg

SEQ ID NO: 692624 - RNA, 22 nt, Human
ucuuuggaugcguuacuuuuac

SEQ ID NO: 692625 - RNA, 22 nt, Human
uuaaggaaggugaauuucuugg

SEQ ID NO: 692626 - RNA, 22 nt, Human
acaguaauuaaaauggaucugc

SEQ ID NO: 692627 - RNA, 20 nt, Human
aacuuguucuaccuguuuca

SEQ ID NO: 692628 - RNA, 22 nt, Human
ugaagcagagaauuugacaguc

SEQ ID NO: 692629 - RNA, 22 nt, Human
guggagccaggggcuguaggua

SEQ ID NO: 692630 - RNA, 22 nt, Human
cagagaugugauccagcugucu

SEQ ID NO: 692631 - RNA, 22 nt, Human
ccuuuuauacucuguccucugg

SEQ ID NO: 692632 - RNA, 22 nt, Human
ccaggcuuccuaaugugugcag

SEQ ID NO: 692633 - RNA, 22 nt, Human
gggcugagaauucagcuuuccu

SEQ ID NO: 692634 - RNA, 22 nt, Human
aacacagaucaaaauauuuccu

SEQ ID NO: 692635 - RNA, 22 nt, Human
aauaacaggguugauuugcaau

SEQ ID NO: 692636 - RNA, 22 nt, Human
auucuagcaguuacaggcugau

SEQ ID NO: 692637 - RNA, 22 nt, Human
aauuuuaagcauaugacugguu

SEQ ID NO: 692638 - RNA, 22 nt, Human
agcagccagagucugaacauua

SEQ ID NO: 692639 - RNA, 22 nt, Human
caggcuccaagcccucugaugu

SEQ ID NO: 692640 - RNA, 22 nt, Human
uccuccagugguacuggccaau

SEQ ID NO: 692641 - RNA, 22 nt, Human
aaacucugcacugcgguaaggu

SEQ ID NO: 692642 - RNA, 22 nt, Human
aaaaucacacaaguagaugggg

SEQ ID NO: 692643 - RNA, 20 nt, Human
cagagcagugcccaggcggc

SEQ ID NO: 692644 - RNA, 22 nt, Human
uuagaaagguuuugcucugaaa

SEQ ID NO: 692645 - RNA, 22 nt, Human
gaaugcuguagacagacucuau

SEQ ID NO: 692646 - RNA, 22 nt, Human
cauuucuagggaucauaaagua

SEQ ID NO: 692647 - RNA, 22 nt, Human
gccugugcauagcagcggacuc

SEQ ID NO: 692648 - RNA, 22 nt, Human
aagauccugcuuuugcuucugu

SEQ ID NO: 692649 - RNA, 22 nt, Human
caaaugaauagggagugugaug

SEQ ID NO: 692650 - RNA, 22 nt, Human
aagcaggcaagguuguggggca

SEQ ID NO: 692651 - RNA, 22 nt, Human
auuaaaauuccaagguaugcca

SEQ ID NO: 692652 - RNA, 22 nt, Human
uauggcuucugggccaaauuua

SEQ ID NO: 692653 - RNA, 22 nt, Human
ugcuucacaagaauucaggacc

SEQ ID NO: 692654 - RNA, 21 nt, Human
ccuaguguuaaaacaguuuaa

SEQ ID NO: 692655 - RNA, 22 nt, Human
cauuucauaguugucacaauaa

SEQ ID NO: 692656 - RNA, 22 nt, Human
uggaacaacaugcuggaaaauu

SEQ ID NO: 692657 - RNA, 22 nt, Human
gguuuuaaccauucacaaguga

SEQ ID NO: 692658 - RNA, 18 nt, Human
cagaaaguuauuuacucu

SEQ ID NO: 692659 - RNA, 22 nt, Human
gggggaggugaaugcaauaagg

SEQ ID NO: 692660 - RNA, 22 nt, Human
uggcucaguuccaucaucugga

SEQ ID NO: 692661 - RNA, 22 nt, Human
ugucacucaaguuccaauuuac

SEQ ID NO: 692662 - RNA, 22 nt, Human
agugaggggauucaggcaaggu

SEQ ID NO: 692663 - RNA, 22 nt, Human
ggggacgggacuuagcaugagu

SEQ ID NO: 692664 - RNA, 22 nt, Human
ugagcucauagcucuuauuaug

SEQ ID NO: 692665 - RNA, 20 nt, Human
cuuuagaagaacccaagcau

SEQ ID NO: 692666 - RNA, 22 nt, Human
accagaguaauguguggaaauu

SEQ ID NO: 692667 - RNA, 22 nt, Human
aaugaucauuauaaagugcucu

SEQ ID NO: 692668 - RNA, 22 nt, Human
aaaacauaaacugacagcccau

SEQ ID NO: 692669 - RNA, 22 nt, Human
ucugugucugguugggccagua

SEQ ID NO: 692670 - RNA, 22 nt, Human
aauugaacaaguaauagaagag

SEQ ID NO: 692671 - RNA, 22 nt, Human
agggcucagggucaccaucugu

SEQ ID NO: 692672 - RNA, 22 nt, Human
uugcaggguugacacugccugc

SEQ ID NO: 692673 - RNA, 22 nt, Human
uuccagugaaacaugaggugug

SEQ ID NO: 692674 - RNA, 22 nt, Human
ucacuccaucuuugcuacuggu

SEQ ID NO: 692675 - RNA, 22 nt, Human
ucugcagaauucgaggaagaaa

SEQ ID NO: 692676 - RNA, 22 nt, Human
cuguggauuuaggcagagcuga

SEQ ID NO: 692677 - RNA, 22 nt, Human
ucucagagauguuagggaagag

SEQ ID NO: 692678 - RNA, 21 nt, Human
ggugacacguggccccgcucu

SEQ ID NO: 692679 - RNA, 22 nt, Human
agggagcuguggucagcucagu

SEQ ID NO: 692680 - RNA, 22 nt, Human
acaugaucccaccugccuauaa

SEQ ID NO: 692681 - RNA, 22 nt, Human
ucaguucugaaguucugccucc

SEQ ID NO: 692682 - RNA, 22 nt, Human
aagcacagauaaaacaggauuc

SEQ ID NO: 692683 - RNA, 22 nt, Human
ugaaaucaguaugucuuucuca

SEQ ID NO: 692684 - RNA, 22 nt, Human
gguuauauaauucagugcuuuc

SEQ ID NO: 692685 - RNA, 22 nt, Human
caggcuggagugcaguugugca

SEQ ID NO: 692686 - RNA, 22 nt, Human
caggcagcaggagcccugcucg

SEQ ID NO: 692687 - RNA, 22 nt, Human
aauuaaaugacaggggaagaug

SEQ ID NO: 692688 - RNA, 22 nt, Human
cuuccagagauagggccucaag

SEQ ID NO: 692689 - RNA, 22 nt, Human
cuucuuguaucugccgccgagc

SEQ ID NO: 692690 - RNA, 22 nt, Human
agacaacugcagagcaaagaau

SEQ ID NO: 692691 - RNA, 22 nt, Human
ugcucuagccuguaaaacauga

SEQ ID NO: 692692 - RNA, 22 nt, Human
acagagaugcaaguguguauuu

SEQ ID NO: 692693 - RNA, 17 nt, Human
ugugacauugggacauu

SEQ ID NO: 692694 - RNA, 22 nt, Human
ucuuuggcuuugccacacccaa

SEQ ID NO: 692695 - RNA, 19 nt, Human
caauucugcaacacugucc

SEQ ID NO: 692696 - RNA, 22 nt, Human
cucaguuucuucauauuguagg

SEQ ID NO: 692697 - RNA, 22 nt, Human
agcagggcuuuggcuggcuuuc

SEQ ID NO: 692698 - RNA, 22 nt, Human
cacacauugguuuuacuccuuu

SEQ ID NO: 692699 - RNA, 22 nt, Human
auguguauuaccucgauuguga

SEQ ID NO: 692700 - RNA, 22 nt, Human
cugaggcacugucagcugaggc

SEQ ID NO: 692701 - RNA, 22 nt, Human
gguuucaacucagcuaguaagg

SEQ ID NO: 692702 - RNA, 22 nt, Human
ucuucauuuuacaggcagaccu

SEQ ID NO: 692703 - RNA, 22 nt, Human
uuucuuucaauucuccuaaugc

SEQ ID NO: 692704 - RNA, 22 nt, Human
caggguggcacaucacagcauu

SEQ ID NO: 692705 - RNA, 22 nt, Human
cuuaacaugggggguaagucug

SEQ ID NO: 692706 - RNA, 22 nt, Human
aucuaaaguguuucaugaaaga

SEQ ID NO: 692707 - RNA, 20 nt, Human
auguagaugaaagcaaaggc

SEQ ID NO: 692708 - RNA, 22 nt, Human
uauuucuuguuauucucguuga

SEQ ID NO: 692709 - RNA, 21 nt, Human
agcauucugcuucuuuccugg

SEQ ID NO: 692710 - RNA, 22 nt, Human
uaauuuugucccccugcacaua

SEQ ID NO: 692711 - RNA, 22 nt, Human
ggcuggcagaggggagucugug

SEQ ID NO: 692712 - RNA, 22 nt, Human
uggaggaggaacuucuuaucuc

SEQ ID NO: 692713 - RNA, 22 nt, Human
agcaucuucaacaggcauuuua

SEQ ID NO: 692714 - RNA, 22 nt, Human
agggacacugaugagaaauucu

SEQ ID NO: 692715 - RNA, 20 nt, Human
uggcuggcuuguauuuccuu

SEQ ID NO: 692716 - RNA, 22 nt, Human
aauguguuuuaugagagaauau

SEQ ID NO: 692717 - RNA, 22 nt, Human
agaagaaaugaggccguucugc

SEQ ID NO: 692718 - RNA, 22 nt, Human
uucucuuugacauuauucaggu

SEQ ID NO: 692719 - RNA, 20 nt, Human
aaguugcagagaguugucuu

SEQ ID NO: 692720 - RNA, 20 nt, Human
acucuggggcucauuagggg

SEQ ID NO: 692721 - RNA, 22 nt, Human
gaguccaguguuuaccaggggu

SEQ ID NO: 692722 - RNA, 22 nt, Human
cauacauuuauacacaucuaug

SEQ ID NO: 692723 - RNA, 22 nt, Human
cugucuuuucuucucauugaug

SEQ ID NO: 692724 - RNA, 22 nt, Human
uagauuuguuuccuucucucca

SEQ ID NO: 692725 - RNA, 22 nt, Human
acaggaggggcaugaaagacgg

SEQ ID NO: 692726 - RNA, 22 nt, Human
gcccucagugaccacugauuca

SEQ ID NO: 692727 - RNA, 22 nt, Human
aggccagacagcuagaaacagg

SEQ ID NO: 692728 - RNA, 22 nt, Human
auacaaaguauuaauccuggau

SEQ ID NO: 692729 - RNA, 19 nt, Human
cccaggaagcggagguugc

SEQ ID NO: 692730 - RNA, 19 nt, Human
cucugcuugguccauaugc

SEQ ID NO: 692731 - RNA, 22 nt, Human
agcagcuagacuucagaaucug

SEQ ID NO: 692732 - RNA, 20 nt, Human
agcugcccuuuucacauguu

SEQ ID NO: 692733 - RNA, 22 nt, Human
ggagaaagcuguaguggaaugu

SEQ ID NO: 692734 - RNA, 22 nt, Human
uacaauauguggccuuuuguga

SEQ ID NO: 692735 - RNA, 22 nt, Human
ucugaaggaaaaggguagauau

SEQ ID NO: 692736 - RNA, 22 nt, Human
aagauacugaugauguaggcua

SEQ ID NO: 692737 - RNA, 22 nt, Human
gggauggacuuggggacuccag

SEQ ID NO: 692738 - RNA, 22 nt, Human
ucagacaggccucuccagccuc

SEQ ID NO: 692739 - RNA, 22 nt, Human
acuucagaguuaguuauagacc

SEQ ID NO: 692740 - RNA, 18 nt, Human
caaagcaggugacagugu

SEQ ID NO: 692741 - RNA, 22 nt, Human
ggaaugcucaguucuuggugcu

SEQ ID NO: 692742 - RNA, 22 nt, Human
uccaggcagucauuaaucucua

SEQ ID NO: 692743 - RNA, 22 nt, Human
uacauguauguuuaucuugaga

SEQ ID NO: 692744 - RNA, 22 nt, Human
uggagguguccaacucgugggu

SEQ ID NO: 692745 - RNA, 23 nt, Human
cccugagcugguccaggcucaac

SEQ ID NO: 692746 - RNA, 22 nt, Human
uacacaugacaguggacugaga

SEQ ID NO: 692747 - RNA, 22 nt, Human
cagcagagcugugugggaaggg

SEQ ID NO: 692748 - RNA, 22 nt, Human
gcuucugucuuagcuaccuccc

SEQ ID NO: 692749 - RNA, 22 nt, Human
gagcugucuggggacucugggu

SEQ ID NO: 692750 - RNA, 22 nt, Human
gugcaaaaguaauugcaguacu

SEQ ID NO: 692751 - RNA, 22 nt, Human
gccuucugauugcuggacugac

SEQ ID NO: 692752 - RNA, 21 nt, Human
ucugugcugccgucaacaucc

SEQ ID NO: 692753 - RNA, 22 nt, Human
aauuucaguaugaaguuucaca

SEQ ID NO: 692754 - RNA, 22 nt, Human
cuugccuuugucuucaaaggcu

SEQ ID NO: 692755 - RNA, 22 nt, Human
ucucagugcagcuugacagaga

SEQ ID NO: 692756 - RNA, 19 nt, Human
accuugggcaagugccuuc

SEQ ID NO: 692757 - RNA, 22 nt, Human
agggagcauugugacauaucac

SEQ ID NO: 692758 - RNA, 22 nt, Human
gggcacaccuugucugagcaca

SEQ ID NO: 692759 - RNA, 20 nt, Human
gugccaggcaagacaggugg

SEQ ID NO: 692760 - RNA, 22 nt, Human
gggcugcuuccuggggaaugcu

SEQ ID NO: 692761 - RNA, 22 nt, Human
uucuggggccccaguguccucg

SEQ ID NO: 692762 - RNA, 22 nt, Human
guuuuccacuggauuguuugga

SEQ ID NO: 692763 - RNA, 22 nt, Human
aaagcacuucaggagcaguuug

SEQ ID NO: 692764 - RNA, 22 nt, Human
gacaggguacgggcuaggcaca

SEQ ID NO: 692765 - RNA, 22 nt, Human
agaagcagacucugaggcaagg

SEQ ID NO: 692766 - RNA, 22 nt, Human
cacagucccgugcuuaccaugu

SEQ ID NO: 692767 - RNA, 22 nt, Human
gcaggguacauugggaugggau

SEQ ID NO: 692768 - RNA, 23 nt, Human
agaaggguccuuggcagcgacag

SEQ ID NO: 692769 - RNA, 22 nt, Human
uauugugaguucagacuaaaaa

SEQ ID NO: 692770 - RNA, 22 nt, Human
cucaagaagagggagaccuaca

SEQ ID NO: 692771 - RNA, 22 nt, Human
ucuaaggacaguuauuacuggg

SEQ ID NO: 692772 - RNA, 22 nt, Human
uggugggggaggcugucuagca

SEQ ID NO: 692773 - RNA, 22 nt, Human
uugugagcaugugcagccucug

SEQ ID NO: 692774 - RNA, 22 nt, Human
uggcuucucuguuuuaguauuu

SEQ ID NO: 692775 - RNA, 22 nt, Human
uguguucauguauguauacaua

SEQ ID NO: 692776 - RNA, 22 nt, Human
uaaauuaugucacaugacucug

SEQ ID NO: 692777 - RNA, 22 nt, Human
uccuggagccaaugugcugcug

SEQ ID NO: 692778 - RNA, 19 nt, Human
uuucugucuguguuuugcc

SEQ ID NO: 692779 - RNA, 22 nt, Human
cugaggcagagggcagaccaga

SEQ ID NO: 692780 - RNA, 22 nt, Human
gucacacuagggccaaguggag

SEQ ID NO: 692781 - RNA, 22 nt, Human
gugggccucuugaggguggcua

SEQ ID NO: 692782 - RNA, 18 nt, Human
ucacaugacagcuguugc

SEQ ID NO: 692783 - RNA, 22 nt, Human
gcacagccagcaucugagggau

SEQ ID NO: 692784 - RNA, 22 nt, Human
agaaagaacgcacuugugcugc

SEQ ID NO: 692785 - RNA, 22 nt, Human
ggcugccuccugcugggcugga

SEQ ID NO: 692786 - RNA, 22 nt, Human
caaacuguaugacccuaggccg

SEQ ID NO: 692787 - RNA, 22 nt, Human
caguggguccuaaguacaguuc

SEQ ID NO: 692788 - RNA, 22 nt, Human
gccgcggcauggcgagcaggac

SEQ ID NO: 692789 - RNA, 22 nt, Human
agaagugaggaaauccucuuua

SEQ ID NO: 692790 - RNA, 22 nt, Human
gugggugauguacuggaggcca

SEQ ID NO: 692791 - RNA, 22 nt, Human
aagaccauaauguaagaugaau

SEQ ID NO: 692792 - RNA, 22 nt, Human
ugggugcaggaugagugcuggc

SEQ ID NO: 692793 - RNA, 22 nt, Human
uuuccuuugggagcaugaauuu

SEQ ID NO: 692794 - RNA, 22 nt, Human
ugagguagaagccuggguugag

SEQ ID NO: 692795 - RNA, 22 nt, Human
ugaggugagucaugcauuggag

SEQ ID NO: 692796 - RNA, 22 nt, Human
gaucuuuucagaauuuaucagu

SEQ ID NO: 692797 - RNA, 20 nt, Human
uaaagcagccguggagggua

SEQ ID NO: 692798 - RNA, 22 nt, Human
aaaugcagauucaugagcccca

SEQ ID NO: 692799 - RNA, 19 nt, Human
ccuuugguuuccaugacau

SEQ ID NO: 692800 - RNA, 22 nt, Human
cagccagggucaggcagcuucu

SEQ ID NO: 692801 - RNA, 22 nt, Human
uugaaagaacaauucugugaug

SEQ ID NO: 692802 - RNA, 22 nt, Human
ucuuccagcuccccacgguguc

SEQ ID NO: 692803 - RNA, 22 nt, Human
agaggcaagauuaucagggcau

SEQ ID NO: 692804 - RNA, 20 nt, Human
uaagcauaguugucaggguc

SEQ ID NO: 692805 - RNA, 22 nt, Human
aagcucaggaaagagucugguu

SEQ ID NO: 692806 - RNA, 22 nt, Human
gcccugucccuuggcuucuagg

SEQ ID NO: 692807 - RNA, 22 nt, Human
cagugguuauacuuacuguuuc

SEQ ID NO: 692808 - RNA, 22 nt, Human
gaccuucaguguguuucucaca

SEQ ID NO: 692809 - RNA, 22 nt, Human
uauuuauguauguggauguguu

SEQ ID NO: 692810 - RNA, 22 nt, Human
aucuacauaaaacgaauacaua

SEQ ID NO: 692811 - RNA, 22 nt, Human
uugagcaggaacuagaagauag

SEQ ID NO: 692812 - RNA, 22 nt, Human
guccuucauggaguuacagccu

SEQ ID NO: 692813 - RNA, 22 nt, Human
cagcucugguuccugggcccag

SEQ ID NO: 692814 - RNA, 22 nt, Human
cucugggacaucccuuggccua

SEQ ID NO: 692815 - RNA, 22 nt, Human
uuaacagagugccuggcaugua

SEQ ID NO: 692816 - RNA, 23 nt, Human
guuuucaacacaauaaauguaac

SEQ ID NO: 692817 - RNA, 22 nt, Human
auguggcagugggaggugaauu

SEQ ID NO: 692818 - RNA, 22 nt, Human
uggcaucucaaacaggcagauu

SEQ ID NO: 692819 - RNA, 22 nt, Human
cuguuuguuggcuauugacagu

SEQ ID NO: 692820 - RNA, 22 nt, Human
uuacuuuaugugauggauuagu

SEQ ID NO: 692821 - RNA, 22 nt, Human
ugucuuuaguugcuuagauuug

SEQ ID NO: 692822 - RNA, 22 nt, Human
uggccaccuucccacuucugcc

SEQ ID NO: 692823 - RNA, 22 nt, Human
cugcacugaagaaaggagcucu

SEQ ID NO: 692824 - RNA, 22 nt, Human
ugugaucuuagacaacucacug

SEQ ID NO: 692825 - RNA, 22 nt, Human
aggcaucuauacauuauguuca

SEQ ID NO: 692826 - RNA, 22 nt, Human
cugggcugauuuagucacguuu

SEQ ID NO: 692827 - RNA, 22 nt, Human
guggcugcagcccagcggcacg

SEQ ID NO: 692828 - RNA, 22 nt, Human
caggcugcagcagcaguggccc

SEQ ID NO: 692829 - RNA, 22 nt, Human
uuucagggaaguguugaaaagg

SEQ ID NO: 692830 - RNA, 22 nt, Human
ucugagaagcuagaggacaaag

SEQ ID NO: 692831 - RNA, 22 nt, Human
augggccacacacgauugggug

SEQ ID NO: 692832 - RNA, 21 nt, Human
gcucaugguggagaaaagcag

SEQ ID NO: 692833 - RNA, 17 nt, Human
uuucuggaaugggcaaa

SEQ ID NO: 692834 - RNA, 23 nt, Human
gaggugugaauucugggugcugc

SEQ ID NO: 692835 - RNA, 22 nt, Human
auaccauggcaguuuauucacg

SEQ ID NO: 692836 - RNA, 17 nt, Human
gcuuuccuugccccucc

SEQ ID NO: 692837 - RNA, 22 nt, Human
acagggcuauauuccucagagc

SEQ ID NO: 692838 - RNA, 22 nt, Human
accaggggaugguuggcacugu

SEQ ID NO: 692839 - RNA, 22 nt, Human
ugacaaagcaugauggugacag

SEQ ID NO: 692840 - RNA, 22 nt, Human
ugcauauuguccuugauauuau

SEQ ID NO: 692841 - RNA, 18 nt, Human
aguaaagcuuauuacaug

SEQ ID NO: 692842 - RNA, 22 nt, Human
ccagcucucugcagaaaggacu

SEQ ID NO: 692843 - RNA, 22 nt, Human
uagaaacccauguuuauucagu

SEQ ID NO: 692844 - RNA, 22 nt, Human
uucucagagcucacuguaguaa

SEQ ID NO: 692845 - RNA, 18 nt, Human
uccuuucaccccuucucu

SEQ ID NO: 692846 - RNA, 22 nt, Human
ucccugccaguccuggucugaa

SEQ ID NO: 692847 - RNA, 22 nt, Human
cuugccuucuuuuccuauagaa

SEQ ID NO: 692848 - RNA, 22 nt, Human
accagucauagaaagcaguggu

SEQ ID NO: 692849 - RNA, 22 nt, Human
cagcaugaucccaguugauugc

SEQ ID NO: 692850 - RNA, 21 nt, Human
gcucagcugcuugguuccugu

SEQ ID NO: 692851 - RNA, 22 nt, Human
gccaggaccucagaugcagggc

SEQ ID NO: 692852 - RNA, 22 nt, Human
ucuuaugcauauucauaacaca

SEQ ID NO: 692853 - RNA, 22 nt, Human
uugcagcugaggaaauugaagc

SEQ ID NO: 692854 - RNA, 22 nt, Human
uacuguaugaauuauguuauuu

SEQ ID NO: 692855 - RNA, 22 nt, Human
aauaauguacauacauauuucg

SEQ ID NO: 692856 - RNA, 16 nt, Human
ugcuccagaggaccca

SEQ ID NO: 692857 - RNA, 22 nt, Human
ggcugggcaggucugcacaggg

SEQ ID NO: 692858 - RNA, 22 nt, Human
gggacacagagaaacuggagaa

SEQ ID NO: 692859 - RNA, 22 nt, Human
uaaggcauucucaugcugugaa

SEQ ID NO: 692860 - RNA, 22 nt, Human
ugcuggaguucgacauugcaaa

SEQ ID NO: 692861 - RNA, 22 nt, Human
uucaugagcagaagggaggggu

SEQ ID NO: 692862 - RNA, 22 nt, Human
ucauaaaguuaucaccaaaucc

SEQ ID NO: 692863 - RNA, 22 nt, Human
uguauaugugcacaugugcuuc

SEQ ID NO: 692864 - RNA, 22 nt, Human
ucuuggucuuucauccuucaac

SEQ ID NO: 692865 - RNA, 22 nt, Human
ucuuucccuguguuagccugua

SEQ ID NO: 692866 - RNA, 22 nt, Human
ucucuguagagacagcacugug

SEQ ID NO: 692867 - RNA, 22 nt, Human
uagaaacagaauaugagugaga

SEQ ID NO: 692868 - RNA, 22 nt, Human
gcagagacuccacugucuugug

SEQ ID NO: 692869 - RNA, 22 nt, Human
aacauacuuguacuaugcauau

SEQ ID NO: 692870 - RNA, 22 nt, Human
agacauuguuggccuauccucu

SEQ ID NO: 692871 - RNA, 16 nt, Human
cacauauauuuauaug

SEQ ID NO: 692872 - RNA, 20 nt, Human
acacuugacaccagaaaugg

SEQ ID NO: 692873 - RNA, 22 nt, Human
uacacugugacaaucaugacag

SEQ ID NO: 692874 - RNA, 22 nt, Human
ucuccaggcccacugauuuaua

SEQ ID NO: 692875 - RNA, 22 nt, Human
aaggagaaaugguagaugugca

SEQ ID NO: 692876 - RNA, 22 nt, Human
aguccaggaguugggugacauu

SEQ ID NO: 692877 - RNA, 22 nt, Human
acugaggauggauaggucauau

SEQ ID NO: 692878 - RNA, 22 nt, Human
auguuucauccacuggccuuuc

SEQ ID NO: 692879 - RNA, 22 nt, Human
auaaagcaagcauaccauuaag

SEQ ID NO: 692880 - RNA, 21 nt, Human
ugcccaccaagcuccacacug

SEQ ID NO: 692881 - RNA, 22 nt, Human
gguuucuagcagagucucuuua

SEQ ID NO: 692882 - RNA, 22 nt, Human
aauauuaguuucucaagagaga

SEQ ID NO: 692883 - RNA, 22 nt, Human
uccagcauucuuagaccucuau

SEQ ID NO: 692884 - RNA, 22 nt, Human
auguggcccagcggucaggcug

SEQ ID NO: 692885 - RNA, 22 nt, Human
uagccucuggaauccuuucucu

SEQ ID NO: 692886 - RNA, 22 nt, Human
augucuguguuaucuguagaau

SEQ ID NO: 692887 - RNA, 22 nt, Human
ccucaggauacaggagccacag

SEQ ID NO: 692888 - RNA, 22 nt, Human
guggccuggcgagcuggcgcgg

SEQ ID NO: 692889 - RNA, 22 nt, Human
ggcuuuauuugcagccauuguu

SEQ ID NO: 692890 - RNA, 22 nt, Human
cccugagcuaccuauguaagca

SEQ ID NO: 692891 - RNA, 20 nt, Human
gcugucuggauuagaagccu

SEQ ID NO: 692892 - RNA, 22 nt, Human
acaaagggggacugcagagggu

SEQ ID NO: 692893 - RNA, 22 nt, Human
ugaaggaaugagggaguggguc

SEQ ID NO: 692894 - RNA, 22 nt, Human
uaaccuuuuuaucuuaccucca

SEQ ID NO: 692895 - RNA, 20 nt, Human
uccaggcagcucagaguguc

SEQ ID NO: 692896 - RNA, 22 nt, Human
aggccaagggcaaagcggagag

SEQ ID NO: 692897 - RNA, 22 nt, Human
uauggguaaauaauaauuuuag

SEQ ID NO: 692898 - RNA, 22 nt, Human
ccccaggcagggccuaacagag

SEQ ID NO: 692899 - RNA, 23 nt, Human
ucugagugauuagccucuggggu

SEQ ID NO: 692900 - RNA, 22 nt, Human
ugagcccugugacugcuuugag

SEQ ID NO: 692901 - RNA, 22 nt, Human
gcuggccugcaaagcccggcug

SEQ ID NO: 692902 - RNA, 22 nt, Human
aggucuggugggcuuuagauug

SEQ ID NO: 692903 - RNA, 22 nt, Human
aaagggcugucaaauaagcaac

SEQ ID NO: 692904 - RNA, 22 nt, Human
ugaaucaugccacugagcuccc

SEQ ID NO: 692905 - RNA, 22 nt, Human
gggcagcacagacagugaaggc

SEQ ID NO: 692906 - RNA, 22 nt, Human
gaugcuuaagauguugguggca

SEQ ID NO: 692907 - RNA, 22 nt, Human
acugcugauauaagaaaagauu

SEQ ID NO: 692908 - RNA, 22 nt, Human
gugcuuuaguucuugcaacugg

SEQ ID NO: 692909 - RNA, 22 nt, Human
aggcugagcugaccugguuugg

SEQ ID NO: 692910 - RNA, 23 nt, Human
uguaugaauaugccacaguuuaa

SEQ ID NO: 692911 - RNA, 22 nt, Human
aaauuguauauuccauuuguau

SEQ ID NO: 692912 - RNA, 22 nt, Human
uuauuauggcaguuuucuaggu

SEQ ID NO: 692913 - RNA, 22 nt, Human
ucccagggacucucugccuucc

SEQ ID NO: 692914 - RNA, 22 nt, Human
ugcuuuuaagaacaaugcugcu

SEQ ID NO: 692915 - RNA, 22 nt, Human
uguuagaauauuguaauauucg

SEQ ID NO: 692916 - RNA, 20 nt, Human
gccacugggcaccagcaggg

SEQ ID NO: 692917 - RNA, 22 nt, Human
auguuagaaucucugaaugugg

SEQ ID NO: 692918 - RNA, 22 nt, Human
ucucuucacauuccuggcaaac

SEQ ID NO: 692919 - RNA, 22 nt, Human
uuacaaugacagguguaucauu

SEQ ID NO: 692920 - RNA, 22 nt, Human
uuauuccaauuucuccuacaaa

SEQ ID NO: 692921 - RNA, 22 nt, Human
caggugcucugcugcagguaag

SEQ ID NO: 692922 - RNA, 22 nt, Human
gaaauguuaugagauauguacu

SEQ ID NO: 692923 - RNA, 22 nt, Human
gcaaugggcacagcccagccca

SEQ ID NO: 692924 - RNA, 22 nt, Human
ucagaagccgggcagguuuugg

SEQ ID NO: 692925 - RNA, 22 nt, Human
uuucagagaaagcccaaagacu

SEQ ID NO: 692926 - RNA, 22 nt, Human
uucugggcucucuuucugugug

SEQ ID NO: 692927 - RNA, 22 nt, Human
auacuguaucacuugugaguga

SEQ ID NO: 692928 - RNA, 22 nt, Human
ugagcaauuaacagagucuaaa

SEQ ID NO: 692929 - RNA, 22 nt, Human
accuucaaguaugugggcugaa

SEQ ID NO: 692930 - RNA, 22 nt, Human
ucugaaauagaagugucuuucu

SEQ ID NO: 692931 - RNA, 22 nt, Human
uuucagagccugcaaucccaau

SEQ ID NO: 692932 - RNA, 22 nt, Human
cuccagaggaugcaggugaggg

SEQ ID NO: 692933 - RNA, 22 nt, Human
agauccaggaugucccaaaaua

SEQ ID NO: 692934 - RNA, 22 nt, Human
uccugagggacugguuccucgc

SEQ ID NO: 692935 - RNA, 22 nt, Human
gaaguggaauuacugggucaua

SEQ ID NO: 692936 - RNA, 22 nt, Human
gcaguccuagggugcucugcag

SEQ ID NO: 692937 - RNA, 22 nt, Human
acaugcauucucuaaaagcaaa

SEQ ID NO: 692938 - RNA, 22 nt, Human
guauuagguuggugcaaaauug

SEQ ID NO: 692939 - RNA, 22 nt, Human
agcuugguggcccuccuggcug

SEQ ID NO: 692940 - RNA, 22 nt, Human
cccugaggauagggcaggaccc

SEQ ID NO: 692941 - RNA, 22 nt, Human
gggagcugcugaacacaagggu

SEQ ID NO: 692942 - RNA, 22 nt, Human
uggaauucccaaguaacuuuua

SEQ ID NO: 692943 - RNA, 22 nt, Human
ugacuuccugcacucaggugau

SEQ ID NO: 692944 - RNA, 22 nt, Human
agugauuuacuaccauauuggg

SEQ ID NO: 692945 - RNA, 18 nt, Human
agauugugucuacaaauc

SEQ ID NO: 692946 - RNA, 22 nt, Human
ucaaaaauguuuuauauuggua

SEQ ID NO: 692947 - RNA, 22 nt, Human
cccugggacccgcugcagaggc

SEQ ID NO: 692948 - RNA, 22 nt, Human
aggucagcaugaguagaaggua

SEQ ID NO: 692949 - RNA, 22 nt, Human
cugaacaucauagaguguacuu

SEQ ID NO: 692950 - RNA, 22 nt, Human
ucuuuacaucacaauuguaugg

SEQ ID NO: 692951 - RNA, 22 nt, Human
cuggcuuuuccuaaacugggaa

SEQ ID NO: 692952 - RNA, 22 nt, Human
gcucuguguugucagaggcacc

SEQ ID NO: 692953 - RNA, 22 nt, Human
augcuuggaugcugccauggga

SEQ ID NO: 692954 - RNA, 22 nt, Human
uucaagauaauaggaaugaaaa

SEQ ID NO: 692955 - RNA, 22 nt, Human
uuuuuccuuggaugugucucuc

SEQ ID NO: 692956 - RNA, 22 nt, Human
gggugggauggcaggagccgcu

SEQ ID NO: 692957 - RNA, 22 nt, Human
aacaauaggcuauaugcuaggc

SEQ ID NO: 692958 - RNA, 22 nt, Human
ccgggccucgggacaccgggua

SEQ ID NO: 692959 - RNA, 22 nt, Human
uggaaggcgcagugaugaugcu

SEQ ID NO: 692960 - RNA, 19 nt, Human
ucuuucauuucuagcucug

SEQ ID NO: 692961 - RNA, 22 nt, Human
ucugcagcuucuugccagagag

SEQ ID NO: 692962 - RNA, 20 nt, Human
gccaggagggugugaugagc

SEQ ID NO: 692963 - RNA, 22 nt, Human
auucuaguguuuccauuacaag

SEQ ID NO: 692964 - RNA, 22 nt, Human
agagcacagaagaauaggugcu

SEQ ID NO: 692965 - RNA, 22 nt, Human
cugguccuugcuacccagcaag

SEQ ID NO: 692966 - RNA, 22 nt, Human
ggugcaugugagaaagacuggg

SEQ ID NO: 692967 - RNA, 22 nt, Human
uuagaaaggcuuauggugccuu

SEQ ID NO: 692968 - RNA, 22 nt, Human
cagagcccuaguccugauggcc

SEQ ID NO: 692969 - RNA, 22 nt, Human
agggaaaggcugaugcuguggg

SEQ ID NO: 692970 - RNA, 22 nt, Human
uuaaauggagggggaaauacgu

SEQ ID NO: 692971 - RNA, 22 nt, Human
ucacaggguaucugggauggau

SEQ ID NO: 692972 - RNA, 18 nt, Human
uccagagguguuggagcc

SEQ ID NO: 692973 - RNA, 22 nt, Human
uuucuucuaagauuucaaacua

SEQ ID NO: 692974 - RNA, 20 nt, Human
acacacuuugaucuugagcc

SEQ ID NO: 692975 - RNA, 22 nt, Human
ccagcugugccuaggagcaggg

SEQ ID NO: 692976 - RNA, 22 nt, Human
aaccagcugagaaugcuucugc

SEQ ID NO: 692977 - RNA, 22 nt, Human
acugcagggcauccuggccaag

SEQ ID NO: 692978 - RNA, 22 nt, Human
gaggggucuuuuguugucaggg

SEQ ID NO: 692979 - RNA, 22 nt, Human
gcuauuuccaaagcugcuguuc

SEQ ID NO: 692980 - RNA, 21 nt, Human
ucaggggcuguguuuuccauc

SEQ ID NO: 692981 - RNA, 22 nt, Human
agaaucucuacucaaguacuug

SEQ ID NO: 692982 - RNA, 22 nt, Human
agaaggcagaugggacggagca

SEQ ID NO: 692983 - RNA, 22 nt, Human
uucucucccaugaagcuucuau

SEQ ID NO: 692984 - RNA, 22 nt, Human
gucugggcucccagggucggcg

SEQ ID NO: 692985 - RNA, 22 nt, Human
gcaaauuaaccaaucaugcucg

SEQ ID NO: 692986 - RNA, 22 nt, Human
auauguauguacgcacauauuc

SEQ ID NO: 692987 - RNA, 22 nt, Human
cauugcacuccacccuaggcaa

SEQ ID NO: 692988 - RNA, 22 nt, Human
uccagcugagguggccucugug

SEQ ID NO: 692989 - RNA, 22 nt, Human
acugggaagcuguuuugcuuuu

SEQ ID NO: 692990 - RNA, 22 nt, Human
gugcugugucuaucaggaauaa

SEQ ID NO: 692991 - RNA, 22 nt, Human
uacagaaaaacuuggaggcuuu

SEQ ID NO: 692992 - RNA, 22 nt, Human
uccaggggcugucuuggaaucu

SEQ ID NO: 692993 - RNA, 22 nt, Human
aaagguuuuauguuuuccacuu

SEQ ID NO: 692994 - RNA, 22 nt, Human
uguaacaaguaauccaugggag

SEQ ID NO: 692995 - RNA, 22 nt, Human
cuccacucaccagaugccagga

SEQ ID NO: 692996 - RNA, 22 nt, Human
gcuuacaaucauuucaguuuag

SEQ ID NO: 692997 - RNA, 22 nt, Human
uaauuuacuugcaaauaacaau

SEQ ID NO: 692998 - RNA, 22 nt, Human
gauguacaaguaaaauaugugu

SEQ ID NO: 692999 - RNA, 22 nt, Human
uuuccugucuuuugugaaggau

SEQ ID NO: 693000 - RNA, 22 nt, Human
gcaguguguuucugagauaugg

SEQ ID NO: 693001 - RNA, 22 nt, Human
aaaccugguggaacggugaaua

SEQ ID NO: 693002 - RNA, 22 nt, Human
auggaagacuaacagaaacaug

SEQ ID NO: 693003 - RNA, 22 nt, Human
acagacauuuaauaaaugcuga

SEQ ID NO: 693004 - RNA, 22 nt, Human
aaugcuacagaagugaucuugg

SEQ ID NO: 693005 - RNA, 21 nt, Human
cuacagaaucgagcauucugg

SEQ ID NO: 693006 - RNA, 22 nt, Human
uccggacucaccugacaauggc

SEQ ID NO: 693007 - RNA, 19 nt, Human
gcugagggccacccagccc

SEQ ID NO: 693008 - RNA, 22 nt, Human
aaagugcucggcgcugguccca

SEQ ID NO: 693009 - RNA, 22 nt, Human
gccuucaguagugucagcugua

SEQ ID NO: 693010 - RNA, 22 nt, Human
uggaugagaaacucuggugacu

SEQ ID NO: 693011 - RNA, 23 nt, Human
uucuuuggaauugggcugcaagg

SEQ ID NO: 693012 - RNA, 22 nt, Human
agauauacagagaauuauucac

SEQ ID NO: 693013 - RNA, 22 nt, Human
ccagccuucugagcugccugga

SEQ ID NO: 693014 - RNA, 22 nt, Human
ccauccugaauggucucagcca

SEQ ID NO: 693015 - RNA, 22 nt, Human
agggcagcuuccauagucuggc

SEQ ID NO: 693016 - RNA, 18 nt, Human
uugauucauauuaaccau

SEQ ID NO: 693017 - RNA, 22 nt, Human
ugaaauaggaaacagauguuuc

SEQ ID NO: 693018 - RNA, 22 nt, Human
agaggaguauuuucuaagggaa

SEQ ID NO: 693019 - RNA, 18 nt, Human
gggaggccccagcaggag

SEQ ID NO: 693020 - RNA, 22 nt, Human
gaagccacagggaaggagaaca

SEQ ID NO: 693021 - RNA, 22 nt, Human
acauaugauauugaggaucuca

SEQ ID NO: 693022 - RNA, 22 nt, Human
caggcagaguuagagcaacugg

SEQ ID NO: 693023 - RNA, 22 nt, Human
ucucugggugauggcagggcac

SEQ ID NO: 693024 - RNA, 22 nt, Human
acauguuuaaguuuaaugaaaa

SEQ ID NO: 693025 - RNA, 22 nt, Human
cagggauucagcugaaggaggc

SEQ ID NO: 693026 - RNA, 19 nt, Human
uuaaagugcgagaagucuu

SEQ ID NO: 693027 - RNA, 21 nt, Human
ucauggaaguaacaaacauau

SEQ ID NO: 693028 - RNA, 22 nt, Human
uuuuacaggucauagguauagu

SEQ ID NO: 693029 - RNA, 22 nt, Human
gggcagcauucugugggcaggu

SEQ ID NO: 693030 - RNA, 22 nt, Human
caccagcaccagcucugugccu

SEQ ID NO: 693031 - RNA, 22 nt, Human
guagaucaugagaauguuuuug

SEQ ID NO: 693032 - RNA, 22 nt, Human
gcagagcucuguucuuaucucc

SEQ ID NO: 693033 - RNA, 22 nt, Human
cuuccugcauggagucugaaug

SEQ ID NO: 693034 - RNA, 22 nt, Human
ugaaauagacacagugcuauac

SEQ ID NO: 693035 - RNA, 22 nt, Human
aaguucaaguguaaucuuuauu

SEQ ID NO: 693036 - RNA, 22 nt, Human
cucccaagggguaagggagcug

SEQ ID NO: 693037 - RNA, 22 nt, Human
accuggcauaagggcuugaguc

SEQ ID NO: 693038 - RNA, 22 nt, Human
gcaagaguggaacaaaggcagc

SEQ ID NO: 693039 - RNA, 22 nt, Human
uuacagaguggucuggcuaugu

SEQ ID NO: 693040 - RNA, 22 nt, Human
uggcucaucuuuuuagacuuau

SEQ ID NO: 693041 - RNA, 22 nt, Human
gcugaccauuaggaggacgaua

SEQ ID NO: 693042 - RNA, 22 nt, Human
uuuugcagaaugggaagguagu

SEQ ID NO: 693043 - RNA, 22 nt, Human
uuccugcccugccugugccacu

SEQ ID NO: 693044 - RNA, 22 nt, Human
aauuuccugggauaaaaagcca

SEQ ID NO: 693045 - RNA, 22 nt, Human
ucgggcucgcucuccuagcgga

SEQ ID NO: 693046 - RNA, 22 nt, Human
gcuggcuucccuaccugcaccu

SEQ ID NO: 693047 - RNA, 18 nt, Human
uggcuucuauuuuacuca

SEQ ID NO: 693048 - RNA, 22 nt, Human
uucuuuuccuguggcucaucca

SEQ ID NO: 693049 - RNA, 22 nt, Human
guccuuggcacccaugugauuc

SEQ ID NO: 693050 - RNA, 18 nt, Human
uggcuucugcuagcugga

SEQ ID NO: 693051 - RNA, 22 nt, Human
uggcucuguuuuaugaguacca

SEQ ID NO: 693052 - RNA, 22 nt, Human
gagugugggcacgggggccuug

SEQ ID NO: 693053 - RNA, 22 nt, Human
gcagcuggcccugacacgcaga

SEQ ID NO: 693054 - RNA, 22 nt, Human
agacucaagacugcagaagacg

SEQ ID NO: 693055 - RNA, 22 nt, Human
cuggccccagaguuucacuugg

SEQ ID NO: 693056 - RNA, 22 nt, Human
gaauuuaagaggaugaaucugu

SEQ ID NO: 693057 - RNA, 22 nt, Human
ggugggcgacugagagggguuu

SEQ ID NO: 693058 - RNA, 22 nt, Human
aagaccuugucuaaacauguag

SEQ ID NO: 693059 - RNA, 22 nt, Human
aaaauggcuguggucuggcaag

SEQ ID NO: 693060 - RNA, 17 nt, Human
ugcgaugucuguguuug

SEQ ID NO: 693061 - RNA, 22 nt, Human
caaaagcagcaaguuuauaugu

SEQ ID NO: 693062 - RNA, 22 nt, Human
cauuauggcagccaggauauug

SEQ ID NO: 693063 - RNA, 23 nt, Human
caguggagacucaugcuuccuua

SEQ ID NO: 693064 - RNA, 19 nt, Human
uggcuggagaucugcuacu

SEQ ID NO: 693065 - RNA, 22 nt, Human
uuguuuaagccacccaaucugu

SEQ ID NO: 693066 - RNA, 22 nt, Human
ugagaaggaaacaauggcuuuu

SEQ ID NO: 693067 - RNA, 22 nt, Human
aggccgccuggggagaggcccu

SEQ ID NO: 693068 - RNA, 22 nt, Human
ccuuggguuccaagucacugaa

SEQ ID NO: 693069 - RNA, 22 nt, Human
ccagccuugcaccgagccagcc

SEQ ID NO: 693070 - RNA, 22 nt, Human
uggaggauuccacuuacaugag

SEQ ID NO: 693071 - RNA, 22 nt, Human
caguaacacaaccacuccguga

SEQ ID NO: 693072 - RNA, 22 nt, Human
guggagcaaucagagggucagu

SEQ ID NO: 693073 - RNA, 22 nt, Human
aaacacauuuuaggaaaaucua

SEQ ID NO: 693074 - RNA, 22 nt, Human
gaauauuuuuaaagggacuaau

SEQ ID NO: 693075 - RNA, 22 nt, Human
gucauucaaacuguaucacuug

SEQ ID NO: 693076 - RNA, 22 nt, Human
ugucauuuucauccuaaggagc

SEQ ID NO: 693077 - RNA, 19 nt, Human
ccagaggacuguuaaugaa

SEQ ID NO: 693078 - RNA, 22 nt, Human
ugagcuacacacuaggcauggg

SEQ ID NO: 693079 - RNA, 22 nt, Human
cacaggacucgacugcagacag

SEQ ID NO: 693080 - RNA, 22 nt, Human
uccuggccuugcgucuugggag

SEQ ID NO: 693081 - RNA, 22 nt, Human
agcuccugaaaauccagacugg

SEQ ID NO: 693082 - RNA, 22 nt, Human
ucacagcaccaggaucucucca

SEQ ID NO: 693083 - RNA, 22 nt, Human
gugaauuaggacaaaagggcuu

SEQ ID NO: 693084 - RNA, 22 nt, Human
ucccuggagguguuugcucagg

SEQ ID NO: 693085 - RNA, 22 nt, Human
cauggccaggccaagagaguac

SEQ ID NO: 693086 - RNA, 22 nt, Human
auauuaaugggauuuagucagg

SEQ ID NO: 693087 - RNA, 18 nt, Human
gaucucugcagugccuac

SEQ ID NO: 693088 - RNA, 22 nt, Human
gcugccugaucauacaccaggg

SEQ ID NO: 693089 - RNA, 22 nt, Human
acaaaugacucaaacaccacuu

SEQ ID NO: 693090 - RNA, 23 nt, Human
agcuccugaggccagccucuccu

SEQ ID NO: 693091 - RNA, 22 nt, Human
uggagcuguagccaccacccug

SEQ ID NO: 693092 - RNA, 22 nt, Human
uaggaagauaaacauuuguaug

SEQ ID NO: 693093 - RNA, 22 nt, Human
gccacaggcacuuaagggcugg

SEQ ID NO: 693094 - RNA, 22 nt, Human
augcacaggaaguguccccauu

SEQ ID NO: 693095 - RNA, 22 nt, Human
auacaaagacaaaucucaaucu

SEQ ID NO: 693096 - RNA, 22 nt, Human
aaaugcucuccaaaaugaaagu

SEQ ID NO: 693097 - RNA, 22 nt, Human
aggagguugccagucugggggu

SEQ ID NO: 693098 - RNA, 18 nt, Human
ucuuuuccuuccacuucc

SEQ ID NO: 693099 - RNA, 22 nt, Human
uacaucaaaucaauguuccagu

SEQ ID NO: 693100 - RNA, 22 nt, Human
auuuuaguuuuagcauccaugc

SEQ ID NO: 693101 - RNA, 22 nt, Human
cugcuuuaacaaggcugaucag

SEQ ID NO: 693102 - RNA, 22 nt, Human
cagccuucgacaguuggaguag

SEQ ID NO: 693103 - RNA, 22 nt, Human
agguacagcaauauaagagguc

SEQ ID NO: 693104 - RNA, 22 nt, Human
gaggcagugaacaauuccugug

SEQ ID NO: 693105 - RNA, 22 nt, Human
uggaccugaagaauaggaagua

SEQ ID NO: 693106 - RNA, 18 nt, Human
ggcuguggacaagauuag

SEQ ID NO: 693107 - RNA, 22 nt, Human
ccucaaaguagagggagaugag

SEQ ID NO: 693108 - RNA, 20 nt, Human
gaaaccagaacgcagcccug

SEQ ID NO: 693109 - RNA, 22 nt, Human
uaaacaaggguuacugagcaug

SEQ ID NO: 693110 - RNA, 22 nt, Human
auucaguuagaucauccuaauu

SEQ ID NO: 693111 - RNA, 21 nt, Human
ggcagugaugugaagugcauc

SEQ ID NO: 693112 - RNA, 22 nt, Human
agugcuguuggauaaugcuguc

SEQ ID NO: 693113 - RNA, 22 nt, Human
uucaaacacagacagcagcaug

SEQ ID NO: 693114 - RNA, 22 nt, Human
augaggccuaucuuggcagagg

SEQ ID NO: 693115 - RNA, 22 nt, Human
uguauguauguauguauuuggg

SEQ ID NO: 693116 - RNA, 22 nt, Human
uugaggucucuacagaagagug

SEQ ID NO: 693117 - RNA, 22 nt, Human
ggccccaggccuuuggucuggc

SEQ ID NO: 693118 - RNA, 22 nt, Human
uuauuacuguauuaauccagag

SEQ ID NO: 693119 - RNA, 19 nt, Human
cuucuggcccugagccacc

SEQ ID NO: 693120 - RNA, 22 nt, Human
uaguuacagugcauagcaagau

SEQ ID NO: 693121 - RNA, 21 nt, Human
guuuagaaguagucuggcuca

SEQ ID NO: 693122 - RNA, 22 nt, Human
agccacagcgaaccucucuucc

SEQ ID NO: 693123 - RNA, 22 nt, Human
agccccucuguggcucugccuc

SEQ ID NO: 693124 - RNA, 22 nt, Human
cagcuuuaggacucauaauaaa

SEQ ID NO: 693125 - RNA, 22 nt, Human
gaaggcuggggcaucagugaaa

SEQ ID NO: 693126 - RNA, 22 nt, Human
aacaguaguggucaauaugcca

SEQ ID NO: 693127 - RNA, 22 nt, Human
aaaaggaggacaugguuacaga

SEQ ID NO: 693128 - RNA, 22 nt, Human
guuucauuaccugacccaugag

SEQ ID NO: 693129 - RNA, 22 nt, Human
uggugcaggccaagcugcgagc

SEQ ID NO: 693130 - RNA, 22 nt, Human
aagggagccaagaaagcagggc

SEQ ID NO: 693131 - RNA, 22 nt, Human
cacaggagaaaggggaagcucg

SEQ ID NO: 693132 - RNA, 22 nt, Human
ggaggugcagaguaggguuggu

SEQ ID NO: 693133 - RNA, 22 nt, Human
cuccagaggcgacuugcaucac

SEQ ID NO: 693134 - RNA, 22 nt, Human
aaaaguuaccucuguaauauaa

SEQ ID NO: 693135 - RNA, 22 nt, Human
uggucucuucuuccaagauggc

SEQ ID NO: 693136 - RNA, 22 nt, Human
uucauggaucaugccuuuugug

SEQ ID NO: 693137 - RNA, 22 nt, Human
ugcuuucuguuuuucauauaau

SEQ ID NO: 693138 - RNA, 22 nt, Human
ucugugcagucagggcucaguc

SEQ ID NO: 693139 - RNA, 22 nt, Human
ccacaucuguucuuaguucuga

SEQ ID NO: 693140 - RNA, 22 nt, Human
gucauuuuuuucguaauagugg

SEQ ID NO: 693141 - RNA, 22 nt, Human
aaggagaguacaggaguuggua

SEQ ID NO: 693142 - RNA, 22 nt, Human
acuuccuggauucccaagggcu

SEQ ID NO: 693143 - RNA, 22 nt, Human
gcugccugccugcauuuaaucc

SEQ ID NO: 693144 - RNA, 22 nt, Human
ucagaguccuuuggccugacag

SEQ ID NO: 693145 - RNA, 22 nt, Human
caggcagauuugcugcccucca

SEQ ID NO: 693146 - RNA, 18 nt, Human
gccugagggucaagugug

SEQ ID NO: 693147 - RNA, 22 nt, Human
uuguauuuuguuaugcuacugc

SEQ ID NO: 693148 - RNA, 22 nt, Human
cugcaagauuggaagaugcaau

SEQ ID NO: 693149 - RNA, 22 nt, Human
aguggccagugcugcucugggg

SEQ ID NO: 693150 - RNA, 22 nt, Human
cuugaauguccuguggcaaagu

SEQ ID NO: 693151 - RNA, 20 nt, Human
ggcagagcuaugucuguugc

SEQ ID NO: 693152 - RNA, 16 nt, Human
cuggucuugcugccga

SEQ ID NO: 693153 - RNA, 22 nt, Human
gguggcagggagugucccuggg

SEQ ID NO: 693154 - RNA, 22 nt, Human
uuccucacacucccccauucga

SEQ ID NO: 693155 - RNA, 22 nt, Human
uuggaucuuaugaagguggcau

SEQ ID NO: 693156 - RNA, 22 nt, Human
cauguuuuguguacagaauauu

SEQ ID NO: 693157 - RNA, 22 nt, Human
ccaggcuggagugcaauggugc

SEQ ID NO: 693158 - RNA, 22 nt, Human
augaugguuguccuaggugcau

SEQ ID NO: 693159 - RNA, 20 nt, Human
aggcaucugagucacaucuu

SEQ ID NO: 693160 - RNA, 22 nt, Human
gagguucugggggucugccugg

SEQ ID NO: 693161 - RNA, 22 nt, Human
uccagagauaacuauuuaggag

SEQ ID NO: 693162 - RNA, 22 nt, Human
ggccugccucacagucagcacc

SEQ ID NO: 693163 - RNA, 20 nt, Human
ucauacacaugagcaugcag

SEQ ID NO: 693164 - RNA, 22 nt, Human
gcugggcuugguuucccugcuu

SEQ ID NO: 693165 - RNA, 22 nt, Human
gcaucuaaauaaacgugggagu

SEQ ID NO: 693166 - RNA, 22 nt, Human
ggccagcugcucagugucucug

SEQ ID NO: 693167 - RNA, 22 nt, Human
ugaauuguacaguaugugaauu

SEQ ID NO: 693168 - RNA, 22 nt, Human
uccugggcgauuuucugaauau

SEQ ID NO: 693169 - RNA, 22 nt, Human
gaaacaugucugacaauuuacc

SEQ ID NO: 693170 - RNA, 22 nt, Human
caacuuggcucucuggcuaucc

SEQ ID NO: 693171 - RNA, 22 nt, Human
ggguucagacuaaagcuaugca

SEQ ID NO: 693172 - RNA, 22 nt, Human
acccugagggaugagaguugca

SEQ ID NO: 693173 - RNA, 22 nt, Human
uuaacacaucccugcucuaccc

SEQ ID NO: 693174 - RNA, 22 nt, Human
agauuuauguggucacacucag

SEQ ID NO: 693175 - RNA, 22 nt, Human
ggcagugccacuaagcucugcu

SEQ ID NO: 693176 - RNA, 22 nt, Human
uggcuggagucuggugcuagcc

SEQ ID NO: 693177 - RNA, 22 nt, Human
ccuggcuccgugucacgugccc

SEQ ID NO: 693178 - RNA, 22 nt, Human
caggaaaauggaaucaccugua

SEQ ID NO: 693179 - RNA, 22 nt, Human
ugcaggcuuggaucacaucucc

SEQ ID NO: 693180 - RNA, 22 nt, Human
ucuuuguaaaugccuagcauaa

SEQ ID NO: 693181 - RNA, 20 nt, Human
gauaaauugucucuuaagug

SEQ ID NO: 693182 - RNA, 22 nt, Human
aaaaguaauugugguuuuugcc

SEQ ID NO: 693183 - RNA, 22 nt, Human
agagcuggugcauauucagaaa

SEQ ID NO: 693184 - RNA, 22 nt, Human
uugggagauggggagauaauau

SEQ ID NO: 693185 - RNA, 22 nt, Human
agcucagcuuccucuccaugcu

SEQ ID NO: 693186 - RNA, 19 nt, Human
auauacauacugugugcau

SEQ ID NO: 693187 - RNA, 22 nt, Human
ucugcaagggcacagccaaccc

SEQ ID NO: 693188 - RNA, 22 nt, Human
gcagguggauuaucagaagugc

SEQ ID NO: 693189 - RNA, 22 nt, Human
ucuguaaacaccauguuagagu

SEQ ID NO: 693190 - RNA, 22 nt, Human
aaacucuaaucaaauauagcau

SEQ ID NO: 693191 - RNA, 22 nt, Human
auacauguugagaaaauaucug

SEQ ID NO: 693192 - RNA, 22 nt, Human
caauugcuuuguggaagccuuu

SEQ ID NO: 693193 - RNA, 22 nt, Human
acagugugugcuuucccuuacg

SEQ ID NO: 693194 - RNA, 22 nt, Human
guaucuuuugguggaaaaauaa

SEQ ID NO: 693195 - RNA, 22 nt, Human
cauguaaagaauuucacacaag

SEQ ID NO: 693196 - RNA, 22 nt, Human
gguggcugcacccuggcuaacu

SEQ ID NO: 693197 - RNA, 22 nt, Human
ucuucagagugagcagugucau

SEQ ID NO: 693198 - RNA, 17 nt, Human
agcaggaccccagagca

SEQ ID NO: 693199 - RNA, 22 nt, Human
aggcuggacccgacaccugccc

SEQ ID NO: 693200 - RNA, 22 nt, Human
uggagagcgcgacgggaggaag

SEQ ID NO: 693201 - RNA, 22 nt, Human
aaacacaauguuucuuuguucu

SEQ ID NO: 693202 - RNA, 22 nt, Human
uuuuccuguccaggcaauuauu

SEQ ID NO: 693203 - RNA, 22 nt, Human
ucuggagcuggcagggcccugg

SEQ ID NO: 693204 - RNA, 22 nt, Human
uuugguuugaaugagcauaaga

SEQ ID NO: 693205 - RNA, 22 nt, Human
ucaaguuaggugguuguuagga

SEQ ID NO: 693206 - RNA, 20 nt, Human
auggagguggaugugacugc

SEQ ID NO: 693207 - RNA, 22 nt, Human
cuauuucagcugccuuugacug

SEQ ID NO: 693208 - RNA, 17 nt, Human
gaguaguuacaacagac

SEQ ID NO: 693209 - RNA, 22 nt, Human
ccagagaguaaacauuuuccgg

SEQ ID NO: 693210 - RNA, 22 nt, Human
cacugagcaugagugggcugug

SEQ ID NO: 693211 - RNA, 20 nt, Human
augugaaguaggaagggugu

SEQ ID NO: 693212 - RNA, 22 nt, Human
augacaugaccugguagagaca

SEQ ID NO: 693213 - RNA, 22 nt, Human
uccgcccgcacguauggagugg

SEQ ID NO: 693214 - RNA, 22 nt, Human
cuuuggcuugcccuggcaguac

SEQ ID NO: 693215 - RNA, 22 nt, Human
uagggcucugagaguucagccu

SEQ ID NO: 693216 - RNA, 22 nt, Human
ccauuaaacuuguggacccagu

SEQ ID NO: 693217 - RNA, 22 nt, Human
ugugugugcacaugcauauaca

SEQ ID NO: 693218 - RNA, 22 nt, Human
uaugcauauauuuucccaucuu

SEQ ID NO: 693219 - RNA, 22 nt, Human
uuggcccuagacucuaaguccg

SEQ ID NO: 693220 - RNA, 22 nt, Human
agugcucugucauuggugggau

SEQ ID NO: 693221 - RNA, 22 nt, Human
gguccuggaugagacagguagu

SEQ ID NO: 693222 - RNA, 22 nt, Human
uguuauuugggaaaguuguaca

SEQ ID NO: 693223 - RNA, 22 nt, Human
ucugucuuugucaggaccagag

SEQ ID NO: 693224 - RNA, 22 nt, Human
aaaguugugguuugaugcaguu

SEQ ID NO: 693225 - RNA, 22 nt, Human
uucauucaaagaggcauccaag

SEQ ID NO: 693226 - RNA, 22 nt, Human
uucauugugauucuuggcuagc

SEQ ID NO: 693227 - RNA, 22 nt, Human
ccacagugguucucaaccaggg

SEQ ID NO: 693228 - RNA, 21 nt, Human
ggcuuugcucagcuuaccaaa

SEQ ID NO: 693229 - RNA, 22 nt, Human
gcuguggcuccaauggugagcc

SEQ ID NO: 693230 - RNA, 22 nt, Human
ccuagagcucugcuuuaucuaa

SEQ ID NO: 693231 - RNA, 22 nt, Human
ugacacaaaggaaagcauaauc

SEQ ID NO: 693232 - RNA, 22 nt, Human
ugaucuuuuuggucauuugggu

SEQ ID NO: 693233 - RNA, 22 nt, Human
aagaaagccaaaguucauaccu

SEQ ID NO: 693234 - RNA, 20 nt, Human
uucuacaaaacugauucuga

SEQ ID NO: 693235 - RNA, 22 nt, Human
acgggccuucucuucaggcgag

SEQ ID NO: 693236 - RNA, 22 nt, Human
acucagagcuuggcuccuugcu

SEQ ID NO: 693237 - RNA, 22 nt, Human
uugcagacuuacuucgagaaau

SEQ ID NO: 693238 - RNA, 22 nt, Human
acaugcuagguacagaucuaaa

SEQ ID NO: 693239 - RNA, 22 nt, Human
aaauaugauacucccuuuuagu

SEQ ID NO: 693240 - RNA, 22 nt, Human
uaaaucacauucgucugcuccu

SEQ ID NO: 693241 - RNA, 22 nt, Human
gccagcugacaccuugauuuug

SEQ ID NO: 693242 - RNA, 21 nt, Human
aaauucaccuaguaaaacuuc

SEQ ID NO: 693243 - RNA, 22 nt, Human
auguacauuuguaguaauauca

SEQ ID NO: 693244 - RNA, 22 nt, Human
agaggaauguauuucccugcaa

SEQ ID NO: 693245 - RNA, 18 nt, Human
uguggcugguccacacug

SEQ ID NO: 693246 - RNA, 21 nt, Human
aucauucuggaaaauucaagc

SEQ ID NO: 693247 - RNA, 22 nt, Human
caggucuguauuaacagagggu

SEQ ID NO: 693248 - RNA, 22 nt, Human
cugccugugccaaugcuccuuu

SEQ ID NO: 693249 - RNA, 22 nt, Human
gacaucugaauauuagagagaa

SEQ ID NO: 693250 - RNA, 22 nt, Human
gauguguaacaugcugugacau

SEQ ID NO: 693251 - RNA, 22 nt, Human
cagaacagggcccaaggggucg

SEQ ID NO: 693252 - RNA, 22 nt, Human
guuuuacacaccuaugaaagac

SEQ ID NO: 693253 - RNA, 22 nt, Human
uagcugccuuugggcuccugcu

SEQ ID NO: 693254 - RNA, 22 nt, Human
ucugggcagccaugugccuggc

SEQ ID NO: 693255 - RNA, 22 nt, Human
ccagcucccauucuucaccugu

SEQ ID NO: 693256 - RNA, 22 nt, Human
gggagagagagcucauguugaa

SEQ ID NO: 693257 - RNA, 22 nt, Human
accaaaaccugcuacuaaagga

SEQ ID NO: 693258 - RNA, 22 nt, Human
uucaugaauguuccaugugagu

SEQ ID NO: 693259 - RNA, 22 nt, Human
uuuaucuguuguacauuuaugc

SEQ ID NO: 693260 - RNA, 22 nt, Human
ucuggaauagguccugaguauu

SEQ ID NO: 693261 - RNA, 22 nt, Human
ggagaaggcacacccaccucug

SEQ ID NO: 693262 - RNA, 22 nt, Human
augaggcaugugaggagaaggg

SEQ ID NO: 693263 - RNA, 22 nt, Human
acaaaauagaguucuccccugg

SEQ ID NO: 693264 - RNA, 19 nt, Human
uaaggccaaaaguaagugu

SEQ ID NO: 693265 - RNA, 22 nt, Human
gcccugucggaacugcgaccuc

SEQ ID NO: 693266 - RNA, 22 nt, Human
aaauuccaccagaaucaguaau

SEQ ID NO: 693267 - RNA, 22 nt, Human
acaacuuuucuaucauguggaa

SEQ ID NO: 693268 - RNA, 22 nt, Human
aaguguauauaugacuuauaaa

SEQ ID NO: 693269 - RNA, 22 nt, Human
uucagaaaaaacuucaauaagu

SEQ ID NO: 693270 - RNA, 22 nt, Human
uucacagggcagaucauuucug

SEQ ID NO: 693271 - RNA, 22 nt, Human
uaaauuuacccaaggaacaugu

SEQ ID NO: 693272 - RNA, 22 nt, Human
ugcuuugccagacaguucccuu

SEQ ID NO: 693273 - RNA, 22 nt, Human
uauaccaaaaaaauucuugucu

SEQ ID NO: 693274 - RNA, 22 nt, Human
ugucaaagcaaggauuaaaugu

SEQ ID NO: 693275 - RNA, 22 nt, Human
gcuaagaggcuauaucuuucuc

SEQ ID NO: 693276 - RNA, 22 nt, Human
gauggcuuugugcaccaugauu

SEQ ID NO: 693277 - RNA, 21 nt, Human
acacacucugagucuucuauu

SEQ ID NO: 693278 - RNA, 22 nt, Human
ggagcccuccaucccuugcggc

SEQ ID NO: 693279 - RNA, 22 nt, Human
uguguaugucuguaugcacaca

SEQ ID NO: 693280 - RNA, 22 nt, Human
cagccuggccugggacugcuga

SEQ ID NO: 693281 - RNA, 23 nt, Human
ugaagcccagugauuuuguuuca

SEQ ID NO: 693282 - RNA, 22 nt, Human
agacuaagcgguucuuuucaau

SEQ ID NO: 693283 - RNA, 22 nt, Human
agggaggcaggaaaguugucug

SEQ ID NO: 693284 - RNA, 22 nt, Human
cugcuggguuugccuuucacca

SEQ ID NO: 693285 - RNA, 23 nt, Human
agucagagagugugagacaacug

SEQ ID NO: 693286 - RNA, 22 nt, Human
uaagcauucaaugcuuagcacu

SEQ ID NO: 693287 - RNA, 22 nt, Human
aagauccuucucacugcagugu

SEQ ID NO: 693288 - RNA, 22 nt, Human
ucugaggaguugggccagugcu

SEQ ID NO: 693289 - RNA, 22 nt, Human
acuaaauagccucugguaguug

SEQ ID NO: 693290 - RNA, 22 nt, Human
ugcaaacaccacagagacaauu

SEQ ID NO: 693291 - RNA, 22 nt, Human
gccuuggcuguuggagcuugau

SEQ ID NO: 693292 - RNA, 22 nt, Human
agagagcuuccauucuagugau

SEQ ID NO: 693293 - RNA, 20 nt, Human
ggguccugacuuggucuccu

SEQ ID NO: 693294 - RNA, 20 nt, Human
uguuucauaagcuguccuau

SEQ ID NO: 693295 - RNA, 22 nt, Human
ggcaaaggaaaacgucucagcu

SEQ ID NO: 693296 - RNA, 22 nt, Human
ugcuccuggacuggugugagau

SEQ ID NO: 693297 - RNA, 22 nt, Human
ccagaagcaaaacagacaguuu

SEQ ID NO: 693298 - RNA, 22 nt, Human
ucagcuuugggggucucaggag

SEQ ID NO: 693299 - RNA, 22 nt, Human
cugcuuugauuagaagaguaca

SEQ ID NO: 693300 - RNA, 22 nt, Human
uggcagaugugguuugagacag

SEQ ID NO: 693301 - RNA, 22 nt, Human
uacuaggaagcagcugcauugg

SEQ ID NO: 693302 - RNA, 22 nt, Human
gagcuccagggaacagcagcua

SEQ ID NO: 693303 - RNA, 23 nt, Human
agcuccagggaacaggcaguagg

SEQ ID NO: 693304 - RNA, 22 nt, Human
caugggcuacagaagcaugcug

SEQ ID NO: 693305 - RNA, 22 nt, Human
aaaaguauuuugagcacuuuau

SEQ ID NO: 693306 - RNA, 22 nt, Human
ucugaaagcauuacaguuuauu

SEQ ID NO: 693307 - RNA, 22 nt, Human
uacaguaacauguuguacaagc

SEQ ID NO: 693308 - RNA, 22 nt, Human
augcaacaccccuauggaugga

SEQ ID NO: 693309 - RNA, 22 nt, Human
auucacaugugcuucuuaucac

SEQ ID NO: 693310 - RNA, 22 nt, Human
agaagccacuggagguugagau

SEQ ID NO: 693311 - RNA, 22 nt, Human
ggagcuguagaucagcuaaucu

SEQ ID NO: 693312 - RNA, 22 nt, Human
aaacauagauaauagauagaug

SEQ ID NO: 693313 - RNA, 22 nt, Human
agggccugagaccguggcuuga

SEQ ID NO: 693314 - RNA, 22 nt, Human
gaaauguauuugacaguccuug

SEQ ID NO: 693315 - RNA, 20 nt, Human
auaaccugcccagaggauga

SEQ ID NO: 693316 - RNA, 22 nt, Human
agaaucaaagagaaauacuuug

SEQ ID NO: 693317 - RNA, 20 nt, Human
ggaaggggcaaaguguguga

SEQ ID NO: 693318 - RNA, 21 nt, Human
ucacagagccacagaauuggu

SEQ ID NO: 693319 - RNA, 20 nt, Human
uauuucugggcaaccauuua

SEQ ID NO: 693320 - RNA, 22 nt, Human
ugaagcugugggcaguggagcc

SEQ ID NO: 693321 - RNA, 22 nt, Human
caguuucuuaucuucaaaauug

SEQ ID NO: 693322 - RNA, 23 nt, Human
ugaaggcccuggagccacgaggc

SEQ ID NO: 693323 - RNA, 22 nt, Human
uuaccaagcucugcauguuaag

SEQ ID NO: 693324 - RNA, 22 nt, Human
uaagcuucaaagaacauauugg

SEQ ID NO: 693325 - RNA, 22 nt, Human
ccugucuguauugguuugcuau

SEQ ID NO: 693326 - RNA, 22 nt, Human
gagguucaggaaaugggcaaag

SEQ ID NO: 693327 - RNA, 22 nt, Human
ugucagugaguuaguugcaagu

SEQ ID NO: 693328 - RNA, 22 nt, Human
gcagcuuuagaaacaagggcug

SEQ ID NO: 693329 - RNA, 22 nt, Human
ggccugugagcccuugcaugua

SEQ ID NO: 693330 - RNA, 22 nt, Human
uccccagaggugaggcagcuuu

SEQ ID NO: 693331 - RNA, 22 nt, Human
ggcuagaugguauauaaggaug

SEQ ID NO: 693332 - RNA, 22 nt, Human
uccuggguuaauuaugauucac

SEQ ID NO: 693333 - RNA, 22 nt, Human
auucaagguauuuaaaacauaa

SEQ ID NO: 693334 - RNA, 22 nt, Human
gaaaucugaacaacagcuguca

SEQ ID NO: 693335 - RNA, 22 nt, Human
ggauccuuaacuaucacaguga

SEQ ID NO: 693336 - RNA, 22 nt, Human
ugcccuccuccugagcccaugu

SEQ ID NO: 693337 - RNA, 22 nt, Human
uccuagagaguaauacaguuuu

SEQ ID NO: 693338 - RNA, 22 nt, Human
ugggcgaggagaaugcugugaa

SEQ ID NO: 693339 - RNA, 22 nt, Human
augucuugauauuuuacuguuu

SEQ ID NO: 693340 - RNA, 22 nt, Human
cagacauggaaauuuaguguua

SEQ ID NO: 693341 - RNA, 22 nt, Human
uauauuuuagacacccucacgc

SEQ ID NO: 693342 - RNA, 22 nt, Human
uacagagacuuuauggcacaaa

SEQ ID NO: 693343 - RNA, 22 nt, Human
auguagauuugcuucuccugcc

SEQ ID NO: 693344 - RNA, 22 nt, Human
ugcuucugcuuuacuugguuca

SEQ ID NO: 693345 - RNA, 22 nt, Human
ucuuaugaaaagcacuuagaac

SEQ ID NO: 693346 - RNA, 22 nt, Human
ugagcagggagcugggcugagc

SEQ ID NO: 693347 - RNA, 22 nt, Human
uauuaaauauaucuguuaguug

SEQ ID NO: 693348 - RNA, 22 nt, Human
uaagucguggaugauucuucgg

SEQ ID NO: 693349 - RNA, 22 nt, Human
aaacugcagagccaugguucaa

SEQ ID NO: 693350 - RNA, 22 nt, Human
uugcauuuacugcaccgugagu

SEQ ID NO: 693351 - RNA, 22 nt, Human
aaccaacauaggaaugcagaga

SEQ ID NO: 693352 - RNA, 22 nt, Human
cacagggcagagaccugggugc

SEQ ID NO: 693353 - RNA, 22 nt, Human
uccagggcuguuacuuuacaua

SEQ ID NO: 693354 - RNA, 17 nt, Human
ugcuuggcuucuuuagg

SEQ ID NO: 693355 - RNA, 22 nt, Human
uugggguaaggaaauauggcuu

SEQ ID NO: 693356 - RNA, 22 nt, Human
cauaacuagagugaaauguuga

SEQ ID NO: 693357 - RNA, 22 nt, Human
uccugggaggcaggaccccuuu

SEQ ID NO: 693358 - RNA, 22 nt, Human
cagauucuccaggggcugcaga

SEQ ID NO: 693359 - RNA, 22 nt, Human
agcagagccagaauuggaccag

SEQ ID NO: 693360 - RNA, 22 nt, Human
uuacauggauguaaaaaaguua

SEQ ID NO: 693361 - RNA, 22 nt, Human
cugggcaaauugugccagcuau

SEQ ID NO: 693362 - RNA, 22 nt, Human
ucugugucagaagauaucaugg

SEQ ID NO: 693363 - RNA, 22 nt, Human
gcugguuagaaaacagagcuca

SEQ ID NO: 693364 - RNA, 21 nt, Human
gaagacaaaugggaauagcug

SEQ ID NO: 693365 - RNA, 22 nt, Human
gcagagauaaguagacaggaug

SEQ ID NO: 693366 - RNA, 22 nt, Human
cucccaggugucccuucugcca

SEQ ID NO: 693367 - RNA, 22 nt, Human
gugcagcaaacuagugcgaggg

SEQ ID NO: 693368 - RNA, 22 nt, Human
ucugagugaguguaggccugac

SEQ ID NO: 693369 - RNA, 22 nt, Human
gucaggacauuuuaccauccug

SEQ ID NO: 693370 - RNA, 22 nt, Human
ccucacugucacuuauaguggu

SEQ ID NO: 693371 - RNA, 22 nt, Human
agucaaaacauguacuuuccuu

SEQ ID NO: 693372 - RNA, 22 nt, Human
acuguggagcaguggcuaggga

SEQ ID NO: 693373 - RNA, 20 nt, Human
uggaaggcaucugcauuauu

SEQ ID NO: 693374 - RNA, 22 nt, Human
gggaugagaguagggugugaaa

SEQ ID NO: 693375 - RNA, 22 nt, Human
uuuugcuuuuguaacacagugu

SEQ ID NO: 693376 - RNA, 22 nt, Human
augcaugugugaauuauuugac

SEQ ID NO: 693377 - RNA, 22 nt, Human
uauguguaaucaaacacaugcu

SEQ ID NO: 693378 - RNA, 22 nt, Human
ugcuaagcugaggaagaugaga

SEQ ID NO: 693379 - RNA, 22 nt, Human
gaguggagaucgugccacugca

SEQ ID NO: 693380 - RNA, 22 nt, Human
gggcaagcacagcgagcgugcg

SEQ ID NO: 693381 - RNA, 22 nt, Human
ccagaugguauaguagggagag

SEQ ID NO: 693382 - RNA, 20 nt, Human
ccuagggcaagugggugggc

SEQ ID NO: 693383 - RNA, 22 nt, Human
augaauuuuucuaagcuuuugu

SEQ ID NO: 693384 - RNA, 22 nt, Human
agagaaucugggaagauguuaa

SEQ ID NO: 693385 - RNA, 22 nt, Human
uagcaaaauguggauguaguug

SEQ ID NO: 693386 - RNA, 22 nt, Human
auguguuggauauuagugggga

SEQ ID NO: 693387 - RNA, 22 nt, Human
uaccagccugacccugucugac

SEQ ID NO: 693388 - RNA, 22 nt, Human
gauccuguuauaauuuggaugu

SEQ ID NO: 693389 - RNA, 22 nt, Human
ugugcuucuugcagcuccugua

SEQ ID NO: 693390 - RNA, 22 nt, Human
gcagaggagaugaagauacuuu

SEQ ID NO: 693391 - RNA, 22 nt, Human
uacagcaaagaaacccucaguc

SEQ ID NO: 693392 - RNA, 22 nt, Human
cagucuaaguuaauuuccacaa

SEQ ID NO: 693393 - RNA, 22 nt, Human
aggcugagcaaagggccuuacc

SEQ ID NO: 693394 - RNA, 22 nt, Human
uuuuccuucugauacuccauuu

SEQ ID NO: 693395 - RNA, 22 nt, Human
cagagguugagcaaaaaugaua

SEQ ID NO: 693396 - RNA, 22 nt, Human
aaacaagagcuuacauggcugc

SEQ ID NO: 693397 - RNA, 22 nt, Human
ugcugagaaucacagguuauaa

SEQ ID NO: 693398 - RNA, 22 nt, Human
cuggcuaaagagcaagaagaug

SEQ ID NO: 693399 - RNA, 22 nt, Human
uccaccaggcuccauguucagu

SEQ ID NO: 693400 - RNA, 22 nt, Human
cuguggcaagucugccugucac

SEQ ID NO: 693401 - RNA, 23 nt, Human
uaagacacccgacuccagagaug

SEQ ID NO: 693402 - RNA, 22 nt, Human
gcccugagccuaugagccucuc

SEQ ID NO: 693403 - RNA, 22 nt, Human
gaugucuucccauguucaugug

SEQ ID NO: 693404 - RNA, 22 nt, Human
gagcagcucugggugacccagu

SEQ ID NO: 693405 - RNA, 19 nt, Human
cuccagaauacauguuccu

SEQ ID NO: 693406 - RNA, 22 nt, Human
cagaacuucauauugacguuag

SEQ ID NO: 693407 - RNA, 22 nt, Human
ugcagcugaggccagcuaugcc

SEQ ID NO: 693408 - RNA, 22 nt, Human
aagcacugaggaaaaauuugau

SEQ ID NO: 693409 - RNA, 22 nt, Human
acugggcaugaugagucaccua

SEQ ID NO: 693410 - RNA, 22 nt, Human
ucagcuccucagagccucaguu

SEQ ID NO: 693411 - RNA, 22 nt, Human
caccauuuucuaaaaauaugac

SEQ ID NO: 693412 - RNA, 22 nt, Human
ugcacacacucguguauaugag

SEQ ID NO: 693413 - RNA, 22 nt, Human
caguaauagaggcuuugagucu

SEQ ID NO: 693414 - RNA, 22 nt, Human
ucagcaagcagggggauguuca

SEQ ID NO: 693415 - RNA, 18 nt, Human
ggacuacaggcacaggga

SEQ ID NO: 693416 - RNA, 22 nt, Human
uucugcuugguucuugguauga

SEQ ID NO: 693417 - RNA, 22 nt, Human
acacaguaggccaccaugucau

SEQ ID NO: 693418 - RNA, 22 nt, Human
uugagacagugggguguugccg

SEQ ID NO: 693419 - RNA, 22 nt, Human
gggcuccaggcaggcaggaaau

SEQ ID NO: 693420 - RNA, 22 nt, Human
cucucuggauauuuguaugcug

SEQ ID NO: 693421 - RNA, 22 nt, Human
aacaucuacuaagugccaggca

SEQ ID NO: 693422 - RNA, 22 nt, Human
uuaaguaacuuguccaaaugag

SEQ ID NO: 693423 - RNA, 22 nt, Human
aagacuuucaaguaugcaugca

SEQ ID NO: 693424 - RNA, 22 nt, Human
acagugugcaagaaauggggga

SEQ ID NO: 693425 - RNA, 22 nt, Human
cagucaccuagacagaacuuac

SEQ ID NO: 693426 - RNA, 22 nt, Human
acugaagucucuuuuguucucu

SEQ ID NO: 693427 - RNA, 22 nt, Human
gcugcuguacuuggggggugcu

SEQ ID NO: 693428 - RNA, 22 nt, Human
ucaucuucuauuaauagggaga

SEQ ID NO: 693429 - RNA, 22 nt, Human
agauaacuuuuggguauucaug

SEQ ID NO: 693430 - RNA, 22 nt, Human
cucagccagacaugacccaguc

SEQ ID NO: 693431 - RNA, 22 nt, Human
acuuuuaucaaggaagugaucu

SEQ ID NO: 693432 - RNA, 22 nt, Human
agcaggcuaagggaccuguuua

SEQ ID NO: 693433 - RNA, 22 nt, Human
ugccugaguuuaacccucagag

SEQ ID NO: 693434 - RNA, 22 nt, Human
ugccagggucagcugcagcucu

SEQ ID NO: 693435 - RNA, 22 nt, Human
caaucacaaagagacaaguguc

SEQ ID NO: 693436 - RNA, 22 nt, Human
ugagcaaaaguugauggugcuu

SEQ ID NO: 693437 - RNA, 22 nt, Human
ccugcauccgaaagugaucaua

SEQ ID NO: 693438 - RNA, 22 nt, Human
uggccaggggaguuccccucca

SEQ ID NO: 693439 - RNA, 22 nt, Human
gcugugagcacugcugggugga

SEQ ID NO: 693440 - RNA, 22 nt, Human
ggguggcaucucucugagcugu

SEQ ID NO: 693441 - RNA, 20 nt, Human
caguccaggcuagaaaacaa

SEQ ID NO: 693442 - RNA, 23 nt, Human
uuuuuugucuugcuaggcugccc

SEQ ID NO: 693443 - RNA, 22 nt, Human
aucagcaaucucguguauuagg

SEQ ID NO: 693444 - RNA, 22 nt, Human
uguuuuuaucucuguguacaac

SEQ ID NO: 693445 - RNA, 19 nt, Human
uacaaugauguuaccuuug

SEQ ID NO: 693446 - RNA, 22 nt, Human
ucuuugugccaugcagugaggc

SEQ ID NO: 693447 - RNA, 22 nt, Human
uaggcaaguggaccagagguuu

SEQ ID NO: 693448 - RNA, 22 nt, Human
ucauuuguugcuguuaccugag

SEQ ID NO: 693449 - RNA, 22 nt, Human
gucuggaaaggggcuuuuaucu

SEQ ID NO: 693450 - RNA, 22 nt, Human
ggggccagcuucgcgugcucuu

SEQ ID NO: 693451 - RNA, 22 nt, Human
aaaaguauuggccaccauuucu

SEQ ID NO: 693452 - RNA, 22 nt, Human
uuccugagggccccagaggagg

SEQ ID NO: 693453 - RNA, 22 nt, Human
uuuaaggaggggcucacguggg

SEQ ID NO: 693454 - RNA, 22 nt, Human
uccagggagauggcagaggcug

SEQ ID NO: 693455 - RNA, 22 nt, Human
aacaaucuguucgauagaaaau

SEQ ID NO: 693456 - RNA, 22 nt, Human
ugcccauguuucucuguauccc

SEQ ID NO: 693457 - RNA, 22 nt, Human
cuuuagaauuucauguuugguc

SEQ ID NO: 693458 - RNA, 22 nt, Human
gugcugccuccauauccgucag

SEQ ID NO: 693459 - RNA, 20 nt, Human
guauauaaccauagugacua

SEQ ID NO: 693460 - RNA, 22 nt, Human
gguuugcacgauauuuccaugg

SEQ ID NO: 693461 - RNA, 21 nt, Human
gaaaauacaaugagcuugacc

SEQ ID NO: 693462 - RNA, 22 nt, Human
gagguggauguugcagugagcu

SEQ ID NO: 693463 - RNA, 22 nt, Human
augaaaauacugugguugauag

SEQ ID NO: 693464 - RNA, 22 nt, Human
uguucuuugccagugauuuaau

SEQ ID NO: 693465 - RNA, 22 nt, Human
uccuuagagauacugucuugaa

SEQ ID NO: 693466 - RNA, 22 nt, Human
ucucuguaagagaggcuuucau

SEQ ID NO: 693467 - RNA, 22 nt, Human
ccugggagaacugcuggguugg

SEQ ID NO: 693468 - RNA, 23 nt, Human
cuuguuauaagaagacugucugg

SEQ ID NO: 693469 - RNA, 22 nt, Human
uguuucuucucacacaaacuca

SEQ ID NO: 693470 - RNA, 22 nt, Human
ggagcucugaggaugcauuggu

SEQ ID NO: 693471 - RNA, 22 nt, Human
caggccaaaauucaggcauucu

SEQ ID NO: 693472 - RNA, 22 nt, Human
gccuaauaugcaaaauugauac

SEQ ID NO: 693473 - RNA, 22 nt, Human
uuccaguucccaugaggauuaa

SEQ ID NO: 693474 - RNA, 22 nt, Human
ggcagguggaaggucuccauuc

SEQ ID NO: 693475 - RNA, 22 nt, Human
ucucaugcaugcauaagucuag

SEQ ID NO: 693476 - RNA, 22 nt, Human
ggcaggcucagcagccaaggag

SEQ ID NO: 693477 - RNA, 20 nt, Human
uggccucuguagaggccaag

SEQ ID NO: 693478 - RNA, 22 nt, Human
aggcuucauuguggcaucagga

SEQ ID NO: 693479 - RNA, 22 nt, Human
aaucuuuaaggacucagucucu

SEQ ID NO: 693480 - RNA, 22 nt, Human
caagagacuuauguggaaaccu

SEQ ID NO: 693481 - RNA, 22 nt, Human
auguaacauaugugaucgcauu

SEQ ID NO: 693482 - RNA, 22 nt, Human
augcacaagcaagagauaaugg

SEQ ID NO: 693483 - RNA, 22 nt, Human
uaucucuagcgcacagaagaaa

SEQ ID NO: 693484 - RNA, 22 nt, Human
gacagacagagaaugggcuuga

SEQ ID NO: 693485 - RNA, 22 nt, Human
ccugccagaaaagagggaguuc

SEQ ID NO: 693486 - RNA, 22 nt, Human
cagugaguugugcugaggacca

SEQ ID NO: 693487 - RNA, 22 nt, Human
aagaugauguuguguuuucacu

SEQ ID NO: 693488 - RNA, 22 nt, Human
uuucaaacuaugugucaggcag

SEQ ID NO: 693489 - RNA, 22 nt, Human
ggugaggggcgccucugcccag

SEQ ID NO: 693490 - RNA, 22 nt, Human
gucugggcagcagcauuucuua

SEQ ID NO: 693491 - RNA, 22 nt, Human
ucacucaagcaucuacagggau

SEQ ID NO: 693492 - RNA, 22 nt, Human
guccuuaacaaacggggaaaag

SEQ ID NO: 693493 - RNA, 22 nt, Human
aaagcucuuuuccaaguauuga

SEQ ID NO: 693494 - RNA, 22 nt, Human
gacuaaauaaaagccaaacuuc

SEQ ID NO: 693495 - RNA, 22 nt, Human
ggcuccaaagggcagugugagg

SEQ ID NO: 693496 - RNA, 22 nt, Human
cccugacccaaaacugucagaa

SEQ ID NO: 693497 - RNA, 22 nt, Human
cagcaucuguucccaacgagau

SEQ ID NO: 693498 - RNA, 22 nt, Human
aaggaggacacccaggacuggg

SEQ ID NO: 693499 - RNA, 22 nt, Human
uuccauaaaggugauaguauac

SEQ ID NO: 693500 - RNA, 22 nt, Human
ggacacagcugcagccacaccc

SEQ ID NO: 693501 - RNA, 22 nt, Human
agguacauggggugugugcacg

SEQ ID NO: 693502 - RNA, 22 nt, Human
cccaggagagagacuugaaucu

SEQ ID NO: 693503 - RNA, 22 nt, Human
ucagaggugguaaaggacagca

SEQ ID NO: 693504 - RNA, 22 nt, Human
aggagcuggguuccuuuggugg

SEQ ID NO: 693505 - RNA, 22 nt, Human
uugaaagacuucuccugugaaa

SEQ ID NO: 693506 - RNA, 22 nt, Human
ucugagcucuaucugugggaau

SEQ ID NO: 693507 - RNA, 19 nt, Human
ggcacuggggccaggacca

SEQ ID NO: 693508 - RNA, 22 nt, Human
uucaaaauccgggaggcgcccc

SEQ ID NO: 693509 - RNA, 22 nt, Human
uacccaaggcccuuucaauuuc

SEQ ID NO: 693510 - RNA, 22 nt, Human
ggggccagauaucacuaagguu

SEQ ID NO: 693511 - RNA, 22 nt, Human
cuggcugcgcuaguccagaaga

SEQ ID NO: 693512 - RNA, 18 nt, Human
gcaacaguaucagcaggc

SEQ ID NO: 693513 - RNA, 21 nt, Human
aggagcuggagaaaacuuucc

SEQ ID NO: 693514 - RNA, 22 nt, Human
auggaaagggaagcaaggaaca

SEQ ID NO: 693515 - RNA, 22 nt, Human
accaccucaucaagcuggauug

SEQ ID NO: 693516 - RNA, 22 nt, Human
cuggaucugucuuuuggauccc

SEQ ID NO: 693517 - RNA, 22 nt, Human
gacacagaaggucacauguuca

SEQ ID NO: 693518 - RNA, 22 nt, Human
agcacagaguugcucacugccg

SEQ ID NO: 693519 - RNA, 22 nt, Human
uuaugcaaaggggccucuuccu

SEQ ID NO: 693520 - RNA, 22 nt, Human
gcccauggucagggaggcaggg

SEQ ID NO: 693521 - RNA, 22 nt, Human
ucagcauucuuuacaaggauga

SEQ ID NO: 693522 - RNA, 22 nt, Human
cugcaaaggugggggaggagcu

SEQ ID NO: 693523 - RNA, 22 nt, Human
uauuuaauuugcucauugugau

SEQ ID NO: 693524 - RNA, 22 nt, Human
ggcugagaacaggcccagccuc

SEQ ID NO: 693525 - RNA, 22 nt, Human
uuuaucuuuggaucuucagaaa

SEQ ID NO: 693526 - RNA, 22 nt, Human
uggcucuguugagguauggauu

SEQ ID NO: 693527 - RNA, 20 nt, Human
gcuggaagggcuagagggcu

SEQ ID NO: 693528 - RNA, 22 nt, Human
gcaaauguggcuuccuuucuag

SEQ ID NO: 693529 - RNA, 22 nt, Human
acacaggacggcccuguggcuu

SEQ ID NO: 693530 - RNA, 20 nt, Human
aggaagauccuuucuuuuaa

SEQ ID NO: 693531 - RNA, 22 nt, Human
guccaaguacauguguguacau

SEQ ID NO: 693532 - RNA, 21 nt, Human
acagagccgggcacaaagcug

SEQ ID NO: 693533 - RNA, 20 nt, Human
auacacauucauagaaaaau

SEQ ID NO: 693534 - RNA, 22 nt, Human
guuuuauuuccaugagagaccg

SEQ ID NO: 693535 - RNA, 22 nt, Human
cuccugggucauugccagcaaa

SEQ ID NO: 693536 - RNA, 22 nt, Human
ugggccaguuggugacuacaaa

SEQ ID NO: 693537 - RNA, 22 nt, Human
uccaggagugugugcuaauggg

SEQ ID NO: 693538 - RNA, 22 nt, Human
cuguaugaggaucagacuggac

SEQ ID NO: 693539 - RNA, 22 nt, Human
aucuggcucauucagggaacgg

SEQ ID NO: 693540 - RNA, 22 nt, Human
ucugaaagaagggcagucuuuu

SEQ ID NO: 693541 - RNA, 22 nt, Human
auuggcauacuuucuauauuca

SEQ ID NO: 693542 - RNA, 22 nt, Human
uugggcuggcagagguggucuu

SEQ ID NO: 693543 - RNA, 22 nt, Human
cugacugucucuucucccauga

SEQ ID NO: 693544 - RNA, 22 nt, Human
caaaugcaggucagcagguguc

SEQ ID NO: 693545 - RNA, 22 nt, Human
agaggcuaggaccauguaucau

SEQ ID NO: 693546 - RNA, 19 nt, Human
cuuggagaaggcuaugacc

SEQ ID NO: 693547 - RNA, 22 nt, Human
uuguuaaaauauuggagaaagg

SEQ ID NO: 693548 - RNA, 22 nt, Human
uaguuuagagaauuggggauga

SEQ ID NO: 693549 - RNA, 22 nt, Human
acagagguuaggauggguugua

SEQ ID NO: 693550 - RNA, 20 nt, Human
caggcaguuugugguuaggg

SEQ ID NO: 693551 - RNA, 22 nt, Human
uucucucuuacugccaugcugu

SEQ ID NO: 693552 - RNA, 22 nt, Human
aaacugguaaucggcaagugag

SEQ ID NO: 693553 - RNA, 22 nt, Human
uaugcacacauguaugcaugug

SEQ ID NO: 693554 - RNA, 22 nt, Human
ccacagugggcacagcaggacu

SEQ ID NO: 693555 - RNA, 22 nt, Human
aucucuguaauuacaugauauu

SEQ ID NO: 693556 - RNA, 22 nt, Human
aguuuucugggaucacuggaau

SEQ ID NO: 693557 - RNA, 20 nt, Human
uggcccaguggggcagggug

SEQ ID NO: 693558 - RNA, 22 nt, Human
acugagggguuggagagugagg

SEQ ID NO: 693559 - RNA, 22 nt, Human
ugaaaucuuauacuuugguagu

SEQ ID NO: 693560 - RNA, 22 nt, Human
uucugaaggucagcagcuuggu

SEQ ID NO: 693561 - RNA, 22 nt, Human
gggccccacuggggcugccugc

SEQ ID NO: 693562 - RNA, 22 nt, Human
cuuagggagaaugccucugcag

SEQ ID NO: 693563 - RNA, 22 nt, Human
aagcugauucuaaaauuuauua

SEQ ID NO: 693564 - RNA, 22 nt, Human
agacuugggaccuaggaaugga

SEQ ID NO: 693565 - RNA, 22 nt, Human
ucucagaguuugaaucuggagu

SEQ ID NO: 693566 - RNA, 22 nt, Human
cugagcugcaguccuggcucug

SEQ ID NO: 693567 - RNA, 22 nt, Human
aaaauagauucuaggaugucuu

SEQ ID NO: 693568 - RNA, 22 nt, Human
ucauggaauagagcaguggcaa

SEQ ID NO: 693569 - RNA, 22 nt, Human
ucccuucaagauuuggggaaau

SEQ ID NO: 693570 - RNA, 22 nt, Human
gcucuggugaguguaguucagg

SEQ ID NO: 693571 - RNA, 22 nt, Human
uauuagcacaaagcaagguauu

SEQ ID NO: 693572 - RNA, 22 nt, Human
ggcugccugccgcccacuuggc

SEQ ID NO: 693573 - RNA, 22 nt, Human
gccaucugcgcgguguccagcu

SEQ ID NO: 693574 - RNA, 22 nt, Human
auuagugauaugugacuagacc

SEQ ID NO: 693575 - RNA, 22 nt, Human
aggagguggcugaacuugaggg

SEQ ID NO: 693576 - RNA, 22 nt, Human
ugcacacacaugaaguagcaug

SEQ ID NO: 693577 - RNA, 22 nt, Human
agggcuccaaggaaguguagcu

SEQ ID NO: 693578 - RNA, 22 nt, Human
uggaagcaucacuucuugccug

SEQ ID NO: 693579 - RNA, 22 nt, Human
uucagagaguccaguaugcagu

SEQ ID NO: 693580 - RNA, 20 nt, Human
uggcugcccgaggcacacac

SEQ ID NO: 693581 - RNA, 22 nt, Human
uuucacaaguaaaguccuaagu

SEQ ID NO: 693582 - RNA, 22 nt, Human
ggccagcccuccucccuggguu

SEQ ID NO: 693583 - RNA, 22 nt, Human
uuugguuuauuaaauuguaggc

SEQ ID NO: 693584 - RNA, 22 nt, Human
ccaaucuugcuguccacuuggu

SEQ ID NO: 693585 - RNA, 22 nt, Human
cccaggcucacuguccgcuucc

SEQ ID NO: 693586 - RNA, 22 nt, Human
gcaguccugggauucuguccuu

SEQ ID NO: 693587 - RNA, 22 nt, Human
gccugcagggccugggccuacc

SEQ ID NO: 693588 - RNA, 21 nt, Human
ugaguuucagaggggaaggaa

SEQ ID NO: 693589 - RNA, 22 nt, Human
auuugcaggugucgauuagucu

SEQ ID NO: 693590 - RNA, 22 nt, Human
gguguugcaguugaagacuggu

SEQ ID NO: 693591 - RNA, 22 nt, Human
gcaguguuacuugguuugcaga

SEQ ID NO: 693592 - RNA, 22 nt, Human
cugcugacucuuccuggaguga

SEQ ID NO: 693593 - RNA, 22 nt, Human
cagacacaccaggcccauucug

SEQ ID NO: 693594 - RNA, 23 nt, Human
gggaagcuccauggaggugcugg

SEQ ID NO: 693595 - RNA, 22 nt, Human
ucaaugucagcugguaggaaau

SEQ ID NO: 693596 - RNA, 22 nt, Human
aguggaaggcugggaaaugcgg

SEQ ID NO: 693597 - RNA, 22 nt, Human
gaaagaccguuugggcucuaaa

SEQ ID NO: 693598 - RNA, 22 nt, Human
uacacaugaucauuuaguagca

SEQ ID NO: 693599 - RNA, 22 nt, Human
ccaaauagucuuucauugaauu

SEQ ID NO: 693600 - RNA, 22 nt, Human
aucauguuccagaaacagugau

SEQ ID NO: 693601 - RNA, 22 nt, Human
aggaagcuagagccaccggacu

SEQ ID NO: 693602 - RNA, 22 nt, Human
auauuuuccgaacuugagguag

SEQ ID NO: 693603 - RNA, 22 nt, Human
ucauuacaguguuuauaugucu

SEQ ID NO: 693604 - RNA, 20 nt, Human
gcacuguuacaaagcacacc

SEQ ID NO: 693605 - RNA, 22 nt, Human
agucucugccagcuuguccucu

SEQ ID NO: 693606 - RNA, 22 nt, Human
gcugucuugcucacucuugcag

SEQ ID NO: 693607 - RNA, 22 nt, Human
augaagcugaccuugucuugcu

SEQ ID NO: 693608 - RNA, 22 nt, Human
gcugguccacucccuggaggcu

SEQ ID NO: 693609 - RNA, 22 nt, Human
cacagaggaaaugacuuucuua

SEQ ID NO: 693610 - RNA, 22 nt, Human
acagaaugcagagaugcccaga

SEQ ID NO: 693611 - RNA, 22 nt, Human
uauuaugaucgugacucaagga

SEQ ID NO: 693612 - RNA, 22 nt, Human
caggcucccacaagcucccagc

SEQ ID NO: 693613 - RNA, 17 nt, Human
agcagcugaagcagcca

SEQ ID NO: 693614 - RNA, 22 nt, Human
cuaacugucaugcacauguguu

SEQ ID NO: 693615 - RNA, 22 nt, Human
ccacacagggggaugaguuauu

SEQ ID NO: 693616 - RNA, 22 nt, Human
aucuucaacuuuggggcugccu

SEQ ID NO: 693617 - RNA, 22 nt, Human
caguaaaugagaagcuaguaau

SEQ ID NO: 693618 - RNA, 21 nt, Human
uccauuguuuucccaggguuu

SEQ ID NO: 693619 - RNA, 22 nt, Human
accugcucaacuggcuucucgc

SEQ ID NO: 693620 - RNA, 17 nt, Human
uuccaguuuaguauugu

SEQ ID NO: 693621 - RNA, 22 nt, Human
ccucugacuccuggacuugggg

SEQ ID NO: 693622 - RNA, 22 nt, Human
ugcacaucuuucagcaucauac

SEQ ID NO: 693623 - RNA, 22 nt, Human
aagauccaugagggcagagauu

SEQ ID NO: 693624 - RNA, 22 nt, Human
uauacagcuauggcaagacaaa

SEQ ID NO: 693625 - RNA, 22 nt, Human
augaguuaggggccugagugga

SEQ ID NO: 693626 - RNA, 22 nt, Human
acauauguguuguacaugcaug

SEQ ID NO: 693627 - RNA, 22 nt, Human
uggccuccccuaacagccucuu

SEQ ID NO: 693628 - RNA, 22 nt, Human
cuguccaucagaaaggggcuua

SEQ ID NO: 693629 - RNA, 22 nt, Human
ugcaugcaugauguuugguagc

SEQ ID NO: 693630 - RNA, 22 nt, Human
aggugucuggauggguguccuu

SEQ ID NO: 693631 - RNA, 22 nt, Human
gugaacuauuggguaucauaaa

SEQ ID NO: 693632 - RNA, 22 nt, Human
aggucuggcucuucuccacaga

SEQ ID NO: 693633 - RNA, 22 nt, Human
uagggcagaguccaggaugggc

SEQ ID NO: 693634 - RNA, 22 nt, Human
ccuagucuuccgcguccccacc

SEQ ID NO: 693635 - RNA, 22 nt, Human
uuuugucuaagaacuuugcaaa

SEQ ID NO: 693636 - RNA, 20 nt, Human
uaacacuugcuuuuugacuu

SEQ ID NO: 693637 - RNA, 22 nt, Human
uuccagcacagaaguauacauu

SEQ ID NO: 693638 - RNA, 22 nt, Human
ugccugucuuggaguccuggcc

SEQ ID NO: 693639 - RNA, 22 nt, Human
ggccugcuggggccucagacac

SEQ ID NO: 693640 - RNA, 22 nt, Human
ugcugggcuggagcugccaggg

SEQ ID NO: 693641 - RNA, 22 nt, Human
ucguaugcucucuguguccugu

SEQ ID NO: 693642 - RNA, 19 nt, Human
guucaaacacugauucagc

SEQ ID NO: 693643 - RNA, 19 nt, Human
uggcuucuguuuucauguu

SEQ ID NO: 693644 - RNA, 22 nt, Human
agguaguguagcugagugggau

SEQ ID NO: 693645 - RNA, 22 nt, Human
aagcugccacacggugaguacu

SEQ ID NO: 693646 - RNA, 20 nt, Human
cuuguuaaauaugcagguag

SEQ ID NO: 693647 - RNA, 18 nt, Human
gggcacuggggacuggag

SEQ ID NO: 693648 - RNA, 22 nt, Human
cugccugguacuuuaggcacuu

SEQ ID NO: 693649 - RNA, 22 nt, Human
uuucaaacuguacuuuccccua

SEQ ID NO: 693650 - RNA, 22 nt, Human
ugcugccaccccucaccagagc

SEQ ID NO: 693651 - RNA, 22 nt, Human
ucucugagggagauggccugcc

SEQ ID NO: 693652 - RNA, 22 nt, Human
ggacagaggguugacagaguau

SEQ ID NO: 693653 - RNA, 22 nt, Human
agugacaggaccaggucuggaa

SEQ ID NO: 693654 - RNA, 22 nt, Human
ucuuuucuagcaaauccaggag

SEQ ID NO: 693655 - RNA, 22 nt, Human
aauuucucauggauucaguuau

SEQ ID NO: 693656 - RNA, 22 nt, Human
agaugcagaaaaacuaagugau

SEQ ID NO: 693657 - RNA, 22 nt, Human
cugcccugcccaggccuugggc

SEQ ID NO: 693658 - RNA, 22 nt, Human
aaagguuuucugacccuuagua

SEQ ID NO: 693659 - RNA, 22 nt, Human
ugaucaaagccaaaguugagau

SEQ ID NO: 693660 - RNA, 20 nt, Human
aaaggcacagcaacagagcu

SEQ ID NO: 693661 - RNA, 22 nt, Human
augcuuaauacacuguuaaagg

SEQ ID NO: 693662 - RNA, 22 nt, Human
uuugaacuguucuaggauuuaa

SEQ ID NO: 693663 - RNA, 22 nt, Human
ucucuguaucagcaccugcugg

SEQ ID NO: 693664 - RNA, 22 nt, Human
cagagucagcuagucuugggau

SEQ ID NO: 693665 - RNA, 18 nt, Human
aagauguuuaaugggaag

SEQ ID NO: 693666 - RNA, 22 nt, Human
cuggccccgguuccuaaaaacc

SEQ ID NO: 693667 - RNA, 22 nt, Human
ucugcaagcgucacaugauucu

SEQ ID NO: 693668 - RNA, 22 nt, Human
aaucuuuugauucuagggcugu

SEQ ID NO: 693669 - RNA, 22 nt, Human
uaaaugugucuuuuuaaggccu

SEQ ID NO: 693670 - RNA, 23 nt, Human
gaggaccaaauauauacauggaa

SEQ ID NO: 693671 - RNA, 22 nt, Human
gcaaagaaagccaaggucuaac

SEQ ID NO: 693672 - RNA, 23 nt, Human
uugcacugaucaauuugauaagc

SEQ ID NO: 693673 - RNA, 19 nt, Human
cugagcaggcagguaggau

SEQ ID NO: 693674 - RNA, 22 nt, Human
ucacacagcuuggaguuauggu

SEQ ID NO: 693675 - RNA, 22 nt, Human
ggagcugggacccugucaucug

SEQ ID NO: 693676 - RNA, 22 nt, Human
aagaccauuuaauggagaaaga

SEQ ID NO: 693677 - RNA, 22 nt, Human
cagugcaauguuaaauaggaaa

SEQ ID NO: 693678 - RNA, 22 nt, Human
ucuggggagcagcccuggugag

SEQ ID NO: 693679 - RNA, 22 nt, Human
auuccucauuauuuacugagga

SEQ ID NO: 693680 - RNA, 22 nt, Human
auggaucagaaucccgggaggg

SEQ ID NO: 693681 - RNA, 22 nt, Human
cucaggaucgcuugcccuaggg

SEQ ID NO: 693682 - RNA, 22 nt, Human
uaguccagguuaaucccugccu

SEQ ID NO: 693683 - RNA, 22 nt, Human
augcauaugcaaugcacaauuu

SEQ ID NO: 693684 - RNA, 22 nt, Human
ugaggagcgggcagggaugcag

SEQ ID NO: 693685 - RNA, 22 nt, Human
agugcuuucagugugcucuuuu

SEQ ID NO: 693686 - RNA, 22 nt, Human
augaaaguguuuaaguuuaugu

SEQ ID NO: 693687 - RNA, 22 nt, Human
auucuauagacagaaggucaau

SEQ ID NO: 693688 - RNA, 22 nt, Human
gggcacagcugcuacccagugc

SEQ ID NO: 693689 - RNA, 22 nt, Human
acacauugcagacaucucauua

SEQ ID NO: 693690 - RNA, 19 nt, Human
ccaguccucuuugggccug

SEQ ID NO: 693691 - RNA, 22 nt, Human
guggcuucuggcugggccucag

SEQ ID NO: 693692 - RNA, 20 nt, Human
agaaccuaaguuaaaacaca

SEQ ID NO: 693693 - RNA, 21 nt, Human
accuuuggguguuuauaauag

SEQ ID NO: 693694 - RNA, 22 nt, Human
auagauauuagcaaaauuuuau

SEQ ID NO: 693695 - RNA, 22 nt, Human
auagacaaugguuugccaagaa

SEQ ID NO: 693696 - RNA, 17 nt, Human
cugaaauauuaugauaa

SEQ ID NO: 693697 - RNA, 20 nt, Human
uaucaguaggauauucugcc

SEQ ID NO: 693698 - RNA, 22 nt, Human
acaauuugugucuuuugcuuau

SEQ ID NO: 693699 - RNA, 22 nt, Human
aguuuagacaaagucuugcauu

SEQ ID NO: 693700 - RNA, 22 nt, Human
uccuggccagaggacaaagcug

SEQ ID NO: 693701 - RNA, 19 nt, Human
auggccaguuuagagguuu

SEQ ID NO: 693702 - RNA, 22 nt, Human
aguugacauccagagacauucu

SEQ ID NO: 693703 - RNA, 22 nt, Human
caguccucucugugucugcacc

SEQ ID NO: 693704 - RNA, 22 nt, Human
auugguuuuguuaucuccauuc

SEQ ID NO: 693705 - RNA, 22 nt, Human
gaagugcaaccugaaauacuag

SEQ ID NO: 693706 - RNA, 22 nt, Human
ugugaaagauacuaggcagagg

SEQ ID NO: 693707 - RNA, 22 nt, Human
agcugguguccuccuggagcug

SEQ ID NO: 693708 - RNA, 22 nt, Human
ucuucagcucugaggcucuggc

SEQ ID NO: 693709 - RNA, 22 nt, Human
aagagagacaauagguagcauu

SEQ ID NO: 693710 - RNA, 22 nt, Human
caucagcucuucauucuugauu

SEQ ID NO: 693711 - RNA, 22 nt, Human
ucuuagaaugucaacugauguu

SEQ ID NO: 693712 - RNA, 22 nt, Human
uggauggggcagcuuaggugug

SEQ ID NO: 693713 - RNA, 18 nt, Human
gugugcaguugcaggggu

SEQ ID NO: 693714 - RNA, 22 nt, Human
agggcugcaucugccuggugaa

SEQ ID NO: 693715 - RNA, 22 nt, Human
ggagucaccaaguaggagucuu

SEQ ID NO: 693716 - RNA, 22 nt, Human
ccugaggucagccauucuugcc

SEQ ID NO: 693717 - RNA, 22 nt, Human
aucuuuuuugucuuggucacug

SEQ ID NO: 693718 - RNA, 17 nt, Human
uaaccucucugaaccug

SEQ ID NO: 693719 - RNA, 22 nt, Human
gccuggagccucagcaaggagg

SEQ ID NO: 693720 - RNA, 22 nt, Human
uuagaguuuuuguaaguacaau

SEQ ID NO: 693721 - RNA, 22 nt, Human
gggcugcuuuuaagggucucag

SEQ ID NO: 693722 - RNA, 22 nt, Human
ucacaucugccuccauagcacc

SEQ ID NO: 693723 - RNA, 22 nt, Human
uccagagccugggguuuguaac

SEQ ID NO: 693724 - RNA, 22 nt, Human
cuuugggcaaagggccaauucg

SEQ ID NO: 693725 - RNA, 23 nt, Human
gggcuucauuuuaauucagcugc

SEQ ID NO: 693726 - RNA, 22 nt, Human
cccagccugaucucggccagcu

SEQ ID NO: 693727 - RNA, 22 nt, Human
uguuuuaagagcgcacuuuaua

SEQ ID NO: 693728 - RNA, 22 nt, Human
gcccaggaguuggaggcugcag

SEQ ID NO: 693729 - RNA, 22 nt, Human
ggcucagagguugaggccggca

SEQ ID NO: 693730 - RNA, 22 nt, Human
uauuuugcuuuagcugacuguu

SEQ ID NO: 693731 - RNA, 22 nt, Human
cauuuaaucuggcucaugagca

SEQ ID NO: 693732 - RNA, 22 nt, Human
cguguuucagccagggccaccu

SEQ ID NO: 693733 - RNA, 22 nt, Human
ugaguucugacugugaugccag

SEQ ID NO: 693734 - RNA, 22 nt, Human
uaguggaguagaaaccaaagaa

SEQ ID NO: 693735 - RNA, 22 nt, Human
gaauugcuaauccaagugacug

SEQ ID NO: 693736 - RNA, 22 nt, Human
ggagucugacucugacccugga

SEQ ID NO: 693737 - RNA, 22 nt, Human
caucuuuuggccuauucugagg

SEQ ID NO: 693738 - RNA, 22 nt, Human
gucauucagagaugcagguaga

SEQ ID NO: 693739 - RNA, 22 nt, Human
auucacaaauaacaggugcaga

SEQ ID NO: 693740 - RNA, 22 nt, Human
gcagggcucauucuaguacaau

SEQ ID NO: 693741 - RNA, 22 nt, Human
cauccaggcaccacaaccagcu

SEQ ID NO: 693742 - RNA, 21 nt, Human
cucaaagaccaaaaguguaga

SEQ ID NO: 693743 - RNA, 22 nt, Human
cccaguccagaccaugaccuca

SEQ ID NO: 693744 - RNA, 22 nt, Human
acuuaguggcuaugugaccuua

SEQ ID NO: 693745 - RNA, 22 nt, Human
uccagucugguaugaauccuag

SEQ ID NO: 693746 - RNA, 22 nt, Human
agaugaguaaauggagucuucc

SEQ ID NO: 693747 - RNA, 22 nt, Human
uaguguuuaguacauaugcaua

SEQ ID NO: 693748 - RNA, 22 nt, Human
augugugugcauuucucucccu

SEQ ID NO: 693749 - RNA, 22 nt, Human
uucauuugcacuggauuacugg

SEQ ID NO: 693750 - RNA, 22 nt, Human
gccucugcaucuucgccgcacu

SEQ ID NO: 693751 - RNA, 22 nt, Human
auucauuagccacuaacuagca

SEQ ID NO: 693752 - RNA, 22 nt, Human
aggcugcuuucauggccgcccc

SEQ ID NO: 693753 - RNA, 22 nt, Human
uuccugguaacaaucucaaagu

SEQ ID NO: 693754 - RNA, 22 nt, Human
cacuuuauauucuaagacggcc

SEQ ID NO: 693755 - RNA, 22 nt, Human
aauuguacaggaaguugcugga

SEQ ID NO: 693756 - RNA, 21 nt, Human
ugaggaugugcagcagcagga

SEQ ID NO: 693757 - RNA, 22 nt, Human
aguccaggcauuccagccauuc

SEQ ID NO: 693758 - RNA, 22 nt, Human
gcauuugaaaugcaagaaagug

SEQ ID NO: 693759 - RNA, 22 nt, Human
uguuuaaccaccauucuauucu

SEQ ID NO: 693760 - RNA, 20 nt, Human
aacaaacuacaaaauuaugu

SEQ ID NO: 693761 - RNA, 22 nt, Human
ugucuaaacuuguuuuaucuca

SEQ ID NO: 693762 - RNA, 22 nt, Human
ccagucugugugccagccugcg

SEQ ID NO: 693763 - RNA, 22 nt, Human
gucuugaaaaguggccaguuug

SEQ ID NO: 693764 - RNA, 22 nt, Human
ccuggcucgcugaccucagggg

SEQ ID NO: 693765 - RNA, 20 nt, Human
gcacacauagaaaugcauau

SEQ ID NO: 693766 - RNA, 22 nt, Human
uccaggagaaaacugacggugg

SEQ ID NO: 693767 - RNA, 22 nt, Human
uggggaagacagcagacacugu

SEQ ID NO: 693768 - RNA, 22 nt, Human
gguggcuggaggagcugaugga

SEQ ID NO: 693769 - RNA, 22 nt, Human
aacaugaugacauuguaagcuu

SEQ ID NO: 693770 - RNA, 22 nt, Human
ggcuucaguggccagagaugau

SEQ ID NO: 693771 - RNA, 22 nt, Human
guaguggagucuccuguccugg

SEQ ID NO: 693772 - RNA, 22 nt, Human
caggaaauucaagagaggcugc

SEQ ID NO: 693773 - RNA, 23 nt, Human
ggcaccaggccauggagcgggag

SEQ ID NO: 693774 - RNA, 22 nt, Human
uaaggcagauguggaaucaauu

SEQ ID NO: 693775 - RNA, 22 nt, Human
caggagacuauggcccaaggcc

SEQ ID NO: 693776 - RNA, 22 nt, Human
cauguauaguuggaacuacauc

SEQ ID NO: 693777 - RNA, 22 nt, Human
ugagcugucaagguacagugaa

SEQ ID NO: 693778 - RNA, 22 nt, Human
ugugugggugguaaggaaggcc

SEQ ID NO: 693779 - RNA, 22 nt, Human
acagggcagagaggcaggcuug

SEQ ID NO: 693780 - RNA, 22 nt, Human
gguuuaauggagauauuucaga

SEQ ID NO: 693781 - RNA, 22 nt, Human
cugcacaggggaugagggcagu

SEQ ID NO: 693782 - RNA, 22 nt, Human
ugucacaugaaacuugcucauc

SEQ ID NO: 693783 - RNA, 22 nt, Human
cugucucuguugccuguaggug

SEQ ID NO: 693784 - RNA, 22 nt, Human
uuacagcagcagggacagacua

SEQ ID NO: 693785 - RNA, 22 nt, Human
ggcagcugucucugaguuagca

SEQ ID NO: 693786 - RNA, 22 nt, Human
ucaguuuauggucuaguucaug

SEQ ID NO: 693787 - RNA, 17 nt, Human
cauuuguugaucaguug

SEQ ID NO: 693788 - RNA, 22 nt, Human
cgucccuaccuggcagcugcgc

SEQ ID NO: 693789 - RNA, 22 nt, Human
agccagaaaggggcauuaucug

SEQ ID NO: 693790 - RNA, 22 nt, Human
cuguugaucucaguuagcuaga

SEQ ID NO: 693791 - RNA, 22 nt, Human
ucuuucugguuauguauagaga

SEQ ID NO: 693792 - RNA, 22 nt, Human
ucagggaaauuuccauguguuu

SEQ ID NO: 693793 - RNA, 22 nt, Human
uuauucagcucucuagaggcac

SEQ ID NO: 693794 - RNA, 22 nt, Human
gagucaggcuagaggugagucu

SEQ ID NO: 693795 - RNA, 22 nt, Human
gcccugccugccgguguggguc

SEQ ID NO: 693796 - RNA, 22 nt, Human
agucaacugcauuaggaaauga

SEQ ID NO: 693797 - RNA, 22 nt, Human
ucagagagcagaacuuuuuuac

SEQ ID NO: 693798 - RNA, 22 nt, Human
agacacugagcauuuuccuagc

SEQ ID NO: 693799 - RNA, 22 nt, Human
agagguagagguugcagugagc

SEQ ID NO: 693800 - RNA, 22 nt, Human
uuuggaauguaguuuaaucauc

SEQ ID NO: 693801 - RNA, 22 nt, Human
gugagcuguuggaguggcagag

SEQ ID NO: 693802 - RNA, 21 nt, Human
aggcucagagaucaaacagua

SEQ ID NO: 693803 - RNA, 22 nt, Human
ucaaauauuggcuauuucacau

SEQ ID NO: 693804 - RNA, 22 nt, Human
gugcaggugguuggcccagccg

SEQ ID NO: 693805 - RNA, 22 nt, Human
uacagacauuuacuccacuccu

SEQ ID NO: 693806 - RNA, 22 nt, Human
ugcacuggggucccagcgcacg

SEQ ID NO: 693807 - RNA, 22 nt, Human
cuguuaauggaggacuacagga

SEQ ID NO: 693808 - RNA, 22 nt, Human
aauauaguguuagcucauuuga

SEQ ID NO: 693809 - RNA, 22 nt, Human
ucuauacacacaaagaaugcuu

SEQ ID NO: 693810 - RNA, 22 nt, Human
cugagagaaacaugacucagga

SEQ ID NO: 693811 - RNA, 22 nt, Human
ucaguguuuauucaauguuauu

SEQ ID NO: 693812 - RNA, 19 nt, Human
cuuccuggaggagagccuc

SEQ ID NO: 693813 - RNA, 22 nt, Human
cagggagaggcaucauagggaa

SEQ ID NO: 693814 - RNA, 22 nt, Human
ucuuucaaaugcuugaauugga

SEQ ID NO: 693815 - RNA, 22 nt, Human
ugaagaucugucaaccccauau

SEQ ID NO: 693816 - RNA, 22 nt, Human
aaagagcuucauuuccauuuau

SEQ ID NO: 693817 - RNA, 22 nt, Human
cugacagaugcugcuggcagua

SEQ ID NO: 693818 - RNA, 22 nt, Human
gaggaagaagcaaaccagcuaa

SEQ ID NO: 693819 - RNA, 22 nt, Human
gacagugauuaguuacuauaaa

SEQ ID NO: 693820 - RNA, 22 nt, Human
ucucuacagaaucuuauuauug

SEQ ID NO: 693821 - RNA, 22 nt, Human
cagggcuggcuguggcaaucuc

SEQ ID NO: 693822 - RNA, 22 nt, Human
aaagcaauggcacaugauggua

SEQ ID NO: 693823 - RNA, 23 nt, Human
cccugcaucugucccucaccagu

SEQ ID NO: 693824 - RNA, 22 nt, Human
ugcguuauugugucuggcuaug

SEQ ID NO: 693825 - RNA, 22 nt, Human
cuuggccugcaggcagcagcgc

SEQ ID NO: 693826 - RNA, 22 nt, Human
uagcaacugcucuauucuagga

SEQ ID NO: 693827 - RNA, 22 nt, Human
gcaugauuaauaugcuuacugu

SEQ ID NO: 693828 - RNA, 22 nt, Human
aacccuggggcagcugcuaggg

SEQ ID NO: 693829 - RNA, 22 nt, Human
gugcaaaaguaauugagguuuu

SEQ ID NO: 693830 - RNA, 22 nt, Human
ggggaccuucccagagcaguug

SEQ ID NO: 693831 - RNA, 22 nt, Human
uuugagaaaugggcucugugcu

SEQ ID NO: 693832 - RNA, 18 nt, Human
ugaaacaagaauggugca

SEQ ID NO: 693833 - RNA, 22 nt, Human
augcauuuuugaguaugaauga

SEQ ID NO: 693834 - RNA, 22 nt, Human
uggcagauaaacaugugauaaa

SEQ ID NO: 693835 - RNA, 22 nt, Human
aguacaaaaugcagcaucauca

SEQ ID NO: 693836 - RNA, 22 nt, Human
guguccagagaacugugggagc

SEQ ID NO: 693837 - RNA, 22 nt, Human
gcagggcuuuuugaaacauggu

SEQ ID NO: 693838 - RNA, 22 nt, Human
cccagccucuggguucugccgg

SEQ ID NO: 693839 - RNA, 22 nt, Human
uuauucucaucucccuacuuag

SEQ ID NO: 693840 - RNA, 22 nt, Human
ccucagcuugauuucugcagag

SEQ ID NO: 693841 - RNA, 22 nt, Human
uccuuaacaagauggcauuugu

SEQ ID NO: 693842 - RNA, 22 nt, Human
uugggcuccuguugauccuguc

SEQ ID NO: 693843 - RNA, 22 nt, Human
uucugggcucccacauauuuca

SEQ ID NO: 693844 - RNA, 22 nt, Human
cucaugauguagcgaaugagaa

SEQ ID NO: 693845 - RNA, 22 nt, Human
aaauguuccggguaaggagaaa

SEQ ID NO: 693846 - RNA, 22 nt, Human
uaagcauuaugguaaagaagua

SEQ ID NO: 693847 - RNA, 22 nt, Human
uugcauuugaucuuggguucuc

SEQ ID NO: 693848 - RNA, 22 nt, Human
aaaugugucauauucaaaguca

SEQ ID NO: 693849 - RNA, 22 nt, Human
caaaaguaccuugugugcuuug

SEQ ID NO: 693850 - RNA, 22 nt, Human
auugucuuuaaaaauauacaac

SEQ ID NO: 693851 - RNA, 22 nt, Human
auggcagaccuccuggccacaa

SEQ ID NO: 693852 - RNA, 22 nt, Human
uccuucaccuuagcccuccuag

SEQ ID NO: 693853 - RNA, 22 nt, Human
uggcagauguggcauagagcau

SEQ ID NO: 693854 - RNA, 22 nt, Human
ggcaucucggaacacgccuccg

SEQ ID NO: 693855 - RNA, 20 nt, Human
uccagggcuagggagcucau

SEQ ID NO: 693856 - RNA, 22 nt, Human
acauuuuuauccugagugccag

SEQ ID NO: 693857 - RNA, 22 nt, Human
uaaacaagcugucugauauucu

SEQ ID NO: 693858 - RNA, 22 nt, Human
guucacaguguuuucuuugcau

SEQ ID NO: 693859 - RNA, 22 nt, Human
uagcagcaaaaugaccuucuaa

SEQ ID NO: 693860 - RNA, 18 nt, Human
ugaagacaugagguuagu

SEQ ID NO: 693861 - RNA, 18 nt, Human
ucuuggaguaaugaucaa

SEQ ID NO: 693862 - RNA, 22 nt, Human
uuaaguccuugguaauuuucuu

SEQ ID NO: 693863 - RNA, 22 nt, Human
uuuacagucugucuagcaaugu

SEQ ID NO: 693864 - RNA, 22 nt, Human
guguuuuauggagucauaacgu

SEQ ID NO: 693865 - RNA, 22 nt, Human
uaaguucaccaguuguaauaag

SEQ ID NO: 693866 - RNA, 21 nt, Human
agacccugcauauguucagua

SEQ ID NO: 693867 - RNA, 22 nt, Human
acaguguaauaugggagucagu

SEQ ID NO: 693868 - RNA, 22 nt, Human
ucagugcuugccucuggaggag

SEQ ID NO: 693869 - RNA, 22 nt, Human
uauugacagagggucagaagag

SEQ ID NO: 693870 - RNA, 22 nt, Human
uugcuaaguuauagaguaucuu

SEQ ID NO: 693871 - RNA, 22 nt, Human
ucaggcugauaggaggaacuga

SEQ ID NO: 693872 - RNA, 22 nt, Human
guuguaaauacaguacugaaac

SEQ ID NO: 693873 - RNA, 22 nt, Human
uuuuacauugggaaaugccucu

SEQ ID NO: 693874 - RNA, 19 nt, Human
cuuugucagaacaugcuuc

SEQ ID NO: 693875 - RNA, 22 nt, Human
aaggugguuguaggcuggucug

SEQ ID NO: 693876 - RNA, 21 nt, Human
ccauccaucucccuuugcugg

SEQ ID NO: 693877 - RNA, 22 nt, Human
caguguccucagccagcagcua

SEQ ID NO: 693878 - RNA, 22 nt, Human
gaaacauucagucaacaguguu

SEQ ID NO: 693879 - RNA, 22 nt, Human
agugaggauaccaauguguaga

SEQ ID NO: 693880 - RNA, 22 nt, Human
ggccuuccuucccagccuacug

SEQ ID NO: 693881 - RNA, 21 nt, Human
cuguuucuugugaagugacac

SEQ ID NO: 693882 - RNA, 22 nt, Human
ucaggacaauagugauuuuuac

SEQ ID NO: 693883 - RNA, 22 nt, Human
uagucuggacuucuuaguguca

SEQ ID NO: 693884 - RNA, 22 nt, Human
gaucuuuagccaagacacacca

SEQ ID NO: 693885 - RNA, 22 nt, Human
uggccacauccuuuccuuguca

SEQ ID NO: 693886 - RNA, 22 nt, Human
caggcagaagaaguggaaggac

SEQ ID NO: 693887 - RNA, 22 nt, Human
agggcucaccacugugcacucc

SEQ ID NO: 693888 - RNA, 22 nt, Human
ucccaagcuuagggcucucagu

SEQ ID NO: 693889 - RNA, 20 nt, Human
auccucacccucaguccuag

SEQ ID NO: 693890 - RNA, 22 nt, Human
agaaaugaaaccaaagccuaga

SEQ ID NO: 693891 - RNA, 22 nt, Human
ugcuuccuugaucauucccaaa

SEQ ID NO: 693892 - RNA, 22 nt, Human
aggccugggcaagaaggggcgu

SEQ ID NO: 693893 - RNA, 22 nt, Human
acauuuuuacugggcaucugca

SEQ ID NO: 693894 - RNA, 22 nt, Human
cuccagguuuuacaaggucuau

SEQ ID NO: 693895 - RNA, 22 nt, Human
agcagcugagaugguaagauuc

SEQ ID NO: 693896 - RNA, 22 nt, Human
ugcugcaggaacuuaagaagcu

SEQ ID NO: 693897 - RNA, 19 nt, Human
uuccuuagaggaggcggug

SEQ ID NO: 693898 - RNA, 22 nt, Human
uaaaggcacggaguuguuaugg

SEQ ID NO: 693899 - RNA, 22 nt, Human
uuauuuucuccucagaaagugg

SEQ ID NO: 693900 - RNA, 22 nt, Human
uugggcuugucugggaaacugc

SEQ ID NO: 693901 - RNA, 22 nt, Human
aaagcuauuuauuacagagaau

SEQ ID NO: 693902 - RNA, 22 nt, Human
cuugauguauaaguugauaugu

SEQ ID NO: 693903 - RNA, 22 nt, Human
gugccugggcaugagcuuguug

SEQ ID NO: 693904 - RNA, 22 nt, Human
gccugcagugagugcagaaggu

SEQ ID NO: 693905 - RNA, 22 nt, Human
uguuccagauucggcgugggac

SEQ ID NO: 693906 - RNA, 22 nt, Human
ccaaggacuggacacacagguu

SEQ ID NO: 693907 - RNA, 22 nt, Human
uuuaaggagcuacucaccguca

SEQ ID NO: 693908 - RNA, 17 nt, Human
aaacuucauucucagga

SEQ ID NO: 693909 - RNA, 22 nt, Human
ugagguagguggugaaaaauga

SEQ ID NO: 693910 - RNA, 22 nt, Human
aauuuuauuagaaggcaagggg

SEQ ID NO: 693911 - RNA, 22 nt, Human
uggcaaaguuuaucaggaauau

SEQ ID NO: 693912 - RNA, 22 nt, Human
aacacuuugggcauggccuucc

SEQ ID NO: 693913 - RNA, 22 nt, Human
agaaaugacacacaugagacau

SEQ ID NO: 693914 - RNA, 22 nt, Human
ucucccuuggucacagauuccu

SEQ ID NO: 693915 - RNA, 22 nt, Human
uuggaaacgucaccuuuuccuu

SEQ ID NO: 693916 - RNA, 22 nt, Human
uuagaaccaggaacucuaauau

SEQ ID NO: 693917 - RNA, 22 nt, Human
uccagagcuacuugcucaacuu

SEQ ID NO: 693918 - RNA, 22 nt, Human
aacacugugcaguguaaugcug

SEQ ID NO: 693919 - RNA, 22 nt, Human
ccuuccaagugcugcuuuuucc

SEQ ID NO: 693920 - RNA, 22 nt, Human
augcaauguuacagaauguacu

SEQ ID NO: 693921 - RNA, 22 nt, Human
uuccuuccagcuugugacaguc

SEQ ID NO: 693922 - RNA, 22 nt, Human
gcaagagacuuuuaugucugcc

SEQ ID NO: 693923 - RNA, 22 nt, Human
agggucuucccaccauuccugc

SEQ ID NO: 693924 - RNA, 22 nt, Human
caccuggcagcuguuggccacg

SEQ ID NO: 693925 - RNA, 22 nt, Human
cugagccagcgggcucacuuuu

SEQ ID NO: 693926 - RNA, 22 nt, Human
cagccaggcccccgagucguug

SEQ ID NO: 693927 - RNA, 22 nt, Human
uacuucuagccugccccuugug

SEQ ID NO: 693928 - RNA, 22 nt, Human
augcucauuuuauugagaauga

SEQ ID NO: 693929 - RNA, 22 nt, Human
auguacaaucuaucacaagaag

SEQ ID NO: 693930 - RNA, 22 nt, Human
cuccagggagcuguggagguuu

SEQ ID NO: 693931 - RNA, 22 nt, Human
caggcuucgcucugugggcagg

SEQ ID NO: 693932 - RNA, 23 nt, Human
cagggcugguagggaagagcgug

SEQ ID NO: 693933 - RNA, 22 nt, Human
uuucacauucagauauagacuu

SEQ ID NO: 693934 - RNA, 22 nt, Human
agacaaauuuguuuuccugucu

SEQ ID NO: 693935 - RNA, 22 nt, Human
uguacagaaggcacuaagguca

SEQ ID NO: 693936 - RNA, 22 nt, Human
agacuucuugagcuggcacuuc

SEQ ID NO: 693937 - RNA, 22 nt, Human
ggcugccagugagugcagaccg

SEQ ID NO: 693938 - RNA, 23 nt, Human
aggauaugacuugucugccaacc

SEQ ID NO: 693939 - RNA, 19 nt, Human
ucauuguugguuugucggg

SEQ ID NO: 693940 - RNA, 21 nt, Human
gcugggucagcagguccucug

SEQ ID NO: 693941 - RNA, 22 nt, Human
uuuuccuggagauggaguuguu

SEQ ID NO: 693942 - RNA, 22 nt, Human
cuucacaguaaauccagaagaa

SEQ ID NO: 693943 - RNA, 22 nt, Human
uccuggugggacagaaaaccuc

SEQ ID NO: 693944 - RNA, 22 nt, Human
gacuggacucugaagaugggug

SEQ ID NO: 693945 - RNA, 22 nt, Human
cuucaggauuuaggaagaugaa

SEQ ID NO: 693946 - RNA, 22 nt, Human
auaaagacaugcuuacuugccc

SEQ ID NO: 693947 - RNA, 22 nt, Human
uauuagggaacugcaagacuaa

SEQ ID NO: 693948 - RNA, 22 nt, Human
cuuuaccagauuccauugcaag

SEQ ID NO: 693949 - RNA, 22 nt, Human
gacagggacacagccagugagg

SEQ ID NO: 693950 - RNA, 21 nt, Human
cucaggcauuugaggagaguc

SEQ ID NO: 693951 - RNA, 22 nt, Human
agauauuuaaaucagacaaaga

SEQ ID NO: 693952 - RNA, 22 nt, Human
agcuguaugcccaagaugcuau

SEQ ID NO: 693953 - RNA, 22 nt, Human
cagcaggaggugagaugugacc

SEQ ID NO: 693954 - RNA, 20 nt, Human
ggucccugcccucugucauc

SEQ ID NO: 693955 - RNA, 22 nt, Human
uucucuucuguucagugcccaa

SEQ ID NO: 693956 - RNA, 22 nt, Human
agcauaaacucagggacacaca

SEQ ID NO: 693957 - RNA, 22 nt, Human
acacuaagguuggagucacagu

SEQ ID NO: 693958 - RNA, 22 nt, Human
auagauguucaaucagauauuu

SEQ ID NO: 693959 - RNA, 22 nt, Human
augugucuuucaagguauagaa

SEQ ID NO: 693960 - RNA, 22 nt, Human
aucugccucuucuucauugcga

SEQ ID NO: 693961 - RNA, 18 nt, Human
uggcagguagacucaggu

SEQ ID NO: 693962 - RNA, 22 nt, Human
ggaguggcuguuucugccccca

SEQ ID NO: 693963 - RNA, 22 nt, Human
uaaguccacuauauccuucucu

SEQ ID NO: 693964 - RNA, 22 nt, Human
uauggcaagagaaucaacugaa

SEQ ID NO: 693965 - RNA, 22 nt, Human
aucagaaaucuaggauucagaa

SEQ ID NO: 693966 - RNA, 22 nt, Human
uccugcgagugcgcuuuugguc

SEQ ID NO: 693967 - RNA, 22 nt, Human
ccugucucuuucaaucugagag

SEQ ID NO: 693968 - RNA, 22 nt, Human
ggaggcucccacgcagcucaca

SEQ ID NO: 693969 - RNA, 23 nt, Human
cuuucauugugguuucacagagc

SEQ ID NO: 693970 - RNA, 22 nt, Human
aaaauaacuucuacuauuugca

SEQ ID NO: 693971 - RNA, 22 nt, Human
cuguccugauggugccacuggu

SEQ ID NO: 693972 - RNA, 23 nt, Human
agagcaaggaaaugaggugugau

SEQ ID NO: 693973 - RNA, 22 nt, Human
accugaggacuggaugguagaa

SEQ ID NO: 693974 - RNA, 22 nt, Human
guauuauucucagcuuugggau

SEQ ID NO: 693975 - RNA, 22 nt, Human
aucugggccuguucccucaccu

SEQ ID NO: 693976 - RNA, 22 nt, Human
uagcagcuccuaaacaguggug

SEQ ID NO: 693977 - RNA, 22 nt, Human
aaggaggagcggaggcuuguug

SEQ ID NO: 693978 - RNA, 22 nt, Human
ggggagcugggaggugaguuac

SEQ ID NO: 693979 - RNA, 22 nt, Human
aauacaaucaaauucacuagca

SEQ ID NO: 693980 - RNA, 22 nt, Human
gugggugucaguaucuuuaacg

SEQ ID NO: 693981 - RNA, 22 nt, Human
guaguaauaguacauuagaaug

SEQ ID NO: 693982 - RNA, 22 nt, Human
aacauacauauuucagugucca

SEQ ID NO: 693983 - RNA, 22 nt, Human
guccugguccugccuccccaug

SEQ ID NO: 693984 - RNA, 22 nt, Human
uaugagcaagaguuugugaagg

SEQ ID NO: 693985 - RNA, 22 nt, Human
ucuuuucugccacagccugagc

SEQ ID NO: 693986 - RNA, 22 nt, Human
cagugcaggcugggggcccugc

SEQ ID NO: 693987 - RNA, 19 nt, Human
auucauuggccaggguggu

SEQ ID NO: 693988 - RNA, 20 nt, Human
cccagccccuaccuguugcc

SEQ ID NO: 693989 - RNA, 22 nt, Human
ccaagggcucugacuugccugc

SEQ ID NO: 693990 - RNA, 22 nt, Human
uaacugauguucccuuacugua

SEQ ID NO: 693991 - RNA, 19 nt, Human
ccugggacuuaggcugggu

SEQ ID NO: 693992 - RNA, 22 nt, Human
aacuuaggaaaauaaggcauga

SEQ ID NO: 693993 - RNA, 18 nt, Human
uggcaggggcaguacgcc

SEQ ID NO: 693994 - RNA, 22 nt, Human
agaaaaggauugauggaucaga

SEQ ID NO: 693995 - RNA, 22 nt, Human
cugcuggagguuggagcaugca

SEQ ID NO: 693996 - RNA, 22 nt, Human
gggacccugggaggcuggcgca

SEQ ID NO: 693997 - RNA, 22 nt, Human
aucugaaaaaucuccuuuguca

SEQ ID NO: 693998 - RNA, 23 nt, Human
cuccccaguguccucaugcaucu

SEQ ID NO: 693999 - RNA, 22 nt, Human
ucucagcagccagauccagagc

SEQ ID NO: 694000 - RNA, 19 nt, Human
ggcugggucuggcagguuc

SEQ ID NO: 694001 - RNA, 22 nt, Human
cuguggccagauggugccaguu

SEQ ID NO: 694002 - RNA, 22 nt, Human
gaagccuuugccuaaaacauua

SEQ ID NO: 694003 - RNA, 22 nt, Human
ggaaagauguaauauuaucuaa

SEQ ID NO: 694004 - RNA, 22 nt, Human
ucccuggguucccguggaagug

SEQ ID NO: 694005 - RNA, 22 nt, Human
uauaucagcaaagcauuuaaaa

SEQ ID NO: 694006 - RNA, 22 nt, Human
caucaucugugcuggagagccu

SEQ ID NO: 694007 - RNA, 22 nt, Human
gugggagaagcccuguucguag

SEQ ID NO: 694008 - RNA, 22 nt, Human
uggcacagacauuuaauagccu

SEQ ID NO: 694009 - RNA, 22 nt, Human
gaacagaugggcucagauccug

SEQ ID NO: 694010 - RNA, 22 nt, Human
aggccagcuucuacccucuguu

SEQ ID NO: 694011 - RNA, 22 nt, Human
gacaagacaugugaugacauca

SEQ ID NO: 694012 - RNA, 22 nt, Human
ucagaaagaacacaggcaguag

SEQ ID NO: 694013 - RNA, 22 nt, Human
aauaagcugcuaggaacuuagu

SEQ ID NO: 694014 - RNA, 22 nt, Human
ucuacccugcggucuuggggca

SEQ ID NO: 694015 - RNA, 23 nt, Human
aggaaagcauucauuuuuaccau

SEQ ID NO: 694016 - RNA, 22 nt, Human
ggccccucuuguggcacauacg

SEQ ID NO: 694017 - RNA, 22 nt, Human
gucugccucuuucuuucugggu

SEQ ID NO: 694018 - RNA, 22 nt, Human
ugcccugcccaucuacccuguc

SEQ ID NO: 694019 - RNA, 22 nt, Human
cuuugcagaaauaaacuugaug

SEQ ID NO: 694020 - RNA, 20 nt, Human
caugauacuuggaagggcuu

SEQ ID NO: 694021 - RNA, 22 nt, Human
cuuuguauucauccguaauaau

SEQ ID NO: 694022 - RNA, 22 nt, Human
cuguacagaagcuagagcaaau

SEQ ID NO: 694023 - RNA, 22 nt, Human
uugaucuuuauaauaguuuuga

SEQ ID NO: 694024 - RNA, 22 nt, Human
cuggccaguugccuuccugggu

SEQ ID NO: 694025 - RNA, 21 nt, Human
ccuccugcccgcaagcuaggg

SEQ ID NO: 694026 - RNA, 22 nt, Human
ggugugguuugaagggagaugg

SEQ ID NO: 694027 - RNA, 20 nt, Human
ugucuccagggcugagugga

SEQ ID NO: 694028 - RNA, 22 nt, Human
cucaggaugcaauuccaucaag

SEQ ID NO: 694029 - RNA, 22 nt, Human
gugcucaggaagcuguuccugc

SEQ ID NO: 694030 - RNA, 22 nt, Human
caggcuggagugcaauggugcu

SEQ ID NO: 694031 - RNA, 22 nt, Human
cuaggugauccacugcucucuu

SEQ ID NO: 694032 - RNA, 22 nt, Human
acuuucuuauccaugaucucac

SEQ ID NO: 694033 - RNA, 22 nt, Human
ugacagagcauguagugacagc

SEQ ID NO: 694034 - RNA, 22 nt, Human
gugcuggggguuucuguagguc

SEQ ID NO: 694035 - RNA, 22 nt, Human
ugugugcauguuaaugagaaaa

SEQ ID NO: 694036 - RNA, 22 nt, Human
agaaucagugagcaguugugau

SEQ ID NO: 694037 - RNA, 22 nt, Human
aauuuguuagcauacucuaguu

SEQ ID NO: 694038 - RNA, 22 nt, Human
caguccugagcuccugggcuga

SEQ ID NO: 694039 - RNA, 22 nt, Human
auguaacaggugaagcucugag

SEQ ID NO: 694040 - RNA, 22 nt, Human
ggcucuggggaagcucucuuca

SEQ ID NO: 694041 - RNA, 22 nt, Human
gaggcucagagaagucauggua

SEQ ID NO: 694042 - RNA, 22 nt, Human
uuaguguuuaaagguuucagag

SEQ ID NO: 694043 - RNA, 22 nt, Human
ugugcccuguuaaaugcacagu

SEQ ID NO: 694044 - RNA, 22 nt, Human
aguguccuugauuccuguuguu

SEQ ID NO: 694045 - RNA, 21 nt, Human
ucucuuugggaacauuaauca

SEQ ID NO: 694046 - RNA, 23 nt, Human
cacacccaucacuaagagcuccu

SEQ ID NO: 694047 - RNA, 20 nt, Human
uguguaugugcacaugcgaa

SEQ ID NO: 694048 - RNA, 22 nt, Human
uaugucuuuuucucacuauagu

SEQ ID NO: 694049 - RNA, 22 nt, Human
ugcguuuaguuucaagacacgu

SEQ ID NO: 694050 - RNA, 22 nt, Human
gcagagcuaucuucuggauuug

SEQ ID NO: 694051 - RNA, 22 nt, Human
uggcucaggccacuucuuuuau

SEQ ID NO: 694052 - RNA, 22 nt, Human
uuuucuauucauugucuauggu

SEQ ID NO: 694053 - RNA, 22 nt, Human
gagaaggggugauguggguaau

SEQ ID NO: 694054 - RNA, 22 nt, Human
gagaggaaugagguuaaggacu

SEQ ID NO: 694055 - RNA, 20 nt, Human
gugcugagggcugggcaaug

SEQ ID NO: 694056 - RNA, 22 nt, Human
aagaacaugcuauaauuaucuu

SEQ ID NO: 694057 - RNA, 22 nt, Human
uauacaagugagaagaagaguu

SEQ ID NO: 694058 - RNA, 22 nt, Human
ccagggaaucucugaguguguu

SEQ ID NO: 694059 - RNA, 22 nt, Human
cacauguaguaagcaggcaaug

SEQ ID NO: 694060 - RNA, 23 nt, Human
cugcugugaaacaugguuuuggu

SEQ ID NO: 694061 - RNA, 22 nt, Human
uggucugauaccggauuccagu

SEQ ID NO: 694062 - RNA, 22 nt, Human
cacccagagggcuugcugaaca

SEQ ID NO: 694063 - RNA, 22 nt, Human
agagccuggcucccagcuaccg

SEQ ID NO: 694064 - RNA, 22 nt, Human
aacuugaaguugcagaaaguac

SEQ ID NO: 694065 - RNA, 22 nt, Human
caggcugcagugcaguggcuau

SEQ ID NO: 694066 - RNA, 22 nt, Human
cugccagcucucuggaggcucu

SEQ ID NO: 694067 - RNA, 22 nt, Human
auaacaugaccugugcuucaca

SEQ ID NO: 694068 - RNA, 22 nt, Human
uagcagaaacuguuacagaagg

SEQ ID NO: 694069 - RNA, 22 nt, Human
uccagcacccaauguggcuaag

SEQ ID NO: 694070 - RNA, 23 nt, Human
aagauccauucaaauuauguauc

SEQ ID NO: 694071 - RNA, 22 nt, Human
cagcuuuccagagaccugcccc

SEQ ID NO: 694072 - RNA, 22 nt, Human
acuguucaagcaaaugacauug

SEQ ID NO: 694073 - RNA, 22 nt, Human
ugcugaggcaguccuaacagga

SEQ ID NO: 694074 - RNA, 22 nt, Human
aaauuucuguuguuuugagcca

SEQ ID NO: 694075 - RNA, 22 nt, Human
cccaggaggaggaaaaagcucg

SEQ ID NO: 694076 - RNA, 22 nt, Human
agauggcaggcccugugggggu

SEQ ID NO: 694077 - RNA, 22 nt, Human
ucacuuuuugauaucauucugc

SEQ ID NO: 694078 - RNA, 22 nt, Human
ccuggcuggacuggaccguggc

SEQ ID NO: 694079 - RNA, 22 nt, Human
ucucagaggugcccuggcaucu

SEQ ID NO: 694080 - RNA, 22 nt, Human
cagugauucagacucaucauuu

SEQ ID NO: 694081 - RNA, 22 nt, Human
uuacacauugcagaucaaaaug

SEQ ID NO: 694082 - RNA, 20 nt, Human
gcaguguguaugaauagcug

SEQ ID NO: 694083 - RNA, 22 nt, Human
ugcggcaggagaagguguuaug

SEQ ID NO: 694084 - RNA, 22 nt, Human
cuuuuuguuguccacacuagga

SEQ ID NO: 694085 - RNA, 22 nt, Human
ucucccaacauguggaggucag

SEQ ID NO: 694086 - RNA, 22 nt, Human
ugcuggagacauagcaggcagc

SEQ ID NO: 694087 - RNA, 22 nt, Human
aacugcaagcucuuuacugcua

SEQ ID NO: 694088 - RNA, 22 nt, Human
acaguguagugugaugucaaaa

SEQ ID NO: 694089 - RNA, 22 nt, Human
ucugaggggcuggaagggcugc

SEQ ID NO: 694090 - RNA, 21 nt, Human
ugcucacagaugugcucagug

SEQ ID NO: 694091 - RNA, 22 nt, Human
aucccugcccucauggagcuua

SEQ ID NO: 694092 - RNA, 22 nt, Human
cuggcugccagcauuuggggga

SEQ ID NO: 694093 - RNA, 22 nt, Human
auucuacaccucucucauuuag

SEQ ID NO: 694094 - RNA, 22 nt, Human
agguggcauuuacaccauggga

SEQ ID NO: 694095 - RNA, 22 nt, Human
gcagggcagcucacugugguuc

SEQ ID NO: 694096 - RNA, 22 nt, Human
ucugugcuaaugcuucacaaua

SEQ ID NO: 694097 - RNA, 22 nt, Human
aguguuuacucccugcccucca

SEQ ID NO: 694098 - RNA, 20 nt, Human
cagguccagcacgugcacgg

SEQ ID NO: 694099 - RNA, 22 nt, Human
gcagagcaccaaagugaaagau

SEQ ID NO: 694100 - RNA, 22 nt, Human
uuuaccaagcuuuaauuacaua

SEQ ID NO: 694101 - RNA, 22 nt, Human
gggucucucucggcuccacgcg

SEQ ID NO: 694102 - RNA, 23 nt, Human
gccuggcuuccaagguaggggag

SEQ ID NO: 694103 - RNA, 22 nt, Human
uagcaggaauaaaaauguaccc

SEQ ID NO: 694104 - RNA, 22 nt, Human
acaugcauggacauguauauau

SEQ ID NO: 694105 - RNA, 22 nt, Human
agugagaguauuaaugugaacu

SEQ ID NO: 694106 - RNA, 20 nt, Human
agaagaggauacaaccaggc

SEQ ID NO: 694107 - RNA, 22 nt, Human
cccuggccccucacuccgaggc

SEQ ID NO: 694108 - RNA, 22 nt, Human
uuucuaagugugauuuuagauu

SEQ ID NO: 694109 - RNA, 22 nt, Human
ugaggccuuuucugucuggcua

SEQ ID NO: 694110 - RNA, 22 nt, Human
aauugcuuuaguuaccauagug

SEQ ID NO: 694111 - RNA, 22 nt, Human
ucaagucuugaugagacaaacc

SEQ ID NO: 694112 - RNA, 22 nt, Human
uacagagaggugacccuugggc

SEQ ID NO: 694113 - RNA, 22 nt, Human
gaugaaaugugaaaguucuggg

SEQ ID NO: 694114 - RNA, 22 nt, Human
aggcacuguacuagguacaggg

SEQ ID NO: 694115 - RNA, 22 nt, Human
augcauguaacaguguuaugaa

SEQ ID NO: 694116 - RNA, 22 nt, Human
uggaggcugguuucugcugagg

SEQ ID NO: 694117 - RNA, 19 nt, Human
gcugccugucuuagccagu

SEQ ID NO: 694118 - RNA, 22 nt, Human
aucuucaaggaaaaaauacagu

SEQ ID NO: 694119 - RNA, 22 nt, Human
uauuuagugauagaagcaagga

SEQ ID NO: 694120 - RNA, 22 nt, Human
ccuugggauuucucaugccaau

SEQ ID NO: 694121 - RNA, 22 nt, Human
aagaaaguguggagagccuagc

SEQ ID NO: 694122 - RNA, 22 nt, Human
uucuuauuucccccuucaucau

SEQ ID NO: 694123 - RNA, 22 nt, Human
gccaggaaggcugaagccagaa

SEQ ID NO: 694124 - RNA, 22 nt, Human
aggcuguuuuguauaaacugga

SEQ ID NO: 694125 - RNA, 22 nt, Human
ugaaaagacugcaagagagcau

SEQ ID NO: 694126 - RNA, 22 nt, Human
ugcaugauagagaugguauuag

SEQ ID NO: 694127 - RNA, 22 nt, Human
ggcagaggugaaguucacaagg

SEQ ID NO: 694128 - RNA, 22 nt, Human
agcccugaagcuggccaugucc

SEQ ID NO: 694129 - RNA, 22 nt, Human
ggagccagagucugcaguguaa

SEQ ID NO: 694130 - RNA, 22 nt, Human
ggucuggcacucaugcagcagg

SEQ ID NO: 694131 - RNA, 22 nt, Human
caugaucaccacuugacagccc

SEQ ID NO: 694132 - RNA, 22 nt, Human
cugugacugggugacaguccuc

SEQ ID NO: 694133 - RNA, 22 nt, Human
uggcacugccaaccugcuaggu

SEQ ID NO: 694134 - RNA, 22 nt, Human
aggcagccuuuagacagucugc

SEQ ID NO: 694135 - RNA, 22 nt, Human
uucaacaauuaaguaucagccu

SEQ ID NO: 694136 - RNA, 19 nt, Human
cauacaauuaccauaggau

SEQ ID NO: 694137 - RNA, 22 nt, Human
ugcaugaaauauuuucuguagg

SEQ ID NO: 694138 - RNA, 18 nt, Human
gagcugccauauuuaguu

SEQ ID NO: 694139 - RNA, 22 nt, Human
gaauuucagagguaacaucauc

SEQ ID NO: 694140 - RNA, 22 nt, Human
ggcugcucugccuuccagcugg

SEQ ID NO: 694141 - RNA, 22 nt, Human
aaaugauguuauaagaccagga

SEQ ID NO: 694142 - RNA, 22 nt, Human
acguggagagaauagggcacca

SEQ ID NO: 694143 - RNA, 22 nt, Human
augagagacaggaacgagcugg

SEQ ID NO: 694144 - RNA, 22 nt, Human
uuccagaaaaaaauguauaucu

SEQ ID NO: 694145 - RNA, 22 nt, Human
cugccuggguucaaguccuguu

SEQ ID NO: 694146 - RNA, 22 nt, Human
cugcagggaugugaggcccguu

SEQ ID NO: 694147 - RNA, 22 nt, Human
agcagagcugcaguggccugcu

SEQ ID NO: 694148 - RNA, 22 nt, Human
auacaugugccauguuggugua

SEQ ID NO: 694149 - RNA, 22 nt, Human
gccaagggaacugagccggagg

SEQ ID NO: 694150 - RNA, 19 nt, Human
cugcugaauuagcucugga

SEQ ID NO: 694151 - RNA, 19 nt, Human
cagggauggguagggacuc

SEQ ID NO: 694152 - RNA, 22 nt, Human
gacagcagguaauuaguuaaca

SEQ ID NO: 694153 - RNA, 22 nt, Human
gagcccagcccagagccauaug

SEQ ID NO: 694154 - RNA, 22 nt, Human
gcucuggcuaguuaccucuuac

SEQ ID NO: 694155 - RNA, 21 nt, Human
gacuucaugggucaaccaauu

SEQ ID NO: 694156 - RNA, 22 nt, Human
ugagucugggcauguucacuuu

SEQ ID NO: 694157 - RNA, 22 nt, Human
auguucuuguucaaaugucagu

SEQ ID NO: 694158 - RNA, 22 nt, Human
cagagguagggagcuauguuau

SEQ ID NO: 694159 - RNA, 22 nt, Human
uuccuggcaaagugagcaucac

SEQ ID NO: 694160 - RNA, 22 nt, Human
aucaauucuuaggaaaauagcu

SEQ ID NO: 694161 - RNA, 19 nt, Human
ugaggcacuagucuggucc

SEQ ID NO: 694162 - RNA, 22 nt, Human
gcagccuguuguaccagccugu

SEQ ID NO: 694163 - RNA, 22 nt, Human
guggaccaagguggaagauaaa

SEQ ID NO: 694164 - RNA, 22 nt, Human
aucuucugauuuauggagcaau

SEQ ID NO: 694165 - RNA, 22 nt, Human
acaugcuuuaucggauugacac

SEQ ID NO: 694166 - RNA, 22 nt, Human
uacagcauuaacaggcuguuua

SEQ ID NO: 694167 - RNA, 22 nt, Human
gacagcauggugucuguucagg

SEQ ID NO: 694168 - RNA, 22 nt, Human
cagcauugaucccaggcugugg

SEQ ID NO: 694169 - RNA, 22 nt, Human
ucuaaggacaaggucuuggaga

SEQ ID NO: 694170 - RNA, 22 nt, Human
cucagaguucuccugggaggug

SEQ ID NO: 694171 - RNA, 22 nt, Human
aagcuggaggcugagaucacca

SEQ ID NO: 694172 - RNA, 22 nt, Human
cuggggcagagcccagcaauuu

SEQ ID NO: 694173 - RNA, 22 nt, Human
uuuucaguaaugucuacauaau

SEQ ID NO: 694174 - RNA, 23 nt, Human
aggaggaaaaguuaucugcugag

SEQ ID NO: 694175 - RNA, 22 nt, Human
ucccgggcaggucgagcgagcc

SEQ ID NO: 694176 - RNA, 22 nt, Human
acugcuuuucagagucugccug

SEQ ID NO: 694177 - RNA, 22 nt, Human
uuacauuuugggguaaggauaa

SEQ ID NO: 694178 - RNA, 22 nt, Human
ugagcuucuuuauuuggccaga

SEQ ID NO: 694179 - RNA, 22 nt, Human
uuuacauugcauuagguauuau

SEQ ID NO: 694180 - RNA, 22 nt, Human
gccagcugaagcccugguggaa

SEQ ID NO: 694181 - RNA, 22 nt, Human
uuucagagaugucuagccuauu

SEQ ID NO: 694182 - RNA, 22 nt, Human
agcuucuuaaguuccugcagca

SEQ ID NO: 694183 - RNA, 18 nt, Human
aauggaaggggugcuguu

SEQ ID NO: 694184 - RNA, 22 nt, Human
guguguguaucugccuaucaca

SEQ ID NO: 694185 - RNA, 22 nt, Human
uucaacaaaauauauuuuucca

SEQ ID NO: 694186 - RNA, 22 nt, Human
cuacuuuaauuuucugcagaga

SEQ ID NO: 694187 - RNA, 22 nt, Human
acuguuuaaaggcuuccuuucu

SEQ ID NO: 694188 - RNA, 22 nt, Human
aaacaguagaaguguauuuuau

SEQ ID NO: 694189 - RNA, 22 nt, Human
aggcacuguucccaguuauccu

SEQ ID NO: 694190 - RNA, 22 nt, Human
ccugaggauuguuggugcuucc

SEQ ID NO: 694191 - RNA, 22 nt, Human
aagauucuuaccuauacccagu

SEQ ID NO: 694192 - RNA, 22 nt, Human
uggcuagaauuggguucacagg

SEQ ID NO: 694193 - RNA, 22 nt, Human
agcuuugguugaggggagugug

SEQ ID NO: 694194 - RNA, 22 nt, Human
cuuuucagagcugagaucaccg

SEQ ID NO: 694195 - RNA, 22 nt, Human
cuacauuuguucuauagcuuuu

SEQ ID NO: 694196 - RNA, 22 nt, Human
agaggucugagcaaucucaagc

SEQ ID NO: 694197 - RNA, 22 nt, Human
aauuccaagagcuuccuaagug

SEQ ID NO: 694198 - RNA, 22 nt, Human
uucuucuguuggcagagcauac

SEQ ID NO: 694199 - RNA, 22 nt, Human
ucaagacauauuaaaugugcga

SEQ ID NO: 694200 - RNA, 22 nt, Human
uugaaugaguguuuuacucaug

SEQ ID NO: 694201 - RNA, 22 nt, Human
aaaggcauuuuaauucuaaaga

SEQ ID NO: 694202 - RNA, 22 nt, Human
cacagagaaugaugagucacug

SEQ ID NO: 694203 - RNA, 22 nt, Human
uguggccaccagagcugcuauu

SEQ ID NO: 694204 - RNA, 22 nt, Human
uacuguaugauuucauguauau

SEQ ID NO: 694205 - RNA, 22 nt, Human
cacuucauugggaccagggcug

SEQ ID NO: 694206 - RNA, 23 nt, Human
uguuccugucaaauuuucuuccc

SEQ ID NO: 694207 - RNA, 22 nt, Human
ugcggaggucggugcugcgggc

SEQ ID NO: 694208 - RNA, 22 nt, Human
gcggcccgagcaggacgggugg

SEQ ID NO: 694209 - RNA, 22 nt, Human
caggagcucaagaccacccugg

SEQ ID NO: 694210 - RNA, 22 nt, Human
uccucuggcccagcugccucug

SEQ ID NO: 694211 - RNA, 22 nt, Human
ucgauagaaaagagcugcaggg

SEQ ID NO: 694212 - RNA, 22 nt, Human
uauuguacauuucaaaguagcu

SEQ ID NO: 694213 - RNA, 22 nt, Human
aaaacuguaucuucuugggacu

SEQ ID NO: 694214 - RNA, 22 nt, Human
guucaguauuaaugagaugauu

SEQ ID NO: 694215 - RNA, 22 nt, Human
augacaguucuacacuuaaucu

SEQ ID NO: 694216 - RNA, 22 nt, Human
cuugacagaagguuuuauccua

SEQ ID NO: 694217 - RNA, 22 nt, Human
ggcacagcacuguaggccuggg

SEQ ID NO: 694218 - RNA, 22 nt, Human
caggucugugugccauuuccaa

SEQ ID NO: 694219 - RNA, 22 nt, Human
uuccaugccuagaacaggauuc

SEQ ID NO: 694220 - RNA, 19 nt, Human
acaaauuguccucaucaag

SEQ ID NO: 694221 - RNA, 22 nt, Human
ggagcggucagcuggccacacg

SEQ ID NO: 694222 - RNA, 20 nt, Human
gggagaagggcugaugagag

SEQ ID NO: 694223 - RNA, 22 nt, Human
uacauuguacuuacaaauagug

SEQ ID NO: 694224 - RNA, 22 nt, Human
uaaagugcucauaaaaauggau

SEQ ID NO: 694225 - RNA, 22 nt, Human
ugcauuccacauaaagcgauaa

SEQ ID NO: 694226 - RNA, 22 nt, Human
uaugagaauuugcuaauuggcu

SEQ ID NO: 694227 - RNA, 22 nt, Human
cuauuauuuccucaucuauaaa

SEQ ID NO: 694228 - RNA, 22 nt, Human
uccaggacagaguagaagcagc

SEQ ID NO: 694229 - RNA, 22 nt, Human
uuguuuaaaagaaaucauagaa

SEQ ID NO: 694230 - RNA, 22 nt, Human
auggcuuuugaugcuaagccaa

SEQ ID NO: 694231 - RNA, 22 nt, Human
ugcagagagauauggcaagagg

SEQ ID NO: 694232 - RNA, 22 nt, Human
uaauuguauggagaaggcugca

SEQ ID NO: 694233 - RNA, 22 nt, Human
ucugcagcaaccuuucaccucc

SEQ ID NO: 694234 - RNA, 22 nt, Human
gugggcagugguuugcgcgguc

SEQ ID NO: 694235 - RNA, 22 nt, Human
acacauauguaugcaucaugug

SEQ ID NO: 694236 - RNA, 19 nt, Human
agcuggagauuggagggca

SEQ ID NO: 694237 - RNA, 20 nt, Human
gagggcaggcacccauuuca

SEQ ID NO: 694238 - RNA, 22 nt, Human
augccugccauuuagaagucuu

SEQ ID NO: 694239 - RNA, 22 nt, Human
uccaaagaaccuggcuacuguc

SEQ ID NO: 694240 - RNA, 22 nt, Human
gucuucuaaguaucaaagcaga

SEQ ID NO: 694241 - RNA, 22 nt, Human
cauaauuacugauaugcugauu

SEQ ID NO: 694242 - RNA, 22 nt, Human
cagguccuuuaguguccagaac

SEQ ID NO: 694243 - RNA, 22 nt, Human
uucccacauucuuuacauucau

SEQ ID NO: 694244 - RNA, 22 nt, Human
uggagccaaugaacauuugcug

SEQ ID NO: 694245 - RNA, 22 nt, Human
ggugucuggacagugagccagg

SEQ ID NO: 694246 - RNA, 22 nt, Human
uuagaaucagguguuauaauca

SEQ ID NO: 694247 - RNA, 18 nt, Human
ucaggagacacagacgca

SEQ ID NO: 694248 - RNA, 22 nt, Human
uccaucacuauuaucuacaaca

SEQ ID NO: 694249 - RNA, 22 nt, Human
cccucccugugugccucauuug

SEQ ID NO: 694250 - RNA, 22 nt, Human
guggauggagcuggaagccauu

SEQ ID NO: 694251 - RNA, 22 nt, Human
uagaaguuaaaggaauacagaa

SEQ ID NO: 694252 - RNA, 22 nt, Human
aaaguauauuuacuuacuguga

SEQ ID NO: 694253 - RNA, 22 nt, Human
uccugggacucuuuaucagaga

SEQ ID NO: 694254 - RNA, 22 nt, Human
cugugugagcaucacuucagau

SEQ ID NO: 694255 - RNA, 22 nt, Human
uaaguuucuacuugucgggucu

SEQ ID NO: 694256 - RNA, 20 nt, Human
gucucagaauggauuugcau

SEQ ID NO: 694257 - RNA, 22 nt, Human
ucaauguuuggaaauccuuugu

SEQ ID NO: 694258 - RNA, 22 nt, Human
ucaguguggaaaauccuuuggc

SEQ ID NO: 694259 - RNA, 22 nt, Human
auuuauuaagcaucugcuaugu

SEQ ID NO: 694260 - RNA, 22 nt, Human
uucucagaggcugcuaagugca

SEQ ID NO: 694261 - RNA, 21 nt, Human
aggcagcaucugauuuauaug

SEQ ID NO: 694262 - RNA, 22 nt, Human
caggaacaauaucuguccuggu

SEQ ID NO: 694263 - RNA, 22 nt, Human
ugugcccauuccacuugaguac

SEQ ID NO: 694264 - RNA, 22 nt, Human
ucugcugaaucagauagcuaag

SEQ ID NO: 694265 - RNA, 22 nt, Human
uggccacacugcccccacuggg

SEQ ID NO: 694266 - RNA, 22 nt, Human
ugcagagguuuuuaauacauuu

SEQ ID NO: 694267 - RNA, 22 nt, Human
ucacaugucacaaaacacugcc

SEQ ID NO: 694268 - RNA, 22 nt, Human
gcagguggugggggagccguuc

SEQ ID NO: 694269 - RNA, 22 nt, Human
aaggaacugcugauguggugac

SEQ ID NO: 694270 - RNA, 22 nt, Human
gcuuccuagcauuagccauugc

SEQ ID NO: 694271 - RNA, 22 nt, Human
augguuaaauugguuauuuaug

SEQ ID NO: 694272 - RNA, 22 nt, Human
agaaguuaccacauacuucucu

SEQ ID NO: 694273 - RNA, 22 nt, Human
acaaccuguucguuuccacaga

SEQ ID NO: 694274 - RNA, 22 nt, Human
aaagauugaaagagaauuuguc

SEQ ID NO: 694275 - RNA, 22 nt, Human
guguaugagccuccagcugggc

SEQ ID NO: 694276 - RNA, 22 nt, Human
cccaggcaucccauuaaggagc

SEQ ID NO: 694277 - RNA, 22 nt, Human
ucacccagguaauagcaguuug

SEQ ID NO: 694278 - RNA, 22 nt, Human
uccuggagugucuuccccaagg

SEQ ID NO: 694279 - RNA, 22 nt, Human
guacugaacuuaaaaauccccu

SEQ ID NO: 694280 - RNA, 22 nt, Human
ggcucagggaaugaggaagaau

SEQ ID NO: 694281 - RNA, 22 nt, Human
aggcccugagcauccgagggca

SEQ ID NO: 694282 - RNA, 23 nt, Human
acugagguacugagguugugaca

SEQ ID NO: 694283 - RNA, 22 nt, Human
ggcacugaaccaggacacaagc

SEQ ID NO: 694284 - RNA, 20 nt, Human
gaguauauuucuuccuuugc

SEQ ID NO: 694285 - RNA, 22 nt, Human
agcuccuggucuuuguccagag

SEQ ID NO: 694286 - RNA, 22 nt, Human
gagccagccuucuucugagguc

SEQ ID NO: 694287 - RNA, 22 nt, Human
uaucuguuuauuguuacuguca

SEQ ID NO: 694288 - RNA, 22 nt, Human
cucuccagggcaugaguuccac

SEQ ID NO: 694289 - RNA, 22 nt, Human
auucagacugucuaaaugguuu

SEQ ID NO: 694290 - RNA, 22 nt, Human
gcagggcugauguuauugacga

SEQ ID NO: 694291 - RNA, 22 nt, Human
ccagcuuuucagaaucugccug

SEQ ID NO: 694292 - RNA, 22 nt, Human
cuggcuccauccuaggcaaaug

SEQ ID NO: 694293 - RNA, 22 nt, Human
gugucccaauguucaggacggc

SEQ ID NO: 694294 - RNA, 22 nt, Human
uugcaguagguggagugaauuu

SEQ ID NO: 694295 - RNA, 22 nt, Human
uuauucaggaagguguuacuua

SEQ ID NO: 694296 - RNA, 22 nt, Human
uuguuuuaagccagucugccua

SEQ ID NO: 694297 - RNA, 20 nt, Human
aucuucuuggccagcuugcu

SEQ ID NO: 694298 - RNA, 22 nt, Human
auguccucggcucugugcugcu

SEQ ID NO: 694299 - RNA, 19 nt, Human
agagaaagaauugagucua

SEQ ID NO: 694300 - RNA, 18 nt, Human
ucauuagggauugcaaag

SEQ ID NO: 694301 - RNA, 22 nt, Human
gcuggugcauuagcugcaguuc

SEQ ID NO: 694302 - RNA, 22 nt, Human
aagcagcugugugacauaaucu

SEQ ID NO: 694303 - RNA, 22 nt, Human
aaggcauguguccucagagaga

SEQ ID NO: 694304 - RNA, 22 nt, Human
gcuccaggcgagcuggaccaga

SEQ ID NO: 694305 - RNA, 19 nt, Human
ccagccucucuuccacccc

SEQ ID NO: 694306 - RNA, 22 nt, Human
ugcuuggcuucauuuaaguuuu

SEQ ID NO: 694307 - RNA, 22 nt, Human
uuuguguauguaugcuuguaca

SEQ ID NO: 694308 - RNA, 20 nt, Human
ccauucugggugcagucugg

SEQ ID NO: 694309 - RNA, 22 nt, Human
ucacaagacagaaaacauuuag

SEQ ID NO: 694310 - RNA, 22 nt, Human
gggugggaugccgcugucucca

SEQ ID NO: 694311 - RNA, 19 nt, Human
uaugacaaguacuaguucu

SEQ ID NO: 694312 - RNA, 22 nt, Human
ugaagcagcaccauuuuagagc

SEQ ID NO: 694313 - RNA, 20 nt, Human
aguggaauuucagauacccc

SEQ ID NO: 694314 - RNA, 22 nt, Human
cauguaaagcacuucauaacag

SEQ ID NO: 694315 - RNA, 22 nt, Human
ugaggcagguaagcaaguuuug

SEQ ID NO: 694316 - RNA, 17 nt, Human
ugaagaugcauggcagc

SEQ ID NO: 694317 - RNA, 22 nt, Human
gugacuguaauuaccuuagcaa

SEQ ID NO: 694318 - RNA, 22 nt, Human
uguucugcaaugcugccuccuu

SEQ ID NO: 694319 - RNA, 22 nt, Human
caaaauaccacgacuuguuuua

SEQ ID NO: 694320 - RNA, 22 nt, Human
gacuucaaaagcugacauucau

SEQ ID NO: 694321 - RNA, 22 nt, Human
cacauuuaugggcugggaggca

SEQ ID NO: 694322 - RNA, 22 nt, Human
uccucacagcugguucauucag

SEQ ID NO: 694323 - RNA, 22 nt, Human
acaggcagugauuuccucuggu

SEQ ID NO: 694324 - RNA, 22 nt, Human
cccaggcagccccagaagcuug

SEQ ID NO: 694325 - RNA, 22 nt, Human
uaacuguauagcuuggacuaaa

SEQ ID NO: 694326 - RNA, 22 nt, Human
uuccccucucagaucuggccua

SEQ ID NO: 694327 - RNA, 22 nt, Human
ugcuuucaugaagucuauagag

SEQ ID NO: 694328 - RNA, 22 nt, Human
uuacagaaagguugugggauag

SEQ ID NO: 694329 - RNA, 22 nt, Human
ucaggaagggcucagucugugc

SEQ ID NO: 694330 - RNA, 22 nt, Human
aaauguguguauguacauauau

SEQ ID NO: 694331 - RNA, 22 nt, Human
augagcugugggauuccagagg

SEQ ID NO: 694332 - RNA, 22 nt, Human
uuuccuaugauauucuaugugu

SEQ ID NO: 694333 - RNA, 22 nt, Human
ucauaguucuguuuugaaggau

SEQ ID NO: 694334 - RNA, 22 nt, Human
uaaucuguuguuaauauugacu

SEQ ID NO: 694335 - RNA, 22 nt, Human
uuggaaggcugaauggccucuc

SEQ ID NO: 694336 - RNA, 22 nt, Human
acugaggauuagcccaggcuag

SEQ ID NO: 694337 - RNA, 22 nt, Human
acagagcacauagauuggaguu

SEQ ID NO: 694338 - RNA, 22 nt, Human
ucugcuucugugaaggcagucu

SEQ ID NO: 694339 - RNA, 22 nt, Human
uuacuuuggguccugcuuauaa

SEQ ID NO: 694340 - RNA, 22 nt, Human
aguacccuagggugggagcuca

SEQ ID NO: 694341 - RNA, 22 nt, Human
augaaacucuaacuuaacaagu

SEQ ID NO: 694342 - RNA, 22 nt, Human
cauggcuuacuuucagggagua

SEQ ID NO: 694343 - RNA, 22 nt, Human
gauccguuuauacugaguuuga

SEQ ID NO: 694344 - RNA, 18 nt, Human
agcaggugugcagaaugu

SEQ ID NO: 694345 - RNA, 22 nt, Human
uucucuuucuacagugugauug

SEQ ID NO: 694346 - RNA, 22 nt, Human
ugcagagaucugggcgucggcu

SEQ ID NO: 694347 - RNA, 22 nt, Human
agcagcauggaugggccucagc

SEQ ID NO: 694348 - RNA, 22 nt, Human
auaaguucagguaaagaaauca

SEQ ID NO: 694349 - RNA, 22 nt, Human
acauuugucuucuuucagauua

SEQ ID NO: 694350 - RNA, 22 nt, Human
acacuuauuucuugucuaacca

SEQ ID NO: 694351 - RNA, 22 nt, Human
gaggaaccaaaucagcuugcac

SEQ ID NO: 694352 - RNA, 20 nt, Human
ugcagggccuaaaaagggaa

SEQ ID NO: 694353 - RNA, 22 nt, Human
ccugaccuauuuuucucagcug

SEQ ID NO: 694354 - RNA, 18 nt, Human
caauuuuacccagucccu

SEQ ID NO: 694355 - RNA, 22 nt, Human
ccaauguuaggcucugguuuua

SEQ ID NO: 694356 - RNA, 22 nt, Human
ugcaggaacauagguuccuugg

SEQ ID NO: 694357 - RNA, 22 nt, Human
uuucacagcuagugagcuucua

SEQ ID NO: 694358 - RNA, 22 nt, Human
cagcccaggacugcagguguuu

SEQ ID NO: 694359 - RNA, 22 nt, Human
aagcagccuggacuugggcugg

SEQ ID NO: 694360 - RNA, 22 nt, Human
ggggggugacaaguagagguug

SEQ ID NO: 694361 - RNA, 22 nt, Human
guggaguggccuggcccugaga

SEQ ID NO: 694362 - RNA, 22 nt, Human
agcagcuuacauguggccuauc

SEQ ID NO: 694363 - RNA, 22 nt, Human
guucacaguuucuaaucccagc

SEQ ID NO: 694364 - RNA, 22 nt, Human
uguuuaaugcauugaccuuggg

SEQ ID NO: 694365 - RNA, 23 nt, Human
aagcaauaccaggugugggcccu

SEQ ID NO: 694366 - RNA, 20 nt, Human
uguuccaugacuauuuggau

SEQ ID NO: 694367 - RNA, 22 nt, Human
cugcucugcagcuuggacuccc

SEQ ID NO: 694368 - RNA, 22 nt, Human
gcacagcacagcaacauguuuu

SEQ ID NO: 694369 - RNA, 22 nt, Human
ucugccuaugcuguaccuuugu

SEQ ID NO: 694370 - RNA, 22 nt, Human
uucagguuuuuaaguucugccu

SEQ ID NO: 694371 - RNA, 22 nt, Human
uaggcagagaggccauaagaau

SEQ ID NO: 694372 - RNA, 22 nt, Human
ggcuucuugugugucaggcucu

SEQ ID NO: 694373 - RNA, 22 nt, Human
aggccaaagcacagagcuggaa

SEQ ID NO: 694374 - RNA, 23 nt, Human
ucugagguccaccaguuugcaga

SEQ ID NO: 694375 - RNA, 22 nt, Human
cugugucccuugucccagagcc

SEQ ID NO: 694376 - RNA, 22 nt, Human
ucuaacuauacaaagaaaacau

SEQ ID NO: 694377 - RNA, 22 nt, Human
auuacaguaacagcuacaaugc

SEQ ID NO: 694378 - RNA, 22 nt, Human
ugcagcagccaagguucugugc

SEQ ID NO: 694379 - RNA, 22 nt, Human
uuuaucagagauauguguggac

SEQ ID NO: 694380 - RNA, 22 nt, Human
cucugugucugaguuauggucu

SEQ ID NO: 694381 - RNA, 22 nt, Human
caccuggaugccacaaagccac

SEQ ID NO: 694382 - RNA, 22 nt, Human
ccuauugacaauucucuucucc

SEQ ID NO: 694383 - RNA, 22 nt, Human
cgguccuguacuugaugagaua

SEQ ID NO: 694384 - RNA, 22 nt, Human
cauuacaacaaucugccauggc

SEQ ID NO: 694385 - RNA, 22 nt, Human
ugcugccaaaugcgagcucugu

SEQ ID NO: 694386 - RNA, 22 nt, Human
uuggcugagagaggaaaagggc

SEQ ID NO: 694387 - RNA, 22 nt, Human
gaagcaaguggccugauucaga

SEQ ID NO: 694388 - RNA, 22 nt, Human
aauuggcagaacuuuauauauu

SEQ ID NO: 694389 - RNA, 22 nt, Human
uuagaggacuguaggugggaau

SEQ ID NO: 694390 - RNA, 22 nt, Human
ugcugccuaauaagucgagggu

SEQ ID NO: 694391 - RNA, 22 nt, Human
auaauauuugcauuacugugau

SEQ ID NO: 694392 - RNA, 22 nt, Human
auuuccuucccagauuugguuc

SEQ ID NO: 694393 - RNA, 22 nt, Human
uuucaaggugcaggaggguuuu

SEQ ID NO: 694394 - RNA, 22 nt, Human
aguaaacaauguaugaggacag

SEQ ID NO: 694395 - RNA, 22 nt, Human
cuggcugacacaaagguaucga

SEQ ID NO: 694396 - RNA, 22 nt, Human
gaggccuggguuggaggugcau

SEQ ID NO: 694397 - RNA, 22 nt, Human
augaaugcugggacaaauauau

SEQ ID NO: 694398 - RNA, 22 nt, Human
agaugauggccauguccucucc

SEQ ID NO: 694399 - RNA, 22 nt, Human
cugguccuugacgcgugggagg

SEQ ID NO: 694400 - RNA, 22 nt, Human
gcaguaguucugauuggaacuu

SEQ ID NO: 694401 - RNA, 22 nt, Human
acagaagcaaaagcaggaucuu

SEQ ID NO: 694402 - RNA, 22 nt, Human
acacauaagccuaaucaucucc

SEQ ID NO: 694403 - RNA, 22 nt, Human
guggccagagugucauuuuauu

SEQ ID NO: 694404 - RNA, 22 nt, Human
gcagcagaugugggcccagagc

SEQ ID NO: 694405 - RNA, 20 nt, Human
aggcccugugcaucuuguuu

SEQ ID NO: 694406 - RNA, 22 nt, Human
uugugugcugagggccugcugu

SEQ ID NO: 694407 - RNA, 22 nt, Human
cacauacaagccauggggggau

SEQ ID NO: 694408 - RNA, 22 nt, Human
cuaaggaaaaggauauauaugu

SEQ ID NO: 694409 - RNA, 22 nt, Human
uuuacacauuauuuucagugug

SEQ ID NO: 694410 - RNA, 19 nt, Human
auucuuguuaagugucauc

SEQ ID NO: 694411 - RNA, 22 nt, Human
guguuacauauaccugagcuua

SEQ ID NO: 694412 - RNA, 21 nt, Human
acugugacuggguguaugggu

SEQ ID NO: 694413 - RNA, 22 nt, Human
auggcucuagaauaccccucag

SEQ ID NO: 694414 - RNA, 22 nt, Human
gggagcuggaugauugaggcaa

SEQ ID NO: 694415 - RNA, 22 nt, Human
cuggcacagagugagcauucaa

SEQ ID NO: 694416 - RNA, 22 nt, Human
cagaggaaaugggaaggagaua

SEQ ID NO: 694417 - RNA, 22 nt, Human
guucauccaugucagcguauau

SEQ ID NO: 694418 - RNA, 22 nt, Human
caggaaaggugugucaugaugg

SEQ ID NO: 694419 - RNA, 22 nt, Human
uuuagacaagauccuucugaau

SEQ ID NO: 694420 - RNA, 22 nt, Human
ugcaggcuccacguuguugucc

SEQ ID NO: 694421 - RNA, 22 nt, Human
uuaugucuuaaguaugcuaauu

SEQ ID NO: 694422 - RNA, 23 nt, Human
ucggugggcguggaggccgaggc

SEQ ID NO: 694423 - RNA, 22 nt, Human
ccuggugccacuagagaauguc

SEQ ID NO: 694424 - RNA, 22 nt, Human
cagcccugagagaaccaucuau

SEQ ID NO: 694425 - RNA, 22 nt, Human
uaggcaugcaaauaaaugugca

SEQ ID NO: 694426 - RNA, 22 nt, Human
ugccuugguucucuacuuggag

SEQ ID NO: 694427 - RNA, 22 nt, Human
uccugggacucaacuuagaagg

SEQ ID NO: 694428 - RNA, 22 nt, Human
ggaaacuuguuauuguauuuuc

SEQ ID NO: 694429 - RNA, 22 nt, Human
uacaaagucagaauaacaggug

SEQ ID NO: 694430 - RNA, 22 nt, Human
acauccaccacaugccaggcuc

SEQ ID NO: 694431 - RNA, 19 nt, Human
cugucugcggggccuguuc

SEQ ID NO: 694432 - RNA, 21 nt, Human
agguggucugcagcagcugaa

SEQ ID NO: 694433 - RNA, 22 nt, Human
cccuguuuuaaguugauauuga

SEQ ID NO: 694434 - RNA, 18 nt, Human
uccugguauugcaagcac

SEQ ID NO: 694435 - RNA, 22 nt, Human
uucuuaauaccuauuuucuacc

SEQ ID NO: 694436 - RNA, 22 nt, Human
cuuugugucuguuaauaauuau

SEQ ID NO: 694437 - RNA, 22 nt, Human
uagauacuuauaaucuuccaag

SEQ ID NO: 694438 - RNA, 22 nt, Human
aagugguuauuuugaucuagaa

SEQ ID NO: 694439 - RNA, 22 nt, Human
uccugcaggcuugaguccucag

SEQ ID NO: 694440 - RNA, 22 nt, Human
gcagaggcuccauuuuacagau

SEQ ID NO: 694441 - RNA, 18 nt, Human
agcaacagaaacauaugg

SEQ ID NO: 694442 - RNA, 22 nt, Human
uauuuauaaucugccaaagaga

SEQ ID NO: 694443 - RNA, 22 nt, Human
gaggacaggagacucacuguuu

SEQ ID NO: 694444 - RNA, 22 nt, Human
auuuuacuucauuugaaaugcc

SEQ ID NO: 694445 - RNA, 22 nt, Human
gucagcuucccuuugguuuauu

SEQ ID NO: 694446 - RNA, 22 nt, Human
aagggcuggaauaucucuuaga

SEQ ID NO: 694447 - RNA, 22 nt, Human
cuggcuuuuuucccauuaugca

SEQ ID NO: 694448 - RNA, 22 nt, Human
gcugcugcugaggaugcaccug

SEQ ID NO: 694449 - RNA, 22 nt, Human
uauauaauuuguaaaagcaccu

SEQ ID NO: 694450 - RNA, 23 nt, Human
cuguagcuaaaagcugggauuug

SEQ ID NO: 694451 - RNA, 22 nt, Human
uucuuagaugauuaaugauggg

SEQ ID NO: 694452 - RNA, 22 nt, Human
gcuauuuuugagccauuuauaa

SEQ ID NO: 694453 - RNA, 23 nt, Human
ugcugugccuuugucugccucca

SEQ ID NO: 694454 - RNA, 22 nt, Human
ugcaccaguuucucagagaauc

SEQ ID NO: 694455 - RNA, 22 nt, Human
uggcuaaacuugggucagaugu

SEQ ID NO: 694456 - RNA, 22 nt, Human
auaaauuaggaucugggguucc

SEQ ID NO: 694457 - RNA, 22 nt, Human
gcugucuguggugucagcugac

SEQ ID NO: 694458 - RNA, 22 nt, Human
aauuccaacagacaaaguuaga

SEQ ID NO: 694459 - RNA, 22 nt, Human
uucuuuggcugccagucuggag

SEQ ID NO: 694460 - RNA, 22 nt, Human
cucuuucugauucgcugggacc

SEQ ID NO: 694461 - RNA, 22 nt, Human
gccuuucaguuccaucaaagga

SEQ ID NO: 694462 - RNA, 18 nt, Human
ucaggcucucuggcuaga

SEQ ID NO: 694463 - RNA, 22 nt, Human
acaaaguuucuucuaacaucug

SEQ ID NO: 694464 - RNA, 22 nt, Human
aaacgguugcucauaguuacau

SEQ ID NO: 694465 - RNA, 22 nt, Human
uagcagcuaugccauuuugaca

SEQ ID NO: 694466 - RNA, 22 nt, Human
uuuaacauguaauugcugcuuu

SEQ ID NO: 694467 - RNA, 22 nt, Human
aacauguagcagaaacgacuaa

SEQ ID NO: 694468 - RNA, 22 nt, Human
aagauucuugacuagaaugauu

SEQ ID NO: 694469 - RNA, 22 nt, Human
uuguagaauuuggaucucggca

SEQ ID NO: 694470 - RNA, 23 nt, Human
uuguauuuuuaguagagacaggg

SEQ ID NO: 694471 - RNA, 22 nt, Human
ucacaaauuucagcucccugaa

SEQ ID NO: 694472 - RNA, 22 nt, Human
aaauggcaacagaagggaguuc

SEQ ID NO: 694473 - RNA, 22 nt, Human
ugugaggauggaguucuacagg

SEQ ID NO: 694474 - RNA, 22 nt, Human
uuucugaggaauuaauacagaa

SEQ ID NO: 694475 - RNA, 22 nt, Human
gagccagaaaagcugccugacu

SEQ ID NO: 694476 - RNA, 22 nt, Human
auuuugaaaagcauuugaguaa

SEQ ID NO: 694477 - RNA, 22 nt, Human
agggccugggauguccuccuag

SEQ ID NO: 694478 - RNA, 22 nt, Human
cagaccucaaagcugcagugcu

SEQ ID NO: 694479 - RNA, 22 nt, Human
ugcuggggucauggggcgcccg

SEQ ID NO: 694480 - RNA, 22 nt, Human
ccaaguacagauuccuccacug

SEQ ID NO: 694481 - RNA, 22 nt, Human
cucagaggcaagcaaggagcug

SEQ ID NO: 694482 - RNA, 22 nt, Human
uguuaaauguauuauguguucu

SEQ ID NO: 694483 - RNA, 19 nt, Human
ugggcagguucaguaaugg

SEQ ID NO: 694484 - RNA, 22 nt, Human
ggccucucuccuuggcuugcag

SEQ ID NO: 694485 - RNA, 22 nt, Human
auuccaguuaguggcagcuuau

SEQ ID NO: 694486 - RNA, 22 nt, Human
aauauaugacuccacugcauga

SEQ ID NO: 694487 - RNA, 22 nt, Human
auuugaaaucuggguuacucug

SEQ ID NO: 694488 - RNA, 22 nt, Human
aggaaacuggguaugguuauac

SEQ ID NO: 694489 - RNA, 23 nt, Human
cccagcuuucccacugccgagag

SEQ ID NO: 694490 - RNA, 22 nt, Human
aaaccugaauguaugucagaag

SEQ ID NO: 694491 - RNA, 22 nt, Human
uuuccucugggcccugccaccc

SEQ ID NO: 694492 - RNA, 21 nt, Human
cagugguugcugaauuagugg

SEQ ID NO: 694493 - RNA, 22 nt, Human
uaggaacaaagagccucacauu

SEQ ID NO: 694494 - RNA, 21 nt, Human
ccagaggccucucuuggccac

SEQ ID NO: 694495 - RNA, 22 nt, Human
uagcagcaauuacacaguccgu

SEQ ID NO: 694496 - RNA, 22 nt, Human
cauuucaagcauugacuucuau

SEQ ID NO: 694497 - RNA, 22 nt, Human
ucaggaagucucaauuagcuac

SEQ ID NO: 694498 - RNA, 22 nt, Human
ggagcccugcccuaggcagcuc

SEQ ID NO: 694499 - RNA, 22 nt, Human
accuggcaugaagcaugccuua

SEQ ID NO: 694500 - RNA, 21 nt, Human
cuuggcacagggaagaugcac

SEQ ID NO: 694501 - RNA, 22 nt, Human
uuuuagauugggaaauguaaag

SEQ ID NO: 694502 - RNA, 22 nt, Human
gguggguauugaauacaggugu

SEQ ID NO: 694503 - RNA, 22 nt, Human
cagagcagggugcaccuugggc

SEQ ID NO: 694504 - RNA, 22 nt, Human
uggcagguuuccuccucauagu

SEQ ID NO: 694505 - RNA, 22 nt, Human
ucacagaagguggccauagcug

SEQ ID NO: 694506 - RNA, 22 nt, Human
cccagggacagcuagguggggc

SEQ ID NO: 694507 - RNA, 22 nt, Human
gcuggcuggaguaaggagggag

SEQ ID NO: 694508 - RNA, 22 nt, Human
uucugaaauaggagauagcugu

SEQ ID NO: 694509 - RNA, 22 nt, Human
aauccugaccugggcaugcuug

SEQ ID NO: 694510 - RNA, 22 nt, Human
gccuggguuccaugaucuccag

SEQ ID NO: 694511 - RNA, 22 nt, Human
cucugugugguaugauugucau

SEQ ID NO: 694512 - RNA, 22 nt, Human
gcugggcacugucccauaggcu

SEQ ID NO: 694513 - RNA, 22 nt, Human
cacacuuugugcuaaucuauuu

SEQ ID NO: 694514 - RNA, 22 nt, Human
uggccugaggcucggcaugggu

SEQ ID NO: 694515 - RNA, 22 nt, Human
aaagugcugggauuccaggcgu

SEQ ID NO: 694516 - RNA, 22 nt, Human
uuugagaagaguuugagguauu

SEQ ID NO: 694517 - RNA, 22 nt, Human
acauuucuuuucaucucuauau

SEQ ID NO: 694518 - RNA, 22 nt, Human
ccacucugcugugcuccaugau

SEQ ID NO: 694519 - RNA, 21 nt, Human
ugggcaccaaaaccuaggagu

SEQ ID NO: 694520 - RNA, 22 nt, Human
acacacuguugcucauccaggc

SEQ ID NO: 694521 - RNA, 22 nt, Human
aggggaggcagcgauaaaccug

SEQ ID NO: 694522 - RNA, 22 nt, Human
ugcuaaauaaguggaauagaca

SEQ ID NO: 694523 - RNA, 22 nt, Human
cuccccuccuuaggucuucuag

SEQ ID NO: 694524 - RNA, 22 nt, Human
agcaccuguggcucaugcucgu

SEQ ID NO: 694525 - RNA, 22 nt, Human
cucugggaagggcugagcacug

SEQ ID NO: 694526 - RNA, 22 nt, Human
ucaguaucaggcuggaauuaag

SEQ ID NO: 694527 - RNA, 22 nt, Human
ugcauacugaaucugccaucac

SEQ ID NO: 694528 - RNA, 22 nt, Human
accuuuuauguaaauauauguu

SEQ ID NO: 694529 - RNA, 22 nt, Human
agcagggacugagccaguggga

SEQ ID NO: 694530 - RNA, 16 nt, Human
gggagggaguuggugg

SEQ ID NO: 694531 - RNA, 20 nt, Human
cagaaagaagguagauuuuu

SEQ ID NO: 694532 - RNA, 22 nt, Human
guggccagggcccacaggauga

SEQ ID NO: 694533 - RNA, 22 nt, Human
ccuggagagagaggccaacugc

SEQ ID NO: 694534 - RNA, 22 nt, Human
ucaauacagaaaggauauuuug

SEQ ID NO: 694535 - RNA, 20 nt, Human
cagcagccauucuaguagua

SEQ ID NO: 694536 - RNA, 22 nt, Human
aaugucugagucucuguauccc

SEQ ID NO: 694537 - RNA, 22 nt, Human
acucugaggagugacuagaggu

SEQ ID NO: 694538 - RNA, 22 nt, Human
uacacaguauaugggaucacag

SEQ ID NO: 694539 - RNA, 22 nt, Human
gggcugugagaguggggcugcu

SEQ ID NO: 694540 - RNA, 22 nt, Human
uauugcuuucaguugcuuugag

SEQ ID NO: 694541 - RNA, 22 nt, Human
uuacaggugggaaaacuaagcu

SEQ ID NO: 694542 - RNA, 22 nt, Human
aaauugucucuauuuugauucg

SEQ ID NO: 694543 - RNA, 22 nt, Human
auaaaucucuuaagacucaaca

SEQ ID NO: 694544 - RNA, 22 nt, Human
cauugcacuuuggguccaggac

SEQ ID NO: 694545 - RNA, 22 nt, Human
gcacaaauacaaaguugagaaa

SEQ ID NO: 694546 - RNA, 22 nt, Human
gacuacaggugugugccaccau

SEQ ID NO: 694547 - RNA, 22 nt, Human
cuccucuccaucagcgccaccc

SEQ ID NO: 694548 - RNA, 22 nt, Human
aucugcuuccuccuuagggaaa

SEQ ID NO: 694549 - RNA, 22 nt, Human
ugcagcugcuggcccaggugcu

SEQ ID NO: 694550 - RNA, 22 nt, Human
cccagagguuccuuagggacca

SEQ ID NO: 694551 - RNA, 21 nt, Human
uuccagagauuguuucaccug

SEQ ID NO: 694552 - RNA, 22 nt, Human
uccugacuccagguccugugug

SEQ ID NO: 694553 - RNA, 22 nt, Human
cagcucaggcucuccaugcucc

SEQ ID NO: 694554 - RNA, 22 nt, Human
uccaggcuggcucuucaaaauu

SEQ ID NO: 694555 - RNA, 23 nt, Human
gguccaggaaaggcagcagcacc

SEQ ID NO: 694556 - RNA, 22 nt, Human
cagcugugagagugcauugaag

SEQ ID NO: 694557 - RNA, 22 nt, Human
aucuuuaccaccaaagaaugcu

SEQ ID NO: 694558 - RNA, 22 nt, Human
ucagggcuuuggcuuuuacucu

SEQ ID NO: 694559 - RNA, 23 nt, Human
uaguuauuuucucuguaauuugc

SEQ ID NO: 694560 - RNA, 22 nt, Human
ggagaggugagagguacaaguu

SEQ ID NO: 694561 - RNA, 22 nt, Human
cugaaguucauacaauggccau

SEQ ID NO: 694562 - RNA, 22 nt, Human
ggaggcuccaugagcuccugca

SEQ ID NO: 694563 - RNA, 22 nt, Human
uuuagcuucaguucuagcuucu

SEQ ID NO: 694564 - RNA, 22 nt, Human
aaaugcauugguuucuacuugu

SEQ ID NO: 694565 - RNA, 22 nt, Human
uuggcagacugacaaucuguuu

SEQ ID NO: 694566 - RNA, 22 nt, Human
uaaugcaguacugauauaaaca

SEQ ID NO: 694567 - RNA, 22 nt, Human
caguccuuauuccuauauuccu

SEQ ID NO: 694568 - RNA, 19 nt, Human
agcaggccaggcagguggc

SEQ ID NO: 694569 - RNA, 22 nt, Human
acagaugaggcuggcgagggca

SEQ ID NO: 694570 - RNA, 22 nt, Human
aucuggcuuuuacugaauugcu

SEQ ID NO: 694571 - RNA, 22 nt, Human
ucucugaagauauuuauuauua

SEQ ID NO: 694572 - RNA, 22 nt, Human
ugaaugaucuaguuuuguagac

SEQ ID NO: 694573 - RNA, 23 nt, Human
acugccugugccgaucucucuca

SEQ ID NO: 694574 - RNA, 22 nt, Human
ucucugggaauucacaagcccu

SEQ ID NO: 694575 - RNA, 22 nt, Human
uuuucaguuccaucucugcucu

SEQ ID NO: 694576 - RNA, 22 nt, Human
cacugaagccacuggaagagga

SEQ ID NO: 694577 - RNA, 22 nt, Human
agcccugggucccaguccuggc

SEQ ID NO: 694578 - RNA, 22 nt, Human
auuacacauagacauucguuca

SEQ ID NO: 694579 - RNA, 22 nt, Human
ccuggagcaggagcugcagagg

SEQ ID NO: 694580 - RNA, 20 nt, Human
uuacucaguuccugccaugc

SEQ ID NO: 694581 - RNA, 22 nt, Human
uaccauuucuacauaucuuguc

SEQ ID NO: 694582 - RNA, 22 nt, Human
cacagggccacuuucccaguaa

SEQ ID NO: 694583 - RNA, 22 nt, Human
cauuugaacuaauaacugugcu

SEQ ID NO: 694584 - RNA, 22 nt, Human
uuuguucaacaggugaaauaga

SEQ ID NO: 694585 - RNA, 22 nt, Human
cuauacagugacuagaaguaau

SEQ ID NO: 694586 - RNA, 22 nt, Human
gaggggugggcuggaaguuaua

SEQ ID NO: 694587 - RNA, 22 nt, Human
ucagcagacuaggcagauuacu

SEQ ID NO: 694588 - RNA, 19 nt, Human
cuucuccagcuucuagaag

SEQ ID NO: 694589 - RNA, 22 nt, Human
auuguacagacaugggaaacaa

SEQ ID NO: 694590 - RNA, 22 nt, Human
uaauguguugaauauuuguaca

SEQ ID NO: 694591 - RNA, 22 nt, Human
ucccgauaggcagggcucuggc

SEQ ID NO: 694592 - RNA, 22 nt, Human
auguauauacuuacaugugugg

SEQ ID NO: 694593 - RNA, 22 nt, Human
uuccacagucauccugggaauu

SEQ ID NO: 694594 - RNA, 22 nt, Human
ugagcuggcacuuuuccuggga

SEQ ID NO: 694595 - RNA, 22 nt, Human
ggcugaauguuggacacuuacg

SEQ ID NO: 694596 - RNA, 22 nt, Human
cuccuguggcuuucugauuuca

SEQ ID NO: 694597 - RNA, 17 nt, Human
cccagagaugcugccuu

SEQ ID NO: 694598 - RNA, 21 nt, Human
acacaggcagugucccgaggu

SEQ ID NO: 694599 - RNA, 22 nt, Human
uccugaaaaauuacauguucag

SEQ ID NO: 694600 - RNA, 22 nt, Human
acagugaaaauucuauugauuu

SEQ ID NO: 694601 - RNA, 23 nt, Human
ggauuggccccaggaguaugggu

SEQ ID NO: 694602 - RNA, 22 nt, Human
guccauacaguggcacacaucu

SEQ ID NO: 694603 - RNA, 22 nt, Human
augaagacuauuugaaggugcc

SEQ ID NO: 694604 - RNA, 22 nt, Human
agugugugcaugcauucgugca

SEQ ID NO: 694605 - RNA, 22 nt, Human
ugcagccuuggcaaccagggac

SEQ ID NO: 694606 - RNA, 22 nt, Human
augcaugcagggaagacaguag

SEQ ID NO: 694607 - RNA, 21 nt, Human
uagaagcacauagguucaaag

SEQ ID NO: 694608 - RNA, 22 nt, Human
cuggagccgcauggagcaggga

SEQ ID NO: 694609 - RNA, 22 nt, Human
ccacgagggaaccagguggggu

SEQ ID NO: 694610 - RNA, 19 nt, Human
gcuuuaguuuacucaucua

SEQ ID NO: 694611 - RNA, 22 nt, Human
uccugaggagaagagugcuagg

SEQ ID NO: 694612 - RNA, 22 nt, Human
agccagcuaccggggcuccugg

SEQ ID NO: 694613 - RNA, 22 nt, Human
uaaaguuuggcagacaauaaca

SEQ ID NO: 694614 - RNA, 20 nt, Human
ggcagggcaucaacagcucu

SEQ ID NO: 694615 - RNA, 22 nt, Human
uuacagacaaacuguguuaagu

SEQ ID NO: 694616 - RNA, 22 nt, Human
agagagaauuggauaaauuggu

SEQ ID NO: 694617 - RNA, 22 nt, Human
aaaguauucaaaaauauuuggu

SEQ ID NO: 694618 - RNA, 22 nt, Human
uacagggcugagugagacaugg

SEQ ID NO: 694619 - RNA, 22 nt, Human
aggugacaugaaaaauguugag

SEQ ID NO: 694620 - RNA, 17 nt, Human
ccagagaguaguuagga

SEQ ID NO: 694621 - RNA, 22 nt, Human
cugugcacacgugcccaacagu

SEQ ID NO: 694622 - RNA, 22 nt, Human
ugagacaguuuuucuauuucca

SEQ ID NO: 694623 - RNA, 22 nt, Human
acuguuuugugccuuaguuucc

SEQ ID NO: 694624 - RNA, 22 nt, Human
caggucucggguucagcaguga

SEQ ID NO: 694625 - RNA, 22 nt, Human
agaauaaccaguguuucacagu

SEQ ID NO: 694626 - RNA, 22 nt, Human
aaacucuagggcuccacauucc

SEQ ID NO: 694627 - RNA, 22 nt, Human
acugaauagaaaugcucauagg

SEQ ID NO: 694628 - RNA, 22 nt, Human
caguagauuugguaaacuagga

SEQ ID NO: 694629 - RNA, 22 nt, Human
aagaacauuuuguagaaugaca

SEQ ID NO: 694630 - RNA, 21 nt, Human
agaagccaugugguggagaac

SEQ ID NO: 694631 - RNA, 22 nt, Human
gggcccacuggcugucugaccc

SEQ ID NO: 694632 - RNA, 22 nt, Human
caggaauguuugugcuccuuua

SEQ ID NO: 694633 - RNA, 22 nt, Human
gcuugagaacuucaacucagug

SEQ ID NO: 694634 - RNA, 22 nt, Human
gagugucuguggggcauggaca

SEQ ID NO: 694635 - RNA, 22 nt, Human
uaugguuauccucaaaagagga

SEQ ID NO: 694636 - RNA, 22 nt, Human
agucacauucugggguacuggg

SEQ ID NO: 694637 - RNA, 22 nt, Human
gcagagcagagccugcauuggc

SEQ ID NO: 694638 - RNA, 22 nt, Human
agcgagugggucagcguugcag

SEQ ID NO: 694639 - RNA, 22 nt, Human
cuggaacccaggccuggaagcc

SEQ ID NO: 694640 - RNA, 22 nt, Human
ggggcccagcaccccuccucgc

SEQ ID NO: 694641 - RNA, 22 nt, Human
uagcaaggacaacauaugagag

SEQ ID NO: 694642 - RNA, 22 nt, Human
ucagaggcuacagucugggagu

SEQ ID NO: 694643 - RNA, 22 nt, Human
auagcuuugagggcuccuuagg

SEQ ID NO: 694644 - RNA, 22 nt, Human
uaagacauuugaaaugugaucc

SEQ ID NO: 694645 - RNA, 22 nt, Human
cuggucaggcugaacugccaca

SEQ ID NO: 694646 - RNA, 21 nt, Human
auaaacugcaucaaguuggug

SEQ ID NO: 694647 - RNA, 22 nt, Human
gggaaagaagaagagccauuuu

SEQ ID NO: 694648 - RNA, 22 nt, Human
gcagcagaguuugggagauggu

SEQ ID NO: 694649 - RNA, 22 nt, Human
ggcaggcuugguggcaccgguu

SEQ ID NO: 694650 - RNA, 22 nt, Human
cucguugcugaagccaaaguca

SEQ ID NO: 694651 - RNA, 22 nt, Human
gagcuggcaggaggcuccccga

SEQ ID NO: 694652 - RNA, 22 nt, Human
ugcugcuguauccuuaguguca

SEQ ID NO: 694653 - RNA, 20 nt, Human
uccagauauuaagacaggca

SEQ ID NO: 694654 - RNA, 22 nt, Human
uagaggagaacacaaauuauag

SEQ ID NO: 694655 - RNA, 22 nt, Human
cccuggguucuggcugggcugc

SEQ ID NO: 694656 - RNA, 22 nt, Human
uguaaaugaaguaugcuuuacu

SEQ ID NO: 694657 - RNA, 22 nt, Human
ugucaguggucauaguagaaaa

SEQ ID NO: 694658 - RNA, 22 nt, Human
ccucagggaggccucuguggcu

SEQ ID NO: 694659 - RNA, 22 nt, Human
aaacagcuggucucaaauguuc

SEQ ID NO: 694660 - RNA, 22 nt, Human
gacagagaggcugagcaguaca

SEQ ID NO: 694661 - RNA, 22 nt, Human
gaagggcucaucagguggccgc

SEQ ID NO: 694662 - RNA, 22 nt, Human
acugaaguagucauugucauua

SEQ ID NO: 694663 - RNA, 22 nt, Human
uugacaaaggcugagaggaaaa

SEQ ID NO: 694664 - RNA, 22 nt, Human
guuaacauaggaguuuguugua

SEQ ID NO: 694665 - RNA, 22 nt, Human
uuagaacauuuuuagaccaaua

SEQ ID NO: 694666 - RNA, 22 nt, Human
ccauacacacaccaaauuugua

SEQ ID NO: 694667 - RNA, 22 nt, Human
aucacauuauguagugaaaagg

SEQ ID NO: 694668 - RNA, 22 nt, Human
auauacacaucuuuuuaaauau

SEQ ID NO: 694669 - RNA, 22 nt, Human
aaauugcuaguugcuuuuuuca

SEQ ID NO: 694670 - RNA, 20 nt, Human
aauguucaguaauuguuuua

SEQ ID NO: 694671 - RNA, 22 nt, Human
agcggcugucggccagccggag

SEQ ID NO: 694672 - RNA, 22 nt, Human
ccagggccucguguucugagug

SEQ ID NO: 694673 - RNA, 22 nt, Human
uccagggcagccgcgggugcgc

SEQ ID NO: 694674 - RNA, 23 nt, Human
ucucuuaucacaauucauuuugc

SEQ ID NO: 694675 - RNA, 22 nt, Human
uagacaaaagggggcagauaug

SEQ ID NO: 694676 - RNA, 22 nt, Human
gcauuuuucaucccucuugggu

SEQ ID NO: 694677 - RNA, 22 nt, Human
ucacucuguguuugaacucaag

SEQ ID NO: 694678 - RNA, 22 nt, Human
acacacuuuaaauuaaaccucu

SEQ ID NO: 694679 - RNA, 22 nt, Human
ucaggaaagguuuguugaaugg

SEQ ID NO: 694680 - RNA, 22 nt, Human
uagguagggaccaccuugggga

SEQ ID NO: 694681 - RNA, 22 nt, Human
gaagaaacaggggcuuggggag

SEQ ID NO: 694682 - RNA, 22 nt, Human
ccucugccaccucccacgaggc

SEQ ID NO: 694683 - RNA, 21 nt, Human
uaaggccaagucuauuucugu

SEQ ID NO: 694684 - RNA, 22 nt, Human
agucacuuccagacaccugccu

SEQ ID NO: 694685 - RNA, 18 nt, Human
agagggaaagcaggcuga

SEQ ID NO: 694686 - RNA, 22 nt, Human
acuguguggaccacucugaggc

SEQ ID NO: 694687 - RNA, 22 nt, Human
ccucugacuccacacuugaacu

SEQ ID NO: 694688 - RNA, 22 nt, Human
uugaucucuguugcugucuuug

SEQ ID NO: 694689 - RNA, 23 nt, Human
ggcagcugggcagcacucauggg

SEQ ID NO: 694690 - RNA, 22 nt, Human
gaaauacaaagccagccauuuu

SEQ ID NO: 694691 - RNA, 22 nt, Human
ugcagaggagucagccugggca

SEQ ID NO: 694692 - RNA, 22 nt, Human
uguaagaagggccagagcucca

SEQ ID NO: 694693 - RNA, 22 nt, Human
ucuucagcuguagucauuguuc

SEQ ID NO: 694694 - RNA, 22 nt, Human
aggcugcuucagcugcagggag

SEQ ID NO: 694695 - RNA, 22 nt, Human
aaaguugugaaaccgaacaugu

SEQ ID NO: 694696 - RNA, 22 nt, Human
gcucuggauccggcugggucug

SEQ ID NO: 694697 - RNA, 21 nt, Human
gccugcagaccccaccaggcu

SEQ ID NO: 694698 - RNA, 22 nt, Human
gaacacugagaaagucagcuuu

SEQ ID NO: 694699 - RNA, 21 nt, Human
auaauguacaaaaacugucuu

SEQ ID NO: 694700 - RNA, 22 nt, Human
auugaacugaauccuggauugc

SEQ ID NO: 694701 - RNA, 22 nt, Human
gggauggcuuuguggcugacuc

SEQ ID NO: 694702 - RNA, 22 nt, Human
cugcagcuuuuugugcuuguaa

SEQ ID NO: 694703 - RNA, 22 nt, Human
agcuccugaguagcuuuacuca

SEQ ID NO: 694704 - RNA, 22 nt, Human
cacgagggcacacgugggaggg

SEQ ID NO: 694705 - RNA, 22 nt, Human
ucagaggccaaacugagcaggg

SEQ ID NO: 694706 - RNA, 22 nt, Human
cauggcuuuuuagcauauucaa

SEQ ID NO: 694707 - RNA, 22 nt, Human
cacaggcaggagguucuccagu

SEQ ID NO: 694708 - RNA, 22 nt, Human
ucagugcagacuguaaguugga

SEQ ID NO: 694709 - RNA, 20 nt, Human
uuucagugguuugugccuag

SEQ ID NO: 694710 - RNA, 22 nt, Human
aaggccaucuacuuacggaauu

SEQ ID NO: 694711 - RNA, 22 nt, Human
guuucucuguaccucuguccca

SEQ ID NO: 694712 - RNA, 22 nt, Human
uggcuaagauuuaaauguuugc

SEQ ID NO: 694713 - RNA, 22 nt, Human
cucuggcuggcugggccucagu

SEQ ID NO: 694714 - RNA, 22 nt, Human
uacagugaggugguuuccuuua

SEQ ID NO: 694715 - RNA, 22 nt, Human
agcaggagacauggggguggug

SEQ ID NO: 694716 - RNA, 22 nt, Human
acucagacgaaaacaugaacau

SEQ ID NO: 694717 - RNA, 22 nt, Human
auguaaacuacugacuacacua

SEQ ID NO: 694718 - RNA, 22 nt, Human
acagugaaaagaauauuagaau

SEQ ID NO: 694719 - RNA, 22 nt, Human
auugaaagcacaaagaacaagu

SEQ ID NO: 694720 - RNA, 22 nt, Human
gaacuguaaaauaauuggcaau

SEQ ID NO: 694721 - RNA, 22 nt, Human
ucagcccugggacccagggaug

SEQ ID NO: 694722 - RNA, 19 nt, Human
uggcagccuccacuuuugc

SEQ ID NO: 694723 - RNA, 22 nt, Human
aucagcaaaaaugccuucagaa

SEQ ID NO: 694724 - RNA, 22 nt, Human
uuuuucauauuccccucucugg

SEQ ID NO: 694725 - RNA, 22 nt, Human
ccagagguuacacccucagccc

SEQ ID NO: 694726 - RNA, 23 nt, Human
cuugagcucaggaagagcugagu

SEQ ID NO: 694727 - RNA, 22 nt, Human
ggucuggaagcgcaguaggcug

SEQ ID NO: 694728 - RNA, 22 nt, Human
ugggaggaagugcuaaugggag

SEQ ID NO: 694729 - RNA, 22 nt, Human
uuuacuuucucaaguauauagg

SEQ ID NO: 694730 - RNA, 22 nt, Human
uucuucuuuaucucaguauccu

SEQ ID NO: 694731 - RNA, 23 nt, Human
ggagcugcuguugggggagcugc

SEQ ID NO: 694732 - RNA, 22 nt, Human
cagugucuccagaugcuccaau

SEQ ID NO: 694733 - RNA, 22 nt, Human
aaaugcacugaauauuccaaau

SEQ ID NO: 694734 - RNA, 22 nt, Human
augcuuuaguucaaaggacuua

SEQ ID NO: 694735 - RNA, 22 nt, Human
auacaugugcuauguuggugua

SEQ ID NO: 694736 - RNA, 22 nt, Human
ggucugagguuugggauucacu

SEQ ID NO: 694737 - RNA, 22 nt, Human
cccaggcucagacuggcuuguu

SEQ ID NO: 694738 - RNA, 22 nt, Human
uggcccaggucucucugagccc

SEQ ID NO: 694739 - RNA, 22 nt, Human
cucagucucuugggcugugaag

SEQ ID NO: 694740 - RNA, 22 nt, Human
gaauuguaugcugucuugauag

SEQ ID NO: 694741 - RNA, 22 nt, Human
uagaugugagcccaggcugcuu

SEQ ID NO: 694742 - RNA, 22 nt, Human
ugagggccgaggagcugugggu

SEQ ID NO: 694743 - RNA, 22 nt, Human
aaggccaaagacaccuacacag

SEQ ID NO: 694744 - RNA, 22 nt, Human
cagcacagugcagaugcugacu

SEQ ID NO: 694745 - RNA, 22 nt, Human
caggcagggagccacuguauaa

SEQ ID NO: 694746 - RNA, 22 nt, Human
ugcugccuuagcagccaggcaa

SEQ ID NO: 694747 - RNA, 22 nt, Human
aucuggagcuuguuagauguuu

SEQ ID NO: 694748 - RNA, 18 nt, Human
uccagcagcauaguuucc

SEQ ID NO: 694749 - RNA, 22 nt, Human
ggggaagaaugcucucuagaga

SEQ ID NO: 694750 - RNA, 22 nt, Human
agcucagaagccuaugcauagu

SEQ ID NO: 694751 - RNA, 22 nt, Human
acuguuuucuuagcucccugcu

SEQ ID NO: 694752 - RNA, 22 nt, Human
aguggagguuacagcuguacau

SEQ ID NO: 694753 - RNA, 22 nt, Human
gacacugugcuagcugggcuua

SEQ ID NO: 694754 - RNA, 22 nt, Human
aaucugagggaacuugaacucc

SEQ ID NO: 694755 - RNA, 22 nt, Human
acagagacugggagcaagaggc

SEQ ID NO: 694756 - RNA, 22 nt, Human
cugucaaauggaaacuuauccu

SEQ ID NO: 694757 - RNA, 22 nt, Human
uccucaucucggaaccugccac

SEQ ID NO: 694758 - RNA, 22 nt, Human
aagguggcgcuggagcuggucc

SEQ ID NO: 694759 - RNA, 22 nt, Human
acuuagaacaggcagaauucca

SEQ ID NO: 694760 - RNA, 22 nt, Human
ggauuugggcuugcagcagagc

SEQ ID NO: 694761 - RNA, 22 nt, Human
cuggugggaagauggaaaacau

SEQ ID NO: 694762 - RNA, 20 nt, Human
aggcugccuaaggcucugca

SEQ ID NO: 694763 - RNA, 22 nt, Human
auguggcuuuucuaacccuucc

SEQ ID NO: 694764 - RNA, 22 nt, Human
aggaaaugcaggcaaauacucu

SEQ ID NO: 694765 - RNA, 22 nt, Human
auaagcauguuagaauauuuga

SEQ ID NO: 694766 - RNA, 22 nt, Human
agcagcugagccccagcuguga

SEQ ID NO: 694767 - RNA, 22 nt, Human
cuagaagcaacuagaucuguuu

SEQ ID NO: 694768 - RNA, 22 nt, Human
ccaggcucaggugcgagagaca

SEQ ID NO: 694769 - RNA, 22 nt, Human
uauugaauuagacccuaaaaug

SEQ ID NO: 694770 - RNA, 17 nt, Human
agccaggcauaugaagu

SEQ ID NO: 694771 - RNA, 17 nt, Human
gcuggcuucuccuugcu

SEQ ID NO: 694772 - RNA, 22 nt, Human
ccuggcucagaccccaguucug

SEQ ID NO: 694773 - RNA, 22 nt, Human
ccagaaguggcuuucucaggga

SEQ ID NO: 694774 - RNA, 22 nt, Human
gucuccacuaaaaacuuucacg

SEQ ID NO: 694775 - RNA, 22 nt, Human
ucacagaaggagggaagcuagu

SEQ ID NO: 694776 - RNA, 22 nt, Human
auucagggaggaaaggggccuc

SEQ ID NO: 694777 - RNA, 22 nt, Human
augccauugcuuuaaaauuaag

SEQ ID NO: 694778 - RNA, 19 nt, Human
gcugugggacagcagggug

SEQ ID NO: 694779 - RNA, 22 nt, Human
aaggagcugggagggacacaug

SEQ ID NO: 694780 - RNA, 22 nt, Human
uuccaggacuggguguuugaag

SEQ ID NO: 694781 - RNA, 22 nt, Human
cucuucagauaaaagggauauu

SEQ ID NO: 694782 - RNA, 22 nt, Human
gaacuaaaugaaauuacuggug

SEQ ID NO: 694783 - RNA, 22 nt, Human
guucauccauauuauagcaugu

SEQ ID NO: 694784 - RNA, 20 nt, Human
ugcagcuucaccugugucau

SEQ ID NO: 694785 - RNA, 22 nt, Human
agaugacagcuacgggaugaaa

SEQ ID NO: 694786 - RNA, 22 nt, Human
ucagagaaaugaaguagggauu

SEQ ID NO: 694787 - RNA, 22 nt, Human
uaucuagauggauuuuagugaa

SEQ ID NO: 694788 - RNA, 22 nt, Human
ccuggucaccccucucucugca

SEQ ID NO: 694789 - RNA, 22 nt, Human
cagcccaggcucagauguuggg

SEQ ID NO: 694790 - RNA, 22 nt, Human
ugcaucauuuauaaugucuuug

SEQ ID NO: 694791 - RNA, 22 nt, Human
acagggcagguggcuacugguc

SEQ ID NO: 694792 - RNA, 22 nt, Human
aaugccaacuuggauauacauu

SEQ ID NO: 694793 - RNA, 22 nt, Human
cauuuguuggucagauuguagu

SEQ ID NO: 694794 - RNA, 22 nt, Human
ggauuuuagaguaccuaagugu

SEQ ID NO: 694795 - RNA, 22 nt, Human
acaggggauugauuggaagucu

SEQ ID NO: 694796 - RNA, 22 nt, Human
ucacagcuaagcuuggucacug

SEQ ID NO: 694797 - RNA, 22 nt, Human
uggcaggaagacguggggcacc

SEQ ID NO: 694798 - RNA, 22 nt, Human
uuucuuuaucauagcaucuuug

SEQ ID NO: 694799 - RNA, 21 nt, Human
ccugggagaauuggguguggc

SEQ ID NO: 694800 - RNA, 22 nt, Human
cgaagacagaccaucugaguag

SEQ ID NO: 694801 - RNA, 22 nt, Human
cccagguaguuggaagagacaa

SEQ ID NO: 694802 - RNA, 22 nt, Human
ucccaggaucugagggcagaga

SEQ ID NO: 694803 - RNA, 22 nt, Human
auuuccuauccuggucuuaaaa

SEQ ID NO: 694804 - RNA, 22 nt, Human
ccagagcugcauccagcagguu

SEQ ID NO: 694805 - RNA, 22 nt, Human
uccaagaucuacagcaguuuag

SEQ ID NO: 694806 - RNA, 22 nt, Human
caagcuggaguuccucagagug

SEQ ID NO: 694807 - RNA, 22 nt, Human
aguaaacaguuucuuagaagaa

SEQ ID NO: 694808 - RNA, 22 nt, Human
acuuuacccgcacucagacaca

SEQ ID NO: 694809 - RNA, 22 nt, Human
gaagccugguucgcuggccacc

SEQ ID NO: 694810 - RNA, 20 nt, Human
cacaggccuugugagcagac

SEQ ID NO: 694811 - RNA, 22 nt, Human
auuuuacauaaggaagguuuaa

SEQ ID NO: 694812 - RNA, 22 nt, Human
ucugaaauuccuuccagacuuu

SEQ ID NO: 694813 - RNA, 22 nt, Human
uugagggaacaugagaaucauc

SEQ ID NO: 694814 - RNA, 22 nt, Human
gucccuggaucugggacagcug

SEQ ID NO: 694815 - RNA, 22 nt, Human
uggccucuggcugaggacuaac

SEQ ID NO: 694816 - RNA, 22 nt, Human
cagaugcagcaaaaugacaggc

SEQ ID NO: 694817 - RNA, 22 nt, Human
uucuucagucuaggccuuucuu

SEQ ID NO: 694818 - RNA, 22 nt, Human
uguaacuguggucuagggacug

SEQ ID NO: 694819 - RNA, 22 nt, Human
agcaguggcugacagacuuacc

SEQ ID NO: 694820 - RNA, 20 nt, Human
acacaguagcaauuagugca

SEQ ID NO: 694821 - RNA, 22 nt, Human
gcgaaucucagcuggugcugcg

SEQ ID NO: 694822 - RNA, 22 nt, Human
aagccagccagugccagucuua

SEQ ID NO: 694823 - RNA, 22 nt, Human
uauacaaguaaugcugaaugau

SEQ ID NO: 694824 - RNA, 23 nt, Human
uuccagaggaagaagucaugacu

SEQ ID NO: 694825 - RNA, 22 nt, Human
aacccaggguggagguugcagu

SEQ ID NO: 694826 - RNA, 22 nt, Human
uacaugcuuaaaaugcaauguu

SEQ ID NO: 694827 - RNA, 22 nt, Human
agagcagcuuuucggaaccacu

SEQ ID NO: 694828 - RNA, 22 nt, Human
aggcucccaugguguggcagga

SEQ ID NO: 694829 - RNA, 22 nt, Human
uuguuuauguguugucuauggc

SEQ ID NO: 694830 - RNA, 22 nt, Human
uagggcugccauuugcuuuucu

SEQ ID NO: 694831 - RNA, 22 nt, Human
auggcuagcaccgcguugcugg

SEQ ID NO: 694832 - RNA, 22 nt, Human
cauuaacaaauggaagcaugaa

SEQ ID NO: 694833 - RNA, 23 nt, Human
uaucuguauuuguucacugcugu

SEQ ID NO: 694834 - RNA, 22 nt, Human
ugcagaccucccauggcugccu

SEQ ID NO: 694835 - RNA, 22 nt, Human
ugggauggccuuugaaagccag

SEQ ID NO: 694836 - RNA, 22 nt, Human
gcucagggagcgauuuaccaug

SEQ ID NO: 694837 - RNA, 22 nt, Human
agugcauguucacuggcauggu

SEQ ID NO: 694838 - RNA, 22 nt, Human
aaucucacucaaagaauucucu

SEQ ID NO: 694839 - RNA, 22 nt, Human
ccuggagcucacugggagccgg

SEQ ID NO: 694840 - RNA, 22 nt, Human
gugggcaucuccuuggaagcca

SEQ ID NO: 694841 - RNA, 22 nt, Human
uuuuuuguagcaagcgcagaua

SEQ ID NO: 694842 - RNA, 22 nt, Human
gagugcugagcccacuuccuug

SEQ ID NO: 694843 - RNA, 22 nt, Human
gggcagcucggaagugggaaag

SEQ ID NO: 694844 - RNA, 22 nt, Human
gcaauuauuaugugacuuuuac

SEQ ID NO: 694845 - RNA, 22 nt, Human
agugcuuucccugaaaccuucc

SEQ ID NO: 694846 - RNA, 22 nt, Human
cuguugguguugauuaaauagu

SEQ ID NO: 694847 - RNA, 23 nt, Human
ugggguugaauuguagcugugcc

SEQ ID NO: 694848 - RNA, 22 nt, Human
ccaggagcauuaagagaacaua

SEQ ID NO: 694849 - RNA, 22 nt, Human
aaacuaagacuaaugaagaacu

SEQ ID NO: 694850 - RNA, 22 nt, Human
gaguacauguauagagauuaac

SEQ ID NO: 694851 - RNA, 22 nt, Human
ucagguccccaacucuucucac

SEQ ID NO: 694852 - RNA, 22 nt, Human
uucuuuuccuacacagcgauuu

SEQ ID NO: 694853 - RNA, 22 nt, Human
ccagcagcucccucaggguccg

SEQ ID NO: 694854 - RNA, 18 nt, Human
guuauucucucugcagua

SEQ ID NO: 694855 - RNA, 22 nt, Human
gcuuugcauuguuuaaucagga

SEQ ID NO: 694856 - RNA, 22 nt, Human
cuggcuugaaguuaugcaccag

SEQ ID NO: 694857 - RNA, 22 nt, Human
acuguucauuuggauuucucug

SEQ ID NO: 694858 - RNA, 22 nt, Human
aggcugaggcaagaggaucacu

SEQ ID NO: 694859 - RNA, 22 nt, Human
ggccuugagagccagugcaggc

SEQ ID NO: 694860 - RNA, 22 nt, Human
agagcuggggccagagucaagg

SEQ ID NO: 694861 - RNA, 22 nt, Human
cuucugggccauggccuuccuc

SEQ ID NO: 694862 - RNA, 22 nt, Human
uuuauugacuucagugagucuu

SEQ ID NO: 694863 - RNA, 22 nt, Human
uccaaaggcccugaguucacuu

SEQ ID NO: 694864 - RNA, 22 nt, Human
uuuacuuuugguaaggucauuu

SEQ ID NO: 694865 - RNA, 21 nt, Human
gcacagggacagaucaucaca

SEQ ID NO: 694866 - RNA, 22 nt, Human
gggcuccaucggacuuggguuu

SEQ ID NO: 694867 - RNA, 22 nt, Human
ucacaccuguaaucccaggccu

SEQ ID NO: 694868 - RNA, 22 nt, Human
auacauagauagauaaucuggc

SEQ ID NO: 694869 - RNA, 22 nt, Human
aagcagggcucccuggggacuc

SEQ ID NO: 694870 - RNA, 22 nt, Human
aaacuguaaagcaggugaguag

SEQ ID NO: 694871 - RNA, 22 nt, Human
ucugauaauggacuucucaucu

SEQ ID NO: 694872 - RNA, 22 nt, Human
cugaggcugagacaggugaaau

SEQ ID NO: 694873 - RNA, 22 nt, Human
uuacauacuuacuagaucuaug

SEQ ID NO: 694874 - RNA, 22 nt, Human
uuacagaaguauugagagaucc

SEQ ID NO: 694875 - RNA, 20 nt, Human
uucugagaguucacagcccc

SEQ ID NO: 694876 - RNA, 22 nt, Human
ggcaggcauggccacucccuag

SEQ ID NO: 694877 - RNA, 22 nt, Human
ucuguagguuaaaaguagacaa

SEQ ID NO: 694878 - RNA, 22 nt, Human
guguuaaaaaucccaugauaug

SEQ ID NO: 694879 - RNA, 22 nt, Human
uuuaaaaaacuagucugagucu

SEQ ID NO: 694880 - RNA, 22 nt, Human
agaaaguuagcagacucuuggc

SEQ ID NO: 694881 - RNA, 22 nt, Human
aguaaugucccuuaaauguggu

SEQ ID NO: 694882 - RNA, 18 nt, Human
ccuguguguguugcaggc

SEQ ID NO: 694883 - RNA, 20 nt, Human
uugcacagagaaggaggcag

SEQ ID NO: 694884 - RNA, 22 nt, Human
gccucugggguuaauagaguuu

SEQ ID NO: 694885 - RNA, 22 nt, Human
ucaggccccaucccagacuuau

SEQ ID NO: 694886 - RNA, 22 nt, Human
uguacacaugcccacuugaagc

SEQ ID NO: 694887 - RNA, 22 nt, Human
ucccaucacuagcaucugcacc

SEQ ID NO: 694888 - RNA, 22 nt, Human
aaucuugagggacucaugaggu

SEQ ID NO: 694889 - RNA, 20 nt, Human
gccagaggccggcaggggcu

SEQ ID NO: 694890 - RNA, 22 nt, Human
ccagaggucuccugcacgggau

SEQ ID NO: 694891 - RNA, 22 nt, Human
ugaggugaauggugucccugga

SEQ ID NO: 694892 - RNA, 22 nt, Human
ucugugucagcagcacucagcc

SEQ ID NO: 694893 - RNA, 22 nt, Human
uucagaaagguuaaucuggauu

SEQ ID NO: 694894 - RNA, 22 nt, Human
gaaugcacucacccaucacuca

SEQ ID NO: 694895 - RNA, 22 nt, Human
ggcuacaguggcucagugcugg

SEQ ID NO: 694896 - RNA, 22 nt, Human
guggcuucacauggcauuuggc

SEQ ID NO: 694897 - RNA, 22 nt, Human
uccugaggugcucagccaggaa

SEQ ID NO: 694898 - RNA, 22 nt, Human
aacuguaaugaauuguucauga

SEQ ID NO: 694899 - RNA, 22 nt, Human
gagcugaguaugaaggauguga

SEQ ID NO: 694900 - RNA, 22 nt, Human
ugcccagcaauaaaccagaaga

SEQ ID NO: 694901 - RNA, 22 nt, Human
aagccaauggauugguugcuuu

SEQ ID NO: 694902 - RNA, 22 nt, Human
uuucauguuacauuuaaaaugu

SEQ ID NO: 694903 - RNA, 22 nt, Human
cagcaacugugccugacacaca

SEQ ID NO: 694904 - RNA, 22 nt, Human
acucaggcuacaggggcagaag

SEQ ID NO: 694905 - RNA, 22 nt, Human
gacuguggccuuggaccauggg

SEQ ID NO: 694906 - RNA, 22 nt, Human
ucuuuuagcucugcaaggaaag

SEQ ID NO: 694907 - RNA, 22 nt, Human
cuuuucuagagccgcagcccua

SEQ ID NO: 694908 - RNA, 20 nt, Human
gaaggcaaugguuuggcaca

SEQ ID NO: 694909 - RNA, 22 nt, Human
ucugggaacugagcuccccuag

SEQ ID NO: 694910 - RNA, 22 nt, Human
ugcagagaagaggacaguucua

SEQ ID NO: 694911 - RNA, 22 nt, Human
caggggcuuuuccucuauaagg

SEQ ID NO: 694912 - RNA, 22 nt, Human
gauguguagagggaauuucaaa

SEQ ID NO: 694913 - RNA, 22 nt, Human
auacauucaucacuuuuggucc

SEQ ID NO: 694914 - RNA, 22 nt, Human
cccaggaguuagagguuguggu

SEQ ID NO: 694915 - RNA, 22 nt, Human
cacuccuauaauuaaagaugca

SEQ ID NO: 694916 - RNA, 22 nt, Human
uucacagugcugcaccuggcuu

SEQ ID NO: 694917 - RNA, 23 nt, Human
gcauucugaugguucucugugau

SEQ ID NO: 694918 - RNA, 22 nt, Human
uguguagcucauauuaguguua

SEQ ID NO: 694919 - RNA, 22 nt, Human
agggucaguucugugagguguu

SEQ ID NO: 694920 - RNA, 21 nt, Human
ucccucagaagcucuugguca

SEQ ID NO: 694921 - RNA, 22 nt, Human
caacauucaaccaacauuuaug

SEQ ID NO: 694922 - RNA, 22 nt, Human
acugaugaaagguaagacucca

SEQ ID NO: 694923 - RNA, 22 nt, Human
uucuucaacaaggacacuguua

SEQ ID NO: 694924 - RNA, 21 nt, Human
uucaauacuauuucaauaguc

SEQ ID NO: 694925 - RNA, 22 nt, Human
aaaaaguauuggccaugguuga

SEQ ID NO: 694926 - RNA, 19 nt, Human
ugccccuuaagaguuucuc

SEQ ID NO: 694927 - RNA, 22 nt, Human
uggguccucuggagcagcagca

SEQ ID NO: 694928 - RNA, 22 nt, Human
agaauaaaauagucugaagaug

SEQ ID NO: 694929 - RNA, 22 nt, Human
uucaggaauauaggcauugaca

SEQ ID NO: 694930 - RNA, 22 nt, Human
ugcuuuauaacuuaguuuaugg

SEQ ID NO: 694931 - RNA, 22 nt, Human
aagccaaugagagaggccucag

SEQ ID NO: 694932 - RNA, 22 nt, Human
ggcaugcucuuuguccacagua

SEQ ID NO: 694933 - RNA, 22 nt, Human
gcuggccaggaagagucucaga

SEQ ID NO: 694934 - RNA, 22 nt, Human
gaccuggcauauucauuggcac

SEQ ID NO: 694935 - RNA, 22 nt, Human
ucugaagagucuugcaagaaag

SEQ ID NO: 694936 - RNA, 21 nt, Human
aggaggaacccguggcugggc

SEQ ID NO: 694937 - RNA, 20 nt, Human
cuuaaacacagagauagauu

SEQ ID NO: 694938 - RNA, 22 nt, Human
aguggggaagauuuugcaguca

SEQ ID NO: 694939 - RNA, 22 nt, Human
guggcugcugguacucugggaa

SEQ ID NO: 694940 - RNA, 22 nt, Human
auuuucaguguaaauguuuuau

SEQ ID NO: 694941 - RNA, 22 nt, Human
augacacauuugugcuguugaa

SEQ ID NO: 694942 - RNA, 22 nt, Human
uuccuguaguugugcaauguac

SEQ ID NO: 694943 - RNA, 22 nt, Human
uccugacuuggcuguuggcccu

SEQ ID NO: 694944 - RNA, 20 nt, Human
uugauucaagggcugaugga

SEQ ID NO: 694945 - RNA, 22 nt, Human
ucaagcuggcuguugcuauuuc

SEQ ID NO: 694946 - RNA, 20 nt, Human
uggcacagaacccuugccua

SEQ ID NO: 694947 - RNA, 22 nt, Human
uguuauucucugccuacaaguc

SEQ ID NO: 694948 - RNA, 22 nt, Human
agaagaugucacugcagacagc

SEQ ID NO: 694949 - RNA, 22 nt, Human
ccaaagugcugggguuacaggc

SEQ ID NO: 694950 - RNA, 22 nt, Human
cauguggauaugaauuguagaa

SEQ ID NO: 694951 - RNA, 22 nt, Human
gcagaggugugggaggggccac

SEQ ID NO: 694952 - RNA, 22 nt, Human
ggcaggaaguagcagucugagc

SEQ ID NO: 694953 - RNA, 22 nt, Human
gacuguguccaugugcuggauu

SEQ ID NO: 694954 - RNA, 22 nt, Human
ucauggaaacaaugcggaaaaa

SEQ ID NO: 694955 - RNA, 22 nt, Human
guccuguguacuccugauacuu

SEQ ID NO: 694956 - RNA, 22 nt, Human
gaggucugagugcggaaagccu

SEQ ID NO: 694957 - RNA, 22 nt, Human
ucuguggcuuucuuauguugua

SEQ ID NO: 694958 - RNA, 22 nt, Human
cagggcucccaaauaucucuuc

SEQ ID NO: 694959 - RNA, 22 nt, Human
gaccuggacugaguuagauggc

SEQ ID NO: 694960 - RNA, 19 nt, Human
aggcuggagacaccaggcc

SEQ ID NO: 694961 - RNA, 22 nt, Human
uaaauguacugaggcaacagga

SEQ ID NO: 694962 - RNA, 22 nt, Human
ucaaagagcucuaucuucaaaa

SEQ ID NO: 694963 - RNA, 22 nt, Human
uccugggcugugugccacucug

SEQ ID NO: 694964 - RNA, 22 nt, Human
uucucaaaacucaggguaucug

SEQ ID NO: 694965 - RNA, 22 nt, Human
acuaagugauucuaagcaucuu

SEQ ID NO: 694966 - RNA, 22 nt, Human
uucuguuuuagaaauaaguagu

SEQ ID NO: 694967 - RNA, 22 nt, Human
ugaacagucauuuagaaugugc

SEQ ID NO: 694968 - RNA, 22 nt, Human
aagagggguggucugugaggau

SEQ ID NO: 694969 - RNA, 22 nt, Human
caacuucaccaggguuccuaga

SEQ ID NO: 694970 - RNA, 22 nt, Human
cucugcuucugagauggaagcu

SEQ ID NO: 694971 - RNA, 22 nt, Human
gauugcaaaucauuacaaagga

SEQ ID NO: 694972 - RNA, 18 nt, Human
agguuugguggaaacaua

SEQ ID NO: 694973 - RNA, 22 nt, Human
ugaaggagauuuuuagggaggc

SEQ ID NO: 694974 - RNA, 22 nt, Human
acugucuguccugcucuccgug

SEQ ID NO: 694975 - RNA, 22 nt, Human
acucuggccccaggaucugugu

SEQ ID NO: 694976 - RNA, 22 nt, Human
gaagguuuuguuugcaaaucau

SEQ ID NO: 694977 - RNA, 22 nt, Human
ucuuggccccaccugugccagc

SEQ ID NO: 694978 - RNA, 22 nt, Human
gaguucuauuaugguuagaagu

SEQ ID NO: 694979 - RNA, 22 nt, Human
ugucugaacugcauuugcuccu

SEQ ID NO: 694980 - RNA, 22 nt, Human
uuagauuuacaagcacuguuua

SEQ ID NO: 694981 - RNA, 22 nt, Human
ugcaauuucaggcauauauugu

SEQ ID NO: 694982 - RNA, 22 nt, Human
uuccacagauguaugaaguggu

SEQ ID NO: 694983 - RNA, 20 nt, Human
uguccccuagaucccagcuc

SEQ ID NO: 694984 - RNA, 22 nt, Human
uggaagggggaagacagcucug

SEQ ID NO: 694985 - RNA, 22 nt, Human
ggcacugauuccauucaugaag

SEQ ID NO: 694986 - RNA, 16 nt, Human
ucauugaagacaguac

SEQ ID NO: 694987 - RNA, 22 nt, Human
guggguggggagcucucuggag

SEQ ID NO: 694988 - RNA, 22 nt, Human
cagucuaagacucacgccaaga

SEQ ID NO: 694989 - RNA, 22 nt, Human
aggccucagccugccaggccug

SEQ ID NO: 694990 - RNA, 22 nt, Human
cagagcaccugcucauugccag

SEQ ID NO: 694991 - RNA, 22 nt, Human
uuucucugugggcuuuaugcau

SEQ ID NO: 694992 - RNA, 21 nt, Human
aguuuccucaucugcauagga

SEQ ID NO: 694993 - RNA, 22 nt, Human
ugaaucaauaguugcaaguauu

SEQ ID NO: 694994 - RNA, 22 nt, Human
gcccagcacuccucucugacau

SEQ ID NO: 694995 - RNA, 22 nt, Human
cgugcaugauauaugaguuguu

SEQ ID NO: 694996 - RNA, 22 nt, Human
cgccccucagcgacccaccagc

SEQ ID NO: 694997 - RNA, 22 nt, Human
uaagugucuaaaaggcagaacu

SEQ ID NO: 694998 - RNA, 22 nt, Human
cccaaguuaauuuguagcugaa

SEQ ID NO: 694999 - RNA, 22 nt, Human
uccaguggaacagauguugccu

SEQ ID NO: 695000 - RNA, 22 nt, Human
ugcaggaaaacaccuaucaccc

SEQ ID NO: 695001 - RNA, 22 nt, Human
acaggacuguggaaggaucucu

SEQ ID NO: 695002 - RNA, 22 nt, Human
accagccccaccgggacugcag

SEQ ID NO: 695003 - RNA, 18 nt, Human
auggcuucugaguggagg

SEQ ID NO: 695004 - RNA, 22 nt, Human
ccacagagucuuccuucucuuc

SEQ ID NO: 695005 - RNA, 22 nt, Human
acagcuuuucugauagauccug

SEQ ID NO: 695006 - RNA, 22 nt, Human
cugguacaaaaugcugauauca

SEQ ID NO: 695007 - RNA, 22 nt, Human
uuacuguuugaaaaaugaaugu

SEQ ID NO: 695008 - RNA, 22 nt, Human
caguccugcccaggcugacaga

SEQ ID NO: 695009 - RNA, 23 nt, Human
gcccacccucagcguccucacgg

SEQ ID NO: 695010 - RNA, 22 nt, Human
aucauucuagcuguuguguuga

SEQ ID NO: 695011 - RNA, 21 nt, Human
uugcuguuuucccaaugcagu

SEQ ID NO: 695012 - RNA, 22 nt, Human
gcauucccaaaagacacuuacc

SEQ ID NO: 695013 - RNA, 22 nt, Human
cuuccuuccuuccccgaaaugc

SEQ ID NO: 695014 - RNA, 23 nt, Human
uacaugcuauaauuucacccuca

SEQ ID NO: 695015 - RNA, 22 nt, Human
cuucucccugggggcucuuuau

SEQ ID NO: 695016 - RNA, 22 nt, Human
aaacuagaugauuaugaagcau

SEQ ID NO: 695017 - RNA, 22 nt, Human
augaucauggaagugcacccau

SEQ ID NO: 695018 - RNA, 22 nt, Human
uucuguuagcauucugaucucc

SEQ ID NO: 695019 - RNA, 22 nt, Human
uccuggucagcuuugagguugu

SEQ ID NO: 695020 - RNA, 22 nt, Human
uagagaugcccuagcugaagua

SEQ ID NO: 695021 - RNA, 22 nt, Human
uuuaacuuagaagagauauccu

SEQ ID NO: 695022 - RNA, 18 nt, Human
ucaaagucuggcuccacu

SEQ ID NO: 695023 - RNA, 22 nt, Human
aaaucucuggcagaaauaaacu

SEQ ID NO: 695024 - RNA, 22 nt, Human
cagcccuggcccaggugccuua

SEQ ID NO: 695025 - RNA, 22 nt, Human
uauucaucuucauagucacagu

SEQ ID NO: 695026 - RNA, 22 nt, Human
acuuuugaagaauuaugcaaaa

SEQ ID NO: 695027 - RNA, 22 nt, Human
caguauuuggaauauagcuaag

SEQ ID NO: 695028 - RNA, 22 nt, Human
ugcguaguacgaauuugugccu

SEQ ID NO: 695029 - RNA, 22 nt, Human
uuuggaaugaaacagcagagcc

SEQ ID NO: 695030 - RNA, 21 nt, Human
aaauuucugcaagccucaacu

SEQ ID NO: 695031 - RNA, 22 nt, Human
uuuccagugaauuagucuguuu

SEQ ID NO: 695032 - RNA, 22 nt, Human
ucucugcccaugagcaaucugc

SEQ ID NO: 695033 - RNA, 22 nt, Human
uacauuauccugucuuuguccu

SEQ ID NO: 695034 - RNA, 22 nt, Human
ugguggucauagcagaggccgu

SEQ ID NO: 695035 - RNA, 23 nt, Human
agaaaccacugaagagauccagu

SEQ ID NO: 695036 - RNA, 22 nt, Human
acagucuucccuuauuccacuc

SEQ ID NO: 695037 - RNA, 22 nt, Human
aguaaacugugugccuuugacu

SEQ ID NO: 695038 - RNA, 22 nt, Human
gaaggcauucuauucuacauau

SEQ ID NO: 695039 - RNA, 22 nt, Human
ccucagugagaugcucagcgaa

SEQ ID NO: 695040 - RNA, 22 nt, Human
gugcuggcaccccucuccaguu

SEQ ID NO: 695041 - RNA, 22 nt, Human
aaggaaauuagguuauuuugcu

SEQ ID NO: 695042 - RNA, 22 nt, Human
cugcacccucaaacuccugggc

SEQ ID NO: 695043 - RNA, 22 nt, Human
aacacugugagguaaugaccua

SEQ ID NO: 695044 - RNA, 22 nt, Human
cugguugggagguuggcuuuca

SEQ ID NO: 695045 - RNA, 22 nt, Human
gugauccgaugucagucgcaga

SEQ ID NO: 695046 - RNA, 22 nt, Human
cagagagaauauguaguaugga

SEQ ID NO: 695047 - RNA, 22 nt, Human
ugccugucuccucugcagggug

SEQ ID NO: 695048 - RNA, 22 nt, Human
uuuagcauuacuaaaaugaaaa

SEQ ID NO: 695049 - RNA, 18 nt, Human
ucaggcuggaaguuugcc

SEQ ID NO: 695050 - RNA, 22 nt, Human
uauaggcuuuuguugcagaaca

SEQ ID NO: 695051 - RNA, 22 nt, Human
aggcuggugccugcagugaauc

SEQ ID NO: 695052 - RNA, 22 nt, Human
guuccaggcaagugggauagga

SEQ ID NO: 695053 - RNA, 22 nt, Human
uggcaagcagagucuggugggg

SEQ ID NO: 695054 - RNA, 22 nt, Human
auaugggggggcgugcagagga

SEQ ID NO: 695055 - RNA, 22 nt, Human
caugcauuacaauugcauagua

SEQ ID NO: 695056 - RNA, 22 nt, Human
gcugucuguucgagcguguguu

SEQ ID NO: 695057 - RNA, 22 nt, Human
guggcugcuaagucuccuuccu

SEQ ID NO: 695058 - RNA, 22 nt, Human
cagaucaugggacugucucagc

SEQ ID NO: 695059 - RNA, 22 nt, Human
agccuuaaaugcuagauucaua

SEQ ID NO: 695060 - RNA, 22 nt, Human
ugcauuaagguaauuguauaau

SEQ ID NO: 695061 - RNA, 22 nt, Human
aaagucaucauuucuuuucaaa

SEQ ID NO: 695062 - RNA, 20 nt, Human
agugccagggcaggugagag

SEQ ID NO: 695063 - RNA, 22 nt, Human
ugcaguguggccaugucagcua

SEQ ID NO: 695064 - RNA, 22 nt, Human
aggaaaugggaauagaugguau

SEQ ID NO: 695065 - RNA, 22 nt, Human
ccauuuguuuucgcuaccaugg

SEQ ID NO: 695066 - RNA, 22 nt, Human
ucuuggaaucuccauagaguga

SEQ ID NO: 695067 - RNA, 23 nt, Human
uucucuuuagauuuacauuacuc

SEQ ID NO: 695068 - RNA, 22 nt, Human
ugucccagguccuagaugacca

SEQ ID NO: 695069 - RNA, 22 nt, Human
uaugcuuucauucauaugugag

SEQ ID NO: 695070 - RNA, 22 nt, Human
ugaaagguguccaauauuucuc

SEQ ID NO: 695071 - RNA, 22 nt, Human
ucacauuuggagaaagccugcc

SEQ ID NO: 695072 - RNA, 22 nt, Human
uauucugcaugaaaauaaacag

SEQ ID NO: 695073 - RNA, 22 nt, Human
uuacaguuguucuaucagcaug

SEQ ID NO: 695074 - RNA, 22 nt, Human
agaaguaucuugggaaggcacu

SEQ ID NO: 695075 - RNA, 22 nt, Human
aaugcacagcguuccaugcuug

SEQ ID NO: 695076 - RNA, 21 nt, Human
agccuggcccagggggaggcu

SEQ ID NO: 695077 - RNA, 22 nt, Human
uugggagguaauggagccaagu

SEQ ID NO: 695078 - RNA, 22 nt, Human
ucaccacugaacagaccuuugg

SEQ ID NO: 695079 - RNA, 22 nt, Human
cauguuaaaauauacauucuga

SEQ ID NO: 695080 - RNA, 22 nt, Human
aauaaagcaugaggcauuuauc

SEQ ID NO: 695081 - RNA, 18 nt, Human
gugcaaugaauagcagag

SEQ ID NO: 695082 - RNA, 22 nt, Human
aggccucaguucuugccaggug

SEQ ID NO: 695083 - RNA, 22 nt, Human
cacccuggccucgcucucugca

SEQ ID NO: 695084 - RNA, 22 nt, Human
gacaauugcuuuugccgaauaa

SEQ ID NO: 695085 - RNA, 22 nt, Human
auuuaccauauguacugaguau

SEQ ID NO: 695086 - RNA, 22 nt, Human
auugucuucuggucuuaucuuu

SEQ ID NO: 695087 - RNA, 22 nt, Human
aggccacaguugaggccagcaa

SEQ ID NO: 695088 - RNA, 22 nt, Human
agugggggcuggcucugucugu

SEQ ID NO: 695089 - RNA, 22 nt, Human
gcaagcagacauucagguaggu

SEQ ID NO: 695090 - RNA, 18 nt, Human
guuuccugucuuacgggg

SEQ ID NO: 695091 - RNA, 22 nt, Human
uccuggcuccagcagcucuucc

SEQ ID NO: 695092 - RNA, 22 nt, Human
gcccaggaguugguggcugcag

SEQ ID NO: 695093 - RNA, 22 nt, Human
ccugagaguaggugucucuuua

SEQ ID NO: 695094 - RNA, 19 nt, Human
gcugcagaguauucuuggg

SEQ ID NO: 695095 - RNA, 22 nt, Human
ggcuccagguuuaaggguaugu

SEQ ID NO: 695096 - RNA, 22 nt, Human
gagacugauggggcucccagaa

SEQ ID NO: 695097 - RNA, 22 nt, Human
ggccagggccuggggacugucc

SEQ ID NO: 695098 - RNA, 22 nt, Human
ugccacagagcaauucugcuga

SEQ ID NO: 695099 - RNA, 22 nt, Human
uucagcagucguccaggaaaag

SEQ ID NO: 695100 - RNA, 22 nt, Human
auguguuaguuugugauuauac

SEQ ID NO: 695101 - RNA, 22 nt, Human
aaggggaaaaaguguuaggagu

SEQ ID NO: 695102 - RNA, 22 nt, Human
uauguuauuuucauacaacaga

SEQ ID NO: 695103 - RNA, 22 nt, Human
cugaggagcguuggucacgugu

SEQ ID NO: 695104 - RNA, 22 nt, Human
aagcuuuaugaucucucagcua

SEQ ID NO: 695105 - RNA, 22 nt, Human
gaguccuucuggcuggcaggau

SEQ ID NO: 695106 - RNA, 22 nt, Human
auucaguuacucuagacacuuc

SEQ ID NO: 695107 - RNA, 22 nt, Human
gaaaguauuuaaguccauauuu

SEQ ID NO: 695108 - RNA, 22 nt, Human
aggugccaauuuucagugaaca

SEQ ID NO: 695109 - RNA, 23 nt, Human
ggcuggaagaaaacagaauuguu

SEQ ID NO: 695110 - RNA, 22 nt, Human
gcagaggucuagcaccaagaau

SEQ ID NO: 695111 - RNA, 20 nt, Human
cugcugagagccuggcuugc

SEQ ID NO: 695112 - RNA, 22 nt, Human
caggaaaugcuaucauagcuga

SEQ ID NO: 695113 - RNA, 22 nt, Human
ugaaaugacagucuuaagcucu

SEQ ID NO: 695114 - RNA, 22 nt, Human
uacauucagagaaaguuuccau

SEQ ID NO: 695115 - RNA, 22 nt, Human
acaagaguaucuuugacuuuag

SEQ ID NO: 695116 - RNA, 22 nt, Human
ucaguguugaauuuuuugcaaa

SEQ ID NO: 695117 - RNA, 22 nt, Human
gaaauccaguucccuacucuua

SEQ ID NO: 695118 - RNA, 22 nt, Human
uuccaaacucauaguauggugu

SEQ ID NO: 695119 - RNA, 22 nt, Human
ccagcagcauccugcagcacuu

SEQ ID NO: 695120 - RNA, 21 nt, Human
gucacacaggccuggagcuga

SEQ ID NO: 695121 - RNA, 22 nt, Human
ucauagaaauguggccagaaac

SEQ ID NO: 695122 - RNA, 22 nt, Human
uggauauguuggaggugaaggu

SEQ ID NO: 695123 - RNA, 22 nt, Human
cucuuugacgugcccauguccc

SEQ ID NO: 695124 - RNA, 22 nt, Human
cugcagagcauaaaucugaaua

SEQ ID NO: 695125 - RNA, 22 nt, Human
ucuguccagagguccuggagac

SEQ ID NO: 695126 - RNA, 22 nt, Human
aaauaaacugaagcacagagag

SEQ ID NO: 695127 - RNA, 22 nt, Human
acagcauucaauaaauaauaac

SEQ ID NO: 695128 - RNA, 22 nt, Human
uacaaguguaagcuugugagac

SEQ ID NO: 695129 - RNA, 22 nt, Human
guggcagagguuccucagugug

SEQ ID NO: 695130 - RNA, 22 nt, Human
aacaaacaaacauuuugucauc

SEQ ID NO: 695131 - RNA, 22 nt, Human
aacugaaacguauuuuugagau

SEQ ID NO: 695132 - RNA, 22 nt, Human
uuagcugcauuaucaaaguuau

SEQ ID NO: 695133 - RNA, 22 nt, Human
aguuuucucuguguucugcuua

SEQ ID NO: 695134 - RNA, 22 nt, Human
ucacugcucgauaacaugauua

SEQ ID NO: 695135 - RNA, 22 nt, Human
uagaauuaugccuugcugucca

SEQ ID NO: 695136 - RNA, 22 nt, Human
ccagggcaugggaagaacugaa

SEQ ID NO: 695137 - RNA, 22 nt, Human
ggguggagcuuggacaccagua

SEQ ID NO: 695138 - RNA, 22 nt, Human
uucuggcugaaaguuuauuuga

SEQ ID NO: 695139 - RNA, 22 nt, Human
gagugagggccaacauccagcu

SEQ ID NO: 695140 - RNA, 22 nt, Human
gcugaaaucccagcauucccca

SEQ ID NO: 695141 - RNA, 22 nt, Human
ucuggauuuguggaaaaucugc

SEQ ID NO: 695142 - RNA, 22 nt, Human
caggccagaguccaacuccaga

SEQ ID NO: 695143 - RNA, 22 nt, Human
ugcccugccaagacucaguggu

SEQ ID NO: 695144 - RNA, 22 nt, Human
auuagcuuaguguuuccguaau

SEQ ID NO: 695145 - RNA, 22 nt, Human
uuuguaugggcagaaauuagau

SEQ ID NO: 695146 - RNA, 22 nt, Human
accaggcccaccgcaugcuccu

SEQ ID NO: 695147 - RNA, 22 nt, Human
uuccuaaccucuagcugcauau

SEQ ID NO: 695148 - RNA, 22 nt, Human
acaggcacugucaagucaugaa

SEQ ID NO: 695149 - RNA, 22 nt, Human
gcugcucucucccuaaguuggg

SEQ ID NO: 695150 - RNA, 22 nt, Human
ucagcaucaguauuguuuagga

SEQ ID NO: 695151 - RNA, 22 nt, Human
cuuccuggccauugccauggca

SEQ ID NO: 695152 - RNA, 20 nt, Human
caugagaagggcagugugag

SEQ ID NO: 695153 - RNA, 22 nt, Human
cuggcccccacaccugucaggg

SEQ ID NO: 695154 - RNA, 22 nt, Human
ugugaagguaaggaggggcaag

SEQ ID NO: 695155 - RNA, 22 nt, Human
gagggaugcagaaacagaggcc

SEQ ID NO: 695156 - RNA, 22 nt, Human
acacagaggcaugacaguggcu

SEQ ID NO: 695157 - RNA, 22 nt, Human
auggcagccugagcagaggaau

SEQ ID NO: 695158 - RNA, 22 nt, Human
agagccugagccugaaagcccu

SEQ ID NO: 695159 - RNA, 22 nt, Human
gaaagauauuuauuggcaacag

SEQ ID NO: 695160 - RNA, 22 nt, Human
ggcucccugggugcuccugcuc

SEQ ID NO: 695161 - RNA, 22 nt, Human
uacagcacggugcauuuacuac

SEQ ID NO: 695162 - RNA, 22 nt, Human
aaugcuuaauucaauacugugu

SEQ ID NO: 695163 - RNA, 22 nt, Human
ucauugacaguuguuucaaaua

SEQ ID NO: 695164 - RNA, 22 nt, Human
gaaaacuuggaucucuagaaug

SEQ ID NO: 695165 - RNA, 22 nt, Human
uccuggugcuuguauuugaagu

SEQ ID NO: 695166 - RNA, 22 nt, Human
ggcuggagaagggugguugaca

SEQ ID NO: 695167 - RNA, 22 nt, Human
caggucuguuuccaucagugcu

SEQ ID NO: 695168 - RNA, 22 nt, Human
uggagacucugcaucugugaca

SEQ ID NO: 695169 - RNA, 22 nt, Human
uauauaagauggguaggcuugu

SEQ ID NO: 695170 - RNA, 19 nt, Human
ccuggcugugaagccugca

SEQ ID NO: 695171 - RNA, 22 nt, Human
uacaguauauacuguguguaga

SEQ ID NO: 695172 - RNA, 22 nt, Human
gagcagggccacuucuguaccu

SEQ ID NO: 695173 - RNA, 22 nt, Human
ugaagccagcuuuggaagacac

SEQ ID NO: 695174 - RNA, 22 nt, Human
gcagacacuugaggugggcuuu

SEQ ID NO: 695175 - RNA, 22 nt, Human
uagccgggugugguggaacucc

SEQ ID NO: 695176 - RNA, 22 nt, Human
cgcagagggagccgcgggcugc

SEQ ID NO: 695177 - RNA, 22 nt, Human
ucucacacuaaugcucuaucag

SEQ ID NO: 695178 - RNA, 22 nt, Human
ugguaucagagccaucuguauu

SEQ ID NO: 695179 - RNA, 22 nt, Human
gugcaugaagacucagaaaguc

SEQ ID NO: 695180 - RNA, 22 nt, Human
uuacaguuuaccaagaauauug

SEQ ID NO: 695181 - RNA, 22 nt, Human
uucaaagauggagggauagauu

SEQ ID NO: 695182 - RNA, 22 nt, Human
caguugaugggacucauguggg

SEQ ID NO: 695183 - RNA, 22 nt, Human
aguguaugaacuuaagagagag

SEQ ID NO: 695184 - RNA, 22 nt, Human
ucagcaccaguuauccucaggg

SEQ ID NO: 695185 - RNA, 22 nt, Human
ugcugaggucaccuugcugcua

SEQ ID NO: 695186 - RNA, 22 nt, Human
acagccuucucuucacuguguc

SEQ ID NO: 695187 - RNA, 22 nt, Human
uugcauugugauuacagaggug

SEQ ID NO: 695188 - RNA, 20 nt, Human
aggagaaauucgggacaccu

SEQ ID NO: 695189 - RNA, 19 nt, Human
uaccaaauugcauuauggc

SEQ ID NO: 695190 - RNA, 19 nt, Human
cuccaaguuaagagggagg

SEQ ID NO: 695191 - RNA, 22 nt, Human
cacaauuuuaauacacagucaa

SEQ ID NO: 695192 - RNA, 22 nt, Human
ucugccuagugggacagcagcc

SEQ ID NO: 695193 - RNA, 22 nt, Human
acaauguucuacauauacauaa

SEQ ID NO: 695194 - RNA, 22 nt, Human
ugggaaguaggacagugcaguu

SEQ ID NO: 695195 - RNA, 22 nt, Human
ccugggcuccacuccaagagca

SEQ ID NO: 695196 - RNA, 22 nt, Human
cuccaggugcagaaggacucag

SEQ ID NO: 695197 - RNA, 22 nt, Human
cuucugugcgccucuauucccu

SEQ ID NO: 695198 - RNA, 22 nt, Human
ccauggcaauggucagucuauu

SEQ ID NO: 695199 - RNA, 22 nt, Human
uuguuucaaauauuucagaaua

SEQ ID NO: 695200 - RNA, 22 nt, Human
ccuaggcuaauucaguccagua

SEQ ID NO: 695201 - RNA, 22 nt, Human
agccagcaucccuucagucucc

SEQ ID NO: 695202 - RNA, 22 nt, Human
aaauggcuuugaggguaggaca

SEQ ID NO: 695203 - RNA, 19 nt, Human
uccugcagguggcuugcag

SEQ ID NO: 695204 - RNA, 22 nt, Human
aagauguuaaauugggggcauu

SEQ ID NO: 695205 - RNA, 22 nt, Human
uggcagcuccuggggccagcac

SEQ ID NO: 695206 - RNA, 22 nt, Human
ugccauuuaaaaaugaccaaau

SEQ ID NO: 695207 - RNA, 22 nt, Human
uacaaaguuugggguccucaaa

SEQ ID NO: 695208 - RNA, 22 nt, Human
ugcguguguguauauacacagg

SEQ ID NO: 695209 - RNA, 22 nt, Human
acaugugcagacagcaagcagg

SEQ ID NO: 695210 - RNA, 22 nt, Human
agaaaguuuauuucuugaugga

SEQ ID NO: 695211 - RNA, 22 nt, Human
uguuuucagucauauagcaggu

SEQ ID NO: 695212 - RNA, 22 nt, Human
acucugccccgaguucugggaa

SEQ ID NO: 695213 - RNA, 22 nt, Human
ggagaaggguauguguggcgga

SEQ ID NO: 695214 - RNA, 22 nt, Human
cagucccaaggaggaagcaguc

SEQ ID NO: 695215 - RNA, 22 nt, Human
caguuuuaugucgaauguauac

SEQ ID NO: 695216 - RNA, 22 nt, Human
ggcagggaagcuggcaucacgg

SEQ ID NO: 695217 - RNA, 23 nt, Human
aaugggugcaacuauccaugaca

SEQ ID NO: 695218 - RNA, 22 nt, Human
aaucuguucuacucuauucaga

SEQ ID NO: 695219 - RNA, 22 nt, Human
acagagggggccuuggagugca

SEQ ID NO: 695220 - RNA, 22 nt, Human
ucaggaggucugcugcggggug

SEQ ID NO: 695221 - RNA, 22 nt, Human
cugguccucuccagcaggcauu

SEQ ID NO: 695222 - RNA, 22 nt, Human
caagcugguaucagcuagagcg

SEQ ID NO: 695223 - RNA, 18 nt, Human
aaggcacaggagaacauu

SEQ ID NO: 695224 - RNA, 22 nt, Human
guuccugaaagaugaguaauua

SEQ ID NO: 695225 - RNA, 21 nt, Human
uugauuuagcagaucuagcug

SEQ ID NO: 695226 - RNA, 22 nt, Human
aucauagaacaccuaccuaccu

SEQ ID NO: 695227 - RNA, 22 nt, Human
ucucugucacacaaucuacaca

SEQ ID NO: 695228 - RNA, 22 nt, Human
gagugggcaccgugggcacacu

SEQ ID NO: 695229 - RNA, 22 nt, Human
uccuggcuaguuuugcugaaau

SEQ ID NO: 695230 - RNA, 22 nt, Human
caggggcagucugugugcgugg

SEQ ID NO: 695231 - RNA, 22 nt, Human
aucugggucugaagauaaugau

SEQ ID NO: 695232 - RNA, 22 nt, Human
accucacaagucucugucagcu

SEQ ID NO: 695233 - RNA, 22 nt, Human
agccacagagagggagcugcaa

SEQ ID NO: 695234 - RNA, 22 nt, Human
cauacauacugaguggacugau

SEQ ID NO: 695235 - RNA, 20 nt, Human
ucccaaggaugccugggugu

SEQ ID NO: 695236 - RNA, 22 nt, Human
uuguuguuggagccaauaugca

SEQ ID NO: 695237 - RNA, 22 nt, Human
acaugucuccacccaucuuaaa

SEQ ID NO: 695238 - RNA, 22 nt, Human
uaggucugauuuccauucaguc

SEQ ID NO: 695239 - RNA, 22 nt, Human
gcccucuguguaacaauccaga

SEQ ID NO: 695240 - RNA, 20 nt, Human
gccauccagccucccaggag

SEQ ID NO: 695241 - RNA, 21 nt, Human
cagaggggcuagccuggcugc

SEQ ID NO: 695242 - RNA, 23 nt, Human
ggauggagccacuuugaaaccac

SEQ ID NO: 695243 - RNA, 20 nt, Human
cggacuuucuucucagggca

SEQ ID NO: 695244 - RNA, 22 nt, Human
guggugcaggaagcaucuggcu

SEQ ID NO: 695245 - RNA, 22 nt, Human
gcacuagaaucccuucaagaag

SEQ ID NO: 695246 - RNA, 22 nt, Human
cacaguggcagguguggguugu

SEQ ID NO: 695247 - RNA, 22 nt, Human
cagacagggcccugugauggua

SEQ ID NO: 695248 - RNA, 22 nt, Human
caaugcauuauucucccacuuc

SEQ ID NO: 695249 - RNA, 22 nt, Human
aguguuuauauuauggaaauau

SEQ ID NO: 695250 - RNA, 22 nt, Human
caucauugccuguuucccuugg

SEQ ID NO: 695251 - RNA, 17 nt, Human
uggggaugguucaugag

SEQ ID NO: 695252 - RNA, 22 nt, Human
ccugccuggaucagccauccug

SEQ ID NO: 695253 - RNA, 22 nt, Human
ggagcagacauaaccuuacaga

SEQ ID NO: 695254 - RNA, 22 nt, Human
ggagaaugauucuuugcucacu

SEQ ID NO: 695255 - RNA, 22 nt, Human
ugagaauuuucaguuucacuuu

SEQ ID NO: 695256 - RNA, 22 nt, Human
cguggccuuugagugagcuccc

SEQ ID NO: 695257 - RNA, 22 nt, Human
uuacaguccuuuguauuguuua

SEQ ID NO: 695258 - RNA, 22 nt, Human
guggccagagauuaaauagagu

SEQ ID NO: 695259 - RNA, 22 nt, Human
agcuuguguuuuucuaaguauc

SEQ ID NO: 695260 - RNA, 22 nt, Human
uguuuguagagacagcugaugc

SEQ ID NO: 695261 - RNA, 22 nt, Human
gcagcaggcacggucucgacau

SEQ ID NO: 695262 - RNA, 22 nt, Human
uuuguaaagucuguucugaguu

SEQ ID NO: 695263 - RNA, 22 nt, Human
uuuucguuuauuugacauguaa

SEQ ID NO: 695264 - RNA, 22 nt, Human
auggucacagagcuuaauuaau

SEQ ID NO: 695265 - RNA, 22 nt, Human
aaguuucaugacuugguuauua

SEQ ID NO: 695266 - RNA, 22 nt, Human
auccaggcugcuuucuaugccc

SEQ ID NO: 695267 - RNA, 22 nt, Human
gggcuucaguaccaaaguuuga

SEQ ID NO: 695268 - RNA, 22 nt, Human
ggaggggcagccauggaacucc

SEQ ID NO: 695269 - RNA, 22 nt, Human
agcaggaggguuuuguagaguc

SEQ ID NO: 695270 - RNA, 22 nt, Human
cagaggcuggauggacuugccu

SEQ ID NO: 695271 - RNA, 22 nt, Human
ccugggcagccugcucaaggac

SEQ ID NO: 695272 - RNA, 22 nt, Human
uuggcagaugaacacaacugga

SEQ ID NO: 695273 - RNA, 21 nt, Human
uuugaaagcccuauguuuuca

SEQ ID NO: 695274 - RNA, 22 nt, Human
caggcagacuuugagaaugaug

SEQ ID NO: 695275 - RNA, 22 nt, Human
uguauuuauucaggauguaacu

SEQ ID NO: 695276 - RNA, 22 nt, Human
gacagcaguccuggaguuccca

SEQ ID NO: 695277 - RNA, 22 nt, Human
cuaggaauccuuuuagaguugg

SEQ ID NO: 695278 - RNA, 22 nt, Human
ugaauugugaccccucuguauu

SEQ ID NO: 695279 - RNA, 22 nt, Human
aggagaaaacaguguuuugccu

SEQ ID NO: 695280 - RNA, 22 nt, Human
gacuauugcacacuucucucac

SEQ ID NO: 695281 - RNA, 22 nt, Human
ucaagcaucuuggucuacgauc

SEQ ID NO: 695282 - RNA, 21 nt, Human
uaagagcuauuauugcaaacc

SEQ ID NO: 695283 - RNA, 22 nt, Human
aagguuuuuuuccaguaucucu

SEQ ID NO: 695284 - RNA, 22 nt, Human
gacccaggguauccagagcugc

SEQ ID NO: 695285 - RNA, 22 nt, Human
acauucuggaugucugaugaga

SEQ ID NO: 695286 - RNA, 22 nt, Human
uguuaggguccugugcaggggc

SEQ ID NO: 695287 - RNA, 22 nt, Human
aagauguugacuccuuugaugu

SEQ ID NO: 695288 - RNA, 22 nt, Human
augucuagagcaagagaugcug

SEQ ID NO: 695289 - RNA, 22 nt, Human
ggagcaagagguggugaaaaau

SEQ ID NO: 695290 - RNA, 22 nt, Human
gcuaggcuguguuucagacccu

SEQ ID NO: 695291 - RNA, 22 nt, Human
uucaacuauuaugaauaaaauu

SEQ ID NO: 695292 - RNA, 22 nt, Human
cuuuugcaccuuuuaaguaaug

SEQ ID NO: 695293 - RNA, 22 nt, Human
cugcugggucuaugcaagugga

SEQ ID NO: 695294 - RNA, 22 nt, Human
uggcagugaaccaaggcuccaa

SEQ ID NO: 695295 - RNA, 21 nt, Human
uuagaguugccauuauaugua

SEQ ID NO: 695296 - RNA, 22 nt, Human
acagauauaugauuguguaaau

SEQ ID NO: 695297 - RNA, 22 nt, Human
ugagggaguguggauacaguag

SEQ ID NO: 695298 - RNA, 22 nt, Human
gccccuggcuggccagcuccuc

SEQ ID NO: 695299 - RNA, 22 nt, Human
cacagcaagagcuaaaugacca

SEQ ID NO: 695300 - RNA, 22 nt, Human
caagcccacugcucagagccaa

SEQ ID NO: 695301 - RNA, 22 nt, Human
ugggugcucugcgaccguaggg

SEQ ID NO: 695302 - RNA, 22 nt, Human
auugaaaaugacauuugugccc

SEQ ID NO: 695303 - RNA, 21 nt, Human
uuggaacaagcagcaguuugc

SEQ ID NO: 695304 - RNA, 19 nt, Human
cugcucaggucagucuguc

SEQ ID NO: 695305 - RNA, 22 nt, Human
gucagcuccuagcaccccccaa

SEQ ID NO: 695306 - RNA, 22 nt, Human
uuguaacaguagcugucagcuc

SEQ ID NO: 695307 - RNA, 22 nt, Human
agacauuuuaacaucuggguuu

SEQ ID NO: 695308 - RNA, 22 nt, Human
ggccuguggcaaggugagaaug

SEQ ID NO: 695309 - RNA, 20 nt, Human
cugggcucaagugauccucc

SEQ ID NO: 695310 - RNA, 22 nt, Human
gggaaaggaucagugggaggcu

SEQ ID NO: 695311 - RNA, 22 nt, Human
cuggacagaaguggcugggcag

SEQ ID NO: 695312 - RNA, 22 nt, Human
uucuaaauuuuggaagaugcag

SEQ ID NO: 695313 - RNA, 22 nt, Human
cagaggccaggcugccugacug

SEQ ID NO: 695314 - RNA, 22 nt, Human
uccaggcccauggagcagagcu

SEQ ID NO: 695315 - RNA, 22 nt, Human
gugaacaaggagacuacaacuu

SEQ ID NO: 695316 - RNA, 22 nt, Human
ugcugcuggaucuuacucaucu

SEQ ID NO: 695317 - RNA, 22 nt, Human
ugcagaaauucagaaagcauaa

SEQ ID NO: 695318 - RNA, 22 nt, Human
cagccugcaggaggccgucagc

SEQ ID NO: 695319 - RNA, 22 nt, Human
ucaagaugcauggguggcauaa

SEQ ID NO: 695320 - RNA, 22 nt, Human
ugagauccccaggaaggacaac

SEQ ID NO: 695321 - RNA, 22 nt, Human
uaauacuuugaaugagagcuaa

SEQ ID NO: 695322 - RNA, 22 nt, Human
uuacagaguagugcagaacuca

SEQ ID NO: 695323 - RNA, 22 nt, Human
ugucacauuauaugugaggaua

SEQ ID NO: 695324 - RNA, 22 nt, Human
aguggucugccugccucagccu

SEQ ID NO: 695325 - RNA, 22 nt, Human
gccagcaguccaguccuuagug

SEQ ID NO: 695326 - RNA, 22 nt, Human
cccaggagguggagguugcggu

SEQ ID NO: 695327 - RNA, 23 nt, Human
acugggcuuaugaggaggcuugu

SEQ ID NO: 695328 - RNA, 22 nt, Human
uuauuucuacuauuuugccuga

SEQ ID NO: 695329 - RNA, 22 nt, Human
accacaggguaaaguuagauau

SEQ ID NO: 695330 - RNA, 22 nt, Human
aggaaagcaauggcugagaaca

SEQ ID NO: 695331 - RNA, 20 nt, Human
uuggucagugguucaguuug

SEQ ID NO: 695332 - RNA, 20 nt, Human
uccaggagguuaguguggcu

SEQ ID NO: 695333 - RNA, 23 nt, Human
ccugcucaggcgugugcccugcu

SEQ ID NO: 695334 - RNA, 22 nt, Human
ccaguguuagagacugauacag

SEQ ID NO: 695335 - RNA, 22 nt, Human
ggaccugcauuuuaacaagauc

SEQ ID NO: 695336 - RNA, 22 nt, Human
gaaguuuuagucaaaauguaga

SEQ ID NO: 695337 - RNA, 22 nt, Human
agggcuguuuuuggcaccuggg

SEQ ID NO: 695338 - RNA, 22 nt, Human
gcccagcaggacagagugguuu

SEQ ID NO: 695339 - RNA, 22 nt, Human
gacacagaauuccccuccaagu

SEQ ID NO: 695340 - RNA, 22 nt, Human
uuuucuaaaagaagucacugau

SEQ ID NO: 695341 - RNA, 23 nt, Human
cacggcagccuccgagggugcug

SEQ ID NO: 695342 - RNA, 22 nt, Human
gaaagcugggaaauaaauauua

SEQ ID NO: 695343 - RNA, 22 nt, Human
uggcccugugacugaguucuag

SEQ ID NO: 695344 - RNA, 22 nt, Human
ggggaguguuuucaugggcuug

SEQ ID NO: 695345 - RNA, 21 nt, Human
ggaggaaaaaggaaugacuug

SEQ ID NO: 695346 - RNA, 22 nt, Human
cugggcacugcaggguguugag

SEQ ID NO: 695347 - RNA, 22 nt, Human
aggcugugaggggcccgcaugc

SEQ ID NO: 695348 - RNA, 22 nt, Human
cugggucuggccacaggaagua

SEQ ID NO: 695349 - RNA, 22 nt, Human
uuccugaagucaaagaucuaaa

SEQ ID NO: 695350 - RNA, 22 nt, Human
gggccccaaaaugccaggcucu

SEQ ID NO: 695351 - RNA, 22 nt, Human
cuggcagcauuuuuuucagaag

SEQ ID NO: 695352 - RNA, 22 nt, Human
ucaaacauguuagcagucugug

SEQ ID NO: 695353 - RNA, 22 nt, Human
gcugcagcagcugcaggguugu

SEQ ID NO: 695354 - RNA, 22 nt, Human
cuucuuuugaagggcguugugu

SEQ ID NO: 695355 - RNA, 22 nt, Human
ugcugaggcagaugucugugac

SEQ ID NO: 695356 - RNA, 22 nt, Human
agcuguguagggaaucagagaa

SEQ ID NO: 695357 - RNA, 22 nt, Human
ccagggcugcugugggacucca

SEQ ID NO: 695358 - RNA, 22 nt, Human
ugaugaaaguucaguagugaau

SEQ ID NO: 695359 - RNA, 22 nt, Human
cagcuccucuguuagcccuggg

SEQ ID NO: 695360 - RNA, 22 nt, Human
gaaggcauaaaaccaauuuugu

SEQ ID NO: 695361 - RNA, 22 nt, Human
gagggccucugcugcuccacau

SEQ ID NO: 695362 - RNA, 19 nt, Human
uguacguguggguguuuaa

SEQ ID NO: 695363 - RNA, 22 nt, Human
gcagagcaggaaggaagucagg

SEQ ID NO: 695364 - RNA, 22 nt, Human
ucugggccggagccgacggcag

SEQ ID NO: 695365 - RNA, 22 nt, Human
auugucucuuaaauguggaaau

SEQ ID NO: 695366 - RNA, 22 nt, Human
gggcuaaaugcagaaaugcaga

SEQ ID NO: 695367 - RNA, 22 nt, Human
aaagguuagacagcucugcaua

SEQ ID NO: 695368 - RNA, 22 nt, Human
aggcugccuguuccaaucuccu

SEQ ID NO: 695369 - RNA, 22 nt, Human
gcuggguauuuuaagaaaggaa

SEQ ID NO: 695370 - RNA, 22 nt, Human
uguaaacauauguauguaugua

SEQ ID NO: 695371 - RNA, 22 nt, Human
uuaaugucaacauuucugaaga

SEQ ID NO: 695372 - RNA, 22 nt, Human
ucuauaaaugcagauaugugug

SEQ ID NO: 695373 - RNA, 22 nt, Human
guuucaaaagucaggcuauucu

SEQ ID NO: 695374 - RNA, 22 nt, Human
uggcauguaguaggugcuauaa

SEQ ID NO: 695375 - RNA, 22 nt, Human
acagagcaguaagaacacagcu

SEQ ID NO: 695376 - RNA, 22 nt, Human
agggcugcugaggaagccuugc

SEQ ID NO: 695377 - RNA, 22 nt, Human
uguaugaaguuacugagccucu

SEQ ID NO: 695378 - RNA, 22 nt, Human
uuuaagaucuaucccauuuugu

SEQ ID NO: 695379 - RNA, 22 nt, Human
caaauacuuuauauacuucaaa

SEQ ID NO: 695380 - RNA, 22 nt, Human
aagaugugaacagaaccacagg

SEQ ID NO: 695381 - RNA, 22 nt, Human
aaugccguagacuuuuacuuau

SEQ ID NO: 695382 - RNA, 21 nt, Human
gggcgaggccugauguggcuc

SEQ ID NO: 695383 - RNA, 22 nt, Human
ucagcuggagauccuuguugug

SEQ ID NO: 695384 - RNA, 22 nt, Human
auuugcuuguaaauguaugccu

SEQ ID NO: 695385 - RNA, 22 nt, Human
uggcaaaggcgcucacaugccu

SEQ ID NO: 695386 - RNA, 22 nt, Human
agaaaucagaacccugaaguuc

SEQ ID NO: 695387 - RNA, 22 nt, Human
gcucuuuguauuuuggaaucaa

SEQ ID NO: 695388 - RNA, 22 nt, Human
cucuuaguuuguaaaaauaauu

SEQ ID NO: 695389 - RNA, 20 nt, Human
gccucagucacauggccuac

SEQ ID NO: 695390 - RNA, 22 nt, Human
gcaugcaauuaugguauuagau

SEQ ID NO: 695391 - RNA, 22 nt, Human
ggguuaguugguaguuaauuga

SEQ ID NO: 695392 - RNA, 22 nt, Human
caagaagcccuuccugggugga

SEQ ID NO: 695393 - RNA, 22 nt, Human
uggcaguccccugugccuggaa

SEQ ID NO: 695394 - RNA, 22 nt, Human
uuccaugacugaagcaggggcg

SEQ ID NO: 695395 - RNA, 22 nt, Human
ggcccagcugugcuuccagccc

SEQ ID NO: 695396 - RNA, 22 nt, Human
agcacagcuuagcaccuggcac

SEQ ID NO: 695397 - RNA, 22 nt, Human
agcugaaauucuuuguccucag

SEQ ID NO: 695398 - RNA, 20 nt, Human
gcugagguggaggaaggaga

SEQ ID NO: 695399 - RNA, 22 nt, Human
auugggcuggauuaggacuguu

SEQ ID NO: 695400 - RNA, 22 nt, Human
guggcaguagacagugcaucua

SEQ ID NO: 695401 - RNA, 22 nt, Human
ugcugucaagaaaacaagcaau

SEQ ID NO: 695402 - RNA, 22 nt, Human
aaaggcuggggacugaggaagg

SEQ ID NO: 695403 - RNA, 22 nt, Human
gcagagccccauugcuggcggg

SEQ ID NO: 695404 - RNA, 22 nt, Human
uuuauuguguugaaacugaauu

SEQ ID NO: 695405 - RNA, 22 nt, Human
cagcacuaugacauuuaauucu

SEQ ID NO: 695406 - RNA, 22 nt, Human
uacaucuauacugaucuacauu

SEQ ID NO: 695407 - RNA, 22 nt, Human
auguucuacagauggaaagggg

SEQ ID NO: 695408 - RNA, 22 nt, Human
acuggcagugucguuuacauga

SEQ ID NO: 695409 - RNA, 22 nt, Human
ccuaacuuucauuaggccccag

SEQ ID NO: 695410 - RNA, 22 nt, Human
uaacaaaguaccauagacugga

SEQ ID NO: 695411 - RNA, 22 nt, Human
uacacaggguauggcuugagga

SEQ ID NO: 695412 - RNA, 22 nt, Human
uggucugaacuaagacaguagu

SEQ ID NO: 695413 - RNA, 22 nt, Human
acagcugugaagcaagcacucu

SEQ ID NO: 695414 - RNA, 17 nt, Human
ugaaaucagcacccagg

SEQ ID NO: 695415 - RNA, 22 nt, Human
auuucuuacauaacaaauuguu

SEQ ID NO: 695416 - RNA, 19 nt, Human
aagguggcagcagguauua

SEQ ID NO: 695417 - RNA, 22 nt, Human
ugaagcaggaucguuugcuuca

SEQ ID NO: 695418 - RNA, 22 nt, Human
uggucccuuucuacugagcaca

SEQ ID NO: 695419 - RNA, 22 nt, Human
aaguuuagaacuauaagaguga

SEQ ID NO: 695420 - RNA, 22 nt, Human
uugcauuugacaaauuauuuaa

SEQ ID NO: 695421 - RNA, 22 nt, Human
ucuggcaccacugagucugcag

SEQ ID NO: 695422 - RNA, 22 nt, Human
cuuucacagucauaugaugaau

SEQ ID NO: 695423 - RNA, 22 nt, Human
aaacugaauucaaguauccagu

SEQ ID NO: 695424 - RNA, 22 nt, Human
ccugugcucccuauguaucugg

SEQ ID NO: 695425 - RNA, 22 nt, Human
uccuugaaugaauguucucucc

SEQ ID NO: 695426 - RNA, 22 nt, Human
aaguaugucaaucauacuucaa

SEQ ID NO: 695427 - RNA, 22 nt, Human
gcaaggcugugcacuuugcauu

SEQ ID NO: 695428 - RNA, 22 nt, Human
gccaggcagccacccucugcga

SEQ ID NO: 695429 - RNA, 22 nt, Human
cagcugagaaaggcaggcucac

SEQ ID NO: 695430 - RNA, 18 nt, Human
acacagguuauucucucc

SEQ ID NO: 695431 - RNA, 22 nt, Human
uaccacuacauuugcuaauggc

SEQ ID NO: 695432 - RNA, 22 nt, Human
caggguggggaaauagcgcccu

SEQ ID NO: 695433 - RNA, 22 nt, Human
aagcugccugccacgcuagaua

SEQ ID NO: 695434 - RNA, 22 nt, Human
agccccaguccgcugcgggcgg

SEQ ID NO: 695435 - RNA, 20 nt, Human
caaggggaguaguaugggcc

SEQ ID NO: 695436 - RNA, 22 nt, Human
gagugagugcugggcugaggcu

SEQ ID NO: 695437 - RNA, 22 nt, Human
cagucccagacccagaaggugg

SEQ ID NO: 695438 - RNA, 22 nt, Human
gcaaggcugggagaugaggccu

SEQ ID NO: 695439 - RNA, 22 nt, Human
acugagggugcacaggcaggca

SEQ ID NO: 695440 - RNA, 22 nt, Human
agcaauaaauguaaagguuaag

SEQ ID NO: 695441 - RNA, 22 nt, Human
auugauucuaccagcuacuuug

SEQ ID NO: 695442 - RNA, 22 nt, Human
aaaagucuacaagcuucaacaa

SEQ ID NO: 695443 - RNA, 18 nt, Human
aagcagacagcagacagu

SEQ ID NO: 695444 - RNA, 21 nt, Human
aaguuugggauucaguuucca

SEQ ID NO: 695445 - RNA, 22 nt, Human
cccaggaaaagcagugccagca

SEQ ID NO: 695446 - RNA, 22 nt, Human
uuucuagaggcuccaggggagu

SEQ ID NO: 695447 - RNA, 22 nt, Human
cuguuuaucccuuuggucagca

SEQ ID NO: 695448 - RNA, 22 nt, Human
cagggcagagggaaacuccuuu

SEQ ID NO: 695449 - RNA, 22 nt, Human
gagggccagcagccucagcaug

SEQ ID NO: 695450 - RNA, 22 nt, Human
caagagcugugaccucauucac

SEQ ID NO: 695451 - RNA, 22 nt, Human
ggggcacacuuuugguagauau

SEQ ID NO: 695452 - RNA, 22 nt, Human
uucuuuaugcuucuguuuaggc

SEQ ID NO: 695453 - RNA, 22 nt, Human
gagaugaauguaaacaaaggca

SEQ ID NO: 695454 - RNA, 22 nt, Human
uuagaaaauggaggugggaggg

SEQ ID NO: 695455 - RNA, 22 nt, Human
cccaccaugugcccauuggcuu

SEQ ID NO: 695456 - RNA, 17 nt, Human
gagugcugguggagcuc

SEQ ID NO: 695457 - RNA, 22 nt, Human
uugcuucacugaguuaugccug

SEQ ID NO: 695458 - RNA, 22 nt, Human
aaaaccuucagguuuggaguuu

SEQ ID NO: 695459 - RNA, 22 nt, Human
aaacugggauucuucacaaggu

SEQ ID NO: 695460 - RNA, 22 nt, Human
ugucaugcagguuuguuauaga

SEQ ID NO: 695461 - RNA, 22 nt, Human
cuccauugaacauccucucaga

SEQ ID NO: 695462 - RNA, 22 nt, Human
agcauuuaagcuucugcaaagc

SEQ ID NO: 695463 - RNA, 22 nt, Human
uggggccacacaucucuuucua

SEQ ID NO: 695464 - RNA, 22 nt, Human
cccuagaacacgcagacacuga

SEQ ID NO: 695465 - RNA, 22 nt, Human
agcagugaaacagcugcauaug

SEQ ID NO: 695466 - RNA, 22 nt, Human
aggagccaaauuacuagcucug

SEQ ID NO: 695467 - RNA, 22 nt, Human
ccugcagucuacccaaugugug

SEQ ID NO: 695468 - RNA, 22 nt, Human
ccuggcuuuuguuuauaaauuc

SEQ ID NO: 695469 - RNA, 22 nt, Human
ugcuucagagacauccuacuca

SEQ ID NO: 695470 - RNA, 23 nt, Human
agugcugaauugaaagcuccagg

SEQ ID NO: 695471 - RNA, 22 nt, Human
gccugccugcugugugcaaguu

SEQ ID NO: 695472 - RNA, 22 nt, Human
cuaucuuucgauucuagcuuaa

SEQ ID NO: 695473 - RNA, 22 nt, Human
ugaagcuauauaaguuacagca

SEQ ID NO: 695474 - RNA, 22 nt, Human
uggagaaagcugcauauggaaa

SEQ ID NO: 695475 - RNA, 22 nt, Human
cauggcuggcacacagcaacca

SEQ ID NO: 695476 - RNA, 22 nt, Human
aaguugguguaugagacagaag

SEQ ID NO: 695477 - RNA, 22 nt, Human
ucugcagagauucugggcugag

SEQ ID NO: 695478 - RNA, 22 nt, Human
aggcaggcacuccggaaguguc

SEQ ID NO: 695479 - RNA, 22 nt, Human
uuagcugaaaaaauucaugcaa

SEQ ID NO: 695480 - RNA, 22 nt, Human
gagugagggcagcaggggcugc

SEQ ID NO: 695481 - RNA, 22 nt, Human
ugggaguuuguuagaaaugcag

SEQ ID NO: 695482 - RNA, 22 nt, Human
ccugccugcguccucugagggc

SEQ ID NO: 695483 - RNA, 22 nt, Human
acgaaggaaugugcuugagcau

SEQ ID NO: 695484 - RNA, 20 nt, Human
uccagggcaaacucaucacc

SEQ ID NO: 695485 - RNA, 22 nt, Human
agagccacggcaggccuaggaa

SEQ ID NO: 695486 - RNA, 22 nt, Human
aggagcugucagagugccagag

SEQ ID NO: 695487 - RNA, 22 nt, Human
ugagccagagagguugaggcua

SEQ ID NO: 695488 - RNA, 22 nt, Human
cuguacaucuuaaauggaaaaa

SEQ ID NO: 695489 - RNA, 22 nt, Human
uuuauuugaaucaggggagaau

SEQ ID NO: 695490 - RNA, 22 nt, Human
agccaggcugcaguuggcuggc

SEQ ID NO: 695491 - RNA, 22 nt, Human
cugggccuaggauggaagggcc

SEQ ID NO: 695492 - RNA, 22 nt, Human
gagucccaggaaugagcauagu

SEQ ID NO: 695493 - RNA, 22 nt, Human
caugugcuguagcagagaggaa

SEQ ID NO: 695494 - RNA, 22 nt, Human
gccuggccgcuccgagcuccgc

SEQ ID NO: 695495 - RNA, 18 nt, Human
ugggcuugaaagcaaggu

SEQ ID NO: 695496 - RNA, 22 nt, Human
ggacaggggcguggggauuguu

SEQ ID NO: 695497 - RNA, 22 nt, Human
uuccugggguacuggagaaaau

SEQ ID NO: 695498 - RNA, 15 nt, Human
ucccucagcuaaaga

SEQ ID NO: 695499 - RNA, 22 nt, Human
acuugaauaggugucaaggcca

SEQ ID NO: 695500 - RNA, 22 nt, Human
uguauuaacauuaauaaaaugg

SEQ ID NO: 695501 - RNA, 22 nt, Human
gcugagaggcacuaucuccgga

SEQ ID NO: 695502 - RNA, 22 nt, Human
gcagacuguaccuggaagaggg

SEQ ID NO: 695503 - RNA, 22 nt, Human
ucucuccuaauuucaggugcuu

SEQ ID NO: 695504 - RNA, 22 nt, Human
caagucaaagacuagaacuagu

SEQ ID NO: 695505 - RNA, 22 nt, Human
ccucuauagaugugugcaucua

SEQ ID NO: 695506 - RNA, 22 nt, Human
gggaagugauggagccaggauu

SEQ ID NO: 695507 - RNA, 22 nt, Human
ucccagggcucuagagugcugg

SEQ ID NO: 695508 - RNA, 21 nt, Human
ggcagagcuggggccuccagc

SEQ ID NO: 695509 - RNA, 22 nt, Human
uggccucagauuucaggggugg

SEQ ID NO: 695510 - RNA, 22 nt, Human
ucugauaggugguagaaggagg

SEQ ID NO: 695511 - RNA, 22 nt, Human
cucagagaagucuuugcuaaac

SEQ ID NO: 695512 - RNA, 22 nt, Human
acucaucuucccuccuggaggg

SEQ ID NO: 695513 - RNA, 22 nt, Human
gcaguguuauguuuucuauaau

SEQ ID NO: 695514 - RNA, 22 nt, Human
acuguguauucuaaugacuaaa

SEQ ID NO: 695515 - RNA, 22 nt, Human
ccagggcccacggccagaauag

SEQ ID NO: 695516 - RNA, 22 nt, Human
uuuagcaauaucauaaggaaga

SEQ ID NO: 695517 - RNA, 22 nt, Human
gaaaaguacacagcccaaacau

SEQ ID NO: 695518 - RNA, 22 nt, Human
caaugguggugucagaagagau

SEQ ID NO: 695519 - RNA, 22 nt, Human
ucacaggcccaaaccacgcuua

SEQ ID NO: 695520 - RNA, 22 nt, Human
guucauucugaaaagcagcuug

SEQ ID NO: 695521 - RNA, 22 nt, Human
uauuugcaaagaacuacacuag

SEQ ID NO: 695522 - RNA, 22 nt, Human
aaaugcuuauuagugucacaaa

SEQ ID NO: 695523 - RNA, 22 nt, Human
guacaaaugaaaauagaccacu

SEQ ID NO: 695524 - RNA, 22 nt, Human
cagcagagaccaagugauuuga

SEQ ID NO: 695525 - RNA, 22 nt, Human
cccaguccuaaagcagacgcca

SEQ ID NO: 695526 - RNA, 22 nt, Human
aguggcaaagucuucagaaguu

SEQ ID NO: 695527 - RNA, 22 nt, Human
ucagaaauuuucucaguaguuc

SEQ ID NO: 695528 - RNA, 17 nt, Human
cuggggaugugggacuc

SEQ ID NO: 695529 - RNA, 22 nt, Human
aggaagccugcaggugacugcu

SEQ ID NO: 695530 - RNA, 22 nt, Human
uaaagcagugugguuguguccc

SEQ ID NO: 695531 - RNA, 22 nt, Human
cagguggccaguacucaaggau

SEQ ID NO: 695532 - RNA, 22 nt, Human
ucuccuguaugggacuggcgag

SEQ ID NO: 695533 - RNA, 21 nt, Human
agugaaauugcaucagaggga

SEQ ID NO: 695534 - RNA, 22 nt, Human
ugcuucuguuucauugaucuua

SEQ ID NO: 695535 - RNA, 22 nt, Human
caauugucguugacauccuuca

SEQ ID NO: 695536 - RNA, 22 nt, Human
guaucuuuccacaucuucagua

SEQ ID NO: 695537 - RNA, 22 nt, Human
ugaauaauccacagucauucau

SEQ ID NO: 695538 - RNA, 22 nt, Human
uggcaagaaacugaggccugcu

SEQ ID NO: 695539 - RNA, 22 nt, Human
cugcccugucuuuuucugauga

SEQ ID NO: 695540 - RNA, 22 nt, Human
uaaggaagagcuugguaauagg

SEQ ID NO: 695541 - RNA, 22 nt, Human
agugugaguaauugagucuguc

SEQ ID NO: 695542 - RNA, 22 nt, Human
auuauauaaaauucuggaagcu

SEQ ID NO: 695543 - RNA, 22 nt, Human
auuccacacaguaauacucaau

SEQ ID NO: 695544 - RNA, 22 nt, Human
uaguggaggccuguugugugca

SEQ ID NO: 695545 - RNA, 22 nt, Human
gugacagagauuaauagcuugg

SEQ ID NO: 695546 - RNA, 22 nt, Human
uucuuaguucaacuaaaauuua

SEQ ID NO: 695547 - RNA, 22 nt, Human
gggucuaggagacaugggcaag

SEQ ID NO: 695548 - RNA, 22 nt, Human
ugcucaugcuggggacagaugu

SEQ ID NO: 695549 - RNA, 22 nt, Human
cagaagcaagggccaaagucuu

SEQ ID NO: 695550 - RNA, 22 nt, Human
caguagcacuagauaugugugg

SEQ ID NO: 695551 - RNA, 22 nt, Human
cagagagcaugggaggcccgag

SEQ ID NO: 695552 - RNA, 22 nt, Human
uuguacacacaggaacaaacgu

SEQ ID NO: 695553 - RNA, 22 nt, Human
cagggagggacaauugucaccu

SEQ ID NO: 695554 - RNA, 22 nt, Human
uuggccaaccagaacggagguc

SEQ ID NO: 695555 - RNA, 22 nt, Human
ugcagcauucugguaaaaggca

SEQ ID NO: 695556 - RNA, 22 nt, Human
uaagaggauauuuggccagaag

SEQ ID NO: 695557 - RNA, 22 nt, Human
aagacaugcaguuuguuccauu

SEQ ID NO: 695558 - RNA, 22 nt, Human
ggucacauucugaggaaucagg

SEQ ID NO: 695559 - RNA, 22 nt, Human
gcuucagaaguugggcucugac

SEQ ID NO: 695560 - RNA, 22 nt, Human
ccuuuucuguguggguaauuua

SEQ ID NO: 695561 - RNA, 22 nt, Human
agaugguucagaauuauaaaga

SEQ ID NO: 695562 - RNA, 22 nt, Human
auggacaguacugaguggacua

SEQ ID NO: 695563 - RNA, 22 nt, Human
uggccugaguugucugcaggcc

SEQ ID NO: 695564 - RNA, 22 nt, Human
aaagcuggccucucaggcuuua

SEQ ID NO: 695565 - RNA, 22 nt, Human
cagugcagaacacauggaaaau

SEQ ID NO: 695566 - RNA, 22 nt, Human
cucacacacgaagcccuuggcc

SEQ ID NO: 695567 - RNA, 22 nt, Human
gagcugaaggagaaagcagggg

SEQ ID NO: 695568 - RNA, 22 nt, Human
cuucucuggcauagcaagcagg

SEQ ID NO: 695569 - RNA, 22 nt, Human
uccuuccugcaggccaaguccu

SEQ ID NO: 695570 - RNA, 22 nt, Human
aacaguaacgagauguccuaac

SEQ ID NO: 695571 - RNA, 22 nt, Human
ucagugauugguggacugccua

SEQ ID NO: 695572 - RNA, 22 nt, Human
cugcaggaauucaaagugagcu

SEQ ID NO: 695573 - RNA, 22 nt, Human
ugggccuggaguuuguccagag

SEQ ID NO: 695574 - RNA, 22 nt, Human
uugcagggaaacaguuuaggaa

SEQ ID NO: 695575 - RNA, 22 nt, Human
acagcuggaggccccauugucc

SEQ ID NO: 695576 - RNA, 22 nt, Human
cuuagcuucucugcaucugugu

SEQ ID NO: 695577 - RNA, 20 nt, Human
gcucugggugguaaaugacu

SEQ ID NO: 695578 - RNA, 22 nt, Human
aauguaaacagcaagagaaggg

SEQ ID NO: 695579 - RNA, 22 nt, Human
uaguccucagcugaacugcugc

SEQ ID NO: 695580 - RNA, 22 nt, Human
gagguggcugucagcuucacuu

SEQ ID NO: 695581 - RNA, 20 nt, Human
uggccaaguauccaacugga

SEQ ID NO: 695582 - RNA, 22 nt, Human
uccaguacugaagcuccuucaa

SEQ ID NO: 695583 - RNA, 22 nt, Human
cuggaaauuggagaugauguuu

SEQ ID NO: 695584 - RNA, 22 nt, Human
gaggaaaauaacaacuaagggc

SEQ ID NO: 695585 - RNA, 22 nt, Human
gcaaagguagccaaggagcuca

SEQ ID NO: 695586 - RNA, 22 nt, Human
ccuggccagggucugggcugcu

SEQ ID NO: 695587 - RNA, 22 nt, Human
agccagcaucuugcuucuugag

SEQ ID NO: 695588 - RNA, 22 nt, Human
gguagaaagcccaagucccccu

SEQ ID NO: 695589 - RNA, 22 nt, Human
agggaccuugauggguuuggga

SEQ ID NO: 695590 - RNA, 22 nt, Human
accccagcucugagccacacca

SEQ ID NO: 695591 - RNA, 22 nt, Human
agauacacagagguaaagauga

SEQ ID NO: 695592 - RNA, 22 nt, Human
ugauuacaacagagucauccau

SEQ ID NO: 695593 - RNA, 22 nt, Human
gacaauaagaacagauacugug

SEQ ID NO: 695594 - RNA, 22 nt, Human
uuugaagucaaagauugauucc

SEQ ID NO: 695595 - RNA, 22 nt, Human
gcagcugccuucagcuggaugg

SEQ ID NO: 695596 - RNA, 22 nt, Human
ugaaauuagugaaguuacaguu

SEQ ID NO: 695597 - RNA, 22 nt, Human
agccaggucagcucacccugcu

SEQ ID NO: 695598 - RNA, 22 nt, Human
uccaggggagacuagacccaca

SEQ ID NO: 695599 - RNA, 22 nt, Human
gacagcagaugaagccugcaga

SEQ ID NO: 695600 - RNA, 22 nt, Human
acacuuaacuucugagaauaaa

SEQ ID NO: 695601 - RNA, 21 nt, Human
uuuagggaggauauuuaacuu

SEQ ID NO: 695602 - RNA, 22 nt, Human
aggcugugggaauggcugcuug

SEQ ID NO: 695603 - RNA, 21 nt, Human
aggcaugagcccugcauggac

SEQ ID NO: 695604 - RNA, 22 nt, Human
agccacugugugaccagcuguc

SEQ ID NO: 695605 - RNA, 22 nt, Human
ucauuacacaguucaguggaaa

SEQ ID NO: 695606 - RNA, 22 nt, Human
acugaguuauggguaugccuug

SEQ ID NO: 695607 - RNA, 22 nt, Human
cugucauuguacauguuauaca

SEQ ID NO: 695608 - RNA, 22 nt, Human
uuuccaggugcauagaaaacag

SEQ ID NO: 695609 - RNA, 22 nt, Human
gaaacagccccugugugaagca

SEQ ID NO: 695610 - RNA, 20 nt, Human
acaaauuggcagaaugacaa

SEQ ID NO: 695611 - RNA, 22 nt, Human
gccaggagagcuccuucagguu

SEQ ID NO: 695612 - RNA, 22 nt, Human
cagcacagggacaauagcagau

SEQ ID NO: 695613 - RNA, 22 nt, Human
aggacaggauuccuugccuugc

SEQ ID NO: 695614 - RNA, 22 nt, Human
ucuguuauucugcucaguauag

SEQ ID NO: 695615 - RNA, 22 nt, Human
cacauucuuucacaguucugaa

SEQ ID NO: 695616 - RNA, 22 nt, Human
ugggguggauagaaagugaugu

SEQ ID NO: 695617 - RNA, 22 nt, Human
ccaguguucaucaagaaaaugu

SEQ ID NO: 695618 - RNA, 20 nt, Human
aaaggaauauaugaaguaua

SEQ ID NO: 695619 - RNA, 22 nt, Human
ugucauuaugaggauuacaaua

SEQ ID NO: 695620 - RNA, 22 nt, Human
agcggagcuaguuuuuguccuc

SEQ ID NO: 695621 - RNA, 22 nt, Human
uccagccuuucuacucacugag

SEQ ID NO: 695622 - RNA, 22 nt, Human
ggaugcaggaguugaagaagga

SEQ ID NO: 695623 - RNA, 22 nt, Human
cuugcagccuuaccaaggcauu

SEQ ID NO: 695624 - RNA, 22 nt, Human
ugggccugggcuccuguccucu

SEQ ID NO: 695625 - RNA, 22 nt, Human
gaagagcugugauucaggcuua

SEQ ID NO: 695626 - RNA, 22 nt, Human
uauggguauuuuauacauaacc

SEQ ID NO: 695627 - RNA, 22 nt, Human
agccuggcggucgucggucagg

SEQ ID NO: 695628 - RNA, 22 nt, Human
cuuuaauuaggaaguauaauga

SEQ ID NO: 695629 - RNA, 22 nt, Human
uggcagucuggguuggcaguua

SEQ ID NO: 695630 - RNA, 23 nt, Human
uucuggaagauuuacuugagaca

SEQ ID NO: 695631 - RNA, 22 nt, Human
gggacuguaaauucauauggcc

SEQ ID NO: 695632 - RNA, 22 nt, Human
ggcaguguggcauaacauguag

SEQ ID NO: 695633 - RNA, 22 nt, Human
ugagagaggggacugccugcuu

SEQ ID NO: 695634 - RNA, 22 nt, Human
agaggggcaaguaaagagucuu

SEQ ID NO: 695635 - RNA, 22 nt, Human
gcagugggcaacaagagcugga

SEQ ID NO: 695636 - RNA, 22 nt, Human
uggaggcaacugaagauguagu

SEQ ID NO: 695637 - RNA, 20 nt, Human
uuuacauuuugaaacaguga

SEQ ID NO: 695638 - RNA, 22 nt, Human
ucagcucugcaaggucaccucc

SEQ ID NO: 695639 - RNA, 22 nt, Human
cagcaucuccauggcuuuggag

SEQ ID NO: 695640 - RNA, 22 nt, Human
aagcagcagcaggauuaaagag

SEQ ID NO: 695641 - RNA, 22 nt, Human
gggcugaggaacauauuuuguu

SEQ ID NO: 695642 - RNA, 22 nt, Human
auguguauugagcaccuacugc

SEQ ID NO: 695643 - RNA, 22 nt, Human
agcacugggaacgcauggggcc

SEQ ID NO: 695644 - RNA, 22 nt, Human
acucauuuuuacugcaauugag

SEQ ID NO: 695645 - RNA, 22 nt, Human
ggaucugggcucugccaaucag

SEQ ID NO: 695646 - RNA, 22 nt, Human
acugcacagauuaaguuagauu

SEQ ID NO: 695647 - RNA, 22 nt, Human
auaugcuuugggauuagaucau

SEQ ID NO: 695648 - RNA, 22 nt, Human
gacuucugaauuccuaucaggu

SEQ ID NO: 695649 - RNA, 22 nt, Human
augcccugugacucuccuggac

SEQ ID NO: 695650 - RNA, 22 nt, Human
ucuuuccaaguaauacuuccca

SEQ ID NO: 695651 - RNA, 18 nt, Human
ugauucugugaugugguc

SEQ ID NO: 695652 - RNA, 22 nt, Human
uauguucauagaaaucaugacc

SEQ ID NO: 695653 - RNA, 22 nt, Human
agugacugacaccuguaauccc

SEQ ID NO: 695654 - RNA, 22 nt, Human
ucagccaggcacaauggcagcu

SEQ ID NO: 695655 - RNA, 22 nt, Human
cugaaugccugcagagccagag

SEQ ID NO: 695656 - RNA, 22 nt, Human
ggacuuggggaaggcacaguua

SEQ ID NO: 695657 - RNA, 22 nt, Human
caggucuuuucuacugguggag

SEQ ID NO: 695658 - RNA, 22 nt, Human
guaggccagugugaaaccuggu

SEQ ID NO: 695659 - RNA, 22 nt, Human
ucuguuaugcauaagcaucagu

SEQ ID NO: 695660 - RNA, 22 nt, Human
gcauggagaagugggaacaggu

SEQ ID NO: 695661 - RNA, 22 nt, Human
uagaaagcuugggguguuuaaa

SEQ ID NO: 695662 - RNA, 22 nt, Human
ucuugugcuugcagcuggggag

SEQ ID NO: 695663 - RNA, 20 nt, Human
ggcacuggaagcacacagga

SEQ ID NO: 695664 - RNA, 22 nt, Human
uggcccagaucucugaccuuga

SEQ ID NO: 695665 - RNA, 22 nt, Human
uuguuuccauaauuaaguguga

SEQ ID NO: 695666 - RNA, 22 nt, Human
ugcauacauaaagugcuaucau

SEQ ID NO: 695667 - RNA, 22 nt, Human
aacagaaaucauuuagggcucu

SEQ ID NO: 695668 - RNA, 20 nt, Human
cuguaaacugcgucuguaau

SEQ ID NO: 695669 - RNA, 22 nt, Human
agcagcaggagccgugggguga

SEQ ID NO: 695670 - RNA, 22 nt, Human
aguggcagagcugggauuuggg

SEQ ID NO: 695671 - RNA, 22 nt, Human
guccucugggcagcugccccac

SEQ ID NO: 695672 - RNA, 22 nt, Human
uugucugagagauggcagaggu

SEQ ID NO: 695673 - RNA, 22 nt, Human
caggguggugaauagcuauagu

SEQ ID NO: 695674 - RNA, 22 nt, Human
uauggauggaaagggccaagcu

SEQ ID NO: 695675 - RNA, 22 nt, Human
gugccugugcggacucagggaa

SEQ ID NO: 695676 - RNA, 19 nt, Human
gaaggagagcugaguuagg

SEQ ID NO: 695677 - RNA, 22 nt, Human
auacaaugggugcaaagaugug

SEQ ID NO: 695678 - RNA, 22 nt, Human
ucaccucaccacccuuaugguu

SEQ ID NO: 695679 - RNA, 22 nt, Human
aaaguuuuagaacuaggaagca

SEQ ID NO: 695680 - RNA, 22 nt, Human
uauuuccaaaaaggccauauuc

SEQ ID NO: 695681 - RNA, 20 nt, Human
ucacacaugguaagcuauga

SEQ ID NO: 695682 - RNA, 22 nt, Human
uuaguguguccaguucugaaaa

SEQ ID NO: 695683 - RNA, 22 nt, Human
cauugaaacagauguacccaug

SEQ ID NO: 695684 - RNA, 22 nt, Human
uccguggagauuuugugcaggg

SEQ ID NO: 695685 - RNA, 22 nt, Human
aagugcauaguaauggagucaa

SEQ ID NO: 695686 - RNA, 21 nt, Human
ggccugagcaccuguccaccu

SEQ ID NO: 695687 - RNA, 22 nt, Human
uccugggagcauggugccguga

SEQ ID NO: 695688 - RNA, 22 nt, Human
ugcagggaagucccagcuccug

SEQ ID NO: 695689 - RNA, 21 nt, Human
gccugcacacaguaggugcac

SEQ ID NO: 695690 - RNA, 22 nt, Human
ugccugcucuugagacuuacaa

SEQ ID NO: 695691 - RNA, 23 nt, Human
aggcaggcaguucagcuguuguu

SEQ ID NO: 695692 - RNA, 22 nt, Human
auuugucaguggaagugauuca

SEQ ID NO: 695693 - RNA, 17 nt, Human
agaaugcaaagcaggcu

SEQ ID NO: 695694 - RNA, 22 nt, Human
cagcuauucucugaaaugaaua

SEQ ID NO: 695695 - RNA, 21 nt, Human
ucagagggcccuggaggcuca

SEQ ID NO: 695696 - RNA, 22 nt, Human
ucuuucagaaacuuugucugcg

SEQ ID NO: 695697 - RNA, 22 nt, Human
acaugugaaaucucauaguuag

SEQ ID NO: 695698 - RNA, 22 nt, Human
acacaauacagggcucaaaaua

SEQ ID NO: 695699 - RNA, 23 nt, Human
uguagcaucucuuauuucucagc

SEQ ID NO: 695700 - RNA, 22 nt, Human
caaaacauucucugcagcaggg

SEQ ID NO: 695701 - RNA, 22 nt, Human
auguagcuugucccacaucaua

SEQ ID NO: 695702 - RNA, 22 nt, Human
ucacuucccucuucagcuccca

SEQ ID NO: 695703 - RNA, 22 nt, Human
uagcugguucuccaggagcuag

SEQ ID NO: 695704 - RNA, 22 nt, Human
cucagagauauagucccugcuu

SEQ ID NO: 695705 - RNA, 22 nt, Human
aguccagugucaaggugccauu

SEQ ID NO: 695706 - RNA, 22 nt, Human
cucucuggcacuucauugcugu

SEQ ID NO: 695707 - RNA, 22 nt, Human
gaacaaauucucaucaacuugu

SEQ ID NO: 695708 - RNA, 22 nt, Human
uucagcucagucugugcagcag

SEQ ID NO: 695709 - RNA, 22 nt, Human
cucuuuagucacagggcuucau

SEQ ID NO: 695710 - RNA, 22 nt, Human
gacauaaaccuugagauauuaa

SEQ ID NO: 695711 - RNA, 22 nt, Human
gugugggggcagcucugauaug

SEQ ID NO: 695712 - RNA, 21 nt, Human
aacugcuggucuuuucugucu

SEQ ID NO: 695713 - RNA, 22 nt, Human
auacaaguugcccaaaugauua

SEQ ID NO: 695714 - RNA, 22 nt, Human
agacagagauacuauguuguca

SEQ ID NO: 695715 - RNA, 23 nt, Human
acuggacagaguggacgaggcug

SEQ ID NO: 695716 - RNA, 22 nt, Human
cacuuagucucaccaguucagu

SEQ ID NO: 695717 - RNA, 22 nt, Human
cauuaugugcguacauguaucu

SEQ ID NO: 695718 - RNA, 22 nt, Human
acucugugugaguagagccugu

SEQ ID NO: 695719 - RNA, 22 nt, Human
auuuccaaucucugcauauggg

SEQ ID NO: 695720 - RNA, 22 nt, Human
aggcucugcaguccaucccgug

SEQ ID NO: 695721 - RNA, 22 nt, Human
aagacauguuuuaagaauauuu

SEQ ID NO: 695722 - RNA, 22 nt, Human
uaacacauagauauuuuaacuu

SEQ ID NO: 695723 - RNA, 22 nt, Human
gcuuuaaugaagucacgcaaag

SEQ ID NO: 695724 - RNA, 22 nt, Human
cacugggaaucugggaaagaga

SEQ ID NO: 695725 - RNA, 22 nt, Human
cuggcucaugugaugagggcaa

SEQ ID NO: 695726 - RNA, 22 nt, Human
gggcuggaggccugccugguua

SEQ ID NO: 695727 - RNA, 22 nt, Human
gcugcagcucgccuuccggccu

SEQ ID NO: 695728 - RNA, 23 nt, Human
uuggaacacaguaaaugcacaau

SEQ ID NO: 695729 - RNA, 22 nt, Human
aggaugagauugcuguguugua

SEQ ID NO: 695730 - RNA, 22 nt, Human
cugugcagugugggguaggccu

SEQ ID NO: 695731 - RNA, 22 nt, Human
uuccuucuuccuuuaguaacca

SEQ ID NO: 695732 - RNA, 22 nt, Human
aggaaacuccccuacaucucaa

SEQ ID NO: 695733 - RNA, 22 nt, Human
cagugggagcaaauacacucau

SEQ ID NO: 695734 - RNA, 22 nt, Human
caaauauuccagguacaucccu

SEQ ID NO: 695735 - RNA, 22 nt, Human
aacccgggaggcagagguugug

SEQ ID NO: 695736 - RNA, 22 nt, Human
aaaagauuguuagggagaaugu

SEQ ID NO: 695737 - RNA, 22 nt, Human
aucugaaaguuuagaauucuug

SEQ ID NO: 695738 - RNA, 21 nt, Human
uauggcuuuacuaagcugcac

SEQ ID NO: 695739 - RNA, 22 nt, Human
ugcagggcaucuuugaagugug

SEQ ID NO: 695740 - RNA, 22 nt, Human
uuucacaugcagcagggaagug

SEQ ID NO: 695741 - RNA, 22 nt, Human
auuaucaaguuuacugugugga

SEQ ID NO: 695742 - RNA, 22 nt, Human
ucucauggagucaggagcagaa

SEQ ID NO: 695743 - RNA, 22 nt, Human
cacuugggacaaagcuucugcu

SEQ ID NO: 695744 - RNA, 22 nt, Human
cucacugucuguacuagcugau

SEQ ID NO: 695745 - RNA, 22 nt, Human
acacuuuacucuuacaccauug

SEQ ID NO: 695746 - RNA, 22 nt, Human
gagcuaaguuucuggaggcaga

SEQ ID NO: 695747 - RNA, 22 nt, Human
agcuauaguacuuggcuuuucu

SEQ ID NO: 695748 - RNA, 23 nt, Human
cacaucaguuuaggucagauuuu

SEQ ID NO: 695749 - RNA, 22 nt, Human
gaaggcucuggggauugagaua

SEQ ID NO: 695750 - RNA, 22 nt, Human
aacagcuuuguauacaguaacu

SEQ ID NO: 695751 - RNA, 22 nt, Human
acugggauuacaggugggaguc

SEQ ID NO: 695752 - RNA, 22 nt, Human
ccaccacuucuggcuucuggug

SEQ ID NO: 695753 - RNA, 22 nt, Human
uugugucuuaaagauuaaaugg

SEQ ID NO: 695754 - RNA, 22 nt, Human
ucaguggauuggaugagaucug

SEQ ID NO: 695755 - RNA, 22 nt, Human
gggaugcagacuacagggcuua

SEQ ID NO: 695756 - RNA, 22 nt, Human
acaaacagaguugaaaaauagg

SEQ ID NO: 695757 - RNA, 22 nt, Human
ggcugagaagacaguggggugg

SEQ ID NO: 695758 - RNA, 22 nt, Human
cacuauuuccuggauuuugacg

SEQ ID NO: 695759 - RNA, 22 nt, Human
cacagcuaugagcagccuagcu

SEQ ID NO: 695760 - RNA, 22 nt, Human
agagcugaaaaagcugacccgg

SEQ ID NO: 695761 - RNA, 22 nt, Human
uacagaaugauguguuuaaaua

SEQ ID NO: 695762 - RNA, 22 nt, Human
augagguauucguaauauuucc

SEQ ID NO: 695763 - RNA, 22 nt, Human
cugcuuuagugugguguuagag

SEQ ID NO: 695764 - RNA, 22 nt, Human
agugcugggauuacaggcauaa

SEQ ID NO: 695765 - RNA, 22 nt, Human
agugcugggauugcaggcauga

SEQ ID NO: 695766 - RNA, 22 nt, Human
uucauucuugggaucagagagu

SEQ ID NO: 695767 - RNA, 22 nt, Human
uguagcauguaaauugguuauu

SEQ ID NO: 695768 - RNA, 22 nt, Human
aaauccuugauaguuugcccua

SEQ ID NO: 695769 - RNA, 22 nt, Human
caggugucuaauucucaccccc

SEQ ID NO: 695770 - RNA, 22 nt, Human
uccuucaguuaaagaucucaca

SEQ ID NO: 695771 - RNA, 22 nt, Human
gcagaagcugggagaagggauu

SEQ ID NO: 695772 - RNA, 22 nt, Human
agcagcaacugcuagaguggca

SEQ ID NO: 695773 - RNA, 22 nt, Human
cuauccauuaaagccuuggaaa

SEQ ID NO: 695774 - RNA, 22 nt, Human
ucacagaauaaauguacuggcc

SEQ ID NO: 695775 - RNA, 22 nt, Human
uagcccuggagcagggaaauac

SEQ ID NO: 695776 - RNA, 22 nt, Human
auguguaugucuuauucaaaga

SEQ ID NO: 695777 - RNA, 22 nt, Human
augcuguguggccaccuccaug

SEQ ID NO: 695778 - RNA, 22 nt, Human
aggcaucugaguuugcaagcuu

SEQ ID NO: 695779 - RNA, 22 nt, Human
ggcccagcccgagucagccuuc

SEQ ID NO: 695780 - RNA, 22 nt, Human
uaagaacuuggcagcaagaaau

SEQ ID NO: 695781 - RNA, 22 nt, Human
ccugagugccaugagagcaccc

SEQ ID NO: 695782 - RNA, 22 nt, Human
auucauguggggagccuucugu

SEQ ID NO: 695783 - RNA, 22 nt, Human
aggcuccaggcaauguuucuga

SEQ ID NO: 695784 - RNA, 22 nt, Human
caucaaauaaagaaauuccuug

SEQ ID NO: 695785 - RNA, 22 nt, Human
cucuagaguacgggcuggcaug

SEQ ID NO: 695786 - RNA, 22 nt, Human
acaguuuaugccucugagccug

SEQ ID NO: 695787 - RNA, 22 nt, Human
uccccaccuaagauacccaucu

SEQ ID NO: 695788 - RNA, 22 nt, Human
ucucagugaagaguauaacaaa

SEQ ID NO: 695789 - RNA, 22 nt, Human
uguaugaagacuucuucugugu

SEQ ID NO: 695790 - RNA, 22 nt, Human
uguuaguguaauuccaguuuuc

SEQ ID NO: 695791 - RNA, 21 nt, Human
uucaaagagugggcauuguca

SEQ ID NO: 695792 - RNA, 18 nt, Human
ccauuucaugauuauuac

SEQ ID NO: 695793 - RNA, 22 nt, Human
ugaaagggaaccugcuggacug

SEQ ID NO: 695794 - RNA, 22 nt, Human
aauagcaauuacccuucaacuc

SEQ ID NO: 695795 - RNA, 22 nt, Human
ugagguaggagggugaucagca

SEQ ID NO: 695796 - RNA, 23 nt, Human
gcucccugucccugcacuuaggc

SEQ ID NO: 695797 - RNA, 22 nt, Human
gugggcuuuggccucuuucucc

SEQ ID NO: 695798 - RNA, 22 nt, Human
gugcagcugggcgcugaccuuc

SEQ ID NO: 695799 - RNA, 22 nt, Human
ccaggcuggaguguagucgcau

SEQ ID NO: 695800 - RNA, 22 nt, Human
gcagccuccgcacugcgagucc

SEQ ID NO: 695801 - RNA, 22 nt, Human
cagggccaggcugauggccugg

SEQ ID NO: 695802 - RNA, 22 nt, Human
ugggcagagucauacaggagac

SEQ ID NO: 695803 - RNA, 22 nt, Human
cugcaggucucugugugcauuc

SEQ ID NO: 695804 - RNA, 22 nt, Human
cuuuucuuacucccgcaaggca

SEQ ID NO: 695805 - RNA, 21 nt, Human
agauucauaaucuguaaaaug

SEQ ID NO: 695806 - RNA, 22 nt, Human
cugucuccagggcaggugcagg

SEQ ID NO: 695807 - RNA, 22 nt, Human
cugcuguguugccagugucacc

SEQ ID NO: 695808 - RNA, 22 nt, Human
ugguaaaaacugcaauuacuuu

SEQ ID NO: 695809 - RNA, 22 nt, Human
uuuucccaucuacaaagcaggg

SEQ ID NO: 695810 - RNA, 22 nt, Human
cccaggagguggagcuugcagu

SEQ ID NO: 695811 - RNA, 22 nt, Human
guuuccauggcucuguuaaugg

SEQ ID NO: 695812 - RNA, 22 nt, Human
cugugacugcagcaccaaguaa

SEQ ID NO: 695813 - RNA, 22 nt, Human
aguuucauuucuuaguaccagu

SEQ ID NO: 695814 - RNA, 22 nt, Human
uuagaacacugagaaagugaug

SEQ ID NO: 695815 - RNA, 22 nt, Human
aaaugcuaaaugcagcaaguag

SEQ ID NO: 695816 - RNA, 22 nt, Human
ggcugccacccucggacuuccg

SEQ ID NO: 695817 - RNA, 22 nt, Human
acacuuuaagcauuucacacug

SEQ ID NO: 695818 - RNA, 22 nt, Human
uuucugcaaguguagauaccca

SEQ ID NO: 695819 - RNA, 17 nt, Human
ugcugccaagucccaac

SEQ ID NO: 695820 - RNA, 22 nt, Human
cuggcuuucauucauucaggcc

SEQ ID NO: 695821 - RNA, 16 nt, Human
acccuggguaguccug

SEQ ID NO: 695822 - RNA, 22 nt, Human
agcuguuuguacuuagauagua

SEQ ID NO: 695823 - RNA, 23 nt, Human
agaggcugcaggguauugagaau

SEQ ID NO: 695824 - RNA, 22 nt, Human
cacauugcagcuucuuuuggcu

SEQ ID NO: 695825 - RNA, 22 nt, Human
agacaucaaugaucagagguag

SEQ ID NO: 695826 - RNA, 22 nt, Human
ccuggccugcucggcucuuaag

SEQ ID NO: 695827 - RNA, 22 nt, Human
auacacugaguccuuuucucau

SEQ ID NO: 695828 - RNA, 19 nt, Human
auauauguauacaaugugg

SEQ ID NO: 695829 - RNA, 22 nt, Human
ccaggguguagggauuccagau

SEQ ID NO: 695830 - RNA, 22 nt, Human
ugagaccugccucugcacuagg

SEQ ID NO: 695831 - RNA, 22 nt, Human
caccaggguacaauuucgcaga

SEQ ID NO: 695832 - RNA, 22 nt, Human
ggcugagacuagagugaggcau

SEQ ID NO: 695833 - RNA, 22 nt, Human
aggccuggugugccggaugcag

SEQ ID NO: 695834 - RNA, 18 nt, Human
acugaagaugcaagaccu

SEQ ID NO: 695835 - RNA, 16 nt, Human
ucuuccuuuugauuuu

SEQ ID NO: 695836 - RNA, 21 nt, Human
gugguuauuuucauuagcauc

SEQ ID NO: 695837 - RNA, 22 nt, Human
auaagagcuacagccaguucug

SEQ ID NO: 695838 - RNA, 22 nt, Human
gucaucuuaaggacugcuauag

SEQ ID NO: 695839 - RNA, 19 nt, Human
acaauguuguuggacacuc

SEQ ID NO: 695840 - RNA, 22 nt, Human
gggccaggucggugaaugguca

SEQ ID NO: 695841 - RNA, 22 nt, Human
ucaggaacacaggggcccaugc

SEQ ID NO: 695842 - RNA, 22 nt, Human
uguuaaauguuuugcuaguguc

SEQ ID NO: 695843 - RNA, 22 nt, Human
guagcagagcugagaguggaac

SEQ ID NO: 695844 - RNA, 22 nt, Human
gcuccugcccucuugcaauucc

SEQ ID NO: 695845 - RNA, 22 nt, Human
agcagggacuacgugaaaguga

SEQ ID NO: 695846 - RNA, 22 nt, Human
gcccaggaguugaaugcagcag

SEQ ID NO: 695847 - RNA, 22 nt, Human
aaagauuaaaucaaauugguca

SEQ ID NO: 695848 - RNA, 22 nt, Human
gcucuugauacaucaagaacuu

SEQ ID NO: 695849 - RNA, 22 nt, Human
guauucuugaguggcaacuagg

SEQ ID NO: 695850 - RNA, 22 nt, Human
ccaauguuuauuuuccugcugc

SEQ ID NO: 695851 - RNA, 22 nt, Human
uuucaagggaauaugaaauuca

SEQ ID NO: 695852 - RNA, 22 nt, Human
uaacaucuaagggagagaaagu

SEQ ID NO: 695853 - RNA, 23 nt, Human
auaacugagccgaggcuuaagaa

SEQ ID NO: 695854 - RNA, 22 nt, Human
uaacagaaauuuuaguuagggg

SEQ ID NO: 695855 - RNA, 22 nt, Human
cagcugaguggacccuagaggc

SEQ ID NO: 695856 - RNA, 22 nt, Human
uagagcuauuuaucagccagaa

SEQ ID NO: 695857 - RNA, 22 nt, Human
agcagcugauggggaaggaguu

SEQ ID NO: 695858 - RNA, 18 nt, Human
ucaggcugcccugugucu

SEQ ID NO: 695859 - RNA, 22 nt, Human
caccucuuugauuugaggcaag

SEQ ID NO: 695860 - RNA, 22 nt, Human
agaucucaccucuguguauuau

SEQ ID NO: 695861 - RNA, 22 nt, Human
gagcugcagacuugauacagga

SEQ ID NO: 695862 - RNA, 22 nt, Human
gcagggcugagucaugugugcc

SEQ ID NO: 695863 - RNA, 22 nt, Human
guuugaaaguggcaaguccuug

SEQ ID NO: 695864 - RNA, 22 nt, Human
gcucuggcuacuccacccuguu

SEQ ID NO: 695865 - RNA, 22 nt, Human
ucauugaagcccuugacaagcc

SEQ ID NO: 695866 - RNA, 22 nt, Human
agcacaguggcuucuaugucua

SEQ ID NO: 695867 - RNA, 22 nt, Human
acuuacaaucaaccaccuugga

SEQ ID NO: 695868 - RNA, 22 nt, Human
cugcagaaauauggaugugaua

SEQ ID NO: 695869 - RNA, 22 nt, Human
auguuucaaauauauagaguug

SEQ ID NO: 695870 - RNA, 22 nt, Human
cuuauacauaaaauggguguag

SEQ ID NO: 695871 - RNA, 23 nt, Human
uacaaugcaaacuuggcccaugg

SEQ ID NO: 695872 - RNA, 21 nt, Human
aauaaaacaguuggugucaau

SEQ ID NO: 695873 - RNA, 22 nt, Human
uagaaaucagcaggcauaugua

SEQ ID NO: 695874 - RNA, 22 nt, Human
guggccuggaguuugauguagg

SEQ ID NO: 695875 - RNA, 22 nt, Human
uuacaagaucuuugaaggcaag

SEQ ID NO: 695876 - RNA, 22 nt, Human
caggaaaaugucaauggaaagc

SEQ ID NO: 695877 - RNA, 19 nt, Human
gcagggcucucccagaugc

SEQ ID NO: 695878 - RNA, 22 nt, Human
gcugcagugagccaagaucgug

SEQ ID NO: 695879 - RNA, 17 nt, Human
auucuuugaugucucug

SEQ ID NO: 695880 - RNA, 22 nt, Human
uauucagaaaacugagcgauga

SEQ ID NO: 695881 - RNA, 21 nt, Human
uagagauguuugcuaaguagc

SEQ ID NO: 695882 - RNA, 22 nt, Human
uauugaugcuuggauugggcca

SEQ ID NO: 695883 - RNA, 22 nt, Human
uucacauuaagccuccuccuac

SEQ ID NO: 695884 - RNA, 22 nt, Human
augagcuguaagguggcuuccu

SEQ ID NO: 695885 - RNA, 22 nt, Human
cugagcauggccgguccauggu

SEQ ID NO: 695886 - RNA, 22 nt, Human
agauggaggaaggcugaacuca

SEQ ID NO: 695887 - RNA, 22 nt, Human
aucaucaugcacucucagguuu

SEQ ID NO: 695888 - RNA, 22 nt, Human
uggcugcugcucacucagccuc

SEQ ID NO: 695889 - RNA, 22 nt, Human
uccguugagucagcuucggacc

SEQ ID NO: 695890 - RNA, 22 nt, Human
ugaaggccacuuccugugagcu

SEQ ID NO: 695891 - RNA, 22 nt, Human
ugccucugugugcaggugagca

SEQ ID NO: 695892 - RNA, 18 nt, Human
agcaacaggaucccaggg

SEQ ID NO: 695893 - RNA, 22 nt, Human
aguuuacaucuucaaucucauu

SEQ ID NO: 695894 - RNA, 22 nt, Human
agaggucagcugcaugccacau

SEQ ID NO: 695895 - RNA, 22 nt, Human
aagcacuaauauuuuggcaccu

SEQ ID NO: 695896 - RNA, 22 nt, Human
aagcgccaugguuccugcgcag

SEQ ID NO: 695897 - RNA, 22 nt, Human
uccagcccagcuccucucagaa

SEQ ID NO: 695898 - RNA, 22 nt, Human
gaggccagcuacccaaggguca

SEQ ID NO: 695899 - RNA, 22 nt, Human
cagggcucaggaaaucagacgu

SEQ ID NO: 695900 - RNA, 22 nt, Human
uuggcuuuuaugcagcuuaggu

SEQ ID NO: 695901 - RNA, 22 nt, Human
aguguacauaguuaggaacauc

SEQ ID NO: 695902 - RNA, 22 nt, Human
ucucaugaaaggucucuccugg

SEQ ID NO: 695903 - RNA, 22 nt, Human
uucucuuuuugcaucucaaccu

SEQ ID NO: 695904 - RNA, 22 nt, Human
gggcccagcgugguuccaucug

SEQ ID NO: 695905 - RNA, 22 nt, Human
uccuggagaagaggggcuugga

SEQ ID NO: 695906 - RNA, 22 nt, Human
ucugaaauaggaaagcaaaugg

SEQ ID NO: 695907 - RNA, 22 nt, Human
cguuggagacacuugaggacuu

SEQ ID NO: 695908 - RNA, 19 nt, Human
augagguagcagcuggugc

SEQ ID NO: 695909 - RNA, 22 nt, Human
uagugcaggguuuuaagcacug

SEQ ID NO: 695910 - RNA, 22 nt, Human
uaucucuuucauuuuagaguca

SEQ ID NO: 695911 - RNA, 22 nt, Human
aauuggcuuugugguuucugca

SEQ ID NO: 695912 - RNA, 22 nt, Human
uccagagugcugacgcagaccc

SEQ ID NO: 695913 - RNA, 22 nt, Human
aauaugcagcuuaucuucuagg

SEQ ID NO: 695914 - RNA, 22 nt, Human
acuacagugugauaagaggggc

SEQ ID NO: 695915 - RNA, 18 nt, Human
ucagagagcagcuuuauu

SEQ ID NO: 695916 - RNA, 22 nt, Human
uguacaaucuuggucccuuuau

SEQ ID NO: 695917 - RNA, 22 nt, Human
ucaagcggacugagauacucug

SEQ ID NO: 695918 - RNA, 22 nt, Human
uaacaucuugcaguagcagaac

SEQ ID NO: 695919 - RNA, 22 nt, Human
uagaaguuaggaaauaggaaua

SEQ ID NO: 695920 - RNA, 22 nt, Human
ugucauugguacaaauugauug

SEQ ID NO: 695921 - RNA, 22 nt, Human
cuuugauuaucggugugaaugu

SEQ ID NO: 695922 - RNA, 22 nt, Human
ugggagaauauauuuaaaacuu

SEQ ID NO: 695923 - RNA, 22 nt, Human
auuccacugccgaaugauacau

SEQ ID NO: 695924 - RNA, 22 nt, Human
cuguggcuucugcuugggccuc

SEQ ID NO: 695925 - RNA, 22 nt, Human
gcccaaagccagugugcucucc

SEQ ID NO: 695926 - RNA, 22 nt, Human
caggguggcccuguggucucau

SEQ ID NO: 695927 - RNA, 22 nt, Human
gcuggguggaucggaggcucug

SEQ ID NO: 695928 - RNA, 19 nt, Human
cugagcagcggcagcacuu

SEQ ID NO: 695929 - RNA, 19 nt, Human
cucugccauuugcugccug

SEQ ID NO: 695930 - RNA, 20 nt, Human
ggucagccccaccuggcagc

SEQ ID NO: 695931 - RNA, 22 nt, Human
ggugauuuucgaguuucauguu

SEQ ID NO: 695932 - RNA, 22 nt, Human
agcguguggagaacuaagcaga

SEQ ID NO: 695933 - RNA, 21 nt, Human
ccuccaggagcagagcccuga

SEQ ID NO: 695934 - RNA, 22 nt, Human
ucugucugagggagugacauuu

SEQ ID NO: 695935 - RNA, 22 nt, Human
ccacugcuguuacuuacgcaaa

SEQ ID NO: 695936 - RNA, 22 nt, Human
auccauauaggcagauggcaca

SEQ ID NO: 695937 - RNA, 22 nt, Human
gccucaguggcuuuaggaguuc

SEQ ID NO: 695938 - RNA, 22 nt, Human
gcaggcaccucguggaguggaa

SEQ ID NO: 695939 - RNA, 22 nt, Human
uggcauggcauuuagagaauua

SEQ ID NO: 695940 - RNA, 22 nt, Human
uucccagagaaggaugaaaaag

SEQ ID NO: 695941 - RNA, 22 nt, Human
cagggaugcugcuuaggcaguu

SEQ ID NO: 695942 - RNA, 22 nt, Human
uuuuauguuccucuuuaugcga

SEQ ID NO: 695943 - RNA, 22 nt, Human
ccugccagcccgcguucaugcc

SEQ ID NO: 695944 - RNA, 19 nt, Human
agaagcaccagucauuccu

SEQ ID NO: 695945 - RNA, 22 nt, Human
guuauguaaucuaacacucagu

SEQ ID NO: 695946 - RNA, 22 nt, Human
acaaccaugucaguucaaacca

SEQ ID NO: 695947 - RNA, 22 nt, Human
acugauuucagggaugagaaga

SEQ ID NO: 695948 - RNA, 21 nt, Human
aguguccuugaucuugccuug

SEQ ID NO: 695949 - RNA, 22 nt, Human
ucagcaucucaaccuucucuac

SEQ ID NO: 695950 - RNA, 22 nt, Human
aauuauauugaaguugaauguc

SEQ ID NO: 695951 - RNA, 22 nt, Human
ugaaggaggaauguggccucca

SEQ ID NO: 695952 - RNA, 22 nt, Human
ucuagaaugacaugcaagagua

SEQ ID NO: 695953 - RNA, 17 nt, Human
agauggcaggaggcaga

SEQ ID NO: 695954 - RNA, 22 nt, Human
ccugaggaccagcacccaucug

SEQ ID NO: 695955 - RNA, 23 nt, Human
cuguaugauguuaaguggaaagc

SEQ ID NO: 695956 - RNA, 21 nt, Human
gaguccuggcuaggguggcag

SEQ ID NO: 695957 - RNA, 22 nt, Human
gcugccuucaguucugauucau

SEQ ID NO: 695958 - RNA, 22 nt, Human
auccccuucacacccucugcau

SEQ ID NO: 695959 - RNA, 17 nt, Human
caggcagacauguaagc

SEQ ID NO: 695960 - RNA, 22 nt, Human
uucauguuuguaggacugaggc

SEQ ID NO: 695961 - RNA, 22 nt, Human
uuacaguuacugguacuguuaa

SEQ ID NO: 695962 - RNA, 22 nt, Human
acagagagguaaaauauauagu

SEQ ID NO: 695963 - RNA, 22 nt, Human
ugcugccuaggaaucuguauuu

SEQ ID NO: 695964 - RNA, 22 nt, Human
aguacauuuauuaaugguaaaa

SEQ ID NO: 695965 - RNA, 22 nt, Human
augcuuuacaguuuuccaaaca

SEQ ID NO: 695966 - RNA, 22 nt, Human
agagguguggccaggacucaag

SEQ ID NO: 695967 - RNA, 22 nt, Human
aggccagcuguuacuagagcca

SEQ ID NO: 695968 - RNA, 22 nt, Human
augcucagggcacacucuggac

SEQ ID NO: 695969 - RNA, 22 nt, Human
auucuccacuguaagguuauua

SEQ ID NO: 695970 - RNA, 22 nt, Human
uacacugaagugucuugguaua

SEQ ID NO: 695971 - RNA, 22 nt, Human
gauuucugggcuuuauuucaga

SEQ ID NO: 695972 - RNA, 23 nt, Human
ugggcggggcuuuucacucugcc

SEQ ID NO: 695973 - RNA, 22 nt, Human
aucaaagagcuugacaauccua

SEQ ID NO: 695974 - RNA, 22 nt, Human
aaggcaguucacucacgcagcc

SEQ ID NO: 695975 - RNA, 22 nt, Human
agaaaagguugaaaguaggauu

SEQ ID NO: 695976 - RNA, 22 nt, Human
gcauugaagaucuuagacuagg

SEQ ID NO: 695977 - RNA, 22 nt, Human
cacaaggaccucagauggauga

SEQ ID NO: 695978 - RNA, 17 nt, Human
gaauccuucucuguucu

SEQ ID NO: 695979 - RNA, 22 nt, Human
cacugcacaggugagauguggg

SEQ ID NO: 695980 - RNA, 22 nt, Human
ccugcagguaaggcuaacugcc

SEQ ID NO: 695981 - RNA, 17 nt, Human
uugggagagaaagguau

SEQ ID NO: 695982 - RNA, 22 nt, Human
uuacaguuuaagaggaaacaaa

SEQ ID NO: 695983 - RNA, 22 nt, Human
uucucuggagaguaucuucuua

SEQ ID NO: 695984 - RNA, 22 nt, Human
cccagagaagugaagugacuug

SEQ ID NO: 695985 - RNA, 22 nt, Human
uugcagggauaaaacaagugaa

SEQ ID NO: 695986 - RNA, 22 nt, Human
agggaauguagcaagaugccaa

SEQ ID NO: 695987 - RNA, 22 nt, Human
aaacaacucggcaacugcuuuu

SEQ ID NO: 695988 - RNA, 22 nt, Human
gagcucuguccacacuuggaga

SEQ ID NO: 695989 - RNA, 22 nt, Human
ucaggauguccaaaauccagcc

SEQ ID NO: 695990 - RNA, 22 nt, Human
cgcugggggaacagcgagggug

SEQ ID NO: 695991 - RNA, 22 nt, Human
uguuaaggagacacaugaaaaa

SEQ ID NO: 695992 - RNA, 21 nt, Human
uggcugagccaggugugugga

SEQ ID NO: 695993 - RNA, 22 nt, Human
ucugagguucccucaacuaccu

SEQ ID NO: 695994 - RNA, 22 nt, Human
cuccagcugccaccagauguuu

SEQ ID NO: 695995 - RNA, 20 nt, Human
gagugcuuuggcuugcucuc

SEQ ID NO: 695996 - RNA, 22 nt, Human
aggggugugcauccuggaggau

SEQ ID NO: 695997 - RNA, 22 nt, Human
auaggaugauaaaauuagaaac

SEQ ID NO: 695998 - RNA, 22 nt, Human
uuuaagaucauuuguauuaucc

SEQ ID NO: 695999 - RNA, 22 nt, Human
gcuuccagcaaacacuggcugc

SEQ ID NO: 696000 - RNA, 22 nt, Human
cugggcuagaaggaccaggaug

SEQ ID NO: 696001 - RNA, 22 nt, Human
ugaugcuguguaccucauggga

SEQ ID NO: 696002 - RNA, 22 nt, Human
aauuugcaugaugagaacaaua

SEQ ID NO: 696003 - RNA, 22 nt, Human
gggcacugagggcccacaggau

SEQ ID NO: 696004 - RNA, 22 nt, Human
gggggagagacgagcggcucug

SEQ ID NO: 696005 - RNA, 22 nt, Human
acugggaaggagcaggaucugu

SEQ ID NO: 696006 - RNA, 22 nt, Human
acgugcaggaucugguuggcga

SEQ ID NO: 696007 - RNA, 22 nt, Human
guggauggcccugcacacaggu

SEQ ID NO: 696008 - RNA, 22 nt, Human
ugucuuccucuuggcuugagcu

SEQ ID NO: 696009 - RNA, 22 nt, Human
acaaaauuaccuaguuauuuuc

SEQ ID NO: 696010 - RNA, 22 nt, Human
caggcccauucuaggcuugcua

SEQ ID NO: 696011 - RNA, 22 nt, Human
uggaagaggccagaaaguggga

SEQ ID NO: 696012 - RNA, 22 nt, Human
ucucuuaauccggugcuuucug

SEQ ID NO: 696013 - RNA, 18 nt, Human
uagcacagagcaggaugu

SEQ ID NO: 696014 - RNA, 22 nt, Human
acaugugugacaacagagguga

SEQ ID NO: 696015 - RNA, 22 nt, Human
agguggguaucaugagagauua

SEQ ID NO: 696016 - RNA, 22 nt, Human
acacaguucaggaucaaauagc

SEQ ID NO: 696017 - RNA, 22 nt, Human
ggccuggaagaggacagagaaa

SEQ ID NO: 696018 - RNA, 22 nt, Human
agguuucuuuaugcugcuagaa

SEQ ID NO: 696019 - RNA, 21 nt, Human
uccaggagcacgggacuagga

SEQ ID NO: 696020 - RNA, 19 nt, Human
auucuucagcagugagacc

SEQ ID NO: 696021 - RNA, 19 nt, Human
ugcaagugucuuggacaag

SEQ ID NO: 696022 - RNA, 22 nt, Human
aaacucugaugcuuauugggaa

SEQ ID NO: 696023 - RNA, 22 nt, Human
gguguuaaacaugauccauuac

SEQ ID NO: 696024 - RNA, 23 nt, Human
uaaugagaagcuuuguuuccuga

SEQ ID NO: 696025 - RNA, 22 nt, Human
ggcagagaugugggucagaauc

SEQ ID NO: 696026 - RNA, 22 nt, Human
ugaacacacacaucuuaauaau

SEQ ID NO: 696027 - RNA, 22 nt, Human
uacuuaaaacugauagaaucuc

SEQ ID NO: 696028 - RNA, 17 nt, Human
aauacuuccaacuagug

SEQ ID NO: 696029 - RNA, 22 nt, Human
uacaaauggguuaaaauauagu

SEQ ID NO: 696030 - RNA, 22 nt, Human
uggcucaaguaacaaaaauaua

SEQ ID NO: 696031 - RNA, 22 nt, Human
cauauggacaagaacauuuaug

SEQ ID NO: 696032 - RNA, 19 nt, Human
uagcccagagccuggcuac

SEQ ID NO: 696033 - RNA, 22 nt, Human
acucugagcaucccaagucuua

SEQ ID NO: 696034 - RNA, 22 nt, Human
gcugugggacagguccagccag

SEQ ID NO: 696035 - RNA, 22 nt, Human
uaguacagaauuaauaauugug

SEQ ID NO: 696036 - RNA, 22 nt, Human
cagcagcugauggggaagugau

SEQ ID NO: 696037 - RNA, 22 nt, Human
uaagacaagccucgcauuugua

SEQ ID NO: 696038 - RNA, 22 nt, Human
cucccaggcacagggaggagcc

SEQ ID NO: 696039 - RNA, 22 nt, Human
uaaaggcaguucugauuagguc

SEQ ID NO: 696040 - RNA, 22 nt, Human
uaaacagagagugcaguuauag

SEQ ID NO: 696041 - RNA, 22 nt, Human
acaggcccagcucuucaccaga

SEQ ID NO: 696042 - RNA, 22 nt, Human
aaagcacagggugcuagagagu

SEQ ID NO: 696043 - RNA, 22 nt, Human
uccagugcauucagacacuugg

SEQ ID NO: 696044 - RNA, 22 nt, Human
ugugcaguucaaacccguguug

SEQ ID NO: 696045 - RNA, 18 nt, Human
uggcucugcagccagaug

SEQ ID NO: 696046 - RNA, 22 nt, Human
caggaagaaggguggugagucc

SEQ ID NO: 696047 - RNA, 22 nt, Human
agaggccagaucaucauagaug

SEQ ID NO: 696048 - RNA, 22 nt, Human
acucucucacacacgccuauau

SEQ ID NO: 696049 - RNA, 22 nt, Human
aauuuuguuuaagugaucugcu

SEQ ID NO: 696050 - RNA, 22 nt, Human
auuucuguggcuucauucuccu

SEQ ID NO: 696051 - RNA, 22 nt, Human
aggggucuauccugagaugguc

SEQ ID NO: 696052 - RNA, 17 nt, Human
cucuuuugucuucuucc

SEQ ID NO: 696053 - RNA, 22 nt, Human
gcccaccuaaccugcucaccuu

SEQ ID NO: 696054 - RNA, 22 nt, Human
ucaccagucuuucuuaccauug

SEQ ID NO: 696055 - RNA, 17 nt, Human
ugcacaagagacaauag

SEQ ID NO: 696056 - RNA, 22 nt, Human
aaagucaucagaaccuuccaga

SEQ ID NO: 696057 - RNA, 22 nt, Human
acagcagagacacucaggaggc

SEQ ID NO: 696058 - RNA, 22 nt, Human
auugcauucauugacauaugag

SEQ ID NO: 696059 - RNA, 23 nt, Human
aaccuagacuacuuacuaugugg

SEQ ID NO: 696060 - RNA, 18 nt, Human
acagggagggcgcugggg

SEQ ID NO: 696061 - RNA, 22 nt, Human
uaauucaugggcccagugauau

SEQ ID NO: 696062 - RNA, 22 nt, Human
uuucacagcuggguggcagagu

SEQ ID NO: 696063 - RNA, 22 nt, Human
auggcuucuagcauugucacaa

SEQ ID NO: 696064 - RNA, 22 nt, Human
augugcuuuccaaugcuguagg

SEQ ID NO: 696065 - RNA, 22 nt, Human
uguuuaauuuuucaugagccaa

SEQ ID NO: 696066 - RNA, 22 nt, Human
caugaacaaauucuguuugagg

SEQ ID NO: 696067 - RNA, 21 nt, Human
uuagcaaagcaaacacaugcu

SEQ ID NO: 696068 - RNA, 22 nt, Human
agucuucuuucauuuacucagu

SEQ ID NO: 696069 - RNA, 22 nt, Human
guaucuuuuacaccaggaaauu

SEQ ID NO: 696070 - RNA, 22 nt, Human
aauucuuggaaacauuacugga

SEQ ID NO: 696071 - RNA, 22 nt, Human
cucugagcagaggccguggcua

SEQ ID NO: 696072 - RNA, 21 nt, Human
agcagaggcugccuggugacu

SEQ ID NO: 696073 - RNA, 22 nt, Human
accaaggaagagauucucaguu

SEQ ID NO: 696074 - RNA, 22 nt, Human
ucaggagacuuaugucacagug

SEQ ID NO: 696075 - RNA, 22 nt, Human
gcucucagaugcuccagcagcc

SEQ ID NO: 696076 - RNA, 22 nt, Human
ugguggcaucagugaaguacac

SEQ ID NO: 696077 - RNA, 22 nt, Human
ucugggccucaguuucuucauc

SEQ ID NO: 696078 - RNA, 22 nt, Human
agcauuuauuucuuagaaauug

SEQ ID NO: 696079 - RNA, 23 nt, Human
auuugcauggccggauuauggau

SEQ ID NO: 696080 - RNA, 22 nt, Human
gccagcuguaagcuggggugau

SEQ ID NO: 696081 - RNA, 23 nt, Human
ugcagagugucacuugaaaacca

SEQ ID NO: 696082 - RNA, 22 nt, Human
caaugaaauugagauccagaga

SEQ ID NO: 696083 - RNA, 22 nt, Human
ucuuuagagcucagaaauacag

SEQ ID NO: 696084 - RNA, 22 nt, Human
aaacuuuuuuagguucauaggc

SEQ ID NO: 696085 - RNA, 22 nt, Human
aaagauuucagaagccugugcc

SEQ ID NO: 696086 - RNA, 18 nt, Human
gcagggcugcacacgcau

SEQ ID NO: 696087 - RNA, 22 nt, Human
ccaggcccaggguacugaccaa

SEQ ID NO: 696088 - RNA, 22 nt, Human
agcuugguguugccugcuugag

SEQ ID NO: 696089 - RNA, 22 nt, Human
uaucaguggucacaagauacau

SEQ ID NO: 696090 - RNA, 22 nt, Human
ugaccugcagucaagaggggaa

SEQ ID NO: 696091 - RNA, 22 nt, Human
ggccagguuggguggaaguggc

SEQ ID NO: 696092 - RNA, 16 nt, Human
gcaggaguaccacuug

SEQ ID NO: 696093 - RNA, 22 nt, Human
gccugccuuuguaugacccuga

SEQ ID NO: 696094 - RNA, 21 nt, Human
gugugcugauacauuggagaa

SEQ ID NO: 696095 - RNA, 22 nt, Human
aaauucagcauccugcacugga

SEQ ID NO: 696096 - RNA, 22 nt, Human
uggaccugcguaggugcugggc

SEQ ID NO: 696097 - RNA, 22 nt, Human
acaggcaauuagcaagcuguua

SEQ ID NO: 696098 - RNA, 18 nt, Human
gacaccagccucugcccc

SEQ ID NO: 696099 - RNA, 22 nt, Human
cuggggcauugggagaggccug

SEQ ID NO: 696100 - RNA, 22 nt, Human
gccuuggccuuccuaggccuga

SEQ ID NO: 696101 - RNA, 22 nt, Human
agaagccaauccuugucucucu

SEQ ID NO: 696102 - RNA, 22 nt, Human
ggcuagaauaauugacuucauu

SEQ ID NO: 696103 - RNA, 22 nt, Human
uggggcuccuccuggcaggagg

SEQ ID NO: 696104 - RNA, 20 nt, Human
ugacaguuucauaugguuca

SEQ ID NO: 696105 - RNA, 22 nt, Human
ugcugccuccuuccugccagga

SEQ ID NO: 696106 - RNA, 22 nt, Human
ggugguggucccgacuugggag

SEQ ID NO: 696107 - RNA, 22 nt, Human
acaauguuucucuuuagucauu

SEQ ID NO: 696108 - RNA, 22 nt, Human
gauggguauuggcagaagaggg

SEQ ID NO: 696109 - RNA, 17 nt, Human
uuccucucacauuuuuu

SEQ ID NO: 696110 - RNA, 22 nt, Human
agucucugagguucagaugccu

SEQ ID NO: 696111 - RNA, 22 nt, Human
cccugcaguccuuucuuggcuc

SEQ ID NO: 696112 - RNA, 22 nt, Human
ccagcagagcucaaacuuccug

SEQ ID NO: 696113 - RNA, 22 nt, Human
uucacuguacugacugucuuau

SEQ ID NO: 696114 - RNA, 22 nt, Human
ucagcacuggcgcugggcaggu

SEQ ID NO: 696115 - RNA, 22 nt, Human
gagugcaguaugagaggcugcu

SEQ ID NO: 696116 - RNA, 22 nt, Human
agcaggugagcacagccaggcu

SEQ ID NO: 696117 - RNA, 22 nt, Human
auucauuccaggucagucagac

SEQ ID NO: 696118 - RNA, 22 nt, Human
ggagcuguucaggacugcuuca

SEQ ID NO: 696119 - RNA, 22 nt, Human
uuugagaaaaccagaaagaucu

SEQ ID NO: 696120 - RNA, 22 nt, Human
agagccaaggcugagagcuauu

SEQ ID NO: 696121 - RNA, 22 nt, Human
aaggccaccaccagcgaggggg

SEQ ID NO: 696122 - RNA, 22 nt, Human
aaaauugagagucuugugcaag

SEQ ID NO: 696123 - RNA, 22 nt, Human
acacuucauagcaagguuggag

SEQ ID NO: 696124 - RNA, 22 nt, Human
agugucugccuauuuuucaagc

SEQ ID NO: 696125 - RNA, 22 nt, Human
aauggaaccuaguuauccacau

SEQ ID NO: 696126 - RNA, 22 nt, Human
ugagcagagacgggggccucca

SEQ ID NO: 696127 - RNA, 22 nt, Human
ccaggaaggccuggaugccccc

SEQ ID NO: 696128 - RNA, 22 nt, Human
ucaggcugccuaucagacugug

SEQ ID NO: 696129 - RNA, 22 nt, Human
ggccagcuuugagcugcaggaa

SEQ ID NO: 696130 - RNA, 22 nt, Human
ggcugagcucaggggcagcagg

SEQ ID NO: 696131 - RNA, 22 nt, Human
cccaggaugaucgagaguggga

SEQ ID NO: 696132 - RNA, 22 nt, Human
aggguagggcccggagacagac

SEQ ID NO: 696133 - RNA, 22 nt, Human
ucugaagauaugagcuuuauga

SEQ ID NO: 696134 - RNA, 22 nt, Human
guugcagacacuccacagucga

SEQ ID NO: 696135 - RNA, 22 nt, Human
aggguugcauuuuuagaggcuc

SEQ ID NO: 696136 - RNA, 22 nt, Human
uuauuuaaugugaucugaagag

SEQ ID NO: 696137 - RNA, 22 nt, Human
cuguacaucucugaggacagua

SEQ ID NO: 696138 - RNA, 18 nt, Human
cuucagugacagucuggc

SEQ ID NO: 696139 - RNA, 22 nt, Human
ggagggggacugacacugauuu

SEQ ID NO: 696140 - RNA, 22 nt, Human
uaggaaaagcacaggauguucu

SEQ ID NO: 696141 - RNA, 22 nt, Human
ugcagaacagggccaugucacc

SEQ ID NO: 696142 - RNA, 22 nt, Human
aucuaaagugucauaaguagcu

SEQ ID NO: 696143 - RNA, 22 nt, Human
auggcugggcuuuuagucagau

SEQ ID NO: 696144 - RNA, 22 nt, Human
cauguacacucauguaacuaua

SEQ ID NO: 696145 - RNA, 22 nt, Human
agagccugucugccuuucuacc

SEQ ID NO: 696146 - RNA, 22 nt, Human
uuggccaagauacgagcacaua

SEQ ID NO: 696147 - RNA, 22 nt, Human
gcuuccucaccuucucuugcau

SEQ ID NO: 696148 - RNA, 22 nt, Human
ugucaguuuccugugcccugcu

SEQ ID NO: 696149 - RNA, 22 nt, Human
ucuaagccuguguccucugcag

SEQ ID NO: 696150 - RNA, 22 nt, Human
caggugggccgggguuuguucu

SEQ ID NO: 696151 - RNA, 22 nt, Human
gaauuggggguuuugcaaggca

SEQ ID NO: 696152 - RNA, 22 nt, Human
guggccuccuccguccgccucu

SEQ ID NO: 696153 - RNA, 22 nt, Human
agucagcaucugcacugugcug

SEQ ID NO: 696154 - RNA, 20 nt, Human
ggagaugcagcccaggugcc

SEQ ID NO: 696155 - RNA, 22 nt, Human
gcugggaagugcaagaucaagg

SEQ ID NO: 696156 - RNA, 22 nt, Human
gccccagcccuguggaccaugg

SEQ ID NO: 696157 - RNA, 22 nt, Human
uaacauucuuaacuuagaaaca

SEQ ID NO: 696158 - RNA, 22 nt, Human
cugugucuucuguuuugaaguu

SEQ ID NO: 696159 - RNA, 20 nt, Human
ucugcucagcccucaguggc

SEQ ID NO: 696160 - RNA, 22 nt, Human
ucaggaguaaguuauaaguauu

SEQ ID NO: 696161 - RNA, 17 nt, Human
cccuggcucuaggugga

SEQ ID NO: 696162 - RNA, 22 nt, Human
uggaagagaaaauccacccuua

SEQ ID NO: 696163 - RNA, 22 nt, Human
caugcauauaugcuacaugcaa

SEQ ID NO: 696164 - RNA, 22 nt, Human
uguggguuuguaguuaaguucu

SEQ ID NO: 696165 - RNA, 22 nt, Human
gcucagugugcacgaguacucu

SEQ ID NO: 696166 - RNA, 22 nt, Human
gacaucuggaggagaugaaugg

SEQ ID NO: 696167 - RNA, 22 nt, Human
uuguggaaauacagacuccaag

SEQ ID NO: 696168 - RNA, 22 nt, Human
ucuguugacuccuagcagccau

SEQ ID NO: 696169 - RNA, 22 nt, Human
cagaauuuagcacaauguaugg

SEQ ID NO: 696170 - RNA, 22 nt, Human
ggagcaggcagggccgugucug

SEQ ID NO: 696171 - RNA, 18 nt, Human
cccagaggaaugccugga

SEQ ID NO: 696172 - RNA, 18 nt, Human
auggaggcagagagcuga

SEQ ID NO: 696173 - RNA, 22 nt, Human
ugaguugcuaucuagauccaga

SEQ ID NO: 696174 - RNA, 22 nt, Human
augaagcugguuuuggcuuggg

SEQ ID NO: 696175 - RNA, 22 nt, Human
ugucuuuagaccucucuggccu

SEQ ID NO: 696176 - RNA, 22 nt, Human
cugaggcucugggugucacugu

SEQ ID NO: 696177 - RNA, 22 nt, Human
agucaggauaugccuugugggc

SEQ ID NO: 696178 - RNA, 22 nt, Human
aaugauggucauggcaacuuuu

SEQ ID NO: 696179 - RNA, 22 nt, Human
gaacuuguuguaagaaaauaug

SEQ ID NO: 696180 - RNA, 22 nt, Human
uuagggaaggcugcugucagcu

SEQ ID NO: 696181 - RNA, 15 nt, Human
gcuucuccagaugac

SEQ ID NO: 696182 - RNA, 22 nt, Human
ggccagcagaccucagggacuc

SEQ ID NO: 696183 - RNA, 18 nt, Human
ggacaucaucaggugcuu

SEQ ID NO: 696184 - RNA, 19 nt, Human
agacucugccacucuucuc

SEQ ID NO: 696185 - RNA, 22 nt, Human
ggagucagaauggcaggguggu

SEQ ID NO: 696186 - RNA, 20 nt, Human
ucaauuuucuacaacauuug

SEQ ID NO: 696187 - RNA, 22 nt, Human
cucaggucacggaucugagcug

SEQ ID NO: 696188 - RNA, 22 nt, Human
cagggccagggcuauggugaag

SEQ ID NO: 696189 - RNA, 22 nt, Human
ugucugugauuuaggccagggc

SEQ ID NO: 696190 - RNA, 22 nt, Human
ugucugugcccaaggcucccgg

SEQ ID NO: 696191 - RNA, 22 nt, Human
ugccuuuuauggcuagccucag

SEQ ID NO: 696192 - RNA, 22 nt, Human
acugcagccuuugggcucauaa

SEQ ID NO: 696193 - RNA, 22 nt, Human
ucucagaaggguggugcuggag

SEQ ID NO: 696194 - RNA, 22 nt, Human
aaacuugaggcaaugaaggugu

SEQ ID NO: 696195 - RNA, 20 nt, Human
ucuuaaauccccagggccau

SEQ ID NO: 696196 - RNA, 22 nt, Human
cugggaccaucugugucuacuu

SEQ ID NO: 696197 - RNA, 22 nt, Human
gaugcucaucuguccuuugaug

SEQ ID NO: 696198 - RNA, 22 nt, Human
ccugccugcuuucugcuuugca

SEQ ID NO: 696199 - RNA, 22 nt, Human
ucccagcuacucuagaggcuga

SEQ ID NO: 696200 - RNA, 22 nt, Human
ucucugaauucugaugcaagug

SEQ ID NO: 696201 - RNA, 22 nt, Human
cauggcagaaaccugagcugcu

SEQ ID NO: 696202 - RNA, 22 nt, Human
gacaaccgagcagcugugggaa

SEQ ID NO: 696203 - RNA, 22 nt, Human
uggcaagcuggguuggguagcc

SEQ ID NO: 696204 - RNA, 22 nt, Human
ccccuuccuuccucagacagcc

SEQ ID NO: 696205 - RNA, 22 nt, Human
uuauuugacuucuugcuaugcu

SEQ ID NO: 696206 - RNA, 22 nt, Human
gcuucuaauuuuuuacagaaua

SEQ ID NO: 696207 - RNA, 22 nt, Human
ugcucauuggcgaucugaggga

SEQ ID NO: 696208 - RNA, 21 nt, Human
gaagagaguccucauccugag

SEQ ID NO: 696209 - RNA, 22 nt, Human
uagcaacugccuuuacuauauu

SEQ ID NO: 696210 - RNA, 22 nt, Human
gcaguacuuuaucacauggaau

SEQ ID NO: 696211 - RNA, 22 nt, Human
agcccuucaaccugccuacucc

SEQ ID NO: 696212 - RNA, 21 nt, Human
gcuugguuuugguuacuugcc

SEQ ID NO: 696213 - RNA, 22 nt, Human
cccucagggaccacugacuuca

SEQ ID NO: 696214 - RNA, 22 nt, Human
acccuguaugcuauaucccuaa

SEQ ID NO: 696215 - RNA, 22 nt, Human
ucaaaauucuagggagaauggu

SEQ ID NO: 696216 - RNA, 22 nt, Human
cugugucucguuaaagcauugg

SEQ ID NO: 696217 - RNA, 18 nt, Human
auuuaaugaacugaaagc

SEQ ID NO: 696218 - RNA, 22 nt, Human
ucccucugggcuggagcagggu

SEQ ID NO: 696219 - RNA, 22 nt, Human
ccuuucugguauuuaaccaaag

SEQ ID NO: 696220 - RNA, 22 nt, Human
guggcagucuuuggcaaugaca

SEQ ID NO: 696221 - RNA, 22 nt, Human
gguccccguggaggcuggagcg

SEQ ID NO: 696222 - RNA, 22 nt, Human
uacacauguauuuauguguaca

SEQ ID NO: 696223 - RNA, 18 nt, Human
aguguuuauuuaggugaa

SEQ ID NO: 696224 - RNA, 22 nt, Human
gacagccucaugugcaugaacu

SEQ ID NO: 696225 - RNA, 22 nt, Human
uagaggagaguugcuggaugga

SEQ ID NO: 696226 - RNA, 22 nt, Human
gaugucuuugaggcucacugcu

SEQ ID NO: 696227 - RNA, 22 nt, Human
uaaggccaauuaacaaccaggg

SEQ ID NO: 696228 - RNA, 22 nt, Human
ccaguguucccucggguucaug

SEQ ID NO: 696229 - RNA, 21 nt, Human
uguucuaucagcucagguguc

SEQ ID NO: 696230 - RNA, 22 nt, Human
uuggccaacagcgacagggcca

SEQ ID NO: 696231 - RNA, 22 nt, Human
gcucccacgcaauucuuuucag

SEQ ID NO: 696232 - RNA, 22 nt, Human
accauguuggccaagcuggucu

SEQ ID NO: 696233 - RNA, 22 nt, Human
cuccugggaugacucuuucuuu

SEQ ID NO: 696234 - RNA, 22 nt, Human
cuuaauuggcuuauuuccucaa

SEQ ID NO: 696235 - RNA, 22 nt, Human
gaaagcauaacuaauauuuauu

SEQ ID NO: 696236 - RNA, 22 nt, Human
acuuuacagaugguuuccugac

SEQ ID NO: 696237 - RNA, 22 nt, Human
acagaauucuaguauguggcuu

SEQ ID NO: 696238 - RNA, 22 nt, Human
aucaaauauaauaauuuucgcu

SEQ ID NO: 696239 - RNA, 22 nt, Human
guggcaggggcgggcuguuccg

SEQ ID NO: 696240 - RNA, 22 nt, Human
uuauuugugaaucauuuaucua

SEQ ID NO: 696241 - RNA, 20 nt, Human
aauaaaagaagccuucaccc

SEQ ID NO: 696242 - RNA, 22 nt, Human
augaaaauugacagcggaagua

SEQ ID NO: 696243 - RNA, 22 nt, Human
uuaaagaugcagcuuuagagaa

SEQ ID NO: 696244 - RNA, 22 nt, Human
uggcugagaaaaugguuuuagg

SEQ ID NO: 696245 - RNA, 22 nt, Human
acacagggcagagagcuggcuc

SEQ ID NO: 696246 - RNA, 22 nt, Human
uacuucaugaguuaauaugcag

SEQ ID NO: 696247 - RNA, 22 nt, Human
cugacaaacuuaauuuucugaa

SEQ ID NO: 696248 - RNA, 22 nt, Human
uuggcagauuugucaguaagcu

SEQ ID NO: 696249 - RNA, 22 nt, Human
ucacccagaaaagacagcagau

SEQ ID NO: 696250 - RNA, 22 nt, Human
agucccagcccaguccuguaag

SEQ ID NO: 696251 - RNA, 21 nt, Human
auuuucauuaauucagugugg

SEQ ID NO: 696252 - RNA, 22 nt, Human
cugggagcuuggagccuuuggu

SEQ ID NO: 696253 - RNA, 22 nt, Human
cuucuggguugcaggucuuggc

SEQ ID NO: 696254 - RNA, 22 nt, Human
gaaguauuacucugaauguauu

SEQ ID NO: 696255 - RNA, 22 nt, Human
agagcugucacauagagccaga

SEQ ID NO: 696256 - RNA, 22 nt, Human
ucacaugaagaucccucaauuu

SEQ ID NO: 696257 - RNA, 22 nt, Human
ggagaagaggagcuggaagccu

SEQ ID NO: 696258 - RNA, 22 nt, Human
gcagggcaguaagagcuagagu

SEQ ID NO: 696259 - RNA, 22 nt, Human
acaggcaaacacagaaaguagg

SEQ ID NO: 696260 - RNA, 22 nt, Human
auacagaacucucaguuguaua

SEQ ID NO: 696261 - RNA, 22 nt, Human
ggcagugaaaaaguauguuucc

SEQ ID NO: 696262 - RNA, 22 nt, Human
gaucauuagcuuuucaaaggag

SEQ ID NO: 696263 - RNA, 22 nt, Human
gacuuggguggauugugacucu

SEQ ID NO: 696264 - RNA, 22 nt, Human
cauuaucugccauugacaccau

SEQ ID NO: 696265 - RNA, 22 nt, Human
gcaggcugggguagccccacuu

SEQ ID NO: 696266 - RNA, 20 nt, Human
cugaggggucugacuuggac

SEQ ID NO: 696267 - RNA, 22 nt, Human
augaugaaacuaggaacuagag

SEQ ID NO: 696268 - RNA, 22 nt, Human
agugacuggugugaaguuaaau

SEQ ID NO: 696269 - RNA, 22 nt, Human
uuccaauuguucuuuggaaucu

SEQ ID NO: 696270 - RNA, 18 nt, Human
ucuccuggguaggggccu

SEQ ID NO: 696271 - RNA, 22 nt, Human
ucauauuaacaaugaaacucag

SEQ ID NO: 696272 - RNA, 22 nt, Human
uuaaacauuuauggaggcagca

SEQ ID NO: 696273 - RNA, 22 nt, Human
ggugggggagacuuggucaaga

SEQ ID NO: 696274 - RNA, 22 nt, Human
agaugcugcuccacaggccagg

SEQ ID NO: 696275 - RNA, 21 nt, Human
agcugccuccacuucugaggc

SEQ ID NO: 696276 - RNA, 22 nt, Human
cugagauggaguuuugcucuug

SEQ ID NO: 696277 - RNA, 22 nt, Human
uuagauaauguagagauaugag

SEQ ID NO: 696278 - RNA, 22 nt, Human
aaaggccacugcaagggaaggu

SEQ ID NO: 696279 - RNA, 22 nt, Human
ugaaaguugcacauaagagaau

SEQ ID NO: 696280 - RNA, 22 nt, Human
ucagugauuucuggggugaggg

SEQ ID NO: 696281 - RNA, 22 nt, Human
ucucuucuugauuuucacugga

SEQ ID NO: 696282 - RNA, 22 nt, Human
aggccucaguuugucaucugua

SEQ ID NO: 696283 - RNA, 22 nt, Human
guuagguagaaguuuacuuuga

SEQ ID NO: 696284 - RNA, 22 nt, Human
cagccugcagggcugccuguug

SEQ ID NO: 696285 - RNA, 22 nt, Human
caggccacaaguuggguucaag

SEQ ID NO: 696286 - RNA, 22 nt, Human
cucugagggucuaaggagucac

SEQ ID NO: 696287 - RNA, 22 nt, Human
uaaaccuugguagcaucuugcu

SEQ ID NO: 696288 - RNA, 22 nt, Human
uaacuggcuuaaauuuuaucaa

SEQ ID NO: 696289 - RNA, 22 nt, Human
ccugucucccuggcauggcuca

SEQ ID NO: 696290 - RNA, 22 nt, Human
aaguuauugcagcaauccaagu

SEQ ID NO: 696291 - RNA, 22 nt, Human
caacugccauacagcuccaugg

SEQ ID NO: 696292 - RNA, 22 nt, Human
augucuuucaaauucugccuag

SEQ ID NO: 696293 - RNA, 22 nt, Human
aaucuuaagcugaauucucucc

SEQ ID NO: 696294 - RNA, 22 nt, Human
augaaggauagggcaaaauuuu

SEQ ID NO: 696295 - RNA, 22 nt, Human
ccuuuggggcuuuacuguggaa

SEQ ID NO: 696296 - RNA, 22 nt, Human
aaggcaguggcuggaaaaccug

SEQ ID NO: 696297 - RNA, 22 nt, Human
aaggaugaacauuaauacauca

SEQ ID NO: 696298 - RNA, 22 nt, Human
uggcagauucugguugauacuu

SEQ ID NO: 696299 - RNA, 22 nt, Human
caggaccaggcguucugggcug

SEQ ID NO: 696300 - RNA, 22 nt, Human
ggauggccuucuugcucaggaa

SEQ ID NO: 696301 - RNA, 22 nt, Human
ugaaugcuuggagucauaaaau

SEQ ID NO: 696302 - RNA, 22 nt, Human
gccagagcugagacacgagucc

SEQ ID NO: 696303 - RNA, 22 nt, Human
uccagccuaauguucuucccac

SEQ ID NO: 696304 - RNA, 22 nt, Human
uguccugggaaugggaugcagu

SEQ ID NO: 696305 - RNA, 19 nt, Human
cccaggcuacauggagagg

SEQ ID NO: 696306 - RNA, 22 nt, Human
ccagggcugccgcaucccuggu

SEQ ID NO: 696307 - RNA, 22 nt, Human
uucugggcccaacccuagagug

SEQ ID NO: 696308 - RNA, 22 nt, Human
cacagcugccaugcagucagug

SEQ ID NO: 696309 - RNA, 22 nt, Human
auccuguuugucacuagaaaau

SEQ ID NO: 696310 - RNA, 22 nt, Human
ggcagguguggaguguuauuuu

SEQ ID NO: 696311 - RNA, 22 nt, Human
gggauccauccgugcagcagag

SEQ ID NO: 696312 - RNA, 22 nt, Human
caaauacugagcacgcaaucaa

SEQ ID NO: 696313 - RNA, 22 nt, Human
uaugaaacauucauacaaauaa

SEQ ID NO: 696314 - RNA, 22 nt, Human
aggcaagaaacuuucugggaga

SEQ ID NO: 696315 - RNA, 19 nt, Human
uggagcagggcccuuguuu

SEQ ID NO: 696316 - RNA, 22 nt, Human
ccugggcugcaugauggcauuu

SEQ ID NO: 696317 - RNA, 22 nt, Human
gccagguccccucauggcuccu

SEQ ID NO: 696318 - RNA, 22 nt, Human
acaugaggaaacaaggguauau

SEQ ID NO: 696319 - RNA, 18 nt, Human
aguaaauguuaaauauug

SEQ ID NO: 696320 - RNA, 22 nt, Human
aaggcaacuguaaaacaugcac

SEQ ID NO: 696321 - RNA, 19 nt, Human
aaugguuugaugaaguaua

SEQ ID NO: 696322 - RNA, 22 nt, Human
gccugaggaaugcuccugacuu

SEQ ID NO: 696323 - RNA, 22 nt, Human
aaccauuugcaguuacugagac

SEQ ID NO: 696324 - RNA, 22 nt, Human
aauagcaguuaaaaaucagccc

SEQ ID NO: 696325 - RNA, 22 nt, Human
gcuucugggcaccugaacagga

SEQ ID NO: 696326 - RNA, 23 nt, Human
augggccaagcaagacccaugac

SEQ ID NO: 696327 - RNA, 22 nt, Human
auggcugggucaccaucagggu

SEQ ID NO: 696328 - RNA, 22 nt, Human
gaaaagaacugcaugggauuaa

SEQ ID NO: 696329 - RNA, 22 nt, Human
acuguuauguuauuacccaugu

SEQ ID NO: 696330 - RNA, 22 nt, Human
cugaggccucucuccuuggcuu

SEQ ID NO: 696331 - RNA, 22 nt, Human
ugcauuguugaauauuucauag

SEQ ID NO: 696332 - RNA, 22 nt, Human
uuguccugugauuucagggccu

SEQ ID NO: 696333 - RNA, 20 nt, Human
uugcagcagugaggugaagg

SEQ ID NO: 696334 - RNA, 22 nt, Human
gggguggauuccuacaggucca

SEQ ID NO: 696335 - RNA, 22 nt, Human
auaaacuggguaucaagaggcc

SEQ ID NO: 696336 - RNA, 22 nt, Human
agcugcaggagucgccuaggau

SEQ ID NO: 696337 - RNA, 22 nt, Human
guacacagagugguggaagaaa

SEQ ID NO: 696338 - RNA, 22 nt, Human
aauuucagaugucauaaauaua

SEQ ID NO: 696339 - RNA, 22 nt, Human
gccagcugaggccgugcaggcu

SEQ ID NO: 696340 - RNA, 22 nt, Human
uggcagagguaauucaaauccc

SEQ ID NO: 696341 - RNA, 22 nt, Human
uccucaguaaggaucgucagcu

SEQ ID NO: 696342 - RNA, 23 nt, Human
uggugccucagaagcagugggcu

SEQ ID NO: 696343 - RNA, 22 nt, Human
cugucugcccuggccagagccc

SEQ ID NO: 696344 - RNA, 22 nt, Human
uuccaggaagcucucggccucu

SEQ ID NO: 696345 - RNA, 22 nt, Human
aauucuacauugguucacauuu

SEQ ID NO: 696346 - RNA, 22 nt, Human
ugggcuggcguggagaguuuag

SEQ ID NO: 696347 - RNA, 19 nt, Human
aaaccuguuaguagagcac

SEQ ID NO: 696348 - RNA, 22 nt, Human
uuaaaacagcgugaaucuggca

SEQ ID NO: 696349 - RNA, 23 nt, Human
aggaagagagagugccucuuucu

SEQ ID NO: 696350 - RNA, 21 nt, Human
uggcucaguugcugggcacag

SEQ ID NO: 696351 - RNA, 22 nt, Human
ccuccaggauaagucagggccu

SEQ ID NO: 696352 - RNA, 22 nt, Human
uuuagugauucauuuagaaaaa

SEQ ID NO: 696353 - RNA, 22 nt, Human
uuggcucagcaucuuggugcca

SEQ ID NO: 696354 - RNA, 22 nt, Human
cugccuagaaaaccaggcuccu

SEQ ID NO: 696355 - RNA, 19 nt, Human
cauuuagaaguacauauua

SEQ ID NO: 696356 - RNA, 22 nt, Human
uauucacaggcuggagugaugu

SEQ ID NO: 696357 - RNA, 22 nt, Human
cucuccuuuacugcagagagcg

SEQ ID NO: 696358 - RNA, 22 nt, Human
gugccuggaacuggguaggcug

SEQ ID NO: 696359 - RNA, 22 nt, Human
agaagccauaguaucucagggu

SEQ ID NO: 696360 - RNA, 22 nt, Human
aggcuggagcaagggggcauau

SEQ ID NO: 696361 - RNA, 22 nt, Human
agcaaggaaaguaggcacggaa

SEQ ID NO: 696362 - RNA, 22 nt, Human
accaggguugagucagcugcgu

SEQ ID NO: 696363 - RNA, 22 nt, Human
aagcacagguugaggauuauuc

SEQ ID NO: 696364 - RNA, 22 nt, Human
ccugagcacaagggagcuuuga

SEQ ID NO: 696365 - RNA, 22 nt, Human
ugagguggcacacacuuccugc

SEQ ID NO: 696366 - RNA, 22 nt, Human
aggcauggcacugagcagcuuc

SEQ ID NO: 696367 - RNA, 22 nt, Human
ccuguaaguaguuugccugagc

SEQ ID NO: 696368 - RNA, 22 nt, Human
auggggugaccaugagcauuua

SEQ ID NO: 696369 - RNA, 22 nt, Human
cugucagaggcucucuguugcc

SEQ ID NO: 696370 - RNA, 22 nt, Human
ggguccaggcacuaugcuaagu

SEQ ID NO: 696371 - RNA, 22 nt, Human
ccaguggccaugcacgagcagc

SEQ ID NO: 696372 - RNA, 22 nt, Human
ucugcauuacaugccauagaca

SEQ ID NO: 696373 - RNA, 22 nt, Human
cuauuuucugucucuauagagu

SEQ ID NO: 696374 - RNA, 22 nt, Human
ucauaaaaauagacucuaaagu

SEQ ID NO: 696375 - RNA, 22 nt, Human
aaagucaucuguccuaggcucu

SEQ ID NO: 696376 - RNA, 22 nt, Human
cuuccuggaugagcaggcugau

SEQ ID NO: 696377 - RNA, 22 nt, Human
cuuuacaaccuaaguugaagcu

SEQ ID NO: 696378 - RNA, 23 nt, Human
gggugggccaaauuagguagccu

SEQ ID NO: 696379 - RNA, 22 nt, Human
auuucccuccagggaaagcuua

SEQ ID NO: 696380 - RNA, 22 nt, Human
acaggcagugggccagauuugu

SEQ ID NO: 696381 - RNA, 22 nt, Human
ggaggagcacuugacggggucu

SEQ ID NO: 696382 - RNA, 22 nt, Human
aacaggaaugaggagaaaaggu

SEQ ID NO: 696383 - RNA, 22 nt, Human
auucucucauuuaucuguccua

SEQ ID NO: 696384 - RNA, 22 nt, Human
augauacaucuuguuuauuuca

SEQ ID NO: 696385 - RNA, 22 nt, Human
gagcagcuuaugucaagccaga

SEQ ID NO: 696386 - RNA, 22 nt, Human
gggagucaggcucccucagaga

SEQ ID NO: 696387 - RNA, 22 nt, Human
gagcuguccgccccugggccga

SEQ ID NO: 696388 - RNA, 22 nt, Human
agaccccauaccucagcaggua

SEQ ID NO: 696389 - RNA, 22 nt, Human
ucagagagccucaggcacugcc

SEQ ID NO: 696390 - RNA, 22 nt, Human
ggucuggccaauagacagcccc

SEQ ID NO: 696391 - RNA, 22 nt, Human
uggcucagcugacucggcuucu

SEQ ID NO: 696392 - RNA, 22 nt, Human
gcugucacaucaaggcacuaaa

SEQ ID NO: 696393 - RNA, 19 nt, Human
gagguuucugaagugggcu

SEQ ID NO: 696394 - RNA, 22 nt, Human
guugugauuguagcuaaacuag

SEQ ID NO: 696395 - RNA, 22 nt, Human
cacacugucagguaaauaacac

SEQ ID NO: 696396 - RNA, 22 nt, Human
cugugccuucugccuggaacau

SEQ ID NO: 696397 - RNA, 22 nt, Human
uggaaggcugagaguccugggg

SEQ ID NO: 696398 - RNA, 22 nt, Human
uuguacaaauaggaaccucuga

SEQ ID NO: 696399 - RNA, 22 nt, Human
uaggaaauauugauuucaguca

SEQ ID NO: 696400 - RNA, 22 nt, Human
ggaguggugucacugagaggaa

SEQ ID NO: 696401 - RNA, 22 nt, Human
agucacagaaacccaggugugg

SEQ ID NO: 696402 - RNA, 22 nt, Human
ucuuuuauagugaauuuucuug

SEQ ID NO: 696403 - RNA, 22 nt, Human
ucugagaaugguggauguggug

SEQ ID NO: 696404 - RNA, 17 nt, Human
ggcugcaguccaggagg

SEQ ID NO: 696405 - RNA, 22 nt, Human
ggccaugcuguugccugcuggu

SEQ ID NO: 696406 - RNA, 18 nt, Human
ucugucuguguugucuuu

SEQ ID NO: 696407 - RNA, 22 nt, Human
caggaaagguagucacaaugua

SEQ ID NO: 696408 - RNA, 22 nt, Human
auuaauuuuaccuuuguaaaca

SEQ ID NO: 696409 - RNA, 22 nt, Human
cagaugaacuaggcugcacuug

SEQ ID NO: 696410 - RNA, 22 nt, Human
guaacuuuggauuuaggguacc

SEQ ID NO: 696411 - RNA, 22 nt, Human
ucucacaagcucaaggauuagu

SEQ ID NO: 696412 - RNA, 22 nt, Human
aucuggcugacuuugugggaca

SEQ ID NO: 696413 - RNA, 22 nt, Human
uuacacaaaguuagcucuugca

SEQ ID NO: 696414 - RNA, 22 nt, Human
gccgaggcucugcccagcugcu

SEQ ID NO: 696415 - RNA, 22 nt, Human
uccugagauaaaucucauguga

SEQ ID NO: 696416 - RNA, 19 nt, Human
aaguguguugagccaggau

SEQ ID NO: 696417 - RNA, 23 nt, Human
ccuugucuggcuggcuggacuuu

SEQ ID NO: 696418 - RNA, 22 nt, Human
aaggcuggguuugggaugugau

SEQ ID NO: 696419 - RNA, 22 nt, Human
cuggagcuaauaauccaucuga

SEQ ID NO: 696420 - RNA, 22 nt, Human
cuuucauuugauaagaaugcca

SEQ ID NO: 696421 - RNA, 22 nt, Human
caguuucuucaucaguuaagca

SEQ ID NO: 696422 - RNA, 22 nt, Human
aggcuuggagguucuguagcca

SEQ ID NO: 696423 - RNA, 22 nt, Human
cacagaaaaaggcuugaaaauc

SEQ ID NO: 696424 - RNA, 22 nt, Human
uucuuuucggccugugagaagg

SEQ ID NO: 696425 - RNA, 20 nt, Human
aaugucuugagacauuucag

SEQ ID NO: 696426 - RNA, 22 nt, Human
ucaauuaagaggcuaaguuacu

SEQ ID NO: 696427 - RNA, 17 nt, Human
ucugugauaguguagau

SEQ ID NO: 696428 - RNA, 22 nt, Human
ugagugugaggugggagcuugg

SEQ ID NO: 696429 - RNA, 22 nt, Human
agccacaggaaacagagacagc

SEQ ID NO: 696430 - RNA, 22 nt, Human
auucuucuaauaugaucguguu

SEQ ID NO: 696431 - RNA, 22 nt, Human
aggccaaguagccgcuguccua

SEQ ID NO: 696432 - RNA, 19 nt, Human
acuuguuuuggaggugaug

SEQ ID NO: 696433 - RNA, 22 nt, Human
aacuuuuguccgaucuccugga

SEQ ID NO: 696434 - RNA, 22 nt, Human
uuccacugaaggaucuagggaa

SEQ ID NO: 696435 - RNA, 23 nt, Human
agggguggucaguacccgcagug

SEQ ID NO: 696436 - RNA, 23 nt, Human
aacuuuacuauuuugaauaaugc

SEQ ID NO: 696437 - RNA, 20 nt, Human
uuuaucugugggaguggaga

SEQ ID NO: 696438 - RNA, 22 nt, Human
uucuggaaguggaauuuuugua

SEQ ID NO: 696439 - RNA, 22 nt, Human
ucucacaggugcacguggcugu

SEQ ID NO: 696440 - RNA, 22 nt, Human
uaacagcacuggcaggcacugu

SEQ ID NO: 696441 - RNA, 22 nt, Human
uguaaaguaucugugagcucuc

SEQ ID NO: 696442 - RNA, 18 nt, Human
ugaggcagucagugaugg

SEQ ID NO: 696443 - RNA, 20 nt, Human
guuuuucuugggcgagcuau

SEQ ID NO: 696444 - RNA, 22 nt, Human
cuuccugagcaaggaacuauag

SEQ ID NO: 696445 - RNA, 22 nt, Human
acuguacauguaaacauuguca

SEQ ID NO: 696446 - RNA, 22 nt, Human
uuagauaaauuaagacuuuaca

SEQ ID NO: 696447 - RNA, 22 nt, Human
uggcccaggugcacccagaggc

SEQ ID NO: 696448 - RNA, 21 nt, Human
uccagggaauuucaacuuuua

SEQ ID NO: 696449 - RNA, 18 nt, Human
cagaugagaugcaaucuc

SEQ ID NO: 696450 - RNA, 22 nt, Human
ucuucuuugaaucauagugacc

SEQ ID NO: 696451 - RNA, 22 nt, Human
uguacagcugccuuuuuuacuu

SEQ ID NO: 696452 - RNA, 22 nt, Human
acuuaaagaggcuacuuuuggu

SEQ ID NO: 696453 - RNA, 22 nt, Human
guuuacuuagaugcucaugcag

SEQ ID NO: 696454 - RNA, 21 nt, Human
cugcaucugagucauuaugcc

SEQ ID NO: 696455 - RNA, 22 nt, Human
ccugccaugccagcaugcccgu

SEQ ID NO: 696456 - RNA, 22 nt, Human
cugcccuggcagccuaccaugg

SEQ ID NO: 696457 - RNA, 22 nt, Human
gggguggccuguaggcagcaug

SEQ ID NO: 696458 - RNA, 21 nt, Human
cuuuuacauucagucaugaug

SEQ ID NO: 696459 - RNA, 22 nt, Human
ugcccaggcuggagugcagagg

SEQ ID NO: 696460 - RNA, 22 nt, Human
ucugccuggagaguucuucucu

SEQ ID NO: 696461 - RNA, 22 nt, Human
uuuucauguuccuuguuaagug

SEQ ID NO: 696462 - RNA, 22 nt, Human
agaaaguuuauuccuaucuagc

SEQ ID NO: 696463 - RNA, 22 nt, Human
cucugucuaucccauucugugc

SEQ ID NO: 696464 - RNA, 22 nt, Human
acagcagacagucggcuuccug

SEQ ID NO: 696465 - RNA, 22 nt, Human
caucuuuucagaagccauucug

SEQ ID NO: 696466 - RNA, 22 nt, Human
ugugcaugucugggccuguaag

SEQ ID NO: 696467 - RNA, 22 nt, Human
uaacacugauuuguucucaggg

SEQ ID NO: 696468 - RNA, 22 nt, Human
ucacccagacagcuugcacuga

SEQ ID NO: 696469 - RNA, 21 nt, Human
acacugacaaccauccacgag

SEQ ID NO: 696470 - RNA, 22 nt, Human
aagugugguuuaggcaucuuuu

SEQ ID NO: 696471 - RNA, 22 nt, Human
aguuuagaguucaaauuaguuc

SEQ ID NO: 696472 - RNA, 22 nt, Human
agguagagcuccaguagaaaau

SEQ ID NO: 696473 - RNA, 22 nt, Human
auccucacaauaaaaucagccu

SEQ ID NO: 696474 - RNA, 22 nt, Human
ucuucacaugaccuucaugucu

SEQ ID NO: 696475 - RNA, 22 nt, Human
gaaggcacccuccaucacucac

SEQ ID NO: 696476 - RNA, 22 nt, Human
caguccuucuccauuaaggcuc

SEQ ID NO: 696477 - RNA, 22 nt, Human
cucuggcuccauuucccuaugu

SEQ ID NO: 696478 - RNA, 22 nt, Human
uuccaguuaaggaagcuauucu

SEQ ID NO: 696479 - RNA, 22 nt, Human
augcauugcugcuuucaaaaca

SEQ ID NO: 696480 - RNA, 19 nt, Human
ccagcccauaguccaucac

SEQ ID NO: 696481 - RNA, 22 nt, Human
caggcuggacauuagauacaua

SEQ ID NO: 696482 - RNA, 22 nt, Human
ggcaggaggugaguggcgggug

SEQ ID NO: 696483 - RNA, 22 nt, Human
aagcaggaaggagcccagggca

SEQ ID NO: 696484 - RNA, 22 nt, Human
uugggaaagaaugagaagguga

SEQ ID NO: 696485 - RNA, 22 nt, Human
agcagaagaggucuuguugcug

SEQ ID NO: 696486 - RNA, 22 nt, Human
gaaaaggauugguaaaauaucu

SEQ ID NO: 696487 - RNA, 21 nt, Human
uucaucagccagaaaucaagc

SEQ ID NO: 696488 - RNA, 22 nt, Human
auggcugcccacguuggugcuu

SEQ ID NO: 696489 - RNA, 22 nt, Human
ggacacagauaaucacacagau

SEQ ID NO: 696490 - RNA, 23 nt, Human
gcucuuuguucauguggaugccu

SEQ ID NO: 696491 - RNA, 22 nt, Human
auguuuuucauaccaguguugg

SEQ ID NO: 696492 - RNA, 19 nt, Human
cucugggcugcaucuuggu

SEQ ID NO: 696493 - RNA, 22 nt, Human
ugacagagacagauugaagcuu

SEQ ID NO: 696494 - RNA, 22 nt, Human
aagacgcacccuuugagggcac

SEQ ID NO: 696495 - RNA, 22 nt, Human
ugccuucauccauguuauagug

SEQ ID NO: 696496 - RNA, 22 nt, Human
gaggcagagaccuucaggaccu

SEQ ID NO: 696497 - RNA, 22 nt, Human
ggggcugauggaacucaggccu

SEQ ID NO: 696498 - RNA, 22 nt, Human
aucaguuuggaacauucaggcc

SEQ ID NO: 696499 - RNA, 22 nt, Human
gacuguggauagaacacugcag

SEQ ID NO: 696500 - RNA, 22 nt, Human
gcauggcagugaggauggugcu

SEQ ID NO: 696501 - RNA, 22 nt, Human
uuccagaaaguucuggaacugg

SEQ ID NO: 696502 - RNA, 23 nt, Human
ugauuuccagugagucaguggga

SEQ ID NO: 696503 - RNA, 22 nt, Human
aggcacuuuuugcauuuuagaa

SEQ ID NO: 696504 - RNA, 22 nt, Human
uuaaagcaccuccuuggaugug

SEQ ID NO: 696505 - RNA, 22 nt, Human
ucagaggaagcaucaaguucuc

SEQ ID NO: 696506 - RNA, 22 nt, Human
aguguccuccucugggagccag

SEQ ID NO: 696507 - RNA, 22 nt, Human
ugcaggugauucugaugcaguu

SEQ ID NO: 696508 - RNA, 22 nt, Human
ccugggcucugaggagggaguc

SEQ ID NO: 696509 - RNA, 22 nt, Human
aaaugcuugcucuugauuauuu

SEQ ID NO: 696510 - RNA, 22 nt, Human
uccagagcuguccuacugugag

SEQ ID NO: 696511 - RNA, 22 nt, Human
uggagagucucugagccagggc

SEQ ID NO: 696512 - RNA, 17 nt, Human
ccaggagagaugcuugu

SEQ ID NO: 696513 - RNA, 22 nt, Human
ugauugaaguguucuguuccag

SEQ ID NO: 696514 - RNA, 23 nt, Human
agaggccaacuucuugccccucc

SEQ ID NO: 696515 - RNA, 22 nt, Human
uuggcuugaugacuggcagugu

SEQ ID NO: 696516 - RNA, 22 nt, Human
aguugcugggaaagauuucagu

SEQ ID NO: 696517 - RNA, 19 nt, Human
uucagcaggcugaagcuuc

SEQ ID NO: 696518 - RNA, 22 nt, Human
ccucugccuuuagugaaaguug

SEQ ID NO: 696519 - RNA, 22 nt, Human
ugcuuugcucucacuguaaggu

SEQ ID NO: 696520 - RNA, 22 nt, Human
gccuugaucugcuguguuugag

SEQ ID NO: 696521 - RNA, 22 nt, Human
cuucuuggaagucguccuucca

SEQ ID NO: 696522 - RNA, 22 nt, Human
ugauuucccuguagccucugaa

SEQ ID NO: 696523 - RNA, 22 nt, Human
cugcugccuaguccaagacgug

SEQ ID NO: 696524 - RNA, 22 nt, Human
cagagccaucaugauauggagu

SEQ ID NO: 696525 - RNA, 22 nt, Human
aagggcuguuauguuuuuauac

SEQ ID NO: 696526 - RNA, 18 nt, Human
gacacaggagagaguccc

SEQ ID NO: 696527 - RNA, 22 nt, Human
ucacuguguccuuucugcguag

SEQ ID NO: 696528 - RNA, 22 nt, Human
gaggccagaaugagcugaaugc

SEQ ID NO: 696529 - RNA, 22 nt, Human
cccucugacugggccaguucug

SEQ ID NO: 696530 - RNA, 23 nt, Human
uggcaggaaaugagaauguuccu

SEQ ID NO: 696531 - RNA, 20 nt, Human
ugcugcuuugccacuaguug

SEQ ID NO: 696532 - RNA, 22 nt, Human
agcagcagcucuguugcccuac

SEQ ID NO: 696533 - RNA, 22 nt, Human
aagggcucacccaacucacuuc

SEQ ID NO: 696534 - RNA, 22 nt, Human
guuaagaagcuagagaugaaca

SEQ ID NO: 696535 - RNA, 22 nt, Human
aacuauaaugggguuaggaaau

SEQ ID NO: 696536 - RNA, 22 nt, Human
agcugcaguaugaggcuggugg

SEQ ID NO: 696537 - RNA, 22 nt, Human
cacauuuaucuguucuuucuag

SEQ ID NO: 696538 - RNA, 17 nt, Human
uucaaagcuuaucaagg

SEQ ID NO: 696539 - RNA, 22 nt, Human
aguguuuauggaacccuggugg

SEQ ID NO: 696540 - RNA, 19 nt, Human
ucuuuggcuucuggaucag

SEQ ID NO: 696541 - RNA, 23 nt, Human
caucagccucagucuguggaccc

SEQ ID NO: 696542 - RNA, 22 nt, Human
uuagcauuucuggaaucacaag

SEQ ID NO: 696543 - RNA, 22 nt, Human
ggucugagcuugagcccaugcu

SEQ ID NO: 696544 - RNA, 22 nt, Human
cucagucugucuugucuguguu

SEQ ID NO: 696545 - RNA, 22 nt, Human
agcaaauauuuuguugaagugc

SEQ ID NO: 696546 - RNA, 22 nt, Human
uggaauguuuuccuaaaucaga

SEQ ID NO: 696547 - RNA, 22 nt, Human
gacuggccuggggcugggcaca

SEQ ID NO: 696548 - RNA, 22 nt, Human
uauuuauucauucagcaagcau

SEQ ID NO: 696549 - RNA, 22 nt, Human
aagcagcagccaucccccaagg

SEQ ID NO: 696550 - RNA, 22 nt, Human
gcugcuguccuuagggaguucu

SEQ ID NO: 696551 - RNA, 22 nt, Human
uugaaggaggcuccuuuuuaaa

SEQ ID NO: 696552 - RNA, 22 nt, Human
ugaguccugcucugggcagggu

SEQ ID NO: 696553 - RNA, 20 nt, Human
auguauauuacuggcuguga

SEQ ID NO: 696554 - RNA, 22 nt, Human
gggggaaguaauuauaaaccaa

SEQ ID NO: 696555 - RNA, 22 nt, Human
gcagggcagggcaagaacuggg

SEQ ID NO: 696556 - RNA, 22 nt, Human
guucucucagcgauagugaugg

SEQ ID NO: 696557 - RNA, 22 nt, Human
uuccugugauauuagccacugu

SEQ ID NO: 696558 - RNA, 22 nt, Human
ggagccggagggccacuggcag

SEQ ID NO: 696559 - RNA, 21 nt, Human
cacuguauagcaggagaaaac

SEQ ID NO: 696560 - RNA, 22 nt, Human
accucugccaagaugugcuccc

SEQ ID NO: 696561 - RNA, 22 nt, Human
augucacagucugacucaguga

SEQ ID NO: 696562 - RNA, 22 nt, Human
gcugacugcucagggccagcug

SEQ ID NO: 696563 - RNA, 22 nt, Human
gggagcugagaaacaacauucu

SEQ ID NO: 696564 - RNA, 22 nt, Human
aaggcucccucuucucgagugu

SEQ ID NO: 696565 - RNA, 16 nt, Human
uacuguggagcaaggc

SEQ ID NO: 696566 - RNA, 22 nt, Human
acaguaaaucaacagaauaucu

SEQ ID NO: 696567 - RNA, 22 nt, Human
caguccugagccaaucaugaug

SEQ ID NO: 696568 - RNA, 22 nt, Human
agcccuucaagagcucuguccu

SEQ ID NO: 696569 - RNA, 22 nt, Human
agcuuucuucuaguuguacagu

SEQ ID NO: 696570 - RNA, 22 nt, Human
cagagcaugaauaaaaguuaca

SEQ ID NO: 696571 - RNA, 22 nt, Human
agucucuuuugcgaagaguguu

SEQ ID NO: 696572 - RNA, 22 nt, Human
uaaaguguggauaugauuagua

SEQ ID NO: 696573 - RNA, 22 nt, Human
aaauagcuacaugaucucuagg

SEQ ID NO: 696574 - RNA, 22 nt, Human
cuugccuucuguuccuauagaa

SEQ ID NO: 696575 - RNA, 17 nt, Human
aggcaggagauuggaga

SEQ ID NO: 696576 - RNA, 22 nt, Human
aaauucucuucagaggaaccag

SEQ ID NO: 696577 - RNA, 22 nt, Human
ugugacuucuuuuugaguucaa

SEQ ID NO: 696578 - RNA, 22 nt, Human
augacaaccugugagcugguau

SEQ ID NO: 696579 - RNA, 22 nt, Human
aaguacauggaggauagcugcu

SEQ ID NO: 696580 - RNA, 22 nt, Human
uagcacacuaaagauauuaaca

SEQ ID NO: 696581 - RNA, 22 nt, Human
cuaacuuuuugauucuugggga

SEQ ID NO: 696582 - RNA, 22 nt, Human
accuuuucaucugaaacuuuua

SEQ ID NO: 696583 - RNA, 22 nt, Human
gcugcccuagaaguacagagag

SEQ ID NO: 696584 - RNA, 22 nt, Human
acuggcuuugccucugccucuc

SEQ ID NO: 696585 - RNA, 22 nt, Human
ccugaguggagggauucugcag

SEQ ID NO: 696586 - RNA, 22 nt, Human
gcuuuacaugauuucucacccu

SEQ ID NO: 696587 - RNA, 22 nt, Human
aaucuaacuucauagcugauuu

SEQ ID NO: 696588 - RNA, 22 nt, Human
ccuccuggagcauuggugagga

SEQ ID NO: 696589 - RNA, 22 nt, Human
agggcugcccagugugagagcu

SEQ ID NO: 696590 - RNA, 22 nt, Human
cccuggugcccugggucagccu

SEQ ID NO: 696591 - RNA, 22 nt, Human
uguguguuaucuuaguucaucu

SEQ ID NO: 696592 - RNA, 22 nt, Human
agagggcugcugcacagugcuc

SEQ ID NO: 696593 - RNA, 22 nt, Human
augaaugagaaagcugaaaucu

SEQ ID NO: 696594 - RNA, 22 nt, Human
uuguggcucaucuucagcuccc

SEQ ID NO: 696595 - RNA, 22 nt, Human
cacauucauggaguuugccugu

SEQ ID NO: 696596 - RNA, 22 nt, Human
cagagccagcaguggggacagg

SEQ ID NO: 696597 - RNA, 22 nt, Human
ggcugguguuacagucggcagc

SEQ ID NO: 696598 - RNA, 22 nt, Human
caguuuagcauuuaccgugaug

SEQ ID NO: 696599 - RNA, 22 nt, Human
ugaaaugaucaguuugguuacu

SEQ ID NO: 696600 - RNA, 21 nt, Human
aaauccaaacacuaguccaca

SEQ ID NO: 696601 - RNA, 22 nt, Human
augcuugggacucccuguagca

SEQ ID NO: 696602 - RNA, 22 nt, Human
uacuguauuugauaagugaagu

SEQ ID NO: 696603 - RNA, 22 nt, Human
uguaugcuugaguguguauacu

SEQ ID NO: 696604 - RNA, 22 nt, Human
uuacacucugguugugggccuu

SEQ ID NO: 696605 - RNA, 22 nt, Human
ugauauggaaggaagauguaca

SEQ ID NO: 696606 - RNA, 22 nt, Human
uucacagaugagaaaauugagg

SEQ ID NO: 696607 - RNA, 22 nt, Human
cucagcccagcucaggucuuuc

SEQ ID NO: 696608 - RNA, 22 nt, Human
gggagagaaauuauagcaauga

SEQ ID NO: 696609 - RNA, 22 nt, Human
guggggguuucauuaagacaau

SEQ ID NO: 696610 - RNA, 21 nt, Human
agaggcgggguuuuggaggcc

SEQ ID NO: 696611 - RNA, 22 nt, Human
cucuguuucucagccuauuucc

SEQ ID NO: 696612 - RNA, 22 nt, Human
agauuuagcugugaacagcuug

SEQ ID NO: 696613 - RNA, 18 nt, Human
gcccugguggagcuggug

SEQ ID NO: 696614 - RNA, 22 nt, Human
cugggucugucacuagauaaau

SEQ ID NO: 696615 - RNA, 22 nt, Human
gagacaguguccauccaggggc

SEQ ID NO: 696616 - RNA, 22 nt, Human
ggcacugcccacccucacaggg

SEQ ID NO: 696617 - RNA, 22 nt, Human
acuggccuaucagcaugagucu

SEQ ID NO: 696618 - RNA, 22 nt, Human
aggcaggcaaccaccugggaag

SEQ ID NO: 696619 - RNA, 20 nt, Human
uguucacaguaguugcugcu

SEQ ID NO: 696620 - RNA, 22 nt, Human
aucguaaagcccuauggcuuca

SEQ ID NO: 696621 - RNA, 22 nt, Human
ccagcugcauccuauucacugc

SEQ ID NO: 696622 - RNA, 22 nt, Human
guggcuucaucaacugugcuua

SEQ ID NO: 696623 - RNA, 22 nt, Human
caauaauugcuuuccagaguua

SEQ ID NO: 696624 - RNA, 22 nt, Human
caaccucuguaauguucuagga

SEQ ID NO: 696625 - RNA, 22 nt, Human
ugaaaccucaaccaaagguuac

SEQ ID NO: 696626 - RNA, 22 nt, Human
ucacauuguaggucauuugcaa

SEQ ID NO: 696627 - RNA, 22 nt, Human
cauuugcucugugucaguggca

SEQ ID NO: 696628 - RNA, 22 nt, Human
uucugaagcucccuuuuguagu

SEQ ID NO: 696629 - RNA, 22 nt, Human
uauacaggaacuguuggcuccc

SEQ ID NO: 696630 - RNA, 22 nt, Human
ggcugcaggcuucccuccagca

SEQ ID NO: 696631 - RNA, 22 nt, Human
gcagugggagcuuaggcagugc

SEQ ID NO: 696632 - RNA, 22 nt, Human
uccuggcuccacugagcaggcc

SEQ ID NO: 696633 - RNA, 22 nt, Human
acugaaagauaaaucaguuagc

SEQ ID NO: 696634 - RNA, 22 nt, Human
ugaggaugguuaaagaacauug

SEQ ID NO: 696635 - RNA, 22 nt, Human
uuauuuaauuuucucacucaga

SEQ ID NO: 696636 - RNA, 22 nt, Human
ucauuguauacuuuauuuauga

SEQ ID NO: 696637 - RNA, 22 nt, Human
gauuucagccccgcucccagcu

SEQ ID NO: 696638 - RNA, 22 nt, Human
gcuuggcuggaaauagguugag

SEQ ID NO: 696639 - RNA, 22 nt, Human
caguccucugcaacaccccuuc

SEQ ID NO: 696640 - RNA, 22 nt, Human
aaugauugcaaacauugagaac

SEQ ID NO: 696641 - RNA, 22 nt, Human
guuucacagucugcagaauuuu

SEQ ID NO: 696642 - RNA, 22 nt, Human
augucugcguuauaucaauauc

SEQ ID NO: 696643 - RNA, 22 nt, Human
gcucuccacugaccacggggca

SEQ ID NO: 696644 - RNA, 22 nt, Human
ucccagcucacauaugguaacu

SEQ ID NO: 696645 - RNA, 22 nt, Human
cugggcuuuugagucacaaggg

SEQ ID NO: 696646 - RNA, 22 nt, Human
uugcugccuuccgaauccucuc

SEQ ID NO: 696647 - RNA, 22 nt, Human
cugggccugccaccaucuuagg

SEQ ID NO: 696648 - RNA, 22 nt, Human
ggagcacuauaauagagauuuu

SEQ ID NO: 696649 - RNA, 18 nt, Human
cguuuuuccgggauugca

SEQ ID NO: 696650 - RNA, 21 nt, Human
ugagcaggugcugcuuuuaug

SEQ ID NO: 696651 - RNA, 22 nt, Human
gugcccaggugucccugagaag

SEQ ID NO: 696652 - RNA, 22 nt, Human
uaaauucugaucaaguuccuuc

SEQ ID NO: 696653 - RNA, 22 nt, Human
augucuguggcaauuguugaug

SEQ ID NO: 696654 - RNA, 22 nt, Human
accuuuauaugaaagaugacau

SEQ ID NO: 696655 - RNA, 22 nt, Human
gaagcacauuagaugugucuuc

SEQ ID NO: 696656 - RNA, 22 nt, Human
uucauauauaugcacuacguac

SEQ ID NO: 696657 - RNA, 22 nt, Human
auaaauagugaagggagccggu

SEQ ID NO: 696658 - RNA, 20 nt, Human
ucuggacugucagacaggga

SEQ ID NO: 696659 - RNA, 22 nt, Human
uuauuagguuauucucuguacu

SEQ ID NO: 696660 - RNA, 22 nt, Human
caugugguauugugagauccac

SEQ ID NO: 696661 - RNA, 22 nt, Human
auacugaauuagguaaagcaua

SEQ ID NO: 696662 - RNA, 20 nt, Human
cuugcccagggucuccugcc

SEQ ID NO: 696663 - RNA, 22 nt, Human
ucugccagcaccaugauccuuc

SEQ ID NO: 696664 - RNA, 22 nt, Human
agagcugaggauccagcugagc

SEQ ID NO: 696665 - RNA, 22 nt, Human
uuucauaaucugucaagugggg

SEQ ID NO: 696666 - RNA, 22 nt, Human
agcagagacaugaaauaugcuu

SEQ ID NO: 696667 - RNA, 22 nt, Human
cucaggauuuaaaggggcacuc

SEQ ID NO: 696668 - RNA, 22 nt, Human
cuaguguacaagugguggagau

SEQ ID NO: 696669 - RNA, 22 nt, Human
auaacuucagggcugugacaga

SEQ ID NO: 696670 - RNA, 22 nt, Human
cuugccaguguugcagaagcuc

SEQ ID NO: 696671 - RNA, 22 nt, Human
cagcaugauuggugucugguga

SEQ ID NO: 696672 - RNA, 22 nt, Human
ugacacagaaauuaagcuguca

SEQ ID NO: 696673 - RNA, 22 nt, Human
uccugcuggaaguagggaauga

SEQ ID NO: 696674 - RNA, 22 nt, Human
agggcacaucugcugggaaugg

SEQ ID NO: 696675 - RNA, 22 nt, Human
agcacaggugaaacagucaggu

SEQ ID NO: 696676 - RNA, 22 nt, Human
gucuaaaccucaaaucaguguc

SEQ ID NO: 696677 - RNA, 22 nt, Human
aauuaauucaguuuuuaaggga

SEQ ID NO: 696678 - RNA, 22 nt, Human
uucuccagaccacugccucugu

SEQ ID NO: 696679 - RNA, 22 nt, Human
aggggaggagcuuuucuugccu

SEQ ID NO: 696680 - RNA, 22 nt, Human
cuucacuucacagaugccaaga

SEQ ID NO: 696681 - RNA, 22 nt, Human
gacacagaaugggugcucagua

SEQ ID NO: 696682 - RNA, 22 nt, Human
ugcugguggagaaaguggaggu

SEQ ID NO: 696683 - RNA, 22 nt, Human
auuuccuucaguguuuaauacu

SEQ ID NO: 696684 - RNA, 22 nt, Human
ggugaagggugucauggcauuu

SEQ ID NO: 696685 - RNA, 22 nt, Human
uauacacauguguguauucaua

SEQ ID NO: 696686 - RNA, 22 nt, Human
aaugacaaauauggaagccuga

SEQ ID NO: 696687 - RNA, 20 nt, Human
uucugcuuuugcuuagggac

SEQ ID NO: 696688 - RNA, 22 nt, Human
ugcuuauucuuuccacaauuca

SEQ ID NO: 696689 - RNA, 22 nt, Human
uagagguauuuuugauggucau

SEQ ID NO: 696690 - RNA, 22 nt, Human
auggcccaggcaggcugguacu

SEQ ID NO: 696691 - RNA, 22 nt, Human
ugaaggaaagagggaacauccc

SEQ ID NO: 696692 - RNA, 22 nt, Human
agacaauggagggaaauacuuc

SEQ ID NO: 696693 - RNA, 23 nt, Human
agggcccaagccuggacagcagg

SEQ ID NO: 696694 - RNA, 19 nt, Human
uuacacuccugggcagugg

SEQ ID NO: 696695 - RNA, 22 nt, Human
gaauuuaaggaccaagcauuuu

SEQ ID NO: 696696 - RNA, 22 nt, Human
uccagagccugcgcacuggcug

SEQ ID NO: 696697 - RNA, 22 nt, Human
caaguuuuagaaauaucuggau

SEQ ID NO: 696698 - RNA, 22 nt, Human
auuucucaguguacauuauguu

SEQ ID NO: 696699 - RNA, 20 nt, Human
ucagagaagggacugagauu

SEQ ID NO: 696700 - RNA, 22 nt, Human
uuggcccuggcacacccccacg

SEQ ID NO: 696701 - RNA, 17 nt, Human
auggcuuugucacacag

SEQ ID NO: 696702 - RNA, 22 nt, Human
cacgggagacgugaucuuggac

SEQ ID NO: 696703 - RNA, 22 nt, Human
ucaucaguuuagaaaaaauaug

SEQ ID NO: 696704 - RNA, 22 nt, Human
ggcagccaugugggcagcgagu

SEQ ID NO: 696705 - RNA, 21 nt, Human
cucagacagggaggcucuggg

SEQ ID NO: 696706 - RNA, 22 nt, Human
aaaaguaauugcgguuuuugcc

SEQ ID NO: 696707 - RNA, 22 nt, Human
aggcuucauauuuaggcauaug

SEQ ID NO: 696708 - RNA, 22 nt, Human
ggagcugaggcugaggccucac

SEQ ID NO: 696709 - RNA, 22 nt, Human
gucuagaauaucuagaaagauc

SEQ ID NO: 696710 - RNA, 22 nt, Human
uuaggaauuuaucacagacugg

SEQ ID NO: 696711 - RNA, 23 nt, Human
gccucuggagccccagugcucag

SEQ ID NO: 696712 - RNA, 22 nt, Human
ugaggcuuggaggcuccagugg

SEQ ID NO: 696713 - RNA, 22 nt, Human
ccaggccagccuggagcauggc

SEQ ID NO: 696714 - RNA, 21 nt, Human
gcaaggcuuuuguguuuccca

SEQ ID NO: 696715 - RNA, 22 nt, Human
aggcauaggacaucuaugucau

SEQ ID NO: 696716 - RNA, 22 nt, Human
ccacaugaaauugcuuauauuu

SEQ ID NO: 696717 - RNA, 22 nt, Human
ccugccagauccccugagcuga

SEQ ID NO: 696718 - RNA, 22 nt, Human
aggcuggcggugacugcucuga

SEQ ID NO: 696719 - RNA, 22 nt, Human
ugggagcaggaagcaggaagua

SEQ ID NO: 696720 - RNA, 22 nt, Human
cauugcuugauagcugaaaauu

SEQ ID NO: 696721 - RNA, 22 nt, Human
ggucugaguagagggcuggcga

SEQ ID NO: 696722 - RNA, 22 nt, Human
ccauguggugggaaggagaaug

SEQ ID NO: 696723 - RNA, 19 nt, Human
acccaggguugauguccag

SEQ ID NO: 696724 - RNA, 22 nt, Human
agcugcacugugaaguucauag

SEQ ID NO: 696725 - RNA, 22 nt, Human
gucacacucagaaugacuagag

SEQ ID NO: 696726 - RNA, 22 nt, Human
agcuggguggagggcccacggu

SEQ ID NO: 696727 - RNA, 22 nt, Human
cagcccuggugccaagguuccc

SEQ ID NO: 696728 - RNA, 22 nt, Human
gcucuauguugaccuucagugg

SEQ ID NO: 696729 - RNA, 22 nt, Human
ucugggaagauguuucaaaggu

SEQ ID NO: 696730 - RNA, 22 nt, Human
gagugggggguccgucucagug

SEQ ID NO: 696731 - RNA, 22 nt, Human
ggcucugggguuggcccaucuc

SEQ ID NO: 696732 - RNA, 22 nt, Human
guuuaauaauguugaauuacua

SEQ ID NO: 696733 - RNA, 22 nt, Human
uacauugacuuggauuguuaga

SEQ ID NO: 696734 - RNA, 22 nt, Human
aaaauaucagcaaagggugaca

SEQ ID NO: 696735 - RNA, 22 nt, Human
guggcuucaccccaguugucuc

SEQ ID NO: 696736 - RNA, 22 nt, Human
caacuacauccacacuuuguua

SEQ ID NO: 696737 - RNA, 23 nt, Human
agccucuuuucuccugcccugca

SEQ ID NO: 696738 - RNA, 22 nt, Human
ugcugcugcuucuguacagccu

SEQ ID NO: 696739 - RNA, 22 nt, Human
cuuaaaaucuggcaguuagcua

SEQ ID NO: 696740 - RNA, 22 nt, Human
ccagccagaugauaagcucuau

SEQ ID NO: 696741 - RNA, 22 nt, Human
cuacagagaacucagcugcccu

SEQ ID NO: 696742 - RNA, 22 nt, Human
gccuccugaaaggaagagcucc

SEQ ID NO: 696743 - RNA, 22 nt, Human
gcaagcaggguuccuuagggca

SEQ ID NO: 696744 - RNA, 22 nt, Human
acauuuaggauguuuugagaga

SEQ ID NO: 696745 - RNA, 22 nt, Human
ugaugacaaacuuuccugaugc

SEQ ID NO: 696746 - RNA, 17 nt, Human
gagugcagacacaagca

SEQ ID NO: 696747 - RNA, 22 nt, Human
aaaacaguuuaggcaucacagu

SEQ ID NO: 696748 - RNA, 22 nt, Human
aaauugcauugagcugcuuauu

SEQ ID NO: 696749 - RNA, 22 nt, Human
uucugcuucacuggccuggagg

SEQ ID NO: 696750 - RNA, 22 nt, Human
caggaagaccagggcuguggcu

SEQ ID NO: 696751 - RNA, 22 nt, Human
caucuccaggaguucuacucau

SEQ ID NO: 696752 - RNA, 22 nt, Human
gggcuggcuaagacuuuucugu

SEQ ID NO: 696753 - RNA, 22 nt, Human
aagagcaggcugcuguggagua

SEQ ID NO: 696754 - RNA, 22 nt, Human
uggggaucauaaauugauggag

SEQ ID NO: 696755 - RNA, 22 nt, Human
acucuuggccacucuugguguc

SEQ ID NO: 696756 - RNA, 22 nt, Human
uucaaagauaauuaccaaacau

SEQ ID NO: 696757 - RNA, 22 nt, Human
gggcgcagccaauccuggcccu

SEQ ID NO: 696758 - RNA, 18 nt, Human
cacaggaaggggaauauc

SEQ ID NO: 696759 - RNA, 22 nt, Human
acaaugcugcagggaaauuagg

SEQ ID NO: 696760 - RNA, 22 nt, Human
uucagugugccuaagucaguug

SEQ ID NO: 696761 - RNA, 20 nt, Human
ggcagagggccugggagaag

SEQ ID NO: 696762 - RNA, 22 nt, Human
cccagccucagcuuuacuucca

SEQ ID NO: 696763 - RNA, 22 nt, Human
gggaguccaaauugguacaaua

SEQ ID NO: 696764 - RNA, 22 nt, Human
gucccauaaguagugcaacuug

SEQ ID NO: 696765 - RNA, 17 nt, Human
aguuaaggcucuuugcu

SEQ ID NO: 696766 - RNA, 22 nt, Human
ucugcugaacuugcugcccaga

SEQ ID NO: 696767 - RNA, 22 nt, Human
agaguguaccaaauauccuaca

SEQ ID NO: 696768 - RNA, 22 nt, Human
cagacaggcaggugagagcucc

SEQ ID NO: 696769 - RNA, 22 nt, Human
ugugauuacugaauagaaaaua

SEQ ID NO: 696770 - RNA, 22 nt, Human
uugcaggggagaggaacaaaca

SEQ ID NO: 696771 - RNA, 22 nt, Human
gcccagcugcacccuggugggu

SEQ ID NO: 696772 - RNA, 22 nt, Human
ugauuuccaauaaggagaaugu

SEQ ID NO: 696773 - RNA, 22 nt, Human
gaaggccacaagagaaguuaag

SEQ ID NO: 696774 - RNA, 22 nt, Human
cagaggugcauacaggucauua

SEQ ID NO: 696775 - RNA, 22 nt, Human
uauguguggcagcugggagugu

SEQ ID NO: 696776 - RNA, 22 nt, Human
cuaaaauuaccuaccaguuuag

SEQ ID NO: 696777 - RNA, 22 nt, Human
uuugagaaugguaaguggaucg

SEQ ID NO: 696778 - RNA, 22 nt, Human
ucugcuguacuuuuggucuguu

SEQ ID NO: 696779 - RNA, 22 nt, Human
gugagcuuugugguaaugaagu

SEQ ID NO: 696780 - RNA, 22 nt, Human
gggauggaggguagagcaagug

SEQ ID NO: 696781 - RNA, 22 nt, Human
ugaacuuucacaagaauaugcu

SEQ ID NO: 696782 - RNA, 22 nt, Human
uuuauuaaaacuguuggcucug

SEQ ID NO: 696783 - RNA, 22 nt, Human
aaguguuaaaagauuaaaugcu

SEQ ID NO: 696784 - RNA, 22 nt, Human
ugcugccagccaggccauggag

SEQ ID NO: 696785 - RNA, 23 nt, Human
cagcucagaguguguccuguuuc

SEQ ID NO: 696786 - RNA, 22 nt, Human
cugucugucaccaaaacagacu

SEQ ID NO: 696787 - RNA, 22 nt, Human
ugcugcugauggaugccuggac

SEQ ID NO: 696788 - RNA, 22 nt, Human
ggggaagaggcgugauggaucc

SEQ ID NO: 696789 - RNA, 23 nt, Human
gcagagcugcccuauugccuugg

SEQ ID NO: 696790 - RNA, 22 nt, Human
agggggcucagcaggcucugga

SEQ ID NO: 696791 - RNA, 22 nt, Human
aggcucagggacucccucccuc

SEQ ID NO: 696792 - RNA, 22 nt, Human
ucuuaacauauuauuuuagcac

SEQ ID NO: 696793 - RNA, 22 nt, Human
aaucgguugaacccaggaagug

SEQ ID NO: 696794 - RNA, 22 nt, Human
aacacuucccgaccauauggcu

SEQ ID NO: 696795 - RNA, 22 nt, Human
aaagguuugcauggaauuuacc

SEQ ID NO: 696796 - RNA, 22 nt, Human
uggcacccugaaguuggucacu

SEQ ID NO: 696797 - RNA, 22 nt, Human
ccuucaaucuuaagucagccca

SEQ ID NO: 696798 - RNA, 17 nt, Human
uugacuguuaauggguu

SEQ ID NO: 696799 - RNA, 23 nt, Human
ggcucugugcuaauugcugaaaa

SEQ ID NO: 696800 - RNA, 22 nt, Human
cuggguggaaagugcugagaau

SEQ ID NO: 696801 - RNA, 22 nt, Human
auuguacaugcagugagucauc

SEQ ID NO: 696802 - RNA, 22 nt, Human
uuggcuucuuuagucaguuugg

SEQ ID NO: 696803 - RNA, 22 nt, Human
agcugcucugauaaaccuacuu

SEQ ID NO: 696804 - RNA, 22 nt, Human
gcagcaagagguuucuguugac

SEQ ID NO: 696805 - RNA, 22 nt, Human
ucuuagaugaauaaaaaguuau

SEQ ID NO: 696806 - RNA, 22 nt, Human
acauggguuauugugagguuaa

SEQ ID NO: 696807 - RNA, 22 nt, Human
gcucugcugcuuacuagauggu

SEQ ID NO: 696808 - RNA, 22 nt, Human
gccacagucacugcugcagggg

SEQ ID NO: 696809 - RNA, 22 nt, Human
uguguuccugccuggcucuggu

SEQ ID NO: 696810 - RNA, 22 nt, Human
aaaguuguaauggaagaaaugc

SEQ ID NO: 696811 - RNA, 22 nt, Human
ccugugagucaaccccuccuug

SEQ ID NO: 696812 - RNA, 22 nt, Human
aggggccucagccuccugguca

SEQ ID NO: 696813 - RNA, 22 nt, Human
cagaggcucagauggcccuggc

SEQ ID NO: 696814 - RNA, 20 nt, Human
gcugaagauucccaugcaag

SEQ ID NO: 696815 - RNA, 22 nt, Human
aagagcuggauggaaucuggga

SEQ ID NO: 696816 - RNA, 22 nt, Human
gcaguguuucccagagauggaa

SEQ ID NO: 696817 - RNA, 21 nt, Human
uuguaaauggcuuuuuccuuc

SEQ ID NO: 696818 - RNA, 22 nt, Human
acauguuuugugccuugacuag

SEQ ID NO: 696819 - RNA, 22 nt, Human
uggggagguaacaauuucaggc

SEQ ID NO: 696820 - RNA, 22 nt, Human
ggagcuggucagccuugagcau

SEQ ID NO: 696821 - RNA, 21 nt, Human
gguuaaaagacacaucuguuu

SEQ ID NO: 696822 - RNA, 22 nt, Human
cuguccuguagcuccaucaguc

SEQ ID NO: 696823 - RNA, 22 nt, Human
uugcaggguccuguggcucucc

SEQ ID NO: 696824 - RNA, 22 nt, Human
guuuauuccagcaaucugcuua

SEQ ID NO: 696825 - RNA, 17 nt, Human
cauucuguaaucuuucu

SEQ ID NO: 696826 - RNA, 22 nt, Human
agacagcaggggagucugguuu

SEQ ID NO: 696827 - RNA, 22 nt, Human
cagcacaggcaggggaacuaua

SEQ ID NO: 696828 - RNA, 21 nt, Human
agugaagagugaaacacaugg

SEQ ID NO: 696829 - RNA, 22 nt, Human
agagucugccuuuuucuccugc

SEQ ID NO: 696830 - RNA, 22 nt, Human
acccaggaaaacauggugcaga

SEQ ID NO: 696831 - RNA, 22 nt, Human
ucuaagacacuguacuuucagu

SEQ ID NO: 696832 - RNA, 22 nt, Human
gcugggcuccacccucaacugu

SEQ ID NO: 696833 - RNA, 22 nt, Human
aaugagacacgugaagcagaug

SEQ ID NO: 696834 - RNA, 22 nt, Human
uaacacauuuuaagccauuuua

SEQ ID NO: 696835 - RNA, 22 nt, Human
gggguggcccuacccucuggaa

SEQ ID NO: 696836 - RNA, 22 nt, Human
accaggcucugccaguguuuac

SEQ ID NO: 696837 - RNA, 22 nt, Human
gcaagcugcucuuauguggagg

SEQ ID NO: 696838 - RNA, 22 nt, Human
gacuggauauugaguacugcaa

SEQ ID NO: 696839 - RNA, 22 nt, Human
ucuuuggauauguauggauaga

SEQ ID NO: 696840 - RNA, 22 nt, Human
acacuuuuguguauauccaguu

SEQ ID NO: 696841 - RNA, 22 nt, Human
uuuccucugacugcuccccugc

SEQ ID NO: 696842 - RNA, 22 nt, Human
acaaggcuaauuuggaagauac

SEQ ID NO: 696843 - RNA, 22 nt, Human
caggacgggcaaacaggauggu

SEQ ID NO: 696844 - RNA, 22 nt, Human
ccucaaaucuuuagaguuauuu

SEQ ID NO: 696845 - RNA, 22 nt, Human
guaaaggcucugauaaguacug

SEQ ID NO: 696846 - RNA, 22 nt, Human
aggcugaggcagguggaucacc

SEQ ID NO: 696847 - RNA, 18 nt, Human
caauagaaacaguaggaa

SEQ ID NO: 696848 - RNA, 22 nt, Human
cacugcucgcugcagcauggcc

SEQ ID NO: 696849 - RNA, 22 nt, Human
ugaggcucauucugcaugccaa

SEQ ID NO: 696850 - RNA, 19 nt, Human
agucuguggauuugugggu

SEQ ID NO: 696851 - RNA, 22 nt, Human
acagugugggacauuaggaaau

SEQ ID NO: 696852 - RNA, 22 nt, Human
uuaaaguaaucugugugaauuu

SEQ ID NO: 696853 - RNA, 22 nt, Human
aagcacagagagguaaaguaac

SEQ ID NO: 696854 - RNA, 22 nt, Human
agaaggcacucacacuggcacg

SEQ ID NO: 696855 - RNA, 22 nt, Human
cugccuuuucaucugagcugga

SEQ ID NO: 696856 - RNA, 22 nt, Human
ugcuuagacgucaaguacagcc

SEQ ID NO: 696857 - RNA, 22 nt, Human
uagaaucagaagauuugacugu

SEQ ID NO: 696858 - RNA, 22 nt, Human
aagugaccucaugguuucuccu

SEQ ID NO: 696859 - RNA, 22 nt, Human
caugcacuuaccugaaauucaa

SEQ ID NO: 696860 - RNA, 22 nt, Human
cucugagagugcucagagggua

SEQ ID NO: 696861 - RNA, 22 nt, Human
ccugagaauguuuaacagagaa

SEQ ID NO: 696862 - RNA, 22 nt, Human
auuuguauauuuaagaggguag

SEQ ID NO: 696863 - RNA, 22 nt, Human
gagacagaugcugcuggagcau

SEQ ID NO: 696864 - RNA, 22 nt, Human
gauaaaagaggaaauuuguuca

SEQ ID NO: 696865 - RNA, 19 nt, Human
ccugugucccacguagaug

SEQ ID NO: 696866 - RNA, 23 nt, Human
ucucugguuaggggagauuggug

SEQ ID NO: 696867 - RNA, 16 nt, Human
ggagagugucugcaaa

SEQ ID NO: 696868 - RNA, 22 nt, Human
ugugugaacauguuuucauuuc

SEQ ID NO: 696869 - RNA, 22 nt, Human
acccugagaaugagugucuccu

SEQ ID NO: 696870 - RNA, 22 nt, Human
cucuaaauccaaauaagugucc

SEQ ID NO: 696871 - RNA, 22 nt, Human
guucaauuuagaaagcacaguu

SEQ ID NO: 696872 - RNA, 22 nt, Human
ugcuguauuacuuuuacaaacu

SEQ ID NO: 696873 - RNA, 22 nt, Human
cacaguaaccccaggacuggga

SEQ ID NO: 696874 - RNA, 22 nt, Human
ugguccagaugccuuggcuuua

SEQ ID NO: 696875 - RNA, 22 nt, Human
cuucugggauuuuugaagacuc

SEQ ID NO: 696876 - RNA, 22 nt, Human
gcugugcagccaagugccucug

SEQ ID NO: 696877 - RNA, 22 nt, Human
gaugaugagauaaggauaacuu

SEQ ID NO: 696878 - RNA, 22 nt, Human
uggcagauaaaauaauagggaa

SEQ ID NO: 696879 - RNA, 22 nt, Human
uuuggcuugcacuggcaccaac

SEQ ID NO: 696880 - RNA, 22 nt, Human
acagucuacuugagcuuguaua

SEQ ID NO: 696881 - RNA, 22 nt, Human
ggcagcuucucccaggcuguuu

SEQ ID NO: 696882 - RNA, 22 nt, Human
gaauacauggcagggagucauc

SEQ ID NO: 696883 - RNA, 22 nt, Human
gucuucaguggcaaauggaucu

SEQ ID NO: 696884 - RNA, 22 nt, Human
auuucaggauagccuaguuuug

SEQ ID NO: 696885 - RNA, 22 nt, Human
acagaggacaacuaggcgcuca

SEQ ID NO: 696886 - RNA, 20 nt, Human
ucccucaguccuggcuuugu

SEQ ID NO: 696887 - RNA, 22 nt, Human
uuauacagggaguuucccugca

SEQ ID NO: 696888 - RNA, 22 nt, Human
agucagucaaaauauaaauugu

SEQ ID NO: 696889 - RNA, 22 nt, Human
aggcuacagccucaagagugca

SEQ ID NO: 696890 - RNA, 21 nt, Human
acuuucuguggguucaagcau

SEQ ID NO: 696891 - RNA, 22 nt, Human
uucugauaauaccacaucgcag

SEQ ID NO: 696892 - RNA, 22 nt, Human
agucuguguaccuuuggccuuc

SEQ ID NO: 696893 - RNA, 22 nt, Human
uaaauuacucaaugcacauaaa

SEQ ID NO: 696894 - RNA, 22 nt, Human
ugggcugcacugcucuuuaucg

SEQ ID NO: 696895 - RNA, 22 nt, Human
uccugggucugggugucugagg

SEQ ID NO: 696896 - RNA, 22 nt, Human
gagguauuuuugcaugccugau

SEQ ID NO: 696897 - RNA, 22 nt, Human
ucaugcaucugggcuggcuggu

SEQ ID NO: 696898 - RNA, 22 nt, Human
ggcucugccacuucuuggcugu

SEQ ID NO: 696899 - RNA, 22 nt, Human
uacaucaaggaacaccugguau

SEQ ID NO: 696900 - RNA, 22 nt, Human
uuuuauugggaguccucuacug

SEQ ID NO: 696901 - RNA, 22 nt, Human
ugcagcugugaaagggaaccaa

SEQ ID NO: 696902 - RNA, 23 nt, Human
uuucacagcuuuuauucugcauc

SEQ ID NO: 696903 - RNA, 22 nt, Human
gacuguggcugcguguaaggaa

SEQ ID NO: 696904 - RNA, 22 nt, Human
caguuuuauacacugcagcucc

SEQ ID NO: 696905 - RNA, 22 nt, Human
cuuuauguccaccagacugcaa

SEQ ID NO: 696906 - RNA, 22 nt, Human
guuuuacaaaugacggcauuca

SEQ ID NO: 696907 - RNA, 22 nt, Human
agcaggaaggggccuagccugg

SEQ ID NO: 696908 - RNA, 21 nt, Human
ugcagcagaagucucuguguc

SEQ ID NO: 696909 - RNA, 17 nt, Human
caggaaaauaugaguga

SEQ ID NO: 696910 - RNA, 22 nt, Human
cugcccuggccacugugcccag

SEQ ID NO: 696911 - RNA, 22 nt, Human
guuaugaagucauucacaaaua

SEQ ID NO: 696912 - RNA, 22 nt, Human
agugggagcggcagucggggac

SEQ ID NO: 696913 - RNA, 22 nt, Human
auucaguuucaaucauuguagu

SEQ ID NO: 696914 - RNA, 22 nt, Human
uaugaagauugcggucuggaau

SEQ ID NO: 696915 - RNA, 22 nt, Human
gucaagcagaagauaauuuaaa

SEQ ID NO: 696916 - RNA, 22 nt, Human
ucaaagacuauauauuuuauuu

SEQ ID NO: 696917 - RNA, 22 nt, Human
uggcuggacagugggcagugga

SEQ ID NO: 696918 - RNA, 22 nt, Human
cuuggcugucuauaggaaagag

SEQ ID NO: 696919 - RNA, 22 nt, Human
ugagagcugggaaauguuagcu

SEQ ID NO: 696920 - RNA, 22 nt, Human
uuggcaguaaaagaaaaugcuu

SEQ ID NO: 696921 - RNA, 21 nt, Human
ucccacugccacagcuucagg

SEQ ID NO: 696922 - RNA, 22 nt, Human
cuagguggugguggguugacau

SEQ ID NO: 696923 - RNA, 22 nt, Human
guccuuaaagagagcaucauuc

SEQ ID NO: 696924 - RNA, 22 nt, Human
aagacacacacauaugcugagu

SEQ ID NO: 696925 - RNA, 22 nt, Human
cauuuguauguuccuccuuagg

SEQ ID NO: 696926 - RNA, 22 nt, Human
cuuccucuguguccugggcuuc

SEQ ID NO: 696927 - RNA, 22 nt, Human
uggacagguuugggugccuguu

SEQ ID NO: 696928 - RNA, 22 nt, Human
aaacacugguaugauguauagu

SEQ ID NO: 696929 - RNA, 22 nt, Human
uuuaaagaaauuccucaucuuu

SEQ ID NO: 696930 - RNA, 22 nt, Human
uuguuuguaugcugagaagaau

SEQ ID NO: 696931 - RNA, 22 nt, Human
augugguugaagaauuacaucu

SEQ ID NO: 696932 - RNA, 22 nt, Human
uuuaaugugagucccuuucaag

SEQ ID NO: 696933 - RNA, 22 nt, Human
uggcuuccugcauggauccucu

SEQ ID NO: 696934 - RNA, 22 nt, Human
caggccagcggcccgcgcguuc

SEQ ID NO: 696935 - RNA, 22 nt, Human
ggcacagcgacuaccaucgaaa

SEQ ID NO: 696936 - RNA, 22 nt, Human
uucuaagagaguacaagcaauu

SEQ ID NO: 696937 - RNA, 22 nt, Human
gagugcugcuugggauagugag

SEQ ID NO: 696938 - RNA, 22 nt, Human
gagaaaagcgaaggaccuggag

SEQ ID NO: 696939 - RNA, 22 nt, Human
auguggcugccaccugccugaa

SEQ ID NO: 696940 - RNA, 22 nt, Human
uggcugugucccuguccagagu

SEQ ID NO: 696941 - RNA, 22 nt, Human
cacuugggagcauugcacaugu

SEQ ID NO: 696942 - RNA, 22 nt, Human
agagagguuugcuggaagauuc

SEQ ID NO: 696943 - RNA, 22 nt, Human
caaauagugucacauugugagg

SEQ ID NO: 696944 - RNA, 22 nt, Human
uagaucaagaauguccacuugu

SEQ ID NO: 696945 - RNA, 22 nt, Human
gaugcaaaaguaucauuuuaau

SEQ ID NO: 696946 - RNA, 22 nt, Human
gcagcuuuaaucugaauaagua

SEQ ID NO: 696947 - RNA, 22 nt, Human
cucuucuuuccaucccuagcca

SEQ ID NO: 696948 - RNA, 22 nt, Human
aaguuuggaaugauagagaccu

SEQ ID NO: 696949 - RNA, 22 nt, Human
uuuugauaucaugaugaacaga

SEQ ID NO: 696950 - RNA, 22 nt, Human
uccucugcuggaagggcaagag

SEQ ID NO: 696951 - RNA, 22 nt, Human
agcccuccuuuguucaugcugc

SEQ ID NO: 696952 - RNA, 22 nt, Human
ugugccugucacccucagagag

SEQ ID NO: 696953 - RNA, 22 nt, Human
guccucuuagccacuuaauuau

SEQ ID NO: 696954 - RNA, 22 nt, Human
ugagcugggcugggcugagcug

SEQ ID NO: 696955 - RNA, 22 nt, Human
uuuccaaagguggcaggaacaa

SEQ ID NO: 696956 - RNA, 22 nt, Human
aagaauguggcauuuauuuaua

SEQ ID NO: 696957 - RNA, 22 nt, Human
uaaugcauguaaugggcugaua

SEQ ID NO: 696958 - RNA, 22 nt, Human
agccuaggagguuggggcugca

SEQ ID NO: 696959 - RNA, 18 nt, Human
cauuguacaaugcuuuau

SEQ ID NO: 696960 - RNA, 22 nt, Human
gggacaucuuucuagucagggu

SEQ ID NO: 696961 - RNA, 22 nt, Human
ugagcaauaugugaauuuucuu

SEQ ID NO: 696962 - RNA, 22 nt, Human
aagugguguguuggaagaaauc

SEQ ID NO: 696963 - RNA, 22 nt, Human
cccagguggguuggccucuguc

SEQ ID NO: 696964 - RNA, 22 nt, Human
ugcagggcuauaacuccauucu

SEQ ID NO: 696965 - RNA, 22 nt, Human
uuugauucuaaguucugucaac

SEQ ID NO: 696966 - RNA, 22 nt, Human
uaauaucuggcauucaaacaug

SEQ ID NO: 696967 - RNA, 18 nt, Human
cccagcuccacuucccuc

SEQ ID NO: 696968 - RNA, 22 nt, Human
uccucccugggagcuucugagu

SEQ ID NO: 696969 - RNA, 22 nt, Human
ggagggcugagacuggggucug

SEQ ID NO: 696970 - RNA, 22 nt, Human
ccuggcagacagcacugaagcu

SEQ ID NO: 696971 - RNA, 22 nt, Human
uuuacagcuacuguccuauuuc

SEQ ID NO: 696972 - RNA, 22 nt, Human
agcaguuauauugaaauaaaaa

SEQ ID NO: 696973 - RNA, 22 nt, Human
gagacaaaaguuggagugcaag

SEQ ID NO: 696974 - RNA, 22 nt, Human
aaucuguuugaugcuugugaua

SEQ ID NO: 696975 - RNA, 22 nt, Human
cccuggcacuagcgacggccau

SEQ ID NO: 696976 - RNA, 19 nt, Human
aagggucacaagcagcaga

SEQ ID NO: 696977 - RNA, 22 nt, Human
ucugacuuuucucacuguugug

SEQ ID NO: 696978 - RNA, 22 nt, Human
aaaagguaguugccaaauaagg

SEQ ID NO: 696979 - RNA, 22 nt, Human
ucacagagaacuauaauccauc

SEQ ID NO: 696980 - RNA, 22 nt, Human
uggcaagagggaugcaagguuu

SEQ ID NO: 696981 - RNA, 22 nt, Human
cagggagaggccucuguugccc

SEQ ID NO: 696982 - RNA, 22 nt, Human
guccacucccagugccugaggc

SEQ ID NO: 696983 - RNA, 22 nt, Human
uucugggcagagcuggagcugc

SEQ ID NO: 696984 - RNA, 22 nt, Human
cagcagagcugggcuuugaauu

SEQ ID NO: 696985 - RNA, 22 nt, Human
acauguaaacauuuacaguauu

SEQ ID NO: 696986 - RNA, 22 nt, Human
ugucccucauugacgcugugcc

SEQ ID NO: 696987 - RNA, 22 nt, Human
uggcccuguggcuucagaacag

SEQ ID NO: 696988 - RNA, 22 nt, Human
guguauaacuaucuaucuagua

SEQ ID NO: 696989 - RNA, 22 nt, Human
agagccugggcagcuccucugg

SEQ ID NO: 696990 - RNA, 20 nt, Human
cugagagucugugcuuaguc

SEQ ID NO: 696991 - RNA, 22 nt, Human
uacauugugauguuucaauaca

SEQ ID NO: 696992 - RNA, 22 nt, Human
uccagggaugguaaugagcagu

SEQ ID NO: 696993 - RNA, 22 nt, Human
uaugacaagaaauacagaggua

SEQ ID NO: 696994 - RNA, 22 nt, Human
gugacugugaucuuauuugcaa

SEQ ID NO: 696995 - RNA, 22 nt, Human
ccauauuugcuucuugcugaua

SEQ ID NO: 696996 - RNA, 22 nt, Human
cuccagcuuuagcucuccaggg

SEQ ID NO: 696997 - RNA, 23 nt, Human
cauuucugggagauuuauaaaau

SEQ ID NO: 696998 - RNA, 22 nt, Human
aaucaagagcugacuauauuuu

SEQ ID NO: 696999 - RNA, 22 nt, Human
uccagggcugacuugggagagg

SEQ ID NO: 697000 - RNA, 22 nt, Human
augcauaagugcagcagauuug

SEQ ID NO: 697001 - RNA, 22 nt, Human
auuauuuuaugugcggccugau

SEQ ID NO: 697002 - RNA, 22 nt, Human
uaccauuuacuugaaaauaaaa

SEQ ID NO: 697003 - RNA, 22 nt, Human
acucucuugggggagagcagag

SEQ ID NO: 697004 - RNA, 22 nt, Human
uuuaucuauuguauuguugaug

SEQ ID NO: 697005 - RNA, 22 nt, Human
gcaggcaggcuuccuugaacug

SEQ ID NO: 697006 - RNA, 22 nt, Human
ucucauguauugcccuggugug

SEQ ID NO: 697007 - RNA, 22 nt, Human
agggaagcagcagccgccuguc

SEQ ID NO: 697008 - RNA, 22 nt, Human
gaggcucccucaacucugggug

SEQ ID NO: 697009 - RNA, 22 nt, Human
agaauuuguaaaagauaagaca

SEQ ID NO: 697010 - RNA, 22 nt, Human
uaaguucagaguucucauuugu

SEQ ID NO: 697011 - RNA, 22 nt, Human
gcacugcagccucagauggugg

SEQ ID NO: 697012 - RNA, 17 nt, Human
gcuuuggaaggguagac

SEQ ID NO: 697013 - RNA, 22 nt, Human
uuuccuaacacaaugcaugaga

SEQ ID NO: 697014 - RNA, 22 nt, Human
ggccucaguuucuccauggguu

SEQ ID NO: 697015 - RNA, 22 nt, Human
cacagugaauuacauagacgug

SEQ ID NO: 697016 - RNA, 22 nt, Human
acagucauagcagccuuuguua

SEQ ID NO: 697017 - RNA, 22 nt, Human
uaugagaacaagaacaaucucc

SEQ ID NO: 697018 - RNA, 22 nt, Human
uuagacaucaagaagccaaugu

SEQ ID NO: 697019 - RNA, 22 nt, Human
gcccaggauucuuucuuccuua

SEQ ID NO: 697020 - RNA, 22 nt, Human
auggaggugccaggugugaggg

SEQ ID NO: 697021 - RNA, 22 nt, Human
ccucacugaagaggugacauuu

SEQ ID NO: 697022 - RNA, 22 nt, Human
uuccaaggcccagcagagagga

SEQ ID NO: 697023 - RNA, 22 nt, Human
agucaacacauuaaaccuaggg

SEQ ID NO: 697024 - RNA, 22 nt, Human
ucaagagacaggacguguuuca

SEQ ID NO: 697025 - RNA, 22 nt, Human
augcuuccaacaguucugugaa

SEQ ID NO: 697026 - RNA, 22 nt, Human
ggaagcugugcucucaggccuc

SEQ ID NO: 697027 - RNA, 22 nt, Human
auucaguguuugcagcaacuuu

SEQ ID NO: 697028 - RNA, 22 nt, Human
cagcauggcuugaguguuuccu

SEQ ID NO: 697029 - RNA, 22 nt, Human
uguaaaguccaagaucaaagag

SEQ ID NO: 697030 - RNA, 22 nt, Human
agaagagaacugccaaacacuu

SEQ ID NO: 697031 - RNA, 22 nt, Human
uggccuuggcagugagaagagu

SEQ ID NO: 697032 - RNA, 22 nt, Human
caguggaauauauaggggauuu

SEQ ID NO: 697033 - RNA, 16 nt, Human
gugcaaaagugaggag

SEQ ID NO: 697034 - RNA, 22 nt, Human
cccuggccuccaggcaguccug

SEQ ID NO: 697035 - RNA, 22 nt, Human
guugucuuagucagaaauaugc

SEQ ID NO: 697036 - RNA, 22 nt, Human
ucaggacacccugugcuuccuu

SEQ ID NO: 697037 - RNA, 22 nt, Human
gggagcucucccugaggccugg

SEQ ID NO: 697038 - RNA, 22 nt, Human
acccugccaaggauggccccga

SEQ ID NO: 697039 - RNA, 22 nt, Human
ggcuauccauggaucugaacuc

SEQ ID NO: 697040 - RNA, 22 nt, Human
uucuaauacacgguaugacuuu

SEQ ID NO: 697041 - RNA, 23 nt, Human
uuuuccuuuggacaggcuguauu

SEQ ID NO: 697042 - RNA, 22 nt, Human
cuggguuccauguagccaagag

SEQ ID NO: 697043 - RNA, 22 nt, Human
uggucugagcggggccauucag

SEQ ID NO: 697044 - RNA, 22 nt, Human
gaaagggaguggacaacaggca

SEQ ID NO: 697045 - RNA, 22 nt, Human
ucagugcagaauagugaugcau

SEQ ID NO: 697046 - RNA, 22 nt, Human
uuauacauguguuuugagauga

SEQ ID NO: 697047 - RNA, 22 nt, Human
cuuaucugagaaagaugcuaca

SEQ ID NO: 697048 - RNA, 22 nt, Human
auauggagaacucaaaaaguga

SEQ ID NO: 697049 - RNA, 22 nt, Human
caugagugaguaucucaagaua

SEQ ID NO: 697050 - RNA, 22 nt, Human
agaagcuugaaggagcagugac

SEQ ID NO: 697051 - RNA, 22 nt, Human
cauaauccugguguagcccucu

SEQ ID NO: 697052 - RNA, 22 nt, Human
gagcucaggagcaucagaagaa

SEQ ID NO: 697053 - RNA, 22 nt, Human
uccugggauuaagguggugauu

SEQ ID NO: 697054 - RNA, 19 nt, Human
caggaaggggcgaaucugg

SEQ ID NO: 697055 - RNA, 22 nt, Human
ugcaggccuaugguggggcccc

SEQ ID NO: 697056 - RNA, 22 nt, Human
uuccaugaagggcagccucuca

SEQ ID NO: 697057 - RNA, 22 nt, Human
uacuuuaucagcgucaaaggua

SEQ ID NO: 697058 - RNA, 22 nt, Human
aaugucaaagugcuuugcaaac

SEQ ID NO: 697059 - RNA, 22 nt, Human
uauucucuccccaaucuugcuu

SEQ ID NO: 697060 - RNA, 22 nt, Human
guugaggagguucagggugguu

SEQ ID NO: 697061 - RNA, 22 nt, Human
guuuccuuuuggaauuagagcu

SEQ ID NO: 697062 - RNA, 22 nt, Human
gagaaagaugaagaguggcguu

SEQ ID NO: 697063 - RNA, 22 nt, Human
ucugagagguuaagcaauuuga

SEQ ID NO: 697064 - RNA, 22 nt, Human
ccggcucggcgaccaggcugaa

SEQ ID NO: 697065 - RNA, 22 nt, Human
gcccugcuucuggcaugcagaa

SEQ ID NO: 697066 - RNA, 17 nt, Human
acacagccagguucucc

SEQ ID NO: 697067 - RNA, 22 nt, Human
ucaguaucaugcgguagccaug

SEQ ID NO: 697068 - RNA, 22 nt, Human
gggcugcguguggaggauguaa

SEQ ID NO: 697069 - RNA, 22 nt, Human
ugguggcaaaagaggcaaagug

SEQ ID NO: 697070 - RNA, 22 nt, Human
gcaaagucugcaucuggaucag

SEQ ID NO: 697071 - RNA, 17 nt, Human
auggcucaccugugggc

SEQ ID NO: 697072 - RNA, 22 nt, Human
acagcucauuuguaaaacggag

SEQ ID NO: 697073 - RNA, 18 nt, Human
ggaaaccacaggguucug

SEQ ID NO: 697074 - RNA, 22 nt, Human
cucugagaggugagaagcagca

SEQ ID NO: 697075 - RNA, 22 nt, Human
aaagggaaguugcacauguucc

SEQ ID NO: 697076 - RNA, 22 nt, Human
cgaugggggcaguguuacauug

SEQ ID NO: 697077 - RNA, 22 nt, Human
ccugagcuugauccuucugucu

SEQ ID NO: 697078 - RNA, 19 nt, Human
uccagaugauauggauuac

SEQ ID NO: 697079 - RNA, 19 nt, Human
ccuguguugggagugugag

SEQ ID NO: 697080 - RNA, 22 nt, Human
gaaacuuucaugaauauaagau

SEQ ID NO: 697081 - RNA, 22 nt, Human
augcacaggaccacacauaaug

SEQ ID NO: 697082 - RNA, 22 nt, Human
ggcaguuucaucaggagaaaag

SEQ ID NO: 697083 - RNA, 22 nt, Human
aaaguacagauggugagguugg

SEQ ID NO: 697084 - RNA, 19 nt, Human
cccuggagaauacccugga

SEQ ID NO: 697085 - RNA, 22 nt, Human
uucuguaggcauggaacaggga

SEQ ID NO: 697086 - RNA, 22 nt, Human
cccuguggugacaggccugucu

SEQ ID NO: 697087 - RNA, 22 nt, Human
gcacaggcaauagauacagcua

SEQ ID NO: 697088 - RNA, 22 nt, Human
aggcacugugcugaugucuuau

SEQ ID NO: 697089 - RNA, 22 nt, Human
gaagugggcuuuguggucagcu

SEQ ID NO: 697090 - RNA, 22 nt, Human
cagcacaguuugcuuggcagag

SEQ ID NO: 697091 - RNA, 22 nt, Human
aauucacaaaaccagauugcuu

SEQ ID NO: 697092 - RNA, 22 nt, Human
ggugugggagagauucuuuccu

SEQ ID NO: 697093 - RNA, 17 nt, Human
gucugggcuuuagagac

SEQ ID NO: 697094 - RNA, 22 nt, Human
uuccuucuggaagcuucagggg

SEQ ID NO: 697095 - RNA, 19 nt, Human
uggcagaggcaguuuguac

SEQ ID NO: 697096 - RNA, 22 nt, Human
gggccagagcuuggcagcuggg

SEQ ID NO: 697097 - RNA, 22 nt, Human
ugcagcaucuccuuaaaucuug

SEQ ID NO: 697098 - RNA, 22 nt, Human
ggaaaggagauauuggagagug

SEQ ID NO: 697099 - RNA, 21 nt, Human
aagaacuauugagguacacag

SEQ ID NO: 697100 - RNA, 22 nt, Human
cuggaagguuccucccagcucc

SEQ ID NO: 697101 - RNA, 22 nt, Human
cacauggguggauggaugcaug

SEQ ID NO: 697102 - RNA, 22 nt, Human
ggagguucucucuuugcagagc

SEQ ID NO: 697103 - RNA, 22 nt, Human
ugugacuggcagaggugucugg

SEQ ID NO: 697104 - RNA, 20 nt, Human
ucauauuuuugcccugggcc

SEQ ID NO: 697105 - RNA, 23 nt, Human
accaugaugggagugcaaauaag

SEQ ID NO: 697106 - RNA, 22 nt, Human
agcuccugcaccaggggccccu

SEQ ID NO: 697107 - RNA, 22 nt, Human
cuguuuccauacagguuuuugg

SEQ ID NO: 697108 - RNA, 21 nt, Human
ugaggcuguuguaccagggag

SEQ ID NO: 697109 - RNA, 22 nt, Human
gucuuauuuaaagagaucauac

SEQ ID NO: 697110 - RNA, 22 nt, Human
agaucacuuugaugcuaccugg

SEQ ID NO: 697111 - RNA, 22 nt, Human
gauacacuggccaaguggagga

SEQ ID NO: 697112 - RNA, 22 nt, Human
gacugagaaucauagaaggcaa

SEQ ID NO: 697113 - RNA, 22 nt, Human
uucacaggaauguaggggucuu

SEQ ID NO: 697114 - RNA, 22 nt, Human
cagcagccugccuugggagcuu

SEQ ID NO: 697115 - RNA, 22 nt, Human
gagcccagcuguccuuggcaaa

SEQ ID NO: 697116 - RNA, 22 nt, Human
ugaaaauuuccaucaguuauau

SEQ ID NO: 697117 - RNA, 22 nt, Human
augugucuaauuccaggagcac

SEQ ID NO: 697118 - RNA, 18 nt, Human
gcagccccucuuccuucc

SEQ ID NO: 697119 - RNA, 22 nt, Human
uaaaugucuuugucacguuggg

SEQ ID NO: 697120 - RNA, 22 nt, Human
uggccagaguccagugagccuu

SEQ ID NO: 697121 - RNA, 22 nt, Human
ugaguacucggagugcuuugga

SEQ ID NO: 697122 - RNA, 20 nt, Human
gucuacacgggcaguguaga

SEQ ID NO: 697123 - RNA, 22 nt, Human
uacagccuguuaccuauauuug

SEQ ID NO: 697124 - RNA, 22 nt, Human
ucagcuuuccugcagcuaaggg

SEQ ID NO: 697125 - RNA, 22 nt, Human
caaagcuauaaauucagacaga

SEQ ID NO: 697126 - RNA, 22 nt, Human
ugagggguugugagaaauguag

SEQ ID NO: 697127 - RNA, 22 nt, Human
gcagcagccacuauucuggcau

SEQ ID NO: 697128 - RNA, 22 nt, Human
gcagcccucgcuagcucucccc

SEQ ID NO: 697129 - RNA, 22 nt, Human
aaaugccuauuuguuccuucag

SEQ ID NO: 697130 - RNA, 22 nt, Human
ccugaaacaucuucuguaaaua

SEQ ID NO: 697131 - RNA, 22 nt, Human
uugcccagaguccacagcguac

SEQ ID NO: 697132 - RNA, 20 nt, Human
aaagugcacagauacagcuc

SEQ ID NO: 697133 - RNA, 22 nt, Human
cagucucagaggugggaguggg

SEQ ID NO: 697134 - RNA, 22 nt, Human
ucucagaaaugacaggagguac

SEQ ID NO: 697135 - RNA, 22 nt, Human
ugucucaguauacgaaacacuu

SEQ ID NO: 697136 - RNA, 22 nt, Human
uccaggagucagacagauggug

SEQ ID NO: 697137 - RNA, 22 nt, Human
cuucuucuggacaggcagcucc

SEQ ID NO: 697138 - RNA, 20 nt, Human
auguuuuauaaaagaacggg

SEQ ID NO: 697139 - RNA, 23 nt, Human
ccucaaauguagccuuuuuccca

SEQ ID NO: 697140 - RNA, 21 nt, Human
gggucugaauaucuggugcug

SEQ ID NO: 697141 - RNA, 22 nt, Human
cucuugcagauaccuugaagga

SEQ ID NO: 697142 - RNA, 22 nt, Human
cccagccuggugcacugugggg

SEQ ID NO: 697143 - RNA, 21 nt, Human
caggcucugcuagaggagccu

SEQ ID NO: 697144 - RNA, 22 nt, Human
cagguagggauaugauggugau

SEQ ID NO: 697145 - RNA, 22 nt, Human
ccagguggacggcgaguacagg

SEQ ID NO: 697146 - RNA, 20 nt, Human
ucccaaaauucuacuuuauc

SEQ ID NO: 697147 - RNA, 22 nt, Human
uguguugugucaccuaucaugc

SEQ ID NO: 697148 - RNA, 22 nt, Human
ugacaguguuugcacuucaggu

SEQ ID NO: 697149 - RNA, 22 nt, Human
agagcccuuucuccaggcaccu

SEQ ID NO: 697150 - RNA, 22 nt, Human
ugggagcagccaacauggccuu

SEQ ID NO: 697151 - RNA, 20 nt, Human
gaaaucaguuaaugaugguu

SEQ ID NO: 697152 - RNA, 22 nt, Human
aucuaaaaggagcucuuuaucu

SEQ ID NO: 697153 - RNA, 17 nt, Human
aagagguaacuguacua

SEQ ID NO: 697154 - RNA, 22 nt, Human
ucacagugcaccccucacaggg

SEQ ID NO: 697155 - RNA, 22 nt, Human
cagggcuugccuugccccggcg

SEQ ID NO: 697156 - RNA, 22 nt, Human
ccugaagggacuccagagagca

SEQ ID NO: 697157 - RNA, 22 nt, Human
caguggcuucuuccuagagcca

SEQ ID NO: 697158 - RNA, 22 nt, Human
auaagguaugaaaaguaaaugg

SEQ ID NO: 697159 - RNA, 22 nt, Human
gagagcuggguucaaguagcug

SEQ ID NO: 697160 - RNA, 22 nt, Human
ucagugcauucauggguggcug

SEQ ID NO: 697161 - RNA, 22 nt, Human
ucaaaggcgguccaggaauaaa

SEQ ID NO: 697162 - RNA, 22 nt, Human
cuggguucucugcuuagggccu

SEQ ID NO: 697163 - RNA, 22 nt, Human
uagcuauuuggaaaauuccaau

SEQ ID NO: 697164 - RNA, 22 nt, Human
uagaaauggggaaguaguuagg

SEQ ID NO: 697165 - RNA, 17 nt, Human
gcaggcacugcugccug

SEQ ID NO: 697166 - RNA, 22 nt, Human
auuuggauaucacugaauacau

SEQ ID NO: 697167 - RNA, 23 nt, Human
acagacauuccauaauguacacc

SEQ ID NO: 697168 - RNA, 22 nt, Human
acuuccugcagcuucucagccc

SEQ ID NO: 697169 - RNA, 19 nt, Human
aagcccaguguaugcucuu

SEQ ID NO: 697170 - RNA, 22 nt, Human
agccugcugggaagggaggcuu

SEQ ID NO: 697171 - RNA, 22 nt, Human
cuggcuucagcugccaucaaug

SEQ ID NO: 697172 - RNA, 22 nt, Human
uucacccaauauaacuagagga

SEQ ID NO: 697173 - RNA, 22 nt, Human
gaguucauauucagagaucgcu

SEQ ID NO: 697174 - RNA, 17 nt, Human
ggaaaaggaugauacag

SEQ ID NO: 697175 - RNA, 22 nt, Human
acuuuguugaagaauauguuag

SEQ ID NO: 697176 - RNA, 22 nt, Human
guucccacgccuccucuccagc

SEQ ID NO: 697177 - RNA, 22 nt, Human
gaucuguuucauucacagucug

SEQ ID NO: 697178 - RNA, 22 nt, Human
aaagcugucaaggcaggaggcu

SEQ ID NO: 697179 - RNA, 22 nt, Human
cuggucccuggaccucccugga

SEQ ID NO: 697180 - RNA, 22 nt, Human
cugaauuaagcauuacauacau

SEQ ID NO: 697181 - RNA, 19 nt, Human
ugcaagcuuuuucuuguua

SEQ ID NO: 697182 - RNA, 22 nt, Human
aaggucauugguucugaauucu

SEQ ID NO: 697183 - RNA, 22 nt, Human
uggcccaggggcucuugguguu

SEQ ID NO: 697184 - RNA, 22 nt, Human
gcugcugagaauugcaggcaag

SEQ ID NO: 697185 - RNA, 22 nt, Human
uuuauacuucauaaugucuauu

SEQ ID NO: 697186 - RNA, 22 nt, Human
gaggaagggacuuuauuaucug

SEQ ID NO: 697187 - RNA, 22 nt, Human
ggucaaaguugaagaagggcau

SEQ ID NO: 697188 - RNA, 22 nt, Human
uacagcaaugcuacaagaugac

SEQ ID NO: 697189 - RNA, 22 nt, Human
caguggcagagaacagagaccu

SEQ ID NO: 697190 - RNA, 22 nt, Human
agcuucugcccguguuugcucu

SEQ ID NO: 697191 - RNA, 18 nt, Human
agcuccaucugucagcau

SEQ ID NO: 697192 - RNA, 22 nt, Human
uguuugcuaggguugguauuua

SEQ ID NO: 697193 - RNA, 22 nt, Human
uacuccagacauucuguccucg

SEQ ID NO: 697194 - RNA, 22 nt, Human
ugugguuuuucaguugcuggag

SEQ ID NO: 697195 - RNA, 22 nt, Human
uugucugaaccaucucccuggc

SEQ ID NO: 697196 - RNA, 22 nt, Human
cucugggcaggaccaguggacc

SEQ ID NO: 697197 - RNA, 22 nt, Human
uuucugauauucauuuagaaga

SEQ ID NO: 697198 - RNA, 22 nt, Human
gucacaugccagugcacacagg

SEQ ID NO: 697199 - RNA, 22 nt, Human
ucuuuccaaggacucuguagca

SEQ ID NO: 697200 - RNA, 22 nt, Human
aggagaguaccauugggccgca

SEQ ID NO: 697201 - RNA, 20 nt, Human
acaucaacuagucacagaca

SEQ ID NO: 697202 - RNA, 22 nt, Human
ggcugccucugaugugcagacg

SEQ ID NO: 697203 - RNA, 22 nt, Human
gccaaaguccuccagccaugca

SEQ ID NO: 697204 - RNA, 22 nt, Human
augugcuucaggaugucagugu

SEQ ID NO: 697205 - RNA, 21 nt, Human
ugaguuaaaaugucagugcca

SEQ ID NO: 697206 - RNA, 22 nt, Human
acucagcugaugaagcacaagu

SEQ ID NO: 697207 - RNA, 22 nt, Human
uaagaaauuuaguuauagaaug

SEQ ID NO: 697208 - RNA, 22 nt, Human
ucaaaugcaccucucauuuguu

SEQ ID NO: 697209 - RNA, 23 nt, Human
cugaggggaaaagggcuucaggc

SEQ ID NO: 697210 - RNA, 22 nt, Human
cuugggcucugugggccuuagu

SEQ ID NO: 697211 - RNA, 22 nt, Human
uacagugauuucuacugguguu

SEQ ID NO: 697212 - RNA, 17 nt, Human
aggcagcucagaacauc

SEQ ID NO: 697213 - RNA, 22 nt, Human
uucuucuuuccaauuacauggu

SEQ ID NO: 697214 - RNA, 22 nt, Human
caugaaaaugucaaguucugcu

SEQ ID NO: 697215 - RNA, 22 nt, Human
aagcccugauaggaaaaugcug

SEQ ID NO: 697216 - RNA, 22 nt, Human
acaggcaggagcuccccauucc

SEQ ID NO: 697217 - RNA, 19 nt, Human
guggccagggcaggggcug

SEQ ID NO: 697218 - RNA, 22 nt, Human
acaaugaagauaauguugcagu

SEQ ID NO: 697219 - RNA, 22 nt, Human
aggcugggaaaccugaaguugu

SEQ ID NO: 697220 - RNA, 21 nt, Human
acacagaggcaucaucacuuu

SEQ ID NO: 697221 - RNA, 22 nt, Human
gaggacugcagaugggugcauc

SEQ ID NO: 697222 - RNA, 22 nt, Human
aaaaccacaauuauuuuugcac

SEQ ID NO: 697223 - RNA, 22 nt, Human
ccuggccagaggcgugccugug

SEQ ID NO: 697224 - RNA, 22 nt, Human
ucauuuuuagcgcgcaaaaguu

SEQ ID NO: 697225 - RNA, 22 nt, Human
agagcuguuuggacaucugagu

SEQ ID NO: 697226 - RNA, 18 nt, Human
uucacaagggcuugguuu

SEQ ID NO: 697227 - RNA, 22 nt, Human
uaaauguagucaaaggagccuc

SEQ ID NO: 697228 - RNA, 22 nt, Human
aaauacaauuucaggcuguaau

SEQ ID NO: 697229 - RNA, 22 nt, Human
uggagcagaaauggccucuugu

SEQ ID NO: 697230 - RNA, 22 nt, Human
uaauugucagguuuuaguauca

SEQ ID NO: 697231 - RNA, 22 nt, Human
gcuuagaaguacacaugccuuu

SEQ ID NO: 697232 - RNA, 22 nt, Human
gcuccugcagagauguuccaug

SEQ ID NO: 697233 - RNA, 22 nt, Human
aagcuguguauuacagaauauu

SEQ ID NO: 697234 - RNA, 22 nt, Human
gguuuuaacuacagaauugcaa

SEQ ID NO: 697235 - RNA, 22 nt, Human
ucacacuuuccauggcuguuaa

SEQ ID NO: 697236 - RNA, 22 nt, Human
gaggcacagagcccuaggagcu

SEQ ID NO: 697237 - RNA, 22 nt, Human
ucuauguagugccagcuaguau

SEQ ID NO: 697238 - RNA, 21 nt, Human
aacaaagggaugcucaucuuu

SEQ ID NO: 697239 - RNA, 22 nt, Human
uauggcuuuuuauucaucuuac

SEQ ID NO: 697240 - RNA, 20 nt, Human
agucauuggguguccuucgg

SEQ ID NO: 697241 - RNA, 22 nt, Human
caggugacccucaguguggacu

SEQ ID NO: 697242 - RNA, 17 nt, Human
acacaucuuggcuuugc

SEQ ID NO: 697243 - RNA, 21 nt, Human
ucacacuugauuggcuuagac

SEQ ID NO: 697244 - RNA, 22 nt, Human
ccuguacacaauuccgaggaua

SEQ ID NO: 697245 - RNA, 22 nt, Human
uucauucagcacauauuuauug

SEQ ID NO: 697246 - RNA, 22 nt, Human
cucucuguuaugcuuucaugaa

SEQ ID NO: 697247 - RNA, 22 nt, Human
uugugaauagugccgcuauaaa

SEQ ID NO: 697248 - RNA, 22 nt, Human
aggcagguuucccggcugucaa

SEQ ID NO: 697249 - RNA, 22 nt, Human
gucccucucaaauuuauaugcu

SEQ ID NO: 697250 - RNA, 22 nt, Human
agggcuuugcaaugcacagugg

SEQ ID NO: 697251 - RNA, 22 nt, Human
agcugcaguuagccccagauga

SEQ ID NO: 697252 - RNA, 22 nt, Human
ggcaguguucugguugucagga

SEQ ID NO: 697253 - RNA, 22 nt, Human
cugccugcaucccacagugggg

SEQ ID NO: 697254 - RNA, 21 nt, Human
ugcugccauagaccugaggga

SEQ ID NO: 697255 - RNA, 22 nt, Human
ucugggaaggagccugagaauu

SEQ ID NO: 697256 - RNA, 22 nt, Human
uaaacaucugucauguguuuau

SEQ ID NO: 697257 - RNA, 22 nt, Human
cucucaguccugcgcgccucug

SEQ ID NO: 697258 - RNA, 22 nt, Human
aagauuguuuugggggaagugg

SEQ ID NO: 697259 - RNA, 22 nt, Human
gcagggcuaauggggcaaguag

SEQ ID NO: 697260 - RNA, 22 nt, Human
augaaagcaaauuauaggccau

SEQ ID NO: 697261 - RNA, 22 nt, Human
ggagcccucaccggcgagugcc

SEQ ID NO: 697262 - RNA, 22 nt, Human
aaguggagccagggaaacugaa

SEQ ID NO: 697263 - RNA, 22 nt, Human
ggugaggcuaagugacacaggg

SEQ ID NO: 697264 - RNA, 23 nt, Human
uggccuggagagaaaagaugagu

SEQ ID NO: 697265 - RNA, 22 nt, Human
aauccauuuacucuuuacaaga

SEQ ID NO: 697266 - RNA, 22 nt, Human
gaccuuccuucuuugcuccggg

SEQ ID NO: 697267 - RNA, 22 nt, Human
caugaguucaaaaugccugccu

SEQ ID NO: 697268 - RNA, 22 nt, Human
aguaaaguaccaaagugugagu

SEQ ID NO: 697269 - RNA, 22 nt, Human
guccagggaaauagcgacaggg

SEQ ID NO: 697270 - RNA, 22 nt, Human
aacaaauguguuuuguaauuaa

SEQ ID NO: 697271 - RNA, 22 nt, Human
uggcaccauguuggcaaauguu

SEQ ID NO: 697272 - RNA, 22 nt, Human
caugcucuagauucucucuaau

SEQ ID NO: 697273 - RNA, 22 nt, Human
uuacucagucucccauacauug

SEQ ID NO: 697274 - RNA, 22 nt, Human
uagaagcagcaggaguaaaggc

SEQ ID NO: 697275 - RNA, 22 nt, Human
auugcuucaacuguucaauggg

SEQ ID NO: 697276 - RNA, 22 nt, Human
ggacaguugguugggcucuugu

SEQ ID NO: 697277 - RNA, 22 nt, Human
ugagcuggcuugucaaccaggg

SEQ ID NO: 697278 - RNA, 22 nt, Human
guguuuauacagcaaagagcau

SEQ ID NO: 697279 - RNA, 22 nt, Human
ucagugugaggggcuggguccu

SEQ ID NO: 697280 - RNA, 22 nt, Human
aggauccugcgcuuugggggag

SEQ ID NO: 697281 - RNA, 21 nt, Human
uggcucuggguaggagagugc

SEQ ID NO: 697282 - RNA, 22 nt, Human
aggugcuuggcucgugcacaca

SEQ ID NO: 697283 - RNA, 21 nt, Human
aggucaaaggcauccaugagg

SEQ ID NO: 697284 - RNA, 22 nt, Human
acucauuuuauaacacuguagu

SEQ ID NO: 697285 - RNA, 22 nt, Human
uuggcacuuugaaugagcucag

SEQ ID NO: 697286 - RNA, 19 nt, Human
uuacuuggcaaagucaguc

SEQ ID NO: 697287 - RNA, 22 nt, Human
caggggcgguggcucacgccug

SEQ ID NO: 697288 - RNA, 22 nt, Human
cacaucugcucugggcagcacu

SEQ ID NO: 697289 - RNA, 22 nt, Human
aaauauuugucugaggcgguug

SEQ ID NO: 697290 - RNA, 22 nt, Human
aggcuggugauuagaagcagcc

SEQ ID NO: 697291 - RNA, 22 nt, Human
aagaugaugcagacuuugaugu

SEQ ID NO: 697292 - RNA, 21 nt, Human
uagcaucucuacugucauaga

SEQ ID NO: 697293 - RNA, 22 nt, Human
cagugguuuuauaucuaagcuu

SEQ ID NO: 697294 - RNA, 22 nt, Human
uaguuucuaaagcuuccuaggu

SEQ ID NO: 697295 - RNA, 22 nt, Human
ccauccauguggcagggcuggc

SEQ ID NO: 697296 - RNA, 22 nt, Human
ggagacaauggaggccaaaaga

SEQ ID NO: 697297 - RNA, 22 nt, Human
acauguggaggaggcgagggua

SEQ ID NO: 697298 - RNA, 22 nt, Human
cuugccucccucagcucacagc

SEQ ID NO: 697299 - RNA, 22 nt, Human
gagagcugcaagguagggcggg

SEQ ID NO: 697300 - RNA, 22 nt, Human
guaccugggggauccacuucuu

SEQ ID NO: 697301 - RNA, 22 nt, Human
ugaugaggaccuggucucugcu

SEQ ID NO: 697302 - RNA, 22 nt, Human
cuugauucucagaaugcuugcu

SEQ ID NO: 697303 - RNA, 22 nt, Human
gcucuguuaacaguccagcuuu

SEQ ID NO: 697304 - RNA, 21 nt, Human
uccaggaguggcugggcaggg

SEQ ID NO: 697305 - RNA, 19 nt, Human
aggcuuggaacagccuuau

SEQ ID NO: 697306 - RNA, 22 nt, Human
ggcugaggguuaagaucagaca

SEQ ID NO: 697307 - RNA, 22 nt, Human
ucucaggggcagugauccuaag

SEQ ID NO: 697308 - RNA, 23 nt, Human
cugcaauugccugaucucauugg

SEQ ID NO: 697309 - RNA, 22 nt, Human
aguggcagccgagcaggagaug

SEQ ID NO: 697310 - RNA, 18 nt, Human
ggcuccaggaccuaccca

SEQ ID NO: 697311 - RNA, 22 nt, Human
cuggcuuuagguuggagagcug

SEQ ID NO: 697312 - RNA, 22 nt, Human
uuuucuaacaucuaguaauuug

SEQ ID NO: 697313 - RNA, 22 nt, Human
uaagaaacaugauuaauggcag

SEQ ID NO: 697314 - RNA, 22 nt, Human
aggccagcauucucucuccagg

SEQ ID NO: 697315 - RNA, 22 nt, Human
uuuggccaugcucaaggguaua

SEQ ID NO: 697316 - RNA, 22 nt, Human
uugaaagugccaaguccuagug

SEQ ID NO: 697317 - RNA, 22 nt, Human
gcccaagagagcgaagguuggc

SEQ ID NO: 697318 - RNA, 22 nt, Human
aaggagacauuugcagagcacc

SEQ ID NO: 697319 - RNA, 22 nt, Human
gcguguaugcaggucugugcag

SEQ ID NO: 697320 - RNA, 22 nt, Human
gcagggcaaauguggaaaggag

SEQ ID NO: 697321 - RNA, 22 nt, Human
agucacugggcugcuuccuaua

SEQ ID NO: 697322 - RNA, 22 nt, Human
acugccuguagcucuucaucuc

SEQ ID NO: 697323 - RNA, 22 nt, Human
agagggguuaagugcuaguccg

SEQ ID NO: 697324 - RNA, 22 nt, Human
uuucaauugacuuuggaagaaa

SEQ ID NO: 697325 - RNA, 22 nt, Human
gcccuucaguuacuccuugaug

SEQ ID NO: 697326 - RNA, 22 nt, Human
uaucuguauccccaucuagcua

SEQ ID NO: 697327 - RNA, 22 nt, Human
uuuagccaaucagcuugggagc

SEQ ID NO: 697328 - RNA, 20 nt, Human
ucacagaaugccugaagaag

SEQ ID NO: 697329 - RNA, 19 nt, Human
uuucugcagcucagagaag

SEQ ID NO: 697330 - RNA, 22 nt, Human
uacauguauugauuucucuucu

SEQ ID NO: 697331 - RNA, 22 nt, Human
gcacauaacugaccacaucuaa

SEQ ID NO: 697332 - RNA, 22 nt, Human
cucugcaucagcuucauucugu

SEQ ID NO: 697333 - RNA, 23 nt, Human
ugagucuugagcuuuggauucug

SEQ ID NO: 697334 - RNA, 22 nt, Human
cuucuuuagggaucucuugcug

SEQ ID NO: 697335 - RNA, 22 nt, Human
uguguguaauguuucucucuuc

SEQ ID NO: 697336 - RNA, 22 nt, Human
gugcaguggcagauccuagcuc

SEQ ID NO: 697337 - RNA, 22 nt, Human
aaacacuucaaggacuucuguc

SEQ ID NO: 697338 - RNA, 22 nt, Human
uggcaugcacagcccuguucgg

SEQ ID NO: 697339 - RNA, 18 nt, Human
gaggaaacaaggcagagg

SEQ ID NO: 697340 - RNA, 22 nt, Human
uucaagcagagauauuucaaga

SEQ ID NO: 697341 - RNA, 22 nt, Human
ccugagggaggguauaggcugu

SEQ ID NO: 697342 - RNA, 23 nt, Human
uucagcaugaagagugaaggcug

SEQ ID NO: 697343 - RNA, 22 nt, Human
acucacugcacuuugaaaugug

SEQ ID NO: 697344 - RNA, 22 nt, Human
gggggagaagauucugcugcuu

SEQ ID NO: 697345 - RNA, 22 nt, Human
gagucugagucuaauggcccca

SEQ ID NO: 697346 - RNA, 22 nt, Human
ucucaucauuccuucaaagccc

SEQ ID NO: 697347 - RNA, 22 nt, Human
auacuuaugauaaauaauugcu

SEQ ID NO: 697348 - RNA, 22 nt, Human
cucuggaggcagcaccagccag

SEQ ID NO: 697349 - RNA, 22 nt, Human
agauuucugggcuucaccaccu

SEQ ID NO: 697350 - RNA, 22 nt, Human
uaaaugaagaaauggagauugu

SEQ ID NO: 697351 - RNA, 19 nt, Human
caugaugagcauccugcag

SEQ ID NO: 697352 - RNA, 22 nt, Human
acuugguggaacguguauuuua

SEQ ID NO: 697353 - RNA, 22 nt, Human
gagggccacguucagggcucuc

SEQ ID NO: 697354 - RNA, 22 nt, Human
cauaacaccugauggcaaugau

SEQ ID NO: 697355 - RNA, 22 nt, Human
ugaagaugucagcagggguggu

SEQ ID NO: 697356 - RNA, 22 nt, Human
gacauuggguguacaauuggca

SEQ ID NO: 697357 - RNA, 22 nt, Human
ccuggcagcuccuccccggcgg

SEQ ID NO: 697358 - RNA, 22 nt, Human
uaccaaagaauauuuuaaauag

SEQ ID NO: 697359 - RNA, 19 nt, Human
agccuggcuuugcucugcu

SEQ ID NO: 697360 - RNA, 22 nt, Human
aaggaggaauucugaguucaug

SEQ ID NO: 697361 - RNA, 22 nt, Human
agauguaccagguauuacagga

SEQ ID NO: 697362 - RNA, 22 nt, Human
aucuuugugaaucucaacuugg

SEQ ID NO: 697363 - RNA, 22 nt, Human
uaauccuggugaguuugaaaaa

SEQ ID NO: 697364 - RNA, 22 nt, Human
cacugugucaguuugguuagac

SEQ ID NO: 697365 - RNA, 22 nt, Human
ugccaccaggagaaccagugca

SEQ ID NO: 697366 - RNA, 22 nt, Human
ucccagcugagauugagcaagg

SEQ ID NO: 697367 - RNA, 22 nt, Human
cagcuauuuguaggaaaacugu

SEQ ID NO: 697368 - RNA, 22 nt, Human
ccugaccagagugagggcuuag

SEQ ID NO: 697369 - RNA, 22 nt, Human
ggcucgagcagcuguguaggau

SEQ ID NO: 697370 - RNA, 22 nt, Human
auaguauuuaauaguuagcuca

SEQ ID NO: 697371 - RNA, 17 nt, Human
caaggccagcaucuuca

SEQ ID NO: 697372 - RNA, 22 nt, Human
caggcuugagggcaggcccagu

SEQ ID NO: 697373 - RNA, 22 nt, Human
acaggcaccuccagggguaugu

SEQ ID NO: 697374 - RNA, 22 nt, Human
gguggcugcaauggcuaacuuc

SEQ ID NO: 697375 - RNA, 21 nt, Human
ggcagccugacccccagagag

SEQ ID NO: 697376 - RNA, 22 nt, Human
uuuccagugagcaaauguagaa

SEQ ID NO: 697377 - RNA, 22 nt, Human
cagggagcuggugccagccgac

SEQ ID NO: 697378 - RNA, 21 nt, Human
cagcccagcccauugacagug

SEQ ID NO: 697379 - RNA, 22 nt, Human
ugaugaccgccaacguuuaggu

SEQ ID NO: 697380 - RNA, 21 nt, Human
uggucugaaaguauuuguggc

SEQ ID NO: 697381 - RNA, 22 nt, Human
ugcagaggagcuggaaggcugg

SEQ ID NO: 697382 - RNA, 23 nt, Human
acaacuuuacagauacauuuugu

SEQ ID NO: 697383 - RNA, 22 nt, Human
cuggcuggucaugucaugagcc

SEQ ID NO: 697384 - RNA, 22 nt, Human
ggagcuggccgccuaugugcag

SEQ ID NO: 697385 - RNA, 22 nt, Human
ggccugcacagagguggcucua

SEQ ID NO: 697386 - RNA, 22 nt, Human
cagcaccauuugcagccucuuu

SEQ ID NO: 697387 - RNA, 22 nt, Human
caagggcaggagaggauggaug

SEQ ID NO: 697388 - RNA, 22 nt, Human
uacaguaggauuuucagggucu

SEQ ID NO: 697389 - RNA, 21 nt, Human
uccaggcuggaaggggcguug

SEQ ID NO: 697390 - RNA, 22 nt, Human
uccauguguuuuccuguccaca

SEQ ID NO: 697391 - RNA, 19 nt, Human
uacacuuguaaugagcaga

SEQ ID NO: 697392 - RNA, 22 nt, Human
auucuggauuaucaguccacca

SEQ ID NO: 697393 - RNA, 22 nt, Human
guguaucaaagcacagacuuca

SEQ ID NO: 697394 - RNA, 22 nt, Human
ucacagugaugacgugggagca

SEQ ID NO: 697395 - RNA, 22 nt, Human
acaggcagcccucucccugguu

SEQ ID NO: 697396 - RNA, 21 nt, Human
aggcucucauccagggaccca

SEQ ID NO: 697397 - RNA, 22 nt, Human
uuugcuauaaaagggucacacg

SEQ ID NO: 697398 - RNA, 22 nt, Human
agugcgugguuuacagcuaguu

SEQ ID NO: 697399 - RNA, 22 nt, Human
agucagauuuagauguagcaag

SEQ ID NO: 697400 - RNA, 22 nt, Human
ccagaggggugggccugguuua

SEQ ID NO: 697401 - RNA, 22 nt, Human
ugcauuguuuagaacucuuugg

SEQ ID NO: 697402 - RNA, 22 nt, Human
aagcaauguguuugaaaggcca

SEQ ID NO: 697403 - RNA, 22 nt, Human
acuugaauuuaguuuuuccuaa

SEQ ID NO: 697404 - RNA, 22 nt, Human
gagcagaacaggccggguggga

SEQ ID NO: 697405 - RNA, 22 nt, Human
acaguaaugauucugagucucu

SEQ ID NO: 697406 - RNA, 22 nt, Human
uaguuucuaaacugaacuguca

SEQ ID NO: 697407 - RNA, 22 nt, Human
cugugugccuagaggguggccg

SEQ ID NO: 697408 - RNA, 22 nt, Human
agcugggaggcuccucugugac

SEQ ID NO: 697409 - RNA, 22 nt, Human
cugggcugcgggcgccccucca

SEQ ID NO: 697410 - RNA, 18 nt, Human
gaagggcuuugaaguaga

SEQ ID NO: 697411 - RNA, 22 nt, Human
cacagggccuggggcagcugcu

SEQ ID NO: 697412 - RNA, 22 nt, Human
uucccacacaauuaagucauuu

SEQ ID NO: 697413 - RNA, 22 nt, Human
cccaucucagucgugcuaaggg

SEQ ID NO: 697414 - RNA, 21 nt, Human
cagcaaggaagucgaguaggu

SEQ ID NO: 697415 - RNA, 22 nt, Human
gaaagcacgauaguagcaaaag

SEQ ID NO: 697416 - RNA, 22 nt, Human
agcagagcauggugggaagggc

SEQ ID NO: 697417 - RNA, 22 nt, Human
agaggcggagcuugcagugagc

SEQ ID NO: 697418 - RNA, 22 nt, Human
aaacccugcccuucccaagaug

SEQ ID NO: 697419 - RNA, 22 nt, Human
ugacaaacccugcaaauagcuc

SEQ ID NO: 697420 - RNA, 21 nt, Human
uugccccugaguuuuucugag

SEQ ID NO: 697421 - RNA, 22 nt, Human
aauagacuccagggucuauuuu

SEQ ID NO: 697422 - RNA, 22 nt, Human
auggcuccagcuuggcuucacc

SEQ ID NO: 697423 - RNA, 22 nt, Human
gaaaauagcagauagaccaaug

SEQ ID NO: 697424 - RNA, 20 nt, Human
uucuuaaagaccucacuuug

SEQ ID NO: 697425 - RNA, 22 nt, Human
uuccaagugaaaguagcuuugu

SEQ ID NO: 697426 - RNA, 22 nt, Human
aacaugaaaguugcuaagugca

SEQ ID NO: 697427 - RNA, 22 nt, Human
auguuuauguugggcuauauuu

SEQ ID NO: 697428 - RNA, 22 nt, Human
gagccugaaauacaggucacug

SEQ ID NO: 697429 - RNA, 22 nt, Human
agcugcaggcccaugcucaguc

SEQ ID NO: 697430 - RNA, 22 nt, Human
ccagcuaguaagcaccugcauc

SEQ ID NO: 697431 - RNA, 22 nt, Human
aaaaagagaaaugcucuagucc

SEQ ID NO: 697432 - RNA, 22 nt, Human
ugcaaagaagccacagucccag

SEQ ID NO: 697433 - RNA, 22 nt, Human
auagauucauucuauuucuccg

SEQ ID NO: 697434 - RNA, 22 nt, Human
uuugagaacuuugguauuuucc

SEQ ID NO: 697435 - RNA, 22 nt, Human
agggcucagccuccuccucagc

SEQ ID NO: 697436 - RNA, 22 nt, Human
auguccagagaacauuugcuuu

SEQ ID NO: 697437 - RNA, 22 nt, Human
ccuggcugcuuccucugccaug

SEQ ID NO: 697438 - RNA, 22 nt, Human
ccagccucacuggcaucaccua

SEQ ID NO: 697439 - RNA, 22 nt, Human
ugcacccugccugccugcgggu

SEQ ID NO: 697440 - RNA, 22 nt, Human
cuguuuaaccagaucucauauc

SEQ ID NO: 697441 - RNA, 22 nt, Human
accagagaggcugcagugugug

SEQ ID NO: 697442 - RNA, 22 nt, Human
uucaauguuucuuaucaaguug

SEQ ID NO: 697443 - RNA, 22 nt, Human
caugagcauaaaucagucacga

SEQ ID NO: 697444 - RNA, 22 nt, Human
cagcaggaaaaucaauucugug

SEQ ID NO: 697445 - RNA, 22 nt, Human
aggcuucugauaccaugagaga

SEQ ID NO: 697446 - RNA, 21 nt, Human
uuaaugcuaugcagaaaaucu

SEQ ID NO: 697447 - RNA, 22 nt, Human
aaacugaugcucagagaggggc

SEQ ID NO: 697448 - RNA, 22 nt, Human
cugcugggaaggucugcucagu

SEQ ID NO: 697449 - RNA, 22 nt, Human
ucaguagcccuugaguucaugu

SEQ ID NO: 697450 - RNA, 21 nt, Human
acagccugucaucucaugguc

SEQ ID NO: 697451 - RNA, 23 nt, Human
uggaagaaaaugguuuggcugug

SEQ ID NO: 697452 - RNA, 22 nt, Human
acuuugcagggcuugauaucca

SEQ ID NO: 697453 - RNA, 22 nt, Human
gauuaaguaacugaacacuuug

SEQ ID NO: 697454 - RNA, 22 nt, Human
gucccaggcuuauguggagcuu

SEQ ID NO: 697455 - RNA, 22 nt, Human
gucucuuuuauggugaguugau

SEQ ID NO: 697456 - RNA, 22 nt, Human
ucugcaaacuggcucuuacugc

SEQ ID NO: 697457 - RNA, 22 nt, Human
uucauugugaacacauucugcc

SEQ ID NO: 697458 - RNA, 22 nt, Human
ccaguucugagaugaauaucca

SEQ ID NO: 697459 - RNA, 18 nt, Human
agaguccagggugaggug

SEQ ID NO: 697460 - RNA, 22 nt, Human
caagaaguugacagccagguga

SEQ ID NO: 697461 - RNA, 22 nt, Human
uucuuauucuugaaauguggga

SEQ ID NO: 697462 - RNA, 22 nt, Human
uuguugggcaugcaguggcugu

SEQ ID NO: 697463 - RNA, 22 nt, Human
auugcacaaacacagucagacu

SEQ ID NO: 697464 - RNA, 22 nt, Human
cuccagagaguccagcucuggg

SEQ ID NO: 697465 - RNA, 22 nt, Human
ucccguugaugacggugcaucc

SEQ ID NO: 697466 - RNA, 22 nt, Human
cugagguggggccugggcauca

SEQ ID NO: 697467 - RNA, 22 nt, Human
cuagucucuggaggucagggcu

SEQ ID NO: 697468 - RNA, 22 nt, Human
auauauaugcugauggcugcca

SEQ ID NO: 697469 - RNA, 22 nt, Human
uuuacugagugaccuagaauaa

SEQ ID NO: 697470 - RNA, 22 nt, Human
uugcuuccaguccaagucuguu

SEQ ID NO: 697471 - RNA, 22 nt, Human
cacugaaaggcaaugcugacag

SEQ ID NO: 697472 - RNA, 22 nt, Human
auugugcaauguuuuacaauuu

SEQ ID NO: 697473 - RNA, 22 nt, Human
acaugucaauuuaguacucuua

SEQ ID NO: 697474 - RNA, 22 nt, Human
acagugucucacugcugaaauc

SEQ ID NO: 697475 - RNA, 22 nt, Human
ggggccagcacugugccuuugu

SEQ ID NO: 697476 - RNA, 22 nt, Human
auucugcauguagguuugcuca

SEQ ID NO: 697477 - RNA, 22 nt, Human
ugccccagaccuacugaauggg

SEQ ID NO: 697478 - RNA, 23 nt, Human
gggggccguccuggggauuauag

SEQ ID NO: 697479 - RNA, 22 nt, Human
cagggccucauugucaguccug

SEQ ID NO: 697480 - RNA, 22 nt, Human
guucaaauugauuuugguaaag

SEQ ID NO: 697481 - RNA, 22 nt, Human
gagcgcgccacaaggagcggcg

SEQ ID NO: 697482 - RNA, 22 nt, Human
gaaaauguuuguccggagcuga

SEQ ID NO: 697483 - RNA, 22 nt, Human
ugcugcugacauuuggggcuug

SEQ ID NO: 697484 - RNA, 22 nt, Human
auggcuuccaaggcccuccgug

SEQ ID NO: 697485 - RNA, 22 nt, Human
gggagcugagcuggaagagaau

SEQ ID NO: 697486 - RNA, 22 nt, Human
cccugcugucaggugcugggag

SEQ ID NO: 697487 - RNA, 22 nt, Human
uccugugacggagcgccagagg

SEQ ID NO: 697488 - RNA, 22 nt, Human
auggcuccaagauggagagcca

SEQ ID NO: 697489 - RNA, 22 nt, Human
aauggaacuuguaauuaugucc

SEQ ID NO: 697490 - RNA, 22 nt, Human
aagagcagaaguccuuggaucc

SEQ ID NO: 697491 - RNA, 19 nt, Human
cuuauuagagugagagcuu

SEQ ID NO: 697492 - RNA, 22 nt, Human
uuuaaagagaaugugaaggagu

SEQ ID NO: 697493 - RNA, 22 nt, Human
agcaggugcguuacuucacucu

SEQ ID NO: 697494 - RNA, 22 nt, Human
aagcugaagacacagcuccagu

SEQ ID NO: 697495 - RNA, 22 nt, Human
uaaugagacucaauugugugug

SEQ ID NO: 697496 - RNA, 22 nt, Human
uauaggaaggcagauuuuagcu

SEQ ID NO: 697497 - RNA, 22 nt, Human
agcuggccuguuagagcugagu

SEQ ID NO: 697498 - RNA, 22 nt, Human
ggcagacaccuuuaugucuaau

SEQ ID NO: 697499 - RNA, 22 nt, Human
uagcagaggaaaagagaacauu

SEQ ID NO: 697500 - RNA, 22 nt, Human
cagccugcuagggcaaugccuu

SEQ ID NO: 697501 - RNA, 22 nt, Human
caacuacaggaaaagucauuca

SEQ ID NO: 697502 - RNA, 22 nt, Human
ggcgugggaaguggggcuucug

SEQ ID NO: 697503 - RNA, 22 nt, Human
aacuucaccuuuuugccacacu

SEQ ID NO: 697504 - RNA, 22 nt, Human
cacugguagagagaagacaagg

SEQ ID NO: 697505 - RNA, 22 nt, Human
uaccaggaauuauuuuacauuu

SEQ ID NO: 697506 - RNA, 22 nt, Human
uggcugguuuuggugagcuccg

SEQ ID NO: 697507 - RNA, 22 nt, Human
ggccagcuuucugucuucuagg

SEQ ID NO: 697508 - RNA, 21 nt, Human
acagaugugauaugcagucuu

SEQ ID NO: 697509 - RNA, 22 nt, Human
ugccaggguccugagggccuug

SEQ ID NO: 697510 - RNA, 22 nt, Human
agccacagcccacaggacucuu

SEQ ID NO: 697511 - RNA, 22 nt, Human
gaagauaauuccuacuuauaac

SEQ ID NO: 697512 - RNA, 22 nt, Human
uacauucuacuuuuucacuccc

SEQ ID NO: 697513 - RNA, 22 nt, Human
ugcccucugccuccucugcaga

SEQ ID NO: 697514 - RNA, 22 nt, Human
cuguacaaguccuucaucaggg

SEQ ID NO: 697515 - RNA, 22 nt, Human
accugagaaugggggcaugugu

SEQ ID NO: 697516 - RNA, 23 nt, Human
ucauuucauccagccuugagagu

SEQ ID NO: 697517 - RNA, 22 nt, Human
agggccaccagagcagggcagu

SEQ ID NO: 697518 - RNA, 21 nt, Human
uacgugugugcauguuuauau

SEQ ID NO: 697519 - RNA, 22 nt, Human
gaaaaaugagcugaugucaggg

SEQ ID NO: 697520 - RNA, 22 nt, Human
ggguaccaagcugcuugggggc

SEQ ID NO: 697521 - RNA, 22 nt, Human
uacugaggguaugaagccaagg

SEQ ID NO: 697522 - RNA, 22 nt, Human
gaagcaguucgaaagcaguugg

SEQ ID NO: 697523 - RNA, 22 nt, Human
agcuugauuucucugcagugug

SEQ ID NO: 697524 - RNA, 22 nt, Human
caguauauucugcagagccuua

SEQ ID NO: 697525 - RNA, 22 nt, Human
cuggugcccuguguggcaggag

SEQ ID NO: 697526 - RNA, 22 nt, Human
cagauacagcuagcuccguggc

SEQ ID NO: 697527 - RNA, 22 nt, Human
gcuuacaagccagcuguaccac

SEQ ID NO: 697528 - RNA, 22 nt, Human
cucccugguguccccuccagga

SEQ ID NO: 697529 - RNA, 22 nt, Human
ugaggcucaagaaucugcauuu

SEQ ID NO: 697530 - RNA, 19 nt, Human
aggguggcaaaggagggug

SEQ ID NO: 697531 - RNA, 22 nt, Human
uuauucuucuucucuugccagg

SEQ ID NO: 697532 - RNA, 22 nt, Human
ccaccagcuucagcagccgcgg

SEQ ID NO: 697533 - RNA, 22 nt, Human
uguaggaaaaacaaugaucugc

SEQ ID NO: 697534 - RNA, 22 nt, Human
acuauacauaaaacauuugggu

SEQ ID NO: 697535 - RNA, 22 nt, Human
ccaguguuccauggagugauua

SEQ ID NO: 697536 - RNA, 22 nt, Human
uguaaaaagcccagccgcugag

SEQ ID NO: 697537 - RNA, 22 nt, Human
gaggacagcuuagggcuuccug

SEQ ID NO: 697538 - RNA, 22 nt, Human
cuucagagugcagaagauuggg

SEQ ID NO: 697539 - RNA, 18 nt, Human
gcuccuggagucugacuc

SEQ ID NO: 697540 - RNA, 22 nt, Human
ucugggcucugggaauuaggga

SEQ ID NO: 697541 - RNA, 22 nt, Human
aagcugggagggagcccagagu

SEQ ID NO: 697542 - RNA, 22 nt, Human
ggaagcuggacaggcuuugagu

SEQ ID NO: 697543 - RNA, 22 nt, Human
ccugugucagccccugccucca

SEQ ID NO: 697544 - RNA, 22 nt, Human
ugcuguuaucacauuuuguaaa

SEQ ID NO: 697545 - RNA, 22 nt, Human
cuguuucaagugaagucagaca

SEQ ID NO: 697546 - RNA, 22 nt, Human
cuguaacagcugucagagcagg

SEQ ID NO: 697547 - RNA, 22 nt, Human
cauuuccugucuggaggucaaa

SEQ ID NO: 697548 - RNA, 22 nt, Human
uccaggcuagccugguagagaa

SEQ ID NO: 697549 - RNA, 22 nt, Human
cuccaaauacaauauuguuguu

SEQ ID NO: 697550 - RNA, 22 nt, Human
auuucucagcacuuccuaucuc

SEQ ID NO: 697551 - RNA, 22 nt, Human
agcccagguucuaaagccaaac

SEQ ID NO: 697552 - RNA, 22 nt, Human
agaaagcacccugcacuuucug

SEQ ID NO: 697553 - RNA, 22 nt, Human
ugagucacacauuucuucauac

SEQ ID NO: 697554 - RNA, 22 nt, Human
cuacauucaacagcagaguuuu

SEQ ID NO: 697555 - RNA, 22 nt, Human
aguuucaugagacagauuuuca

SEQ ID NO: 697556 - RNA, 22 nt, Human
cacugagaguagggcacaagug

SEQ ID NO: 697557 - RNA, 22 nt, Human
aggccagugcagcuggaacaga

SEQ ID NO: 697558 - RNA, 20 nt, Human
agcuuugguuaagccagugg

SEQ ID NO: 697559 - RNA, 22 nt, Human
cucaagugugaguuuuaaaguc

SEQ ID NO: 697560 - RNA, 22 nt, Human
acuuguuuggucucauguuuaa

SEQ ID NO: 697561 - RNA, 22 nt, Human
gguccugaguaccuauguuuau

SEQ ID NO: 697562 - RNA, 21 nt, Human
ugaucauuuguguaaaggaga

SEQ ID NO: 697563 - RNA, 22 nt, Human
uuauguacccacucauauuccc

SEQ ID NO: 697564 - RNA, 22 nt, Human
uuucagaucauuuuuuaaguac

SEQ ID NO: 697565 - RNA, 22 nt, Human
uagccggguguugugucaugca

SEQ ID NO: 697566 - RNA, 22 nt, Human
cugaggagcagcuggcccgcua

SEQ ID NO: 697567 - RNA, 22 nt, Human
gccugcugaaccucaugcaguc

SEQ ID NO: 697568 - RNA, 22 nt, Human
uuacccagggaccaagagaaac

SEQ ID NO: 697569 - RNA, 22 nt, Human
uggaacacaucucgcugcaggg

SEQ ID NO: 697570 - RNA, 22 nt, Human
agauucauuaucuucuuuguac

SEQ ID NO: 697571 - RNA, 22 nt, Human
ucagagaucuucaggaugggac

SEQ ID NO: 697572 - RNA, 22 nt, Human
uuccuucuauucagcuccaaga

SEQ ID NO: 697573 - RNA, 22 nt, Human
ggagcaggcucugugguuucca

SEQ ID NO: 697574 - RNA, 22 nt, Human
uggagcccaggagaggauaaac

SEQ ID NO: 697575 - RNA, 22 nt, Human
cauacaaauguguccaggcucu

SEQ ID NO: 697576 - RNA, 23 nt, Human
uaaagucacauauuagagugagc

SEQ ID NO: 697577 - RNA, 21 nt, Human
uguccuggucacugcucuccc

SEQ ID NO: 697578 - RNA, 22 nt, Human
uaggggugaggccaggcaucag

SEQ ID NO: 697579 - RNA, 21 nt, Human
acacaggaguuucuucuuucu

SEQ ID NO: 697580 - RNA, 22 nt, Human
aggaaggacugcagcauuuggu

SEQ ID NO: 697581 - RNA, 22 nt, Human
ccagaggcauguucaaagcaau

SEQ ID NO: 697582 - RNA, 22 nt, Human
ccagggcacuuaggcccagccc

SEQ ID NO: 697583 - RNA, 22 nt, Human
ccugggcccucaccgccggugg

SEQ ID NO: 697584 - RNA, 22 nt, Human
auucucaaagccagagucaacg

SEQ ID NO: 697585 - RNA, 22 nt, Human
gggagccacagugaggugcaug

SEQ ID NO: 697586 - RNA, 22 nt, Human
cagcucuuugaguauuccauuu

SEQ ID NO: 697587 - RNA, 21 nt, Human
uuacaacauuuguguucuaug

SEQ ID NO: 697588 - RNA, 22 nt, Human
ccagcuggaaacaaauagagug

SEQ ID NO: 697589 - RNA, 22 nt, Human
acagguccuuauaagagcacuc

SEQ ID NO: 697590 - RNA, 23 nt, Human
ugucacauuuaguuggcauuguu

SEQ ID NO: 697591 - RNA, 22 nt, Human
uacaaguaaauuguagauacca

SEQ ID NO: 697592 - RNA, 22 nt, Human
gcaucuaaaucacuuuaaugua

SEQ ID NO: 697593 - RNA, 22 nt, Human
gcugugagaaacagggaguguc

SEQ ID NO: 697594 - RNA, 22 nt, Human
caaggcugcuggcuucugagcu

SEQ ID NO: 697595 - RNA, 22 nt, Human
ucagugcuaaaagagcuggugu

SEQ ID NO: 697596 - RNA, 22 nt, Human
acucuggcugccuugugagcau

SEQ ID NO: 697597 - RNA, 20 nt, Human
uucugggcagccauguacuu

SEQ ID NO: 697598 - RNA, 20 nt, Human
ccugcugugcuuuccaugga

SEQ ID NO: 697599 - RNA, 22 nt, Human
aacuacagugggcagaggcaau

SEQ ID NO: 697600 - RNA, 22 nt, Human
gaggaucauuugagccuaggag

SEQ ID NO: 697601 - RNA, 22 nt, Human
uaaaucucacuggguauauugg

SEQ ID NO: 697602 - RNA, 22 nt, Human
ccaggaucuguacaccucugag

SEQ ID NO: 697603 - RNA, 22 nt, Human
cugggcuucucccccuggcaga

SEQ ID NO: 697604 - RNA, 22 nt, Human
ugucuuuauauauuuggaaaau

SEQ ID NO: 697605 - RNA, 20 nt, Human
uugagcaaucaguaaaggau

SEQ ID NO: 697606 - RNA, 22 nt, Human
ugugagaaaaugauugcacagu

SEQ ID NO: 697607 - RNA, 22 nt, Human
cuucccuuuagcauauaguagu

SEQ ID NO: 697608 - RNA, 19 nt, Human
gccuggcugggaugagccc

SEQ ID NO: 697609 - RNA, 22 nt, Human
uuaagugagcuugaauaaucuu

SEQ ID NO: 697610 - RNA, 22 nt, Human
aguacaaaugcagccagaguag

SEQ ID NO: 697611 - RNA, 22 nt, Human
gugccaccuucaaaucacauug

SEQ ID NO: 697612 - RNA, 22 nt, Human
aagcugugagcuggaugcucca

SEQ ID NO: 697613 - RNA, 22 nt, Human
guauaucucuuacauacacaca

SEQ ID NO: 697614 - RNA, 22 nt, Human
ucccucugcuagugcuugagcu

SEQ ID NO: 697615 - RNA, 22 nt, Human
aagacagugugucaggcaggug

SEQ ID NO: 697616 - RNA, 22 nt, Human
ucagaagaguaauagggugaga

SEQ ID NO: 697617 - RNA, 22 nt, Human
ucagucuuugcuuaugacaaua

SEQ ID NO: 697618 - RNA, 22 nt, Human
ugggaccugcucuuggaaugag

SEQ ID NO: 697619 - RNA, 22 nt, Human
gcuggagagugaggggagcaag

SEQ ID NO: 697620 - RNA, 22 nt, Human
aguauguugacuuauucuugga

SEQ ID NO: 697621 - RNA, 17 nt, Human
agauggccucuaagauu

SEQ ID NO: 697622 - RNA, 22 nt, Human
aucugccaaugccaugagaaga

SEQ ID NO: 697623 - RNA, 22 nt, Human
cucuggagaugguucucaauug

SEQ ID NO: 697624 - RNA, 21 nt, Human
uccaggcugaugaugucaacu

SEQ ID NO: 697625 - RNA, 22 nt, Human
gcagguggauauugcuacuuga

SEQ ID NO: 697626 - RNA, 23 nt, Human
cuccucguaacucuguggugggu

SEQ ID NO: 697627 - RNA, 22 nt, Human
uccaccagagccuucccaugcu

SEQ ID NO: 697628 - RNA, 22 nt, Human
agaggcagaaguguucaaaccc

SEQ ID NO: 697629 - RNA, 22 nt, Human
auauaguuuaagaaaguacagu

SEQ ID NO: 697630 - RNA, 22 nt, Human
gucuccagcccacucuagauau

SEQ ID NO: 697631 - RNA, 22 nt, Human
caggaugggauguagugggccc

SEQ ID NO: 697632 - RNA, 22 nt, Human
acauaaauagauuauugggagg

SEQ ID NO: 697633 - RNA, 22 nt, Human
acuuuagagaaauguagaagua

SEQ ID NO: 697634 - RNA, 22 nt, Human
cacccaggcagguggcugagaa

SEQ ID NO: 697635 - RNA, 22 nt, Human
accugucugggcuacauuugca

SEQ ID NO: 697636 - RNA, 22 nt, Human
uacauauagacaguuacucuag

SEQ ID NO: 697637 - RNA, 22 nt, Human
cuccucccaauugccaagugcu

SEQ ID NO: 697638 - RNA, 22 nt, Human
cuggggacuuugguucuccaug

SEQ ID NO: 697639 - RNA, 22 nt, Human
acaguuagguccuaaaauucug

SEQ ID NO: 697640 - RNA, 22 nt, Human
ucaaucauaaugaagugaagaa

SEQ ID NO: 697641 - RNA, 22 nt, Human
aggcagcuggaaaacuccaggc

SEQ ID NO: 697642 - RNA, 23 nt, Human
uguaaaagcauuugucagccugg

SEQ ID NO: 697643 - RNA, 22 nt, Human
ucugggaaugaggcuugggcaa

SEQ ID NO: 697644 - RNA, 22 nt, Human
agucccuugagggaguacuguu

SEQ ID NO: 697645 - RNA, 22 nt, Human
ggcaagagggcagauggagugc

SEQ ID NO: 697646 - RNA, 22 nt, Human
ugucagcagcugguuugcuguu

SEQ ID NO: 697647 - RNA, 22 nt, Human
ggguucagguuggccugagcac

SEQ ID NO: 697648 - RNA, 22 nt, Human
aaauaugagggugaugcccaga

SEQ ID NO: 697649 - RNA, 21 nt, Human
gcacagcaugaguguuggcau

SEQ ID NO: 697650 - RNA, 22 nt, Human
aagugucuucugauggggugug

SEQ ID NO: 697651 - RNA, 22 nt, Human
ugucuuuaaaauuaaacacauc

SEQ ID NO: 697652 - RNA, 20 nt, Human
ggccucggacuucaucguag

SEQ ID NO: 697653 - RNA, 22 nt, Human
cacacuagucuauccauuagcu

SEQ ID NO: 697654 - RNA, 22 nt, Human
agcuggcuaugcccugugaacc

SEQ ID NO: 697655 - RNA, 22 nt, Human
acucuggggcgcuacuccaacu

SEQ ID NO: 697656 - RNA, 22 nt, Human
ugaaauguguucuaguguuuug

SEQ ID NO: 697657 - RNA, 22 nt, Human
cagguuuagguggacgugcagg

SEQ ID NO: 697658 - RNA, 22 nt, Human
aaagugcagcuugugaucccua

SEQ ID NO: 697659 - RNA, 22 nt, Human
ucucaggcugacauugggacuc

SEQ ID NO: 697660 - RNA, 22 nt, Human
uaggcagaguuuaaugguuaag

SEQ ID NO: 697661 - RNA, 22 nt, Human
ggcagcuccucaaaaaauuaaa

SEQ ID NO: 697662 - RNA, 22 nt, Human
cuuccucaggcauuagcuggac

SEQ ID NO: 697663 - RNA, 20 nt, Human
ugucuuccagcagguguuua

SEQ ID NO: 697664 - RNA, 17 nt, Human
ugguggcuggagucagg

SEQ ID NO: 697665 - RNA, 22 nt, Human
ucagugcugcuuuaugacaguu

SEQ ID NO: 697666 - RNA, 22 nt, Human
ggauggagaugaccauggugac

SEQ ID NO: 697667 - RNA, 22 nt, Human
cagacuuucugacucccuugcc

SEQ ID NO: 697668 - RNA, 22 nt, Human
cauggcuuuccaguccuccacu

SEQ ID NO: 697669 - RNA, 22 nt, Human
agcccugggcuguagauaagca

SEQ ID NO: 697670 - RNA, 22 nt, Human
gucuucaauagagccucaauuu

SEQ ID NO: 697671 - RNA, 21 nt, Human
uccaggccucaggaagggaug

SEQ ID NO: 697672 - RNA, 22 nt, Human
gugacauuuauuagaugcuuac

SEQ ID NO: 697673 - RNA, 17 nt, Human
aaggccauuuccaccca

SEQ ID NO: 697674 - RNA, 22 nt, Human
uagauucuucuaggucuuuagc

SEQ ID NO: 697675 - RNA, 22 nt, Human
uuauggaaaauacaauuauaag

SEQ ID NO: 697676 - RNA, 22 nt, Human
ucaguguuugaacccaggguua

SEQ ID NO: 697677 - RNA, 22 nt, Human
agcccaggcagagggaugcuug

SEQ ID NO: 697678 - RNA, 22 nt, Human
uguccagguuagcuucaaacac

SEQ ID NO: 697679 - RNA, 22 nt, Human
auuguacaacugaggguggaau

SEQ ID NO: 697680 - RNA, 22 nt, Human
ucauggcuucaaggaagcaggc

SEQ ID NO: 697681 - RNA, 21 nt, Human
ucaggcaggucccacugaaca

SEQ ID NO: 697682 - RNA, 22 nt, Human
gguggguauaguuagggccucu

SEQ ID NO: 697683 - RNA, 22 nt, Human
gauuucagggugucuuccagcu

SEQ ID NO: 697684 - RNA, 22 nt, Human
ugcauucaucauuugaaagccc

SEQ ID NO: 697685 - RNA, 22 nt, Human
cauuucuaagaaggcugcacau

SEQ ID NO: 697686 - RNA, 22 nt, Human
gagaauuacuguuuuuauaaca

SEQ ID NO: 697687 - RNA, 22 nt, Human
ccugggucuucagucugcuggu

SEQ ID NO: 697688 - RNA, 22 nt, Human
gaaggaagucauuagugcagac

SEQ ID NO: 697689 - RNA, 22 nt, Human
ccugugcuucagcuggaggagg

SEQ ID NO: 697690 - RNA, 22 nt, Human
ccuccugguccagcaucucuuu

SEQ ID NO: 697691 - RNA, 22 nt, Human
auugcugaaaguauuuuaugac

SEQ ID NO: 697692 - RNA, 23 nt, Human
agcaggcaucuguggcacaaggc

SEQ ID NO: 697693 - RNA, 22 nt, Human
uuaaauuauugagggauuguca

SEQ ID NO: 697694 - RNA, 22 nt, Human
caugagcugcugggagccuguc

SEQ ID NO: 697695 - RNA, 22 nt, Human
gaucuugaaauaucuuuuccua

SEQ ID NO: 697696 - RNA, 22 nt, Human
acagggaauggagggaucagua

SEQ ID NO: 697697 - RNA, 22 nt, Human
ggcuaaagauguguucuuugga

SEQ ID NO: 697698 - RNA, 22 nt, Human
agccagagggaaucuuugggga

SEQ ID NO: 697699 - RNA, 22 nt, Human
uagguucacuuagcugugggaa

SEQ ID NO: 697700 - RNA, 22 nt, Human
aaguugagaugucauaggagac

SEQ ID NO: 697701 - RNA, 22 nt, Human
uguuuacuccugauauauuuuu

SEQ ID NO: 697702 - RNA, 22 nt, Human
ggagcuggagagcuagccuagg

SEQ ID NO: 697703 - RNA, 22 nt, Human
caggaggacauacuggcucaca

SEQ ID NO: 697704 - RNA, 22 nt, Human
cuuaauuuaaaauaguucaggc

SEQ ID NO: 697705 - RNA, 22 nt, Human
cuggugagacucagggaugcuu

SEQ ID NO: 697706 - RNA, 22 nt, Human
ugaggccacaggaaagggcccg

SEQ ID NO: 697707 - RNA, 22 nt, Human
agcuuccugaugcaagagggcu

SEQ ID NO: 697708 - RNA, 22 nt, Human
gggcucuggaaaugggagcucc

SEQ ID NO: 697709 - RNA, 22 nt, Human
uauugucuaucgcugcuuucau

SEQ ID NO: 697710 - RNA, 22 nt, Human
ugcagagaaaccaguggaggac

SEQ ID NO: 697711 - RNA, 22 nt, Human
uauuguccaauaggauguuccu

SEQ ID NO: 697712 - RNA, 22 nt, Human
cagaguuuugugaacaacuugg

SEQ ID NO: 697713 - RNA, 17 nt, Human
gaggagcuccaguaggu

SEQ ID NO: 697714 - RNA, 19 nt, Human
agggcggggcccaggcaca

SEQ ID NO: 697715 - RNA, 22 nt, Human
ugguggggcuuuccuucugcuu

SEQ ID NO: 697716 - RNA, 22 nt, Human
aaacaaacaauuaguugugugg

SEQ ID NO: 697717 - RNA, 22 nt, Human
agaaaauuacuccagagacaag

SEQ ID NO: 697718 - RNA, 22 nt, Human
acaguguguucugggaccucca

SEQ ID NO: 697719 - RNA, 22 nt, Human
acuguaauguuuuaaagcagag

SEQ ID NO: 697720 - RNA, 22 nt, Human
ugucuuuaugcacacugacuug

SEQ ID NO: 697721 - RNA, 22 nt, Human
gcagugaauuuaacacucagau

SEQ ID NO: 697722 - RNA, 22 nt, Human
cugggcucaccuguggcuggca

SEQ ID NO: 697723 - RNA, 22 nt, Human
cuccaggacagauucagggcca

SEQ ID NO: 697724 - RNA, 22 nt, Human
augcuuuuuaaacuuaauugga

SEQ ID NO: 697725 - RNA, 22 nt, Human
ucuucugugaucuauguguuuu

SEQ ID NO: 697726 - RNA, 22 nt, Human
ucugauguugcuucugcagaac

SEQ ID NO: 697727 - RNA, 22 nt, Human
uucaggauccccuugaugggcu

SEQ ID NO: 697728 - RNA, 22 nt, Human
ccucagaagaaguggaauugau

SEQ ID NO: 697729 - RNA, 22 nt, Human
gucaccucgcugucuuccugag

SEQ ID NO: 697730 - RNA, 22 nt, Human
gauucagugagggugagaagaa

SEQ ID NO: 697731 - RNA, 22 nt, Human
agaaaucaggaacaguaaggag

SEQ ID NO: 697732 - RNA, 22 nt, Human
uuuuguauagucaaagacaaga

SEQ ID NO: 697733 - RNA, 22 nt, Human
aaugcucucugccauagcuaac

SEQ ID NO: 697734 - RNA, 22 nt, Human
cugccacuagcuuucacaucuu

SEQ ID NO: 697735 - RNA, 22 nt, Human
uaagacaauucuucagucacaa

SEQ ID NO: 697736 - RNA, 22 nt, Human
ucacccuugauaauguucuucu

SEQ ID NO: 697737 - RNA, 21 nt, Human
gcagaugggaagagacgaggc

SEQ ID NO: 697738 - RNA, 22 nt, Human
cuaaacuucuuggcaauuuuau

SEQ ID NO: 697739 - RNA, 22 nt, Human
cuauauauaucaucuuccaguu

SEQ ID NO: 697740 - RNA, 22 nt, Human
cagauaugauaggauuagcaca

SEQ ID NO: 697741 - RNA, 22 nt, Human
agcaaacuaauugcaguucugg

SEQ ID NO: 697742 - RNA, 21 nt, Human
cugcaggugcugccaucaggg

SEQ ID NO: 697743 - RNA, 22 nt, Human
ucuccuuuaagauuuccucagg

SEQ ID NO: 697744 - RNA, 21 nt, Human
ucucugggaggacuugugaga

SEQ ID NO: 697745 - RNA, 22 nt, Human
ugugaguuauuuucaggaguuu

SEQ ID NO: 697746 - RNA, 22 nt, Human
uucuccaguuucucccuucagu

SEQ ID NO: 697747 - RNA, 22 nt, Human
gccccaagggagcccagcacac

SEQ ID NO: 697748 - RNA, 22 nt, Human
ggagucugaguccucauagaca

SEQ ID NO: 697749 - RNA, 22 nt, Human
acuucuguccuccaagccacgu

SEQ ID NO: 697750 - RNA, 22 nt, Human
uagaacaugugaaaauauagcc

SEQ ID NO: 697751 - RNA, 22 nt, Human
uccagggccaugaaguugcaca

SEQ ID NO: 697752 - RNA, 22 nt, Human
auggaaaugauggaacauuaaa

SEQ ID NO: 697753 - RNA, 22 nt, Human
uuaugauuugccacagauuggu

SEQ ID NO: 697754 - RNA, 22 nt, Human
caguggccugagccaggcuucc

SEQ ID NO: 697755 - RNA, 22 nt, Human
ucagccucagguguucagauuu

SEQ ID NO: 697756 - RNA, 22 nt, Human
uuaaaugugauuucauuuaugu

SEQ ID NO: 697757 - RNA, 22 nt, Human
ucugcagaaguggcugggccac

SEQ ID NO: 697758 - RNA, 22 nt, Human
ucccacugagcauaugcagaug

SEQ ID NO: 697759 - RNA, 22 nt, Human
gguggaguaauucgcagagguu

SEQ ID NO: 697760 - RNA, 22 nt, Human
ucugaagcacagcaggaagggu

SEQ ID NO: 697761 - RNA, 22 nt, Human
cccagcagcuugcacagugcug

SEQ ID NO: 697762 - RNA, 22 nt, Human
gugacuguuuuuaggaggagua

SEQ ID NO: 697763 - RNA, 22 nt, Human
caguauuugguaauuggcuacc

SEQ ID NO: 697764 - RNA, 20 nt, Human
uuauuucucauucuccuacu

SEQ ID NO: 697765 - RNA, 22 nt, Human
uugcuuuaaaauggcuaagucu

SEQ ID NO: 697766 - RNA, 22 nt, Human
uaaugugugucaucaguagagu

SEQ ID NO: 697767 - RNA, 23 nt, Human
gggaccaggcccuuccugguuug

SEQ ID NO: 697768 - RNA, 22 nt, Human
gaauacaaacuuaaggcuuuac

SEQ ID NO: 697769 - RNA, 22 nt, Human
uccuugaaaggggcugcagggc

SEQ ID NO: 697770 - RNA, 22 nt, Human
aggaggucagagccccaugcug

SEQ ID NO: 697771 - RNA, 22 nt, Human
gaagccccaaacccucgccauc

SEQ ID NO: 697772 - RNA, 19 nt, Human
augcagagaauggcaguag

SEQ ID NO: 697773 - RNA, 22 nt, Human
gcccaaagagcuuugaucucag

SEQ ID NO: 697774 - RNA, 22 nt, Human
uggcuucuucauaugugaucuu

SEQ ID NO: 697775 - RNA, 23 nt, Human
gcucuggagcugggccuggcagg

SEQ ID NO: 697776 - RNA, 22 nt, Human
aauguacacugaaagccuauca

SEQ ID NO: 697777 - RNA, 22 nt, Human
guggcuuuguuuccaaaugaaa

SEQ ID NO: 697778 - RNA, 22 nt, Human
aaagcagcugcucuggccuuga

SEQ ID NO: 697779 - RNA, 22 nt, Human
ucuucagauugcacugagcaag

SEQ ID NO: 697780 - RNA, 22 nt, Human
agaguguuuuucugucaaggac

SEQ ID NO: 697781 - RNA, 22 nt, Human
cugagcugcucccgcugcagcg

SEQ ID NO: 697782 - RNA, 22 nt, Human
cagguggcuucucugcagccuu

SEQ ID NO: 697783 - RNA, 22 nt, Human
uugcuuuauauucaagagagga

SEQ ID NO: 697784 - RNA, 22 nt, Human
uaauuguaaaguaguaguacag

SEQ ID NO: 697785 - RNA, 22 nt, Human
gauuuccaggucauuaauaaag

SEQ ID NO: 697786 - RNA, 22 nt, Human
cagggagaagucuggucagucc

SEQ ID NO: 697787 - RNA, 22 nt, Human
uaacacaguguccucagaaaca

SEQ ID NO: 697788 - RNA, 22 nt, Human
guaugucaaaaucugcaugaua

SEQ ID NO: 697789 - RNA, 22 nt, Human
aaccggagugauucccaccucu

SEQ ID NO: 697790 - RNA, 22 nt, Human
acuaguauaauugcccuaaccu

SEQ ID NO: 697791 - RNA, 22 nt, Human
gaugauggguugaugugaaggg

SEQ ID NO: 697792 - RNA, 22 nt, Human
uugcauuuguuugaguagaaug

SEQ ID NO: 697793 - RNA, 22 nt, Human
guccaagagucaagaagggggc

SEQ ID NO: 697794 - RNA, 22 nt, Human
uuuccagagcaugucugcucag

SEQ ID NO: 697795 - RNA, 22 nt, Human
cuucucauucaagcaaaacaga

SEQ ID NO: 697796 - RNA, 22 nt, Human
aaaacauugaauugcacacuau

SEQ ID NO: 697797 - RNA, 22 nt, Human
ugugucugcccuuaguacaucu

SEQ ID NO: 697798 - RNA, 22 nt, Human
uuugggcaggcuuuucccuaga

SEQ ID NO: 697799 - RNA, 22 nt, Human
ugggaccugcuccuggaaugag

SEQ ID NO: 697800 - RNA, 22 nt, Human
gccucucuccuuggcuugcagu

SEQ ID NO: 697801 - RNA, 22 nt, Human
agcggcuggaccagcguucaag

SEQ ID NO: 697802 - RNA, 22 nt, Human
agcuaggaaauugaggcugaga

SEQ ID NO: 697803 - RNA, 22 nt, Human
gagaaacaacacuugaugccuu

SEQ ID NO: 697804 - RNA, 22 nt, Human
ccuuuucuaggaugcuuuauag

SEQ ID NO: 697805 - RNA, 22 nt, Human
aguguuuggggugauuguaacc

SEQ ID NO: 697806 - RNA, 18 nt, Human
ugcccaccagaagaggga

SEQ ID NO: 697807 - RNA, 19 nt, Human
ucucuggcauagacucaau

SEQ ID NO: 697808 - RNA, 22 nt, Human
gcuuuggaugugugccugaggu

SEQ ID NO: 697809 - RNA, 22 nt, Human
ugaccaaagaguugcuuguauu

SEQ ID NO: 697810 - RNA, 22 nt, Human
uuguaaauaguaguaagaugcc

SEQ ID NO: 697811 - RNA, 21 nt, Human
acaauagaauagaguguggug

SEQ ID NO: 697812 - RNA, 22 nt, Human
uacaugcaugauacaaaguugc

SEQ ID NO: 697813 - RNA, 22 nt, Human
aauggccagcugggagaguuga

SEQ ID NO: 697814 - RNA, 20 nt, Human
uucugccuaggguuagccug

SEQ ID NO: 697815 - RNA, 22 nt, Human
aggaugagccgcgcaagcugac

SEQ ID NO: 697816 - RNA, 22 nt, Human
augcucugggcaggagcccugg

SEQ ID NO: 697817 - RNA, 22 nt, Human
accucugcucaagaccccuccg

SEQ ID NO: 697818 - RNA, 22 nt, Human
agcuggaggggccagcaggugu

SEQ ID NO: 697819 - RNA, 22 nt, Human
ugggugaggaugaugaggcagc

SEQ ID NO: 697820 - RNA, 22 nt, Human
gcucugaggcugugaggugcug

SEQ ID NO: 697821 - RNA, 22 nt, Human
auugucuuuggugcuuccagga

SEQ ID NO: 697822 - RNA, 22 nt, Human
uauuuagaugcauuuggauugc

SEQ ID NO: 697823 - RNA, 22 nt, Human
uuacaguuuauccaggaagagc

SEQ ID NO: 697824 - RNA, 22 nt, Human
cugagaaaccaggugcucugau

SEQ ID NO: 697825 - RNA, 22 nt, Human
cccucucucgguugcugugguu

SEQ ID NO: 697826 - RNA, 22 nt, Human
agcuggcagucauccuagugag

SEQ ID NO: 697827 - RNA, 22 nt, Human
aaugacucugcugcagagacac

SEQ ID NO: 697828 - RNA, 22 nt, Human
ggaaaacaagagaaugauguuu

SEQ ID NO: 697829 - RNA, 22 nt, Human
acacccaggaauaaggacuggg

SEQ ID NO: 697830 - RNA, 22 nt, Human
gccagagaggcaaauccuagca

SEQ ID NO: 697831 - RNA, 23 nt, Human
agcagcuguggaguuuugcauuu

SEQ ID NO: 697832 - RNA, 22 nt, Human
uggcccugggcagaggcaacau

SEQ ID NO: 697833 - RNA, 22 nt, Human
ggcaggcaaugaggaugggaag

SEQ ID NO: 697834 - RNA, 22 nt, Human
acauauauguaaaguacuuugu

SEQ ID NO: 697835 - RNA, 22 nt, Human
ucugcccuuggcucucuuguug

SEQ ID NO: 697836 - RNA, 22 nt, Human
gugaagaugccucaggugaccc

SEQ ID NO: 697837 - RNA, 22 nt, Human
ccagggugugagaaggaaguag

SEQ ID NO: 697838 - RNA, 22 nt, Human
uuguauuuauauugaauagcuu

SEQ ID NO: 697839 - RNA, 22 nt, Human
guggaagggacugccuagagga

SEQ ID NO: 697840 - RNA, 22 nt, Human
gcagggucuugagaggcagcca

SEQ ID NO: 697841 - RNA, 22 nt, Human
uugcccugcguuaccaucucuu

SEQ ID NO: 697842 - RNA, 22 nt, Human
uccucuggauauaagccucacc

SEQ ID NO: 697843 - RNA, 22 nt, Human
auaauauuuggauaggacagua

SEQ ID NO: 697844 - RNA, 22 nt, Human
auaccucuggcacucaagacuu

SEQ ID NO: 697845 - RNA, 23 nt, Human
agggccuggcguggagugugugc

SEQ ID NO: 697846 - RNA, 22 nt, Human
cugaggagugggugggcaguga

SEQ ID NO: 697847 - RNA, 22 nt, Human
ccagagaaagugaagcaaaugu

SEQ ID NO: 697848 - RNA, 22 nt, Human
uuuagagucauuuuauauugac

SEQ ID NO: 697849 - RNA, 22 nt, Human
uucucagaaaagcaagcuuucu

SEQ ID NO: 697850 - RNA, 22 nt, Human
aguucuuuguaaaaggucucua

SEQ ID NO: 697851 - RNA, 20 nt, Human
cucuuauugcauuaguuucu

SEQ ID NO: 697852 - RNA, 22 nt, Human
ugucucaucucuuaaccccacu

SEQ ID NO: 697853 - RNA, 22 nt, Human
uggagcuggcagcggaaaaggg

SEQ ID NO: 697854 - RNA, 22 nt, Human
cauuuguauagugcuuagacca

SEQ ID NO: 697855 - RNA, 22 nt, Human
uucacauuauaaucaguucugc

SEQ ID NO: 697856 - RNA, 22 nt, Human
agaaugucuaaguguucagccc

SEQ ID NO: 697857 - RNA, 21 nt, Human
caaccugagcugaacccgugc

SEQ ID NO: 697858 - RNA, 22 nt, Human
gccucaggccuauagcugcugu

SEQ ID NO: 697859 - RNA, 22 nt, Human
cagagacagaaaauggaucuag

SEQ ID NO: 697860 - RNA, 22 nt, Human
uguauacauguguucaugcaug

SEQ ID NO: 697861 - RNA, 22 nt, Human
caggugcuguccugcacauguc

SEQ ID NO: 697862 - RNA, 22 nt, Human
aaguaacacggaacuugaagca

SEQ ID NO: 697863 - RNA, 22 nt, Human
cuuacaaaggagaggagauagg

SEQ ID NO: 697864 - RNA, 22 nt, Human
accagaguuuuauuaguucuaa

SEQ ID NO: 697865 - RNA, 23 nt, Human
cugcauguccacugguguaaaug

SEQ ID NO: 697866 - RNA, 22 nt, Human
aaaugcacucugcuucugugac

SEQ ID NO: 697867 - RNA, 22 nt, Human
auuucagguaccugugggaucc

SEQ ID NO: 697868 - RNA, 22 nt, Human
cucagguagagucugcaugggg

SEQ ID NO: 697869 - RNA, 23 nt, Human
guggccuccccggaaugccucgc

SEQ ID NO: 697870 - RNA, 22 nt, Human
caguggaggcucaagugugcuu

SEQ ID NO: 697871 - RNA, 22 nt, Human
ucuucagacuccaaauguuuua

SEQ ID NO: 697872 - RNA, 22 nt, Human
guccucagagugggcagguccu

SEQ ID NO: 697873 - RNA, 22 nt, Human
cagcagacuuacuagaauguaa

SEQ ID NO: 697874 - RNA, 22 nt, Human
cagauggcacagauuuagagug

SEQ ID NO: 697875 - RNA, 22 nt, Human
uaucuguuguccaugcagaaag

SEQ ID NO: 697876 - RNA, 22 nt, Human
uccugaacagcuccugagcaug

SEQ ID NO: 697877 - RNA, 22 nt, Human
ucugucacugagcucaggauuc

SEQ ID NO: 697878 - RNA, 22 nt, Human
gaggggucacaugggcuggcuu

SEQ ID NO: 697879 - RNA, 22 nt, Human
ccucaaauugcucagcgucuag

SEQ ID NO: 697880 - RNA, 22 nt, Human
aauuaaaagauaacccaugagu

SEQ ID NO: 697881 - RNA, 22 nt, Human
uuuccuuuuggcuaggugugaa

SEQ ID NO: 697882 - RNA, 22 nt, Human
auguuuucaaaguaaacuugua

SEQ ID NO: 697883 - RNA, 22 nt, Human
aggcccugcauuguacugaggg

SEQ ID NO: 697884 - RNA, 22 nt, Human
agcaggaaucuguucuguauaa

SEQ ID NO: 697885 - RNA, 22 nt, Human
cagucucucuccuugcaggcgu

SEQ ID NO: 697886 - RNA, 22 nt, Human
cagaaauacccagcauuuggag

SEQ ID NO: 697887 - RNA, 18 nt, Human
ggcagggaaaagauaggg

SEQ ID NO: 697888 - RNA, 22 nt, Human
cacaauuuccauugagcagcag

SEQ ID NO: 697889 - RNA, 22 nt, Human
cuucuuaaucccuuauauauuu

SEQ ID NO: 697890 - RNA, 22 nt, Human
gccagaucugacauaguggaag

SEQ ID NO: 697891 - RNA, 22 nt, Human
ucagaaagguucuauguuuuac

SEQ ID NO: 697892 - RNA, 22 nt, Human
ugaugcaauguuuacaucuuga

SEQ ID NO: 697893 - RNA, 22 nt, Human
uguggggacugaguggaggcuu

SEQ ID NO: 697894 - RNA, 22 nt, Human
gcuggugucuaaccuggcucuu

SEQ ID NO: 697895 - RNA, 22 nt, Human
acacuucuauucccugcacaaa

SEQ ID NO: 697896 - RNA, 22 nt, Human
augcaugugugagagcaagagg

SEQ ID NO: 697897 - RNA, 22 nt, Human
aagaguuuccaugcucugugcu

SEQ ID NO: 697898 - RNA, 22 nt, Human
cagcucaggaaggaaggccggc

SEQ ID NO: 697899 - RNA, 23 nt, Human
uugaggucggcucucugagccug

SEQ ID NO: 697900 - RNA, 22 nt, Human
gaagccacuauagauauucuaa

SEQ ID NO: 697901 - RNA, 22 nt, Human
augucuguuuauccuucaagau

SEQ ID NO: 697902 - RNA, 22 nt, Human
gcccagaagugacucagcacug

SEQ ID NO: 697903 - RNA, 22 nt, Human
cuucucaguugcaagugucaga

SEQ ID NO: 697904 - RNA, 22 nt, Human
ggcugugagcaggcagaaugcu

SEQ ID NO: 697905 - RNA, 22 nt, Human
uaguuuuauaauguuaacaucu

SEQ ID NO: 697906 - RNA, 22 nt, Human
uggaguggacuucaugaggcca

SEQ ID NO: 697907 - RNA, 22 nt, Human
guaauuaggaauaaaaugggaa

SEQ ID NO: 697908 - RNA, 22 nt, Human
agcauuuaauuacaguuuaauu

SEQ ID NO: 697909 - RNA, 22 nt, Human
ugcucuaagaacucuaggaauu

SEQ ID NO: 697910 - RNA, 22 nt, Human
uuuuaaaucuccaguugacccc

SEQ ID NO: 697911 - RNA, 22 nt, Human
aggaugacuggaacccaaguga

SEQ ID NO: 697912 - RNA, 17 nt, Human
uuucagauucacuuucu

SEQ ID NO: 697913 - RNA, 22 nt, Human
augcagaagacugaaaagcuga

SEQ ID NO: 697914 - RNA, 22 nt, Human
cagcuucuucaguccuggagcu

SEQ ID NO: 697915 - RNA, 22 nt, Human
ccaggagguggcaggacuugcc

SEQ ID NO: 697916 - RNA, 22 nt, Human
gggucugaggaguaccauuguc

SEQ ID NO: 697917 - RNA, 22 nt, Human
uuagaaagaauagccuggcugc

SEQ ID NO: 697918 - RNA, 22 nt, Human
aggacaguccgggguccuccac

SEQ ID NO: 697919 - RNA, 22 nt, Human
ucugagcuccaugcaggaggcu

SEQ ID NO: 697920 - RNA, 22 nt, Human
cagugagaauucaguagguacu

SEQ ID NO: 697921 - RNA, 22 nt, Human
accgcagugacgugggacuucc

SEQ ID NO: 697922 - RNA, 22 nt, Human
ucuuccaguguagacaucugcc

SEQ ID NO: 697923 - RNA, 22 nt, Human
uccaggccccacugaagccccu

SEQ ID NO: 697924 - RNA, 22 nt, Human
auuuacagugugccuacuauau

SEQ ID NO: 697925 - RNA, 22 nt, Human
uucuggggcuaauacagagguc

SEQ ID NO: 697926 - RNA, 22 nt, Human
auaauggcuugugguguuauuc

SEQ ID NO: 697927 - RNA, 22 nt, Human
aacauugaacuuggcacaccca

SEQ ID NO: 697928 - RNA, 22 nt, Human
ggacaaaauccaaacuucuuag

SEQ ID NO: 697929 - RNA, 18 nt, Human
cagcaucuucauuaggcc

SEQ ID NO: 697930 - RNA, 17 nt, Human
cacaggugugguuugag

SEQ ID NO: 697931 - RNA, 22 nt, Human
cagucaggaaugccuccuuccu

SEQ ID NO: 697932 - RNA, 22 nt, Human
ugggacagugaccccagagguc

SEQ ID NO: 697933 - RNA, 22 nt, Human
gggcccugcgacucgcggcgga

SEQ ID NO: 697934 - RNA, 22 nt, Human
acaaucaguauuuagacccagg

SEQ ID NO: 697935 - RNA, 22 nt, Human
augucuguccccuagcccugau

SEQ ID NO: 697936 - RNA, 22 nt, Human
gagucuggugauggucauuguc

SEQ ID NO: 697937 - RNA, 22 nt, Human
gcauucauucauucauuaggua

SEQ ID NO: 697938 - RNA, 22 nt, Human
uguaggaguccaaucaggagac

SEQ ID NO: 697939 - RNA, 22 nt, Human
uacaagugcuagcagauauugu

SEQ ID NO: 697940 - RNA, 22 nt, Human
agagaagggccuguauguaauc

SEQ ID NO: 697941 - RNA, 22 nt, Human
cccaggagacagaaacagaggu

SEQ ID NO: 697942 - RNA, 22 nt, Human
gaagguuugaaauagguauaga

SEQ ID NO: 697943 - RNA, 22 nt, Human
accagaagcuggagcacaagga

SEQ ID NO: 697944 - RNA, 22 nt, Human
gacuuugugccaaacgccagaa

SEQ ID NO: 697945 - RNA, 22 nt, Human
uagucacacaauuguguacauu

SEQ ID NO: 697946 - RNA, 22 nt, Human
uaaaugacccaugcugaccuca

SEQ ID NO: 697947 - RNA, 22 nt, Human
cgcagaagagguugucuagucc

SEQ ID NO: 697948 - RNA, 22 nt, Human
cugcuuccaugcaauggcaguc

SEQ ID NO: 697949 - RNA, 22 nt, Human
gggcagcugccccucucugggc

SEQ ID NO: 697950 - RNA, 22 nt, Human
ugauuaacguuuuaggcauacu

SEQ ID NO: 697951 - RNA, 22 nt, Human
gagguucaguaaggaauacuga

SEQ ID NO: 697952 - RNA, 22 nt, Human
uucauucccuuauauuagcauu

SEQ ID NO: 697953 - RNA, 22 nt, Human
caguguuuguauagaauaugca

SEQ ID NO: 697954 - RNA, 22 nt, Human
acugucaucagaagaugaaaau

SEQ ID NO: 697955 - RNA, 22 nt, Human
aacaaguguauuaauggaaaua

SEQ ID NO: 697956 - RNA, 22 nt, Human
gaauuagacaugcuuugcuuuu

SEQ ID NO: 697957 - RNA, 22 nt, Human
agguggaguuggcuguaguuca

SEQ ID NO: 697958 - RNA, 22 nt, Human
cuucaagguggcuaaauggggc

SEQ ID NO: 697959 - RNA, 22 nt, Human
gcucagcucuauggacacaaag

SEQ ID NO: 697960 - RNA, 22 nt, Human
accaucuuaguggccagcucuc

SEQ ID NO: 697961 - RNA, 22 nt, Human
cugcacagggauauggggagcu

SEQ ID NO: 697962 - RNA, 22 nt, Human
gaaguauaggagacaaacaaga

SEQ ID NO: 697963 - RNA, 22 nt, Human
cuacagagugaaugcagaaaau

SEQ ID NO: 697964 - RNA, 22 nt, Human
gacuucuucaugucuuuuccac

SEQ ID NO: 697965 - RNA, 22 nt, Human
uguaccaaacccaucauaacua

SEQ ID NO: 697966 - RNA, 22 nt, Human
acuguuauuuguaauccauuau

SEQ ID NO: 697967 - RNA, 22 nt, Human
cccucccuuccaaguugaggac

SEQ ID NO: 697968 - RNA, 22 nt, Human
ggagcugugggacgcuguccca

SEQ ID NO: 697969 - RNA, 21 nt, Human
ugcaggcaggcagagaugcug

SEQ ID NO: 697970 - RNA, 22 nt, Human
uuuagcaagaugcccuggcuuu

SEQ ID NO: 697971 - RNA, 22 nt, Human
gccagcagggaagccuugggcu

SEQ ID NO: 697972 - RNA, 22 nt, Human
guuaacuuuuuacagaaaugaa

SEQ ID NO: 697973 - RNA, 22 nt, Human
caugacaguccugaagagaacg

SEQ ID NO: 697974 - RNA, 22 nt, Human
cuauuuggccaagcugcccaca

SEQ ID NO: 697975 - RNA, 22 nt, Human
cuaguauuuaaaggcuaugauu

SEQ ID NO: 697976 - RNA, 17 nt, Human
gagagcugcugcuuccg

SEQ ID NO: 697977 - RNA, 22 nt, Human
ugugugugggcggaacggcccc

SEQ ID NO: 697978 - RNA, 22 nt, Human
aguggcagagccaggguuggga

SEQ ID NO: 697979 - RNA, 22 nt, Human
acaugcucuccuaaggcccugu

SEQ ID NO: 697980 - RNA, 22 nt, Human
aaacugauaaaauaaguacauu

SEQ ID NO: 697981 - RNA, 22 nt, Human
aagcauuuuaguaaugaacuug

SEQ ID NO: 697982 - RNA, 22 nt, Human
augcauauuucaugaaucuuug

SEQ ID NO: 697983 - RNA, 22 nt, Human
uucauucacccaggaaacaucu

SEQ ID NO: 697984 - RNA, 21 nt, Human
gaaagcacagaaaggacucuu

SEQ ID NO: 697985 - RNA, 23 nt, Human
uaaagugcugauggugagggagc

SEQ ID NO: 697986 - RNA, 22 nt, Human
ggcuggcuggcugguagacaag

SEQ ID NO: 697987 - RNA, 22 nt, Human
gagcaucgcugagaucccagac

SEQ ID NO: 697988 - RNA, 22 nt, Human
uuucagaagucacaguugacug

SEQ ID NO: 697989 - RNA, 22 nt, Human
uggcugcugcagacagacagga

SEQ ID NO: 697990 - RNA, 22 nt, Human
ggcuggcacgaagcccugcugg

SEQ ID NO: 697991 - RNA, 22 nt, Human
aggcaaaauuacaaaguuauua

SEQ ID NO: 697992 - RNA, 22 nt, Human
ccaggacagggagacgggagcc

SEQ ID NO: 697993 - RNA, 22 nt, Human
uucagaaugcuauuucugaaau

SEQ ID NO: 697994 - RNA, 22 nt, Human
cauaauuugauaugcuugaugg

SEQ ID NO: 697995 - RNA, 22 nt, Human
uuucagaccuggaugugggggc

SEQ ID NO: 697996 - RNA, 22 nt, Human
acaugcagugaggaucuuagaa

SEQ ID NO: 697997 - RNA, 22 nt, Human
gagggcugcugccagauaugcc

SEQ ID NO: 697998 - RNA, 22 nt, Human
agagccucugucauggagagaa

SEQ ID NO: 697999 - RNA, 22 nt, Human
ucuacugcacuggugucucauc

SEQ ID NO: 698000 - RNA, 22 nt, Human
ccuuguguuuacaccugucuuu

SEQ ID NO: 698001 - RNA, 22 nt, Human
cugggagaugacucagagcagg

SEQ ID NO: 698002 - RNA, 23 nt, Human
ugcuggcugaaacagccaaagga

SEQ ID NO: 698003 - RNA, 22 nt, Human
uagcuguucaaguuccuggaaa

SEQ ID NO: 698004 - RNA, 22 nt, Human
uucacauaaauagaucacauca

SEQ ID NO: 698005 - RNA, 22 nt, Human
auugauauauuauuucuaacug

SEQ ID NO: 698006 - RNA, 22 nt, Human
uguugccuggggaagcucugau

SEQ ID NO: 698007 - RNA, 22 nt, Human
ccuucugagcuucaauuucagu

SEQ ID NO: 698008 - RNA, 22 nt, Human
uucacuaugcuuggaaacuucu

SEQ ID NO: 698009 - RNA, 21 nt, Human
aggugcuggcgccccaggaga

SEQ ID NO: 698010 - RNA, 22 nt, Human
cauaauauacuacauugaugaa

SEQ ID NO: 698011 - RNA, 22 nt, Human
ggccuggcugguucaguacccu

SEQ ID NO: 698012 - RNA, 22 nt, Human
cugccaggcagcagagggagaa

SEQ ID NO: 698013 - RNA, 22 nt, Human
uauagcaagcuuugagcuuuca

SEQ ID NO: 698014 - RNA, 20 nt, Human
uccaggcuccuccacuuagu

SEQ ID NO: 698015 - RNA, 22 nt, Human
aggugggcgcugcucccgcugg

SEQ ID NO: 698016 - RNA, 22 nt, Human
aaaagcucuuucugcuguagau

SEQ ID NO: 698017 - RNA, 22 nt, Human
accugucaugucaauguucagu

SEQ ID NO: 698018 - RNA, 22 nt, Human
agccugggcaacaacacagcga

SEQ ID NO: 698019 - RNA, 22 nt, Human
ugccagaguuacaugaggguca

SEQ ID NO: 698020 - RNA, 19 nt, Human
ucugggguguggccuggca

SEQ ID NO: 698021 - RNA, 22 nt, Human
cccacuuugguugcacucugcc

SEQ ID NO: 698022 - RNA, 22 nt, Human
uuacucauugcuggaucuagaa

SEQ ID NO: 698023 - RNA, 22 nt, Human
gagacacucaacaaagauauga

SEQ ID NO: 698024 - RNA, 22 nt, Human
gcaaaugaagguggugcuacag

SEQ ID NO: 698025 - RNA, 22 nt, Human
auuuccauuaucaugacaaauu

SEQ ID NO: 698026 - RNA, 22 nt, Human
augagacaugacuucaggccuu

SEQ ID NO: 698027 - RNA, 22 nt, Human
cagaagaggacuggguagcuca

SEQ ID NO: 698028 - RNA, 22 nt, Human
aacccuggagaaggcuuuggau

SEQ ID NO: 698029 - RNA, 22 nt, Human
uagaagauucuaaaguggagag

SEQ ID NO: 698030 - RNA, 22 nt, Human
aaucuguuuuugaaacuuugua

SEQ ID NO: 698031 - RNA, 22 nt, Human
aggaagggcuguuucuccaaga

SEQ ID NO: 698032 - RNA, 22 nt, Human
uugccagauaggcaugaaaagu

SEQ ID NO: 698033 - RNA, 22 nt, Human
auuauugucaucuuaaucuuaa

SEQ ID NO: 698034 - RNA, 22 nt, Human
auggccuggccagagcucugcu

SEQ ID NO: 698035 - RNA, 22 nt, Human
uaacacaugguucugucaggaa

SEQ ID NO: 698036 - RNA, 22 nt, Human
augcaccacagauaucugcgua

SEQ ID NO: 698037 - RNA, 22 nt, Human
uccuguggcuuccacgaccuaa

SEQ ID NO: 698038 - RNA, 22 nt, Human
guuacacaggaaaacauuagca

SEQ ID NO: 698039 - RNA, 22 nt, Human
gcaauaaaguagcagcucauca

SEQ ID NO: 698040 - RNA, 22 nt, Human
gagcuaagcccuggagaggucg

SEQ ID NO: 698041 - RNA, 22 nt, Human
aaguuaggaugaaugccuuagc

SEQ ID NO: 698042 - RNA, 22 nt, Human
auaaucuguggaugguuuugag

SEQ ID NO: 698043 - RNA, 22 nt, Human
agccacuggccugggcagcucu

SEQ ID NO: 698044 - RNA, 22 nt, Human
caacaugccagacauuaguuug

SEQ ID NO: 698045 - RNA, 22 nt, Human
cucugcuuuuaugugccggcgc

SEQ ID NO: 698046 - RNA, 18 nt, Human
uggcuucugaacaacugc

SEQ ID NO: 698047 - RNA, 22 nt, Human
auccaaaguagauuaagucaca

SEQ ID NO: 698048 - RNA, 22 nt, Human
cagagccaacgccaccugccca

SEQ ID NO: 698049 - RNA, 22 nt, Human
acagauaauuagcauaaaugcu

SEQ ID NO: 698050 - RNA, 22 nt, Human
aguccugguucugauucugaca

SEQ ID NO: 698051 - RNA, 22 nt, Human
guaugcaugcauguguauguac

SEQ ID NO: 698052 - RNA, 22 nt, Human
uuaagagcaacauauggugaca

SEQ ID NO: 698053 - RNA, 22 nt, Human
cccugcagggaggauucugaag

SEQ ID NO: 698054 - RNA, 22 nt, Human
augcacauacauaugcucuaua

SEQ ID NO: 698055 - RNA, 22 nt, Human
ccugaggucaugcauuuccaac

SEQ ID NO: 698056 - RNA, 22 nt, Human
uggcuagcccuuguggggagag

SEQ ID NO: 698057 - RNA, 22 nt, Human
acugggaagacuggaauugcuc

SEQ ID NO: 698058 - RNA, 22 nt, Human
aauguucagaggacaauauaaa

SEQ ID NO: 698059 - RNA, 22 nt, Human
auagugucuuucuucacaggca

SEQ ID NO: 698060 - RNA, 22 nt, Human
uauucacaguugauuuacaguu

SEQ ID NO: 698061 - RNA, 22 nt, Human
aucuguguguuauuguuuauca

SEQ ID NO: 698062 - RNA, 21 nt, Human
ccucugcucgggcaugcguuu

SEQ ID NO: 698063 - RNA, 22 nt, Human
ggcagaguugguggagucaguu

SEQ ID NO: 698064 - RNA, 22 nt, Human
guucuucaggcugugcucuaga

SEQ ID NO: 698065 - RNA, 22 nt, Human
uccuaauugcuucauguguugu

SEQ ID NO: 698066 - RNA, 22 nt, Human
augggggcggcugaagcccagg

SEQ ID NO: 698067 - RNA, 22 nt, Human
aggagucagauaugggaaaguu

SEQ ID NO: 698068 - RNA, 22 nt, Human
cucuggacagcaggugcugugg

SEQ ID NO: 698069 - RNA, 21 nt, Human
auggagggaccagggaagcag

SEQ ID NO: 698070 - RNA, 22 nt, Human
uaacacacugaaggugagaugg

SEQ ID NO: 698071 - RNA, 22 nt, Human
gaggccagaugucaugucuuau

SEQ ID NO: 698072 - RNA, 22 nt, Human
aggugacaucccggcagcagag

SEQ ID NO: 698073 - RNA, 18 nt, Human
aagaggcuguucuguggg

SEQ ID NO: 698074 - RNA, 22 nt, Human
cuguauaauucaugcucuuauu

SEQ ID NO: 698075 - RNA, 22 nt, Human
cagcuggcuggucagugcacaa

SEQ ID NO: 698076 - RNA, 22 nt, Human
uauugcuuucucagacguuuag

SEQ ID NO: 698077 - RNA, 22 nt, Human
aguucucaagacaauuaccugu

SEQ ID NO: 698078 - RNA, 22 nt, Human
ucagauuuguccuacuaggcac

SEQ ID NO: 698079 - RNA, 22 nt, Human
ucaggagcagccuuggagagcg

SEQ ID NO: 698080 - RNA, 18 nt, Human
cuugcaguguguggagaa

SEQ ID NO: 698081 - RNA, 22 nt, Human
agcaccugccugcauuggcuau

SEQ ID NO: 698082 - RNA, 22 nt, Human
cuugggaguagaggcaggagca

SEQ ID NO: 698083 - RNA, 22 nt, Human
aguaaaucagaccucauuaugu

SEQ ID NO: 698084 - RNA, 22 nt, Human
uauuaugaucccagcccuggag

SEQ ID NO: 698085 - RNA, 22 nt, Human
ggaacuuuuuaacaagcugcug

SEQ ID NO: 698086 - RNA, 22 nt, Human
gcuggcuuaauagggaugggcu

SEQ ID NO: 698087 - RNA, 22 nt, Human
aaguggagcuauaggcucagau

SEQ ID NO: 698088 - RNA, 22 nt, Human
cacuggaauggauagagcagag

SEQ ID NO: 698089 - RNA, 22 nt, Human
uaagaacaagcuggggguucca

SEQ ID NO: 698090 - RNA, 22 nt, Human
uaauacugaaaggaguaucagc

SEQ ID NO: 698091 - RNA, 22 nt, Human
agggguuggauuuggccuagag

SEQ ID NO: 698092 - RNA, 22 nt, Human
uguaugaggcauacaucaggca

SEQ ID NO: 698093 - RNA, 18 nt, Human
cuacauucauaggaaagg

SEQ ID NO: 698094 - RNA, 22 nt, Human
uuuauuaugauggacaccuucg

SEQ ID NO: 698095 - RNA, 22 nt, Human
ggaaagaaucaagugauccugu

SEQ ID NO: 698096 - RNA, 22 nt, Human
uucagcacaguucaagauggua

SEQ ID NO: 698097 - RNA, 20 nt, Human
aguguuucucaacauggggc

SEQ ID NO: 698098 - RNA, 22 nt, Human
cugcccacaguucucugccaug

SEQ ID NO: 698099 - RNA, 22 nt, Human
gucagccugcacucagggagcg

SEQ ID NO: 698100 - RNA, 22 nt, Human
augcugaauugaugcgagggag

SEQ ID NO: 698101 - RNA, 22 nt, Human
aggggcuccuggccuggagagc

SEQ ID NO: 698102 - RNA, 22 nt, Human
cagcuggcagaaccugcaucca

SEQ ID NO: 698103 - RNA, 22 nt, Human
ucccugggaccggcagcucaca

SEQ ID NO: 698104 - RNA, 22 nt, Human
cuuguuuaagccgcuguuaagc

SEQ ID NO: 698105 - RNA, 22 nt, Human
ugagaauauuguuuuagugagg

SEQ ID NO: 698106 - RNA, 22 nt, Human
ugaguuauugcagcuuccuccu

SEQ ID NO: 698107 - RNA, 22 nt, Human
aggccaggguagggcccauugu

SEQ ID NO: 698108 - RNA, 17 nt, Human
gcucugccccagccucu

SEQ ID NO: 698109 - RNA, 22 nt, Human
caggugggcguggcgagaaggc

SEQ ID NO: 698110 - RNA, 22 nt, Human
caucagaagaaagacaaaugau

SEQ ID NO: 698111 - RNA, 22 nt, Human
uccugcaguuacaucccagcca

SEQ ID NO: 698112 - RNA, 23 nt, Human
uuggaagggaagagcauuugaga

SEQ ID NO: 698113 - RNA, 22 nt, Human
acaaaugaaucauacauaaugu

SEQ ID NO: 698114 - RNA, 22 nt, Human
caggcuccagcuuccugcucag

SEQ ID NO: 698115 - RNA, 22 nt, Human
auagacaaacacgaagaugaca

SEQ ID NO: 698116 - RNA, 21 nt, Human
auaagcaugcugauuacauuu

SEQ ID NO: 698117 - RNA, 22 nt, Human
gggcucaggccuggccucucac

SEQ ID NO: 698118 - RNA, 22 nt, Human
uuaaggcugguccccucugcgu

SEQ ID NO: 698119 - RNA, 22 nt, Human
ggaagcugggaucucucucccg

SEQ ID NO: 698120 - RNA, 22 nt, Human
uaccaguaauguaacuuugcaa

SEQ ID NO: 698121 - RNA, 21 nt, Human
cuucaucccggagauucuggu

SEQ ID NO: 698122 - RNA, 22 nt, Human
uguguggaugcagcgugggucu

SEQ ID NO: 698123 - RNA, 22 nt, Human
aggaagcacuggaagggguugg

SEQ ID NO: 698124 - RNA, 22 nt, Human
aaaccucuuuccauuagaggaa

SEQ ID NO: 698125 - RNA, 22 nt, Human
ugucauaugcugucauagccau

SEQ ID NO: 698126 - RNA, 22 nt, Human
ucacuguagagucuguuuccac

SEQ ID NO: 698127 - RNA, 22 nt, Human
caccuggcuggaagugcuccgg

SEQ ID NO: 698128 - RNA, 22 nt, Human
aggagaucagccucccugcaac

SEQ ID NO: 698129 - RNA, 22 nt, Human
cuucucuucccagggacacagg

SEQ ID NO: 698130 - RNA, 22 nt, Human
acaaagucugaaaccugaggca

SEQ ID NO: 698131 - RNA, 22 nt, Human
auuugucugcuugcugccuucc

SEQ ID NO: 698132 - RNA, 22 nt, Human
uugaguucagggguugauugga

SEQ ID NO: 698133 - RNA, 22 nt, Human
uaaguuuggggaaaauguuaag

SEQ ID NO: 698134 - RNA, 22 nt, Human
aaauggcauagaggugaaggua

SEQ ID NO: 698135 - RNA, 22 nt, Human
uuugacaaauaggggaauaagg

SEQ ID NO: 698136 - RNA, 19 nt, Human
agucuuucccacucgucuu

SEQ ID NO: 698137 - RNA, 22 nt, Human
gggcucagggacacaugugugu

SEQ ID NO: 698138 - RNA, 22 nt, Human
aggcaaagcgauaccagagcua

SEQ ID NO: 698139 - RNA, 22 nt, Human
auggaaauggagggugcuagaa

SEQ ID NO: 698140 - RNA, 23 nt, Human
acacauauauucagauacagaug

SEQ ID NO: 698141 - RNA, 22 nt, Human
ugcucugugguccaagauggcu

SEQ ID NO: 698142 - RNA, 22 nt, Human
uacagaaucuaugcuucacagu

SEQ ID NO: 698143 - RNA, 22 nt, Human
uauuuccuguggauacuuuuag

SEQ ID NO: 698144 - RNA, 22 nt, Human
aauggagacuucaaaauggauu

SEQ ID NO: 698145 - RNA, 22 nt, Human
acacacaaaucuauuagugaau

SEQ ID NO: 698146 - RNA, 22 nt, Human
acagaggaaggcugagcugccc

SEQ ID NO: 698147 - RNA, 22 nt, Human
guuccuaagcacugugcauucu

SEQ ID NO: 698148 - RNA, 22 nt, Human
uagaagcaguaauagaaauagg

SEQ ID NO: 698149 - RNA, 22 nt, Human
gagagagaaggccugugggugu

SEQ ID NO: 698150 - RNA, 20 nt, Human
aggcaguguagagaugagua

SEQ ID NO: 698151 - RNA, 22 nt, Human
gggccaggaguggagauauggg

SEQ ID NO: 698152 - RNA, 22 nt, Human
aggcuguguggauaauauuggg

SEQ ID NO: 698153 - RNA, 22 nt, Human
uucuuaagcaccuaaaaagugg

SEQ ID NO: 698154 - RNA, 22 nt, Human
cuccugggagcagggauggaug

SEQ ID NO: 698155 - RNA, 22 nt, Human
gggcagcagaggaucccuuaau

SEQ ID NO: 698156 - RNA, 22 nt, Human
gauggagucugaagcugggaac

SEQ ID NO: 698157 - RNA, 22 nt, Human
gcuugguuucuaacuuuucaua

SEQ ID NO: 698158 - RNA, 22 nt, Human
ugaaaaacuuuaauccauaaag

SEQ ID NO: 698159 - RNA, 22 nt, Human
acaguauagggcuuauauugua

SEQ ID NO: 698160 - RNA, 22 nt, Human
accccagcccugcuucugggag

SEQ ID NO: 698161 - RNA, 22 nt, Human
agagccugaggcccugagaggg

SEQ ID NO: 698162 - RNA, 22 nt, Human
cugagguuuguccauccuuggu

SEQ ID NO: 698163 - RNA, 22 nt, Human
cacagcuuagaaaagaagccau

SEQ ID NO: 698164 - RNA, 22 nt, Human
uucucucuguggucccauuuug

SEQ ID NO: 698165 - RNA, 22 nt, Human
cugagcagcaacccagagccuc

SEQ ID NO: 698166 - RNA, 22 nt, Human
gggaaauuguaacaagucuguu

SEQ ID NO: 698167 - RNA, 22 nt, Human
uauguaaaguagauggcaggua

SEQ ID NO: 698168 - RNA, 22 nt, Human
gcugcccagcaggccccagggg

SEQ ID NO: 698169 - RNA, 22 nt, Human
gaggacaaagcccaggugcugg

SEQ ID NO: 698170 - RNA, 22 nt, Human
auauguguauggauuucuaucu

SEQ ID NO: 698171 - RNA, 22 nt, Human
uaagacacauucauaucugucu

SEQ ID NO: 698172 - RNA, 22 nt, Human
cagcucuguucauagauggugc

SEQ ID NO: 698173 - RNA, 22 nt, Human
gccuggggucccuuguuggcac

SEQ ID NO: 698174 - RNA, 22 nt, Human
acauacuuauguguauaugugu

SEQ ID NO: 698175 - RNA, 23 nt, Human
ugugacagugacaauacugacuu

SEQ ID NO: 698176 - RNA, 22 nt, Human
augaagucucuuuuucaugaga

SEQ ID NO: 698177 - RNA, 22 nt, Human
augcugccuccucuucagccgc

SEQ ID NO: 698178 - RNA, 22 nt, Human
agagggaucacccuguuucugg

SEQ ID NO: 698179 - RNA, 20 nt, Human
acauugauuauguuuguaga

SEQ ID NO: 698180 - RNA, 22 nt, Human
ucuacuuccgcaaaaggcacau

SEQ ID NO: 698181 - RNA, 22 nt, Human
uugaagauggaucgccacucuc

SEQ ID NO: 698182 - RNA, 22 nt, Human
auguguaugagugugcuucuuu

SEQ ID NO: 698183 - RNA, 22 nt, Human
caaggagaguaauugaaugaga

SEQ ID NO: 698184 - RNA, 22 nt, Human
aacaaauuaguugcaagacugg

SEQ ID NO: 698185 - RNA, 22 nt, Human
uucggucuuguguaaacacugu

SEQ ID NO: 698186 - RNA, 22 nt, Human
aacauguaaccagcauucaucu

SEQ ID NO: 698187 - RNA, 22 nt, Human
ugagcuguguccugggggcagu

SEQ ID NO: 698188 - RNA, 22 nt, Human
ggguggccuuaggcaagucacu

SEQ ID NO: 698189 - RNA, 22 nt, Human
gccauggggcucagcugcacua

SEQ ID NO: 698190 - RNA, 22 nt, Human
ugcugagaugaauagagaccuc

SEQ ID NO: 698191 - RNA, 22 nt, Human
uccaaggcuccggcccuggcgu

SEQ ID NO: 698192 - RNA, 22 nt, Human
agcacagauuugucaacauaga

SEQ ID NO: 698193 - RNA, 22 nt, Human
uuagaaacucaacucugggaau

SEQ ID NO: 698194 - RNA, 22 nt, Human
ugcuuucacaccaugccuauaa

SEQ ID NO: 698195 - RNA, 22 nt, Human
ccaugagcuuccuauauagggu

SEQ ID NO: 698196 - RNA, 22 nt, Human
auacacauuugcuagagauggg

SEQ ID NO: 698197 - RNA, 22 nt, Human
caaauguguagagcuuuugggg

SEQ ID NO: 698198 - RNA, 17 nt, Human
caggcuccuuccagauu

SEQ ID NO: 698199 - RNA, 22 nt, Human
ugauucuauggaaggcauaagg

SEQ ID NO: 698200 - RNA, 22 nt, Human
ucuauuugcugguugcuucugu

SEQ ID NO: 698201 - RNA, 22 nt, Human
aucugggccaauccuaguacca

SEQ ID NO: 698202 - RNA, 22 nt, Human
uggaggccagugaaaguagauu

SEQ ID NO: 698203 - RNA, 22 nt, Human
caaacauuugacuucucucagg

SEQ ID NO: 698204 - RNA, 22 nt, Human
uucuagaggggagauacuagua

SEQ ID NO: 698205 - RNA, 22 nt, Human
ucagcuguguaucccagggccu

SEQ ID NO: 698206 - RNA, 22 nt, Human
cuggaagggucuacuuagcaga

SEQ ID NO: 698207 - RNA, 22 nt, Human
cugcuuugcauagcugccagag

SEQ ID NO: 698208 - RNA, 22 nt, Human
aguuuucugauguguagugaga

SEQ ID NO: 698209 - RNA, 22 nt, Human
uaaugaaugagaauauaacaga

SEQ ID NO: 698210 - RNA, 22 nt, Human
uuaguaguaagagucauaugua

SEQ ID NO: 698211 - RNA, 22 nt, Human
ggcugaaguguaguggcucacu

SEQ ID NO: 698212 - RNA, 22 nt, Human
gaagugugcacaucuuacaagu

SEQ ID NO: 698213 - RNA, 22 nt, Human
uuucacagguaagcaauacagg

SEQ ID NO: 698214 - RNA, 22 nt, Human
ccagugugcauuaucauguguc

SEQ ID NO: 698215 - RNA, 22 nt, Human
ucuggcuucgcagcucccagcc

SEQ ID NO: 698216 - RNA, 22 nt, Human
aagacacugauacucugugauu

SEQ ID NO: 698217 - RNA, 22 nt, Human
uguguuuuggaaggaacaugca

SEQ ID NO: 698218 - RNA, 22 nt, Human
cuccagagagaaaggaggccgc

SEQ ID NO: 698219 - RNA, 22 nt, Human
agaguuaagacguacaugagug

SEQ ID NO: 698220 - RNA, 22 nt, Human
auaaaugccucagaaucauccc

SEQ ID NO: 698221 - RNA, 22 nt, Human
ggucccaggagaauaggugcaa

SEQ ID NO: 698222 - RNA, 22 nt, Human
cccugagcaacaaacugaauac

SEQ ID NO: 698223 - RNA, 22 nt, Human
cuccagcuucugcccagagacu

SEQ ID NO: 698224 - RNA, 22 nt, Human
ugccauuugccccagcacuguc

SEQ ID NO: 698225 - RNA, 22 nt, Human
gcagugaagauuugggcucugg

SEQ ID NO: 698226 - RNA, 22 nt, Human
uaaagguugaaaacugacugcc

SEQ ID NO: 698227 - RNA, 22 nt, Human
cugcaugcugagccaacaguga

SEQ ID NO: 698228 - RNA, 22 nt, Human
auugucuuaaacaaauguguuu

SEQ ID NO: 698229 - RNA, 22 nt, Human
augucuguuugcugagcccggc

SEQ ID NO: 698230 - RNA, 22 nt, Human
uacaaugcaaaauacugucugc

SEQ ID NO: 698231 - RNA, 22 nt, Human
auccaggcuggguguggcuacu

SEQ ID NO: 698232 - RNA, 22 nt, Human
uauguguaggaggaggacaggg

SEQ ID NO: 698233 - RNA, 21 nt, Human
uccugugaggaccugucagug

SEQ ID NO: 698234 - RNA, 22 nt, Human
ugaauaguccuuggaauaacug

SEQ ID NO: 698235 - RNA, 22 nt, Human
gaaacuucuugucucacaguuc

SEQ ID NO: 698236 - RNA, 22 nt, Human
guggugaguucaggcuggggug

SEQ ID NO: 698237 - RNA, 22 nt, Human
cccagagggcugaggauaugaa

SEQ ID NO: 698238 - RNA, 16 nt, Human
ugaggccagccauuuc

SEQ ID NO: 698239 - RNA, 22 nt, Human
cagaggcuucaagucauucucc

SEQ ID NO: 698240 - RNA, 22 nt, Human
ugauuuccaguugcugggugcu

SEQ ID NO: 698241 - RNA, 22 nt, Human
aacaggggauuagauagcaggc

SEQ ID NO: 698242 - RNA, 22 nt, Human
caugaacauucagaaauacagc

SEQ ID NO: 698243 - RNA, 22 nt, Human
cuauggaaaccuaaucaggaga

SEQ ID NO: 698244 - RNA, 22 nt, Human
agcucagaacugcagacaugug

SEQ ID NO: 698245 - RNA, 20 nt, Human
acaguguuuuugaguagagc

SEQ ID NO: 698246 - RNA, 22 nt, Human
aagauuuccuucaguagagcua

SEQ ID NO: 698247 - RNA, 22 nt, Human
uauucucauuagucuguauucc

SEQ ID NO: 698248 - RNA, 22 nt, Human
gucuccuuguggaucucaagga

SEQ ID NO: 698249 - RNA, 22 nt, Human
acugauuacacgaguucugacu

SEQ ID NO: 698250 - RNA, 22 nt, Human
agaaaguuugagaacuguagau

SEQ ID NO: 698251 - RNA, 22 nt, Human
uacaaccagauccucuaaguca

SEQ ID NO: 698252 - RNA, 22 nt, Human
ccuugcugaccaucaccuuuga

SEQ ID NO: 698253 - RNA, 22 nt, Human
ggccacugccuccgccauggcu

SEQ ID NO: 698254 - RNA, 22 nt, Human
caucaucaaaacaaauggaguc

SEQ ID NO: 698255 - RNA, 22 nt, Human
uucugcugcugcugcacccaau

SEQ ID NO: 698256 - RNA, 17 nt, Human
gaauuucuuggucaaaa

SEQ ID NO: 698257 - RNA, 22 nt, Human
acaggagcccaggaugggcgga

SEQ ID NO: 698258 - RNA, 21 nt, Human
aacaguucucuuugaaggugu

SEQ ID NO: 698259 - RNA, 18 nt, Human
uccagagcagucuuuggc

SEQ ID NO: 698260 - RNA, 22 nt, Human
aaagcugcccagcugccuguuu

SEQ ID NO: 698261 - RNA, 22 nt, Human
uggcuccuaucaaggagugggu

SEQ ID NO: 698262 - RNA, 22 nt, Human
aagccauggcaugccaggauca

SEQ ID NO: 698263 - RNA, 22 nt, Human
uaaugccgucucuacaagacuc

SEQ ID NO: 698264 - RNA, 19 nt, Human
aagauugccuuguuccauu

SEQ ID NO: 698265 - RNA, 22 nt, Human
cuucaaaucccccugaguuuga

SEQ ID NO: 698266 - RNA, 22 nt, Human
ccucagcagacacgcuucucac

SEQ ID NO: 698267 - RNA, 22 nt, Human
augaggcagauguugcaugagg

SEQ ID NO: 698268 - RNA, 22 nt, Human
uuguuaaaaugaggucauucug

SEQ ID NO: 698269 - RNA, 22 nt, Human
acagaugaugugcacagauaga

SEQ ID NO: 698270 - RNA, 22 nt, Human
uuuccuaagggaugcggcucaa

SEQ ID NO: 698271 - RNA, 22 nt, Human
ggagccugugcccaagcccaga

SEQ ID NO: 698272 - RNA, 22 nt, Human
aggcuguugagccccagcaagu

SEQ ID NO: 698273 - RNA, 22 nt, Human
uagcagcaauucaggugugaug

SEQ ID NO: 698274 - RNA, 18 nt, Human
uaggagagaauuuauuua

SEQ ID NO: 698275 - RNA, 22 nt, Human
uuacagauggcaguuucuugag

SEQ ID NO: 698276 - RNA, 23 nt, Human
cagugcugguucugccugugggg

SEQ ID NO: 698277 - RNA, 22 nt, Human
cucauacauaugccauuccugc

SEQ ID NO: 698278 - RNA, 22 nt, Human
ccuguucagagcuaagcaucau

SEQ ID NO: 698279 - RNA, 22 nt, Human
ugccaggcacgugagaguggcc

SEQ ID NO: 698280 - RNA, 22 nt, Human
ggccugcucaaacagauuccug

SEQ ID NO: 698281 - RNA, 22 nt, Human
uaugcacugguacuauucgugu

SEQ ID NO: 698282 - RNA, 17 nt, Human
ugcugcuaauuaaaaua

SEQ ID NO: 698283 - RNA, 22 nt, Human
cggaggggauacauuuucugaa

SEQ ID NO: 698284 - RNA, 22 nt, Human
uuguggcucgugagauguuagg

SEQ ID NO: 698285 - RNA, 22 nt, Human
agccacagucuguagccagcuu

SEQ ID NO: 698286 - RNA, 22 nt, Human
augagguaauacuuucaguccu

SEQ ID NO: 698287 - RNA, 22 nt, Human
acacuuuagauauucccuucug

SEQ ID NO: 698288 - RNA, 22 nt, Human
uugggagcuuggccgagaugua

SEQ ID NO: 698289 - RNA, 22 nt, Human
gugaacugcugaguuuuaucau

SEQ ID NO: 698290 - RNA, 22 nt, Human
gcccaagaucuggagcugcagg

SEQ ID NO: 698291 - RNA, 22 nt, Human
agcuuuauagaaaggaucagug

SEQ ID NO: 698292 - RNA, 22 nt, Human
cacagaggaaugcaucagcaga

SEQ ID NO: 698293 - RNA, 21 nt, Human
uucugcauuaagguggagaua

SEQ ID NO: 698294 - RNA, 22 nt, Human
ucucuuaauuguaaugguuccu

SEQ ID NO: 698295 - RNA, 22 nt, Human
cuuucucuucagcacccagccc

SEQ ID NO: 698296 - RNA, 22 nt, Human
ugaauuaucuuguaauuuugaa

SEQ ID NO: 698297 - RNA, 22 nt, Human
aagauucuguauuucuaacaau

SEQ ID NO: 698298 - RNA, 22 nt, Human
cuguuauuuuccucugaacucu

SEQ ID NO: 698299 - RNA, 22 nt, Human
auuuaagacugacuucaccagu

SEQ ID NO: 698300 - RNA, 22 nt, Human
uguuuauugcagugcugggcug

SEQ ID NO: 698301 - RNA, 22 nt, Human
uccucuggucuucgguguggac

SEQ ID NO: 698302 - RNA, 22 nt, Human
auguguaugcaugcacuaagau

SEQ ID NO: 698303 - RNA, 22 nt, Human
acuuggcugggagaguugaaga

SEQ ID NO: 698304 - RNA, 22 nt, Human
aagacaugcaauuagcaaggaa

SEQ ID NO: 698305 - RNA, 22 nt, Human
ucagguccaagauggccaucca

SEQ ID NO: 698306 - RNA, 22 nt, Human
aauugugcccgugacauuucau

SEQ ID NO: 698307 - RNA, 22 nt, Human
aggucacagcuuucucgugagg

SEQ ID NO: 698308 - RNA, 22 nt, Human
ugauucuguucuccuugagaau

SEQ ID NO: 698309 - RNA, 22 nt, Human
ugauucagucucuucaggagaa

SEQ ID NO: 698310 - RNA, 22 nt, Human
aaugcauaccaugucaucuuug

SEQ ID NO: 698311 - RNA, 22 nt, Human
agaauguguuauuagagaagga

SEQ ID NO: 698312 - RNA, 16 nt, Human
gacacaugggggaaaa

SEQ ID NO: 698313 - RNA, 22 nt, Human
accuuuggauaaucuuuguguu

SEQ ID NO: 698314 - RNA, 22 nt, Human
ugugggaggucuggaaggcucc

SEQ ID NO: 698315 - RNA, 18 nt, Human
uauucuguccuaugaagc

SEQ ID NO: 698316 - RNA, 18 nt, Human
gggcaucauucacaaagu

SEQ ID NO: 698317 - RNA, 21 nt, Human
cugcccuagauggcucuggaa

SEQ ID NO: 698318 - RNA, 21 nt, Human
aggggacagaguagcuccagg

SEQ ID NO: 698319 - RNA, 18 nt, Human
cugcccagagcauuucau

SEQ ID NO: 698320 - RNA, 22 nt, Human
ggccucugguucacagggagga

SEQ ID NO: 698321 - RNA, 22 nt, Human
aucugaagaaugaauggaauua

SEQ ID NO: 698322 - RNA, 22 nt, Human
uggcuggauaucagaggaagug

SEQ ID NO: 698323 - RNA, 22 nt, Human
agcuggcccacuguguggucca

SEQ ID NO: 698324 - RNA, 22 nt, Human
aucuuugaagaggacuugaagu

SEQ ID NO: 698325 - RNA, 17 nt, Human
gacuucaacuucugcug

SEQ ID NO: 698326 - RNA, 21 nt, Human
aggcugcuggcucaggguccu

SEQ ID NO: 698327 - RNA, 20 nt, Human
uucccuggaaggagaagcag

SEQ ID NO: 698328 - RNA, 22 nt, Human
uauggguaggguuugauaagau

SEQ ID NO: 698329 - RNA, 21 nt, Human
cuucuuggggagcagcuagac

SEQ ID NO: 698330 - RNA, 22 nt, Human
uauagcaagcaggacagucuca

SEQ ID NO: 698331 - RNA, 22 nt, Human
cugauuccagagucuguguucu

SEQ ID NO: 698332 - RNA, 22 nt, Human
ucucuggaauuggcugaggcaa

SEQ ID NO: 698333 - RNA, 22 nt, Human
ggucugaguggugcugacucag

SEQ ID NO: 698334 - RNA, 22 nt, Human
gcucuguguccacagcuggaaa

SEQ ID NO: 698335 - RNA, 22 nt, Human
ggugaggcccagugaucugugu

SEQ ID NO: 698336 - RNA, 18 nt, Human
ggcaggggugaaccacag

SEQ ID NO: 698337 - RNA, 22 nt, Human
caaaugaaguccaaagggcuua

SEQ ID NO: 698338 - RNA, 22 nt, Human
aacuguaauuuuuacauaguaa

SEQ ID NO: 698339 - RNA, 22 nt, Human
cuggcucugaguggcucuaauu

SEQ ID NO: 698340 - RNA, 22 nt, Human
ugagcaggcaaacaaugguuau

SEQ ID NO: 698341 - RNA, 22 nt, Human
ggauggcuguaaaaggugggaa

SEQ ID NO: 698342 - RNA, 22 nt, Human
acagugaaaaguagcuaacaca

SEQ ID NO: 698343 - RNA, 22 nt, Human
aaauaucuuaggaguauaugag

SEQ ID NO: 698344 - RNA, 22 nt, Human
uugcccugaagaacgucccaga

SEQ ID NO: 698345 - RNA, 21 nt, Human
ucuuuucucagcuuugugguu

SEQ ID NO: 698346 - RNA, 22 nt, Human
cacugcuugauugacaugcacg

SEQ ID NO: 698347 - RNA, 22 nt, Human
cagugguauuugagagaaugga

SEQ ID NO: 698348 - RNA, 22 nt, Human
auacaugugggucuaaacauau

SEQ ID NO: 698349 - RNA, 22 nt, Human
gcagcgagugcggcugccacag

SEQ ID NO: 698350 - RNA, 22 nt, Human
ucucauaauuagguaagucaga

SEQ ID NO: 698351 - RNA, 22 nt, Human
uguccaggcuaaagugcagugg

SEQ ID NO: 698352 - RNA, 22 nt, Human
cagggagcuggcuggcgugagu

SEQ ID NO: 698353 - RNA, 22 nt, Human
ugugcucugcaaucaguucuuu

SEQ ID NO: 698354 - RNA, 22 nt, Human
ugguuacccagucgcuggaguu

SEQ ID NO: 698355 - RNA, 22 nt, Human
ucaaguauuuauuucugcuggc

SEQ ID NO: 698356 - RNA, 22 nt, Human
ucuggggaugagugaugucgua

SEQ ID NO: 698357 - RNA, 22 nt, Human
aggggaaggccagccuguagag

SEQ ID NO: 698358 - RNA, 21 nt, Human
gcccagcaaggugagaaggcc

SEQ ID NO: 698359 - RNA, 20 nt, Human
uacugggucuggguccugga

SEQ ID NO: 698360 - RNA, 22 nt, Human
agucugaaggcaaucugcugac

SEQ ID NO: 698361 - RNA, 19 nt, Human
uggcucugucgaaggcaca

SEQ ID NO: 698362 - RNA, 22 nt, Human
cugugccuucuacuucacucua

SEQ ID NO: 698363 - RNA, 22 nt, Human
ucagcuguagguauggaugucc

SEQ ID NO: 698364 - RNA, 22 nt, Human
caggcagagaggagcauuuaau

SEQ ID NO: 698365 - RNA, 22 nt, Human
uccuuaggaaaaugaugagggg

SEQ ID NO: 698366 - RNA, 22 nt, Human
ucuaaugaguuagauaauuuug

SEQ ID NO: 698367 - RNA, 22 nt, Human
agagauuuacacaugccuuuuc

SEQ ID NO: 698368 - RNA, 22 nt, Human
caguauuuguucccuaucaaug

SEQ ID NO: 698369 - RNA, 22 nt, Human
gcuggcuggaaugggagaagaa

SEQ ID NO: 698370 - RNA, 22 nt, Human
cuggaggagcauggacuggagu

SEQ ID NO: 698371 - RNA, 22 nt, Human
uuagcaaauuuccaggugaugc

SEQ ID NO: 698372 - RNA, 22 nt, Human
gaggagagaagcuaacggugcu

SEQ ID NO: 698373 - RNA, 22 nt, Human
ugccccucuugagaagcucagc

SEQ ID NO: 698374 - RNA, 22 nt, Human
ccccaggccuguuggauggcgc

SEQ ID NO: 698375 - RNA, 21 nt, Human
uucuccccagcgaauccucgg

SEQ ID NO: 698376 - RNA, 22 nt, Human
auauucuggguuagauauguuu

SEQ ID NO: 698377 - RNA, 22 nt, Human
ugccugaugcaggaguaucaga

SEQ ID NO: 698378 - RNA, 22 nt, Human
cauugcacucuggcuggaacgg

SEQ ID NO: 698379 - RNA, 22 nt, Human
cuguuuccccaugcccugacuc

SEQ ID NO: 698380 - RNA, 22 nt, Human
ucaggacagagaucagaacuuc

SEQ ID NO: 698381 - RNA, 22 nt, Human
uugauucauauagauaugcgug

SEQ ID NO: 698382 - RNA, 22 nt, Human
uuagcuuuuaagugugcuacau

SEQ ID NO: 698383 - RNA, 22 nt, Human
cugaacugacagacugccugcu

SEQ ID NO: 698384 - RNA, 22 nt, Human
ugcuuggccuacuuguccuuug

SEQ ID NO: 698385 - RNA, 22 nt, Human
gugccuccaucagugccuccaa

SEQ ID NO: 698386 - RNA, 22 nt, Human
uggaaggcaggaccugccuugg

SEQ ID NO: 698387 - RNA, 22 nt, Human
aucauacacucacauaaacaga

SEQ ID NO: 698388 - RNA, 22 nt, Human
cagugcagguuuagggcugggg

SEQ ID NO: 698389 - RNA, 22 nt, Human
uccagaggggcagcccugugcu

SEQ ID NO: 698390 - RNA, 22 nt, Human
gggugaagcuccugcaggggcc

SEQ ID NO: 698391 - RNA, 22 nt, Human
gucugcccucacgccagcuggg

SEQ ID NO: 698392 - RNA, 22 nt, Human
gauuucuacuugaacuugcuaa

SEQ ID NO: 698393 - RNA, 22 nt, Human
gcuuccagggugggggauguuu

SEQ ID NO: 698394 - RNA, 22 nt, Human
cuguggcuaggaagcuguggga

SEQ ID NO: 698395 - RNA, 22 nt, Human
agcaauaauuuaggccuuuccu

SEQ ID NO: 698396 - RNA, 22 nt, Human
gcaguauacacugauacaugag

SEQ ID NO: 698397 - RNA, 20 nt, Human
acacauagauaagaagcuga

SEQ ID NO: 698398 - RNA, 22 nt, Human
gugggaagucucucggaggaag

SEQ ID NO: 698399 - RNA, 22 nt, Human
ccaaagucuggagcagcagagc

SEQ ID NO: 698400 - RNA, 22 nt, Human
ugaauaauuccuuuuugucaag

SEQ ID NO: 698401 - RNA, 22 nt, Human
ugccagcuuuugacuaucuuag

SEQ ID NO: 698402 - RNA, 22 nt, Human
uugcuucaucagaguaaacaag

SEQ ID NO: 698403 - RNA, 22 nt, Human
agcugagguugaagagugaacg

SEQ ID NO: 698404 - RNA, 22 nt, Human
uggaaugagcuggcuaauaacc

SEQ ID NO: 698405 - RNA, 22 nt, Human
caaugcuugcugacucccuguc

SEQ ID NO: 698406 - RNA, 22 nt, Human
cacauuugaaggaauuagcauu

SEQ ID NO: 698407 - RNA, 22 nt, Human
gccagggcaggggagcaucugc

SEQ ID NO: 698408 - RNA, 21 nt, Human
cugucuggccgcgggcuccgc

SEQ ID NO: 698409 - RNA, 22 nt, Human
aagggcucccaacucaucuuuu

SEQ ID NO: 698410 - RNA, 22 nt, Human
cugucauuuuuuuagaacaccu

SEQ ID NO: 698411 - RNA, 22 nt, Human
cuguauguuccguuuugucacu

SEQ ID NO: 698412 - RNA, 22 nt, Human
gguggacaaaugaaugacugaa

SEQ ID NO: 698413 - RNA, 22 nt, Human
ccaccuggggcuguggccccuu

SEQ ID NO: 698414 - RNA, 19 nt, Human
acuguagcacugcaguaua

SEQ ID NO: 698415 - RNA, 22 nt, Human
aucugccuguauuuaccaucau

SEQ ID NO: 698416 - RNA, 22 nt, Human
aacagcauaaguauuuauuuca

SEQ ID NO: 698417 - RNA, 22 nt, Human
agcauucaugaugacaacagga

SEQ ID NO: 698418 - RNA, 22 nt, Human
gaaaugugaccuacuuccuugu

SEQ ID NO: 698419 - RNA, 22 nt, Human
cagcuguuucaguagcguuacu

SEQ ID NO: 698420 - RNA, 18 nt, Human
caggagcaggaguugaac

SEQ ID NO: 698421 - RNA, 22 nt, Human
uuacuugguguucugcccagga

SEQ ID NO: 698422 - RNA, 22 nt, Human
ugcuucugcaacuugaauguac

SEQ ID NO: 698423 - RNA, 22 nt, Human
aaugaacuguguuaacugaaua

SEQ ID NO: 698424 - RNA, 19 nt, Human
uguggccaugguucagcug

SEQ ID NO: 698425 - RNA, 22 nt, Human
guggauuacaagacaguugaga

SEQ ID NO: 698426 - RNA, 22 nt, Human
uccuuggcagcagggagcauga

SEQ ID NO: 698427 - RNA, 22 nt, Human
uggcaggagagcgucagaucag

SEQ ID NO: 698428 - RNA, 22 nt, Human
cuccccagcucgcgggugacgg

SEQ ID NO: 698429 - RNA, 22 nt, Human
ucugggagcacacgcagugauc

SEQ ID NO: 698430 - RNA, 22 nt, Human
uugucauugggguuauuuguua

SEQ ID NO: 698431 - RNA, 22 nt, Human
auuucuggacugaaaaggaagu

SEQ ID NO: 698432 - RNA, 22 nt, Human
uuccucucaacaugccugccgg

SEQ ID NO: 698433 - RNA, 22 nt, Human
aagcugaggcuccccugaggga

SEQ ID NO: 698434 - RNA, 22 nt, Human
acaugaacauuauaucagcaag

SEQ ID NO: 698435 - RNA, 23 nt, Human
agcuucauuauuuuccaugaucu

SEQ ID NO: 698436 - RNA, 22 nt, Human
uggcuccugcauuugugcuaac

SEQ ID NO: 698437 - RNA, 22 nt, Human
agucuccacacuggcagaugcc

SEQ ID NO: 698438 - RNA, 22 nt, Human
augcacaacaguggcugccuug

SEQ ID NO: 698439 - RNA, 22 nt, Human
aaauugcagaugcuaaaugacu

SEQ ID NO: 698440 - RNA, 21 nt, Human
gcuggcuuccugagggcugag

SEQ ID NO: 698441 - RNA, 22 nt, Human
cuuuacacaugagaccugcaau

SEQ ID NO: 698442 - RNA, 22 nt, Human
aauguggcauugucauuauugg

SEQ ID NO: 698443 - RNA, 22 nt, Human
ucaggucuguacuauugucuug

SEQ ID NO: 698444 - RNA, 22 nt, Human
uccaggcauuccagccauucca

SEQ ID NO: 698445 - RNA, 22 nt, Human
uggcaggcgggagccauagagg

SEQ ID NO: 698446 - RNA, 22 nt, Human
augcuaaaaacuugaucauuau

SEQ ID NO: 698447 - RNA, 22 nt, Human
auuuuccagccuuucuagaacu

SEQ ID NO: 698448 - RNA, 22 nt, Human
gcccucuggcacagagaugcag

SEQ ID NO: 698449 - RNA, 22 nt, Human
cauuuguaggaugcuucuuguu

SEQ ID NO: 698450 - RNA, 22 nt, Human
cucccugggccucaguuucucu

SEQ ID NO: 698451 - RNA, 22 nt, Human
ucuauuucgcauauaaguuuug

SEQ ID NO: 698452 - RNA, 22 nt, Human
uuuucaguugugcucucuaguu

SEQ ID NO: 698453 - RNA, 22 nt, Human
ugagaguuccuccucuuuccac

SEQ ID NO: 698454 - RNA, 22 nt, Human
uucaaugccuagaacuuagcau

SEQ ID NO: 698455 - RNA, 22 nt, Human
aacagcagaaacugcaagcuac

SEQ ID NO: 698456 - RNA, 22 nt, Human
ggccagagagcagccaggauuc

SEQ ID NO: 698457 - RNA, 22 nt, Human
ccuccuggcuuuucccauugaa

SEQ ID NO: 698458 - RNA, 22 nt, Human
ugcuuggcuuucugagcuucug

SEQ ID NO: 698459 - RNA, 23 nt, Human
uggccagcagaagcaaggggagc

SEQ ID NO: 698460 - RNA, 17 nt, Human
ucuuuccugccaugcuc

SEQ ID NO: 698461 - RNA, 22 nt, Human
acuguggccaaagccucuggga

SEQ ID NO: 698462 - RNA, 22 nt, Human
caggacacagaauaaggcaguu

SEQ ID NO: 698463 - RNA, 22 nt, Human
cccaggaauuggaggcugcagu

SEQ ID NO: 698464 - RNA, 22 nt, Human
agaagcacagguaaagugauuu

SEQ ID NO: 698465 - RNA, 22 nt, Human
ucauuauuugcuuuaguuaugu

SEQ ID NO: 698466 - RNA, 22 nt, Human
ucuuagcacagcuauauaaguu

SEQ ID NO: 698467 - RNA, 22 nt, Human
cuuacauuaaguaagagauuga

SEQ ID NO: 698468 - RNA, 22 nt, Human
acugcugauuaugaaagugaca

SEQ ID NO: 698469 - RNA, 22 nt, Human
uagcaacaauggaaguaacuuc

SEQ ID NO: 698470 - RNA, 22 nt, Human
uaguucuggacacacguuccca

SEQ ID NO: 698471 - RNA, 17 nt, Human
ugcuucuguauugcugg

SEQ ID NO: 698472 - RNA, 22 nt, Human
cuuggggaugcaaagccagugu

SEQ ID NO: 698473 - RNA, 22 nt, Human
uccuuuccagccucaccucagc

SEQ ID NO: 698474 - RNA, 22 nt, Human
gacaaagucaacaguacucuca

SEQ ID NO: 698475 - RNA, 22 nt, Human
cauccguugugcuguugcucuc

SEQ ID NO: 698476 - RNA, 22 nt, Human
gcagugcugagaggugaucgga

SEQ ID NO: 698477 - RNA, 22 nt, Human
uaagaguuacugguuuagaacc

SEQ ID NO: 698478 - RNA, 22 nt, Human
gaagcagccacggggagacaga

SEQ ID NO: 698479 - RNA, 22 nt, Human
uucugaaaccuucaguaugaag

SEQ ID NO: 698480 - RNA, 22 nt, Human
cuuuacagugcugcuaauggcu

SEQ ID NO: 698481 - RNA, 22 nt, Human
gaauuguagagggaacagaagc

SEQ ID NO: 698482 - RNA, 22 nt, Human
cccaggcacaccccgaacggaa

SEQ ID NO: 698483 - RNA, 22 nt, Human
auucucuuuguauaacaucuug

SEQ ID NO: 698484 - RNA, 22 nt, Human
acccggagucggagguugcagu

SEQ ID NO: 698485 - RNA, 22 nt, Human
ccuguuccauucauauccuauu

SEQ ID NO: 698486 - RNA, 22 nt, Human
aauauauagaaguacccguugu

SEQ ID NO: 698487 - RNA, 20 nt, Human
agaguagagguagauuuaug

SEQ ID NO: 698488 - RNA, 22 nt, Human
uuuccuaaucccaaugacauuu

SEQ ID NO: 698489 - RNA, 17 nt, Human
gguucaguucugcauuc

SEQ ID NO: 698490 - RNA, 22 nt, Human
uagccagugaauguuuccagug

SEQ ID NO: 698491 - RNA, 22 nt, Human
uccccuuggcuuggucaagagg

SEQ ID NO: 698492 - RNA, 22 nt, Human
cugggagucuggccucuggucc

SEQ ID NO: 698493 - RNA, 22 nt, Human
uggcacugaaaaaggagagguu

SEQ ID NO: 698494 - RNA, 22 nt, Human
cugugcccuggccaggccucuc

SEQ ID NO: 698495 - RNA, 22 nt, Human
acucuggggugaugucucugag

SEQ ID NO: 698496 - RNA, 22 nt, Human
aggccagcuaugacucugcucc

SEQ ID NO: 698497 - RNA, 22 nt, Human
auauguguaaaugcauuuguuu

SEQ ID NO: 698498 - RNA, 22 nt, Human
agaagugucucaucaggcaaua

SEQ ID NO: 698499 - RNA, 22 nt, Human
agcuggggcauuuauccacuaa

SEQ ID NO: 698500 - RNA, 22 nt, Human
guaacaaacgguuccaagaugc

SEQ ID NO: 698501 - RNA, 22 nt, Human
gcacagccacguaaugugguca

SEQ ID NO: 698502 - RNA, 22 nt, Human
aaggggaaguagcaccagaggu

SEQ ID NO: 698503 - RNA, 22 nt, Human
gacaauuagaucauuccuuuga

SEQ ID NO: 698504 - RNA, 22 nt, Human
agacuucuaaauagcagcuucu

SEQ ID NO: 698505 - RNA, 22 nt, Human
cgccugcucuguuuccaugugg

SEQ ID NO: 698506 - RNA, 22 nt, Human
uggcuucuuucuuuccaugugu

SEQ ID NO: 698507 - RNA, 22 nt, Human
ugcuuuuuccccuucuggcgag

SEQ ID NO: 698508 - RNA, 22 nt, Human
aauguucauuagcauuguugac

SEQ ID NO: 698509 - RNA, 22 nt, Human
uauucugguuuccggaucucua

SEQ ID NO: 698510 - RNA, 22 nt, Human
uuggaagaccagaggccuuguc

SEQ ID NO: 698511 - RNA, 22 nt, Human
uccaggugagugcaggugcaga

SEQ ID NO: 698512 - RNA, 22 nt, Human
ugcaaggcccagacaagagcuc

SEQ ID NO: 698513 - RNA, 22 nt, Human
ggugcagaagaaagcagucauu

SEQ ID NO: 698514 - RNA, 22 nt, Human
auggaagaacgcucaggguuac

SEQ ID NO: 698515 - RNA, 22 nt, Human
guucuucaccaaggucagaggc

SEQ ID NO: 698516 - RNA, 22 nt, Human
agcuauuucaaaguuugagaca

SEQ ID NO: 698517 - RNA, 22 nt, Human
ucagugcauucuaccaaaaggc

SEQ ID NO: 698518 - RNA, 22 nt, Human
guuaaacugaaaggcucguuca

SEQ ID NO: 698519 - RNA, 22 nt, Human
uauugaucuggauauuuagaca

SEQ ID NO: 698520 - RNA, 22 nt, Human
ugaaaucaauaauuggugauug

SEQ ID NO: 698521 - RNA, 22 nt, Human
uucagagagaaaccagugggaa

SEQ ID NO: 698522 - RNA, 22 nt, Human
acaaaaguaguugcgguuuuug

SEQ ID NO: 698523 - RNA, 22 nt, Human
gagggcacuggguuucaauguc

SEQ ID NO: 698524 - RNA, 22 nt, Human
auugcuuuugagcuagaauuuu

SEQ ID NO: 698525 - RNA, 18 nt, Human
gccucaguuuccucaccu

SEQ ID NO: 698526 - RNA, 22 nt, Human
uuucauguuauuaauagugcug

SEQ ID NO: 698527 - RNA, 20 nt, Human
augcauauauguggugucug

SEQ ID NO: 698528 - RNA, 22 nt, Human
ugagacuugugaguccuucuag

SEQ ID NO: 698529 - RNA, 22 nt, Human
aucagcugaugaauggaugaau

SEQ ID NO: 698530 - RNA, 23 nt, Human
ccaaagucgaagucuaguccaga

SEQ ID NO: 698531 - RNA, 22 nt, Human
ggcaggcucuuggccuuaugag

SEQ ID NO: 698532 - RNA, 22 nt, Human
agccagugggauuagagccucu

SEQ ID NO: 698533 - RNA, 22 nt, Human
cugugggagaggugccuggauu

SEQ ID NO: 698534 - RNA, 22 nt, Human
gagguggaggggaaaaauagau

SEQ ID NO: 698535 - RNA, 22 nt, Human
ccuuuugagacuuccacugugu

SEQ ID NO: 698536 - RNA, 20 nt, Human
uuuacauccccaccagcaau

SEQ ID NO: 698537 - RNA, 22 nt, Human
auagauuauuugcucauuacuu

SEQ ID NO: 698538 - RNA, 22 nt, Human
gaguggcaggcacugugacgga

SEQ ID NO: 698539 - RNA, 22 nt, Human
guuccuauauagccuuaaggau

SEQ ID NO: 698540 - RNA, 22 nt, Human
cagagccucaucauccacucca

SEQ ID NO: 698541 - RNA, 22 nt, Human
acagguggccccgagggagugg

SEQ ID NO: 698542 - RNA, 22 nt, Human
gugcccagugcaggcccgcagg

SEQ ID NO: 698543 - RNA, 23 nt, Human
ucagagaggcccccugcagagau

SEQ ID NO: 698544 - RNA, 22 nt, Human
acagcuguggucuccuuagugu

SEQ ID NO: 698545 - RNA, 22 nt, Human
uagacuggugaauuagggggaa

SEQ ID NO: 698546 - RNA, 22 nt, Human
uguguauagaaaguaggaaagg

SEQ ID NO: 698547 - RNA, 22 nt, Human
ucagaggagaaguugggaaaau

SEQ ID NO: 698548 - RNA, 22 nt, Human
gaggaaccaaucugugauauuc

SEQ ID NO: 698549 - RNA, 22 nt, Human
agcaguuguagucauggaaaau

SEQ ID NO: 698550 - RNA, 19 nt, Human
ucaaaacacaaaugguuga

SEQ ID NO: 698551 - RNA, 22 nt, Human
cuucagagaacuugaucgcugc

SEQ ID NO: 698552 - RNA, 22 nt, Human
aguucaguaguccuucauugua

SEQ ID NO: 698553 - RNA, 22 nt, Human
uaaaguguggacaguaucuaua

SEQ ID NO: 698554 - RNA, 22 nt, Human
agaguggcagcaagucagguag

SEQ ID NO: 698555 - RNA, 22 nt, Human
acagggccauuaucuguucuag

SEQ ID NO: 698556 - RNA, 22 nt, Human
aagggugcugcuaucaggaagc

SEQ ID NO: 698557 - RNA, 22 nt, Human
uuugcuugauuaggauauggaa

SEQ ID NO: 698558 - RNA, 22 nt, Human
aguggcagagccaaguagagcc

SEQ ID NO: 698559 - RNA, 21 nt, Human
gcuggcugucucuuacacggu

SEQ ID NO: 698560 - RNA, 22 nt, Human
ccugagaccaaguugcagccau

SEQ ID NO: 698561 - RNA, 18 nt, Human
cuucaguggcugcucugc

SEQ ID NO: 698562 - RNA, 22 nt, Human
ugggauauuuugagcuuuccuc

SEQ ID NO: 698563 - RNA, 20 nt, Human
agcuggcccccgguggccug

SEQ ID NO: 698564 - RNA, 22 nt, Human
guguuaaugguagaaucugagu

SEQ ID NO: 698565 - RNA, 22 nt, Human
uggaaugaaaaguacuucagaa

SEQ ID NO: 698566 - RNA, 22 nt, Human
cuaaauacuagccuucagauuu

SEQ ID NO: 698567 - RNA, 22 nt, Human
aggcaguuucugggacagcaua

SEQ ID NO: 698568 - RNA, 22 nt, Human
aaggugcucacgggcucaggga

SEQ ID NO: 698569 - RNA, 22 nt, Human
aggcuccagggcugugugggag

SEQ ID NO: 698570 - RNA, 22 nt, Human
cuugauggaggggccaggcuuu

SEQ ID NO: 698571 - RNA, 22 nt, Human
uuuuucugagaauaugagagga

SEQ ID NO: 698572 - RNA, 22 nt, Human
aagcagcuuccccaaagugccu

SEQ ID NO: 698573 - RNA, 22 nt, Human
aaacuuuuuauucuaaugucua

SEQ ID NO: 698574 - RNA, 22 nt, Human
agguggaacguucaggugcuag

SEQ ID NO: 698575 - RNA, 22 nt, Human
agcuggugauggccuaagaagg

SEQ ID NO: 698576 - RNA, 22 nt, Human
uaaaagauuuuauaggaacaag

SEQ ID NO: 698577 - RNA, 22 nt, Human
auuuaauuugugucuuuagcug

SEQ ID NO: 698578 - RNA, 22 nt, Human
uuugaagaccuuaucucuaaau

SEQ ID NO: 698579 - RNA, 22 nt, Human
caaaugaauuucccugcaaaug

SEQ ID NO: 698580 - RNA, 22 nt, Human
caucccugucugccacucugaa

SEQ ID NO: 698581 - RNA, 22 nt, Human
ccugccagcgcuuaucucucgg

SEQ ID NO: 698582 - RNA, 22 nt, Human
ucuucagaaaauuaucacuugu

SEQ ID NO: 698583 - RNA, 22 nt, Human
uacaggagcacaaaagaguuga

SEQ ID NO: 698584 - RNA, 22 nt, Human
aucucaggaggacccugaugcu

SEQ ID NO: 698585 - RNA, 21 nt, Human
ccaccaggucuucugcucggg

SEQ ID NO: 698586 - RNA, 22 nt, Human
ucauugcaccccagucccagcu

SEQ ID NO: 698587 - RNA, 22 nt, Human
accugagaccuaaucugacugu

SEQ ID NO: 698588 - RNA, 22 nt, Human
aacaugcauguuauuuaucagu

SEQ ID NO: 698589 - RNA, 22 nt, Human
cauggcagcaauuuuccugacu

SEQ ID NO: 698590 - RNA, 23 nt, Human
cagcccuuccugcauguuuuugu

SEQ ID NO: 698591 - RNA, 22 nt, Human
gagagcugugguuugaccaggc

SEQ ID NO: 698592 - RNA, 22 nt, Human
ugagccuguccugugcauguga

SEQ ID NO: 698593 - RNA, 22 nt, Human
cagucccacaagaucuccacaa

SEQ ID NO: 698594 - RNA, 22 nt, Human
ggauggcagacagugaguggcu

SEQ ID NO: 698595 - RNA, 22 nt, Human
cagugucugccuuucuguuugg

SEQ ID NO: 698596 - RNA, 22 nt, Human
augggcugaggugggauagaag

SEQ ID NO: 698597 - RNA, 22 nt, Human
gcuucuguggugaggucaccuu

SEQ ID NO: 698598 - RNA, 18 nt, Human
aauuuccauaugaauugc

SEQ ID NO: 698599 - RNA, 22 nt, Human
accuaauaaagguaaauucugu

SEQ ID NO: 698600 - RNA, 22 nt, Human
ucagcaggcagugggucacaau

SEQ ID NO: 698601 - RNA, 22 nt, Human
auauaaaguguuuagaaagcug

SEQ ID NO: 698602 - RNA, 22 nt, Human
ucaauguuuguucaugaaaaua

SEQ ID NO: 698603 - RNA, 22 nt, Human
uacacagauuuaaaagcaggga

SEQ ID NO: 698604 - RNA, 22 nt, Human
cccuggaggcggagcuugcagu

SEQ ID NO: 698605 - RNA, 22 nt, Human
uugacaguauagcuuuaccuau

SEQ ID NO: 698606 - RNA, 22 nt, Human
aucaggaucagggcuagcagag

SEQ ID NO: 698607 - RNA, 22 nt, Human
uccaggaggcaccuuuggacca

SEQ ID NO: 698608 - RNA, 22 nt, Human
ucuguucagacacuuuacaugu

SEQ ID NO: 698609 - RNA, 22 nt, Human
ucugggcccuaaaccagcucua

SEQ ID NO: 698610 - RNA, 22 nt, Human
agcuggguuucuggcaggcuua

SEQ ID NO: 698611 - RNA, 22 nt, Human
ugcaucauauaaugucuaugga

SEQ ID NO: 698612 - RNA, 22 nt, Human
uugagguauugauauuuuauga

SEQ ID NO: 698613 - RNA, 22 nt, Human
guauuauuggguaguaugguaa

SEQ ID NO: 698614 - RNA, 22 nt, Human
uggcccaggccaaagcccugga

SEQ ID NO: 698615 - RNA, 22 nt, Human
ggccugagcucuggggaggcaa

SEQ ID NO: 698616 - RNA, 22 nt, Human
uuggucacuugcuaugugccaa

SEQ ID NO: 698617 - RNA, 22 nt, Human
ucuuuggacuuuccaauuuguu

SEQ ID NO: 698618 - RNA, 22 nt, Human
uuuuccucuguaugcgugagau

SEQ ID NO: 698619 - RNA, 22 nt, Human
uggcccucagcacugagaccuu

SEQ ID NO: 698620 - RNA, 22 nt, Human
ccuuucaaaacagaacacuagc

SEQ ID NO: 698621 - RNA, 22 nt, Human
cagcaucguguggaaaguggua

SEQ ID NO: 698622 - RNA, 22 nt, Human
agccugggcccugccucuucuc

SEQ ID NO: 698623 - RNA, 22 nt, Human
uuucacauggaagcucucgaga

SEQ ID NO: 698624 - RNA, 22 nt, Human
uucucagaugauucagauaaac

SEQ ID NO: 698625 - RNA, 23 nt, Human
uuaguguaaggcaggcacaguug

SEQ ID NO: 698626 - RNA, 21 nt, Human
ugauucuguuuuaucaucagc

SEQ ID NO: 698627 - RNA, 22 nt, Human
uaggccacaaauaagauccugu

SEQ ID NO: 698628 - RNA, 21 nt, Human
uuauugaauguuuaccgugug

SEQ ID NO: 698629 - RNA, 23 nt, Human
agcagcagugagaggugucuuac

SEQ ID NO: 698630 - RNA, 22 nt, Human
ucucaggaucuaauacauggua

SEQ ID NO: 698631 - RNA, 22 nt, Human
ggcaccagcacuugggauggcu

SEQ ID NO: 698632 - RNA, 22 nt, Human
ugcuggggauccguaccaaccc

SEQ ID NO: 698633 - RNA, 22 nt, Human
agcaauauuucagcuagcaggu

SEQ ID NO: 698634 - RNA, 22 nt, Human
aacgucuucucuccaaguaaau

SEQ ID NO: 698635 - RNA, 20 nt, Human
ccugggcuccaggagccccg

SEQ ID NO: 698636 - RNA, 22 nt, Human
cccauggagugccugagggcca

SEQ ID NO: 698637 - RNA, 22 nt, Human
ucugggaguuagaauacauggg

SEQ ID NO: 698638 - RNA, 22 nt, Human
uacaaguauauucuagugauau

SEQ ID NO: 698639 - RNA, 22 nt, Human
ucucaggcucuuggaaccuguu

SEQ ID NO: 698640 - RNA, 22 nt, Human
agacacuguucucacaugcuug

SEQ ID NO: 698641 - RNA, 22 nt, Human
ugcaaaaagagcgaggagcccu

SEQ ID NO: 698642 - RNA, 22 nt, Human
uuaaaagagcagcccagcauau

SEQ ID NO: 698643 - RNA, 21 nt, Human
gccuggcuucacaggcacuga

SEQ ID NO: 698644 - RNA, 22 nt, Human
agcuuucucucagccaggcugc

SEQ ID NO: 698645 - RNA, 22 nt, Human
ggcagaaggcaauuagagacug

SEQ ID NO: 698646 - RNA, 22 nt, Human
acuaggaaguggcaaaacugga

SEQ ID NO: 698647 - RNA, 22 nt, Human
ucuggccuuaucuguccaagcc

SEQ ID NO: 698648 - RNA, 22 nt, Human
uuuucugugugucccucgacag

SEQ ID NO: 698649 - RNA, 22 nt, Human
uauaaagaaggcacagcaagac

SEQ ID NO: 698650 - RNA, 22 nt, Human
uugacaaaaauaacacagcaua

SEQ ID NO: 698651 - RNA, 22 nt, Human
gcggcgccuaagccccgaccuc

SEQ ID NO: 698652 - RNA, 22 nt, Human
ugcuucugauucaugguuauug

SEQ ID NO: 698653 - RNA, 22 nt, Human
cacugagccaggagcaauauca

SEQ ID NO: 698654 - RNA, 22 nt, Human
aaucaaagaaugggcuaguugg

SEQ ID NO: 698655 - RNA, 22 nt, Human
uggaagccucaguuugccuucu

SEQ ID NO: 698656 - RNA, 22 nt, Human
acuggcaucuguggguagaggc

SEQ ID NO: 698657 - RNA, 22 nt, Human
ugggccuccaauuccagcggga

SEQ ID NO: 698658 - RNA, 22 nt, Human
aucucuucucccaacaccuggc

SEQ ID NO: 698659 - RNA, 20 nt, Human
gccagcacagggagcaguuc

SEQ ID NO: 698660 - RNA, 22 nt, Human
agcuuuuaguacguuaaaauug

SEQ ID NO: 698661 - RNA, 22 nt, Human
cugguuuagcuguaagguuccc

SEQ ID NO: 698662 - RNA, 22 nt, Human
auucugauaucuuauucuagcu

SEQ ID NO: 698663 - RNA, 22 nt, Human
uggcagugaagcugucuuuagg

SEQ ID NO: 698664 - RNA, 22 nt, Human
ggccauggucaugggugagcuu

SEQ ID NO: 698665 - RNA, 22 nt, Human
cugggccuucauugcucuccca

SEQ ID NO: 698666 - RNA, 22 nt, Human
guccugugaugaguaccaggug

SEQ ID NO: 698667 - RNA, 22 nt, Human
aacaccuaaaaaucauuguuga

SEQ ID NO: 698668 - RNA, 22 nt, Human
auuuuccuuguggguuagcgaa

SEQ ID NO: 698669 - RNA, 22 nt, Human
uacagugugacauuucuacaaa

SEQ ID NO: 698670 - RNA, 22 nt, Human
accaugaucugcucugguguuu

SEQ ID NO: 698671 - RNA, 22 nt, Human
uaggggcuuguaauuuaauaga

SEQ ID NO: 698672 - RNA, 22 nt, Human
ugucuuuagaaagaagcagaca

SEQ ID NO: 698673 - RNA, 22 nt, Human
uaugagguagguauuauacuua

SEQ ID NO: 698674 - RNA, 22 nt, Human
agucacaucgauuauaaaauuu

SEQ ID NO: 698675 - RNA, 18 nt, Human
caauguuuuagaucucua

SEQ ID NO: 698676 - RNA, 22 nt, Human
ugugccaagacuauauugugcu

SEQ ID NO: 698677 - RNA, 22 nt, Human
ucaggaguaaagacagaguucc

SEQ ID NO: 698678 - RNA, 22 nt, Human
auucagugugagguuuucaagu

SEQ ID NO: 698679 - RNA, 22 nt, Human
agugggagagaagcaaguagua

SEQ ID NO: 698680 - RNA, 22 nt, Human
agugugucaguugaaagagauu

SEQ ID NO: 698681 - RNA, 22 nt, Human
gugacucucacuuuaccugacu

SEQ ID NO: 698682 - RNA, 22 nt, Human
aaacacugucucugguauugaa

SEQ ID NO: 698683 - RNA, 22 nt, Human
ucagcccaacccugcacaagga

SEQ ID NO: 698684 - RNA, 22 nt, Human
ucuguuuuggucaccuuuauau

SEQ ID NO: 698685 - RNA, 22 nt, Human
aagcacaaugaacaucuuagau

SEQ ID NO: 698686 - RNA, 22 nt, Human
gcugucugucuucacaucucgc

SEQ ID NO: 698687 - RNA, 22 nt, Human
accaggcccuccagcugcgugg

SEQ ID NO: 698688 - RNA, 22 nt, Human
caucauuuuauuaaccaagaaa

SEQ ID NO: 698689 - RNA, 22 nt, Human
ucugauuagcaguuuagggaaa

SEQ ID NO: 698690 - RNA, 22 nt, Human
ugaggagcuucuggaaagugca

SEQ ID NO: 698691 - RNA, 22 nt, Human
ugaaagcugaggacaggagggu

SEQ ID NO: 698692 - RNA, 22 nt, Human
uuucuuugagucucaguuugcu

SEQ ID NO: 698693 - RNA, 22 nt, Human
aacauccccuucaugucaugau

SEQ ID NO: 698694 - RNA, 22 nt, Human
uaaggucauggugaauaauaag

SEQ ID NO: 698695 - RNA, 22 nt, Human
aggcuuggcuggcagcccuggg

SEQ ID NO: 698696 - RNA, 21 nt, Human
agcugcccagaguagggaagg

SEQ ID NO: 698697 - RNA, 22 nt, Human
uggcagauguauaucacagcuu

SEQ ID NO: 698698 - RNA, 20 nt, Human
ugucauuuauuuaucaaaug

SEQ ID NO: 698699 - RNA, 22 nt, Human
ugugcucacucuaaauuaagau

SEQ ID NO: 698700 - RNA, 22 nt, Human
guauaucaccccaagcagcuga

SEQ ID NO: 698701 - RNA, 22 nt, Human
uuuccagggcucuguagaagaa

SEQ ID NO: 698702 - RNA, 22 nt, Human
uagaaaugcaguguacuguguc

SEQ ID NO: 698703 - RNA, 22 nt, Human
ucauagaaguaguauccacauu

SEQ ID NO: 698704 - RNA, 22 nt, Human
ugcaugugugacaaggacaguu

SEQ ID NO: 698705 - RNA, 22 nt, Human
cuggggcucacuccagcccugg

SEQ ID NO: 698706 - RNA, 22 nt, Human
aaagaacucagagaggauuuua

SEQ ID NO: 698707 - RNA, 18 nt, Human
gguguguaacguguuuuc

SEQ ID NO: 698708 - RNA, 22 nt, Human
auuuucaucauggguuuaacau

SEQ ID NO: 698709 - RNA, 21 nt, Human
cagagccuguguugacaguug

SEQ ID NO: 698710 - RNA, 19 nt, Human
accaggaacuucccuaggc

SEQ ID NO: 698711 - RNA, 22 nt, Human
caauaauuuacauuggauacca

SEQ ID NO: 698712 - RNA, 22 nt, Human
acaggaguuucugacagagaca

SEQ ID NO: 698713 - RNA, 22 nt, Human
ucugggcccacucaacuucacu

SEQ ID NO: 698714 - RNA, 22 nt, Human
gcagggcugacucagccacccu

SEQ ID NO: 698715 - RNA, 22 nt, Human
auggaaaggcuguggaaacuua

SEQ ID NO: 698716 - RNA, 22 nt, Human
aauggcuuagcucagcgcucag

SEQ ID NO: 698717 - RNA, 22 nt, Human
cacaccuguaauccuagcacuu

SEQ ID NO: 698718 - RNA, 22 nt, Human
ggcaggguggcccuccagugag

SEQ ID NO: 698719 - RNA, 22 nt, Human
aacuguaagugguuggaagaag

SEQ ID NO: 698720 - RNA, 19 nt, Human
ucagcccaucagacucaca

SEQ ID NO: 698721 - RNA, 22 nt, Human
caggcagcucugcuuuuccuaa

SEQ ID NO: 698722 - RNA, 22 nt, Human
uccuggccuagcucacccugga

SEQ ID NO: 698723 - RNA, 22 nt, Human
ucugaaauaagggagaagggaa

SEQ ID NO: 698724 - RNA, 22 nt, Human
accagaggcucugccaccucca

SEQ ID NO: 698725 - RNA, 22 nt, Human
auuagcaaucacgcagucauuu

SEQ ID NO: 698726 - RNA, 19 nt, Human
aagcuguccuguuggcccu

SEQ ID NO: 698727 - RNA, 22 nt, Human
gcugucuuccuugcuccaaggg

SEQ ID NO: 698728 - RNA, 22 nt, Human
cagagccucccuccucugccau

SEQ ID NO: 698729 - RNA, 22 nt, Human
gaacaauagugguaacaaagcc

SEQ ID NO: 698730 - RNA, 22 nt, Human
gaauuauagguuugcaugcuaa

SEQ ID NO: 698731 - RNA, 22 nt, Human
ggcaguggcuguagucucuugg

SEQ ID NO: 698732 - RNA, 22 nt, Human
cuguugcucugaacaggucuug

SEQ ID NO: 698733 - RNA, 22 nt, Human
cugagcugggaguggauagugg

SEQ ID NO: 698734 - RNA, 22 nt, Human
agugucuguuguucagaacucu

SEQ ID NO: 698735 - RNA, 22 nt, Human
gggcucaggaguuugaggcugc

SEQ ID NO: 698736 - RNA, 22 nt, Human
gcucacaggcaguguugggaga

SEQ ID NO: 698737 - RNA, 22 nt, Human
ccugagcugaacuaagcaguuu

SEQ ID NO: 698738 - RNA, 22 nt, Human
acagcagugcacagagaacccu

SEQ ID NO: 698739 - RNA, 22 nt, Human
uagcagagugauuggccaugag

SEQ ID NO: 698740 - RNA, 22 nt, Human
caucagaaucugagucucugcc

SEQ ID NO: 698741 - RNA, 22 nt, Human
aaacucuaagacacuguacaau

SEQ ID NO: 698742 - RNA, 22 nt, Human
ugcuuuaucugugagaaccuga

SEQ ID NO: 698743 - RNA, 22 nt, Human
guuuagaaugaaacuuuugagc

SEQ ID NO: 698744 - RNA, 22 nt, Human
cucagugcaaccaaagugaucu

SEQ ID NO: 698745 - RNA, 22 nt, Human
cuuggcagagggcugggcucag

SEQ ID NO: 698746 - RNA, 22 nt, Human
ucugucugggugccucgaguac

SEQ ID NO: 698747 - RNA, 22 nt, Human
ugugcugacaagaucagaaggu

SEQ ID NO: 698748 - RNA, 22 nt, Human
agccauuggcugccuggugcgu

SEQ ID NO: 698749 - RNA, 22 nt, Human
agaguguaauaagggcaagggc

SEQ ID NO: 698750 - RNA, 22 nt, Human
uaaggcacccgugagcugccag

SEQ ID NO: 698751 - RNA, 22 nt, Human
cagcuuccauaagagauggaga

SEQ ID NO: 698752 - RNA, 22 nt, Human
uccgcagaggaggaguugcugu

SEQ ID NO: 698753 - RNA, 22 nt, Human
cagcugugcuguauuaagcucu

SEQ ID NO: 698754 - RNA, 22 nt, Human
guguaaauuuguacuuguaaau

SEQ ID NO: 698755 - RNA, 20 nt, Human
gcucagguuugggcuuugug

SEQ ID NO: 698756 - RNA, 22 nt, Human
ucccugggccacagcugugagc

SEQ ID NO: 698757 - RNA, 22 nt, Human
uaugugcaguuugcucuuaaca

SEQ ID NO: 698758 - RNA, 23 nt, Human
agcaaaguuguugcuaaccucau

SEQ ID NO: 698759 - RNA, 22 nt, Human
ucaguguuggcuacaucugccu

SEQ ID NO: 698760 - RNA, 22 nt, Human
gagaaggagcuccuuggggucu

SEQ ID NO: 698761 - RNA, 22 nt, Human
aguucccaggugaugcugaugu

SEQ ID NO: 698762 - RNA, 22 nt, Human
accuguuuaccugcaccuguuu

SEQ ID NO: 698763 - RNA, 20 nt, Human
ucugugcuacacuccagauu

SEQ ID NO: 698764 - RNA, 22 nt, Human
gaugacagcagcuguggcucac

SEQ ID NO: 698765 - RNA, 22 nt, Human
gugggaugcuuaggaucuugcc

SEQ ID NO: 698766 - RNA, 23 nt, Human
uacauuguggauggaguccuggg

SEQ ID NO: 698767 - RNA, 22 nt, Human
gaggcucacuaggcauccuggg

SEQ ID NO: 698768 - RNA, 22 nt, Human
cagaggcagacccuccagggcg

SEQ ID NO: 698769 - RNA, 22 nt, Human
uagcaucuuuuucugucuucua

SEQ ID NO: 698770 - RNA, 22 nt, Human
ggaacacagaagggcugaaaaa

SEQ ID NO: 698771 - RNA, 22 nt, Human
auugcaaagcguagacucuaaa

SEQ ID NO: 698772 - RNA, 22 nt, Human
gccuggagcuacuggacacuga

SEQ ID NO: 698773 - RNA, 22 nt, Human
auuacaguuaauuuaccuucuu

SEQ ID NO: 698774 - RNA, 22 nt, Human
uagauguugaagucauauuugg

SEQ ID NO: 698775 - RNA, 22 nt, Human
gccuugggauucuuggaugcuc

SEQ ID NO: 698776 - RNA, 20 nt, Human
gccacaguuuucucacugca

SEQ ID NO: 698777 - RNA, 22 nt, Human
ucaaacauaggcacacauucag

SEQ ID NO: 698778 - RNA, 22 nt, Human
cugcaucacucuuacuggcuuu

SEQ ID NO: 698779 - RNA, 22 nt, Human
uuuauauuguaaaaaugguucu

SEQ ID NO: 698780 - RNA, 22 nt, Human
uuggaacaggauucaauuaaag

SEQ ID NO: 698781 - RNA, 23 nt, Human
auuguuuuuggcucucagggaau

SEQ ID NO: 698782 - RNA, 22 nt, Human
cugcagaaagcugagaugauua

SEQ ID NO: 698783 - RNA, 22 nt, Human
uugcuguaguguucugauguca

SEQ ID NO: 698784 - RNA, 21 nt, Human
uggccaaaaccauauuauuaa

SEQ ID NO: 698785 - RNA, 22 nt, Human
acaugcuuguuuuucacaaccu

SEQ ID NO: 698786 - RNA, 22 nt, Human
aggguggcugugaagugcuugg

SEQ ID NO: 698787 - RNA, 22 nt, Human
acauggcuaaagcaagucuaga

SEQ ID NO: 698788 - RNA, 22 nt, Human
ucuccaggcuuaaucucagcuu

SEQ ID NO: 698789 - RNA, 20 nt, Human
ccugucuccucuuaccuggc

SEQ ID NO: 698790 - RNA, 22 nt, Human
auuccugcauuggucaacccau

SEQ ID NO: 698791 - RNA, 18 nt, Human
gauguaaaauaguagcuu

SEQ ID NO: 698792 - RNA, 19 nt, Human
gucccugggcagaggcacc

SEQ ID NO: 698793 - RNA, 22 nt, Human
gcagguggggcugcuaccagaa

SEQ ID NO: 698794 - RNA, 22 nt, Human
ccagaggacuugggggcugaau

SEQ ID NO: 698795 - RNA, 22 nt, Human
ugggccacugcuccaaguagcu

SEQ ID NO: 698796 - RNA, 22 nt, Human
cugccagcucaccggcucagac

SEQ ID NO: 698797 - RNA, 22 nt, Human
agaacaauugccccaaagcuug

SEQ ID NO: 698798 - RNA, 22 nt, Human
auaguuguguggggauucuggu

SEQ ID NO: 698799 - RNA, 22 nt, Human
gagaggcugauccugcagagaa

SEQ ID NO: 698800 - RNA, 22 nt, Human
uauuaugaggacugguguaagg

SEQ ID NO: 698801 - RNA, 22 nt, Human
agucagcagccuggccaggaga

SEQ ID NO: 698802 - RNA, 22 nt, Human
uagucuuuugagaaguauaucu

SEQ ID NO: 698803 - RNA, 22 nt, Human
gauagcagcucuggggucagac

SEQ ID NO: 698804 - RNA, 22 nt, Human
gagauucuaauauaaggauggg

SEQ ID NO: 698805 - RNA, 22 nt, Human
ccacuguguccaccaggaaugc

SEQ ID NO: 698806 - RNA, 22 nt, Human
ucagcuuuugucagaaauugua

SEQ ID NO: 698807 - RNA, 22 nt, Human
gcugccuccgccggcuccacag

SEQ ID NO: 698808 - RNA, 22 nt, Human
aucaguuuugggggacauacug

SEQ ID NO: 698809 - RNA, 22 nt, Human
uacaguuuagaaccauagaugg

SEQ ID NO: 698810 - RNA, 22 nt, Human
ugccuggcagcuugaaagaaau

SEQ ID NO: 698811 - RNA, 18 nt, Human
uuccauaauguauguaac

SEQ ID NO: 698812 - RNA, 22 nt, Human
aguguuugcaucucauugauuu

SEQ ID NO: 698813 - RNA, 22 nt, Human
ggugcagaaggaagggagcugg

SEQ ID NO: 698814 - RNA, 22 nt, Human
auggaucuucccucauuucuga

SEQ ID NO: 698815 - RNA, 22 nt, Human
acugucaccuaaauuuucauug

SEQ ID NO: 698816 - RNA, 22 nt, Human
ggagacauauuccagagcuggg

SEQ ID NO: 698817 - RNA, 22 nt, Human
ugugaagcuggauccuggagcu

SEQ ID NO: 698818 - RNA, 22 nt, Human
aucagcuggaacaagugucuga

SEQ ID NO: 698819 - RNA, 22 nt, Human
uaacacauaucuacaacaugug

SEQ ID NO: 698820 - RNA, 22 nt, Human
caggagagauaugaguccccac

SEQ ID NO: 698821 - RNA, 20 nt, Human
ccagucccugagcaccaggg

SEQ ID NO: 698822 - RNA, 22 nt, Human
uaggccacagagaggagauuuc

SEQ ID NO: 698823 - RNA, 23 nt, Human
aggcuuccuaucuuagagcuggg

SEQ ID NO: 698824 - RNA, 22 nt, Human
ucaguguguuauucuacuuuca

SEQ ID NO: 698825 - RNA, 22 nt, Human
uggcacugaccccaggccugug

SEQ ID NO: 698826 - RNA, 22 nt, Human
auuguauaauuguauugccaaa

SEQ ID NO: 698827 - RNA, 22 nt, Human
uuuacagacaacuuaauagggg

SEQ ID NO: 698828 - RNA, 22 nt, Human
agggagcagggcuccuuugggu

SEQ ID NO: 698829 - RNA, 22 nt, Human
agccauccuacuaccucagcau

SEQ ID NO: 698830 - RNA, 22 nt, Human
ggcccugagucuagcugcucuu

SEQ ID NO: 698831 - RNA, 22 nt, Human
gagcugugcuuauaccaauuca

SEQ ID NO: 698832 - RNA, 22 nt, Human
cucagaaucugccaaguucagg

SEQ ID NO: 698833 - RNA, 19 nt, Human
gucuuggcucucaaccauc

SEQ ID NO: 698834 - RNA, 22 nt, Human
cacauucagguggcauguuaga

SEQ ID NO: 698835 - RNA, 22 nt, Human
gugagcugggugaaugguaggg

SEQ ID NO: 698836 - RNA, 22 nt, Human
cuucagcaucuuuuucuugggg

SEQ ID NO: 698837 - RNA, 22 nt, Human
uacagcauauacagaaugaaca

SEQ ID NO: 698838 - RNA, 22 nt, Human
cagggugggcacccagccucca

SEQ ID NO: 698839 - RNA, 22 nt, Human
uguaugugcaauguuuauaugu

SEQ ID NO: 698840 - RNA, 22 nt, Human
ggggcagaaagcccacagagug

SEQ ID NO: 698841 - RNA, 22 nt, Human
agugcccucgugcccagggccu

SEQ ID NO: 698842 - RNA, 22 nt, Human
cucacaguuuucuguaguccaa

SEQ ID NO: 698843 - RNA, 22 nt, Human
gaauagauagcuuggaugguug

SEQ ID NO: 698844 - RNA, 22 nt, Human
gagccaagcaauauacccaacc

SEQ ID NO: 698845 - RNA, 22 nt, Human
gccaggcucaguagcgauuccu

SEQ ID NO: 698846 - RNA, 22 nt, Human
ccaaagucugcauuuuaacaug

SEQ ID NO: 698847 - RNA, 22 nt, Human
aaacaugagcacuugcuucaua

SEQ ID NO: 698848 - RNA, 22 nt, Human
gccucugcaugcucagcaccca

SEQ ID NO: 698849 - RNA, 22 nt, Human
cagagaaagaagcccauucauu

SEQ ID NO: 698850 - RNA, 17 nt, Human
aggucugagaguaucug

SEQ ID NO: 698851 - RNA, 22 nt, Human
ugcccugguagacacagacugu

SEQ ID NO: 698852 - RNA, 22 nt, Human
ucccaggguuacagccagggca

SEQ ID NO: 698853 - RNA, 22 nt, Human
aggggagcgacauuccgugccg

SEQ ID NO: 698854 - RNA, 22 nt, Human
agcuuuaugaggagaccuuagu

SEQ ID NO: 698855 - RNA, 22 nt, Human
ugaggguagcuggaucacggag

SEQ ID NO: 698856 - RNA, 22 nt, Human
cugacucccaaagaggacgcgu

SEQ ID NO: 698857 - RNA, 22 nt, Human
cuguccauuuucgugccuccuu

SEQ ID NO: 698858 - RNA, 22 nt, Human
ucacaggcucuccaccaugagg

SEQ ID NO: 698859 - RNA, 22 nt, Human
uaaucuguauuccuacuuugca

SEQ ID NO: 698860 - RNA, 22 nt, Human
gugcaggggccuccccuugcug

SEQ ID NO: 698861 - RNA, 22 nt, Human
cucuccagaauaugccgccgug

SEQ ID NO: 698862 - RNA, 22 nt, Human
guccugggcccaggggcugccu

SEQ ID NO: 698863 - RNA, 23 nt, Human
augcagagaauaacaaaugccau

SEQ ID NO: 698864 - RNA, 22 nt, Human
acugucaugcauuauggcaugu

SEQ ID NO: 698865 - RNA, 22 nt, Human
guguuuuaagaaagaagcucag

SEQ ID NO: 698866 - RNA, 22 nt, Human
uuugacuuugggcucuaacuca

SEQ ID NO: 698867 - RNA, 22 nt, Human
uuuugccuaggguugacccguu

SEQ ID NO: 698868 - RNA, 22 nt, Human
cucagagucugcauuucuguca

SEQ ID NO: 698869 - RNA, 22 nt, Human
aauacaagauuuauaguuguuu

SEQ ID NO: 698870 - RNA, 22 nt, Human
ugcaacaggcugugacauggaa

SEQ ID NO: 698871 - RNA, 22 nt, Human
ggcuucacugacugguucuagg

SEQ ID NO: 698872 - RNA, 22 nt, Human
aaagaugaucuacaaguucauu

SEQ ID NO: 698873 - RNA, 22 nt, Human
gcaguuguaauaugaugugagg

SEQ ID NO: 698874 - RNA, 22 nt, Human
auucuucacuguuucagaauga

SEQ ID NO: 698875 - RNA, 22 nt, Human
uuuucauuagaaugacugagaa

SEQ ID NO: 698876 - RNA, 22 nt, Human
uaaaugcucagaccuuauucca

SEQ ID NO: 698877 - RNA, 22 nt, Human
ucaggcuuuuccugccuccuac

SEQ ID NO: 698878 - RNA, 22 nt, Human
gcaugagggggguuaggaaguu

SEQ ID NO: 698879 - RNA, 22 nt, Human
cacagagcaacucaaaucagcu

SEQ ID NO: 698880 - RNA, 22 nt, Human
cugccucugguuuuggucccug

SEQ ID NO: 698881 - RNA, 22 nt, Human
gauggagugccaggguggaacu

SEQ ID NO: 698882 - RNA, 22 nt, Human
agcacuuugugcauuucugaag

SEQ ID NO: 698883 - RNA, 22 nt, Human
cccaggucugccagccuguggg

SEQ ID NO: 698884 - RNA, 22 nt, Human
aaccguuuuaccauuuguaacu

SEQ ID NO: 698885 - RNA, 18 nt, Human
gucuuuucucccuuccuc

SEQ ID NO: 698886 - RNA, 22 nt, Human
auuuuucucucacacuuaccag

SEQ ID NO: 698887 - RNA, 22 nt, Human
agcugccugcauuuauauccug

SEQ ID NO: 698888 - RNA, 22 nt, Human
ugguggcagugagaaggagagg

SEQ ID NO: 698889 - RNA, 22 nt, Human
gguuuuauagcaguacuaucag

SEQ ID NO: 698890 - RNA, 21 nt, Human
ucagaacaauuccaugccucc

SEQ ID NO: 698891 - RNA, 22 nt, Human
uacuuuauauuguggcuggcca

SEQ ID NO: 698892 - RNA, 23 nt, Human
uucuacagcuucuucaguuaagg

SEQ ID NO: 698893 - RNA, 22 nt, Human
cacugcaggucugagauggggg

SEQ ID NO: 698894 - RNA, 22 nt, Human
agcuccaguuuccugacugagc

SEQ ID NO: 698895 - RNA, 22 nt, Human
acuguaauauuuuaagaugucu

SEQ ID NO: 698896 - RNA, 22 nt, Human
ucugggggcgaccagggacugc

SEQ ID NO: 698897 - RNA, 20 nt, Human
aguaugauccacucugcucu

SEQ ID NO: 698898 - RNA, 18 nt, Human
ccugaagccugugucuuu

SEQ ID NO: 698899 - RNA, 22 nt, Human
uagacauuugaaugugaaauga

SEQ ID NO: 698900 - RNA, 22 nt, Human
cagcccagcugggaucacacuc

SEQ ID NO: 698901 - RNA, 22 nt, Human
ugugugcucgauggcccugcag

SEQ ID NO: 698902 - RNA, 18 nt, Human
accaggaagcuucuuguc

SEQ ID NO: 698903 - RNA, 21 nt, Human
ggucagggggugccuccaggu

SEQ ID NO: 698904 - RNA, 22 nt, Human
guggccuuuccugaagaaauga

SEQ ID NO: 698905 - RNA, 22 nt, Human
uggcuucucauuugcauuaaac

SEQ ID NO: 698906 - RNA, 22 nt, Human
gagccagguuugaaucucaguc

SEQ ID NO: 698907 - RNA, 22 nt, Human
ggaggcaaagcacuuugcuugg

SEQ ID NO: 698908 - RNA, 22 nt, Human
gaagcccauuuguacagcacau

SEQ ID NO: 698909 - RNA, 22 nt, Human
ugcagggagcucuggggugcag

SEQ ID NO: 698910 - RNA, 22 nt, Human
ugcucuguugugcaugugggau

SEQ ID NO: 698911 - RNA, 22 nt, Human
guaaaauagaauaacguggcua

SEQ ID NO: 698912 - RNA, 18 nt, Human
agcaguguggcaagcaga

SEQ ID NO: 698913 - RNA, 22 nt, Human
guuugaaaaaagcaguauguaa

SEQ ID NO: 698914 - RNA, 22 nt, Human
auucaaguucuucugucuuugc

SEQ ID NO: 698915 - RNA, 22 nt, Human
cucuggcuugguaaaaacuucu

SEQ ID NO: 698916 - RNA, 21 nt, Human
auuuccaaggguaccuaagau

SEQ ID NO: 698917 - RNA, 22 nt, Human
gaacuguaguuaauacuacaca

SEQ ID NO: 698918 - RNA, 22 nt, Human
agccacagcauguguguaugua

SEQ ID NO: 698919 - RNA, 22 nt, Human
gucugagggucaugggucucac

SEQ ID NO: 698920 - RNA, 22 nt, Human
auccugggcaagucaauguccc

SEQ ID NO: 698921 - RNA, 22 nt, Human
acacugcuaaacaguaaagaug

SEQ ID NO: 698922 - RNA, 22 nt, Human
caccucucauuucuacagauuc

SEQ ID NO: 698923 - RNA, 22 nt, Human
uuucucauggaacaucguuuag

SEQ ID NO: 698924 - RNA, 22 nt, Human
ggggugugaguagagcugggga

SEQ ID NO: 698925 - RNA, 22 nt, Human
gggucugaccugggcacaccau

SEQ ID NO: 698926 - RNA, 22 nt, Human
gaggacagcucuaacuaaaguc

SEQ ID NO: 698927 - RNA, 22 nt, Human
uagaggcauaagagggaagcag

SEQ ID NO: 698928 - RNA, 22 nt, Human
ggcagcaaguggugggagacuu

SEQ ID NO: 698929 - RNA, 22 nt, Human
agccaggggagucagcugcugg

SEQ ID NO: 698930 - RNA, 23 nt, Human
aggauaaacuaaacucauuuugg

SEQ ID NO: 698931 - RNA, 22 nt, Human
uuauuguggacuacuguucugg

SEQ ID NO: 698932 - RNA, 22 nt, Human
cugggaggcaccgcgucgugcu

SEQ ID NO: 698933 - RNA, 22 nt, Human
agcugugucauccuggaaaaug

SEQ ID NO: 698934 - RNA, 22 nt, Human
ccagagcugcagguaaaaugcu

SEQ ID NO: 698935 - RNA, 22 nt, Human
ugugcgugauggaccgggccug

SEQ ID NO: 698936 - RNA, 22 nt, Human
ugagagggcccagagcacacca

SEQ ID NO: 698937 - RNA, 22 nt, Human
acagccaggaauucuggagaag

SEQ ID NO: 698938 - RNA, 22 nt, Human
ccagagagagaggucaauggca

SEQ ID NO: 698939 - RNA, 22 nt, Human
gggccuggggugacguaccccu

SEQ ID NO: 698940 - RNA, 22 nt, Human
aaaugaugauuaaaaugaggua

SEQ ID NO: 698941 - RNA, 22 nt, Human
aagggggccacaccugguguga

SEQ ID NO: 698942 - RNA, 20 nt, Human
uuuauucacagagaagaguu

SEQ ID NO: 698943 - RNA, 20 nt, Human
gugcagccaagcugagccgc

SEQ ID NO: 698944 - RNA, 22 nt, Human
ggcagguguggugaccagagau

SEQ ID NO: 698945 - RNA, 22 nt, Human
caguccagcccccugcuaaaag

SEQ ID NO: 698946 - RNA, 22 nt, Human
cuugcuugauuaugaucauaaa

SEQ ID NO: 698947 - RNA, 22 nt, Human
agggaccucuucuugcagcuga

SEQ ID NO: 698948 - RNA, 22 nt, Human
aaauauguauggaguucaugaa

SEQ ID NO: 698949 - RNA, 22 nt, Human
ccugaggucacaacuugcuuau

SEQ ID NO: 698950 - RNA, 22 nt, Human
aaugcauguuuccucucagcag

SEQ ID NO: 698951 - RNA, 20 nt, Human
agaaggcuccuuuugccaag

SEQ ID NO: 698952 - RNA, 22 nt, Human
cagguggcuucucccuaggcca

SEQ ID NO: 698953 - RNA, 22 nt, Human
agacaguguguguauauauggu

SEQ ID NO: 698954 - RNA, 22 nt, Human
uuuccucuuauacaguguuuau

SEQ ID NO: 698955 - RNA, 21 nt, Human
ugcugccaucaugcagagaug

SEQ ID NO: 698956 - RNA, 22 nt, Human
gccagaaacauacacaucacuu

SEQ ID NO: 698957 - RNA, 22 nt, Human
acccucagaguaggcacugcug

SEQ ID NO: 698958 - RNA, 22 nt, Human
ugugggcuguacugagggcagg

SEQ ID NO: 698959 - RNA, 22 nt, Human
gggcugcugccaccagguggau

SEQ ID NO: 698960 - RNA, 22 nt, Human
gccagaggaacgcugcgcgccc

SEQ ID NO: 698961 - RNA, 22 nt, Human
auucuuuaauucaauugaagga

SEQ ID NO: 698962 - RNA, 22 nt, Human
ugaagcaucuggucugagaauu

SEQ ID NO: 698963 - RNA, 22 nt, Human
cagucuccaaaucaaucugaau

SEQ ID NO: 698964 - RNA, 22 nt, Human
aaggggaguuagugauaaaacc

SEQ ID NO: 698965 - RNA, 22 nt, Human
ccuuugugguggcccagugugg

SEQ ID NO: 698966 - RNA, 22 nt, Human
auguguauacuugugcuuacuc

SEQ ID NO: 698967 - RNA, 22 nt, Human
ucuccacaccagaaggagcuga

SEQ ID NO: 698968 - RNA, 22 nt, Human
caggccuccacuccacgcagac

SEQ ID NO: 698969 - RNA, 22 nt, Human
ccugcugucagcauccucgcga

SEQ ID NO: 698970 - RNA, 22 nt, Human
uucaggaucauuuguuuuaucu

SEQ ID NO: 698971 - RNA, 22 nt, Human
uguaugcaccauuguauuaccu

SEQ ID NO: 698972 - RNA, 22 nt, Human
gugguaaucggauucuuaccgg

SEQ ID NO: 698973 - RNA, 22 nt, Human
ugauggaagugacugucaguuc

SEQ ID NO: 698974 - RNA, 22 nt, Human
uccuggggccagcacuggugga

SEQ ID NO: 698975 - RNA, 22 nt, Human
acuaaagucaucaaagaacuuu

SEQ ID NO: 698976 - RNA, 22 nt, Human
gccaggaggggagaguguguca

SEQ ID NO: 698977 - RNA, 22 nt, Human
augucacaguugcaacaugaau

SEQ ID NO: 698978 - RNA, 22 nt, Human
uaucauuguguuauuucuucca

SEQ ID NO: 698979 - RNA, 22 nt, Human
ccuaacuuuaaugggaccagga

SEQ ID NO: 698980 - RNA, 22 nt, Human
cuuggagaaugacaguggauua

SEQ ID NO: 698981 - RNA, 22 nt, Human
gccaggcagcuagcaaccccug

SEQ ID NO: 698982 - RNA, 22 nt, Human
auguuuacaauucaguauuaca

SEQ ID NO: 698983 - RNA, 22 nt, Human
ucauauuuugcaaggucagcua

SEQ ID NO: 698984 - RNA, 22 nt, Human
gcucccaggcauggagguaauu

SEQ ID NO: 698985 - RNA, 22 nt, Human
ggcugagggucccagacccuaa

SEQ ID NO: 698986 - RNA, 22 nt, Human
cccugcuuugcacccaggcugg

SEQ ID NO: 698987 - RNA, 22 nt, Human
ugguggaaauaaacauccaauu

SEQ ID NO: 698988 - RNA, 22 nt, Human
aagauacuucacuugccgaaau

SEQ ID NO: 698989 - RNA, 22 nt, Human
auccaguaugagguagggcuug

SEQ ID NO: 698990 - RNA, 19 nt, Human
cucuggccucuggaugcug

SEQ ID NO: 698991 - RNA, 22 nt, Human
gaaacuguuucuggcuuuggug

SEQ ID NO: 698992 - RNA, 20 nt, Human
ugauuucucuucuauuccuu

SEQ ID NO: 698993 - RNA, 22 nt, Human
ugcuuccgcuaaaaauuaaucc

SEQ ID NO: 698994 - RNA, 22 nt, Human
auuucaaggcuauuaauauaaa

SEQ ID NO: 698995 - RNA, 22 nt, Human
uucccucuuucacugugauuuu

SEQ ID NO: 698996 - RNA, 22 nt, Human
cccugcccaucggggcggccug

SEQ ID NO: 698997 - RNA, 22 nt, Human
acuguuggucagggauauugug

SEQ ID NO: 698998 - RNA, 22 nt, Human
guuccucacguggacagaugau

SEQ ID NO: 698999 - RNA, 22 nt, Human
uaucaguauggauucauggauu

SEQ ID NO: 699000 - RNA, 22 nt, Human
uagaagcacagccugauggaca

SEQ ID NO: 699001 - RNA, 19 nt, Human
agagucggggggacauagg

SEQ ID NO: 699002 - RNA, 22 nt, Human
uuuacaaguacaccuaacagcu

SEQ ID NO: 699003 - RNA, 22 nt, Human
auuuagacaacaagccuucucc

SEQ ID NO: 699004 - RNA, 22 nt, Human
acacagagguggccacucuuuu

SEQ ID NO: 699005 - RNA, 22 nt, Human
ugcucugggaccgucauuaaaa

SEQ ID NO: 699006 - RNA, 22 nt, Human
auucucuggucauugaguauaa

SEQ ID NO: 699007 - RNA, 22 nt, Human
ggcccugggacacaacaccgaa

SEQ ID NO: 699008 - RNA, 22 nt, Human
ugggcgaggcccagggcugcgu

SEQ ID NO: 699009 - RNA, 22 nt, Human
uauauuagugagauuuauccau

SEQ ID NO: 699010 - RNA, 22 nt, Human
ucagugaaccuucuguggcagg

SEQ ID NO: 699011 - RNA, 22 nt, Human
uaaugcuuuuccuucaaauaag

SEQ ID NO: 699012 - RNA, 22 nt, Human
uuccuuaguugacugucuuagu

SEQ ID NO: 699013 - RNA, 23 nt, Human
acucaaaauuuggcauuugagga

SEQ ID NO: 699014 - RNA, 22 nt, Human
gcuuccagacgaucauguaaga

SEQ ID NO: 699015 - RNA, 22 nt, Human
ucauggcaguuuaauaaguggu

SEQ ID NO: 699016 - RNA, 18 nt, Human
gggcucugauccuucacc

SEQ ID NO: 699017 - RNA, 22 nt, Human
cuucuggaggacacuggcccca

SEQ ID NO: 699018 - RNA, 22 nt, Human
uagggcuguuaguaauucucag

SEQ ID NO: 699019 - RNA, 22 nt, Human
auacaucauuucccaucaaucg

SEQ ID NO: 699020 - RNA, 22 nt, Human
gaauguuuuucauuggugacuc

SEQ ID NO: 699021 - RNA, 22 nt, Human
uugcaaaaccauccuaaguaaa

SEQ ID NO: 699022 - RNA, 22 nt, Human
cugagggcccugaagcuuggca

SEQ ID NO: 699023 - RNA, 22 nt, Human
uuugaaugauuaucuuucggca

SEQ ID NO: 699024 - RNA, 22 nt, Human
ccugaguguaauaaugaaggca

SEQ ID NO: 699025 - RNA, 22 nt, Human
ucuguuaaccuggucuuggcuu

SEQ ID NO: 699026 - RNA, 22 nt, Human
uguucucuucucauugaacaug

SEQ ID NO: 699027 - RNA, 22 nt, Human
aauuuacacuucauuuggaggg

SEQ ID NO: 699028 - RNA, 22 nt, Human
aggcaccagguugugguuuguc

SEQ ID NO: 699029 - RNA, 22 nt, Human
gaaguccagaauacugcucuga

SEQ ID NO: 699030 - RNA, 22 nt, Human
aagauucuuaaauuuguuucuc

SEQ ID NO: 699031 - RNA, 22 nt, Human
uacagugcuugguaucuaguaa

SEQ ID NO: 699032 - RNA, 22 nt, Human
acaggugguaaaauggacuguc

SEQ ID NO: 699033 - RNA, 22 nt, Human
gucaacuuaucucuuuaucugu

SEQ ID NO: 699034 - RNA, 22 nt, Human
gcagguagugaucgagggugac

SEQ ID NO: 699035 - RNA, 22 nt, Human
agagugugaagaaagugcaaug

SEQ ID NO: 699036 - RNA, 22 nt, Human
cccagcagccuggauguucuuu

SEQ ID NO: 699037 - RNA, 22 nt, Human
aauaguauuuauuuggaaaaag

SEQ ID NO: 699038 - RNA, 22 nt, Human
acaagagucugcauuucuaaca

SEQ ID NO: 699039 - RNA, 21 nt, Human
uggccaaggaauagaagcucu

SEQ ID NO: 699040 - RNA, 22 nt, Human
aaugaauggguuuaauauuuua

SEQ ID NO: 699041 - RNA, 22 nt, Human
ucuuccugaaacccuguuccag

SEQ ID NO: 699042 - RNA, 22 nt, Human
auacaucuuccuuuuaaaaugc

SEQ ID NO: 699043 - RNA, 22 nt, Human
cugggugucaggagacaugaug

SEQ ID NO: 699044 - RNA, 22 nt, Human
cucuccagggaagcaguguacu

SEQ ID NO: 699045 - RNA, 22 nt, Human
uuagccauugucagcacauggc

SEQ ID NO: 699046 - RNA, 21 nt, Human
agguuucugugagcagagcag

SEQ ID NO: 699047 - RNA, 22 nt, Human
guguauggacacaugucauguu

SEQ ID NO: 699048 - RNA, 22 nt, Human
auuguuuccccggaauuauuca

SEQ ID NO: 699049 - RNA, 22 nt, Human
agccuucucugauucuccuagu

SEQ ID NO: 699050 - RNA, 22 nt, Human
ugcgucuggaguggaguuugaa

SEQ ID NO: 699051 - RNA, 22 nt, Human
gccagccacguuagacuggccc

SEQ ID NO: 699052 - RNA, 22 nt, Human
uaagguuugcuuaucuucgccu

SEQ ID NO: 699053 - RNA, 22 nt, Human
aucagugcuaaagcaaaugccc

SEQ ID NO: 699054 - RNA, 22 nt, Human
ugcccugucgcucacucccacc

SEQ ID NO: 699055 - RNA, 22 nt, Human
gggagcugaauggcaauggaga

SEQ ID NO: 699056 - RNA, 22 nt, Human
uuaagagauuuaggaacauuau

SEQ ID NO: 699057 - RNA, 19 nt, Human
aggcacagguugucuggac

SEQ ID NO: 699058 - RNA, 22 nt, Human
cucaggcucuggccauccaagg

SEQ ID NO: 699059 - RNA, 22 nt, Human
uugcagagagguuaggaacuca

SEQ ID NO: 699060 - RNA, 22 nt, Human
guucacagguucucuuucuaag

SEQ ID NO: 699061 - RNA, 22 nt, Human
ggguccagagccucagcccaga

SEQ ID NO: 699062 - RNA, 22 nt, Human
uaaauuauggcuggcagagcag

SEQ ID NO: 699063 - RNA, 22 nt, Human
cgaaaauagaucuguuucccag

SEQ ID NO: 699064 - RNA, 22 nt, Human
uggacaggugcacacagcagcc

SEQ ID NO: 699065 - RNA, 19 nt, Human
gcaugcagaguaagaaggu

SEQ ID NO: 699066 - RNA, 22 nt, Human
acacugcuucucuggcagagcc

SEQ ID NO: 699067 - RNA, 22 nt, Human
cauuguaagcuguugaauccuc

SEQ ID NO: 699068 - RNA, 22 nt, Human
uuccacggggcuccccgcucuu

SEQ ID NO: 699069 - RNA, 22 nt, Human
auacaguaauuuguaacucauc

SEQ ID NO: 699070 - RNA, 23 nt, Human
uccugccagaugacuccuuucuu

SEQ ID NO: 699071 - RNA, 22 nt, Human
ucaaaugcucuuugcagagagg

SEQ ID NO: 699072 - RNA, 23 nt, Human
ugguggggucuuggagacagcac

SEQ ID NO: 699073 - RNA, 22 nt, Human
augacagacccucuaaagacaa

SEQ ID NO: 699074 - RNA, 22 nt, Human
cccugagcagucugcagagagc

SEQ ID NO: 699075 - RNA, 22 nt, Human
uaugaacuguacuguacuaagc

SEQ ID NO: 699076 - RNA, 22 nt, Human
ugggauggcauccugggccuug

SEQ ID NO: 699077 - RNA, 22 nt, Human
ucuggcagaggaaggaggccug

SEQ ID NO: 699078 - RNA, 22 nt, Human
acugggaagagagaauucuguc

SEQ ID NO: 699079 - RNA, 22 nt, Human
ucuggcugaaaggggcugugcc

SEQ ID NO: 699080 - RNA, 22 nt, Human
uccagccacguauuaucucacu

SEQ ID NO: 699081 - RNA, 22 nt, Human
ucuuugcaaaauacaacaaugg

SEQ ID NO: 699082 - RNA, 22 nt, Human
ggaaggugcucccuggacagag

SEQ ID NO: 699083 - RNA, 22 nt, Human
guuuaacaucugugaagcugcu

SEQ ID NO: 699084 - RNA, 22 nt, Human
cagcccagcagggucuggcccu

SEQ ID NO: 699085 - RNA, 22 nt, Human
uuauuaagugcguacuguaugc

SEQ ID NO: 699086 - RNA, 22 nt, Human
uugcugccagcgcccugcaggg

SEQ ID NO: 699087 - RNA, 22 nt, Human
uuggccaauuccagaggaucau

SEQ ID NO: 699088 - RNA, 17 nt, Human
acagcagggaaguguug

SEQ ID NO: 699089 - RNA, 22 nt, Human
uuuguagagaauaaaacaaauu

SEQ ID NO: 699090 - RNA, 19 nt, Human
aggcuucaggccacaugcu

SEQ ID NO: 699091 - RNA, 22 nt, Human
ucccagagauuuccucuccuuc

SEQ ID NO: 699092 - RNA, 22 nt, Human
cccuguccuggaugggagcacu

SEQ ID NO: 699093 - RNA, 19 nt, Human
uggcagaggacaaggacuu

SEQ ID NO: 699094 - RNA, 22 nt, Human
uaaagcaaggcaaauuguuggu

SEQ ID NO: 699095 - RNA, 22 nt, Human
cugggcugaaaguguuccuuga

SEQ ID NO: 699096 - RNA, 22 nt, Human
ucacaaacaaugcuuuggaauu

SEQ ID NO: 699097 - RNA, 22 nt, Human
caggaacauuguagaauugaaa

SEQ ID NO: 699098 - RNA, 22 nt, Human
uuagauuuauaugugagaaugg

SEQ ID NO: 699099 - RNA, 22 nt, Human
uucucaggacuccugccugcuu

SEQ ID NO: 699100 - RNA, 17 nt, Human
agcagcuggguugaucu

SEQ ID NO: 699101 - RNA, 22 nt, Human
guaaagaaguuuuugaaugcau

SEQ ID NO: 699102 - RNA, 22 nt, Human
gaggccucugucccaccaggga

SEQ ID NO: 699103 - RNA, 22 nt, Human
gggagccacucagcugagaguu

SEQ ID NO: 699104 - RNA, 23 nt, Human
agcagguagguugaaauuuuccu

SEQ ID NO: 699105 - RNA, 22 nt, Human
uucuaaacuucaauucuaaauu

SEQ ID NO: 699106 - RNA, 22 nt, Human
guuugccuuuuagauaggaaug

SEQ ID NO: 699107 - RNA, 22 nt, Human
cugcugguaccaguggccguca

SEQ ID NO: 699108 - RNA, 22 nt, Human
cagagccacugcauuuuacagc

SEQ ID NO: 699109 - RNA, 21 nt, Human
uuucgcauguguuaacuguga

SEQ ID NO: 699110 - RNA, 22 nt, Human
cagggcucuucaucacacagua

SEQ ID NO: 699111 - RNA, 22 nt, Human
gucugucucucuccagagugca

SEQ ID NO: 699112 - RNA, 22 nt, Human
gagcaacaaauuagggggauuu

SEQ ID NO: 699113 - RNA, 17 nt, Human
ccagaucccaguccuua

SEQ ID NO: 699114 - RNA, 22 nt, Human
gaaugugggcugugaagaggag

SEQ ID NO: 699115 - RNA, 22 nt, Human
uucaaggaaaccagcauuuggu

SEQ ID NO: 699116 - RNA, 22 nt, Human
uagcaggaggcaguuccucgcu

SEQ ID NO: 699117 - RNA, 22 nt, Human
aucugaaacucugacauugucu

SEQ ID NO: 699118 - RNA, 22 nt, Human
aguaaauaacagagaaaauggg

SEQ ID NO: 699119 - RNA, 18 nt, Human
gaauaucuagcacauagu

SEQ ID NO: 699120 - RNA, 22 nt, Human
uuguguuuucuuauggcauaaa

SEQ ID NO: 699121 - RNA, 22 nt, Human
uucucccugguauuuacuuagu

SEQ ID NO: 699122 - RNA, 23 nt, Human
uggcucugagcuuccugguggcc

SEQ ID NO: 699123 - RNA, 22 nt, Human
auugcuggcagcuggaucugca

SEQ ID NO: 699124 - RNA, 22 nt, Human
ugagcaggucaggaaguacauu

SEQ ID NO: 699125 - RNA, 22 nt, Human
gaugugggugucuucagcuggu

SEQ ID NO: 699126 - RNA, 19 nt, Human
aguuggggcagggaagaga

SEQ ID NO: 699127 - RNA, 22 nt, Human
gauaugaaguggcauugugaag

SEQ ID NO: 699128 - RNA, 22 nt, Human
gccuguccacuaaacagccaag

SEQ ID NO: 699129 - RNA, 22 nt, Human
ucugggaaauggcuacuuguca

SEQ ID NO: 699130 - RNA, 22 nt, Human
ucauaaaacacaccagguaguu

SEQ ID NO: 699131 - RNA, 22 nt, Human
acagaaauugcuaauagcucau

SEQ ID NO: 699132 - RNA, 22 nt, Human
uuaaaaugcagauuaugacuca

SEQ ID NO: 699133 - RNA, 22 nt, Human
gcagggcaaugaucccgagagg

SEQ ID NO: 699134 - RNA, 22 nt, Human
ucccagaacccugccagguccu

SEQ ID NO: 699135 - RNA, 22 nt, Human
uuuaggaucucucuuguuacau

SEQ ID NO: 699136 - RNA, 22 nt, Human
gcccacugagugacucccucag

SEQ ID NO: 699137 - RNA, 23 nt, Human
uugaggacaauuuacaugguguu

SEQ ID NO: 699138 - RNA, 22 nt, Human
gagugugggggugcugaggaca

SEQ ID NO: 699139 - RNA, 20 nt, Human
uuucuauggggccagcacau

SEQ ID NO: 699140 - RNA, 22 nt, Human
gugagauuugaguggggauaca

SEQ ID NO: 699141 - RNA, 22 nt, Human
gguauuuauaugucugaagcug

SEQ ID NO: 699142 - RNA, 22 nt, Human
cuguggcagggaagaggccaug

SEQ ID NO: 699143 - RNA, 22 nt, Human
aagaggccucaccucacugccc

SEQ ID NO: 699144 - RNA, 21 nt, Human
agcaaggcagccucucagccu

SEQ ID NO: 699145 - RNA, 22 nt, Human
agccuuguuggucugaguuugg

SEQ ID NO: 699146 - RNA, 22 nt, Human
uugggagcuggaagcaaggccu

SEQ ID NO: 699147 - RNA, 21 nt, Human
aguuaaaccuuuagagaacua

SEQ ID NO: 699148 - RNA, 22 nt, Human
acaaagauucauuugcauuauu

SEQ ID NO: 699149 - RNA, 18 nt, Human
agccaaggaggaggagga

SEQ ID NO: 699150 - RNA, 22 nt, Human
gcagugcaggacaaaucagugc

SEQ ID NO: 699151 - RNA, 22 nt, Human
uccuucaggguugaggccgacu

SEQ ID NO: 699152 - RNA, 19 nt, Human
uuuaccuucuugagagcag

SEQ ID NO: 699153 - RNA, 23 nt, Human
ccauucaucucagucauugcuuu

SEQ ID NO: 699154 - RNA, 22 nt, Human
uucaaagugugaccugacaagc

SEQ ID NO: 699155 - RNA, 18 nt, Human
ucugagguggacgaggag

SEQ ID NO: 699156 - RNA, 22 nt, Human
guuucacauaauuuuaaauugu

SEQ ID NO: 699157 - RNA, 22 nt, Human
aaauagauuuaacauccauccc

SEQ ID NO: 699158 - RNA, 22 nt, Human
ucucugcccauccucaguccac

SEQ ID NO: 699159 - RNA, 22 nt, Human
gaggcauuaaagggaaucuucu

SEQ ID NO: 699160 - RNA, 22 nt, Human
acauugauacugagauacaaag

SEQ ID NO: 699161 - RNA, 22 nt, Human
cagcuguugacugguacaugaa

SEQ ID NO: 699162 - RNA, 22 nt, Human
caggaggcuccuagggcucugu

SEQ ID NO: 699163 - RNA, 22 nt, Human
aguuugaaauguuggcaauauu

SEQ ID NO: 699164 - RNA, 22 nt, Human
uuguccuguuuagggauaagga

SEQ ID NO: 699165 - RNA, 22 nt, Human
agcaggguauguuagagcugua

SEQ ID NO: 699166 - RNA, 22 nt, Human
acaaugaaagcaagaagacggc

SEQ ID NO: 699167 - RNA, 21 nt, Human
uccugcugcuccugucguguu

SEQ ID NO: 699168 - RNA, 22 nt, Human
ucaggcuaacccuaggcagaag

SEQ ID NO: 699169 - RNA, 22 nt, Human
agcuggguggccucuccucggg

SEQ ID NO: 699170 - RNA, 20 nt, Human
gcacagagaugagcaaagua

SEQ ID NO: 699171 - RNA, 22 nt, Human
ugucagcuggagauggcauggg

SEQ ID NO: 699172 - RNA, 22 nt, Human
cauuguuauagcauuacacacc

SEQ ID NO: 699173 - RNA, 22 nt, Human
aguggcugccaagagcaaugcu

SEQ ID NO: 699174 - RNA, 22 nt, Human
uucacagaauggcaaguuaugg

SEQ ID NO: 699175 - RNA, 22 nt, Human
gcuuucugcucuguaaaauggg

SEQ ID NO: 699176 - RNA, 22 nt, Human
gagcaaggauggccggggccgu

SEQ ID NO: 699177 - RNA, 22 nt, Human
ucacuugacuccaguuucuucu

SEQ ID NO: 699178 - RNA, 22 nt, Human
gaaaccugggauauauaaguuu

SEQ ID NO: 699179 - RNA, 22 nt, Human
aggcucugugacaaucaagcug

SEQ ID NO: 699180 - RNA, 22 nt, Human
aaaagcuagucaaugauguauu

SEQ ID NO: 699181 - RNA, 22 nt, Human
aauauuuuaggcuuuccaggcu

SEQ ID NO: 699182 - RNA, 22 nt, Human
gggaacuauuuuaagcacuuga

SEQ ID NO: 699183 - RNA, 22 nt, Human
ugggggagaguuuagaugauuu

SEQ ID NO: 699184 - RNA, 22 nt, Human
guccucaguaagagggccucug

SEQ ID NO: 699185 - RNA, 22 nt, Human
ugagaagcccacacucuuuccu

SEQ ID NO: 699186 - RNA, 22 nt, Human
acauuucucagggaguuuugcu

SEQ ID NO: 699187 - RNA, 22 nt, Human
aggaggugcguggugauccccu

SEQ ID NO: 699188 - RNA, 22 nt, Human
aagacaggaacauagcaaaucc

SEQ ID NO: 699189 - RNA, 22 nt, Human
ggcuucccagcagagggcgcac

SEQ ID NO: 699190 - RNA, 22 nt, Human
cugagcagcaccuucaagaaac

SEQ ID NO: 699191 - RNA, 22 nt, Human
cacugaaucucaaggggagggu

SEQ ID NO: 699192 - RNA, 22 nt, Human
cuguggcugugaaacuucucag

SEQ ID NO: 699193 - RNA, 22 nt, Human
cguugugagcuugguagacacu

SEQ ID NO: 699194 - RNA, 21 nt, Human
agccaggcaagcacccccacu

SEQ ID NO: 699195 - RNA, 22 nt, Human
cauggccucaaaggacugcaga

SEQ ID NO: 699196 - RNA, 22 nt, Human
acaggcaggcgggacagcccga

SEQ ID NO: 699197 - RNA, 22 nt, Human
cuggcuccuccaaggccuggag

SEQ ID NO: 699198 - RNA, 22 nt, Human
ugcugaggcccaggagcacuuu

SEQ ID NO: 699199 - RNA, 22 nt, Human
gagcuuggccucuugaacgugg

SEQ ID NO: 699200 - RNA, 22 nt, Human
cugugcccuuucgcugcacugu

SEQ ID NO: 699201 - RNA, 22 nt, Human
uaauccaaaacugaaucugugg

SEQ ID NO: 699202 - RNA, 22 nt, Human
caugauacuugaauuuggaagg

SEQ ID NO: 699203 - RNA, 22 nt, Human
aaaugucuaucuggcauauucc

SEQ ID NO: 699204 - RNA, 22 nt, Human
ucauacaucuuguauaucuauc

SEQ ID NO: 699205 - RNA, 22 nt, Human
cuguccugaaguuuucaugaga

SEQ ID NO: 699206 - RNA, 22 nt, Human
gcugagcagguguaaggaaggc

SEQ ID NO: 699207 - RNA, 22 nt, Human
gcugccuggauuugcaauccuc

SEQ ID NO: 699208 - RNA, 22 nt, Human
acguuuucagugacugugcuuc

SEQ ID NO: 699209 - RNA, 22 nt, Human
aagcacaccucccuggcaggag

SEQ ID NO: 699210 - RNA, 22 nt, Human
acucagcuuccuacagcuagaa

SEQ ID NO: 699211 - RNA, 22 nt, Human
uaguagaauccaaaccaacagu

SEQ ID NO: 699212 - RNA, 22 nt, Human
gggcacuggaggccaaggagcu

SEQ ID NO: 699213 - RNA, 22 nt, Human
ggagccagugcccucuggugga

SEQ ID NO: 699214 - RNA, 22 nt, Human
ggaggagcugcugugggggccc

SEQ ID NO: 699215 - RNA, 22 nt, Human
cucuuuaguggugaugaugcua

SEQ ID NO: 699216 - RNA, 22 nt, Human
agguuccaggucuggguuaugu

SEQ ID NO: 699217 - RNA, 22 nt, Human
ucccaggcugggggccugaagu

SEQ ID NO: 699218 - RNA, 22 nt, Human
acaucuaagccaauuuugauuu

SEQ ID NO: 699219 - RNA, 22 nt, Human
aaagaacaaaugauauaugguu

SEQ ID NO: 699220 - RNA, 22 nt, Human
uugcauuuuugagcacgaaguu

SEQ ID NO: 699221 - RNA, 17 nt, Human
auaaaggcaaguauuau

SEQ ID NO: 699222 - RNA, 22 nt, Human
ucuuuauaaaagucauuauguc

SEQ ID NO: 699223 - RNA, 22 nt, Human
uggcucauucuuuagaauauac

SEQ ID NO: 699224 - RNA, 22 nt, Human
uaugcauauagaugcacacaca

SEQ ID NO: 699225 - RNA, 22 nt, Human
uuacacaaguucuuuaaccuau

SEQ ID NO: 699226 - RNA, 22 nt, Human
aagaauguucauuaaacuguug

SEQ ID NO: 699227 - RNA, 22 nt, Human
gauuaagauuacauauuuaagu

SEQ ID NO: 699228 - RNA, 22 nt, Human
cagggagcaggcucuguccauc

SEQ ID NO: 699229 - RNA, 22 nt, Human
cuucaguauccuccacauguua

SEQ ID NO: 699230 - RNA, 22 nt, Human
gcguggcuuagagugggguacc

SEQ ID NO: 699231 - RNA, 22 nt, Human
gcuguagguaaggauggcaaag

SEQ ID NO: 699232 - RNA, 22 nt, Human
uaaguacaaauguauacauaag

SEQ ID NO: 699233 - RNA, 22 nt, Human
aggucacauggauaaugaucag

SEQ ID NO: 699234 - RNA, 18 nt, Human
ccuucagcucugccagua

SEQ ID NO: 699235 - RNA, 22 nt, Human
uccccagcauugagggucucuc

SEQ ID NO: 699236 - RNA, 22 nt, Human
agagcugggugaagugccauca

SEQ ID NO: 699237 - RNA, 22 nt, Human
cugugggcucccagcuucucuc

SEQ ID NO: 699238 - RNA, 22 nt, Human
cuguuucucccaacgcccuagu

SEQ ID NO: 699239 - RNA, 20 nt, Human
ugugugcacacaugacauuc

SEQ ID NO: 699240 - RNA, 22 nt, Human
caugcuauauaggaagagcacu

SEQ ID NO: 699241 - RNA, 22 nt, Human
aacucagcauccugcacagaga

SEQ ID NO: 699242 - RNA, 22 nt, Human
ggagcacagccuugccaguacc

SEQ ID NO: 699243 - RNA, 22 nt, Human
gcaaggcagcauccuuuugagg

SEQ ID NO: 699244 - RNA, 22 nt, Human
gaugguuuaugauagaugggaa

SEQ ID NO: 699245 - RNA, 22 nt, Human
gcccagagagaugaagugaugg

SEQ ID NO: 699246 - RNA, 22 nt, Human
caggacaaucucgucggguccu

SEQ ID NO: 699247 - RNA, 22 nt, Human
aaauacuguuuuauuccaugau

SEQ ID NO: 699248 - RNA, 22 nt, Human
uuuguacaggugcaggcauuug

SEQ ID NO: 699249 - RNA, 22 nt, Human
ggcuucuguccucuggaucugu

SEQ ID NO: 699250 - RNA, 22 nt, Human
gaucaggaauauuggaaaguac

SEQ ID NO: 699251 - RNA, 22 nt, Human
augucauuaaaauugugcugca

SEQ ID NO: 699252 - RNA, 22 nt, Human
uaaaaucauucuggugucagua

SEQ ID NO: 699253 - RNA, 22 nt, Human
aaauucuaaggucacaauguug

SEQ ID NO: 699254 - RNA, 22 nt, Human
uacaaacuuguuuuaaguaagu

SEQ ID NO: 699255 - RNA, 22 nt, Human
aaagcugcugccaaucaggcuu

SEQ ID NO: 699256 - RNA, 22 nt, Human
ucacaguaguuguucucuguuu

SEQ ID NO: 699257 - RNA, 22 nt, Human
cagaguaaggagcugucaaacg

SEQ ID NO: 699258 - RNA, 21 nt, Human
gaggaaugguuugcaaagcac

SEQ ID NO: 699259 - RNA, 22 nt, Human
ugaugaggagacuguggcuugg

SEQ ID NO: 699260 - RNA, 21 nt, Human
ugcucagucugucuccagcuu

SEQ ID NO: 699261 - RNA, 22 nt, Human
ggagagugggagcaacuguugc

SEQ ID NO: 699262 - RNA, 20 nt, Human
cacaggcuuacaguuuagau

SEQ ID NO: 699263 - RNA, 22 nt, Human
caugaaggaauaauuguuuaga

SEQ ID NO: 699264 - RNA, 22 nt, Human
guggcagaggcugugaggaugc

SEQ ID NO: 699265 - RNA, 22 nt, Human
ucuuucuacauuuuauaugcuu

SEQ ID NO: 699266 - RNA, 22 nt, Human
cacagcagaaaguguaggagga

SEQ ID NO: 699267 - RNA, 22 nt, Human
gugccugcaggugccggcuuca

SEQ ID NO: 699268 - RNA, 22 nt, Human
ucuccacacuuucucucccagg

SEQ ID NO: 699269 - RNA, 22 nt, Human
gcacauguugcuaguuacuugc

SEQ ID NO: 699270 - RNA, 22 nt, Human
aauuucaaguggcaucuuugau

SEQ ID NO: 699271 - RNA, 22 nt, Human
uacuguacauuccguuuguugc

SEQ ID NO: 699272 - RNA, 22 nt, Human
gccuggagaaaggaagguggga

SEQ ID NO: 699273 - RNA, 22 nt, Human
gucuggggaagucagggcauca

SEQ ID NO: 699274 - RNA, 22 nt, Human
agggccacaguaaugcugagua

SEQ ID NO: 699275 - RNA, 22 nt, Human
ggcagcuguaagaugagugaau

SEQ ID NO: 699276 - RNA, 22 nt, Human
aguauuuagagacacaagacgg

SEQ ID NO: 699277 - RNA, 22 nt, Human
gaggagcucugcuccauccuuc

SEQ ID NO: 699278 - RNA, 22 nt, Human
uaacauuccauggaucugcaga

SEQ ID NO: 699279 - RNA, 22 nt, Human
aaaucaaggagggauuauauuu

SEQ ID NO: 699280 - RNA, 22 nt, Human
agcuggcagucggccuugaugc

SEQ ID NO: 699281 - RNA, 22 nt, Human
cagcugagucugagguucuuug

SEQ ID NO: 699282 - RNA, 22 nt, Human
ccacagcaccugcagccaguug

SEQ ID NO: 699283 - RNA, 22 nt, Human
gagcuaguagaacaagugagga

SEQ ID NO: 699284 - RNA, 22 nt, Human
acauggggcccaaagagagguc

SEQ ID NO: 699285 - RNA, 22 nt, Human
gggacagacccaugggccaggu

SEQ ID NO: 699286 - RNA, 22 nt, Human
aacuuaaugauuucaugcaugu

SEQ ID NO: 699287 - RNA, 22 nt, Human
aauuauauguuaaucuucaauu

SEQ ID NO: 699288 - RNA, 22 nt, Human
cauguaucuuaauugcuuugga

SEQ ID NO: 699289 - RNA, 22 nt, Human
ccaaggcuggagggcuuaugua

SEQ ID NO: 699290 - RNA, 22 nt, Human
gauauauguaaaaguagacaga

SEQ ID NO: 699291 - RNA, 22 nt, Human
auguguuuugguggaucauuca

SEQ ID NO: 699292 - RNA, 22 nt, Human
ggcuggucuccaacccccgauc

SEQ ID NO: 699293 - RNA, 23 nt, Human
aaagaccuaggaugagggagacg

SEQ ID NO: 699294 - RNA, 22 nt, Human
aaaucugggucaagguggagug

SEQ ID NO: 699295 - RNA, 22 nt, Human
auuggaaauacugagagauaaa

SEQ ID NO: 699296 - RNA, 22 nt, Human
ccagccuggagggcaguggugg

SEQ ID NO: 699297 - RNA, 22 nt, Human
aaaaaccucaauuacuuuugca

SEQ ID NO: 699298 - RNA, 22 nt, Human
gaacagaauuaccgaagaucug

SEQ ID NO: 699299 - RNA, 22 nt, Human
acaggccuagcuaaugcuuucc

SEQ ID NO: 699300 - RNA, 22 nt, Human
aagagagaacacagcuugggca

SEQ ID NO: 699301 - RNA, 22 nt, Human
guccagagggucaaguuucuug

SEQ ID NO: 699302 - RNA, 22 nt, Human
uuauuaaaaugcggauuuggcu

SEQ ID NO: 699303 - RNA, 22 nt, Human
ggacauuucauaagaccauucu

SEQ ID NO: 699304 - RNA, 22 nt, Human
uguuguaaaauuugagauguca

SEQ ID NO: 699305 - RNA, 22 nt, Human
cuggccaccaagagcuugcuca

SEQ ID NO: 699306 - RNA, 22 nt, Human
aguggcuuggcugcacuacagg

SEQ ID NO: 699307 - RNA, 21 nt, Human
gagcccaggcaucucauuaau

SEQ ID NO: 699308 - RNA, 22 nt, Human
guauacaauacacaaugcucug

SEQ ID NO: 699309 - RNA, 22 nt, Human
cuggcucccgucugguggccau

SEQ ID NO: 699310 - RNA, 22 nt, Human
gaucaguguuuugugcauucuu

SEQ ID NO: 699311 - RNA, 22 nt, Human
cccaauggcuggauggagggau

SEQ ID NO: 699312 - RNA, 22 nt, Human
ugaugaggggcucagaggucag

SEQ ID NO: 699313 - RNA, 23 nt, Human
cuggcuccgaagacuccaggauc

SEQ ID NO: 699314 - RNA, 22 nt, Human
cucuuacauucuuuuacuagca

SEQ ID NO: 699315 - RNA, 21 nt, Human
uaagacaguaugaauacuuuc

SEQ ID NO: 699316 - RNA, 22 nt, Human
ccacuuuugggaacagugagua

SEQ ID NO: 699317 - RNA, 22 nt, Human
ugcagaagaaaacagcugugug

SEQ ID NO: 699318 - RNA, 22 nt, Human
aaaagucucucugaguaaaagu

SEQ ID NO: 699319 - RNA, 22 nt, Human
guuuucugauuagcaaaucuga

SEQ ID NO: 699320 - RNA, 23 nt, Human
ggagggcuucaucagacccccag

SEQ ID NO: 699321 - RNA, 22 nt, Human
aauauguugagucuaucuuuau

SEQ ID NO: 699322 - RNA, 22 nt, Human
aggcugccaaagcuucugucuc

SEQ ID NO: 699323 - RNA, 22 nt, Human
uguuacuuggugucucuggcug

SEQ ID NO: 699324 - RNA, 22 nt, Human
uauauguguggauucuuguaga

SEQ ID NO: 699325 - RNA, 22 nt, Human
uauuucuguaugcauaaaagga

SEQ ID NO: 699326 - RNA, 22 nt, Human
caaauugcuugucuguagugga

SEQ ID NO: 699327 - RNA, 21 nt, Human
uuggaauuugggagcuaugug

SEQ ID NO: 699328 - RNA, 22 nt, Human
aaauugucagaauucagaaagu

SEQ ID NO: 699329 - RNA, 20 nt, Human
uagauuucauacuucucuuu

SEQ ID NO: 699330 - RNA, 22 nt, Human
ucagaggcuugaagcccaagcc

SEQ ID NO: 699331 - RNA, 22 nt, Human
caagcugccaccagaagagcau

SEQ ID NO: 699332 - RNA, 22 nt, Human
cuuccagguucugguugggaag

SEQ ID NO: 699333 - RNA, 22 nt, Human
ccaguccugggagcuugcacug

SEQ ID NO: 699334 - RNA, 22 nt, Human
uugaggucuucagcugacaccu

SEQ ID NO: 699335 - RNA, 22 nt, Human
ugggauagggcuauugcucaca

SEQ ID NO: 699336 - RNA, 22 nt, Human
uucaagucaauuuuugaaugac

SEQ ID NO: 699337 - RNA, 22 nt, Human
aaguuuagugaaacucuagggg

SEQ ID NO: 699338 - RNA, 22 nt, Human
ucuguucuauuggucuaugugu

SEQ ID NO: 699339 - RNA, 22 nt, Human
cucugcagauucaucccuucac

SEQ ID NO: 699340 - RNA, 22 nt, Human
uggaagggaaaguuuggggucc

SEQ ID NO: 699341 - RNA, 22 nt, Human
ccuuuggagcaacugagagcua

SEQ ID NO: 699342 - RNA, 20 nt, Human
uggaaguucuguugcauugg

SEQ ID NO: 699343 - RNA, 22 nt, Human
uguccaggacccuauucucacu

SEQ ID NO: 699344 - RNA, 18 nt, Human
cuuccugacuagcucugg

SEQ ID NO: 699345 - RNA, 22 nt, Human
ucuugcuaggagcuauggaaga

SEQ ID NO: 699346 - RNA, 22 nt, Human
aauugcuucccaagggaggucu

SEQ ID NO: 699347 - RNA, 22 nt, Human
ugcauguuuauaacagaugagg

SEQ ID NO: 699348 - RNA, 22 nt, Human
cacccaguugacuacaaagggg

SEQ ID NO: 699349 - RNA, 22 nt, Human
auacacacugcuauccuuuuuu

SEQ ID NO: 699350 - RNA, 22 nt, Human
gaggagcuguucccucaccucu

SEQ ID NO: 699351 - RNA, 22 nt, Human
aaucucucugggguucaguccu

SEQ ID NO: 699352 - RNA, 22 nt, Human
acacaaugucaucauaauguca

SEQ ID NO: 699353 - RNA, 22 nt, Human
uguauucucucaauauuucaua

SEQ ID NO: 699354 - RNA, 23 nt, Human
uggccacaguccaugcaugccca

SEQ ID NO: 699355 - RNA, 22 nt, Human
aaagauuucacaucccaagccu

SEQ ID NO: 699356 - RNA, 22 nt, Human
ccaggaaaccugcgccauccag

SEQ ID NO: 699357 - RNA, 22 nt, Human
ugagguccugcauguugagguc

SEQ ID NO: 699358 - RNA, 22 nt, Human
gagggagaauugcagccagcgu

SEQ ID NO: 699359 - RNA, 22 nt, Human
guuauuaaaguauuugauguua

SEQ ID NO: 699360 - RNA, 18 nt, Human
gcugagguggugucagag

SEQ ID NO: 699361 - RNA, 22 nt, Human
uacaggaagcacucaagaaaug

SEQ ID NO: 699362 - RNA, 22 nt, Human
ucacacagugagaaagugcgga

SEQ ID NO: 699363 - RNA, 22 nt, Human
uuauuugcccauguuuagcaga

SEQ ID NO: 699364 - RNA, 22 nt, Human
gugcaauaaauaaauagauugu

SEQ ID NO: 699365 - RNA, 22 nt, Human
guucaugcuacccuuuccuaau

SEQ ID NO: 699366 - RNA, 23 nt, Human
acacagaagaagacccaaggaag

SEQ ID NO: 699367 - RNA, 22 nt, Human
aucagaaggggagguaaagaag

SEQ ID NO: 699368 - RNA, 22 nt, Human
ucacauuuauuucaaaguuacu

SEQ ID NO: 699369 - RNA, 22 nt, Human
caacaucaguccucaugagaca

SEQ ID NO: 699370 - RNA, 22 nt, Human
uuuauaucuggaguugcuagga

SEQ ID NO: 699371 - RNA, 22 nt, Human
gagguccaggguggggccugag

SEQ ID NO: 699372 - RNA, 22 nt, Human
cagagcuuuggcuagaugguug

SEQ ID NO: 699373 - RNA, 22 nt, Human
uccaggggugauuuuugacuug

SEQ ID NO: 699374 - RNA, 22 nt, Human
uuuguuuucaaugugucauuca

SEQ ID NO: 699375 - RNA, 22 nt, Human
augccaggccccacgcugggca

SEQ ID NO: 699376 - RNA, 22 nt, Human
gaaguuauuuccugguguugga

SEQ ID NO: 699377 - RNA, 22 nt, Human
cagaggucuccaucacccuccu

SEQ ID NO: 699378 - RNA, 22 nt, Human
cagacagaaggaaggccaacau

SEQ ID NO: 699379 - RNA, 22 nt, Human
cugugcugaggaugcaguuucu

SEQ ID NO: 699380 - RNA, 22 nt, Human
cacauuuagguuccuauagcca

SEQ ID NO: 699381 - RNA, 22 nt, Human
uauuuuacaaaugggaaugcug

SEQ ID NO: 699382 - RNA, 22 nt, Human
acucugggaugagaaaaggguu

SEQ ID NO: 699383 - RNA, 22 nt, Human
gcugggagccccgagccagcgc

SEQ ID NO: 699384 - RNA, 22 nt, Human
uuuucuuauggugaagcacaaa

SEQ ID NO: 699385 - RNA, 22 nt, Human
ucuuugauuugacaauaucuug

SEQ ID NO: 699386 - RNA, 22 nt, Human
uuaacagauguuuauggagcau

SEQ ID NO: 699387 - RNA, 22 nt, Human
uaugaacugugagugugauggg

SEQ ID NO: 699388 - RNA, 22 nt, Human
ugcagggcagcuagggagcuuu

SEQ ID NO: 699389 - RNA, 22 nt, Human
uucagagguaagggucucagaa

SEQ ID NO: 699390 - RNA, 22 nt, Human
gaaggcagggaauguggugcua

SEQ ID NO: 699391 - RNA, 22 nt, Human
ugaggggauacgguacacauug

SEQ ID NO: 699392 - RNA, 22 nt, Human
agcugucucugguauuauguga

SEQ ID NO: 699393 - RNA, 22 nt, Human
cugccacuuacuaggcauggug

SEQ ID NO: 699394 - RNA, 17 nt, Human
aauaccugccaauucua

SEQ ID NO: 699395 - RNA, 22 nt, Human
cucagagcucagcuuuguuagu

SEQ ID NO: 699396 - RNA, 20 nt, Human
gcuguggccgugccagacuc

SEQ ID NO: 699397 - RNA, 19 nt, Human
ucugggagagugaaucuga

SEQ ID NO: 699398 - RNA, 22 nt, Human
guggccugccagcagauggcgc

SEQ ID NO: 699399 - RNA, 22 nt, Human
cugggugauuccuguccaggca

SEQ ID NO: 699400 - RNA, 22 nt, Human
caguccuuagauuuuacugcca

SEQ ID NO: 699401 - RNA, 22 nt, Human
ucugcguggcugcugugagcgu

SEQ ID NO: 699402 - RNA, 22 nt, Human
gggcugacuccuauuggaugaa

SEQ ID NO: 699403 - RNA, 22 nt, Human
aagucaugaguccucuucugug

SEQ ID NO: 699404 - RNA, 22 nt, Human
gauacauuccauuucuacuuaa

SEQ ID NO: 699405 - RNA, 22 nt, Human
uagcacaagaaguacacauaga

SEQ ID NO: 699406 - RNA, 22 nt, Human
agguguggcuggggcagaggcc

SEQ ID NO: 699407 - RNA, 22 nt, Human
ucuuggcugcguccuggcugug

SEQ ID NO: 699408 - RNA, 22 nt, Human
aucuggacuagagcagaauggg

SEQ ID NO: 699409 - RNA, 22 nt, Human
auguggccuaguauagaaauga

SEQ ID NO: 699410 - RNA, 22 nt, Human
uucccagaccuguaggaucaga

SEQ ID NO: 699411 - RNA, 22 nt, Human
gcccucaggacaagguuacgcu

SEQ ID NO: 699412 - RNA, 22 nt, Human
auucucagcuuucaaauagaca

SEQ ID NO: 699413 - RNA, 20 nt, Human
cagcuuuagaucuuugauua

SEQ ID NO: 699414 - RNA, 22 nt, Human
uggccuggugcucaggcaguag

SEQ ID NO: 699415 - RNA, 22 nt, Human
ggcugagguguggggaacuaua

SEQ ID NO: 699416 - RNA, 20 nt, Human
ggcauccuucugacccagag

SEQ ID NO: 699417 - RNA, 22 nt, Human
acacaacagaagagcaauugca

SEQ ID NO: 699418 - RNA, 22 nt, Human
uugaaacuuagaaauugagcug

SEQ ID NO: 699419 - RNA, 20 nt, Human
uuguuagaggaaugccauag

SEQ ID NO: 699420 - RNA, 15 nt, Human
uguggcuggcuccug

SEQ ID NO: 699421 - RNA, 22 nt, Human
ucuccaaggagcuccugugccg

SEQ ID NO: 699422 - RNA, 22 nt, Human
uacagcuaugucuugguguucu

SEQ ID NO: 699423 - RNA, 22 nt, Human
acuaaagaugucuaaauauauu

SEQ ID NO: 699424 - RNA, 22 nt, Human
ugguuugacaaugaggacuggu

SEQ ID NO: 699425 - RNA, 22 nt, Human
agcagggggcauccuugcccuu

SEQ ID NO: 699426 - RNA, 22 nt, Human
gcuccuggauguucaagucggc

SEQ ID NO: 699427 - RNA, 22 nt, Human
augcuuuagugucaaguuuggg

SEQ ID NO: 699428 - RNA, 22 nt, Human
cuguaaaacacuguaguaucug

SEQ ID NO: 699429 - RNA, 22 nt, Human
aacugagacacgaacuaugauu

SEQ ID NO: 699430 - RNA, 22 nt, Human
auugaaaauauaauucuaggag

SEQ ID NO: 699431 - RNA, 22 nt, Human
ucucacuggguauaaaugagua

SEQ ID NO: 699432 - RNA, 22 nt, Human
guuaucuucccuuugaugauuu

SEQ ID NO: 699433 - RNA, 22 nt, Human
augcgugugugcaaaccauugc

SEQ ID NO: 699434 - RNA, 22 nt, Human
aaccagagugacacucuacaga

SEQ ID NO: 699435 - RNA, 22 nt, Human
cuggcagugcccagucacuguu

SEQ ID NO: 699436 - RNA, 19 nt, Human
ggaaggagagaaaugcaug

SEQ ID NO: 699437 - RNA, 22 nt, Human
agguacugaaaaaauguuugca

SEQ ID NO: 699438 - RNA, 22 nt, Human
gccaccuuccaaaauaaucaca

SEQ ID NO: 699439 - RNA, 22 nt, Human
gaaauucacuguauuucuuggg

SEQ ID NO: 699440 - RNA, 22 nt, Human
uuggcaggaauauugcagaggu

SEQ ID NO: 699441 - RNA, 22 nt, Human
cucaggcugucuaauggauuag

SEQ ID NO: 699442 - RNA, 22 nt, Human
uauuucagcaagaagaaugugg

SEQ ID NO: 699443 - RNA, 22 nt, Human
cagcugccccauaaaucacagu

SEQ ID NO: 699444 - RNA, 22 nt, Human
ugaguagacgugaucuaguaac

SEQ ID NO: 699445 - RNA, 22 nt, Human
augggcugugagguccggcagg

SEQ ID NO: 699446 - RNA, 22 nt, Human
acacaugaaauaauauuaugca

SEQ ID NO: 699447 - RNA, 22 nt, Human
uguuuccuucugucucuuugga

SEQ ID NO: 699448 - RNA, 22 nt, Human
aucacagggugaggauuagacc

SEQ ID NO: 699449 - RNA, 22 nt, Human
gacuguggcagaaauguuguug

SEQ ID NO: 699450 - RNA, 20 nt, Human
ucccucccuccagcucuggg

SEQ ID NO: 699451 - RNA, 22 nt, Human
cuuccgugucaguuccaggugg

SEQ ID NO: 699452 - RNA, 22 nt, Human
ugcauuucacagacugagaaau

SEQ ID NO: 699453 - RNA, 22 nt, Human
ugaaugaugaggggagaauaau

SEQ ID NO: 699454 - RNA, 22 nt, Human
ggugaggggcgccucugcccgg

SEQ ID NO: 699455 - RNA, 22 nt, Human
acagaaagaugauuugaaaugg

SEQ ID NO: 699456 - RNA, 23 nt, Human
acugggcugaaauuaaagguguc

SEQ ID NO: 699457 - RNA, 22 nt, Human
auuucagauucagaaauguagg

SEQ ID NO: 699458 - RNA, 22 nt, Human
aucuggcuggauucuuagcguu

SEQ ID NO: 699459 - RNA, 22 nt, Human
aaggaggaauguagccagcucc

SEQ ID NO: 699460 - RNA, 22 nt, Human
aacaaugugaagugcuguucag

SEQ ID NO: 699461 - RNA, 22 nt, Human
aauggccagcaacaggagugaa

SEQ ID NO: 699462 - RNA, 22 nt, Human
ccaguccuggccaguaacauga

SEQ ID NO: 699463 - RNA, 22 nt, Human
uuuauugucaaucuauucccag

SEQ ID NO: 699464 - RNA, 22 nt, Human
uggucccuagcacagcuguccu

SEQ ID NO: 699465 - RNA, 18 nt, Human
uccuguggcccagaguuu

SEQ ID NO: 699466 - RNA, 21 nt, Human
uaagcauaucagauagacucu

SEQ ID NO: 699467 - RNA, 19 nt, Human
cucuuggguggcagaggcc

SEQ ID NO: 699468 - RNA, 22 nt, Human
caugugugggacccuuagguug

SEQ ID NO: 699469 - RNA, 22 nt, Human
guuccauaucacagcagacgaa

SEQ ID NO: 699470 - RNA, 22 nt, Human
uggauuaguuuaacaauguggc

SEQ ID NO: 699471 - RNA, 22 nt, Human
ugugacuuaauccuuggguggg

SEQ ID NO: 699472 - RNA, 22 nt, Human
ggcugcugagucacgacaguga

SEQ ID NO: 699473 - RNA, 22 nt, Human
ccucugagaacaccuggcgucc

SEQ ID NO: 699474 - RNA, 22 nt, Human
ggcucugcuuccuggaauugug

SEQ ID NO: 699475 - RNA, 22 nt, Human
gcagacgucaccgagucgaugg

SEQ ID NO: 699476 - RNA, 22 nt, Human
acagugcuaaacacuucuugaa

SEQ ID NO: 699477 - RNA, 22 nt, Human
ugccagcaagaauagacaguaa

SEQ ID NO: 699478 - RNA, 21 nt, Human
ucccacuggcccagggcucca

SEQ ID NO: 699479 - RNA, 22 nt, Human
ggaggcaggaaagacagguuca

SEQ ID NO: 699480 - RNA, 22 nt, Human
auuauguauuugguauaguuug

SEQ ID NO: 699481 - RNA, 22 nt, Human
agggucaacauucuaaaaucug

SEQ ID NO: 699482 - RNA, 22 nt, Human
ugggcucagucugcaccugcgg

SEQ ID NO: 699483 - RNA, 22 nt, Human
guggcuucugcggugugcgcag

SEQ ID NO: 699484 - RNA, 22 nt, Human
cuagcagcaucacaggaagacu

SEQ ID NO: 699485 - RNA, 22 nt, Human
gcauucaggaaccggaagggua

SEQ ID NO: 699486 - RNA, 22 nt, Human
ucacaggcuugugaacauugca

SEQ ID NO: 699487 - RNA, 22 nt, Human
ucaucuaagagucuuacauuua

SEQ ID NO: 699488 - RNA, 22 nt, Human
ggcauacaagagaaauauaaga

SEQ ID NO: 699489 - RNA, 22 nt, Human
uuuuuuauaucaacugaagucu

SEQ ID NO: 699490 - RNA, 22 nt, Human
uuguuuugcuaaagggucauca

SEQ ID NO: 699491 - RNA, 22 nt, Human
gcacacauucggauucuuaacc

SEQ ID NO: 699492 - RNA, 22 nt, Human
cagaagacagagcacuucucuu

SEQ ID NO: 699493 - RNA, 22 nt, Human
aguggcagagguugacugcagu

SEQ ID NO: 699494 - RNA, 22 nt, Human
aggcuggagugcaguggcguga

SEQ ID NO: 699495 - RNA, 19 nt, Human
aguuucccuggagacauca

SEQ ID NO: 699496 - RNA, 22 nt, Human
aacaguuuggguagguauguag

SEQ ID NO: 699497 - RNA, 22 nt, Human
gugccuuugagaaguuucucug

SEQ ID NO: 699498 - RNA, 22 nt, Human
ugggacacaaaccagaccagga

SEQ ID NO: 699499 - RNA, 22 nt, Human
ucugcagguagagcucaggaau

SEQ ID NO: 699500 - RNA, 22 nt, Human
uaaaugcagauuccugagccua

SEQ ID NO: 699501 - RNA, 22 nt, Human
gucaggaugggcagccaaacua

SEQ ID NO: 699502 - RNA, 22 nt, Human
aagcauauauuuuauauguugu

SEQ ID NO: 699503 - RNA, 22 nt, Human
cucagcuccagcccucagcagc

SEQ ID NO: 699504 - RNA, 21 nt, Human
agcuguggcgaggggaacaug

SEQ ID NO: 699505 - RNA, 18 nt, Human
ucuaggagaguaccuacc

SEQ ID NO: 699506 - RNA, 22 nt, Human
cauaaucagauguguacauaag

SEQ ID NO: 699507 - RNA, 22 nt, Human
uccaucaccacagaggacagag

SEQ ID NO: 699508 - RNA, 22 nt, Human
aggcucagucccggcccgcgcc

SEQ ID NO: 699509 - RNA, 22 nt, Human
caggcgagggcccugaggagcc

SEQ ID NO: 699510 - RNA, 22 nt, Human
ucagaaaggaguuagaggucuc

SEQ ID NO: 699511 - RNA, 22 nt, Human
ucacaggacccugaggguggcg

SEQ ID NO: 699512 - RNA, 22 nt, Human
uugugcaagaagccagcaccaa

SEQ ID NO: 699513 - RNA, 19 nt, Human
uucuaugauuaacaugaga

SEQ ID NO: 699514 - RNA, 22 nt, Human
aauuaauggaaaguaaggaagg

SEQ ID NO: 699515 - RNA, 22 nt, Human
uccucacagucaacacuuugag

SEQ ID NO: 699516 - RNA, 22 nt, Human
cugucuggccggcccagcuucc

SEQ ID NO: 699517 - RNA, 22 nt, Human
gguggggccugcuccagcggcc

SEQ ID NO: 699518 - RNA, 22 nt, Human
augacaauauagcuuugauuuu

SEQ ID NO: 699519 - RNA, 22 nt, Human
uuucaugugcaauuagcaauau

SEQ ID NO: 699520 - RNA, 23 nt, Human
agcuucgccuuccuuucucugca

SEQ ID NO: 699521 - RNA, 22 nt, Human
gacugaggcuccccuaggcuca

SEQ ID NO: 699522 - RNA, 22 nt, Human
ccuggcacagauccuucauaca

SEQ ID NO: 699523 - RNA, 21 nt, Human
auaucacaaacauauggucug

SEQ ID NO: 699524 - RNA, 22 nt, Human
gcuucuggagucuucagaggaa

SEQ ID NO: 699525 - RNA, 22 nt, Human
auccuuggauccuguguuccug

SEQ ID NO: 699526 - RNA, 22 nt, Human
aagaaaggauauaugggaggua

SEQ ID NO: 699527 - RNA, 22 nt, Human
aagcacacagcaaaggggagcu

SEQ ID NO: 699528 - RNA, 22 nt, Human
guggccuggcuggcaccaccuc

SEQ ID NO: 699529 - RNA, 22 nt, Human
aucuguaaagauaaucauaugu

SEQ ID NO: 699530 - RNA, 22 nt, Human
auacagcuuacaguucuaaugc

SEQ ID NO: 699531 - RNA, 22 nt, Human
gaggaaacauuguagaagcagu

SEQ ID NO: 699532 - RNA, 22 nt, Human
caauuucuuguuaauucucagg

SEQ ID NO: 699533 - RNA, 22 nt, Human
cagagcugggaucccaugggcg

SEQ ID NO: 699534 - RNA, 23 nt, Human
gcugagguacauuuacaggaaga

SEQ ID NO: 699535 - RNA, 22 nt, Human
acccaggcuggagugcaguagc

SEQ ID NO: 699536 - RNA, 19 nt, Human
gcaggcuugggucucccca

SEQ ID NO: 699537 - RNA, 22 nt, Human
auucaaagcccaguaaacauug

SEQ ID NO: 699538 - RNA, 22 nt, Human
ugcugggcaucguaggagguac

SEQ ID NO: 699539 - RNA, 22 nt, Human
gcucaggggaaugggcugccgu

SEQ ID NO: 699540 - RNA, 22 nt, Human
gacuauuuuuaucuaacugggu

SEQ ID NO: 699541 - RNA, 22 nt, Human
aucauaaagugcuaucugauug

SEQ ID NO: 699542 - RNA, 22 nt, Human
ucacagaaggcaucacagaaga

SEQ ID NO: 699543 - RNA, 22 nt, Human
ggcugucaauucauaggucaga

SEQ ID NO: 699544 - RNA, 22 nt, Human
ugcccugggaggcuuuccuguu

SEQ ID NO: 699545 - RNA, 22 nt, Human
ucaaagaagugcaaaccucauc

SEQ ID NO: 699546 - RNA, 22 nt, Human
uauagccauuuccaguggcauc

SEQ ID NO: 699547 - RNA, 22 nt, Human
gcuggccucgcaggcaggaugu

SEQ ID NO: 699548 - RNA, 22 nt, Human
aaucagaaaauucaguggaauu

SEQ ID NO: 699549 - RNA, 22 nt, Human
gcagggcacagacagugccaag

SEQ ID NO: 699550 - RNA, 22 nt, Human
gaaguuaucaaagauguauucu

SEQ ID NO: 699551 - RNA, 22 nt, Human
guaauugacucagcucuguuca

SEQ ID NO: 699552 - RNA, 22 nt, Human
gccuuuggagaauccagucaug

SEQ ID NO: 699553 - RNA, 22 nt, Human
gaaggccauuuuuagguagaau

SEQ ID NO: 699554 - RNA, 22 nt, Human
auugacuuaaaggcucugguua

SEQ ID NO: 699555 - RNA, 22 nt, Human
aucaggcuaguguguguguuca

SEQ ID NO: 699556 - RNA, 22 nt, Human
ccacucugauuucaagggagau

SEQ ID NO: 699557 - RNA, 22 nt, Human
ugaagccauaggacagaggaua

SEQ ID NO: 699558 - RNA, 22 nt, Human
caggccagagcgcgugguuggg

SEQ ID NO: 699559 - RNA, 22 nt, Human
uggagaugaggacauggacguc

SEQ ID NO: 699560 - RNA, 22 nt, Human
caggaauguagcagcgauggaa

SEQ ID NO: 699561 - RNA, 22 nt, Human
uucuuggaaacugauuccuugu

SEQ ID NO: 699562 - RNA, 22 nt, Human
ucucuuccuugaccuauuguaa

SEQ ID NO: 699563 - RNA, 22 nt, Human
uaguuaaugcuaauuaacaaau

SEQ ID NO: 699564 - RNA, 17 nt, Human
ggaagaaaaggaucauc

SEQ ID NO: 699565 - RNA, 22 nt, Human
gggcccuggacguggcggcaga

SEQ ID NO: 699566 - RNA, 22 nt, Human
aaaugcauuaagucagaacaau

SEQ ID NO: 699567 - RNA, 16 nt, Human
gagccaggugccuuga

SEQ ID NO: 699568 - RNA, 22 nt, Human
cugggcauuuuucucuguuaca

SEQ ID NO: 699569 - RNA, 22 nt, Human
agucaaaugaguaaauauauaa

SEQ ID NO: 699570 - RNA, 22 nt, Human
cauuucucacuccagcaacuuu

SEQ ID NO: 699571 - RNA, 22 nt, Human
aggguggccaccaaguauguca

SEQ ID NO: 699572 - RNA, 22 nt, Human
uuaaguaagaccuuaugucuug

SEQ ID NO: 699573 - RNA, 22 nt, Human
ggcugguggggaaagaggacca

SEQ ID NO: 699574 - RNA, 22 nt, Human
ggaggagacggagugauuagug

SEQ ID NO: 699575 - RNA, 22 nt, Human
gcuucagacuggagcagaggaa

SEQ ID NO: 699576 - RNA, 22 nt, Human
cugaaggacuuggugauaguug

SEQ ID NO: 699577 - RNA, 22 nt, Human
gaggcucaguuaugucaucagg

SEQ ID NO: 699578 - RNA, 22 nt, Human
uuuccuuucuagaagccuaaau

SEQ ID NO: 699579 - RNA, 22 nt, Human
cacaaaguuggacaacgcaccc

SEQ ID NO: 699580 - RNA, 22 nt, Human
acuuucaauucacugagauaua

SEQ ID NO: 699581 - RNA, 22 nt, Human
aaagccaguucuuuuauauugg

SEQ ID NO: 699582 - RNA, 22 nt, Human
gggcacaggagaaggaucuggc

SEQ ID NO: 699583 - RNA, 22 nt, Human
ugagaacuugugcuauugcaca

SEQ ID NO: 699584 - RNA, 22 nt, Human
gagcagagcuucucaaaguaaa

SEQ ID NO: 699585 - RNA, 22 nt, Human
cuggaaaggguccucauucugu

SEQ ID NO: 699586 - RNA, 22 nt, Human
auuuaauuuauagauguggaua

SEQ ID NO: 699587 - RNA, 22 nt, Human
cucugcugcuuugccaguggaa

SEQ ID NO: 699588 - RNA, 22 nt, Human
gacagacaggugugguaggcac

SEQ ID NO: 699589 - RNA, 20 nt, Human
aaguuggcuccuccuagcaa

SEQ ID NO: 699590 - RNA, 22 nt, Human
ggccuucacgugaccuggcgug

SEQ ID NO: 699591 - RNA, 22 nt, Human
acccagcuaacccuacccugga

SEQ ID NO: 699592 - RNA, 22 nt, Human
ugcauaaagugccauaguauua

SEQ ID NO: 699593 - RNA, 22 nt, Human
auuucucagugaaaugacaggc

SEQ ID NO: 699594 - RNA, 22 nt, Human
aagcaauguguuaaugaaugag

SEQ ID NO: 699595 - RNA, 20 nt, Human
gccaggcacuguucucaaua

SEQ ID NO: 699596 - RNA, 22 nt, Human
cuggcccuggagggcugugcga

SEQ ID NO: 699597 - RNA, 20 nt, Human
ugagccaggcuaggaagggc

SEQ ID NO: 699598 - RNA, 22 nt, Human
aggcugugacagggucauggag

SEQ ID NO: 699599 - RNA, 22 nt, Human
agaguuggcccacguguaggcg

SEQ ID NO: 699600 - RNA, 22 nt, Human
cucuuagaaacuauagagauua

SEQ ID NO: 699601 - RNA, 22 nt, Human
agugcagaggcugggaaaugcu

SEQ ID NO: 699602 - RNA, 22 nt, Human
acacauuauaggcaaucaaaag

SEQ ID NO: 699603 - RNA, 22 nt, Human
ggccugcuguguacugauguca

SEQ ID NO: 699604 - RNA, 22 nt, Human
aaagacuuucaccuagcaaaga

SEQ ID NO: 699605 - RNA, 22 nt, Human
auuuuguugaugguggaguagc

SEQ ID NO: 699606 - RNA, 22 nt, Human
guauuuuuagguaaggaaagua

SEQ ID NO: 699607 - RNA, 22 nt, Human
uguagaugagucagggugcaug

SEQ ID NO: 699608 - RNA, 22 nt, Human
ccccaggagauuugggagcaca

SEQ ID NO: 699609 - RNA, 23 nt, Human
ugugaaauuugaggucagugcuu

SEQ ID NO: 699610 - RNA, 22 nt, Human
cugagccaguagucagggacaa

SEQ ID NO: 699611 - RNA, 22 nt, Human
gguuugcaugugauguugggca

SEQ ID NO: 699612 - RNA, 22 nt, Human
ccagggaugcuuucccaggacu

SEQ ID NO: 699613 - RNA, 22 nt, Human
agaaagcacucugucuuuuacc

SEQ ID NO: 699614 - RNA, 22 nt, Human
caguauguuugggagacaugac

SEQ ID NO: 699615 - RNA, 22 nt, Human
aagcuguugcccugcucuuucu

SEQ ID NO: 699616 - RNA, 21 nt, Human
uggcuaaacccuaguaaauua

SEQ ID NO: 699617 - RNA, 22 nt, Human
ucacacuuaucccacucaguca

SEQ ID NO: 699618 - RNA, 22 nt, Human
uuacagagaggugauugugaag

SEQ ID NO: 699619 - RNA, 22 nt, Human
aucagagaaauggagggcgcuu

SEQ ID NO: 699620 - RNA, 22 nt, Human
cuugagaaucuugaugucuacc

SEQ ID NO: 699621 - RNA, 22 nt, Human
cacaggagggagcgggcagcca

SEQ ID NO: 699622 - RNA, 22 nt, Human
gccaguggugagauucccuggg

SEQ ID NO: 699623 - RNA, 22 nt, Human
aaaauuggacguagcuacucca

SEQ ID NO: 699624 - RNA, 22 nt, Human
auguauuucuauguagugaaga

SEQ ID NO: 699625 - RNA, 22 nt, Human
uucacauucucacaagaggaaa

SEQ ID NO: 699626 - RNA, 22 nt, Human
uggaagaaggcagagaggcauu

SEQ ID NO: 699627 - RNA, 22 nt, Human
uaccaugaucaggcucauccuu

SEQ ID NO: 699628 - RNA, 22 nt, Human
cgcugugugcagacugaaaaug

SEQ ID NO: 699629 - RNA, 22 nt, Human
uuaagacauuuuuggagauuau

SEQ ID NO: 699630 - RNA, 22 nt, Human
aagaagcacuuuccuacauguu

SEQ ID NO: 699631 - RNA, 22 nt, Human
uuggccagaucugaggauacug

SEQ ID NO: 699632 - RNA, 22 nt, Human
ugaaaucugcaugcaaaguccu

SEQ ID NO: 699633 - RNA, 22 nt, Human
ucuggggcaguuacuggggccu

SEQ ID NO: 699634 - RNA, 22 nt, Human
uuuaaugggauccaucugguua

SEQ ID NO: 699635 - RNA, 22 nt, Human
aaggcucuggguuucauaggug

SEQ ID NO: 699636 - RNA, 22 nt, Human
ucagaagccaccuuuuguuggg

SEQ ID NO: 699637 - RNA, 22 nt, Human
cuuggggcugucacucuggcau

SEQ ID NO: 699638 - RNA, 22 nt, Human
ucuuuccucugagcuccuguag

SEQ ID NO: 699639 - RNA, 22 nt, Human
agugcugucccgacaacugagg

SEQ ID NO: 699640 - RNA, 22 nt, Human
ucauuuuugaccauggguagga

SEQ ID NO: 699641 - RNA, 20 nt, Human
ucucccugcccaucucagau

SEQ ID NO: 699642 - RNA, 22 nt, Human
ccuccugggcuccugucugcac

SEQ ID NO: 699643 - RNA, 22 nt, Human
ugaacucucucaagugacagaa

SEQ ID NO: 699644 - RNA, 22 nt, Human
ugagucucgguuuccccuccaa

SEQ ID NO: 699645 - RNA, 22 nt, Human
cuggaaggugacugucuugaau

SEQ ID NO: 699646 - RNA, 19 nt, Human
aggucugcagcugcaguuu

SEQ ID NO: 699647 - RNA, 16 nt, Human
caguuuuaaggcccaa

SEQ ID NO: 699648 - RNA, 20 nt, Human
accauaauguuaauuacaaa

SEQ ID NO: 699649 - RNA, 20 nt, Human
aguguuccggaagacuggca

SEQ ID NO: 699650 - RNA, 22 nt, Human
ggaggaugagcuacgaggagcu

SEQ ID NO: 699651 - RNA, 22 nt, Human
gcucugagccgggggccugucc

SEQ ID NO: 699652 - RNA, 22 nt, Human
uaagacacaugcguacaagaua

SEQ ID NO: 699653 - RNA, 22 nt, Human
auugaguauuguaaauaaaaca

SEQ ID NO: 699654 - RNA, 22 nt, Human
gcaucuuucuguccauucagca

SEQ ID NO: 699655 - RNA, 22 nt, Human
acccacuguagccacucugggu

SEQ ID NO: 699656 - RNA, 22 nt, Human
gugugcagaacagggagugggu

SEQ ID NO: 699657 - RNA, 22 nt, Human
ugcaaauagccuauauuuauag

SEQ ID NO: 699658 - RNA, 22 nt, Human
augaaccauaggcaagacaaua

SEQ ID NO: 699659 - RNA, 22 nt, Human
ugaaugaggauccuugaccuua

SEQ ID NO: 699660 - RNA, 22 nt, Human
aaagaaucagaagucucaaaca

SEQ ID NO: 699661 - RNA, 22 nt, Human
aacugagggcccugcugaagca

SEQ ID NO: 699662 - RNA, 22 nt, Human
acugacuuuggaauauuucuag

SEQ ID NO: 699663 - RNA, 22 nt, Human
agggcuuugauggcauucucau

SEQ ID NO: 699664 - RNA, 22 nt, Human
uuucuugucuuuaguaucuggc

SEQ ID NO: 699665 - RNA, 22 nt, Human
acgaguauguuuguauuuucuu

SEQ ID NO: 699666 - RNA, 22 nt, Human
acuacuuugggccauuuguuua

SEQ ID NO: 699667 - RNA, 22 nt, Human
agggcuggaggguacuaguuua

SEQ ID NO: 699668 - RNA, 22 nt, Human
acacaaguucuaaagauugcgc

SEQ ID NO: 699669 - RNA, 22 nt, Human
ugauguaagagauacacuugau

SEQ ID NO: 699670 - RNA, 22 nt, Human
aggaaacugggccucagguuag

SEQ ID NO: 699671 - RNA, 22 nt, Human
ucauuuacauagaaacaauaua

SEQ ID NO: 699672 - RNA, 22 nt, Human
agggcagcacaaggcauggacu

SEQ ID NO: 699673 - RNA, 22 nt, Human
aagagaauaucgauagcacucu

SEQ ID NO: 699674 - RNA, 22 nt, Human
ucuucaccaucaacagaaugaa

SEQ ID NO: 699675 - RNA, 22 nt, Human
agggucuugaggaucugaacug

SEQ ID NO: 699676 - RNA, 22 nt, Human
cuuccugggucuggagacugga

SEQ ID NO: 699677 - RNA, 22 nt, Human
cauuacaugguccaggauauau

SEQ ID NO: 699678 - RNA, 22 nt, Human
caaaguaauuuggagauauaua

SEQ ID NO: 699679 - RNA, 22 nt, Human
ucccagccuuaucuccccuggc

SEQ ID NO: 699680 - RNA, 22 nt, Human
ccuggagcgcgggucaagcugg

SEQ ID NO: 699681 - RNA, 22 nt, Human
caugacacccaggcauagcacc

SEQ ID NO: 699682 - RNA, 22 nt, Human
uuggaauuccuguuguuucguc

SEQ ID NO: 699683 - RNA, 22 nt, Human
caaauucaaugaacauguuuaa

SEQ ID NO: 699684 - RNA, 21 nt, Human
uggcagaguugaguaguuaug

SEQ ID NO: 699685 - RNA, 22 nt, Human
aggcagcaaugaaugaaaugga

SEQ ID NO: 699686 - RNA, 22 nt, Human
aucugcuauguuauuucccacu

SEQ ID NO: 699687 - RNA, 22 nt, Human
agcuacucugcagugcccaugg

SEQ ID NO: 699688 - RNA, 22 nt, Human
aaacugugcuucccaaaugccc

SEQ ID NO: 699689 - RNA, 22 nt, Human
cuggccacuggagguggcaccc

SEQ ID NO: 699690 - RNA, 22 nt, Human
ugcugaauaauaagauuacuca

SEQ ID NO: 699691 - RNA, 22 nt, Human
augugucuuugagacucugcua

SEQ ID NO: 699692 - RNA, 22 nt, Human
uguagcagaguaucucuguuuu

SEQ ID NO: 699693 - RNA, 23 nt, Human
uucucaguccugcccagggaggc

SEQ ID NO: 699694 - RNA, 22 nt, Human
agugaacaaguuaagaacacua

SEQ ID NO: 699695 - RNA, 22 nt, Human
cucuuuagucuguguggagaag

SEQ ID NO: 699696 - RNA, 22 nt, Human
agccauuguugucuucaucuuc

SEQ ID NO: 699697 - RNA, 23 nt, Human
ucagagaaguuguaggcugggga

SEQ ID NO: 699698 - RNA, 22 nt, Human
ucucauaauagcauuucucacc

SEQ ID NO: 699699 - RNA, 19 nt, Human
ucuaacagaagugucgucc

SEQ ID NO: 699700 - RNA, 22 nt, Human
uauuugugagacugacugaagu

SEQ ID NO: 699701 - RNA, 22 nt, Human
cuuguuaaaaugcagauuccaa

SEQ ID NO: 699702 - RNA, 22 nt, Human
ccugcagacacuuguccagcaa

SEQ ID NO: 699703 - RNA, 22 nt, Human
ugguccuggucaucugggcugg

SEQ ID NO: 699704 - RNA, 22 nt, Human
uggcaggguacaccuuaacacc

SEQ ID NO: 699705 - RNA, 22 nt, Human
uuaagaaugugccuuuugguug

SEQ ID NO: 699706 - RNA, 22 nt, Human
gcacaggcuccggaggagagcu

SEQ ID NO: 699707 - RNA, 18 nt, Human
gcuuuauuucuuggggaa

SEQ ID NO: 699708 - RNA, 22 nt, Human
aauugucuuuaucacaguucaa

SEQ ID NO: 699709 - RNA, 17 nt, Human
ucaggauguagcaguag

SEQ ID NO: 699710 - RNA, 22 nt, Human
agggugguauuuaacaacugga

SEQ ID NO: 699711 - RNA, 22 nt, Human
uacauuuccugucagagauaua

SEQ ID NO: 699712 - RNA, 22 nt, Human
gcggguggaucaugaggucagg

SEQ ID NO: 699713 - RNA, 22 nt, Human
cggagcugccugccaagccugc

SEQ ID NO: 699714 - RNA, 22 nt, Human
guagagcaggacuugagauguu

SEQ ID NO: 699715 - RNA, 22 nt, Human
uccuggauuuagaagagccucc

SEQ ID NO: 699716 - RNA, 22 nt, Human
gaaggcacccggcgugcggcgg

SEQ ID NO: 699717 - RNA, 22 nt, Human
aauuagaagggaguuauugaua

SEQ ID NO: 699718 - RNA, 22 nt, Human
ggccugcuuuccgagccugcag

SEQ ID NO: 699719 - RNA, 22 nt, Human
uuucuagucagccauaucuagu

SEQ ID NO: 699720 - RNA, 22 nt, Human
gcccucugcacagcucugagca

SEQ ID NO: 699721 - RNA, 22 nt, Human
ggaggacacuggcucugccuuc

SEQ ID NO: 699722 - RNA, 22 nt, Human
acauuucauguuuuccagagca

SEQ ID NO: 699723 - RNA, 22 nt, Human
agagcugaauuuggguggugga

SEQ ID NO: 699724 - RNA, 22 nt, Human
ccaucacaguccccaucgugau

SEQ ID NO: 699725 - RNA, 22 nt, Human
auaaggaaccugggcuuaagag

SEQ ID NO: 699726 - RNA, 22 nt, Human
ucuugacauugcaaucuucaga

SEQ ID NO: 699727 - RNA, 22 nt, Human
agauauuaccagcagucuaugc

SEQ ID NO: 699728 - RNA, 22 nt, Human
gaucuugagcaaguuguguaac

SEQ ID NO: 699729 - RNA, 23 nt, Human
uuaaaauguggucucucccuagu

SEQ ID NO: 699730 - RNA, 22 nt, Human
ccucuggguuaguuuagggagc

SEQ ID NO: 699731 - RNA, 22 nt, Human
cccucucucuaucgggccccag

SEQ ID NO: 699732 - RNA, 22 nt, Human
ggcugagucugugacccaugcg

SEQ ID NO: 699733 - RNA, 19 nt, Human
gguuggagaagagcggccc

SEQ ID NO: 699734 - RNA, 22 nt, Human
ggggaagaaccgggauucccau

SEQ ID NO: 699735 - RNA, 22 nt, Human
gcugcuggagagcgagacuguu

SEQ ID NO: 699736 - RNA, 22 nt, Human
cuuuccaaugcauuuccaaugu

SEQ ID NO: 699737 - RNA, 22 nt, Human
cagggagaggcugguggaguaa

SEQ ID NO: 699738 - RNA, 22 nt, Human
ugaaggagaaauggaaaguggg

SEQ ID NO: 699739 - RNA, 18 nt, Human
cccagcccaccauuucuc

SEQ ID NO: 699740 - RNA, 22 nt, Human
auaauuacauuauacuguuaga

SEQ ID NO: 699741 - RNA, 22 nt, Human
uauccauauucagacugugaau

SEQ ID NO: 699742 - RNA, 22 nt, Human
ugcugcacgauaaauaauuucu

SEQ ID NO: 699743 - RNA, 22 nt, Human
gcauuucauguaagucagacca

SEQ ID NO: 699744 - RNA, 22 nt, Human
cagcccagagccaguucccgcu

SEQ ID NO: 699745 - RNA, 22 nt, Human
cagcacacagugacucgcaccu

SEQ ID NO: 699746 - RNA, 22 nt, Human
caucagaccugccagacuaggu

SEQ ID NO: 699747 - RNA, 22 nt, Human
gacaggaggcagagcucaggug

SEQ ID NO: 699748 - RNA, 22 nt, Human
uucuggagcuaaaguccacucu

SEQ ID NO: 699749 - RNA, 22 nt, Human
aguucuggugguuuggagaucu

SEQ ID NO: 699750 - RNA, 22 nt, Human
ggcucaggacacagugguuuag

SEQ ID NO: 699751 - RNA, 22 nt, Human
aagcacaguucuuagaguuaca

SEQ ID NO: 699752 - RNA, 22 nt, Human
gggccagcaguaucggaggcau

SEQ ID NO: 699753 - RNA, 22 nt, Human
acuggcagagguuggacaccau

SEQ ID NO: 699754 - RNA, 22 nt, Human
ugggccuccuggaagaaugugg

SEQ ID NO: 699755 - RNA, 22 nt, Human
gagaggcuugugugaagaacaa

SEQ ID NO: 699756 - RNA, 22 nt, Human
ccccacucucggccagauaggc

SEQ ID NO: 699757 - RNA, 22 nt, Human
aaagucuuuauuuuguaucuuu

SEQ ID NO: 699758 - RNA, 22 nt, Human
cuuaauuacuguccaauaugca

SEQ ID NO: 699759 - RNA, 22 nt, Human
ucauggcuugcagauggccacc

SEQ ID NO: 699760 - RNA, 22 nt, Human
ugucuccuacugccuguggauc

SEQ ID NO: 699761 - RNA, 22 nt, Human
cucugguuucgcaggaaauaga

SEQ ID NO: 699762 - RNA, 21 nt, Human
acaauagacauaagcagagca

SEQ ID NO: 699763 - RNA, 22 nt, Human
uccugagguauaugcuuugcag

SEQ ID NO: 699764 - RNA, 22 nt, Human
gggcuccaaaaucuaugucuuc

SEQ ID NO: 699765 - RNA, 22 nt, Human
aaggcacugaacuuaaauucug

SEQ ID NO: 699766 - RNA, 22 nt, Human
aauauaaauuccugggcccagc

SEQ ID NO: 699767 - RNA, 22 nt, Human
cauuaacacuuuggauuuagac

SEQ ID NO: 699768 - RNA, 22 nt, Human
cuacccuuaaguuucugugggg

SEQ ID NO: 699769 - RNA, 20 nt, Human
ggaaaaaugcaugcucaaga

SEQ ID NO: 699770 - RNA, 22 nt, Human
cugcuuuguaaaauagacauaa

SEQ ID NO: 699771 - RNA, 22 nt, Human
ucacaaaagcuuuugaauuugg

SEQ ID NO: 699772 - RNA, 22 nt, Human
uuacaguacagaaaauaacaga

SEQ ID NO: 699773 - RNA, 22 nt, Human
cuuuucaugagucuguuauggg

SEQ ID NO: 699774 - RNA, 22 nt, Human
uggaccugagccuggcccugcc

SEQ ID NO: 699775 - RNA, 22 nt, Human
uaguuuagugaaugguuaaaga

SEQ ID NO: 699776 - RNA, 22 nt, Human
uccaagaucaagguguuggcag

SEQ ID NO: 699777 - RNA, 19 nt, Human
acacaugcuccuggagccu

SEQ ID NO: 699778 - RNA, 22 nt, Human
ugacagugcggguacaucauag

SEQ ID NO: 699779 - RNA, 22 nt, Human
aaucuguuuccaauacuugcua

SEQ ID NO: 699780 - RNA, 22 nt, Human
cuggggagugaagguaauuaca

SEQ ID NO: 699781 - RNA, 22 nt, Human
agaaaucaugacuaagagcagu

SEQ ID NO: 699782 - RNA, 22 nt, Human
acccugaagaaacuucuaagug

SEQ ID NO: 699783 - RNA, 22 nt, Human
agaggccuaaccaagauguccu

SEQ ID NO: 699784 - RNA, 22 nt, Human
cacagguuugacaaggauaaaa

SEQ ID NO: 699785 - RNA, 18 nt, Human
gaggauggaaggagaugc

SEQ ID NO: 699786 - RNA, 22 nt, Human
agcaugcugggucauuuuugcc

SEQ ID NO: 699787 - RNA, 22 nt, Human
ccagcaucuaugugcuguugau

SEQ ID NO: 699788 - RNA, 22 nt, Human
aucuuggauugacuggcucugc

SEQ ID NO: 699789 - RNA, 22 nt, Human
ucccagggacuggaugaugcag

SEQ ID NO: 699790 - RNA, 22 nt, Human
uacuugcuggguguaauuuucu

SEQ ID NO: 699791 - RNA, 22 nt, Human
agcaggcaguguagagccuuca

SEQ ID NO: 699792 - RNA, 21 nt, Human
uuucccagcugaaaauaaaug

SEQ ID NO: 699793 - RNA, 23 nt, Human
ucugggccacuugucugcacuuc

SEQ ID NO: 699794 - RNA, 22 nt, Human
agagccagaccauugccgugca

SEQ ID NO: 699795 - RNA, 22 nt, Human
uaccuugggagacgccaggccc

SEQ ID NO: 699796 - RNA, 23 nt, Human
ugcaaaauuugcagaguucgaug

SEQ ID NO: 699797 - RNA, 22 nt, Human
ucuuacaagaaggaaaagggag

SEQ ID NO: 699798 - RNA, 22 nt, Human
auguguuaaugucaaccagaaa

SEQ ID NO: 699799 - RNA, 22 nt, Human
augagaaaauucauuccaucca

SEQ ID NO: 699800 - RNA, 22 nt, Human
augaaaugucuggaucuuuuuc

SEQ ID NO: 699801 - RNA, 22 nt, Human
gugccagccgcaccccaggaga

SEQ ID NO: 699802 - RNA, 22 nt, Human
uuuugucagugagaacagaguu

SEQ ID NO: 699803 - RNA, 22 nt, Human
gaugcugagagauuggagacua

SEQ ID NO: 699804 - RNA, 22 nt, Human
gaugcagaaaguagacaccauc

SEQ ID NO: 699805 - RNA, 20 nt, Human
gcacugaaauucaauguuug

SEQ ID NO: 699806 - RNA, 22 nt, Human
agggccagccccacccucucug

SEQ ID NO: 699807 - RNA, 22 nt, Human
ggagcagggcagugaauucugg

SEQ ID NO: 699808 - RNA, 22 nt, Human
aagcccuggcaaugucagauga

SEQ ID NO: 699809 - RNA, 22 nt, Human
cagucacauagguauacacaua

SEQ ID NO: 699810 - RNA, 22 nt, Human
uggcccuuguccugggagaguu

SEQ ID NO: 699811 - RNA, 22 nt, Human
uacccaguuccacacacugaug

SEQ ID NO: 699812 - RNA, 22 nt, Human
uggcccuguucuguaccucaua

SEQ ID NO: 699813 - RNA, 22 nt, Human
auuucucacugagcagauaaaa

SEQ ID NO: 699814 - RNA, 22 nt, Human
ugacuuuuggaccucacugucc

SEQ ID NO: 699815 - RNA, 22 nt, Human
uaguuuagcacuaagaaaaaca

SEQ ID NO: 699816 - RNA, 20 nt, Human
aggcucugcauuucugagug

SEQ ID NO: 699817 - RNA, 22 nt, Human
uccuggggcucugagcgagaca

SEQ ID NO: 699818 - RNA, 22 nt, Human
ccaguguucaauacauauuugu

SEQ ID NO: 699819 - RNA, 21 nt, Human
ucagaguggaagacaguuuga

SEQ ID NO: 699820 - RNA, 22 nt, Human
uggguuaaaaugauaccuugca

SEQ ID NO: 699821 - RNA, 22 nt, Human
ugacucugggguugaccagaug

SEQ ID NO: 699822 - RNA, 22 nt, Human
gcugaggauauagcaggaacaa

SEQ ID NO: 699823 - RNA, 22 nt, Human
uuuacgacugcuaaaugccugc

SEQ ID NO: 699824 - RNA, 22 nt, Human
ugaccacuguagccacuuaaga

SEQ ID NO: 699825 - RNA, 22 nt, Human
auguuuccagauaugucacccu

SEQ ID NO: 699826 - RNA, 22 nt, Human
cguccauauuccugagggcuca

SEQ ID NO: 699827 - RNA, 22 nt, Human
ggccagcauggcaagaccaacu

SEQ ID NO: 699828 - RNA, 22 nt, Human
uucaaaugauggcaguccuggc

SEQ ID NO: 699829 - RNA, 22 nt, Human
aguggcuagaucaugagugagc

SEQ ID NO: 699830 - RNA, 22 nt, Human
guucuggaguggugccaggccu

SEQ ID NO: 699831 - RNA, 20 nt, Human
ugccagggccagcagaggcu

SEQ ID NO: 699832 - RNA, 22 nt, Human
gacucagugauuugacaugccu

SEQ ID NO: 699833 - RNA, 22 nt, Human
uucugcuaccuuucuguaccuu

SEQ ID NO: 699834 - RNA, 22 nt, Human
cugaaauaguuucauagaacuu

SEQ ID NO: 699835 - RNA, 22 nt, Human
aguuucacuaaggucugugugu

SEQ ID NO: 699836 - RNA, 22 nt, Human
uucuuuucccaauauuuugcug

SEQ ID NO: 699837 - RNA, 22 nt, Human
ggugggaucaaagagucauucg

SEQ ID NO: 699838 - RNA, 22 nt, Human
ugauucaagauugguuagcugu

SEQ ID NO: 699839 - RNA, 22 nt, Human
uggcucacaggacucucugggc

SEQ ID NO: 699840 - RNA, 22 nt, Human
gcucaggaaauaguuuaguguu

SEQ ID NO: 699841 - RNA, 22 nt, Human
aaguacauuauaugagcagaau

SEQ ID NO: 699842 - RNA, 22 nt, Human
gcagaggugcucaguggcagaa

SEQ ID NO: 699843 - RNA, 22 nt, Human
uccagguccuacuggcccauag

SEQ ID NO: 699844 - RNA, 22 nt, Human
uauggcagaggagaggcacuag

SEQ ID NO: 699845 - RNA, 22 nt, Human
ggggugggcgugcagggacacc

SEQ ID NO: 699846 - RNA, 22 nt, Human
auacaagacucagcacagacgg

SEQ ID NO: 699847 - RNA, 22 nt, Human
auguggcacagcacaguaagag

SEQ ID NO: 699848 - RNA, 22 nt, Human
uggcauccucccucaagcugaa

SEQ ID NO: 699849 - RNA, 22 nt, Human
cuguggaguggggaguacuggu

SEQ ID NO: 699850 - RNA, 22 nt, Human
caguuucuacgacuuaagcaca

SEQ ID NO: 699851 - RNA, 18 nt, Human
guggccagccuggucuug

SEQ ID NO: 699852 - RNA, 22 nt, Human
gauccugucuccgcaccguguu

SEQ ID NO: 699853 - RNA, 22 nt, Human
ugcuggccaacaaggcuccaag

SEQ ID NO: 699854 - RNA, 22 nt, Human
auuugucuucaguagguucuuc

SEQ ID NO: 699855 - RNA, 22 nt, Human
uguggcuguugaggaccccaag

SEQ ID NO: 699856 - RNA, 22 nt, Human
uuuauguaaguggaaugaugcc

SEQ ID NO: 699857 - RNA, 22 nt, Human
uacauacagagaugcuaguuaa

SEQ ID NO: 699858 - RNA, 23 nt, Human
ccauggagcauggcucacuaggc

SEQ ID NO: 699859 - RNA, 19 nt, Human
cauuuucucauugugcccc

SEQ ID NO: 699860 - RNA, 22 nt, Human
cugaggucuagacaccccaggg

SEQ ID NO: 699861 - RNA, 22 nt, Human
gcagcuuuggagguggaacucu

SEQ ID NO: 699862 - RNA, 22 nt, Human
cugccaggcugucccagguccg

SEQ ID NO: 699863 - RNA, 22 nt, Human
cugcucuagagagcauuaguca

SEQ ID NO: 699864 - RNA, 18 nt, Human
ugagcaggggcugaccuu

SEQ ID NO: 699865 - RNA, 22 nt, Human
agucacaugaguuucucuuuau

SEQ ID NO: 699866 - RNA, 22 nt, Human
uuuacuaaguacuuguaucccu

SEQ ID NO: 699867 - RNA, 23 nt, Human
agucugaauugagaugugcugug

SEQ ID NO: 699868 - RNA, 22 nt, Human
acaguaugaaugcagaauguag

SEQ ID NO: 699869 - RNA, 21 nt, Human
gggaaauuaggauugcucauc

SEQ ID NO: 699870 - RNA, 22 nt, Human
uuauccugcauccuggaacuca

SEQ ID NO: 699871 - RNA, 22 nt, Human
ggcccugaucuccuggauucuu

SEQ ID NO: 699872 - RNA, 22 nt, Human
ggaggccaauuuucuaacugca

SEQ ID NO: 699873 - RNA, 22 nt, Human
uucuuacauuagucugugcuuu

SEQ ID NO: 699874 - RNA, 22 nt, Human
agaaauuauuagugaauagucu

SEQ ID NO: 699875 - RNA, 22 nt, Human
uauuacacuuucuucuucaagc

SEQ ID NO: 699876 - RNA, 21 nt, Human
ugguggaccagugcugggaga

SEQ ID NO: 699877 - RNA, 22 nt, Human
cugugccugccuuguucacuga

SEQ ID NO: 699878 - RNA, 22 nt, Human
ucugcuggccuuagcaggucua

SEQ ID NO: 699879 - RNA, 22 nt, Human
agcuucuucugauuugucaguc

SEQ ID NO: 699880 - RNA, 22 nt, Human
ucuuggccagguguggugccuc

SEQ ID NO: 699881 - RNA, 22 nt, Human
ucugagaaaucaguggugaaua

SEQ ID NO: 699882 - RNA, 22 nt, Human
uggccugggugcugcugacauc

SEQ ID NO: 699883 - RNA, 22 nt, Human
uccuggccgccgcguggggccg

SEQ ID NO: 699884 - RNA, 22 nt, Human
ggaguguggagaggacaugggu

SEQ ID NO: 699885 - RNA, 22 nt, Human
augacuuuguuguuuuccagcg

SEQ ID NO: 699886 - RNA, 22 nt, Human
augcugaagaguucaugauuau

SEQ ID NO: 699887 - RNA, 20 nt, Human
ugucauuguuucuaggaccu

SEQ ID NO: 699888 - RNA, 22 nt, Human
auugaacuguuggagagguuuu

SEQ ID NO: 699889 - RNA, 22 nt, Human
ugaaccuuguuccugcccuccu

SEQ ID NO: 699890 - RNA, 22 nt, Human
agagggcuucccuaggagugag

SEQ ID NO: 699891 - RNA, 22 nt, Human
caagcccuguuaggggucucua

SEQ ID NO: 699892 - RNA, 22 nt, Human
agcccucauggaacagcuccua

SEQ ID NO: 699893 - RNA, 22 nt, Human
ccaggcuccgcauagaccccac

SEQ ID NO: 699894 - RNA, 22 nt, Human
gagucucuggaggggucagacc

SEQ ID NO: 699895 - RNA, 22 nt, Human
agggccaguggguugaaaggca

SEQ ID NO: 699896 - RNA, 22 nt, Human
ggauuucuuccuuccucagaag

SEQ ID NO: 699897 - RNA, 22 nt, Human
aauucuuaaucccauaaaguga

SEQ ID NO: 699898 - RNA, 21 nt, Human
agagcaaguuaaggcauuaau

SEQ ID NO: 699899 - RNA, 21 nt, Human
cauccguuuauaucucugugg

SEQ ID NO: 699900 - RNA, 22 nt, Human
uggaacaaucccgguuuagcuc

SEQ ID NO: 699901 - RNA, 22 nt, Human
guggcugcagcucugaacggac

SEQ ID NO: 699902 - RNA, 22 nt, Human
ucuuuccuagaggcugaugagu

SEQ ID NO: 699903 - RNA, 18 nt, Human
ucagcccagagcccaguu

SEQ ID NO: 699904 - RNA, 22 nt, Human
gugcauuaguuuccuauugcug

SEQ ID NO: 699905 - RNA, 22 nt, Human
guguccuuauaagaagagaugc

SEQ ID NO: 699906 - RNA, 22 nt, Human
ggaggcucugcuccguguguuc

SEQ ID NO: 699907 - RNA, 22 nt, Human
caaacauagugaagcaaugaca

SEQ ID NO: 699908 - RNA, 22 nt, Human
ugaucuggaauucccuguggua

SEQ ID NO: 699909 - RNA, 22 nt, Human
caacagcugaucuuugaugaag

SEQ ID NO: 699910 - RNA, 22 nt, Human
uguggaaaauuggaacguuccu

SEQ ID NO: 699911 - RNA, 22 nt, Human
gccucuguggcucagccuugcu

SEQ ID NO: 699912 - RNA, 22 nt, Human
uucuuucuguccauaaugagac

SEQ ID NO: 699913 - RNA, 22 nt, Human
cagggcucaggcucugggauuc

SEQ ID NO: 699914 - RNA, 21 nt, Human
ggguggccgcaugggugcgug

SEQ ID NO: 699915 - RNA, 22 nt, Human
cugcuccacaccuccauuuccu

SEQ ID NO: 699916 - RNA, 22 nt, Human
ucaguguuuccuagagcauaua

SEQ ID NO: 699917 - RNA, 22 nt, Human
auuuucauggcuucugcucagu

SEQ ID NO: 699918 - RNA, 22 nt, Human
aacucuacuugggacuccucug

SEQ ID NO: 699919 - RNA, 22 nt, Human
ucaucuuuaccccuugcuucaa

SEQ ID NO: 699920 - RNA, 22 nt, Human
cugucauucuuacauaauguga

SEQ ID NO: 699921 - RNA, 22 nt, Human
cagaagaaaucauuaucuggac

SEQ ID NO: 699922 - RNA, 22 nt, Human
uaacaucuuauuggcaaagaua

SEQ ID NO: 699923 - RNA, 22 nt, Human
cuuccagagauccaugaauacc

SEQ ID NO: 699924 - RNA, 22 nt, Human
aguccguuucuccuugaaggca

SEQ ID NO: 699925 - RNA, 22 nt, Human
gcucugucuucagcacacagua

SEQ ID NO: 699926 - RNA, 22 nt, Human
guuaacauaggcuuagggguuu

SEQ ID NO: 699927 - RNA, 22 nt, Human
guuuggcaguguuauguagguu

SEQ ID NO: 699928 - RNA, 22 nt, Human
ggagacaugcagacugagauac

SEQ ID NO: 699929 - RNA, 23 nt, Human
uccuaacugauucugcagucucu

SEQ ID NO: 699930 - RNA, 22 nt, Human
agccaggcagacucucuuucuu

SEQ ID NO: 699931 - RNA, 22 nt, Human
cacucacuuauuucuaacagaa

SEQ ID NO: 699932 - RNA, 22 nt, Human
uggagaaugauauuccaucauu

SEQ ID NO: 699933 - RNA, 22 nt, Human
gccccuguuguggcuuugucua

SEQ ID NO: 699934 - RNA, 22 nt, Human
acaguagugccaugaccuacag

SEQ ID NO: 699935 - RNA, 22 nt, Human
uuagcuuucagccuuucucacc

SEQ ID NO: 699936 - RNA, 22 nt, Human
ugauuuccucuacuagcaauua

SEQ ID NO: 699937 - RNA, 22 nt, Human
aggcucagugcaaaucauucug

SEQ ID NO: 699938 - RNA, 22 nt, Human
gucauuuucuagaauuauuuga

SEQ ID NO: 699939 - RNA, 18 nt, Human
aggaagcaggaggaaggc

SEQ ID NO: 699940 - RNA, 22 nt, Human
ucccacagaguggcucaccuag

SEQ ID NO: 699941 - RNA, 22 nt, Human
cagaaguaagauuacugugaga

SEQ ID NO: 699942 - RNA, 22 nt, Human
uuccauuuggcacuucacugag

SEQ ID NO: 699943 - RNA, 23 nt, Human
augcaagaguuucucaaacugga

SEQ ID NO: 699944 - RNA, 22 nt, Human
gagagcuguuuaucuucuucaa

SEQ ID NO: 699945 - RNA, 22 nt, Human
ugccaggcaggacccuagaacc

SEQ ID NO: 699946 - RNA, 22 nt, Human
ccugcccaggagucucucugug

SEQ ID NO: 699947 - RNA, 22 nt, Human
cugauuccugauucaugcucuu

SEQ ID NO: 699948 - RNA, 22 nt, Human
gcugaggauugaagaguugcca

SEQ ID NO: 699949 - RNA, 22 nt, Human
ucccugucuaauaugccaugaa

SEQ ID NO: 699950 - RNA, 22 nt, Human
uggagggcuaagcugagggaua

SEQ ID NO: 699951 - RNA, 22 nt, Human
cccaaagggugucagcagcaag

SEQ ID NO: 699952 - RNA, 22 nt, Human
guuugccugugauguacauuuc

SEQ ID NO: 699953 - RNA, 22 nt, Human
auauacuuccccauuauggggg

SEQ ID NO: 699954 - RNA, 22 nt, Human
agacgagggcccccaggacagc

SEQ ID NO: 699955 - RNA, 22 nt, Human
aaaaaccuuucauugcaaaugu

SEQ ID NO: 699956 - RNA, 22 nt, Human
ucagaaaggccacauggugcag

SEQ ID NO: 699957 - RNA, 22 nt, Human
ugcagaagaaugagcuuggagu

SEQ ID NO: 699958 - RNA, 22 nt, Human
ucugcagaaaguggcucagugg

SEQ ID NO: 699959 - RNA, 22 nt, Human
ugcaggcuggauuugcuuuugu

SEQ ID NO: 699960 - RNA, 20 nt, Human
ccacuccgcccccagagggc

SEQ ID NO: 699961 - RNA, 22 nt, Human
acaguuauauacauguagcugu

SEQ ID NO: 699962 - RNA, 22 nt, Human
ugcccucagccaccuccaaguu

SEQ ID NO: 699963 - RNA, 22 nt, Human
uuugagguuagcuagcagauca

SEQ ID NO: 699964 - RNA, 22 nt, Human
ugagagauugcuguauguuuug

SEQ ID NO: 699965 - RNA, 22 nt, Human
aaauugccaaauuguuuuccag

SEQ ID NO: 699966 - RNA, 22 nt, Human
guggucagggagcagagccaug

SEQ ID NO: 699967 - RNA, 22 nt, Human
uugaggagucaggggcacggaa

SEQ ID NO: 699968 - RNA, 22 nt, Human
ugcauccuagggaaggcacuga

SEQ ID NO: 699969 - RNA, 22 nt, Human
uguguguauguuuacuuuuccu

SEQ ID NO: 699970 - RNA, 22 nt, Human
uacauuaucuuguuaucuuuca

SEQ ID NO: 699971 - RNA, 22 nt, Human
auaaaaggaaagccuguuguga

SEQ ID NO: 699972 - RNA, 22 nt, Human
cggggcugcucguccuccugug

SEQ ID NO: 699973 - RNA, 22 nt, Human
cauugcuguuaauugucucuag

SEQ ID NO: 699974 - RNA, 22 nt, Human
cccuucucuuucacucacuauu

SEQ ID NO: 699975 - RNA, 22 nt, Human
agagucccagggacacuccaga

SEQ ID NO: 699976 - RNA, 22 nt, Human
gcucaggcucucccaggggaau

SEQ ID NO: 699977 - RNA, 22 nt, Human
uuaaguugugaauaauccaguc

SEQ ID NO: 699978 - RNA, 22 nt, Human
uuuugugacacuucuugagaca

SEQ ID NO: 699979 - RNA, 22 nt, Human
cagcacagugaccagacccacu

SEQ ID NO: 699980 - RNA, 22 nt, Human
aaggguuggggaagagcaaauu

SEQ ID NO: 699981 - RNA, 23 nt, Human
gcugucgccagagccccaccuac

SEQ ID NO: 699982 - RNA, 22 nt, Human
ucaauacauguguguggauggu

SEQ ID NO: 699983 - RNA, 22 nt, Human
ugcccugcaugcagggagcugu

SEQ ID NO: 699984 - RNA, 22 nt, Human
aaagaguucuguuugagcugaa

SEQ ID NO: 699985 - RNA, 22 nt, Human
ugagagcuguccaccuguggga

SEQ ID NO: 699986 - RNA, 22 nt, Human
acugaaguucauacaacagacu

SEQ ID NO: 699987 - RNA, 22 nt, Human
ggugcuggacacguggcacucc

SEQ ID NO: 699988 - RNA, 22 nt, Human
cuucuuuccuuccuccaguggc

SEQ ID NO: 699989 - RNA, 22 nt, Human
gcuccagggaguacauuuauca

SEQ ID NO: 699990 - RNA, 22 nt, Human
gucagaggggcagcugccaggc

SEQ ID NO: 699991 - RNA, 22 nt, Human
ucagagguggccccugcccuca

SEQ ID NO: 699992 - RNA, 22 nt, Human
auaaaaguaggaccaacuuaca

SEQ ID NO: 699993 - RNA, 22 nt, Human
cuuguuuuggaacagagugaau

SEQ ID NO: 699994 - RNA, 22 nt, Human
cagcagagggagccauugaaau

SEQ ID NO: 699995 - RNA, 22 nt, Human
ccuggcuuccauauggcacaua

SEQ ID NO: 699996 - RNA, 18 nt, Human
ugggauggagaguaacug

SEQ ID NO: 699997 - RNA, 22 nt, Human
gcuuucucuucacugauguuca

SEQ ID NO: 699998 - RNA, 22 nt, Human
cccuccagagcuugaccugcug

SEQ ID NO: 699999 - RNA, 22 nt, Human
gaugugagugguagcugggauu

SEQ ID NO: 700000 - RNA, 22 nt, Human
cucauagauuuagauagaucga

SEQ ID NO: 700001 - RNA, 22 nt, Human
ugcuggcuuccugugcacagca

SEQ ID NO: 700002 - RNA, 22 nt, Human
gccccuucuucuggagauucaa

SEQ ID NO: 700003 - RNA, 22 nt, Human
ugucagaccugugauuucagca

SEQ ID NO: 700004 - RNA, 22 nt, Human
uugcuuuaaugagauuuugcca

SEQ ID NO: 700005 - RNA, 22 nt, Human
auucagacucuugagcaguccc

SEQ ID NO: 700006 - RNA, 22 nt, Human
ucucaucuucauaucugaaaga

SEQ ID NO: 700007 - RNA, 22 nt, Human
ugauaaacuggagagguggagg

SEQ ID NO: 700008 - RNA, 22 nt, Human
guguuccuggacagcaagugag

SEQ ID NO: 700009 - RNA, 22 nt, Human
gcagcuggagcaucuucucauc

SEQ ID NO: 700010 - RNA, 22 nt, Human
uuuauucuauaggcauuaagca

SEQ ID NO: 700011 - RNA, 22 nt, Human
uagcagagagguuucagcuaau

SEQ ID NO: 700012 - RNA, 22 nt, Human
gcacucuguuucuccugucagc

SEQ ID NO: 700013 - RNA, 22 nt, Human
uguacaaaguuaaaccuauaua

SEQ ID NO: 700014 - RNA, 22 nt, Human
uaguggagaguuguuuugugca

SEQ ID NO: 700015 - RNA, 22 nt, Human
uugccucccagcaugggcagcu

SEQ ID NO: 700016 - RNA, 22 nt, Human
acaagucuguuaugcaccugga

SEQ ID NO: 700017 - RNA, 22 nt, Human
acaaugucuuugucuccuucag

SEQ ID NO: 700018 - RNA, 22 nt, Human
agggucagggagugaguauuua

SEQ ID NO: 700019 - RNA, 22 nt, Human
ccugcuggacguggaggagggg

SEQ ID NO: 700020 - RNA, 22 nt, Human
ucagcauuguggcagagaaugg

SEQ ID NO: 700021 - RNA, 22 nt, Human
aggccagguuccucaaucuuga

SEQ ID NO: 700022 - RNA, 22 nt, Human
gcaaagacggacucaggagugc

SEQ ID NO: 700023 - RNA, 22 nt, Human
gggucccaggucuggaaaagca

SEQ ID NO: 700024 - RNA, 22 nt, Human
uccagaccaaggaaggcugggc

SEQ ID NO: 700025 - RNA, 22 nt, Human
aacuacauagaaauuaguauuu

SEQ ID NO: 700026 - RNA, 22 nt, Human
auuuaauuuacauuugacagag

SEQ ID NO: 700027 - RNA, 22 nt, Human
caauccaucaauuacacaggcu

SEQ ID NO: 700028 - RNA, 22 nt, Human
ugcugugggcaguacauaagcu

SEQ ID NO: 700029 - RNA, 19 nt, Human
ucacaugaagccuagagaa

SEQ ID NO: 700030 - RNA, 22 nt, Human
augauugaccaucugcugggcu

SEQ ID NO: 700031 - RNA, 18 nt, Human
uagaguuacuacaugauu

SEQ ID NO: 700032 - RNA, 22 nt, Human
ucugacuuuggacaguggcgaa

SEQ ID NO: 700033 - RNA, 22 nt, Human
ggaccugaacauaaaacgaggc

SEQ ID NO: 700034 - RNA, 22 nt, Human
uccugacucugguguccucuac

SEQ ID NO: 700035 - RNA, 22 nt, Human
gcagggugugucucauacaguu

SEQ ID NO: 700036 - RNA, 22 nt, Human
agggcucagccagccugugugc

SEQ ID NO: 700037 - RNA, 22 nt, Human
gcugaggaaaccaaugcucaga

SEQ ID NO: 700038 - RNA, 22 nt, Human
cuggccauguugccucugagac

SEQ ID NO: 700039 - RNA, 22 nt, Human
uauacagauuaacagauuuaaa

SEQ ID NO: 700040 - RNA, 22 nt, Human
auaggaaagaaaauuauguagg

SEQ ID NO: 700041 - RNA, 22 nt, Human
ugcuuucucucuaccccacuuu

SEQ ID NO: 700042 - RNA, 22 nt, Human
uaguauuugcagauuuguguca

SEQ ID NO: 700043 - RNA, 22 nt, Human
cagcccuugcgacacccuggcu

SEQ ID NO: 700044 - RNA, 22 nt, Human
cagcagcaugaauucgagccac

SEQ ID NO: 700045 - RNA, 22 nt, Human
aguagaauagauggauacuauu

SEQ ID NO: 700046 - RNA, 22 nt, Human
cagagccucuaaaauuucuauc

SEQ ID NO: 700047 - RNA, 21 nt, Human
uucuccagggggagcucucuc

SEQ ID NO: 700048 - RNA, 22 nt, Human
uuagaggugucaggagcacagg

SEQ ID NO: 700049 - RNA, 22 nt, Human
cacaggaaggccuucucacaau

SEQ ID NO: 700050 - RNA, 23 nt, Human
ugcauuauccucucugaagacca

SEQ ID NO: 700051 - RNA, 22 nt, Human
guuauucaauggcuuauaagga

SEQ ID NO: 700052 - RNA, 22 nt, Human
cauacuauuacuaggagcagga

SEQ ID NO: 700053 - RNA, 22 nt, Human
gggacuggcacagggcugggag

SEQ ID NO: 700054 - RNA, 22 nt, Human
uuggccuucccuaccugggcca

SEQ ID NO: 700055 - RNA, 22 nt, Human
uugauuaaacaggcauauucaa

SEQ ID NO: 700056 - RNA, 22 nt, Human
agugacucacuagcucucagug

SEQ ID NO: 700057 - RNA, 22 nt, Human
ucugaacauccagcaaugcaca

SEQ ID NO: 700058 - RNA, 22 nt, Human
ugagagcagaggugggcagccu

SEQ ID NO: 700059 - RNA, 22 nt, Human
uaggagagcugaacuauugucu

SEQ ID NO: 700060 - RNA, 22 nt, Human
agugucuuugucaaauuacagg

SEQ ID NO: 700061 - RNA, 22 nt, Human
uugcacaguuugaagaugacuc

SEQ ID NO: 700062 - RNA, 22 nt, Human
ucucagaaaagagcuucagaaa

SEQ ID NO: 700063 - RNA, 22 nt, Human
cucagaguggggcucccugagg

SEQ ID NO: 700064 - RNA, 22 nt, Human
uuucaugaggggcaaaaucuca

SEQ ID NO: 700065 - RNA, 22 nt, Human
uucaugucugccuuuucaagug

SEQ ID NO: 700066 - RNA, 22 nt, Human
uccucaguauuguggagcagau

SEQ ID NO: 700067 - RNA, 22 nt, Human
acugcacagaauuaugguuggu

SEQ ID NO: 700068 - RNA, 22 nt, Human
aaacaacaugguggguguguag

SEQ ID NO: 700069 - RNA, 22 nt, Human
ggcacugaaguggguguugggu

SEQ ID NO: 700070 - RNA, 22 nt, Human
agcucagagcucgggaggaugg

SEQ ID NO: 700071 - RNA, 22 nt, Human
uggccagcagaguucacucucu

SEQ ID NO: 700072 - RNA, 22 nt, Human
agcagggccuggcacuccuggg

SEQ ID NO: 700073 - RNA, 22 nt, Human
ugagaagcauuaggaagaacau

SEQ ID NO: 700074 - RNA, 21 nt, Human
cucuggaggcaagggagagug

SEQ ID NO: 700075 - RNA, 22 nt, Human
aaauuacagaucaccaaugcau

SEQ ID NO: 700076 - RNA, 22 nt, Human
uuuggaagggaaccaaaacaug

SEQ ID NO: 700077 - RNA, 22 nt, Human
uaauuucuucaucucugcagcu

SEQ ID NO: 700078 - RNA, 22 nt, Human
gggagcugcacacgccccggaa

SEQ ID NO: 700079 - RNA, 22 nt, Human
uagauguguugccuggaguugu

SEQ ID NO: 700080 - RNA, 18 nt, Human
aaauguacuguccauggc

SEQ ID NO: 700081 - RNA, 22 nt, Human
agacuguacuuucugcagcucu

SEQ ID NO: 700082 - RNA, 22 nt, Human
ugguuuuagaugccuuuacugc

SEQ ID NO: 700083 - RNA, 22 nt, Human
uacauugaauuuuuuagcaugu

SEQ ID NO: 700084 - RNA, 22 nt, Human
aagaagcauggcuguagauucc

SEQ ID NO: 700085 - RNA, 22 nt, Human
ucccucagcaggaauguggcag

SEQ ID NO: 700086 - RNA, 22 nt, Human
guggcccacacagacagcaucu

SEQ ID NO: 700087 - RNA, 22 nt, Human
gaaguuauuuuaccuguuaaag

SEQ ID NO: 700088 - RNA, 22 nt, Human
caggcaccagugagaagggccu

SEQ ID NO: 700089 - RNA, 22 nt, Human
ccugggaggcugugggucugcu

SEQ ID NO: 700090 - RNA, 22 nt, Human
ggcugcugacuucauccagcuu

SEQ ID NO: 700091 - RNA, 22 nt, Human
caugggccauggugaagccagg

SEQ ID NO: 700092 - RNA, 22 nt, Human
uccagcacagaauuuccuagcu

SEQ ID NO: 700093 - RNA, 22 nt, Human
augcauucuggaaaguagcaau

SEQ ID NO: 700094 - RNA, 22 nt, Human
ugcugggcccagggagccucug

SEQ ID NO: 700095 - RNA, 22 nt, Human
cugccuggcauggagaagagaa

SEQ ID NO: 700096 - RNA, 22 nt, Human
ccauuacuuuccaauauaucag

SEQ ID NO: 700097 - RNA, 22 nt, Human
uggcagugugugagcuguuauu

SEQ ID NO: 700098 - RNA, 22 nt, Human
aucugaagggaaguggaaggca

SEQ ID NO: 700099 - RNA, 22 nt, Human
ccagguggaaggucugugcucu

SEQ ID NO: 700100 - RNA, 22 nt, Human
guagggacaugccauuaucuca

SEQ ID NO: 700101 - RNA, 22 nt, Human
agagaacuucuccuaaaucuca

SEQ ID NO: 700102 - RNA, 22 nt, Human
ggcuucucuaaagaucaugcgu

SEQ ID NO: 700103 - RNA, 22 nt, Human
cagcaguggccaucuguguggu

SEQ ID NO: 700104 - RNA, 22 nt, Human
gcaggaguguggugggacaucc

SEQ ID NO: 700105 - RNA, 22 nt, Human
gcagggcacaaggacgcacagg

SEQ ID NO: 700106 - RNA, 22 nt, Human
aacagugagaagguggacagga

SEQ ID NO: 700107 - RNA, 23 nt, Human
uuucaacaggcagagaagacuua

SEQ ID NO: 700108 - RNA, 22 nt, Human
ugacaggauugguugcuucuga

SEQ ID NO: 700109 - RNA, 22 nt, Human
uagagguagcaacaggacuaga

SEQ ID NO: 700110 - RNA, 22 nt, Human
uagcuuuaauaagcugcugaau

SEQ ID NO: 700111 - RNA, 22 nt, Human
uccauuuucuugcucuagguaa

SEQ ID NO: 700112 - RNA, 22 nt, Human
auauuagguuggugcaaaagua

SEQ ID NO: 700113 - RNA, 22 nt, Human
ugcagaaagcauugacucuucc

SEQ ID NO: 700114 - RNA, 22 nt, Human
acacaguauuacaauaggugcu

SEQ ID NO: 700115 - RNA, 22 nt, Human
acugucacugacagaaucaaca

SEQ ID NO: 700116 - RNA, 22 nt, Human
ggcaagugauccuggagcaccg

SEQ ID NO: 700117 - RNA, 22 nt, Human
caggguggcacucagcgcaucu

SEQ ID NO: 700118 - RNA, 22 nt, Human
gaccuggaaugaagggucccuc

SEQ ID NO: 700119 - RNA, 22 nt, Human
ugccaaaaugggcuuuauaccg

SEQ ID NO: 700120 - RNA, 22 nt, Human
ggccugugguuucuaguagguu

SEQ ID NO: 700121 - RNA, 22 nt, Human
guguuugcuggagcucuggguc

SEQ ID NO: 700122 - RNA, 22 nt, Human
ugcuggagaucauuaauguuca

SEQ ID NO: 700123 - RNA, 22 nt, Human
aagagcugugggugguaguccu

SEQ ID NO: 700124 - RNA, 22 nt, Human
ggacaggaugcugaagaugaag

SEQ ID NO: 700125 - RNA, 23 nt, Human
uccuucaggcucuuccccuggac

SEQ ID NO: 700126 - RNA, 17 nt, Human
gccuuuauacaugcugc

SEQ ID NO: 700127 - RNA, 22 nt, Human
cuggggaccgagcaagcucugg

SEQ ID NO: 700128 - RNA, 22 nt, Human
aagauuuucagcuaauggugca

SEQ ID NO: 700129 - RNA, 22 nt, Human
ucuucuguccuaagucaaagca

SEQ ID NO: 700130 - RNA, 22 nt, Human
gugaacuaaggauucaaacuuc

SEQ ID NO: 700131 - RNA, 22 nt, Human
uugaagcagcucaggaggcuua

SEQ ID NO: 700132 - RNA, 22 nt, Human
ugagcugugcuacgcccuggga

SEQ ID NO: 700133 - RNA, 22 nt, Human
gugugcuguuguucagguagaa

SEQ ID NO: 700134 - RNA, 22 nt, Human
gaggcaguggucugaugcaagg

SEQ ID NO: 700135 - RNA, 22 nt, Human
caucauuuuguauccaagggga

SEQ ID NO: 700136 - RNA, 20 nt, Human
ggagucacauucuuuacugc

SEQ ID NO: 700137 - RNA, 19 nt, Human
gccugagccagccaugcaa

SEQ ID NO: 700138 - RNA, 19 nt, Human
ggccuuggggucccaaagu

SEQ ID NO: 700139 - RNA, 22 nt, Human
gcuggaaggcuaggcucaguug

SEQ ID NO: 700140 - RNA, 22 nt, Human
gguagacugucaaacacuagcc

SEQ ID NO: 700141 - RNA, 22 nt, Human
cagcuguuaugagguguacaug

SEQ ID NO: 700142 - RNA, 22 nt, Human
acauacuuuuuaaaagauugcu

SEQ ID NO: 700143 - RNA, 22 nt, Human
cagcagagguuuugcuccauga

SEQ ID NO: 700144 - RNA, 22 nt, Human
aguggcuguacuauuuuuucau

SEQ ID NO: 700145 - RNA, 23 nt, Human
ucuuuagaagaacaucagaaaug

SEQ ID NO: 700146 - RNA, 22 nt, Human
ggcucuggugaggguaggagau

SEQ ID NO: 700147 - RNA, 22 nt, Human
augcuggugguugauggcagga

SEQ ID NO: 700148 - RNA, 22 nt, Human
uagaaacccugccuuaguagcu

SEQ ID NO: 700149 - RNA, 22 nt, Human
uaaacaucugaauccugcuucc

SEQ ID NO: 700150 - RNA, 22 nt, Human
uaugaguacugugaacgagaau

SEQ ID NO: 700151 - RNA, 22 nt, Human
ugcaugaacggaggguaagcug

SEQ ID NO: 700152 - RNA, 21 nt, Human
uguguaaaguugaaauccugu

SEQ ID NO: 700153 - RNA, 23 nt, Human
uuacaugugugcacacauucugg

SEQ ID NO: 700154 - RNA, 22 nt, Human
auuucacaucuaucucagauuu

SEQ ID NO: 700155 - RNA, 22 nt, Human
aacacuuuuuaguaaagauuga

SEQ ID NO: 700156 - RNA, 22 nt, Human
cagcaugcaaguccagaugugg

SEQ ID NO: 700157 - RNA, 22 nt, Human
agauauucugccuaacagguuu

SEQ ID NO: 700158 - RNA, 22 nt, Human
accaugaugggaagcucagggc

SEQ ID NO: 700159 - RNA, 22 nt, Human
agauauguuuguauauauuugu

SEQ ID NO: 700160 - RNA, 22 nt, Human
uacauuagcaaacaucuuggug

SEQ ID NO: 700161 - RNA, 22 nt, Human
ccucucccacguggcagaggcu

SEQ ID NO: 700162 - RNA, 22 nt, Human
gagguauugacuaugggauggc

SEQ ID NO: 700163 - RNA, 17 nt, Human
aaaucacugucaguuca

SEQ ID NO: 700164 - RNA, 22 nt, Human
guaggucagacauaagaggaca

SEQ ID NO: 700165 - RNA, 15 nt, Human
aaucagaaguguggc

SEQ ID NO: 700166 - RNA, 22 nt, Human
aaacauuccauuucuauguaag

SEQ ID NO: 700167 - RNA, 22 nt, Human
guuuggcaguuuuagagugcaa

SEQ ID NO: 700168 - RNA, 21 nt, Human
ugcuugcagaacuuucaggcu

SEQ ID NO: 700169 - RNA, 22 nt, Human
aaguucaauggaaaagcuuuag

SEQ ID NO: 700170 - RNA, 22 nt, Human
agggguggagaguguugccagu

SEQ ID NO: 700171 - RNA, 22 nt, Human
cucuucaggauggcuugugaug

SEQ ID NO: 700172 - RNA, 22 nt, Human
guucugccuguggcuucugugg

SEQ ID NO: 700173 - RNA, 22 nt, Human
ugcagacagagaaaugaggccc

SEQ ID NO: 700174 - RNA, 22 nt, Human
agcacaaaaacauucccagagu

SEQ ID NO: 700175 - RNA, 22 nt, Human
caguuucuucaauucagacacu

SEQ ID NO: 700176 - RNA, 22 nt, Human
cauuuguucugauuucaaaagg

SEQ ID NO: 700177 - RNA, 18 nt, Human
gaugaggcugucugagaa

SEQ ID NO: 700178 - RNA, 22 nt, Human
ugacaaaccaguagcaauaaag

SEQ ID NO: 700179 - RNA, 22 nt, Human
cuguguaucucugugggacaga

SEQ ID NO: 700180 - RNA, 22 nt, Human
uuaaaaccaucagcuguaagau

SEQ ID NO: 700181 - RNA, 22 nt, Human
aucauggaaagguucagcaagc

SEQ ID NO: 700182 - RNA, 22 nt, Human
guggggagcagccuuagccccu

SEQ ID NO: 700183 - RNA, 22 nt, Human
acccagagaacugugccuugag

SEQ ID NO: 700184 - RNA, 22 nt, Human
aagcccugacuaugaagacaua

SEQ ID NO: 700185 - RNA, 18 nt, Human
ugagagccugcuuguccc

SEQ ID NO: 700186 - RNA, 22 nt, Human
aucugacaaggccacauauucu

SEQ ID NO: 700187 - RNA, 22 nt, Human
uugaaugcaugguucacucugu

SEQ ID NO: 700188 - RNA, 22 nt, Human
auggcugugugcuucuccccau

SEQ ID NO: 700189 - RNA, 22 nt, Human
auuccacaggagcugguuuucu

SEQ ID NO: 700190 - RNA, 22 nt, Human
acuauagcucggguuauaaugu

SEQ ID NO: 700191 - RNA, 22 nt, Human
gugugcagucugcuaggcaggg

SEQ ID NO: 700192 - RNA, 21 nt, Human
gggagcugacagcagcacggc

SEQ ID NO: 700193 - RNA, 23 nt, Human
ccaccuggacucugggcaggugc

SEQ ID NO: 700194 - RNA, 22 nt, Human
ucugcagacacuggggucugga

SEQ ID NO: 700195 - RNA, 22 nt, Human
aggcagcauuucugcuuaucca

SEQ ID NO: 700196 - RNA, 22 nt, Human
ggagcuccuggcagugacagag

SEQ ID NO: 700197 - RNA, 22 nt, Human
ucaucaaagcgcuuggaguagg

SEQ ID NO: 700198 - RNA, 22 nt, Human
cagucacauugcccugcauuua

SEQ ID NO: 700199 - RNA, 22 nt, Human
uguaugcagcaaaacaauuagu

SEQ ID NO: 700200 - RNA, 22 nt, Human
ucuggagagcagaugccucugg

SEQ ID NO: 700201 - RNA, 22 nt, Human
ugcugccuccaacuccugggcu

SEQ ID NO: 700202 - RNA, 22 nt, Human
ugguccaguuuagcauugagug

SEQ ID NO: 700203 - RNA, 22 nt, Human
gugaaaaaugauuuguuaacug

SEQ ID NO: 700204 - RNA, 22 nt, Human
acagcucucccucagagaaaug

SEQ ID NO: 700205 - RNA, 22 nt, Human
auauauuuacucuccuguugca

SEQ ID NO: 700206 - RNA, 22 nt, Human
uccucugccccagaugaaauuu

SEQ ID NO: 700207 - RNA, 22 nt, Human
ucucugugucuuagugaaggga

SEQ ID NO: 700208 - RNA, 22 nt, Human
uaucucuuuauugacaauaaaa

SEQ ID NO: 700209 - RNA, 22 nt, Human
ucagccagaaagugauuuucag

SEQ ID NO: 700210 - RNA, 22 nt, Human
agcuuucacgauuuggaacagg

SEQ ID NO: 700211 - RNA, 22 nt, Human
uacuacaguauguguguuauac

SEQ ID NO: 700212 - RNA, 22 nt, Human
ccuggauucaagucuuucuuuc

SEQ ID NO: 700213 - RNA, 22 nt, Human
gagcugccugaacaagcagcag

SEQ ID NO: 700214 - RNA, 22 nt, Human
uagggggcuuugcugcuugaca

SEQ ID NO: 700215 - RNA, 22 nt, Human
uaagaguaagugauuaagaaga

SEQ ID NO: 700216 - RNA, 23 nt, Human
uucagggccucagaggugaagcu

SEQ ID NO: 700217 - RNA, 22 nt, Human
uuugcauugccucugacuuaug

SEQ ID NO: 700218 - RNA, 22 nt, Human
cuugcaggcagggacacugucu

SEQ ID NO: 700219 - RNA, 22 nt, Human
uccugagaaggcacagcuugca

SEQ ID NO: 700220 - RNA, 22 nt, Human
uagcagggauacaaggucgccu

SEQ ID NO: 700221 - RNA, 22 nt, Human
gagcacagcgcaguuuguaauu

SEQ ID NO: 700222 - RNA, 22 nt, Human
uucucagauuccccuuuuaaua

SEQ ID NO: 700223 - RNA, 22 nt, Human
uagcucugugcucuggaucugu

SEQ ID NO: 700224 - RNA, 22 nt, Human
ugucuugauuagaaugaugggc

SEQ ID NO: 700225 - RNA, 22 nt, Human
uuuauucaucaucuguucauau

SEQ ID NO: 700226 - RNA, 22 nt, Human
acagugcucaugugacauggug

SEQ ID NO: 700227 - RNA, 22 nt, Human
gugugucuuucauuucaugagg

SEQ ID NO: 700228 - RNA, 22 nt, Human
aacuaauacauuaauacaugug

SEQ ID NO: 700229 - RNA, 22 nt, Human
ccugcugucugcuguguuaagc

SEQ ID NO: 700230 - RNA, 22 nt, Human
uuucuacagaagauacacugcu

SEQ ID NO: 700231 - RNA, 22 nt, Human
gcuuuauuuugugagggauuac

SEQ ID NO: 700232 - RNA, 22 nt, Human
agaacaaaauuagaggagugca

SEQ ID NO: 700233 - RNA, 22 nt, Human
ccuuuggcauuuugaggaugcg

SEQ ID NO: 700234 - RNA, 22 nt, Human
aaaucagugcucauuugaaagg

SEQ ID NO: 700235 - RNA, 22 nt, Human
uaaaccuguaguugauguaauu

SEQ ID NO: 700236 - RNA, 22 nt, Human
uccaggccccccacgcuaaugg

SEQ ID NO: 700237 - RNA, 22 nt, Human
ucucuggcagacuggcugggcu

SEQ ID NO: 700238 - RNA, 22 nt, Human
gacuugggggaagauguggcug

SEQ ID NO: 700239 - RNA, 22 nt, Human
gcauccaugcaugcagggugug

SEQ ID NO: 700240 - RNA, 22 nt, Human
guccucugaaguugugcaaugc

SEQ ID NO: 700241 - RNA, 22 nt, Human
ucaguuuugaaaacauugaaug

SEQ ID NO: 700242 - RNA, 20 nt, Human
gcugacuguuuggguggcgg

SEQ ID NO: 700243 - RNA, 22 nt, Human
acaugcacugguugagggguuu

SEQ ID NO: 700244 - RNA, 22 nt, Human
aagaacauuuaugauggcauuu

SEQ ID NO: 700245 - RNA, 22 nt, Human
cauuaggguaauugaacacuua

SEQ ID NO: 700246 - RNA, 22 nt, Human
uuugguccauuauaugcuguca

SEQ ID NO: 700247 - RNA, 21 nt, Human
cuuauucacuguuauuuauca

SEQ ID NO: 700248 - RNA, 18 nt, Human
gagagcccagcagguggu

SEQ ID NO: 700249 - RNA, 22 nt, Human
cuggccaggccccuugcagggc

SEQ ID NO: 700250 - RNA, 22 nt, Human
cucugaaagcaaaacuagagaa

SEQ ID NO: 700251 - RNA, 22 nt, Human
guuaaugugucugacacaaugg

SEQ ID NO: 700252 - RNA, 22 nt, Human
cuacaggcucagggagcccucu

SEQ ID NO: 700253 - RNA, 22 nt, Human
cacagccugcugcacucaagaa

SEQ ID NO: 700254 - RNA, 22 nt, Human
uucugauugcugaugaggccca

SEQ ID NO: 700255 - RNA, 22 nt, Human
uugaaguugcacauuauaauuu

SEQ ID NO: 700256 - RNA, 22 nt, Human
cuggcuuccucaggagcagugg

SEQ ID NO: 700257 - RNA, 22 nt, Human
acacauauauuauuuguggcuc

SEQ ID NO: 700258 - RNA, 22 nt, Human
cugugaauuaaguauuguuauc

SEQ ID NO: 700259 - RNA, 22 nt, Human
cagcccugugcuaagcacccuc

SEQ ID NO: 700260 - RNA, 22 nt, Human
uacauugagcacguacuaugug

SEQ ID NO: 700261 - RNA, 22 nt, Human
gugggccaguuccucacaggua

SEQ ID NO: 700262 - RNA, 22 nt, Human
cucuguccuccaccugcuuuca

SEQ ID NO: 700263 - RNA, 22 nt, Human
ucagcaaugagaacuggcauuu

SEQ ID NO: 700264 - RNA, 22 nt, Human
cccagguguuuguggcagaggu

SEQ ID NO: 700265 - RNA, 22 nt, Human
uguguuugaguccucacagugc

SEQ ID NO: 700266 - RNA, 22 nt, Human
cugagccacugcuuguucagug

SEQ ID NO: 700267 - RNA, 22 nt, Human
guggguggauuccagcaacgcu

SEQ ID NO: 700268 - RNA, 21 nt, Human
ggcaacagauauuuugcuuag

SEQ ID NO: 700269 - RNA, 22 nt, Human
cgacagcagaagaagcaagcca

SEQ ID NO: 700270 - RNA, 22 nt, Human
auauagucaaacauauaugugu

SEQ ID NO: 700271 - RNA, 22 nt, Human
uuacuguaugagugugguaguc

SEQ ID NO: 700272 - RNA, 22 nt, Human
uaguaacagauuuauacagucu

SEQ ID NO: 700273 - RNA, 22 nt, Human
acauuaacaccgugaguuuggu

SEQ ID NO: 700274 - RNA, 21 nt, Human
auucagaaagggaauaaacuc

SEQ ID NO: 700275 - RNA, 22 nt, Human
aacaugauuggaaaaugcuguc

SEQ ID NO: 700276 - RNA, 22 nt, Human
gcugggucucucccugguccug

SEQ ID NO: 700277 - RNA, 22 nt, Human
agacacauuuuacauuaacugu

SEQ ID NO: 700278 - RNA, 22 nt, Human
gcuuuuuugcuauugaaguggu

SEQ ID NO: 700279 - RNA, 20 nt, Human
uucuuucaucuacacguugu

SEQ ID NO: 700280 - RNA, 22 nt, Human
ccuuucucuggcagcaggacag

SEQ ID NO: 700281 - RNA, 22 nt, Human
auguggcuaguggcuaugaucu

SEQ ID NO: 700282 - RNA, 22 nt, Human
acagcugcucuauaucucagcc

SEQ ID NO: 700283 - RNA, 22 nt, Human
ugaaacaaaccaguaauuuugu

SEQ ID NO: 700284 - RNA, 22 nt, Human
ucccaggacccaggcauucaca

SEQ ID NO: 700285 - RNA, 18 nt, Human
ucacuggguguauguggc

SEQ ID NO: 700286 - RNA, 22 nt, Human
cuggugucugauucuccccuga

SEQ ID NO: 700287 - RNA, 22 nt, Human
uucagaggguuuuagggucaga

SEQ ID NO: 700288 - RNA, 22 nt, Human
agcaccuugcucuuggccuucc

SEQ ID NO: 700289 - RNA, 22 nt, Human
auauucacugagcauaaagcca

SEQ ID NO: 700290 - RNA, 22 nt, Human
gagcagcaguuguuacaaugau

SEQ ID NO: 700291 - RNA, 22 nt, Human
cugaguccuugggcuuagagug

SEQ ID NO: 700292 - RNA, 22 nt, Human
auaucauaaaucggugcaugaa

SEQ ID NO: 700293 - RNA, 21 nt, Human
uccucagggccccagagcacu

SEQ ID NO: 700294 - RNA, 22 nt, Human
guaacugaggcagcuuuuaaga

SEQ ID NO: 700295 - RNA, 22 nt, Human
guuuuuccugcugacuuggguc

SEQ ID NO: 700296 - RNA, 22 nt, Human
aggccucacauugggcuucaag

SEQ ID NO: 700297 - RNA, 22 nt, Human
aauuuguacaaaauguuuauaa

SEQ ID NO: 700298 - RNA, 22 nt, Human
aggcaaaugauccugcuccuug

SEQ ID NO: 700299 - RNA, 22 nt, Human
gaccuggcuuugggccccggca

SEQ ID NO: 700300 - RNA, 22 nt, Human
ucccucagggugcaguugcuuu

SEQ ID NO: 700301 - RNA, 22 nt, Human
cagccccauggugugcuccagc

SEQ ID NO: 700302 - RNA, 22 nt, Human
uuauuaguguugauauuaggau

SEQ ID NO: 700303 - RNA, 22 nt, Human
ccucuggccuaggccgggagag

SEQ ID NO: 700304 - RNA, 22 nt, Human
gaggcuggugguuaguuccauu

SEQ ID NO: 700305 - RNA, 22 nt, Human
uuucaaaccuacuuguauguuu

SEQ ID NO: 700306 - RNA, 22 nt, Human
augaaacaguguguauagcaaa

SEQ ID NO: 700307 - RNA, 22 nt, Human
ucugcucuguacugcacuggcc

SEQ ID NO: 700308 - RNA, 22 nt, Human
aaggaggaaaauauuguugcug

SEQ ID NO: 700309 - RNA, 22 nt, Human
ucaacuuuaguguagcuauuua

SEQ ID NO: 700310 - RNA, 22 nt, Human
uuucagacugcugugugaaacu

SEQ ID NO: 700311 - RNA, 22 nt, Human
cggcagggcuccaugcauuucu

SEQ ID NO: 700312 - RNA, 22 nt, Human
auuagaaaaucuggaggugggg

SEQ ID NO: 700313 - RNA, 22 nt, Human
accuuucaaaguggcuaucacu

SEQ ID NO: 700314 - RNA, 22 nt, Human
aauguaaaguugggcacaaaug

SEQ ID NO: 700315 - RNA, 22 nt, Human
aacaggcuggccuugaagcagu

SEQ ID NO: 700316 - RNA, 22 nt, Human
cugagaaaguuuauguuuauuu

SEQ ID NO: 700317 - RNA, 22 nt, Human
cugcugucccagccuccucaca

SEQ ID NO: 700318 - RNA, 22 nt, Human
uuugucauaucacacaauuuug

SEQ ID NO: 700319 - RNA, 22 nt, Human
aagaauguuaguuucugauaca

SEQ ID NO: 700320 - RNA, 22 nt, Human
caggcagauauguucgcuuuaa

SEQ ID NO: 700321 - RNA, 22 nt, Human
agaaaacuugucacagcucuca

SEQ ID NO: 700322 - RNA, 22 nt, Human
gucuaugauauuuuguuauagc

SEQ ID NO: 700323 - RNA, 22 nt, Human
cccucaggaugcaguggaagug

SEQ ID NO: 700324 - RNA, 19 nt, Human
ccccaaaguuuagauguug

SEQ ID NO: 700325 - RNA, 22 nt, Human
auuguauuagcacaauacaauu

SEQ ID NO: 700326 - RNA, 22 nt, Human
aaugcuagugugauauguaagg

SEQ ID NO: 700327 - RNA, 22 nt, Human
agcauuuaugacuaauguaaaa

SEQ ID NO: 700328 - RNA, 22 nt, Human
uuuguguaccuuguacauuugu

SEQ ID NO: 700329 - RNA, 22 nt, Human
acucugccugaaccuccugcaa

SEQ ID NO: 700330 - RNA, 22 nt, Human
cccugcuagaaccuccaacaug

SEQ ID NO: 700331 - RNA, 22 nt, Human
aaggcugaggagggccugcagg

SEQ ID NO: 700332 - RNA, 22 nt, Human
agaggaggcagcuuaacucagu

SEQ ID NO: 700333 - RNA, 22 nt, Human
uauugccugaguguuucauaau

SEQ ID NO: 700334 - RNA, 22 nt, Human
ugcugcucuucaccauggccuc

SEQ ID NO: 700335 - RNA, 22 nt, Human
ucccugggcuucuccagacuug

SEQ ID NO: 700336 - RNA, 22 nt, Human
ugccagcaguagcaguaggcca

SEQ ID NO: 700337 - RNA, 22 nt, Human
ucagugcaucacagaacuuugu

SEQ ID NO: 700338 - RNA, 22 nt, Human
uccuggacuggcucagcacccu

SEQ ID NO: 700339 - RNA, 22 nt, Human
ucccuguccaaagucuuccuau

SEQ ID NO: 700340 - RNA, 22 nt, Human
ugagauguaagguaugcuuacu

SEQ ID NO: 700341 - RNA, 22 nt, Human
acagcuaagcucccacaaccug

SEQ ID NO: 700342 - RNA, 22 nt, Human
uaguuaggguucugcagagaca

SEQ ID NO: 700343 - RNA, 22 nt, Human
ggcugagcaauuuugaugacau

SEQ ID NO: 700344 - RNA, 22 nt, Human
caugaaagcaggaaugguuuua

SEQ ID NO: 700345 - RNA, 22 nt, Human
gaauugcugaugaaucugauug

SEQ ID NO: 700346 - RNA, 22 nt, Human
aaugcuuucaaaaaugugcagu

SEQ ID NO: 700347 - RNA, 22 nt, Human
aaauccuaaugacaaguuuagu

SEQ ID NO: 700348 - RNA, 22 nt, Human
cagcuauuguucuguauaauga

SEQ ID NO: 700349 - RNA, 22 nt, Human
cuguggcuggcucaucauaggu

SEQ ID NO: 700350 - RNA, 22 nt, Human
agguggcugaagagugggugag

SEQ ID NO: 700351 - RNA, 22 nt, Human
gagggcgcuucagagagaugaa

SEQ ID NO: 700352 - RNA, 22 nt, Human
ugcagaaccaguccucagaccc

SEQ ID NO: 700353 - RNA, 22 nt, Human
caauuucuggaacuaauucuga

SEQ ID NO: 700354 - RNA, 22 nt, Human
ggcaagagguccaagaggucuc

SEQ ID NO: 700355 - RNA, 22 nt, Human
uggagcaggcaucuuucucucu

SEQ ID NO: 700356 - RNA, 22 nt, Human
caacaguuuauaguguuaucuu

SEQ ID NO: 700357 - RNA, 22 nt, Human
cugucacugaugcuccugccac

SEQ ID NO: 700358 - RNA, 22 nt, Human
caggaaauauaggaaaaggaac

SEQ ID NO: 700359 - RNA, 22 nt, Human
acuuaucaguugucucuaaugu

SEQ ID NO: 700360 - RNA, 22 nt, Human
auauggcauuuuaauguaugag

SEQ ID NO: 700361 - RNA, 22 nt, Human
guaaucucagcuacuugggagg

SEQ ID NO: 700362 - RNA, 19 nt, Human
ucugagggagcacgaaggc

SEQ ID NO: 700363 - RNA, 22 nt, Human
aaacugaagagcuuuuugacac

SEQ ID NO: 700364 - RNA, 22 nt, Human
uugauagguuuuauguauaguu

SEQ ID NO: 700365 - RNA, 22 nt, Human
aauggacaggagagcauaguca

SEQ ID NO: 700366 - RNA, 22 nt, Human
auugguggugaggacaugccag

SEQ ID NO: 700367 - RNA, 22 nt, Human
agggaguuccgaucugugcacc

SEQ ID NO: 700368 - RNA, 22 nt, Human
aagccucaccuuuuagaagcua

SEQ ID NO: 700369 - RNA, 22 nt, Human
ccaguguguuuuucucugacuc

SEQ ID NO: 700370 - RNA, 18 nt, Human
aguccuggcucuaccacc

SEQ ID NO: 700371 - RNA, 22 nt, Human
gagcagcaagcacucaaaggcu

SEQ ID NO: 700372 - RNA, 22 nt, Human
ggcagagcucuggacugagaac

SEQ ID NO: 700373 - RNA, 22 nt, Human
ucagaacauuugggacuuuggg

SEQ ID NO: 700374 - RNA, 22 nt, Human
uagaggagcggcgagcugagcu

SEQ ID NO: 700375 - RNA, 22 nt, Human
agggcugcugcuccgggcccag

SEQ ID NO: 700376 - RNA, 22 nt, Human
agcagcagaaaguugauggcag

SEQ ID NO: 700377 - RNA, 22 nt, Human
acccuggguucccgcagcacca

SEQ ID NO: 700378 - RNA, 22 nt, Human
uagaagagacauagccuguggu

SEQ ID NO: 700379 - RNA, 23 nt, Human
agguggccaccagaauguuaagg

SEQ ID NO: 700380 - RNA, 22 nt, Human
uuagcaagauaacaguaauuuu

SEQ ID NO: 700381 - RNA, 22 nt, Human
gccugugacccagggcccagga

SEQ ID NO: 700382 - RNA, 21 nt, Human
ggccccagcccauggguucuc

SEQ ID NO: 700383 - RNA, 22 nt, Human
accugcagguguuuccacacuu

SEQ ID NO: 700384 - RNA, 21 nt, Human
gcuccagaacucuaugcuaac

SEQ ID NO: 700385 - RNA, 22 nt, Human
agucaacagaguggccgcagcg

SEQ ID NO: 700386 - RNA, 22 nt, Human
ggcaugagagguccuggggauu

SEQ ID NO: 700387 - RNA, 22 nt, Human
augucuucuaagcucuaagcug

SEQ ID NO: 700388 - RNA, 22 nt, Human
ucccugagcuucucugaaaugg

SEQ ID NO: 700389 - RNA, 22 nt, Human
cugggucucaggaguucugagg

SEQ ID NO: 700390 - RNA, 19 nt, Human
cuggucugucaugcucccc

SEQ ID NO: 700391 - RNA, 22 nt, Human
acaggcuugcacuaggguggca

SEQ ID NO: 700392 - RNA, 22 nt, Human
aacaugcaaugucugaaaaucc

SEQ ID NO: 700393 - RNA, 22 nt, Human
uaguuuaggaacaaguagugga

SEQ ID NO: 700394 - RNA, 22 nt, Human
agcaaacagugugcuaagaaau

SEQ ID NO: 700395 - RNA, 22 nt, Human
gagaguggauggagcugcgaag

SEQ ID NO: 700396 - RNA, 22 nt, Human
acuaaaguccuguuguagcaua

SEQ ID NO: 700397 - RNA, 22 nt, Human
aguuccagcugugaccagaaaa

SEQ ID NO: 700398 - RNA, 20 nt, Human
acaguguuaguuaucaucuc

SEQ ID NO: 700399 - RNA, 22 nt, Human
aaguuccuuagccuuagggcuu

SEQ ID NO: 700400 - RNA, 22 nt, Human
uuugaauaaucacugggcauua

SEQ ID NO: 700401 - RNA, 22 nt, Human
aguucaggcauaaggcaugaac

SEQ ID NO: 700402 - RNA, 22 nt, Human
cugaaacuccaugagaaauugc

SEQ ID NO: 700403 - RNA, 22 nt, Human
cugagaggcacaaggcauuucg

SEQ ID NO: 700404 - RNA, 22 nt, Human
aacugugggaugcauuaauuca

SEQ ID NO: 700405 - RNA, 22 nt, Human
agucugaguaucucugagccag

SEQ ID NO: 700406 - RNA, 22 nt, Human
ugcaagcacucaaugcaaacag

SEQ ID NO: 700407 - RNA, 22 nt, Human
ugcaggaggccccauggaaccg

SEQ ID NO: 700408 - RNA, 22 nt, Human
uuagugcaaaccucagagacac

SEQ ID NO: 700409 - RNA, 22 nt, Human
uuggaauugaggauuuacauag

SEQ ID NO: 700410 - RNA, 22 nt, Human
aaagcaguauaaguaacggaag

SEQ ID NO: 700411 - RNA, 22 nt, Human
ccuuggcuaggcagcggcuguc

SEQ ID NO: 700412 - RNA, 22 nt, Human
ugggggcagaggauucaggaau

SEQ ID NO: 700413 - RNA, 22 nt, Human
ccuggagguggagguugcagug

SEQ ID NO: 700414 - RNA, 22 nt, Human
uagcagcaccuuucuaaucuga

SEQ ID NO: 700415 - RNA, 22 nt, Human
cuuuacauccuguuucccguuu

SEQ ID NO: 700416 - RNA, 22 nt, Human
cuugccugggacugaggcauuu

SEQ ID NO: 700417 - RNA, 22 nt, Human
acccugagaaagucacaugcau

SEQ ID NO: 700418 - RNA, 22 nt, Human
uauuaaauguuauuuggguugu

SEQ ID NO: 700419 - RNA, 22 nt, Human
uucaggaaucaaccaagucauu

SEQ ID NO: 700420 - RNA, 22 nt, Human
auccugggccucagaggugugu

SEQ ID NO: 700421 - RNA, 22 nt, Human
ccaccagcuuugccacccugcu

SEQ ID NO: 700422 - RNA, 22 nt, Human
aguuucacauagcucagugcuc

SEQ ID NO: 700423 - RNA, 22 nt, Human
acaguagucuuaauuucaugua

SEQ ID NO: 700424 - RNA, 22 nt, Human
aggagagucuugagucacuggu

SEQ ID NO: 700425 - RNA, 22 nt, Human
aaaucucaaaggcuuagcaucu

SEQ ID NO: 700426 - RNA, 22 nt, Human
gggcuucugcucuuuuggugcu

SEQ ID NO: 700427 - RNA, 22 nt, Human
cucuugggagugcucuggagaa

SEQ ID NO: 700428 - RNA, 22 nt, Human
uaguuuagccccacgugugcuu

SEQ ID NO: 700429 - RNA, 22 nt, Human
auuuggucauguucaguguaga

SEQ ID NO: 700430 - RNA, 22 nt, Human
accagagcuggcagaguaucaa

SEQ ID NO: 700431 - RNA, 22 nt, Human
caaucacugggauauuggugug

SEQ ID NO: 700432 - RNA, 22 nt, Human
ugagcccagagcccuuguaggg

SEQ ID NO: 700433 - RNA, 22 nt, Human
aauuuuacaaaauaccuccgau

SEQ ID NO: 700434 - RNA, 22 nt, Human
gcccagcaggggauggcagcuc

SEQ ID NO: 700435 - RNA, 22 nt, Human
cugggcacaggggagcagaguc

SEQ ID NO: 700436 - RNA, 22 nt, Human
ggcugccuucagacuccagcuu

SEQ ID NO: 700437 - RNA, 22 nt, Human
aaaaagacuagucgagugcagu

SEQ ID NO: 700438 - RNA, 22 nt, Human
auguacauuauucgagugaugg

SEQ ID NO: 700439 - RNA, 22 nt, Human
ccauuaaagcaccacuguaaua

SEQ ID NO: 700440 - RNA, 22 nt, Human
aauaauuuuagcucagaguugu

SEQ ID NO: 700441 - RNA, 22 nt, Human
auagucuuagucuauaguuuug

SEQ ID NO: 700442 - RNA, 22 nt, Human
augcacaguacaaacuggaaac

SEQ ID NO: 700443 - RNA, 20 nt, Human
gcauggcuaaucuguacuga

SEQ ID NO: 700444 - RNA, 21 nt, Human
uuaagagcuuagcaguaggcc

SEQ ID NO: 700445 - RNA, 22 nt, Human
uaauggcuaaaauucagaagaa

SEQ ID NO: 700446 - RNA, 22 nt, Human
gccaggcucucagugacugccc

SEQ ID NO: 700447 - RNA, 22 nt, Human
cccuuuggguuccccaagccug

SEQ ID NO: 700448 - RNA, 22 nt, Human
uuguuuuggaagaacuuacucu

SEQ ID NO: 700449 - RNA, 21 nt, Human
uuucugaaggcaacaucuauc

SEQ ID NO: 700450 - RNA, 19 nt, Human
uagucuuuauucuuaauuu

SEQ ID NO: 700451 - RNA, 22 nt, Human
gcccuggagagggauauggcau

SEQ ID NO: 700452 - RNA, 22 nt, Human
cugggugaguauaggaaaggga

SEQ ID NO: 700453 - RNA, 22 nt, Human
auaauugaugaggcuuuggaca

SEQ ID NO: 700454 - RNA, 22 nt, Human
ucauauaacuggauauuuucaa

SEQ ID NO: 700455 - RNA, 22 nt, Human
uagcagugcccuguggaauaag

SEQ ID NO: 700456 - RNA, 22 nt, Human
gagagcaggaggcagcgggacg

SEQ ID NO: 700457 - RNA, 22 nt, Human
aucugcaucagacuuugcauga

SEQ ID NO: 700458 - RNA, 22 nt, Human
augccaaagggagcacuuuggg

SEQ ID NO: 700459 - RNA, 22 nt, Human
ugcugucccccgugucugggcu

SEQ ID NO: 700460 - RNA, 22 nt, Human
ggcaggaagcauuaaaacgauu

SEQ ID NO: 700461 - RNA, 22 nt, Human
uuggagauaucacaccuucaca

SEQ ID NO: 700462 - RNA, 22 nt, Human
gagcuggcuccgccaugcugcu

SEQ ID NO: 700463 - RNA, 19 nt, Human
gccuuugggcguuguuggg

SEQ ID NO: 700464 - RNA, 22 nt, Human
ggggccgaccgcgguucaggcc

SEQ ID NO: 700465 - RNA, 22 nt, Human
aacaaauguaaaaugcagaugc

SEQ ID NO: 700466 - RNA, 22 nt, Human
gccuggcuuuugccucauguuc

SEQ ID NO: 700467 - RNA, 22 nt, Human
ugaggaaguuguuucucuucua

SEQ ID NO: 700468 - RNA, 22 nt, Human
augcacagcugaacacucuaaa

SEQ ID NO: 700469 - RNA, 23 nt, Human
uccagggcuggccagaccucggu

SEQ ID NO: 700470 - RNA, 22 nt, Human
auuucagggagucauuuacaca

SEQ ID NO: 700471 - RNA, 22 nt, Human
uuuuuaucuacagauucucagc

SEQ ID NO: 700472 - RNA, 22 nt, Human
cagaucaugaaugacugacaga

SEQ ID NO: 700473 - RNA, 22 nt, Human
agguggggugagcugcagacua

SEQ ID NO: 700474 - RNA, 22 nt, Human
ugcugagggcuguuaaggaagc

SEQ ID NO: 700475 - RNA, 22 nt, Human
accagagcccaucugcuccuag

SEQ ID NO: 700476 - RNA, 22 nt, Human
ucacucuguuuuacucacuguu

SEQ ID NO: 700477 - RNA, 23 nt, Human
ugggcagcuucugcaugcccacc

SEQ ID NO: 700478 - RNA, 22 nt, Human
uaauauguguuacugacuuuuu

SEQ ID NO: 700479 - RNA, 22 nt, Human
gcugcagcccugcggaucacuu

SEQ ID NO: 700480 - RNA, 22 nt, Human
cauuugaauggcauuucacuuu

SEQ ID NO: 700481 - RNA, 19 nt, Human
cagcacaugcuucucugag

SEQ ID NO: 700482 - RNA, 22 nt, Human
augcugaaggccauccugcauc

SEQ ID NO: 700483 - RNA, 22 nt, Human
gccuggagugguccugcugccc

SEQ ID NO: 700484 - RNA, 22 nt, Human
ugggcucucacacauguucuga

SEQ ID NO: 700485 - RNA, 22 nt, Human
agcaaggccgagaggaugcuau

SEQ ID NO: 700486 - RNA, 22 nt, Human
ggcccacuugaaauggagcuca

SEQ ID NO: 700487 - RNA, 22 nt, Human
cugcugugagcacuccagccug

SEQ ID NO: 700488 - RNA, 22 nt, Human
agcuuuggcuguguugcucugu

SEQ ID NO: 700489 - RNA, 22 nt, Human
agugguaagggcauaggcacug

SEQ ID NO: 700490 - RNA, 23 nt, Human
ucaaacagguuucagagcaucuu

SEQ ID NO: 700491 - RNA, 22 nt, Human
guaguucuuucucaauguucaa

SEQ ID NO: 700492 - RNA, 22 nt, Human
gagcuuccuuuuucugcaugac

SEQ ID NO: 700493 - RNA, 22 nt, Human
aagauuacuacggaacaugacc

SEQ ID NO: 700494 - RNA, 22 nt, Human
ugacagaggcugaguuagucug

SEQ ID NO: 700495 - RNA, 22 nt, Human
ggagcgugcagcaugagcucau

SEQ ID NO: 700496 - RNA, 22 nt, Human
cagagacccuucucaguggcca

SEQ ID NO: 700497 - RNA, 22 nt, Human
gggagccacaguuuauagugau

SEQ ID NO: 700498 - RNA, 22 nt, Human
ugugcccaucccucuggagugu

SEQ ID NO: 700499 - RNA, 22 nt, Human
cuacacugagagcucuucaggg

SEQ ID NO: 700500 - RNA, 16 nt, Human
agugggaggagaaaga

SEQ ID NO: 700501 - RNA, 22 nt, Human
ggcaggguggcagaggcucaga

SEQ ID NO: 700502 - RNA, 22 nt, Human
uucugaaaggcagguuguuugc

SEQ ID NO: 700503 - RNA, 22 nt, Human
aguuuuuccguggcuacgauaa

SEQ ID NO: 700504 - RNA, 22 nt, Human
gaacauuuggcaugagaauuug

SEQ ID NO: 700505 - RNA, 22 nt, Human
cugucacacugauaucaggcuu

SEQ ID NO: 700506 - RNA, 22 nt, Human
acccagcucuuugauggucuug

SEQ ID NO: 700507 - RNA, 22 nt, Human
uagaagauucauuuccucugaa

SEQ ID NO: 700508 - RNA, 22 nt, Human
ucuauacaugugcacacacauc

SEQ ID NO: 700509 - RNA, 22 nt, Human
cugccugcugccuguggagggu

SEQ ID NO: 700510 - RNA, 22 nt, Human
uuagaaccaccuggagagcuuu

SEQ ID NO: 700511 - RNA, 22 nt, Human
ugucaaaaauaagagagauugu

SEQ ID NO: 700512 - RNA, 22 nt, Human
auuuucaugacuaccuuaaaua

SEQ ID NO: 700513 - RNA, 22 nt, Human
ugggaagggaguuucuuggagu

SEQ ID NO: 700514 - RNA, 22 nt, Human
uccuagugcaaauuggagcaug

SEQ ID NO: 700515 - RNA, 22 nt, Human
gcagaggagcaaguugcuacag

SEQ ID NO: 700516 - RNA, 22 nt, Human
uuauguuuuaaguguguaucuu

SEQ ID NO: 700517 - RNA, 22 nt, Human
acacauaugguugcugcaguga

SEQ ID NO: 700518 - RNA, 22 nt, Human
auucuacaggacuggcaauccc

SEQ ID NO: 700519 - RNA, 22 nt, Human
aggacaaaggaccagaucugga

SEQ ID NO: 700520 - RNA, 22 nt, Human
gauuuauaguaugugcuuucag

SEQ ID NO: 700521 - RNA, 22 nt, Human
uaucuagaaacagaguuuuacu

SEQ ID NO: 700522 - RNA, 22 nt, Human
gucugagggguuucccaggaca

SEQ ID NO: 700523 - RNA, 22 nt, Human
gagcuggacuuucagauacauc

SEQ ID NO: 700524 - RNA, 22 nt, Human
gugcacaggugggaaaaugagu

SEQ ID NO: 700525 - RNA, 22 nt, Human
uuccaagaguaaauucaaauug

SEQ ID NO: 700526 - RNA, 22 nt, Human
uaaggccauuauggugggcccg

SEQ ID NO: 700527 - RNA, 22 nt, Human
guauuagggccaaaggcaggaa

SEQ ID NO: 700528 - RNA, 22 nt, Human
ccacagagacucugcaggacug

SEQ ID NO: 700529 - RNA, 23 nt, Human
caguauaauguauggauggggca

SEQ ID NO: 700530 - RNA, 22 nt, Human
ucuuggaacuuauuauuguaga

SEQ ID NO: 700531 - RNA, 22 nt, Human
gcagugcagugggacagggcgc

SEQ ID NO: 700532 - RNA, 22 nt, Human
cugccugugccaccgccucauu

SEQ ID NO: 700533 - RNA, 22 nt, Human
ccuuggcugugcugcccuuugc

SEQ ID NO: 700534 - RNA, 22 nt, Human
uagugaaaccugacagaucaug

SEQ ID NO: 700535 - RNA, 22 nt, Human
uuagugucuggcuauauuuaaa

SEQ ID NO: 700536 - RNA, 22 nt, Human
gaaggcccagcuugaaugcugc

SEQ ID NO: 700537 - RNA, 22 nt, Human
caccuguuagcucuaauuuucu

SEQ ID NO: 700538 - RNA, 22 nt, Human
aaagguaaaguaucugcccaag

SEQ ID NO: 700539 - RNA, 22 nt, Human
uucugucuguaaacuucucaau

SEQ ID NO: 700540 - RNA, 22 nt, Human
uggcagucggacuucuaucuca

SEQ ID NO: 700541 - RNA, 18 nt, Human
cggaucaugcgcugaggc

SEQ ID NO: 700542 - RNA, 22 nt, Human
uacuguauacuacugcuguucu

SEQ ID NO: 700543 - RNA, 22 nt, Human
uccugggguuuuggccgcagcu

SEQ ID NO: 700544 - RNA, 22 nt, Human
caugcauuucuaccaaggaaua

SEQ ID NO: 700545 - RNA, 22 nt, Human
uagaauauacacuacagcuuaa

SEQ ID NO: 700546 - RNA, 22 nt, Human
aacacaaaaauucucaggggca

SEQ ID NO: 700547 - RNA, 22 nt, Human
cagccaggagccucugcaacua

SEQ ID NO: 700548 - RNA, 22 nt, Human
uggcgcaguuucucugcugccu

SEQ ID NO: 700549 - RNA, 22 nt, Human
acuguccauucacucauauuca

SEQ ID NO: 700550 - RNA, 19 nt, Human
cccaggggacccagcccua

SEQ ID NO: 700551 - RNA, 20 nt, Human
acagagaucagcugaugggc

SEQ ID NO: 700552 - RNA, 22 nt, Human
cauugaaaauguugcaggcugu

SEQ ID NO: 700553 - RNA, 22 nt, Human
uggcagaaagaaccaugugcaa

SEQ ID NO: 700554 - RNA, 22 nt, Human
aguguucacucuguggagccca

SEQ ID NO: 700555 - RNA, 22 nt, Human
uuccugccuacaugccuuaugc

SEQ ID NO: 700556 - RNA, 22 nt, Human
gcagcuccuucaaucucaccau

SEQ ID NO: 700557 - RNA, 22 nt, Human
agccccuguccucucugaugac

SEQ ID NO: 700558 - RNA, 22 nt, Human
uugcucuguaauaaucuggggu

SEQ ID NO: 700559 - RNA, 22 nt, Human
ugaugaaaauguucagcaauua

SEQ ID NO: 700560 - RNA, 22 nt, Human
ggaggggaacuaaucccgugac

SEQ ID NO: 700561 - RNA, 22 nt, Human
agguauauguucauguaugugu

SEQ ID NO: 700562 - RNA, 22 nt, Human
acuuaaaaacagauccagcagg

SEQ ID NO: 700563 - RNA, 22 nt, Human
ggucugaggcuccaaggaggug

SEQ ID NO: 700564 - RNA, 22 nt, Human
ugaaacaagggccaugggaaac

SEQ ID NO: 700565 - RNA, 22 nt, Human
gauguguuuguuucuggaggag

SEQ ID NO: 700566 - RNA, 22 nt, Human
guggucagagaugacagugggu

SEQ ID NO: 700567 - RNA, 22 nt, Human
uagaauguuaagaauauguaua

SEQ ID NO: 700568 - RNA, 21 nt, Human
cagugcucaaucugacagugg

SEQ ID NO: 700569 - RNA, 22 nt, Human
cucagcagugacaagagaguau

SEQ ID NO: 700570 - RNA, 19 nt, Human
ggugugaagugaggaguua

SEQ ID NO: 700571 - RNA, 22 nt, Human
uucuccuuauucauaguugucu

SEQ ID NO: 700572 - RNA, 22 nt, Human
uuuuauaaagagagucaguugg

SEQ ID NO: 700573 - RNA, 22 nt, Human
cagagaaaaaauccugcucuca

SEQ ID NO: 700574 - RNA, 22 nt, Human
gacacagaauuuacucccgaua

SEQ ID NO: 700575 - RNA, 22 nt, Human
auuguucuguagugacauguag

SEQ ID NO: 700576 - RNA, 22 nt, Human
caggccuggcugcagcucgccu

SEQ ID NO: 700577 - RNA, 22 nt, Human
agcaacaggaccauggagccca

SEQ ID NO: 700578 - RNA, 22 nt, Human
cuggagggcuucugcagguuac

SEQ ID NO: 700579 - RNA, 22 nt, Human
cugaggucucuuuccauaguga

SEQ ID NO: 700580 - RNA, 22 nt, Human
uaaaucuucuacaucaucauaa

SEQ ID NO: 700581 - RNA, 22 nt, Human
ugcuucauuaaaacaauauuuu

SEQ ID NO: 700582 - RNA, 22 nt, Human
aauggguugaacaucaaggucu

SEQ ID NO: 700583 - RNA, 20 nt, Human
gcuuucuaugagauggacug

SEQ ID NO: 700584 - RNA, 22 nt, Human
auacaucuggauguaugcauuu

SEQ ID NO: 700585 - RNA, 22 nt, Human
ucccagagcagaugugcuaaag

SEQ ID NO: 700586 - RNA, 22 nt, Human
ccuggcuccaaagcugugacuc

SEQ ID NO: 700587 - RNA, 22 nt, Human
gugaccagccagugcugucugu

SEQ ID NO: 700588 - RNA, 22 nt, Human
uucucacagaagcacgaagccu

SEQ ID NO: 700589 - RNA, 22 nt, Human
agggcacaagacucugagcccc

SEQ ID NO: 700590 - RNA, 22 nt, Human
cugagccaugagccugcgccca

SEQ ID NO: 700591 - RNA, 22 nt, Human
uacuuacauuagcaaacaaggu

SEQ ID NO: 700592 - RNA, 22 nt, Human
agcaggagcccuuaucaccagg

SEQ ID NO: 700593 - RNA, 22 nt, Human
auacaaaaauuagccgggagua

SEQ ID NO: 700594 - RNA, 22 nt, Human
gcacccagugggaugcuuagca

SEQ ID NO: 700595 - RNA, 22 nt, Human
gcuuucuguagguaguuacugu

SEQ ID NO: 700596 - RNA, 22 nt, Human
ggcaagagugaggagugucucu

SEQ ID NO: 700597 - RNA, 22 nt, Human
ucaugaguggauuaauauggcu

SEQ ID NO: 700598 - RNA, 22 nt, Human
aggcagcauuugaauccagguc

SEQ ID NO: 700599 - RNA, 22 nt, Human
gauggcuuccuucucacugugu

SEQ ID NO: 700600 - RNA, 22 nt, Human
cugggcucagcaggccaaggcc

SEQ ID NO: 700601 - RNA, 22 nt, Human
cugagagucagcuucuccuccu

SEQ ID NO: 700602 - RNA, 22 nt, Human
acugugugggccgcucacuggg

SEQ ID NO: 700603 - RNA, 22 nt, Human
caucacuacaaauuuaagaaau

SEQ ID NO: 700604 - RNA, 22 nt, Human
uguauacaugucugugugcaca

SEQ ID NO: 700605 - RNA, 22 nt, Human
ucuuccucuagaucugaggccc

SEQ ID NO: 700606 - RNA, 22 nt, Human
cccugaggcugaggauaggugg

SEQ ID NO: 700607 - RNA, 22 nt, Human
cgcggcgcgcccccgggugugu

SEQ ID NO: 700608 - RNA, 22 nt, Human
auacacacgugcacgugggaaa

SEQ ID NO: 700609 - RNA, 22 nt, Human
uauucauuaugaccaaaucuag

SEQ ID NO: 700610 - RNA, 22 nt, Human
cagcuaauccucucuauccaag

SEQ ID NO: 700611 - RNA, 22 nt, Human
gcagggcuugcagcagcuagac

SEQ ID NO: 700612 - RNA, 22 nt, Human
gucuuccuaauuugcuauuagg

SEQ ID NO: 700613 - RNA, 22 nt, Human
uggccaagaugcgaccucucag

SEQ ID NO: 700614 - RNA, 22 nt, Human
gcagggaccaaaagaggcagua

SEQ ID NO: 700615 - RNA, 22 nt, Human
acagcuuuaguguggguggugc

SEQ ID NO: 700616 - RNA, 22 nt, Human
gacuuuccagguccugggcuau

SEQ ID NO: 700617 - RNA, 22 nt, Human
cuggccuaaaauugcuucugca

SEQ ID NO: 700618 - RNA, 22 nt, Human
cugaaaaacgggauuuggcugg

SEQ ID NO: 700619 - RNA, 22 nt, Human
agagggaaauccaggagugcuu

SEQ ID NO: 700620 - RNA, 22 nt, Human
gcugugagggucuagugaggug

SEQ ID NO: 700621 - RNA, 22 nt, Human
ccugaagcacccggagcuggca

SEQ ID NO: 700622 - RNA, 22 nt, Human
ggagaaggaagaaagcuacuau

SEQ ID NO: 700623 - RNA, 21 nt, Human
aacuuguauuucuccuuauuc

SEQ ID NO: 700624 - RNA, 22 nt, Human
aaagguuuuguucaucgauuuu

SEQ ID NO: 700625 - RNA, 23 nt, Human
uggccugcagaguuucugcuggg

SEQ ID NO: 700626 - RNA, 17 nt, Human
gucauucucagaaaaug

SEQ ID NO: 700627 - RNA, 22 nt, Human
aaccucaggcucucuggacaau

SEQ ID NO: 700628 - RNA, 19 nt, Human
ugcuucuggggcuucucca

SEQ ID NO: 700629 - RNA, 22 nt, Human
uccucacacuauagaugaggau

SEQ ID NO: 700630 - RNA, 23 nt, Human
augcacaagccagcaggggacag

SEQ ID NO: 700631 - RNA, 22 nt, Human
auaucacaggaaaggaagauac

SEQ ID NO: 700632 - RNA, 22 nt, Human
aguguuucucagaagggccuau

SEQ ID NO: 700633 - RNA, 22 nt, Human
aggauaaauucuccaaagugug

SEQ ID NO: 700634 - RNA, 22 nt, Human
gaaugugucacccugucccaug

SEQ ID NO: 700635 - RNA, 22 nt, Human
aggcagccacaugagcuccuga

SEQ ID NO: 700636 - RNA, 23 nt, Human
agguagguuauugcugcuaccug

SEQ ID NO: 700637 - RNA, 22 nt, Human
uucuuugugcauccaauuuucu

SEQ ID NO: 700638 - RNA, 21 nt, Human
cacagcaggguuccugggcuc

SEQ ID NO: 700639 - RNA, 17 nt, Human
uguggccuucugagcuu

SEQ ID NO: 700640 - RNA, 22 nt, Human
cugcaguaacgaucauggugcc

SEQ ID NO: 700641 - RNA, 22 nt, Human
uugcugggucagaagccaggag

SEQ ID NO: 700642 - RNA, 22 nt, Human
aaguuuaggccaaauuagauuu

SEQ ID NO: 700643 - RNA, 22 nt, Human
ugaauaaacuaugaggaggaau

SEQ ID NO: 700644 - RNA, 22 nt, Human
ucucagucagccuugauguccc

SEQ ID NO: 700645 - RNA, 19 nt, Human
cucugccucccuccugggu

SEQ ID NO: 700646 - RNA, 22 nt, Human
uccuggguaaacacugaccuuu

SEQ ID NO: 700647 - RNA, 22 nt, Human
ucugaggcaaacagaggagugu

SEQ ID NO: 700648 - RNA, 22 nt, Human
auacaucguuuauuuuaguuca

SEQ ID NO: 700649 - RNA, 22 nt, Human
cugcugucauagccaucccucc

SEQ ID NO: 700650 - RNA, 21 nt, Human
uggugccuucagcugucuuuu

SEQ ID NO: 700651 - RNA, 22 nt, Human
ucuugugugguggaagauaugg

SEQ ID NO: 700652 - RNA, 22 nt, Human
ugcaaacuagcaucaacuagua

SEQ ID NO: 700653 - RNA, 22 nt, Human
auguuacuuagaauaauucugg

SEQ ID NO: 700654 - RNA, 22 nt, Human
gaugcacagugacccugccagu

SEQ ID NO: 700655 - RNA, 19 nt, Human
uuuggcucuggucagagag

SEQ ID NO: 700656 - RNA, 22 nt, Human
gugggggcuggaaaucuugcca

SEQ ID NO: 700657 - RNA, 21 nt, Human
ggccucugucauccugggaag

SEQ ID NO: 700658 - RNA, 22 nt, Human
gucagaucuuuggggaugcugu

SEQ ID NO: 700659 - RNA, 22 nt, Human
agauaaugucaaauucugucug

SEQ ID NO: 700660 - RNA, 22 nt, Human
augucaugaaaugcuacuaacu

SEQ ID NO: 700661 - RNA, 22 nt, Human
uuccuucuaauauucugccugu

SEQ ID NO: 700662 - RNA, 22 nt, Human
uggaaagaaaaacaggccauga

SEQ ID NO: 700663 - RNA, 22 nt, Human
cugaauaucauuuaucauuggc

SEQ ID NO: 700664 - RNA, 22 nt, Human
aguuaucaucccuuacacuuug

SEQ ID NO: 700665 - RNA, 22 nt, Human
gucacauucaugcagaaucaaa

SEQ ID NO: 700666 - RNA, 22 nt, Human
cagcuguguagaugcaggguca

SEQ ID NO: 700667 - RNA, 22 nt, Human
gugcugaggagagggggugguc

SEQ ID NO: 700668 - RNA, 22 nt, Human
acauuucuuccacaugcugcug

SEQ ID NO: 700669 - RNA, 22 nt, Human
ucaucucaaaacccaaggggca

SEQ ID NO: 700670 - RNA, 22 nt, Human
ggcuggcuaucugugguugccu

SEQ ID NO: 700671 - RNA, 22 nt, Human
agggccugugcugaguagacga

SEQ ID NO: 700672 - RNA, 22 nt, Human
uacccagcccaugccuaccuca

SEQ ID NO: 700673 - RNA, 18 nt, Human
ucugcccugccauucacu

SEQ ID NO: 700674 - RNA, 17 nt, Human
cagaccucugugaagcc

SEQ ID NO: 700675 - RNA, 22 nt, Human
gcagagugaggaagagcuucca

SEQ ID NO: 700676 - RNA, 22 nt, Human
gucuggaggaaaagguuaaaug

SEQ ID NO: 700677 - RNA, 22 nt, Human
uuccuucuccagaacuucuagg

SEQ ID NO: 700678 - RNA, 22 nt, Human
uucacaauagcuggcaucaucu

SEQ ID NO: 700679 - RNA, 22 nt, Human
aacaguauggaagccauuagga

SEQ ID NO: 700680 - RNA, 22 nt, Human
accaggagguguuugcucaagu

SEQ ID NO: 700681 - RNA, 22 nt, Human
uccaacuuucuccuccggcuug

SEQ ID NO: 700682 - RNA, 20 nt, Human
gcuucaaagccauccuuuua

SEQ ID NO: 700683 - RNA, 22 nt, Human
ugugaaaagcguguguucuagg

SEQ ID NO: 700684 - RNA, 22 nt, Human
auguuaugacaagcaugacaga

SEQ ID NO: 700685 - RNA, 22 nt, Human
cauucugugauucuaaaucccu

SEQ ID NO: 700686 - RNA, 22 nt, Human
acuucacaacuguacauggcag

SEQ ID NO: 700687 - RNA, 22 nt, Human
ucaggagcugcacugggcccac

SEQ ID NO: 700688 - RNA, 22 nt, Human
auuguacuuuuauuacauguag

SEQ ID NO: 700689 - RNA, 22 nt, Human
acaguccuaagauaauugucuc

SEQ ID NO: 700690 - RNA, 22 nt, Human
caucucuucauuagcauuauug

SEQ ID NO: 700691 - RNA, 22 nt, Human
uucaucuguagcaucuuccaau

SEQ ID NO: 700692 - RNA, 22 nt, Human
acacugugugacuucugagacu

SEQ ID NO: 700693 - RNA, 22 nt, Human
auguuucagggugauagaaggu

SEQ ID NO: 700694 - RNA, 20 nt, Human
uggcggggaugagggaguua

SEQ ID NO: 700695 - RNA, 22 nt, Human
uaggcacugggcuaggacaggu

SEQ ID NO: 700696 - RNA, 22 nt, Human
aagugucugcuggcucuacccu

SEQ ID NO: 700697 - RNA, 22 nt, Human
ugaaacauuauagaauauuuau

SEQ ID NO: 700698 - RNA, 22 nt, Human
ccagcaugagacgaugaugaag

SEQ ID NO: 700699 - RNA, 22 nt, Human
ccugugaggucaucugugguaa

SEQ ID NO: 700700 - RNA, 22 nt, Human
acacagcagaaggcccgugucu

SEQ ID NO: 700701 - RNA, 22 nt, Human
gugcauauaugcacauaugugu

SEQ ID NO: 700702 - RNA, 22 nt, Human
gaaugaacaaaugugguggaga

SEQ ID NO: 700703 - RNA, 22 nt, Human
gcagaaggauccgcaggugcaa

SEQ ID NO: 700704 - RNA, 22 nt, Human
uccagcagaaaagagguaggga

SEQ ID NO: 700705 - RNA, 22 nt, Human
aacucucuuuagagagggacaa

SEQ ID NO: 700706 - RNA, 22 nt, Human
uacaaucacccaaagagccaga

SEQ ID NO: 700707 - RNA, 22 nt, Human
gggaucugauuuaggaugggag

SEQ ID NO: 700708 - RNA, 22 nt, Human
caguggguaguggggauuagca

SEQ ID NO: 700709 - RNA, 22 nt, Human
auacaaugauaauaguacuuua

SEQ ID NO: 700710 - RNA, 22 nt, Human
agcuaggacagguagagauggg

SEQ ID NO: 700711 - RNA, 22 nt, Human
ugugagagcagaagacacauag

SEQ ID NO: 700712 - RNA, 22 nt, Human
ugccagggagcccugcugacca

SEQ ID NO: 700713 - RNA, 22 nt, Human
cuguguccucccgcugcaccca

SEQ ID NO: 700714 - RNA, 22 nt, Human
ucccacugucugucuugcugca

SEQ ID NO: 700715 - RNA, 22 nt, Human
cagucacauuucgacauaacua

SEQ ID NO: 700716 - RNA, 22 nt, Human
ugagagccaggaucugcucuau

SEQ ID NO: 700717 - RNA, 22 nt, Human
uagcuuaaggaguaccagauca

SEQ ID NO: 700718 - RNA, 18 nt, Human
aggagccuuugcacugga

SEQ ID NO: 700719 - RNA, 22 nt, Human
gcaggcacuccuaggaccauca

SEQ ID NO: 700720 - RNA, 22 nt, Human
ggccagcugccaccagcccuau

SEQ ID NO: 700721 - RNA, 22 nt, Human
gagaggcuccgccacugcucag

SEQ ID NO: 700722 - RNA, 22 nt, Human
cagaugaagaucauagaauagu

SEQ ID NO: 700723 - RNA, 22 nt, Human
ugcuggcaguggcagugauggu

SEQ ID NO: 700724 - RNA, 22 nt, Human
gaugagcauuguuucauguguu

SEQ ID NO: 700725 - RNA, 22 nt, Human
uucucacaauucuuguauuugc

SEQ ID NO: 700726 - RNA, 22 nt, Human
uuucacaaagcauagcacuuua

SEQ ID NO: 700727 - RNA, 22 nt, Human
uguaucuguaaucccagaucaa

SEQ ID NO: 700728 - RNA, 22 nt, Human
ggcagccaggaggguguaguuu

SEQ ID NO: 700729 - RNA, 22 nt, Human
gaaacauuuguugaguacuugc

SEQ ID NO: 700730 - RNA, 22 nt, Human
uuucgagggccuuaaguauucc

SEQ ID NO: 700731 - RNA, 22 nt, Human
cugggagacaagagagggcuga

SEQ ID NO: 700732 - RNA, 21 nt, Human
gcucuuggaaggggcucagcu

SEQ ID NO: 700733 - RNA, 22 nt, Human
agcagcaguacauauaagacua

SEQ ID NO: 700734 - RNA, 22 nt, Human
gcacuaaaccaacauguaauaa

SEQ ID NO: 700735 - RNA, 22 nt, Human
cagaagcagaacacuagauuua

SEQ ID NO: 700736 - RNA, 22 nt, Human
ugucugagcaccugugcugaac

SEQ ID NO: 700737 - RNA, 22 nt, Human
ugacccuuagugaacauuagaa

SEQ ID NO: 700738 - RNA, 17 nt, Human
gggcuuuagguggugua

SEQ ID NO: 700739 - RNA, 22 nt, Human
gcauacauugcacccugguagu

SEQ ID NO: 700740 - RNA, 22 nt, Human
aguccaugguucugacucaucu

SEQ ID NO: 700741 - RNA, 22 nt, Human
uuuuguaagaaacugccaagcc

SEQ ID NO: 700742 - RNA, 22 nt, Human
gucugggccaggcgagccgagg

SEQ ID NO: 700743 - RNA, 22 nt, Human
uggucugauggucccaccaccg

SEQ ID NO: 700744 - RNA, 22 nt, Human
acaggguugaagagcauaaagu

SEQ ID NO: 700745 - RNA, 22 nt, Human
gggcacaugcuuagggaggaaa

SEQ ID NO: 700746 - RNA, 22 nt, Human
ccucacccacuacacucaaggg

SEQ ID NO: 700747 - RNA, 22 nt, Human
cuucacauuaguuuggaucaaa

SEQ ID NO: 700748 - RNA, 22 nt, Human
uccucaggaugugggguagaau

SEQ ID NO: 700749 - RNA, 22 nt, Human
uggcuucugggacuugugagca

SEQ ID NO: 700750 - RNA, 22 nt, Human
ucuagguuagaacccagaaaag

SEQ ID NO: 700751 - RNA, 22 nt, Human
agagcaggcauaaagcuuugaa

SEQ ID NO: 700752 - RNA, 22 nt, Human
cagggccucugugggcucucuc

SEQ ID NO: 700753 - RNA, 22 nt, Human
uauugguguacuuauagcagag

SEQ ID NO: 700754 - RNA, 22 nt, Human
uuuauuaauguagcauccaugg

SEQ ID NO: 700755 - RNA, 19 nt, Human
guccaguguuuuccaguca

SEQ ID NO: 700756 - RNA, 22 nt, Human
cugagcugggcaacucuuagau

SEQ ID NO: 700757 - RNA, 22 nt, Human
acaugcuaugagagauuacuuc

SEQ ID NO: 700758 - RNA, 22 nt, Human
gagugccaagagaagaggcugg

SEQ ID NO: 700759 - RNA, 22 nt, Human
gcccuucacgaugguaucuuag

SEQ ID NO: 700760 - RNA, 22 nt, Human
acauuucuaauuuaauguaaca

SEQ ID NO: 700761 - RNA, 22 nt, Human
aaauucuggccuaucacaguga

SEQ ID NO: 700762 - RNA, 22 nt, Human
caagcauacucauuccagacuc

SEQ ID NO: 700763 - RNA, 22 nt, Human
aggcuggcgacaucuggcgggc

SEQ ID NO: 700764 - RNA, 22 nt, Human
uugaaguucugcauuucuaaua

SEQ ID NO: 700765 - RNA, 22 nt, Human
uagcagcuggggcuauucauca

SEQ ID NO: 700766 - RNA, 22 nt, Human
uuuugcagccacaucugaccug

SEQ ID NO: 700767 - RNA, 22 nt, Human
caggaagcacagugaggagacc

SEQ ID NO: 700768 - RNA, 22 nt, Human
ucagacuugccuuuuuauaaaa

SEQ ID NO: 700769 - RNA, 22 nt, Human
cgcaggcaagagaguacaguua

SEQ ID NO: 700770 - RNA, 22 nt, Human
gugaacaguucauuuuaucaug

SEQ ID NO: 700771 - RNA, 22 nt, Human
aagagcuuggacuuucaaguca

SEQ ID NO: 700772 - RNA, 22 nt, Human
gauauuuaacucucacaggucc

SEQ ID NO: 700773 - RNA, 22 nt, Human
caacuccuggcuguuaggcaca

SEQ ID NO: 700774 - RNA, 22 nt, Human
ugugcgcuccggcgagucagcg

SEQ ID NO: 700775 - RNA, 19 nt, Human
aaugccucaaauugggaga

SEQ ID NO: 700776 - RNA, 16 nt, Human
ggcagcagcuccgugc

SEQ ID NO: 700777 - RNA, 22 nt, Human
guggccucaugucuauaaagag

SEQ ID NO: 700778 - RNA, 21 nt, Human
uaauauagguucacaacuagu

SEQ ID NO: 700779 - RNA, 22 nt, Human
cuugcaugcauuugaagaucau

SEQ ID NO: 700780 - RNA, 22 nt, Human
aaggcacuuuuccugagaugau

SEQ ID NO: 700781 - RNA, 22 nt, Human
gcagggcugcugaaacuuguuu

SEQ ID NO: 700782 - RNA, 22 nt, Human
ucuucagcaacuccccaaucug

SEQ ID NO: 700783 - RNA, 22 nt, Human
ggaggaguguggggcacucugc

SEQ ID NO: 700784 - RNA, 22 nt, Human
auuuacagaugaugcuauuuga

SEQ ID NO: 700785 - RNA, 20 nt, Human
uguauucuuugcucuccacu

SEQ ID NO: 700786 - RNA, 22 nt, Human
ggcugagccuggagcaucuggu

SEQ ID NO: 700787 - RNA, 22 nt, Human
uuuaggauaacuccaguuuucc

SEQ ID NO: 700788 - RNA, 22 nt, Human
acaguucugaagacuagagccu

SEQ ID NO: 700789 - RNA, 19 nt, Human
cuuggcaucugugaaguga

SEQ ID NO: 700790 - RNA, 22 nt, Human
aacuguagaagggacacaaaag

SEQ ID NO: 700791 - RNA, 22 nt, Human
ggucccaaggaggaugaggcua

SEQ ID NO: 700792 - RNA, 22 nt, Human
gcugugagccgcugcugagcau

SEQ ID NO: 700793 - RNA, 22 nt, Human
uuucuguaauuaaaagggcagg

SEQ ID NO: 700794 - RNA, 22 nt, Human
gcuggggacuccccaccauagc

SEQ ID NO: 700795 - RNA, 22 nt, Human
cugcuccaagccagcccugcag

SEQ ID NO: 700796 - RNA, 22 nt, Human
cuucaugguaaaucugccuuua

SEQ ID NO: 700797 - RNA, 22 nt, Human
agcugggugcgguggcucaugc

SEQ ID NO: 700798 - RNA, 22 nt, Human
ucaggucuugagccaucaggau

SEQ ID NO: 700799 - RNA, 18 nt, Human
ucagggaagagaauauga

SEQ ID NO: 700800 - RNA, 22 nt, Human
ucagaggaacacuguuucaugc

SEQ ID NO: 700801 - RNA, 22 nt, Human
aggcaaagaggauauuuugggg

SEQ ID NO: 700802 - RNA, 22 nt, Human
guccucuggagguuuuuaggug

SEQ ID NO: 700803 - RNA, 23 nt, Human
gcacugccaugugcucugcaggc

SEQ ID NO: 700804 - RNA, 22 nt, Human
ucucucuucaugcuuuuagaau

SEQ ID NO: 700805 - RNA, 19 nt, Human
uuuagcuuacguuucauug

SEQ ID NO: 700806 - RNA, 22 nt, Human
ucucugugaagcucccguuagg

SEQ ID NO: 700807 - RNA, 22 nt, Human
gggaacacagacuugaugauga

SEQ ID NO: 700808 - RNA, 22 nt, Human
agccagcuggugggucagcugg

SEQ ID NO: 700809 - RNA, 22 nt, Human
auguuauucaauuugaauccaa

SEQ ID NO: 700810 - RNA, 22 nt, Human
accagcucuggacaggcauuuc

SEQ ID NO: 700811 - RNA, 22 nt, Human
auggcagggcagccucucagag

SEQ ID NO: 700812 - RNA, 22 nt, Human
gaggaggggacaguacuugugc

SEQ ID NO: 700813 - RNA, 22 nt, Human
uugauguugcucuuaacaguau

SEQ ID NO: 700814 - RNA, 22 nt, Human
gcuggccauggggagugaggag

SEQ ID NO: 700815 - RNA, 22 nt, Human
agcagcagggcaugucuuacuc

SEQ ID NO: 700816 - RNA, 22 nt, Human
cuuauuuacugauccacagaug

SEQ ID NO: 700817 - RNA, 21 nt, Human
ucuuuccaauauucaugucuc

SEQ ID NO: 700818 - RNA, 22 nt, Human
cuaguugaagaggcugucauca

SEQ ID NO: 700819 - RNA, 22 nt, Human
acaaagucaaauugcagccgcc

SEQ ID NO: 700820 - RNA, 22 nt, Human
guguguucagcaagagguaagg

SEQ ID NO: 700821 - RNA, 22 nt, Human
gccagauuuacagauuugcccu

SEQ ID NO: 700822 - RNA, 22 nt, Human
cacagggcuuugauggcugagu

SEQ ID NO: 700823 - RNA, 22 nt, Human
gaccucucaggaaucucacaug

SEQ ID NO: 700824 - RNA, 22 nt, Human
agugguaacuaaguccugcuua

SEQ ID NO: 700825 - RNA, 22 nt, Human
gaccagucauuacucaugcccu

SEQ ID NO: 700826 - RNA, 22 nt, Human
aggagcccugcgggaggcagag

SEQ ID NO: 700827 - RNA, 22 nt, Human
cccacaggcaggggcagagaca

SEQ ID NO: 700828 - RNA, 22 nt, Human
uuaugucaaaaugguugagauu

SEQ ID NO: 700829 - RNA, 21 nt, Human
cauuugaucccucaucaggau

SEQ ID NO: 700830 - RNA, 22 nt, Human
ugcccugcuguggcucugccca

SEQ ID NO: 700831 - RNA, 22 nt, Human
cagcugggccuccugagcccug

SEQ ID NO: 700832 - RNA, 22 nt, Human
uaucuuuagaggaagagaaucu

SEQ ID NO: 700833 - RNA, 22 nt, Human
gaguaauuuauccagugaagua

SEQ ID NO: 700834 - RNA, 22 nt, Human
agccuggccugggcaggcacau

SEQ ID NO: 700835 - RNA, 22 nt, Human
guggggggacguuggucacuuu

SEQ ID NO: 700836 - RNA, 22 nt, Human
aguccccucucgcuuggcugag

SEQ ID NO: 700837 - RNA, 22 nt, Human
cacacagaaccgcucgccacuu

SEQ ID NO: 700838 - RNA, 22 nt, Human
uguugugacccagaccaagaag

SEQ ID NO: 700839 - RNA, 22 nt, Human
guggccuugggcacugaccuug

SEQ ID NO: 700840 - RNA, 22 nt, Human
ucugcagacaggaagcugaggc

SEQ ID NO: 700841 - RNA, 22 nt, Human
aaagcuguagaaucaucuuaau

SEQ ID NO: 700842 - RNA, 22 nt, Human
agugugagaacggacuaauaaa

SEQ ID NO: 700843 - RNA, 22 nt, Human
gcugaaauucagauuccuaggc

SEQ ID NO: 700844 - RNA, 22 nt, Human
gucucaguuguaucaccugguu

SEQ ID NO: 700845 - RNA, 22 nt, Human
ggcuggucccggguccuccggc

SEQ ID NO: 700846 - RNA, 22 nt, Human
uucugcaucugaauuuaaguac

SEQ ID NO: 700847 - RNA, 22 nt, Human
uucuuuuaaugucuggcuuuca

SEQ ID NO: 700848 - RNA, 17 nt, Human
uuauugucaagguucca

SEQ ID NO: 700849 - RNA, 22 nt, Human
cacuggaagagcaucugagcca

SEQ ID NO: 700850 - RNA, 22 nt, Human
ucucugaaggggagcuguuuaa

SEQ ID NO: 700851 - RNA, 22 nt, Human
cugcccacuauguugucauggg

SEQ ID NO: 700852 - RNA, 22 nt, Human
uuugcauucuagaaaaauuucu

SEQ ID NO: 700853 - RNA, 22 nt, Human
uggcccugucccuggagccugg

SEQ ID NO: 700854 - RNA, 23 nt, Human
cugggcacccaguaccuaggccc

SEQ ID NO: 700855 - RNA, 22 nt, Human
ucagcagagcgagaccaaguca

SEQ ID NO: 700856 - RNA, 19 nt, Human
aggauggagcaggcgguga

SEQ ID NO: 700857 - RNA, 22 nt, Human
cuguuaaucugcuugcaugaug

SEQ ID NO: 700858 - RNA, 22 nt, Human
gugcuguucuggcugccaccac

SEQ ID NO: 700859 - RNA, 22 nt, Human
aggcaggaggaucauggaugca

SEQ ID NO: 700860 - RNA, 22 nt, Human
cauugacaucaggcuuggccaa

SEQ ID NO: 700861 - RNA, 22 nt, Human
aaucaagaaaaugaggauucuu

SEQ ID NO: 700862 - RNA, 18 nt, Human
uuccaguagcuguaucac

SEQ ID NO: 700863 - RNA, 22 nt, Human
gagggcuccacacgggcccagc

SEQ ID NO: 700864 - RNA, 22 nt, Human
uuugucuuuccccuccucauug

SEQ ID NO: 700865 - RNA, 22 nt, Human
aacugcuugaugaagcucccac

SEQ ID NO: 700866 - RNA, 22 nt, Human
caagcucugcgggcuccaagau

SEQ ID NO: 700867 - RNA, 21 nt, Human
agugucauucccaagcuguga

SEQ ID NO: 700868 - RNA, 22 nt, Human
agcuuuauauaaaagaguacau

SEQ ID NO: 700869 - RNA, 22 nt, Human
caagccugucucaccagugcua

SEQ ID NO: 700870 - RNA, 22 nt, Human
uuucuuuugcugagaggggcac

SEQ ID NO: 700871 - RNA, 22 nt, Human
uuaaauuuuagaaacagacucu

SEQ ID NO: 700872 - RNA, 22 nt, Human
ugacucaggaggaaagacucca

SEQ ID NO: 700873 - RNA, 22 nt, Human
ccuggacuaaaaucuuuucuua

SEQ ID NO: 700874 - RNA, 22 nt, Human
gugaggagcucuuugacucacg

SEQ ID NO: 700875 - RNA, 22 nt, Human
uuucaaagacagccauauuugu

SEQ ID NO: 700876 - RNA, 22 nt, Human
ccugagagccagugccugccca

SEQ ID NO: 700877 - RNA, 22 nt, Human
aacaugagcauucuugugcuug

SEQ ID NO: 700878 - RNA, 22 nt, Human
uguggcaggcaagauguacaga

SEQ ID NO: 700879 - RNA, 22 nt, Human
caggcagaugcugacaagaguu

SEQ ID NO: 700880 - RNA, 22 nt, Human
uauuuacuuuuaaauugagaac

SEQ ID NO: 700881 - RNA, 22 nt, Human
cugaggccgucugggucugcag

SEQ ID NO: 700882 - RNA, 22 nt, Human
caggccggccggccccagcucu

SEQ ID NO: 700883 - RNA, 22 nt, Human
uugaaugaauucuacuuccaga

SEQ ID NO: 700884 - RNA, 22 nt, Human
auggcccugaccuugaugaccu

SEQ ID NO: 700885 - RNA, 20 nt, Human
agugucuggugcagggccuc

SEQ ID NO: 700886 - RNA, 22 nt, Human
auggcuucucgcuggcaccugu

SEQ ID NO: 700887 - RNA, 22 nt, Human
uccugggcuuuguuucucuccu

SEQ ID NO: 700888 - RNA, 22 nt, Human
guguaaacaaugaaaacagagc

SEQ ID NO: 700889 - RNA, 21 nt, Human
cagcagaguaaugcauucgua

SEQ ID NO: 700890 - RNA, 22 nt, Human
gaggaggcuaagugggcucugg

SEQ ID NO: 700891 - RNA, 22 nt, Human
agguauagaauugaaaggguuu

SEQ ID NO: 700892 - RNA, 22 nt, Human
gcuggggccugaacagucagcu

SEQ ID NO: 700893 - RNA, 22 nt, Human
uuaacagagaacauagaaguag

SEQ ID NO: 700894 - RNA, 22 nt, Human
gggaucuggaauuuugguaugu

SEQ ID NO: 700895 - RNA, 19 nt, Human
ggaguuuccaauggguaaa

SEQ ID NO: 700896 - RNA, 22 nt, Human
aucagaaaauacccaguguuua

SEQ ID NO: 700897 - RNA, 22 nt, Human
aaauuuaaaaagcagcauugca

SEQ ID NO: 700898 - RNA, 22 nt, Human
aaaguacaauauugagauugau

SEQ ID NO: 700899 - RNA, 20 nt, Human
gugaagggagucaggugugc

SEQ ID NO: 700900 - RNA, 22 nt, Human
cuguuuaucucuaaccuguuua

SEQ ID NO: 700901 - RNA, 22 nt, Human
uuacaugguaaacacucuuuua

SEQ ID NO: 700902 - RNA, 22 nt, Human
cugacagucucauugauuugcu

SEQ ID NO: 700903 - RNA, 22 nt, Human
aggaaagggguagguguggacg

SEQ ID NO: 700904 - RNA, 22 nt, Human
acucuguaauucuauaugcagu

SEQ ID NO: 700905 - RNA, 22 nt, Human
ggucuggccuggcauucuaugg

SEQ ID NO: 700906 - RNA, 22 nt, Human
ggcacagagcaggccacuaauc

SEQ ID NO: 700907 - RNA, 22 nt, Human
ugaggguaaccuggagcugcug

SEQ ID NO: 700908 - RNA, 22 nt, Human
gaagcacacugauuuuauuucu

SEQ ID NO: 700909 - RNA, 22 nt, Human
cagugggaaugaaguggaggcc

SEQ ID NO: 700910 - RNA, 22 nt, Human
uaaagaauagauggguagggag

SEQ ID NO: 700911 - RNA, 22 nt, Human
gcugcugccgcggccgcuggga

SEQ ID NO: 700912 - RNA, 22 nt, Human
ucagccagugccuugaucuugc

SEQ ID NO: 700913 - RNA, 22 nt, Human
caugugugagugagcagucuuc

SEQ ID NO: 700914 - RNA, 22 nt, Human
uuggaaucauucuuaaaggucu

SEQ ID NO: 700915 - RNA, 22 nt, Human
uguaaacuguagaaaauacuuu

SEQ ID NO: 700916 - RNA, 22 nt, Human
aaggcuaugaucuuuuucauga

SEQ ID NO: 700917 - RNA, 22 nt, Human
cugccuggagcauucugaaggu

SEQ ID NO: 700918 - RNA, 22 nt, Human
uccugcuggacucugaguacaa

SEQ ID NO: 700919 - RNA, 22 nt, Human
gcugagcugcuguucauccugc

SEQ ID NO: 700920 - RNA, 22 nt, Human
gauuuuuauauaaagugagaaa

SEQ ID NO: 700921 - RNA, 21 nt, Human
cagugcugccuaauagggagu

SEQ ID NO: 700922 - RNA, 22 nt, Human
cacugccuggaaggagagacau

SEQ ID NO: 700923 - RNA, 22 nt, Human
ccagagcccagggucaugcagg

SEQ ID NO: 700924 - RNA, 22 nt, Human
gccaugccugugucuccaggcc

SEQ ID NO: 700925 - RNA, 22 nt, Human
ggcagccagcaaugagaaguuu

SEQ ID NO: 700926 - RNA, 22 nt, Human
ugcagcugcaggagggugggag

SEQ ID NO: 700927 - RNA, 19 nt, Human
cugucaggggcuggauguu

SEQ ID NO: 700928 - RNA, 20 nt, Human
cuuguacaugauaaagauuu

SEQ ID NO: 700929 - RNA, 22 nt, Human
ucucaucuuguucaucuacccu

SEQ ID NO: 700930 - RNA, 22 nt, Human
auaaacagaguaguugcuacug

SEQ ID NO: 700931 - RNA, 22 nt, Human
ugaaugaugguguguucuugcc

SEQ ID NO: 700932 - RNA, 22 nt, Human
ccugucuguaucgguucagagu

SEQ ID NO: 700933 - RNA, 22 nt, Human
ggaaggggagcuggaaagggua

SEQ ID NO: 700934 - RNA, 22 nt, Human
auguggccagucauguaguaac

SEQ ID NO: 700935 - RNA, 21 nt, Human
gcuccuggugcugcguggcgc

SEQ ID NO: 700936 - RNA, 22 nt, Human
cuuggagagugguuaucccugu

SEQ ID NO: 700937 - RNA, 22 nt, Human
aaauuuuaguaaggaaguugag

SEQ ID NO: 700938 - RNA, 22 nt, Human
aauacuugucagaugaauaaga

SEQ ID NO: 700939 - RNA, 22 nt, Human
gugaaggacugaaugaaaaugu

SEQ ID NO: 700940 - RNA, 22 nt, Human
acugaaauauuuagaagugaag

SEQ ID NO: 700941 - RNA, 22 nt, Human
gcaacugugauuuguuaucuug

SEQ ID NO: 700942 - RNA, 22 nt, Human
accuaaaucuaccucauguuuu

SEQ ID NO: 700943 - RNA, 22 nt, Human
aagcuggccucaaacuccuagc

SEQ ID NO: 700944 - RNA, 22 nt, Human
ccuccagaggguuucccaugaa

SEQ ID NO: 700945 - RNA, 22 nt, Human
gggcucugugcaccccagcacc

SEQ ID NO: 700946 - RNA, 22 nt, Human
auguggcuaguccucugcggca

SEQ ID NO: 700947 - RNA, 21 nt, Human
uaacaaagacuucuggucagg

SEQ ID NO: 700948 - RNA, 22 nt, Human
gugcuuuaccuuauuggucucg

SEQ ID NO: 700949 - RNA, 22 nt, Human
cggcagagcggcgagccccucc

SEQ ID NO: 700950 - RNA, 22 nt, Human
gcacaugacaguaaguagagca

SEQ ID NO: 700951 - RNA, 22 nt, Human
cagagacauuaagugccaugau

SEQ ID NO: 700952 - RNA, 16 nt, Human
ugguggggaggacagc

SEQ ID NO: 700953 - RNA, 18 nt, Human
agcuggugaaauccagua

SEQ ID NO: 700954 - RNA, 22 nt, Human
aagagguaaccauagcaaccac

SEQ ID NO: 700955 - RNA, 22 nt, Human
ccagagccggcucccucagcuu

SEQ ID NO: 700956 - RNA, 19 nt, Human
uccccaagaguucuagcuc

SEQ ID NO: 700957 - RNA, 22 nt, Human
aguggcagacacaaugugggca

SEQ ID NO: 700958 - RNA, 23 nt, Human
ggagcccugagcuguccccaugc

SEQ ID NO: 700959 - RNA, 22 nt, Human
cugucuguggucucaguaggcc

SEQ ID NO: 700960 - RNA, 19 nt, Human
cugaggugaggggcaucau

SEQ ID NO: 700961 - RNA, 22 nt, Human
agugcaaaauucagaagcaauu

SEQ ID NO: 700962 - RNA, 22 nt, Human
guacaggcagcaaacaccauaa

SEQ ID NO: 700963 - RNA, 22 nt, Human
cuccagaggcccuaucccacua

SEQ ID NO: 700964 - RNA, 23 nt, Human
cccagcugcagacaagggagggu

SEQ ID NO: 700965 - RNA, 19 nt, Human
aucugccuuagugcugcug

SEQ ID NO: 700966 - RNA, 22 nt, Human
acagaugaauuuuaauuguguu

SEQ ID NO: 700967 - RNA, 22 nt, Human
gugcuggcccuguccucgagcu

SEQ ID NO: 700968 - RNA, 22 nt, Human
gcaaagcaagauucagauguag

SEQ ID NO: 700969 - RNA, 22 nt, Human
uguuuuauauaagcagagcggu

SEQ ID NO: 700970 - RNA, 22 nt, Human
aaagaaguguugaauuugcaag

SEQ ID NO: 700971 - RNA, 22 nt, Human
uucagugucaauuuuuaaauau

SEQ ID NO: 700972 - RNA, 22 nt, Human
ccuuccuggcuguccgccugau

SEQ ID NO: 700973 - RNA, 22 nt, Human
uucacagguugaagccuaaucc

SEQ ID NO: 700974 - RNA, 22 nt, Human
uugugauaaaacauuagacauu

SEQ ID NO: 700975 - RNA, 22 nt, Human
ucuaugucagcaucuuucuacc

SEQ ID NO: 700976 - RNA, 22 nt, Human
uuacaagauaacggagaaagca

SEQ ID NO: 700977 - RNA, 22 nt, Human
gguggcacacuggggagcucgg

SEQ ID NO: 700978 - RNA, 22 nt, Human
acccagggcucaagcguaggca

SEQ ID NO: 700979 - RNA, 22 nt, Human
cggcagugggcgccaggucucc

SEQ ID NO: 700980 - RNA, 19 nt, Human
uaaaaacugaaggaagcag

SEQ ID NO: 700981 - RNA, 22 nt, Human
auggcugggaggagaguaugau

SEQ ID NO: 700982 - RNA, 22 nt, Human
uuuccagggaggaauguggggu

SEQ ID NO: 700983 - RNA, 19 nt, Human
uuuuaaguccucucuauuc

SEQ ID NO: 700984 - RNA, 22 nt, Human
gggaaggcauaccugagggaga

SEQ ID NO: 700985 - RNA, 22 nt, Human
cugucccuucauuauucacuac

SEQ ID NO: 700986 - RNA, 22 nt, Human
uucccucccccagccuggcagg

SEQ ID NO: 700987 - RNA, 22 nt, Human
acacauaugguugguaggaguu

SEQ ID NO: 700988 - RNA, 22 nt, Human
ucagccugcgucauggugacac

SEQ ID NO: 700989 - RNA, 22 nt, Human
ugcuccagccccuggugcacag

SEQ ID NO: 700990 - RNA, 22 nt, Human
gagcuucucaacaguuaucucu

SEQ ID NO: 700991 - RNA, 22 nt, Human
ccaccaggcacucacagggaag

SEQ ID NO: 700992 - RNA, 22 nt, Human
ccaggcagccugcuccauucug

SEQ ID NO: 700993 - RNA, 22 nt, Human
ggcggggguccaggagccugca

SEQ ID NO: 700994 - RNA, 22 nt, Human
uuucaguuuaugucuugaauua

SEQ ID NO: 700995 - RNA, 22 nt, Human
cccugagucaucauugcggaag

SEQ ID NO: 700996 - RNA, 15 nt, Human
uccaggcauucauuc

SEQ ID NO: 700997 - RNA, 22 nt, Human
ggugucucagcugcuggcaggg

SEQ ID NO: 700998 - RNA, 22 nt, Human
acugaaggaagcgggcaggggu

SEQ ID NO: 700999 - RNA, 22 nt, Human
ccacacuggcaugggauggagg

SEQ ID NO: 701000 - RNA, 22 nt, Human
gcagauggugccaugucuugug

SEQ ID NO: 701001 - RNA, 22 nt, Human
uuauuuggaaauauggcuucug

SEQ ID NO: 701002 - RNA, 22 nt, Human
gcugggagaggcagcuuucgga

SEQ ID NO: 701003 - RNA, 22 nt, Human
uauggcuucugcuuucuugacu

SEQ ID NO: 701004 - RNA, 22 nt, Human
uggcccugacugauguggaggg

SEQ ID NO: 701005 - RNA, 19 nt, Human
cagaggugauauaugccca

SEQ ID NO: 701006 - RNA, 22 nt, Human
aucuggaagccagauacucagu

SEQ ID NO: 701007 - RNA, 22 nt, Human
caguucagcuagaagaaacaaa

SEQ ID NO: 701008 - RNA, 22 nt, Human
cagggagcagcgcuggggccuc

SEQ ID NO: 701009 - RNA, 23 nt, Human
aaaguugauuugcaguuuaagag

SEQ ID NO: 701010 - RNA, 22 nt, Human
acucuucacacaugcugcccuc

SEQ ID NO: 701011 - RNA, 22 nt, Human
uuccagucuaguaccuggaugc

SEQ ID NO: 701012 - RNA, 22 nt, Human
ucucaggcccacuguguugaaa

SEQ ID NO: 701013 - RNA, 22 nt, Human
uucugcuccaccacuuccagca

SEQ ID NO: 701014 - RNA, 22 nt, Human
uccugccugagcguggaggagg

SEQ ID NO: 701015 - RNA, 22 nt, Human
ugccucgugucugagucuguuc

SEQ ID NO: 701016 - RNA, 22 nt, Human
aagagccaagcagucaucaaua

SEQ ID NO: 701017 - RNA, 22 nt, Human
aaguauucauaaggacauaugu

SEQ ID NO: 701018 - RNA, 22 nt, Human
gacagacacaauugauccauga

SEQ ID NO: 701019 - RNA, 22 nt, Human
caggccuugucaagaaaaugcc

SEQ ID NO: 701020 - RNA, 22 nt, Human
uuauuuggauuuagcuuaucaa

SEQ ID NO: 701021 - RNA, 22 nt, Human
ucagaacauccugguuuaaaau

SEQ ID NO: 701022 - RNA, 22 nt, Human
ugggaagggccugcccuuccuc

SEQ ID NO: 701023 - RNA, 22 nt, Human
aggaagacaaucugugugcugu

SEQ ID NO: 701024 - RNA, 22 nt, Human
gaguuuguaaacuauucacuaa

SEQ ID NO: 701025 - RNA, 22 nt, Human
ugcaugcuccacagcccauuca

SEQ ID NO: 701026 - RNA, 22 nt, Human
guugggcugggagcugcccuga

SEQ ID NO: 701027 - RNA, 22 nt, Human
uugaggagcacuagucagguau

SEQ ID NO: 701028 - RNA, 22 nt, Human
ugcugcaggaauucucaaggga

SEQ ID NO: 701029 - RNA, 20 nt, Human
cucacagucaaugcagaggu

SEQ ID NO: 701030 - RNA, 22 nt, Human
uaucaaaggcuaugugauuuuu

SEQ ID NO: 701031 - RNA, 22 nt, Human
acuggcagccacaacuggcagg

SEQ ID NO: 701032 - RNA, 22 nt, Human
ccccaacccugguuccguggcg

SEQ ID NO: 701033 - RNA, 22 nt, Human
cugcagaugguauuguucuggu

SEQ ID NO: 701034 - RNA, 22 nt, Human
uugacacaauguauauuuucaa

SEQ ID NO: 701035 - RNA, 22 nt, Human
auuuuccuucuaagaggaaggu

SEQ ID NO: 701036 - RNA, 22 nt, Human
uccugcagugugucuccugcac

SEQ ID NO: 701037 - RNA, 22 nt, Human
cugagucucccggcaguggagg

SEQ ID NO: 701038 - RNA, 22 nt, Human
ucuggugucaguauucuuugaa

SEQ ID NO: 701039 - RNA, 22 nt, Human
ucagaggaaucuguacuugaaa

SEQ ID NO: 701040 - RNA, 22 nt, Human
ugggcuuugagcucggucaccu

SEQ ID NO: 701041 - RNA, 22 nt, Human
acacaauguaccauaucuccaa

SEQ ID NO: 701042 - RNA, 22 nt, Human
ccaagggcugcugaggugucca

SEQ ID NO: 701043 - RNA, 22 nt, Human
ccuugguccaacccugcacagc

SEQ ID NO: 701044 - RNA, 22 nt, Human
uggcugugguuuaucccaguuc

SEQ ID NO: 701045 - RNA, 22 nt, Human
uuauucagauuggcuacaggau

SEQ ID NO: 701046 - RNA, 22 nt, Human
auguuauuuauugaaacacuuu

SEQ ID NO: 701047 - RNA, 22 nt, Human
cauaauccuugauucaaauaau

SEQ ID NO: 701048 - RNA, 22 nt, Human
acuugauuuugaaccuuucuac

SEQ ID NO: 701049 - RNA, 22 nt, Human
gucagcacuuuuccgaggcaga

SEQ ID NO: 701050 - RNA, 22 nt, Human
ucauauuuaguucacgcucaau

SEQ ID NO: 701051 - RNA, 22 nt, Human
gcucuaaagaacccagaggagu

SEQ ID NO: 701052 - RNA, 22 nt, Human
guccucuguuuccaucugacuu

SEQ ID NO: 701053 - RNA, 22 nt, Human
gcuccagagcagagacuagguu

SEQ ID NO: 701054 - RNA, 22 nt, Human
gaagagcauaugaagagcauau

SEQ ID NO: 701055 - RNA, 22 nt, Human
gcagugggaagguuggcacaug

SEQ ID NO: 701056 - RNA, 22 nt, Human
cugcugacagcccugcuucagg

SEQ ID NO: 701057 - RNA, 22 nt, Human
uucagugccuguccacagcuuc

SEQ ID NO: 701058 - RNA, 22 nt, Human
gagcuggcugugguugagugca

SEQ ID NO: 701059 - RNA, 22 nt, Human
gcccaugguccaggaagacaga

SEQ ID NO: 701060 - RNA, 18 nt, Human
ucugucucuguccuugcu

SEQ ID NO: 701061 - RNA, 22 nt, Human
gggcucuguccauuccuucaua

SEQ ID NO: 701062 - RNA, 22 nt, Human
uggacacaauguugccuuaggg

SEQ ID NO: 701063 - RNA, 22 nt, Human
cugugagaugaccaacugacug

SEQ ID NO: 701064 - RNA, 22 nt, Human
auuagugucugugaauaauucu

SEQ ID NO: 701065 - RNA, 22 nt, Human
acaaugucucauauucguguuc

SEQ ID NO: 701066 - RNA, 22 nt, Human
agggagaaaauuggaugcacaa

SEQ ID NO: 701067 - RNA, 22 nt, Human
uccugcagcauccgucgucugu

SEQ ID NO: 701068 - RNA, 22 nt, Human
cugugagucuucagcaaguguu

SEQ ID NO: 701069 - RNA, 22 nt, Human
ccagcuucaugggcaugcacca

SEQ ID NO: 701070 - RNA, 22 nt, Human
aaggcacagccacuugaucauc

SEQ ID NO: 701071 - RNA, 22 nt, Human
aaaauccucuaauucuagaaua

SEQ ID NO: 701072 - RNA, 23 nt, Human
gucccucaccccuaggcaaugcc

SEQ ID NO: 701073 - RNA, 22 nt, Human
gggcuucuugccauggggacgg

SEQ ID NO: 701074 - RNA, 22 nt, Human
aguugacaauaaauuuaauugg

SEQ ID NO: 701075 - RNA, 22 nt, Human
aaggaaagauucucucucuaga

SEQ ID NO: 701076 - RNA, 22 nt, Human
gguguggcaguggaccugugaa

SEQ ID NO: 701077 - RNA, 22 nt, Human
acaagcgggccacagugcuggu

SEQ ID NO: 701078 - RNA, 22 nt, Human
gccuucccuggcuaggcaagca

SEQ ID NO: 701079 - RNA, 22 nt, Human
uuugucaccaguggcuuuggua

SEQ ID NO: 701080 - RNA, 18 nt, Human
ggcuucucacugaccuca

SEQ ID NO: 701081 - RNA, 22 nt, Human
aacuagaacgagaaagcugaac

SEQ ID NO: 701082 - RNA, 23 nt, Human
gcccagggacugggaaucagugg

SEQ ID NO: 701083 - RNA, 22 nt, Human
gcauuccuacaggcugcuauga

SEQ ID NO: 701084 - RNA, 21 nt, Human
acaguucugccggcaucuuuc

SEQ ID NO: 701085 - RNA, 22 nt, Human
uugcagggaccugcagaaagcu

SEQ ID NO: 701086 - RNA, 22 nt, Human
guguccagagaaacucacagcu

SEQ ID NO: 701087 - RNA, 22 nt, Human
ggggugcuagaguggggccacu

SEQ ID NO: 701088 - RNA, 22 nt, Human
ucagccaguuaaggcuuagaca

SEQ ID NO: 701089 - RNA, 22 nt, Human
gccacaggucggcuagaggguc

SEQ ID NO: 701090 - RNA, 22 nt, Human
caguacuuaguucucaugguuu

SEQ ID NO: 701091 - RNA, 22 nt, Human
cagauuucagcucauauauuau

SEQ ID NO: 701092 - RNA, 22 nt, Human
augagcaauuaggaagaaaaca

SEQ ID NO: 701093 - RNA, 22 nt, Human
aggcccuucuugguggcucagg

SEQ ID NO: 701094 - RNA, 22 nt, Human
uauuuggagccuauccauagau

SEQ ID NO: 701095 - RNA, 22 nt, Human
uggaaucccgcaauggaggauu

SEQ ID NO: 701096 - RNA, 22 nt, Human
ccaggcucuguuccccgaggag

SEQ ID NO: 701097 - RNA, 22 nt, Human
ggcggcuacuccuccuggugag

SEQ ID NO: 701098 - RNA, 22 nt, Human
uucucaaagggugguuugcaaa

SEQ ID NO: 701099 - RNA, 22 nt, Human
aaauugugagcuauagaucuag

SEQ ID NO: 701100 - RNA, 22 nt, Human
aaggcccucaugcgucagagcc

SEQ ID NO: 701101 - RNA, 22 nt, Human
cagcccugagaaggaggaucuc

SEQ ID NO: 701102 - RNA, 22 nt, Human
guacuuccguggacuaauuguu

SEQ ID NO: 701103 - RNA, 22 nt, Human
uuuagagcccaugugaguguga

SEQ ID NO: 701104 - RNA, 22 nt, Human
gaguguuccagaaacuggcccu

SEQ ID NO: 701105 - RNA, 22 nt, Human
uucagugcacaguacugagacu

SEQ ID NO: 701106 - RNA, 22 nt, Human
auacuucuuugauguucacagg

SEQ ID NO: 701107 - RNA, 22 nt, Human
gcccucuaccuuggcuauagaa

SEQ ID NO: 701108 - RNA, 22 nt, Human
aggcauccaugguggucgcuga

SEQ ID NO: 701109 - RNA, 22 nt, Human
caggcauggagaggcagagacu

SEQ ID NO: 701110 - RNA, 20 nt, Human
gcugugccuccagcuggugg

SEQ ID NO: 701111 - RNA, 22 nt, Human
agaugaagacucaggagcaggu

SEQ ID NO: 701112 - RNA, 22 nt, Human
agcuaguucacugaagccuaug

SEQ ID NO: 701113 - RNA, 22 nt, Human
auacugaugaugugaagaaaca

SEQ ID NO: 701114 - RNA, 18 nt, Human
ucagcuuuugaaaaccaa

SEQ ID NO: 701115 - RNA, 22 nt, Human
gacuggucuuuugugauggaug

SEQ ID NO: 701116 - RNA, 22 nt, Human
ugcaggcugcagucucaggugg

SEQ ID NO: 701117 - RNA, 22 nt, Human
ucucagagaugucaagagucua

SEQ ID NO: 701118 - RNA, 17 nt, Human
cacaugucuacauggau

SEQ ID NO: 701119 - RNA, 22 nt, Human
acaaugcucauauuuaugccaa

SEQ ID NO: 701120 - RNA, 22 nt, Human
aucaggauuacacggggaugcu

SEQ ID NO: 701121 - RNA, 22 nt, Human
ggugggcacccgagacuggauc

SEQ ID NO: 701122 - RNA, 22 nt, Human
ccugagagugagugccaccuua

SEQ ID NO: 701123 - RNA, 20 nt, Human
uucugcuugcaaauaucaag

SEQ ID NO: 701124 - RNA, 22 nt, Human
ucucuuagucuuauauguaaaa

SEQ ID NO: 701125 - RNA, 22 nt, Human
uacagcuugaugagagcgcgag

SEQ ID NO: 701126 - RNA, 22 nt, Human
agggcucugagugggaaagagg

SEQ ID NO: 701127 - RNA, 22 nt, Human
accugaauugucauaucuuauu

SEQ ID NO: 701128 - RNA, 22 nt, Human
ugaaggagcucaaugaugaugc

SEQ ID NO: 701129 - RNA, 22 nt, Human
aguggcugcuggaguggagaug

SEQ ID NO: 701130 - RNA, 22 nt, Human
uuguauuaauugaaaugaaugc

SEQ ID NO: 701131 - RNA, 22 nt, Human
caugugguucaaguacuccaca

SEQ ID NO: 701132 - RNA, 22 nt, Human
ucagaacauuuaaaaagugguu

SEQ ID NO: 701133 - RNA, 22 nt, Human
gugccuguaaguuguaugggcu

SEQ ID NO: 701134 - RNA, 22 nt, Human
ugcauuugaguugggagcaggc

SEQ ID NO: 701135 - RNA, 22 nt, Human
aggacacagguaagccagugga

SEQ ID NO: 701136 - RNA, 22 nt, Human
cacuguugagcaauguacagug

SEQ ID NO: 701137 - RNA, 23 nt, Human
aggagccaggugcagcccuugug

SEQ ID NO: 701138 - RNA, 22 nt, Human
ucaggaguccugccugcagccu

SEQ ID NO: 701139 - RNA, 22 nt, Human
ucugaaaugcaaauuugacuga

SEQ ID NO: 701140 - RNA, 22 nt, Human
gaguggguaccggagcaggugc

SEQ ID NO: 701141 - RNA, 22 nt, Human
cagaggcugccagccaugugca

SEQ ID NO: 701142 - RNA, 22 nt, Human
gugcagaccuuccagaaagaac

SEQ ID NO: 701143 - RNA, 22 nt, Human
aggaauguaauaguguggcuca

SEQ ID NO: 701144 - RNA, 22 nt, Human
guguugaugacauuuuagaaac

SEQ ID NO: 701145 - RNA, 22 nt, Human
auuugcugauggcauuugagcu

SEQ ID NO: 701146 - RNA, 23 nt, Human
ggggaaguggcagugagugaggc

SEQ ID NO: 701147 - RNA, 20 nt, Human
ugcagguguuggagaaggua

SEQ ID NO: 701148 - RNA, 22 nt, Human
gucccaggggagcucucugauu

SEQ ID NO: 701149 - RNA, 22 nt, Human
ggcacacauggugguuggugaa

SEQ ID NO: 701150 - RNA, 22 nt, Human
ucacuguugaccuggaaguggg

SEQ ID NO: 701151 - RNA, 22 nt, Human
ucaggcucuacacuugacacac

SEQ ID NO: 701152 - RNA, 22 nt, Human
ggcagcaugugugguccgcugg

SEQ ID NO: 701153 - RNA, 23 nt, Human
uggacgccgacuuuggaggcgcu

SEQ ID NO: 701154 - RNA, 22 nt, Human
gcaugcagaaaaugaacaacga

SEQ ID NO: 701155 - RNA, 22 nt, Human
uggcacuauggaugagacugau

SEQ ID NO: 701156 - RNA, 22 nt, Human
gaggagugccagccguggaguc

SEQ ID NO: 701157 - RNA, 22 nt, Human
uaagagcucccuucuccuugca

SEQ ID NO: 701158 - RNA, 22 nt, Human
aagcaguuuuucaacuguuuag

SEQ ID NO: 701159 - RNA, 22 nt, Human
auguccuuugcuucucuggucc

SEQ ID NO: 701160 - RNA, 22 nt, Human
auucacagggacaaugggagag

SEQ ID NO: 701161 - RNA, 22 nt, Human
gcugaaggcccggaggacaggg

SEQ ID NO: 701162 - RNA, 22 nt, Human
ucaaaggcccauugucccguug

SEQ ID NO: 701163 - RNA, 22 nt, Human
ucuuuggauaucgcuagaccgu

SEQ ID NO: 701164 - RNA, 20 nt, Human
caggacagcgcaaucggagg

SEQ ID NO: 701165 - RNA, 22 nt, Human
cugaggccuaagacaugaauga

SEQ ID NO: 701166 - RNA, 22 nt, Human
cccaggcuuuuaaguuagacag

SEQ ID NO: 701167 - RNA, 22 nt, Human
gaugcauguauggagugagggu

SEQ ID NO: 701168 - RNA, 23 nt, Human
agugugacuuuuuugacugucac

SEQ ID NO: 701169 - RNA, 21 nt, Human
ugggaccuagcuuugcacagg

SEQ ID NO: 701170 - RNA, 22 nt, Human
ggugcggagacuccaugaggcc

SEQ ID NO: 701171 - RNA, 19 nt, Human
augcaucugcauugacagg

SEQ ID NO: 701172 - RNA, 22 nt, Human
cacuuguugguggugaaaucac

SEQ ID NO: 701173 - RNA, 22 nt, Human
uggaaacacccacgcaugcaua

SEQ ID NO: 701174 - RNA, 18 nt, Human
ggguccccagcugcaggg

SEQ ID NO: 701175 - RNA, 18 nt, Human
ucugagggugcgggagcu

SEQ ID NO: 701176 - RNA, 22 nt, Human
uuuguucaccuagcaaacuuuu

SEQ ID NO: 701177 - RNA, 22 nt, Human
cauugcuuugugcauauuuaaa

SEQ ID NO: 701178 - RNA, 22 nt, Human
ugcucccaaaccugacaggcuc

SEQ ID NO: 701179 - RNA, 22 nt, Human
gcugucugcugggucgcucagg

SEQ ID NO: 701180 - RNA, 22 nt, Human
agggcucagaaagcagguuuuc

SEQ ID NO: 701181 - RNA, 22 nt, Human
aggcucagugauguaaaauaua

SEQ ID NO: 701182 - RNA, 22 nt, Human
cuccagagagaaaggaggccgc

SEQ ID NO: 701183 - RNA, 22 nt, Human
caaggcuaagcuuuggcuuucu

SEQ ID NO: 701184 - RNA, 22 nt, Human
gcuguauuuauaugaaggcaug

SEQ ID NO: 701185 - RNA, 22 nt, Human
ccucccugccggcuggacuagu

SEQ ID NO: 701186 - RNA, 22 nt, Human
guccagaguagucgaguauucu

SEQ ID NO: 701187 - RNA, 22 nt, Human
caggcacaaugagcgccaucuu

SEQ ID NO: 701188 - RNA, 22 nt, Human
cugcuuuaaaacugauacauga

SEQ ID NO: 701189 - RNA, 22 nt, Human
ggucccagucccuuuccaccgu

SEQ ID NO: 701190 - RNA, 22 nt, Human
gucccagaggacagggucacau

SEQ ID NO: 701191 - RNA, 22 nt, Human
uuguaacaguagcugucagcuc

SEQ ID NO: 701192 - RNA, 22 nt, Human
auggaguugagcucuguugucc

SEQ ID NO: 701193 - RNA, 22 nt, Human
cuucauguacaguuauuggaga

SEQ ID NO: 701194 - RNA, 22 nt, Human
cuggcuccucaggacugcggga

SEQ ID NO: 701195 - RNA, 22 nt, Human
ccuggaaaaugccacuuucaca

SEQ ID NO: 701196 - RNA, 22 nt, Human
gucaucaucaggcagaugcugc

SEQ ID NO: 701197 - RNA, 22 nt, Human
cugaggcucugagaaagccaaa

SEQ ID NO: 701198 - RNA, 22 nt, Human
uuguauuaaaauguguuucugu

SEQ ID NO: 701199 - RNA, 22 nt, Human
uuuacuuuugguaaggucauuu

SEQ ID NO: 701200 - RNA, 22 nt, Human
cugagcugguucucuugugaaa

SEQ ID NO: 701201 - RNA, 16 nt, Human
aggagcuggguaggag

SEQ ID NO: 701202 - RNA, 22 nt, Human
uggcucaggccuacgacgccuu

SEQ ID NO: 701203 - RNA, 22 nt, Human
guuguuuuugaacggugguggc

SEQ ID NO: 701204 - RNA, 22 nt, Human
cugggagggguagccaauccua

SEQ ID NO: 701205 - RNA, 22 nt, Human
uccuuucugucuuuacucugga

SEQ ID NO: 701206 - RNA, 22 nt, Human
ugccaggcugcccuccagucug

SEQ ID NO: 701207 - RNA, 22 nt, Human
cuuccugcaacaccuguguugc

SEQ ID NO: 701208 - RNA, 18 nt, Human
cuggucucccuucgcuuu

SEQ ID NO: 701209 - RNA, 22 nt, Human
cucacaggguucuaucgaagag

SEQ ID NO: 701210 - RNA, 22 nt, Human
cuuucuuucgaagacgugauua

SEQ ID NO: 701211 - RNA, 22 nt, Human
ugucuuacagcaaucuguucug

SEQ ID NO: 701212 - RNA, 22 nt, Human
uuaccacagugccugucuaaug

SEQ ID NO: 701213 - RNA, 22 nt, Human
aggcucaguauagcuggcaagu

SEQ ID NO: 701214 - RNA, 22 nt, Human
uguauuucugcuuucucuagua

SEQ ID NO: 701215 - RNA, 22 nt, Human
gggagcuggagcuggaagacuc

SEQ ID NO: 701216 - RNA, 22 nt, Human
augaaacaacagacuuggucaa

SEQ ID NO: 701217 - RNA, 22 nt, Human
guuuauuggguauuguggagcc

SEQ ID NO: 701218 - RNA, 22 nt, Human
cuucuaauucuuauguaagcuu

SEQ ID NO: 701219 - RNA, 22 nt, Human
uaucugucgggagucuuccgga

SEQ ID NO: 701220 - RNA, 22 nt, Human
ucucaggcuuccuggugcugug

SEQ ID NO: 701221 - RNA, 22 nt, Human
uuucuacacuucgugguguuuu

SEQ ID NO: 701222 - RNA, 20 nt, Human
augucaggaagggagucagg

SEQ ID NO: 701223 - RNA, 22 nt, Human
cccacucccugcacgccugccg

SEQ ID NO: 701224 - RNA, 22 nt, Human
cucccagggucuaggcugcugg

SEQ ID NO: 701225 - RNA, 22 nt, Human
agcccugugugcuuguguuccu

SEQ ID NO: 701226 - RNA, 22 nt, Human
gcaugcaggaagggcuugggga

SEQ ID NO: 701227 - RNA, 22 nt, Human
uaucuguuuuuacagugucuuu

SEQ ID NO: 701228 - RNA, 22 nt, Human
uacaagcuuuuguguauaaaug

SEQ ID NO: 701229 - RNA, 22 nt, Human
agacugugagaagauggcugcg

SEQ ID NO: 701230 - RNA, 22 nt, Human
ugugcuugucguggagccaggc

SEQ ID NO: 701231 - RNA, 22 nt, Human
ucugcuguuuacugugugauau

SEQ ID NO: 701232 - RNA, 22 nt, Human
ucugcuugugucuguccagccu

SEQ ID NO: 701233 - RNA, 22 nt, Human
gcugcuccgcagagugugugug

SEQ ID NO: 701234 - RNA, 22 nt, Human
gcagcugcgcugguguggggca

SEQ ID NO: 701235 - RNA, 22 nt, Human
caggccacacggcggcucccug

SEQ ID NO: 701236 - RNA, 22 nt, Human
agauaucuuacacuuugaaguu

SEQ ID NO: 701237 - RNA, 22 nt, Human
gucuuuuuuacaccuuacauca

SEQ ID NO: 701238 - RNA, 22 nt, Human
uuguuuguaaggcucuuagaau

SEQ ID NO: 701239 - RNA, 22 nt, Human
ucuguccauucagaauggcccu

SEQ ID NO: 701240 - RNA, 22 nt, Human
ucuauuaaugauucaauagugu

SEQ ID NO: 701241 - RNA, 22 nt, Human
ugucuucuaccuugacagcauu

SEQ ID NO: 701242 - RNA, 22 nt, Human
caguuuuucaaaauuacaugau

SEQ ID NO: 701243 - RNA, 22 nt, Human
auuuccuauacaguuguccaua

SEQ ID NO: 701244 - RNA, 22 nt, Human
cagcaguguacaaggugucaga

SEQ ID NO: 701245 - RNA, 20 nt, Human
ucucuggcaagaagcugcag

SEQ ID NO: 701246 - RNA, 22 nt, Human
uccuuucuucuucugcccaugg

SEQ ID NO: 701247 - RNA, 22 nt, Human
uacauguuauuucacuauuggu

SEQ ID NO: 701248 - RNA, 22 nt, Human
ucauugaggaaagguaguggcu

SEQ ID NO: 701249 - RNA, 22 nt, Human
cccagccuuugcuuccugguuc

SEQ ID NO: 701250 - RNA, 22 nt, Human
cuggcuccauccuugagcucug

SEQ ID NO: 701251 - RNA, 22 nt, Human
gggagcugaaggagccggcggg

SEQ ID NO: 701252 - RNA, 22 nt, Human
ccagcugcgggcaucgagaguu

SEQ ID NO: 701253 - RNA, 22 nt, Human
cuggagcucuccagagccccgu

SEQ ID NO: 701254 - RNA, 18 nt, Human
gaggcacauaguuggggc

SEQ ID NO: 701255 - RNA, 17 nt, Human
ucuccuggcucuaucag

SEQ ID NO: 701256 - RNA, 19 nt, Human
ugcagcuguaugagcuuaa

SEQ ID NO: 701257 - RNA, 22 nt, Human
ucugcacccugugguccucuag

SEQ ID NO: 701258 - RNA, 22 nt, Human
ucuccaggcuuaaucucagcuu

SEQ ID NO: 701259 - RNA, 22 nt, Human
agcucugcuucuugggaagaug

SEQ ID NO: 701260 - RNA, 22 nt, Human
ugcuccaggcugcugaagaucu

SEQ ID NO: 701261 - RNA, 22 nt, Human
uauaugcagauuuucaucaucg

SEQ ID NO: 701262 - RNA, 19 nt, Human
aacuacagcgcacuguccu

SEQ ID NO: 701263 - RNA, 22 nt, Human
cauaacuugguguuggaaacug

SEQ ID NO: 701264 - RNA, 22 nt, Human
gagcugcuggccuccugcggga

SEQ ID NO: 701265 - RNA, 22 nt, Human
uuccaauaaaauguuauuugca

SEQ ID NO: 701266 - RNA, 22 nt, Human
ggccacuguuuccugggcaguu

SEQ ID NO: 701267 - RNA, 23 nt, Human
cagcugguugugggaguggcugc

SEQ ID NO: 701268 - RNA, 22 nt, Human
gagggcucaacuacuacuaggc

SEQ ID NO: 701269 - RNA, 22 nt, Human
caggagcucaagaccacccugg

SEQ ID NO: 701270 - RNA, 22 nt, Human
uacagcagcccaccuucuucug

SEQ ID NO: 701271 - RNA, 22 nt, Human
cuccagcucgcgagcucugcuc

SEQ ID NO: 701272 - RNA, 22 nt, Human
cagcagcucaggcuccuuccca

SEQ ID NO: 701273 - RNA, 22 nt, Human
uuuauucucuaguuggucagau

SEQ ID NO: 701274 - RNA, 22 nt, Human
uuccuuucucuggacugcagcc

SEQ ID NO: 701275 - RNA, 22 nt, Human
cagcugcuguucaguuuuguuu

SEQ ID NO: 701276 - RNA, 22 nt, Human
aucuguucuucaaaauauuaca

SEQ ID NO: 701277 - RNA, 22 nt, Human
uuuucuuggaguggcuguccuu

SEQ ID NO: 701278 - RNA, 22 nt, Human
uagcuguucucuguaaauugga

SEQ ID NO: 701279 - RNA, 22 nt, Human
ucccacugcuuugcucugcuca

SEQ ID NO: 701280 - RNA, 22 nt, Human
uuucucuuucaaucugcaguac

SEQ ID NO: 701281 - RNA, 22 nt, Human
gcugcugcuugaaggcucggag

SEQ ID NO: 701282 - RNA, 22 nt, Human
agagcuccaggguuuuguagug

SEQ ID NO: 701283 - RNA, 22 nt, Human
guucucugccggcaccuacccg

SEQ ID NO: 701284 - RNA, 22 nt, Human
uccagagaacgaugaaagcugg

SEQ ID NO: 701285 - RNA, 22 nt, Human
uugcuauuuugagagucauagu

SEQ ID NO: 701286 - RNA, 22 nt, Human
cugggaggcccacguugggaag

SEQ ID NO: 701287 - RNA, 22 nt, Human
aaggcucccucuucucgagugu

SEQ ID NO: 701288 - RNA, 22 nt, Human
cccuggaacccauggccagugu

SEQ ID NO: 701289 - RNA, 22 nt, Human
ggcucagaaaccucuggugucu

SEQ ID NO: 701290 - RNA, 22 nt, Human
cuucucuuggguguggugucuu

SEQ ID NO: 701291 - RNA, 22 nt, Human
uuccagagaguuauuccccugg

SEQ ID NO: 701292 - RNA, 22 nt, Human
aucugucccuccucacagccuc

SEQ ID NO: 701293 - RNA, 22 nt, Human
accucccuaacccuuuuggcuc

SEQ ID NO: 701294 - RNA, 22 nt, Human
uuauugagcacauaguaugugg

SEQ ID NO: 701295 - RNA, 22 nt, Human
auggcucugcugggcaaagcaa

SEQ ID NO: 701296 - RNA, 22 nt, Human
accauccaaacugcuuucugug

SEQ ID NO: 701297 - RNA, 22 nt, Human
ucccacugucuucucgugcucg

SEQ ID NO: 701298 - RNA, 22 nt, Human
aaauucuguccugaaugccauu

SEQ ID NO: 701299 - RNA, 22 nt, Human
uacuguauacuacugcuguucu

SEQ ID NO: 701300 - RNA, 22 nt, Human
cugccuuggcccuaguucaugg

SEQ ID NO: 701301 - RNA, 22 nt, Human
uggagcugguucuggggaagcu

SEQ ID NO: 701302 - RNA, 22 nt, Human
agcacauucccaccuguacuuc

SEQ ID NO: 701303 - RNA, 20 nt, Human
cagagcagugcccaggcggc

SEQ ID NO: 701304 - RNA, 22 nt, Human
ucauugagcgguucuuaaccca

SEQ ID NO: 701305 - RNA, 22 nt, Human
cucuccaggcgagguccuacug

SEQ ID NO: 701306 - RNA, 22 nt, Human
uuuccacacucacugcacucau

SEQ ID NO: 701307 - RNA, 22 nt, Human
gcagcagugugggcugaaccua

SEQ ID NO: 701308 - RNA, 22 nt, Human
uuucuucucacccaggacagag

SEQ ID NO: 701309 - RNA, 22 nt, Human
uucuccacccacucuuuuguug

SEQ ID NO: 701310 - RNA, 22 nt, Human
cccagccucuggguucugccgg

SEQ ID NO: 701311 - RNA, 22 nt, Human
agcuuuauuugucauucacggc

SEQ ID NO: 701312 - RNA, 22 nt, Human
ucauuguuucugcuuuucauga

SEQ ID NO: 701313 - RNA, 22 nt, Human
aggcuuaacuacaauuuuugcc

SEQ ID NO: 701314 - RNA, 22 nt, Human
cagggcuccccagagagccucu

SEQ ID NO: 701315 - RNA, 22 nt, Human
cccuggcucaggcagcuuuguu

SEQ ID NO: 701316 - RNA, 22 nt, Human
ucugccaucaagaugcucuggc

SEQ ID NO: 701317 - RNA, 22 nt, Human
cucucuuuuucgugugccgaag

SEQ ID NO: 701318 - RNA, 22 nt, Human
ucccagaacccugccagguccu

SEQ ID NO: 701319 - RNA, 22 nt, Human
cccucucccugcagaauguggc

SEQ ID NO: 701320 - RNA, 20 nt, Human
ugugcccaauguccagguuc

SEQ ID NO: 701321 - RNA, 22 nt, Human
ccaggcccugcuccucacacca

SEQ ID NO: 701322 - RNA, 22 nt, Human
uuuuguguugccauguuaagca

SEQ ID NO: 701323 - RNA, 22 nt, Human
uuccuucuucauuguguuacag

SEQ ID NO: 701324 - RNA, 22 nt, Human
cugggaggcagucucucuagaa

SEQ ID NO: 701325 - RNA, 22 nt, Human
aacuuucuuugcaucuaaguuu

SEQ ID NO: 701326 - RNA, 22 nt, Human
gaugucuggcuaccacucgcac

SEQ ID NO: 701327 - RNA, 22 nt, Human
cuaguucugccauucaguguca

SEQ ID NO: 701328 - RNA, 18 nt, Human
agcucacagaucuguuuu

SEQ ID NO: 701329 - RNA, 22 nt, Human
cuacuucuguggcucuaagaga

SEQ ID NO: 701330 - RNA, 22 nt, Human
ucuaugucucuggaaggagugu

SEQ ID NO: 701331 - RNA, 22 nt, Human
auguaacauaugugaucgcauu

SEQ ID NO: 701332 - RNA, 22 nt, Human
acucacagggccucaguuuucc

SEQ ID NO: 701333 - RNA, 22 nt, Human
cagugcagccaaggacaggcac

SEQ ID NO: 701334 - RNA, 22 nt, Human
cauuuugugcuagacacuaugg

SEQ ID NO: 701335 - RNA, 22 nt, Human
gacuacaggugugugccaccau

SEQ ID NO: 701336 - RNA, 22 nt, Human
accuuuaugaaacagcugucgu

SEQ ID NO: 701337 - RNA, 22 nt, Human
aucuaaagugucauaaguagcu

SEQ ID NO: 701338 - RNA, 22 nt, Human
caauaauugcuuuccagaguua

SEQ ID NO: 701339 - RNA, 22 nt, Human
ugcugcucuucaccauggccuc

SEQ ID NO: 701340 - RNA, 21 nt, Human
ucugugcuuuuuuggcuccua

SEQ ID NO: 701341 - RNA, 22 nt, Human
aaugugcugguaacugcuuugc

SEQ ID NO: 701342 - RNA, 22 nt, Human
uugaagcauuugcuauagcauu

SEQ ID NO: 701343 - RNA, 22 nt, Human
ccaggagagcucucguucagug

SEQ ID NO: 701344 - RNA, 22 nt, Human
gucccaggggagcucucugauu

SEQ ID NO: 701345 - RNA, 22 nt, Human
uucuuucugggguccuucggcu

SEQ ID NO: 701346 - RNA, 22 nt, Human
ucaugcagaguagaaagggcaa

SEQ ID NO: 701347 - RNA, 21 nt, Human
gucuuuuuaauugcgauuucc

SEQ ID NO: 701348 - RNA, 22 nt, Human
ggcuagcuuagagucaugcuag

SEQ ID NO: 701349 - RNA, 22 nt, Human
ugcuuuauucgacaucugguag

SEQ ID NO: 701350 - RNA, 22 nt, Human
caggcacaagaucggcuagaua

SEQ ID NO: 701351 - RNA, 22 nt, Human
cagcuccccucuguggggcagu

SEQ ID NO: 701352 - RNA, 17 nt, Human
agcagcuggguugaucu

SEQ ID NO: 701353 - RNA, 22 nt, Human
aacagauuguaaccugauagcc

SEQ ID NO: 701354 - RNA, 22 nt, Human
cucucuguuaugcuuucaugaa

SEQ ID NO: 701355 - RNA, 22 nt, Human
cucccagccuucgccagucuga

SEQ ID NO: 701356 - RNA, 22 nt, Human
acuagugcacauuguuucucaa

SEQ ID NO: 701357 - RNA, 22 nt, Human
ucucuguaagcugccuucucgu

SEQ ID NO: 701358 - RNA, 22 nt, Human
caggcuacauuugcucugagaa

SEQ ID NO: 701359 - RNA, 20 nt, Human
ucugccacuuuuucugucac

SEQ ID NO: 701360 - RNA, 22 nt, Human
agcugucuaccugcagaguccu

SEQ ID NO: 701361 - RNA, 22 nt, Human
gcagcugccgugagcucacgcc

SEQ ID NO: 701362 - RNA, 22 nt, Human
uucucucaguuaaacuuuguga

SEQ ID NO: 701363 - RNA, 20 nt, Human
auuugcuuaccuuguuucua

SEQ ID NO: 701364 - RNA, 22 nt, Human
uacuacauacagaauuuagaga

SEQ ID NO: 701365 - RNA, 22 nt, Human
ucuggcccaucuucugccacca

SEQ ID NO: 701366 - RNA, 21 nt, Human
uuggaacaagcagcaguuugc

SEQ ID NO: 701367 - RNA, 18 nt, Human
cuuuagcugucaucuuug

SEQ ID NO: 701368 - RNA, 21 nt, Human
auccauccaucuuggccuaac

SEQ ID NO: 701369 - RNA, 22 nt, Human
cggagcagagccacucgggccg

SEQ ID NO: 701370 - RNA, 22 nt, Human
guaguucuuucucaauguucaa

SEQ ID NO: 701371 - RNA, 22 nt, Human
gcuguagguaaggauggcaaag

SEQ ID NO: 701372 - RNA, 22 nt, Human
cucucuccuuagcugcagacca

SEQ ID NO: 701373 - RNA, 18 nt, Human
uagcucuuguugguccau

SEQ ID NO: 701374 - RNA, 22 nt, Human
cucccugggccucaguuucucu

SEQ ID NO: 701375 - RNA, 18 nt, Human
agguguguuucuaggagc

SEQ ID NO: 701376 - RNA, 22 nt, Human
agccagggacgcugcaggcuac

SEQ ID NO: 701377 - RNA, 19 nt, Human
acugcagggaggaggugug

SEQ ID NO: 701378 - RNA, 23 nt, Human
ggucccaguggagaggccucacc

SEQ ID NO: 701379 - RNA, 22 nt, Human
cuccacagccccuccaguggca

SEQ ID NO: 701380 - RNA, 22 nt, Human
ugcugaggagguggcugugcuu

SEQ ID NO: 701381 - RNA, 22 nt, Human
cuuccucuguggccagagugua

SEQ ID NO: 701382 - RNA, 22 nt, Human
cuggagcucuguguguuccuga

SEQ ID NO: 701383 - RNA, 22 nt, Human
aaggcacauauuuuagagucac

SEQ ID NO: 701384 - RNA, 20 nt, Human
caauaauuuacuucccuauu

SEQ ID NO: 701385 - RNA, 22 nt, Human
auguacauuauucgagugaugg

SEQ ID NO: 701386 - RNA, 22 nt, Human
auuguuacuggguuaauuugga

SEQ ID NO: 701387 - RNA, 22 nt, Human
aggucacguccugugaugucau

SEQ ID NO: 701388 - RNA, 22 nt, Human
cugguuuuccaauguuuugacu

SEQ ID NO: 701389 - RNA, 22 nt, Human
ccaggcagccaagugugugugu

SEQ ID NO: 701390 - RNA, 22 nt, Human
uuccuuuucuucuaccacaugu

SEQ ID NO: 701391 - RNA, 22 nt, Human
ggcuuccuccuuccugcuguca

SEQ ID NO: 701392 - RNA, 22 nt, Human
uccaggcuccccugcgugcucc

SEQ ID NO: 701393 - RNA, 22 nt, Human
cagcugcucugguggucucucc

SEQ ID NO: 701394 - RNA, 22 nt, Human
cuggcuaaagagcaagaagaug

SEQ ID NO: 701395 - RNA, 22 nt, Human
guauuucuuuacauaugcucau

SEQ ID NO: 701396 - RNA, 22 nt, Human
gaucuguccuggcaguuaacac

SEQ ID NO: 701397 - RNA, 22 nt, Human
guuaacaacacugugagugcug

SEQ ID NO: 701398 - RNA, 22 nt, Human
uuuuuugucuugaagaaauggu

SEQ ID NO: 701399 - RNA, 22 nt, Human
ucucuccuccacaccgggugcu

SEQ ID NO: 701400 - RNA, 22 nt, Human
cugcauaucaaauuacuccugg

SEQ ID NO: 701401 - RNA, 22 nt, Human
ccaggcuccccaggaggcccuu

SEQ ID NO: 701402 - RNA, 22 nt, Human
cagggcucgcucgcucgcucgc

SEQ ID NO: 701403 - RNA, 22 nt, Human
uaauccaaaacugaaucugugg

SEQ ID NO: 701404 - RNA, 22 nt, Human
guuuuguucaugaacauugggu

SEQ ID NO: 701405 - RNA, 21 nt, Human
acugaacuuguguucuagagg

SEQ ID NO: 701406 - RNA, 22 nt, Human
ugucauuggugaucugaugccu

SEQ ID NO: 701407 - RNA, 22 nt, Human
uacaggcucuugucagacguau

SEQ ID NO: 701408 - RNA, 22 nt, Human
acagccaggaauucuggagaag

SEQ ID NO: 701409 - RNA, 22 nt, Human
cucuauucuaauggauucuggg

SEQ ID NO: 701410 - RNA, 22 nt, Human
uagcugcuugaccaggcagugg

SEQ ID NO: 701411 - RNA, 22 nt, Human
acuggaaaguauucuuucacug

SEQ ID NO: 701412 - RNA, 22 nt, Human
uguucugcaaugcugccuccuu

SEQ ID NO: 701413 - RNA, 22 nt, Human
agcaggugucacuuucacucca

SEQ ID NO: 701414 - RNA, 22 nt, Human
ugcuuguauucauaucacagcu

SEQ ID NO: 701415 - RNA, 22 nt, Human
ucaauuuauguggcuauucauu

SEQ ID NO: 701416 - RNA, 22 nt, Human
cuccccuagcccguugggaggu

SEQ ID NO: 701417 - RNA, 22 nt, Human
gggagcugagcuggaagagaau

SEQ ID NO: 701418 - RNA, 22 nt, Human
cuucacugcagucauggcucug

SEQ ID NO: 701419 - RNA, 22 nt, Human
gagauuuccauauuuuguaaca

SEQ ID NO: 701420 - RNA, 22 nt, Human
cuaguauuaagugugaguaaaa

SEQ ID NO: 701421 - RNA, 22 nt, Human
auucugcugccuaguuuaugaa

SEQ ID NO: 701422 - RNA, 22 nt, Human
guucucucagcgauagugaugg

SEQ ID NO: 701423 - RNA, 22 nt, Human
uggcuacauuuauacucucauu

SEQ ID NO: 701424 - RNA, 19 nt, Human
ugcucucuggugcuucaug

SEQ ID NO: 701425 - RNA, 22 nt, Human
uccccaguaagccugcacugug

SEQ ID NO: 701426 - RNA, 22 nt, Human
uuuccagaaauaccauuuggug

SEQ ID NO: 701427 - RNA, 22 nt, Human
aggucccugcagcagacugcca

SEQ ID NO: 701428 - RNA, 22 nt, Human
uucuuuccucccagccuuugga

SEQ ID NO: 701429 - RNA, 22 nt, Human
cauuguccucugaugccuuccc

SEQ ID NO: 701430 - RNA, 19 nt, Human
auucuucucuuccugcugu

SEQ ID NO: 701431 - RNA, 22 nt, Human
ucugcccaggaggucccauggg

SEQ ID NO: 701432 - RNA, 22 nt, Human
uuuguugguugcacuggugggu

SEQ ID NO: 701433 - RNA, 22 nt, Human
guucuccaggggcuguucaucu

SEQ ID NO: 701434 - RNA, 22 nt, Human
ucuaguuagugguugauacugu

SEQ ID NO: 701435 - RNA, 22 nt, Human
ucuuuuccuugaugguuaaaua

SEQ ID NO: 701436 - RNA, 22 nt, Human
gcuucauagcauucauugccug

SEQ ID NO: 701437 - RNA, 22 nt, Human
aucaucaucuaaauugugucgc

SEQ ID NO: 701438 - RNA, 22 nt, Human
agacauauuggcuugcuuuaau

SEQ ID NO: 701439 - RNA, 22 nt, Human
uuggaaagggauaucuguacuu

SEQ ID NO: 701440 - RNA, 18 nt, Human
accugauuggcgcagccc

SEQ ID NO: 701441 - RNA, 23 nt, Human
agcccagcagagaaccuaggucc

SEQ ID NO: 701442 - RNA, 22 nt, Human
uuucauguuggauacuguuuca

SEQ ID NO: 701443 - RNA, 18 nt, Human
uggcagccagcugcuccu

SEQ ID NO: 701444 - RNA, 22 nt, Human
ugcacccacuuagcugaaguuc

SEQ ID NO: 701445 - RNA, 22 nt, Human
cugagggccuucuaugcugagc

SEQ ID NO: 701446 - RNA, 22 nt, Human
gagucucugaccagggugccaa

SEQ ID NO: 701447 - RNA, 22 nt, Human
uucuuuuaauuucugucugcag

SEQ ID NO: 701448 - RNA, 22 nt, Human
ucucugucucccguguguccgg

SEQ ID NO: 701449 - RNA, 20 nt, Human
uggccucugagaugccacgg

SEQ ID NO: 701450 - RNA, 19 nt, Human
agcaguggagccaugccug

SEQ ID NO: 701451 - RNA, 21 nt, Human
uugcuguuuucccaaugcagu

SEQ ID NO: 701452 - RNA, 22 nt, Human
aucauccuagaaggaagcuagg

SEQ ID NO: 701453 - RNA, 22 nt, Human
guuucuccucugugucuuguuu

SEQ ID NO: 701454 - RNA, 21 nt, Human
ugcuggguuugcccaucaggc

SEQ ID NO: 701455 - RNA, 22 nt, Human
ccagcuggcccagcugugcucc

SEQ ID NO: 701456 - RNA, 22 nt, Human
acauuucuccuacuuguuauuu

SEQ ID NO: 701457 - RNA, 22 nt, Human
cugcucucuguuccccuggauc

SEQ ID NO: 701458 - RNA, 22 nt, Human
uugcugccuuuguacucugaug

SEQ ID NO: 701459 - RNA, 22 nt, Human
cugcugucuuuauuucacugcu

SEQ ID NO: 701460 - RNA, 22 nt, Human
uccuucccaggugucgccgccu

SEQ ID NO: 701461 - RNA, 22 nt, Human
cauuguguauuucuguaguacu

SEQ ID NO: 701462 - RNA, 22 nt, Human
acauauuuugaaagcuuucuaa

SEQ ID NO: 701463 - RNA, 22 nt, Human
uguucuggugaggccauggggu

SEQ ID NO: 701464 - RNA, 22 nt, Human
cugggagaugacucagagcagg

SEQ ID NO: 701465 - RNA, 22 nt, Human
ccugcagacacuuguccagcaa

SEQ ID NO: 701466 - RNA, 22 nt, Human
uggagcagccuuuucuaagcaa

SEQ ID NO: 701467 - RNA, 22 nt, Human
gcaguccuguagcgacuuuuuu

SEQ ID NO: 701468 - RNA, 22 nt, Human
ucuuccuggauggggguugaug

SEQ ID NO: 701469 - RNA, 22 nt, Human
cagucucuugcuucauuaguug

SEQ ID NO: 701470 - RNA, 22 nt, Human
gcugggugauucauuuccauaa

SEQ ID NO: 701471 - RNA, 22 nt, Human
augauugaaaaugacauugcca

SEQ ID NO: 701472 - RNA, 22 nt, Human
cuuggcugaacuccaggaugca

SEQ ID NO: 701473 - RNA, 22 nt, Human
cugcccugcagcuccacggacu

SEQ ID NO: 701474 - RNA, 20 nt, Human
cucuuuucacucucaguggu

SEQ ID NO: 701475 - RNA, 22 nt, Human
gggcucaucaagccucuccgcc

SEQ ID NO: 701476 - RNA, 22 nt, Human
agugagaguauuaaugugaacu

SEQ ID NO: 701477 - RNA, 22 nt, Human
uuuucuaacaucuaguaauuug

SEQ ID NO: 701478 - RNA, 22 nt, Human
cuggagaggcugggaacagguu

SEQ ID NO: 701479 - RNA, 22 nt, Human
uagggcucugagaguucagccu

SEQ ID NO: 701480 - RNA, 22 nt, Human
uugucucuacagagaguaguag

SEQ ID NO: 701481 - RNA, 22 nt, Human
gucuggaggaggaagaaggcac

SEQ ID NO: 701482 - RNA, 22 nt, Human
cagucucuggugaguugacagu

SEQ ID NO: 701483 - RNA, 22 nt, Human
ccucuucuaggacguccuugug

SEQ ID NO: 701484 - RNA, 22 nt, Human
agagggcgcccaggcccacgcc

SEQ ID NO: 701485 - RNA, 22 nt, Human
gcuucuggugaggccucaggaa

SEQ ID NO: 701486 - RNA, 22 nt, Human
uuguugcugcucaaccucuaua

SEQ ID NO: 701487 - RNA, 22 nt, Human
ucccugccuccuggcagugcca

SEQ ID NO: 701488 - RNA, 19 nt, Human
cucugccauuugcugccug

SEQ ID NO: 701489 - RNA, 22 nt, Human
aauucauacucuauauugcuuu

SEQ ID NO: 701490 - RNA, 22 nt, Human
ucaucuccauacggucucgcag

SEQ ID NO: 701491 - RNA, 22 nt, Human
cagcuuuugcagacuucuugcc

SEQ ID NO: 701492 - RNA, 22 nt, Human
uccucccugcacucagugaagu

SEQ ID NO: 701493 - RNA, 22 nt, Human
cuucucugucacaggguuacgu

SEQ ID NO: 701494 - RNA, 23 nt, Human
acugccugugccgaucucucuca

SEQ ID NO: 701495 - RNA, 22 nt, Human
cugcaucaguggauaugauggu

SEQ ID NO: 701496 - RNA, 23 nt, Human
cugagggcuggucugaagucugc

SEQ ID NO: 701497 - RNA, 22 nt, Human
cuauacagcagcuuacuaguua

SEQ ID NO: 701498 - RNA, 22 nt, Human
aguucugggaggugcacgucca

SEQ ID NO: 701499 - RNA, 22 nt, Human
auacagaagaccccuccgucau

SEQ ID NO: 701500 - RNA, 22 nt, Human
uacugcugagcuggguagaagg

SEQ ID NO: 701501 - RNA, 22 nt, Human
uucuaguuacagaagccuugcu

SEQ ID NO: 701502 - RNA, 22 nt, Human
gcugucccgaaccccugguaau

SEQ ID NO: 701503 - RNA, 21 nt, Human
acccugcuuuaugccguccuc

SEQ ID NO: 701504 - RNA, 20 nt, Human
uccuccuugcagagcccaga

SEQ ID NO: 701505 - RNA, 22 nt, Human
gcucccugguauugcugccacu

SEQ ID NO: 701506 - RNA, 22 nt, Human
aggguccugggugcaguugcuu

SEQ ID NO: 701507 - RNA, 22 nt, Human
aucauccauggcugaucauaaa

SEQ ID NO: 701508 - RNA, 22 nt, Human
gcagagucagguccaaggacug

SEQ ID NO: 701509 - RNA, 22 nt, Human
uaggugcaggucacaagggaug

SEQ ID NO: 701510 - RNA, 22 nt, Human
cuccagcagaaagggcgagugg

SEQ ID NO: 701511 - RNA, 22 nt, Human
aucagaaaaaugagaagagcug

SEQ ID NO: 701512 - RNA, 22 nt, Human
agcuucuuugugggcuccagaa

SEQ ID NO: 701513 - RNA, 22 nt, Human
ugacuugucucuuugggagaca

SEQ ID NO: 701514 - RNA, 22 nt, Human
caggcaaggaggcacugaggga

SEQ ID NO: 701515 - RNA, 22 nt, Human
ucaggagugcagcaguuuggag

SEQ ID NO: 701516 - RNA, 22 nt, Human
aaaguuugaaugauauauuagu

SEQ ID NO: 701517 - RNA, 22 nt, Human
ugugcuucugcagagacuauuu

SEQ ID NO: 701518 - RNA, 22 nt, Human
cugaguccagggacagaggcgu

SEQ ID NO: 701519 - RNA, 22 nt, Human
ucauggauggccgggaggugau

SEQ ID NO: 701520 - RNA, 22 nt, Human
ggaccugccagaacucaggcua

SEQ ID NO: 701521 - RNA, 22 nt, Human
uccuggaguugugcagugcaca

SEQ ID NO: 701522 - RNA, 22 nt, Human
uucuaacuccacuucccacucc

SEQ ID NO: 701523 - RNA, 22 nt, Human
ucagaagagcuggugcugccug

SEQ ID NO: 701524 - RNA, 22 nt, Human
uuugagaaggugacaaauucua

SEQ ID NO: 701525 - RNA, 22 nt, Human
uccaggaggguuuucugccuuc

SEQ ID NO: 701526 - RNA, 21 nt, Human
ucucuguauccauggguucca

SEQ ID NO: 701527 - RNA, 22 nt, Human
gugcaaaaggcauugugguuuu

SEQ ID NO: 701528 - RNA, 22 nt, Human
auggagcaaauggggcugcagg

SEQ ID NO: 701529 - RNA, 22 nt, Human
aagaugauaggacuugcuuaag

SEQ ID NO: 701530 - RNA, 22 nt, Human
aguuuuauugucccagagguga

SEQ ID NO: 701531 - RNA, 22 nt, Human
ucugcuggaaaaccagggaauu

SEQ ID NO: 701532 - RNA, 22 nt, Human
ucagaggcuuucaauguguuuu

SEQ ID NO: 701533 - RNA, 22 nt, Human
acaugucucuucugaaagacaa

SEQ ID NO: 701534 - RNA, 22 nt, Human
ggagggacccacucuagaggug

SEQ ID NO: 701535 - RNA, 22 nt, Human
aaguugaaucaguaacacaguu

SEQ ID NO: 701536 - RNA, 22 nt, Human
gaggucaauaauaugugcuuua

SEQ ID NO: 701537 - RNA, 22 nt, Human
cucugcaggcacccaggguggg

SEQ ID NO: 701538 - RNA, 22 nt, Human
gacccagcuaaccaggugggga

SEQ ID NO: 701539 - RNA, 22 nt, Human
cagcuucugucugauuagcaag

SEQ ID NO: 701540 - RNA, 22 nt, Human
ugucugugauuuaggccagggc

SEQ ID NO: 701541 - RNA, 22 nt, Human
aguauauggggaauugcauaau

SEQ ID NO: 701542 - RNA, 22 nt, Human
ccaggugcucuugccagggcug

SEQ ID NO: 701543 - RNA, 23 nt, Human
gcccagggacugggaaucagugg

SEQ ID NO: 701544 - RNA, 19 nt, Human
ccucucccaugcuuaccuc

SEQ ID NO: 701545 - RNA, 22 nt, Human
uucugggcccaacccuagagug

SEQ ID NO: 701546 - RNA, 21 nt, Human
agauuauaaagaaccuucuua

SEQ ID NO: 701547 - RNA, 22 nt, Human
ucucuguaaaauguggaugaua

SEQ ID NO: 701548 - RNA, 22 nt, Human
uuacagagcuggguggagagag

SEQ ID NO: 701549 - RNA, 22 nt, Human
gccuggaguggacuuggccccu

SEQ ID NO: 701550 - RNA, 22 nt, Human
ugcccagccccuaucccuggga

SEQ ID NO: 701551 - RNA, 22 nt, Human
aagcaauacaaguggucauuga

SEQ ID NO: 701552 - RNA, 22 nt, Human
augcuuccaugaacguucuugu

SEQ ID NO: 701553 - RNA, 22 nt, Human
cagcuggguuuaguggggugug

SEQ ID NO: 701554 - RNA, 22 nt, Human
gcccagcaggggauggcagcuc

SEQ ID NO: 701555 - RNA, 22 nt, Human
uggauuuaacagaauaccaggu

SEQ ID NO: 701556 - RNA, 19 nt, Human
acaauagaaaagucuuuug

SEQ ID NO: 701557 - RNA, 22 nt, Human
uggguccuuuuuggacuucuuc

SEQ ID NO: 701558 - RNA, 22 nt, Human
uggcagccuucucugagaaggu

SEQ ID NO: 701559 - RNA, 22 nt, Human
cugggcuucucccccuggcaga

SEQ ID NO: 701560 - RNA, 22 nt, Human
agaucuuuagugaagcuaaauc

SEQ ID NO: 701561 - RNA, 22 nt, Human
ucauuucaaugauacuacuaag

SEQ ID NO: 701562 - RNA, 18 nt, Human
gaggccugagaaccaggu

SEQ ID NO: 701563 - RNA, 22 nt, Human
ucuucauguauuugacaaccau

SEQ ID NO: 701564 - RNA, 22 nt, Human
gcuggcugggucccugagaggc

SEQ ID NO: 701565 - RNA, 22 nt, Human
acguuuucagugacugugcuuc

SEQ ID NO: 701566 - RNA, 22 nt, Human
gcugagcugggacaguccuggg

SEQ ID NO: 701567 - RNA, 22 nt, Human
gaaccucagugaaacuggaggu

SEQ ID NO: 701568 - RNA, 22 nt, Human
cuggccuuuagccccagugucu

SEQ ID NO: 701569 - RNA, 22 nt, Human
uuuacuucugcauuuccccuag

SEQ ID NO: 701570 - RNA, 22 nt, Human
uaagaaucaguagauauagauu

SEQ ID NO: 701571 - RNA, 22 nt, Human
ccugcugucugcuguguuaagc

SEQ ID NO: 701572 - RNA, 22 nt, Human
aggaggugagcggucauguggu

SEQ ID NO: 701573 - RNA, 22 nt, Human
gaucaaaagcuggguucuaaaa

SEQ ID NO: 701574 - RNA, 22 nt, Human
agccuucaguaaauccacugug

SEQ ID NO: 701575 - RNA, 22 nt, Human
uucuguuagaauuuugaaaaua

SEQ ID NO: 701576 - RNA, 22 nt, Human
gugauuucagguuuuucauacu

SEQ ID NO: 701577 - RNA, 22 nt, Human
acagcaacuccugcuucugagu

SEQ ID NO: 701578 - RNA, 22 nt, Human
gccuucccacccugcgaggcug

SEQ ID NO: 701579 - RNA, 22 nt, Human
ucagaggaugcuguucuuuaau

SEQ ID NO: 701580 - RNA, 22 nt, Human
cccucccagaugggcuugaggu

SEQ ID NO: 701581 - RNA, 22 nt, Human
ucugccaucuuaauucucuuuu

SEQ ID NO: 701582 - RNA, 22 nt, Human
ugucacuucaggaaugcaggga

SEQ ID NO: 701583 - RNA, 22 nt, Human
ucuggauuuguggaaaaucugc

SEQ ID NO: 701584 - RNA, 22 nt, Human
agccagcuaccggggcuccugg

SEQ ID NO: 701585 - RNA, 22 nt, Human
uauucacaggcacgaaauauug

SEQ ID NO: 701586 - RNA, 20 nt, Human
acaugaaaggaaacaggaaa

SEQ ID NO: 701587 - RNA, 22 nt, Human
cgugucuguaugucaaucagcu

SEQ ID NO: 701588 - RNA, 22 nt, Human
uguucuuagguauuugacaguc

SEQ ID NO: 701589 - RNA, 22 nt, Human
uuucuaagugaacauucaaguu

SEQ ID NO: 701590 - RNA, 22 nt, Human
ucagcuuugccaccagcuguaa

SEQ ID NO: 701591 - RNA, 22 nt, Human
ugaggaagccaaacagcuacac

SEQ ID NO: 701592 - RNA, 22 nt, Human
ugaacagaucaauagaacugac

SEQ ID NO: 701593 - RNA, 22 nt, Human
ucagcuuuuaaaaacaagaagu

SEQ ID NO: 701594 - RNA, 22 nt, Human
ugcuagaauaccuaccuggagg

SEQ ID NO: 701595 - RNA, 20 nt, Human
agagcugggaagcucccuau

SEQ ID NO: 701596 - RNA, 22 nt, Human
uuauguugggaaaagucagauu

SEQ ID NO: 701597 - RNA, 22 nt, Human
augcugggaaacugaaaggaau

SEQ ID NO: 701598 - RNA, 20 nt, Human
gggugagauguaggagaggg

SEQ ID NO: 701599 - RNA, 22 nt, Human
ccagcagaguugguuucuggua

SEQ ID NO: 701600 - RNA, 22 nt, Human
cagcagcacucugcgggucccc

SEQ ID NO: 701601 - RNA, 22 nt, Human
ccuuuagaaagucaguaguugc

SEQ ID NO: 701602 - RNA, 22 nt, Human
uguuuacuggcuccugugguuc

SEQ ID NO: 701603 - RNA, 22 nt, Human
ugcacacacaggagucuccucc

SEQ ID NO: 701604 - RNA, 22 nt, Human
cagaagcaagggccaaagucuu

SEQ ID NO: 701605 - RNA, 22 nt, Human
uggcagagacaaggccgggccu

SEQ ID NO: 701606 - RNA, 22 nt, Human
agaugaaaauacgugacuuuaa

SEQ ID NO: 701607 - RNA, 21 nt, Human
ugagagaguagcaggacauau

SEQ ID NO: 701608 - RNA, 22 nt, Human
cccugccuucuuggccuuuaaa

SEQ ID NO: 701609 - RNA, 22 nt, Human
aggggcucaguuacuuuggcag

SEQ ID NO: 701610 - RNA, 22 nt, Human
uggcagauguauaucacagcuu

SEQ ID NO: 701611 - RNA, 22 nt, Human
uaaacauuuguuauucuuguuu

SEQ ID NO: 701612 - RNA, 22 nt, Human
cuuuguaagucuuucuccaaga

SEQ ID NO: 701613 - RNA, 22 nt, Human
uucagcuccuuauuucugagca

SEQ ID NO: 701614 - RNA, 22 nt, Human
acuuucauuuguaauaaacuuc

SEQ ID NO: 701615 - RNA, 22 nt, Human
cugggacccacaccuggaaucu

SEQ ID NO: 701616 - RNA, 22 nt, Human
agcaaggcagcuuucacugcuu

SEQ ID NO: 701617 - RNA, 22 nt, Human
auacaugcacauuuuuauacau

SEQ ID NO: 701618 - RNA, 22 nt, Human
uuaauuugaccauaaauaucuu

SEQ ID NO: 701619 - RNA, 22 nt, Human
gaagcugagcugaggcauguug

SEQ ID NO: 701620 - RNA, 23 nt, Human
uguguacauacauauguacacac

SEQ ID NO: 701621 - RNA, 22 nt, Human
ugcugucugauucagggugauu

SEQ ID NO: 701622 - RNA, 19 nt, Human
ucuaaacacagggacaagc

SEQ ID NO: 701623 - RNA, 22 nt, Human
uucauacucacuccaauaacug

SEQ ID NO: 701624 - RNA, 22 nt, Human
cagaauuuagcacaauguaugg

SEQ ID NO: 701625 - RNA, 22 nt, Human
ucucagagauuuuguuucccuu

SEQ ID NO: 701626 - RNA, 22 nt, Human
caaaagucuuccuauucucuua

SEQ ID NO: 701627 - RNA, 22 nt, Human
guagcaauguugaacacugcgu

SEQ ID NO: 701628 - RNA, 22 nt, Human
gaacagcagcuuccugggaauu

SEQ ID NO: 701629 - RNA, 22 nt, Human
caguccugagccaaucaugaug

SEQ ID NO: 701630 - RNA, 22 nt, Human
ugagguaugguaagguaaaauc

SEQ ID NO: 701631 - RNA, 22 nt, Human
uaauccagcgggugauugcaca

SEQ ID NO: 701632 - RNA, 22 nt, Human
uugcaaaugaccauugccacau

SEQ ID NO: 701633 - RNA, 22 nt, Human
aggauucuguaaucugugaaau

SEQ ID NO: 701634 - RNA, 22 nt, Human
aauaggaagcaccaaauucucc

SEQ ID NO: 701635 - RNA, 22 nt, Human
uagguucacugucuugaggagc

SEQ ID NO: 701636 - RNA, 22 nt, Human
guacagaauuaugccaugaggg

SEQ ID NO: 701637 - RNA, 22 nt, Human
caguuuaccuauauguaaauuu

SEQ ID NO: 701638 - RNA, 22 nt, Human
acagaaauucaaacuggaauuu

SEQ ID NO: 701639 - RNA, 22 nt, Human
ugagugggauuaaaugagguga

SEQ ID NO: 701640 - RNA, 22 nt, Human
auucugugauaguugauccuua

SEQ ID NO: 701641 - RNA, 22 nt, Human
cugcagggaacugaggcccaga

SEQ ID NO: 701642 - RNA, 22 nt, Human
aaugggagagaacacaaagucc

SEQ ID NO: 701643 - RNA, 22 nt, Human
ccaccccugggugcagggagcg

SEQ ID NO: 701644 - RNA, 22 nt, Human
aguauuuagagacacaagaugg

SEQ ID NO: 701645 - RNA, 22 nt, Human
caucuccaggaguucuacucau

SEQ ID NO: 701646 - RNA, 22 nt, Human
ucagcagggagaggagaaugca

SEQ ID NO: 701647 - RNA, 22 nt, Human
ugguauguaaauuguaacucaa

SEQ ID NO: 701648 - RNA, 16 nt, Human
gaucuguucuauuuca

SEQ ID NO: 701649 - RNA, 22 nt, Human
ugcaugaacggaggguaagcug

SEQ ID NO: 701650 - RNA, 23 nt, Human
aggaagcuaccaauuuuguaggc

SEQ ID NO: 701651 - RNA, 22 nt, Human
cugagagguaaucacacaaaau

SEQ ID NO: 701652 - RNA, 22 nt, Human
cuaacuuuuugauucuugggga

SEQ ID NO: 701653 - RNA, 22 nt, Human
aggagacagccaggggccugag

SEQ ID NO: 701654 - RNA, 22 nt, Human
aacaucuuguacugcacauuuu

SEQ ID NO: 701655 - RNA, 22 nt, Human
ccucuguccccagugcaggccu

SEQ ID NO: 701656 - RNA, 22 nt, Human
gagugugggggugcugaggaca

SEQ ID NO: 701657 - RNA, 22 nt, Human
ugggagcaagcuggugcuggag

SEQ ID NO: 701658 - RNA, 23 nt, Human
caguucccacugucugucacaag

SEQ ID NO: 701659 - RNA, 22 nt, Human
caugcagggacuagagaacagg

SEQ ID NO: 701660 - RNA, 22 nt, Human
acugggcucccaggcuugucau

SEQ ID NO: 701661 - RNA, 22 nt, Human
cagcaacuccuauauugaaagc

SEQ ID NO: 701662 - RNA, 19 nt, Human
uguguggguuuagaguagu

SEQ ID NO: 701663 - RNA, 22 nt, Human
cagaagacagagcacuucucuu

SEQ ID NO: 701664 - RNA, 22 nt, Human
agcuugccucuuaaucaccuca

SEQ ID NO: 701665 - RNA, 22 nt, Human
ccuugagccagggagcuggcag

SEQ ID NO: 701666 - RNA, 22 nt, Human
cuggcucaccuccgcuccagca

SEQ ID NO: 701667 - RNA, 18 nt, Human
cuccuuggagaagaggcc

SEQ ID NO: 701668 - RNA, 18 nt, Human
ggagagugagaucaaaca

SEQ ID NO: 701669 - RNA, 22 nt, Human
cagcugcagaaagcaagcaggu

SEQ ID NO: 701670 - RNA, 22 nt, Human
aggccucacucucagagcuucu

SEQ ID NO: 701671 - RNA, 20 nt, Human
gccacugggcaccagcaggg

SEQ ID NO: 701672 - RNA, 22 nt, Human
cuguauuugaaagaaaagauuu

SEQ ID NO: 701673 - RNA, 22 nt, Human
aguagaaucagccucuugaugg

SEQ ID NO: 701674 - RNA, 22 nt, Human
gcuuggcuccuggcucacaggu

SEQ ID NO: 701675 - RNA, 22 nt, Human
acuuagaaagggauucuagauu

SEQ ID NO: 701676 - RNA, 22 nt, Human
ccacugaguacccgauggcugc

SEQ ID NO: 701677 - RNA, 22 nt, Human
uauacagauaaugaagaccaag

SEQ ID NO: 701678 - RNA, 22 nt, Human
uguguaaauuauuuuuaaugau

SEQ ID NO: 701679 - RNA, 22 nt, Human
ccagggcuugguggcuuguauc

SEQ ID NO: 701680 - RNA, 22 nt, Human
ugcuuaaacauccagacaguau

SEQ ID NO: 701681 - RNA, 22 nt, Human
cucuuugucacucauacaguca

SEQ ID NO: 701682 - RNA, 22 nt, Human
cacaggagggagcgggcagcca

SEQ ID NO: 701683 - RNA, 22 nt, Human
uuuuuuaucuaugguaguacca

SEQ ID NO: 701684 - RNA, 23 nt, Human
aucaaacuggugagaaugucagu

SEQ ID NO: 701685 - RNA, 22 nt, Human
ugcguggcuggucccugugacc

SEQ ID NO: 701686 - RNA, 22 nt, Human
agcuccuggcuuuccucucacc

SEQ ID NO: 701687 - RNA, 22 nt, Human
ugguaagggguggaaccagagc

SEQ ID NO: 701688 - RNA, 22 nt, Human
uacagaaagggaugauugaucu

SEQ ID NO: 701689 - RNA, 18 nt, Human
gggcuguguucaugccca

SEQ ID NO: 701690 - RNA, 22 nt, Human
ugagaaauggcagcauuacugg

SEQ ID NO: 701691 - RNA, 22 nt, Human
acacagauauuguacuugaucc

SEQ ID NO: 701692 - RNA, 23 nt, Human
uugauuucaaaugcagagaacac

SEQ ID NO: 701693 - RNA, 22 nt, Human
cugggcagugcagcuauagaac

SEQ ID NO: 701694 - RNA, 22 nt, Human
ucuccgaucacagguuuucaau

SEQ ID NO: 701695 - RNA, 22 nt, Human
uagguagggaccaccuugggga

SEQ ID NO: 701696 - RNA, 22 nt, Human
ggcuugaagggaggaaagcagg

SEQ ID NO: 701697 - RNA, 22 nt, Human
aaguauucuggcagucauucag

SEQ ID NO: 701698 - RNA, 22 nt, Human
uaucuuguaauagguccacuug

SEQ ID NO: 701699 - RNA, 22 nt, Human
ugcaaaaacagccuugaggccu

SEQ ID NO: 701700 - RNA, 22 nt, Human
uguaugaaagaacaagggcuua

SEQ ID NO: 701701 - RNA, 22 nt, Human
cccacccugggcuacacaucca

SEQ ID NO: 701702 - RNA, 19 nt, Human
ccuuugguuuccaugacau

SEQ ID NO: 701703 - RNA, 22 nt, Human
ucuccaggugcuaagugugccu

SEQ ID NO: 701704 - RNA, 22 nt, Human
gagcaggugccuguagcucucu

SEQ ID NO: 701705 - RNA, 22 nt, Human
uccagaggcagcugcggucagg

SEQ ID NO: 701706 - RNA, 22 nt, Human
uguucagagacagaaauucuaa

SEQ ID NO: 701707 - RNA, 22 nt, Human
aaucuggaguuaauguuuucgc

SEQ ID NO: 701708 - RNA, 20 nt, Human
ugucuucauuauggugcccu

SEQ ID NO: 701709 - RNA, 21 nt, Human
ucuaugcaagacccuaguccu

SEQ ID NO: 701710 - RNA, 22 nt, Human
uugagaaaccuggcaguagaga

SEQ ID NO: 701711 - RNA, 22 nt, Human
cagggccucucaucccacgggc

SEQ ID NO: 701712 - RNA, 22 nt, Human
aggcuuccgaguagcugggacu

SEQ ID NO: 701713 - RNA, 22 nt, Human
ucuuuuggguucuuaugauuua

SEQ ID NO: 701714 - RNA, 22 nt, Human
agcagggggccacagucacagc

SEQ ID NO: 701715 - RNA, 22 nt, Human
auguggcagugggaggugaauu

SEQ ID NO: 701716 - RNA, 22 nt, Human
uauuuauguauguggauguguu

SEQ ID NO: 701717 - RNA, 18 nt, Human
uucugugcaucuuucuau

SEQ ID NO: 701718 - RNA, 22 nt, Human
agacaggacacaagcugcauaa

SEQ ID NO: 701719 - RNA, 22 nt, Human
aagggcucugggcuacgcacug

SEQ ID NO: 701720 - RNA, 22 nt, Human
uagcaaaaacugcaguuacuuu

SEQ ID NO: 701721 - RNA, 22 nt, Human
ccucgcggcacucgggccggau

SEQ ID NO: 701722 - RNA, 22 nt, Human
guugagcaaggccagagaagcc

SEQ ID NO: 701723 - RNA, 22 nt, Human
caugagaucugcagggaugggc

SEQ ID NO: 701724 - RNA, 22 nt, Human
aggucugggcaccacuggcugc

SEQ ID NO: 701725 - RNA, 19 nt, Human
uaguacacacucuaauucc

SEQ ID NO: 701726 - RNA, 22 nt, Human
auuugcuucuugcuuccagcac

SEQ ID NO: 701727 - RNA, 22 nt, Human
aagagaugaagguccugacugu

SEQ ID NO: 701728 - RNA, 22 nt, Human
agaucacaguggcaacucccuu

SEQ ID NO: 701729 - RNA, 22 nt, Human
cagcugggcuaagaguagaggc

SEQ ID NO: 701730 - RNA, 22 nt, Human
cuguuauuucugccaggugagu

SEQ ID NO: 701731 - RNA, 22 nt, Human
uauaggcuuuugccugaagcua

SEQ ID NO: 701732 - RNA, 18 nt, Human
uggcagagugucuguucu

SEQ ID NO: 701733 - RNA, 19 nt, Human
cugcugaauuagcucugga

SEQ ID NO: 701734 - RNA, 20 nt, Human
uguccuaauagacaagcaga

SEQ ID NO: 701735 - RNA, 22 nt, Human
uauuucuugaguggucaguuuc

SEQ ID NO: 701736 - RNA, 22 nt, Human
uacagcuguugguguuuccucu

SEQ ID NO: 701737 - RNA, 22 nt, Human
ggcucuggagauguccgaccug

SEQ ID NO: 701738 - RNA, 22 nt, Human
ucuugaaaguaucuuauuuugu

SEQ ID NO: 701739 - RNA, 23 nt, Human
cagcuuucagggcuuuagggaag

SEQ ID NO: 701740 - RNA, 22 nt, Human
gggcuucaguucugaccaucuu

SEQ ID NO: 701741 - RNA, 22 nt, Human
ucugggccuuggaguggggaga

SEQ ID NO: 701742 - RNA, 22 nt, Human
gaaguuacucucguuaaauaug

SEQ ID NO: 701743 - RNA, 22 nt, Human
uuacuuuggcaaacuccugccc

SEQ ID NO: 701744 - RNA, 19 nt, Human
uggaggccucaggaaaaga

SEQ ID NO: 701745 - RNA, 22 nt, Human
uuccacaggacuaaaugucauc

SEQ ID NO: 701746 - RNA, 22 nt, Human
cucugcaccuuguaggaggcaa

SEQ ID NO: 701747 - RNA, 22 nt, Human
ugcuaggaauacacagagcaau

SEQ ID NO: 701748 - RNA, 22 nt, Human
caugcggcucuuuccaaaccgg

SEQ ID NO: 701749 - RNA, 22 nt, Human
cagcaggaggugagaugugacc

SEQ ID NO: 701750 - RNA, 22 nt, Human
aucggggaaaagggaggcugug

SEQ ID NO: 701751 - RNA, 22 nt, Human
cugcuuccucccuguaaaggca

SEQ ID NO: 701752 - RNA, 22 nt, Human
ugcaauuaauuuacaugcuuaa

SEQ ID NO: 701753 - RNA, 22 nt, Human
accuucaggugagcacacagau

SEQ ID NO: 701754 - RNA, 22 nt, Human
uagggcugcagaacaauggccu

SEQ ID NO: 701755 - RNA, 22 nt, Human
gagucuccaauccaugccuguc

SEQ ID NO: 701756 - RNA, 22 nt, Human
agauuuagugguggaauuuugg

SEQ ID NO: 701757 - RNA, 21 nt, Human
uggccucccacacuuccaugg

SEQ ID NO: 701758 - RNA, 22 nt, Human
ccacagaguuacaaaacaguca

SEQ ID NO: 701759 - RNA, 22 nt, Human
uucagaaagugaaucuuguuau

SEQ ID NO: 701760 - RNA, 22 nt, Human
ggccacugcccuggcuacaccg

SEQ ID NO: 701761 - RNA, 22 nt, Human
ccaaugagacagaaagagccuc

SEQ ID NO: 701762 - RNA, 22 nt, Human
cugccugcuaccugaaaugcca

SEQ ID NO: 701763 - RNA, 22 nt, Human
agaccugggugcccugugcuuu

SEQ ID NO: 701764 - RNA, 17 nt, Human
uuguguguaguucugau

SEQ ID NO: 701765 - RNA, 22 nt, Human
caggacacuuguucuucucugc

SEQ ID NO: 701766 - RNA, 22 nt, Human
uacccagauucacaagccaagg

SEQ ID NO: 701767 - RNA, 22 nt, Human
ccugaggccccugaggauagca

SEQ ID NO: 701768 - RNA, 22 nt, Human
agacagcauggagcugauaaca

SEQ ID NO: 701769 - RNA, 22 nt, Human
gggaggguguucucccaagaac

SEQ ID NO: 701770 - RNA, 22 nt, Human
gcucccagacugaccagaggug

SEQ ID NO: 701771 - RNA, 23 nt, Human
ggcuuugcucuggguucuagggu

SEQ ID NO: 701772 - RNA, 22 nt, Human
ugggggcauggaccagccuggc

SEQ ID NO: 701773 - RNA, 22 nt, Human
caggggcaagaaugcugucagc

SEQ ID NO: 701774 - RNA, 22 nt, Human
cuggcucacaggugagaugcau

SEQ ID NO: 701775 - RNA, 22 nt, Human
agcaccaggcuguuggaagccc

SEQ ID NO: 701776 - RNA, 22 nt, Human
cacaggaaagucagccagaaga

SEQ ID NO: 701777 - RNA, 22 nt, Human
ccagcuggagccaagguggacu

SEQ ID NO: 701778 - RNA, 22 nt, Human
guuuauaugaacuucauaccca

SEQ ID NO: 701779 - RNA, 20 nt, Human
cagcagagacccauggggag

SEQ ID NO: 701780 - RNA, 22 nt, Human
cagaaagaccugauuggcaguu

SEQ ID NO: 701781 - RNA, 22 nt, Human
uagcccagagucccaauuccag

SEQ ID NO: 701782 - RNA, 22 nt, Human
uuugcauuacuugacuuuaguu

SEQ ID NO: 701783 - RNA, 19 nt, Human
ucugaaguccagggcauac

SEQ ID NO: 701784 - RNA, 22 nt, Human
uuguaugcugaugacaccaccu

SEQ ID NO: 701785 - RNA, 22 nt, Human
agcuaacaugacuagaagcuuc

SEQ ID NO: 701786 - RNA, 23 nt, Human
uuugaaguugacugccuuccaga

SEQ ID NO: 701787 - RNA, 22 nt, Human
ugacaucugggcccucagcuaa

SEQ ID NO: 701788 - RNA, 22 nt, Human
ggccagagucuauaugcagaca

SEQ ID NO: 701789 - RNA, 22 nt, Human
ugcaaucucggcacuuugggag

SEQ ID NO: 701790 - RNA, 19 nt, Human
gcuuuuuguugucaaaggu

SEQ ID NO: 701791 - RNA, 22 nt, Human
ugagaaagacagacauuccuaa

SEQ ID NO: 701792 - RNA, 23 nt, Human
uuuaugcugugauucacccagcc

SEQ ID NO: 701793 - RNA, 21 nt, Human
aaauugccacacauuucuucc

SEQ ID NO: 701794 - RNA, 22 nt, Human
augcaguaaauguuaagaaaaa

SEQ ID NO: 701795 - RNA, 22 nt, Human
ugaaugaucuaguuuuguagac

SEQ ID NO: 701796 - RNA, 22 nt, Human
uagcugccuagacagcuauagc

SEQ ID NO: 701797 - RNA, 22 nt, Human
gacagcuggcaguggaaaggug

SEQ ID NO: 701798 - RNA, 22 nt, Human
ggcuggaccaugcugccccuuc

SEQ ID NO: 701799 - RNA, 22 nt, Human
aguggcugcuucugguugcucc

SEQ ID NO: 701800 - RNA, 22 nt, Human
aaucaguuucuuggcaaguuua

SEQ ID NO: 701801 - RNA, 22 nt, Human
cuucuuccaguuauaagagcuu

SEQ ID NO: 701802 - RNA, 22 nt, Human
ugcuuuuagcuaguaacuagua

SEQ ID NO: 701803 - RNA, 22 nt, Human
uccugcaggggcugaggaacca

SEQ ID NO: 701804 - RNA, 22 nt, Human
gacagcugugcaggagaagggg

SEQ ID NO: 701805 - RNA, 22 nt, Human
cagguccucgggggaggccggc

SEQ ID NO: 701806 - RNA, 22 nt, Human
auuguucauguaugaauaaaua

SEQ ID NO: 701807 - RNA, 22 nt, Human
uugaaacauuaccuguauuucc

SEQ ID NO: 701808 - RNA, 22 nt, Human
gagcagcacuugaggcauguca

SEQ ID NO: 701809 - RNA, 22 nt, Human
uccaggcaggguuaaggguccu

SEQ ID NO: 701810 - RNA, 22 nt, Human
uccuggagagaggccuggaaga

SEQ ID NO: 701811 - RNA, 22 nt, Human
aguccaugcugucuacagaauc

SEQ ID NO: 701812 - RNA, 22 nt, Human
aggugcagaaaaaaguccuuua

SEQ ID NO: 701813 - RNA, 22 nt, Human
ugauuuccugugcgcccuuagg

SEQ ID NO: 701814 - RNA, 22 nt, Human
cugagguccuugacugcuugcc

SEQ ID NO: 701815 - RNA, 22 nt, Human
cauccugacuguaacuaagaga

SEQ ID NO: 701816 - RNA, 22 nt, Human
acauguaaaagauaaauuaaca

SEQ ID NO: 701817 - RNA, 22 nt, Human
accccagcgcauauggucugcg

SEQ ID NO: 701818 - RNA, 22 nt, Human
auuugucaaaacacagagaaca

SEQ ID NO: 701819 - RNA, 22 nt, Human
uugccaggcucugguuccagcc

SEQ ID NO: 701820 - RNA, 22 nt, Human
aauaaugagcuugucuaauugu

SEQ ID NO: 701821 - RNA, 22 nt, Human
ccagcuuucauaucaugaggua

SEQ ID NO: 701822 - RNA, 22 nt, Human
gccagggggucagcaggcacuu

SEQ ID NO: 701823 - RNA, 22 nt, Human
ggcucagaaaccucuggugucu

SEQ ID NO: 701824 - RNA, 22 nt, Human
guauaaaguauaagcuuguuuu

SEQ ID NO: 701825 - RNA, 22 nt, Human
gaauugcuaaccaauucaaaau

SEQ ID NO: 701826 - RNA, 22 nt, Human
ggacaaauucccuauuugcaug

SEQ ID NO: 701827 - RNA, 23 nt, Human
agaggcacuaauuauucagagau

SEQ ID NO: 701828 - RNA, 22 nt, Human
gucaaagaaacgcaccuuacau

SEQ ID NO: 701829 - RNA, 22 nt, Human
aagccacucacaauaacugucc

SEQ ID NO: 701830 - RNA, 22 nt, Human
aguggcagaagucacuggguag

SEQ ID NO: 701831 - RNA, 22 nt, Human
ucucugggaguugagcagcagc

SEQ ID NO: 701832 - RNA, 22 nt, Human
ucccugcacagccgagccaugc

SEQ ID NO: 701833 - RNA, 22 nt, Human
cuuaaauuggaugaguuaaguu

SEQ ID NO: 701834 - RNA, 22 nt, Human
augcauguuuauagggugcuuc

SEQ ID NO: 701835 - RNA, 18 nt, Human
aaugcauuuauggagaug

SEQ ID NO: 701836 - RNA, 20 nt, Human
acaggcuuucugaggcuggc

SEQ ID NO: 701837 - RNA, 22 nt, Human
ccaauucaccuccuaugcacau

SEQ ID NO: 701838 - RNA, 22 nt, Human
agugcuggguacuguucccauu

SEQ ID NO: 701839 - RNA, 18 nt, Human
ggccucuggacuggcagc

SEQ ID NO: 701840 - RNA, 22 nt, Human
ucuucucccaucggccgcaggg

SEQ ID NO: 701841 - RNA, 22 nt, Human
aauaacuucaguucuuacauua

SEQ ID NO: 701842 - RNA, 22 nt, Human
aauuggcaagcaaguuauccag

SEQ ID NO: 701843 - RNA, 22 nt, Human
guuuccagccuagagaugguga

SEQ ID NO: 701844 - RNA, 22 nt, Human
acugggcuguuccuuauuucua

SEQ ID NO: 701845 - RNA, 22 nt, Human
aggaggccuacgcacaugucua

SEQ ID NO: 701846 - RNA, 22 nt, Human
aucugaaaagcuuuaaugagcu

SEQ ID NO: 701847 - RNA, 22 nt, Human
ggaggagcacuugacggggucu

SEQ ID NO: 701848 - RNA, 23 nt, Human
ugggccucuccacccuuuucugu

SEQ ID NO: 701849 - RNA, 22 nt, Human
acauucuguuuccccaaagaga

SEQ ID NO: 701850 - RNA, 22 nt, Human
ugcagaacgggucuucuagcac

SEQ ID NO: 701851 - RNA, 22 nt, Human
ccagggcagugggagaaggugc

SEQ ID NO: 701852 - RNA, 22 nt, Human
agggcccuaaggaaggcacaca

SEQ ID NO: 701853 - RNA, 22 nt, Human
aauaacagagucuucaagauag

SEQ ID NO: 701854 - RNA, 22 nt, Human
uuagauguggacuuauguuauu

SEQ ID NO: 701855 - RNA, 22 nt, Human
caggucagaggcgcagccccca

SEQ ID NO: 701856 - RNA, 22 nt, Human
gggcugcacagaucuucaaggg

SEQ ID NO: 701857 - RNA, 22 nt, Human
ugccacuggcucaauggugcag

SEQ ID NO: 701858 - RNA, 19 nt, Human
ucucuauauuuguuucuga

SEQ ID NO: 701859 - RNA, 23 nt, Human
ucuucauggccaucugguucuuc

SEQ ID NO: 701860 - RNA, 22 nt, Human
agcucagggcaaagacucaaau

SEQ ID NO: 701861 - RNA, 22 nt, Human
gagcccuccauggagccaggca

SEQ ID NO: 701862 - RNA, 22 nt, Human
gagggucccgagcccugucaga

SEQ ID NO: 701863 - RNA, 22 nt, Human
ugccauugggcagucauugaag

SEQ ID NO: 701864 - RNA, 22 nt, Human
uaugcauuuuauagugcaaagc

SEQ ID NO: 701865 - RNA, 22 nt, Human
gcaggcagagucaauuugaucc

SEQ ID NO: 701866 - RNA, 22 nt, Human
uccuugaauggacauuacacug

SEQ ID NO: 701867 - RNA, 23 nt, Human
gcuuuuaaaccugugacugccgc

SEQ ID NO: 701868 - RNA, 18 nt, Human
uuggaggauguccaugaa

SEQ ID NO: 701869 - RNA, 22 nt, Human
cugacucccuccccaaagcugg

SEQ ID NO: 701870 - RNA, 22 nt, Human
auguccagagaacauuugcuuu

SEQ ID NO: 701871 - RNA, 22 nt, Human
cugggcugagccugggcugugu

SEQ ID NO: 701872 - RNA, 22 nt, Human
caguuuaaguagaacugagaau

SEQ ID NO: 701873 - RNA, 22 nt, Human
agggcaauccagccagcugauc

SEQ ID NO: 701874 - RNA, 22 nt, Human
uugaaugcaucuuugagcuccu

SEQ ID NO: 701875 - RNA, 22 nt, Human
uaguuuaggauccaaucuaaga

SEQ ID NO: 701876 - RNA, 22 nt, Human
agacucugauaagcaacucuug

SEQ ID NO: 701877 - RNA, 22 nt, Human
ucugagggaauagcuauuguag

SEQ ID NO: 701878 - RNA, 22 nt, Human
gcgggcgcucaggcugcagcug

SEQ ID NO: 701879 - RNA, 20 nt, Human
ugaguggccacugggucgca

SEQ ID NO: 701880 - RNA, 22 nt, Human
ggggccuuggaucugugccccg

SEQ ID NO: 701881 - RNA, 22 nt, Human
ucuucaaaaacugcaccuugcu

SEQ ID NO: 701882 - RNA, 23 nt, Human
uuucacauuaauguuuagcagga

SEQ ID NO: 701883 - RNA, 22 nt, Human
ugcacagaauaauauauguucu

SEQ ID NO: 701884 - RNA, 22 nt, Human
aagauuucagaguuugggggaa

SEQ ID NO: 701885 - RNA, 22 nt, Human
acuuucuccagaaaaccaagga

SEQ ID NO: 701886 - RNA, 22 nt, Human
uucucauggugucuuuauacau

SEQ ID NO: 701887 - RNA, 22 nt, Human
uguccuggccuccagaaagucg

SEQ ID NO: 701888 - RNA, 22 nt, Human
cuuguuuuggaacagagugaau

SEQ ID NO: 701889 - RNA, 22 nt, Human
ugggaagaagcagagaacugga

SEQ ID NO: 701890 - RNA, 22 nt, Human
aacaguuuauguaaauguccag

SEQ ID NO: 701891 - RNA, 22 nt, Human
ugggcugagaguaccuuauaaa

SEQ ID NO: 701892 - RNA, 22 nt, Human
agaguuugaaguuaucuuugac

SEQ ID NO: 701893 - RNA, 22 nt, Human
agugaugguuuccagucacuga

SEQ ID NO: 701894 - RNA, 22 nt, Human
aaagcaugugaauagaauaugg

SEQ ID NO: 701895 - RNA, 22 nt, Human
ugcaugcucaaguuaguuguga

SEQ ID NO: 701896 - RNA, 22 nt, Human
uguacaaaguuaaaccuauaua

SEQ ID NO: 701897 - RNA, 22 nt, Human
ucugccugccgagaacaccuac

SEQ ID NO: 701898 - RNA, 22 nt, Human
ggcggguguaaguaggacagcg

SEQ ID NO: 701899 - RNA, 19 nt, Human
gggagagccaggcucaccc

SEQ ID NO: 701900 - RNA, 23 nt, Human
cccuguagcccaggacaggcuuu

SEQ ID NO: 701901 - RNA, 17 nt, Human
gcagacacuucuauuga

SEQ ID NO: 701902 - RNA, 22 nt, Human
gcacuggaggguguaguugcug

SEQ ID NO: 701903 - RNA, 22 nt, Human
uccagagcaugcagaucaucaa

SEQ ID NO: 701904 - RNA, 22 nt, Human
agcugggccugagcuggaagcu

SEQ ID NO: 701905 - RNA, 22 nt, Human
cugucccuucauuauucacuac

SEQ ID NO: 701906 - RNA, 22 nt, Human
uucuggaaccaacaugccaguu

SEQ ID NO: 701907 - RNA, 22 nt, Human
uuauucugaacuagacucucau

SEQ ID NO: 701908 - RNA, 22 nt, Human
gagggcugauguugccaccuca

SEQ ID NO: 701909 - RNA, 22 nt, Human
acagaaaugauguuuggcaaua

SEQ ID NO: 701910 - RNA, 22 nt, Human
accagcuguuaucuguaguauc

SEQ ID NO: 701911 - RNA, 23 nt, Human
aaacuugcuauggcugaaaucau

SEQ ID NO: 701912 - RNA, 20 nt, Human
aggcacuggauuucuuauau

SEQ ID NO: 701913 - RNA, 22 nt, Human
uuagacauagaauauugucuag

SEQ ID NO: 701914 - RNA, 22 nt, Human
ucccuggcacaagaaggcuguc

SEQ ID NO: 701915 - RNA, 22 nt, Human
gugauccgaugucagucgcaga

SEQ ID NO: 701916 - RNA, 22 nt, Human
uuuugugacacuucuugagaca

SEQ ID NO: 701917 - RNA, 22 nt, Human
uauagcaagcaggacagucuca

SEQ ID NO: 701918 - RNA, 22 nt, Human
ucugaggacagugcugugccug

SEQ ID NO: 701919 - RNA, 22 nt, Human
uuagaggugucaggagcacagg

SEQ ID NO: 701920 - RNA, 22 nt, Human
uggagcugggaguccugggcug

SEQ ID NO: 701921 - RNA, 22 nt, Human
uuuguguuuguacaaugcacua

SEQ ID NO: 701922 - RNA, 22 nt, Human
aauagcaaaugcucauuugaaa

SEQ ID NO: 701923 - RNA, 18 nt, Human
gcugcgugggaugugacc

SEQ ID NO: 701924 - RNA, 22 nt, Human
cgcuaggauuaggauuaauccu

SEQ ID NO: 701925 - RNA, 22 nt, Human
aagaacuguaucaagauguagu

SEQ ID NO: 701926 - RNA, 22 nt, Human
ucagagguggccccugcccuca

SEQ ID NO: 701927 - RNA, 22 nt, Human
cuccuggaugcaggcugucugc

SEQ ID NO: 701928 - RNA, 22 nt, Human
ugcucuggagggugaagcuuuu

SEQ ID NO: 701929 - RNA, 22 nt, Human
cuaguucuagaucccugaggaa

SEQ ID NO: 701930 - RNA, 17 nt, Human
gacuucaacuucugcug

SEQ ID NO: 701931 - RNA, 22 nt, Human
cuggcccccacaccugucaggg

SEQ ID NO: 701932 - RNA, 22 nt, Human
cuuggagauucauugccugaaa

SEQ ID NO: 701933 - RNA, 22 nt, Human
ugaggcagguggauuacaaggu

SEQ ID NO: 701934 - RNA, 22 nt, Human
ccuggcauguccuccuggcaug

SEQ ID NO: 701935 - RNA, 22 nt, Human
ggggcugguggugguuucucca

SEQ ID NO: 701936 - RNA, 22 nt, Human
uccauguggccagacacuggca

SEQ ID NO: 701937 - RNA, 22 nt, Human
ccugcagucuacccaaugugug

SEQ ID NO: 701938 - RNA, 22 nt, Human
uacucucaggguuaguacagga

SEQ ID NO: 701939 - RNA, 22 nt, Human
uauuccaugccagaguuuauug

SEQ ID NO: 701940 - RNA, 22 nt, Human
ucaggcugggcuccucucccca

SEQ ID NO: 701941 - RNA, 22 nt, Human
gagcagaacaggccggguggga

SEQ ID NO: 701942 - RNA, 22 nt, Human
cucugcuuuccucuuacacacu

SEQ ID NO: 701943 - RNA, 22 nt, Human
auucucuggguuccaguaaaug

SEQ ID NO: 701944 - RNA, 22 nt, Human
gguguuaaacaugauccauuac

SEQ ID NO: 701945 - RNA, 22 nt, Human
cuucagagugcagaagauuggg

SEQ ID NO: 701946 - RNA, 17 nt, Human
agcccccacucccaagu

SEQ ID NO: 701947 - RNA, 22 nt, Human
ugaagacagggucuuuaacgag

SEQ ID NO: 701948 - RNA, 22 nt, Human
cagagccucugcccugggcacu

SEQ ID NO: 701949 - RNA, 22 nt, Human
acacaguauugugacuauaacu

SEQ ID NO: 701950 - RNA, 22 nt, Human
ggucuugaaggacauccagucc

SEQ ID NO: 701951 - RNA, 19 nt, Human
ccucccacggauuccuucc

SEQ ID NO: 701952 - RNA, 22 nt, Human
cuguugucuccucucagauuau

SEQ ID NO: 701953 - RNA, 22 nt, Human
caauacaucaggucaaaaugug

SEQ ID NO: 701954 - RNA, 22 nt, Human
uuugaucaugaagaggauaaac

SEQ ID NO: 701955 - RNA, 22 nt, Human
ucagcauuucagaaguggcaua

SEQ ID NO: 701956 - RNA, 22 nt, Human
gugggagcuucaucaagcaguu

SEQ ID NO: 701957 - RNA, 22 nt, Human
uauuugcucaauaauaguuuua

SEQ ID NO: 701958 - RNA, 22 nt, Human
augcaaauucuuugcuucuucu

SEQ ID NO: 701959 - RNA, 22 nt, Human
cagccagcuggugcggcagagc

SEQ ID NO: 701960 - RNA, 22 nt, Human
auguuucuaaaacuugcauggc

SEQ ID NO: 701961 - RNA, 22 nt, Human
ggugcugacauucagagucugg

SEQ ID NO: 701962 - RNA, 22 nt, Human
aagcacagcuggaacagcagga

SEQ ID NO: 701963 - RNA, 22 nt, Human
aaacugcacacgaugugccuga

SEQ ID NO: 701964 - RNA, 22 nt, Human
cagcugcccugccuugcccuua

SEQ ID NO: 701965 - RNA, 22 nt, Human
cuguucauggaaaaauaguugg

SEQ ID NO: 701966 - RNA, 22 nt, Human
ugacaaugacauggacagugau

SEQ ID NO: 701967 - RNA, 22 nt, Human
ccugggcugggcgucucauggg

SEQ ID NO: 701968 - RNA, 22 nt, Human
ucuccagggcagagaauagcaa

SEQ ID NO: 701969 - RNA, 22 nt, Human
gcaguggcaccgcuggcucugg

SEQ ID NO: 701970 - RNA, 22 nt, Human
ucagccacuacccaccuuaaca

SEQ ID NO: 701971 - RNA, 22 nt, Human
aggaauugguucaagguuuauc

SEQ ID NO: 701972 - RNA, 22 nt, Human
gggccuccggggugagcugugg

SEQ ID NO: 701973 - RNA, 22 nt, Human
acugggcccauauacucagucu

SEQ ID NO: 701974 - RNA, 22 nt, Human
gcuccuguuuucuuccagaaau

SEQ ID NO: 701975 - RNA, 23 nt, Human
uggagaauucuuccuuccacugu

SEQ ID NO: 701976 - RNA, 22 nt, Human
uccauccacccugcauuauauu

SEQ ID NO: 701977 - RNA, 21 nt, Human
gaaaagcaagggaguagaaca

SEQ ID NO: 701978 - RNA, 22 nt, Human
gcaggccaagcccucgcagaga

SEQ ID NO: 701979 - RNA, 22 nt, Human
ggauggagaugaccauggugac

SEQ ID NO: 701980 - RNA, 22 nt, Human
agugacuggugugaaguuaaau

SEQ ID NO: 701981 - RNA, 22 nt, Human
uccaggccuuugcacauguugu

SEQ ID NO: 701982 - RNA, 19 nt, Human
uguucagauaugucagcuu

SEQ ID NO: 701983 - RNA, 22 nt, Human
cuucaaaugugauuuuaauaac

SEQ ID NO: 701984 - RNA, 22 nt, Human
cuggccaggagguaaccagaug

SEQ ID NO: 701985 - RNA, 22 nt, Human
gguuucaaauuaaagucuuaag

SEQ ID NO: 701986 - RNA, 22 nt, Human
agacuucacucccagagauucu

SEQ ID NO: 701987 - RNA, 22 nt, Human
ggcucacacaugacugggcucu

SEQ ID NO: 701988 - RNA, 22 nt, Human
uggccuggggaagaccaugggc

SEQ ID NO: 701989 - RNA, 22 nt, Human
gacagaauuuuccaucaugugg

SEQ ID NO: 701990 - RNA, 22 nt, Human
cucugagggcucgagggacgcg

SEQ ID NO: 701991 - RNA, 22 nt, Human
aguguccuggcaaggguuucag

SEQ ID NO: 701992 - RNA, 19 nt, Human
agauuuaccucauauaguu

SEQ ID NO: 701993 - RNA, 22 nt, Human
gcuucucuggcuggucugccac

SEQ ID NO: 701994 - RNA, 22 nt, Human
cugccuugguucccagccagca

SEQ ID NO: 701995 - RNA, 22 nt, Human
uggggacugacagccaggccuc

SEQ ID NO: 701996 - RNA, 22 nt, Human
ugcucagagcucuggugcaggu

SEQ ID NO: 701997 - RNA, 22 nt, Human
uuagaaccaggguuacgauucu

SEQ ID NO: 701998 - RNA, 22 nt, Human
gaguagacauuaaauuacacug

SEQ ID NO: 701999 - RNA, 22 nt, Human
gaggccaacuuuggagaacagg

SEQ ID NO: 702000 - RNA, 22 nt, Human
cacaugaucgucaugugaaagu

SEQ ID NO: 702001 - RNA, 22 nt, Human
gagguugggaugagggauacag

SEQ ID NO: 702002 - RNA, 22 nt, Human
uuauacaggagauuccuuacuu

SEQ ID NO: 702003 - RNA, 22 nt, Human
cucccugugucuucacuuggcc

SEQ ID NO: 702004 - RNA, 22 nt, Human
guccuccauggucuugaaguaa

SEQ ID NO: 702005 - RNA, 22 nt, Human
aggcuuggcuggcagcccuggg

SEQ ID NO: 702006 - RNA, 22 nt, Human
gccucucuccuuggcuugcagu

SEQ ID NO: 702007 - RNA, 22 nt, Human
cagcucagcuuccugggugugu

SEQ ID NO: 702008 - RNA, 22 nt, Human
cucugcagaauuugagcugcuc

SEQ ID NO: 702009 - RNA, 19 nt, Human
cagaggcaccagguauaga

SEQ ID NO: 702010 - RNA, 22 nt, Human
agcuggguguucuugggccuaa

SEQ ID NO: 702011 - RNA, 22 nt, Human
cuggaggaauaaucuccuaccc

SEQ ID NO: 702012 - RNA, 22 nt, Human
aggaaacuggguaugguuauac

SEQ ID NO: 702013 - RNA, 22 nt, Human
ggccaagguguucugauaugcc

SEQ ID NO: 702014 - RNA, 22 nt, Human
uggcaggcaaguucagcuccac

SEQ ID NO: 702015 - RNA, 20 nt, Human
cugaaaggagucgggauguc

SEQ ID NO: 702016 - RNA, 22 nt, Human
uggcuaugaggagcgcaggugu

SEQ ID NO: 702017 - RNA, 22 nt, Human
cagaaacacuguauuuagggaa

SEQ ID NO: 702018 - RNA, 22 nt, Human
auuuauugagccuuuccuaugu

SEQ ID NO: 702019 - RNA, 22 nt, Human
ugaugcaauguuuacaucuuga

SEQ ID NO: 702020 - RNA, 22 nt, Human
uucuuccucuguaaaaggugac

SEQ ID NO: 702021 - RNA, 22 nt, Human
ucugcccuuggcucucuuguug

SEQ ID NO: 702022 - RNA, 22 nt, Human
uggcugucagucgccugcauuc

SEQ ID NO: 702023 - RNA, 22 nt, Human
ugagagagggaugcacccuccu

SEQ ID NO: 702024 - RNA, 22 nt, Human
ucugagaguacgggcugcgcgc

SEQ ID NO: 702025 - RNA, 22 nt, Human
acccagguggcucugacggggg

SEQ ID NO: 702026 - RNA, 22 nt, Human
acugggcaucccauggcagagc

SEQ ID NO: 702027 - RNA, 22 nt, Human
caccuuguggcccagucagguu

SEQ ID NO: 702028 - RNA, 22 nt, Human
ugugcacaggaagcuauucucu

SEQ ID NO: 702029 - RNA, 22 nt, Human
ucaccaauaauaacuugagaau

SEQ ID NO: 702030 - RNA, 21 nt, Human
ucacauuucucauggguaaau

SEQ ID NO: 702031 - RNA, 22 nt, Human
ugcugcauuuaucuucucaaac

SEQ ID NO: 702032 - RNA, 22 nt, Human
uugagggauuuacagagguggg

SEQ ID NO: 702033 - RNA, 22 nt, Human
uuccucuauucuaacaaaagua

SEQ ID NO: 702034 - RNA, 22 nt, Human
cuuguuaucuccguguccuugu

SEQ ID NO: 702035 - RNA, 22 nt, Human
caggcacuagcagaaugaggcu

SEQ ID NO: 702036 - RNA, 22 nt, Human
agucaguggauuuaccaugcgu

SEQ ID NO: 702037 - RNA, 22 nt, Human
gaaacauuguguucuacagauu

SEQ ID NO: 702038 - RNA, 20 nt, Human
uuggcucagauuuuuauggg

SEQ ID NO: 702039 - RNA, 22 nt, Human
ugaguuaaucucuacgauagaa

SEQ ID NO: 702040 - RNA, 22 nt, Human
uccagguccagagguucaacug

SEQ ID NO: 702041 - RNA, 22 nt, Human
uaauaguuaugguugguucuca

SEQ ID NO: 702042 - RNA, 21 nt, Human
gcacaugagggagggcaugcc

SEQ ID NO: 702043 - RNA, 22 nt, Human
uuugacagugaugauauauaca

SEQ ID NO: 702044 - RNA, 22 nt, Human
agagccaggaaguggcgugggg

SEQ ID NO: 702045 - RNA, 22 nt, Human
agcacuguggggaacucacaga

SEQ ID NO: 702046 - RNA, 22 nt, Human
ggccccagcagacccuccucug

SEQ ID NO: 702047 - RNA, 22 nt, Human
gccuuuggagaugucauaggau

SEQ ID NO: 702048 - RNA, 22 nt, Human
ugcuucaggagaugucaccaug

SEQ ID NO: 702049 - RNA, 22 nt, Human
ucucucuccuaguuuuuagugg

SEQ ID NO: 702050 - RNA, 22 nt, Human
uuauucuuuaaacauauauguu

SEQ ID NO: 702051 - RNA, 22 nt, Human
ucuuagcacagcuauauaaguu

SEQ ID NO: 702052 - RNA, 22 nt, Human
cccugagcgugaggaggaagua

SEQ ID NO: 702053 - RNA, 22 nt, Human
agagcaccccgggaagagcaag

SEQ ID NO: 702054 - RNA, 22 nt, Human
ucuggcaucuguuuucauauuu

SEQ ID NO: 702055 - RNA, 22 nt, Human
uggaaaacaugcacauuggauu

SEQ ID NO: 702056 - RNA, 22 nt, Human
cugggaaguagaaucagaugag

SEQ ID NO: 702057 - RNA, 22 nt, Human
gcucugccuggucgcgugcugg

SEQ ID NO: 702058 - RNA, 22 nt, Human
ucaccuaauugaagucaggagu

SEQ ID NO: 702059 - RNA, 23 nt, Human
cagcugaagcagccugggcugga

SEQ ID NO: 702060 - RNA, 22 nt, Human
ccucagagccuccagaaggaau

SEQ ID NO: 702061 - RNA, 22 nt, Human
ugccuguggaaaggcuggugcu

SEQ ID NO: 702062 - RNA, 22 nt, Human
agguguggcuugaagucucuau

SEQ ID NO: 702063 - RNA, 22 nt, Human
gaguggggcgaagucggcgagu

SEQ ID NO: 702064 - RNA, 22 nt, Human
cgguccuggcacuugcggcucc

SEQ ID NO: 702065 - RNA, 22 nt, Human
cugggucccggcuucuauccac

SEQ ID NO: 702066 - RNA, 22 nt, Human
ccagaagagaucacaguucuug

SEQ ID NO: 702067 - RNA, 22 nt, Human
acuccucagccagcaucaggga

SEQ ID NO: 702068 - RNA, 22 nt, Human
guaagcacaugugugugcaugg

SEQ ID NO: 702069 - RNA, 22 nt, Human
gcggcgccuaagccccgaccuc

SEQ ID NO: 702070 - RNA, 22 nt, Human
cugaggagucaguuccacucag

SEQ ID NO: 702071 - RNA, 22 nt, Human
uugagcaaugcugcaaagagau

SEQ ID NO: 702072 - RNA, 19 nt, Human
gcagccaccgcggcggccg

SEQ ID NO: 702073 - RNA, 22 nt, Human
aggaaagcuuggcaaacuaaau

SEQ ID NO: 702074 - RNA, 22 nt, Human
ggucuggaagcgcaguaggcug

SEQ ID NO: 702075 - RNA, 22 nt, Human
ucugggcuggcuuuaugcugac

SEQ ID NO: 702076 - RNA, 22 nt, Human
agaggcucuaauaccagcaugg

SEQ ID NO: 702077 - RNA, 22 nt, Human
cacaauuuggggugcccacugu

SEQ ID NO: 702078 - RNA, 22 nt, Human
auugucgcuuauuuaggugcuu

SEQ ID NO: 702079 - RNA, 22 nt, Human
caugcuuuucaaucuaucuuaa

SEQ ID NO: 702080 - RNA, 23 nt, Human
ucucauuucccuugaucuaucuu

SEQ ID NO: 702081 - RNA, 22 nt, Human
gcuggacccggccccucaccuc

SEQ ID NO: 702082 - RNA, 22 nt, Human
uuccugaugcacacagucauuu

SEQ ID NO: 702083 - RNA, 22 nt, Human
ugucucuuggcucuaucacuua

SEQ ID NO: 702084 - RNA, 22 nt, Human
agaaaguuuugugcuauauaug

SEQ ID NO: 702085 - RNA, 22 nt, Human
uuuagcauguuccuuucauaga

SEQ ID NO: 702086 - RNA, 22 nt, Human
uucugaaauaggagauagcugu

SEQ ID NO: 702087 - RNA, 22 nt, Human
ccauccuaucugaccuacuugu

SEQ ID NO: 702088 - RNA, 22 nt, Human
gccccagcccuguggaccaugg

SEQ ID NO: 702089 - RNA, 22 nt, Human
aguuucccccuucacagcuuaa

SEQ ID NO: 702090 - RNA, 22 nt, Human
gaaaauuauugaaaauggcucu

SEQ ID NO: 702091 - RNA, 22 nt, Human
agcacacagucuuccuuccucc

SEQ ID NO: 702092 - RNA, 22 nt, Human
cugugucucccaaggaggguca

SEQ ID NO: 702093 - RNA, 22 nt, Human
gcugcagggagcuggaaggcuc

SEQ ID NO: 702094 - RNA, 22 nt, Human
agggcugccugcucugcauuga

SEQ ID NO: 702095 - RNA, 22 nt, Human
ggugagugucaaugguuagagu

SEQ ID NO: 702096 - RNA, 22 nt, Human
gaagcagcuagcccacuaguca

SEQ ID NO: 702097 - RNA, 22 nt, Human
ugugcagagcccacaggcagcu

SEQ ID NO: 702098 - RNA, 22 nt, Human
uccaugcucuugucuagccucc

SEQ ID NO: 702099 - RNA, 22 nt, Human
auguggcuaguggacacaguau

SEQ ID NO: 702100 - RNA, 22 nt, Human
gcauuuguguucuuccuagagc

SEQ ID NO: 702101 - RNA, 22 nt, Human
uuagauaaauugcaacuugauu

SEQ ID NO: 702102 - RNA, 22 nt, Human
uuagacaggauguaugaaagcu

SEQ ID NO: 702103 - RNA, 23 nt, Human
ggccuccuggucuaggcuagacu

SEQ ID NO: 702104 - RNA, 22 nt, Human
gccagggcaggggagcaucugc

SEQ ID NO: 702105 - RNA, 22 nt, Human
uugugugcugagggccugcugu

SEQ ID NO: 702106 - RNA, 22 nt, Human
uauuuuacuauuuggcaaaguc

SEQ ID NO: 702107 - RNA, 22 nt, Human
gccucugcaauuacauugugcc

SEQ ID NO: 702108 - RNA, 22 nt, Human
uuuagacaucuauaauugcuaa

SEQ ID NO: 702109 - RNA, 22 nt, Human
ugaggcagcaauuguauuguau

SEQ ID NO: 702110 - RNA, 22 nt, Human
cagaauaauauuggucucauag

SEQ ID NO: 702111 - RNA, 17 nt, Human
ggacugggcggggcagg

SEQ ID NO: 702112 - RNA, 22 nt, Human
agcuucucagaagaguccugua

SEQ ID NO: 702113 - RNA, 22 nt, Human
ugguuucacggagugccuugcu

SEQ ID NO: 702114 - RNA, 21 nt, Human
aggucagcccagcucuggaag

SEQ ID NO: 702115 - RNA, 22 nt, Human
gcugggaagagaugcacaugau

SEQ ID NO: 702116 - RNA, 19 nt, Human
ucagugugacuuggucagu

SEQ ID NO: 702117 - RNA, 22 nt, Human
cagcaugauuggugucugguga

SEQ ID NO: 702118 - RNA, 22 nt, Human
ugguggcagugagaaggagagg

SEQ ID NO: 702119 - RNA, 22 nt, Human
cacaggcuuccaguccccagcu

SEQ ID NO: 702120 - RNA, 22 nt, Human
cugugagugacccuggucagca

SEQ ID NO: 702121 - RNA, 22 nt, Human
caaguuuuagaaauaucuggau

SEQ ID NO: 702122 - RNA, 19 nt, Human
cagcaaacacuguaaaugg

SEQ ID NO: 702123 - RNA, 22 nt, Human
aaacuuuuucuuagguaugucu

SEQ ID NO: 702124 - RNA, 22 nt, Human
acaugaaaaauguuugcaguuu

SEQ ID NO: 702125 - RNA, 22 nt, Human
cagauucuucuguauuuuugcu

SEQ ID NO: 702126 - RNA, 22 nt, Human
ggcagugaacagaaaugcagaa

SEQ ID NO: 702127 - RNA, 23 nt, Human
ugccucugccucccuagucugca

SEQ ID NO: 702128 - RNA, 22 nt, Human
uuucagaaauggcacugaaauc

SEQ ID NO: 702129 - RNA, 22 nt, Human
agacaacaugaucagcaguccu

SEQ ID NO: 702130 - RNA, 22 nt, Human
gucguggagcucacagugugcc

SEQ ID NO: 702131 - RNA, 22 nt, Human
ucagugugcacaugguagcagu

SEQ ID NO: 702132 - RNA, 22 nt, Human
caguacauaaugcgcaaaaccg

SEQ ID NO: 702133 - RNA, 22 nt, Human
ggagggcuguagaggagaccug

SEQ ID NO: 702134 - RNA, 22 nt, Human
ugggcugccggcaggcucugcc

SEQ ID NO: 702135 - RNA, 22 nt, Human
aaggaaaugaagcugauguugg

SEQ ID NO: 702136 - RNA, 22 nt, Human
aaagaucaauagauaaagcuac

SEQ ID NO: 702137 - RNA, 18 nt, Human
ugucugcuucuccaacuc

SEQ ID NO: 702138 - RNA, 22 nt, Human
ccuagccuucggccuacccauc

SEQ ID NO: 702139 - RNA, 22 nt, Human
uagcagugccaggauuuugcug

SEQ ID NO: 702140 - RNA, 22 nt, Human
augggugugaaaauggucaucu

SEQ ID NO: 702141 - RNA, 22 nt, Human
gcaaauugggaaauuucucuag

SEQ ID NO: 702142 - RNA, 22 nt, Human
agucacauuugggggugucaaa

SEQ ID NO: 702143 - RNA, 22 nt, Human
aucuucucaagcagcauccugu

SEQ ID NO: 702144 - RNA, 22 nt, Human
uugcuuuagguauagaauccau

SEQ ID NO: 702145 - RNA, 22 nt, Human
aucuuuggugcaugauacuuug

SEQ ID NO: 702146 - RNA, 19 nt, Human
uucuaccuuacuguaggcu

SEQ ID NO: 702147 - RNA, 22 nt, Human
uuggcugugagggguugcacag

SEQ ID NO: 702148 - RNA, 22 nt, Human
ggcagcccaccagcccacgucu

SEQ ID NO: 702149 - RNA, 22 nt, Human
gugcugcagagucucgugccgc

SEQ ID NO: 702150 - RNA, 22 nt, Human
ggauacaagguguucuaucacu

SEQ ID NO: 702151 - RNA, 22 nt, Human
uagcaaggcuuccaaugaacag

SEQ ID NO: 702152 - RNA, 22 nt, Human
cacaagggagcuuagaaaacau

SEQ ID NO: 702153 - RNA, 22 nt, Human
ugucuuuuauaacugacauaua

SEQ ID NO: 702154 - RNA, 22 nt, Human
auguuucaaauauauagaguug

SEQ ID NO: 702155 - RNA, 22 nt, Human
ucagaaguuucaaucccagcug

SEQ ID NO: 702156 - RNA, 22 nt, Human
gagggcaccuucaguaauagcu

SEQ ID NO: 702157 - RNA, 22 nt, Human
aauuugauuuucuuaaaccaua

SEQ ID NO: 702158 - RNA, 22 nt, Human
gagcagugaugggaggacguca

SEQ ID NO: 702159 - RNA, 22 nt, Human
caugauuuacuaaaauuuguuu

SEQ ID NO: 702160 - RNA, 22 nt, Human
uuauucacucugaagccauccu

SEQ ID NO: 702161 - RNA, 22 nt, Human
auggcugggcuuuuagucagau

SEQ ID NO: 702162 - RNA, 22 nt, Human
ggugcccagagccaggaaugag

SEQ ID NO: 702163 - RNA, 22 nt, Human
ccagucccaggcagaaauccag

SEQ ID NO: 702164 - RNA, 22 nt, Human
gaagcagcugccagagaugucu

SEQ ID NO: 702165 - RNA, 19 nt, Human
gggcuucugggaucaagag

SEQ ID NO: 702166 - RNA, 22 nt, Human
ccucacacaguuaucucuucau

SEQ ID NO: 702167 - RNA, 23 nt, Human
ggagggcuucaucagacccccag

SEQ ID NO: 702168 - RNA, 22 nt, Human
uaucagcaacucagagcagucu

SEQ ID NO: 702169 - RNA, 22 nt, Human
gaggaaccaaucugugauauuc

SEQ ID NO: 702170 - RNA, 20 nt, Human
guugaaaguaauaugaugcu

SEQ ID NO: 702171 - RNA, 22 nt, Human
ccuuguguuuacaccugucuuu

SEQ ID NO: 702172 - RNA, 22 nt, Human
augcaacauccaauuccuuuug

SEQ ID NO: 702173 - RNA, 22 nt, Human
guaaaguucuauuugaauuuag

SEQ ID NO: 702174 - RNA, 22 nt, Human
uuuagcaacgaagcacucgaca

SEQ ID NO: 702175 - RNA, 22 nt, Human
aaacauguaauucugcuuaaga

SEQ ID NO: 702176 - RNA, 22 nt, Human
agcaaggggcagugaaagugug

SEQ ID NO: 702177 - RNA, 22 nt, Human
guauccuuugcggaaauuucua

SEQ ID NO: 702178 - RNA, 17 nt, Human
uaugcuuuucuucucca

SEQ ID NO: 702179 - RNA, 22 nt, Human
uacaguaaucuggacaugauuu

SEQ ID NO: 702180 - RNA, 23 nt, Human
uauggcuuacagugcuuuaggua

SEQ ID NO: 702181 - RNA, 22 nt, Human
cucagagcucagcuuuguuagu

SEQ ID NO: 702182 - RNA, 22 nt, Human
ggaaggcagaggugucgugggg

SEQ ID NO: 702183 - RNA, 22 nt, Human
gcaaauugcuagcuuucucugc

SEQ ID NO: 702184 - RNA, 22 nt, Human
guguaauuauauaaagaucuac

SEQ ID NO: 702185 - RNA, 22 nt, Human
cugugccucaguguccucgagu

SEQ ID NO: 702186 - RNA, 23 nt, Human
cucugcaggagagugggcagggc

SEQ ID NO: 702187 - RNA, 22 nt, Human
aguuuuugagaauuuacuaugu

SEQ ID NO: 702188 - RNA, 22 nt, Human
cuccagguauuacuguuuuccc

SEQ ID NO: 702189 - RNA, 22 nt, Human
gugcccugcaugccccggguau

SEQ ID NO: 702190 - RNA, 22 nt, Human
uuugaaaggagcuuuauccaga

SEQ ID NO: 702191 - RNA, 22 nt, Human
aagggcugaucucacuuucuuu

SEQ ID NO: 702192 - RNA, 22 nt, Human
ccacagucuaugcaacaagguc

SEQ ID NO: 702193 - RNA, 22 nt, Human
ccagagagcuacaaggcauaaa

SEQ ID NO: 702194 - RNA, 22 nt, Human
guguggcuagaagugucuuguu

SEQ ID NO: 702195 - RNA, 22 nt, Human
cucugggauagagccucggucu

SEQ ID NO: 702196 - RNA, 21 nt, Human
augacagaugcugcagaucgu

SEQ ID NO: 702197 - RNA, 18 nt, Human
gggcauggaugcagcauc

SEQ ID NO: 702198 - RNA, 22 nt, Human
cuggaauaaacgaucuucagca

SEQ ID NO: 702199 - RNA, 22 nt, Human
ggacccugcagccacccgacau

SEQ ID NO: 702200 - RNA, 21 nt, Human
aucuuuauuacgcagagaaga

SEQ ID NO: 702201 - RNA, 22 nt, Human
caagcagggauacugcagggag

SEQ ID NO: 702202 - RNA, 22 nt, Human
ugggagaugguucugagacuuu

SEQ ID NO: 702203 - RNA, 22 nt, Human
gcagugcugagaggugaucgga

SEQ ID NO: 702204 - RNA, 22 nt, Human
ugaggcagcccacuuuccuuag

SEQ ID NO: 702205 - RNA, 22 nt, Human
ugcuggaaauuccuaggaggua

SEQ ID NO: 702206 - RNA, 22 nt, Human
agucacugcuuugucccugugu

SEQ ID NO: 702207 - RNA, 22 nt, Human
agcaacagcccuguuucauuag

SEQ ID NO: 702208 - RNA, 22 nt, Human
ccagacuguggaguuccuggug

SEQ ID NO: 702209 - RNA, 22 nt, Human
aguauauuuguuaagauuauuc

SEQ ID NO: 702210 - RNA, 22 nt, Human
aagccuaggccuacucugguuu

SEQ ID NO: 702211 - RNA, 22 nt, Human
gugcugaauugugcucuuuaca

SEQ ID NO: 702212 - RNA, 22 nt, Human
uucugagacaauugagagucua

SEQ ID NO: 702213 - RNA, 22 nt, Human
agucucaucaggcauguaguca

SEQ ID NO: 702214 - RNA, 20 nt, Human
cuguggcaucuugaaggagg

SEQ ID NO: 702215 - RNA, 22 nt, Human
ggcaaauugcugcaauuacuua

SEQ ID NO: 702216 - RNA, 22 nt, Human
agcaaagcuaucucuauggaga

SEQ ID NO: 702217 - RNA, 22 nt, Human
uuucacauucuucugaaucuac

SEQ ID NO: 702218 - RNA, 20 nt, Human
uggcccuguuuucuccaggc

SEQ ID NO: 702219 - RNA, 22 nt, Human
gguaccaccaauucagcugcca

SEQ ID NO: 702220 - RNA, 22 nt, Human
gugcaaaaguaacugugguuuu

SEQ ID NO: 702221 - RNA, 22 nt, Human
uggcagcacuugaacuugagcc

SEQ ID NO: 702222 - RNA, 22 nt, Human
cugggaguacugggggauguca

SEQ ID NO: 702223 - RNA, 22 nt, Human
aaucacaaacgaauugauggaa

SEQ ID NO: 702224 - RNA, 22 nt, Human
aacugcaauuacuuuugcgcca

SEQ ID NO: 702225 - RNA, 22 nt, Human
aaaaggaucagauuuugagcag

SEQ ID NO: 702226 - RNA, 22 nt, Human
uugcaacaucugaacauuuauc

SEQ ID NO: 702227 - RNA, 22 nt, Human
caggaacauguuggaaagaaau

SEQ ID NO: 702228 - RNA, 22 nt, Human
gugugcagugagcaaaagaucu

SEQ ID NO: 702229 - RNA, 22 nt, Human
auaaagcaugcuuguuuggaga

SEQ ID NO: 702230 - RNA, 22 nt, Human
caggacagcucaacaccuccuc

SEQ ID NO: 702231 - RNA, 22 nt, Human
uugucugaaccaucucccuggc

SEQ ID NO: 702232 - RNA, 22 nt, Human
gucugucaucugagauggagug

SEQ ID NO: 702233 - RNA, 22 nt, Human
ugauacagaauugauaucugag

SEQ ID NO: 702234 - RNA, 22 nt, Human
agcaccaggcaccaaagggccu

SEQ ID NO: 702235 - RNA, 22 nt, Human
ugcuucugcuuuacuugguuca

SEQ ID NO: 702236 - RNA, 22 nt, Human
agcagggcagugcuucagcucu

SEQ ID NO: 702237 - RNA, 23 nt, Human
ugguaauagggagcagaagguag

SEQ ID NO: 702238 - RNA, 22 nt, Human
uccugaauuguugagaagcagc

SEQ ID NO: 702239 - RNA, 22 nt, Human
ugcccagggauaagccuagaga

SEQ ID NO: 702240 - RNA, 22 nt, Human
uugguuaaaaucaaauuaauca

SEQ ID NO: 702241 - RNA, 22 nt, Human
ucagugaaaugcauauucuucg

SEQ ID NO: 702242 - RNA, 22 nt, Human
aaguuuuauuggcuauagcacu

SEQ ID NO: 702243 - RNA, 22 nt, Human
uacaaugagcuguacaucucca

SEQ ID NO: 702244 - RNA, 16 nt, Human
uggaaggggucuccgg

SEQ ID NO: 702245 - RNA, 22 nt, Human
guggcagaagaguaggaugggc

SEQ ID NO: 702246 - RNA, 23 nt, Human
acaucagaguuaguucaaucagg

SEQ ID NO: 702247 - RNA, 22 nt, Human
cacagagauuagaauuagacua

SEQ ID NO: 702248 - RNA, 22 nt, Human
cugagggcuggagcugaggccu

SEQ ID NO: 702249 - RNA, 22 nt, Human
acucaagucauaggcuucuuuc

SEQ ID NO: 702250 - RNA, 22 nt, Human
acugcagggcauccuggccaag

SEQ ID NO: 702251 - RNA, 22 nt, Human
caguucagcuagaagaaacaaa

SEQ ID NO: 702252 - RNA, 22 nt, Human
cgcccagggcaggaggccgcuc

SEQ ID NO: 702253 - RNA, 19 nt, Human
agggccugagcagauguug

SEQ ID NO: 702254 - RNA, 22 nt, Human
auguucauuugacaaguaguga

SEQ ID NO: 702255 - RNA, 22 nt, Human
auuguuuuaauuccauugugaa

SEQ ID NO: 702256 - RNA, 22 nt, Human
agacagcagcagaggggcuccc

SEQ ID NO: 702257 - RNA, 22 nt, Human
uggcaucauagccaaggugcuu

SEQ ID NO: 702258 - RNA, 22 nt, Human
ccucuuccucaccaucuacaac

SEQ ID NO: 702259 - RNA, 22 nt, Human
aauaauuuugagagccuggaaa

SEQ ID NO: 702260 - RNA, 23 nt, Human
uuguccagcugguuugggccaca

SEQ ID NO: 702261 - RNA, 22 nt, Human
ugcuuauaauguuacugacaac

SEQ ID NO: 702262 - RNA, 22 nt, Human
ccaguguuuccccagaagagag

SEQ ID NO: 702263 - RNA, 22 nt, Human
cccagaggucugaaaagguuga

SEQ ID NO: 702264 - RNA, 22 nt, Human
caaugugucaggaaaagggcca

SEQ ID NO: 702265 - RNA, 22 nt, Human
auucaguuccuugaggguauag

SEQ ID NO: 702266 - RNA, 22 nt, Human
ccagcaggagaugccugugucu

SEQ ID NO: 702267 - RNA, 22 nt, Human
uuugaacaggaguaucuauagu

SEQ ID NO: 702268 - RNA, 22 nt, Human
cuggccccagaguuucacuugg

SEQ ID NO: 702269 - RNA, 22 nt, Human
gcuguguccucacacagccuuu

SEQ ID NO: 702270 - RNA, 22 nt, Human
ggauuugggcuugcagcagagc

SEQ ID NO: 702271 - RNA, 17 nt, Human
cauccgugagcucggca

SEQ ID NO: 702272 - RNA, 22 nt, Human
ccaggugccuccagucacagug

SEQ ID NO: 702273 - RNA, 22 nt, Human
aaaguagaggcauugaucaggu

SEQ ID NO: 702274 - RNA, 22 nt, Human
cugggaagggagucaagauacu

SEQ ID NO: 702275 - RNA, 16 nt, Human
caauacauggcauuuc

SEQ ID NO: 702276 - RNA, 22 nt, Human
gacauuuacugaauacugauua

SEQ ID NO: 702277 - RNA, 22 nt, Human
ccuggccuggcacucccucugc

SEQ ID NO: 702278 - RNA, 22 nt, Human
ucugucuuugucaggaccagag

SEQ ID NO: 702279 - RNA, 22 nt, Human
ggcacugggugagggucacugg

SEQ ID NO: 702280 - RNA, 22 nt, Human
auaaccaugauuaaucuaagaa

SEQ ID NO: 702281 - RNA, 22 nt, Human
auauuuuuccaugugggacucu

SEQ ID NO: 702282 - RNA, 22 nt, Human
ccaguguucugguguucauuuc

SEQ ID NO: 702283 - RNA, 22 nt, Human
aaugguuuaguuaagacugagu

SEQ ID NO: 702284 - RNA, 22 nt, Human
cauuucuguucucuuccuguac

SEQ ID NO: 702285 - RNA, 22 nt, Human
acagagcugggugcccccugga

SEQ ID NO: 702286 - RNA, 22 nt, Human
ucagacauggggagagagaccu

SEQ ID NO: 702287 - RNA, 22 nt, Human
gcuuugauucuuggcuuaucag

SEQ ID NO: 702288 - RNA, 22 nt, Human
auuccacaggagcugguuuucu

SEQ ID NO: 702289 - RNA, 22 nt, Human
uuacagaaugugccauuugguc

SEQ ID NO: 702290 - RNA, 22 nt, Human
gaaagggcaugggcaugacaac

SEQ ID NO: 702291 - RNA, 22 nt, Human
acauugaugaucccacuuacag

SEQ ID NO: 702292 - RNA, 22 nt, Human
uacuguaugauuucauguauau

SEQ ID NO: 702293 - RNA, 22 nt, Human
ccccuguguuguucaaggguca

SEQ ID NO: 702294 - RNA, 22 nt, Human
ccugccugauuccaggauggcu

SEQ ID NO: 702295 - RNA, 22 nt, Human
agucagagacccuagaucuaau

SEQ ID NO: 702296 - RNA, 22 nt, Human
cacagggccacuuucccaguaa

SEQ ID NO: 702297 - RNA, 22 nt, Human
cacagugacuggcacauaguaa

SEQ ID NO: 702298 - RNA, 22 nt, Human
ggcugugcuugguguccuugga

SEQ ID NO: 702299 - RNA, 22 nt, Human
aaaggcucacgcaguuagugau

SEQ ID NO: 702300 - RNA, 22 nt, Human
aagauguuauugucuuccuugc

SEQ ID NO: 702301 - RNA, 22 nt, Human
ugauauuugcugacugcauugu

SEQ ID NO: 702302 - RNA, 22 nt, Human
cccaaggccucuccuuggcuug

SEQ ID NO: 702303 - RNA, 18 nt, Human
uaaaccugagaagcgugu

SEQ ID NO: 702304 - RNA, 20 nt, Human
uaaauuagccuugaagauua

SEQ ID NO: 702305 - RNA, 22 nt, Human
cugcagugccugccacugagcc

SEQ ID NO: 702306 - RNA, 18 nt, Human
agcuggugaaauccagua

SEQ ID NO: 702307 - RNA, 19 nt, Human
uucuuagucucaugcauga

SEQ ID NO: 702308 - RNA, 22 nt, Human
acauccacuauccuugcuuguu

SEQ ID NO: 702309 - RNA, 22 nt, Human
cuacucuuuugagucuucagau

SEQ ID NO: 702310 - RNA, 22 nt, Human
agagcggggauaguuaauauuc

SEQ ID NO: 702311 - RNA, 22 nt, Human
gcccuggccuucaucucagaca

SEQ ID NO: 702312 - RNA, 22 nt, Human
uccagcugagguggccucugug

SEQ ID NO: 702313 - RNA, 22 nt, Human
cagaaacuguuuguuaauauuu

SEQ ID NO: 702314 - RNA, 22 nt, Human
cuggguagaagauuccucagga

SEQ ID NO: 702315 - RNA, 22 nt, Human
gaaugaauucagcacauggaau

SEQ ID NO: 702316 - RNA, 22 nt, Human
gcagagcaggaaggaagucagg

SEQ ID NO: 702317 - RNA, 22 nt, Human
auuuuagagaaacaaacguagg

SEQ ID NO: 702318 - RNA, 22 nt, Human
uugagaaauguuuuuuaagcug

SEQ ID NO: 702319 - RNA, 19 nt, Human
cagauguuuucaguucauu

SEQ ID NO: 702320 - RNA, 22 nt, Human
uuuauuguugggucuuaagcug

SEQ ID NO: 702321 - RNA, 22 nt, Human
uccaggccgcauaguuacucug

SEQ ID NO: 702322 - RNA, 22 nt, Human
ccagggcuggaccagugcuugg

SEQ ID NO: 702323 - RNA, 22 nt, Human
uaauuuacuugcaaauaacaau

SEQ ID NO: 702324 - RNA, 22 nt, Human
gcagggugaaggucacauagaa

SEQ ID NO: 702325 - RNA, 22 nt, Human
uggcuucagagacagaaucuau

SEQ ID NO: 702326 - RNA, 22 nt, Human
accacacuggcuagugaagaag

SEQ ID NO: 702327 - RNA, 22 nt, Human
uggcagcucuguucaacaugag

SEQ ID NO: 702328 - RNA, 22 nt, Human
agcuguggggcaggcagcgagg

SEQ ID NO: 702329 - RNA, 18 nt, Human
gcuuccugaaagcugccc

SEQ ID NO: 702330 - RNA, 22 nt, Human
ugaaauguuugaagaccacuga

SEQ ID NO: 702331 - RNA, 22 nt, Human
cugccuggggaaugugaggauu

SEQ ID NO: 702332 - RNA, 17 nt, Human
caggucccagggucucu

SEQ ID NO: 702333 - RNA, 22 nt, Human
caucuuuaaaaugggaacaaca

SEQ ID NO: 702334 - RNA, 22 nt, Human
uacaguauuugaagaauaugag

SEQ ID NO: 702335 - RNA, 22 nt, Human
aaagaaucagaagucucaaaca

SEQ ID NO: 702336 - RNA, 22 nt, Human
uuuagguuuuuucacguggcua

SEQ ID NO: 702337 - RNA, 22 nt, Human
gagccaggucgggccgcggcga

SEQ ID NO: 702338 - RNA, 22 nt, Human
aaaaagacagaggaugaggcag

SEQ ID NO: 702339 - RNA, 17 nt, Human
uacagaaggcaccacaa

SEQ ID NO: 702340 - RNA, 22 nt, Human
cuguccuggccgcccuugugag

SEQ ID NO: 702341 - RNA, 22 nt, Human
caggucagcuggugccccaggu

SEQ ID NO: 702342 - RNA, 22 nt, Human
ugcaugaacacaugugcaugua

SEQ ID NO: 702343 - RNA, 22 nt, Human
guagugggugaggaaggaagga

SEQ ID NO: 702344 - RNA, 22 nt, Human
uagacauuauguauuaaguucu

SEQ ID NO: 702345 - RNA, 22 nt, Human
uuuccagugaauuagucuguuu

SEQ ID NO: 702346 - RNA, 22 nt, Human
ugugucuaggcucaugcuugcu

SEQ ID NO: 702347 - RNA, 22 nt, Human
auuauucaacacuugagaaauu

SEQ ID NO: 702348 - RNA, 22 nt, Human
ugauacauaaaccaucauuuug

SEQ ID NO: 702349 - RNA, 22 nt, Human
acacauauaugucgaaguccuc

SEQ ID NO: 702350 - RNA, 22 nt, Human
uuccuacaucaccagggggagu

SEQ ID NO: 702351 - RNA, 22 nt, Human
uggggugaaucuuuguuguccg

SEQ ID NO: 702352 - RNA, 18 nt, Human
auacaagaucaaguguuc

SEQ ID NO: 702353 - RNA, 22 nt, Human
cuucugcugcuguucaugguug

SEQ ID NO: 702354 - RNA, 22 nt, Human
acauuuugcccuuauuugcuga

SEQ ID NO: 702355 - RNA, 22 nt, Human
uugacuguuaagacuuggcucu

SEQ ID NO: 702356 - RNA, 22 nt, Human
uaggaaguagauagguuguucu

SEQ ID NO: 702357 - RNA, 22 nt, Human
ggcccuuccucuugugcuggca

SEQ ID NO: 702358 - RNA, 22 nt, Human
ggugugccuggggcuuagcugc

SEQ ID NO: 702359 - RNA, 22 nt, Human
ugaaaucugucccacuuuagcu

SEQ ID NO: 702360 - RNA, 22 nt, Human
aaaauucauagaacuguacgcu

SEQ ID NO: 702361 - RNA, 22 nt, Human
aguuuuaugcaguguucugaua

SEQ ID NO: 702362 - RNA, 22 nt, Human
agcuauguuccucgaugcucag

SEQ ID NO: 702363 - RNA, 23 nt, Human
acuuuagauaaauuaugugcaca

SEQ ID NO: 702364 - RNA, 22 nt, Human
uuucuuccuauguaucuugcug

SEQ ID NO: 702365 - RNA, 22 nt, Human
uuccuggccccaccccuggaga

SEQ ID NO: 702366 - RNA, 22 nt, Human
uagaaggaggacuggcaguguu

SEQ ID NO: 702367 - RNA, 22 nt, Human
uucauaaucaccaaaaacugga

SEQ ID NO: 702368 - RNA, 22 nt, Human
agguaaagaaagguguaacauu

SEQ ID NO: 702369 - RNA, 22 nt, Human
aguggcaaugggaguggagaca

SEQ ID NO: 702370 - RNA, 22 nt, Human
uaaaauagcaugugcagugaaa

SEQ ID NO: 702371 - RNA, 22 nt, Human
cugcagaggccucgccuccucu

SEQ ID NO: 702372 - RNA, 22 nt, Human
ccagcagagggcgcuucacacc

SEQ ID NO: 702373 - RNA, 22 nt, Human
gaugaagucauuauccuuuugg

SEQ ID NO: 702374 - RNA, 22 nt, Human
uggcagccucagacaaggaccu

SEQ ID NO: 702375 - RNA, 23 nt, Human
ucacauuuaaccccucagaccuc

SEQ ID NO: 702376 - RNA, 22 nt, Human
gcacaguugugacaaccaucgc

SEQ ID NO: 702377 - RNA, 22 nt, Human
agaggucagaacaggaaagugu

SEQ ID NO: 702378 - RNA, 22 nt, Human
agaggccaccagagguggugcc

SEQ ID NO: 702379 - RNA, 22 nt, Human
ggucccagcuggucacugucag

SEQ ID NO: 702380 - RNA, 22 nt, Human
ugggccuccuccgacagccggg

SEQ ID NO: 702381 - RNA, 22 nt, Human
ggaagcugaacuuagcaaggaa

SEQ ID NO: 702382 - RNA, 22 nt, Human
ggucuggccuggcauucuaugg

SEQ ID NO: 702383 - RNA, 22 nt, Human
ugcacacauuaaggauacacag

SEQ ID NO: 702384 - RNA, 18 nt, Human
ucaaagucuggcuccacu

SEQ ID NO: 702385 - RNA, 22 nt, Human
ucacaggcccaaaccacgcuua

SEQ ID NO: 702386 - RNA, 22 nt, Human
uuaaggaaccacagcauguuag

SEQ ID NO: 702387 - RNA, 22 nt, Human
uggcugagagaagacggggaag

SEQ ID NO: 702388 - RNA, 22 nt, Human
cagagguggggaguauuucaag

SEQ ID NO: 702389 - RNA, 22 nt, Human
gagcagcagguggcugugaugg

SEQ ID NO: 702390 - RNA, 22 nt, Human
gaggcaugucuggccuguccca

SEQ ID NO: 702391 - RNA, 22 nt, Human
ugaggcccaucugagauuuuga

SEQ ID NO: 702392 - RNA, 22 nt, Human
aguucagcuucccaggucacug

SEQ ID NO: 702393 - RNA, 22 nt, Human
aagucacuggaggaacucuacu

SEQ ID NO: 702394 - RNA, 20 nt, Human
augugucuguaaacaacucu

SEQ ID NO: 702395 - RNA, 22 nt, Human
accaccucaucaagcuggauug

SEQ ID NO: 702396 - RNA, 22 nt, Human
cacuuucucaugaauuuggccc

SEQ ID NO: 702397 - RNA, 22 nt, Human
cucugugcccuacugcucagcu

SEQ ID NO: 702398 - RNA, 20 nt, Human
uuaugcaagcaucaauauug

SEQ ID NO: 702399 - RNA, 22 nt, Human
aagaccuugucuaaacauguag

SEQ ID NO: 702400 - RNA, 22 nt, Human
auuuccacauaagggaaauaag

SEQ ID NO: 702401 - RNA, 22 nt, Human
uucaguuggccauaccccuaga

SEQ ID NO: 702402 - RNA, 22 nt, Human
cagauggaaggcauagagguuu

SEQ ID NO: 702403 - RNA, 22 nt, Human
guuuucuaccagggaagagagu

SEQ ID NO: 702404 - RNA, 22 nt, Human
agcagcuaaguagcgcaguuaa

SEQ ID NO: 702405 - RNA, 19 nt, Human
acacugaauguagaauugg

SEQ ID NO: 702406 - RNA, 22 nt, Human
cugcucuggcuguguacuucag

SEQ ID NO: 702407 - RNA, 22 nt, Human
uuaauguggaaagcucuugagu

SEQ ID NO: 702408 - RNA, 22 nt, Human
auuuuucucucacacuuaccag

SEQ ID NO: 702409 - RNA, 22 nt, Human
ugucuugucugugagggcauug

SEQ ID NO: 702410 - RNA, 22 nt, Human
uggcuggauuauuggcuaguac

SEQ ID NO: 702411 - RNA, 22 nt, Human
auugauucuaccagcuacuuug

SEQ ID NO: 702412 - RNA, 22 nt, Human
ugacauuucuuguugauauaaa

SEQ ID NO: 702413 - RNA, 22 nt, Human
uguuuauagauggccacaauga

SEQ ID NO: 702414 - RNA, 22 nt, Human
aaauaguuguuuggaucaauaa

SEQ ID NO: 702415 - RNA, 22 nt, Human
ugagggugcauuuagcauguag

SEQ ID NO: 702416 - RNA, 22 nt, Human
cauugcaacuucaaacuccugg

SEQ ID NO: 702417 - RNA, 22 nt, Human
ggugacagugguuaaaauuugu

SEQ ID NO: 702418 - RNA, 20 nt, Human
ccagcauguacacaugugga

SEQ ID NO: 702419 - RNA, 22 nt, Human
aggaaggggagaaguuaaagcu

SEQ ID NO: 702420 - RNA, 22 nt, Human
gacaguguuuguauaauuccug

SEQ ID NO: 702421 - RNA, 22 nt, Human
uaugaaugcuccaguaacuuuc

SEQ ID NO: 702422 - RNA, 22 nt, Human
ugaucuuuuuggucauuugggu

SEQ ID NO: 702423 - RNA, 22 nt, Human
cuucuggguaauucuucuucau

SEQ ID NO: 702424 - RNA, 22 nt, Human
uaaucuguugacuaacuuggga

SEQ ID NO: 702425 - RNA, 22 nt, Human
ugcuucuaaucuacugcauuag

SEQ ID NO: 702426 - RNA, 22 nt, Human
uccguguucuccagagauaauc

SEQ ID NO: 702427 - RNA, 22 nt, Human
ggcucuggguucugcaaugcgu

SEQ ID NO: 702428 - RNA, 22 nt, Human
gcugucagaaggugaaggguaa

SEQ ID NO: 702429 - RNA, 22 nt, Human
augggcuggcagccugaacagc

SEQ ID NO: 702430 - RNA, 21 nt, Human
ucagagucucaggagcaaggg

SEQ ID NO: 702431 - RNA, 22 nt, Human
gggggcuggaauauccaucaac

SEQ ID NO: 702432 - RNA, 22 nt, Human
uggguagagacacagucugggg

SEQ ID NO: 702433 - RNA, 22 nt, Human
ggcuuccuggggccuccugcaa

SEQ ID NO: 702434 - RNA, 22 nt, Human
gcccugaauuccucaggcugug

SEQ ID NO: 702435 - RNA, 22 nt, Human
ggcuccagcccuggcucuucac

SEQ ID NO: 702436 - RNA, 21 nt, Human
agugucauuugaucauuguua

SEQ ID NO: 702437 - RNA, 22 nt, Human
aguauuucugcucaugaaagag

SEQ ID NO: 702438 - RNA, 22 nt, Human
ugugaugguucacugggcauga

SEQ ID NO: 702439 - RNA, 22 nt, Human
acaaagaucuugcuuuccuacu

SEQ ID NO: 702440 - RNA, 22 nt, Human
auuucugcuacugcacccuagu

SEQ ID NO: 702441 - RNA, 22 nt, Human
ccagaggggugggccugguuua

SEQ ID NO: 702442 - RNA, 22 nt, Human
uuucuggguuuaugucacagcu

SEQ ID NO: 702443 - RNA, 22 nt, Human
ccaggagccugggccaggcugg

SEQ ID NO: 702444 - RNA, 22 nt, Human
cucuggccuggggccugcuccc

SEQ ID NO: 702445 - RNA, 22 nt, Human
uaggcugggcauucuggccagg

SEQ ID NO: 702446 - RNA, 22 nt, Human
uugucucuaagugugaucuuca

SEQ ID NO: 702447 - RNA, 22 nt, Human
gagccaagggcgugcuggagag

SEQ ID NO: 702448 - RNA, 22 nt, Human
gggugaggccuugcugccauca

SEQ ID NO: 702449 - RNA, 19 nt, Human
ugucuggaagagcugcagg

SEQ ID NO: 702450 - RNA, 22 nt, Human
ggagcuggagagcuagccuagg

SEQ ID NO: 702451 - RNA, 22 nt, Human
uucuacagugacugcagccaua

SEQ ID NO: 702452 - RNA, 22 nt, Human
agcccagguugaggcugcagug

SEQ ID NO: 702453 - RNA, 20 nt, Human
gcacacauagaaaugcauau

SEQ ID NO: 702454 - RNA, 22 nt, Human
gcaggugguccccguggagugg

SEQ ID NO: 702455 - RNA, 22 nt, Human
ggcugccugugcccaggcacac

SEQ ID NO: 702456 - RNA, 20 nt, Human
agugccagggcaggugagag

SEQ ID NO: 702457 - RNA, 22 nt, Human
ugagcuucaaaguuggaucuga

SEQ ID NO: 702458 - RNA, 22 nt, Human
gugacgugcagguguggccagc

SEQ ID NO: 702459 - RNA, 21 nt, Human
accuucaagccagaggugguc

SEQ ID NO: 702460 - RNA, 22 nt, Human
auugacacaaugggauguaagg

SEQ ID NO: 702461 - RNA, 22 nt, Human
agugcauuauauguuucaaugg

SEQ ID NO: 702462 - RNA, 22 nt, Human
aggcugagcugaccugguuugg

SEQ ID NO: 702463 - RNA, 22 nt, Human
gccagggaggcuguaggguccu

SEQ ID NO: 702464 - RNA, 22 nt, Human
acuggcuuggcaggaggaagau

SEQ ID NO: 702465 - RNA, 22 nt, Human
acucucccuuggagccucaggc

SEQ ID NO: 702466 - RNA, 22 nt, Human
ggcucuccacuauggaugagaa

SEQ ID NO: 702467 - RNA, 19 nt, Human
cccuggggguuucugguac

SEQ ID NO: 702468 - RNA, 22 nt, Human
ggcagaggaagcuggaaguggg

SEQ ID NO: 702469 - RNA, 22 nt, Human
uguguugugucaccuaucaugc

SEQ ID NO: 702470 - RNA, 22 nt, Human
uuuucaccauagacacuggucc

SEQ ID NO: 702471 - RNA, 22 nt, Human
gggccucagguucuggagaagg

SEQ ID NO: 702472 - RNA, 22 nt, Human
ucucagagauguuagggaagag

SEQ ID NO: 702473 - RNA, 22 nt, Human
uuucagagcucagcagcuagag

SEQ ID NO: 702474 - RNA, 22 nt, Human
cagcccuguccaaugucugcuc

SEQ ID NO: 702475 - RNA, 22 nt, Human
ccugcucuaaaucucauggaac

SEQ ID NO: 702476 - RNA, 22 nt, Human
cugaggcucugggugucacugu

SEQ ID NO: 702477 - RNA, 22 nt, Human
aggucugaguauggccugagaa

SEQ ID NO: 702478 - RNA, 22 nt, Human
caaaguuaucaacugcaacauu

SEQ ID NO: 702479 - RNA, 21 nt, Human
ucccacugccacagcuucagg

SEQ ID NO: 702480 - RNA, 22 nt, Human
gcauucauucauucauuaggua

SEQ ID NO: 702481 - RNA, 22 nt, Human
uuccagccacuuuauacugcua

SEQ ID NO: 702482 - RNA, 22 nt, Human
auggaguucuuuaaauucacag

SEQ ID NO: 702483 - RNA, 22 nt, Human
ccuggcuucuauaccaccaggu

SEQ ID NO: 702484 - RNA, 22 nt, Human
aacauuucagcaaauaagaaca

SEQ ID NO: 702485 - RNA, 22 nt, Human
gacccaggguauccagagcugc

SEQ ID NO: 702486 - RNA, 22 nt, Human
gucauucaaacuguaucacuug

SEQ ID NO: 702487 - RNA, 21 nt, Human
acacacucugagucuucuauu

SEQ ID NO: 702488 - RNA, 22 nt, Human
agggugcagggacaggugugca

SEQ ID NO: 702489 - RNA, 22 nt, Human
cuguacaauguuaccuauuuau

SEQ ID NO: 702490 - RNA, 22 nt, Human
uauccaaagagauucauguucu

SEQ ID NO: 702491 - RNA, 22 nt, Human
ugagauggguggggagcucagg

SEQ ID NO: 702492 - RNA, 22 nt, Human
aaggaggaauuucagggugaau

SEQ ID NO: 702493 - RNA, 22 nt, Human
uuugcaaaauuauucccagcau

SEQ ID NO: 702494 - RNA, 22 nt, Human
aguguuuaguuaagauuucaaa

SEQ ID NO: 702495 - RNA, 22 nt, Human
uuccucaucugugcaccucacu

SEQ ID NO: 702496 - RNA, 22 nt, Human
uggaugaguucaaugaggcaga

SEQ ID NO: 702497 - RNA, 22 nt, Human
uccucuggucuucgguguggac

SEQ ID NO: 702498 - RNA, 22 nt, Human
agaaagcuuaugaaugggcaag

SEQ ID NO: 702499 - RNA, 22 nt, Human
uccugggagcccuugcuccacc

SEQ ID NO: 702500 - RNA, 21 nt, Human
ucagagggcccuggaggcuca

SEQ ID NO: 702501 - RNA, 22 nt, Human
ugaccugcguaggugguuucug

SEQ ID NO: 702502 - RNA, 22 nt, Human
uuggaaggccagcaccuugagu

SEQ ID NO: 702503 - RNA, 22 nt, Human
ucucugcuaagauugugucuag

SEQ ID NO: 702504 - RNA, 22 nt, Human
cucugggucuaccuguggccag

SEQ ID NO: 702505 - RNA, 22 nt, Human
aaaggccaccaacaugaagcau

SEQ ID NO: 702506 - RNA, 22 nt, Human
uugccagggccagugggggugu

SEQ ID NO: 702507 - RNA, 22 nt, Human
uguaugaagccagaaucuguuu

SEQ ID NO: 702508 - RNA, 22 nt, Human
aaccagcuccagccuccauuca

SEQ ID NO: 702509 - RNA, 22 nt, Human
acagaauugaagcugaguaaau

SEQ ID NO: 702510 - RNA, 22 nt, Human
ggucagaggucacaagcuggca

SEQ ID NO: 702511 - RNA, 22 nt, Human
cuccagaauuguccauuggaaa

SEQ ID NO: 702512 - RNA, 22 nt, Human
cucucagggucccugcggagga

SEQ ID NO: 702513 - RNA, 22 nt, Human
uuacagaaaggaaggacugacu

SEQ ID NO: 702514 - RNA, 19 nt, Human
auucuucucuuccugcugu

SEQ ID NO: 702515 - RNA, 22 nt, Human
cugcagaguggagccucggcug

SEQ ID NO: 702516 - RNA, 18 nt, Human
uaguuucuaauggccuuu

SEQ ID NO: 702517 - RNA, 22 nt, Human
uguagaaguaggagucaucuca

SEQ ID NO: 702518 - RNA, 22 nt, Human
guggcugcagcccagcggcacg

SEQ ID NO: 702519 - RNA, 22 nt, Human
acucuggggcgcuacuccaacu

SEQ ID NO: 702520 - RNA, 22 nt, Human
guuuugaaucacugcgcuucac

SEQ ID NO: 702521 - RNA, 22 nt, Human
agaguccacccuggggucaggc

SEQ ID NO: 702522 - RNA, 22 nt, Human
ucagcaguagagggggcacagu

SEQ ID NO: 702523 - RNA, 21 nt, Human
uuuggcuucucugcugcagcc

SEQ ID NO: 702524 - RNA, 22 nt, Human
gcccuuggaagcggcagguagc

SEQ ID NO: 702525 - RNA, 22 nt, Human
cagugugaggaauuagugucca

SEQ ID NO: 702526 - RNA, 22 nt, Human
ggacaacacuucauuccagcua

SEQ ID NO: 702527 - RNA, 22 nt, Human
aaacacauuuuaggaaaaucua

SEQ ID NO: 702528 - RNA, 22 nt, Human
ucuugaauaaguuucaugagcu

SEQ ID NO: 702529 - RNA, 22 nt, Human
agacacugagcauuuuccuagc

SEQ ID NO: 702530 - RNA, 22 nt, Human
cugggcucaccuguggcuggca

SEQ ID NO: 702531 - RNA, 22 nt, Human
uuuggucuuuuauuuaaagcag

SEQ ID NO: 702532 - RNA, 20 nt, Human
ccagagcagccacugaaguu

SEQ ID NO: 702533 - RNA, 22 nt, Human
gucugggccaggcgagccgagg

SEQ ID NO: 702534 - RNA, 22 nt, Human
cuauuuuaacuugauuaccucu

SEQ ID NO: 702535 - RNA, 22 nt, Human
aggcaugacuuuggcugaagaa

SEQ ID NO: 702536 - RNA, 17 nt, Human
uggcaagaauggaaaug

SEQ ID NO: 702537 - RNA, 22 nt, Human
acauggaaaguacuccacaauu

SEQ ID NO: 702538 - RNA, 22 nt, Human
uuugauuccuggggcagggcug

SEQ ID NO: 702539 - RNA, 22 nt, Human
uaggcugaaaggagaggugaag

SEQ ID NO: 702540 - RNA, 19 nt, Human
ugaagagcugucaaaagug

SEQ ID NO: 702541 - RNA, 18 nt, Human
acacaguggaugccuggu

SEQ ID NO: 702542 - RNA, 22 nt, Human
uccuucagcuuguuagagugac

SEQ ID NO: 702543 - RNA, 22 nt, Human
cuggcuccauccuugagcucug

SEQ ID NO: 702544 - RNA, 22 nt, Human
aauacaguagguaauaguucau

SEQ ID NO: 702545 - RNA, 22 nt, Human
cagagcaacacccuuuacaucg

SEQ ID NO: 702546 - RNA, 22 nt, Human
ugugucagcacaguaucaauua

SEQ ID NO: 702547 - RNA, 19 nt, Human
uccccaagaguucuagcuc

SEQ ID NO: 702548 - RNA, 22 nt, Human
caaaugauacuguuuuuagucu

SEQ ID NO: 702549 - RNA, 22 nt, Human
ugagaagcccacacucuuuccu

SEQ ID NO: 702550 - RNA, 21 nt, Human
acugagguuagaugccuugcc

SEQ ID NO: 702551 - RNA, 21 nt, Human
uacauagaggugauaucuguu

SEQ ID NO: 702552 - RNA, 22 nt, Human
acuuaaaguaguuuuacugugg

SEQ ID NO: 702553 - RNA, 22 nt, Human
gacuuuggcaucuagacauugu

SEQ ID NO: 702554 - RNA, 22 nt, Human
cuuaaauucuuaaugcccucau

SEQ ID NO: 702555 - RNA, 22 nt, Human
gaagccaaguccucgaguuuca

SEQ ID NO: 702556 - RNA, 21 nt, Human
guuuaugaaucuuguccugcu

SEQ ID NO: 702557 - RNA, 22 nt, Human
aauauuuccaaggccugucagg

SEQ ID NO: 702558 - RNA, 22 nt, Human
ugugucaauuuucauuccuacu

SEQ ID NO: 702559 - RNA, 22 nt, Human
uaauuacagagguuugccaguu

SEQ ID NO: 702560 - RNA, 20 nt, Human
accauuaauguaagcuuugu

SEQ ID NO: 702561 - RNA, 22 nt, Human
ugcuccaggcaagcugagaguu

SEQ ID NO: 702562 - RNA, 22 nt, Human
ugaaagcaggcgggcuacuuua

SEQ ID NO: 702563 - RNA, 22 nt, Human
gcaggggcuaaggacacagaga

SEQ ID NO: 702564 - RNA, 22 nt, Human
gcccagucucuucuggcccugu

SEQ ID NO: 702565 - RNA, 22 nt, Human
aauguacagcugucuuuccucc

SEQ ID NO: 702566 - RNA, 18 nt, Human
uagcagcacuggccgcuu

SEQ ID NO: 702567 - RNA, 22 nt, Human
ugcagaugagggaugaaaauga

SEQ ID NO: 702568 - RNA, 22 nt, Human
ggguuggauuacuuagggagaa

SEQ ID NO: 702569 - RNA, 22 nt, Human
cuggcucccgaagcccucagug

SEQ ID NO: 702570 - RNA, 23 nt, Human
ucugagguggcucuugcuuugaa

SEQ ID NO: 702571 - RNA, 22 nt, Human
cucuggagaacuccuugugucu

SEQ ID NO: 702572 - RNA, 22 nt, Human
gagaaagaaagggaaguuuguu

SEQ ID NO: 702573 - RNA, 22 nt, Human
agcagguaugacauagauaugu

SEQ ID NO: 702574 - RNA, 22 nt, Human
aaggcuuuuaacuacuguuuua

SEQ ID NO: 702575 - RNA, 22 nt, Human
cagcucuggccagaucuauccu

SEQ ID NO: 702576 - RNA, 19 nt, Human
uaauaagcaauauggaagu

SEQ ID NO: 702577 - RNA, 22 nt, Human
gugaggcagagaugccaaaacu

SEQ ID NO: 702578 - RNA, 22 nt, Human
augaggauaccgcagggggcag

SEQ ID NO: 702579 - RNA, 22 nt, Human
ucucugggaucagguggcccag

SEQ ID NO: 702580 - RNA, 22 nt, Human
uuucagacugcugugugaaacu

SEQ ID NO: 702581 - RNA, 22 nt, Human
uucacauugguucuugauagcu

SEQ ID NO: 702582 - RNA, 22 nt, Human
acauuucugucuuagggacugu

SEQ ID NO: 702583 - RNA, 22 nt, Human
agacugaauaacaagcaaauaa

SEQ ID NO: 702584 - RNA, 22 nt, Human
cugucauuguacauguuauaca

SEQ ID NO: 702585 - RNA, 22 nt, Human
ucagcuucuccaagugacaugg

SEQ ID NO: 702586 - RNA, 22 nt, Human
cccaguggggaaauagcuagcu

SEQ ID NO: 702587 - RNA, 22 nt, Human
aaaggcagagugcucagcuggc

SEQ ID NO: 702588 - RNA, 22 nt, Human
uaaguuucuccaaagcacagaa

SEQ ID NO: 702589 - RNA, 22 nt, Human
acuuuuaucaaggaagugaucu

SEQ ID NO: 702590 - RNA, 19 nt, Human
cugggccagagcuguccuc

SEQ ID NO: 702591 - RNA, 22 nt, Human
gacagugaacagguucccacug

SEQ ID NO: 702592 - RNA, 22 nt, Human
uaggaaaugaaugcaggcuccc

SEQ ID NO: 702593 - RNA, 22 nt, Human
agucuugucuuauuuuaauaga

SEQ ID NO: 702594 - RNA, 22 nt, Human
auaauguugaugauugucuuug

SEQ ID NO: 702595 - RNA, 22 nt, Human
ucugcagaauucgaggaagaaa

SEQ ID NO: 702596 - RNA, 22 nt, Human
cugaggcagagggcagaccaga

SEQ ID NO: 702597 - RNA, 22 nt, Human
cugccucacauuggcuguguga

SEQ ID NO: 702598 - RNA, 22 nt, Human
augaacaucggaaaugagacug

SEQ ID NO: 702599 - RNA, 22 nt, Human
cggcuggugucgggcacagcaa

SEQ ID NO: 702600 - RNA, 20 nt, Human
aaacgagccaucauucuggu

SEQ ID NO: 702601 - RNA, 22 nt, Human
gugcauauuuugcacacagaug

SEQ ID NO: 702602 - RNA, 22 nt, Human
acuucaguaggugauaugugca

SEQ ID NO: 702603 - RNA, 22 nt, Human
ggggaggaguguacagguuuau

SEQ ID NO: 702604 - RNA, 22 nt, Human
gacaaagcagacaagauaauuc

SEQ ID NO: 702605 - RNA, 22 nt, Human
accuuuauaugaaagaugacau

SEQ ID NO: 702606 - RNA, 22 nt, Human
uagcuguugcaauaaacaguuc

SEQ ID NO: 702607 - RNA, 22 nt, Human
uuuuaucugugacaucuggcag

SEQ ID NO: 702608 - RNA, 22 nt, Human
uccuuggggacgcugacaucgu

SEQ ID NO: 702609 - RNA, 22 nt, Human
ucagaaaggccacauggugcag

SEQ ID NO: 702610 - RNA, 22 nt, Human
acccccaagaggggccuucagc

SEQ ID NO: 702611 - RNA, 22 nt, Human
ugggaguuuguuagaaaugcag

SEQ ID NO: 702612 - RNA, 22 nt, Human
cugcugccggcgagccucccuu

SEQ ID NO: 702613 - RNA, 22 nt, Human
guuauuuucauuggcucagacu

SEQ ID NO: 702614 - RNA, 22 nt, Human
gcauugaagaucuuagacuagg

SEQ ID NO: 702615 - RNA, 22 nt, Human
cuucuccucugaguccugggag

SEQ ID NO: 702616 - RNA, 22 nt, Human
aaaaucugguaauuugaaugug

SEQ ID NO: 702617 - RNA, 22 nt, Human
uuccaauccaaacuucaccuuu

SEQ ID NO: 702618 - RNA, 22 nt, Human
ugcucuccugcuccucagccca

SEQ ID NO: 702619 - RNA, 22 nt, Human
caggccaaagaucccauugaca

SEQ ID NO: 702620 - RNA, 22 nt, Human
ggcuggguuauuuauggccaag

SEQ ID NO: 702621 - RNA, 22 nt, Human
ggugggugaaaucuaggugugu

SEQ ID NO: 702622 - RNA, 22 nt, Human
aguaaacugugugccuuugacu

SEQ ID NO: 702623 - RNA, 22 nt, Human
ugauacagagcaagcaucuuuu

SEQ ID NO: 702624 - RNA, 18 nt, Human
cggcagagugcuucuagc

SEQ ID NO: 702625 - RNA, 22 nt, Human
gugugcaugcauagacaccaca

SEQ ID NO: 702626 - RNA, 19 nt, Human
ccagcagacacagcugccc

SEQ ID NO: 702627 - RNA, 22 nt, Human
cagcuucuuagucuuuccuugu

SEQ ID NO: 702628 - RNA, 22 nt, Human
uaauuagagucacaaguaacca

SEQ ID NO: 702629 - RNA, 22 nt, Human
cagacaucacacucagauugca

SEQ ID NO: 702630 - RNA, 22 nt, Human
auucucauuugcuggcuauaug

SEQ ID NO: 702631 - RNA, 22 nt, Human
agcuccuguaguacauauuauu

SEQ ID NO: 702632 - RNA, 22 nt, Human
gcaggcagagagggguuuccag

SEQ ID NO: 702633 - RNA, 22 nt, Human
agucuccagaaauauagcagug

SEQ ID NO: 702634 - RNA, 22 nt, Human
ggggagaccaucugaaggugau

SEQ ID NO: 702635 - RNA, 23 nt, Human
agggguggucaguacccgcagug

SEQ ID NO: 702636 - RNA, 17 nt, Human
agccgggcauggaccag

SEQ ID NO: 702637 - RNA, 22 nt, Human
auggacuuaagagucagaagcu

SEQ ID NO: 702638 - RNA, 22 nt, Human
ucaaaggguaauguaauagucu

SEQ ID NO: 702639 - RNA, 22 nt, Human
guuuaugaaugugucagacaua

SEQ ID NO: 702640 - RNA, 22 nt, Human
gaggaggucccccgacaugccu

SEQ ID NO: 702641 - RNA, 22 nt, Human
cagcccuuccaggcagaauucu

SEQ ID NO: 702642 - RNA, 22 nt, Human
cuggagaaaauccauguguaug

SEQ ID NO: 702643 - RNA, 22 nt, Human
ccuuuaaauggauguucaacug

SEQ ID NO: 702644 - RNA, 22 nt, Human
aagggcuggcccugggaagagu

SEQ ID NO: 702645 - RNA, 22 nt, Human
uggccuggcccugaggcccugu

SEQ ID NO: 702646 - RNA, 22 nt, Human
ccagaugguauaguagggagag

SEQ ID NO: 702647 - RNA, 22 nt, Human
cugaggucucuuuccauaguga

SEQ ID NO: 702648 - RNA, 22 nt, Human
gcugucuugcucacucuugcag

SEQ ID NO: 702649 - RNA, 21 nt, Human
cauuucuauugaugagaaaag

SEQ ID NO: 702650 - RNA, 22 nt, Human
gcccaggaguuugcauuuuaac

SEQ ID NO: 702651 - RNA, 17 nt, Human
uggaagcuucauguugg

SEQ ID NO: 702652 - RNA, 22 nt, Human
guuucucaagcuugaaugcaca

SEQ ID NO: 702653 - RNA, 22 nt, Human
ugcagcagucagucaggccugg

SEQ ID NO: 702654 - RNA, 22 nt, Human
agggggugaaugucugucuaca

SEQ ID NO: 702655 - RNA, 22 nt, Human
aauccauagguuuuuccaagag

SEQ ID NO: 702656 - RNA, 22 nt, Human
agggucuaucucucugccuuug

SEQ ID NO: 702657 - RNA, 22 nt, Human
uccaugagacagauacuguaag

SEQ ID NO: 702658 - RNA, 22 nt, Human
ugaauaaacuaugaggaggaau

SEQ ID NO: 702659 - RNA, 21 nt, Human
uauuuaguuuuacaaaugugg

SEQ ID NO: 702660 - RNA, 22 nt, Human
cagggcagaaggcacucuacuc

SEQ ID NO: 702661 - RNA, 22 nt, Human
augagguccagggaaguuaaau

SEQ ID NO: 702662 - RNA, 22 nt, Human
uucauaggaaauaguguucuuu

SEQ ID NO: 702663 - RNA, 22 nt, Human
ucaguuucuaaaucuuaccaau

SEQ ID NO: 702664 - RNA, 22 nt, Human
gaagaaggguaaggaguguuga

SEQ ID NO: 702665 - RNA, 22 nt, Human
ugucuggacagagauucucaau

SEQ ID NO: 702666 - RNA, 22 nt, Human
ucugcagacuugccuaagugug

SEQ ID NO: 702667 - RNA, 22 nt, Human
caugccauuuacuuggaggaga

SEQ ID NO: 702668 - RNA, 22 nt, Human
ucuguucaucucaugggagaau

SEQ ID NO: 702669 - RNA, 22 nt, Human
agaaacagaaccaggugucauu

SEQ ID NO: 702670 - RNA, 22 nt, Human
uccugcagcugcagaccugggg

SEQ ID NO: 702671 - RNA, 22 nt, Human
gggcagcucucacagcagccaa

SEQ ID NO: 702672 - RNA, 22 nt, Human
cagagagagugggguguggauu

SEQ ID NO: 702673 - RNA, 22 nt, Human
cagcuuugugcaaugcagucuc

SEQ ID NO: 702674 - RNA, 22 nt, Human
guccuucaagguccuuggugug

SEQ ID NO: 702675 - RNA, 22 nt, Human
acuuccagcugcccugugugcu

SEQ ID NO: 702676 - RNA, 22 nt, Human
uggcugagcugcagcguggcuu

SEQ ID NO: 702677 - RNA, 18 nt, Human
uggcagugccaccuucuc

SEQ ID NO: 702678 - RNA, 22 nt, Human
aaugaagccacugaagacaauc

SEQ ID NO: 702679 - RNA, 22 nt, Human
ggcaauuucaugugguuuaaac

SEQ ID NO: 702680 - RNA, 22 nt, Human
guuccaggacccuggccucuga

SEQ ID NO: 702681 - RNA, 22 nt, Human
aaacaugagcacuugcuucaua

SEQ ID NO: 702682 - RNA, 22 nt, Human
ucuagagauacauuggucauuu

SEQ ID NO: 702683 - RNA, 22 nt, Human
aguguuucaagaagcaggaagu

SEQ ID NO: 702684 - RNA, 22 nt, Human
ucagaacauucucauugacugc

SEQ ID NO: 702685 - RNA, 22 nt, Human
guacacauacuauucaaagaga

SEQ ID NO: 702686 - RNA, 22 nt, Human
gguggccauggucagguagcgg

SEQ ID NO: 702687 - RNA, 22 nt, Human
uuacauuuugcacagauguccc

SEQ ID NO: 702688 - RNA, 22 nt, Human
ccagcacucugucccagcuucc

SEQ ID NO: 702689 - RNA, 22 nt, Human
gugcagagcaagggcugagggc

SEQ ID NO: 702690 - RNA, 22 nt, Human
uaagacacauucauaucugucu

SEQ ID NO: 702691 - RNA, 21 nt, Human
ucuccucccggggagaggccg

SEQ ID NO: 702692 - RNA, 20 nt, Human
uucuuucaucuacacguugu

SEQ ID NO: 702693 - RNA, 22 nt, Human
uagucacacaauuguguacauu

SEQ ID NO: 702694 - RNA, 22 nt, Human
uuguguacuacaguaugccaca

SEQ ID NO: 702695 - RNA, 22 nt, Human
cacuggugucugagcaggguga

SEQ ID NO: 702696 - RNA, 22 nt, Human
cuucagccucaacuacuauggu

SEQ ID NO: 702697 - RNA, 22 nt, Human
agagagcuuccauucuagugau

SEQ ID NO: 702698 - RNA, 22 nt, Human
acuuagcauuauguaauuacua

SEQ ID NO: 702699 - RNA, 20 nt, Human
ggccucggacuucaucguag

SEQ ID NO: 702700 - RNA, 22 nt, Human
cacagucucuguugcugggacc

SEQ ID NO: 702701 - RNA, 22 nt, Human
accuggaagugggugcuauggc

SEQ ID NO: 702702 - RNA, 22 nt, Human
auuguacagaugagguaaguga

SEQ ID NO: 702703 - RNA, 23 nt, Human
uggaagacuccucucuuggcugc

SEQ ID NO: 702704 - RNA, 22 nt, Human
aucuggcuccuacacuugaaga

SEQ ID NO: 702705 - RNA, 22 nt, Human
cuucuguguagaaagguagccc

SEQ ID NO: 702706 - RNA, 22 nt, Human
uuccaaaacaauauucugugaa

SEQ ID NO: 702707 - RNA, 22 nt, Human
cagggccuuauccugccauuga

SEQ ID NO: 702708 - RNA, 22 nt, Human
uaaaugagauguacauaacuca

SEQ ID NO: 702709 - RNA, 19 nt, Human
ccagguggaacugagguag

SEQ ID NO: 702710 - RNA, 22 nt, Human
gcagugggagcuuaggcagugc

SEQ ID NO: 702711 - RNA, 22 nt, Human
ucucccagaggaucccagugga

SEQ ID NO: 702712 - RNA, 22 nt, Human
aggucacccguuugacuaucca

SEQ ID NO: 702713 - RNA, 17 nt, Human
gcuuccucaugcaguuc

SEQ ID NO: 702714 - RNA, 19 nt, Human
uuuagacauugucugguau

SEQ ID NO: 702715 - RNA, 22 nt, Human
uuaauccggggugaauuuaauu

SEQ ID NO: 702716 - RNA, 22 nt, Human
gagucauuugggggcuucuuga

SEQ ID NO: 702717 - RNA, 22 nt, Human
uagagcaguguuguccaucaga

SEQ ID NO: 702718 - RNA, 22 nt, Human
agcucuccaucuaucugugaug

SEQ ID NO: 702719 - RNA, 22 nt, Human
augaagucugcacaugcaugug

SEQ ID NO: 702720 - RNA, 22 nt, Human
cccaggguaaucaugugaagcc

SEQ ID NO: 702721 - RNA, 22 nt, Human
cugccccuggugauggacgcca

SEQ ID NO: 702722 - RNA, 22 nt, Human
aagugcaugguauggucuccau

SEQ ID NO: 702723 - RNA, 22 nt, Human
acagggccucagccagggcaga

SEQ ID NO: 702724 - RNA, 22 nt, Human
guggagcaaucagagggucagu

SEQ ID NO: 702725 - RNA, 23 nt, Human
ugugaagguggguccaagggcug

SEQ ID NO: 702726 - RNA, 22 nt, Human
cagaguggcaugaaugaagccu

SEQ ID NO: 702727 - RNA, 22 nt, Human
ucagagguggagauaguuggga

SEQ ID NO: 702728 - RNA, 22 nt, Human
aggcacgagcaauggccgagga

SEQ ID NO: 702729 - RNA, 22 nt, Human
aaugagcuagaccugcuuccuc

SEQ ID NO: 702730 - RNA, 22 nt, Human
aucaguuucacuugcuugcaaa

SEQ ID NO: 702731 - RNA, 22 nt, Human
uuccauuguuucugucuucacu

SEQ ID NO: 702732 - RNA, 22 nt, Human
aggcauaaccuuuuaucuggau

SEQ ID NO: 702733 - RNA, 22 nt, Human
ucugggcucuuaguguacccuc

SEQ ID NO: 702734 - RNA, 22 nt, Human
cuuauguaugcuacuuuguggu

SEQ ID NO: 702735 - RNA, 17 nt, Human
aaucagauuucugagga

SEQ ID NO: 702736 - RNA, 22 nt, Human
aaaucaaaagacauguguuuua

SEQ ID NO: 702737 - RNA, 22 nt, Human
agugaaauaaagcugccuaugg

SEQ ID NO: 702738 - RNA, 22 nt, Human
ucacaugcacauacuuccugug

SEQ ID NO: 702739 - RNA, 22 nt, Human
uguuuuccuccugguuucugcc

SEQ ID NO: 702740 - RNA, 22 nt, Human
ucugucacuauuggccagaaca

SEQ ID NO: 702741 - RNA, 22 nt, Human
agaaauguuuacucacccccuu

SEQ ID NO: 702742 - RNA, 22 nt, Human
uaagugcaauguuuuacuuaaa

SEQ ID NO: 702743 - RNA, 22 nt, Human
uugaauuuagauuguauguuga

SEQ ID NO: 702744 - RNA, 22 nt, Human
ggcaggguggcagaggcucaga

SEQ ID NO: 702745 - RNA, 22 nt, Human
gccugugacccagggcccagga

SEQ ID NO: 702746 - RNA, 22 nt, Human
gcccaggagguugggcugugca

SEQ ID NO: 702747 - RNA, 22 nt, Human
uccacugcuacaaccucccaga

SEQ ID NO: 702748 - RNA, 22 nt, Human
gguccuggcagucuuugguugu

SEQ ID NO: 702749 - RNA, 22 nt, Human
cuuuaugacugaguugucaauu

SEQ ID NO: 702750 - RNA, 22 nt, Human
agcagcaggaggccauugucuu

SEQ ID NO: 702751 - RNA, 22 nt, Human
ucugggugcccuuugcucuguu

SEQ ID NO: 702752 - RNA, 22 nt, Human
gagcucauccccaugguccguc

SEQ ID NO: 702753 - RNA, 22 nt, Human
gaauauuuuuaaagggacuaau

SEQ ID NO: 702754 - RNA, 22 nt, Human
aaaggacaugucaauaucaggc

SEQ ID NO: 702755 - RNA, 22 nt, Human
gaauuacauaauaaaaugagag

SEQ ID NO: 702756 - RNA, 22 nt, Human
ugauuuuuaaaauucuccuugc

SEQ ID NO: 702757 - RNA, 22 nt, Human
cuucugcaggcccugucugacc

SEQ ID NO: 702758 - RNA, 22 nt, Human
gucagaaaccagucaaacaaga

SEQ ID NO: 702759 - RNA, 22 nt, Human
gcagcagugucucccaucuugc

SEQ ID NO: 702760 - RNA, 22 nt, Human
gcccuuccaacccagagggcaa

SEQ ID NO: 702761 - RNA, 22 nt, Human
gccuagagaaaaagccucugca

SEQ ID NO: 702762 - RNA, 22 nt, Human
aguguggccaaugaggaugggc

SEQ ID NO: 702763 - RNA, 20 nt, Human
gacacaggcaguccucagag

SEQ ID NO: 702764 - RNA, 22 nt, Human
auuagugcccaggcugccucuu

SEQ ID NO: 702765 - RNA, 22 nt, Human
aagaauaacacuuagguuuugc

SEQ ID NO: 702766 - RNA, 21 nt, Human
ugcaguccuuugacaugauuc

SEQ ID NO: 702767 - RNA, 16 nt, Human
ugcuccagaggaccca

SEQ ID NO: 702768 - RNA, 22 nt, Human
aaggcacagccacuugaucauc

SEQ ID NO: 702769 - RNA, 22 nt, Human
ugaguaaaaauucuacauuucc

SEQ ID NO: 702770 - RNA, 22 nt, Human
cagcaugaucccaguugauugc

SEQ ID NO: 702771 - RNA, 22 nt, Human
agagccugagccugaaagcccu

SEQ ID NO: 702772 - RNA, 22 nt, Human
aagccaguuagcacaucauugc

SEQ ID NO: 702773 - RNA, 22 nt, Human
uguggaauguccucagcauccu

SEQ ID NO: 702774 - RNA, 22 nt, Human
gggcaguguugcucucaaaguc

SEQ ID NO: 702775 - RNA, 22 nt, Human
cagcccugucuaugacugauga

SEQ ID NO: 702776 - RNA, 22 nt, Human
uccugcuggaaguagggaauga

SEQ ID NO: 702777 - RNA, 22 nt, Human
uugcauauccuccaacacaugg

SEQ ID NO: 702778 - RNA, 22 nt, Human
uggaggcaggagacagggcaaa

SEQ ID NO: 702779 - RNA, 22 nt, Human
accucugcaaugcaaugucaug

SEQ ID NO: 702780 - RNA, 22 nt, Human
ggaccaguuucaaacuguacca

SEQ ID NO: 702781 - RNA, 22 nt, Human
ugaaugauuugggugcauucag

SEQ ID NO: 702782 - RNA, 22 nt, Human
uggucugaaugacuuguuaguu

SEQ ID NO: 702783 - RNA, 22 nt, Human
ugacacagaaauuaagcuguca

SEQ ID NO: 702784 - RNA, 22 nt, Human
gauaauuauaggcuaagccacu

SEQ ID NO: 702785 - RNA, 20 nt, Human
ugucuccagggcugagugga

SEQ ID NO: 702786 - RNA, 22 nt, Human
uugacacaguuuucucauuaag

SEQ ID NO: 702787 - RNA, 22 nt, Human
uucccacagugacuccagagaa

SEQ ID NO: 702788 - RNA, 21 nt, Human
ccagaggccucucuuggccac

SEQ ID NO: 702789 - RNA, 22 nt, Human
cuggcucauagagcagcuccaa

SEQ ID NO: 702790 - RNA, 22 nt, Human
acggcaggcucagagcuggaau

SEQ ID NO: 702791 - RNA, 22 nt, Human
accauugccuagaaaaauuccu

SEQ ID NO: 702792 - RNA, 22 nt, Human
gaagauuuauaaggaccuuauu

SEQ ID NO: 702793 - RNA, 22 nt, Human
guuucuccucugugucuuguuu

SEQ ID NO: 702794 - RNA, 22 nt, Human
agcugguucagaaauuagaugg

SEQ ID NO: 702795 - RNA, 22 nt, Human
aggcacuugcauugaugagguc

SEQ ID NO: 702796 - RNA, 21 nt, Human
ucuggagcccuaagcugagaa

SEQ ID NO: 702797 - RNA, 22 nt, Human
gccuggugauaagcagugaccu

SEQ ID NO: 702798 - RNA, 22 nt, Human
ccugagguuauccaucuaccug

SEQ ID NO: 702799 - RNA, 18 nt, Human
gagaaaccugugaaugcu

SEQ ID NO: 702800 - RNA, 22 nt, Human
aagcccugucacccugacuuca

SEQ ID NO: 702801 - RNA, 22 nt, Human
auucuagcugaguaucagcccc

SEQ ID NO: 702802 - RNA, 23 nt, Human
agaggcugcaggguauugagaau

SEQ ID NO: 702803 - RNA, 22 nt, Human
guauuuuuaguagagucggggu

SEQ ID NO: 702804 - RNA, 22 nt, Human
aaauguguuuagaugguuuauu

SEQ ID NO: 702805 - RNA, 22 nt, Human
caggccuccacuccacgcagac

SEQ ID NO: 702806 - RNA, 23 nt, Human
cuucagcagaaacauaaauucuc

SEQ ID NO: 702807 - RNA, 22 nt, Human
accagggcugacaaucugaugg

SEQ ID NO: 702808 - RNA, 22 nt, Human
agcauguguaaucucaauaccu

SEQ ID NO: 702809 - RNA, 22 nt, Human
ggugccuuccugccagccgcaa

SEQ ID NO: 702810 - RNA, 22 nt, Human
guauaucuucagaaauuauagg

SEQ ID NO: 702811 - RNA, 22 nt, Human
ucugcugccucgguguggguac

SEQ ID NO: 702812 - RNA, 22 nt, Human
cagguggcaugacugccuacaa

SEQ ID NO: 702813 - RNA, 22 nt, Human
uucaccagguguacaguuaguu

SEQ ID NO: 702814 - RNA, 22 nt, Human
agaggauucacugcagaagaca

SEQ ID NO: 702815 - RNA, 22 nt, Human
uuuucuuaugugcagcuauaug

SEQ ID NO: 702816 - RNA, 22 nt, Human
acaugauuuuuaaagagauaau

SEQ ID NO: 702817 - RNA, 22 nt, Human
guagcauucugaguucgcagag

SEQ ID NO: 702818 - RNA, 22 nt, Human
ggcugggaggaugacuugcuac

SEQ ID NO: 702819 - RNA, 22 nt, Human
gcaguguuaccuugggcugguu

SEQ ID NO: 702820 - RNA, 22 nt, Human
gcguaaggccucuggucucgga

SEQ ID NO: 702821 - RNA, 22 nt, Human
acgaauaaaucuauuucacaca

SEQ ID NO: 702822 - RNA, 22 nt, Human
acauuuagcuguacaaucuaug

SEQ ID NO: 702823 - RNA, 22 nt, Human
aucauucagccuaagcaaguac

SEQ ID NO: 702824 - RNA, 22 nt, Human
agcugggaagacuggaagacag

SEQ ID NO: 702825 - RNA, 22 nt, Human
cuauucagguguccauuaaucc

SEQ ID NO: 702826 - RNA, 22 nt, Human
gcugggagccccgagccagcgc

SEQ ID NO: 702827 - RNA, 22 nt, Human
gcagccaccucccauggcgggg

SEQ ID NO: 702828 - RNA, 22 nt, Human
aagagagaagucucucugguuc

SEQ ID NO: 702829 - RNA, 22 nt, Human
aguguucaggaucugaggccag

SEQ ID NO: 702830 - RNA, 22 nt, Human
agugcccaguuagguuggagca

SEQ ID NO: 702831 - RNA, 22 nt, Human
ugcugggcucaaccuccagagc

SEQ ID NO: 702832 - RNA, 22 nt, Human
aauccagcugugucacagguga

SEQ ID NO: 702833 - RNA, 22 nt, Human
acagguggggaggcugagguuc

SEQ ID NO: 702834 - RNA, 22 nt, Human
uggaaugaaaaguacuucagaa

SEQ ID NO: 702835 - RNA, 22 nt, Human
cuauuuauuguggguauccagg

SEQ ID NO: 702836 - RNA, 22 nt, Human
aaugauuuccccuacacagaag

SEQ ID NO: 702837 - RNA, 22 nt, Human
uuaaauucauuccaacuuuuga

SEQ ID NO: 702838 - RNA, 22 nt, Human
ccugagugaauucccucacugu

SEQ ID NO: 702839 - RNA, 22 nt, Human
gcauuuuugaucccacuaggau

SEQ ID NO: 702840 - RNA, 22 nt, Human
ugaggcaggagaaucaccggaa

SEQ ID NO: 702841 - RNA, 22 nt, Human
uucuuucuuggggaacacacuc

SEQ ID NO: 702842 - RNA, 22 nt, Human
ugggugcaggaugagugcuggc

SEQ ID NO: 702843 - RNA, 22 nt, Human
augggaggcaaagaucgcagaa

SEQ ID NO: 702844 - RNA, 22 nt, Human
caugaaggcugccagcaggcau

SEQ ID NO: 702845 - RNA, 22 nt, Human
uaagugucccuauugugauuuu

SEQ ID NO: 702846 - RNA, 22 nt, Human
gcaggagaaaugaagauugggu

SEQ ID NO: 702847 - RNA, 22 nt, Human
gcuguacaucacaauuugcugu

SEQ ID NO: 702848 - RNA, 23 nt, Human
agaggccaacuucuugccccucc

SEQ ID NO: 702849 - RNA, 22 nt, Human
cugcuuucuuguugcaucuuaa

SEQ ID NO: 702850 - RNA, 22 nt, Human
accagcugauuuaagaauaaag

SEQ ID NO: 702851 - RNA, 22 nt, Human
ggaggaugccaagcugugcaca

SEQ ID NO: 702852 - RNA, 22 nt, Human
uggcucagagcagggacucugg

SEQ ID NO: 702853 - RNA, 22 nt, Human
accccuuuuauagaagaacaga

SEQ ID NO: 702854 - RNA, 22 nt, Human
agcagacagguaggaggauaaa

SEQ ID NO: 702855 - RNA, 22 nt, Human
cagcccuguccagcagagggug

SEQ ID NO: 702856 - RNA, 22 nt, Human
gccagcugaagcccugguggaa

SEQ ID NO: 702857 - RNA, 18 nt, Human
ccuucagcucugguuuuc

SEQ ID NO: 702858 - RNA, 22 nt, Human
ggagagucugcuggccacagug

SEQ ID NO: 702859 - RNA, 22 nt, Human
ccacugucagaggggcugugcc

SEQ ID NO: 702860 - RNA, 22 nt, Human
acugggccuggauuggcguguc

SEQ ID NO: 702861 - RNA, 22 nt, Human
ccuggggagccgccugagcccc

SEQ ID NO: 702862 - RNA, 22 nt, Human
auucucaaagccagagucaacg

SEQ ID NO: 702863 - RNA, 19 nt, Human
ucucacaagcaacauuguu

SEQ ID NO: 702864 - RNA, 22 nt, Human
cugauucuuugaagaugcaccc

SEQ ID NO: 702865 - RNA, 22 nt, Human
uguggccuggaaggggcugcuc

SEQ ID NO: 702866 - RNA, 22 nt, Human
cacauauuguaguucaccagga

SEQ ID NO: 702867 - RNA, 22 nt, Human
uugauucauuuauugagugccu

SEQ ID NO: 702868 - RNA, 22 nt, Human
cucagccaugcaacaugcuggg

SEQ ID NO: 702869 - RNA, 22 nt, Human
aagcaacuguugaauuggacua

SEQ ID NO: 702870 - RNA, 21 nt, Human
auucugaguugucagucuuca

SEQ ID NO: 702871 - RNA, 22 nt, Human
uucccaggcugugcuaccagag

SEQ ID NO: 702872 - RNA, 22 nt, Human
acuccagggcuccaucccuugu

SEQ ID NO: 702873 - RNA, 22 nt, Human
gcugccuccugagauuugggca

SEQ ID NO: 702874 - RNA, 22 nt, Human
caagggugaaggcagaggacau

SEQ ID NO: 702875 - RNA, 22 nt, Human
uucccaggacucugggugucuu

SEQ ID NO: 702876 - RNA, 22 nt, Human
uauuuauuggacaguguugcug

SEQ ID NO: 702877 - RNA, 22 nt, Human
gaaagccaucuggcugcuggga

SEQ ID NO: 702878 - RNA, 22 nt, Human
uaaauguuguaaguacaucuaa

SEQ ID NO: 702879 - RNA, 22 nt, Human
cauggaacuguauaaaggcacu

SEQ ID NO: 702880 - RNA, 22 nt, Human
caauaauuuacauuggauacca

SEQ ID NO: 702881 - RNA, 22 nt, Human
ucugagguccugugauuucucu

SEQ ID NO: 702882 - RNA, 22 nt, Human
ugucuccagaaagcaccaggag

SEQ ID NO: 702883 - RNA, 22 nt, Human
uuaccugguguuuaugguccau

SEQ ID NO: 702884 - RNA, 16 nt, Human
agcaccagaucauauc

SEQ ID NO: 702885 - RNA, 22 nt, Human
accuuuucaucugaaacuuuua

SEQ ID NO: 702886 - RNA, 22 nt, Human
aacauuuguuuggcuucaauua

SEQ ID NO: 702887 - RNA, 22 nt, Human
ggagggccaucuugggugugau

SEQ ID NO: 702888 - RNA, 22 nt, Human
uguggcucucagauccuccaau

SEQ ID NO: 702889 - RNA, 22 nt, Human
ccuuuuaagggagacuagagau

SEQ ID NO: 702890 - RNA, 22 nt, Human
uaugauaugcacuuuaucagaa

SEQ ID NO: 702891 - RNA, 22 nt, Human
aguuacaagcuauuuuacuuaa

SEQ ID NO: 702892 - RNA, 22 nt, Human
uuugauuuacuggauauucuca

SEQ ID NO: 702893 - RNA, 22 nt, Human
aggcaguuucugggacagcaua

SEQ ID NO: 702894 - RNA, 22 nt, Human
ucacuguuuugccugcacuucc

SEQ ID NO: 702895 - RNA, 22 nt, Human
uucuacaaauauuuacuguucc

SEQ ID NO: 702896 - RNA, 22 nt, Human
cagcucuuaacacagcuuguau

SEQ ID NO: 702897 - RNA, 22 nt, Human
cucugucuaucccauucugugc

SEQ ID NO: 702898 - RNA, 22 nt, Human
uccagcuccugaguucacugcu

SEQ ID NO: 702899 - RNA, 22 nt, Human
gagggaugucaggggaccuugg

SEQ ID NO: 702900 - RNA, 22 nt, Human
ggcagacuguaauaggagaauu

SEQ ID NO: 702901 - RNA, 22 nt, Human
agaugcagaguuugcuguggac

SEQ ID NO: 702902 - RNA, 23 nt, Human
gggaucuguaaaccuggagaacc

SEQ ID NO: 702903 - RNA, 22 nt, Human
cugcaggggcaguccacuuccu

SEQ ID NO: 702904 - RNA, 22 nt, Human
ugcugugcuggcggcagaggcc

SEQ ID NO: 702905 - RNA, 22 nt, Human
ugagauaguauguagcaccuga

SEQ ID NO: 702906 - RNA, 22 nt, Human
gggaccuggcgagggucacaca

SEQ ID NO: 702907 - RNA, 22 nt, Human
aauauccagguagaugucuucu

SEQ ID NO: 702908 - RNA, 22 nt, Human
auuuccauuaucaugacaaauu

SEQ ID NO: 702909 - RNA, 22 nt, Human
aggcugcuuccuuacguggcug

SEQ ID NO: 702910 - RNA, 21 nt, Human
uccuccuggccaggcggcccc

SEQ ID NO: 702911 - RNA, 22 nt, Human
cagggccucuccuccaggaacu

SEQ ID NO: 702912 - RNA, 22 nt, Human
aagacagugugucaggcaggug

SEQ ID NO: 702913 - RNA, 22 nt, Human
agcuucugcaucuuuucuuccc

SEQ ID NO: 702914 - RNA, 22 nt, Human
caccucugcuguccacaggaug

SEQ ID NO: 702915 - RNA, 22 nt, Human
uuccaguuggagccugccuuua

SEQ ID NO: 702916 - RNA, 22 nt, Human
aucaggaaagaaaagcuuggcg

SEQ ID NO: 702917 - RNA, 22 nt, Human
guaggggugcugagaucuggaa

SEQ ID NO: 702918 - RNA, 22 nt, Human
cagggacauuuccaagagaauu

SEQ ID NO: 702919 - RNA, 22 nt, Human
ugaugucucucuauacucuaac

SEQ ID NO: 702920 - RNA, 22 nt, Human
aauguagaugagauauuuuuug

SEQ ID NO: 702921 - RNA, 22 nt, Human
aggaggggcaaugauagucugg

SEQ ID NO: 702922 - RNA, 22 nt, Human
cuuucccuuuugccuugcgugg

SEQ ID NO: 702923 - RNA, 22 nt, Human
ugcccugcagugagugcgucug

SEQ ID NO: 702924 - RNA, 22 nt, Human
aucacgucaugguuugaucugg

SEQ ID NO: 702925 - RNA, 22 nt, Human
uuagaaaugauuucaccucuuu

SEQ ID NO: 702926 - RNA, 22 nt, Human
agauuucccacuccauguauug

SEQ ID NO: 702927 - RNA, 22 nt, Human
gcugucuguggugucagcugac

SEQ ID NO: 702928 - RNA, 22 nt, Human
augaaauggugguuuuccauuu

SEQ ID NO: 702929 - RNA, 20 nt, Human
gggaggcgagggcugagcag

SEQ ID NO: 702930 - RNA, 22 nt, Human
auuauuguuuuaauaguagaga

SEQ ID NO: 702931 - RNA, 22 nt, Human
cuaugaccccagcaugaauaag

SEQ ID NO: 702932 - RNA, 22 nt, Human
cucaaauauaagcuaaaugugg

SEQ ID NO: 702933 - RNA, 22 nt, Human
aagaaucauccugcaagagucu

SEQ ID NO: 702934 - RNA, 22 nt, Human
cuggggggagcugcguccagca

SEQ ID NO: 702935 - RNA, 22 nt, Human
ucuugggcaauuucucuagagg

SEQ ID NO: 702936 - RNA, 22 nt, Human
acccagccacagcauugaggga

SEQ ID NO: 702937 - RNA, 22 nt, Human
acaucccacagaaacauacaua

SEQ ID NO: 702938 - RNA, 22 nt, Human
aguguacauguacacauuagua

SEQ ID NO: 702939 - RNA, 22 nt, Human
aguaugaagcugaaugauuuua

SEQ ID NO: 702940 - RNA, 22 nt, Human
aaacuucagugaaugacuuaug

SEQ ID NO: 702941 - RNA, 22 nt, Human
guaaggcuaaugucuuuguggu

SEQ ID NO: 702942 - RNA, 22 nt, Human
gcucugacacauuuguucuacc

SEQ ID NO: 702943 - RNA, 22 nt, Human
uagcaaagaaccugauacccca

SEQ ID NO: 702944 - RNA, 22 nt, Human
ugguacuuggaggcagaaaaau

SEQ ID NO: 702945 - RNA, 22 nt, Human
uucuuuggggaauauucugguu

SEQ ID NO: 702946 - RNA, 22 nt, Human
agcuaaggaaucagaagagguu

SEQ ID NO: 702947 - RNA, 22 nt, Human
gacuacucaaacuuucucuaua

SEQ ID NO: 702948 - RNA, 22 nt, Human
aggcccuguccauggugcugaa

SEQ ID NO: 702949 - RNA, 23 nt, Human
cccugcucaggggucugauucuc

SEQ ID NO: 702950 - RNA, 22 nt, Human
uuggccaagauacgagcacaua

SEQ ID NO: 702951 - RNA, 22 nt, Human
caaguccucgcuucuagcugug

SEQ ID NO: 702952 - RNA, 22 nt, Human
cacaugaugguggaagccauag

SEQ ID NO: 702953 - RNA, 22 nt, Human
cacagggcaggccccaggccuc

SEQ ID NO: 702954 - RNA, 22 nt, Human
cugaggccggagcacugaagag

SEQ ID NO: 702955 - RNA, 22 nt, Human
uguggcugugguuuucauaaau

SEQ ID NO: 702956 - RNA, 22 nt, Human
uggagucugugaugcucugggu

SEQ ID NO: 702957 - RNA, 22 nt, Human
ugaaggccuaacuuccagugcu

SEQ ID NO: 702958 - RNA, 22 nt, Human
uuucuagcuguaggaagcugag

SEQ ID NO: 702959 - RNA, 22 nt, Human
gagauuuagcugcuuaacuccu

SEQ ID NO: 702960 - RNA, 22 nt, Human
uuugacauuaaggaacauauau

SEQ ID NO: 702961 - RNA, 22 nt, Human
ucaggaagucucaauuagcuac

SEQ ID NO: 702962 - RNA, 22 nt, Human
gcuggagcugcagccugggccu

SEQ ID NO: 702963 - RNA, 18 nt, Human
ugcuuggagcauuuacca

SEQ ID NO: 702964 - RNA, 22 nt, Human
ccuaacuuuaaugggaccagga

SEQ ID NO: 702965 - RNA, 22 nt, Human
aauuagggaggacaaagguaca

SEQ ID NO: 702966 - RNA, 22 nt, Human
agugucuuucauauccuccauc

SEQ ID NO: 702967 - RNA, 22 nt, Human
cccucucucgguugcugugguu

SEQ ID NO: 702968 - RNA, 22 nt, Human
uaauagaauaguggaaacauug

SEQ ID NO: 702969 - RNA, 23 nt, Human
ccuggggcacuugaguccucauc

SEQ ID NO: 702970 - RNA, 22 nt, Human
ugcagaagaaaacagcugugug

SEQ ID NO: 702971 - RNA, 22 nt, Human
cuucuguuacuguuagcugaag

SEQ ID NO: 702972 - RNA, 22 nt, Human
aaggggauagagcagacacucc

SEQ ID NO: 702973 - RNA, 23 nt, Human
ggcuagaguggaggggaacugca

SEQ ID NO: 702974 - RNA, 21 nt, Human
uugaaggaucacuucuguacc

SEQ ID NO: 702975 - RNA, 22 nt, Human
guguauugcacauccuguagcc

SEQ ID NO: 702976 - RNA, 22 nt, Human
acuucagugugguauaaaacgu

SEQ ID NO: 702977 - RNA, 21 nt, Human
aaagagcccgcugagagguuc

SEQ ID NO: 702978 - RNA, 22 nt, Human
uuguacagggaaguaauacaag

SEQ ID NO: 702979 - RNA, 22 nt, Human
ugacucaggaggaaagacucca

SEQ ID NO: 702980 - RNA, 22 nt, Human
cccagugucuccaacaucagau

SEQ ID NO: 702981 - RNA, 22 nt, Human
ccugguggccuucagcccacaa

SEQ ID NO: 702982 - RNA, 22 nt, Human
gggggucccaagcugggcugcu

SEQ ID NO: 702983 - RNA, 22 nt, Human
uuugucuucauccuucgagcug

SEQ ID NO: 702984 - RNA, 22 nt, Human
agcaccagcaacuaugggcugc

SEQ ID NO: 702985 - RNA, 22 nt, Human
gaggaggcagccuaucccuuag

SEQ ID NO: 702986 - RNA, 22 nt, Human
gucaacuuaucucuuuaucugu

SEQ ID NO: 702987 - RNA, 20 nt, Human
cuccugggacugcugguuau

SEQ ID NO: 702988 - RNA, 22 nt, Human
uaguguucuaagaacauccaug

SEQ ID NO: 702989 - RNA, 22 nt, Human
caguggccaacuuccugccucu

SEQ ID NO: 702990 - RNA, 22 nt, Human
ugcuggcuuuuugugucaaaga

SEQ ID NO: 702991 - RNA, 20 nt, Human
agcuggugaauuaaagacug

SEQ ID NO: 702992 - RNA, 22 nt, Human
ucaguguuacauuauauagaac

SEQ ID NO: 702993 - RNA, 22 nt, Human
cugcuuuuucuaggaggacaau

SEQ ID NO: 702994 - RNA, 22 nt, Human
auagcaaagccuggcacaauga

SEQ ID NO: 702995 - RNA, 21 nt, Human
uucagaaguugagggcagguu

SEQ ID NO: 702996 - RNA, 15 nt, Human
ccaggcucugcacuc

SEQ ID NO: 702997 - RNA, 22 nt, Human
acagugaggacagggacugugu

SEQ ID NO: 702998 - RNA, 22 nt, Human
acuucuucuucagcugggggau

SEQ ID NO: 702999 - RNA, 22 nt, Human
gccaggaaaaaggguggccaau

SEQ ID NO: 703000 - RNA, 22 nt, Human
uauucugguuuccggaucucua

SEQ ID NO: 703001 - RNA, 21 nt, Human
ugagcaggagucaugggaaug

SEQ ID NO: 703002 - RNA, 22 nt, Human
agugcuaaugugcaauauagag

SEQ ID NO: 703003 - RNA, 22 nt, Human
uuuauuaugauggacaccuucg

SEQ ID NO: 703004 - RNA, 22 nt, Human
ccuuggcauguggcauguggcu

SEQ ID NO: 703005 - RNA, 22 nt, Human
caacaucaguccucaugagaca

SEQ ID NO: 703006 - RNA, 22 nt, Human
agcuguccuggcucaggcugug

SEQ ID NO: 703007 - RNA, 22 nt, Human
uaugacauuauaaaggauuauu

SEQ ID NO: 703008 - RNA, 22 nt, Human
uggcucaguuuagcagcucagu

SEQ ID NO: 703009 - RNA, 22 nt, Human
ugcuuagggcuccuccaauaga

SEQ ID NO: 703010 - RNA, 18 nt, Human
uccgaggcaccauaaaaa

SEQ ID NO: 703011 - RNA, 22 nt, Human
ucugcugaccuuucucugacac

SEQ ID NO: 703012 - RNA, 22 nt, Human
gagcucagauucuggugucaga

SEQ ID NO: 703013 - RNA, 22 nt, Human
aggcuccguccagucucaggcc

SEQ ID NO: 703014 - RNA, 22 nt, Human
auacacagcuacauugaacaau

SEQ ID NO: 703015 - RNA, 22 nt, Human
ucaaggaaaagauaacuugaug

SEQ ID NO: 703016 - RNA, 22 nt, Human
uuauacagcauugcuagugaug

SEQ ID NO: 703017 - RNA, 22 nt, Human
uggaccugggguggccuccucu

SEQ ID NO: 703018 - RNA, 22 nt, Human
uggucuuagcuggaaggaggga

SEQ ID NO: 703019 - RNA, 21 nt, Human
uagaaucacuaauaagaugua

SEQ ID NO: 703020 - RNA, 22 nt, Human
gguuucaaaguggacaguuagu

SEQ ID NO: 703021 - RNA, 22 nt, Human
gagcuuggacaagcucugaagg

SEQ ID NO: 703022 - RNA, 22 nt, Human
cuucacuugcucaucaugcuau

SEQ ID NO: 703023 - RNA, 22 nt, Human
guccugaggaugcagagauaaa

SEQ ID NO: 703024 - RNA, 19 nt, Human
aggcugugagggaggacuc

SEQ ID NO: 703025 - RNA, 22 nt, Human
acagaacugggggcacagauag

SEQ ID NO: 703026 - RNA, 21 nt, Human
ggaaaauucagagugcaauuu

SEQ ID NO: 703027 - RNA, 18 nt, Human
ggugagggagcuggaagc

SEQ ID NO: 703028 - RNA, 22 nt, Human
auguuucucacuguuucucuau

SEQ ID NO: 703029 - RNA, 22 nt, Human
aaaggugacacucugccagcug

SEQ ID NO: 703030 - RNA, 22 nt, Human
cuucaaguugucugaggguggg

SEQ ID NO: 703031 - RNA, 22 nt, Human
gcggcccgagcaggacgggugg

SEQ ID NO: 703032 - RNA, 22 nt, Human
cacaguaucccucuuucucccc

SEQ ID NO: 703033 - RNA, 22 nt, Human
augcuaaaaacuugaucauuau

SEQ ID NO: 703034 - RNA, 17 nt, Human
cagagucugucugcauc

SEQ ID NO: 703035 - RNA, 22 nt, Human
augcacaguaaugagcugguug

SEQ ID NO: 703036 - RNA, 22 nt, Human
ucuggcagagucagugcacaca

SEQ ID NO: 703037 - RNA, 22 nt, Human
aagauucacagagugaaugaaa

SEQ ID NO: 703038 - RNA, 22 nt, Human
uuuauaauuaucucuacucuua

SEQ ID NO: 703039 - RNA, 22 nt, Human
agccaggcucaaggccugcucc

SEQ ID NO: 703040 - RNA, 22 nt, Human
augcaucuuaucaaaaauuaua

SEQ ID NO: 703041 - RNA, 22 nt, Human
gccagccacuucagcuauggcu

SEQ ID NO: 703042 - RNA, 22 nt, Human
uuggaauucagcuugcuuauaa

SEQ ID NO: 703043 - RNA, 22 nt, Human
acacauuuauuacaugcaugug

SEQ ID NO: 703044 - RNA, 22 nt, Human
caaauacuuuauauacuucaaa

SEQ ID NO: 703045 - RNA, 22 nt, Human
agguauggcauaaaucacaggg

SEQ ID NO: 703046 - RNA, 22 nt, Human
aagugacaaaaggguauccaaa

SEQ ID NO: 703047 - RNA, 22 nt, Human
cauuaaauaucaaccuagacua

SEQ ID NO: 703048 - RNA, 20 nt, Human
uuucacuggcuugauaaggu

SEQ ID NO: 703049 - RNA, 22 nt, Human
uaccuggagcaggaggcagaau

SEQ ID NO: 703050 - RNA, 18 nt, Human
auguacauguacucacac

SEQ ID NO: 703051 - RNA, 22 nt, Human
uggauaaaugugcagaugacau

SEQ ID NO: 703052 - RNA, 22 nt, Human
cuguggauuuaggcagagcuga

SEQ ID NO: 703053 - RNA, 22 nt, Human
ucagacuuccacuuugugcacu

SEQ ID NO: 703054 - RNA, 22 nt, Human
ccugauguccauaauccuguaa

SEQ ID NO: 703055 - RNA, 21 nt, Human
acuuuaauauacaugaggagg

SEQ ID NO: 703056 - RNA, 22 nt, Human
cuggucugggaugagggaugua

SEQ ID NO: 703057 - RNA, 22 nt, Human
accgcagugacgugggacuucc

SEQ ID NO: 703058 - RNA, 22 nt, Human
uuagugaucaaaaucaaaauug

SEQ ID NO: 703059 - RNA, 21 nt, Human
uuguaugcauacauacacaca

SEQ ID NO: 703060 - RNA, 22 nt, Human
uccaagaaucacugacacagcu

SEQ ID NO: 703061 - RNA, 22 nt, Human
cuguagcagugugcucuuuuuc

SEQ ID NO: 703062 - RNA, 22 nt, Human
uauuucugucagccagauaugg

SEQ ID NO: 703063 - RNA, 22 nt, Human
gcugcuguuccuccaguggauc

SEQ ID NO: 703064 - RNA, 22 nt, Human
acagggcaaccucugggagacu

SEQ ID NO: 703065 - RNA, 22 nt, Human
aagcacagccagguuaggggcu

SEQ ID NO: 703066 - RNA, 20 nt, Human
gccaguaccauucugccacu

SEQ ID NO: 703067 - RNA, 22 nt, Human
ucauccauuguccucacauuag

SEQ ID NO: 703068 - RNA, 22 nt, Human
agaaaggucaaaaucgugacau

SEQ ID NO: 703069 - RNA, 22 nt, Human
cagcucuguugcccuggaaacg

SEQ ID NO: 703070 - RNA, 22 nt, Human
aauguguuuauuuagugauuua

SEQ ID NO: 703071 - RNA, 22 nt, Human
ugcaugguaaccaggaugucua

SEQ ID NO: 703072 - RNA, 22 nt, Human
uuacauaguuaaauaguacagc

SEQ ID NO: 703073 - RNA, 22 nt, Human
ggcagguguggaguguuauuuu

SEQ ID NO: 703074 - RNA, 22 nt, Human
acugcucacgcauuacuugagc

SEQ ID NO: 703075 - RNA, 22 nt, Human
aucuuuagcauuacuuuauuca

SEQ ID NO: 703076 - RNA, 22 nt, Human
gacuuugacgaaagagucauua

SEQ ID NO: 703077 - RNA, 23 nt, Human
cccacaugucugagucagugcca

SEQ ID NO: 703078 - RNA, 22 nt, Human
aauuuauuauauccuaggggaa

SEQ ID NO: 703079 - RNA, 22 nt, Human
gcucagggaaggccacgugaga

SEQ ID NO: 703080 - RNA, 22 nt, Human
auugacaacccugguaugagca

SEQ ID NO: 703081 - RNA, 22 nt, Human
agacaauggcuaaguaaccugu

SEQ ID NO: 703082 - RNA, 22 nt, Human
ggcagaggugacagugucuuuu

SEQ ID NO: 703083 - RNA, 22 nt, Human
cucaggaggccauucucaaggu

SEQ ID NO: 703084 - RNA, 22 nt, Human
uuucagaagucacaguugacug

SEQ ID NO: 703085 - RNA, 22 nt, Human
uauuauugaaucaguucuuuga

SEQ ID NO: 703086 - RNA, 22 nt, Human
gggcuaggcuuggccagcacug

SEQ ID NO: 703087 - RNA, 18 nt, Human
uaagucauuuugccagca

SEQ ID NO: 703088 - RNA, 20 nt, Human
gcccacucuaauccacuguc

SEQ ID NO: 703089 - RNA, 22 nt, Human
cauucaaaaugggcugaccugu

SEQ ID NO: 703090 - RNA, 22 nt, Human
gugcugagcaucaugaggcacu

SEQ ID NO: 703091 - RNA, 22 nt, Human
ucucagguggcccccaugagug

SEQ ID NO: 703092 - RNA, 22 nt, Human
acuguucaagcaaaugacauug

SEQ ID NO: 703093 - RNA, 21 nt, Human
aggagcuggagaaaacuuucc

SEQ ID NO: 703094 - RNA, 22 nt, Human
agugauaaugugguaauuauuu

SEQ ID NO: 703095 - RNA, 22 nt, Human
gugcagagagguggagggacuu

SEQ ID NO: 703096 - RNA, 22 nt, Human
aucuacagccagucugguuugu

SEQ ID NO: 703097 - RNA, 22 nt, Human
uuacuucuuacaaaagaaauau

SEQ ID NO: 703098 - RNA, 22 nt, Human
ucucauuugccucaucuauaaa

SEQ ID NO: 703099 - RNA, 22 nt, Human
agggcuccaaggaaguguagcu

SEQ ID NO: 703100 - RNA, 22 nt, Human
gcaaugucuagucugagggcuu

SEQ ID NO: 703101 - RNA, 22 nt, Human
uucucagauauuuacugagcau

SEQ ID NO: 703102 - RNA, 23 nt, Human
cugggcuguccugaggucaccuc

SEQ ID NO: 703103 - RNA, 22 nt, Human
gugagaagauaaguauugcaaa

SEQ ID NO: 703104 - RNA, 22 nt, Human
ugcagcauucugguaaaaggca

SEQ ID NO: 703105 - RNA, 22 nt, Human
ccagcugcugacaugggcaggu

SEQ ID NO: 703106 - RNA, 22 nt, Human
agcagggaagccuccagaaccu

SEQ ID NO: 703107 - RNA, 18 nt, Human
uccugguucuguggccac

SEQ ID NO: 703108 - RNA, 20 nt, Human
uuuuccucguguuuguucua

SEQ ID NO: 703109 - RNA, 22 nt, Human
ucacuccucaggcuagcaucau

SEQ ID NO: 703110 - RNA, 22 nt, Human
uggaaugugaacauacaaggua

SEQ ID NO: 703111 - RNA, 22 nt, Human
aggagcugagucagcccgacag

SEQ ID NO: 703112 - RNA, 22 nt, Human
uucuucccuucauuccaccacc

SEQ ID NO: 703113 - RNA, 22 nt, Human
aagcagccuggcaugaugcuuu

SEQ ID NO: 703114 - RNA, 22 nt, Human
ccagcucccauucuucaccugu

SEQ ID NO: 703115 - RNA, 22 nt, Human
uguggucucguuauguugccca

SEQ ID NO: 703116 - RNA, 22 nt, Human
uuuccaggaaguaaggauaauc

SEQ ID NO: 703117 - RNA, 22 nt, Human
ucauaaaguuaucaccaaaucc

SEQ ID NO: 703118 - RNA, 22 nt, Human
augcccugagcaggccuucaag

SEQ ID NO: 703119 - RNA, 22 nt, Human
gcugaugggagcuggcucaccc

SEQ ID NO: 703120 - RNA, 22 nt, Human
uccaugggaagauuuugagugg

SEQ ID NO: 703121 - RNA, 22 nt, Human
uugcagcugaggaaauugaagc

SEQ ID NO: 703122 - RNA, 22 nt, Human
ccugcuuugagaugggcagcag

SEQ ID NO: 703123 - RNA, 22 nt, Human
acucccuuuucuacuucuaccc

SEQ ID NO: 703124 - RNA, 22 nt, Human
agaaggcaccguggccaauauu

SEQ ID NO: 703125 - RNA, 22 nt, Human
ggagccagagggaugcaguuga

SEQ ID NO: 703126 - RNA, 22 nt, Human
aguccagucucacucuuggcag

SEQ ID NO: 703127 - RNA, 22 nt, Human
aguauguauuuuauacuuacag

SEQ ID NO: 703128 - RNA, 22 nt, Human
uuggccaacagcgacagggcca

SEQ ID NO: 703129 - RNA, 22 nt, Human
ucaggaagacaaucuuuggcuc

SEQ ID NO: 703130 - RNA, 22 nt, Human
uccugccaccugcacagcuccc

SEQ ID NO: 703131 - RNA, 19 nt, Human
ugaggggaggagaggccug

SEQ ID NO: 703132 - RNA, 22 nt, Human
ucauguuuuugccauaugacuc

SEQ ID NO: 703133 - RNA, 22 nt, Human
caggcccaggggucuggcccac

SEQ ID NO: 703134 - RNA, 22 nt, Human
uauucuuguaccuuaaaugauu

SEQ ID NO: 703135 - RNA, 22 nt, Human
uauguucaugucaaacaaaugc

SEQ ID NO: 703136 - RNA, 22 nt, Human
uauagcaacuccaaagagacuu

SEQ ID NO: 703137 - RNA, 22 nt, Human
aaagaucuaugggcauuuagcu

SEQ ID NO: 703138 - RNA, 22 nt, Human
uguguauagguugugcuaauag

SEQ ID NO: 703139 - RNA, 22 nt, Human
ggagcugagacccaguggcuga

SEQ ID NO: 703140 - RNA, 20 nt, Human
cugggcaccugucugcaguu

SEQ ID NO: 703141 - RNA, 22 nt, Human
cuguuauuucugaaugccaucc

SEQ ID NO: 703142 - RNA, 22 nt, Human
cuaaauacuagccuucagauuu

SEQ ID NO: 703143 - RNA, 22 nt, Human
cacaguauucacugggcagauu

SEQ ID NO: 703144 - RNA, 22 nt, Human
aacuuuuagacuuggguauaaa

SEQ ID NO: 703145 - RNA, 22 nt, Human
aacacugaaguagugaauacug

SEQ ID NO: 703146 - RNA, 22 nt, Human
acaaauuuauugaagggcauau

SEQ ID NO: 703147 - RNA, 22 nt, Human
aucuuuacuuucagugcugagc

SEQ ID NO: 703148 - RNA, 22 nt, Human
cuggcccuaggcaaacacagau

SEQ ID NO: 703149 - RNA, 22 nt, Human
cagggauggcugucaggaugua

SEQ ID NO: 703150 - RNA, 21 nt, Human
gcucucagcugccugcugguu

SEQ ID NO: 703151 - RNA, 22 nt, Human
ugguagugacucccccagggcu

SEQ ID NO: 703152 - RNA, 23 nt, Human
uaccugaaguaagcauucaucca

SEQ ID NO: 703153 - RNA, 22 nt, Human
aggcuccauuccaggagcuaga

SEQ ID NO: 703154 - RNA, 22 nt, Human
aggcacuggucuaccccuuagu

SEQ ID NO: 703155 - RNA, 22 nt, Human
auuguaaaguacuguguacaau

SEQ ID NO: 703156 - RNA, 22 nt, Human
auccuucaauuagaaccaauug

SEQ ID NO: 703157 - RNA, 22 nt, Human
guuuuaguggguggccacugau

SEQ ID NO: 703158 - RNA, 22 nt, Human
uguuuucauggagaugguggcg

SEQ ID NO: 703159 - RNA, 22 nt, Human
ggaggaggggcgcuuugucuau

SEQ ID NO: 703160 - RNA, 22 nt, Human
caagaugugccuaaucagaccu

SEQ ID NO: 703161 - RNA, 22 nt, Human
uucacauuagccaagagaugga

SEQ ID NO: 703162 - RNA, 22 nt, Human
ccuuuggagcaacugagagcua

SEQ ID NO: 703163 - RNA, 22 nt, Human
agguuuauguuuggugcaggag

SEQ ID NO: 703164 - RNA, 18 nt, Human
uguuccaaggaaggaauc

SEQ ID NO: 703165 - RNA, 22 nt, Human
aaauuagaaauacuuucaaagc

SEQ ID NO: 703166 - RNA, 22 nt, Human
gcaggcuugggacgagcuggag

SEQ ID NO: 703167 - RNA, 18 nt, Human
ggcagggaaaagauaggg

SEQ ID NO: 703168 - RNA, 22 nt, Human
acaugucaauuuaguacucuua

SEQ ID NO: 703169 - RNA, 22 nt, Human
cacuggugacuucugagcugga

SEQ ID NO: 703170 - RNA, 22 nt, Human
cugggcagcuguaucagggagu

SEQ ID NO: 703171 - RNA, 22 nt, Human
aacacagaucaaaauauuuccu

SEQ ID NO: 703172 - RNA, 22 nt, Human
ucaggcagcuccaggaauggua

SEQ ID NO: 703173 - RNA, 19 nt, Human
uggauggagccugugguug

SEQ ID NO: 703174 - RNA, 22 nt, Human
gcagagauggcugccucugagu

SEQ ID NO: 703175 - RNA, 22 nt, Human
guccuggggauuauagaguguu

SEQ ID NO: 703176 - RNA, 22 nt, Human
uuuaucuucugcaguucuggcu

SEQ ID NO: 703177 - RNA, 22 nt, Human
ggaacuuuuuaacaagcugcug

SEQ ID NO: 703178 - RNA, 22 nt, Human
aacacugugcaguguaaugcug

SEQ ID NO: 703179 - RNA, 21 nt, Human
acaguucugccggcaucuuuc

SEQ ID NO: 703180 - RNA, 22 nt, Human
uguguuugaggcauguugcaga

SEQ ID NO: 703181 - RNA, 22 nt, Human
cuggccugugggcugucuccgg

SEQ ID NO: 703182 - RNA, 22 nt, Human
ugcuuaaagcugcucaguugua

SEQ ID NO: 703183 - RNA, 22 nt, Human
uaaaucacauucgucugcuccu

SEQ ID NO: 703184 - RNA, 22 nt, Human
aguggagcuuuuccuaucagag

SEQ ID NO: 703185 - RNA, 23 nt, Human
auuauuaaggacauggacuuugu

SEQ ID NO: 703186 - RNA, 22 nt, Human
ucugagagcuguagaagccuau

SEQ ID NO: 703187 - RNA, 22 nt, Human
auuuuguuaucagggcuuugca

SEQ ID NO: 703188 - RNA, 22 nt, Human
aaaugcuguguuuuaacauaga

SEQ ID NO: 703189 - RNA, 22 nt, Human
cauaacuagagugaaauguuga

SEQ ID NO: 703190 - RNA, 22 nt, Human
auguuuuuggcuucaaguuucu

SEQ ID NO: 703191 - RNA, 22 nt, Human
gccccuucguggaagugcauuc

SEQ ID NO: 703192 - RNA, 22 nt, Human
cauguguguggacgagcguggc

SEQ ID NO: 703193 - RNA, 22 nt, Human
aaacugugaagcaaguacaagg

SEQ ID NO: 703194 - RNA, 22 nt, Human
ggcaguggcagagcuuggucua

SEQ ID NO: 703195 - RNA, 22 nt, Human
ucugccuggguguggagcagag

SEQ ID NO: 703196 - RNA, 22 nt, Human
aucugggccuguucccucaccu

SEQ ID NO: 703197 - RNA, 22 nt, Human
gagcuucagaauuuaacagacu

SEQ ID NO: 703198 - RNA, 22 nt, Human
gcuuuagaagacacucuguuuu

SEQ ID NO: 703199 - RNA, 22 nt, Human
ucuguuucuucuucuguuauau

SEQ ID NO: 703200 - RNA, 22 nt, Human
aucugacaaccuauugacuuga

SEQ ID NO: 703201 - RNA, 22 nt, Human
uaaaugugggggccacgggcuu

SEQ ID NO: 703202 - RNA, 22 nt, Human
ccugggaguggcacucacagca

SEQ ID NO: 703203 - RNA, 22 nt, Human
aggaaggguucuuugugaaaga

SEQ ID NO: 703204 - RNA, 22 nt, Human
uacauacauuaccucauuuagu

SEQ ID NO: 703205 - RNA, 22 nt, Human
gagagacagcacacaguguggg

SEQ ID NO: 703206 - RNA, 22 nt, Human
ugaacacauuuucuucaguaga

SEQ ID NO: 703207 - RNA, 22 nt, Human
cugggaggauucauugagguga

SEQ ID NO: 703208 - RNA, 22 nt, Human
ucaggggcccuucccucagcag

SEQ ID NO: 703209 - RNA, 23 nt, Human
uuuuauugauauguagcuguugu

SEQ ID NO: 703210 - RNA, 22 nt, Human
auccuggaggcuggaggcuugc

SEQ ID NO: 703211 - RNA, 22 nt, Human
aaggaaggaauugaucaugcgc

SEQ ID NO: 703212 - RNA, 22 nt, Human
aaauuuaagaagugugugcgug

SEQ ID NO: 703213 - RNA, 22 nt, Human
uggcacugccuggcagggcccc

SEQ ID NO: 703214 - RNA, 22 nt, Human
guggcuucaccccaguugucuc

SEQ ID NO: 703215 - RNA, 19 nt, Human
ugcucaguggcuaaaagca

SEQ ID NO: 703216 - RNA, 22 nt, Human
ucugggcucugggaauuaggga

SEQ ID NO: 703217 - RNA, 19 nt, Human
auauacauacugugugcau

SEQ ID NO: 703218 - RNA, 22 nt, Human
ugcagaagcagagccgguggcc

SEQ ID NO: 703219 - RNA, 22 nt, Human
cugguuccaggauggaucuuuc

SEQ ID NO: 703220 - RNA, 22 nt, Human
agaaucaaagagaaauacuuug

SEQ ID NO: 703221 - RNA, 22 nt, Human
ugcauuaagggccuggagauac

SEQ ID NO: 703222 - RNA, 22 nt, Human
ucagcacuuggauuucagagau

SEQ ID NO: 703223 - RNA, 22 nt, Human
ggagucugcggcagacacugua

SEQ ID NO: 703224 - RNA, 22 nt, Human
ucaguuuucauuucaugagcag

SEQ ID NO: 703225 - RNA, 22 nt, Human
ucuuuggaugcguuacuuuuac

SEQ ID NO: 703226 - RNA, 22 nt, Human
cuucuucagcacaauauugaug

SEQ ID NO: 703227 - RNA, 22 nt, Human
gcuugcuuuguaaauaucugug

SEQ ID NO: 703228 - RNA, 20 nt, Human
aauacaugagcacacuuuca

SEQ ID NO: 703229 - RNA, 22 nt, Human
uggguagggacuuagcuggcug

SEQ ID NO: 703230 - RNA, 22 nt, Human
uagcaucuguuucucuuuguga

SEQ ID NO: 703231 - RNA, 22 nt, Human
acuguacaaauauugcaaaaua

SEQ ID NO: 703232 - RNA, 22 nt, Human
ggcuggaaccagagugaggcag

SEQ ID NO: 703233 - RNA, 22 nt, Human
cggggccuagcugcacacccuc

SEQ ID NO: 703234 - RNA, 22 nt, Human
uggcacagcccagagcucuuga

SEQ ID NO: 703235 - RNA, 19 nt, Human
auuaacaucaguguuggcc

SEQ ID NO: 703236 - RNA, 22 nt, Human
gcauuuuagaauauuggagcaa

SEQ ID NO: 703237 - RNA, 22 nt, Human
cuuagggaaucuuagagcugga

SEQ ID NO: 703238 - RNA, 22 nt, Human
uuuacagucugucuagcaaugu

SEQ ID NO: 703239 - RNA, 22 nt, Human
ggcuucacagccccauuagugc

SEQ ID NO: 703240 - RNA, 22 nt, Human
cugggagcuuguuaggaaugca

SEQ ID NO: 703241 - RNA, 22 nt, Human
gccuagggugcucagggacgag

SEQ ID NO: 703242 - RNA, 22 nt, Human
uggcuuccagaacugagcaaca

SEQ ID NO: 703243 - RNA, 22 nt, Human
acccuucauagaggagaagcug

SEQ ID NO: 703244 - RNA, 22 nt, Human
uuauugcagauggugugagaga

SEQ ID NO: 703245 - RNA, 22 nt, Human
ucccucuguguugggcaugccu

SEQ ID NO: 703246 - RNA, 22 nt, Human
uccugggauuugcccuuuucuc

SEQ ID NO: 703247 - RNA, 23 nt, Human
accugcuccaugucaccuucacu

SEQ ID NO: 703248 - RNA, 23 nt, Human
cagagcugauuaaacuuaaucuc

SEQ ID NO: 703249 - RNA, 23 nt, Human
caggcaggaugaggacuacacuc

SEQ ID NO: 703250 - RNA, 21 nt, Human
gaagccaagacaggaucaagg

SEQ ID NO: 703251 - RNA, 20 nt, Human
agauuaggggcuuucuucuu

SEQ ID NO: 703252 - RNA, 22 nt, Human
cugcugugucagaguccagggg

SEQ ID NO: 703253 - RNA, 22 nt, Human
cgaacacacuugggaguucuga

SEQ ID NO: 703254 - RNA, 22 nt, Human
cuccagagguucucaucuggga

SEQ ID NO: 703255 - RNA, 22 nt, Human
gcccauccauggggucauggcc

SEQ ID NO: 703256 - RNA, 22 nt, Human
cugagcugcuuugcuuuugggg

SEQ ID NO: 703257 - RNA, 22 nt, Human
uacauucuacuuuuucacuccc

SEQ ID NO: 703258 - RNA, 22 nt, Human
cugaggcaggggcagcuggaga

SEQ ID NO: 703259 - RNA, 22 nt, Human
ggugagggacaucacucagcca

SEQ ID NO: 703260 - RNA, 22 nt, Human
agauuucugggcuucaccaccu

SEQ ID NO: 703261 - RNA, 22 nt, Human
cuuggcucuguguugaugggac

SEQ ID NO: 703262 - RNA, 22 nt, Human
agaggucagaggucgccagguc

SEQ ID NO: 703263 - RNA, 17 nt, Human
gcuugccuugucuuccu

SEQ ID NO: 703264 - RNA, 22 nt, Human
uguguaugucuguaugcacaca

SEQ ID NO: 703265 - RNA, 22 nt, Human
uuaaauuagucaagcuucucug

SEQ ID NO: 703266 - RNA, 22 nt, Human
ugcucacagcccagaacauaau

SEQ ID NO: 703267 - RNA, 22 nt, Human
aggacuguuuuuucuucuaggg

SEQ ID NO: 703268 - RNA, 22 nt, Human
ccaguguggccaggugcuggua

SEQ ID NO: 703269 - RNA, 22 nt, Human
ugggccaguuggugacuacaaa

SEQ ID NO: 703270 - RNA, 22 nt, Human
ucccaagcaaugagucagggcc

SEQ ID NO: 703271 - RNA, 19 nt, Human
gaguacaggugcagaaaug

SEQ ID NO: 703272 - RNA, 19 nt, Human
cccagccaggucuugcauc

SEQ ID NO: 703273 - RNA, 21 nt, Human
auaauguacaaaaacugucuu

SEQ ID NO: 703274 - RNA, 22 nt, Human
cugacugucucuucucccauga

SEQ ID NO: 703275 - RNA, 22 nt, Human
gcuguauuuauuuucuaggguu

SEQ ID NO: 703276 - RNA, 22 nt, Human
cagaugagcaugggcacaagca

SEQ ID NO: 703277 - RNA, 22 nt, Human
guaggcagaccaguggaugggu

SEQ ID NO: 703278 - RNA, 22 nt, Human
uuucgagggauuagcuaggacu

SEQ ID NO: 703279 - RNA, 23 nt, Human
ccugacacaaaaggauucuugcu

SEQ ID NO: 703280 - RNA, 19 nt, Human
cgcagagggcuucugagag

SEQ ID NO: 703281 - RNA, 22 nt, Human
auauauuuugcggucacguggc

SEQ ID NO: 703282 - RNA, 22 nt, Human
gaaccuguaaguauagaugugg

SEQ ID NO: 703283 - RNA, 22 nt, Human
acaguacagcugaaacuuuagu

SEQ ID NO: 703284 - RNA, 22 nt, Human
uccugagacaucucugcugguc

SEQ ID NO: 703285 - RNA, 23 nt, Human
uguggcugagaaauugacaacuu

SEQ ID NO: 703286 - RNA, 22 nt, Human
gcuuccuccuggaggucacuca

SEQ ID NO: 703287 - RNA, 21 nt, Human
aucucacagcccagagaagcc

SEQ ID NO: 703288 - RNA, 22 nt, Human
ucacagugaggcaguucuugua

SEQ ID NO: 703289 - RNA, 22 nt, Human
uuuauucauuguuucgucgcag

SEQ ID NO: 703290 - RNA, 22 nt, Human
aaacugaggaguuagacuaggg

SEQ ID NO: 703291 - RNA, 22 nt, Human
gccagcucagaugcaggaagga

SEQ ID NO: 703292 - RNA, 23 nt, Human
agaugucuuagaaacugaagcug

SEQ ID NO: 703293 - RNA, 22 nt, Human
ucucuucuuguguuuuccugcc

SEQ ID NO: 703294 - RNA, 22 nt, Human
cuggaggagaacuugaggaagg

SEQ ID NO: 703295 - RNA, 22 nt, Human
cccaucucagucgugcuaaggg

SEQ ID NO: 703296 - RNA, 22 nt, Human
ggaggggcugagcaacuuucag

SEQ ID NO: 703297 - RNA, 22 nt, Human
uagcuuaaggaguaccagauca

SEQ ID NO: 703298 - RNA, 22 nt, Human
uuuacugaauuugguauauucc

SEQ ID NO: 703299 - RNA, 17 nt, Human
ugcuccuguggcagccu

SEQ ID NO: 703300 - RNA, 20 nt, Human
agacaaugagugacagaguu

SEQ ID NO: 703301 - RNA, 23 nt, Human
uccuggagaaaagaaacauuucu

SEQ ID NO: 703302 - RNA, 22 nt, Human
gagcagugagugaauguugccu

SEQ ID NO: 703303 - RNA, 22 nt, Human
aaaguacuuggauuacaggcau

SEQ ID NO: 703304 - RNA, 23 nt, Human
gucccucaccccuaggcaaugcc

SEQ ID NO: 703305 - RNA, 22 nt, Human
guggccagucccgaugcuuguu

SEQ ID NO: 703306 - RNA, 22 nt, Human
aggggagaauuucaacucaggu

SEQ ID NO: 703307 - RNA, 22 nt, Human
agcauaaaauaaauaguuugca

SEQ ID NO: 703308 - RNA, 22 nt, Human
uucuguuucuggggucucugac

SEQ ID NO: 703309 - RNA, 22 nt, Human
aaggcuguuugagcacuggagc

SEQ ID NO: 703310 - RNA, 22 nt, Human
acaggggcuccgaaggugaggg

SEQ ID NO: 703311 - RNA, 22 nt, Human
uggcugcagacaccuauggcag

SEQ ID NO: 703312 - RNA, 22 nt, Human
uuaagucacuuaucuaaagaca

SEQ ID NO: 703313 - RNA, 23 nt, Human
cucaacauccauucuugcccuuc

SEQ ID NO: 703314 - RNA, 22 nt, Human
cucuuucugauucgcugggacc

SEQ ID NO: 703315 - RNA, 22 nt, Human
cucagacaucugaaauggguua

SEQ ID NO: 703316 - RNA, 23 nt, Human
cugucuccugggcuagguggaau

SEQ ID NO: 703317 - RNA, 22 nt, Human
gagcccaggcagagguugcagu

SEQ ID NO: 703318 - RNA, 22 nt, Human
uugcauguguaauuuuucuaaa

SEQ ID NO: 703319 - RNA, 22 nt, Human
uguaccuuuuucugugcaugcu

SEQ ID NO: 703320 - RNA, 22 nt, Human
cccuccuuaccaccacagcucc

SEQ ID NO: 703321 - RNA, 22 nt, Human
cccagccugucuuucccaauga

SEQ ID NO: 703322 - RNA, 22 nt, Human
acauccauuugcuuuauuugcu

SEQ ID NO: 703323 - RNA, 22 nt, Human
ugaugcuucacgcugaauaugc

SEQ ID NO: 703324 - RNA, 22 nt, Human
ugcuucucuguucuaacccuug

SEQ ID NO: 703325 - RNA, 19 nt, Human
cacaucagcagggcugugg

SEQ ID NO: 703326 - RNA, 22 nt, Human
cugauuguguuccugggagcug

SEQ ID NO: 703327 - RNA, 22 nt, Human
gggcugacagcacgccuucugu

SEQ ID NO: 703328 - RNA, 22 nt, Human
ccugggaaggucuuagcaucua

SEQ ID NO: 703329 - RNA, 22 nt, Human
uggauugauaagagacaaguga

SEQ ID NO: 703330 - RNA, 22 nt, Human
ccaggcccugcuccucacacca

SEQ ID NO: 703331 - RNA, 22 nt, Human
gggccuggggugacguaccccu

SEQ ID NO: 703332 - RNA, 22 nt, Human
cauagaaaucaggugagaaucu

SEQ ID NO: 703333 - RNA, 22 nt, Human
ucccugaguguauguggugaac

SEQ ID NO: 703334 - RNA, 21 nt, Human
aggccucccuguugacagggc

SEQ ID NO: 703335 - RNA, 22 nt, Human
gcugagcacagcaaagagacaa

SEQ ID NO: 703336 - RNA, 21 nt, Human
aaacugaccuugccugagaca

SEQ ID NO: 703337 - RNA, 22 nt, Human
guuauuguccauuuauuuagca

SEQ ID NO: 703338 - RNA, 22 nt, Human
auaguuuaccuuccagauggcu

SEQ ID NO: 703339 - RNA, 22 nt, Human
agcuagagcugagaagcacuug

SEQ ID NO: 703340 - RNA, 22 nt, Human
ggccuggagucagggaaagcaa

SEQ ID NO: 703341 - RNA, 22 nt, Human
gcuuccaucuaugucuucauca

SEQ ID NO: 703342 - RNA, 22 nt, Human
ugcagcuccucuggcugccuga

SEQ ID NO: 703343 - RNA, 22 nt, Human
uccaggccugccugguguuugc

SEQ ID NO: 703344 - RNA, 22 nt, Human
cugaggcaugggaaguugggug

SEQ ID NO: 703345 - RNA, 22 nt, Human
aucaaaaugcuccagugauggu

SEQ ID NO: 703346 - RNA, 22 nt, Human
uggccaggaggcugcuucugac

SEQ ID NO: 703347 - RNA, 22 nt, Human
uacaguauuaugagugauugaa

SEQ ID NO: 703348 - RNA, 20 nt, Human
gauaaauugucucuuaagug

SEQ ID NO: 703349 - RNA, 22 nt, Human
gggcacagccuaacuauggaga

SEQ ID NO: 703350 - RNA, 22 nt, Human
aacacugagaacuguugguggu

SEQ ID NO: 703351 - RNA, 22 nt, Human
caaagccaggcuuucuaaugua

SEQ ID NO: 703352 - RNA, 22 nt, Human
ccaggcacgguggcucaugccu

SEQ ID NO: 703353 - RNA, 22 nt, Human
uaagccacuagucuguuaugaa

SEQ ID NO: 703354 - RNA, 22 nt, Human
acucagaagauguggguagaua

SEQ ID NO: 703355 - RNA, 20 nt, Human
gccugagcuauugccaggau

SEQ ID NO: 703356 - RNA, 22 nt, Human
cuccccauggcaacaguuaugg

SEQ ID NO: 703357 - RNA, 23 nt, Human
ccaguggcguaaacuagaggaua

SEQ ID NO: 703358 - RNA, 18 nt, Human
auguggcuagugcaacug

SEQ ID NO: 703359 - RNA, 22 nt, Human
uauaucaccaaaaacaguucug

SEQ ID NO: 703360 - RNA, 22 nt, Human
gccgaagcugccgucugguccu

SEQ ID NO: 703361 - RNA, 22 nt, Human
auuucuacauugaguuuuagca

SEQ ID NO: 703362 - RNA, 22 nt, Human
uuccaaaguuaguuauuagaaa

SEQ ID NO: 703363 - RNA, 23 nt, Human
uuaaaggcagauguugaguauua

SEQ ID NO: 703364 - RNA, 22 nt, Human
gccagggugagggcugagaggu

SEQ ID NO: 703365 - RNA, 23 nt, Human
cacauggauuaaaugagaccaca

SEQ ID NO: 703366 - RNA, 22 nt, Human
gaguuacauuuggugacacuuc

SEQ ID NO: 703367 - RNA, 22 nt, Human
gcuuuacaugauuucucacccu

SEQ ID NO: 703368 - RNA, 22 nt, Human
aucugggcagggcagcaaggcg

SEQ ID NO: 703369 - RNA, 22 nt, Human
uggcagguuuccuccucauagu

SEQ ID NO: 703370 - RNA, 22 nt, Human
cuggagggggaaauguucauug

SEQ ID NO: 703371 - RNA, 22 nt, Human
uuaauugggugcaacagcugaa

SEQ ID NO: 703372 - RNA, 22 nt, Human
cauacuuuuuagaucugccuuc

SEQ ID NO: 703373 - RNA, 22 nt, Human
uauucagaggugaaguagggag

SEQ ID NO: 703374 - RNA, 22 nt, Human
uucucugugagggugcuggauu

SEQ ID NO: 703375 - RNA, 22 nt, Human
ggccccagauucugggcugggu

SEQ ID NO: 703376 - RNA, 22 nt, Human
gcucuguaaagaagagaaaugc

SEQ ID NO: 703377 - RNA, 22 nt, Human
auucuucauaccuacugagguu

SEQ ID NO: 703378 - RNA, 22 nt, Human
gaggcagcagggcugguuccuu

SEQ ID NO: 703379 - RNA, 22 nt, Human
aaaugcuacacaggaauucuca

SEQ ID NO: 703380 - RNA, 22 nt, Human
ugcugccuccaacuccugggcu

SEQ ID NO: 703381 - RNA, 23 nt, Human
ucucugguuaggggagauuggug

SEQ ID NO: 703382 - RNA, 22 nt, Human
ugugccugacuaggugaaucaa

SEQ ID NO: 703383 - RNA, 22 nt, Human
uuucucaaauugcaugaguagc

SEQ ID NO: 703384 - RNA, 19 nt, Human
ggucucagugcagcugcag

SEQ ID NO: 703385 - RNA, 22 nt, Human
cuugaaagauuuggccucugug

SEQ ID NO: 703386 - RNA, 22 nt, Human
ugcucugggcaacagccucccu

SEQ ID NO: 703387 - RNA, 22 nt, Human
cucuggguggucucacugagug

SEQ ID NO: 703388 - RNA, 22 nt, Human
uuuggaaaguguacaaauuuga

SEQ ID NO: 703389 - RNA, 22 nt, Human
cuggcagaggauggggacccag

SEQ ID NO: 703390 - RNA, 22 nt, Human
aggaaugguuauggggauagua

SEQ ID NO: 703391 - RNA, 22 nt, Human
guggaugcuuaggcagccuggg

SEQ ID NO: 703392 - RNA, 22 nt, Human
uaugacaagguggaguaugagu

SEQ ID NO: 703393 - RNA, 22 nt, Human
ugacaguuguauuacaugggaa

SEQ ID NO: 703394 - RNA, 22 nt, Human
augaaaguggcuugauuaaaug

SEQ ID NO: 703395 - RNA, 22 nt, Human
acagauaauuuaauuaaugcau

SEQ ID NO: 703396 - RNA, 22 nt, Human
agcucagcuuccucuccaugcu

SEQ ID NO: 703397 - RNA, 22 nt, Human
guccaaauuuuucacauguaga

SEQ ID NO: 703398 - RNA, 22 nt, Human
ugaaggagggaagaaggcucug

SEQ ID NO: 703399 - RNA, 22 nt, Human
ccucagugagaugcucagcgaa

SEQ ID NO: 703400 - RNA, 22 nt, Human
ggcagcugucucugaguuagca

SEQ ID NO: 703401 - RNA, 22 nt, Human
uaggaagggaaaggcuucaacu

SEQ ID NO: 703402 - RNA, 22 nt, Human
aauaauaguugcaaaguguuua

SEQ ID NO: 703403 - RNA, 22 nt, Human
guuccacaucacacuacuugau

SEQ ID NO: 703404 - RNA, 23 nt, Human
ccucagcauggcaggagcccagc

SEQ ID NO: 703405 - RNA, 22 nt, Human
cccccucugccgggguccuuca

SEQ ID NO: 703406 - RNA, 22 nt, Human
acuuaaaguuauaauuugcuaa

SEQ ID NO: 703407 - RNA, 22 nt, Human
auagcaaaaggcaccagaguga

SEQ ID NO: 703408 - RNA, 22 nt, Human
ucaugcaguuucuuaucugcca

SEQ ID NO: 703409 - RNA, 22 nt, Human
aaacuguauagggaaaaguaga

SEQ ID NO: 703410 - RNA, 22 nt, Human
acagacuguuugguucaugucu

SEQ ID NO: 703411 - RNA, 22 nt, Human
agagcuguuuauugaugucaca

SEQ ID NO: 703412 - RNA, 22 nt, Human
cuggauccaucgggucccgagu

SEQ ID NO: 703413 - RNA, 22 nt, Human
ugauuucucauauuguucaaaa

SEQ ID NO: 703414 - RNA, 20 nt, Human
uccaggcagcucagaguguc

SEQ ID NO: 703415 - RNA, 22 nt, Human
cccacaggcaggggcagagaca

SEQ ID NO: 703416 - RNA, 22 nt, Human
aacacauuuugccuaggcaaua

SEQ ID NO: 703417 - RNA, 22 nt, Human
gaacauuuaugaugcaauaccu

SEQ ID NO: 703418 - RNA, 22 nt, Human
uuggcagaggccgaggugaaga

SEQ ID NO: 703419 - RNA, 21 nt, Human
ggaagggguccucccaacagu

SEQ ID NO: 703420 - RNA, 22 nt, Human
uauucagaggguugaauuuuua

SEQ ID NO: 703421 - RNA, 22 nt, Human
auauauuuacucuccuguugca

SEQ ID NO: 703422 - RNA, 22 nt, Human
cagcccagugcauuuguguacu

SEQ ID NO: 703423 - RNA, 22 nt, Human
gcugagguggaggaaggagacc

SEQ ID NO: 703424 - RNA, 22 nt, Human
ggcagcaggcgacuucccuauu

SEQ ID NO: 703425 - RNA, 22 nt, Human
aggagggagcuuaagccaggca

SEQ ID NO: 703426 - RNA, 22 nt, Human
aaagacagacggaaaccugagg

SEQ ID NO: 703427 - RNA, 22 nt, Human
uugucugaauauguauguaucc

SEQ ID NO: 703428 - RNA, 21 nt, Human
agguggcugcauccucagaag

SEQ ID NO: 703429 - RNA, 22 nt, Human
uggccuccccuaacagccucuu

SEQ ID NO: 703430 - RNA, 22 nt, Human
ucuuccagcuccccacgguguc

SEQ ID NO: 703431 - RNA, 22 nt, Human
ucaguaaaagggugcuuuacuc

SEQ ID NO: 703432 - RNA, 20 nt, Human
cuucuucaguaguuuguucu

SEQ ID NO: 703433 - RNA, 22 nt, Human
auuagaagaggcugacgaaugu

SEQ ID NO: 703434 - RNA, 22 nt, Human
cagcuggguggcucuucugcuc

SEQ ID NO: 703435 - RNA, 22 nt, Human
ccaguguguuuaaugcauucca

SEQ ID NO: 703436 - RNA, 22 nt, Human
ggcaggagauaaaauauuaguu

SEQ ID NO: 703437 - RNA, 22 nt, Human
cuggaaaaugaagaagcagagg

SEQ ID NO: 703438 - RNA, 22 nt, Human
cccauuuaucccaagguuacuc

SEQ ID NO: 703439 - RNA, 22 nt, Human
ugaaguaggcagcaugcugaga

SEQ ID NO: 703440 - RNA, 22 nt, Human
uugaaugaaauugcuguguuau

SEQ ID NO: 703441 - RNA, 22 nt, Human
aaggccagagcguguccugccu

SEQ ID NO: 703442 - RNA, 22 nt, Human
gcugugagccgcugcugagcau

SEQ ID NO: 703443 - RNA, 22 nt, Human
uguuuccauggugacagcagcu

SEQ ID NO: 703444 - RNA, 22 nt, Human
gagcucugcggaaaacgugccg

SEQ ID NO: 703445 - RNA, 22 nt, Human
gugaccauuugacauauccuug

SEQ ID NO: 703446 - RNA, 22 nt, Human
ugcaaacaccacagagacaauu

SEQ ID NO: 703447 - RNA, 22 nt, Human
cugcugccucgacauugggaca

SEQ ID NO: 703448 - RNA, 22 nt, Human
uguccaggucagcagcagggac

SEQ ID NO: 703449 - RNA, 22 nt, Human
gcaaggcugcccacuucaaaag

SEQ ID NO: 703450 - RNA, 22 nt, Human
guaaaacaagcuuuaugguucc

SEQ ID NO: 703451 - RNA, 22 nt, Human
aaggucagagcaggaaggaguc

SEQ ID NO: 703452 - RNA, 22 nt, Human
uaaaccuguaguugauguaauu

SEQ ID NO: 703453 - RNA, 22 nt, Human
caggcaggagaggaggauuucu

SEQ ID NO: 703454 - RNA, 22 nt, Human
ucuugcuucugcucaaggggag

SEQ ID NO: 703455 - RNA, 22 nt, Human
ugcaagagguaaaaugaaagga

SEQ ID NO: 703456 - RNA, 22 nt, Human
ccuuucucuuugcugaucaugu

SEQ ID NO: 703457 - RNA, 22 nt, Human
aauuggcagaacuuuauauauu

SEQ ID NO: 703458 - RNA, 22 nt, Human
uuuucccagagcuguccucaag

SEQ ID NO: 703459 - RNA, 22 nt, Human
uucuuuggcugccagucuggag

SEQ ID NO: 703460 - RNA, 21 nt, Human
uagcaucucuacugucauaga

SEQ ID NO: 703461 - RNA, 22 nt, Human
uccucagggguuucagguguac

SEQ ID NO: 703462 - RNA, 21 nt, Human
caugaagccgguucccuguuu

SEQ ID NO: 703463 - RNA, 22 nt, Human
uagcuuuacaaagugcugcacc

SEQ ID NO: 703464 - RNA, 22 nt, Human
acaguguuccuuuguugugacu

SEQ ID NO: 703465 - RNA, 22 nt, Human
aguguggagccacugaguggcu

SEQ ID NO: 703466 - RNA, 22 nt, Human
ggcacugacugugcagcgcacc

SEQ ID NO: 703467 - RNA, 22 nt, Human
uccccaccuaagauacccaucu

SEQ ID NO: 703468 - RNA, 22 nt, Human
cuagccagauuuaaagagagac

SEQ ID NO: 703469 - RNA, 22 nt, Human
auaugggggggcgugcagagga

SEQ ID NO: 703470 - RNA, 22 nt, Human
cacugucugcuucgacucuuca

SEQ ID NO: 703471 - RNA, 22 nt, Human
gagguggcuggcucagagccag

SEQ ID NO: 703472 - RNA, 22 nt, Human
gugguccaucaugcagagcucc

SEQ ID NO: 703473 - RNA, 22 nt, Human
aaggaaauuagguuauuuugcu

SEQ ID NO: 703474 - RNA, 22 nt, Human
gccaggcagcagcgaggauggu

SEQ ID NO: 703475 - RNA, 22 nt, Human
uuuauaucuggaguugcuagga

SEQ ID NO: 703476 - RNA, 22 nt, Human
ucccagagugugggcaucaagg

SEQ ID NO: 703477 - RNA, 22 nt, Human
ucucaccaaagccuugaccaua

SEQ ID NO: 703478 - RNA, 22 nt, Human
aguguggauuggcuggagcuau

SEQ ID NO: 703479 - RNA, 22 nt, Human
gugccagggggcacugaacaga

SEQ ID NO: 703480 - RNA, 20 nt, Human
aaucagaaagugugagcucu

SEQ ID NO: 703481 - RNA, 22 nt, Human
auuugcuuuuacuauguuaaaa

SEQ ID NO: 703482 - RNA, 22 nt, Human
acuuuguuguuccuugucuaaa

SEQ ID NO: 703483 - RNA, 19 nt, Human
uccagaugauauggauuac

SEQ ID NO: 703484 - RNA, 22 nt, Human
cuuuuaaugggagcaguauuug

SEQ ID NO: 703485 - RNA, 22 nt, Human
guuauucucuuggccuaauuau

SEQ ID NO: 703486 - RNA, 22 nt, Human
uguuuccuucugucucuuugga

SEQ ID NO: 703487 - RNA, 22 nt, Human
agcuuuaugaggagaccuuagu

SEQ ID NO: 703488 - RNA, 22 nt, Human
cugagcugaaacuugagaggcu

SEQ ID NO: 703489 - RNA, 22 nt, Human
aagaaagggagaaggauggugu

SEQ ID NO: 703490 - RNA, 22 nt, Human
uaacuguauagcuuggacuaaa

SEQ ID NO: 703491 - RNA, 22 nt, Human
gggcugacauauuuggugcucu

SEQ ID NO: 703492 - RNA, 22 nt, Human
ggugagaggcagaggacagcuu

SEQ ID NO: 703493 - RNA, 22 nt, Human
ugaagcagcaccauuuuagagc

SEQ ID NO: 703494 - RNA, 22 nt, Human
cucaggagacaguguccacaug

SEQ ID NO: 703495 - RNA, 22 nt, Human
ugucuuucugcaccaccucaca

SEQ ID NO: 703496 - RNA, 22 nt, Human
aaucugagggaacuugaacucc

SEQ ID NO: 703497 - RNA, 22 nt, Human
aaagaacucagagaggauuuua

SEQ ID NO: 703498 - RNA, 22 nt, Human
agaggcugauggaguagugucu

SEQ ID NO: 703499 - RNA, 22 nt, Human
gcaaagcaagauucagauguag

SEQ ID NO: 703500 - RNA, 22 nt, Human
cucugggccaugcuacugcucu

SEQ ID NO: 703501 - RNA, 22 nt, Human
uguuggaaaggccaggcugugg

SEQ ID NO: 703502 - RNA, 22 nt, Human
aggcuucuugagccccacaggc

SEQ ID NO: 703503 - RNA, 22 nt, Human
ucugccagaagccagggucugg

SEQ ID NO: 703504 - RNA, 22 nt, Human
uugcagagagguuaggaacuca

SEQ ID NO: 703505 - RNA, 22 nt, Human
aaaguuucaauagaggaagugg

SEQ ID NO: 703506 - RNA, 22 nt, Human
aauauguucaaaauagaucacu

SEQ ID NO: 703507 - RNA, 22 nt, Human
agauaucuggaaaaaauguaug

SEQ ID NO: 703508 - RNA, 22 nt, Human
ucugagccaccugagcccaugg

SEQ ID NO: 703509 - RNA, 22 nt, Human
uugcaucuagggcaacccagag

SEQ ID NO: 703510 - RNA, 19 nt, Human
ugggcuuccccagggcaga

SEQ ID NO: 703511 - RNA, 22 nt, Human
cacaggcuuuuuuggcugaugu

SEQ ID NO: 703512 - RNA, 22 nt, Human
cugcagaaagcugagaugauua

SEQ ID NO: 703513 - RNA, 22 nt, Human
aggccacaagaaaaugcuucau

SEQ ID NO: 703514 - RNA, 23 nt, Human
uuauggagugccagacauuuggc

SEQ ID NO: 703515 - RNA, 22 nt, Human
gacccuggaguuaguccugugu

SEQ ID NO: 703516 - RNA, 22 nt, Human
ccacagggccuuuccugcuggc

SEQ ID NO: 703517 - RNA, 22 nt, Human
gcucuagaaagaaggauguggg

SEQ ID NO: 703518 - RNA, 22 nt, Human
ucagaguucucuguccagauga

SEQ ID NO: 703519 - RNA, 22 nt, Human
cauggcagcuuugggaggagga

SEQ ID NO: 703520 - RNA, 22 nt, Human
cauaauuacugauaugcugauu

SEQ ID NO: 703521 - RNA, 22 nt, Human
uaauaauuggcaauguugagca

SEQ ID NO: 703522 - RNA, 22 nt, Human
uucuucucggcugucagauagu

SEQ ID NO: 703523 - RNA, 17 nt, Human
uccuuggcaaccaguuc

SEQ ID NO: 703524 - RNA, 22 nt, Human
ugggcucucaaagugcggcuug

SEQ ID NO: 703525 - RNA, 22 nt, Human
gguuuaauggagauauuucaga

SEQ ID NO: 703526 - RNA, 19 nt, Human
gaagaagcuugagaaguag

SEQ ID NO: 703527 - RNA, 22 nt, Human
ugcauuaaggccauugaaauuu

SEQ ID NO: 703528 - RNA, 22 nt, Human
caagagcuagacuuugucagga

SEQ ID NO: 703529 - RNA, 22 nt, Human
ucaggaagccgguuaaauagau

SEQ ID NO: 703530 - RNA, 22 nt, Human
cacacaucaaccuagacauugu

SEQ ID NO: 703531 - RNA, 22 nt, Human
acucugggcuguuaggagcugu

SEQ ID NO: 703532 - RNA, 22 nt, Human
aguucccuccacaacuucucac

SEQ ID NO: 703533 - RNA, 23 nt, Human
ggucccaguggagaggccucacc

SEQ ID NO: 703534 - RNA, 22 nt, Human
ucagcagaguggaacauuguca

SEQ ID NO: 703535 - RNA, 22 nt, Human
aagguuaaauagguauuuucca

SEQ ID NO: 703536 - RNA, 22 nt, Human
uuuuccucugagcuuugaauaa

SEQ ID NO: 703537 - RNA, 22 nt, Human
cugccuccucacguccacagug

SEQ ID NO: 703538 - RNA, 19 nt, Human
cuguggccuccaggaggga

SEQ ID NO: 703539 - RNA, 22 nt, Human
agccugggcaacaacacagcga

SEQ ID NO: 703540 - RNA, 22 nt, Human
ggccucucgaagcuucagucca

SEQ ID NO: 703541 - RNA, 22 nt, Human
cccagagccgguggugcucaca

SEQ ID NO: 703542 - RNA, 22 nt, Human
ccagagguuacacccucagccc

SEQ ID NO: 703543 - RNA, 22 nt, Human
aaggcccuggccccagcuucuu

SEQ ID NO: 703544 - RNA, 22 nt, Human
ugagcagaggccagcaccuggg

SEQ ID NO: 703545 - RNA, 22 nt, Human
guguccuuuuaugugacugguu

SEQ ID NO: 703546 - RNA, 22 nt, Human
ccagcuggaacggcagcccagc

SEQ ID NO: 703547 - RNA, 22 nt, Human
ccaugggaccuaccuccugugc

SEQ ID NO: 703548 - RNA, 22 nt, Human
gugaaggcuacaagagaucaag

SEQ ID NO: 703549 - RNA, 21 nt, Human
gccuggcuucacaggcacuga

SEQ ID NO: 703550 - RNA, 22 nt, Human
gagcuggugugugcccgagcac

SEQ ID NO: 703551 - RNA, 22 nt, Human
caccaggguacaauuucgcaga

SEQ ID NO: 703552 - RNA, 22 nt, Human
uucuucuuuaucucaguauccu

SEQ ID NO: 703553 - RNA, 22 nt, Human
uuugguccauuauaugcuguca

SEQ ID NO: 703554 - RNA, 22 nt, Human
cuaggaggcgggggcugcagua

SEQ ID NO: 703555 - RNA, 22 nt, Human
uugucugcauuguuucuauggg

SEQ ID NO: 703556 - RNA, 22 nt, Human
uugauuugcagaagguguagag

SEQ ID NO: 703557 - RNA, 22 nt, Human
acacuuuuguguauauccaguu

SEQ ID NO: 703558 - RNA, 22 nt, Human
uggcaaaguaauuggguuucuc

SEQ ID NO: 703559 - RNA, 22 nt, Human
ucccuccuggugaugaugcaaa

SEQ ID NO: 703560 - RNA, 22 nt, Human
caggcugacaacugagcauuuu

SEQ ID NO: 703561 - RNA, 22 nt, Human
gugagcguggucuucugugggu

SEQ ID NO: 703562 - RNA, 19 nt, Human
cagcaagaaugaaggcaua

SEQ ID NO: 703563 - RNA, 22 nt, Human
agcauccugccucuccucccaa

SEQ ID NO: 703564 - RNA, 20 nt, Human
cagcucugggcaggucgagg

SEQ ID NO: 703565 - RNA, 23 nt, Human
uuuaugcagcauguagaacaugg

SEQ ID NO: 703566 - RNA, 22 nt, Human
aguucuggugguuuggagaucu

SEQ ID NO: 703567 - RNA, 22 nt, Human
acauuugggacccucucuucac

SEQ ID NO: 703568 - RNA, 22 nt, Human
cucaggaugaaagucaugguga

SEQ ID NO: 703569 - RNA, 22 nt, Human
uccagcugcugccagccaagcu

SEQ ID NO: 703570 - RNA, 22 nt, Human
ugacaggcaggacagaggugug

SEQ ID NO: 703571 - RNA, 22 nt, Human
auuugcuuugggacagcuuaaa

SEQ ID NO: 703572 - RNA, 22 nt, Human
acauaaugagcucuuuauaaau

SEQ ID NO: 703573 - RNA, 22 nt, Human
aaccaggacaauuuugaaagua

SEQ ID NO: 703574 - RNA, 22 nt, Human
ugaagugaccuggggcagugua

SEQ ID NO: 703575 - RNA, 22 nt, Human
agcaguuguagucauggaaaau

SEQ ID NO: 703576 - RNA, 22 nt, Human
cugaggucuagacaccccaggg

SEQ ID NO: 703577 - RNA, 22 nt, Human
caaaugcuacuaauaggcaagu

SEQ ID NO: 703578 - RNA, 22 nt, Human
acuuuguuccuuucacaaagaa

SEQ ID NO: 703579 - RNA, 22 nt, Human
cugccacuuacuaggcauggug

SEQ ID NO: 703580 - RNA, 22 nt, Human
uaguagaauccaaaccaacagu

SEQ ID NO: 703581 - RNA, 18 nt, Human
uggcagugagguaggcau

SEQ ID NO: 703582 - RNA, 22 nt, Human
ccguguguaugguggaacugcu

SEQ ID NO: 703583 - RNA, 22 nt, Human
ugaaggagauuuuuagggaggc

SEQ ID NO: 703584 - RNA, 22 nt, Human
auaacagaugcuucagcauaaa

SEQ ID NO: 703585 - RNA, 22 nt, Human
gcaucuuucuguccauucagca

SEQ ID NO: 703586 - RNA, 21 nt, Human
uggagacucugguucuuugug

SEQ ID NO: 703587 - RNA, 22 nt, Human
cuugacagaagguuuuauccua

SEQ ID NO: 703588 - RNA, 21 nt, Human
cuauuggaaaagaaaauauuu

SEQ ID NO: 703589 - RNA, 22 nt, Human
gcugcaggcuguggcaggggag

SEQ ID NO: 703590 - RNA, 22 nt, Human
ugauuuuauuggugaggaaauu

SEQ ID NO: 703591 - RNA, 22 nt, Human
cugggaugauagugcuaguauu

SEQ ID NO: 703592 - RNA, 23 nt, Human
ggcagcugggcagcacucauggg

SEQ ID NO: 703593 - RNA, 22 nt, Human
aagggcuggucuagaaagggag

SEQ ID NO: 703594 - RNA, 22 nt, Human
uuacaguccuuuguauuguuua

SEQ ID NO: 703595 - RNA, 19 nt, Human
ugccuggcaccagcuccac

SEQ ID NO: 703596 - RNA, 22 nt, Human
caucagaaucugagucucugcc

SEQ ID NO: 703597 - RNA, 22 nt, Human
uuuaugcacacuuagacauggc

SEQ ID NO: 703598 - RNA, 22 nt, Human
ugucacagggauaccauggggc

SEQ ID NO: 703599 - RNA, 22 nt, Human
aacaauuagacugacgguauua

SEQ ID NO: 703600 - RNA, 22 nt, Human
acucagagaaacagcagggugu

SEQ ID NO: 703601 - RNA, 22 nt, Human
cagcucagacgcaggucgagca

SEQ ID NO: 703602 - RNA, 22 nt, Human
cuaaaauuaccuaccaguuuag

SEQ ID NO: 703603 - RNA, 22 nt, Human
aagcuggcaauuaucaaaacug

SEQ ID NO: 703604 - RNA, 22 nt, Human
cuagugaaauuugcaaguaauu

SEQ ID NO: 703605 - RNA, 22 nt, Human
ugagcagagaugacugggcauu

SEQ ID NO: 703606 - RNA, 22 nt, Human
aagaggaggauugaugugggag

SEQ ID NO: 703607 - RNA, 22 nt, Human
uacaugaauuugagucagagga

SEQ ID NO: 703608 - RNA, 22 nt, Human
aggcugugauggauguaaagga

SEQ ID NO: 703609 - RNA, 22 nt, Human
gauauauguaaaaguagacaga

SEQ ID NO: 703610 - RNA, 17 nt, Human
cccuggcucuaggugga

SEQ ID NO: 703611 - RNA, 22 nt, Human
aaagucuuuauuuuguaucuuu

SEQ ID NO: 703612 - RNA, 22 nt, Human
uaagaaacuauggagaagaacu

SEQ ID NO: 703613 - RNA, 20 nt, Human
agcaggaaaagugccagucu

SEQ ID NO: 703614 - RNA, 22 nt, Human
ccuccaggccuugcagguuaac

SEQ ID NO: 703615 - RNA, 22 nt, Human
ugcagugugauuuucuggcuga

SEQ ID NO: 703616 - RNA, 17 nt, Human
acugucuuuuacacccu

SEQ ID NO: 703617 - RNA, 22 nt, Human
gcuccagcaccuagagcagguc

SEQ ID NO: 703618 - RNA, 22 nt, Human
gaaaauagcagauagaccaaug

SEQ ID NO: 703619 - RNA, 22 nt, Human
cugcagggcauuguaacucuuu

SEQ ID NO: 703620 - RNA, 22 nt, Human
cccagguaguuggaagagacaa

SEQ ID NO: 703621 - RNA, 22 nt, Human
gggcauggugagggauaugaag

SEQ ID NO: 703622 - RNA, 22 nt, Human
cuggagaggcugggaacagguu

SEQ ID NO: 703623 - RNA, 22 nt, Human
ggagcagggcagugaauucugg

SEQ ID NO: 703624 - RNA, 22 nt, Human
cagcuguugugauccauuuacg

SEQ ID NO: 703625 - RNA, 22 nt, Human
caaggccaugagcagcgagugu

SEQ ID NO: 703626 - RNA, 22 nt, Human
ccucagugugcagcagcaucug

SEQ ID NO: 703627 - RNA, 22 nt, Human
gccuauggauuggagaaggagc

SEQ ID NO: 703628 - RNA, 22 nt, Human
gcacagccugucccuguccugg

SEQ ID NO: 703629 - RNA, 22 nt, Human
cagguaaggucacauucugaag

SEQ ID NO: 703630 - RNA, 22 nt, Human
gggagggaaggaggcgccgugu

SEQ ID NO: 703631 - RNA, 23 nt, Human
uagauacugcauauagguggaau

SEQ ID NO: 703632 - RNA, 23 nt, Human
cugagguggagagugagguaagu

SEQ ID NO: 703633 - RNA, 22 nt, Human
agguacagggugaaaguuuaug

SEQ ID NO: 703634 - RNA, 22 nt, Human
gcugccacauuuucaggacuaa

SEQ ID NO: 703635 - RNA, 22 nt, Human
aggcugagccugggcguggugg

SEQ ID NO: 703636 - RNA, 22 nt, Human
aguggcagagccaaguagagcc

SEQ ID NO: 703637 - RNA, 20 nt, Human
uaugaguauuacuuucagga

SEQ ID NO: 703638 - RNA, 22 nt, Human
ucuuccugcuuggugugucugg

SEQ ID NO: 703639 - RNA, 22 nt, Human
uagaaacaaugacaugcuugua

SEQ ID NO: 703640 - RNA, 22 nt, Human
uaguggagguggucugugaacu

SEQ ID NO: 703641 - RNA, 22 nt, Human
gccaggcagcaggaagccagug

SEQ ID NO: 703642 - RNA, 22 nt, Human
uugcuuuucccugucucugauu

SEQ ID NO: 703643 - RNA, 15 nt, Human
aaagugcacccaaua

SEQ ID NO: 703644 - RNA, 22 nt, Human
ggucuggaccauggacgccggg

SEQ ID NO: 703645 - RNA, 22 nt, Human
gccaaagcccaggagacagcca

SEQ ID NO: 703646 - RNA, 22 nt, Human
acacugugacaagaaagagcug

SEQ ID NO: 703647 - RNA, 22 nt, Human
cucucuuuuucgugugccgaag

SEQ ID NO: 703648 - RNA, 22 nt, Human
gaaaccugagccagagugggga

SEQ ID NO: 703649 - RNA, 22 nt, Human
guggggagcagccuuagccccu

SEQ ID NO: 703650 - RNA, 22 nt, Human
gacaagcucuuguuucaugguu

SEQ ID NO: 703651 - RNA, 22 nt, Human
guccugagcauuaagcaauugu

SEQ ID NO: 703652 - RNA, 22 nt, Human
gggaaugagagucagcccagga

SEQ ID NO: 703653 - RNA, 22 nt, Human
ucuggcuuguguccuuccuugc

SEQ ID NO: 703654 - RNA, 22 nt, Human
ggcuggcuaucugugguugccu

SEQ ID NO: 703655 - RNA, 22 nt, Human
cauuuguguccgucccaguucu

SEQ ID NO: 703656 - RNA, 22 nt, Human
uuguaacuuaaguuuugcauau

SEQ ID NO: 703657 - RNA, 22 nt, Human
ugccacacuccccugcugcagu

SEQ ID NO: 703658 - RNA, 22 nt, Human
cuuccuggcucggugccucacc

SEQ ID NO: 703659 - RNA, 22 nt, Human
agcggagcuaguuuuuguccuc

SEQ ID NO: 703660 - RNA, 22 nt, Human
gaugcacuugccccuccucaga

SEQ ID NO: 703661 - RNA, 21 nt, Human
uuuaugcagauaaugcuauuu

SEQ ID NO: 703662 - RNA, 22 nt, Human
cugcaucacucuuacuggcuuu

SEQ ID NO: 703663 - RNA, 22 nt, Human
agaggcaagggaccuuucuggg

SEQ ID NO: 703664 - RNA, 22 nt, Human
augaaaugucuggaucuuuuuc

SEQ ID NO: 703665 - RNA, 22 nt, Human
cugugggcgccugucagccuca

SEQ ID NO: 703666 - RNA, 22 nt, Human
acaucuguuuaacgaaggcauu

SEQ ID NO: 703667 - RNA, 22 nt, Human
guucuccacugcagagucucuc

SEQ ID NO: 703668 - RNA, 22 nt, Human
uccugggcugugugccacucug

SEQ ID NO: 703669 - RNA, 21 nt, Human
uccuggcuuuaugcuaccucu

SEQ ID NO: 703670 - RNA, 22 nt, Human
cagauucugggcccagcuuguc

SEQ ID NO: 703671 - RNA, 22 nt, Human
cccggacagaggggcagagugu

SEQ ID NO: 703672 - RNA, 22 nt, Human
gaagaagcaggaguguguagca

SEQ ID NO: 703673 - RNA, 22 nt, Human
uggucacccacugggacugcgg

SEQ ID NO: 703674 - RNA, 22 nt, Human
gccugccuuuguaugacccuga

SEQ ID NO: 703675 - RNA, 21 nt, Human
aacauuucaggauccaaauug

SEQ ID NO: 703676 - RNA, 22 nt, Human
agaaaaacacaaucgggccucc

SEQ ID NO: 703677 - RNA, 21 nt, Human
gccaaggggguagcuauuccu

SEQ ID NO: 703678 - RNA, 23 nt, Human
uguaacuucuuaaauucuucacu

SEQ ID NO: 703679 - RNA, 22 nt, Human
gagagaagaaagccaugguccu

SEQ ID NO: 703680 - RNA, 23 nt, Human
aacacuugcaugaacagcuacac

SEQ ID NO: 703681 - RNA, 22 nt, Human
uaccaaauguaaucauucuaau

SEQ ID NO: 703682 - RNA, 21 nt, Human
ugacauuuggauucauaguaa

SEQ ID NO: 703683 - RNA, 22 nt, Human
ucaaugucugcggcuagcugga

SEQ ID NO: 703684 - RNA, 22 nt, Human
aaaaguguucaggaagaauaau

SEQ ID NO: 703685 - RNA, 22 nt, Human
ggccaccugggaucucauccug

SEQ ID NO: 703686 - RNA, 22 nt, Human
uauguuucaucaggcauggagu

SEQ ID NO: 703687 - RNA, 22 nt, Human
cacaugcauaaggauaauuacu

SEQ ID NO: 703688 - RNA, 22 nt, Human
uuugaaagggacaaagucacug

SEQ ID NO: 703689 - RNA, 22 nt, Human
ucugucauuucaauaugguuaa

SEQ ID NO: 703690 - RNA, 21 nt, Human
uccagccuuucccucacuucc

SEQ ID NO: 703691 - RNA, 22 nt, Human
ucagucuauccagcucagaucc

SEQ ID NO: 703692 - RNA, 22 nt, Human
auuucacucuuaauugcuuccu

SEQ ID NO: 703693 - RNA, 22 nt, Human
ucaguguguuauucuacuuuca

SEQ ID NO: 703694 - RNA, 22 nt, Human
auuuaauuaaucauggugaauu

SEQ ID NO: 703695 - RNA, 22 nt, Human
uaaacagcuacugugucaaagg

SEQ ID NO: 703696 - RNA, 17 nt, Human
ucugucugugguccacu

SEQ ID NO: 703697 - RNA, 22 nt, Human
gugaggcaggcauucuccuuuc

SEQ ID NO: 703698 - RNA, 22 nt, Human
uuauaaagauccuuccagaguu

SEQ ID NO: 703699 - RNA, 22 nt, Human
auguuccugauccucguucuau

SEQ ID NO: 703700 - RNA, 22 nt, Human
aggaggagcagcuuuuugucuc

SEQ ID NO: 703701 - RNA, 22 nt, Human
ucugcguggcugcugugagcgu

SEQ ID NO: 703702 - RNA, 22 nt, Human
ugaacaguuucaagaaaacuuu

SEQ ID NO: 703703 - RNA, 22 nt, Human
gcaggcagaucaccugucagga

SEQ ID NO: 703704 - RNA, 22 nt, Human
ccuggguagacuuugaagcauu

SEQ ID NO: 703705 - RNA, 22 nt, Human
cugagcauuugugcagcuucuc

SEQ ID NO: 703706 - RNA, 22 nt, Human
gaggaggcacuaguuagugaca

SEQ ID NO: 703707 - RNA, 22 nt, Human
gcuaggaaaggaagaacuuuga

SEQ ID NO: 703708 - RNA, 19 nt, Human
cagcaucugagccgugucc

SEQ ID NO: 703709 - RNA, 22 nt, Human
cagaaguggauauuagaguaau

SEQ ID NO: 703710 - RNA, 22 nt, Human
cagccaggacucccauuuagga

SEQ ID NO: 703711 - RNA, 22 nt, Human
auggaucagaaucccgggaggg

SEQ ID NO: 703712 - RNA, 22 nt, Human
auuuguuccacacauauuuacu

SEQ ID NO: 703713 - RNA, 22 nt, Human
ugauucugccccuuggcucugg

SEQ ID NO: 703714 - RNA, 22 nt, Human
gaaccuguuuauguuaccugcg

SEQ ID NO: 703715 - RNA, 22 nt, Human
ggucuggaauaagguccaggaa

SEQ ID NO: 703716 - RNA, 22 nt, Human
augcauauauacauacacaguc

SEQ ID NO: 703717 - RNA, 22 nt, Human
aucauucaagugcucuaaaaug

SEQ ID NO: 703718 - RNA, 22 nt, Human
accagcuguguccuggcugcag

SEQ ID NO: 703719 - RNA, 22 nt, Human
acaggugugagaacaugccuug

SEQ ID NO: 703720 - RNA, 22 nt, Human
gaggcuguuagggccugaggua

SEQ ID NO: 703721 - RNA, 22 nt, Human
ugggcugcagggguugagagcu

SEQ ID NO: 703722 - RNA, 22 nt, Human
cagaggguugucaggcgccuug

SEQ ID NO: 703723 - RNA, 18 nt, Human
gucaggcaugaaucuggg

SEQ ID NO: 703724 - RNA, 22 nt, Human
gggcugggcaugguguucccuc

SEQ ID NO: 703725 - RNA, 21 nt, Human
uucauuuguuauagacaaagu

SEQ ID NO: 703726 - RNA, 22 nt, Human
accagcugugugacuuuuaaug

SEQ ID NO: 703727 - RNA, 22 nt, Human
ucacaguuuuagcuguuaaaua

SEQ ID NO: 703728 - RNA, 23 nt, Human
ugcaggggaggcuuaaagcaggu

SEQ ID NO: 703729 - RNA, 22 nt, Human
aagccucaccuuuuagaagcua

SEQ ID NO: 703730 - RNA, 22 nt, Human
agggcuggaggguacuaguuua

SEQ ID NO: 703731 - RNA, 20 nt, Human
ucucuuuuagcuuacagcug

SEQ ID NO: 703732 - RNA, 22 nt, Human
ugccaagaccacaauugcuuuu

SEQ ID NO: 703733 - RNA, 22 nt, Human
gguggcugggauuaguagccca

SEQ ID NO: 703734 - RNA, 22 nt, Human
aguuucuucauccaaaaaaugg

SEQ ID NO: 703735 - RNA, 22 nt, Human
ugcugcuccugccuggcuccca

SEQ ID NO: 703736 - RNA, 22 nt, Human
caguaugagaguugaaucaagg

SEQ ID NO: 703737 - RNA, 22 nt, Human
auacacauuugcuagagauggg

SEQ ID NO: 703738 - RNA, 22 nt, Human
uugauucuauguuguugucuca

SEQ ID NO: 703739 - RNA, 22 nt, Human
cccuccucaacucuggcuucca

SEQ ID NO: 703740 - RNA, 22 nt, Human
auggaaguuggaaccauucaua

SEQ ID NO: 703741 - RNA, 17 nt, Human
aggaaacauuuucuuuc

SEQ ID NO: 703742 - RNA, 22 nt, Human
acauuuaaugauccuacuguga

SEQ ID NO: 703743 - RNA, 22 nt, Human
guuugcauaaaguggaugcagg

SEQ ID NO: 703744 - RNA, 22 nt, Human
aggcugugaguaguucuuguug

SEQ ID NO: 703745 - RNA, 21 nt, Human
gcaaccagaccacagggcagu

SEQ ID NO: 703746 - RNA, 20 nt, Human
aacauugcuucaauguaacc

SEQ ID NO: 703747 - RNA, 22 nt, Human
cguuaauaggugcaagguaagg

SEQ ID NO: 703748 - RNA, 22 nt, Human
ucucugugagccagguccuagu

SEQ ID NO: 703749 - RNA, 20 nt, Human
uauggcuuggcaaagcuuca

SEQ ID NO: 703750 - RNA, 19 nt, Human
ucagcucuggggucagugg

SEQ ID NO: 703751 - RNA, 22 nt, Human
aggccucugagcagcacucaug

SEQ ID NO: 703752 - RNA, 22 nt, Human
agcagugaugcaugacagccua

SEQ ID NO: 703753 - RNA, 22 nt, Human
uuucauguuacauuuaaaaugu

SEQ ID NO: 703754 - RNA, 22 nt, Human
acauuacacugugguccuguuc

SEQ ID NO: 703755 - RNA, 22 nt, Human
uauaaagaaaugauuuccagaa

SEQ ID NO: 703756 - RNA, 22 nt, Human
cugacagauacuuaugacauaa

SEQ ID NO: 703757 - RNA, 22 nt, Human
uuacagguacuugcugcugaaa

SEQ ID NO: 703758 - RNA, 22 nt, Human
aaaucagugcucauuugaaagg

SEQ ID NO: 703759 - RNA, 22 nt, Human
uggcuccucaucacaguuggug

SEQ ID NO: 703760 - RNA, 22 nt, Human
auagcuuugagggcuccuuagg

SEQ ID NO: 703761 - RNA, 22 nt, Human
uucaggaugcagagguuguagu

SEQ ID NO: 703762 - RNA, 22 nt, Human
gcagccaggggcugugaccugu

SEQ ID NO: 703763 - RNA, 22 nt, Human
uaaggcaaagugauuucuuaaa

SEQ ID NO: 703764 - RNA, 22 nt, Human
ugggcacagagucccaucugcc

SEQ ID NO: 703765 - RNA, 22 nt, Human
aacaguuuguggauagcuugua

SEQ ID NO: 703766 - RNA, 19 nt, Human
agcugucugcugcuuuugu

SEQ ID NO: 703767 - RNA, 21 nt, Human
acagcaagccuucacaugagu

SEQ ID NO: 703768 - RNA, 22 nt, Human
aguggcagggacuucauauaaa

SEQ ID NO: 703769 - RNA, 22 nt, Human
uucucuaagccuuaguuucuuc

SEQ ID NO: 703770 - RNA, 22 nt, Human
uccaaagaacauugcugagacc

SEQ ID NO: 703771 - RNA, 22 nt, Human
uaaugcuuuguuuugaucuaac

SEQ ID NO: 703772 - RNA, 22 nt, Human
agacauagauaggcacugauug

SEQ ID NO: 703773 - RNA, 22 nt, Human
ccaguuuagguacuaggcucua

SEQ ID NO: 703774 - RNA, 22 nt, Human
aagcucugggguacacaucugc

SEQ ID NO: 703775 - RNA, 22 nt, Human
gcuuccucaccuucucuugcau

SEQ ID NO: 703776 - RNA, 22 nt, Human
aaaaagauguccugaaguuuag

SEQ ID NO: 703777 - RNA, 22 nt, Human
ggcagaaggcaauuagagacug

SEQ ID NO: 703778 - RNA, 22 nt, Human
caugagaaccaggucuguguuu

SEQ ID NO: 703779 - RNA, 22 nt, Human
gcagggcuuuuugaaacauggu

SEQ ID NO: 703780 - RNA, 22 nt, Human
ucuccuggcauuugguugagua

SEQ ID NO: 703781 - RNA, 19 nt, Human
ucugacacuuacacacccc

SEQ ID NO: 703782 - RNA, 22 nt, Human
guccuggcccacuggcaggcug

SEQ ID NO: 703783 - RNA, 22 nt, Human
uugucaaggcuuuuaauauucu

SEQ ID NO: 703784 - RNA, 22 nt, Human
guggccaauaggagcagcuauc

SEQ ID NO: 703785 - RNA, 22 nt, Human
gcagcagcagggagucugacuu

SEQ ID NO: 703786 - RNA, 22 nt, Human
accuggcugguugugauuccca

SEQ ID NO: 703787 - RNA, 22 nt, Human
uggggccuuggccucauuagau

SEQ ID NO: 703788 - RNA, 22 nt, Human
uuuaugcagcguuucaccaccc

SEQ ID NO: 703789 - RNA, 22 nt, Human
aacaguguguuuuguuauuaag

SEQ ID NO: 703790 - RNA, 22 nt, Human
acccugccaaggauggccccga

SEQ ID NO: 703791 - RNA, 22 nt, Human
ccucagaaggacaagagacaaa

SEQ ID NO: 703792 - RNA, 22 nt, Human
caucauuuuauuaaccaagaaa

SEQ ID NO: 703793 - RNA, 22 nt, Human
ucagcuuuccugcagcuaaggg

SEQ ID NO: 703794 - RNA, 22 nt, Human
ccacuggcugucagcaggacuc

SEQ ID NO: 703795 - RNA, 22 nt, Human
gaggaaugucagcacaggccuc

SEQ ID NO: 703796 - RNA, 22 nt, Human
ugaggggcggccugcagaggcc

SEQ ID NO: 703797 - RNA, 22 nt, Human
guggcccaggcuuggcgcuggc

SEQ ID NO: 703798 - RNA, 22 nt, Human
cauaauccauuugcacugcaga

SEQ ID NO: 703799 - RNA, 22 nt, Human
agggagcucgaugccugagugu

SEQ ID NO: 703800 - RNA, 22 nt, Human
uugaauuauaagugugucuacu

SEQ ID NO: 703801 - RNA, 22 nt, Human
gcaggcugggguagccccacuu

SEQ ID NO: 703802 - RNA, 22 nt, Human
ucagugcuccuaaagugaaugc

SEQ ID NO: 703803 - RNA, 22 nt, Human
augcuggugguugauggcagga

SEQ ID NO: 703804 - RNA, 19 nt, Human
cucagcuguagcucaugug

SEQ ID NO: 703805 - RNA, 22 nt, Human
cuguugguguugauuaaauagu

SEQ ID NO: 703806 - RNA, 22 nt, Human
aaggaagauauaucaagcuuaa

SEQ ID NO: 703807 - RNA, 22 nt, Human
uuuccuuugggcacccgagcuc

SEQ ID NO: 703808 - RNA, 22 nt, Human
cacacauggcugccagggaggu

SEQ ID NO: 703809 - RNA, 22 nt, Human
gacagguauuugagagcuggga

SEQ ID NO: 703810 - RNA, 22 nt, Human
cagaggaugaucuggccucucu

SEQ ID NO: 703811 - RNA, 22 nt, Human
cagcauggcuugaguguuuccu

SEQ ID NO: 703812 - RNA, 22 nt, Human
gauaaacuggaaccauugccuc

SEQ ID NO: 703813 - RNA, 22 nt, Human
cauaacauccuugcuacuuuga

SEQ ID NO: 703814 - RNA, 22 nt, Human
acaugagaagcugcaacaugac

SEQ ID NO: 703815 - RNA, 22 nt, Human
auccugggaaugggagggucau

SEQ ID NO: 703816 - RNA, 22 nt, Human
agagcuguggauaguccuggau

SEQ ID NO: 703817 - RNA, 22 nt, Human
agagugggcaggagccucgacu

SEQ ID NO: 703818 - RNA, 22 nt, Human
uauccguuagaaucaugcuggg

SEQ ID NO: 703819 - RNA, 22 nt, Human
caccuggcccagcuccagugcu

SEQ ID NO: 703820 - RNA, 17 nt, Human
aagaaucauuagagaag

SEQ ID NO: 703821 - RNA, 22 nt, Human
aacauguuuccaguguaaggcc

SEQ ID NO: 703822 - RNA, 22 nt, Human
uaauaacaauuguaggacauga

SEQ ID NO: 703823 - RNA, 22 nt, Human
uucuauguguugacaagccuga

SEQ ID NO: 703824 - RNA, 22 nt, Human
uucacaauagcuggcaucaucu

SEQ ID NO: 703825 - RNA, 22 nt, Human
aaaauugucagaaguugaucuu

SEQ ID NO: 703826 - RNA, 22 nt, Human
cccacacauuuuucacuuaccg

SEQ ID NO: 703827 - RNA, 22 nt, Human
aggcugggcaccguuuugaucc

SEQ ID NO: 703828 - RNA, 22 nt, Human
cagggaguuuuuguuccucuag

SEQ ID NO: 703829 - RNA, 19 nt, Human
gcccugagagcuuggguuc

SEQ ID NO: 703830 - RNA, 22 nt, Human
ucugcguuauugaaaagcagcc

SEQ ID NO: 703831 - RNA, 21 nt, Human
gcuucagcaaggcuugcuggu

SEQ ID NO: 703832 - RNA, 22 nt, Human
gcuccuggucuggagcuucaag

SEQ ID NO: 703833 - RNA, 22 nt, Human
aggugggcgcugcucccgcugg

SEQ ID NO: 703834 - RNA, 22 nt, Human
agcuuagugguuguaugaguua

SEQ ID NO: 703835 - RNA, 22 nt, Human
ucacauugaagaaauuuuaagu

SEQ ID NO: 703836 - RNA, 22 nt, Human
ucaugccacuuacaaaauaaug

SEQ ID NO: 703837 - RNA, 22 nt, Human
accacaggaggauggcugcugg

SEQ ID NO: 703838 - RNA, 20 nt, Human
gccaccucucuagcaguaga

SEQ ID NO: 703839 - RNA, 21 nt, Human
acauuuucuguuuuaggaagu

SEQ ID NO: 703840 - RNA, 22 nt, Human
aacagcagguccuggcaugggu

SEQ ID NO: 703841 - RNA, 22 nt, Human
uauaauccugcuucacauugaa

SEQ ID NO: 703842 - RNA, 22 nt, Human
acaaguaccaaaugcucaagua

SEQ ID NO: 703843 - RNA, 22 nt, Human
auccaggcgaaugcagaaggcc

SEQ ID NO: 703844 - RNA, 22 nt, Human
aaagcuauuuauuacagagaau

SEQ ID NO: 703845 - RNA, 22 nt, Human
uuuguaugugauaagacuauuc

SEQ ID NO: 703846 - RNA, 22 nt, Human
uccuucaaaaguugagagagcc

SEQ ID NO: 703847 - RNA, 22 nt, Human
ccagagacgucggucagggcgc

SEQ ID NO: 703848 - RNA, 22 nt, Human
acuuacaaguucccuuucucag

SEQ ID NO: 703849 - RNA, 22 nt, Human
ggaggcugagaggucgcagugg

SEQ ID NO: 703850 - RNA, 22 nt, Human
agaaaucacaggaggcagaagg

SEQ ID NO: 703851 - RNA, 22 nt, Human
augugcuuucuuuccaaggggc

SEQ ID NO: 703852 - RNA, 22 nt, Human
caggguggaauggaaugcuggc

SEQ ID NO: 703853 - RNA, 22 nt, Human
aucaggaucagggcuagcagag

SEQ ID NO: 703854 - RNA, 22 nt, Human
cacugcccuggggguugccauc

SEQ ID NO: 703855 - RNA, 22 nt, Human
aucuggcuuaccuagggugccu

SEQ ID NO: 703856 - RNA, 22 nt, Human
uagcuguuuuuugugaggaaau

SEQ ID NO: 703857 - RNA, 22 nt, Human
guuucacaugaaacuuggggaa

SEQ ID NO: 703858 - RNA, 22 nt, Human
cccagcucuggaagguggggga

SEQ ID NO: 703859 - RNA, 20 nt, Human
uagauccgcaguaaaacuuu

SEQ ID NO: 703860 - RNA, 22 nt, Human
uagauccugagcccuaucuacu

SEQ ID NO: 703861 - RNA, 22 nt, Human
uccaggcugugcaugaguuuag

SEQ ID NO: 703862 - RNA, 22 nt, Human
aguguugcaugaggcaguacca

SEQ ID NO: 703863 - RNA, 22 nt, Human
cugcccugagggccuguguguu

SEQ ID NO: 703864 - RNA, 22 nt, Human
aucaagaacuuauuuuggaaau

SEQ ID NO: 703865 - RNA, 21 nt, Human
aggcacuguuugugguuuggg

SEQ ID NO: 703866 - RNA, 23 nt, Human
uucauucaaaaggaaaagucaug

SEQ ID NO: 703867 - RNA, 22 nt, Human
uuucuugucuuuaguaucuggc

SEQ ID NO: 703868 - RNA, 22 nt, Human
caugcuauuuuccaauaaugua

SEQ ID NO: 703869 - RNA, 22 nt, Human
aaauauguuuuccaguugucau

SEQ ID NO: 703870 - RNA, 22 nt, Human
ugcauuccuuugucuguuaaag

SEQ ID NO: 703871 - RNA, 22 nt, Human
gcagaggugucaccuuccagga

SEQ ID NO: 703872 - RNA, 22 nt, Human
cgcgcggcucucgcgagaugug

SEQ ID NO: 703873 - RNA, 22 nt, Human
acaaaugcuuaguucaccaaaa

SEQ ID NO: 703874 - RNA, 22 nt, Human
cacagcuucugucugacccaug

SEQ ID NO: 703875 - RNA, 21 nt, Human
gccugcagaccccaccaggcu

SEQ ID NO: 703876 - RNA, 22 nt, Human
ccucucaucauuaucgcuuugu

SEQ ID NO: 703877 - RNA, 22 nt, Human
caaaguaauuuggagauauaua

SEQ ID NO: 703878 - RNA, 22 nt, Human
agcagagaagacacaggcuuca

SEQ ID NO: 703879 - RNA, 22 nt, Human
ccagccuggagggcaguggugg

SEQ ID NO: 703880 - RNA, 22 nt, Human
gcuggcuugucccaggacaaag

SEQ ID NO: 703881 - RNA, 22 nt, Human
agaggacagguuuuccaugggc

SEQ ID NO: 703882 - RNA, 22 nt, Human
aauugcuucccaagggaggucu

SEQ ID NO: 703883 - RNA, 22 nt, Human
uuucacaguagaaaucauuaug

SEQ ID NO: 703884 - RNA, 22 nt, Human
augaacaaaaacaaggccuguu

SEQ ID NO: 703885 - RNA, 22 nt, Human
ccaaagugcugggauucaggca

SEQ ID NO: 703886 - RNA, 22 nt, Human
aauugcuuaugccaggugagag

SEQ ID NO: 703887 - RNA, 22 nt, Human
uaggaacaaagagccucacauu

SEQ ID NO: 703888 - RNA, 22 nt, Human
uuuagcagagcauaugauaucc

SEQ ID NO: 703889 - RNA, 22 nt, Human
aacugaaacguauuuuugagau

SEQ ID NO: 703890 - RNA, 17 nt, Human
uuaaaccauaaagaagg

SEQ ID NO: 703891 - RNA, 22 nt, Human
augaggcacaucacagccaaug

SEQ ID NO: 703892 - RNA, 22 nt, Human
ccaaggcuggagggcuuaugua

SEQ ID NO: 703893 - RNA, 19 nt, Human
acccugagaggugguccgg

SEQ ID NO: 703894 - RNA, 22 nt, Human
gugcauauguaccugugaucau

SEQ ID NO: 703895 - RNA, 22 nt, Human
acacaaacagucuauagcacca

SEQ ID NO: 703896 - RNA, 22 nt, Human
cuaaaauuaucaagauaauucc

SEQ ID NO: 703897 - RNA, 22 nt, Human
cccaggcugaugggaugggcca

SEQ ID NO: 703898 - RNA, 22 nt, Human
ugcaucuuucugcauauguaaa

SEQ ID NO: 703899 - RNA, 21 nt, Human
ugcaaugcauugacagcagca

SEQ ID NO: 703900 - RNA, 22 nt, Human
gcccuucauuuauaguuggaau

SEQ ID NO: 703901 - RNA, 22 nt, Human
ucagauuuguccuacuaggcac

SEQ ID NO: 703902 - RNA, 22 nt, Human
uggcaaggcugugggggcagag

SEQ ID NO: 703903 - RNA, 22 nt, Human
ugguccuuguaggcauuugagc

SEQ ID NO: 703904 - RNA, 22 nt, Human
gaagcaaucuggcucccagcca

SEQ ID NO: 703905 - RNA, 22 nt, Human
cccuuuggcauuuccaggauau

SEQ ID NO: 703906 - RNA, 20 nt, Human
auguaaaagacagggaguag

SEQ ID NO: 703907 - RNA, 22 nt, Human
uacauuuccugucagagauaua

SEQ ID NO: 703908 - RNA, 22 nt, Human
uuucucugcagagccccaagga

SEQ ID NO: 703909 - RNA, 22 nt, Human
uccuuaggcaauuugggagagu

SEQ ID NO: 703910 - RNA, 22 nt, Human
uuccugggccuuaaaucuuuug

SEQ ID NO: 703911 - RNA, 22 nt, Human
accaagcucucuucccggcucu

SEQ ID NO: 703912 - RNA, 22 nt, Human
ccagugccuaucuccucuggga

SEQ ID NO: 703913 - RNA, 22 nt, Human
caugcuaauucccaggccccaa

SEQ ID NO: 703914 - RNA, 22 nt, Human
aaugaggugaggaaggccucag

SEQ ID NO: 703915 - RNA, 18 nt, Human
ugcagcauguucccauaa

SEQ ID NO: 703916 - RNA, 22 nt, Human
aggggucuauccugagaugguc

SEQ ID NO: 703917 - RNA, 22 nt, Human
cucugcugcuugccagucauug

SEQ ID NO: 703918 - RNA, 22 nt, Human
uccugggcuugcuccuccagcu

SEQ ID NO: 703919 - RNA, 22 nt, Human
uugagaagguggucauuugcaa

SEQ ID NO: 703920 - RNA, 21 nt, Human
agagggagaguggcccuucca

SEQ ID NO: 703921 - RNA, 22 nt, Human
acuggacucacguauuccugag

SEQ ID NO: 703922 - RNA, 22 nt, Human
ugcagcagacugaguaugagaa

SEQ ID NO: 703923 - RNA, 23 nt, Human
agcagugaguaaacagauaggau

SEQ ID NO: 703924 - RNA, 22 nt, Human
gcuucuggugaggccucaggaa

SEQ ID NO: 703925 - RNA, 22 nt, Human
aagauucuuugaggauuuuacu

SEQ ID NO: 703926 - RNA, 22 nt, Human
ccagcaggagacuagcaacaua

SEQ ID NO: 703927 - RNA, 22 nt, Human
cacagaggagugcacacucucu

SEQ ID NO: 703928 - RNA, 22 nt, Human
acccugagaaugagugucuccu

SEQ ID NO: 703929 - RNA, 22 nt, Human
uggcagauggccuggaaccaaa

SEQ ID NO: 703930 - RNA, 22 nt, Human
uacaggcauguagcauggugau

SEQ ID NO: 703931 - RNA, 22 nt, Human
agauauuuaaaucagacaaaga

SEQ ID NO: 703932 - RNA, 22 nt, Human
acccaggacaugggcacccgug

SEQ ID NO: 703933 - RNA, 22 nt, Human
ggaaaaacagucuuuauuauuu

SEQ ID NO: 703934 - RNA, 22 nt, Human
aaagugcugaaauuacaggggu

SEQ ID NO: 703935 - RNA, 22 nt, Human
aaauaacuuucuguguauaguc

SEQ ID NO: 703936 - RNA, 22 nt, Human
ucccggcgcugggagguggguc

SEQ ID NO: 703937 - RNA, 22 nt, Human
guaguacaugaagcacuuggca

SEQ ID NO: 703938 - RNA, 22 nt, Human
cugacccuugcucgggcccugu

SEQ ID NO: 703939 - RNA, 19 nt, Human
aacagcaacuuccuaguca

SEQ ID NO: 703940 - RNA, 22 nt, Human
uugcauuuguuugaguagaaug

SEQ ID NO: 703941 - RNA, 22 nt, Human
gcucugagaggaugcugagcag

SEQ ID NO: 703942 - RNA, 19 nt, Human
uccaggccauucccagagc

SEQ ID NO: 703943 - RNA, 22 nt, Human
uuuuacuuaauucuuggucaug

SEQ ID NO: 703944 - RNA, 22 nt, Human
aggcagugcagaguccucuucu

SEQ ID NO: 703945 - RNA, 22 nt, Human
cccugugggccaugugucuaca

SEQ ID NO: 703946 - RNA, 22 nt, Human
aggccuggguguucaccagaag

SEQ ID NO: 703947 - RNA, 22 nt, Human
uauagcaaaguacuaccaacuc

SEQ ID NO: 703948 - RNA, 22 nt, Human
gaccucagugaauggucaugua

SEQ ID NO: 703949 - RNA, 22 nt, Human
gggcccuggggccugauuugca

SEQ ID NO: 703950 - RNA, 22 nt, Human
uucagagguaagggucucagaa

SEQ ID NO: 703951 - RNA, 22 nt, Human
ugucucuuuggccucccauaug

SEQ ID NO: 703952 - RNA, 22 nt, Human
gaugcaaagaggaccuucagua

SEQ ID NO: 703953 - RNA, 22 nt, Human
ggggcugcugguauuuccaguu

SEQ ID NO: 703954 - RNA, 22 nt, Human
gcccaggagccuggagaugugu

SEQ ID NO: 703955 - RNA, 22 nt, Human
acugggcuaccccaccauuacc

SEQ ID NO: 703956 - RNA, 22 nt, Human
gagcuguccgccccugggccga

SEQ ID NO: 703957 - RNA, 22 nt, Human
uuaccacagugccugucuaaug

SEQ ID NO: 703958 - RNA, 22 nt, Human
ccuccugggacucauuagcacc

SEQ ID NO: 703959 - RNA, 22 nt, Human
aagcgcagacacagagagugga

SEQ ID NO: 703960 - RNA, 22 nt, Human
gccuugggauucuuggaugcuc

SEQ ID NO: 703961 - RNA, 22 nt, Human
cucucccuugggugggcuuugg

SEQ ID NO: 703962 - RNA, 22 nt, Human
uaagugcaugauugaacuuggc

SEQ ID NO: 703963 - RNA, 22 nt, Human
gcucccugcacucugcagcccu

SEQ ID NO: 703964 - RNA, 22 nt, Human
cugcagagaguaacugaaauau

SEQ ID NO: 703965 - RNA, 22 nt, Human
agaccuggugauagcuguccua

SEQ ID NO: 703966 - RNA, 22 nt, Human
cauggcuuaccccaggagcagc

SEQ ID NO: 703967 - RNA, 22 nt, Human
aaaauagaugaaaggaagucug

SEQ ID NO: 703968 - RNA, 22 nt, Human
uuauauacugugguaguacugu

SEQ ID NO: 703969 - RNA, 22 nt, Human
ugcagggcagauaugacuguag

SEQ ID NO: 703970 - RNA, 22 nt, Human
aaacuguaggagggaaaggaag

SEQ ID NO: 703971 - RNA, 22 nt, Human
acaguagcuaauauugcauuau

SEQ ID NO: 703972 - RNA, 22 nt, Human
acuguuucucaaauuauguggu

SEQ ID NO: 703973 - RNA, 22 nt, Human
acucuggcuauucacuauaaua

SEQ ID NO: 703974 - RNA, 22 nt, Human
gcugggcugagaaguuaagcaa

SEQ ID NO: 703975 - RNA, 22 nt, Human
gggucucuccuccccagcugug

SEQ ID NO: 703976 - RNA, 21 nt, Human
ugccagggauuuacagagccu

SEQ ID NO: 703977 - RNA, 17 nt, Human
ggccacagagcuugggg

SEQ ID NO: 703978 - RNA, 22 nt, Human
agggagcucuuuggucuugccg

SEQ ID NO: 703979 - RNA, 22 nt, Human
gaaaauugaaucaguagcugau

SEQ ID NO: 703980 - RNA, 22 nt, Human
uauucacaguugauuuacaguu

SEQ ID NO: 703981 - RNA, 22 nt, Human
cagcucagugaugccuucacag

SEQ ID NO: 703982 - RNA, 22 nt, Human
ccagcucagggucacauggcac

SEQ ID NO: 703983 - RNA, 22 nt, Human
auuauucaauguuauuucagug

SEQ ID NO: 703984 - RNA, 22 nt, Human
agcagcauacacaucauguuga

SEQ ID NO: 703985 - RNA, 21 nt, Human
ucaaagcacauauuugcacau

SEQ ID NO: 703986 - RNA, 22 nt, Human
ugccugcucugugccacaguug

SEQ ID NO: 703987 - RNA, 22 nt, Human
guggagccaggaucuccgcaca

SEQ ID NO: 703988 - RNA, 22 nt, Human
uaucaucacuguaauccguuga

SEQ ID NO: 703989 - RNA, 22 nt, Human
accugggaggcagagguugcag

SEQ ID NO: 703990 - RNA, 22 nt, Human
uuuauugcuagcccuuggucca

SEQ ID NO: 703991 - RNA, 20 nt, Human
ccuggcaggcggguuacuua

SEQ ID NO: 703992 - RNA, 22 nt, Human
agcugcugagccauguccugcu

SEQ ID NO: 703993 - RNA, 22 nt, Human
guggucaggggcuguggcuaug

SEQ ID NO: 703994 - RNA, 22 nt, Human
caggaccccauauucacugaac

SEQ ID NO: 703995 - RNA, 20 nt, Human
aagaagccgggaaggcaggc

SEQ ID NO: 703996 - RNA, 22 nt, Human
gauccguuccaccagucuuuau

SEQ ID NO: 703997 - RNA, 22 nt, Human
gccaguggugagauucccuggg

SEQ ID NO: 703998 - RNA, 22 nt, Human
cuggucccugcagugugcuggg

SEQ ID NO: 703999 - RNA, 22 nt, Human
gacccuccacucacugcugugu

SEQ ID NO: 704000 - RNA, 22 nt, Human
ugucacuacaucauaaauauau

SEQ ID NO: 704001 - RNA, 22 nt, Human
auuuuuucagauugaguguuaa

SEQ ID NO: 704002 - RNA, 22 nt, Human
accaaaggcagagcugaacacu

SEQ ID NO: 704003 - RNA, 22 nt, Human
gaaucaaugguagauuaaguaa

SEQ ID NO: 704004 - RNA, 22 nt, Human
aaaagagguuaaccaggugugu

SEQ ID NO: 704005 - RNA, 22 nt, Human
ucagaggcaucauucauaguua

SEQ ID NO: 704006 - RNA, 22 nt, Human
ucauauaccagagaguuuauau

SEQ ID NO: 704007 - RNA, 23 nt, Human
acuugauuauuguugauagauuc

SEQ ID NO: 704008 - RNA, 22 nt, Human
uucagacuuuguggggcccucc

SEQ ID NO: 704009 - RNA, 22 nt, Human
uguagauuuuggagucuacaag

SEQ ID NO: 704010 - RNA, 22 nt, Human
gagacauucuuaggaacaaugu

SEQ ID NO: 704011 - RNA, 22 nt, Human
ucucugagaucagccacugacu

SEQ ID NO: 704012 - RNA, 22 nt, Human
ggcuggcuggcuuagcagagga

SEQ ID NO: 704013 - RNA, 22 nt, Human
uauggauguuuaucuacaggcu

SEQ ID NO: 704014 - RNA, 22 nt, Human
ggcuuuauuauguggccaugug

SEQ ID NO: 704015 - RNA, 22 nt, Human
ggcuauccauggaucugaacuc

SEQ ID NO: 704016 - RNA, 20 nt, Human
uggcacagaacccuugccua

SEQ ID NO: 704017 - RNA, 22 nt, Human
ggcucugugagaacaaaggcua

SEQ ID NO: 704018 - RNA, 22 nt, Human
uuuucaaagacuggaggcugau

SEQ ID NO: 704019 - RNA, 22 nt, Human
ccuucucugcagguaguuggcu

SEQ ID NO: 704020 - RNA, 22 nt, Human
uguugggaagcucugccagggg

SEQ ID NO: 704021 - RNA, 22 nt, Human
aguuaacaaguuggcaaucaac

SEQ ID NO: 704022 - RNA, 22 nt, Human
aaacuuuuuuagguucauaggc

SEQ ID NO: 704023 - RNA, 22 nt, Human
aauuccaagagcuuccuaagug

SEQ ID NO: 704024 - RNA, 22 nt, Human
gcaaugucugugcuaaaaacug

SEQ ID NO: 704025 - RNA, 22 nt, Human
agccaacuaggagauuaaggua

SEQ ID NO: 704026 - RNA, 17 nt, Human
ccugucuuguuucugcc

SEQ ID NO: 704027 - RNA, 23 nt, Human
gcucacagaauguugaagggaau

SEQ ID NO: 704028 - RNA, 22 nt, Human
ucuugagaaauaauuaaacaug

SEQ ID NO: 704029 - RNA, 22 nt, Human
ccugucaccuagguacugagca

SEQ ID NO: 704030 - RNA, 22 nt, Human
uucaagucugcccagagucagc

SEQ ID NO: 704031 - RNA, 22 nt, Human
uucugcuuugguuccauggaug

SEQ ID NO: 704032 - RNA, 22 nt, Human
ucacagaaggcaucacagaaga

SEQ ID NO: 704033 - RNA, 18 nt, Human
ugcucuguuuaaugauuu

SEQ ID NO: 704034 - RNA, 22 nt, Human
ccaaaauauuagugcuuaagua

SEQ ID NO: 704035 - RNA, 23 nt, Human
cuugcagggcuggaggcuuagaa

SEQ ID NO: 704036 - RNA, 22 nt, Human
agccaggauggucucgaucggc

SEQ ID NO: 704037 - RNA, 22 nt, Human
cuauccauauccugggcauggc

SEQ ID NO: 704038 - RNA, 20 nt, Human
acauuugaguaucaucuacu

SEQ ID NO: 704039 - RNA, 22 nt, Human
uauauugggacuucaggacuuu

SEQ ID NO: 704040 - RNA, 23 nt, Human
uaaugccagcccugcaguuaagc

SEQ ID NO: 704041 - RNA, 18 nt, Human
gaagggcuuugaaguaga

SEQ ID NO: 704042 - RNA, 22 nt, Human
auaauucagguuuucuggcaca

SEQ ID NO: 704043 - RNA, 23 nt, Human
acagugucugcugcaagauaucu

SEQ ID NO: 704044 - RNA, 22 nt, Human
auucucuuuguauaacaucuug

SEQ ID NO: 704045 - RNA, 18 nt, Human
ucagccuguugucugccu

SEQ ID NO: 704046 - RNA, 22 nt, Human
uauaguacacuuagguacuuca

SEQ ID NO: 704047 - RNA, 22 nt, Human
auuuuacuuugugaauauugac

SEQ ID NO: 704048 - RNA, 22 nt, Human
uugcacagugguuuagagccug

SEQ ID NO: 704049 - RNA, 23 nt, Human
acagaucaucucgaaacaacuau

SEQ ID NO: 704050 - RNA, 22 nt, Human
uggcuggcugucaaggaaagcc

SEQ ID NO: 704051 - RNA, 22 nt, Human
uccagcccugugucugggagag

SEQ ID NO: 704052 - RNA, 22 nt, Human
cagugagggaagaucucagcac

SEQ ID NO: 704053 - RNA, 22 nt, Human
ugaggccuggagggaggaguuu

SEQ ID NO: 704054 - RNA, 21 nt, Human
uggcugagccaggugugugga

SEQ ID NO: 704055 - RNA, 22 nt, Human
uagggaggaggguuuucaaauc

SEQ ID NO: 704056 - RNA, 22 nt, Human
cacugcuucuggaggaauuugg

SEQ ID NO: 704057 - RNA, 21 nt, Human
aguguccuuuuacugugaaua

SEQ ID NO: 704058 - RNA, 22 nt, Human
cagcaucugaccaauaucuaca

SEQ ID NO: 704059 - RNA, 21 nt, Human
ugcagcagaagucucuguguc

SEQ ID NO: 704060 - RNA, 22 nt, Human
uggcuuugaaauccagucauua

SEQ ID NO: 704061 - RNA, 22 nt, Human
cccacacucugagaaaugcuga

SEQ ID NO: 704062 - RNA, 17 nt, Human
cagguacauugcuacug

SEQ ID NO: 704063 - RNA, 22 nt, Human
gcuggcccagggucaccuagga

SEQ ID NO: 704064 - RNA, 22 nt, Human
uucauguguauggaacauuuuu

SEQ ID NO: 704065 - RNA, 22 nt, Human
ugagccaggcuccaugccaccu

SEQ ID NO: 704066 - RNA, 21 nt, Human
uagaucaugguauucuuuggc

SEQ ID NO: 704067 - RNA, 22 nt, Human
gcugagggccgcauagggucau

SEQ ID NO: 704068 - RNA, 19 nt, Human
ggcucucuuaaagcuguuu

SEQ ID NO: 704069 - RNA, 22 nt, Human
cugaauaucauuuaucauuggc

SEQ ID NO: 704070 - RNA, 22 nt, Human
ucauguuuuagcugcaaaauga

SEQ ID NO: 704071 - RNA, 22 nt, Human
agcugccccaugagaggcaggu

SEQ ID NO: 704072 - RNA, 22 nt, Human
acacagcagaaggcccgugucu

SEQ ID NO: 704073 - RNA, 22 nt, Human
acaguugaggacuuaaacaaaa

SEQ ID NO: 704074 - RNA, 22 nt, Human
gucauauuauaaauguucuguu

SEQ ID NO: 704075 - RNA, 22 nt, Human
aauuguacaggaaguugcugga

SEQ ID NO: 704076 - RNA, 22 nt, Human
cauccugguuaccccauaguca

SEQ ID NO: 704077 - RNA, 22 nt, Human
caggcuccuucccagggauggu

SEQ ID NO: 704078 - RNA, 22 nt, Human
aacaugcauauagguaaaugga

SEQ ID NO: 704079 - RNA, 22 nt, Human
acagugcagggcgggaagaagg

SEQ ID NO: 704080 - RNA, 22 nt, Human
cacuugcuggaugguggcucag

SEQ ID NO: 704081 - RNA, 23 nt, Human
auuugcauggccggauuauggau

SEQ ID NO: 704082 - RNA, 22 nt, Human
cuacacuuugguugacuuugug

SEQ ID NO: 704083 - RNA, 22 nt, Human
uugugucugggggagugacauc

SEQ ID NO: 704084 - RNA, 22 nt, Human
aguggcagagguugacugcagu

SEQ ID NO: 704085 - RNA, 22 nt, Human
acauggcuaaagcaagucuaga

SEQ ID NO: 704086 - RNA, 22 nt, Human
uucuucugauugccuucugcaa

SEQ ID NO: 704087 - RNA, 21 nt, Human
agcugccuuuagagagaacca

SEQ ID NO: 704088 - RNA, 22 nt, Human
cucugcuguuuuguauacaggc

SEQ ID NO: 704089 - RNA, 22 nt, Human
cagucccaguuugagacucugg

SEQ ID NO: 704090 - RNA, 22 nt, Human
acacaggaacucugagaggugg

SEQ ID NO: 704091 - RNA, 22 nt, Human
cuacugaguccuucagcugcca

SEQ ID NO: 704092 - RNA, 22 nt, Human
ugagauaauaaacaucuccuua

SEQ ID NO: 704093 - RNA, 22 nt, Human
agugcccucgugcccagggccu

SEQ ID NO: 704094 - RNA, 22 nt, Human
ggcuggauguacuuuggggcug

SEQ ID NO: 704095 - RNA, 22 nt, Human
ugugucuuaaguuccaagacau

SEQ ID NO: 704096 - RNA, 22 nt, Human
cugccagccaggccagguaggc

SEQ ID NO: 704097 - RNA, 22 nt, Human
caugggcccgugagaggcaggg

SEQ ID NO: 704098 - RNA, 22 nt, Human
aggagcugauaaaaggggguca

SEQ ID NO: 704099 - RNA, 22 nt, Human
ugacaggugauugugaacuaag

SEQ ID NO: 704100 - RNA, 22 nt, Human
cuucuauuuucaugccuggguc

SEQ ID NO: 704101 - RNA, 22 nt, Human
caguaauagaggcuuugagucu

SEQ ID NO: 704102 - RNA, 22 nt, Human
uuguauuuauauugaauagcuu

SEQ ID NO: 704103 - RNA, 22 nt, Human
cugcucuguucccccaucaucu

SEQ ID NO: 704104 - RNA, 22 nt, Human
cagcucagucuugaagcacugg

SEQ ID NO: 704105 - RNA, 18 nt, Human
ccagcugcgcugaaccga

SEQ ID NO: 704106 - RNA, 16 nt, Human
gggggugagagagagu

SEQ ID NO: 704107 - RNA, 22 nt, Human
ucagaaagcuuuuacuuaaaca

SEQ ID NO: 704108 - RNA, 22 nt, Human
uuggcugucacugucaguucag

SEQ ID NO: 704109 - RNA, 22 nt, Human
gccagguucuggggagguacaa

SEQ ID NO: 704110 - RNA, 21 nt, Human
agagucugagugugcaagggc

SEQ ID NO: 704111 - RNA, 22 nt, Human
cccauucauccucgcuuccuuc

SEQ ID NO: 704112 - RNA, 22 nt, Human
ccacccaugugacuaccucaug

SEQ ID NO: 704113 - RNA, 22 nt, Human
uaggcagagaggccauaagaau

SEQ ID NO: 704114 - RNA, 22 nt, Human
ucacagcaaaagugugcagagc

SEQ ID NO: 704115 - RNA, 22 nt, Human
gcccagaaguugaggcugcagu

SEQ ID NO: 704116 - RNA, 22 nt, Human
uugaaugaauaguugcuagaag

SEQ ID NO: 704117 - RNA, 22 nt, Human
ucagauagugauaauagcaugu

SEQ ID NO: 704118 - RNA, 22 nt, Human
ucugccuaugcuguaccuuugu

SEQ ID NO: 704119 - RNA, 22 nt, Human
uggcacagaccuuaucuucucu

SEQ ID NO: 704120 - RNA, 22 nt, Human
aucucuucucccaacaccuggc

SEQ ID NO: 704121 - RNA, 22 nt, Human
uggcuggagcauuccuugucuu

SEQ ID NO: 704122 - RNA, 22 nt, Human
ucuccaaggagcuccugugccg

SEQ ID NO: 704123 - RNA, 22 nt, Human
augcauuguaacgaugugcaca

SEQ ID NO: 704124 - RNA, 22 nt, Human
ucugauguugcuucugcagaac

SEQ ID NO: 704125 - RNA, 22 nt, Human
ucugggaguggguccaaggaau

SEQ ID NO: 704126 - RNA, 22 nt, Human
auucugcugcacaccuuccccc

SEQ ID NO: 704127 - RNA, 22 nt, Human
caaacugagcaucagaaaguuu

SEQ ID NO: 704128 - RNA, 22 nt, Human
aucugccucuucuucauugcga

SEQ ID NO: 704129 - RNA, 22 nt, Human
aaugggcuuuggccaguaggag

SEQ ID NO: 704130 - RNA, 22 nt, Human
uauaccaaaaaaauucuugucu

SEQ ID NO: 704131 - RNA, 21 nt, Human
gcaaguguuucugacaguggc

SEQ ID NO: 704132 - RNA, 22 nt, Human
agagcccugcaguucuucagga

SEQ ID NO: 704133 - RNA, 22 nt, Human
ucaagaaggagacuccacugug

SEQ ID NO: 704134 - RNA, 22 nt, Human
cucuuuaaaguaaaauuugucu

SEQ ID NO: 704135 - RNA, 22 nt, Human
ucuucaaguuccaaagugcagg

SEQ ID NO: 704136 - RNA, 22 nt, Human
auucuggccuuggcucugucac

SEQ ID NO: 704137 - RNA, 22 nt, Human
cuggcuugcagcucaucauaaa

SEQ ID NO: 704138 - RNA, 22 nt, Human
uuauaagaguauauaguguacu

SEQ ID NO: 704139 - RNA, 22 nt, Human
aggcagagcuaggaagaauugu

SEQ ID NO: 704140 - RNA, 22 nt, Human
gguggggcuaggaccucaggau

SEQ ID NO: 704141 - RNA, 22 nt, Human
caaccugaauucugcuuuggca

SEQ ID NO: 704142 - RNA, 22 nt, Human
aaggcaugauguaaucaaugau

SEQ ID NO: 704143 - RNA, 22 nt, Human
caggucccgccccgggcugacc

SEQ ID NO: 704144 - RNA, 22 nt, Human
guuuccuacacuguaguauuau

SEQ ID NO: 704145 - RNA, 22 nt, Human
auauuaggugcucaauacaugc

SEQ ID NO: 704146 - RNA, 22 nt, Human
aguugucaccucuauucaaauc

SEQ ID NO: 704147 - RNA, 22 nt, Human
augaauggauggggucaagaua

SEQ ID NO: 704148 - RNA, 22 nt, Human
cuggccuagcucucugcuugaa

SEQ ID NO: 704149 - RNA, 23 nt, Human
agaguccacaagauuuuccagug

SEQ ID NO: 704150 - RNA, 22 nt, Human
gacagcaggugcuugggaaagg

SEQ ID NO: 704151 - RNA, 22 nt, Human
aagcaggaaggagcccagggca

SEQ ID NO: 704152 - RNA, 22 nt, Human
ggcugagucugugacccaugcg

SEQ ID NO: 704153 - RNA, 23 nt, Human
cauuucuagguguguuuggccau

SEQ ID NO: 704154 - RNA, 21 nt, Human
cuuggcacagggaagaugcac

SEQ ID NO: 704155 - RNA, 22 nt, Human
aguccaaggagagacagcauuu

SEQ ID NO: 704156 - RNA, 22 nt, Human
ugauauguaacuacuccuuaua

SEQ ID NO: 704157 - RNA, 22 nt, Human
gcaccugauugauuucacugcu

SEQ ID NO: 704158 - RNA, 22 nt, Human
cagcucuggcuuuggggagcuu

SEQ ID NO: 704159 - RNA, 22 nt, Human
aaaaggcagugcaagagagggu

SEQ ID NO: 704160 - RNA, 22 nt, Human
cuguuauuuaugcugcuccauu

SEQ ID NO: 704161 - RNA, 22 nt, Human
acagaacaacaagguggaccag

SEQ ID NO: 704162 - RNA, 22 nt, Human
gggaugaggaucaaucagggag

SEQ ID NO: 704163 - RNA, 22 nt, Human
aucacauuuauaguggcacgca

SEQ ID NO: 704164 - RNA, 22 nt, Human
agacaauggagggaaauacuuc

SEQ ID NO: 704165 - RNA, 22 nt, Human
auaaagcuauuuuuaauucugu

SEQ ID NO: 704166 - RNA, 22 nt, Human
aguucucaagacaauuaccugu

SEQ ID NO: 704167 - RNA, 22 nt, Human
cuggcagcucuacucagagccu

SEQ ID NO: 704168 - RNA, 22 nt, Human
aucugucuuuuauucaugagcu

SEQ ID NO: 704169 - RNA, 22 nt, Human
ucucugucacacaaucuacaca

SEQ ID NO: 704170 - RNA, 22 nt, Human
uaaagugcugggauuauaggcc

SEQ ID NO: 704171 - RNA, 22 nt, Human
auugugcuuugcaucuuguucc

SEQ ID NO: 704172 - RNA, 22 nt, Human
uggcuagguagcuuucugcugu

SEQ ID NO: 704173 - RNA, 22 nt, Human
cucucaguaaauuucugcccca

SEQ ID NO: 704174 - RNA, 22 nt, Human
guuccauaucacagcagacgaa

SEQ ID NO: 704175 - RNA, 22 nt, Human
ugcccaagcagaggagugauuc

SEQ ID NO: 704176 - RNA, 22 nt, Human
accuuuuuucagaacucuaaag

SEQ ID NO: 704177 - RNA, 22 nt, Human
uuguucauuagcgcuugggcac

SEQ ID NO: 704178 - RNA, 22 nt, Human
augcauauuggauuagcagcca

SEQ ID NO: 704179 - RNA, 22 nt, Human
cacauuucuaggaaauuaaaug

SEQ ID NO: 704180 - RNA, 22 nt, Human
ugagguaggugucgagagaggu

SEQ ID NO: 704181 - RNA, 22 nt, Human
agguccugucuaucacccucgc

SEQ ID NO: 704182 - RNA, 22 nt, Human
ccagagaguaucauggagagua

SEQ ID NO: 704183 - RNA, 22 nt, Human
cuuaaaggagguuuuguuucca

SEQ ID NO: 704184 - RNA, 22 nt, Human
aauaaagacaaacaggggagcc

SEQ ID NO: 704185 - RNA, 22 nt, Human
ggagcuggagaguacagaguuu

SEQ ID NO: 704186 - RNA, 22 nt, Human
aggaagaggugugcaauggugu

SEQ ID NO: 704187 - RNA, 22 nt, Human
aguauacaguaaugacauaucu

SEQ ID NO: 704188 - RNA, 22 nt, Human
ugacauuuuuaaaaccacuagu

SEQ ID NO: 704189 - RNA, 22 nt, Human
uccucuucugccuauaucugcc

SEQ ID NO: 704190 - RNA, 18 nt, Human
gguguguaacguguuuuc

SEQ ID NO: 704191 - RNA, 22 nt, Human
uaugaaaugguaguaggaaggg

SEQ ID NO: 704192 - RNA, 22 nt, Human
aaauuucuggaagugucagagu

SEQ ID NO: 704193 - RNA, 22 nt, Human
gggaggugauggcaagcagcgg

SEQ ID NO: 704194 - RNA, 20 nt, Human
uuggcucaugcaacaccuac

SEQ ID NO: 704195 - RNA, 22 nt, Human
cccucaggugaaaggaaaaauu

SEQ ID NO: 704196 - RNA, 22 nt, Human
gaugucuuucugugugccuaga

SEQ ID NO: 704197 - RNA, 22 nt, Human
ccacacugucuaacaaggcaua

SEQ ID NO: 704198 - RNA, 22 nt, Human
agugugggcccccagguuagcc

SEQ ID NO: 704199 - RNA, 22 nt, Human
cccagagguuccuuagggacca

SEQ ID NO: 704200 - RNA, 22 nt, Human
guggguguggaacugugagacc

SEQ ID NO: 704201 - RNA, 22 nt, Human
aaguccauucuuccagccagcu

SEQ ID NO: 704202 - RNA, 22 nt, Human
cuuguauuccccuaucucuaaa

SEQ ID NO: 704203 - RNA, 22 nt, Human
accaggcagcacuuuccuugca

SEQ ID NO: 704204 - RNA, 22 nt, Human
aucagagauggcuccagugcuc

SEQ ID NO: 704205 - RNA, 22 nt, Human
acagcagggaauaugggaauug

SEQ ID NO: 704206 - RNA, 22 nt, Human
uugaaggacaucuuguuucuag

SEQ ID NO: 704207 - RNA, 22 nt, Human
aaucacaugcagggccuccacc

SEQ ID NO: 704208 - RNA, 22 nt, Human
uagaaagcccuguguucacugc

SEQ ID NO: 704209 - RNA, 22 nt, Human
cggcagagcccugagucagccu

SEQ ID NO: 704210 - RNA, 22 nt, Human
gcugaggcugggagcagccugu

SEQ ID NO: 704211 - RNA, 22 nt, Human
caaggccaguccauuuuggaag

SEQ ID NO: 704212 - RNA, 22 nt, Human
ugagggacuugcuaguucucug

SEQ ID NO: 704213 - RNA, 22 nt, Human
gcucaggcaaauuucuggugaa

SEQ ID NO: 704214 - RNA, 19 nt, Human
aacauggaacuggagaggg

SEQ ID NO: 704215 - RNA, 22 nt, Human
gugggggcuggaaaucuugcca

SEQ ID NO: 704216 - RNA, 22 nt, Human
agacauguccacaaagcauuca

SEQ ID NO: 704217 - RNA, 22 nt, Human
ugcuggaggccgagaagcagca

SEQ ID NO: 704218 - RNA, 22 nt, Human
ucuuggaacuuauuauuguaga

SEQ ID NO: 704219 - RNA, 22 nt, Human
ucagagguaaaaacucacugua

SEQ ID NO: 704220 - RNA, 22 nt, Human
uugcuuggcccauugcuucagu

SEQ ID NO: 704221 - RNA, 22 nt, Human
ugggggaagagcuuguuaaagu

SEQ ID NO: 704222 - RNA, 22 nt, Human
ugccaaggagcuggaucagggc

SEQ ID NO: 704223 - RNA, 22 nt, Human
acacaauguaccauaucuccaa

SEQ ID NO: 704224 - RNA, 22 nt, Human
uucuggaguugugaccucaggg

SEQ ID NO: 704225 - RNA, 22 nt, Human
uccaggcucuaggcugcucucc

SEQ ID NO: 704226 - RNA, 20 nt, Human
ugcacagacaaugagcccag

SEQ ID NO: 704227 - RNA, 22 nt, Human
uguuguaaaauuugagauguca

SEQ ID NO: 704228 - RNA, 22 nt, Human
auggccagccacuccugauggc

SEQ ID NO: 704229 - RNA, 22 nt, Human
ccugcuucagggaugauggcac

SEQ ID NO: 704230 - RNA, 22 nt, Human
cccagcaucccagugggcagca

SEQ ID NO: 704231 - RNA, 22 nt, Human
cuucauuaacuauuggaaugca

SEQ ID NO: 704232 - RNA, 22 nt, Human
cagcacauaagccgaagacugu

SEQ ID NO: 704233 - RNA, 22 nt, Human
uucauucacccaggaaacaucu

SEQ ID NO: 704234 - RNA, 22 nt, Human
uagaaaguaaaucaguuuuauu

SEQ ID NO: 704235 - RNA, 22 nt, Human
ucugggugccacugucuguaca

SEQ ID NO: 704236 - RNA, 22 nt, Human
augaggccacaguuauagauuu

SEQ ID NO: 704237 - RNA, 22 nt, Human
agcauuccacacugaagucugc

SEQ ID NO: 704238 - RNA, 22 nt, Human
auuugacaacuucugguggcau

SEQ ID NO: 704239 - RNA, 22 nt, Human
aggccugaggaccagauaaaug

SEQ ID NO: 704240 - RNA, 22 nt, Human
uagcaacagaaaauaggagugc

SEQ ID NO: 704241 - RNA, 22 nt, Human
caguacuucuuggaaacuggau

SEQ ID NO: 704242 - RNA, 22 nt, Human
auuuggaaggcguuucucugua

SEQ ID NO: 704243 - RNA, 22 nt, Human
ugucucaguacacuccgauguu

SEQ ID NO: 704244 - RNA, 22 nt, Human
ccucucuguaagggucccuccc

SEQ ID NO: 704245 - RNA, 22 nt, Human
ucacauacugaaaguccaguga

SEQ ID NO: 704246 - RNA, 22 nt, Human
ucauccaguucacauggugagu

SEQ ID NO: 704247 - RNA, 22 nt, Human
auguuucugaaguuuacagaua

SEQ ID NO: 704248 - RNA, 22 nt, Human
gcagccuuuggaauuagagacu

SEQ ID NO: 704249 - RNA, 22 nt, Human
cagaggcagacccuccagggcg

SEQ ID NO: 704250 - RNA, 22 nt, Human
agcuuucucccugacgcuuugg

SEQ ID NO: 704251 - RNA, 22 nt, Human
guccuuggcuguggcuguaaug

SEQ ID NO: 704252 - RNA, 22 nt, Human
gcuguggcugaagaugcaggga

SEQ ID NO: 704253 - RNA, 22 nt, Human
acagccacucaaagggccgaag

SEQ ID NO: 704254 - RNA, 22 nt, Human
ccucagaagacuuuagggaaga

SEQ ID NO: 704255 - RNA, 22 nt, Human
agggcuggccacaugauuuggu

SEQ ID NO: 704256 - RNA, 22 nt, Human
uucagggcccugagagggcagu

SEQ ID NO: 704257 - RNA, 22 nt, Human
uuuucaguuacuguuuauguga

SEQ ID NO: 704258 - RNA, 22 nt, Human
uacacuguuugaacuguggucg

SEQ ID NO: 704259 - RNA, 22 nt, Human
aaaggagagugagucagaugcc

SEQ ID NO: 704260 - RNA, 17 nt, Human
caggcagacauguaagc

SEQ ID NO: 704261 - RNA, 19 nt, Human
uccagcagugcuugaaauc

SEQ ID NO: 704262 - RNA, 22 nt, Human
cuccgaacaguggcuccaaggc

SEQ ID NO: 704263 - RNA, 18 nt, Human
ucuguccuuccauucuuc

SEQ ID NO: 704264 - RNA, 22 nt, Human
ugagaucauugacuuguuccug

SEQ ID NO: 704265 - RNA, 22 nt, Human
ucucuguguguuggcuguauau

SEQ ID NO: 704266 - RNA, 23 nt, Human
ccacauggcaagaugaugcauuc

SEQ ID NO: 704267 - RNA, 21 nt, Human
cuguggccuggcuagcaccgu

SEQ ID NO: 704268 - RNA, 22 nt, Human
gacagcuggacagacacugaug

SEQ ID NO: 704269 - RNA, 22 nt, Human
cagggcuguuagcugcugcucu

SEQ ID NO: 704270 - RNA, 22 nt, Human
cugccuuugcccuugacacugu

SEQ ID NO: 704271 - RNA, 22 nt, Human
uuuuaucuaccuaugcucauuu

SEQ ID NO: 704272 - RNA, 22 nt, Human
ccaaggagaaaugcugugcuuu

SEQ ID NO: 704273 - RNA, 22 nt, Human
uuucagaaccaagagagacauc

SEQ ID NO: 704274 - RNA, 22 nt, Human
cugucauggucagauugucauc

SEQ ID NO: 704275 - RNA, 22 nt, Human
uuguauuccagccaccacaggc

SEQ ID NO: 704276 - RNA, 22 nt, Human
aacuuauacccagggcagaaau

SEQ ID NO: 704277 - RNA, 22 nt, Human
auaagcauguuagaauauuuga

SEQ ID NO: 704278 - RNA, 22 nt, Human
caaagacugcauaacacaugaa

SEQ ID NO: 704279 - RNA, 22 nt, Human
uguuauuaucuguuagguguuc

SEQ ID NO: 704280 - RNA, 22 nt, Human
aagggcagcuauuaucgucauc

SEQ ID NO: 704281 - RNA, 22 nt, Human
ucuggccacuaauaggucucac

SEQ ID NO: 704282 - RNA, 22 nt, Human
cucuggagaugguucucaauug

SEQ ID NO: 704283 - RNA, 22 nt, Human
agaaaugacacacaugagacau

SEQ ID NO: 704284 - RNA, 22 nt, Human
uguccccuuuaccuccgcagcc

SEQ ID NO: 704285 - RNA, 22 nt, Human
uucuuugugcugaagaagcccu

SEQ ID NO: 704286 - RNA, 22 nt, Human
ccaggccucaccugcccaccua

SEQ ID NO: 704287 - RNA, 22 nt, Human
agauggugauagagcugggauu

SEQ ID NO: 704288 - RNA, 22 nt, Human
acaaauguggacauggauaaug

SEQ ID NO: 704289 - RNA, 22 nt, Human
uguauauucugccuaaaagcuu

SEQ ID NO: 704290 - RNA, 22 nt, Human
gagcuuuggggaagaauacaga

SEQ ID NO: 704291 - RNA, 22 nt, Human
aaaagagaaaguggcaggcuuu

SEQ ID NO: 704292 - RNA, 22 nt, Human
ugugcccuuuccugcuccucca

SEQ ID NO: 704293 - RNA, 22 nt, Human
gggagccacagugaggugcaug

SEQ ID NO: 704294 - RNA, 22 nt, Human
caggaaguggggucauggagua

SEQ ID NO: 704295 - RNA, 22 nt, Human
uguauucagggacauauaugua

SEQ ID NO: 704296 - RNA, 22 nt, Human
gaaggcccugguauucuugagg

SEQ ID NO: 704297 - RNA, 22 nt, Human
cagaggagaauugcgggaucau

SEQ ID NO: 704298 - RNA, 22 nt, Human
cuacauaaauauuuaugugucu

SEQ ID NO: 704299 - RNA, 22 nt, Human
aggggcugacuggaaagugcca

SEQ ID NO: 704300 - RNA, 22 nt, Human
ugagaaaaguguggaggucaau

SEQ ID NO: 704301 - RNA, 22 nt, Human
gaaauaauucugugucugaaca

SEQ ID NO: 704302 - RNA, 22 nt, Human
uguggcaguaaaauugggcaac

SEQ ID NO: 704303 - RNA, 22 nt, Human
cuaggcagauggagaaguggcu

SEQ ID NO: 704304 - RNA, 22 nt, Human
aacuaguuuagcuuuuuaagac

SEQ ID NO: 704305 - RNA, 22 nt, Human
uccugaaguauggguauggagu

SEQ ID NO: 704306 - RNA, 22 nt, Human
agccaacaacucugagcccagu

SEQ ID NO: 704307 - RNA, 22 nt, Human
aggugggcaaugaggccugagu

SEQ ID NO: 704308 - RNA, 22 nt, Human
uuccugggcugcagagagcacc

SEQ ID NO: 704309 - RNA, 22 nt, Human
guggccugucagaagccguggg

SEQ ID NO: 704310 - RNA, 22 nt, Human
uggaagaauauggggguacaga

SEQ ID NO: 704311 - RNA, 22 nt, Human
uuugacaagagcaaauguucuu

SEQ ID NO: 704312 - RNA, 22 nt, Human
augucuauauagucaauaauca

SEQ ID NO: 704313 - RNA, 22 nt, Human
ggucugugucauaggcugaguu

SEQ ID NO: 704314 - RNA, 22 nt, Human
agggccugggauguccuccuag

SEQ ID NO: 704315 - RNA, 22 nt, Human
gcugccugaaauguugccuagc

SEQ ID NO: 704316 - RNA, 22 nt, Human
cccaggaaugagcaggcagggg

SEQ ID NO: 704317 - RNA, 22 nt, Human
uugagcucagugacucgacuuu

SEQ ID NO: 704318 - RNA, 22 nt, Human
gugacauuucgugacgugagaa

SEQ ID NO: 704319 - RNA, 22 nt, Human
uaagacaccucucugcccuuca

SEQ ID NO: 704320 - RNA, 22 nt, Human
ucaauuuccccuauugauagac

SEQ ID NO: 704321 - RNA, 22 nt, Human
cagggcucuucaucacacagua

SEQ ID NO: 704322 - RNA, 22 nt, Human
gcaaaaaccacaauuacuuuua

SEQ ID NO: 704323 - RNA, 22 nt, Human
agcugaggaauaauaacaaggu

SEQ ID NO: 704324 - RNA, 22 nt, Human
gugucaugggagucagaaguga

SEQ ID NO: 704325 - RNA, 22 nt, Human
ucuguuaucucaagucacaaga

SEQ ID NO: 704326 - RNA, 22 nt, Human
cuugggaaugcuaacagaugac

SEQ ID NO: 704327 - RNA, 22 nt, Human
ccugaggucagccauucuugcc

SEQ ID NO: 704328 - RNA, 22 nt, Human
uuagucccauuauaugacuucu

SEQ ID NO: 704329 - RNA, 22 nt, Human
cucacauuccacuugugccaac

SEQ ID NO: 704330 - RNA, 22 nt, Human
uaaaggaacagaggacucauuu

SEQ ID NO: 704331 - RNA, 22 nt, Human
ucauaugucacucaugggcaua

SEQ ID NO: 704332 - RNA, 22 nt, Human
aagaguuuaugauauaacaugu

SEQ ID NO: 704333 - RNA, 22 nt, Human
guccauacaguggcacacaucu

SEQ ID NO: 704334 - RNA, 22 nt, Human
gaggcugacggcaccaucuucu

SEQ ID NO: 704335 - RNA, 21 nt, Human
aacuuguauuucuccuuauuc

SEQ ID NO: 704336 - RNA, 22 nt, Human
auucucucucuaugaaaacuga

SEQ ID NO: 704337 - RNA, 22 nt, Human
caguuaaacgggccaugugagu

SEQ ID NO: 704338 - RNA, 22 nt, Human
auacaugugccgcguuggugug

SEQ ID NO: 704339 - RNA, 22 nt, Human
gagucucugcuauguuuucucu

SEQ ID NO: 704340 - RNA, 22 nt, Human
uaucuuugcaaauaucucuaag

SEQ ID NO: 704341 - RNA, 22 nt, Human
cugugucucuaccuccccaucc

SEQ ID NO: 704342 - RNA, 19 nt, Human
uccagguggagagacaccc

SEQ ID NO: 704343 - RNA, 22 nt, Human
aggcacuuguaauugcagucau

SEQ ID NO: 704344 - RNA, 22 nt, Human
uucuaauuauucccuuguccca

SEQ ID NO: 704345 - RNA, 22 nt, Human
accuccauggcucaguuucaga

SEQ ID NO: 704346 - RNA, 22 nt, Human
agaaacaagguguagguugacc

SEQ ID NO: 704347 - RNA, 22 nt, Human
cugaaggauuuaguucuuugcu

SEQ ID NO: 704348 - RNA, 22 nt, Human
aaaaccacaaugacuuuugcag

SEQ ID NO: 704349 - RNA, 22 nt, Human
gcauuuuucuaaucauuggcau

SEQ ID NO: 704350 - RNA, 22 nt, Human
gcaggcaccucguggaguggaa

SEQ ID NO: 704351 - RNA, 22 nt, Human
auaaucugagcuauuucaugag

SEQ ID NO: 704352 - RNA, 19 nt, Human
ucuggguauuuggaagaug

SEQ ID NO: 704353 - RNA, 21 nt, Human
uggcugcacuguggcuuucau

SEQ ID NO: 704354 - RNA, 22 nt, Human
cugucaguaggcucccaucauu

SEQ ID NO: 704355 - RNA, 22 nt, Human
acacaguaaauauguauugaau

SEQ ID NO: 704356 - RNA, 22 nt, Human
cugggaggcacuauucaggagg

SEQ ID NO: 704357 - RNA, 22 nt, Human
augugugcuacaggugugggaa

SEQ ID NO: 704358 - RNA, 19 nt, Human
aaaauugcguauuuugagg

SEQ ID NO: 704359 - RNA, 22 nt, Human
agcuuguuguuacugaugcauu

SEQ ID NO: 704360 - RNA, 22 nt, Human
cauuucaccuuagagaauuauu

SEQ ID NO: 704361 - RNA, 22 nt, Human
aggcugaggcagguggaucacc

SEQ ID NO: 704362 - RNA, 23 nt, Human
uuuauagcagcaugauuuauaau

SEQ ID NO: 704363 - RNA, 22 nt, Human
augugguugaagaauuacaucu

SEQ ID NO: 704364 - RNA, 22 nt, Human
gcccuggauguacaggcauguu

SEQ ID NO: 704365 - RNA, 22 nt, Human
caguacuuaguucucaugguuu

SEQ ID NO: 704366 - RNA, 22 nt, Human
uccaggcauaaugcccaguggu

SEQ ID NO: 704367 - RNA, 22 nt, Human
cuggagcuaggaaguccaagau

SEQ ID NO: 704368 - RNA, 22 nt, Human
uugcuguuuuacaucugguggg

SEQ ID NO: 704369 - RNA, 22 nt, Human
aagccauuuguuguccuucagg

SEQ ID NO: 704370 - RNA, 22 nt, Human
ucucaaggacuuugggcacuaa

SEQ ID NO: 704371 - RNA, 22 nt, Human
aacaaguguauuaauggaaaua

SEQ ID NO: 704372 - RNA, 22 nt, Human
cacagcuuccauuagaaugaga

SEQ ID NO: 704373 - RNA, 22 nt, Human
uauuuggaaaguuuaucuaucu

SEQ ID NO: 704374 - RNA, 22 nt, Human
aggcaacaugggccaggcagaa

SEQ ID NO: 704375 - RNA, 22 nt, Human
aauggcuuagcucagcgcucag

SEQ ID NO: 704376 - RNA, 22 nt, Human
ucacauuuauuucaaaguuacu

SEQ ID NO: 704377 - RNA, 22 nt, Human
uuucaucaucaaaauagugagg

SEQ ID NO: 704378 - RNA, 22 nt, Human
acacuuuacagcuuccuuugca

SEQ ID NO: 704379 - RNA, 22 nt, Human
auuugccucugcuuucaaggau

SEQ ID NO: 704380 - RNA, 22 nt, Human
ggguuccagucugaaacuacag

SEQ ID NO: 704381 - RNA, 18 nt, Human
agcugaggggacugaaga

SEQ ID NO: 704382 - RNA, 22 nt, Human
caguaauaaagcuaaguauuuc

SEQ ID NO: 704383 - RNA, 22 nt, Human
aaagucauuuuccagaccagua

SEQ ID NO: 704384 - RNA, 22 nt, Human
cacaccuguaauccuagcacuu

SEQ ID NO: 704385 - RNA, 22 nt, Human
caguuuuaaauuuugaaugucu

SEQ ID NO: 704386 - RNA, 22 nt, Human
uugaagaggacuuugcagcugu

SEQ ID NO: 704387 - RNA, 22 nt, Human
aagaugcagcaaacuacuuuuu

SEQ ID NO: 704388 - RNA, 22 nt, Human
acuggaugaggggaaagagaca

SEQ ID NO: 704389 - RNA, 22 nt, Human
agccuggguggggguucggaga

SEQ ID NO: 704390 - RNA, 22 nt, Human
ugccaggcuuagagcaggggcu

SEQ ID NO: 704391 - RNA, 22 nt, Human
uuuucuuauagagcuuaaaguu

SEQ ID NO: 704392 - RNA, 22 nt, Human
acagaauugauggaaaucucag

SEQ ID NO: 704393 - RNA, 22 nt, Human
aucugucccuccucacagccuc

SEQ ID NO: 704394 - RNA, 22 nt, Human
aggacaguuaguuaggaaguuu

SEQ ID NO: 704395 - RNA, 22 nt, Human
gaggucugagugcggaaagccu

SEQ ID NO: 704396 - RNA, 22 nt, Human
cagcagugucuccagcaucaca

SEQ ID NO: 704397 - RNA, 19 nt, Human
ucuaacagcuuucauucua

SEQ ID NO: 704398 - RNA, 22 nt, Human
ccuuggagaagacagugccagg

SEQ ID NO: 704399 - RNA, 22 nt, Human
cagagcaccagugggagacaag

SEQ ID NO: 704400 - RNA, 22 nt, Human
agggacccauagagagaccagu

SEQ ID NO: 704401 - RNA, 23 nt, Human
agcauggaauaggaaagaggcag

SEQ ID NO: 704402 - RNA, 22 nt, Human
cauuaacacuuuggauuuagac

SEQ ID NO: 704403 - RNA, 22 nt, Human
uguguucuuaaaagcagugaua

SEQ ID NO: 704404 - RNA, 22 nt, Human
gaacagcuucuugggagcuggg

SEQ ID NO: 704405 - RNA, 19 nt, Human
auacagauguauccaugau

SEQ ID NO: 704406 - RNA, 22 nt, Human
aguaacaggguauuuguguggg

SEQ ID NO: 704407 - RNA, 22 nt, Human
gccaggaaggcugaagccagaa

SEQ ID NO: 704408 - RNA, 22 nt, Human
aggcucugugauccacaaugag

SEQ ID NO: 704409 - RNA, 22 nt, Human
auuuucaucgcuagguuggccu

SEQ ID NO: 704410 - RNA, 22 nt, Human
uuaucauugucgcagucuaauu

SEQ ID NO: 704411 - RNA, 22 nt, Human
uguguuccugccuggcucuggu

SEQ ID NO: 704412 - RNA, 20 nt, Human
agaagccaagugacauguuu

SEQ ID NO: 704413 - RNA, 22 nt, Human
aacuguaaugaauuguucauga

SEQ ID NO: 704414 - RNA, 18 nt, Human
aggcuugggcccagcagc

SEQ ID NO: 704415 - RNA, 22 nt, Human
uaacacugauuuguucucaggg

SEQ ID NO: 704416 - RNA, 22 nt, Human
uacauaugaacuuuauaacuug

SEQ ID NO: 704417 - RNA, 22 nt, Human
cucugcugcccaggccugcuag

SEQ ID NO: 704418 - RNA, 22 nt, Human
ggccugggccuuuguguuuuga

SEQ ID NO: 704419 - RNA, 22 nt, Human
cccagcagccuugucccuucuc

SEQ ID NO: 704420 - RNA, 22 nt, Human
uucucagggucuggauggccug

SEQ ID NO: 704421 - RNA, 18 nt, Human
uccugguauugcaagcac

SEQ ID NO: 704422 - RNA, 22 nt, Human
acuuuagaccaucuuccacagu

SEQ ID NO: 704423 - RNA, 22 nt, Human
cugggccuagcaacagaggagu

SEQ ID NO: 704424 - RNA, 22 nt, Human
uggugguuaugcgcuuuguggg

SEQ ID NO: 704425 - RNA, 22 nt, Human
uuccugagggacuuuugagauu

SEQ ID NO: 704426 - RNA, 22 nt, Human
acccaggacucucuuccaguag

SEQ ID NO: 704427 - RNA, 22 nt, Human
ugggcgggcaggagcgcaccug

SEQ ID NO: 704428 - RNA, 22 nt, Human
ccucaggcccugucccugcgcc

SEQ ID NO: 704429 - RNA, 22 nt, Human
cucagcuacgcuuucaccagcu

SEQ ID NO: 704430 - RNA, 19 nt, Human
ggcaccuuucugcuguguc

SEQ ID NO: 704431 - RNA, 23 nt, Human
uggguagagcugcaaggacacug

SEQ ID NO: 704432 - RNA, 22 nt, Human
ucuccugugcacccucccugug

SEQ ID NO: 704433 - RNA, 22 nt, Human
gugagcagaauaaggguugaga

SEQ ID NO: 704434 - RNA, 22 nt, Human
agaaaaacuaagaguggguggu

SEQ ID NO: 704435 - RNA, 22 nt, Human
aucauggaaagguucagcaagc

SEQ ID NO: 704436 - RNA, 22 nt, Human
ccuuuggccgcuuuauggagga

SEQ ID NO: 704437 - RNA, 22 nt, Human
augugcaacuucagcagaaagg

SEQ ID NO: 704438 - RNA, 22 nt, Human
ggaggucacaaggugaguaaag

SEQ ID NO: 704439 - RNA, 22 nt, Human
uaaggucauggugaauaauaag

SEQ ID NO: 704440 - RNA, 22 nt, Human
ugccuccaggaggggcagcucu

SEQ ID NO: 704441 - RNA, 22 nt, Human
aaauugcuaaggaucucaugug

SEQ ID NO: 704442 - RNA, 19 nt, Human
gcacugaagaguuggucac

SEQ ID NO: 704443 - RNA, 18 nt, Human
gugaagcuuuauugaaug

SEQ ID NO: 704444 - RNA, 21 nt, Human
uugccccugaguuuuucugag

SEQ ID NO: 704445 - RNA, 22 nt, Human
cugauagacaaucaccauggga

SEQ ID NO: 704446 - RNA, 22 nt, Human
agagccacaguggauaggagcc

SEQ ID NO: 704447 - RNA, 22 nt, Human
uugaaaugagcaaacugucagc

SEQ ID NO: 704448 - RNA, 22 nt, Human
cacuucauugggaccagggcug

SEQ ID NO: 704449 - RNA, 22 nt, Human
guuuaucugcacucucuuguag

SEQ ID NO: 704450 - RNA, 22 nt, Human
uacauaauugucuuuguccuca

SEQ ID NO: 704451 - RNA, 22 nt, Human
cccuccaccaagcagggcgcca

SEQ ID NO: 704452 - RNA, 22 nt, Human
auccaucuuuccugcugaacug

SEQ ID NO: 704453 - RNA, 22 nt, Human
uucagcaaaauaucucagauag

SEQ ID NO: 704454 - RNA, 18 nt, Human
ggagucucaggagaggaa

SEQ ID NO: 704455 - RNA, 22 nt, Human
acauuuuuauucaucaaagcag

SEQ ID NO: 704456 - RNA, 22 nt, Human
agccacuggccugggcagcucu

SEQ ID NO: 704457 - RNA, 20 nt, Human
cccuccagcaaccaggacuu

SEQ ID NO: 704458 - RNA, 17 nt, Human
cuuugucaccaaugcca

SEQ ID NO: 704459 - RNA, 22 nt, Human
ugagaaauuacuucagugaugg

SEQ ID NO: 704460 - RNA, 22 nt, Human
cguauuucaucuccuuucugcu

SEQ ID NO: 704461 - RNA, 22 nt, Human
gcuugguuacugauggaaagga

SEQ ID NO: 704462 - RNA, 22 nt, Human
gagagugucgggggccccagga

SEQ ID NO: 704463 - RNA, 22 nt, Human
uuacagaaguauugagagaucc

SEQ ID NO: 704464 - RNA, 22 nt, Human
gauugagucugaggaugcugca

SEQ ID NO: 704465 - RNA, 22 nt, Human
uuuauguaaguggaaugaugcc

SEQ ID NO: 704466 - RNA, 22 nt, Human
uucuucuuucccccugugguac

SEQ ID NO: 704467 - RNA, 22 nt, Human
uuuuaucagcagggauaacaag

SEQ ID NO: 704468 - RNA, 22 nt, Human
cccaggcauuuucaacuuuagu

SEQ ID NO: 704469 - RNA, 22 nt, Human
uggcuggcguuggggccaguga

SEQ ID NO: 704470 - RNA, 22 nt, Human
uuuaccaaaugagacuauuguu

SEQ ID NO: 704471 - RNA, 22 nt, Human
gcugggcaaugccagagaggag

SEQ ID NO: 704472 - RNA, 22 nt, Human
gcugccucacuccagcccaaua

SEQ ID NO: 704473 - RNA, 22 nt, Human
ugugauuucaucugaggccagg

SEQ ID NO: 704474 - RNA, 22 nt, Human
gcugugcuauaucucugagugu

SEQ ID NO: 704475 - RNA, 22 nt, Human
caggaggcccggccacagccca

SEQ ID NO: 704476 - RNA, 22 nt, Human
agaguggccucagagaaauaca

SEQ ID NO: 704477 - RNA, 22 nt, Human
gcacauaugcuguaagcacaug

SEQ ID NO: 704478 - RNA, 22 nt, Human
ggaaaugugggcuguuucugua

SEQ ID NO: 704479 - RNA, 22 nt, Human
cucuccuuucacuaaauauucu

SEQ ID NO: 704480 - RNA, 22 nt, Human
cgaggcagggaagcugcaaaag

SEQ ID NO: 704481 - RNA, 21 nt, Human
uucuucaugaugauuaauggc

SEQ ID NO: 704482 - RNA, 22 nt, Human
cuggcuguaugcuggccucaga

SEQ ID NO: 704483 - RNA, 22 nt, Human
ucccacacuugaaacaaggcug

SEQ ID NO: 704484 - RNA, 22 nt, Human
gcggguggaucaugaggucagg

SEQ ID NO: 704485 - RNA, 22 nt, Human
gugaaugcaaacuguuucugau

SEQ ID NO: 704486 - RNA, 22 nt, Human
ugccuggcacuccuggagcuca

SEQ ID NO: 704487 - RNA, 23 nt, Human
uagacacuccuuugucuguccuu

SEQ ID NO: 704488 - RNA, 22 nt, Human
aucuuccuucacuuucucccac

SEQ ID NO: 704489 - RNA, 22 nt, Human
uccucaguuuucuaguauggca

SEQ ID NO: 704490 - RNA, 22 nt, Human
auguaguauuuggaaauguaaa

SEQ ID NO: 704491 - RNA, 22 nt, Human
aagcauucugcauuuucaaaga

SEQ ID NO: 704492 - RNA, 22 nt, Human
auuugcucuagcugcagugaau

SEQ ID NO: 704493 - RNA, 22 nt, Human
aagaguuuaauuuugucuagac

SEQ ID NO: 704494 - RNA, 22 nt, Human
auacuacauacuauguaaacau

SEQ ID NO: 704495 - RNA, 22 nt, Human
ucugugccucaucugguucagg

SEQ ID NO: 704496 - RNA, 22 nt, Human
ucuuuacuggaauggaacuuuc

SEQ ID NO: 704497 - RNA, 22 nt, Human
uggcucugugucucccagcagc

SEQ ID NO: 704498 - RNA, 22 nt, Human
uucaagauggcaccagugagug

SEQ ID NO: 704499 - RNA, 23 nt, Human
ugcuggcuuccagcugcucccuc

SEQ ID NO: 704500 - RNA, 22 nt, Human
ucuuaagcagagaagaaguuga

SEQ ID NO: 704501 - RNA, 20 nt, Human
gcuuccaggagggcugauau

SEQ ID NO: 704502 - RNA, 22 nt, Human
ccuaggccuuacuuuccugugc

SEQ ID NO: 704503 - RNA, 22 nt, Human
uuuacacugugaaacagguauc

SEQ ID NO: 704504 - RNA, 22 nt, Human
uucauagguuugcugugaacau

SEQ ID NO: 704505 - RNA, 22 nt, Human
ugcuuugggucucucuaguuuc

SEQ ID NO: 704506 - RNA, 22 nt, Human
acacaucucaggggacacucuc

SEQ ID NO: 704507 - RNA, 22 nt, Human
cuaggguggauuugugcagagu

SEQ ID NO: 704508 - RNA, 22 nt, Human
aaggcaccauaggcaaauccag

SEQ ID NO: 704509 - RNA, 22 nt, Human
uggcagaauuuuaaagacagau

SEQ ID NO: 704510 - RNA, 22 nt, Human
gcugauguaagacuuuugguuu

SEQ ID NO: 704511 - RNA, 22 nt, Human
uuacagaguagggaauugaagu

SEQ ID NO: 704512 - RNA, 22 nt, Human
aggcagccuauggggagcucag

SEQ ID NO: 704513 - RNA, 23 nt, Human
ugucaaguauagcaggcccuccc

SEQ ID NO: 704514 - RNA, 22 nt, Human
guuuucucaucuccucaauggu

SEQ ID NO: 704515 - RNA, 22 nt, Human
ugagcuguuucucugguggcuu

SEQ ID NO: 704516 - RNA, 22 nt, Human
ggcuccaggugcaugccaggcu

SEQ ID NO: 704517 - RNA, 22 nt, Human
uggcagagaacacggcugaucu

SEQ ID NO: 704518 - RNA, 22 nt, Human
ucucaguggcuuccucacuuuu

SEQ ID NO: 704519 - RNA, 22 nt, Human
ccugccuguacuagagacccag

SEQ ID NO: 704520 - RNA, 22 nt, Human
uauguaguguugagaaugcuug

SEQ ID NO: 704521 - RNA, 19 nt, Human
ugugguuucccggcggccu

SEQ ID NO: 704522 - RNA, 22 nt, Human
uaaaauuugucccugaguguug

SEQ ID NO: 704523 - RNA, 22 nt, Human
uucuuuauguuaaugaaucuau

SEQ ID NO: 704524 - RNA, 22 nt, Human
aggggagaggugagcaacuucu

SEQ ID NO: 704525 - RNA, 22 nt, Human
ggcuagaguggaacuggagcgg

SEQ ID NO: 704526 - RNA, 22 nt, Human
ucugggugcuacaaacaguauu

SEQ ID NO: 704527 - RNA, 22 nt, Human
agugucuguuacgcuugcagaa

SEQ ID NO: 704528 - RNA, 22 nt, Human
uccaggcacuauauauacuuuu

SEQ ID NO: 704529 - RNA, 22 nt, Human
uuggaauuccuguuguuucguc

SEQ ID NO: 704530 - RNA, 22 nt, Human
aaucaguauugguauagaauga

SEQ ID NO: 704531 - RNA, 22 nt, Human
gggcacugagggcccacaggau

SEQ ID NO: 704532 - RNA, 22 nt, Human
aaaccucugaauacuguuggca

SEQ ID NO: 704533 - RNA, 22 nt, Human
ccugguguugugaaguagccgu

SEQ ID NO: 704534 - RNA, 22 nt, Human
uaccaggucugugcagguguca

SEQ ID NO: 704535 - RNA, 22 nt, Human
ucuacauuuucacaaggucucc

SEQ ID NO: 704536 - RNA, 22 nt, Human
cacaauuuggugcuaaagaaag

SEQ ID NO: 704537 - RNA, 22 nt, Human
uccuggguggugguaggagcag

SEQ ID NO: 704538 - RNA, 22 nt, Human
cucuucaguaaaugacacuguu

SEQ ID NO: 704539 - RNA, 22 nt, Human
cuccaggggccagaagccuggc

SEQ ID NO: 704540 - RNA, 22 nt, Human
caguccucugcaacaccccuuc

SEQ ID NO: 704541 - RNA, 22 nt, Human
agucccaacagcuuacaaggaa

SEQ ID NO: 704542 - RNA, 22 nt, Human
cagccagaggcugcgaggggcc

SEQ ID NO: 704543 - RNA, 22 nt, Human
cagcuguggcugccacugcucc

SEQ ID NO: 704544 - RNA, 21 nt, Human
cugugcuuuuuaagugugaug

SEQ ID NO: 704545 - RNA, 19 nt, Human
cugucaggggcuggauguu

SEQ ID NO: 704546 - RNA, 22 nt, Human
uuagggaaagcagcauucccuu

SEQ ID NO: 704547 - RNA, 22 nt, Human
ugaggcaauguccuucauccuu

SEQ ID NO: 704548 - RNA, 22 nt, Human
uggccugacugucaggcuguau

SEQ ID NO: 704549 - RNA, 22 nt, Human
agcucugcaggcacagcugagg

SEQ ID NO: 704550 - RNA, 22 nt, Human
agcauuuaauccuacauagauc

SEQ ID NO: 704551 - RNA, 22 nt, Human
cugauugagaaggaaggggauc

SEQ ID NO: 704552 - RNA, 19 nt, Human
cuggcuucaagcaguccuc

SEQ ID NO: 704553 - RNA, 22 nt, Human
gagcacagcgcaguuuguaauu

SEQ ID NO: 704554 - RNA, 22 nt, Human
ucuagcaucuaauuauggaauc

SEQ ID NO: 704555 - RNA, 22 nt, Human
agacauuggcuaaaaguagugu

SEQ ID NO: 704556 - RNA, 22 nt, Human
agcuggaacgucacaggagcag

SEQ ID NO: 704557 - RNA, 22 nt, Human
uuucagugcacguaguuuauuu

SEQ ID NO: 704558 - RNA, 19 nt, Human
ucaggacugacuugaaguc

SEQ ID NO: 704559 - RNA, 23 nt, Human
gccaggcuccggucuguggccac

SEQ ID NO: 704560 - RNA, 22 nt, Human
aggugaguccugggcacaggua

SEQ ID NO: 704561 - RNA, 22 nt, Human
auaugcauguacgugugcacaa

SEQ ID NO: 704562 - RNA, 22 nt, Human
aggcugcucaguagauggagcu

SEQ ID NO: 704563 - RNA, 17 nt, Human
acaaugcagucucuagu

SEQ ID NO: 704564 - RNA, 22 nt, Human
ugguaaaaaccgcaauuacauu

SEQ ID NO: 704565 - RNA, 22 nt, Human
acacagugccaaauugcaguua

SEQ ID NO: 704566 - RNA, 22 nt, Human
gccagcagguugucaaggagcu

SEQ ID NO: 704567 - RNA, 22 nt, Human
gugugccacugccugaggaccc

SEQ ID NO: 704568 - RNA, 22 nt, Human
aauauugagaaccagcauguuu

SEQ ID NO: 704569 - RNA, 22 nt, Human
aauugcuuaucuuguugaauag

SEQ ID NO: 704570 - RNA, 18 nt, Human
uagauuaaaauugaauuc

SEQ ID NO: 704571 - RNA, 22 nt, Human
guggauggcuaguugagaaggg

SEQ ID NO: 704572 - RNA, 22 nt, Human
gagucacaaaagaugcccaggg

SEQ ID NO: 704573 - RNA, 22 nt, Human
agcugaggccacgagugaaggg

SEQ ID NO: 704574 - RNA, 22 nt, Human
ugacugugccuguugaaugaau

SEQ ID NO: 704575 - RNA, 22 nt, Human
cagcagccuaggguuccaucau

SEQ ID NO: 704576 - RNA, 17 nt, Human
uugaaaaguaagcuccc

SEQ ID NO: 704577 - RNA, 22 nt, Human
ggcuuugcaggcagcaucaagg

SEQ ID NO: 704578 - RNA, 19 nt, Human
gggcaaagugaucguccug

SEQ ID NO: 704579 - RNA, 22 nt, Human
acaaauagagauucaaauaaag

SEQ ID NO: 704580 - RNA, 22 nt, Human
uguguguuggcuggagagggcu

SEQ ID NO: 704581 - RNA, 22 nt, Human
gucacuggggccacaugcagaa

SEQ ID NO: 704582 - RNA, 22 nt, Human
gggccccuugcugcucugcugg

SEQ ID NO: 704583 - RNA, 22 nt, Human
gucagaggggacaagacacaga

SEQ ID NO: 704584 - RNA, 22 nt, Human
uugcuucagaaguucugcuugu

SEQ ID NO: 704585 - RNA, 21 nt, Human
acagagaaagagcagccuccu

SEQ ID NO: 704586 - RNA, 22 nt, Human
augaacucauuuauuuuccucu

SEQ ID NO: 704587 - RNA, 22 nt, Human
ucaguugcaccugcaugguacu

SEQ ID NO: 704588 - RNA, 22 nt, Human
gaaaguauucacaaaguucuug

SEQ ID NO: 704589 - RNA, 22 nt, Human
acugugagcagcgaccugagga

SEQ ID NO: 704590 - RNA, 22 nt, Human
uaaugaacaucuuaaucugaaa

SEQ ID NO: 704591 - RNA, 22 nt, Human
augcaacaaaugcuacgaaucg

SEQ ID NO: 704592 - RNA, 22 nt, Human
gagaggaagccaggggguguug

SEQ ID NO: 704593 - RNA, 22 nt, Human
gaagaauugcccauuucugucu

SEQ ID NO: 704594 - RNA, 22 nt, Human
aggcaaauuauuguaugcaguu

SEQ ID NO: 704595 - RNA, 22 nt, Human
gaggccauaagaaguucuuggg

SEQ ID NO: 704596 - RNA, 22 nt, Human
ccacagugacacgggcuggccc

SEQ ID NO: 704597 - RNA, 22 nt, Human
gguccuugggucuccuguguuu

SEQ ID NO: 704598 - RNA, 22 nt, Human
ucauaaaugcagugucauaaau

SEQ ID NO: 704599 - RNA, 22 nt, Human
gagaacacgaggaggcccagcg

SEQ ID NO: 704600 - RNA, 22 nt, Human
ucccuucaucagugagcaagcc

SEQ ID NO: 704601 - RNA, 22 nt, Human
gauuucaggcuaucuaugcaga

SEQ ID NO: 704602 - RNA, 22 nt, Human
cagaggccccagaacuagcucu

SEQ ID NO: 704603 - RNA, 19 nt, Human
uacacuuguaaugagcaga

SEQ ID NO: 704604 - RNA, 22 nt, Human
ucaggcucuggguacaccugac

SEQ ID NO: 704605 - RNA, 22 nt, Human
uggcucauucuggggaagucag

SEQ ID NO: 704606 - RNA, 22 nt, Human
aaugcacauauauguguauaca

SEQ ID NO: 704607 - RNA, 22 nt, Human
agugggagaaugaauaagggcc

SEQ ID NO: 704608 - RNA, 22 nt, Human
uagaaagcugaguaauacauuu

SEQ ID NO: 704609 - RNA, 22 nt, Human
cagaugcugcucaccugauuau

SEQ ID NO: 704610 - RNA, 22 nt, Human
agccagugucgugugacaugag

SEQ ID NO: 704611 - RNA, 22 nt, Human
auccuucuucugcuagugucua

SEQ ID NO: 704612 - RNA, 20 nt, Human
uuuaucaggcacuuacuauu

SEQ ID NO: 704613 - RNA, 22 nt, Human
uauuucaccuuacuaagcugug

SEQ ID NO: 704614 - RNA, 22 nt, Human
gcaagaccuaucuaguugcugu

SEQ ID NO: 704615 - RNA, 22 nt, Human
aucacaucucaccacugcaacc

SEQ ID NO: 704616 - RNA, 22 nt, Human
aagcacaugagcuauucaugcu

SEQ ID NO: 704617 - RNA, 22 nt, Human
gauucccauccucagcagcagc

SEQ ID NO: 704618 - RNA, 19 nt, Human
agcugggcugucacaguga

SEQ ID NO: 704619 - RNA, 22 nt, Human
uggcugggagcuggaacugggc

SEQ ID NO: 704620 - RNA, 22 nt, Human
gucagaggaauggaugagugau

SEQ ID NO: 704621 - RNA, 22 nt, Human
agcuguggcagcacuuuggagu

SEQ ID NO: 704622 - RNA, 23 nt, Human
uggagcugggcagcugggaaagu

SEQ ID NO: 704623 - RNA, 22 nt, Human
uucugccugauguagucauacc

SEQ ID NO: 704624 - RNA, 22 nt, Human
ccaguucuuucugugugcaaca

SEQ ID NO: 704625 - RNA, 22 nt, Human
gaacuuuauuccagaagaaagc

SEQ ID NO: 704626 - RNA, 19 nt, Human
agauaagaguugacugugg

SEQ ID NO: 704627 - RNA, 22 nt, Human
ucagggcugugguuccuuuucu

SEQ ID NO: 704628 - RNA, 22 nt, Human
uaugugugcuuuuuccaugcau

SEQ ID NO: 704629 - RNA, 22 nt, Human
aacacugauggaaaguauguuu

SEQ ID NO: 704630 - RNA, 22 nt, Human
ucuaaagccuuccauauaacgc

SEQ ID NO: 704631 - RNA, 22 nt, Human
agcuggggguagugagaaauaa

SEQ ID NO: 704632 - RNA, 22 nt, Human
ccagcagagucuaggaaggagg

SEQ ID NO: 704633 - RNA, 21 nt, Human
ucauuuuuauugcuaccuugc

SEQ ID NO: 704634 - RNA, 22 nt, Human
gcacagggcugccaggcggcuu

SEQ ID NO: 704635 - RNA, 22 nt, Human
uuuaacauguaauugcugcuuu

SEQ ID NO: 704636 - RNA, 22 nt, Human
caaaggaggugauaggcccucu

SEQ ID NO: 704637 - RNA, 22 nt, Human
ugucucuugaguuuguuuuaau

SEQ ID NO: 704638 - RNA, 22 nt, Human
auucuucaucacuaccuuguga

SEQ ID NO: 704639 - RNA, 22 nt, Human
ggucugaggcuccaaggaggug

SEQ ID NO: 704640 - RNA, 18 nt, Human
ggcugcuccucucccuac

SEQ ID NO: 704641 - RNA, 19 nt, Human
uucccaggaaaggggugca

SEQ ID NO: 704642 - RNA, 23 nt, Human
uugcauagacauccucauagauu

SEQ ID NO: 704643 - RNA, 22 nt, Human
aaggccacacuugcuggccagc

SEQ ID NO: 704644 - RNA, 22 nt, Human
uccugagcugacacuuggggag

SEQ ID NO: 704645 - RNA, 22 nt, Human
agauacaaaggccuacagagca

SEQ ID NO: 704646 - RNA, 22 nt, Human
uuucaccaagguaaccuuugau

SEQ ID NO: 704647 - RNA, 22 nt, Human
gcuggcauuacaggagagaacc

SEQ ID NO: 704648 - RNA, 20 nt, Human
uggacaggggcauagguugc

SEQ ID NO: 704649 - RNA, 22 nt, Human
guacacacuauguauuguacac

SEQ ID NO: 704650 - RNA, 22 nt, Human
ccugagagccagugccugccca

SEQ ID NO: 704651 - RNA, 22 nt, Human
gcuauuuauuaaaauagugaag

SEQ ID NO: 704652 - RNA, 22 nt, Human
gcuggcugugauuuugccaaca

SEQ ID NO: 704653 - RNA, 22 nt, Human
agaucagagaugcuaaaagagc

SEQ ID NO: 704654 - RNA, 22 nt, Human
uggaagaggccagaaaguggga

SEQ ID NO: 704655 - RNA, 22 nt, Human
uauuucucucacgguugccugg

SEQ ID NO: 704656 - RNA, 22 nt, Human
uagcaaggacaacauaugagag

SEQ ID NO: 704657 - RNA, 22 nt, Human
aucugaaaguuuagaauucuug

SEQ ID NO: 704658 - RNA, 22 nt, Human
gcuauacaaguguagaauagag

SEQ ID NO: 704659 - RNA, 23 nt, Human
cggacaaccauuguuuuaguauc

SEQ ID NO: 704660 - RNA, 22 nt, Human
ccucugcaucuggcugcugcag

SEQ ID NO: 704661 - RNA, 22 nt, Human
gcuuugcuggaaucaacgaaug

SEQ ID NO: 704662 - RNA, 22 nt, Human
cauaacuuuaaagacagugugg

SEQ ID NO: 704663 - RNA, 18 nt, Human
uccagcagcauaguuucc

SEQ ID NO: 704664 - RNA, 22 nt, Human
uugcaaaagccgaggcacucca

SEQ ID NO: 704665 - RNA, 22 nt, Human
cagggcuccccagagagccucu

SEQ ID NO: 704666 - RNA, 22 nt, Human
uccuggcccacuaugccagcau

SEQ ID NO: 704667 - RNA, 22 nt, Human
accucaguucaauucaguuaga

SEQ ID NO: 704668 - RNA, 22 nt, Human
uaaaguagcaaguuuagacuga

SEQ ID NO: 704669 - RNA, 22 nt, Human
uggacaugaccucgagcgagau

SEQ ID NO: 704670 - RNA, 22 nt, Human
uggcuggagaacuuggggaucu

SEQ ID NO: 704671 - RNA, 22 nt, Human
uguuugaauuuugcuaacgugu

SEQ ID NO: 704672 - RNA, 20 nt, Human
ucuccagaugcagaugacau

SEQ ID NO: 704673 - RNA, 22 nt, Human
ugcccugucuaagcugucagua

SEQ ID NO: 704674 - RNA, 22 nt, Human
uuuccuaguucuaagaaaugua

SEQ ID NO: 704675 - RNA, 22 nt, Human
guuuccagagugagggcacuug

SEQ ID NO: 704676 - RNA, 20 nt, Human
ucaugcaagauucauaaagg

SEQ ID NO: 704677 - RNA, 22 nt, Human
ccaaaauuauuacauuuguagg

SEQ ID NO: 704678 - RNA, 22 nt, Human
cagaaauaucaguugaaagugc

SEQ ID NO: 704679 - RNA, 23 nt, Human
aggagccagcccuguucucagua

SEQ ID NO: 704680 - RNA, 22 nt, Human
ugggccauuuuuggaagacugg

SEQ ID NO: 704681 - RNA, 22 nt, Human
ucaaagcacuggggaaagccug

SEQ ID NO: 704682 - RNA, 22 nt, Human
auuugacauuauucucucaguc

SEQ ID NO: 704683 - RNA, 20 nt, Human
uccuccuugcagagcccaga

SEQ ID NO: 704684 - RNA, 22 nt, Human
gugaagguggggagccucaguu

SEQ ID NO: 704685 - RNA, 22 nt, Human
gagguagcucuuacucucuccg

SEQ ID NO: 704686 - RNA, 22 nt, Human
caugcuuacuugucucagcaga

SEQ ID NO: 704687 - RNA, 22 nt, Human
uuggcucaccugucuacccaga

SEQ ID NO: 704688 - RNA, 22 nt, Human
cagacacuaggugacagagugc

SEQ ID NO: 704689 - RNA, 22 nt, Human
uauucacaaaaugagguccuca

SEQ ID NO: 704690 - RNA, 22 nt, Human
cgagcagaagccugguggucug

SEQ ID NO: 704691 - RNA, 22 nt, Human
uuuauuugaaucaggggagaau

SEQ ID NO: 704692 - RNA, 20 nt, Human
uuuuagcacuuguuauggug

SEQ ID NO: 704693 - RNA, 22 nt, Human
uauguuuuaggaauuaauuguu

SEQ ID NO: 704694 - RNA, 22 nt, Human
gauaaacaugggagaaaggaau

SEQ ID NO: 704695 - RNA, 22 nt, Human
ggagcugagcagcgauggcgga

SEQ ID NO: 704696 - RNA, 22 nt, Human
cacauuuaaagguugaagcuga

SEQ ID NO: 704697 - RNA, 18 nt, Human
aaaggcagauuacuggga

SEQ ID NO: 704698 - RNA, 22 nt, Human
uccugagggcgauucagcaggu

SEQ ID NO: 704699 - RNA, 22 nt, Human
uggagcugagaguuaauaagga

SEQ ID NO: 704700 - RNA, 22 nt, Human
gccaccugguggcaucuucugg

SEQ ID NO: 704701 - RNA, 22 nt, Human
uggaacaaauuuuggggaccuu

SEQ ID NO: 704702 - RNA, 22 nt, Human
auagauugcuaguuuuaaaauu

SEQ ID NO: 704703 - RNA, 22 nt, Human
ucccugaaacauaauagaugcc

SEQ ID NO: 704704 - RNA, 22 nt, Human
ugcuguuauacuuagcugguua

SEQ ID NO: 704705 - RNA, 18 nt, Human
ccuggaccugucuccuuu

SEQ ID NO: 704706 - RNA, 18 nt, Human
ugggcuugaaagcaaggu

SEQ ID NO: 704707 - RNA, 22 nt, Human
uguguaaauuuauuuacauaaa

SEQ ID NO: 704708 - RNA, 22 nt, Human
gggagggccagugcucucuaga

SEQ ID NO: 704709 - RNA, 22 nt, Human
gcugccagcccagcaaggugug

SEQ ID NO: 704710 - RNA, 22 nt, Human
gacccguggcaggcugccugcu

SEQ ID NO: 704711 - RNA, 22 nt, Human
ccugcagggugcugccacagau

SEQ ID NO: 704712 - RNA, 22 nt, Human
ggcccaguguggguggauguug

SEQ ID NO: 704713 - RNA, 22 nt, Human
uguguguguccucauuugcaga

SEQ ID NO: 704714 - RNA, 22 nt, Human
ucuaaacuucacuuuaagugcu

SEQ ID NO: 704715 - RNA, 19 nt, Human
uagcugccuguuaccucca

SEQ ID NO: 704716 - RNA, 22 nt, Human
gggaguaaacuauggugaggau

SEQ ID NO: 704717 - RNA, 22 nt, Human
aggcaggaacccugugugcgcc

SEQ ID NO: 704718 - RNA, 22 nt, Human
ccagugggagggagcuaggcca

SEQ ID NO: 704719 - RNA, 22 nt, Human
auuuaugauuagccuauuguug

SEQ ID NO: 704720 - RNA, 22 nt, Human
uaaggaaggggaaagacauguc

SEQ ID NO: 704721 - RNA, 22 nt, Human
augaagacaaacuggguagaaa

SEQ ID NO: 704722 - RNA, 22 nt, Human
ggcucccuguucuauucccugg

SEQ ID NO: 704723 - RNA, 22 nt, Human
uuagaaccauaaugaaucaaug

SEQ ID NO: 704724 - RNA, 22 nt, Human
ugcucccuugccagaggggaag

SEQ ID NO: 704725 - RNA, 22 nt, Human
ucugugugggauaguuugagga

SEQ ID NO: 704726 - RNA, 22 nt, Human
acaggggugcauggugcauggu

SEQ ID NO: 704727 - RNA, 22 nt, Human
augaggcagauguugcaugagg

SEQ ID NO: 704728 - RNA, 22 nt, Human
gagagccaugguggagaugggg

SEQ ID NO: 704729 - RNA, 22 nt, Human
uuucucaaccucaacacuauuu

SEQ ID NO: 704730 - RNA, 22 nt, Human
cagcuucccagcucacucauaa

SEQ ID NO: 704731 - RNA, 22 nt, Human
auucuggguuuuugucuucugu

SEQ ID NO: 704732 - RNA, 22 nt, Human
agcacagaaagcacauuugaaa

SEQ ID NO: 704733 - RNA, 22 nt, Human
aggcuuuaauuaucuacaggag

SEQ ID NO: 704734 - RNA, 22 nt, Human
gcugcccagcaggccccagggg

SEQ ID NO: 704735 - RNA, 18 nt, Human
uuucuuucugccuggggc

SEQ ID NO: 704736 - RNA, 22 nt, Human
uaccaguaauguaacuuugcaa

SEQ ID NO: 704737 - RNA, 22 nt, Human
uggcccagugcuuaugcucuga

SEQ ID NO: 704738 - RNA, 22 nt, Human
gagucauuguuggucccucccc

SEQ ID NO: 704739 - RNA, 22 nt, Human
aucuagcaguguuauaauugga

SEQ ID NO: 704740 - RNA, 20 nt, Human
uuucacaaugaacaugucuc

SEQ ID NO: 704741 - RNA, 22 nt, Human
ccugggcucugaggagggaguc

SEQ ID NO: 704742 - RNA, 22 nt, Human
uuccaaguccagccaggccaaa

SEQ ID NO: 704743 - RNA, 22 nt, Human
ucagucccuuaaagguggcagc

SEQ ID NO: 704744 - RNA, 22 nt, Human
ggaggugcugaucccagucaac

SEQ ID NO: 704745 - RNA, 22 nt, Human
agcaaacagugugcuaagaaau

SEQ ID NO: 704746 - RNA, 22 nt, Human
uagcuuuaaaaaucaucaaagc

SEQ ID NO: 704747 - RNA, 22 nt, Human
ucugggaacagcuuagcuccag

SEQ ID NO: 704748 - RNA, 22 nt, Human
cacagcaauagcuaacugauac

SEQ ID NO: 704749 - RNA, 22 nt, Human
augcaaauaaacagucuaguug

SEQ ID NO: 704750 - RNA, 22 nt, Human
gcagcugugggccucggagagc

SEQ ID NO: 704751 - RNA, 23 nt, Human
ucugggcugagcucgaguguaga

SEQ ID NO: 704752 - RNA, 22 nt, Human
cguggcuggggcgacuccacgg

SEQ ID NO: 704753 - RNA, 22 nt, Human
aaucacaaaugcaaguugucac

SEQ ID NO: 704754 - RNA, 22 nt, Human
ucucugcugagaagggcuggca

SEQ ID NO: 704755 - RNA, 22 nt, Human
ugguccuucuugaagagugagu

SEQ ID NO: 704756 - RNA, 22 nt, Human
uccugccauuugcuuuuucucc

SEQ ID NO: 704757 - RNA, 22 nt, Human
ugguggcagcugggacagaggu

SEQ ID NO: 704758 - RNA, 22 nt, Human
aggcuuccuggaggaagaggua

SEQ ID NO: 704759 - RNA, 22 nt, Human
aggggugugcauccuggaggau

SEQ ID NO: 704760 - RNA, 22 nt, Human
cacaucuucuuaacuccaaagu

SEQ ID NO: 704761 - RNA, 22 nt, Human
uaaguuucuacuugucgggucu

SEQ ID NO: 704762 - RNA, 20 nt, Human
gagugcuuuggcuugcucuc

SEQ ID NO: 704763 - RNA, 22 nt, Human
gcuggagguggugagaaaaggu

SEQ ID NO: 704764 - RNA, 22 nt, Human
aggcuccagucuccucuggcag

SEQ ID NO: 704765 - RNA, 22 nt, Human
uauuuucauucugugugacugu

SEQ ID NO: 704766 - RNA, 22 nt, Human
aaggaacugcugauguggugac

SEQ ID NO: 704767 - RNA, 22 nt, Human
acaaauuugaauccugacuucu

SEQ ID NO: 704768 - RNA, 22 nt, Human
uccaucuggugagugaggagcc

SEQ ID NO: 704769 - RNA, 22 nt, Human
acugucaccuaaauuuucauug

SEQ ID NO: 704770 - RNA, 23 nt, Human
agacaguggccgagagguacuag

SEQ ID NO: 704771 - RNA, 22 nt, Human
aaaaggaggucacuuuauuccu

SEQ ID NO: 704772 - RNA, 22 nt, Human
cugccccaggaccucuucugga

SEQ ID NO: 704773 - RNA, 22 nt, Human
cuaguguacaagugguggagau

SEQ ID NO: 704774 - RNA, 18 nt, Human
agcaaagcaagagaucac

SEQ ID NO: 704775 - RNA, 21 nt, Human
acaggagaccgccuggcaguc

SEQ ID NO: 704776 - RNA, 18 nt, Human
gaugggguccaggcauag

SEQ ID NO: 704777 - RNA, 22 nt, Human
auuuuccuucuaagaggaaggu

SEQ ID NO: 704778 - RNA, 22 nt, Human
agaggccuaaccaagauguccu

SEQ ID NO: 704779 - RNA, 22 nt, Human
aggaggccgggauucuggagau

SEQ ID NO: 704780 - RNA, 18 nt, Human
cuccagagcugugagaca

SEQ ID NO: 704781 - RNA, 22 nt, Human
ucugccuggauuuuggaaagcu

SEQ ID NO: 704782 - RNA, 22 nt, Human
uggucugagcaacugcccuauc

SEQ ID NO: 704783 - RNA, 22 nt, Human
gcauguggcccaaggaggcugu

SEQ ID NO: 704784 - RNA, 22 nt, Human
uagacaaugccaucuugugguu

SEQ ID NO: 704785 - RNA, 22 nt, Human
agcugcucuucauuucccccca

SEQ ID NO: 704786 - RNA, 22 nt, Human
guuuccauggcucuguuaaugg

SEQ ID NO: 704787 - RNA, 22 nt, Human
gacuccauccaaucuguguucu

SEQ ID NO: 704788 - RNA, 22 nt, Human
uccugggacucuuuaucagaga

SEQ ID NO: 704789 - RNA, 21 nt, Human
agguggggcugcaccucugcu

SEQ ID NO: 704790 - RNA, 22 nt, Human
caagagagaugcagcucacuca

SEQ ID NO: 704791 - RNA, 22 nt, Human
gaugcuccaaacagcaauucuu

SEQ ID NO: 704792 - RNA, 22 nt, Human
aucauuuaugccccaauuagau

SEQ ID NO: 704793 - RNA, 22 nt, Human
uacacauaggucugaauaaaaa

SEQ ID NO: 704794 - RNA, 22 nt, Human
gagcauggaucaugugcugggu

SEQ ID NO: 704795 - RNA, 22 nt, Human
guuuagaccaaucauaauuuau

SEQ ID NO: 704796 - RNA, 22 nt, Human
guuaucuucccuuugaugauuu

SEQ ID NO: 704797 - RNA, 22 nt, Human
aaagacagauggcaaggaugau

SEQ ID NO: 704798 - RNA, 22 nt, Human
gagucaggaguccugugugaga

SEQ ID NO: 704799 - RNA, 22 nt, Human
gggaaggacauucugggcucag

SEQ ID NO: 704800 - RNA, 22 nt, Human
cccaggaaaugggcucuugccu

SEQ ID NO: 704801 - RNA, 22 nt, Human
acccuuugucaagcacagaaga

SEQ ID NO: 704802 - RNA, 22 nt, Human
ucagggaacaucguuaaacuag

SEQ ID NO: 704803 - RNA, 22 nt, Human
ucuuuuagagcauuucugauuc

SEQ ID NO: 704804 - RNA, 22 nt, Human
uuggcuuucagaaucccuaucu

SEQ ID NO: 704805 - RNA, 22 nt, Human
uuucaaacuuuacucuugaauc

SEQ ID NO: 704806 - RNA, 22 nt, Human
ggcaggcugggagucaucagag

SEQ ID NO: 704807 - RNA, 22 nt, Human
augccagggucauccccugggu

SEQ ID NO: 704808 - RNA, 22 nt, Human
ugcaaggcuugcaauggugauc

SEQ ID NO: 704809 - RNA, 22 nt, Human
uagauuuuacuucugucauuac

SEQ ID NO: 704810 - RNA, 22 nt, Human
aguguguacucauauacuucca

SEQ ID NO: 704811 - RNA, 22 nt, Human
agcuucuugaccaagccuguaa

SEQ ID NO: 704812 - RNA, 22 nt, Human
cacaugaguguaggaagaggga

SEQ ID NO: 704813 - RNA, 22 nt, Human
uccaggcaucccccaggacaga

SEQ ID NO: 704814 - RNA, 22 nt, Human
uuuaagaugguauuuuauaaag

SEQ ID NO: 704815 - RNA, 22 nt, Human
cuggccacaacuagcccaggac

SEQ ID NO: 704816 - RNA, 22 nt, Human
gggcugaugugacagaacucuc

SEQ ID NO: 704817 - RNA, 19 nt, Human
cauauuuuugggcuggcau

SEQ ID NO: 704818 - RNA, 22 nt, Human
ggcagagacuggguuggcagag

SEQ ID NO: 704819 - RNA, 22 nt, Human
uguuaaauguauuauguguucu

SEQ ID NO: 704820 - RNA, 22 nt, Human
aggaggugcuguuuguccugga

SEQ ID NO: 704821 - RNA, 22 nt, Human
agauacauagcugugagcacac

SEQ ID NO: 704822 - RNA, 22 nt, Human
uagcaaccuauggauagagaag

SEQ ID NO: 704823 - RNA, 22 nt, Human
ugcagcaauuugcaguaauuua

SEQ ID NO: 704824 - RNA, 22 nt, Human
acccugggcuuggccugcucag

SEQ ID NO: 704825 - RNA, 22 nt, Human
cauuucaauacaguuuguaaau

SEQ ID NO: 704826 - RNA, 22 nt, Human
acuguguccucauguggcagaa

SEQ ID NO: 704827 - RNA, 22 nt, Human
uucagcuucauuugucuuuaug

SEQ ID NO: 704828 - RNA, 22 nt, Human
agcccccaggagucuccacgcc

SEQ ID NO: 704829 - RNA, 22 nt, Human
uaucuguuuauuguuacuguca

SEQ ID NO: 704830 - RNA, 22 nt, Human
cuugggaacugccuugccuuug

SEQ ID NO: 704831 - RNA, 22 nt, Human
cccaggcacagauuaucccaau

SEQ ID NO: 704832 - RNA, 22 nt, Human
uggcagcuauggucuaagggcc

SEQ ID NO: 704833 - RNA, 22 nt, Human
cccaggcagugcugaucccuca

SEQ ID NO: 704834 - RNA, 23 nt, Human
ugggagacuuuucauuuuguucu

SEQ ID NO: 704835 - RNA, 20 nt, Human
gagggcaggcacccauuuca

SEQ ID NO: 704836 - RNA, 22 nt, Human
gccucugcaggugcgguuaucc

SEQ ID NO: 704837 - RNA, 22 nt, Human
ggugaggggcuccucugcccgg

SEQ ID NO: 704838 - RNA, 22 nt, Human
aagcagaaggggaauaauauuu

SEQ ID NO: 704839 - RNA, 22 nt, Human
ucugcuucuccuacuucauggg

SEQ ID NO: 704840 - RNA, 22 nt, Human
aucugcuuagaauucauugucc

SEQ ID NO: 704841 - RNA, 18 nt, Human
aaaggcauauauagaagu

SEQ ID NO: 704842 - RNA, 22 nt, Human
cuucacagagucccugauuguu

SEQ ID NO: 704843 - RNA, 22 nt, Human
uuccaugccuagaacaggauuc

SEQ ID NO: 704844 - RNA, 22 nt, Human
acacagugguguuuacaaaauu

SEQ ID NO: 704845 - RNA, 22 nt, Human
gauuucuuuaugaaguacagaa

SEQ ID NO: 704846 - RNA, 22 nt, Human
agcuauguauaaauaggccacu

SEQ ID NO: 704847 - RNA, 22 nt, Human
cucugaaauuggcccucagcag

SEQ ID NO: 704848 - RNA, 19 nt, Human
gcauccauggaggccgcuu

SEQ ID NO: 704849 - RNA, 22 nt, Human
uacauugauggaguaccuagcu

SEQ ID NO: 704850 - RNA, 22 nt, Human
uucacuguaugagagggcuuga

SEQ ID NO: 704851 - RNA, 22 nt, Human
uagcucuggcauucuuuccaaa

SEQ ID NO: 704852 - RNA, 22 nt, Human
uacagugucccuuuuucagaca

SEQ ID NO: 704853 - RNA, 19 nt, Human
uuucuuaggccuuuggccu

SEQ ID NO: 704854 - RNA, 22 nt, Human
ugucagugguagacccagaggu

SEQ ID NO: 704855 - RNA, 22 nt, Human
aagcccagcucugccugcucug

SEQ ID NO: 704856 - RNA, 22 nt, Human
ugugggaagauguugcaggaga

SEQ ID NO: 704857 - RNA, 22 nt, Human
ccucacccagucaccuaggugg

SEQ ID NO: 704858 - RNA, 22 nt, Human
uucuggaauccucaaaacauga

SEQ ID NO: 704859 - RNA, 23 nt, Human
cacaccaggagccgucugggcca

SEQ ID NO: 704860 - RNA, 22 nt, Human
ugcaucauuuauaaugucuuug

SEQ ID NO: 704861 - RNA, 22 nt, Human
cauuaugugggaaaauguucuu

SEQ ID NO: 704862 - RNA, 22 nt, Human
aggcacugauucucagaguuac

SEQ ID NO: 704863 - RNA, 22 nt, Human
acaacacagcuuuccucaaguu

SEQ ID NO: 704864 - RNA, 22 nt, Human
aaggcacuuaacgugggaggau

SEQ ID NO: 704865 - RNA, 22 nt, Human
aaaugcacagguuuuaaauccu

SEQ ID NO: 704866 - RNA, 22 nt, Human
ugaugaaauguugaggcaguga

SEQ ID NO: 704867 - RNA, 22 nt, Human
aguggcagccgagcaggagaug

SEQ ID NO: 704868 - RNA, 17 nt, Human
ugaguggccgggggaca

SEQ ID NO: 704869 - RNA, 23 nt, Human
guuccuucauguggucauugguu

SEQ ID NO: 704870 - RNA, 22 nt, Human
uugccuuguuauucucucagaa

SEQ ID NO: 704871 - RNA, 21 nt, Human
ucccucagaagcucuugguca

SEQ ID NO: 704872 - RNA, 22 nt, Human
gguucacacuaagcuuaagugg

SEQ ID NO: 704873 - RNA, 22 nt, Human
cagucacacaaguggacuuggg

SEQ ID NO: 704874 - RNA, 19 nt, Human
uguguccuagcagccaguc

SEQ ID NO: 704875 - RNA, 22 nt, Human
uugcccugcggguccugcgcaa

SEQ ID NO: 704876 - RNA, 20 nt, Human
gcucaguggagaaaugcacc

SEQ ID NO: 704877 - RNA, 22 nt, Human
aaucauugagacaaauuagcuu

SEQ ID NO: 704878 - RNA, 22 nt, Human
caguguuuguugagaaaggcaa

SEQ ID NO: 704879 - RNA, 19 nt, Human
ggacuugguuuccaggcuc

SEQ ID NO: 704880 - RNA, 22 nt, Human
ggaaaaggccacagggacacau

SEQ ID NO: 704881 - RNA, 22 nt, Human
ugcucaguccuaccuuggcucc

SEQ ID NO: 704882 - RNA, 22 nt, Human
uagggcuuugcucauccuaggu

SEQ ID NO: 704883 - RNA, 22 nt, Human
ucuucauucucgccuuugucgu

SEQ ID NO: 704884 - RNA, 22 nt, Human
uggagcuggaagaauguagacg

SEQ ID NO: 704885 - RNA, 22 nt, Human
cccuuuaaguccuggaacaaag

SEQ ID NO: 704886 - RNA, 22 nt, Human
gcuccagguauuugcccuuuua

SEQ ID NO: 704887 - RNA, 22 nt, Human
uucaggauaguggugaguggca

SEQ ID NO: 704888 - RNA, 22 nt, Human
acaauagaaggaaacugacaua

SEQ ID NO: 704889 - RNA, 22 nt, Human
ucuucauuuuauagcaucugug

SEQ ID NO: 704890 - RNA, 20 nt, Human
gcugcucgcugcagucacuc

SEQ ID NO: 704891 - RNA, 22 nt, Human
gaacacaguacuuuuccugaug

SEQ ID NO: 704892 - RNA, 22 nt, Human
ucagaacagaagcuggcuauaa

SEQ ID NO: 704893 - RNA, 22 nt, Human
gugcccucacaaaguggaaaga

SEQ ID NO: 704894 - RNA, 23 nt, Human
gugcuugaaagaugcagaauuaa

SEQ ID NO: 704895 - RNA, 22 nt, Human
acuucaugcagaagagagcugu

SEQ ID NO: 704896 - RNA, 22 nt, Human
gggcuccaguuguccccaggau

SEQ ID NO: 704897 - RNA, 22 nt, Human
agaagccacaggccucgucugg

SEQ ID NO: 704898 - RNA, 22 nt, Human
aggucugaaagccucagucaca

SEQ ID NO: 704899 - RNA, 22 nt, Human
ggcuucucagcacacuguccac

SEQ ID NO: 704900 - RNA, 22 nt, Human
uaucagcaagauggcaguauag

SEQ ID NO: 704901 - RNA, 22 nt, Human
ccuuugcauucuagauguuuag

SEQ ID NO: 704902 - RNA, 22 nt, Human
gcuucugcagagccguccugag

SEQ ID NO: 704903 - RNA, 22 nt, Human
cucuuuuaugugacguguguga

SEQ ID NO: 704904 - RNA, 22 nt, Human
uucaugauaguauuuuuuguga

SEQ ID NO: 704905 - RNA, 22 nt, Human
guucagauuugacugguuucuc

SEQ ID NO: 704906 - RNA, 22 nt, Human
aucaggauccaccuugagccug

SEQ ID NO: 704907 - RNA, 22 nt, Human
gcuguacaguuuacuagguggg

SEQ ID NO: 704908 - RNA, 22 nt, Human
aaauuuaaggaggugcucacuu

SEQ ID NO: 704909 - RNA, 22 nt, Human
auucagcagccauggcuucuga

SEQ ID NO: 704910 - RNA, 22 nt, Human
uuuaucucuuuugaccaagauu

SEQ ID NO: 704911 - RNA, 22 nt, Human
cucuccagguuagagcacuuau

SEQ ID NO: 704912 - RNA, 23 nt, Human
uugcaaaaugagucuugagugaa

SEQ ID NO: 704913 - RNA, 22 nt, Human
caauguaucaagaagcaucagu

SEQ ID NO: 704914 - RNA, 22 nt, Human
acuguauuuggauauaagaucu

SEQ ID NO: 704915 - RNA, 22 nt, Human
caggaaaugggucguuuuauaa

SEQ ID NO: 704916 - RNA, 22 nt, Human
uggcugcuuguuuuagugaggc

SEQ ID NO: 704917 - RNA, 22 nt, Human
caguuuuucaaaauuacaugau

SEQ ID NO: 704918 - RNA, 22 nt, Human
cagggccagagagggcuggcug

SEQ ID NO: 704919 - RNA, 22 nt, Human
uaggcauuuaagauggauaagg

SEQ ID NO: 704920 - RNA, 19 nt, Human
cucucuccaguggcuggcu

SEQ ID NO: 704921 - RNA, 22 nt, Human
caggucugugugccauuuccaa

SEQ ID NO: 704922 - RNA, 22 nt, Human
acuguggccugcuguaugggcu

SEQ ID NO: 704923 - RNA, 22 nt, Human
uuggcccuggcacacccccacg

SEQ ID NO: 704924 - RNA, 22 nt, Human
aacaaucaaguuucuaaaugac

SEQ ID NO: 704925 - RNA, 22 nt, Human
aggaagagcaucuuugggucug

SEQ ID NO: 704926 - RNA, 19 nt, Human
aacaccagagucaggaguc

SEQ ID NO: 704927 - RNA, 22 nt, Human
cagaugugcaugaugggaaggg

SEQ ID NO: 704928 - RNA, 22 nt, Human
uucacauugaaggugcuuucuu

SEQ ID NO: 704929 - RNA, 22 nt, Human
cuaacuuuauuugcuaaguaga

SEQ ID NO: 704930 - RNA, 22 nt, Human
cagggccccagggaugucugcu

SEQ ID NO: 704931 - RNA, 22 nt, Human
ccaguggacuucucccuguggu

SEQ ID NO: 704932 - RNA, 22 nt, Human
aaagcaauagaggguaagacug

SEQ ID NO: 704933 - RNA, 22 nt, Human
caggaaauaucuccuggcagag

SEQ ID NO: 704934 - RNA, 22 nt, Human
agucccagcccaguccuguaag

SEQ ID NO: 704935 - RNA, 22 nt, Human
uacagccugauuuggagccacu

SEQ ID NO: 704936 - RNA, 22 nt, Human
auauuuguugaguucuuaugau

SEQ ID NO: 704937 - RNA, 22 nt, Human
uuccacuccuccugguggggug

SEQ ID NO: 704938 - RNA, 19 nt, Human
uccugcugugugaagggga

SEQ ID NO: 704939 - RNA, 22 nt, Human
gccaggacggugaaugggcuac

SEQ ID NO: 704940 - RNA, 22 nt, Human
cauuuaguuauacuaaaacauu

SEQ ID NO: 704941 - RNA, 22 nt, Human
uuacaugagguuaauuaagcau

SEQ ID NO: 704942 - RNA, 22 nt, Human
agaaauguacacgacacccaga

SEQ ID NO: 704943 - RNA, 22 nt, Human
ucaauacuuaagcuuaauucua

SEQ ID NO: 704944 - RNA, 22 nt, Human
gguuucuagcagagucucuuua

SEQ ID NO: 704945 - RNA, 22 nt, Human
cugagcugugcuaagugaaaug

SEQ ID NO: 704946 - RNA, 22 nt, Human
cauagaaacuugcagcaagcac

SEQ ID NO: 704947 - RNA, 22 nt, Human
uggcagaggaggcucagauuga

SEQ ID NO: 704948 - RNA, 22 nt, Human
gccccuucuucuggagauucaa

SEQ ID NO: 704949 - RNA, 22 nt, Human
cagugcuggcuguuaggacagu

SEQ ID NO: 704950 - RNA, 22 nt, Human
gcuaggagugggauggaagucg

SEQ ID NO: 704951 - RNA, 22 nt, Human
acacuguaaagugaugcuuaaa

SEQ ID NO: 704952 - RNA, 22 nt, Human
aaagacauggaacuagagaugg

SEQ ID NO: 704953 - RNA, 22 nt, Human
uccaagaaguuuauguuguuuc

SEQ ID NO: 704954 - RNA, 22 nt, Human
ugagccaaguucacaccauugc

SEQ ID NO: 704955 - RNA, 22 nt, Human
agcucagaagccuaugcauagu

SEQ ID NO: 704956 - RNA, 22 nt, Human
caggaagugccuggugagagga

SEQ ID NO: 704957 - RNA, 21 nt, Human
acacaggcagugucccgaggu

SEQ ID NO: 704958 - RNA, 19 nt, Human
gugcuuuuuaagagcucag

SEQ ID NO: 704959 - RNA, 22 nt, Human
uaaagucauaagaguggauccg

SEQ ID NO: 704960 - RNA, 22 nt, Human
ucucuguggguuucaccagcgc

SEQ ID NO: 704961 - RNA, 22 nt, Human
uauguacauggagagcaauuga

SEQ ID NO: 704962 - RNA, 22 nt, Human
cuggcagggugggcuuugcuuu

SEQ ID NO: 704963 - RNA, 22 nt, Human
ucugggagagcugcugucagag

SEQ ID NO: 704964 - RNA, 22 nt, Human
gcacagccagcaucugagggau

SEQ ID NO: 704965 - RNA, 22 nt, Human
accccagaggcggaggcugcag

SEQ ID NO: 704966 - RNA, 22 nt, Human
uucaggcauggaaacuggauua

SEQ ID NO: 704967 - RNA, 22 nt, Human
gcuuucugguucucaaagcacu

SEQ ID NO: 704968 - RNA, 22 nt, Human
uucagauaagucaaguuaguau

SEQ ID NO: 704969 - RNA, 22 nt, Human
ggaguggcacucugaggcgggg

SEQ ID NO: 704970 - RNA, 22 nt, Human
aacuccagggucaccauucaca

SEQ ID NO: 704971 - RNA, 22 nt, Human
agcugguugcuuaaccucucug

SEQ ID NO: 704972 - RNA, 22 nt, Human
uucaguauauuacucuugucaa

SEQ ID NO: 704973 - RNA, 22 nt, Human
gcugguccagggccucuguggg

SEQ ID NO: 704974 - RNA, 22 nt, Human
gagcaguaggagaacccugagc

SEQ ID NO: 704975 - RNA, 22 nt, Human
uucagaaacaucaguggaugga

SEQ ID NO: 704976 - RNA, 22 nt, Human
cugcuuggaguccuccagcacc

SEQ ID NO: 704977 - RNA, 22 nt, Human
ugggaugcccugacccucugga

SEQ ID NO: 704978 - RNA, 22 nt, Human
guggcucagcggagcucugcac

SEQ ID NO: 704979 - RNA, 22 nt, Human
uuacagauguuucaggaauacu

SEQ ID NO: 704980 - RNA, 22 nt, Human
cugcucuggcguacucggcauc

SEQ ID NO: 704981 - RNA, 22 nt, Human
ucccagaguuuccuguguccca

SEQ ID NO: 704982 - RNA, 22 nt, Human
ucaggacauuugucagcaggag

SEQ ID NO: 704983 - RNA, 22 nt, Human
gaccuggccugcacagcccuua

SEQ ID NO: 704984 - RNA, 22 nt, Human
uuaaaugaugcauaucauuuag

SEQ ID NO: 704985 - RNA, 17 nt, Human
ucauuucaguaaaucca

SEQ ID NO: 704986 - RNA, 22 nt, Human
caaggagaaaacggcuucugaa

SEQ ID NO: 704987 - RNA, 22 nt, Human
cacauggggcgcugcauuggcc

SEQ ID NO: 704988 - RNA, 22 nt, Human
uguccaggcggccuugccuguu

SEQ ID NO: 704989 - RNA, 22 nt, Human
agaaguggucugucuuccagau

SEQ ID NO: 704990 - RNA, 22 nt, Human
uucuagauagagugcaaauuau

SEQ ID NO: 704991 - RNA, 22 nt, Human
guguucauggaugucaauuuga

SEQ ID NO: 704992 - RNA, 22 nt, Human
aacacaugccuuaagaauaagu

SEQ ID NO: 704993 - RNA, 16 nt, Human
ucucugcuucauaggu

SEQ ID NO: 704994 - RNA, 22 nt, Human
augaagucuagcaagcauugaa

SEQ ID NO: 704995 - RNA, 19 nt, Human
cagagccucagagcuagaa

SEQ ID NO: 704996 - RNA, 22 nt, Human
caauauauaaugaguacuuucc

SEQ ID NO: 704997 - RNA, 22 nt, Human
cauuuauugguuaggccagcag

SEQ ID NO: 704998 - RNA, 22 nt, Human
ugcugguaccgcgccuccgcca

SEQ ID NO: 704999 - RNA, 22 nt, Human
ugcuggaagaaaauucuuuaac

SEQ ID NO: 705000 - RNA, 22 nt, Human
ucugccugaaauucacauguaa

SEQ ID NO: 705001 - RNA, 22 nt, Human
uuucaaacuuaaauaccuuucc

SEQ ID NO: 705002 - RNA, 22 nt, Human
caguaggaaggaugcagaaaaa

SEQ ID NO: 705003 - RNA, 18 nt, Human
ugagcagaguaaggcuuu

SEQ ID NO: 705004 - RNA, 22 nt, Human
uagauuuccucuuccucauucc

SEQ ID NO: 705005 - RNA, 22 nt, Human
gaagcuucuggcauuucucaaa

SEQ ID NO: 705006 - RNA, 22 nt, Human
ugaauaugugacuuugauuuca

SEQ ID NO: 705007 - RNA, 22 nt, Human
caucuuuugguaggagccgggc

SEQ ID NO: 705008 - RNA, 19 nt, Human
cucugaggauuagcugugg

SEQ ID NO: 705009 - RNA, 22 nt, Human
ugcaggccucacaccuggcacc

SEQ ID NO: 705010 - RNA, 22 nt, Human
cucucuggcuuggcacggagau

SEQ ID NO: 705011 - RNA, 22 nt, Human
auaaagcauacuuuguaugacu

SEQ ID NO: 705012 - RNA, 22 nt, Human
gugaauggggcaggaaggaugg

SEQ ID NO: 705013 - RNA, 22 nt, Human
ucagcacugucuauuagugaga

SEQ ID NO: 705014 - RNA, 22 nt, Human
ugucugaguggugcaaggcuga

SEQ ID NO: 705015 - RNA, 22 nt, Human
uccacagacuauuaagugaucu

SEQ ID NO: 705016 - RNA, 22 nt, Human
uugaaugaggaagagcacuggc

SEQ ID NO: 705017 - RNA, 22 nt, Human
uacaauguugguaaaguaucau

SEQ ID NO: 705018 - RNA, 22 nt, Human
ggggaggaagcuggaacacggg

SEQ ID NO: 705019 - RNA, 22 nt, Human
aauuaugguauguucaacaacu

SEQ ID NO: 705020 - RNA, 20 nt, Human
uuguuucugcuauuuucuaa

SEQ ID NO: 705021 - RNA, 22 nt, Human
cuguggcauuuagagguugcgu

SEQ ID NO: 705022 - RNA, 22 nt, Human
ucucuuaauuguaaugguuccu

SEQ ID NO: 705023 - RNA, 22 nt, Human
ucacccaggcuggugcgcagug

SEQ ID NO: 705024 - RNA, 22 nt, Human
ugccugcugccuuucaucccaa

SEQ ID NO: 705025 - RNA, 22 nt, Human
cucaguccagggaccggccucc

SEQ ID NO: 705026 - RNA, 21 nt, Human
uucugccuucgaggucucagg

SEQ ID NO: 705027 - RNA, 19 nt, Human
uuugccuugcagcugugug

SEQ ID NO: 705028 - RNA, 22 nt, Human
acucacuagagguagaucccug

SEQ ID NO: 705029 - RNA, 22 nt, Human
cagauggcugccuucuugcugu

SEQ ID NO: 705030 - RNA, 22 nt, Human
aaagcugcccuugugaaacaag

SEQ ID NO: 705031 - RNA, 22 nt, Human
aagauucuacaguagguacauu

SEQ ID NO: 705032 - RNA, 22 nt, Human
ugaauggucacugagcaucugu

SEQ ID NO: 705033 - RNA, 22 nt, Human
caaagcaggaagcuccugacag

SEQ ID NO: 705034 - RNA, 22 nt, Human
guggggaguguucugugauugg

SEQ ID NO: 705035 - RNA, 22 nt, Human
ucaugcaucugggcuggcuggu

SEQ ID NO: 705036 - RNA, 22 nt, Human
ugggccugggcuggacagccug

SEQ ID NO: 705037 - RNA, 22 nt, Human
aaccugaaaguaguaaaagcug

SEQ ID NO: 705038 - RNA, 22 nt, Human
ugccuggcagcuugaaagaaau

SEQ ID NO: 705039 - RNA, 22 nt, Human
uguaugcacauauauagguaca

SEQ ID NO: 705040 - RNA, 19 nt, Human
uucuggggccuggccuugg

SEQ ID NO: 705041 - RNA, 22 nt, Human
ucuggggaauguucauuucuga

SEQ ID NO: 705042 - RNA, 22 nt, Human
aaacucuagggcuccacauucc

SEQ ID NO: 705043 - RNA, 22 nt, Human
gcacagugauaggcaguugugc

SEQ ID NO: 705044 - RNA, 22 nt, Human
ugcauauuuucugauucagaag

SEQ ID NO: 705045 - RNA, 22 nt, Human
acagugaaaauucuauugauuu

SEQ ID NO: 705046 - RNA, 22 nt, Human
agcaccugcacaguggaggaaa

SEQ ID NO: 705047 - RNA, 22 nt, Human
ucacaccuguaaucccaggccu

SEQ ID NO: 705048 - RNA, 22 nt, Human
cuggcuggcagaugcucuugcu

SEQ ID NO: 705049 - RNA, 22 nt, Human
gcagugaacauaacacagaagg

SEQ ID NO: 705050 - RNA, 22 nt, Human
cacccugcccacuagcaaucug

SEQ ID NO: 705051 - RNA, 22 nt, Human
ccauuugucaccucugcacucc

SEQ ID NO: 705052 - RNA, 22 nt, Human
aaagguuaauguugucauguua

SEQ ID NO: 705053 - RNA, 22 nt, Human
gagcugagaagcagcgcuugau

SEQ ID NO: 705054 - RNA, 22 nt, Human
aggaaugaacucgagugaucug

SEQ ID NO: 705055 - RNA, 22 nt, Human
ucuuccaggagggcauuucuuu

SEQ ID NO: 705056 - RNA, 22 nt, Human
acuuguuuggucucauguuuaa

SEQ ID NO: 705057 - RNA, 22 nt, Human
gagugucugugacagcucauga

SEQ ID NO: 705058 - RNA, 22 nt, Human
aggccuggccuuuauguucaag

SEQ ID NO: 705059 - RNA, 22 nt, Human
cucacugucuguacuagcugau

SEQ ID NO: 705060 - RNA, 22 nt, Human
ugcaggcuggggaggcagacuu

SEQ ID NO: 705061 - RNA, 22 nt, Human
ugguaaaguugauuggugcucu

SEQ ID NO: 705062 - RNA, 19 nt, Human
gaaugucuccuacuucuga

SEQ ID NO: 705063 - RNA, 22 nt, Human
ccuucagccuucauccuuccuu

SEQ ID NO: 705064 - RNA, 22 nt, Human
aaaaccugauugaauucuauuu

SEQ ID NO: 705065 - RNA, 22 nt, Human
uuggcuucuggcagucuggacg

SEQ ID NO: 705066 - RNA, 22 nt, Human
agagauaugaguaguugugaca

SEQ ID NO: 705067 - RNA, 22 nt, Human
uccaggccgcaggggcagcccc

SEQ ID NO: 705068 - RNA, 22 nt, Human
ucccugaaucucgaacuagccu

SEQ ID NO: 705069 - RNA, 22 nt, Human
gcagcagggugccagcuuugca

SEQ ID NO: 705070 - RNA, 22 nt, Human
ggccugugcacaugugcaggaa

SEQ ID NO: 705071 - RNA, 22 nt, Human
gugugugucuccgcggccguag

SEQ ID NO: 705072 - RNA, 19 nt, Human
gccaggcuccauagccggc

SEQ ID NO: 705073 - RNA, 22 nt, Human
ugcucgcgcuguuccagcagcu

SEQ ID NO: 705074 - RNA, 21 nt, Human
ugccuggccuuugcuuuuccu

SEQ ID NO: 705075 - RNA, 22 nt, Human
gcuccuggugcuguagagauuu

SEQ ID NO: 705076 - RNA, 22 nt, Human
ucugucugcgcuugcccuggug

SEQ ID NO: 705077 - RNA, 22 nt, Human
augagauagacuaugucauaca

SEQ ID NO: 705078 - RNA, 22 nt, Human
gaaaguugcaaucauggcuuuu

SEQ ID NO: 705079 - RNA, 22 nt, Human
acauagcagaggacugagcaga

SEQ ID NO: 705080 - RNA, 22 nt, Human
ccuggcuuccuggagcucacaa

SEQ ID NO: 705081 - RNA, 19 nt, Human
augaagauugguaaauuca

SEQ ID NO: 705082 - RNA, 22 nt, Human
auccaaaggugacacagaauac

SEQ ID NO: 705083 - RNA, 21 nt, Human
ccuguggauuuuaaaauugga

SEQ ID NO: 705084 - RNA, 22 nt, Human
ucugccagugguuuggcccuga

SEQ ID NO: 705085 - RNA, 22 nt, Human
cuucaguguugccagggccuag

SEQ ID NO: 705086 - RNA, 22 nt, Human
auagacaaucccccauccuacc

SEQ ID NO: 705087 - RNA, 22 nt, Human
cagcugcccauccugggaaaug

SEQ ID NO: 705088 - RNA, 22 nt, Human
auauauuacaaaagaggaagga

SEQ ID NO: 705089 - RNA, 22 nt, Human
caaggcugugcaggguccauau

SEQ ID NO: 705090 - RNA, 22 nt, Human
ucugaguugaggaaaugcauuu

SEQ ID NO: 705091 - RNA, 22 nt, Human
acccugauauagguccaagagc

SEQ ID NO: 705092 - RNA, 22 nt, Human
ccaggcagcucugauuuauguc

SEQ ID NO: 705093 - RNA, 22 nt, Human
aaagagcuaacauugccgagau

SEQ ID NO: 705094 - RNA, 22 nt, Human
cagugcauagauccugaggccu

SEQ ID NO: 705095 - RNA, 22 nt, Human
gaucuuuucagaauuuaucagu

SEQ ID NO: 705096 - RNA, 22 nt, Human
cacaggcucuccagggccugga

SEQ ID NO: 705097 - RNA, 22 nt, Human
ugagguccugcauguugagguc

SEQ ID NO: 705098 - RNA, 22 nt, Human
auguacaagcuguuuuacugca

SEQ ID NO: 705099 - RNA, 22 nt, Human
gugcuacagacugaguacacuu

SEQ ID NO: 705100 - RNA, 22 nt, Human
agaaagcacucugucuuuuacc

SEQ ID NO: 705101 - RNA, 22 nt, Human
ggcaggugagagcucuuugaaa

SEQ ID NO: 705102 - RNA, 22 nt, Human
ggaggugcuggcggccagcucu

SEQ ID NO: 705103 - RNA, 18 nt, Human
ugcacuagaugcuggcag

SEQ ID NO: 705104 - RNA, 20 nt, Human
uauuuagauucaaguaugga

SEQ ID NO: 705105 - RNA, 22 nt, Human
ugaaaacagaauccuuguuuuc

SEQ ID NO: 705106 - RNA, 20 nt, Human
aguguuccggaagacuggca

SEQ ID NO: 705107 - RNA, 22 nt, Human
agugggcagugcgcucggaugc

SEQ ID NO: 705108 - RNA, 22 nt, Human
uaucagcaccgcggacagcauc

SEQ ID NO: 705109 - RNA, 22 nt, Human
cugaaagggagaacaccaagag

SEQ ID NO: 705110 - RNA, 21 nt, Human
gaguccuuccaauguccucag

SEQ ID NO: 705111 - RNA, 22 nt, Human
agggcaucucuaacagucuccu

SEQ ID NO: 705112 - RNA, 22 nt, Human
uguccugggaaaucccuuaggc

SEQ ID NO: 705113 - RNA, 22 nt, Human
ucagggaccaccacucacccag

SEQ ID NO: 705114 - RNA, 21 nt, Human
gcagcaaaugacaacagugag

SEQ ID NO: 705115 - RNA, 22 nt, Human
aggucagcaugaguagaaggua

SEQ ID NO: 705116 - RNA, 22 nt, Human
ccuguguggaaaccgcaugacg

SEQ ID NO: 705117 - RNA, 22 nt, Human
cugaacauucuugaacaucugu

SEQ ID NO: 705118 - RNA, 22 nt, Human
aguucaugugguuuaacuuaau

SEQ ID NO: 705119 - RNA, 22 nt, Human
uacuuuguggagauuaaaaaua

SEQ ID NO: 705120 - RNA, 22 nt, Human
cagauaaaggcuuacuaguagu

SEQ ID NO: 705121 - RNA, 22 nt, Human
ccuugcaggggaacaggcagug

SEQ ID NO: 705122 - RNA, 21 nt, Human
ugauuuccagaaaauuggccc

SEQ ID NO: 705123 - RNA, 22 nt, Human
ggcuugggagcaggcaugugac

SEQ ID NO: 705124 - RNA, 22 nt, Human
cagagacaggcuugcccuccac

SEQ ID NO: 705125 - RNA, 22 nt, Human
uggcucagcgguggcagcagac

SEQ ID NO: 705126 - RNA, 22 nt, Human
ucugagcuuuuauuaucaaccu

SEQ ID NO: 705127 - RNA, 22 nt, Human
ggucagggcucuuccaguggcu

SEQ ID NO: 705128 - RNA, 22 nt, Human
ugccaggagagugcaugcaggg

SEQ ID NO: 705129 - RNA, 19 nt, Human
gccagugugugguacagug

SEQ ID NO: 705130 - RNA, 22 nt, Human
cacauuuaagcagauguggacc

SEQ ID NO: 705131 - RNA, 22 nt, Human
guggcaugacagugaaugggca

SEQ ID NO: 705132 - RNA, 22 nt, Human
gacaggaagucugaaggaggga

SEQ ID NO: 705133 - RNA, 22 nt, Human
aagauagaugucaucagcauau

SEQ ID NO: 705134 - RNA, 22 nt, Human
aaucagaaccuugggucauaac

SEQ ID NO: 705135 - RNA, 22 nt, Human
uuuucauaguaauggugcaugu

SEQ ID NO: 705136 - RNA, 17 nt, Human
agggacagcaguuuagg

SEQ ID NO: 705137 - RNA, 22 nt, Human
ccuggcaguuuugcccaggauu

SEQ ID NO: 705138 - RNA, 22 nt, Human
auauuauaaguuauuucaaguu

SEQ ID NO: 705139 - RNA, 22 nt, Human
cuggguauaggaaacaguuaag

SEQ ID NO: 705140 - RNA, 22 nt, Human
cuccucccugcgauugcucugc

SEQ ID NO: 705141 - RNA, 22 nt, Human
gaggcugguucugaaguacugu

SEQ ID NO: 705142 - RNA, 21 nt, Human
agguuucugugagcagagcag

SEQ ID NO: 705143 - RNA, 22 nt, Human
acauagcuuaaaugagaagaua

SEQ ID NO: 705144 - RNA, 22 nt, Human
cuuuacagccccacuuccgggc

SEQ ID NO: 705145 - RNA, 22 nt, Human
aauucuuggaaacauuacugga

SEQ ID NO: 705146 - RNA, 22 nt, Human
gcagccacucucauuccacgug

SEQ ID NO: 705147 - RNA, 22 nt, Human
uggggcuguccuuagucugaga

SEQ ID NO: 705148 - RNA, 22 nt, Human
gauguguuuccaggauuuguuu

SEQ ID NO: 705149 - RNA, 22 nt, Human
uaaugucaaggugauagauuug

SEQ ID NO: 705150 - RNA, 22 nt, Human
ucacagugcaccccucacaggg

SEQ ID NO: 705151 - RNA, 22 nt, Human
acagguguugacucacaggccc

SEQ ID NO: 705152 - RNA, 22 nt, Human
ccugaacucuaaauagagcagu

SEQ ID NO: 705153 - RNA, 22 nt, Human
aacaguacaacuccacaagacu

SEQ ID NO: 705154 - RNA, 22 nt, Human
cagcagaagugcauuugugauu

SEQ ID NO: 705155 - RNA, 22 nt, Human
aggacaauuagacucuuuguuu

SEQ ID NO: 705156 - RNA, 22 nt, Human
gcucagugcagccuuucuguau

SEQ ID NO: 705157 - RNA, 21 nt, Human
aaagaacaggcagauguucuu

SEQ ID NO: 705158 - RNA, 22 nt, Human
uaccauuucauucuuuccucau

SEQ ID NO: 705159 - RNA, 22 nt, Human
ugaggggagguuggggcacauc

SEQ ID NO: 705160 - RNA, 22 nt, Human
uuccuuguucuacaucccugcc

SEQ ID NO: 705161 - RNA, 22 nt, Human
cugcccugggaguaccuguccu

SEQ ID NO: 705162 - RNA, 19 nt, Human
augcaucugcauugacagg

SEQ ID NO: 705163 - RNA, 22 nt, Human
acucagaguuuuacccagagac

SEQ ID NO: 705164 - RNA, 22 nt, Human
agcacaauauaaagugaacgca

SEQ ID NO: 705165 - RNA, 22 nt, Human
cagagccugccaccuuucuccc

SEQ ID NO: 705166 - RNA, 22 nt, Human
auggcccucuccuuaggucagc

SEQ ID NO: 705167 - RNA, 22 nt, Human
aacuucuugguccugagcuguu

SEQ ID NO: 705168 - RNA, 22 nt, Human
gggcaucugguggagccucagg

SEQ ID NO: 705169 - RNA, 22 nt, Human
uccuggugcuuguauuugaagu

SEQ ID NO: 705170 - RNA, 22 nt, Human
auggauggaacucugcuguggu

SEQ ID NO: 705171 - RNA, 22 nt, Human
acaggcugacuuccugccaugu

SEQ ID NO: 705172 - RNA, 19 nt, Human
augauggucccauucaccu

SEQ ID NO: 705173 - RNA, 22 nt, Human
uguauaugugcacaugugcuuc

SEQ ID NO: 705174 - RNA, 18 nt, Human
cacaauagacaccgauaa

SEQ ID NO: 705175 - RNA, 22 nt, Human
aggagccagauucucucacuuu

SEQ ID NO: 705176 - RNA, 22 nt, Human
cucaggcuccagacuuccgucc

SEQ ID NO: 705177 - RNA, 23 nt, Human
ggcuggcccggggcugcuccuga

SEQ ID NO: 705178 - RNA, 22 nt, Human
uaaccucuauuuuuauaaaagu

SEQ ID NO: 705179 - RNA, 22 nt, Human
ccaagagguaauacgagauauc

SEQ ID NO: 705180 - RNA, 22 nt, Human
gucuggacaggacuauuucuaa

SEQ ID NO: 705181 - RNA, 22 nt, Human
ggucccagguugacagggagac

SEQ ID NO: 705182 - RNA, 22 nt, Human
uggagucaucuuaaucuaggca

SEQ ID NO: 705183 - RNA, 21 nt, Human
ucucaucuccugaccugugcc

SEQ ID NO: 705184 - RNA, 22 nt, Human
acuugguggaacguguauuuua

SEQ ID NO: 705185 - RNA, 22 nt, Human
ucacuuuacuuuguuaaucugg

SEQ ID NO: 705186 - RNA, 22 nt, Human
uccucacagcugguucauucag

SEQ ID NO: 705187 - RNA, 22 nt, Human
acccugagucagacagccugac

SEQ ID NO: 705188 - RNA, 22 nt, Human
uuaaauagucaaaucaguggca

SEQ ID NO: 705189 - RNA, 22 nt, Human
aguucuagaagacuuuuccauu

SEQ ID NO: 705190 - RNA, 22 nt, Human
aguaugaagaauacauagauga

SEQ ID NO: 705191 - RNA, 22 nt, Human
cucagcagcagggaagagguca

SEQ ID NO: 705192 - RNA, 22 nt, Human
ucuguggauuuuaguguucaug

SEQ ID NO: 705193 - RNA, 19 nt, Human
cuuauuagagugagagcuu

SEQ ID NO: 705194 - RNA, 22 nt, Human
uugcgcgcggcuaggucucggu

SEQ ID NO: 705195 - RNA, 22 nt, Human
acaugcuuugauguauuuugca

SEQ ID NO: 705196 - RNA, 22 nt, Human
cccaggcacacugaagugacau

SEQ ID NO: 705197 - RNA, 22 nt, Human
cacccagagccugagagggaua

SEQ ID NO: 705198 - RNA, 22 nt, Human
ugccaucuuccuuccucugcac

SEQ ID NO: 705199 - RNA, 22 nt, Human
accagagaggcugcagugugug

SEQ ID NO: 705200 - RNA, 22 nt, Human
aguuggcgggacauguggaaag

SEQ ID NO: 705201 - RNA, 20 nt, Human
aggcuucaaccauacaccuu

SEQ ID NO: 705202 - RNA, 22 nt, Human
cugagcagaccauggcagaggu

SEQ ID NO: 705203 - RNA, 22 nt, Human
ccaggcacugcucgaggugcua

SEQ ID NO: 705204 - RNA, 22 nt, Human
cugggagcaagucaggaaaggu

SEQ ID NO: 705205 - RNA, 22 nt, Human
uggcuucucuguuuuaguauuu

SEQ ID NO: 705206 - RNA, 22 nt, Human
aaauugcauucaggaugcagga

SEQ ID NO: 705207 - RNA, 22 nt, Human
aagcgccacgagaagcuggacc

SEQ ID NO: 705208 - RNA, 22 nt, Human
gugcuuuaguucuugcaacugg

SEQ ID NO: 705209 - RNA, 18 nt, Human
gggcugugagaugggaag

SEQ ID NO: 705210 - RNA, 22 nt, Human
gucacacagagcccugugcuca

SEQ ID NO: 705211 - RNA, 22 nt, Human
uacuuuaauauaugugaaguuc

SEQ ID NO: 705212 - RNA, 22 nt, Human
cucugggccaccgcugguguau

SEQ ID NO: 705213 - RNA, 22 nt, Human
uauuacauccacuuuuauugca

SEQ ID NO: 705214 - RNA, 22 nt, Human
aacuagaacgucuaguugcugg

SEQ ID NO: 705215 - RNA, 22 nt, Human
gucacaugccagugcacacagg

SEQ ID NO: 705216 - RNA, 22 nt, Human
ugaaauguuaaacaaguggcuc

SEQ ID NO: 705217 - RNA, 22 nt, Human
augugcuguaauccauugaagg

SEQ ID NO: 705218 - RNA, 22 nt, Human
acaacaaaaucacuagucuucc

SEQ ID NO: 705219 - RNA, 22 nt, Human
augaagucucuuuuucaugaga

SEQ ID NO: 705220 - RNA, 22 nt, Human
gcccagcacuccucucugacau

SEQ ID NO: 705221 - RNA, 22 nt, Human
uucuucaggauacgucauccag

SEQ ID NO: 705222 - RNA, 22 nt, Human
ggcuccugauuugagggggcug

SEQ ID NO: 705223 - RNA, 22 nt, Human
aauaauguacauacauauuucg

SEQ ID NO: 705224 - RNA, 22 nt, Human
agauguaaacucucaugucauu

SEQ ID NO: 705225 - RNA, 22 nt, Human
gaggcacauauauacagagccc

SEQ ID NO: 705226 - RNA, 20 nt, Human
acagaugaggaaaaugaagu

SEQ ID NO: 705227 - RNA, 22 nt, Human
guuuccuuuuggaauuagagcu

SEQ ID NO: 705228 - RNA, 20 nt, Human
cuuccacacaagaagcacag

SEQ ID NO: 705229 - RNA, 23 nt, Human
ucaggauauugugugccaaggug

SEQ ID NO: 705230 - RNA, 22 nt, Human
uagcucaucuaggcuaccacag

SEQ ID NO: 705231 - RNA, 22 nt, Human
ugcagggauuagaggccgggga

SEQ ID NO: 705232 - RNA, 17 nt, Human
aaacugaaaaauucacu

SEQ ID NO: 705233 - RNA, 22 nt, Human
acuaaugauuauugucauugug

SEQ ID NO: 705234 - RNA, 22 nt, Human
uggccucugcacugggcucccc

SEQ ID NO: 705235 - RNA, 22 nt, Human
auaguggugagcugcauuuaug

SEQ ID NO: 705236 - RNA, 22 nt, Human
uccagggucagaagucacauac

SEQ ID NO: 705237 - RNA, 22 nt, Human
uuccuaacaaacuucagugaau

SEQ ID NO: 705238 - RNA, 22 nt, Human
ugccuggcauguuauagacaca

SEQ ID NO: 705239 - RNA, 22 nt, Human
uugaaaacauuuauauuagaau

SEQ ID NO: 705240 - RNA, 22 nt, Human
ucuuuguaacugucuauugaga

SEQ ID NO: 705241 - RNA, 22 nt, Human
ucauuuauuugacuuuggagug

SEQ ID NO: 705242 - RNA, 19 nt, Human
uagauacugaugaacucca

SEQ ID NO: 705243 - RNA, 22 nt, Human
acugggcagggaaggagaccga

SEQ ID NO: 705244 - RNA, 22 nt, Human
uuaaauuuuagaaacagacucu

SEQ ID NO: 705245 - RNA, 22 nt, Human
acucaggaauggggcugggacu

SEQ ID NO: 705246 - RNA, 22 nt, Human
cugcuuuagagcugagccucag

SEQ ID NO: 705247 - RNA, 22 nt, Human
ucucagaaucaggaccuacuuc

SEQ ID NO: 705248 - RNA, 22 nt, Human
ccucugggcagguagcagcagc

SEQ ID NO: 705249 - RNA, 22 nt, Human
caggugucuaauucucaccccc

SEQ ID NO: 705250 - RNA, 22 nt, Human
uuauucuguugcuuuuacagua

SEQ ID NO: 705251 - RNA, 22 nt, Human
aggaucagggugguggaaguca

SEQ ID NO: 705252 - RNA, 22 nt, Human
cuccaggaguggccuggacacc

SEQ ID NO: 705253 - RNA, 22 nt, Human
ggggaggaccuuuccaaggcuu

SEQ ID NO: 705254 - RNA, 22 nt, Human
gcuuaaaagccacuuagucuau

SEQ ID NO: 705255 - RNA, 22 nt, Human
caguaacaugaagagacaugga

SEQ ID NO: 705256 - RNA, 22 nt, Human
ugggggugcugagaagacagga

SEQ ID NO: 705257 - RNA, 22 nt, Human
auguuuaaggaacugguuugcu

SEQ ID NO: 705258 - RNA, 22 nt, Human
uuggcauucaugggacaacaaa

SEQ ID NO: 705259 - RNA, 20 nt, Human
caccucugaaaguuuccagc

SEQ ID NO: 705260 - RNA, 22 nt, Human
uccuuggcuuucuggagcuucu

SEQ ID NO: 705261 - RNA, 22 nt, Human
ucaggagcucaggcugauggaa

SEQ ID NO: 705262 - RNA, 17 nt, Human
aagauuucauuagcuga

SEQ ID NO: 705263 - RNA, 22 nt, Human
gacuccaggugcaggaggagcc

SEQ ID NO: 705264 - RNA, 22 nt, Human
cucuguugucaguggaagcagc

SEQ ID NO: 705265 - RNA, 22 nt, Human
ugaacucuaauggugcuuuucu

SEQ ID NO: 705266 - RNA, 22 nt, Human
caguccugggugcagcaggaaa

SEQ ID NO: 705267 - RNA, 22 nt, Human
gcuggaaggcuaggcucaguug

SEQ ID NO: 705268 - RNA, 22 nt, Human
uacaucauuuuggagaugagca

SEQ ID NO: 705269 - RNA, 22 nt, Human
cagcagcuaaggcauguuccug

SEQ ID NO: 705270 - RNA, 17 nt, Human
ccagaucccaguccuua

SEQ ID NO: 705271 - RNA, 22 nt, Human
aggcugcugccuuggagagugu

SEQ ID NO: 705272 - RNA, 22 nt, Human
cugaggagaccaucaacuaauu

SEQ ID NO: 705273 - RNA, 21 nt, Human
cuugggcuuguagauggugga

SEQ ID NO: 705274 - RNA, 22 nt, Human
agcacagguaauacagaguaac

SEQ ID NO: 705275 - RNA, 22 nt, Human
ugcccaggaucuggcgaugcuc

SEQ ID NO: 705276 - RNA, 22 nt, Human
ugugggcaggagcacaagucag

SEQ ID NO: 705277 - RNA, 22 nt, Human
uuucaguuuccagcuuugucau

SEQ ID NO: 705278 - RNA, 22 nt, Human
gugugccucgccaagcugucgg

SEQ ID NO: 705279 - RNA, 22 nt, Human
aauccauagaauaaaauugcag

SEQ ID NO: 705280 - RNA, 22 nt, Human
cuggacagugcugcuugagaug

SEQ ID NO: 705281 - RNA, 22 nt, Human
aacauaucuacggauacgauua

SEQ ID NO: 705282 - RNA, 22 nt, Human
uuugacauuggcuuauucuguu

SEQ ID NO: 705283 - RNA, 22 nt, Human
gcagcuuucuuuuugcaugucu

SEQ ID NO: 705284 - RNA, 22 nt, Human
auacuuuaacguggcgaaccuu

SEQ ID NO: 705285 - RNA, 22 nt, Human
cuggggcugcggacgggagccc

SEQ ID NO: 705286 - RNA, 22 nt, Human
cucuucuuggcccccaugaggg

SEQ ID NO: 705287 - RNA, 22 nt, Human
aguagaaaguugcaggaggaau

SEQ ID NO: 705288 - RNA, 22 nt, Human
auucuuucaaggaauaguuauu

SEQ ID NO: 705289 - RNA, 22 nt, Human
gcuucucuuguccaagggcagg

SEQ ID NO: 705290 - RNA, 22 nt, Human
ucaggcagaguuaauuugcucc

SEQ ID NO: 705291 - RNA, 22 nt, Human
ggccacacucugguagagguga

SEQ ID NO: 705292 - RNA, 22 nt, Human
cugaagucagauggcacaaggu

SEQ ID NO: 705293 - RNA, 19 nt, Human
guaagggcuaauggacuau

SEQ ID NO: 705294 - RNA, 22 nt, Human
gucugcccuuggcucagccaua

SEQ ID NO: 705295 - RNA, 22 nt, Human
uaacagaaacagauaaguguaa

SEQ ID NO: 705296 - RNA, 22 nt, Human
uucaguguauauuuuuugagua

SEQ ID NO: 705297 - RNA, 18 nt, Human
gggaggccccagcaggag

SEQ ID NO: 705298 - RNA, 22 nt, Human
ggaaaggagauauuggagagug

SEQ ID NO: 705299 - RNA, 18 nt, Human
agaagccacgaggagucc

SEQ ID NO: 705300 - RNA, 20 nt, Human
gcuguggcaagugcucacug

SEQ ID NO: 705301 - RNA, 23 nt, Human
ucauaaauauuagcacaguagga

SEQ ID NO: 705302 - RNA, 22 nt, Human
guccaggcucaaaagguuguua

SEQ ID NO: 705303 - RNA, 22 nt, Human
gcagcccugcaggcagcuccag

SEQ ID NO: 705304 - RNA, 22 nt, Human
cauggaggacccucagggagcu

SEQ ID NO: 705305 - RNA, 22 nt, Human
ccugggauuugcgccagaccuu

SEQ ID NO: 705306 - RNA, 22 nt, Human
uccccaggaaucaggugguugc

SEQ ID NO: 705307 - RNA, 22 nt, Human
ugauuccuaggcacucuucucc

SEQ ID NO: 705308 - RNA, 22 nt, Human
cuuccagcugauuacaggcuau

SEQ ID NO: 705309 - RNA, 22 nt, Human
uacaugucuacaugcauuuuug

SEQ ID NO: 705310 - RNA, 22 nt, Human
ucaggggcugugcauuucccag

SEQ ID NO: 705311 - RNA, 22 nt, Human
cagcaggcuguggaaauccugg

SEQ ID NO: 705312 - RNA, 22 nt, Human
ugccacagaggugaagcccacu

SEQ ID NO: 705313 - RNA, 22 nt, Human
agugaaauggaugcugcuacug

SEQ ID NO: 705314 - RNA, 22 nt, Human
ucccagaguucaaugggaaggu

SEQ ID NO: 705315 - RNA, 22 nt, Human
uucaaaacagcuagauauugga

SEQ ID NO: 705316 - RNA, 22 nt, Human
gcgguggggaaaggaggugcug

SEQ ID NO: 705317 - RNA, 22 nt, Human
acacuuuacucuuacaccauug

SEQ ID NO: 705318 - RNA, 22 nt, Human
cagaagacagcuguuucacucg

SEQ ID NO: 705319 - RNA, 22 nt, Human
ccccaaagcugaguucccgccu

SEQ ID NO: 705320 - RNA, 22 nt, Human
aggcaggcaaccaccugggaag

SEQ ID NO: 705321 - RNA, 22 nt, Human
uugcugaugguauuaugcuagu

SEQ ID NO: 705322 - RNA, 21 nt, Human
cauuucuaagccuggcuauag

SEQ ID NO: 705323 - RNA, 22 nt, Human
uggcuggucacaugguaggucu

SEQ ID NO: 705324 - RNA, 22 nt, Human
gcagaagggaauaaggagcuuu

SEQ ID NO: 705325 - RNA, 22 nt, Human
uauuccagaugaaaucauucag

SEQ ID NO: 705326 - RNA, 22 nt, Human
gccaggcagagccccgugcagc

SEQ ID NO: 705327 - RNA, 22 nt, Human
cuggaguuuguggcuugcucaa

SEQ ID NO: 705328 - RNA, 22 nt, Human
aggaacuagugcaacaggagcg

SEQ ID NO: 705329 - RNA, 22 nt, Human
ucaaugucugucuaucuauuua

SEQ ID NO: 705330 - RNA, 22 nt, Human
auguagaaaguucauagaugcg

SEQ ID NO: 705331 - RNA, 22 nt, Human
aaaggaguuacucauaaagcuu

SEQ ID NO: 705332 - RNA, 22 nt, Human
auuacaugagagaauguaaaua

SEQ ID NO: 705333 - RNA, 22 nt, Human
gggagcuggcggauuccccagg

SEQ ID NO: 705334 - RNA, 22 nt, Human
ugaggcuggaugggaugccucc

SEQ ID NO: 705335 - RNA, 22 nt, Human
aauagcuuuuacuccuccgagg

SEQ ID NO: 705336 - RNA, 22 nt, Human
uaacagcaguccucuucucaug

SEQ ID NO: 705337 - RNA, 22 nt, Human
gaguuaguauguucuguaagua

SEQ ID NO: 705338 - RNA, 18 nt, Human
uccagcgugcuccagggc

SEQ ID NO: 705339 - RNA, 22 nt, Human
uaaggcauucucaugcugugaa

SEQ ID NO: 705340 - RNA, 22 nt, Human
acaguuuaugguguuuuauaua

SEQ ID NO: 705341 - RNA, 22 nt, Human
cuguccuggagggcauaggacg

SEQ ID NO: 705342 - RNA, 22 nt, Human
augucuguauguggagaggggu

SEQ ID NO: 705343 - RNA, 22 nt, Human
cacaugaucacuucuugaaaau

SEQ ID NO: 705344 - RNA, 22 nt, Human
acucugcuggcugcagggcagc

SEQ ID NO: 705345 - RNA, 22 nt, Human
uauaagaaauugccaaccuguu

SEQ ID NO: 705346 - RNA, 22 nt, Human
agauggaguggagaugaguaaa

SEQ ID NO: 705347 - RNA, 22 nt, Human
gccacagggauuguuuugugag

SEQ ID NO: 705348 - RNA, 22 nt, Human
uacaugguuggcccauucuucu

SEQ ID NO: 705349 - RNA, 22 nt, Human
augcugggaaguccuaaccaca

SEQ ID NO: 705350 - RNA, 22 nt, Human
agugacacggagagacagcaug

SEQ ID NO: 705351 - RNA, 22 nt, Human
gagaaggaaguugagccagcau

SEQ ID NO: 705352 - RNA, 22 nt, Human
ucauccauauagaaagaugauu

SEQ ID NO: 705353 - RNA, 20 nt, Human
acacacuuugaucuugagcc

SEQ ID NO: 705354 - RNA, 19 nt, Human
ggagaagcaucuagaaaua

SEQ ID NO: 705355 - RNA, 21 nt, Human
uuucugaaggcaacaucuauc

SEQ ID NO: 705356 - RNA, 22 nt, Human
aaugaacaacacugaaggaaga

SEQ ID NO: 705357 - RNA, 22 nt, Human
uauguuaaauguuugauguuua

SEQ ID NO: 705358 - RNA, 22 nt, Human
agagacugcaaaucauaagaau

SEQ ID NO: 705359 - RNA, 22 nt, Human
agucugggcauuuaggauguug

SEQ ID NO: 705360 - RNA, 22 nt, Human
uuugugugcaacgcauggaguc

SEQ ID NO: 705361 - RNA, 22 nt, Human
uccagcagcccgaaggcccauc

SEQ ID NO: 705362 - RNA, 21 nt, Human
ugaagggcagccucaggcucc

SEQ ID NO: 705363 - RNA, 22 nt, Human
caccuguccacgcagucugccu

SEQ ID NO: 705364 - RNA, 22 nt, Human
uggcaccagggaacaagcauuu

SEQ ID NO: 705365 - RNA, 22 nt, Human
agcagcagccguagccuuauua

SEQ ID NO: 705366 - RNA, 22 nt, Human
agaucacuuugaugcuaccugg

SEQ ID NO: 705367 - RNA, 22 nt, Human
guccacucucugccgugccugu

SEQ ID NO: 705368 - RNA, 22 nt, Human
cacccugcuacaaagccuccug

SEQ ID NO: 705369 - RNA, 22 nt, Human
agcuuuauauaaaagaguacau

SEQ ID NO: 705370 - RNA, 22 nt, Human
uggucucugugcucgggcaugg

SEQ ID NO: 705371 - RNA, 21 nt, Human
ggguagcagaggaggccgugg

SEQ ID NO: 705372 - RNA, 19 nt, Human
auuguacauugaguuuggc

SEQ ID NO: 705373 - RNA, 22 nt, Human
guucugccuguggcuucugugg

SEQ ID NO: 705374 - RNA, 22 nt, Human
cugccacaagcuggcccugugu

SEQ ID NO: 705375 - RNA, 22 nt, Human
gggcagguacuggguggugagc

SEQ ID NO: 705376 - RNA, 19 nt, Human
auucuuugguguccauuuc

SEQ ID NO: 705377 - RNA, 22 nt, Human
uccaggcuuuggggcaggagcg

SEQ ID NO: 705378 - RNA, 22 nt, Human
aaaaagacuuccaacucaggag

SEQ ID NO: 705379 - RNA, 22 nt, Human
uuucuagcaagaaagaggugga

SEQ ID NO: 705380 - RNA, 22 nt, Human
cgggggaguugaggcacauggg

SEQ ID NO: 705381 - RNA, 19 nt, Human
acuucaaaucuuagagaaa

SEQ ID NO: 705382 - RNA, 22 nt, Human
agguuucuccuuuaaagcaugg

SEQ ID NO: 705383 - RNA, 22 nt, Human
uuggcuguauguacaucuguua

SEQ ID NO: 705384 - RNA, 22 nt, Human
uuagcaagauaacaguaauuuu

SEQ ID NO: 705385 - RNA, 22 nt, Human
aauugaacuugaucuuuagcua

SEQ ID NO: 705386 - RNA, 22 nt, Human
agacccugcauuuuccaggguu

SEQ ID NO: 705387 - RNA, 19 nt, Human
uuuauucaccuuuaccuug

SEQ ID NO: 705388 - RNA, 22 nt, Human
acccuggggguggccagugcca

SEQ ID NO: 705389 - RNA, 22 nt, Human
acagggaagcucaggggcucug

SEQ ID NO: 705390 - RNA, 22 nt, Human
aaagcauuacuagacuggauuu

SEQ ID NO: 705391 - RNA, 22 nt, Human
uccaggguugugggcuucagca

SEQ ID NO: 705392 - RNA, 22 nt, Human
uucugucucccugauguagagc

SEQ ID NO: 705393 - RNA, 22 nt, Human
cugugaguaaugaccugucuug

SEQ ID NO: 705394 - RNA, 22 nt, Human
agcucaagaguaguucgagggg

SEQ ID NO: 705395 - RNA, 22 nt, Human
agcaucugugauauuuuguuau

SEQ ID NO: 705396 - RNA, 18 nt, Human
ggaaggugaugugaaaag

SEQ ID NO: 705397 - RNA, 22 nt, Human
agcuggccuccgggugccuggg

SEQ ID NO: 705398 - RNA, 22 nt, Human
gaaacugaguaggcuagagcac

SEQ ID NO: 705399 - RNA, 22 nt, Human
uguuacuuggugucucuggcug

SEQ ID NO: 705400 - RNA, 22 nt, Human
acaucccuugcucggggccccu

SEQ ID NO: 705401 - RNA, 22 nt, Human
caggugcccaggggacaguggc

SEQ ID NO: 705402 - RNA, 23 nt, Human
uccaggcaugagcucuggaugga

SEQ ID NO: 705403 - RNA, 16 nt, Human
uccuggccccuaugga

SEQ ID NO: 705404 - RNA, 22 nt, Human
gcacagaggaagcacagacucu

SEQ ID NO: 705405 - RNA, 19 nt, Human
agacauaaagaguuugcaa

SEQ ID NO: 705406 - RNA, 23 nt, Human
uugaagucucaguuuucucauag

SEQ ID NO: 705407 - RNA, 22 nt, Human
cagauuucagcucauauauuau

SEQ ID NO: 705408 - RNA, 22 nt, Human
ucagaacauuuaaaaagugguu

SEQ ID NO: 705409 - RNA, 22 nt, Human
cagggcuugaucugcauccugc

SEQ ID NO: 705410 - RNA, 22 nt, Human
auggaacugagcuugccaaacu

SEQ ID NO: 705411 - RNA, 22 nt, Human
aaaggagaaaacauacaggacu

SEQ ID NO: 705412 - RNA, 22 nt, Human
ugaauuguggcuuuuuccaauu

SEQ ID NO: 705413 - RNA, 22 nt, Human
uccagcccaggcuggaguguag

SEQ ID NO: 705414 - RNA, 22 nt, Human
agcucugcuacucuguggggug

SEQ ID NO: 705415 - RNA, 22 nt, Human
uuuauuuaaagucguguguuaa

SEQ ID NO: 705416 - RNA, 22 nt, Human
cugcugggucccccugcugauu

SEQ ID NO: 705417 - RNA, 21 nt, Human
accugugaauagccacugcac

SEQ ID NO: 705418 - RNA, 22 nt, Human
ugugucucuccuggaagcacgu

SEQ ID NO: 705419 - RNA, 22 nt, Human
cagcucaggaaggaaggccggc

SEQ ID NO: 705420 - RNA, 22 nt, Human
uucuuugaauagauguucccag

SEQ ID NO: 705421 - RNA, 22 nt, Human
auaugcauaugucaaaacuuau

SEQ ID NO: 705422 - RNA, 22 nt, Human
ccacagcaggacuggagccgcc

SEQ ID NO: 705423 - RNA, 22 nt, Human
agccaggacguugcucagcucc

SEQ ID NO: 705424 - RNA, 22 nt, Human
guaaccuggaaguuuagggaag

SEQ ID NO: 705425 - RNA, 22 nt, Human
gugcuucuccguucugcagcac

SEQ ID NO: 705426 - RNA, 19 nt, Human
agcuuuggacuugcauuuc

SEQ ID NO: 705427 - RNA, 22 nt, Human
ugaaucugauuucccuggaggc

SEQ ID NO: 705428 - RNA, 22 nt, Human
guuucauucggcagcucauaag

SEQ ID NO: 705429 - RNA, 22 nt, Human
agauauguuacugcaucauggg

SEQ ID NO: 705430 - RNA, 22 nt, Human
gcaagaguuuuuucucucuuga

SEQ ID NO: 705431 - RNA, 23 nt, Human
cccugagcugguccaggcucaac

SEQ ID NO: 705432 - RNA, 23 nt, Human
aaaugacuaaauguucuuauaga

SEQ ID NO: 705433 - RNA, 22 nt, Human
ccaggaagggcucuuuaaagac

SEQ ID NO: 705434 - RNA, 22 nt, Human
ucacacaugaguaaauacaggg

SEQ ID NO: 705435 - RNA, 22 nt, Human
aaaaugaagcaaaggcauucag

SEQ ID NO: 705436 - RNA, 22 nt, Human
acagcagccuuguugguuucga

SEQ ID NO: 705437 - RNA, 22 nt, Human
acugaauagcccuucugucucc

SEQ ID NO: 705438 - RNA, 22 nt, Human
ccugucuggaacauggccuguu

SEQ ID NO: 705439 - RNA, 22 nt, Human
uggcucuuucugucugggaucc

SEQ ID NO: 705440 - RNA, 22 nt, Human
ggagauggcucugcaaggucua

SEQ ID NO: 705441 - RNA, 22 nt, Human
ugacuccaaacagaaaacgaau

SEQ ID NO: 705442 - RNA, 22 nt, Human
uaaauucccaacucugcucuuc

SEQ ID NO: 705443 - RNA, 22 nt, Human
ugucugggagggacagggcuac

SEQ ID NO: 705444 - RNA, 22 nt, Human
auuugucauguauguaaaguug

SEQ ID NO: 705445 - RNA, 22 nt, Human
augcaugcagggaagacaguag

SEQ ID NO: 705446 - RNA, 22 nt, Human
agauaacucauuuuguauaucc

SEQ ID NO: 705447 - RNA, 22 nt, Human
cuuucacagcacaagccugccu

SEQ ID NO: 705448 - RNA, 22 nt, Human
auguuuauuuugcagaguaggg

SEQ ID NO: 705449 - RNA, 22 nt, Human
gugagcuguuuuggacccaucu

SEQ ID NO: 705450 - RNA, 22 nt, Human
cucucuagaggcccaccuugag

SEQ ID NO: 705451 - RNA, 22 nt, Human
uauguacaaucagcaguucaua

SEQ ID NO: 705452 - RNA, 19 nt, Human
agagaaggauccuaugguu

SEQ ID NO: 705453 - RNA, 22 nt, Human
guggcagucucaucuguggcuc

SEQ ID NO: 705454 - RNA, 22 nt, Human
cucuggaguaagagcuaugaaa

SEQ ID NO: 705455 - RNA, 22 nt, Human
guuuagaauggcaaaauuaagu

SEQ ID NO: 705456 - RNA, 18 nt, Human
ucucucugauaacauuuu

SEQ ID NO: 705457 - RNA, 23 nt, Human
cagggcugggcuugguguuaggc

SEQ ID NO: 705458 - RNA, 22 nt, Human
uuuacagauucuggguauuagg

SEQ ID NO: 705459 - RNA, 22 nt, Human
gacaugcaugaaugcaggucuc

SEQ ID NO: 705460 - RNA, 22 nt, Human
uucuguccacugcuggggccuc

SEQ ID NO: 705461 - RNA, 22 nt, Human
cuuacagugacccugcagauuu

SEQ ID NO: 705462 - RNA, 22 nt, Human
uugaaagaggcaaaguuugauc

SEQ ID NO: 705463 - RNA, 22 nt, Human
aggagcugacuuguaaagcauu

SEQ ID NO: 705464 - RNA, 22 nt, Human
cuccccacauuucucccugucu

SEQ ID NO: 705465 - RNA, 22 nt, Human
uaacagaagaugaaacuucuuu

SEQ ID NO: 705466 - RNA, 22 nt, Human
augagggcagcuauguaagugu

SEQ ID NO: 705467 - RNA, 22 nt, Human
agguauuauuagcaucucuauu

SEQ ID NO: 705468 - RNA, 22 nt, Human
gaaugcugagucuuaucucuua

SEQ ID NO: 705469 - RNA, 22 nt, Human
aacagcuuuguauacaguaacu

SEQ ID NO: 705470 - RNA, 22 nt, Human
gccaccccaaccucccuaaguu

SEQ ID NO: 705471 - RNA, 22 nt, Human
ugggaaaguaauugucauccuu

SEQ ID NO: 705472 - RNA, 22 nt, Human
gaacuuuugggaagccguguga

SEQ ID NO: 705473 - RNA, 22 nt, Human
cugccugccuuggccuccagga

SEQ ID NO: 705474 - RNA, 22 nt, Human
cccagggaaggcagauggagga

SEQ ID NO: 705475 - RNA, 22 nt, Human
ggucuggaagcgucccaaaggu

SEQ ID NO: 705476 - RNA, 22 nt, Human
aacuuucuuugcaucuaaguuu

SEQ ID NO: 705477 - RNA, 22 nt, Human
ugggaaggaacugccuuuagcu

SEQ ID NO: 705478 - RNA, 22 nt, Human
ccacugccgugggccuugggga

SEQ ID NO: 705479 - RNA, 22 nt, Human
ucugagcuguggccauucuucc

SEQ ID NO: 705480 - RNA, 22 nt, Human
aaguuuauguucuuugaaggca

SEQ ID NO: 705481 - RNA, 22 nt, Human
ggccagcccagugguccucucu

SEQ ID NO: 705482 - RNA, 22 nt, Human
uugauuaaucccaugugaguag

SEQ ID NO: 705483 - RNA, 22 nt, Human
acugacucuuguuaacuucagc

SEQ ID NO: 705484 - RNA, 22 nt, Human
gugucagauguccagggcagca

SEQ ID NO: 705485 - RNA, 22 nt, Human
aaacucuaguuaugaaguuugu

SEQ ID NO: 705486 - RNA, 22 nt, Human
cggcuggagcuuugaaccugau

SEQ ID NO: 705487 - RNA, 22 nt, Human
cuccugcaugcucacauaugcc

SEQ ID NO: 705488 - RNA, 22 nt, Human
gccucagggauaggaugagcau

SEQ ID NO: 705489 - RNA, 22 nt, Human
uuuuaaguuggauugcuaagua

SEQ ID NO: 705490 - RNA, 22 nt, Human
ucagagccaaucauggugcauu

SEQ ID NO: 705491 - RNA, 22 nt, Human
cuccaaggauucuggacccuug

SEQ ID NO: 705492 - RNA, 19 nt, Human
cagagcagugguuccugaa

SEQ ID NO: 705493 - RNA, 22 nt, Human
ugaaggccacuuccugugagcu

SEQ ID NO: 705494 - RNA, 22 nt, Human
cacagcugucagcugaccuagg

SEQ ID NO: 705495 - RNA, 22 nt, Human
agaggggaaguaaugaaugaua

SEQ ID NO: 705496 - RNA, 22 nt, Human
acugccugccuuccagguacug

SEQ ID NO: 705497 - RNA, 22 nt, Human
uaguguaaugacauuuagacga

SEQ ID NO: 705498 - RNA, 22 nt, Human
agaagagaacugccaaacacuu

SEQ ID NO: 705499 - RNA, 17 nt, Human
ugcuuggcuucuuuagg

SEQ ID NO: 705500 - RNA, 22 nt, Human
ucuacagacagagcagguggga

SEQ ID NO: 705501 - RNA, 22 nt, Human
uuugaaagucaaccuuccaguu

SEQ ID NO: 705502 - RNA, 22 nt, Human
cugggcacacagugacucugca

SEQ ID NO: 705503 - RNA, 22 nt, Human
cucaaguccauagaaucaggaa

SEQ ID NO: 705504 - RNA, 22 nt, Human
ugcagaggcauuuauugaugua

SEQ ID NO: 705505 - RNA, 22 nt, Human
augacacaauuuuagagcugaa

SEQ ID NO: 705506 - RNA, 22 nt, Human
auccaggcauucugacuucaag

SEQ ID NO: 705507 - RNA, 22 nt, Human
cagaucaagcuguauggucaga

SEQ ID NO: 705508 - RNA, 22 nt, Human
uaggacaguagcuggugcacag

SEQ ID NO: 705509 - RNA, 22 nt, Human
acugugcuugccaaaccauuga

SEQ ID NO: 705510 - RNA, 22 nt, Human
auauguguguauuucuuacuag

SEQ ID NO: 705511 - RNA, 22 nt, Human
agagauuucuacugcacucuuu

SEQ ID NO: 705512 - RNA, 22 nt, Human
auucuacaacccaauaauaauu

SEQ ID NO: 705513 - RNA, 22 nt, Human
ggccugucucacccccgggugc

SEQ ID NO: 705514 - RNA, 22 nt, Human
cauugcacuuuggguccaggac

SEQ ID NO: 705515 - RNA, 22 nt, Human
uucugcuuagagggcauuugca

SEQ ID NO: 705516 - RNA, 22 nt, Human
cuccucagucaggucuaggguc

SEQ ID NO: 705517 - RNA, 22 nt, Human
uggcuaagauuuaaauguuugc

SEQ ID NO: 705518 - RNA, 22 nt, Human
cucucugcaaguuuugaaauag

SEQ ID NO: 705519 - RNA, 22 nt, Human
cacaggaaaauaaaagaucuaa

SEQ ID NO: 705520 - RNA, 22 nt, Human
gcaguccucguaaaggucgaag

SEQ ID NO: 705521 - RNA, 22 nt, Human
caaaccacacucagcguaucgg

SEQ ID NO: 705522 - RNA, 22 nt, Human
uugugggaucucccuguugcuc

SEQ ID NO: 705523 - RNA, 22 nt, Human
uauuaugagguauuuggacuuu

SEQ ID NO: 705524 - RNA, 22 nt, Human
cucuguugagcauuuuuccccu

SEQ ID NO: 705525 - RNA, 22 nt, Human
uuugaugaaagcuacuauuuac

SEQ ID NO: 705526 - RNA, 22 nt, Human
gaggguggagcuccagaaucug

SEQ ID NO: 705527 - RNA, 20 nt, Human
uuuaucugugggaguggaga

SEQ ID NO: 705528 - RNA, 22 nt, Human
aagccaauguugccuggguuuc

SEQ ID NO: 705529 - RNA, 22 nt, Human
agguucauucccaaauuuggag

SEQ ID NO: 705530 - RNA, 22 nt, Human
auacagugaauacuuacagugu

SEQ ID NO: 705531 - RNA, 22 nt, Human
auacacuggccuuugcagagcc

SEQ ID NO: 705532 - RNA, 22 nt, Human
ggaauucuguagcucuuccucu

SEQ ID NO: 705533 - RNA, 22 nt, Human
uucaaagugugaccugacaagc

SEQ ID NO: 705534 - RNA, 22 nt, Human
uccaagaguauaguuuauuggc

SEQ ID NO: 705535 - RNA, 22 nt, Human
ucucucccaaaucugcagauag

SEQ ID NO: 705536 - RNA, 22 nt, Human
agcaacauauaucaaugccuga

SEQ ID NO: 705537 - RNA, 22 nt, Human
cuucucaguugcaagugucaga

SEQ ID NO: 705538 - RNA, 22 nt, Human
cuauuuucccauaugguugaca

SEQ ID NO: 705539 - RNA, 22 nt, Human
uggcacuguagccacuacugcc

SEQ ID NO: 705540 - RNA, 22 nt, Human
gugaacuauuggguaucauaaa

SEQ ID NO: 705541 - RNA, 21 nt, Human
guggagagugauuuugaugca

SEQ ID NO: 705542 - RNA, 22 nt, Human
cuuuacaaacuauaaagugcgg

SEQ ID NO: 705543 - RNA, 22 nt, Human
uauguucuaaccuugucuuucc

SEQ ID NO: 705544 - RNA, 23 nt, Human
accuggcugcucaaccugcaggg

SEQ ID NO: 705545 - RNA, 22 nt, Human
ugucuucaaauauugaaauccu

SEQ ID NO: 705546 - RNA, 22 nt, Human
ucagagcacuuggcucauggca

SEQ ID NO: 705547 - RNA, 22 nt, Human
gcaggcuccaggccggccccuu

SEQ ID NO: 705548 - RNA, 22 nt, Human
ccuccuggggugaaggauggga

SEQ ID NO: 705549 - RNA, 15 nt, Human
uaccagcugauccgu

SEQ ID NO: 705550 - RNA, 22 nt, Human
aauguuuuagauuacugcuggg

SEQ ID NO: 705551 - RNA, 22 nt, Human
caguuucuuggaugccaauuuc

SEQ ID NO: 705552 - RNA, 22 nt, Human
agccucagugucaccaucuacc

SEQ ID NO: 705553 - RNA, 22 nt, Human
gucuguggucccugcuggggac

SEQ ID NO: 705554 - RNA, 22 nt, Human
aagaguauuugguauagaacac

SEQ ID NO: 705555 - RNA, 23 nt, Human
uucuggcuccgagcuccaucuuc

SEQ ID NO: 705556 - RNA, 21 nt, Human
uuccuggggacuuccguggga

SEQ ID NO: 705557 - RNA, 22 nt, Human
auguguguaaacaaguauaauu

SEQ ID NO: 705558 - RNA, 22 nt, Human
cccugaggaccaggaaggaggg

SEQ ID NO: 705559 - RNA, 22 nt, Human
cugccugugcaugcagucagaa

SEQ ID NO: 705560 - RNA, 22 nt, Human
gagggccaauggauuucaacug

SEQ ID NO: 705561 - RNA, 22 nt, Human
uuauugcaaaggaagagcuuga

SEQ ID NO: 705562 - RNA, 22 nt, Human
gcuuagcacagaaugagaguuc

SEQ ID NO: 705563 - RNA, 22 nt, Human
caguuucuacgaaggucaaccc

SEQ ID NO: 705564 - RNA, 22 nt, Human
cagcaucuccugugcagaggga

SEQ ID NO: 705565 - RNA, 22 nt, Human
gcuuagcaucuuacaaugcuga

SEQ ID NO: 705566 - RNA, 22 nt, Human
agcaggagauggggcgugaugu

SEQ ID NO: 705567 - RNA, 22 nt, Human
uuccugggcuuuccccucuggu

SEQ ID NO: 705568 - RNA, 22 nt, Human
cacauggaagagauacagugag

SEQ ID NO: 705569 - RNA, 22 nt, Human
cagaggccuucaauacucauuu

SEQ ID NO: 705570 - RNA, 22 nt, Human
gauucaaaaguuugagcuccaa

SEQ ID NO: 705571 - RNA, 22 nt, Human
ucucaaauauuuggagagagga

SEQ ID NO: 705572 - RNA, 22 nt, Human
gauggacaccuccugagguucu

SEQ ID NO: 705573 - RNA, 22 nt, Human
cugcugucaucuggcgcugugc

SEQ ID NO: 705574 - RNA, 22 nt, Human
acccaggcgggagugcaguguc

SEQ ID NO: 705575 - RNA, 22 nt, Human
aauggccagcaacaggagugaa

SEQ ID NO: 705576 - RNA, 22 nt, Human
cugugcccaccuggcucugagg

SEQ ID NO: 705577 - RNA, 21 nt, Human
acaaacugaaaugaguuuccu

SEQ ID NO: 705578 - RNA, 22 nt, Human
ggaaaagaauugcagugaagua

SEQ ID NO: 705579 - RNA, 22 nt, Human
ccacagugaguuagauugacca

SEQ ID NO: 705580 - RNA, 23 nt, Human
cugggcacccaguaccuaggccc

SEQ ID NO: 705581 - RNA, 22 nt, Human
ugcccuggaaaugagaggugug

SEQ ID NO: 705582 - RNA, 22 nt, Human
aggcuacuucuagagggacaau

SEQ ID NO: 705583 - RNA, 20 nt, Human
ucaaguuuugcuugacaaga

SEQ ID NO: 705584 - RNA, 22 nt, Human
ggggcucaguucggacagccug

SEQ ID NO: 705585 - RNA, 22 nt, Human
caaauacaaauacgggcagcuu

SEQ ID NO: 705586 - RNA, 23 nt, Human
ggacacugugcagaugcuagugc

SEQ ID NO: 705587 - RNA, 23 nt, Human
agcuaaugggacagauuccaugg

SEQ ID NO: 705588 - RNA, 22 nt, Human
ugcccccuuuucuuguuacacu

SEQ ID NO: 705589 - RNA, 22 nt, Human
aaucagaacuccuaccacagag

SEQ ID NO: 705590 - RNA, 22 nt, Human
ccugcugugaagccaggccugu

SEQ ID NO: 705591 - RNA, 22 nt, Human
ggggacagucgaucuagugauu

SEQ ID NO: 705592 - RNA, 22 nt, Human
ugguggggauucccucccuggc

SEQ ID NO: 705593 - RNA, 22 nt, Human
cagcagcauugcucuggauucc

SEQ ID NO: 705594 - RNA, 22 nt, Human
cuggagggaggaggcugcuauu

SEQ ID NO: 705595 - RNA, 22 nt, Human
uaaagcuagaauuguuccagca

SEQ ID NO: 705596 - RNA, 22 nt, Human
ccucuuccuucucacuguggaa

SEQ ID NO: 705597 - RNA, 22 nt, Human
cuggcuccugaggcuuggcccc

SEQ ID NO: 705598 - RNA, 22 nt, Human
cugucaaauggaaacuuauccu

SEQ ID NO: 705599 - RNA, 21 nt, Human
cucagagcaguucagagggau

SEQ ID NO: 705600 - RNA, 22 nt, Human
aagcuauauuauauuuguguuu

SEQ ID NO: 705601 - RNA, 22 nt, Human
uucauucaucacaugcagcugg

SEQ ID NO: 705602 - RNA, 22 nt, Human
ccuucagccuagaacuugagag

SEQ ID NO: 705603 - RNA, 23 nt, Human
agucagagcagaagggcugcuug

SEQ ID NO: 705604 - RNA, 22 nt, Human
acauuucuugaugccucuguga

SEQ ID NO: 705605 - RNA, 22 nt, Human
cuccaguggugauggggaagaa

SEQ ID NO: 705606 - RNA, 22 nt, Human
caggugguugagagcuguaggc

SEQ ID NO: 705607 - RNA, 18 nt, Human
cagagugggccaagagac

SEQ ID NO: 705608 - RNA, 19 nt, Human
guccaguguuuuccaguca

SEQ ID NO: 705609 - RNA, 22 nt, Human
uuguuaaaaugcauauucuggu

SEQ ID NO: 705610 - RNA, 22 nt, Human
augugcuuuagguuuguuuaca

SEQ ID NO: 705611 - RNA, 22 nt, Human
uagcagcugucaguuucacaua

SEQ ID NO: 705612 - RNA, 22 nt, Human
gcacuugauuacauuagugccu

SEQ ID NO: 705613 - RNA, 22 nt, Human
ugccuggcccugacagcccugg

SEQ ID NO: 705614 - RNA, 22 nt, Human
ggcugaaguguaguggcucacu

SEQ ID NO: 705615 - RNA, 22 nt, Human
cauuaugugcguacauguaucu

SEQ ID NO: 705616 - RNA, 22 nt, Human
gccuggggccagcuugggcuga

SEQ ID NO: 705617 - RNA, 23 nt, Human
acuuuucaauuagcuaugcuuaa

SEQ ID NO: 705618 - RNA, 22 nt, Human
uccagcugccaaccgggccccg

SEQ ID NO: 705619 - RNA, 22 nt, Human
auuuagucuguaacaguacagu

SEQ ID NO: 705620 - RNA, 22 nt, Human
auaccuuuuagacauguaguug

SEQ ID NO: 705621 - RNA, 22 nt, Human
cucgcaggacagugcuaggacu

SEQ ID NO: 705622 - RNA, 21 nt, Human
agaauuaaauuggauuugugu

SEQ ID NO: 705623 - RNA, 22 nt, Human
cgcagaagagguugucuagucc

SEQ ID NO: 705624 - RNA, 22 nt, Human
cccaguggagauaggagugugg

SEQ ID NO: 705625 - RNA, 22 nt, Human
aguugcuggcaccugugaguau

SEQ ID NO: 705626 - RNA, 22 nt, Human
uucugucuguaaacuucucaau

SEQ ID NO: 705627 - RNA, 22 nt, Human
agaaauaugcugauuagaugaa

SEQ ID NO: 705628 - RNA, 22 nt, Human
uaaaugacccaugcugaccuca

SEQ ID NO: 705629 - RNA, 22 nt, Human
augcugugaaaaagaaggcuga

SEQ ID NO: 705630 - RNA, 21 nt, Human
gcagacugcccugcugucccc

SEQ ID NO: 705631 - RNA, 21 nt, Human
aggugcagagccagggaccag

SEQ ID NO: 705632 - RNA, 22 nt, Human
ugcccagcuauuccuuucuuag

SEQ ID NO: 705633 - RNA, 22 nt, Human
uggagagagucgggauaguaca

SEQ ID NO: 705634 - RNA, 22 nt, Human
uggucauaacaugauuaguagg

SEQ ID NO: 705635 - RNA, 22 nt, Human
auaaacacuucuagggcacaca

SEQ ID NO: 705636 - RNA, 20 nt, Human
cuugaacugauucuauuucc

SEQ ID NO: 705637 - RNA, 22 nt, Human
uggcucaggugugagcugaaga

SEQ ID NO: 705638 - RNA, 17 nt, Human
aaucucaguggcuuaag

SEQ ID NO: 705639 - RNA, 22 nt, Human
aggauugugccuccagucagaa

SEQ ID NO: 705640 - RNA, 19 nt, Human
augcauuguuugaaguuga

SEQ ID NO: 705641 - RNA, 22 nt, Human
uagcaaaggaugacuauguacc

SEQ ID NO: 705642 - RNA, 22 nt, Human
ccacccuguguuuuugccauug

SEQ ID NO: 705643 - RNA, 19 nt, Human
acacauguaacaguuuuuc

SEQ ID NO: 705644 - RNA, 22 nt, Human
guaccagucucugugggcaccu

SEQ ID NO: 705645 - RNA, 22 nt, Human
ugggcagauguccucugaagug

SEQ ID NO: 705646 - RNA, 22 nt, Human
uuuagugcuuugcuauucaugg

SEQ ID NO: 705647 - RNA, 21 nt, Human
cuguuuauuucaccugggugc

SEQ ID NO: 705648 - RNA, 22 nt, Human
cagcagcugaggcgcuggcgug

SEQ ID NO: 705649 - RNA, 22 nt, Human
auaugauuccacuauuguaugg

SEQ ID NO: 705650 - RNA, 22 nt, Human
auugucuuuccacugagaaguu

SEQ ID NO: 705651 - RNA, 22 nt, Human
ucugaaagaaagauuuuguuuc

SEQ ID NO: 705652 - RNA, 22 nt, Human
caucugccuaaguggcccuguu

SEQ ID NO: 705653 - RNA, 21 nt, Human
cccugcaggccagggcugagc

SEQ ID NO: 705654 - RNA, 22 nt, Human
uggagaaugauauuccaucauu

SEQ ID NO: 705655 - RNA, 22 nt, Human
gcugagcugcuguucauccugc

SEQ ID NO: 705656 - RNA, 22 nt, Human
gcacacagaaucagugggcaua

SEQ ID NO: 705657 - RNA, 22 nt, Human
cuccuccaguccuccaaggaca

SEQ ID NO: 705658 - RNA, 20 nt, Human
uguucacaguaguugcugcu

SEQ ID NO: 705659 - RNA, 22 nt, Human
aucuggcugacuuugugggaca

SEQ ID NO: 705660 - RNA, 22 nt, Human
gugaaugccgcagucuguugcu

SEQ ID NO: 705661 - RNA, 22 nt, Human
caggaauguuugugcuccuuua

SEQ ID NO: 705662 - RNA, 23 nt, Human
gcacugccaugugcucugcaggc

SEQ ID NO: 705663 - RNA, 19 nt, Human
agcagagcagggccguggg

SEQ ID NO: 705664 - RNA, 22 nt, Human
agggcuacugccugccuucagg

SEQ ID NO: 705665 - RNA, 22 nt, Human
uacagauaacugaaugcagacu

SEQ ID NO: 705666 - RNA, 22 nt, Human
uaaaucacuccuaauaaucagu

SEQ ID NO: 705667 - RNA, 22 nt, Human
uuuaucugagcugauagauagu

SEQ ID NO: 705668 - RNA, 22 nt, Human
uccucugacuucugguugaguu

SEQ ID NO: 705669 - RNA, 18 nt, Human
ggccagccccaggccagc

SEQ ID NO: 705670 - RNA, 22 nt, Human
ucuaggaguaaugagcuagcac

SEQ ID NO: 705671 - RNA, 22 nt, Human
ccugccagccagaucacucgcc

SEQ ID NO: 705672 - RNA, 22 nt, Human
ugaggcaaagacaaagcagcau

SEQ ID NO: 705673 - RNA, 22 nt, Human
ucacacacauuugcugucugau

SEQ ID NO: 705674 - RNA, 22 nt, Human
acagcaauaggaaauacuugca

SEQ ID NO: 705675 - RNA, 22 nt, Human
ucugaaagaagggcagucuuuu

SEQ ID NO: 705676 - RNA, 22 nt, Human
ugggaguguucuuggcuugcuu

SEQ ID NO: 705677 - RNA, 22 nt, Human
uucagaaguagcuaagcaguca

SEQ ID NO: 705678 - RNA, 22 nt, Human
uccuggguaaacacugaccuuu

SEQ ID NO: 705679 - RNA, 22 nt, Human
gaggccugcuuuggcacucugg

SEQ ID NO: 705680 - RNA, 19 nt, Human
gguuugaagaaaaucuugc

SEQ ID NO: 705681 - RNA, 22 nt, Human
uaggugagguuacaagaguuca

SEQ ID NO: 705682 - RNA, 22 nt, Human
augaagaaaaauccagcugucc

SEQ ID NO: 705683 - RNA, 22 nt, Human
aucuggcuuacgaagcacuggu

SEQ ID NO: 705684 - RNA, 22 nt, Human
cugagggcuuccuugucccggg

SEQ ID NO: 705685 - RNA, 22 nt, Human
ccagggcuucaguuagugguga

SEQ ID NO: 705686 - RNA, 22 nt, Human
gcaggagccagggauuccagga

SEQ ID NO: 705687 - RNA, 22 nt, Human
gggcuuggcucauaaguggaug

SEQ ID NO: 705688 - RNA, 22 nt, Human
ggcuauggcaaagaacucagau

SEQ ID NO: 705689 - RNA, 22 nt, Human
ucucuucucuagugagcaacug

SEQ ID NO: 705690 - RNA, 22 nt, Human
agacacaguuugggauggguug

SEQ ID NO: 705691 - RNA, 22 nt, Human
cuagagaaaauguuaauacagu

SEQ ID NO: 705692 - RNA, 21 nt, Human
ccaggaaggacugagcucccu

SEQ ID NO: 705693 - RNA, 22 nt, Human
gcuggggagggcgucaaggcca

SEQ ID NO: 705694 - RNA, 22 nt, Human
ugaguugcuaucuagauccaga

SEQ ID NO: 705695 - RNA, 22 nt, Human
ugcagccaggaaauauuugcug

SEQ ID NO: 705696 - RNA, 22 nt, Human
ggcacugacacuagcauggcac

SEQ ID NO: 705697 - RNA, 21 nt, Human
ucagcauccugagcuguccuc

SEQ ID NO: 705698 - RNA, 22 nt, Human
uuccaggaugcugcugcuuuuu

SEQ ID NO: 705699 - RNA, 22 nt, Human
cacagccuugagcgaggacaag

SEQ ID NO: 705700 - RNA, 22 nt, Human
acuaaaugcugcauaaaugcuu

SEQ ID NO: 705701 - RNA, 22 nt, Human
uccuggaguuuguaaggugagc

SEQ ID NO: 705702 - RNA, 22 nt, Human
guccucuuagccacuuaauuau

SEQ ID NO: 705703 - RNA, 22 nt, Human
auaguuccagcaucuuugguaa

SEQ ID NO: 705704 - RNA, 23 nt, Human
uuaugcaagcuuccuggucucag

SEQ ID NO: 705705 - RNA, 22 nt, Human
acucagaagauauaaugacuca

SEQ ID NO: 705706 - RNA, 22 nt, Human
cuccugggaugacucuuucuuu

SEQ ID NO: 705707 - RNA, 22 nt, Human
acagcaaaagacaagaacuuaa

SEQ ID NO: 705708 - RNA, 22 nt, Human
auucccaccugaaaaagguagg

SEQ ID NO: 705709 - RNA, 22 nt, Human
ugagcaauuaacagagucuaaa

SEQ ID NO: 705710 - RNA, 15 nt, Human
aaucuggcggcaagu

SEQ ID NO: 705711 - RNA, 22 nt, Human
ugcaggaaacagaggcucaaau

SEQ ID NO: 705712 - RNA, 22 nt, Human
gacaggccaggggcugaggugg

SEQ ID NO: 705713 - RNA, 22 nt, Human
ccauuuuugacagaaggccuaa

SEQ ID NO: 705714 - RNA, 22 nt, Human
aaauguacgggaguagaauuag

SEQ ID NO: 705715 - RNA, 22 nt, Human
ccagaucuaaguccaaaguacu

SEQ ID NO: 705716 - RNA, 22 nt, Human
agcaggaaguccucucaggaga

SEQ ID NO: 705717 - RNA, 22 nt, Human
ggaagauucaguuaucucauga

SEQ ID NO: 705718 - RNA, 22 nt, Human
acuuauauuugcuuuaugcuuc

SEQ ID NO: 705719 - RNA, 19 nt, Human
aggcuucaggccacaugcu

SEQ ID NO: 705720 - RNA, 22 nt, Human
uccaguguggaccccugcaguc

SEQ ID NO: 705721 - RNA, 22 nt, Human
gugccaccucugccccagaggg

SEQ ID NO: 705722 - RNA, 22 nt, Human
agcuuccucaccucagaggucu

SEQ ID NO: 705723 - RNA, 22 nt, Human
gcucaagggaugggagugggug

SEQ ID NO: 705724 - RNA, 22 nt, Human
ucuguauaaggacaaacauuua

SEQ ID NO: 705725 - RNA, 22 nt, Human
uccagcuucuugacuugguggu

SEQ ID NO: 705726 - RNA, 21 nt, Human
uuaguucuaccacuugcauuc

SEQ ID NO: 705727 - RNA, 22 nt, Human
uuuggucacuggauuuggcugu

SEQ ID NO: 705728 - RNA, 22 nt, Human
ggagaaaggcauagcagaaccu

SEQ ID NO: 705729 - RNA, 22 nt, Human
cuguccccgcgaguccagagcu

SEQ ID NO: 705730 - RNA, 22 nt, Human
ucaaugucucuuucuaaaaugu

SEQ ID NO: 705731 - RNA, 22 nt, Human
ugauggaaauaaaagcauagcu

SEQ ID NO: 705732 - RNA, 23 nt, Human
uugauuuagcugggauugcaugc

SEQ ID NO: 705733 - RNA, 22 nt, Human
acaguggaugacauccuuuugc

SEQ ID NO: 705734 - RNA, 22 nt, Human
gcccagggcagggcaagaguga

SEQ ID NO: 705735 - RNA, 22 nt, Human
cguguacagucuaucuuuuuuc

SEQ ID NO: 705736 - RNA, 22 nt, Human
uaggaaaaauacagaauuauau

SEQ ID NO: 705737 - RNA, 22 nt, Human
ugagccagcuccuugccuguca

SEQ ID NO: 705738 - RNA, 22 nt, Human
gcagggaggaagagaugcuucc

SEQ ID NO: 705739 - RNA, 22 nt, Human
uaauuuacagagauacagucag

SEQ ID NO: 705740 - RNA, 22 nt, Human
ucagggcaucucuuaaguggug

SEQ ID NO: 705741 - RNA, 22 nt, Human
aacagucuuccuacggccauua

SEQ ID NO: 705742 - RNA, 22 nt, Human
uucuguuagcauucugaucucc

SEQ ID NO: 705743 - RNA, 22 nt, Human
caaugucagaauuacaguugau

SEQ ID NO: 705744 - RNA, 22 nt, Human
aaacacugcaggguuuacuuga

SEQ ID NO: 705745 - RNA, 22 nt, Human
caggggaaggagccuugaaacu

SEQ ID NO: 705746 - RNA, 22 nt, Human
cucaggccauuccuaccaaggg

SEQ ID NO: 705747 - RNA, 22 nt, Human
agucugggcugucugcaggagu

SEQ ID NO: 705748 - RNA, 22 nt, Human
gggcuucucccuaaggacucug

SEQ ID NO: 705749 - RNA, 22 nt, Human
acacccaggcuggcgugcagug

SEQ ID NO: 705750 - RNA, 22 nt, Human
aggaccuggaucacagagaucu

SEQ ID NO: 705751 - RNA, 22 nt, Human
aaguuuuaacaaguacuuacua

SEQ ID NO: 705752 - RNA, 19 nt, Human
uuaaagugcgagaagucuu

SEQ ID NO: 705753 - RNA, 22 nt, Human
cuaaaggcuaggucugaacuca

SEQ ID NO: 705754 - RNA, 22 nt, Human
ugggcagaguagcucagaagaa

SEQ ID NO: 705755 - RNA, 19 nt, Human
ugucaccuucugucaguuu

SEQ ID NO: 705756 - RNA, 22 nt, Human
agacaguaugauauaugaauac

SEQ ID NO: 705757 - RNA, 22 nt, Human
agcagggccuggcacuccuggg

SEQ ID NO: 705758 - RNA, 22 nt, Human
acagaucaccuguuagccaaaa

SEQ ID NO: 705759 - RNA, 22 nt, Human
uaauuuaauuccauggauucua

SEQ ID NO: 705760 - RNA, 22 nt, Human
auuucuaaagagggugguuugg

SEQ ID NO: 705761 - RNA, 22 nt, Human
ugcauccuagggaaggcacuga

SEQ ID NO: 705762 - RNA, 22 nt, Human
agggggugcauuugugaaugaa

SEQ ID NO: 705763 - RNA, 22 nt, Human
aggagguugccagucugggggu

SEQ ID NO: 705764 - RNA, 22 nt, Human
ggguccagggacguuucugcag

SEQ ID NO: 705765 - RNA, 22 nt, Human
ucuaaagauguuuauugacaua

SEQ ID NO: 705766 - RNA, 22 nt, Human
uccaaaaaacguuugaauaguu

SEQ ID NO: 705767 - RNA, 22 nt, Human
cagcugucuaaguugagcagga

SEQ ID NO: 705768 - RNA, 17 nt, Human
cugcuuugugcaacgcu

SEQ ID NO: 705769 - RNA, 23 nt, Human
gacagguaaggguugggagaauc

SEQ ID NO: 705770 - RNA, 22 nt, Human
gggucaaggcuacauggagacc

SEQ ID NO: 705771 - RNA, 22 nt, Human
ggucaaaguugaagaagggcau

SEQ ID NO: 705772 - RNA, 22 nt, Human
aaagcacagagcucccacagga

SEQ ID NO: 705773 - RNA, 22 nt, Human
cucagucaguuuuugugagaga

SEQ ID NO: 705774 - RNA, 22 nt, Human
aucugaaauagucuuaucugag

SEQ ID NO: 705775 - RNA, 22 nt, Human
gacccaggguuucugcacaggg

SEQ ID NO: 705776 - RNA, 22 nt, Human
aacacuaaugggagaacaaccc

SEQ ID NO: 705777 - RNA, 22 nt, Human
uccaggcccagacggggugagg

SEQ ID NO: 705778 - RNA, 22 nt, Human
auuugccuugugaauuggauau

SEQ ID NO: 705779 - RNA, 22 nt, Human
uguuuuguucacugcauugucc

SEQ ID NO: 705780 - RNA, 22 nt, Human
agcugcugagccaggcugaugu

SEQ ID NO: 705781 - RNA, 22 nt, Human
auugaacucugcaggagcugcc

SEQ ID NO: 705782 - RNA, 22 nt, Human
ugacuuuggauaagaaaaugag

SEQ ID NO: 705783 - RNA, 22 nt, Human
ccugccagcauggcuuaucucc

SEQ ID NO: 705784 - RNA, 22 nt, Human
uccuucuggaggcucuaagggg

SEQ ID NO: 705785 - RNA, 22 nt, Human
augggcagacagggagcucacg

SEQ ID NO: 705786 - RNA, 22 nt, Human
gggacuggccaggguuuggaau

SEQ ID NO: 705787 - RNA, 22 nt, Human
gggaagcugcguggucuagggc

SEQ ID NO: 705788 - RNA, 22 nt, Human
ucucacacuucuguguugcaca

SEQ ID NO: 705789 - RNA, 22 nt, Human
auuccagugugcaugguacaca

SEQ ID NO: 705790 - RNA, 19 nt, Human
gagacauguagauagaaga

SEQ ID NO: 705791 - RNA, 22 nt, Human
aagcccagcaucccugcaccag

SEQ ID NO: 705792 - RNA, 22 nt, Human
accacccucagcagagcugaaa

SEQ ID NO: 705793 - RNA, 22 nt, Human
uuuacacaaaagauagcacacc

SEQ ID NO: 705794 - RNA, 22 nt, Human
acagcuuuucaauucugcugag

SEQ ID NO: 705795 - RNA, 22 nt, Human
aucuguuauugaauaggugcua

SEQ ID NO: 705796 - RNA, 22 nt, Human
accauuaacaugauuuugggga

SEQ ID NO: 705797 - RNA, 22 nt, Human
agagccagcauuugacacuggc

SEQ ID NO: 705798 - RNA, 22 nt, Human
agccccccaagggccuucucuu

SEQ ID NO: 705799 - RNA, 19 nt, Human
gccucugcuggggacaggc

SEQ ID NO: 705800 - RNA, 22 nt, Human
auaaaagaaguuuugguacuug

SEQ ID NO: 705801 - RNA, 22 nt, Human
agggcuguuuuucaguguguga

SEQ ID NO: 705802 - RNA, 22 nt, Human
gaaggcagggaauguggugcua

SEQ ID NO: 705803 - RNA, 22 nt, Human
cuuguagcugacuaucuuguuc

SEQ ID NO: 705804 - RNA, 22 nt, Human
gagaugaaucauuccaugguca

SEQ ID NO: 705805 - RNA, 22 nt, Human
gagccaaaugugcagacauugu

SEQ ID NO: 705806 - RNA, 23 nt, Human
ucccugggcccgugccagcggug

SEQ ID NO: 705807 - RNA, 22 nt, Human
auuuuuuauauaccaagguggg

SEQ ID NO: 705808 - RNA, 17 nt, Human
gugcagggaugaaggau

SEQ ID NO: 705809 - RNA, 22 nt, Human
auguuuaauuaucuggguuuug

SEQ ID NO: 705810 - RNA, 22 nt, Human
ugcucuguaaggucagaaaagg

SEQ ID NO: 705811 - RNA, 22 nt, Human
ugcacaguaaacaugacuggag

SEQ ID NO: 705812 - RNA, 22 nt, Human
agcacacugaccugaagccuug

SEQ ID NO: 705813 - RNA, 22 nt, Human
caggugcuucuguaagaaagac

SEQ ID NO: 705814 - RNA, 22 nt, Human
uauuuccagcaguaagaagaca

SEQ ID NO: 705815 - RNA, 15 nt, Human
cuguggcuaaccuaa

SEQ ID NO: 705816 - RNA, 22 nt, Human
auccauauaggcagauggcaca

SEQ ID NO: 705817 - RNA, 22 nt, Human
cauuaacaaauggaagcaugaa

SEQ ID NO: 705818 - RNA, 22 nt, Human
acagguggacacagcagcaguc

SEQ ID NO: 705819 - RNA, 22 nt, Human
aguggccagugcugcucugggg

SEQ ID NO: 705820 - RNA, 22 nt, Human
gacaagacauugguaaagauau

SEQ ID NO: 705821 - RNA, 18 nt, Human
ggggagcagacugaacuc

SEQ ID NO: 705822 - RNA, 22 nt, Human
uggcuucucugugugagggaga

SEQ ID NO: 705823 - RNA, 22 nt, Human
cacagagcaggggucuguguca

SEQ ID NO: 705824 - RNA, 23 nt, Human
ugggaccuguuugcccacagaug

SEQ ID NO: 705825 - RNA, 22 nt, Human
cuguuuuaugaagggaaugaga

SEQ ID NO: 705826 - RNA, 22 nt, Human
ugggccccagcacgucugggga

SEQ ID NO: 705827 - RNA, 22 nt, Human
aagcacaucauguuguucagac

SEQ ID NO: 705828 - RNA, 22 nt, Human
augcaccugaacuccaucagcu

SEQ ID NO: 705829 - RNA, 22 nt, Human
ccagggaagaauaggugugguu

SEQ ID NO: 705830 - RNA, 22 nt, Human
ggccagucugggccacggucgg

SEQ ID NO: 705831 - RNA, 21 nt, Human
ggcugguguuuagcugugaua

SEQ ID NO: 705832 - RNA, 22 nt, Human
uggcagcauuaauuauucaggu

SEQ ID NO: 705833 - RNA, 22 nt, Human
gcuuccuuauuguugccauagu

SEQ ID NO: 705834 - RNA, 22 nt, Human
ccagaagugucuaucaagaugu

SEQ ID NO: 705835 - RNA, 22 nt, Human
guguguguauauauacacacac

SEQ ID NO: 705836 - RNA, 22 nt, Human
caucucugagaccucagcuggg

SEQ ID NO: 705837 - RNA, 22 nt, Human
uuguacuugccauagaacaaca

SEQ ID NO: 705838 - RNA, 22 nt, Human
acagugaaaauaauaucuucaa

SEQ ID NO: 705839 - RNA, 22 nt, Human
uuggacuccucuuuccucuugg

SEQ ID NO: 705840 - RNA, 22 nt, Human
gauuuccuaauguggaucucug

SEQ ID NO: 705841 - RNA, 22 nt, Human
gggcuagcagauucuaccuaau

SEQ ID NO: 705842 - RNA, 21 nt, Human
agacagcagucuccaaacccc

SEQ ID NO: 705843 - RNA, 20 nt, Human
uucuccacaggguggaggag

SEQ ID NO: 705844 - RNA, 22 nt, Human
aaauuuuaguaaggaaguugag

SEQ ID NO: 705845 - RNA, 22 nt, Human
guuggcuuugcucucuguccua

SEQ ID NO: 705846 - RNA, 22 nt, Human
accauuuaauaaguauuuccau

SEQ ID NO: 705847 - RNA, 22 nt, Human
cagagucaugggccgucaggca

SEQ ID NO: 705848 - RNA, 19 nt, Human
aagaagcaauaagcuguga

SEQ ID NO: 705849 - RNA, 22 nt, Human
aacaugaugugaagcaugaacu

SEQ ID NO: 705850 - RNA, 22 nt, Human
accagagauggggcuucucugu

SEQ ID NO: 705851 - RNA, 22 nt, Human
cacccagccuucacacaggagu

SEQ ID NO: 705852 - RNA, 22 nt, Human
gguccugggaagaugcucauga

SEQ ID NO: 705853 - RNA, 22 nt, Human
aacauuaauuacagucaaacau

SEQ ID NO: 705854 - RNA, 22 nt, Human
augucuuucuugugucccaaga

SEQ ID NO: 705855 - RNA, 17 nt, Human
ccuuccucaucuccuuc

SEQ ID NO: 705856 - RNA, 22 nt, Human
cagcccagccgagggccuggcu

SEQ ID NO: 705857 - RNA, 22 nt, Human
gcuggcuccucuguccucacgg

SEQ ID NO: 705858 - RNA, 20 nt, Human
cuaggcagcgagugacugag

SEQ ID NO: 705859 - RNA, 21 nt, Human
gcucuuggaaggggcucagcu

SEQ ID NO: 705860 - RNA, 22 nt, Human
uucuucuucuggcugcaccugg

SEQ ID NO: 705861 - RNA, 22 nt, Human
aggugccagugcuguggucccc

SEQ ID NO: 705862 - RNA, 22 nt, Human
accugcuuuauuccuccugccu

SEQ ID NO: 705863 - RNA, 22 nt, Human
cucuugguaagacauuagaggu

SEQ ID NO: 705864 - RNA, 17 nt, Human
gagagcugcugcuuccg

SEQ ID NO: 705865 - RNA, 19 nt, Human
uggggccuccugucccugg

SEQ ID NO: 705866 - RNA, 22 nt, Human
ggcaggcaaugaggaugggaag

SEQ ID NO: 705867 - RNA, 22 nt, Human
cagcacagcacagcggugacuc

SEQ ID NO: 705868 - RNA, 22 nt, Human
aggaauguggcaaucuucaagu

SEQ ID NO: 705869 - RNA, 22 nt, Human
gcuggccauauauuuugcuguu

SEQ ID NO: 705870 - RNA, 22 nt, Human
ccaaaggccaggcacugagguu

SEQ ID NO: 705871 - RNA, 21 nt, Human
acucaggcaccaggggauggc

SEQ ID NO: 705872 - RNA, 20 nt, Human
ccugaagaguuucucuuucu

SEQ ID NO: 705873 - RNA, 22 nt, Human
gaucuguuuuuucuuagacagu

SEQ ID NO: 705874 - RNA, 22 nt, Human
caaggccaagguuuugugaacu

SEQ ID NO: 705875 - RNA, 22 nt, Human
uccuugagagccacugucuugg

SEQ ID NO: 705876 - RNA, 22 nt, Human
ugccagcuacucuguaggcuga

SEQ ID NO: 705877 - RNA, 22 nt, Human
augucugagucugcuccaguug

SEQ ID NO: 705878 - RNA, 22 nt, Human
ccugccugucccucaguccaca

SEQ ID NO: 705879 - RNA, 22 nt, Human
agagucugugcuggggccagcu

SEQ ID NO: 705880 - RNA, 22 nt, Human
caaaauugauuguggugauggu

SEQ ID NO: 705881 - RNA, 22 nt, Human
aaggaggagugggguccuggaa

SEQ ID NO: 705882 - RNA, 22 nt, Human
ucugggaaugaauaagaccugu

SEQ ID NO: 705883 - RNA, 22 nt, Human
ucugagcugggggccuggcaug

SEQ ID NO: 705884 - RNA, 22 nt, Human
ggucucugucacugaguggccc

SEQ ID NO: 705885 - RNA, 22 nt, Human
cccuggagggacagcugcucua

SEQ ID NO: 705886 - RNA, 22 nt, Human
ggccccacgggggaguccuagu

SEQ ID NO: 705887 - RNA, 22 nt, Human
ggaagaugcccaacccagcuuu

SEQ ID NO: 705888 - RNA, 22 nt, Human
ggaaaauuggcgcguggggcug

SEQ ID NO: 705889 - RNA, 22 nt, Human
cauugaaaaacguugacugagu

SEQ ID NO: 705890 - RNA, 22 nt, Human
ugucaaaaagcugggacaagca

SEQ ID NO: 705891 - RNA, 22 nt, Human
uguguucauguugauucauagc

SEQ ID NO: 705892 - RNA, 22 nt, Human
auuuaagauugcguauucaugu

SEQ ID NO: 705893 - RNA, 22 nt, Human
gaaauugaaagaccaacugcau

SEQ ID NO: 705894 - RNA, 22 nt, Human
agccagcaucccuucagucucc

SEQ ID NO: 705895 - RNA, 22 nt, Human
ucugaaaucuaaugcucugugg

SEQ ID NO: 705896 - RNA, 22 nt, Human
ccuccaaguuugacucaggaca

SEQ ID NO: 705897 - RNA, 22 nt, Human
aaaugcacaaagauuuugcacu

SEQ ID NO: 705898 - RNA, 22 nt, Human
augagagguuucgucagaggaa

SEQ ID NO: 705899 - RNA, 23 nt, Human
ugcaugugaauucauacuuguuu

SEQ ID NO: 705900 - RNA, 22 nt, Human
guauuuaauucugugcuucuag

SEQ ID NO: 705901 - RNA, 22 nt, Human
accagggcagccgagguguguc

SEQ ID NO: 705902 - RNA, 21 nt, Human
ugggugggcagagucucuuca

SEQ ID NO: 705903 - RNA, 22 nt, Human
ggucaggguauaaucaagugag

SEQ ID NO: 705904 - RNA, 22 nt, Human
gggcuccagccaggugucccca

SEQ ID NO: 705905 - RNA, 22 nt, Human
aacauucaccucuaccuccuuc

SEQ ID NO: 705906 - RNA, 22 nt, Human
agcuccugcgcacggugcacac

SEQ ID NO: 705907 - RNA, 22 nt, Human
ucuuaugaaaagcacuuagaac

SEQ ID NO: 705908 - RNA, 22 nt, Human
gacccaggggcagggagaaagu

SEQ ID NO: 705909 - RNA, 22 nt, Human
gcucuggggaugcuucugccgu

SEQ ID NO: 705910 - RNA, 22 nt, Human
aggagaguaccauugggccgca

SEQ ID NO: 705911 - RNA, 22 nt, Human
auuuacaguuuagcauuucaag

SEQ ID NO: 705912 - RNA, 22 nt, Human
cagagucucugggaggcugggu

SEQ ID NO: 705913 - RNA, 22 nt, Human
gaggcagcugaagcuucaaaga

SEQ ID NO: 705914 - RNA, 22 nt, Human
ccucacucuuguccuggcaggu

SEQ ID NO: 705915 - RNA, 22 nt, Human
aagcuucaaugagauaauuguu

SEQ ID NO: 705916 - RNA, 22 nt, Human
gcccugguuuuagaggagcagg

SEQ ID NO: 705917 - RNA, 22 nt, Human
uugugggcuugccuggcucuug

SEQ ID NO: 705918 - RNA, 23 nt, Human
uuauaagaagcaucacaggaaga

SEQ ID NO: 705919 - RNA, 22 nt, Human
uuggcccuggggccagcuucga

SEQ ID NO: 705920 - RNA, 22 nt, Human
gaaaucugcuucuugcauagua

SEQ ID NO: 705921 - RNA, 22 nt, Human
cauugcaccacauugcaucccu

SEQ ID NO: 705922 - RNA, 22 nt, Human
gacaggaacauaaauguaggag

SEQ ID NO: 705923 - RNA, 22 nt, Human
gcuggcucugccccaccuguuc

SEQ ID NO: 705924 - RNA, 23 nt, Human
cguuuuuuccucagauguucugg

SEQ ID NO: 705925 - RNA, 22 nt, Human
uuuugcuuaaucuagauuuugc

SEQ ID NO: 705926 - RNA, 23 nt, Human
uugaaaaauauagucccauuguc

SEQ ID NO: 705927 - RNA, 22 nt, Human
ggacaggagugaggcggguucc

SEQ ID NO: 705928 - RNA, 21 nt, Human
gcuugccuuccuaucuuuggc

SEQ ID NO: 705929 - RNA, 22 nt, Human
aucuguggcuggugagaggcag

SEQ ID NO: 705930 - RNA, 20 nt, Human
agcaagaguaaggacagcga

SEQ ID NO: 705931 - RNA, 22 nt, Human
ugugccugucacccucagagag

SEQ ID NO: 705932 - RNA, 22 nt, Human
gccaggcauucuagaaguagug

SEQ ID NO: 705933 - RNA, 22 nt, Human
uauuaugcaaauauuccuaccu

SEQ ID NO: 705934 - RNA, 22 nt, Human
cucuggcuuguuaaugcauauu

SEQ ID NO: 705935 - RNA, 22 nt, Human
gcaguguguuucugagauaugg

SEQ ID NO: 705936 - RNA, 22 nt, Human
ccucucuuggccgcagucuucu

SEQ ID NO: 705937 - RNA, 22 nt, Human
uguggccuuauuuguauggggg

SEQ ID NO: 705938 - RNA, 22 nt, Human
gauggcuuaagaguaaaaggca

SEQ ID NO: 705939 - RNA, 22 nt, Human
agggcugaccuaagcuccacuu

SEQ ID NO: 705940 - RNA, 22 nt, Human
uuuccuaacucaucggauguac

SEQ ID NO: 705941 - RNA, 22 nt, Human
cuggccagacuacacaugugug

SEQ ID NO: 705942 - RNA, 20 nt, Human
agaaguggcugcagacacua

SEQ ID NO: 705943 - RNA, 22 nt, Human
acucugccuuucagcagaugaa

SEQ ID NO: 705944 - RNA, 22 nt, Human
ugcucugcacaucccucacaaa

SEQ ID NO: 705945 - RNA, 22 nt, Human
agaaccucaauuauuuuugcac

SEQ ID NO: 705946 - RNA, 22 nt, Human
cugagcuguggaauaaacacug

SEQ ID NO: 705947 - RNA, 22 nt, Human
uggcaagagggaugcaagguuu

SEQ ID NO: 705948 - RNA, 22 nt, Human
aguggggucuccuccagccccc

SEQ ID NO: 705949 - RNA, 22 nt, Human
ugcuuucacauguaugcacaaa

SEQ ID NO: 705950 - RNA, 22 nt, Human
ucagacuucaguuuuuaguugu

SEQ ID NO: 705951 - RNA, 22 nt, Human
aggagguggcugaacuugaggg

SEQ ID NO: 705952 - RNA, 22 nt, Human
uggcaugcaagaggaggcuccc

SEQ ID NO: 705953 - RNA, 22 nt, Human
aggcccugcccagagcuccucg

SEQ ID NO: 705954 - RNA, 22 nt, Human
aaggcaacuguaaaacaugcac

SEQ ID NO: 705955 - RNA, 22 nt, Human
cucuaggcugcccaggagcuga

SEQ ID NO: 705956 - RNA, 22 nt, Human
cagagcuguugcggggcuuggc

SEQ ID NO: 705957 - RNA, 22 nt, Human
ucacugaaaaccauacuucuuu

SEQ ID NO: 705958 - RNA, 22 nt, Human
cuuccugaacaaugccaucaau

SEQ ID NO: 705959 - RNA, 22 nt, Human
uucuuuuaauagagauccugug

SEQ ID NO: 705960 - RNA, 23 nt, Human
agcccugcugagacccagcuccc

SEQ ID NO: 705961 - RNA, 19 nt, Human
cuggucugcugcuuccagg

SEQ ID NO: 705962 - RNA, 22 nt, Human
uauugucuaucgcugcuuucau

SEQ ID NO: 705963 - RNA, 22 nt, Human
uuccacagaugaaaauuaaguu

SEQ ID NO: 705964 - RNA, 22 nt, Human
caugaaagcaggaaugguuuua

SEQ ID NO: 705965 - RNA, 22 nt, Human
aucaugacaucugaguuuaagu

SEQ ID NO: 705966 - RNA, 22 nt, Human
auuuccuaauuuaugcaggagu

SEQ ID NO: 705967 - RNA, 22 nt, Human
gcuaggcuucaaaaucucccug

SEQ ID NO: 705968 - RNA, 22 nt, Human
gaggaagaaucaggguggugag

SEQ ID NO: 705969 - RNA, 22 nt, Human
uugcuuccuggcagggcgagcg

SEQ ID NO: 705970 - RNA, 22 nt, Human
ugugcugguacaugugaggaug

SEQ ID NO: 705971 - RNA, 22 nt, Human
acugaucuguuuucagauucug

SEQ ID NO: 705972 - RNA, 22 nt, Human
aaagcauuucaugucuagaaag

SEQ ID NO: 705973 - RNA, 22 nt, Human
gugauccuauaaagugagcaca

SEQ ID NO: 705974 - RNA, 22 nt, Human
ccacaguaaauggauucagacc

SEQ ID NO: 705975 - RNA, 22 nt, Human
auuugcagagcucugaauuuug

SEQ ID NO: 705976 - RNA, 23 nt, Human
uauuacaauuggucuuauuaaga

SEQ ID NO: 705977 - RNA, 22 nt, Human
uuuauuaauguagcauccaugg

SEQ ID NO: 705978 - RNA, 22 nt, Human
ccuguuuaccacugaggggcag

SEQ ID NO: 705979 - RNA, 22 nt, Human
cucacagcacuugugucauugg

SEQ ID NO: 705980 - RNA, 20 nt, Human
aggcuggcacuccuggccag

SEQ ID NO: 705981 - RNA, 21 nt, Human
gauuucacuuaccuucauuua

SEQ ID NO: 705982 - RNA, 22 nt, Human
uguugggaucgaaugguggaac

SEQ ID NO: 705983 - RNA, 22 nt, Human
acugucacuccaacugagucgu

SEQ ID NO: 705984 - RNA, 22 nt, Human
cuguggaguuccaucaggggag

SEQ ID NO: 705985 - RNA, 19 nt, Human
uugaauaugcaaacugaag

SEQ ID NO: 705986 - RNA, 22 nt, Human
aaggcuuuaugugaccaaaaga

SEQ ID NO: 705987 - RNA, 22 nt, Human
cagcucccuauggugaggcgac

SEQ ID NO: 705988 - RNA, 22 nt, Human
gaagucugacucuuuguaagcu

SEQ ID NO: 705989 - RNA, 22 nt, Human
augaaacagaguacuuaauaua

SEQ ID NO: 705990 - RNA, 22 nt, Human
cccaggaggacauuccauaccc

SEQ ID NO: 705991 - RNA, 22 nt, Human
agugaguggguuacagauggga

SEQ ID NO: 705992 - RNA, 22 nt, Human
ucugggcaauggaugcacucac

SEQ ID NO: 705993 - RNA, 22 nt, Human
cuuauuuaaugaggguuagaau

SEQ ID NO: 705994 - RNA, 22 nt, Human
uggcugaaucugcagcaggaag

SEQ ID NO: 705995 - RNA, 22 nt, Human
gaucucuguggacucuuagcac

SEQ ID NO: 705996 - RNA, 22 nt, Human
uggcugagagucauccugugug

SEQ ID NO: 705997 - RNA, 22 nt, Human
cuguuuauacucaaaagauaca

SEQ ID NO: 705998 - RNA, 22 nt, Human
ucucucuaggcaucuauuuuca

SEQ ID NO: 705999 - RNA, 22 nt, Human
gaaccuggcagcccuauaucug

SEQ ID NO: 706000 - RNA, 22 nt, Human
uuuuuccaggguuagauguuua

SEQ ID NO: 706001 - RNA, 22 nt, Human
ggagguggcagagggacauucu

SEQ ID NO: 706002 - RNA, 22 nt, Human
aggagcuggguuccuuuggugg

SEQ ID NO: 706003 - RNA, 22 nt, Human
ugugguuuacuguggcgcugcu

SEQ ID NO: 706004 - RNA, 22 nt, Human
ucagaggugguaaaggacagca

SEQ ID NO: 706005 - RNA, 22 nt, Human
gacagugucccucuggggugga

SEQ ID NO: 706006 - RNA, 22 nt, Human
ugaaggaauggaggaucagagc

SEQ ID NO: 706007 - RNA, 22 nt, Human
ggcagcugcaaaucugcucugu

SEQ ID NO: 706008 - RNA, 22 nt, Human
aacaugaaacccaaacagaaua

SEQ ID NO: 706009 - RNA, 22 nt, Human
uuugagaaugguaaguggaucg

SEQ ID NO: 706010 - RNA, 22 nt, Human
gaaggagcuaaagggagcccug

SEQ ID NO: 706011 - RNA, 22 nt, Human
uucaaagauggagggauagauu

SEQ ID NO: 706012 - RNA, 22 nt, Human
aacaucuaguuccuauauaaua

SEQ ID NO: 706013 - RNA, 22 nt, Human
ucaggacagacuagacuagcgu

SEQ ID NO: 706014 - RNA, 22 nt, Human
agagaauuugagacuugcccaa

SEQ ID NO: 706015 - RNA, 22 nt, Human
uggucugauagucugaaaauga

SEQ ID NO: 706016 - RNA, 22 nt, Human
agguaaaugucagagccuuuaa

SEQ ID NO: 706017 - RNA, 22 nt, Human
ggcaggugcuaagagagguaaa

SEQ ID NO: 706018 - RNA, 22 nt, Human
aauugcuaaagauuauguuuuc

SEQ ID NO: 706019 - RNA, 22 nt, Human
agugucauaugccacugcaucc

SEQ ID NO: 706020 - RNA, 22 nt, Human
cuaggcagacugagcucuaggg

SEQ ID NO: 706021 - RNA, 22 nt, Human
ugucaacacaccuaucucaauu

SEQ ID NO: 706022 - RNA, 22 nt, Human
guggccaagagauaaaauugug

SEQ ID NO: 706023 - RNA, 22 nt, Human
agacacaguguugaaggcuagu

SEQ ID NO: 706024 - RNA, 22 nt, Human
aagcucugcucagcagacuagg

SEQ ID NO: 706025 - RNA, 22 nt, Human
ugaugaaaguucaguagugaau

SEQ ID NO: 706026 - RNA, 22 nt, Human
agaaauuauuagugaauagucu

SEQ ID NO: 706027 - RNA, 22 nt, Human
ccuccccacagcccaggagacu

SEQ ID NO: 706028 - RNA, 22 nt, Human
uauaauuuuagaagagauggaa

SEQ ID NO: 706029 - RNA, 22 nt, Human
ugcagcuggaacuuagaggaga

SEQ ID NO: 706030 - RNA, 22 nt, Human
ugugacagaucuuuaaauaaug

SEQ ID NO: 706031 - RNA, 22 nt, Human
ugcuccuggacuggugugagau

SEQ ID NO: 706032 - RNA, 22 nt, Human
gcuguuucuaagcugguuccua

SEQ ID NO: 706033 - RNA, 22 nt, Human
uaccauuuugaaacauuucauc

SEQ ID NO: 706034 - RNA, 22 nt, Human
gcacagagagucccgggugccc

SEQ ID NO: 706035 - RNA, 22 nt, Human
gcugggucccaagccuggggag

SEQ ID NO: 706036 - RNA, 18 nt, Human
gcuccuggaccaggucac

SEQ ID NO: 706037 - RNA, 22 nt, Human
ucugggagauccaagcagaacu

SEQ ID NO: 706038 - RNA, 22 nt, Human
cagcaucuaaucuucaugccgg

SEQ ID NO: 706039 - RNA, 20 nt, Human
acagagacugagacacuugc

SEQ ID NO: 706040 - RNA, 22 nt, Human
aauacagauggcaugugaagau

SEQ ID NO: 706041 - RNA, 22 nt, Human
auuucacucucccugccacuua

SEQ ID NO: 706042 - RNA, 22 nt, Human
ccuggcugcauuuugcuggaug

SEQ ID NO: 706043 - RNA, 22 nt, Human
acuguguggaaauuugugaggg

SEQ ID NO: 706044 - RNA, 22 nt, Human
gcagcagaguuugggagauggu

SEQ ID NO: 706045 - RNA, 22 nt, Human
auucaagauuaauucuauguca

SEQ ID NO: 706046 - RNA, 22 nt, Human
auguguguauauauagucauuu

SEQ ID NO: 706047 - RNA, 21 nt, Human
ugucuuuggccucauucccag

SEQ ID NO: 706048 - RNA, 22 nt, Human
ucaagcaucuuggucuacgauc

SEQ ID NO: 706049 - RNA, 22 nt, Human
uccugagggcucggggcucaug

SEQ ID NO: 706050 - RNA, 22 nt, Human
ccagcccaugcccuuauagcau

SEQ ID NO: 706051 - RNA, 22 nt, Human
caguggaggccuugggaccuuu

SEQ ID NO: 706052 - RNA, 22 nt, Human
acacauauauuauuuguggcuc

SEQ ID NO: 706053 - RNA, 22 nt, Human
uauaauuuggggaaaguggugu

SEQ ID NO: 706054 - RNA, 18 nt, Human
gagagggaucccucagga

SEQ ID NO: 706055 - RNA, 22 nt, Human
cacagugacauuagugagaaaa

SEQ ID NO: 706056 - RNA, 22 nt, Human
gcaauguuuuuccuuccauauu

SEQ ID NO: 706057 - RNA, 22 nt, Human
cagagggaaaaggggaguaaua

SEQ ID NO: 706058 - RNA, 22 nt, Human
cuucuucccagcuucccucacc

SEQ ID NO: 706059 - RNA, 22 nt, Human
ccuaagauuggugugcacugug

SEQ ID NO: 706060 - RNA, 22 nt, Human
gagaggucggggacacugcaaa

SEQ ID NO: 706061 - RNA, 22 nt, Human
uuaagacauucagauauuucua

SEQ ID NO: 706062 - RNA, 22 nt, Human
caggcuugugucucagcugcag

SEQ ID NO: 706063 - RNA, 22 nt, Human
ucucucuuuuuaaucauguaau

SEQ ID NO: 706064 - RNA, 22 nt, Human
gcagcagcucagccgggcacug

SEQ ID NO: 706065 - RNA, 22 nt, Human
gccaggucgucuccauguccaa

SEQ ID NO: 706066 - RNA, 22 nt, Human
uaaacacucacuucauagccau

SEQ ID NO: 706067 - RNA, 22 nt, Human
uuuguaugaacugguauguagg

SEQ ID NO: 706068 - RNA, 22 nt, Human
acugccuguagcucuucaucuc

SEQ ID NO: 706069 - RNA, 22 nt, Human
agaggcaccaucuggaacagcc

SEQ ID NO: 706070 - RNA, 22 nt, Human
ucagacagcuugggauaacuga

SEQ ID NO: 706071 - RNA, 22 nt, Human
uuccugugguccagagucaucc

SEQ ID NO: 706072 - RNA, 22 nt, Human
gcucugaagggugagcuguucg

SEQ ID NO: 706073 - RNA, 22 nt, Human
aggguccugagccuggggcgca

SEQ ID NO: 706074 - RNA, 22 nt, Human
gccugcaguucugugcuaggca

SEQ ID NO: 706075 - RNA, 22 nt, Human
gugggcagccuccuuuauuuuc

SEQ ID NO: 706076 - RNA, 22 nt, Human
auagguacagcagauauucuua

SEQ ID NO: 706077 - RNA, 18 nt, Human
aagcacagguguuucagg

SEQ ID NO: 706078 - RNA, 18 nt, Human
ugugguggagcugccuuc

SEQ ID NO: 706079 - RNA, 22 nt, Human
uggcuuccaaaggaaugggccu

SEQ ID NO: 706080 - RNA, 22 nt, Human
aggucaaaaugcuuuucagguc

SEQ ID NO: 706081 - RNA, 22 nt, Human
guggucaggcagugggagagaa

SEQ ID NO: 706082 - RNA, 22 nt, Human
gugcacagagcccagggccgcg

SEQ ID NO: 706083 - RNA, 22 nt, Human
ugaagaaacgcagagagguagg

SEQ ID NO: 706084 - RNA, 22 nt, Human
agaaggaaacagcugugcuuug

SEQ ID NO: 706085 - RNA, 22 nt, Human
cuggcuaugugguuagacauaa

SEQ ID NO: 706086 - RNA, 22 nt, Human
cuucuucuucccccuucagggg

SEQ ID NO: 706087 - RNA, 22 nt, Human
aaacaguggccaauucuggaga

SEQ ID NO: 706088 - RNA, 22 nt, Human
acaccaaaguagaauuaaugua

SEQ ID NO: 706089 - RNA, 18 nt, Human
ugagaauguaagaaaugg

SEQ ID NO: 706090 - RNA, 22 nt, Human
cuccaggaaaauagggaaugag

SEQ ID NO: 706091 - RNA, 18 nt, Human
ucagagguacagaaaagu

SEQ ID NO: 706092 - RNA, 22 nt, Human
caaagaauagcauggcauuugu

SEQ ID NO: 706093 - RNA, 22 nt, Human
ugucauuuggacuuugguauua

SEQ ID NO: 706094 - RNA, 22 nt, Human
ggccaggagcaagccaggcucu

SEQ ID NO: 706095 - RNA, 22 nt, Human
acacauuuucuaacagggauca

SEQ ID NO: 706096 - RNA, 22 nt, Human
cugcaugcugagccaacaguga

SEQ ID NO: 706097 - RNA, 22 nt, Human
ucauuuacuugguuuuaaucuu

SEQ ID NO: 706098 - RNA, 22 nt, Human
uuugcauuuguucaaguauuga

SEQ ID NO: 706099 - RNA, 20 nt, Human
cucagaaaagcuaaggagaa

SEQ ID NO: 706100 - RNA, 22 nt, Human
cuuagacauggcagcuccaagu

SEQ ID NO: 706101 - RNA, 22 nt, Human
ucccacaggaggaguuggaaau

SEQ ID NO: 706102 - RNA, 20 nt, Human
uccaagcccuccuuccauuc

SEQ ID NO: 706103 - RNA, 22 nt, Human
gucugaauacguacuugugaag

SEQ ID NO: 706104 - RNA, 22 nt, Human
cccuggcugccagucaccagac

SEQ ID NO: 706105 - RNA, 22 nt, Human
uaaccugggaucugacgggaug

SEQ ID NO: 706106 - RNA, 22 nt, Human
uagaaaccucagggaaaucuuu

SEQ ID NO: 706107 - RNA, 22 nt, Human
gguggcucucugucagugacag

SEQ ID NO: 706108 - RNA, 22 nt, Human
ggcuggcucaugcaaaggguga

SEQ ID NO: 706109 - RNA, 22 nt, Human
aggcugaggcggguagaucacc

SEQ ID NO: 706110 - RNA, 22 nt, Human
uuggcaaaauuuaaagaaguga

SEQ ID NO: 706111 - RNA, 16 nt, Human
ccugggcucuguugga

SEQ ID NO: 706112 - RNA, 22 nt, Human
uauuuguccuuauuaagaucug

SEQ ID NO: 706113 - RNA, 22 nt, Human
cccagcccugaccuauuggaaa

SEQ ID NO: 706114 - RNA, 22 nt, Human
gaugaugaggccaugaggcagg

SEQ ID NO: 706115 - RNA, 22 nt, Human
aagugauacaucuagucuauaa

SEQ ID NO: 706116 - RNA, 22 nt, Human
uucccuaagcauugcaauggcg

SEQ ID NO: 706117 - RNA, 22 nt, Human
uagaaaacuaauacaugcuuga

SEQ ID NO: 706118 - RNA, 22 nt, Human
aggaagcugggguguucuucau

SEQ ID NO: 706119 - RNA, 22 nt, Human
ggccuaguuuuuucugguaggu

SEQ ID NO: 706120 - RNA, 22 nt, Human
ccucccugcgcuccugcggcgg

SEQ ID NO: 706121 - RNA, 22 nt, Human
gggacgacaggcucugugguag

SEQ ID NO: 706122 - RNA, 18 nt, Human
auuaaucauaaaaugcug

SEQ ID NO: 706123 - RNA, 22 nt, Human
uacagccucacauuuacuuaca

SEQ ID NO: 706124 - RNA, 22 nt, Human
cacugacuaaguuugugaaggu

SEQ ID NO: 706125 - RNA, 22 nt, Human
ugaggccugaagccuggagccu

SEQ ID NO: 706126 - RNA, 22 nt, Human
auuucacauuaauuugaugcuc

SEQ ID NO: 706127 - RNA, 22 nt, Human
uauauguagauuguaccaaugu

SEQ ID NO: 706128 - RNA, 22 nt, Human
uugagauagaucucaucuuccc

SEQ ID NO: 706129 - RNA, 22 nt, Human
cccaaaggcauuuugcugacca

SEQ ID NO: 706130 - RNA, 22 nt, Human
ugaaaacuugacaagugaggua

SEQ ID NO: 706131 - RNA, 22 nt, Human
caggcucccgcuccacugggca

SEQ ID NO: 706132 - RNA, 22 nt, Human
agaagcaaggucugucaguaua

SEQ ID NO: 706133 - RNA, 22 nt, Human
uacagagaguacagcauccaca

SEQ ID NO: 706134 - RNA, 19 nt, Human
cuguuauugucagagcucc

SEQ ID NO: 706135 - RNA, 22 nt, Human
cugggccuggggcuguugagag

SEQ ID NO: 706136 - RNA, 22 nt, Human
uuuccauauuuaaucaaaauaa

SEQ ID NO: 706137 - RNA, 18 nt, Human
acauuucuccuucugacc

SEQ ID NO: 706138 - RNA, 22 nt, Human
aggguggcaccuggaagggaug

SEQ ID NO: 706139 - RNA, 22 nt, Human
uguguauagaugcaugcauaua

SEQ ID NO: 706140 - RNA, 23 nt, Human
aggcagcagguuguccaggguga

SEQ ID NO: 706141 - RNA, 22 nt, Human
ugagaggguucccagggguuuc

SEQ ID NO: 706142 - RNA, 22 nt, Human
ucacaugucagucuuaaacaga

SEQ ID NO: 706143 - RNA, 22 nt, Human
auccuucagcugcccuguuacc

SEQ ID NO: 706144 - RNA, 22 nt, Human
uaaaucaguaaggcauauucuc

SEQ ID NO: 706145 - RNA, 22 nt, Human
ucaagacagauggguaacuugg

SEQ ID NO: 706146 - RNA, 22 nt, Human
ccugcaagacuauuuaguucca

SEQ ID NO: 706147 - RNA, 22 nt, Human
aaggucugcuuguuuucuugag

SEQ ID NO: 706148 - RNA, 22 nt, Human
ccaggcacuucaucauuagggu

SEQ ID NO: 706149 - RNA, 22 nt, Human
aaguaucucaaaaacaguaauc

SEQ ID NO: 706150 - RNA, 22 nt, Human
caggauggcagagaaaagggug

SEQ ID NO: 706151 - RNA, 16 nt, Human
cuccucuccuucagga

SEQ ID NO: 706152 - RNA, 22 nt, Human
aguuaaacucuaguagauacaa

SEQ ID NO: 706153 - RNA, 22 nt, Human
agauuucucuuucccuggcuga

SEQ ID NO: 706154 - RNA, 22 nt, Human
uucagucucaauuuaaguuuaa

SEQ ID NO: 706155 - RNA, 22 nt, Human
ccugccccucaaggccuggugc

SEQ ID NO: 706156 - RNA, 22 nt, Human
ccugaagagcacucuagaguug

SEQ ID NO: 706157 - RNA, 22 nt, Human
caggagacuauggcccaaggcc

SEQ ID NO: 706158 - RNA, 22 nt, Human
uaauguguccugaaagcuucug

SEQ ID NO: 706159 - RNA, 21 nt, Human
ucuguacaucauugagucccc

SEQ ID NO: 706160 - RNA, 22 nt, Human
uuuuauguuccugaagcuaucu

SEQ ID NO: 706161 - RNA, 22 nt, Human
ugcuuaaaguguuaacccuguu

SEQ ID NO: 706162 - RNA, 23 nt, Human
ugugucuguuuagggaggaugug

SEQ ID NO: 706163 - RNA, 22 nt, Human
ugagaauuacaaaugagucaca

SEQ ID NO: 706164 - RNA, 22 nt, Human
aaguuacauuuuggucuaauug

SEQ ID NO: 706165 - RNA, 22 nt, Human
ugaaauucauuguuuuaugugu

SEQ ID NO: 706166 - RNA, 22 nt, Human
agggagcuucuacuucaaggca

SEQ ID NO: 706167 - RNA, 22 nt, Human
aaaauugagagucuugugcaag

SEQ ID NO: 706168 - RNA, 22 nt, Human
agcuggagccagugugaggcuu

SEQ ID NO: 706169 - RNA, 22 nt, Human
cauuagcaggcacuaagaaggu

SEQ ID NO: 706170 - RNA, 18 nt, Human
augggcagguaagaucca

SEQ ID NO: 706171 - RNA, 21 nt, Human
uggcacagcaagugggcucau

SEQ ID NO: 706172 - RNA, 22 nt, Human
agcccugggauacaguaaaagc

SEQ ID NO: 706173 - RNA, 22 nt, Human
agcugccccgaggcggcgggaa

SEQ ID NO: 706174 - RNA, 21 nt, Human
gccuggcuagaagcuccuagc

SEQ ID NO: 706175 - RNA, 22 nt, Human
uacagcuuugggaaggccccau

SEQ ID NO: 706176 - RNA, 22 nt, Human
ucacuggagaaaaguaauguau

SEQ ID NO: 706177 - RNA, 22 nt, Human
cgcggagcuccgcccggugccc

SEQ ID NO: 706178 - RNA, 22 nt, Human
gcaguaggagggacaacuaccu

SEQ ID NO: 706179 - RNA, 22 nt, Human
uuuaauuauguuaagccacuga

SEQ ID NO: 706180 - RNA, 22 nt, Human
ggcagugagaggucuccugguc

SEQ ID NO: 706181 - RNA, 22 nt, Human
aggcuucauuguggcaucagga

SEQ ID NO: 706182 - RNA, 18 nt, Human
uguggcugguccacacug

SEQ ID NO: 706183 - RNA, 22 nt, Human
acagaauuuacacaucucuaaa

SEQ ID NO: 706184 - RNA, 22 nt, Human
agggagaagagaacaaagcccu

SEQ ID NO: 706185 - RNA, 22 nt, Human
agcuuuaaaucaauccagugag

SEQ ID NO: 706186 - RNA, 22 nt, Human
gguggaguaauucgcagagguu

SEQ ID NO: 706187 - RNA, 20 nt, Human
acaggagaucugaggaaagg

SEQ ID NO: 706188 - RNA, 22 nt, Human
agcuccugaaaauccagacugg

SEQ ID NO: 706189 - RNA, 22 nt, Human
acuuccuggcguagcugacauu

SEQ ID NO: 706190 - RNA, 22 nt, Human
cagucucucugaaguauuaaga

SEQ ID NO: 706191 - RNA, 22 nt, Human
uuucuaagucugagggaguaua

SEQ ID NO: 706192 - RNA, 22 nt, Human
gggcacaccuugucugagcaca

SEQ ID NO: 706193 - RNA, 22 nt, Human
ucacacagcuuggaguuauggu

SEQ ID NO: 706194 - RNA, 22 nt, Human
gauggagucugaagcugggaac

SEQ ID NO: 706195 - RNA, 22 nt, Human
agccacaggaaacagagacagc

SEQ ID NO: 706196 - RNA, 22 nt, Human
gugcaagaaggggagacugggu

SEQ ID NO: 706197 - RNA, 22 nt, Human
acucuuauuuugaaguaauaau

SEQ ID NO: 706198 - RNA, 22 nt, Human
agcaaugcaaucuuaaccuuga

SEQ ID NO: 706199 - RNA, 22 nt, Human
aagguuuccagugauauugugg

SEQ ID NO: 706200 - RNA, 22 nt, Human
agugaaaaccuaaucaugcagu

SEQ ID NO: 706201 - RNA, 20 nt, Human
ugcagagcuggcuggcuccu

SEQ ID NO: 706202 - RNA, 19 nt, Human
ggcugucucggcccagcca

SEQ ID NO: 706203 - RNA, 22 nt, Human
ugaauaguccuuggaauaacug

SEQ ID NO: 706204 - RNA, 22 nt, Human
ucccaaggccucuaguugauua

SEQ ID NO: 706205 - RNA, 22 nt, Human
gucucccacuuucuggccucuu

SEQ ID NO: 706206 - RNA, 22 nt, Human
gaucucuggguccuguuggccu

SEQ ID NO: 706207 - RNA, 22 nt, Human
ugcucccagggacucuggcugg

SEQ ID NO: 706208 - RNA, 22 nt, Human
gguacagggcuuccuggacaag

SEQ ID NO: 706209 - RNA, 19 nt, Human
gcuggauggauccuggagu

SEQ ID NO: 706210 - RNA, 22 nt, Human
uuggaagggaaccgaguuugcu

SEQ ID NO: 706211 - RNA, 22 nt, Human
gguucaguuuacauuaaaaucu

SEQ ID NO: 706212 - RNA, 18 nt, Human
aacuaaagaucuuuaagc

SEQ ID NO: 706213 - RNA, 20 nt, Human
agugaggcaguucagugggc

SEQ ID NO: 706214 - RNA, 19 nt, Human
ugaagcaggcagagaagau

SEQ ID NO: 706215 - RNA, 19 nt, Human
ucaaaugccaaugucacag

SEQ ID NO: 706216 - RNA, 22 nt, Human
augagcugggccauccagugau

SEQ ID NO: 706217 - RNA, 22 nt, Human
uaaguucaagucuuggauauaa

SEQ ID NO: 706218 - RNA, 22 nt, Human
uauuauugcaaguauauaaagu

SEQ ID NO: 706219 - RNA, 22 nt, Human
uggagcagccaugaugacagag

SEQ ID NO: 706220 - RNA, 22 nt, Human
aaggcuaaauucuguacugcau

SEQ ID NO: 706221 - RNA, 20 nt, Human
aagaaacuugaaaguacaag

SEQ ID NO: 706222 - RNA, 22 nt, Human
ccucccagugccggggccggcu

SEQ ID NO: 706223 - RNA, 22 nt, Human
ccuguucaccauggucacgugc

SEQ ID NO: 706224 - RNA, 23 nt, Human
gcuugucuagugaauucauaucu

SEQ ID NO: 706225 - RNA, 22 nt, Human
uauccugcuuuguuccucuuga

SEQ ID NO: 706226 - RNA, 21 nt, Human
ugaggcucaucuuauguggcu

SEQ ID NO: 706227 - RNA, 23 nt, Human
ugccagaggcagucacaguggug

SEQ ID NO: 706228 - RNA, 22 nt, Human
uggccagugggguugagcagga

SEQ ID NO: 706229 - RNA, 22 nt, Human
uucugagagagccucucauguu

SEQ ID NO: 706230 - RNA, 20 nt, Human
cucuuuugacucuuugcaag

SEQ ID NO: 706231 - RNA, 22 nt, Human
cccagccucuggguucugccgg

SEQ ID NO: 706232 - RNA, 22 nt, Human
gaagcuucgaaagagugauuuc

SEQ ID NO: 706233 - RNA, 22 nt, Human
aagcacugaggaaaaauuugau

SEQ ID NO: 706234 - RNA, 22 nt, Human
ucaggccugcaggcuuccugga

SEQ ID NO: 706235 - RNA, 22 nt, Human
ucagaaagcugauucuugauac

SEQ ID NO: 706236 - RNA, 22 nt, Human
cacauacugagaaucacaccca

SEQ ID NO: 706237 - RNA, 23 nt, Human
uggcuggcagaaacugaagcaug

SEQ ID NO: 706238 - RNA, 22 nt, Human
gcggggcacagugauggagcac

SEQ ID NO: 706239 - RNA, 22 nt, Human
gaugaagccccaguguaaguaa

SEQ ID NO: 706240 - RNA, 22 nt, Human
ccuggcugggguagaagugagg

SEQ ID NO: 706241 - RNA, 22 nt, Human
ggggcucaggggaaguguccag

SEQ ID NO: 706242 - RNA, 22 nt, Human
uggccagacagagaggcuuugu

SEQ ID NO: 706243 - RNA, 22 nt, Human
ggacgcagcgagggaagcagcc

SEQ ID NO: 706244 - RNA, 22 nt, Human
uuggaaacuuggauggaaaacc

SEQ ID NO: 706245 - RNA, 22 nt, Human
uguucuguaccuguccuggggc

SEQ ID NO: 706246 - RNA, 22 nt, Human
acacagccgugaaucugcuucu

SEQ ID NO: 706247 - RNA, 22 nt, Human
gcuuuggagccuguguucugcc

SEQ ID NO: 706248 - RNA, 22 nt, Human
cauggccacaucuagcugcaag

SEQ ID NO: 706249 - RNA, 22 nt, Human
ucaggucccacugcuaguaagu

SEQ ID NO: 706250 - RNA, 22 nt, Human
cuauuaaacacuacugugcacu

SEQ ID NO: 706251 - RNA, 22 nt, Human
gacagacagagaaugggcuuga

SEQ ID NO: 706252 - RNA, 22 nt, Human
ugacaccuugcuaaauggcacc

SEQ ID NO: 706253 - RNA, 22 nt, Human
aaguuuagaacuauaagaguga

SEQ ID NO: 706254 - RNA, 22 nt, Human
cuucauaaacucagaaggcagc

SEQ ID NO: 706255 - RNA, 22 nt, Human
cugaccugcuaagccccugucc

SEQ ID NO: 706256 - RNA, 22 nt, Human
ugcagggccuucuagaccaugg

SEQ ID NO: 706257 - RNA, 22 nt, Human
ccagggcuccccagaaguaccc

SEQ ID NO: 706258 - RNA, 22 nt, Human
uccaaacacccuccaugcugca

SEQ ID NO: 706259 - RNA, 22 nt, Human
ugggccuugcugagcuauggag

SEQ ID NO: 706260 - RNA, 22 nt, Human
aggccuggugugccggaugcag

SEQ ID NO: 706261 - RNA, 22 nt, Human
accagguggccccagcgugguu

SEQ ID NO: 706262 - RNA, 22 nt, Human
cauggcagaaaccugagcugcu

SEQ ID NO: 706263 - RNA, 22 nt, Human
auugcuuuugagcuagaauuuu

SEQ ID NO: 706264 - RNA, 22 nt, Human
cacaggaagcugacugcuggca

SEQ ID NO: 706265 - RNA, 22 nt, Human
uuguccuugugauaguuugcug

SEQ ID NO: 706266 - RNA, 22 nt, Human
ucucucugaguugagcaggagu

SEQ ID NO: 706267 - RNA, 22 nt, Human
uaggagcuaaaauauuuuauau

SEQ ID NO: 706268 - RNA, 22 nt, Human
acaagauuuaaugcaacccaag

SEQ ID NO: 706269 - RNA, 21 nt, Human
ugcaggcugugcgcuccugcc

SEQ ID NO: 706270 - RNA, 22 nt, Human
ggcugcaggcaggguauccacu

SEQ ID NO: 706271 - RNA, 17 nt, Human
uuucaagguuacguucc

SEQ ID NO: 706272 - RNA, 22 nt, Human
uuccucuuccaucuucccaggg

SEQ ID NO: 706273 - RNA, 22 nt, Human
uguauauugccugagucuuucc

SEQ ID NO: 706274 - RNA, 22 nt, Human
ucaaaguuacuugugguuuucu

SEQ ID NO: 706275 - RNA, 21 nt, Human
uuaagacacacagauuaagga

SEQ ID NO: 706276 - RNA, 22 nt, Human
auccucucugugacagggaacg

SEQ ID NO: 706277 - RNA, 22 nt, Human
gucacaggccuggaugaggggc

SEQ ID NO: 706278 - RNA, 23 nt, Human
acacauuuuucccguucugaggu

SEQ ID NO: 706279 - RNA, 21 nt, Human
ggcagccucuguggaagggga

SEQ ID NO: 706280 - RNA, 22 nt, Human
uagcaaccagaacagcacucua

SEQ ID NO: 706281 - RNA, 22 nt, Human
agaguuugugggcuuuuccucc

SEQ ID NO: 706282 - RNA, 22 nt, Human
uagcuguuuugccauaagcgcu

SEQ ID NO: 706283 - RNA, 22 nt, Human
augcccugcugcuggggcagug

SEQ ID NO: 706284 - RNA, 22 nt, Human
gaucacauaauuuggaaacagc

SEQ ID NO: 706285 - RNA, 22 nt, Human
gacaguguuacaauuuaaugga

SEQ ID NO: 706286 - RNA, 22 nt, Human
guuuucucuguguuuggaugau

SEQ ID NO: 706287 - RNA, 22 nt, Human
uagggcuguggucaguccucua

SEQ ID NO: 706288 - RNA, 19 nt, Human
aggcagcaggccagggaug

SEQ ID NO: 706289 - RNA, 22 nt, Human
cagcucuggcgucagggagcga

SEQ ID NO: 706290 - RNA, 22 nt, Human
caggaacaacucccagcaucuc

SEQ ID NO: 706291 - RNA, 19 nt, Human
gaaggagagcugaguuagg

SEQ ID NO: 706292 - RNA, 22 nt, Human
ugaggccucugaggccuaggcu

SEQ ID NO: 706293 - RNA, 22 nt, Human
aaauccuaaaaguuugacuuaa

SEQ ID NO: 706294 - RNA, 22 nt, Human
ugggcacagggguaggaaugag

SEQ ID NO: 706295 - RNA, 22 nt, Human
uagaaauggguuacauuuagag

SEQ ID NO: 706296 - RNA, 22 nt, Human
cggucaggugcagcguuggcac

SEQ ID NO: 706297 - RNA, 22 nt, Human
uuauucuuuucuccagaauccc

SEQ ID NO: 706298 - RNA, 22 nt, Human
guugaaagcuuuucauuuaguu

SEQ ID NO: 706299 - RNA, 18 nt, Human
uuguuuuaagacucuguc

SEQ ID NO: 706300 - RNA, 18 nt, Human
gccugagggucaagugug

SEQ ID NO: 706301 - RNA, 22 nt, Human
caucccugcugguggaaggggu

SEQ ID NO: 706302 - RNA, 22 nt, Human
auggcaccuuccccagagcuca

SEQ ID NO: 706303 - RNA, 22 nt, Human
agaaggcagguuuuaaaauguc

SEQ ID NO: 706304 - RNA, 22 nt, Human
uuuccuuguuauuauuuguccu

SEQ ID NO: 706305 - RNA, 22 nt, Human
uaguuuaugcugcugcagugag

SEQ ID NO: 706306 - RNA, 22 nt, Human
auuaauuuccaggcacugugcu

SEQ ID NO: 706307 - RNA, 22 nt, Human
cggcuucagucucaucaucgcc

SEQ ID NO: 706308 - RNA, 22 nt, Human
ugucuguauugaggugcauauu

SEQ ID NO: 706309 - RNA, 22 nt, Human
cucaguaaggaugcuucagcgg

SEQ ID NO: 706310 - RNA, 22 nt, Human
ugccuggcugaggugacagguu

SEQ ID NO: 706311 - RNA, 22 nt, Human
ugcugccaugcagagcaacaga

SEQ ID NO: 706312 - RNA, 22 nt, Human
aucagaaauagucauguuacuu

SEQ ID NO: 706313 - RNA, 22 nt, Human
acaugcucuccuaaggcccugu

SEQ ID NO: 706314 - RNA, 23 nt, Human
cuggggcucauugcaguagccau

SEQ ID NO: 706315 - RNA, 22 nt, Human
aagaggcagaaauaucgcugaa

SEQ ID NO: 706316 - RNA, 22 nt, Human
auuguaacaggaucccuguggc

SEQ ID NO: 706317 - RNA, 19 nt, Human
ucaucucacagggccuggc

SEQ ID NO: 706318 - RNA, 22 nt, Human
guuuucucaggaugguguguac

SEQ ID NO: 706319 - RNA, 22 nt, Human
aggcuaaggugggaggaucgcu

SEQ ID NO: 706320 - RNA, 22 nt, Human
uuaauugagccagaaaguaucu

SEQ ID NO: 706321 - RNA, 22 nt, Human
agaacagaugugggcagaccug

SEQ ID NO: 706322 - RNA, 22 nt, Human
uuccucuccucccaccagguga

SEQ ID NO: 706323 - RNA, 22 nt, Human
aagugucuuuuagccacuuuua

SEQ ID NO: 706324 - RNA, 22 nt, Human
cacacugauagcacuaagucag

SEQ ID NO: 706325 - RNA, 22 nt, Human
auuauuggacacuucuucugca

SEQ ID NO: 706326 - RNA, 22 nt, Human
gggcuccagauugcagcgauca

SEQ ID NO: 706327 - RNA, 22 nt, Human
cuuugggcaaagggccaauucg

SEQ ID NO: 706328 - RNA, 22 nt, Human
cagauaaauagauagauaaacu

SEQ ID NO: 706329 - RNA, 22 nt, Human
uguguauucagcaagcgaaaca

SEQ ID NO: 706330 - RNA, 22 nt, Human
ugggacagauuauaagucugca

SEQ ID NO: 706331 - RNA, 22 nt, Human
cauuuaugauaguaauaugaaa

SEQ ID NO: 706332 - RNA, 22 nt, Human
uaggcuucccgcucacaugccc

SEQ ID NO: 706333 - RNA, 17 nt, Human
ggcaguggaggaagaga

SEQ ID NO: 706334 - RNA, 22 nt, Human
agcuucuuggcucagcacuugg

SEQ ID NO: 706335 - RNA, 22 nt, Human
ucacugaugcuuaugaaagugu

SEQ ID NO: 706336 - RNA, 22 nt, Human
auuaguguguaggcuggaaaaa

SEQ ID NO: 706337 - RNA, 19 nt, Human
augagcaauaguuuuaauc

SEQ ID NO: 706338 - RNA, 20 nt, Human
ucugaacacaauauaucccc

SEQ ID NO: 706339 - RNA, 21 nt, Human
guucaaauggguagauucaca

SEQ ID NO: 706340 - RNA, 22 nt, Human
auuugucuuuggaccugugaga

SEQ ID NO: 706341 - RNA, 22 nt, Human
uucauuuaauuuguguauuaac

SEQ ID NO: 706342 - RNA, 22 nt, Human
ugcagaaguauuccaggcccca

SEQ ID NO: 706343 - RNA, 23 nt, Human
augacaaacaggacaucuugugc

SEQ ID NO: 706344 - RNA, 22 nt, Human
uuagugcucacguguuagaaag

SEQ ID NO: 706345 - RNA, 22 nt, Human
auugaguaauaauugaucuugg

SEQ ID NO: 706346 - RNA, 22 nt, Human
auccuuggaugugucuuuuugu

SEQ ID NO: 706347 - RNA, 22 nt, Human
auaaaaugguaaacgaagcuga

SEQ ID NO: 706348 - RNA, 22 nt, Human
uaauuggauguucucuggaagc

SEQ ID NO: 706349 - RNA, 22 nt, Human
aagcagcuuaaauuagagccug

SEQ ID NO: 706350 - RNA, 22 nt, Human
agacccugcaccucucgugggc

SEQ ID NO: 706351 - RNA, 22 nt, Human
aggcggguacccuggcucgaaa

SEQ ID NO: 706352 - RNA, 22 nt, Human
uaaugcuuaacagcuggcuuuu

SEQ ID NO: 706353 - RNA, 22 nt, Human
ucuggcagcagcaucaguggcu

SEQ ID NO: 706354 - RNA, 22 nt, Human
gcggugggggaaaggagcgguu

SEQ ID NO: 706355 - RNA, 22 nt, Human
cagucuccaaaucaaucugaau

SEQ ID NO: 706356 - RNA, 22 nt, Human
guggcccuuuguuuugauaccu

SEQ ID NO: 706357 - RNA, 22 nt, Human
uuagagccaguuacaaggucaa

SEQ ID NO: 706358 - RNA, 22 nt, Human
cacuuggaggcccccugugccc

SEQ ID NO: 706359 - RNA, 17 nt, Human
uauugaccuuuguaugu

SEQ ID NO: 706360 - RNA, 22 nt, Human
uacauaaugagcuaguuaaguu

SEQ ID NO: 706361 - RNA, 22 nt, Human
gacuguggcugcguguaaggaa

SEQ ID NO: 706362 - RNA, 22 nt, Human
cagugagcuccugucugucccu

SEQ ID NO: 706363 - RNA, 22 nt, Human
ugcucgagguccccaccggcuc

SEQ ID NO: 706364 - RNA, 22 nt, Human
ccuggggaagucacuucucuuu

SEQ ID NO: 706365 - RNA, 22 nt, Human
agugauuuacuaccauauuggg

SEQ ID NO: 706366 - RNA, 22 nt, Human
aacaucucagaagugacccuga

SEQ ID NO: 706367 - RNA, 22 nt, Human
aauauuaguuucucaagagaga

SEQ ID NO: 706368 - RNA, 22 nt, Human
uagggaugauggagccuaugua

SEQ ID NO: 706369 - RNA, 23 nt, Human
ugugcucccaaauguaggucuau

SEQ ID NO: 706370 - RNA, 22 nt, Human
agaggacagagugcuggauuua

SEQ ID NO: 706371 - RNA, 22 nt, Human
uguuauuuauuucaccuccaga

SEQ ID NO: 706372 - RNA, 22 nt, Human
uuacaguuuauccaggaagagc

SEQ ID NO: 706373 - RNA, 22 nt, Human
gaaagugcucucucuauacaca

SEQ ID NO: 706374 - RNA, 22 nt, Human
ucugagcacaauuacuuacauc

SEQ ID NO: 706375 - RNA, 22 nt, Human
auucauaaguaaaugauuaccu

SEQ ID NO: 706376 - RNA, 22 nt, Human
cagagccagaacuagaccuugu

SEQ ID NO: 706377 - RNA, 22 nt, Human
gggcccaguacccucugccaag

SEQ ID NO: 706378 - RNA, 17 nt, Human
caggaaaauaugaguga

SEQ ID NO: 706379 - RNA, 22 nt, Human
agcugaaggcuagaacagcugg

SEQ ID NO: 706380 - RNA, 22 nt, Human
cuucaauaggaacugcauggca

SEQ ID NO: 706381 - RNA, 22 nt, Human
uuuagaauguuagcguuaaagg

SEQ ID NO: 706382 - RNA, 22 nt, Human
uuccugccccugagagcuccca

SEQ ID NO: 706383 - RNA, 22 nt, Human
uguacaaugccgagacuaacuc

SEQ ID NO: 706384 - RNA, 20 nt, Human
aauguucaguaauuguuuua

SEQ ID NO: 706385 - RNA, 22 nt, Human
uauuuuaaagacugccagccua

SEQ ID NO: 706386 - RNA, 22 nt, Human
ggcaaagcugggauucaaaccc

SEQ ID NO: 706387 - RNA, 22 nt, Human
acaugggacagagaaagaggcc

SEQ ID NO: 706388 - RNA, 22 nt, Human
ggcucugggguuggcccaucuc

SEQ ID NO: 706389 - RNA, 22 nt, Human
ccaccucugagcccaaacccug

SEQ ID NO: 706390 - RNA, 19 nt, Human
uaugucccuuucccccauu

SEQ ID NO: 706391 - RNA, 22 nt, Human
agucugccaagccagaucaugu

SEQ ID NO: 706392 - RNA, 22 nt, Human
cccagcugaacuugcauuccaa

SEQ ID NO: 706393 - RNA, 22 nt, Human
cugcuuccaagaaagagauagg

SEQ ID NO: 706394 - RNA, 22 nt, Human
cuggaagggagcacuguagaga

SEQ ID NO: 706395 - RNA, 22 nt, Human
uagaauucauguuacuguuagc

SEQ ID NO: 706396 - RNA, 22 nt, Human
uuuugccuaagaaucucucuga

SEQ ID NO: 706397 - RNA, 22 nt, Human
ucagacagauuuugacacuugc

SEQ ID NO: 706398 - RNA, 22 nt, Human
gaggcuuugguuauaaaagauc

SEQ ID NO: 706399 - RNA, 22 nt, Human
cuuccaggugcuggccuggccu

SEQ ID NO: 706400 - RNA, 22 nt, Human
uguggcuuccacgauggucacc

SEQ ID NO: 706401 - RNA, 22 nt, Human
ggcuaggggaauaaucuguggu

SEQ ID NO: 706402 - RNA, 22 nt, Human
cuuucuugcauaauuugaaacc

SEQ ID NO: 706403 - RNA, 22 nt, Human
agaguaaauaggagaugacagc

SEQ ID NO: 706404 - RNA, 23 nt, Human
agcuaacagaucgacaaaguaua

SEQ ID NO: 706405 - RNA, 18 nt, Human
ucaguguagaucugugua

SEQ ID NO: 706406 - RNA, 22 nt, Human
gggcugccaagccugccugccu

SEQ ID NO: 706407 - RNA, 22 nt, Human
auacccuuuacaggaacagcaa

SEQ ID NO: 706408 - RNA, 22 nt, Human
guguucucuagagcuguacaaa

SEQ ID NO: 706409 - RNA, 22 nt, Human
ccagccacugggccacugccag

SEQ ID NO: 706410 - RNA, 22 nt, Human
gaagccacagggaaggagaaca

SEQ ID NO: 706411 - RNA, 22 nt, Human
aaggagaauuuggcuugugaug

SEQ ID NO: 706412 - RNA, 22 nt, Human
aagcccuggcggguggagggcc

SEQ ID NO: 706413 - RNA, 22 nt, Human
cuguacaggucaaugauaagau

SEQ ID NO: 706414 - RNA, 22 nt, Human
uuggcauugaaguuucauuggu

SEQ ID NO: 706415 - RNA, 22 nt, Human
ucuucaugccaaaugaguuuug

SEQ ID NO: 706416 - RNA, 22 nt, Human
ugggccuggaguuuguccagag

SEQ ID NO: 706417 - RNA, 19 nt, Human
uggagcagggcccuuguuu

SEQ ID NO: 706418 - RNA, 22 nt, Human
gccccaccgagggugcaguccu

SEQ ID NO: 706419 - RNA, 22 nt, Human
augcaaugguauauggucaccu

SEQ ID NO: 706420 - RNA, 22 nt, Human
acagaugaaacccagcuaguug

SEQ ID NO: 706421 - RNA, 22 nt, Human
ccagagagguagcuuacccucu

SEQ ID NO: 706422 - RNA, 19 nt, Human
gucucugcuccagggucuc

SEQ ID NO: 706423 - RNA, 22 nt, Human
uuacacacucugcccugcuguu

SEQ ID NO: 706424 - RNA, 21 nt, Human
uauuaauuuuucuucccacua

SEQ ID NO: 706425 - RNA, 22 nt, Human
uaaucucuagcccaugcaaaga

SEQ ID NO: 706426 - RNA, 22 nt, Human
aguuuacauaaaaaggcagagg

SEQ ID NO: 706427 - RNA, 22 nt, Human
ucugcucagugcuuaucucuaa

SEQ ID NO: 706428 - RNA, 22 nt, Human
aaugugaacuuugucauguaac

SEQ ID NO: 706429 - RNA, 22 nt, Human
auucuggaauucuaagauucug

SEQ ID NO: 706430 - RNA, 22 nt, Human
aagagggcagcacagguggguc

SEQ ID NO: 706431 - RNA, 22 nt, Human
ucauuuaugcaggaauggcaua

SEQ ID NO: 706432 - RNA, 22 nt, Human
ccaaaucaccagcacgaucauu

SEQ ID NO: 706433 - RNA, 22 nt, Human
cccuggcagugcuccuuuagac

SEQ ID NO: 706434 - RNA, 22 nt, Human
gaccucuugcacccuggcucuu

SEQ ID NO: 706435 - RNA, 22 nt, Human
guguccuguuucccugucuaua

SEQ ID NO: 706436 - RNA, 22 nt, Human
uaauuuuuccacguacacuggg

SEQ ID NO: 706437 - RNA, 22 nt, Human
uccugccugcaaucccagcacu

SEQ ID NO: 706438 - RNA, 22 nt, Human
gcaugagguucuuggccagcau

SEQ ID NO: 706439 - RNA, 22 nt, Human
uugcagaacuuaaagacagagu

SEQ ID NO: 706440 - RNA, 19 nt, Human
ucacauucagccuugcuga

SEQ ID NO: 706441 - RNA, 22 nt, Human
cuugaagacaauggcagauucc

SEQ ID NO: 706442 - RNA, 22 nt, Human
ccucagggucucucacagcacc

SEQ ID NO: 706443 - RNA, 22 nt, Human
uuguuuucacagcuuugcccgg

SEQ ID NO: 706444 - RNA, 22 nt, Human
ugugggaaucagccaggggggc

SEQ ID NO: 706445 - RNA, 22 nt, Human
uaacaauucucaaaagagggga

SEQ ID NO: 706446 - RNA, 22 nt, Human
uggcugcagugcuugagauguc

SEQ ID NO: 706447 - RNA, 19 nt, Human
agcagggacauggaacuuu

SEQ ID NO: 706448 - RNA, 22 nt, Human
ggcacuagugacaaggggacau

SEQ ID NO: 706449 - RNA, 22 nt, Human
acacaaugcauauuuuuccaga

SEQ ID NO: 706450 - RNA, 22 nt, Human
agauguaagaccuucaugaggg

SEQ ID NO: 706451 - RNA, 22 nt, Human
agagugaagguugacacuucac

SEQ ID NO: 706452 - RNA, 21 nt, Human
ucauuugugaucugauuucca

SEQ ID NO: 706453 - RNA, 22 nt, Human
cuggcuguauuaguuugauccu

SEQ ID NO: 706454 - RNA, 18 nt, Human
acugaagaugcaagaccu

SEQ ID NO: 706455 - RNA, 22 nt, Human
gaacagacuuggaggagugauc

SEQ ID NO: 706456 - RNA, 22 nt, Human
ugugggccucagcaggacucca

SEQ ID NO: 706457 - RNA, 22 nt, Human
uucagccaauuagaagccccac

SEQ ID NO: 706458 - RNA, 22 nt, Human
agcaucagcagacucucagcua

SEQ ID NO: 706459 - RNA, 22 nt, Human
agccagagacuuuaccugugca

SEQ ID NO: 706460 - RNA, 22 nt, Human
aaauguccugagauucaacuua

SEQ ID NO: 706461 - RNA, 22 nt, Human
auagacgcggccgcugaugcag

SEQ ID NO: 706462 - RNA, 22 nt, Human
gucagaaaaagcaaggcugggc

SEQ ID NO: 706463 - RNA, 22 nt, Human
guucugaggcaaaggcagcagc

SEQ ID NO: 706464 - RNA, 19 nt, Human
uuagggguaugaaguggua

SEQ ID NO: 706465 - RNA, 22 nt, Human
gcacggcaagacggggccuccu

SEQ ID NO: 706466 - RNA, 18 nt, Human
acauuucuaggugaaagc

SEQ ID NO: 706467 - RNA, 22 nt, Human
uuguguccugauuugacacaau

SEQ ID NO: 706468 - RNA, 22 nt, Human
cuggggggcuacugacagagga

SEQ ID NO: 706469 - RNA, 22 nt, Human
ugaaaauggccugaagaagcaa

SEQ ID NO: 706470 - RNA, 19 nt, Human
agaggcaagggcucaugac

SEQ ID NO: 706471 - RNA, 22 nt, Human
ccuggcuggcaagaucgugaag

SEQ ID NO: 706472 - RNA, 22 nt, Human
ggauccuuaacuaucacaguga

SEQ ID NO: 706473 - RNA, 22 nt, Human
uaauagucauuguauaccuugg

SEQ ID NO: 706474 - RNA, 22 nt, Human
gccaggcuggugcaaggauauu

SEQ ID NO: 706475 - RNA, 22 nt, Human
ccagaagcaaaacagacaguuu

SEQ ID NO: 706476 - RNA, 22 nt, Human
cccagcagccagaaugaggagc

SEQ ID NO: 706477 - RNA, 22 nt, Human
gaaggccaguuuugagauaggu

SEQ ID NO: 706478 - RNA, 22 nt, Human
gcuucuauccuaccaugucuug

SEQ ID NO: 706479 - RNA, 20 nt, Human
aucaucuuuacaaugucagu

SEQ ID NO: 706480 - RNA, 23 nt, Human
acaacuuuacagauacauuuugu

SEQ ID NO: 706481 - RNA, 22 nt, Human
uuacuguguuuggcuuuagaug

SEQ ID NO: 706482 - RNA, 22 nt, Human
aaccuggagugcugguuucacu

SEQ ID NO: 706483 - RNA, 17 nt, Human
cagcugugagagccuua

SEQ ID NO: 706484 - RNA, 22 nt, Human
caaaugcaugagaaauaagagg

SEQ ID NO: 706485 - RNA, 22 nt, Human
cuucuuuagggaucucuugcug

SEQ ID NO: 706486 - RNA, 22 nt, Human
ucuaugucuccaccuucgcaga

SEQ ID NO: 706487 - RNA, 19 nt, Human
uacauccggguuacuuaag

SEQ ID NO: 706488 - RNA, 22 nt, Human
cuggagaguuggaagauggacu

SEQ ID NO: 706489 - RNA, 21 nt, Human
gauuaaauuuaagcuacaugc

SEQ ID NO: 706490 - RNA, 22 nt, Human
agacuguaauugacaugucagc

SEQ ID NO: 706491 - RNA, 22 nt, Human
gagaguucuugccuggguauua

SEQ ID NO: 706492 - RNA, 22 nt, Human
ccaccuggggccucugagucuc

SEQ ID NO: 706493 - RNA, 22 nt, Human
ugaucuuuucaaagacaagcuu

SEQ ID NO: 706494 - RNA, 23 nt, Human
agacccagagacuggcucugcuc

SEQ ID NO: 706495 - RNA, 22 nt, Human
uacagugauuucuacugguguu

SEQ ID NO: 706496 - RNA, 20 nt, Human
agcaguguuucuugacucua

SEQ ID NO: 706497 - RNA, 22 nt, Human
ugccugggugcccucugcuccu

SEQ ID NO: 706498 - RNA, 22 nt, Human
ucuguccagcucuggggcucac

SEQ ID NO: 706499 - RNA, 22 nt, Human
ucuggcagcgaagcguguacuu

SEQ ID NO: 706500 - RNA, 22 nt, Human
cacuccagccucagugacagag

SEQ ID NO: 706501 - RNA, 22 nt, Human
aacauucuauuuugcuaaaaca

SEQ ID NO: 706502 - RNA, 22 nt, Human
cuguguuuuuggucugaucuau

SEQ ID NO: 706503 - RNA, 22 nt, Human
ugcugcuuugauguguaaauca

SEQ ID NO: 706504 - RNA, 22 nt, Human
uuaacacuugaacucuacaugu

SEQ ID NO: 706505 - RNA, 22 nt, Human
cacauuccugagcuucgaccug

SEQ ID NO: 706506 - RNA, 22 nt, Human
cuugaacucaaugugaggaaga

SEQ ID NO: 706507 - RNA, 22 nt, Human
aacauacuuauacuaaauaaug

SEQ ID NO: 706508 - RNA, 22 nt, Human
gcugggcaaggcugaagcuacc

SEQ ID NO: 706509 - RNA, 22 nt, Human
gaggaagggcugccugccgggc

SEQ ID NO: 706510 - RNA, 22 nt, Human
uguguucauuucucucugcugu

SEQ ID NO: 706511 - RNA, 22 nt, Human
gcccagccagagcugugugaug

SEQ ID NO: 706512 - RNA, 22 nt, Human
ucauuuggagccuuccuguuuu

SEQ ID NO: 706513 - RNA, 22 nt, Human
auuauuuguguccacagaauac

SEQ ID NO: 706514 - RNA, 21 nt, Human
gaagacacauaaccucucucc

SEQ ID NO: 706515 - RNA, 22 nt, Human
caggcuucagggaacgcagucu

SEQ ID NO: 706516 - RNA, 22 nt, Human
ugucaauguguacaggagcuca

SEQ ID NO: 706517 - RNA, 22 nt, Human
agacaaauuuguuuuccugucu

SEQ ID NO: 706518 - RNA, 22 nt, Human
gcugagaaaugcagacaugcug

SEQ ID NO: 706519 - RNA, 22 nt, Human
uggcacugaaaaaggagagguu

SEQ ID NO: 706520 - RNA, 22 nt, Human
gcagggcaaacccagguguuca

SEQ ID NO: 706521 - RNA, 22 nt, Human
guuauuucagccacagagugca

SEQ ID NO: 706522 - RNA, 22 nt, Human
gacuggccuggagaugcagcug

SEQ ID NO: 706523 - RNA, 22 nt, Human
accauguuggccaagcuggucu

SEQ ID NO: 706524 - RNA, 22 nt, Human
gcagcuuugaagacuuauuugc

SEQ ID NO: 706525 - RNA, 22 nt, Human
ggcucugggccuccaaggucug

SEQ ID NO: 706526 - RNA, 22 nt, Human
uuaguuaaaauucugcugacau

SEQ ID NO: 706527 - RNA, 22 nt, Human
cacuugaguucuuaauagucag

SEQ ID NO: 706528 - RNA, 22 nt, Human
gcaggucuguugauuacaguca

SEQ ID NO: 706529 - RNA, 22 nt, Human
uauucauggggguccagguacc

SEQ ID NO: 706530 - RNA, 22 nt, Human
guagggcucaguaaauacuuug

SEQ ID NO: 706531 - RNA, 22 nt, Human
uagaaagucaaaacacuguguu

SEQ ID NO: 706532 - RNA, 22 nt, Human
agggaagaaaauccaucgcugc

SEQ ID NO: 706533 - RNA, 22 nt, Human
ugguggagggaacuauuuccag

SEQ ID NO: 706534 - RNA, 22 nt, Human
ggcugugcuuugcccaaagggc

SEQ ID NO: 706535 - RNA, 22 nt, Human
guguagagugacaaggugggaa

SEQ ID NO: 706536 - RNA, 22 nt, Human
ggcaggaagcauuaaaacgauu

SEQ ID NO: 706537 - RNA, 22 nt, Human
caugucuuauauccugucuuca

SEQ ID NO: 706538 - RNA, 22 nt, Human
aaagaacuuaagaaauuaggcu

SEQ ID NO: 706539 - RNA, 22 nt, Human
ucaguucuugggcugcuaggac

SEQ ID NO: 706540 - RNA, 22 nt, Human
gaugaucugagguacaugaaac

SEQ ID NO: 706541 - RNA, 22 nt, Human
guaaacaauagcauugccugau

SEQ ID NO: 706542 - RNA, 22 nt, Human
aaccugaauuacuuuugcacca

SEQ ID NO: 706543 - RNA, 22 nt, Human
gugaaacugcuuuguaaacugu

SEQ ID NO: 706544 - RNA, 22 nt, Human
uggauggggcagcuuaggugug

SEQ ID NO: 706545 - RNA, 22 nt, Human
aaauauaccaguugccugcauc

SEQ ID NO: 706546 - RNA, 22 nt, Human
ucugggaagugagaugcugugu

SEQ ID NO: 706547 - RNA, 22 nt, Human
uuucaagaacaacauucauuca

SEQ ID NO: 706548 - RNA, 22 nt, Human
aaagugcugaaauuacaggugu

SEQ ID NO: 706549 - RNA, 22 nt, Human
aaaugcuuguauauuucuuggu

SEQ ID NO: 706550 - RNA, 22 nt, Human
agcccaugcaacaggccuagcg

SEQ ID NO: 706551 - RNA, 22 nt, Human
gauguacaagauuguaggaaug

SEQ ID NO: 706552 - RNA, 22 nt, Human
cagaaacauguauaaaguugua

SEQ ID NO: 706553 - RNA, 21 nt, Human
uuucuaagugcuugguuuggg

SEQ ID NO: 706554 - RNA, 22 nt, Human
auaaggcaucucucaguuagca

SEQ ID NO: 706555 - RNA, 22 nt, Human
ugauuucucuccguuauuucag

SEQ ID NO: 706556 - RNA, 22 nt, Human
uuuguuuaucaaggucuagcau

SEQ ID NO: 706557 - RNA, 22 nt, Human
gagaggccaagggauccgugag

SEQ ID NO: 706558 - RNA, 22 nt, Human
uauuacugagguuuuauggagu

SEQ ID NO: 706559 - RNA, 22 nt, Human
cacaggaaauauuaggagggau

SEQ ID NO: 706560 - RNA, 22 nt, Human
gaacaaauucucaucaacuugu

SEQ ID NO: 706561 - RNA, 22 nt, Human
uagcaucuguucuuucauuaaa

SEQ ID NO: 706562 - RNA, 22 nt, Human
gcccaggauaaugcugucccug

SEQ ID NO: 706563 - RNA, 22 nt, Human
aggcuucagaugaccuuagcau

SEQ ID NO: 706564 - RNA, 22 nt, Human
guaacaaaguuucuaggugcug

SEQ ID NO: 706565 - RNA, 22 nt, Human
agguucuggagaacuuggaggu

SEQ ID NO: 706566 - RNA, 22 nt, Human
gcaaagcaaaugccugaaggcg

SEQ ID NO: 706567 - RNA, 22 nt, Human
gcagagcaccaaagugaaagau

SEQ ID NO: 706568 - RNA, 22 nt, Human
ugcugaggcaguccuaacagga

SEQ ID NO: 706569 - RNA, 22 nt, Human
aaauuugccagaucaauucuga

SEQ ID NO: 706570 - RNA, 21 nt, Human
ugcuugucugccuagaggcuu

SEQ ID NO: 706571 - RNA, 22 nt, Human
gaaggaagacugguuuaaaugu

SEQ ID NO: 706572 - RNA, 21 nt, Human
ugucagcaacaauacuuucuc

SEQ ID NO: 706573 - RNA, 22 nt, Human
gucuccaguguucaggugacug

SEQ ID NO: 706574 - RNA, 22 nt, Human
gaaggagagaaaggcaauucug

SEQ ID NO: 706575 - RNA, 18 nt, Human
gccucaguuuccucaccu

SEQ ID NO: 706576 - RNA, 22 nt, Human
ugaaugaguggauucugaguag

SEQ ID NO: 706577 - RNA, 22 nt, Human
guacaggaaggagggaguuuca

SEQ ID NO: 706578 - RNA, 22 nt, Human
uguuauuugggaaaguuguaca

SEQ ID NO: 706579 - RNA, 22 nt, Human
cuguccaucagaaaggggcuua

SEQ ID NO: 706580 - RNA, 22 nt, Human
ucaggucuuuugucuccuagaa

SEQ ID NO: 706581 - RNA, 22 nt, Human
aaccccaggcuggaggagucuc

SEQ ID NO: 706582 - RNA, 22 nt, Human
aagacacucauuaucacugguu

SEQ ID NO: 706583 - RNA, 22 nt, Human
uuccugccuacaugccuuaugc

SEQ ID NO: 706584 - RNA, 22 nt, Human
cagagccuggcgaugucaugga

SEQ ID NO: 706585 - RNA, 22 nt, Human
cacuguuuuuauguaaucagug

SEQ ID NO: 706586 - RNA, 22 nt, Human
ugguguguacauuuuugcuucu

SEQ ID NO: 706587 - RNA, 22 nt, Human
gggagagagagcucauguugaa

SEQ ID NO: 706588 - RNA, 22 nt, Human
uacaaagugugcccaugcugag

SEQ ID NO: 706589 - RNA, 22 nt, Human
uuuccuaaucccaaugacauuu

SEQ ID NO: 706590 - RNA, 22 nt, Human
aagccaguguggucugcccauu

SEQ ID NO: 706591 - RNA, 22 nt, Human
cagguggguacaucacagagac

SEQ ID NO: 706592 - RNA, 21 nt, Human
cagcaaaucauugggcagacu

SEQ ID NO: 706593 - RNA, 22 nt, Human
ccugcccagggucaccacagag

SEQ ID NO: 706594 - RNA, 22 nt, Human
auguacaggauggugcucaucu

SEQ ID NO: 706595 - RNA, 18 nt, Human
cgggcgggcgccuggccc

SEQ ID NO: 706596 - RNA, 22 nt, Human
uggcaacaugucgaagugcugu

SEQ ID NO: 706597 - RNA, 19 nt, Human
cagaggcacuuucucuuag

SEQ ID NO: 706598 - RNA, 22 nt, Human
gcuggggacuccccaccauagc

SEQ ID NO: 706599 - RNA, 22 nt, Human
gggaagugauggagccaggauu

SEQ ID NO: 706600 - RNA, 22 nt, Human
acauucuuucaccuugugucca

SEQ ID NO: 706601 - RNA, 22 nt, Human
gaggccuccucugagacaucug

SEQ ID NO: 706602 - RNA, 22 nt, Human
caggaaacaaagccuugcucau

SEQ ID NO: 706603 - RNA, 22 nt, Human
aaauugccaaauuguuuuccag

SEQ ID NO: 706604 - RNA, 22 nt, Human
gaauguuuuucaaaccuguggc

SEQ ID NO: 706605 - RNA, 22 nt, Human
agcaccuccuuagcuaugacca

SEQ ID NO: 706606 - RNA, 22 nt, Human
guuuacaguggcuucauuggau

SEQ ID NO: 706607 - RNA, 22 nt, Human
auucuagcaguuacaggcugau

SEQ ID NO: 706608 - RNA, 22 nt, Human
cuggccaggcauccccugaucc

SEQ ID NO: 706609 - RNA, 22 nt, Human
ccagggugagaaaaggcuggau

SEQ ID NO: 706610 - RNA, 22 nt, Human
guuccacaaagauugucucucu

SEQ ID NO: 706611 - RNA, 22 nt, Human
uucuuguuccaugaaagacaga

SEQ ID NO: 706612 - RNA, 22 nt, Human
acugugaacggacugaagccca

SEQ ID NO: 706613 - RNA, 22 nt, Human
aggaaugucugagaaagaggca

SEQ ID NO: 706614 - RNA, 22 nt, Human
aaauacauuuacagucguggcu

SEQ ID NO: 706615 - RNA, 22 nt, Human
ccucaccucagucugggccuca

SEQ ID NO: 706616 - RNA, 22 nt, Human
aaucuugaguguuacucucauu

SEQ ID NO: 706617 - RNA, 22 nt, Human
cauuaugaagcaucaucuuauu

SEQ ID NO: 706618 - RNA, 22 nt, Human
cacaguuucaauaauuauucuu

SEQ ID NO: 706619 - RNA, 22 nt, Human
agcagagcaugcuaagugacuc

SEQ ID NO: 706620 - RNA, 22 nt, Human
acuagcagggauguuauuacuu

SEQ ID NO: 706621 - RNA, 23 nt, Human
gaggcacucaggaaaugugagug

SEQ ID NO: 706622 - RNA, 22 nt, Human
ugucuauuugaauuauccuaau

SEQ ID NO: 706623 - RNA, 23 nt, Human
aagcuucuaucucugcagaagga

SEQ ID NO: 706624 - RNA, 22 nt, Human
agggcacaucugcugggaaugg

SEQ ID NO: 706625 - RNA, 21 nt, Human
uuucauugaaugagauaaggu

SEQ ID NO: 706626 - RNA, 22 nt, Human
gcaguuauguauguguuugaga

SEQ ID NO: 706627 - RNA, 22 nt, Human
cagggcucugccuugagggaug

SEQ ID NO: 706628 - RNA, 22 nt, Human
aagccacuguuuuggagugcuu

SEQ ID NO: 706629 - RNA, 22 nt, Human
uuagaaaugcacccaagaccua

SEQ ID NO: 706630 - RNA, 22 nt, Human
agugacaggaccaggucuggaa

SEQ ID NO: 706631 - RNA, 20 nt, Human
agcugguccccaagccucuc

SEQ ID NO: 706632 - RNA, 17 nt, Human
ggcagcugccacuuuuu

SEQ ID NO: 706633 - RNA, 22 nt, Human
ugcugucuucucugaggucccu

SEQ ID NO: 706634 - RNA, 22 nt, Human
gcaaggaccuuugagcgugcca

SEQ ID NO: 706635 - RNA, 22 nt, Human
aaagcagcaaguauuuguuacu

SEQ ID NO: 706636 - RNA, 22 nt, Human
cagccugcuagggcaaugccuu

SEQ ID NO: 706637 - RNA, 22 nt, Human
ugaaguccuagaacuccuggua

SEQ ID NO: 706638 - RNA, 21 nt, Human
gacuucaugggucaaccaauu

SEQ ID NO: 706639 - RNA, 22 nt, Human
uuccucuccucacaugagucac

SEQ ID NO: 706640 - RNA, 22 nt, Human
cugaacugacagacugccugcu

SEQ ID NO: 706641 - RNA, 22 nt, Human
uaaacuaucuguguuugaaguu

SEQ ID NO: 706642 - RNA, 22 nt, Human
ucagcagggccaugcucucucu

SEQ ID NO: 706643 - RNA, 22 nt, Human
aggcagauuacuugaggccagg

SEQ ID NO: 706644 - RNA, 22 nt, Human
ugaaggcauuugaguuggugag

SEQ ID NO: 706645 - RNA, 22 nt, Human
ccggcgggcgcggugacgucag

SEQ ID NO: 706646 - RNA, 22 nt, Human
agugaccauuuucagcuagagg

SEQ ID NO: 706647 - RNA, 22 nt, Human
ggcuuccaagguccucuccacc

SEQ ID NO: 706648 - RNA, 22 nt, Human
agcucaggcaacucugggcccc

SEQ ID NO: 706649 - RNA, 22 nt, Human
ggguccagaaugagaaugggcu

SEQ ID NO: 706650 - RNA, 22 nt, Human
caaagcugauacucagcaagua

SEQ ID NO: 706651 - RNA, 22 nt, Human
cagcacaauuuucaggagucca

SEQ ID NO: 706652 - RNA, 22 nt, Human
guggggcaguggccugggagca

SEQ ID NO: 706653 - RNA, 22 nt, Human
aagaggaacugggggcugaguc

SEQ ID NO: 706654 - RNA, 22 nt, Human
agggcugccugacuccagagcc

SEQ ID NO: 706655 - RNA, 20 nt, Human
auaauuuacccugcaccacu

SEQ ID NO: 706656 - RNA, 22 nt, Human
ugauacuuuucuuuuagacuaa

SEQ ID NO: 706657 - RNA, 22 nt, Human
auaaggaaaauuggagaaauug

SEQ ID NO: 706658 - RNA, 22 nt, Human
uagaggagggcuguucuucagu

SEQ ID NO: 706659 - RNA, 22 nt, Human
gcagagcucaugccugcaccuc

SEQ ID NO: 706660 - RNA, 22 nt, Human
acaugcaauauugagacuuucu

SEQ ID NO: 706661 - RNA, 22 nt, Human
gcccacuggcuggagugcuggu

SEQ ID NO: 706662 - RNA, 22 nt, Human
uugacaaaacaacacagauuuc

SEQ ID NO: 706663 - RNA, 22 nt, Human
ugauuuuauugaaacuucacuu

SEQ ID NO: 706664 - RNA, 22 nt, Human
gugauuaagcauuucagaauuu

SEQ ID NO: 706665 - RNA, 22 nt, Human
ugagcagcccuuccuccggcca

SEQ ID NO: 706666 - RNA, 22 nt, Human
agcuccaggccuugggccccgg

SEQ ID NO: 706667 - RNA, 22 nt, Human
gggcuucuagaauuucugauau

SEQ ID NO: 706668 - RNA, 22 nt, Human
gggcaccagcggccgcacugcc

SEQ ID NO: 706669 - RNA, 22 nt, Human
acuuggcuuuuccaucucugca

SEQ ID NO: 706670 - RNA, 22 nt, Human
ggugucugaugguggcuucuca

SEQ ID NO: 706671 - RNA, 22 nt, Human
agcucacaguguccuuccucaa

SEQ ID NO: 706672 - RNA, 22 nt, Human
cagaaauguuuauauguggugu

SEQ ID NO: 706673 - RNA, 22 nt, Human
agugugagcccuggaguggugc

SEQ ID NO: 706674 - RNA, 22 nt, Human
auuucaacguuagauguaauag

SEQ ID NO: 706675 - RNA, 20 nt, Human
ucuucagcacuccuuaggua

SEQ ID NO: 706676 - RNA, 23 nt, Human
cccagggacacgaugacaccucc

SEQ ID NO: 706677 - RNA, 22 nt, Human
guggcacaaggcuuacacagca

SEQ ID NO: 706678 - RNA, 22 nt, Human
gaguaauuccaauauaaaucac

SEQ ID NO: 706679 - RNA, 22 nt, Human
ccuccaggcugaauaucuagaa

SEQ ID NO: 706680 - RNA, 22 nt, Human
aaugcaaugcagcaccuccuug

SEQ ID NO: 706681 - RNA, 22 nt, Human
uuuccucuucgauuaaguuugg

SEQ ID NO: 706682 - RNA, 22 nt, Human
agaagccagaauauucauggau

SEQ ID NO: 706683 - RNA, 22 nt, Human
aagagcaggacagaaucagaac

SEQ ID NO: 706684 - RNA, 22 nt, Human
ccaggccuggaccaugccaggg

SEQ ID NO: 706685 - RNA, 22 nt, Human
uuugcucaguucucuguauuuu

SEQ ID NO: 706686 - RNA, 22 nt, Human
agacacugaaauguauugaaga

SEQ ID NO: 706687 - RNA, 22 nt, Human
guccaggucuggacccugagcc

SEQ ID NO: 706688 - RNA, 22 nt, Human
ugggccacaagccaugggacca

SEQ ID NO: 706689 - RNA, 22 nt, Human
gguggggcugcaagcaguucgg

SEQ ID NO: 706690 - RNA, 22 nt, Human
gaacacaagcguaugucuuugu

SEQ ID NO: 706691 - RNA, 22 nt, Human
gcagcagugcgggcagcuacag

SEQ ID NO: 706692 - RNA, 22 nt, Human
aacuagaaagaacauauuucca

SEQ ID NO: 706693 - RNA, 22 nt, Human
gcacaugucuuauucacuguua

SEQ ID NO: 706694 - RNA, 22 nt, Human
aaggauuuuuggaaugagaugg

SEQ ID NO: 706695 - RNA, 22 nt, Human
uuaagaauggaaugaggaauuu

SEQ ID NO: 706696 - RNA, 21 nt, Human
acugggcuagccugacuucug

SEQ ID NO: 706697 - RNA, 22 nt, Human
cuggagguaauguuauuuuugu

SEQ ID NO: 706698 - RNA, 23 nt, Human
cagugcagggcaacucagacucc

SEQ ID NO: 706699 - RNA, 22 nt, Human
uacaagaaugucuuaaaagcuc

SEQ ID NO: 706700 - RNA, 22 nt, Human
auucacaugugcuucuuaucac

SEQ ID NO: 706701 - RNA, 22 nt, Human
acuugaaaagcucagcaguagu

SEQ ID NO: 706702 - RNA, 22 nt, Human
caguuaacuucauaugaucauu

SEQ ID NO: 706703 - RNA, 22 nt, Human
cagcuggaucccugcagaacuu

SEQ ID NO: 706704 - RNA, 22 nt, Human
gccuggagggauagaaugcaag

SEQ ID NO: 706705 - RNA, 22 nt, Human
cacugaaccugaaccaauacuc

SEQ ID NO: 706706 - RNA, 22 nt, Human
gagaugguuggguuaacaacua

SEQ ID NO: 706707 - RNA, 22 nt, Human
uuuaacccaaauaaccacagga

SEQ ID NO: 706708 - RNA, 22 nt, Human
gaggagggcaguuccucuuuua

SEQ ID NO: 706709 - RNA, 19 nt, Human
ugucccagacuccgugucu

SEQ ID NO: 706710 - RNA, 22 nt, Human
ccugggaccucgcgggaagcgg

SEQ ID NO: 706711 - RNA, 22 nt, Human
ccugucuguauugguuugcuau

SEQ ID NO: 706712 - RNA, 22 nt, Human
cacuucaaccucugaguccugg

SEQ ID NO: 706713 - RNA, 22 nt, Human
uuacuuucaaaaacuacguggg

SEQ ID NO: 706714 - RNA, 22 nt, Human
gugcaggugguuggcccagccg

SEQ ID NO: 706715 - RNA, 22 nt, Human
ccaggagguggcaggacuugcc

SEQ ID NO: 706716 - RNA, 22 nt, Human
cuccuccagugggucccucagg

SEQ ID NO: 706717 - RNA, 22 nt, Human
ggggaccuaggcucugucucuu

SEQ ID NO: 706718 - RNA, 22 nt, Human
acaggcaccugccaccacaucu

SEQ ID NO: 706719 - RNA, 22 nt, Human
ucagcuucaaauuuggugaagu

SEQ ID NO: 706720 - RNA, 22 nt, Human
gcagaugauguagacagacagu

SEQ ID NO: 706721 - RNA, 22 nt, Human
cacaggcuuuucugacauaggc

SEQ ID NO: 706722 - RNA, 20 nt, Human
cucugcagcaaggccugggu

SEQ ID NO: 706723 - RNA, 22 nt, Human
agcugcccucgcuggggccaga

SEQ ID NO: 706724 - RNA, 22 nt, Human
uaacacagugucuaccauuauu

SEQ ID NO: 706725 - RNA, 22 nt, Human
uacaccugggacccauccaaga

SEQ ID NO: 706726 - RNA, 22 nt, Human
accaggaggaaguguuaaugau

SEQ ID NO: 706727 - RNA, 22 nt, Human
gucaguucauuagcacuuccaa

SEQ ID NO: 706728 - RNA, 22 nt, Human
acacaagaauaaugaugaaggu

SEQ ID NO: 706729 - RNA, 19 nt, Human
auucagcauucugcacuuc

SEQ ID NO: 706730 - RNA, 22 nt, Human
uugacaagaaucguugccuugg

SEQ ID NO: 706731 - RNA, 22 nt, Human
uaacuucuggaaaugcaucugc

SEQ ID NO: 706732 - RNA, 22 nt, Human
agggagacacaugaggaaguca

SEQ ID NO: 706733 - RNA, 22 nt, Human
cuucuugucaauuugccauugu

SEQ ID NO: 706734 - RNA, 22 nt, Human
gggcucuguggaugugagagcu

SEQ ID NO: 706735 - RNA, 22 nt, Human
agaggucuuaaguuccuugaug

SEQ ID NO: 706736 - RNA, 22 nt, Human
aagcuuggaagucuuccuuuca

SEQ ID NO: 706737 - RNA, 22 nt, Human
acuugggauuucagaugcugug

SEQ ID NO: 706738 - RNA, 22 nt, Human
cugggccuugcaucccagagcc

SEQ ID NO: 706739 - RNA, 22 nt, Human
agcuggccagcaccuccagguc

SEQ ID NO: 706740 - RNA, 22 nt, Human
acaggaaauuggcauaucaguu

SEQ ID NO: 706741 - RNA, 22 nt, Human
gaaaagaacugcaugggauuaa

SEQ ID NO: 706742 - RNA, 23 nt, Human
gaggaccaaauauauacauggaa

SEQ ID NO: 706743 - RNA, 22 nt, Human
aggagagaauuacuggguguca

SEQ ID NO: 706744 - RNA, 22 nt, Human
aagaggucauaccagauaaggg

SEQ ID NO: 706745 - RNA, 22 nt, Human
ugcagagaaaacuccuggguac

SEQ ID NO: 706746 - RNA, 22 nt, Human
agcaugaaaggcgugccaacuu

SEQ ID NO: 706747 - RNA, 22 nt, Human
gcucccagggaccgcagggcag

SEQ ID NO: 706748 - RNA, 22 nt, Human
uguucugccagcacuucucagc

SEQ ID NO: 706749 - RNA, 22 nt, Human
ggcuucaaauggagcaaccaga

SEQ ID NO: 706750 - RNA, 21 nt, Human
cugggcucaagcaauccuuuc

SEQ ID NO: 706751 - RNA, 22 nt, Human
augcuuccuuuuucccuuaagg

SEQ ID NO: 706752 - RNA, 20 nt, Human
uguauucuucuccuuccucc

SEQ ID NO: 706753 - RNA, 23 nt, Human
auaauaauuauggcagcaaagug

SEQ ID NO: 706754 - RNA, 22 nt, Human
ucucugaagcuguuguagucuc

SEQ ID NO: 706755 - RNA, 22 nt, Human
aggcucaguucuguggugagcc

SEQ ID NO: 706756 - RNA, 22 nt, Human
gcugggcuugguuucccugcuu

SEQ ID NO: 706757 - RNA, 22 nt, Human
agggugcagucacaggaaaugu

SEQ ID NO: 706758 - RNA, 22 nt, Human
aguucugcugcugccuagggug

SEQ ID NO: 706759 - RNA, 22 nt, Human
auacuuacuuuucuucagacua

SEQ ID NO: 706760 - RNA, 22 nt, Human
gaaggccacuuuguguugagaa

SEQ ID NO: 706761 - RNA, 22 nt, Human
uuaacauuaaaagcagcauuuu

SEQ ID NO: 706762 - RNA, 22 nt, Human
auguaaacaagguuauugucca

SEQ ID NO: 706763 - RNA, 22 nt, Human
gaaaaccaccucccaucaagca

SEQ ID NO: 706764 - RNA, 22 nt, Human
agcugggcaaaaugugagguug

SEQ ID NO: 706765 - RNA, 22 nt, Human
uuuguguguauauguauauaga

SEQ ID NO: 706766 - RNA, 22 nt, Human
ucgcaccuguccucugauuaug

SEQ ID NO: 706767 - RNA, 22 nt, Human
uacaugacauuucuuucuguuc

SEQ ID NO: 706768 - RNA, 22 nt, Human
uucacauuauaaucaguucugc

SEQ ID NO: 706769 - RNA, 20 nt, Human
uacccuggcuaugcuucuga

SEQ ID NO: 706770 - RNA, 22 nt, Human
uagacacuuuagaaguaagggu

SEQ ID NO: 706771 - RNA, 22 nt, Human
gggugcagcuuugaaagcaugu

SEQ ID NO: 706772 - RNA, 22 nt, Human
uggcuccacaggccagggugug

SEQ ID NO: 706773 - RNA, 22 nt, Human
uguccacaucacucacuuguca

SEQ ID NO: 706774 - RNA, 22 nt, Human
gaugucuuacuaacuagccuuu

SEQ ID NO: 706775 - RNA, 22 nt, Human
augagcucauccgagucacacu

SEQ ID NO: 706776 - RNA, 22 nt, Human
uccaggcugcagucuugcccuc

SEQ ID NO: 706777 - RNA, 22 nt, Human
auaacuucaguuucuguguccu

SEQ ID NO: 706778 - RNA, 18 nt, Human
cguuuuuccgggauugca

SEQ ID NO: 706779 - RNA, 22 nt, Human
gcccaugggccugaggcccuag

SEQ ID NO: 706780 - RNA, 22 nt, Human
agaugaagauaucugcaggggc

SEQ ID NO: 706781 - RNA, 22 nt, Human
uauuucuuguuauucucguuga

SEQ ID NO: 706782 - RNA, 22 nt, Human
ggaucuucagccagcaggugcc

SEQ ID NO: 706783 - RNA, 22 nt, Human
cagaaaauaaacauuuguggaa

SEQ ID NO: 706784 - RNA, 17 nt, Human
aggccagaugaggcaag

SEQ ID NO: 706785 - RNA, 22 nt, Human
agcaagagcaugucggccuggu

SEQ ID NO: 706786 - RNA, 22 nt, Human
auucuucaguauguguggauug

SEQ ID NO: 706787 - RNA, 22 nt, Human
agacaauuaaaaaauuaugcuu

SEQ ID NO: 706788 - RNA, 19 nt, Human
agcacagacaagaccagca

SEQ ID NO: 706789 - RNA, 23 nt, Human
aucuaaaguguuaaauagcuggg

SEQ ID NO: 706790 - RNA, 22 nt, Human
aucuggcuuuuacugaauugcu

SEQ ID NO: 706791 - RNA, 19 nt, Human
acagugcuucugagugagg

SEQ ID NO: 706792 - RNA, 22 nt, Human
guaguggagucuccuguccugg

SEQ ID NO: 706793 - RNA, 22 nt, Human
agcaaggcuaaauuucaguuau

SEQ ID NO: 706794 - RNA, 22 nt, Human
uucuggaagauaccucuccuaa

SEQ ID NO: 706795 - RNA, 19 nt, Human
ugagggugagcuuuggaga

SEQ ID NO: 706796 - RNA, 22 nt, Human
acaaggaucuguguaggcaggc

SEQ ID NO: 706797 - RNA, 22 nt, Human
cacuucaaauaagcucuucuca

SEQ ID NO: 706798 - RNA, 22 nt, Human
uaaacaagcugucugauauucu

SEQ ID NO: 706799 - RNA, 22 nt, Human
uggccuugggcagguggccugc

SEQ ID NO: 706800 - RNA, 22 nt, Human
acacagagggcagaagauacau

SEQ ID NO: 706801 - RNA, 22 nt, Human
uucaaagauuagcauacgcaau

SEQ ID NO: 706802 - RNA, 22 nt, Human
ccuuucuuuuauccaccagcca

SEQ ID NO: 706803 - RNA, 22 nt, Human
agaggaauguauuucccugcaa

SEQ ID NO: 706804 - RNA, 22 nt, Human
gaaagugccagaauaggaggcc

SEQ ID NO: 706805 - RNA, 22 nt, Human
ugaacaaaugaaucaguguagc

SEQ ID NO: 706806 - RNA, 22 nt, Human
uucccucucuagcuuuccccaa

SEQ ID NO: 706807 - RNA, 22 nt, Human
cagugucucaaaacaaguugcu

SEQ ID NO: 706808 - RNA, 22 nt, Human
gcagaggucuagcaccaagaau

SEQ ID NO: 706809 - RNA, 22 nt, Human
uccaccuccaugcugggcagag

SEQ ID NO: 706810 - RNA, 22 nt, Human
cuggccccgguuccuaaaaacc

SEQ ID NO: 706811 - RNA, 22 nt, Human
cugccaccaaauagcugcauga

SEQ ID NO: 706812 - RNA, 22 nt, Human
aagcaauagcaacaacuuuaca

SEQ ID NO: 706813 - RNA, 22 nt, Human
acucauuugacacuuuaaacug

SEQ ID NO: 706814 - RNA, 22 nt, Human
aacauugaaauauuugcaauag

SEQ ID NO: 706815 - RNA, 22 nt, Human
augaaguucuagugagaaaugc

SEQ ID NO: 706816 - RNA, 22 nt, Human
uucccacagucacugggagaag

SEQ ID NO: 706817 - RNA, 22 nt, Human
uacagacauuuacuccacuccu

SEQ ID NO: 706818 - RNA, 22 nt, Human
aucagcaggugcugguggagac

SEQ ID NO: 706819 - RNA, 22 nt, Human
agacuccaggagggaggcugcu

SEQ ID NO: 706820 - RNA, 22 nt, Human
aauuucacagugaacuuugagg

SEQ ID NO: 706821 - RNA, 22 nt, Human
augaggcaucugcagucacuag

SEQ ID NO: 706822 - RNA, 22 nt, Human
uuaacaguuaaacaauuggcua

SEQ ID NO: 706823 - RNA, 22 nt, Human
uuuguaaauagcaguacucaug

SEQ ID NO: 706824 - RNA, 22 nt, Human
gcaguguguggugagggcugcc

SEQ ID NO: 706825 - RNA, 22 nt, Human
ggaccugcccuggcucagaugc

SEQ ID NO: 706826 - RNA, 22 nt, Human
caccacugaauuguucacuuuc

SEQ ID NO: 706827 - RNA, 22 nt, Human
aaaugugcuugugaucagcugu

SEQ ID NO: 706828 - RNA, 22 nt, Human
gcaguccauugacagaggucuu

SEQ ID NO: 706829 - RNA, 22 nt, Human
cagucccagacauaguaaggga

SEQ ID NO: 706830 - RNA, 22 nt, Human
ucagcuugugggucagccucug

SEQ ID NO: 706831 - RNA, 22 nt, Human
guggcaucgucugagguggggu

SEQ ID NO: 706832 - RNA, 22 nt, Human
gauguacaaguaaaauaugugu

SEQ ID NO: 706833 - RNA, 22 nt, Human
auuguacauaaaauguaugucu

SEQ ID NO: 706834 - RNA, 22 nt, Human
cacuguccaugcuugcuaaccc

SEQ ID NO: 706835 - RNA, 22 nt, Human
agggccaguaccaggugggugg

SEQ ID NO: 706836 - RNA, 22 nt, Human
uggagcugggguuugaaucugg

SEQ ID NO: 706837 - RNA, 19 nt, Human
acaggggcuagcggaagca

SEQ ID NO: 706838 - RNA, 22 nt, Human
acaaucacacaugcaauuauac

SEQ ID NO: 706839 - RNA, 22 nt, Human
cucuggcacacuccuuccaggu

SEQ ID NO: 706840 - RNA, 22 nt, Human
aggaagcaaaaggcagggucua

SEQ ID NO: 706841 - RNA, 22 nt, Human
guguuuaauagguagcugaauc

SEQ ID NO: 706842 - RNA, 22 nt, Human
agguuccuuauggggauggcua

SEQ ID NO: 706843 - RNA, 22 nt, Human
ccuggaagauucaccacuacca

SEQ ID NO: 706844 - RNA, 22 nt, Human
ucacuguuaauaaauagcaaag

SEQ ID NO: 706845 - RNA, 22 nt, Human
aucagaauaauuagauuucaga

SEQ ID NO: 706846 - RNA, 22 nt, Human
cuggguccugcucucccuaaga

SEQ ID NO: 706847 - RNA, 22 nt, Human
cacaugaagagagucuaguaau

SEQ ID NO: 706848 - RNA, 22 nt, Human
cugggcaguucgcuuucguuuu

SEQ ID NO: 706849 - RNA, 22 nt, Human
gagacugcugguaaagauggga

SEQ ID NO: 706850 - RNA, 22 nt, Human
cugugcugauucagcacaggcc

SEQ ID NO: 706851 - RNA, 22 nt, Human
uugcauaaaugcuuaaaauuug

SEQ ID NO: 706852 - RNA, 22 nt, Human
gcuggcuuugaucuucccaucu

SEQ ID NO: 706853 - RNA, 22 nt, Human
uaagaacauaaauucauacggg

SEQ ID NO: 706854 - RNA, 22 nt, Human
cuucugggcauucagcugcaca

SEQ ID NO: 706855 - RNA, 22 nt, Human
agugcguggaccccuggcugcu

SEQ ID NO: 706856 - RNA, 22 nt, Human
ccucaaaguagagggagaugag

SEQ ID NO: 706857 - RNA, 22 nt, Human
uucuuuccucccagccuuugga

SEQ ID NO: 706858 - RNA, 22 nt, Human
ggugacugguuuaucuggcagu

SEQ ID NO: 706859 - RNA, 22 nt, Human
ggccuagggcuuggucauggca

SEQ ID NO: 706860 - RNA, 21 nt, Human
aucugaaaugucaaagcagau

SEQ ID NO: 706861 - RNA, 22 nt, Human
acugauacaucuguggaagugg

SEQ ID NO: 706862 - RNA, 22 nt, Human
gcucugcugaagccccuugcau

SEQ ID NO: 706863 - RNA, 19 nt, Human
gagcagcuuccuaucuggu

SEQ ID NO: 706864 - RNA, 22 nt, Human
uuaauuggccucuuagagguua

SEQ ID NO: 706865 - RNA, 22 nt, Human
acacaucagccucagcuuuggg

SEQ ID NO: 706866 - RNA, 22 nt, Human
gauuuacagcuauacccaaugg

SEQ ID NO: 706867 - RNA, 22 nt, Human
gugucugcauauucaaacuugu

SEQ ID NO: 706868 - RNA, 22 nt, Human
uuugaagaccuuaucucuaaau

SEQ ID NO: 706869 - RNA, 22 nt, Human
cauuuaaucuggcucaugagca

SEQ ID NO: 706870 - RNA, 22 nt, Human
ucuaguuaauuccuuugguguu

SEQ ID NO: 706871 - RNA, 22 nt, Human
cacagcugcccccucucuaacu

SEQ ID NO: 706872 - RNA, 18 nt, Human
uccuccuuuggccuuuuc

SEQ ID NO: 706873 - RNA, 22 nt, Human
agggcucaagggcaugcuacgu

SEQ ID NO: 706874 - RNA, 22 nt, Human
ugcuggaagagauuggagccuc

SEQ ID NO: 706875 - RNA, 22 nt, Human
uauuccaacugucauagucaua

SEQ ID NO: 706876 - RNA, 22 nt, Human
gggacuggaacuacuggugcag

SEQ ID NO: 706877 - RNA, 22 nt, Human
cugaggagggaaguccccaaag

SEQ ID NO: 706878 - RNA, 22 nt, Human
ugggcugagcacugaggaagga

SEQ ID NO: 706879 - RNA, 22 nt, Human
cagggaugaccagagggaugug

SEQ ID NO: 706880 - RNA, 22 nt, Human
gccugggacccuuagcucuugg

SEQ ID NO: 706881 - RNA, 22 nt, Human
uuauuguuagugagacuguaga

SEQ ID NO: 706882 - RNA, 22 nt, Human
guacaaaugcagguuuguuaca

SEQ ID NO: 706883 - RNA, 22 nt, Human
ucucugggaaauggagaauuuu

SEQ ID NO: 706884 - RNA, 22 nt, Human
aacauuugcaugcuuuauuaga

SEQ ID NO: 706885 - RNA, 22 nt, Human
caaaugaauagggagugugaug

SEQ ID NO: 706886 - RNA, 22 nt, Human
uugcugccuuccgaauccucuc

SEQ ID NO: 706887 - RNA, 22 nt, Human
ggcauguuucaucacaucaaga

SEQ ID NO: 706888 - RNA, 22 nt, Human
uauguauucucagauuuacuaa

SEQ ID NO: 706889 - RNA, 22 nt, Human
cuccaggaaagccugaggcccg

SEQ ID NO: 706890 - RNA, 22 nt, Human
cuuaacucuacacugcacuuua

SEQ ID NO: 706891 - RNA, 22 nt, Human
uaguggaggggaugcaaagcuu

SEQ ID NO: 706892 - RNA, 22 nt, Human
gcccaagaguuaagucucugcu

SEQ ID NO: 706893 - RNA, 22 nt, Human
gcauucaugccugugugagcuc

SEQ ID NO: 706894 - RNA, 22 nt, Human
acugagaagauucucacucuua

SEQ ID NO: 706895 - RNA, 22 nt, Human
ugaguaaauacaaaaucaccuc

SEQ ID NO: 706896 - RNA, 22 nt, Human
ccagauucauagaaacucauag

SEQ ID NO: 706897 - RNA, 22 nt, Human
gccagcugaauuuccaacuguu

SEQ ID NO: 706898 - RNA, 22 nt, Human
agcuggcugggugccagucucc

SEQ ID NO: 706899 - RNA, 22 nt, Human
uauuuccagaggaguauagaag

SEQ ID NO: 706900 - RNA, 22 nt, Human
aacugagccccugcacuuguga

SEQ ID NO: 706901 - RNA, 22 nt, Human
auggucuuaggguaggcagcug

SEQ ID NO: 706902 - RNA, 22 nt, Human
aucuggaauccuuguggacaau

SEQ ID NO: 706903 - RNA, 22 nt, Human
ugcagagccccagauuggagag

SEQ ID NO: 706904 - RNA, 22 nt, Human
gcuguacauucuguggguuugg

SEQ ID NO: 706905 - RNA, 22 nt, Human
cuggauaagaguuuuacuuccu

SEQ ID NO: 706906 - RNA, 22 nt, Human
uuuggacauguugagucugaua

SEQ ID NO: 706907 - RNA, 22 nt, Human
guccugucccccaaggcugugg

SEQ ID NO: 706908 - RNA, 22 nt, Human
ggcuccuggaggcaccacuggu

SEQ ID NO: 706909 - RNA, 22 nt, Human
auggaauugagcaucaguuguu

SEQ ID NO: 706910 - RNA, 19 nt, Human
ccaggccuccugggagguc

SEQ ID NO: 706911 - RNA, 22 nt, Human
cauauguauuucucauaauuag

SEQ ID NO: 706912 - RNA, 22 nt, Human
uucaaacacuguuggcacuggg

SEQ ID NO: 706913 - RNA, 22 nt, Human
cuugaauguaaauaauguacag

SEQ ID NO: 706914 - RNA, 22 nt, Human
ugaaauuccaggagaguuaaaa

SEQ ID NO: 706915 - RNA, 22 nt, Human
ugggaugagcuauauagaaagu

SEQ ID NO: 706916 - RNA, 22 nt, Human
cuaacuuuuacagucauguugc

SEQ ID NO: 706917 - RNA, 22 nt, Human
uggcauuuaguugcguauugca

SEQ ID NO: 706918 - RNA, 17 nt, Human
ggcugcugugcuggugc

SEQ ID NO: 706919 - RNA, 21 nt, Human
ucaggaagagcuucucccacu

SEQ ID NO: 706920 - RNA, 22 nt, Human
augccaaauucuacuuucagca

SEQ ID NO: 706921 - RNA, 22 nt, Human
aaccugaaacuacauucuugau

SEQ ID NO: 706922 - RNA, 22 nt, Human
gccuugcuaauuucuccucaac

SEQ ID NO: 706923 - RNA, 22 nt, Human
cuugcagaggcuguuccagaug

SEQ ID NO: 706924 - RNA, 22 nt, Human
gcaggguacauugggaugggau

SEQ ID NO: 706925 - RNA, 22 nt, Human
aagaacauaacagaagcugugu

SEQ ID NO: 706926 - RNA, 22 nt, Human
caacauguguuagacaauagac

SEQ ID NO: 706927 - RNA, 22 nt, Human
ggagagagagcucauuagcugc

SEQ ID NO: 706928 - RNA, 22 nt, Human
gggcagccucggugccugcugc

SEQ ID NO: 706929 - RNA, 22 nt, Human
agagaaucugggaagauguuaa

SEQ ID NO: 706930 - RNA, 22 nt, Human
cugaaguucauacaauggccau

SEQ ID NO: 706931 - RNA, 22 nt, Human
gaggcuccuccuuacauuuacc

SEQ ID NO: 706932 - RNA, 22 nt, Human
gccagaugccguaaagaugggc

SEQ ID NO: 706933 - RNA, 22 nt, Human
cagugcugugcuggaagcuguu

SEQ ID NO: 706934 - RNA, 22 nt, Human
ggggaggaagcucucaguucca

SEQ ID NO: 706935 - RNA, 22 nt, Human
cugggcccugaagacagucagg

SEQ ID NO: 706936 - RNA, 22 nt, Human
agcugcugugugcucaggcagg

SEQ ID NO: 706937 - RNA, 22 nt, Human
cagccucuguggcugccacacc

SEQ ID NO: 706938 - RNA, 19 nt, Human
ggaugagggucaggcauag

SEQ ID NO: 706939 - RNA, 22 nt, Human
auuucauggcagacuuuaaccc

SEQ ID NO: 706940 - RNA, 22 nt, Human
uguggggguacacguacacaug

SEQ ID NO: 706941 - RNA, 22 nt, Human
caugcuuaauuggagcauucau

SEQ ID NO: 706942 - RNA, 22 nt, Human
ggucccuggggaacuaggcugu

SEQ ID NO: 706943 - RNA, 22 nt, Human
caguggcacccacgggcugggc

SEQ ID NO: 706944 - RNA, 22 nt, Human
gcagcugcuggaaguuccugcc

SEQ ID NO: 706945 - RNA, 22 nt, Human
uuaaauuauuucuagugaggug

SEQ ID NO: 706946 - RNA, 22 nt, Human
caggccugggcuucggggcuga

SEQ ID NO: 706947 - RNA, 22 nt, Human
ucauuuacauagaaacaauaua

SEQ ID NO: 706948 - RNA, 22 nt, Human
cuggcucccguuguccuugaag

SEQ ID NO: 706949 - RNA, 22 nt, Human
auagugguuggauaugucagag

SEQ ID NO: 706950 - RNA, 22 nt, Human
uccaucugguggcuuccuuuug

SEQ ID NO: 706951 - RNA, 22 nt, Human
agagggaaugugauugcaccau

SEQ ID NO: 706952 - RNA, 22 nt, Human
ggcuguagguuggugcuggaca

SEQ ID NO: 706953 - RNA, 22 nt, Human
ugcagaguugcuuugauagucc

SEQ ID NO: 706954 - RNA, 22 nt, Human
uugcugagcaguguuuaauugu

SEQ ID NO: 706955 - RNA, 22 nt, Human
ucaaugauaucagcaggaugug

SEQ ID NO: 706956 - RNA, 22 nt, Human
guuccaaauuuggaucuuuagg

SEQ ID NO: 706957 - RNA, 22 nt, Human
cagccacuucgagcuuccugau

SEQ ID NO: 706958 - RNA, 22 nt, Human
agcaaagcaucacuccaaucug

SEQ ID NO: 706959 - RNA, 22 nt, Human
ugugugucugcacauguauaau

SEQ ID NO: 706960 - RNA, 22 nt, Human
ggccagcuuucugucuucuagg

SEQ ID NO: 706961 - RNA, 22 nt, Human
uccagguguauuuacugaagua

SEQ ID NO: 706962 - RNA, 20 nt, Human
aauguauauuuuaugccagg

SEQ ID NO: 706963 - RNA, 22 nt, Human
ugccaggcccagcagggcggcc

SEQ ID NO: 706964 - RNA, 22 nt, Human
cugugugugucugcagcauacu

SEQ ID NO: 706965 - RNA, 22 nt, Human
gugaagaucugagcccucaggu

SEQ ID NO: 706966 - RNA, 22 nt, Human
ccucaggcuugugagccuucag

SEQ ID NO: 706967 - RNA, 21 nt, Human
cugagggccgcagcugggcuc

SEQ ID NO: 706968 - RNA, 22 nt, Human
auugaaagcauggauuuggauu

SEQ ID NO: 706969 - RNA, 18 nt, Human
ccagcccugcagcaccug

SEQ ID NO: 706970 - RNA, 22 nt, Human
uugaaacugaguguguuugggg

SEQ ID NO: 706971 - RNA, 22 nt, Human
caagagacuuauguggaaaccu

SEQ ID NO: 706972 - RNA, 22 nt, Human
uuuaaucaggcaaagcauaaua

SEQ ID NO: 706973 - RNA, 22 nt, Human
augaaacaugagaaauggagag

SEQ ID NO: 706974 - RNA, 23 nt, Human
agcuguguggccuugggcaaguu

SEQ ID NO: 706975 - RNA, 22 nt, Human
gugagcuggaauaguggagaaa

SEQ ID NO: 706976 - RNA, 22 nt, Human
aucuuuuugacauggugauggu

SEQ ID NO: 706977 - RNA, 21 nt, Human
ugcagcuggguucugguuugc

SEQ ID NO: 706978 - RNA, 22 nt, Human
uucguguggagauguuucugca

SEQ ID NO: 706979 - RNA, 22 nt, Human
cucugcauuuuaacagaugauu

SEQ ID NO: 706980 - RNA, 22 nt, Human
ucaggcuggggugcuaaggugu

SEQ ID NO: 706981 - RNA, 22 nt, Human
uuugaaagaauuuauguacuuu

SEQ ID NO: 706982 - RNA, 22 nt, Human
gcugcaggcagaaucucccaau

SEQ ID NO: 706983 - RNA, 22 nt, Human
caggacagguguucuagaucag

SEQ ID NO: 706984 - RNA, 22 nt, Human
ccucccaccauuuagagagagc

SEQ ID NO: 706985 - RNA, 17 nt, Human
uuauugucaagguucca

SEQ ID NO: 706986 - RNA, 22 nt, Human
aagccauggcugcaucagccug

SEQ ID NO: 706987 - RNA, 20 nt, Human
cuuuagaagaacccaagcau

SEQ ID NO: 706988 - RNA, 22 nt, Human
guuccaaagucucugagcugag

SEQ ID NO: 706989 - RNA, 20 nt, Human
gagcagcuguuugcauugca

SEQ ID NO: 706990 - RNA, 21 nt, Human
ucaggaaacaccucuuaagga

SEQ ID NO: 706991 - RNA, 22 nt, Human
cauaucccauuggccaggacau

SEQ ID NO: 706992 - RNA, 22 nt, Human
cagcaucuguucccaacgagau

SEQ ID NO: 706993 - RNA, 22 nt, Human
cccuccccagggucauauugaa

SEQ ID NO: 706994 - RNA, 22 nt, Human
agcagaugugucucugcacugu

SEQ ID NO: 706995 - RNA, 22 nt, Human
ccaggcauugugagugggcagg

SEQ ID NO: 706996 - RNA, 22 nt, Human
ugucuuuaguugcuuagauuug

SEQ ID NO: 706997 - RNA, 22 nt, Human
uauacugauuugucuauacucu

SEQ ID NO: 706998 - RNA, 22 nt, Human
cauuucuacagcuucuucagaa

SEQ ID NO: 706999 - RNA, 22 nt, Human
cuauuucauguuccuauggccg

SEQ ID NO: 707000 - RNA, 22 nt, Human
uucuggaaggguggaguagcuu

SEQ ID NO: 707001 - RNA, 22 nt, Human
uuauuucccugaggguugcagg

SEQ ID NO: 707002 - RNA, 23 nt, Human
ucauuucauccagccuugagagu

SEQ ID NO: 707003 - RNA, 22 nt, Human
gcuguguaggauccuguuguau

SEQ ID NO: 707004 - RNA, 23 nt, Human
uggaccugaaccagugccucugu

SEQ ID NO: 707005 - RNA, 22 nt, Human
ccccagggacugguuucaugga

SEQ ID NO: 707006 - RNA, 22 nt, Human
guggcuucaucaacugugcuua

SEQ ID NO: 707007 - RNA, 17 nt, Human
cugagcauccgugcucu

SEQ ID NO: 707008 - RNA, 21 nt, Human
uuaagagcuuagcaguaggcc

SEQ ID NO: 707009 - RNA, 22 nt, Human
uuacagaaucuacucgugguga

SEQ ID NO: 707010 - RNA, 22 nt, Human
agcugcccugggucuugcugcu

SEQ ID NO: 707011 - RNA, 22 nt, Human
ccucuucaccucgggcacacug

SEQ ID NO: 707012 - RNA, 22 nt, Human
uaagauagaacucugaggcuac

SEQ ID NO: 707013 - RNA, 22 nt, Human
uggugcagucauuggcccaggg

SEQ ID NO: 707014 - RNA, 22 nt, Human
cagacaggcaggugcugcuuug

SEQ ID NO: 707015 - RNA, 17 nt, Human
uauacacagacagacug

SEQ ID NO: 707016 - RNA, 22 nt, Human
aagguguucagguuuucccauu

SEQ ID NO: 707017 - RNA, 22 nt, Human
auggcugggucaccaucagggu

SEQ ID NO: 707018 - RNA, 22 nt, Human
uccaggcaaagugcugggcugc

SEQ ID NO: 707019 - RNA, 22 nt, Human
gcugagggggaaggaaagcuga

SEQ ID NO: 707020 - RNA, 22 nt, Human
gccaggcuguggggaacuugaa

SEQ ID NO: 707021 - RNA, 22 nt, Human
ucagagugcagcgggaggcugg

SEQ ID NO: 707022 - RNA, 22 nt, Human
gacacagauaucucugagauua

SEQ ID NO: 707023 - RNA, 22 nt, Human
caaaugaagguggugggucauu

SEQ ID NO: 707024 - RNA, 22 nt, Human
accagagcuuacaugcuagaaa

SEQ ID NO: 707025 - RNA, 22 nt, Human
ccaggcacaggugggccucaga

SEQ ID NO: 707026 - RNA, 22 nt, Human
aacagugcuucauucacacauu

SEQ ID NO: 707027 - RNA, 22 nt, Human
uggagcaggaaacaucuagagg

SEQ ID NO: 707028 - RNA, 23 nt, Human
acugccugugccgaucucucuca

SEQ ID NO: 707029 - RNA, 22 nt, Human
gcaggugaaagugaguagugag

SEQ ID NO: 707030 - RNA, 22 nt, Human
uagaaacagaauaugagugaga

SEQ ID NO: 707031 - RNA, 22 nt, Human
uuugggacuggagcuuggagag

SEQ ID NO: 707032 - RNA, 18 nt, Human
gcaacaguaucagcaggc

SEQ ID NO: 707033 - RNA, 22 nt, Human
caggucagagguagaugagaug

SEQ ID NO: 707034 - RNA, 22 nt, Human
cugucaccugccagcauaccca

SEQ ID NO: 707035 - RNA, 22 nt, Human
gaagccucaacaucucugcguc

SEQ ID NO: 707036 - RNA, 22 nt, Human
auuaaauuuucacuaggcuccc

SEQ ID NO: 707037 - RNA, 22 nt, Human
ugggaagguguagaaagaacaa

SEQ ID NO: 707038 - RNA, 22 nt, Human
ccagccaccgcuuguuugcacu

SEQ ID NO: 707039 - RNA, 22 nt, Human
acaguacugcuguucuuguccu

SEQ ID NO: 707040 - RNA, 22 nt, Human
caggcagaugcugacaagaguu

SEQ ID NO: 707041 - RNA, 22 nt, Human
cucagauaaucuuugagucuuc

SEQ ID NO: 707042 - RNA, 22 nt, Human
ucuugaauuguacucccauaag

SEQ ID NO: 707043 - RNA, 22 nt, Human
uggcccgaagauccgaggguca

SEQ ID NO: 707044 - RNA, 22 nt, Human
cagcccgucacacgcuagcauc

SEQ ID NO: 707045 - RNA, 19 nt, Human
cugucugguucauguguuc

SEQ ID NO: 707046 - RNA, 22 nt, Human
agagucugaggaggaccaacag

SEQ ID NO: 707047 - RNA, 22 nt, Human
gagccuggauugucaccgacuu

SEQ ID NO: 707048 - RNA, 22 nt, Human
uuacagguggagaaguaaggcu

SEQ ID NO: 707049 - RNA, 22 nt, Human
uaugucuggaccacugcagccc

SEQ ID NO: 707050 - RNA, 22 nt, Human
uugauucaaaacaggagguagg

SEQ ID NO: 707051 - RNA, 19 nt, Human
ccaggccuggcgucuccgc

SEQ ID NO: 707052 - RNA, 22 nt, Human
aauucuagcauugugaaaauau

SEQ ID NO: 707053 - RNA, 22 nt, Human
cagaacaggucaugcuugcugu

SEQ ID NO: 707054 - RNA, 22 nt, Human
ucccaggccauaaaacucagag

SEQ ID NO: 707055 - RNA, 22 nt, Human
ccucugagcuggccuguggggc

SEQ ID NO: 707056 - RNA, 23 nt, Human
acauauugaaugcugagaauuuu

SEQ ID NO: 707057 - RNA, 22 nt, Human
uagaaagcaaaauccuaccaag

SEQ ID NO: 707058 - RNA, 22 nt, Human
aggaccagaccgaacuagcuaa

SEQ ID NO: 707059 - RNA, 19 nt, Human
caggucuucuuggaggacu

SEQ ID NO: 707060 - RNA, 22 nt, Human
acacuucaggacucuggggcaa

SEQ ID NO: 707061 - RNA, 22 nt, Human
acucagaguagaaaauagguuc

SEQ ID NO: 707062 - RNA, 22 nt, Human
ccuagagcucugcuuuaucuaa

SEQ ID NO: 707063 - RNA, 22 nt, Human
uuucauguuuauggaaaaugag

SEQ ID NO: 707064 - RNA, 22 nt, Human
uagcuuuagaaauauucucaga

SEQ ID NO: 707065 - RNA, 22 nt, Human
aaggccaugaccacuugcugug

SEQ ID NO: 707066 - RNA, 22 nt, Human
cugcaguagcaccuguggcuuu

SEQ ID NO: 707067 - RNA, 22 nt, Human
ugcauuggaaacucagcagcac

SEQ ID NO: 707068 - RNA, 22 nt, Human
gugugucugaaguugaguagac

SEQ ID NO: 707069 - RNA, 22 nt, Human
gugccugcuaccugacuuguuu

SEQ ID NO: 707070 - RNA, 22 nt, Human
uagaaacagagcagguggccca

SEQ ID NO: 707071 - RNA, 22 nt, Human
aggagcuagccaggcauaugca

SEQ ID NO: 707072 - RNA, 22 nt, Human
agucugaaaguauguuguaaug

SEQ ID NO: 707073 - RNA, 22 nt, Human
aucuuagagagucguguuuugu

SEQ ID NO: 707074 - RNA, 22 nt, Human
ccacugagaagggguugggguc

SEQ ID NO: 707075 - RNA, 21 nt, Human
ucuuguccuugcucucccacu

SEQ ID NO: 707076 - RNA, 22 nt, Human
gaggcuggaauauuagaaaugu

SEQ ID NO: 707077 - RNA, 22 nt, Human
agugugaguuugguugagacuu

SEQ ID NO: 707078 - RNA, 22 nt, Human
agacccuguuaguuccagucuu

SEQ ID NO: 707079 - RNA, 23 nt, Human
ucugaagaugcuguuuccaguga

SEQ ID NO: 707080 - RNA, 22 nt, Human
gcgcucaggugccaggccugcg

SEQ ID NO: 707081 - RNA, 22 nt, Human
agcuggguacugaugucuucag

SEQ ID NO: 707082 - RNA, 22 nt, Human
ucccaaggccaggcaucuagaa

SEQ ID NO: 707083 - RNA, 22 nt, Human
auagaaaacagauguccuuaaa

SEQ ID NO: 707084 - RNA, 22 nt, Human
ggcuuugggcccucaagucucc

SEQ ID NO: 707085 - RNA, 22 nt, Human
cucugaaaguuagagaaaauag

SEQ ID NO: 707086 - RNA, 23 nt, Human
aaugugcuguauucauuucugga

SEQ ID NO: 707087 - RNA, 22 nt, Human
gcaguguuucagugcuuuuucu

SEQ ID NO: 707088 - RNA, 22 nt, Human
acccacaccuccguauaucacu

SEQ ID NO: 707089 - RNA, 22 nt, Human
uccaaaggggcaguguccagcc

SEQ ID NO: 707090 - RNA, 22 nt, Human
uccaggagaaaacugacggugg

SEQ ID NO: 707091 - RNA, 22 nt, Human
aaacagaaggguagguaaacau

SEQ ID NO: 707092 - RNA, 17 nt, Human
uuauugcagugcugaag

SEQ ID NO: 707093 - RNA, 22 nt, Human
ccagacaguuccuugagguuca

SEQ ID NO: 707094 - RNA, 22 nt, Human
auucacacauacucauguguga

SEQ ID NO: 707095 - RNA, 22 nt, Human
uacagcaaagaaacccucaguc

SEQ ID NO: 707096 - RNA, 22 nt, Human
accagcuggucaccugggcacu

SEQ ID NO: 707097 - RNA, 22 nt, Human
gcaaagcagucuucugugccua

SEQ ID NO: 707098 - RNA, 22 nt, Human
gucagccugcacucagggagcg

SEQ ID NO: 707099 - RNA, 22 nt, Human
uagacaaacugauacuuggcga

SEQ ID NO: 707100 - RNA, 22 nt, Human
gaauuugugcucaggaagauua

SEQ ID NO: 707101 - RNA, 22 nt, Human
agagcagagggcucugggacaa

SEQ ID NO: 707102 - RNA, 22 nt, Human
ugaggcaggaaguuauauaaug

SEQ ID NO: 707103 - RNA, 18 nt, Human
ucugaaggaaugauucca

SEQ ID NO: 707104 - RNA, 22 nt, Human
ugccagaacagcucaucuggcc

SEQ ID NO: 707105 - RNA, 22 nt, Human
gaaguggguggugauaucacug

SEQ ID NO: 707106 - RNA, 19 nt, Human
guguauguaaguugugagg

SEQ ID NO: 707107 - RNA, 22 nt, Human
aggcaugaugugcaguggcaaa

SEQ ID NO: 707108 - RNA, 20 nt, Human
agccaggccucaaguuaagu

SEQ ID NO: 707109 - RNA, 22 nt, Human
agcaacaguguauaucauaggc

SEQ ID NO: 707110 - RNA, 22 nt, Human
cagaggaguucaguacacagcc

SEQ ID NO: 707111 - RNA, 22 nt, Human
ccccagggaagcuuugcuuacu

SEQ ID NO: 707112 - RNA, 22 nt, Human
uuaucugugauccuaaaugucu

SEQ ID NO: 707113 - RNA, 22 nt, Human
gucuggcuguuccugccuguga

SEQ ID NO: 707114 - RNA, 22 nt, Human
aggguagcuacccaacuccaga

SEQ ID NO: 707115 - RNA, 22 nt, Human
uccaggccccagaccguacugc

SEQ ID NO: 707116 - RNA, 22 nt, Human
cagggagcuggcuggcgugagu

SEQ ID NO: 707117 - RNA, 22 nt, Human
gacuguccagaauuccuaggug

SEQ ID NO: 707118 - RNA, 22 nt, Human
uauuauggcagcauucaguaug

SEQ ID NO: 707119 - RNA, 22 nt, Human
ugcagggaaaguguuggcagca

SEQ ID NO: 707120 - RNA, 22 nt, Human
ucaaucaaugugucaguuccca

SEQ ID NO: 707121 - RNA, 22 nt, Human
uugucugaaagaucauuacauu

SEQ ID NO: 707122 - RNA, 22 nt, Human
gaauuugucccuugauauaaaa

SEQ ID NO: 707123 - RNA, 22 nt, Human
uacaucuauuugacagauacag

SEQ ID NO: 707124 - RNA, 22 nt, Human
ucugaauaauguccuuguauca

SEQ ID NO: 707125 - RNA, 22 nt, Human
aaaccuggaacauuugacuagg

SEQ ID NO: 707126 - RNA, 22 nt, Human
guaugaaguuggacuguauaaa

SEQ ID NO: 707127 - RNA, 22 nt, Human
cucuccccgguacgagcggccg

SEQ ID NO: 707128 - RNA, 22 nt, Human
cugagggagcugcuggccuugg

SEQ ID NO: 707129 - RNA, 23 nt, Human
gcuguccccaugcuccaucccug

SEQ ID NO: 707130 - RNA, 22 nt, Human
agcucugacugaagagaugcaa

SEQ ID NO: 707131 - RNA, 22 nt, Human
gaggcuaaguaacuguccaugg

SEQ ID NO: 707132 - RNA, 23 nt, Human
accccaggcaucgcauuccucuu

SEQ ID NO: 707133 - RNA, 22 nt, Human
uaaugcuuaauuuucacaagcc

SEQ ID NO: 707134 - RNA, 22 nt, Human
uucuggaauucuugcagccacu

SEQ ID NO: 707135 - RNA, 22 nt, Human
acagugaaaaguagcuaacaca

SEQ ID NO: 707136 - RNA, 22 nt, Human
cuauuugucacaacugguguuu

SEQ ID NO: 707137 - RNA, 22 nt, Human
cagcuccucacgagucuugaaa

SEQ ID NO: 707138 - RNA, 22 nt, Human
cacuuuacuaucuauaaaauaa

SEQ ID NO: 707139 - RNA, 21 nt, Human
augucuguucugauuggugcg

SEQ ID NO: 707140 - RNA, 22 nt, Human
ggcagggcaggaaagucaggaa

SEQ ID NO: 707141 - RNA, 22 nt, Human
uuucuuccuggauuccuacuuc

SEQ ID NO: 707142 - RNA, 22 nt, Human
cagcccagcagucuuagccugc

SEQ ID NO: 707143 - RNA, 18 nt, Human
cugucaccgccaccacac

SEQ ID NO: 707144 - RNA, 22 nt, Human
auugaaaguccuaucuaaggga

SEQ ID NO: 707145 - RNA, 22 nt, Human
acagauauguuggguucuuguu

SEQ ID NO: 707146 - RNA, 22 nt, Human
ugcuggcauaccaccuaguuca

SEQ ID NO: 707147 - RNA, 22 nt, Human
gaugcaaaccuuacauggaccu

SEQ ID NO: 707148 - RNA, 21 nt, Human
gcugucucuggcuccugggaa

SEQ ID NO: 707149 - RNA, 22 nt, Human
ugcagugguguccagguguacu

SEQ ID NO: 707150 - RNA, 22 nt, Human
aggcaccaguaagaguagaacu

SEQ ID NO: 707151 - RNA, 22 nt, Human
cuuccuccgaagaaguugcugg

SEQ ID NO: 707152 - RNA, 22 nt, Human
auaaugcaccuuugaguauggc

SEQ ID NO: 707153 - RNA, 22 nt, Human
uucauucuugucuuuguauagu

SEQ ID NO: 707154 - RNA, 22 nt, Human
uaauuucuagggacuaaggugc

SEQ ID NO: 707155 - RNA, 22 nt, Human
uacaggagcauggggaagggau

SEQ ID NO: 707156 - RNA, 22 nt, Human
cugggcagcuaccaccacugcu

SEQ ID NO: 707157 - RNA, 22 nt, Human
uaucaguauggauucauggauu

SEQ ID NO: 707158 - RNA, 22 nt, Human
ucuucuguuuuagauugcauac

SEQ ID NO: 707159 - RNA, 22 nt, Human
gaguccuuccagcaggcauuua

SEQ ID NO: 707160 - RNA, 22 nt, Human
ugggagagaauucuggugacug

SEQ ID NO: 707161 - RNA, 22 nt, Human
uuucugucauaguuaucuuugu

SEQ ID NO: 707162 - RNA, 22 nt, Human
ggcaugaguaacgugagugagg

SEQ ID NO: 707163 - RNA, 22 nt, Human
acacauuuagcaccagguuuau

SEQ ID NO: 707164 - RNA, 22 nt, Human
cagaaaggacuuugguuggcuu

SEQ ID NO: 707165 - RNA, 22 nt, Human
aacugcaauaacuugugcacca

SEQ ID NO: 707166 - RNA, 22 nt, Human
gucuucaacaauaacuaccacu

SEQ ID NO: 707167 - RNA, 22 nt, Human
uuucugaagauacagcuuugcu

SEQ ID NO: 707168 - RNA, 22 nt, Human
aaaugguauaaugucauguauu

SEQ ID NO: 707169 - RNA, 22 nt, Human
gaauugcugaaucauauguuua

SEQ ID NO: 707170 - RNA, 18 nt, Human
aguuucagggcaggaaac

SEQ ID NO: 707171 - RNA, 22 nt, Human
caacugugaauuuuaugauacc

SEQ ID NO: 707172 - RNA, 22 nt, Human
uaugugauauaggcuauuugau

SEQ ID NO: 707173 - RNA, 22 nt, Human
uucaaucauugcaaaguaaugg

SEQ ID NO: 707174 - RNA, 22 nt, Human
ucccaggugaugcugaggccac

SEQ ID NO: 707175 - RNA, 22 nt, Human
aucuacagcugucugcacagua

SEQ ID NO: 707176 - RNA, 22 nt, Human
caucaugccccgcuacagugca

SEQ ID NO: 707177 - RNA, 22 nt, Human
ggcucaggagaggggcuaaaag

SEQ ID NO: 707178 - RNA, 22 nt, Human
gauugaaucauaugaaauugug

SEQ ID NO: 707179 - RNA, 22 nt, Human
uaaagugcaugcggggccagau

SEQ ID NO: 707180 - RNA, 22 nt, Human
uggcagaguaggauggcccugu

SEQ ID NO: 707181 - RNA, 20 nt, Human
uauaaauucagagcuuuggu

SEQ ID NO: 707182 - RNA, 19 nt, Human
uucuuacaacacccuggga

SEQ ID NO: 707183 - RNA, 22 nt, Human
uggccucuuacgacauagccuu

SEQ ID NO: 707184 - RNA, 22 nt, Human
aagaauauagauuuuuugaagu

SEQ ID NO: 707185 - RNA, 22 nt, Human
aaaagcagaccacgcuuugugg

SEQ ID NO: 707186 - RNA, 22 nt, Human
ucugagguguagcugggcuuca

SEQ ID NO: 707187 - RNA, 22 nt, Human
ccagugcagucccccugaacug

SEQ ID NO: 707188 - RNA, 22 nt, Human
agucuggggucugguagaacga

SEQ ID NO: 707189 - RNA, 22 nt, Human
aggagccaguuccaccccagga

SEQ ID NO: 707190 - RNA, 22 nt, Human
uggaaugacagagagucugaau

SEQ ID NO: 707191 - RNA, 22 nt, Human
uggagguugggaugcuugugau

SEQ ID NO: 707192 - RNA, 22 nt, Human
ccucuuugugccugcaggcugc

SEQ ID NO: 707193 - RNA, 22 nt, Human
acauuuuucacauuuguagggu

SEQ ID NO: 707194 - RNA, 18 nt, Human
gaugaagcugcuggggau

SEQ ID NO: 707195 - RNA, 19 nt, Human
ccuggagucgcgcugccuc

SEQ ID NO: 707196 - RNA, 23 nt, Human
gacagggcugacuuggcagcugc

SEQ ID NO: 707197 - RNA, 22 nt, Human
ccaggcuuuucucauggaguca

SEQ ID NO: 707198 - RNA, 22 nt, Human
gcuccagggucagcucagaacu

SEQ ID NO: 707199 - RNA, 22 nt, Human
uggaaaauuaguagugaaaggc

SEQ ID NO: 707200 - RNA, 22 nt, Human
uggccugcagcucucagggaag

SEQ ID NO: 707201 - RNA, 22 nt, Human
cccugcugugucccaccuggaa

SEQ ID NO: 707202 - RNA, 22 nt, Human
augcaacagcugggaauaugua

SEQ ID NO: 707203 - RNA, 22 nt, Human
uggcaaagaugaagcauuucgu

SEQ ID NO: 707204 - RNA, 20 nt, Human
ucagauuuuucuaacuuuga

SEQ ID NO: 707205 - RNA, 22 nt, Human
caggagcaggcccaaggacaca

SEQ ID NO: 707206 - RNA, 22 nt, Human
aaauauguaagauuagcacuag

SEQ ID NO: 707207 - RNA, 22 nt, Human
gcacaacaccaagggagguauc

SEQ ID NO: 707208 - RNA, 22 nt, Human
ggcucugggccagaguuggcuu

SEQ ID NO: 707209 - RNA, 22 nt, Human
aacagucagcuucucgggacau

SEQ ID NO: 707210 - RNA, 22 nt, Human
uggcuucaguuccuguguuguu

SEQ ID NO: 707211 - RNA, 22 nt, Human
ucugcuguucucaugcugauuu

SEQ ID NO: 707212 - RNA, 22 nt, Human
gaaacucucgcauccugggaac

SEQ ID NO: 707213 - RNA, 22 nt, Human
auagcacaauauuaccuuuaug

SEQ ID NO: 707214 - RNA, 22 nt, Human
cugcuucuccaaaguaggacuu

SEQ ID NO: 707215 - RNA, 22 nt, Human
ggcugcggccgcgggucugugc

SEQ ID NO: 707216 - RNA, 22 nt, Human
acccaggcugcuucucaguggc

SEQ ID NO: 707217 - RNA, 22 nt, Human
cacugaaggcugcagcucagcc

SEQ ID NO: 707218 - RNA, 22 nt, Human
ugucugggauguuggcagccac

SEQ ID NO: 707219 - RNA, 22 nt, Human
acacauaagaaacuacaaagag

SEQ ID NO: 707220 - RNA, 22 nt, Human
uuguuuccuuucuauacaggau

SEQ ID NO: 707221 - RNA, 22 nt, Human
caaugacauggauaaucauauu

SEQ ID NO: 707222 - RNA, 22 nt, Human
uggcagaaugaagacuggggcc

SEQ ID NO: 707223 - RNA, 22 nt, Human
auguccagaguaaagcacauuc

SEQ ID NO: 707224 - RNA, 19 nt, Human
cacugugguccuucacugc

SEQ ID NO: 707225 - RNA, 22 nt, Human
cagcacaguuucccccaugagc

SEQ ID NO: 707226 - RNA, 22 nt, Human
cugugggcugaaagugcucccg

SEQ ID NO: 707227 - RNA, 22 nt, Human
acuugguugaugucauaagguu

SEQ ID NO: 707228 - RNA, 22 nt, Human
uuggcagaauuaaccacugaag

SEQ ID NO: 707229 - RNA, 22 nt, Human
gcugagggaggcugaacugagu

SEQ ID NO: 707230 - RNA, 22 nt, Human
uuccuaauggcaaaacauguuu

SEQ ID NO: 707231 - RNA, 22 nt, Human
auuugcuaguggaauuuuccug

SEQ ID NO: 707232 - RNA, 16 nt, Human
gagaagagcccggcag

SEQ ID NO: 707233 - RNA, 19 nt, Human
cugggucuuauucugugaa

SEQ ID NO: 707234 - RNA, 22 nt, Human
aucagaagcuuguagucucucu

SEQ ID NO: 707235 - RNA, 22 nt, Human
ggcaucguccugggcauaggga

SEQ ID NO: 707236 - RNA, 22 nt, Human
ccucaggguggcaucagaucuu

SEQ ID NO: 707237 - RNA, 22 nt, Human
accugcaguggccacuccuaau

SEQ ID NO: 707238 - RNA, 22 nt, Human
uccccagauggccagcuacaug

SEQ ID NO: 707239 - RNA, 22 nt, Human
ccuuagagaguacugggcugcc

SEQ ID NO: 707240 - RNA, 22 nt, Human
agguggcaaggggcgccucucu

SEQ ID NO: 707241 - RNA, 22 nt, Human
aacuuaaacccacucauguaga

SEQ ID NO: 707242 - RNA, 22 nt, Human
agaccaggucuuuauggcucca

SEQ ID NO: 707243 - RNA, 22 nt, Human
uugggcagguguggcucuccuu

SEQ ID NO: 707244 - RNA, 22 nt, Human
uggaagcacugaagagacaacc

SEQ ID NO: 707245 - RNA, 17 nt, Human
cacaggugugguuugag

SEQ ID NO: 707246 - RNA, 22 nt, Human
uuaacagagugccuggcaugua

SEQ ID NO: 707247 - RNA, 22 nt, Human
ucaauaauggcaggauaaauuu

SEQ ID NO: 707248 - RNA, 22 nt, Human
aagaugaaaauuuacugugaug

SEQ ID NO: 707249 - RNA, 22 nt, Human
gguaauaaaauugugucaaaca

SEQ ID NO: 707250 - RNA, 22 nt, Human
ucagagguaguagcagaguuga

SEQ ID NO: 707251 - RNA, 22 nt, Human
ucccagccuuccagucugguuu

SEQ ID NO: 707252 - RNA, 22 nt, Human
uagaauucaagauucaacaggc

SEQ ID NO: 707253 - RNA, 22 nt, Human
uggccaauggcuccggccucau

SEQ ID NO: 707254 - RNA, 23 nt, Human
uacauucuguauuuuuauagagu

SEQ ID NO: 707255 - RNA, 22 nt, Human
gagacacaaucucauuuacauu

SEQ ID NO: 707256 - RNA, 22 nt, Human
acauaugugcuuauauccauga

SEQ ID NO: 707257 - RNA, 22 nt, Human
uccuggagccacggagcuuuca

SEQ ID NO: 707258 - RNA, 22 nt, Human
agaaggaaaaccugucuuaugu

SEQ ID NO: 707259 - RNA, 21 nt, Human
ccagcugucuguccuuaggca

SEQ ID NO: 707260 - RNA, 19 nt, Human
gcucagugaugccagacca

SEQ ID NO: 707261 - RNA, 22 nt, Human
uuuccaggugcauagaaaacag

SEQ ID NO: 707262 - RNA, 22 nt, Human
gaaaccugugcugauuuguuag

SEQ ID NO: 707263 - RNA, 22 nt, Human
cucuugggagugcucuggagaa

SEQ ID NO: 707264 - RNA, 22 nt, Human
uaaggaagagcuugguaauagg

SEQ ID NO: 707265 - RNA, 22 nt, Human
uggaggcugguuucugcugagg

SEQ ID NO: 707266 - RNA, 22 nt, Human
gguccccagcaguggcugcuuc

SEQ ID NO: 707267 - RNA, 21 nt, Human
uuacaugguuuaucauaugga

SEQ ID NO: 707268 - RNA, 22 nt, Human
ggcuuuauuucacuguaccaua

SEQ ID NO: 707269 - RNA, 22 nt, Human
cugagcugggacucaguagcaa

SEQ ID NO: 707270 - RNA, 20 nt, Human
caccuucaaauuuccuggca

SEQ ID NO: 707271 - RNA, 22 nt, Human
ucagcugugauccaucuaucua

SEQ ID NO: 707272 - RNA, 21 nt, Human
uucagcaagcacucuggacac

SEQ ID NO: 707273 - RNA, 22 nt, Human
ccagccugguucagaauuggcu

SEQ ID NO: 707274 - RNA, 18 nt, Human
uacaugcauaaaugaagc

SEQ ID NO: 707275 - RNA, 22 nt, Human
aggcugagucgggaggaucacu

SEQ ID NO: 707276 - RNA, 20 nt, Human
gugccaggcaagacaggugg

SEQ ID NO: 707277 - RNA, 22 nt, Human
gugggugucucaagaauggggg

SEQ ID NO: 707278 - RNA, 22 nt, Human
gcuguagauggacuggcaucca

SEQ ID NO: 707279 - RNA, 23 nt, Human
uugcacugaucaauuugauaagc

SEQ ID NO: 707280 - RNA, 22 nt, Human
ucugaaggaaaaggguagauau

SEQ ID NO: 707281 - RNA, 20 nt, Human
ccagaggcugacagacuuug

SEQ ID NO: 707282 - RNA, 22 nt, Human
uuucaguugcagugguugucua

SEQ ID NO: 707283 - RNA, 22 nt, Human
cauucaaagcaggaaaggccuu

SEQ ID NO: 707284 - RNA, 17 nt, Human
aaggauauuauaguucu

SEQ ID NO: 707285 - RNA, 22 nt, Human
cugggcucccucaugugucugc

SEQ ID NO: 707286 - RNA, 22 nt, Human
gcaggcccuuagccuugguggg

SEQ ID NO: 707287 - RNA, 22 nt, Human
acucaggaaauugagauaaugg

SEQ ID NO: 707288 - RNA, 18 nt, Human
caggccucuugaucuucc

SEQ ID NO: 707289 - RNA, 22 nt, Human
ggcagguggacgugcuaaagcu

SEQ ID NO: 707290 - RNA, 22 nt, Human
ucaaaaauggucuuugagcugc

SEQ ID NO: 707291 - RNA, 22 nt, Human
uguuugaaguucuucugugacu

SEQ ID NO: 707292 - RNA, 22 nt, Human
ggcuggucacaccacugcaggg

SEQ ID NO: 707293 - RNA, 22 nt, Human
agcaggccugccaccucggggu

SEQ ID NO: 707294 - RNA, 22 nt, Human
augcagaagacugaaaagcuga

SEQ ID NO: 707295 - RNA, 22 nt, Human
ugugaauauacuuaaugccacu

SEQ ID NO: 707296 - RNA, 23 nt, Human
ugggaagauauguauguucaagg

SEQ ID NO: 707297 - RNA, 16 nt, Human
gcacacacaucaauga

SEQ ID NO: 707298 - RNA, 22 nt, Human
ucaucaaaagccuucuggguua

SEQ ID NO: 707299 - RNA, 23 nt, Human
uuuaaugaccaauagaaggaaca

SEQ ID NO: 707300 - RNA, 19 nt, Human
uagucuuuauucuuaauuu

SEQ ID NO: 707301 - RNA, 22 nt, Human
ucucuuggagguucuuccuguu

SEQ ID NO: 707302 - RNA, 22 nt, Human
ucagucacacucacugagguag

SEQ ID NO: 707303 - RNA, 22 nt, Human
gggccagaccucuucucaggga

SEQ ID NO: 707304 - RNA, 22 nt, Human
gugagagcugcuccagaucucu

SEQ ID NO: 707305 - RNA, 19 nt, Human
cccaggaagcggagguugc

SEQ ID NO: 707306 - RNA, 22 nt, Human
gaaugcuguagacagacucuau

SEQ ID NO: 707307 - RNA, 22 nt, Human
cuggggcagagcccagcaauuu

SEQ ID NO: 707308 - RNA, 22 nt, Human
ugcugagaagagggccgaccca

SEQ ID NO: 707309 - RNA, 22 nt, Human
ucuucauguugcuguagggaga

SEQ ID NO: 707310 - RNA, 22 nt, Human
gguguugggagagcugguuuug

SEQ ID NO: 707311 - RNA, 22 nt, Human
gagagcugucagcguagcaccg

SEQ ID NO: 707312 - RNA, 22 nt, Human
gacuuucuugcagaaauauucc

SEQ ID NO: 707313 - RNA, 22 nt, Human
gucuccugccacacucaguccc

SEQ ID NO: 707314 - RNA, 18 nt, Human
gacacauccccaggccuc

SEQ ID NO: 707315 - RNA, 22 nt, Human
aaguuacaguuauuauuuaaaa

SEQ ID NO: 707316 - RNA, 22 nt, Human
gugagagauugauuguagcggc

SEQ ID NO: 707317 - RNA, 22 nt, Human
gaugcauucgggauguuuacuu

SEQ ID NO: 707318 - RNA, 22 nt, Human
ugcacagaugcuaggaggugaa

SEQ ID NO: 707319 - RNA, 19 nt, Human
cugggaguucacugcugcc

SEQ ID NO: 707320 - RNA, 22 nt, Human
acaagagacaagagguucuucu

SEQ ID NO: 707321 - RNA, 19 nt, Human
ccugugucccacguagaug

SEQ ID NO: 707322 - RNA, 22 nt, Human
gggcaagcuuugaacaucagca

SEQ ID NO: 707323 - RNA, 22 nt, Human
aggacacagguaagccagugga

SEQ ID NO: 707324 - RNA, 20 nt, Human
ucagagagagggugccacuu

SEQ ID NO: 707325 - RNA, 22 nt, Human
auguguucgcuagauugcuguu

SEQ ID NO: 707326 - RNA, 22 nt, Human
ucauaaagcucuuccaaaugua

SEQ ID NO: 707327 - RNA, 22 nt, Human
uccugagcaccuaugccauggc

SEQ ID NO: 707328 - RNA, 22 nt, Human
ggcagcucugaugaugcucugg

SEQ ID NO: 707329 - RNA, 22 nt, Human
gcugcccugcaucugugccuuc

SEQ ID NO: 707330 - RNA, 22 nt, Human
aagcugccuagaguugaauguc

SEQ ID NO: 707331 - RNA, 22 nt, Human
acagacagggcaccugccuccu

SEQ ID NO: 707332 - RNA, 22 nt, Human
uguggggcuuacaaaggcagau

SEQ ID NO: 707333 - RNA, 22 nt, Human
uaucaguagauaaacggauugc

SEQ ID NO: 707334 - RNA, 22 nt, Human
cagguccaacuauuuaucugug

SEQ ID NO: 707335 - RNA, 22 nt, Human
ugcuucugaguugcaggacuug

SEQ ID NO: 707336 - RNA, 17 nt, Human
ugcagcugcucccaggc

SEQ ID NO: 707337 - RNA, 22 nt, Human
ggcauggcucggagucagaaca

SEQ ID NO: 707338 - RNA, 22 nt, Human
uagagaaaagcagggaucagga

SEQ ID NO: 707339 - RNA, 22 nt, Human
ugacaguguuggggguaaauuu

SEQ ID NO: 707340 - RNA, 22 nt, Human
augaacaagagagggaagauuc

SEQ ID NO: 707341 - RNA, 20 nt, Human
cgcccagugcgguucugacc

SEQ ID NO: 707342 - RNA, 22 nt, Human
aagugacuauuugaguacauca

SEQ ID NO: 707343 - RNA, 22 nt, Human
guucucuaucauuagugaauuu

SEQ ID NO: 707344 - RNA, 22 nt, Human
uccauuuagcuggcaaacaaug

SEQ ID NO: 707345 - RNA, 22 nt, Human
aauuuucugaugaugaagcacg

SEQ ID NO: 707346 - RNA, 22 nt, Human
auucuguguuaggauagauggu

SEQ ID NO: 707347 - RNA, 22 nt, Human
ucucucauagagaaaaauauau

SEQ ID NO: 707348 - RNA, 22 nt, Human
gacuucagauauuuuuuaaguu

SEQ ID NO: 707349 - RNA, 20 nt, Human
gucgaaaaagauaaacaggc

SEQ ID NO: 707350 - RNA, 22 nt, Human
cuacaaaaguaauugugguuuu

SEQ ID NO: 707351 - RNA, 22 nt, Human
uagugucugacauuuaagagca

SEQ ID NO: 707352 - RNA, 22 nt, Human
gugcccugaguggguaggagag

SEQ ID NO: 707353 - RNA, 22 nt, Human
ucuggguccgggacuguggaug

SEQ ID NO: 707354 - RNA, 22 nt, Human
gagagcccucacuccuucccug

SEQ ID NO: 707355 - RNA, 22 nt, Human
cugcuggguuugccuuucacca

SEQ ID NO: 707356 - RNA, 22 nt, Human
ucuuuacuuguguauuguauau

SEQ ID NO: 707357 - RNA, 22 nt, Human
augaaaauugacagcggaagua

SEQ ID NO: 707358 - RNA, 23 nt, Human
uggucucacuugguaagaugaag

SEQ ID NO: 707359 - RNA, 22 nt, Human
auguagagcaguguuguccaau

SEQ ID NO: 707360 - RNA, 22 nt, Human
cauuugaauggcauuucacuuu

SEQ ID NO: 707361 - RNA, 22 nt, Human
cagcuuggauuuuggcacgugu

SEQ ID NO: 707362 - RNA, 22 nt, Human
aggcuggacccgacaccugccc

SEQ ID NO: 707363 - RNA, 22 nt, Human
ggucugugcucuggagccucug

SEQ ID NO: 707364 - RNA, 22 nt, Human
uuucagaacagggauugggccu

SEQ ID NO: 707365 - RNA, 22 nt, Human
ugauuucaguaaugaggaugaa

SEQ ID NO: 707366 - RNA, 22 nt, Human
acucccucucuaguccuugcaa

SEQ ID NO: 707367 - RNA, 22 nt, Human
ggauaaagucuuuagguggaca

SEQ ID NO: 707368 - RNA, 22 nt, Human
auauaguuuaagaaaguacagu

SEQ ID NO: 707369 - RNA, 22 nt, Human
cuggcagcauuaacagagagca

SEQ ID NO: 707370 - RNA, 22 nt, Human
uagauuucaggcuggcuugcgg

SEQ ID NO: 707371 - RNA, 22 nt, Human
uccaggaggcagggcugugccc

SEQ ID NO: 707372 - RNA, 22 nt, Human
uuggcucugauggggaucagga

SEQ ID NO: 707373 - RNA, 22 nt, Human
auaaaggauaauccauuagacu

SEQ ID NO: 707374 - RNA, 22 nt, Human
cacaaaguuggacaacgcaccc

SEQ ID NO: 707375 - RNA, 22 nt, Human
guggguggggagcucucuggag

SEQ ID NO: 707376 - RNA, 22 nt, Human
gaagcagaagguuuggacgugc

SEQ ID NO: 707377 - RNA, 22 nt, Human
cuucugcaagagcaucaguugu

SEQ ID NO: 707378 - RNA, 22 nt, Human
ugaucuggaauucccuguggua

SEQ ID NO: 707379 - RNA, 22 nt, Human
uccagagagguuucuccaugcu

SEQ ID NO: 707380 - RNA, 22 nt, Human
acugggccgcgcugcagagggc

SEQ ID NO: 707381 - RNA, 22 nt, Human
agcugcucugagcccugauucu

SEQ ID NO: 707382 - RNA, 22 nt, Human
uggcuggcgccgggcuagccac

SEQ ID NO: 707383 - RNA, 17 nt, Human
ugugcgcuugugugagg

SEQ ID NO: 707384 - RNA, 18 nt, Human
ggacaucaucaggugcuu

SEQ ID NO: 707385 - RNA, 22 nt, Human
aguuaaugagcauuuuggaaug

SEQ ID NO: 707386 - RNA, 22 nt, Human
uucugggcucucuuucugugug

SEQ ID NO: 707387 - RNA, 22 nt, Human
auucugcugguaacucuauaaa

SEQ ID NO: 707388 - RNA, 22 nt, Human
cagagccaaaccucagggcccg

SEQ ID NO: 707389 - RNA, 22 nt, Human
augaggcaggauuaagcuauca

SEQ ID NO: 707390 - RNA, 22 nt, Human
gugggaagagccaauuggggua

SEQ ID NO: 707391 - RNA, 22 nt, Human
agaugacaaaucaggggacggg

SEQ ID NO: 707392 - RNA, 23 nt, Human
uuugcaaauuggacacaaccaca

SEQ ID NO: 707393 - RNA, 21 nt, Human
cuguuucuugugaagugacac

SEQ ID NO: 707394 - RNA, 22 nt, Human
aaaugcagcagcuaauugaaaa

SEQ ID NO: 707395 - RNA, 22 nt, Human
ugagccaguucuucagauccau

SEQ ID NO: 707396 - RNA, 22 nt, Human
auagcacuuauagauuuggucu

SEQ ID NO: 707397 - RNA, 22 nt, Human
gaaucagaaucucuaagguggg

SEQ ID NO: 707398 - RNA, 19 nt, Human
caucaaguggaguaucucg

SEQ ID NO: 707399 - RNA, 22 nt, Human
ucacugauuaugaaaaugaagg

SEQ ID NO: 707400 - RNA, 18 nt, Human
gggaagccgggaagccgg

SEQ ID NO: 707401 - RNA, 22 nt, Human
caucaguguucacuauuccuuc

SEQ ID NO: 707402 - RNA, 22 nt, Human
agcccuccuggggccacgcugg

SEQ ID NO: 707403 - RNA, 22 nt, Human
cccaggaggaggaaaaagcucg

SEQ ID NO: 707404 - RNA, 22 nt, Human
gaaaucugaaucuucuguuggu

SEQ ID NO: 707405 - RNA, 22 nt, Human
cugaggggaaaagucaggauga

SEQ ID NO: 707406 - RNA, 22 nt, Human
aaaugcaaggccaugugaagga

SEQ ID NO: 707407 - RNA, 22 nt, Human
ccaucuccaaauaccaucacau

SEQ ID NO: 707408 - RNA, 22 nt, Human
ugccaccuugugcagcaggagg

SEQ ID NO: 707409 - RNA, 22 nt, Human
gauggcagcagcagccagggau

SEQ ID NO: 707410 - RNA, 18 nt, Human
uguaaugcagcggguggc

SEQ ID NO: 707411 - RNA, 22 nt, Human
acuucaaacaauuaacagagaa

SEQ ID NO: 707412 - RNA, 23 nt, Human
ggcagagagcauggcuggggccc

SEQ ID NO: 707413 - RNA, 22 nt, Human
aggcccaguguggcuuccugga

SEQ ID NO: 707414 - RNA, 22 nt, Human
aggcugugcaauuaggguaaga

SEQ ID NO: 707415 - RNA, 22 nt, Human
uaaugucuguguuucagugcag

SEQ ID NO: 707416 - RNA, 22 nt, Human
uucucugaaggccaugcucacu

SEQ ID NO: 707417 - RNA, 18 nt, Human
cccugaagggcaagauaa

SEQ ID NO: 707418 - RNA, 22 nt, Human
ccagagcccagcacacggugcu

SEQ ID NO: 707419 - RNA, 22 nt, Human
ggcccagcugugcuuccagccc

SEQ ID NO: 707420 - RNA, 22 nt, Human
acuggaaauugagaggucacug

SEQ ID NO: 707421 - RNA, 22 nt, Human
aauuuguguuauaccugcuccu

SEQ ID NO: 707422 - RNA, 22 nt, Human
ggaguggcaggccacagugcug

SEQ ID NO: 707423 - RNA, 22 nt, Human
aagaaaucauaucauuucuugg

SEQ ID NO: 707424 - RNA, 23 nt, Human
acuaaauggggcuuugcuuaaag

SEQ ID NO: 707425 - RNA, 22 nt, Human
ccauugaaccccucuaggccac

SEQ ID NO: 707426 - RNA, 22 nt, Human
aacaggcaggagaauucugccu

SEQ ID NO: 707427 - RNA, 22 nt, Human
uucucaaggacaaaaugacaug

SEQ ID NO: 707428 - RNA, 22 nt, Human
auuacuccuuuucuagcaggug

SEQ ID NO: 707429 - RNA, 23 nt, Human
ucacaggggccagcgcucugugg

SEQ ID NO: 707430 - RNA, 22 nt, Human
ucuacccugcggucuuggggca

SEQ ID NO: 707431 - RNA, 22 nt, Human
caguggaagacucagcucuccc

SEQ ID NO: 707432 - RNA, 22 nt, Human
gggccaugagagguucaucaac

SEQ ID NO: 707433 - RNA, 22 nt, Human
uuguacauaaugaaaggaggcu

SEQ ID NO: 707434 - RNA, 22 nt, Human
auucuggguuugcuguacaaag

SEQ ID NO: 707435 - RNA, 22 nt, Human
cagagcuuugugucagggcugu

SEQ ID NO: 707436 - RNA, 22 nt, Human
ugagccaugggacuccaaggga

SEQ ID NO: 707437 - RNA, 22 nt, Human
uccaggcuacuuggauuccugg

SEQ ID NO: 707438 - RNA, 22 nt, Human
ucucugugucucauguuccuau

SEQ ID NO: 707439 - RNA, 22 nt, Human
guucacaauuuuuacugauugg

SEQ ID NO: 707440 - RNA, 22 nt, Human
ggccagcggcacagccuggccc

SEQ ID NO: 707441 - RNA, 22 nt, Human
uaaggcaguuuugccugagaua

SEQ ID NO: 707442 - RNA, 18 nt, Human
ugcccaccagaagaggga

SEQ ID NO: 707443 - RNA, 22 nt, Human
ggcccaaacggguccagugaaa

SEQ ID NO: 707444 - RNA, 22 nt, Human
uuaaccuguuaugcccccagag

SEQ ID NO: 707445 - RNA, 22 nt, Human
cugugccuucuacuucacucua

SEQ ID NO: 707446 - RNA, 22 nt, Human
uggcugugaacaaagagaauaa

SEQ ID NO: 707447 - RNA, 22 nt, Human
cuacacugagagcucuucaggg

SEQ ID NO: 707448 - RNA, 23 nt, Human
ugagucuugagcuuuggauucug

SEQ ID NO: 707449 - RNA, 22 nt, Human
uuuauguuauggguaggaucaa

SEQ ID NO: 707450 - RNA, 22 nt, Human
uucaggauggcggauguugggg

SEQ ID NO: 707451 - RNA, 20 nt, Human
uccaggagaacugggagccg

SEQ ID NO: 707452 - RNA, 22 nt, Human
aaaugcaugguaaaugauugcc

SEQ ID NO: 707453 - RNA, 22 nt, Human
cugagaaaaguaugagcucugg

SEQ ID NO: 707454 - RNA, 20 nt, Human
uuucaguugguuaauggcau

SEQ ID NO: 707455 - RNA, 21 nt, Human
aagaacuauugagguacacag

SEQ ID NO: 707456 - RNA, 22 nt, Human
gaguccaguaguuaggacagag

SEQ ID NO: 707457 - RNA, 22 nt, Human
acugauggcccaccuuggucuc

SEQ ID NO: 707458 - RNA, 22 nt, Human
gacuuucugagucaaagaaagg

SEQ ID NO: 707459 - RNA, 22 nt, Human
cucugggaccauggcaagugcg

SEQ ID NO: 707460 - RNA, 22 nt, Human
gcugaaauucagauuccuaggc

SEQ ID NO: 707461 - RNA, 22 nt, Human
ucuaaaaugcagaucuacuggu

SEQ ID NO: 707462 - RNA, 22 nt, Human
cacacauauugucccuagugug

SEQ ID NO: 707463 - RNA, 22 nt, Human
ggcggcuuauucacucugggga

SEQ ID NO: 707464 - RNA, 22 nt, Human
ugaagacagaccaaggagaaug

SEQ ID NO: 707465 - RNA, 22 nt, Human
gucccugcaucugcaggccaug

SEQ ID NO: 707466 - RNA, 22 nt, Human
caagucaaugauuauaagaguc

SEQ ID NO: 707467 - RNA, 22 nt, Human
aaagccaggcuggccugggguu

SEQ ID NO: 707468 - RNA, 22 nt, Human
aagguuucuccgaggcuauuuu

SEQ ID NO: 707469 - RNA, 22 nt, Human
cacugugggucccagacuggag

SEQ ID NO: 707470 - RNA, 22 nt, Human
aauguauucugggaaaauguua

SEQ ID NO: 707471 - RNA, 22 nt, Human
cuggcagguuuggugucuggug

SEQ ID NO: 707472 - RNA, 22 nt, Human
uagagguauuuuugauggucau

SEQ ID NO: 707473 - RNA, 22 nt, Human
gagcucaggagcaucagaagaa

SEQ ID NO: 707474 - RNA, 22 nt, Human
accagcugccuuuucuuaguag

SEQ ID NO: 707475 - RNA, 22 nt, Human
agcagccacccagcugcucauu

SEQ ID NO: 707476 - RNA, 22 nt, Human
augcaaaaacugcacuuacgcu

SEQ ID NO: 707477 - RNA, 22 nt, Human
cugcauugaucaggcagaaucu

SEQ ID NO: 707478 - RNA, 22 nt, Human
augcaguuuaucuccaaaucau

SEQ ID NO: 707479 - RNA, 22 nt, Human
uccuggagauaauugcagugaa

SEQ ID NO: 707480 - RNA, 21 nt, Human
uauacaugugugcauacgugu

SEQ ID NO: 707481 - RNA, 22 nt, Human
gugggcuggauuugcuugcaga

SEQ ID NO: 707482 - RNA, 19 nt, Human
gccaggucuuggguccagg

SEQ ID NO: 707483 - RNA, 21 nt, Human
uugaaaguaaauucagcagcu

SEQ ID NO: 707484 - RNA, 22 nt, Human
acauugaaagcauauuaucucc

SEQ ID NO: 707485 - RNA, 22 nt, Human
ugaaaucaguaugucuuucuca

SEQ ID NO: 707486 - RNA, 17 nt, Human
ugaaguuaggcugcaga

SEQ ID NO: 707487 - RNA, 22 nt, Human
agucucugccagcuuguccucu

SEQ ID NO: 707488 - RNA, 22 nt, Human
gcuggaguuggcaaggcaugua

SEQ ID NO: 707489 - RNA, 22 nt, Human
ccugcagaaaggguccccagga

SEQ ID NO: 707490 - RNA, 22 nt, Human
gggcuccugccuccuggcaccu

SEQ ID NO: 707491 - RNA, 22 nt, Human
gcugcaugacagacaggccugg

SEQ ID NO: 707492 - RNA, 22 nt, Human
uaucaaaguuguccugugaagu

SEQ ID NO: 707493 - RNA, 22 nt, Human
uacagacauucaauuuugaccc

SEQ ID NO: 707494 - RNA, 22 nt, Human
ugagaaucagcugcacagaggu

SEQ ID NO: 707495 - RNA, 22 nt, Human
auucucugugcagauuuaagac

SEQ ID NO: 707496 - RNA, 21 nt, Human
caugcagauucuggagccaga

SEQ ID NO: 707497 - RNA, 22 nt, Human
ucugaagcuggaggaagcuuug

SEQ ID NO: 707498 - RNA, 19 nt, Human
cuucuucuuggcagccaag

SEQ ID NO: 707499 - RNA, 22 nt, Human
aagauucugucaguuaggagga

SEQ ID NO: 707500 - RNA, 22 nt, Human
cugaggaaugagugaggagcca

SEQ ID NO: 707501 - RNA, 22 nt, Human
ucucagucaguuuggacugugu

SEQ ID NO: 707502 - RNA, 22 nt, Human
agggcccaggacagcaucaggg

SEQ ID NO: 707503 - RNA, 22 nt, Human
cuguuuccuaccguuuuucauu

SEQ ID NO: 707504 - RNA, 21 nt, Human
auccguuuaauaauacugaau

SEQ ID NO: 707505 - RNA, 22 nt, Human
cuggcuccaccccaggaggaug

SEQ ID NO: 707506 - RNA, 17 nt, Human
ugcuugacucucuuguu

SEQ ID NO: 707507 - RNA, 23 nt, Human
ugcccucccaaugcuucggucac

SEQ ID NO: 707508 - RNA, 21 nt, Human
gucugaugcuugaugcaguug

SEQ ID NO: 707509 - RNA, 22 nt, Human
gccccagcguggcuguguuagg

SEQ ID NO: 707510 - RNA, 22 nt, Human
gagggccagcagccucagcaug

SEQ ID NO: 707511 - RNA, 22 nt, Human
cugacuccuuaccauaugcuuu

SEQ ID NO: 707512 - RNA, 22 nt, Human
uguuucuuacguuuuuagaggc

SEQ ID NO: 707513 - RNA, 22 nt, Human
ccuggcuggacuggaccguggc

SEQ ID NO: 707514 - RNA, 22 nt, Human
cagaugaggcaaccucauugcu

SEQ ID NO: 707515 - RNA, 22 nt, Human
gaagaugugcaauacaaagaaa

SEQ ID NO: 707516 - RNA, 22 nt, Human
uguucacaaggugaugcuuuga

SEQ ID NO: 707517 - RNA, 22 nt, Human
gcccagcuggcuuccagcacau

SEQ ID NO: 707518 - RNA, 22 nt, Human
uccuucuggaggcuguaaagga

SEQ ID NO: 707519 - RNA, 22 nt, Human
aaauacaaaaauuagccaggca

SEQ ID NO: 707520 - RNA, 22 nt, Human
ucuuccagucuguaggacuagg

SEQ ID NO: 707521 - RNA, 22 nt, Human
caucuuuaacagaauggauuug

SEQ ID NO: 707522 - RNA, 22 nt, Human
acagcagagcaccagggccacu

SEQ ID NO: 707523 - RNA, 22 nt, Human
gugcaguggcagauccuagcuc

SEQ ID NO: 707524 - RNA, 22 nt, Human
aaagccaggguccaggccugcc

SEQ ID NO: 707525 - RNA, 22 nt, Human
cugcccaggaaccagaggggca

SEQ ID NO: 707526 - RNA, 22 nt, Human
ugcuuccagcucucuguaaggu

SEQ ID NO: 707527 - RNA, 22 nt, Human
auuauuaggugcucucugacaa

SEQ ID NO: 707528 - RNA, 22 nt, Human
aguuucuguuaccauauuugac

SEQ ID NO: 707529 - RNA, 22 nt, Human
aucaggaauuaggugagaugga

SEQ ID NO: 707530 - RNA, 22 nt, Human
cugguggagagugggcucugga

SEQ ID NO: 707531 - RNA, 22 nt, Human
ccuguacagugaaugaauguga

SEQ ID NO: 707532 - RNA, 22 nt, Human
uggggcucuccacagugucuca

SEQ ID NO: 707533 - RNA, 22 nt, Human
ugaggcaggacugagcgggaug

SEQ ID NO: 707534 - RNA, 22 nt, Human
uauacagauaucuaagauguaa

SEQ ID NO: 707535 - RNA, 23 nt, Human
cagugggcuucuaacugcuccug

SEQ ID NO: 707536 - RNA, 22 nt, Human
ggacaagccugugaguggguuu

SEQ ID NO: 707537 - RNA, 22 nt, Human
uccagggccuuaccucuucaga

SEQ ID NO: 707538 - RNA, 22 nt, Human
uaaauuguuuucuagaaguugu

SEQ ID NO: 707539 - RNA, 22 nt, Human
gaauuugaaaagugaugggaau

SEQ ID NO: 707540 - RNA, 22 nt, Human
auguaugcauguauguaucgcu

SEQ ID NO: 707541 - RNA, 20 nt, Human
ugcaguguggaagacugaga

SEQ ID NO: 707542 - RNA, 22 nt, Human
ugucaguuaccuagcacaagaa

SEQ ID NO: 707543 - RNA, 22 nt, Human
aggagccccucuucaguccugg

SEQ ID NO: 707544 - RNA, 22 nt, Human
aaguuuaguggugguguuccau

SEQ ID NO: 707545 - RNA, 22 nt, Human
ugaaauaucauuuucaucuccc

SEQ ID NO: 707546 - RNA, 22 nt, Human
uaaagcuacacauuauuaaucc

SEQ ID NO: 707547 - RNA, 23 nt, Human
uuugcaaauuuuccugacuacuc

SEQ ID NO: 707548 - RNA, 22 nt, Human
agcuggggcauuuauccacuaa

SEQ ID NO: 707549 - RNA, 22 nt, Human
ucacauuugcaauugcauuguu

SEQ ID NO: 707550 - RNA, 19 nt, Human
uuucuaagcuaaaugcuuc

SEQ ID NO: 707551 - RNA, 22 nt, Human
agagagcugacuuuggagucag

SEQ ID NO: 707552 - RNA, 22 nt, Human
ccacuggcaaccccgccucaua

SEQ ID NO: 707553 - RNA, 22 nt, Human
agagccuggaccugagcuacaa

SEQ ID NO: 707554 - RNA, 22 nt, Human
uaggaaauggcucaguuacugc

SEQ ID NO: 707555 - RNA, 22 nt, Human
gcacucaguaccaggucacugc

SEQ ID NO: 707556 - RNA, 22 nt, Human
aaacuguaagagaauaaacuac

SEQ ID NO: 707557 - RNA, 22 nt, Human
uggagaauaggggccacuggug

SEQ ID NO: 707558 - RNA, 22 nt, Human
cagagcacacaugcauagagug

SEQ ID NO: 707559 - RNA, 22 nt, Human
agguccugacuccacguucuag

SEQ ID NO: 707560 - RNA, 22 nt, Human
ccgggcgggggcucucgucacc

SEQ ID NO: 707561 - RNA, 22 nt, Human
cugaaagcaaaguaauucuuaa

SEQ ID NO: 707562 - RNA, 22 nt, Human
gcugcccaguucugcugcugcc

SEQ ID NO: 707563 - RNA, 22 nt, Human
uagauguuaagcuucuagaagg

SEQ ID NO: 707564 - RNA, 22 nt, Human
agcaggaaggucugugugaguc

SEQ ID NO: 707565 - RNA, 22 nt, Human
auugaacuguuggagagguuuu

SEQ ID NO: 707566 - RNA, 22 nt, Human
aguggguguagucuuccuccug

SEQ ID NO: 707567 - RNA, 20 nt, Human
cacaggcuauaugagagcca

SEQ ID NO: 707568 - RNA, 22 nt, Human
agcucugaugacuuuacaacuu

SEQ ID NO: 707569 - RNA, 22 nt, Human
cuuggcagcuuuuggaggagcc

SEQ ID NO: 707570 - RNA, 22 nt, Human
gcagcgagugcggcugccacag

SEQ ID NO: 707571 - RNA, 22 nt, Human
ugcagcagguuccaaaggguua

SEQ ID NO: 707572 - RNA, 22 nt, Human
ugcaaauauugggacagucuag

SEQ ID NO: 707573 - RNA, 22 nt, Human
aauaccuuuucagugcacaaaa

SEQ ID NO: 707574 - RNA, 22 nt, Human
auuauacaaggcuggugccuaa

SEQ ID NO: 707575 - RNA, 20 nt, Human
auuguacuucuguugauggu

SEQ ID NO: 707576 - RNA, 21 nt, Human
aagaaguuuggauuuuguccu

SEQ ID NO: 707577 - RNA, 22 nt, Human
ucugggcuuuaguuuguuaucu

SEQ ID NO: 707578 - RNA, 22 nt, Human
ucuggagaagcagugagaguca

SEQ ID NO: 707579 - RNA, 22 nt, Human
uuugaaaggugucgagaugugu

SEQ ID NO: 707580 - RNA, 20 nt, Human
ucagugcagauuguccaagu

SEQ ID NO: 707581 - RNA, 22 nt, Human
gccagcagguggagagaucaag

SEQ ID NO: 707582 - RNA, 22 nt, Human
aggaaaugggaauagaugguau

SEQ ID NO: 707583 - RNA, 23 nt, Human
acagccccaugcagguguguuug

SEQ ID NO: 707584 - RNA, 22 nt, Human
ugcaauauuuuauauccaacaa

SEQ ID NO: 707585 - RNA, 22 nt, Human
uauuugugagacugacugaagu

SEQ ID NO: 707586 - RNA, 22 nt, Human
caagcugcagcgccugcgccgg

SEQ ID NO: 707587 - RNA, 22 nt, Human
ugcauuucacagacugagaaau

SEQ ID NO: 707588 - RNA, 22 nt, Human
aaaguuacccaaucucuaugaa

SEQ ID NO: 707589 - RNA, 22 nt, Human
cauuucugucacguucuuuuau

SEQ ID NO: 707590 - RNA, 22 nt, Human
acugcccauuaaaggugcuuug

SEQ ID NO: 707591 - RNA, 22 nt, Human
uauucuugucuuuuccagaaau

SEQ ID NO: 707592 - RNA, 22 nt, Human
aagggcugccagggggugccag

SEQ ID NO: 707593 - RNA, 22 nt, Human
uggcucaugcaucuuuucuaca

SEQ ID NO: 707594 - RNA, 22 nt, Human
uugaacauuggcaauuucauau

SEQ ID NO: 707595 - RNA, 22 nt, Human
gcccagcaccucucucaggguu

SEQ ID NO: 707596 - RNA, 21 nt, Human
ugcaugcuauguuuuuauuuc

SEQ ID NO: 707597 - RNA, 22 nt, Human
gccaccagguuagauccagccu

SEQ ID NO: 707598 - RNA, 22 nt, Human
caucuuauaggcagaguucagu

SEQ ID NO: 707599 - RNA, 22 nt, Human
aaaauugaagugaucaggaacu

SEQ ID NO: 707600 - RNA, 22 nt, Human
guccucagcaccagaacuaggg

SEQ ID NO: 707601 - RNA, 23 nt, Human
uuggaacacaguaaaugcacaau

SEQ ID NO: 707602 - RNA, 17 nt, Human
cacugugggggcauuua

SEQ ID NO: 707603 - RNA, 22 nt, Human
ccagggaugcuuucccaggacu

SEQ ID NO: 707604 - RNA, 22 nt, Human
aagagcuggucacagguccauu

SEQ ID NO: 707605 - RNA, 22 nt, Human
gggucuggagauccgggugaag

SEQ ID NO: 707606 - RNA, 21 nt, Human
ugagagacugguggauacagg

SEQ ID NO: 707607 - RNA, 22 nt, Human
caucuugagacaugaaaggugu

SEQ ID NO: 707608 - RNA, 22 nt, Human
aaagacaugacacauuggagag

SEQ ID NO: 707609 - RNA, 22 nt, Human
ccauggcaauggucagucuauu

SEQ ID NO: 707610 - RNA, 22 nt, Human
uuguguuuucuuauggcauaaa

SEQ ID NO: 707611 - RNA, 22 nt, Human
gcagggcaaugaucccgagagg

SEQ ID NO: 707612 - RNA, 18 nt, Human
gguccugggccuggcuca

SEQ ID NO: 707613 - RNA, 22 nt, Human
acagagucaugguagucaaagg

SEQ ID NO: 707614 - RNA, 22 nt, Human
ugaugaggcauaugcuacacau

SEQ ID NO: 707615 - RNA, 22 nt, Human
gcugugugcucacguaguggaa

SEQ ID NO: 707616 - RNA, 22 nt, Human
aggacagcagccauuggcaguc

SEQ ID NO: 707617 - RNA, 22 nt, Human
ucugaauaguucuauuuuaaag

SEQ ID NO: 707618 - RNA, 22 nt, Human
gcucacugccauucucuagaug

SEQ ID NO: 707619 - RNA, 21 nt, Human
gggcagaggggccuccugggu

SEQ ID NO: 707620 - RNA, 22 nt, Human
ccuuaaauucuccauuugaaag

SEQ ID NO: 707621 - RNA, 22 nt, Human
aaauaagugugggccagucaaa

SEQ ID NO: 707622 - RNA, 22 nt, Human
ccugaaaauauccucuccuuug

SEQ ID NO: 707623 - RNA, 20 nt, Human
uuucacagucccuguuuccu

SEQ ID NO: 707624 - RNA, 22 nt, Human
uguauuuauucuucugguguuu

SEQ ID NO: 707625 - RNA, 22 nt, Human
cugcccugugaggguccuuggg

SEQ ID NO: 707626 - RNA, 22 nt, Human
agaaaucaggaacaguaaggag

SEQ ID NO: 707627 - RNA, 22 nt, Human
ccagagccagagaggugccugc

SEQ ID NO: 707628 - RNA, 22 nt, Human
ccagccuuugcaucccccaucu

SEQ ID NO: 707629 - RNA, 22 nt, Human
gcuguuucuugaggcuacuccu

SEQ ID NO: 707630 - RNA, 22 nt, Human
acuuuugugcaggucucuccca

SEQ ID NO: 707631 - RNA, 22 nt, Human
ugggcaguggcugggccucucu

SEQ ID NO: 707632 - RNA, 23 nt, Human
ugauuacaagggccaaagaaagg

SEQ ID NO: 707633 - RNA, 22 nt, Human
aaucacaugugcucaauuuuaa

SEQ ID NO: 707634 - RNA, 22 nt, Human
caguaaaagauggaaauagaau

SEQ ID NO: 707635 - RNA, 18 nt, Human
aguaaagcuuauuacaug

SEQ ID NO: 707636 - RNA, 22 nt, Human
uccuucaggccucauucucaua

SEQ ID NO: 707637 - RNA, 22 nt, Human
gcccuccagcuguugcgcgucg

SEQ ID NO: 707638 - RNA, 22 nt, Human
gaugaaaugugaaaguucuggg

SEQ ID NO: 707639 - RNA, 22 nt, Human
gaggcucagagacuuuaaguuu

SEQ ID NO: 707640 - RNA, 18 nt, Human
cugauagggguggcagcu

SEQ ID NO: 707641 - RNA, 21 nt, Human
ugagggguuauaacagggugg

SEQ ID NO: 707642 - RNA, 22 nt, Human
aucaaauauaauaauuuucgcu

SEQ ID NO: 707643 - RNA, 22 nt, Human
agggcacaagacucugagcccc

SEQ ID NO: 707644 - RNA, 22 nt, Human
guccuucuuuucaucccugguu

SEQ ID NO: 707645 - RNA, 22 nt, Human
cugggucuggaggccaagggug

SEQ ID NO: 707646 - RNA, 20 nt, Human
cugcuuaaguaagugacaca

SEQ ID NO: 707647 - RNA, 22 nt, Human
ucugagcccucuuuugcagccc

SEQ ID NO: 707648 - RNA, 22 nt, Human
ugacuuaagcuguucuuuagau

SEQ ID NO: 707649 - RNA, 22 nt, Human
acauagaacuucgaugucuuuu

SEQ ID NO: 707650 - RNA, 23 nt, Human
agcugugugcgcguccggguucu

SEQ ID NO: 707651 - RNA, 22 nt, Human
gcagguaagagaggcuggcuuc

SEQ ID NO: 707652 - RNA, 22 nt, Human
cggagcagaaggcgccgccggc

SEQ ID NO: 707653 - RNA, 22 nt, Human
caagcaacgacuuucaagcugu

SEQ ID NO: 707654 - RNA, 22 nt, Human
uccagggcuguuacuuuacaua

SEQ ID NO: 707655 - RNA, 22 nt, Human
gcucauccagcaagccagggcc

SEQ ID NO: 707656 - RNA, 18 nt, Human
gggguagaguguccuauu

SEQ ID NO: 707657 - RNA, 22 nt, Human
uaggguccugccuacagagaca

SEQ ID NO: 707658 - RNA, 22 nt, Human
uuuuacaggugugagccaccau

SEQ ID NO: 707659 - RNA, 19 nt, Human
ggcugccuuuccuuaccag

SEQ ID NO: 707660 - RNA, 21 nt, Human
ugaggcuguuguaccagggag

SEQ ID NO: 707661 - RNA, 22 nt, Human
ccuguguuaguuaugggucucu

SEQ ID NO: 707662 - RNA, 22 nt, Human
uuugacaugcaaagcacuuuag

SEQ ID NO: 707663 - RNA, 22 nt, Human
cuggcuuuagguuggagagcug

SEQ ID NO: 707664 - RNA, 22 nt, Human
agcugcaguaugaggcuggugg

SEQ ID NO: 707665 - RNA, 22 nt, Human
ugugugccagccuacgaggagc

SEQ ID NO: 707666 - RNA, 22 nt, Human
ucacugaaggaagacacuguca

SEQ ID NO: 707667 - RNA, 22 nt, Human
aauugaaaauauuguagaccau

SEQ ID NO: 707668 - RNA, 22 nt, Human
uuuaaauguuuaaaacucguga

SEQ ID NO: 707669 - RNA, 22 nt, Human
gaggggucuuuuguugucaggg

SEQ ID NO: 707670 - RNA, 22 nt, Human
gcuauuuccaaagcugcuguuc

SEQ ID NO: 707671 - RNA, 22 nt, Human
agagcugguuuacucaggaauu

SEQ ID NO: 707672 - RNA, 22 nt, Human
uucaccuggcacaugugagccu

SEQ ID NO: 707673 - RNA, 22 nt, Human
aaccacagacccagacuagaga

SEQ ID NO: 707674 - RNA, 22 nt, Human
cuggugggagcagcaggcagcu

SEQ ID NO: 707675 - RNA, 22 nt, Human
ucucuggggccuuucuacauca

SEQ ID NO: 707676 - RNA, 21 nt, Human
uucugggccggagaaggggcg

SEQ ID NO: 707677 - RNA, 22 nt, Human
uggaacacaggacuaucagcug

SEQ ID NO: 707678 - RNA, 22 nt, Human
ucucagaguuugaaucuggagu

SEQ ID NO: 707679 - RNA, 22 nt, Human
acucuugaagguggugggagug

SEQ ID NO: 707680 - RNA, 22 nt, Human
uuccaaagcacuugauguaaag

SEQ ID NO: 707681 - RNA, 22 nt, Human
uuucacaaagcauagcacuuua

SEQ ID NO: 707682 - RNA, 22 nt, Human
acucacagcaugagcuuggcag

SEQ ID NO: 707683 - RNA, 22 nt, Human
gagguucauucagcucugucac

SEQ ID NO: 707684 - RNA, 22 nt, Human
caggcuugcugcuagagcacuu

SEQ ID NO: 707685 - RNA, 22 nt, Human
agaggaaggaugcauauccaaa

SEQ ID NO: 707686 - RNA, 18 nt, Human
gcagugaagaaagagcuu

SEQ ID NO: 707687 - RNA, 22 nt, Human
ugguccuggaagguccugaggg

SEQ ID NO: 707688 - RNA, 18 nt, Human
ucugcccugccauucacu

SEQ ID NO: 707689 - RNA, 22 nt, Human
uagcacaguuccugacucuuug

SEQ ID NO: 707690 - RNA, 22 nt, Human
ucaugcauauuuguaguaguuc

SEQ ID NO: 707691 - RNA, 22 nt, Human
aagaaucucugaucaggcuuua

SEQ ID NO: 707692 - RNA, 20 nt, Human
uggaaccuaggcagagcugg

SEQ ID NO: 707693 - RNA, 22 nt, Human
aucacacuguuauuuuaguuaa

SEQ ID NO: 707694 - RNA, 17 nt, Human
ucuuucccugggagaug

SEQ ID NO: 707695 - RNA, 22 nt, Human
gcacagacuuugauugcaguca

SEQ ID NO: 707696 - RNA, 22 nt, Human
gagacugguguuugcugggcug

SEQ ID NO: 707697 - RNA, 22 nt, Human
aaauuauuaugccccucuauaa

SEQ ID NO: 707698 - RNA, 21 nt, Human
ucucugagaggucugcuuaga

SEQ ID NO: 707699 - RNA, 22 nt, Human
uggccaccuucccacuucugcc

SEQ ID NO: 707700 - RNA, 22 nt, Human
ugaggcucaagaaagauuuguu

SEQ ID NO: 707701 - RNA, 22 nt, Human
aggccugaggaccuucuggagg

SEQ ID NO: 707702 - RNA, 22 nt, Human
gggaagguauuuagcugcugaa

SEQ ID NO: 707703 - RNA, 22 nt, Human
aaaugacacucauucaguguca

SEQ ID NO: 707704 - RNA, 22 nt, Human
gggcuccaccuagggacacugg

SEQ ID NO: 707705 - RNA, 22 nt, Human
uggaaauacuugccauaaaacu

SEQ ID NO: 707706 - RNA, 22 nt, Human
agacacagugcugggugcugag

SEQ ID NO: 707707 - RNA, 22 nt, Human
uguuacaagucuugagguacuu

SEQ ID NO: 707708 - RNA, 22 nt, Human
ucagcuccucaugcaggggaua

SEQ ID NO: 707709 - RNA, 22 nt, Human
auagcaaaacccacugcauuac

SEQ ID NO: 707710 - RNA, 22 nt, Human
uuucuuccccacugcaggcucu

SEQ ID NO: 707711 - RNA, 22 nt, Human
auucuucagaauaucuggcacu

SEQ ID NO: 707712 - RNA, 22 nt, Human
acuaaaugagauacugucuuca

SEQ ID NO: 707713 - RNA, 22 nt, Human
cugggcugucccaaccccaucc

SEQ ID NO: 707714 - RNA, 22 nt, Human
augucuagagcaagagaugcug

SEQ ID NO: 707715 - RNA, 22 nt, Human
ucuggcucuguguccucaccca

SEQ ID NO: 707716 - RNA, 22 nt, Human
ucaucucuagacaggaggcugg

SEQ ID NO: 707717 - RNA, 22 nt, Human
cugaggagcugaaggcccucca

SEQ ID NO: 707718 - RNA, 22 nt, Human
gcaguuuuauuaugauggaaau

SEQ ID NO: 707719 - RNA, 23 nt, Human
agaaaagcuuggacacauggccu

SEQ ID NO: 707720 - RNA, 22 nt, Human
ucucccaggugggugccuggag

SEQ ID NO: 707721 - RNA, 18 nt, Human
ggaagaaaaggaacucag

SEQ ID NO: 707722 - RNA, 22 nt, Human
agaauuacagcuuuuagaauag

SEQ ID NO: 707723 - RNA, 22 nt, Human
aaggaauucuagaagguuuugu

SEQ ID NO: 707724 - RNA, 22 nt, Human
agugacaucaugucagcaaagu

SEQ ID NO: 707725 - RNA, 22 nt, Human
uuagcauuucuggaaucacaag

SEQ ID NO: 707726 - RNA, 22 nt, Human
gggccuuggcgaaguguggugg

SEQ ID NO: 707727 - RNA, 22 nt, Human
uuuccuggaggguccccagcag

SEQ ID NO: 707728 - RNA, 22 nt, Human
uuugacucauugauuuucucug

SEQ ID NO: 707729 - RNA, 22 nt, Human
guggagagagugacagcaucuu

SEQ ID NO: 707730 - RNA, 22 nt, Human
aauaggcaguuggauaugcaag

SEQ ID NO: 707731 - RNA, 22 nt, Human
cauguccacaguucugagaggc

SEQ ID NO: 707732 - RNA, 22 nt, Human
ugucagugaguuaguugcaagu

SEQ ID NO: 707733 - RNA, 22 nt, Human
aaagaauacuccuuuugccuug

SEQ ID NO: 707734 - RNA, 21 nt, Human
ggcuuugcucagcuuaccaaa

SEQ ID NO: 707735 - RNA, 21 nt, Human
gccauguuuccuuacuaagag

SEQ ID NO: 707736 - RNA, 22 nt, Human
ccacgcucauccucucugagag

SEQ ID NO: 707737 - RNA, 20 nt, Human
cucuucaaauauuuuauucu

SEQ ID NO: 707738 - RNA, 22 nt, Human
cagcuccuauuagacacugaau

SEQ ID NO: 707739 - RNA, 22 nt, Human
ugagcagaauguucagauaaau

SEQ ID NO: 707740 - RNA, 22 nt, Human
aauguuuuuuggucugaugaau

SEQ ID NO: 707741 - RNA, 20 nt, Human
cuggcccaggaugauggcgc

SEQ ID NO: 707742 - RNA, 22 nt, Human
agaagcaggccucacagaucug

SEQ ID NO: 707743 - RNA, 22 nt, Human
auaugcuauguauguaaaugag

SEQ ID NO: 707744 - RNA, 22 nt, Human
acaauguaguugucaugagaca

SEQ ID NO: 707745 - RNA, 22 nt, Human
agguggggaguauauguaauug

SEQ ID NO: 707746 - RNA, 22 nt, Human
gagcccagcuguccuuggcaaa

SEQ ID NO: 707747 - RNA, 22 nt, Human
aguugaaauuaagagagaguuu

SEQ ID NO: 707748 - RNA, 22 nt, Human
cagagucauaucagagaauaug

SEQ ID NO: 707749 - RNA, 22 nt, Human
ggaguuggaggcuccagggaac

SEQ ID NO: 707750 - RNA, 22 nt, Human
auugcagugaugguugcauaau

SEQ ID NO: 707751 - RNA, 21 nt, Human
uugcaccaugauaaauucaga

SEQ ID NO: 707752 - RNA, 22 nt, Human
uggggccacagccuccuagcuu

SEQ ID NO: 707753 - RNA, 22 nt, Human
cauccccaauuagcgcccagcu

SEQ ID NO: 707754 - RNA, 22 nt, Human
aucaaauaaagguaccuagcuu

SEQ ID NO: 707755 - RNA, 22 nt, Human
acaggacuuaagucauuuauaa

SEQ ID NO: 707756 - RNA, 22 nt, Human
cacuugaaauauuaggggugau

SEQ ID NO: 707757 - RNA, 22 nt, Human
auucuccaguagucauucuauc

SEQ ID NO: 707758 - RNA, 22 nt, Human
cugccugcacugccuggcucca

SEQ ID NO: 707759 - RNA, 22 nt, Human
ugacaacagccaucacuuuuag

SEQ ID NO: 707760 - RNA, 18 nt, Human
gaguguggcacugggccc

SEQ ID NO: 707761 - RNA, 22 nt, Human
gggcugcuuuuuucuuagcaga

SEQ ID NO: 707762 - RNA, 21 nt, Human
acagaacuguauagugauaaa

SEQ ID NO: 707763 - RNA, 22 nt, Human
agggucaccugcuugccagggc

SEQ ID NO: 707764 - RNA, 22 nt, Human
augguggacgggagacaggacu

SEQ ID NO: 707765 - RNA, 22 nt, Human
uguuauuucuuugccauaucuu

SEQ ID NO: 707766 - RNA, 22 nt, Human
ucccucucccuauugccuggag

SEQ ID NO: 707767 - RNA, 22 nt, Human
acuucagaguuaguuauagacc

SEQ ID NO: 707768 - RNA, 22 nt, Human
ucuguuucuuccuagccaugcu

SEQ ID NO: 707769 - RNA, 22 nt, Human
agacagacugguuugaauuggu

SEQ ID NO: 707770 - RNA, 22 nt, Human
uggaagcaucacuucuugccug

SEQ ID NO: 707771 - RNA, 22 nt, Human
uccugcagccuugggcuggagc

SEQ ID NO: 707772 - RNA, 22 nt, Human
uaaaauguagcuucuaggcugg

SEQ ID NO: 707773 - RNA, 22 nt, Human
cagaugcugcuauuucacccug

SEQ ID NO: 707774 - RNA, 22 nt, Human
uauaagugacagauuauccaaa

SEQ ID NO: 707775 - RNA, 22 nt, Human
cccucuacagggaagcgcuuuc

SEQ ID NO: 707776 - RNA, 22 nt, Human
ggcugcuggcauugagguaggu

SEQ ID NO: 707777 - RNA, 18 nt, Human
ucacuggguguauguggc

SEQ ID NO: 707778 - RNA, 22 nt, Human
augaggucuuauugcaguaguu

SEQ ID NO: 707779 - RNA, 22 nt, Human
guugccguuuguucuaccagac

SEQ ID NO: 707780 - RNA, 22 nt, Human
gagauuggccuggcuugccaac

SEQ ID NO: 707781 - RNA, 22 nt, Human
gaagucugagugggggccaggc

SEQ ID NO: 707782 - RNA, 20 nt, Human
uucugggcagccauguacuu

SEQ ID NO: 707783 - RNA, 22 nt, Human
uaaaugucuuugucacguuggg

SEQ ID NO: 707784 - RNA, 20 nt, Human
acacaugugcguguucagua

SEQ ID NO: 707785 - RNA, 22 nt, Human
uucaguguggugcacaguuuug

SEQ ID NO: 707786 - RNA, 22 nt, Human
agucuggaauuuggccugagca

SEQ ID NO: 707787 - RNA, 22 nt, Human
cagaagcacauguuuacaugua

SEQ ID NO: 707788 - RNA, 23 nt, Human
aaagacugcugagaauuuuagga

SEQ ID NO: 707789 - RNA, 22 nt, Human
ccauagcaagaggagcagaaau

SEQ ID NO: 707790 - RNA, 18 nt, Human
ucacaugacagcuguugc

SEQ ID NO: 707791 - RNA, 21 nt, Human
gaguggaacgcucuucacacc

SEQ ID NO: 707792 - RNA, 22 nt, Human
uggugcaggccaagcugcgagc

SEQ ID NO: 707793 - RNA, 22 nt, Human
gaauagcuuagauuccuuagug

SEQ ID NO: 707794 - RNA, 21 nt, Human
uuccuggggaaggagcugccu

SEQ ID NO: 707795 - RNA, 22 nt, Human
uucagugcagacgccgaagccc

SEQ ID NO: 707796 - RNA, 22 nt, Human
augcuguggaaguuccugaagc

SEQ ID NO: 707797 - RNA, 22 nt, Human
uggugcugccucagaugccuua

SEQ ID NO: 707798 - RNA, 22 nt, Human
gaccacugaugacaugaggaga

SEQ ID NO: 707799 - RNA, 22 nt, Human
caggcucccugggcaguggcag

SEQ ID NO: 707800 - RNA, 23 nt, Human
acugggcugaaauuuuucauggc

SEQ ID NO: 707801 - RNA, 22 nt, Human
cagaguccugcaccagcuccag

SEQ ID NO: 707802 - RNA, 23 nt, Human
cacacccaucacuaagagcuccu

SEQ ID NO: 707803 - RNA, 22 nt, Human
cagcaaagguagaagcacagga

SEQ ID NO: 707804 - RNA, 20 nt, Human
gccaggagggugugaugagc

SEQ ID NO: 707805 - RNA, 22 nt, Human
cuccugaggacuucuauugggu

SEQ ID NO: 707806 - RNA, 22 nt, Human
auauaccucauucuuugagugc

SEQ ID NO: 707807 - RNA, 22 nt, Human
ccucuggccuaggccgggagag

SEQ ID NO: 707808 - RNA, 22 nt, Human
cccaggcuccugcuguguugac

SEQ ID NO: 707809 - RNA, 22 nt, Human
gacauucauugaugucuuccuc

SEQ ID NO: 707810 - RNA, 22 nt, Human
ugccuugguuuccccaucugua

SEQ ID NO: 707811 - RNA, 22 nt, Human
aguguuuacucaaaggguucca

SEQ ID NO: 707812 - RNA, 22 nt, Human
ucuggcugggugagagcuucuc

SEQ ID NO: 707813 - RNA, 22 nt, Human
cuguccugauggugccacuggu

SEQ ID NO: 707814 - RNA, 22 nt, Human
agguagcuauccagacgcugaa

SEQ ID NO: 707815 - RNA, 22 nt, Human
ugcacagagagaugagacacgu

SEQ ID NO: 707816 - RNA, 19 nt, Human
cauaauacaguggaucuga

SEQ ID NO: 707817 - RNA, 22 nt, Human
caaugucaugauuuuccauuag

SEQ ID NO: 707818 - RNA, 22 nt, Human
uagaaauaaaucugcagcuggg

SEQ ID NO: 707819 - RNA, 22 nt, Human
uauguuguggggugcaucaaaa

SEQ ID NO: 707820 - RNA, 18 nt, Human
guuuacauuacugaauag

SEQ ID NO: 707821 - RNA, 22 nt, Human
ugacaggcuaggaggcugaagg

SEQ ID NO: 707822 - RNA, 22 nt, Human
gccagcugggccuuagggcugg

SEQ ID NO: 707823 - RNA, 22 nt, Human
cacuugaaaaucagaggaaauu

SEQ ID NO: 707824 - RNA, 22 nt, Human
aaaccauggaguaaguucacau

SEQ ID NO: 707825 - RNA, 22 nt, Human
auuuaugacguguucggucaau

SEQ ID NO: 707826 - RNA, 22 nt, Human
uuacauaacuuuaaaaugccgu

SEQ ID NO: 707827 - RNA, 22 nt, Human
cagaaaucuccaugucagacau

SEQ ID NO: 707828 - RNA, 22 nt, Human
ugucagaccugugauuucagca

SEQ ID NO: 707829 - RNA, 22 nt, Human
uuagaaucuuuagagucucacu

SEQ ID NO: 707830 - RNA, 22 nt, Human
ccuuuggucaccuccacucuua

SEQ ID NO: 707831 - RNA, 22 nt, Human
aucagagauuguaguaugugca

SEQ ID NO: 707832 - RNA, 22 nt, Human
acauugagugcuccauaaauca

SEQ ID NO: 707833 - RNA, 22 nt, Human
uaauaguuucauaaugugcuuc

SEQ ID NO: 707834 - RNA, 22 nt, Human
ucccuggagguguuugcucagg

SEQ ID NO: 707835 - RNA, 22 nt, Human
ucccaucaucuguucuggcuac

SEQ ID NO: 707836 - RNA, 22 nt, Human
auuuucucucaaaccuuaaaau

SEQ ID NO: 707837 - RNA, 22 nt, Human
cugagguaaaauuucuauuuug

SEQ ID NO: 707838 - RNA, 20 nt, Human
caucuugaaggucuuccaca

SEQ ID NO: 707839 - RNA, 22 nt, Human
uacacucuuaggaauugguuau

SEQ ID NO: 707840 - RNA, 22 nt, Human
uccuugaaaggggcugcagggc

SEQ ID NO: 707841 - RNA, 22 nt, Human
ccucuucuagguuucagccugc

SEQ ID NO: 707842 - RNA, 22 nt, Human
uacagggacucccgcagagaua

SEQ ID NO: 707843 - RNA, 22 nt, Human
cugccagguaaacugcaggaau

SEQ ID NO: 707844 - RNA, 22 nt, Human
auacaucuggauguaugcauuu

SEQ ID NO: 707845 - RNA, 19 nt, Human
ugcugaaguugucagucug

SEQ ID NO: 707846 - RNA, 22 nt, Human
acucugaggcaggucagggcag

SEQ ID NO: 707847 - RNA, 22 nt, Human
uaaggaaagugccaugauuucu

SEQ ID NO: 707848 - RNA, 22 nt, Human
ggagcugaugguagaagaauga

SEQ ID NO: 707849 - RNA, 22 nt, Human
uuaggcuguucuuguguuguua

SEQ ID NO: 707850 - RNA, 17 nt, Human
uggagcugcguguguuc

SEQ ID NO: 707851 - RNA, 22 nt, Human
uugccuuauagugcucugcauu

SEQ ID NO: 707852 - RNA, 22 nt, Human
uggucucugcugcagcuucuca

SEQ ID NO: 707853 - RNA, 21 nt, Human
uucaagauauuuaaaaggugg

SEQ ID NO: 707854 - RNA, 22 nt, Human
agugaagugauaguuugccuag

SEQ ID NO: 707855 - RNA, 22 nt, Human
uucaggauccccaccgcguuua

SEQ ID NO: 707856 - RNA, 22 nt, Human
uguguguuaucuuaguucaucu

SEQ ID NO: 707857 - RNA, 22 nt, Human
acauugauauuucaaauacagg

SEQ ID NO: 707858 - RNA, 22 nt, Human
aucaguuuauacuuauaaaucu

SEQ ID NO: 707859 - RNA, 22 nt, Human
gcaggagacuggcugugguagu

SEQ ID NO: 707860 - RNA, 23 nt, Human
caacagcuguuagauaugggcuu

SEQ ID NO: 707861 - RNA, 22 nt, Human
acagcuugucugguuucagguc

SEQ ID NO: 707862 - RNA, 22 nt, Human
aggcagccaaucagaggcugac

SEQ ID NO: 707863 - RNA, 22 nt, Human
aacauuuauucuaauucuggga

SEQ ID NO: 707864 - RNA, 22 nt, Human
gaugaagaggcacugacauauu

SEQ ID NO: 707865 - RNA, 20 nt, Human
uggacacagcccuguugagu

SEQ ID NO: 707866 - RNA, 22 nt, Human
cucaggcaaggcccgcauucuc

SEQ ID NO: 707867 - RNA, 22 nt, Human
auucuucaucagagaugcacua

SEQ ID NO: 707868 - RNA, 22 nt, Human
auuauggagaaauauguacagg

SEQ ID NO: 707869 - RNA, 21 nt, Human
ugcuggccaugugcugggcau

SEQ ID NO: 707870 - RNA, 22 nt, Human
cuucucaaaguugugaaucagg

SEQ ID NO: 707871 - RNA, 22 nt, Human
ccugagcugaacuaagcaguuu

SEQ ID NO: 707872 - RNA, 22 nt, Human
uuugaagacuacugggagugaa

SEQ ID NO: 707873 - RNA, 23 nt, Human
agaagcaaugcuuuuuuuccucu

SEQ ID NO: 707874 - RNA, 22 nt, Human
gccuggcugcugguucugagga

SEQ ID NO: 707875 - RNA, 22 nt, Human
cagauucuuaauuuaugggauu

SEQ ID NO: 707876 - RNA, 22 nt, Human
ugggccaggucugcggucauuu

SEQ ID NO: 707877 - RNA, 22 nt, Human
gaccacaguccagucaucaugg

SEQ ID NO: 707878 - RNA, 18 nt, Human
ugagaaacugacacaugg

SEQ ID NO: 707879 - RNA, 22 nt, Human
ggagacacauauacagaaagag

SEQ ID NO: 707880 - RNA, 22 nt, Human
agaaauacuaggaauauucaua

SEQ ID NO: 707881 - RNA, 22 nt, Human
cacagugcucaaacacaagugc

SEQ ID NO: 707882 - RNA, 20 nt, Human
cagcugccuggcucugggau

SEQ ID NO: 707883 - RNA, 22 nt, Human
uauuucuugagacucgucuucc

SEQ ID NO: 707884 - RNA, 22 nt, Human
gugccugggacacgagauuuuc

SEQ ID NO: 707885 - RNA, 22 nt, Human
auugcuuuagaaagaaaaauau

SEQ ID NO: 707886 - RNA, 22 nt, Human
ucauugcaggcauuccccugcc

SEQ ID NO: 707887 - RNA, 22 nt, Human
auuagcagcuuucuggucucua

SEQ ID NO: 707888 - RNA, 22 nt, Human
cagcagcuacuuggagcagcag

SEQ ID NO: 707889 - RNA, 22 nt, Human
ccaggcucacugacuaccacau

SEQ ID NO: 707890 - RNA, 22 nt, Human
ucagacugcugucccugccugg

SEQ ID NO: 707891 - RNA, 22 nt, Human
ugagccaggucucacucaccuu

SEQ ID NO: 707892 - RNA, 22 nt, Human
uuucuucuccauggcagguccu

SEQ ID NO: 707893 - RNA, 22 nt, Human
gugugcuguuguucagguagaa

SEQ ID NO: 707894 - RNA, 22 nt, Human
ucagcaggguuugacuucuaau

SEQ ID NO: 707895 - RNA, 22 nt, Human
gaaauaauuuagaagguauucc

SEQ ID NO: 707896 - RNA, 22 nt, Human
caggugguuaugaggaagguga

SEQ ID NO: 707897 - RNA, 22 nt, Human
cagagacauucuccccauugga

SEQ ID NO: 707898 - RNA, 18 nt, Human
uucauguuggcuuaggga

SEQ ID NO: 707899 - RNA, 22 nt, Human
ucagggcacugucaccugauau

SEQ ID NO: 707900 - RNA, 22 nt, Human
agcucagagaauagggcuugag

SEQ ID NO: 707901 - RNA, 22 nt, Human
agacauuuggaagauacacaua

SEQ ID NO: 707902 - RNA, 22 nt, Human
acauauuggcaaacuggaggca

SEQ ID NO: 707903 - RNA, 22 nt, Human
uccaggcugccacagugcaacg

SEQ ID NO: 707904 - RNA, 22 nt, Human
gcaccaggugcagccgggcccc

SEQ ID NO: 707905 - RNA, 22 nt, Human
uuacaaagagaaguuguagaau

SEQ ID NO: 707906 - RNA, 20 nt, Human
ugcuggaaaaagucacucau

SEQ ID NO: 707907 - RNA, 22 nt, Human
caggaagagaacauggaggcug

SEQ ID NO: 707908 - RNA, 22 nt, Human
ccagggcuggugggagaugcug

SEQ ID NO: 707909 - RNA, 22 nt, Human
gucccuggaaaagagcugguga

SEQ ID NO: 707910 - RNA, 20 nt, Human
ugugccuggcuuuguccuga

SEQ ID NO: 707911 - RNA, 22 nt, Human
ugucaccuugcucauccucgga

SEQ ID NO: 707912 - RNA, 22 nt, Human
uugucuuucccagcuucuagag

SEQ ID NO: 707913 - RNA, 22 nt, Human
ucucuucccuuuaugguaugug

SEQ ID NO: 707914 - RNA, 22 nt, Human
agucuggcuuuuugaugagcuu

SEQ ID NO: 707915 - RNA, 22 nt, Human
gucuuauugcguauguauacaa

SEQ ID NO: 707916 - RNA, 22 nt, Human
gccugccuuuuggaggcacauu

SEQ ID NO: 707917 - RNA, 22 nt, Human
uguguacagcaugguccagcag

SEQ ID NO: 707918 - RNA, 22 nt, Human
gagcugcugguugcuggugccu

SEQ ID NO: 707919 - RNA, 22 nt, Human
ggccacagugggaaauccuggg

SEQ ID NO: 707920 - RNA, 22 nt, Human
ggugagagaaaagaaacacugu

SEQ ID NO: 707921 - RNA, 20 nt, Human
acaguggguggggagcacug

SEQ ID NO: 707922 - RNA, 22 nt, Human
caggcagcgcucguggccuggc

SEQ ID NO: 707923 - RNA, 22 nt, Human
ccaggaggcuucguccguggag

SEQ ID NO: 707924 - RNA, 22 nt, Human
aaagcagcagaaagcuggcccc

SEQ ID NO: 707925 - RNA, 22 nt, Human
cagucuaaguuaauuuccacaa

SEQ ID NO: 707926 - RNA, 22 nt, Human
agucucuuuugcgaagaguguu

SEQ ID NO: 707927 - RNA, 23 nt, Human
auauuagggagauuagcccucua

SEQ ID NO: 707928 - RNA, 22 nt, Human
guccucugagggggcugcacgc

SEQ ID NO: 707929 - RNA, 21 nt, Human
cuuaacauuuuaaaugaaagg

SEQ ID NO: 707930 - RNA, 22 nt, Human
auccuguggggcggcugcaggg

SEQ ID NO: 707931 - RNA, 20 nt, Human
cagaacagucugagaggcca

SEQ ID NO: 707932 - RNA, 21 nt, Human
gucagggauucaagugcucac

SEQ ID NO: 707933 - RNA, 22 nt, Human
uauggguauuuuauacauaacc

SEQ ID NO: 707934 - RNA, 22 nt, Human
aaugucucucuaaauaaacuuu

SEQ ID NO: 707935 - RNA, 22 nt, Human
acacuaagguuggagucacagu

SEQ ID NO: 707936 - RNA, 22 nt, Human
acacagggauauuucagguggu

SEQ ID NO: 707937 - RNA, 22 nt, Human
gacccugaggauucccugcuga

SEQ ID NO: 707938 - RNA, 22 nt, Human
cacaggcuccggccuugcagcc

SEQ ID NO: 707939 - RNA, 22 nt, Human
agaaauacuuuguaaaucucac

SEQ ID NO: 707940 - RNA, 22 nt, Human
uucaaagaauuuugagaccuga

SEQ ID NO: 707941 - RNA, 22 nt, Human
ucaggccugcagugccaaccca

SEQ ID NO: 707942 - RNA, 22 nt, Human
ucuguguacgcaggcgugcgcg

SEQ ID NO: 707943 - RNA, 22 nt, Human
ggccuguggcuuuggcgucuaa

SEQ ID NO: 707944 - RNA, 22 nt, Human
ugcacugauccugaccagugaa

SEQ ID NO: 707945 - RNA, 22 nt, Human
uugcuucuggaacuuucuguuc

SEQ ID NO: 707946 - RNA, 22 nt, Human
uugaaguccuugccucuugcac

SEQ ID NO: 707947 - RNA, 22 nt, Human
gcaagcaaaaugggagauuccc

SEQ ID NO: 707948 - RNA, 23 nt, Human
cauggcugauuucaagcuaccac

SEQ ID NO: 707949 - RNA, 22 nt, Human
agggucucugggaguagggcac

SEQ ID NO: 707950 - RNA, 22 nt, Human
agcccagccugauucuacaccc

SEQ ID NO: 707951 - RNA, 22 nt, Human
aggaaaggccucagcagaaacc

SEQ ID NO: 707952 - RNA, 22 nt, Human
ccagcugguuuauauuccccac

SEQ ID NO: 707953 - RNA, 22 nt, Human
gacagcagacaaaccauguuuu

SEQ ID NO: 707954 - RNA, 22 nt, Human
cuuuuucauuggcuuuaggaca

SEQ ID NO: 707955 - RNA, 22 nt, Human
ugcugaauaauaagauuacuca

SEQ ID NO: 707956 - RNA, 22 nt, Human
acauuucuaucauccuguaaug

SEQ ID NO: 707957 - RNA, 22 nt, Human
gcuccagguggcuuauuuguau

SEQ ID NO: 707958 - RNA, 22 nt, Human
gaggagaaagcagugauuugug

SEQ ID NO: 707959 - RNA, 22 nt, Human
uuccaggcacaucccaacucca

SEQ ID NO: 707960 - RNA, 22 nt, Human
agucagcuuggcuccucccaug

SEQ ID NO: 707961 - RNA, 22 nt, Human
gugccuggcagggucagcugcu

SEQ ID NO: 707962 - RNA, 22 nt, Human
cugcugcccuagacccaguccu

SEQ ID NO: 707963 - RNA, 22 nt, Human
uguaggaaaaacaaugaucugc

SEQ ID NO: 707964 - RNA, 22 nt, Human
gacagugagagucuacacccuc

SEQ ID NO: 707965 - RNA, 22 nt, Human
cuaggaacaguucaacaguuua

SEQ ID NO: 707966 - RNA, 22 nt, Human
gcagaggcuguagggaagguug

SEQ ID NO: 707967 - RNA, 22 nt, Human
acuguuacagggcacugaacau

SEQ ID NO: 707968 - RNA, 20 nt, Human
ggcugcugugggcagagagg

SEQ ID NO: 707969 - RNA, 22 nt, Human
ugcagguggcuccagggacugc

SEQ ID NO: 707970 - RNA, 22 nt, Human
gcccugcuucuggcaugcagaa

SEQ ID NO: 707971 - RNA, 22 nt, Human
aucugcuauguuauuucccacu

SEQ ID NO: 707972 - RNA, 20 nt, Human
agcugccccugggcacugcc

SEQ ID NO: 707973 - RNA, 22 nt, Human
uccaguggugguuugaagggca

SEQ ID NO: 707974 - RNA, 22 nt, Human
ucugccuagguuuccaaugugc

SEQ ID NO: 707975 - RNA, 22 nt, Human
uuuaacagaugugaaauuuuca

SEQ ID NO: 707976 - RNA, 22 nt, Human
uuccccagggaagcuccugcgc

SEQ ID NO: 707977 - RNA, 22 nt, Human
ucaagaugaaccaggacauuca

SEQ ID NO: 707978 - RNA, 22 nt, Human
gagcugggaguuauagcauguu

SEQ ID NO: 707979 - RNA, 23 nt, Human
gggggcgugucauggagggccac

SEQ ID NO: 707980 - RNA, 22 nt, Human
ucaacuuuaguguagcuauuua

SEQ ID NO: 707981 - RNA, 22 nt, Human
ugguuucugcccucagagcuca

SEQ ID NO: 707982 - RNA, 23 nt, Human
gugcucugcggucugcuagucug

SEQ ID NO: 707983 - RNA, 22 nt, Human
gucuccagagguuacauccugu

SEQ ID NO: 707984 - RNA, 22 nt, Human
ucuggucccuuuuccugcaguc

SEQ ID NO: 707985 - RNA, 22 nt, Human
auuucagaauguccuaauuuag

SEQ ID NO: 707986 - RNA, 19 nt, Human
uggcaugaugauggauggg

SEQ ID NO: 707987 - RNA, 22 nt, Human
cugggcacauuuugacuagugu

SEQ ID NO: 707988 - RNA, 22 nt, Human
ucaggagucugugcaguuccac

SEQ ID NO: 707989 - RNA, 22 nt, Human
uuuaagcacagggauaaaguua

SEQ ID NO: 707990 - RNA, 22 nt, Human
cauugcacuccagcuugggcaa

SEQ ID NO: 707991 - RNA, 22 nt, Human
uggggugagauucagauauuca

SEQ ID NO: 707992 - RNA, 22 nt, Human
acauccaugcaugucugugcac

SEQ ID NO: 707993 - RNA, 22 nt, Human
cuggugucugcucccucacagc

SEQ ID NO: 707994 - RNA, 22 nt, Human
ugaaaucaugagauagugucac

SEQ ID NO: 707995 - RNA, 22 nt, Human
ugaaauacacaaauuuaguaag

SEQ ID NO: 707996 - RNA, 22 nt, Human
agcaucaguacuaaucuggcca

SEQ ID NO: 707997 - RNA, 22 nt, Human
cagcaucuggggaacauucaag

SEQ ID NO: 707998 - RNA, 23 nt, Human
cuguagcuaaaagcugggauuug

SEQ ID NO: 707999 - RNA, 22 nt, Human
caggcaggugcagauuccucuu

SEQ ID NO: 708000 - RNA, 22 nt, Human
aaccuguuuugauuaacaagua

SEQ ID NO: 708001 - RNA, 22 nt, Human
uggaagcucaaggcagggugag

SEQ ID NO: 708002 - RNA, 22 nt, Human
gcuggcccagcguggggccgug

SEQ ID NO: 708003 - RNA, 22 nt, Human
ucucuguaguugggcagcugcu

SEQ ID NO: 708004 - RNA, 22 nt, Human
gaggcucaguuauuuuagccug

SEQ ID NO: 708005 - RNA, 22 nt, Human
gugccagagaugacaggccugc

SEQ ID NO: 708006 - RNA, 22 nt, Human
acugccugagcuauuggaaaag

SEQ ID NO: 708007 - RNA, 20 nt, Human
gcugaggggucuauggcaua

SEQ ID NO: 708008 - RNA, 22 nt, Human
cacuugaauggcauuguuccuu

SEQ ID NO: 708009 - RNA, 22 nt, Human
uuacauucuuggaaucuuguuu

SEQ ID NO: 708010 - RNA, 22 nt, Human
acaggaguuaaccaugggaagu

SEQ ID NO: 708011 - RNA, 22 nt, Human
ugccaggcccugcgggguccca

SEQ ID NO: 708012 - RNA, 22 nt, Human
cugugccuccagucucgcuucu

SEQ ID NO: 708013 - RNA, 22 nt, Human
uuccagagugacugugccacuu

SEQ ID NO: 708014 - RNA, 22 nt, Human
uggggaggauaugugaguuauu

SEQ ID NO: 708015 - RNA, 22 nt, Human
aagguagauucuggaucgaagg

SEQ ID NO: 708016 - RNA, 22 nt, Human
cuagagaagagguuaagcauga

SEQ ID NO: 708017 - RNA, 22 nt, Human
agcacagugcucuggacagagu

SEQ ID NO: 708018 - RNA, 22 nt, Human
caggccaaaauucaggcauucu

SEQ ID NO: 708019 - RNA, 22 nt, Human
cuccagggaggucugcaggacu

SEQ ID NO: 708020 - RNA, 22 nt, Human
ggguggagaggcuaaguccagu

SEQ ID NO: 708021 - RNA, 22 nt, Human
augugcaauggugucaccacau

SEQ ID NO: 708022 - RNA, 22 nt, Human
auauucuugaagggagauuaua

SEQ ID NO: 708023 - RNA, 22 nt, Human
accaguuaaagggaaauugaaa

SEQ ID NO: 708024 - RNA, 19 nt, Human
aggcaugggaagagaaguc

SEQ ID NO: 708025 - RNA, 22 nt, Human
ugcuucuguuuguuucugucau

SEQ ID NO: 708026 - RNA, 19 nt, Human
ucucuggcauagacucaau

SEQ ID NO: 708027 - RNA, 20 nt, Human
gcuucucagggcuucucuga

SEQ ID NO: 708028 - RNA, 22 nt, Human
gcuuuggaugugugccugaggu

SEQ ID NO: 708029 - RNA, 22 nt, Human
uguuuguaucucucucuguggc

SEQ ID NO: 708030 - RNA, 21 nt, Human
agacagcagauagucgaaagg

SEQ ID NO: 708031 - RNA, 22 nt, Human
ucuccaggaaccaucaugguaa

SEQ ID NO: 708032 - RNA, 22 nt, Human
acagagcaucagaugaaaucaa

SEQ ID NO: 708033 - RNA, 22 nt, Human
aaggcagagggcuggaucagag

SEQ ID NO: 708034 - RNA, 22 nt, Human
uccagagaauucuacgcagugc

SEQ ID NO: 708035 - RNA, 22 nt, Human
gcauccauuguuuauguguuuc

SEQ ID NO: 708036 - RNA, 22 nt, Human
uggcuuccgccgcgggccucgg

SEQ ID NO: 708037 - RNA, 22 nt, Human
gugccagcucuccccacaucug

SEQ ID NO: 708038 - RNA, 22 nt, Human
cuacagugaagacuagcuauag

SEQ ID NO: 708039 - RNA, 18 nt, Human
aagauguuuaaugggaag

SEQ ID NO: 708040 - RNA, 22 nt, Human
gugugagagaagcugccaugga

SEQ ID NO: 708041 - RNA, 22 nt, Human
caagaaauuucuuaagaacuaa

SEQ ID NO: 708042 - RNA, 22 nt, Human
uauguuuauacuuugauguacu

SEQ ID NO: 708043 - RNA, 22 nt, Human
aaaacauguccauacagaaacu

SEQ ID NO: 708044 - RNA, 22 nt, Human
aggaauaugagcugcugcagug

SEQ ID NO: 708045 - RNA, 22 nt, Human
auuacagaaagcaauauugagu

SEQ ID NO: 708046 - RNA, 23 nt, Human
ggcaccaggccauggagcgggag

SEQ ID NO: 708047 - RNA, 22 nt, Human
uccagucaagcuugagaauuuc

SEQ ID NO: 708048 - RNA, 22 nt, Human
caugcagccugugaacaguguc

SEQ ID NO: 708049 - RNA, 22 nt, Human
uuuuucucuucuguaaaguggu

SEQ ID NO: 708050 - RNA, 22 nt, Human
augguagguacaacagcaggca

SEQ ID NO: 708051 - RNA, 22 nt, Human
gaccuucaguguguuucucaca

SEQ ID NO: 708052 - RNA, 22 nt, Human
cuuuaugaaccuguucagcuug

SEQ ID NO: 708053 - RNA, 16 nt, Human
aggaggggaauuagga

SEQ ID NO: 708054 - RNA, 22 nt, Human
auucacagagugguuaguggua

SEQ ID NO: 708055 - RNA, 22 nt, Human
agugaaaugauaguguaaauac

SEQ ID NO: 708056 - RNA, 22 nt, Human
cuagaaacauuacauguguuaa

SEQ ID NO: 708057 - RNA, 22 nt, Human
aggggcaguuccaaguuuugug

SEQ ID NO: 708058 - RNA, 22 nt, Human
gugucugccuuuggacuaacug

SEQ ID NO: 708059 - RNA, 19 nt, Human
gcaggguggcagagcucuu

SEQ ID NO: 708060 - RNA, 22 nt, Human
acauugaagggcuauccaauag

SEQ ID NO: 708061 - RNA, 22 nt, Human
aaguuacaggagaaagagauca

SEQ ID NO: 708062 - RNA, 22 nt, Human
gaaauacagaaagggcugaaug

SEQ ID NO: 708063 - RNA, 22 nt, Human
ugcaaaaauugcuggaaucuuu

SEQ ID NO: 708064 - RNA, 22 nt, Human
aagaggagaaaggcuggcuuug

SEQ ID NO: 708065 - RNA, 19 nt, Human
ugaagcaauaccauuuuug

SEQ ID NO: 708066 - RNA, 22 nt, Human
cugaggaccccacaggaggccc

SEQ ID NO: 708067 - RNA, 22 nt, Human
guuaaacaauaacuggcacaca

SEQ ID NO: 708068 - RNA, 22 nt, Human
uugucucugggacaugguauua

SEQ ID NO: 708069 - RNA, 22 nt, Human
cagcucuguucauagauggugc

SEQ ID NO: 708070 - RNA, 22 nt, Human
uauggcaagaugacauguucuc

SEQ ID NO: 708071 - RNA, 22 nt, Human
gcauuuuucucuccuauaggag

SEQ ID NO: 708072 - RNA, 22 nt, Human
uuucaacaucaccuagcaguuc

SEQ ID NO: 708073 - RNA, 22 nt, Human
cuggccucauagccaagcugug

SEQ ID NO: 708074 - RNA, 22 nt, Human
aagcagaaguugaucuaccaua

SEQ ID NO: 708075 - RNA, 22 nt, Human
cugggccaucucucugcaagug

SEQ ID NO: 708076 - RNA, 22 nt, Human
guuuaacauuguaccaacaccu

SEQ ID NO: 708077 - RNA, 22 nt, Human
ggcuuuaugcacagcagauggu

SEQ ID NO: 708078 - RNA, 22 nt, Human
ucucuacagaaucuuauuauug

SEQ ID NO: 708079 - RNA, 22 nt, Human
ucccuccauaacagaggugagc

SEQ ID NO: 708080 - RNA, 22 nt, Human
ggagcuguugauuguuugagga

SEQ ID NO: 708081 - RNA, 22 nt, Human
aaaaucaguacacuuuauuuug

SEQ ID NO: 708082 - RNA, 22 nt, Human
uuagucaggaccuuuugguuuc

SEQ ID NO: 708083 - RNA, 22 nt, Human
uaaaugugucuuuuuaaggccu

SEQ ID NO: 708084 - RNA, 22 nt, Human
ucacaauggcauaguauaaaau

SEQ ID NO: 708085 - RNA, 22 nt, Human
gagauucuuuccagaacuuuga

SEQ ID NO: 708086 - RNA, 22 nt, Human
uggcccuguggcuucagaacag

SEQ ID NO: 708087 - RNA, 22 nt, Human
caguugcuacaguucaagugug

SEQ ID NO: 708088 - RNA, 22 nt, Human
caggcaccacacuaggggcuga

SEQ ID NO: 708089 - RNA, 22 nt, Human
cagagccagucagucagaaacu

SEQ ID NO: 708090 - RNA, 22 nt, Human
ccuccccacccacggcuggugg

SEQ ID NO: 708091 - RNA, 22 nt, Human
gaagggaaggaaagaaccagca

SEQ ID NO: 708092 - RNA, 22 nt, Human
aauauagauuuacucaagagaa

SEQ ID NO: 708093 - RNA, 22 nt, Human
accucagagauacaaaccaugg

SEQ ID NO: 708094 - RNA, 18 nt, Human
gaaaauacucugggcuca

SEQ ID NO: 708095 - RNA, 22 nt, Human
uacuacaguauguguguuauac

SEQ ID NO: 708096 - RNA, 22 nt, Human
auuuugcacacuaugcagcuuu

SEQ ID NO: 708097 - RNA, 22 nt, Human
agaaaggagcaccgugggggau

SEQ ID NO: 708098 - RNA, 21 nt, Human
ggcagcacuaccugaagcaua

SEQ ID NO: 708099 - RNA, 22 nt, Human
agagguucaaacuucauaauuu

SEQ ID NO: 708100 - RNA, 22 nt, Human
aucuggauagguuguuuugcau

SEQ ID NO: 708101 - RNA, 22 nt, Human
gcaaacuguuggaguagagucu

SEQ ID NO: 708102 - RNA, 22 nt, Human
ucugggaaaugggcagcuucgc

SEQ ID NO: 708103 - RNA, 22 nt, Human
aguguguccaggaagcagaugg

SEQ ID NO: 708104 - RNA, 22 nt, Human
aggaauuacucaucugugguau

SEQ ID NO: 708105 - RNA, 22 nt, Human
cugaauaucauuuacauuugga

SEQ ID NO: 708106 - RNA, 22 nt, Human
ugacaauggguggacaagauag

SEQ ID NO: 708107 - RNA, 22 nt, Human
uuucauaaucugucaagugggg

SEQ ID NO: 708108 - RNA, 23 nt, Human
ggcuucuugccugucuuggugcu

SEQ ID NO: 708109 - RNA, 22 nt, Human
cucugaaagaguuuaguauuau

SEQ ID NO: 708110 - RNA, 22 nt, Human
uuccauuuggcacuucacugag

SEQ ID NO: 708111 - RNA, 17 nt, Human
gccuggcccagccuggc

SEQ ID NO: 708112 - RNA, 22 nt, Human
augcugcacaagccacauguag

SEQ ID NO: 708113 - RNA, 22 nt, Human
uaaugucaaggucauucuagag

SEQ ID NO: 708114 - RNA, 22 nt, Human
aguggcuaugcaugacuggaau

SEQ ID NO: 708115 - RNA, 22 nt, Human
uacacaugugcacgcguguccu

SEQ ID NO: 708116 - RNA, 22 nt, Human
agucacaggguacacaaggauu

SEQ ID NO: 708117 - RNA, 17 nt, Human
uuguuucuucucugugg

SEQ ID NO: 708118 - RNA, 22 nt, Human
gggcuuuaggggccagugacca

SEQ ID NO: 708119 - RNA, 22 nt, Human
ccagucucaguucacguuggua

SEQ ID NO: 708120 - RNA, 22 nt, Human
ugcugcacgauaaauaauuucu

SEQ ID NO: 708121 - RNA, 22 nt, Human
cugccccugcucauggcugucc

SEQ ID NO: 708122 - RNA, 22 nt, Human
ugucuccuauuuccugcuaagg

SEQ ID NO: 708123 - RNA, 17 nt, Human
ucugaagccagucugcu

SEQ ID NO: 708124 - RNA, 22 nt, Human
uuaccuguguguuugauacaua

SEQ ID NO: 708125 - RNA, 22 nt, Human
gcacacugcggugaugugaguc

SEQ ID NO: 708126 - RNA, 22 nt, Human
aggaauuuuacaagcugguugc

SEQ ID NO: 708127 - RNA, 22 nt, Human
ugcugggcaccagugccugcag

SEQ ID NO: 708128 - RNA, 22 nt, Human
auuugucuagugguauucacgu

SEQ ID NO: 708129 - RNA, 22 nt, Human
ugcauuggguugacauacuaaa

SEQ ID NO: 708130 - RNA, 22 nt, Human
uaaucacugucaaccuuuguuc

SEQ ID NO: 708131 - RNA, 22 nt, Human
ucauguuuuaaugccuuuuucu

SEQ ID NO: 708132 - RNA, 22 nt, Human
uugauuaaaaugagacaucauu

SEQ ID NO: 708133 - RNA, 22 nt, Human
uuugauaauuaaaaauuguagu

SEQ ID NO: 708134 - RNA, 22 nt, Human
gaauuacagccagaagaaugaa

SEQ ID NO: 708135 - RNA, 22 nt, Human
ggaggggucucuagcgaggaga

SEQ ID NO: 708136 - RNA, 23 nt, Human
aagguguuuguuuucagaaagca

SEQ ID NO: 708137 - RNA, 18 nt, Human
gccaggaagaggaaugug

SEQ ID NO: 708138 - RNA, 22 nt, Human
aguuuuuccguggcuacgauaa

SEQ ID NO: 708139 - RNA, 22 nt, Human
ggcccacacugacagcugagcu

SEQ ID NO: 708140 - RNA, 22 nt, Human
cuucuccuaaggucagaauugc

SEQ ID NO: 708141 - RNA, 22 nt, Human
gacagacaggaggcauucaggg

SEQ ID NO: 708142 - RNA, 22 nt, Human
gcugagagugagcacuggauau

SEQ ID NO: 708143 - RNA, 22 nt, Human
gaagccaguacugugcucugca

SEQ ID NO: 708144 - RNA, 22 nt, Human
aaagcagcugaucucagagccu

SEQ ID NO: 708145 - RNA, 22 nt, Human
uuauuuauguuaacagucgaga

SEQ ID NO: 708146 - RNA, 22 nt, Human
aggcucuguuauucuagagggc

SEQ ID NO: 708147 - RNA, 22 nt, Human
ucagaacauguuugaguaagac

SEQ ID NO: 708148 - RNA, 18 nt, Human
uuaagagcugaaagggga

SEQ ID NO: 708149 - RNA, 22 nt, Human
gggcuccaaaguaagcuuuagu

SEQ ID NO: 708150 - RNA, 22 nt, Human
ucugagccguauggcuuggcua

SEQ ID NO: 708151 - RNA, 22 nt, Human
gcugggugucacggggcucgug

SEQ ID NO: 708152 - RNA, 22 nt, Human
guuccuaaauuugaaggacuuu

SEQ ID NO: 708153 - RNA, 22 nt, Human
uauuuguauuucaugcaguaaa

SEQ ID NO: 708154 - RNA, 21 nt, Human
uccagaggaggacagacucag

SEQ ID NO: 708155 - RNA, 22 nt, Human
ugaaaucauugccaaguauuga

SEQ ID NO: 708156 - RNA, 22 nt, Human
cuagggagggauguuggcauga

SEQ ID NO: 708157 - RNA, 22 nt, Human
uuccaggauagcuuucaggaau

SEQ ID NO: 708158 - RNA, 22 nt, Human
aagauacuucacuugccgaaau

SEQ ID NO: 708159 - RNA, 22 nt, Human
gcucugggugaaggguaccauu

SEQ ID NO: 708160 - RNA, 22 nt, Human
gacauaaaccuugagauauuaa

SEQ ID NO: 708161 - RNA, 22 nt, Human
ugauaggcuuaauuuuccuguc

SEQ ID NO: 708162 - RNA, 18 nt, Human
agcuucccucugagaggg

SEQ ID NO: 708163 - RNA, 22 nt, Human
uuuucagaauuagcauaccauu

SEQ ID NO: 708164 - RNA, 20 nt, Human
caguccugcaggcgggagaa

SEQ ID NO: 708165 - RNA, 22 nt, Human
ggcugagaacaggcccagccuc

SEQ ID NO: 708166 - RNA, 22 nt, Human
gugacucacacaggccugggcu

SEQ ID NO: 708167 - RNA, 22 nt, Human
uggagacugauaaaggcuauug

SEQ ID NO: 708168 - RNA, 22 nt, Human
uggccaagaugcgaccucucag

SEQ ID NO: 708169 - RNA, 22 nt, Human
ccuuuggucuugaugaacuguu

SEQ ID NO: 708170 - RNA, 22 nt, Human
uagacuuuuaagucccucuuua

SEQ ID NO: 708171 - RNA, 22 nt, Human
aaucucucugggguucaguccu

SEQ ID NO: 708172 - RNA, 22 nt, Human
cugaggagugggugggcaguga

SEQ ID NO: 708173 - RNA, 20 nt, Human
cuguggugagcaggagagua

SEQ ID NO: 708174 - RNA, 22 nt, Human
ugcuggccgugagcucucggga

SEQ ID NO: 708175 - RNA, 20 nt, Human
cgcuccagucgcuggugugu

SEQ ID NO: 708176 - RNA, 19 nt, Human
agagaaagaauugagucua

SEQ ID NO: 708177 - RNA, 22 nt, Human
uaaacacugccuugguggguca

SEQ ID NO: 708178 - RNA, 22 nt, Human
cccaaagggcuuccuguucuca

SEQ ID NO: 708179 - RNA, 22 nt, Human
aagcauuuuucacagcaacagc

SEQ ID NO: 708180 - RNA, 22 nt, Human
caguccugagcuccugggcuga

SEQ ID NO: 708181 - RNA, 22 nt, Human
aucuugcauuugcuaaaaugca

SEQ ID NO: 708182 - RNA, 22 nt, Human
uagauggaggcuagaugcaggg

SEQ ID NO: 708183 - RNA, 22 nt, Human
agcugcacugugaaguucauag

SEQ ID NO: 708184 - RNA, 22 nt, Human
cagaacuuggcaaagccgacug

SEQ ID NO: 708185 - RNA, 18 nt, Human
cagucccaaaccuuagga

SEQ ID NO: 708186 - RNA, 22 nt, Human
agcacccuccaacuucccugua

SEQ ID NO: 708187 - RNA, 22 nt, Human
ugagcuggcuugucaaccaggg

SEQ ID NO: 708188 - RNA, 20 nt, Human
ggcagcaggaguuuccucuu

SEQ ID NO: 708189 - RNA, 22 nt, Human
aguuggguuugugucaguugca

SEQ ID NO: 708190 - RNA, 22 nt, Human
ggcuuuuguuucagcucugcua

SEQ ID NO: 708191 - RNA, 22 nt, Human
cucuuuuaauugucauaacaac

SEQ ID NO: 708192 - RNA, 22 nt, Human
agugggcagcccaggaggucuu

SEQ ID NO: 708193 - RNA, 22 nt, Human
gcuggcagggugguugagagag

SEQ ID NO: 708194 - RNA, 22 nt, Human
gaggccugguuugcaugagaau

SEQ ID NO: 708195 - RNA, 22 nt, Human
ugaguauucugaauuucaaacu

SEQ ID NO: 708196 - RNA, 22 nt, Human
guugcuuuuuugauagguggaa

SEQ ID NO: 708197 - RNA, 21 nt, Human
gccugccugcgugacccucuu

SEQ ID NO: 708198 - RNA, 22 nt, Human
gggaucugaguugucaggaagg

SEQ ID NO: 708199 - RNA, 22 nt, Human
ccuuuccuuuuuagugugggag

SEQ ID NO: 708200 - RNA, 22 nt, Human
auaggaauuucuucagcacuga

SEQ ID NO: 708201 - RNA, 22 nt, Human
cagggagcugacaaccaaggag

SEQ ID NO: 708202 - RNA, 22 nt, Human
ucaauagauaaagcuacauaaa

SEQ ID NO: 708203 - RNA, 22 nt, Human
accuucaagauugugggucaau

SEQ ID NO: 708204 - RNA, 22 nt, Human
cucagagcugaggccagggaca

SEQ ID NO: 708205 - RNA, 22 nt, Human
cucuccagccuuuagcccacgc

SEQ ID NO: 708206 - RNA, 22 nt, Human
aggagauggagcucagugggca

SEQ ID NO: 708207 - RNA, 22 nt, Human
ggaauguagaaucucuggucuc

SEQ ID NO: 708208 - RNA, 22 nt, Human
gggcucugggaugcucuuagag

SEQ ID NO: 708209 - RNA, 22 nt, Human
gcacugagcuuuggaggagcag

SEQ ID NO: 708210 - RNA, 17 nt, Human
gcaaggaaguucuuugc

SEQ ID NO: 708211 - RNA, 16 nt, Human
gcugcugcuuccugcu

SEQ ID NO: 708212 - RNA, 22 nt, Human
cuucucugcccauaggaaaugc

SEQ ID NO: 708213 - RNA, 22 nt, Human
uaguauuuuagaaaaccaugaa

SEQ ID NO: 708214 - RNA, 18 nt, Human
acacugcagcagucugcu

SEQ ID NO: 708215 - RNA, 22 nt, Human
acuuucucaaaucagacuuuaa

SEQ ID NO: 708216 - RNA, 22 nt, Human
gccccagcucugccacaacuag

SEQ ID NO: 708217 - RNA, 22 nt, Human
caugugugucuccaccagcugc

SEQ ID NO: 708218 - RNA, 22 nt, Human
ggcagccagagggcagcuggau

SEQ ID NO: 708219 - RNA, 22 nt, Human
caaauuaaugugucucaaaaua

SEQ ID NO: 708220 - RNA, 22 nt, Human
uaaauguuaugcccaucaucca

SEQ ID NO: 708221 - RNA, 22 nt, Human
caggcacucauucagagaggug

SEQ ID NO: 708222 - RNA, 18 nt, Human
cacuggaccucaugagag

SEQ ID NO: 708223 - RNA, 22 nt, Human
uuauacuaaaacgcauugaauu

SEQ ID NO: 708224 - RNA, 22 nt, Human
ccaacaccaucugagcuccagc

SEQ ID NO: 708225 - RNA, 22 nt, Human
acagcuuguaucccaauggagc

SEQ ID NO: 708226 - RNA, 22 nt, Human
acuagaaauuacucagaauaaa

SEQ ID NO: 708227 - RNA, 18 nt, Human
gucucaggaguggcacgu

SEQ ID NO: 708228 - RNA, 22 nt, Human
ccagcccuccuccaucagagga

SEQ ID NO: 708229 - RNA, 19 nt, Human
ccagggcuuuaaguugagg

SEQ ID NO: 708230 - RNA, 22 nt, Human
uccugagagccuuggcuucaga

SEQ ID NO: 708231 - RNA, 22 nt, Human
uuauuagguuauucucuguacu

SEQ ID NO: 708232 - RNA, 22 nt, Human
guucuauucuccaguuacauau

SEQ ID NO: 708233 - RNA, 20 nt, Human
gugcagccaagcugagccgc

SEQ ID NO: 708234 - RNA, 22 nt, Human
uucuggagaaucaccaccaggc

SEQ ID NO: 708235 - RNA, 22 nt, Human
guaacugaggcagcuuuuaaga

SEQ ID NO: 708236 - RNA, 22 nt, Human
cacagacagugucccuuuguug

SEQ ID NO: 708237 - RNA, 23 nt, Human
ucucaagccagaccaggccucgc

SEQ ID NO: 708238 - RNA, 22 nt, Human
ucugggagaagcugaugugaag

SEQ ID NO: 708239 - RNA, 22 nt, Human
uguuguuuucucauggagaaua

SEQ ID NO: 708240 - RNA, 18 nt, Human
acugucucugagaguggu

SEQ ID NO: 708241 - RNA, 20 nt, Human
acagcagauaccacaacuau

SEQ ID NO: 708242 - RNA, 22 nt, Human
uuugacacugggagugugggug

SEQ ID NO: 708243 - RNA, 21 nt, Human
ggcccugguuacgccuccucu

SEQ ID NO: 708244 - RNA, 22 nt, Human
cuggcagcuggaggcuagaggc

SEQ ID NO: 708245 - RNA, 19 nt, Human
gcagcaguggaaggaaaaa

SEQ ID NO: 708246 - RNA, 22 nt, Human
cccacugagccuauacaaacag

SEQ ID NO: 708247 - RNA, 22 nt, Human
ugcagggaagucccagcuccug

SEQ ID NO: 708248 - RNA, 22 nt, Human
agauaauguucugauccauuuc

SEQ ID NO: 708249 - RNA, 22 nt, Human
aaacauguagugcaugaggauc

SEQ ID NO: 708250 - RNA, 22 nt, Human
gcccugagugccuguguaagaa

SEQ ID NO: 708251 - RNA, 22 nt, Human
agaggccuuucuguugagugaa

SEQ ID NO: 708252 - RNA, 22 nt, Human
ucuuucuggucucgccuuauuc

SEQ ID NO: 708253 - RNA, 22 nt, Human
uuuacacggcauuaucuucaug

SEQ ID NO: 708254 - RNA, 22 nt, Human
uccugagguauaugcuuugcag

SEQ ID NO: 708255 - RNA, 22 nt, Human
ggucccugaagaggccuggggu

SEQ ID NO: 708256 - RNA, 22 nt, Human
uggcagagguauauugggagga

SEQ ID NO: 708257 - RNA, 22 nt, Human
ugcuuccugcuaaggcugccug

SEQ ID NO: 708258 - RNA, 22 nt, Human
acagaaugcagagaugcccaga

SEQ ID NO: 708259 - RNA, 22 nt, Human
acaguuucccccuagggcagca

SEQ ID NO: 708260 - RNA, 22 nt, Human
ucauauagagggcauacaaaug

SEQ ID NO: 708261 - RNA, 23 nt, Human
ccuggcugaccugaagguguagu

SEQ ID NO: 708262 - RNA, 22 nt, Human
uuucgagggccuuaaguauucc

SEQ ID NO: 708263 - RNA, 20 nt, Human
cucugcugcccgccggcugc

SEQ ID NO: 708264 - RNA, 22 nt, Human
uuuggacuuagccugcagaauu

SEQ ID NO: 708265 - RNA, 22 nt, Human
caucacauguaggcagcaucac

SEQ ID NO: 708266 - RNA, 22 nt, Human
ccauuuguauuacugccccagg

SEQ ID NO: 708267 - RNA, 22 nt, Human
cugccgagugggucaugaggca

SEQ ID NO: 708268 - RNA, 22 nt, Human
auuuaauuuggagagagaaacc

SEQ ID NO: 708269 - RNA, 22 nt, Human
aucugcauguaucucucugcau

SEQ ID NO: 708270 - RNA, 22 nt, Human
uuguucuuggagcaggcagaga

SEQ ID NO: 708271 - RNA, 22 nt, Human
uauuaugguuguagguuaacaa

SEQ ID NO: 708272 - RNA, 20 nt, Human
cugcccagccacugagggau

SEQ ID NO: 708273 - RNA, 22 nt, Human
ucacagcuaagcuuggucacug

SEQ ID NO: 708274 - RNA, 22 nt, Human
ucuugccucuuccccuuuccau

SEQ ID NO: 708275 - RNA, 22 nt, Human
acugaaguucauacaacagacu

SEQ ID NO: 708276 - RNA, 22 nt, Human
uuggggaagcuuugaaauacuu

SEQ ID NO: 708277 - RNA, 22 nt, Human
aacaggaauugaugggaguccu

SEQ ID NO: 708278 - RNA, 22 nt, Human
ucuuaaaggcacauagugucua

SEQ ID NO: 708279 - RNA, 22 nt, Human
gauuauauaauggaagcucuug

SEQ ID NO: 708280 - RNA, 22 nt, Human
gcuguacauucugcacaggccc

SEQ ID NO: 708281 - RNA, 22 nt, Human
agucaccagguuuuagagaccu

SEQ ID NO: 708282 - RNA, 22 nt, Human
ucuacuuuucccuauacaguuu

SEQ ID NO: 708283 - RNA, 22 nt, Human
gcucaggacccaggugugaccu

SEQ ID NO: 708284 - RNA, 22 nt, Human
guguggcuugggugaggcgccu

SEQ ID NO: 708285 - RNA, 22 nt, Human
gcugcuguccuucaagucugcg

SEQ ID NO: 708286 - RNA, 22 nt, Human
uauuauuaugcauagcaugaaa

SEQ ID NO: 708287 - RNA, 22 nt, Human
cugucugccaauaaucuauggc

SEQ ID NO: 708288 - RNA, 22 nt, Human
agugcuccacauugcacuauuc

SEQ ID NO: 708289 - RNA, 22 nt, Human
augugaaugcaguuaucuauaa

SEQ ID NO: 708290 - RNA, 21 nt, Human
cagggcaaccaaguccagaga

SEQ ID NO: 708291 - RNA, 22 nt, Human
caaggccacguucugcaugcgg

SEQ ID NO: 708292 - RNA, 22 nt, Human
uugauucuucugaauuugcaga

SEQ ID NO: 708293 - RNA, 22 nt, Human
cggcagcaucgaaacuacauuc

SEQ ID NO: 708294 - RNA, 23 nt, Human
ccguguguauacucuguaauaga

SEQ ID NO: 708295 - RNA, 22 nt, Human
caaagucauggggaugcagguc

SEQ ID NO: 708296 - RNA, 22 nt, Human
cuggugcacguggcugcagucg

SEQ ID NO: 708297 - RNA, 22 nt, Human
ucuaaggagcgcuccagaaaaa

SEQ ID NO: 708298 - RNA, 22 nt, Human
agccuggauccuaggcucagcu

SEQ ID NO: 708299 - RNA, 22 nt, Human
uguggccaccagagcugcuauu

SEQ ID NO: 708300 - RNA, 22 nt, Human
gguaacaguauguagaguaaga

SEQ ID NO: 708301 - RNA, 22 nt, Human
uuagaaaggcuuauggugccuu

SEQ ID NO: 708302 - RNA, 22 nt, Human
acuuuagaaaagcauccauaga

SEQ ID NO: 708303 - RNA, 22 nt, Human
ugcucuggaguggcuugugcac

SEQ ID NO: 708304 - RNA, 22 nt, Human
ggggaagaauggcagaaaacau

SEQ ID NO: 708305 - RNA, 22 nt, Human
ggcagccaggaggguguaguuu

SEQ ID NO: 708306 - RNA, 22 nt, Human
acagauuuuugguaaauaauuu

SEQ ID NO: 708307 - RNA, 22 nt, Human
agguucaaaugcaagagaugcu

SEQ ID NO: 708308 - RNA, 22 nt, Human
aacaauaggcuauaugcuaggc

SEQ ID NO: 708309 - RNA, 22 nt, Human
cagcacccucggaggcugccgu

SEQ ID NO: 708310 - RNA, 22 nt, Human
uggaacaagaagcaggucgcuu

SEQ ID NO: 708311 - RNA, 22 nt, Human
augcaugugugagagcaagagg

SEQ ID NO: 708312 - RNA, 22 nt, Human
acugggcuagaguggaagcugg

SEQ ID NO: 708313 - RNA, 22 nt, Human
gcacuguagugggggagaaaug

SEQ ID NO: 708314 - RNA, 22 nt, Human
gugcccugagcuuaugcauucu

SEQ ID NO: 708315 - RNA, 22 nt, Human
aauguuuaauguuagugguaau

SEQ ID NO: 708316 - RNA, 22 nt, Human
gcaguguuguuaaaagauuaga

SEQ ID NO: 708317 - RNA, 22 nt, Human
agacagcacuuuuguauggggg

SEQ ID NO: 708318 - RNA, 22 nt, Human
acuccagguaggcacauugaca

SEQ ID NO: 708319 - RNA, 21 nt, Human
acagcuggugcagggcgggga

SEQ ID NO: 708320 - RNA, 22 nt, Human
uggcucaguuaggucagaaaca

SEQ ID NO: 708321 - RNA, 20 nt, Human
cucuggcuccgcgugaccgc

SEQ ID NO: 708322 - RNA, 22 nt, Human
ugagccuggggccugggcagcg

SEQ ID NO: 708323 - RNA, 22 nt, Human
ucacugacguggggcuacuuga

SEQ ID NO: 708324 - RNA, 22 nt, Human
ccuucccaggcuagaccaacau

SEQ ID NO: 708325 - RNA, 22 nt, Human
auaaacuggguaucaagaggcc

SEQ ID NO: 708326 - RNA, 22 nt, Human
agagugaaguucaucgugcagc

SEQ ID NO: 708327 - RNA, 23 nt, Human
cugaagagccaacaaaaagcuug

SEQ ID NO: 708328 - RNA, 22 nt, Human
uuuccugugacuaaucuggaca

SEQ ID NO: 708329 - RNA, 22 nt, Human
caguggcaugguugacugcagu

SEQ ID NO: 708330 - RNA, 22 nt, Human
ugacacaggcagcucccagcac

SEQ ID NO: 708331 - RNA, 22 nt, Human
uacagaguuuuccugccaagaa

SEQ ID NO: 708332 - RNA, 22 nt, Human
agucccuguacuuuccacugcc

SEQ ID NO: 708333 - RNA, 20 nt, Human
aggaaagccugugugagucu

SEQ ID NO: 708334 - RNA, 19 nt, Human
acauuuaaauucagaucuc

SEQ ID NO: 708335 - RNA, 22 nt, Human
cugagaggcggagguugcagug

SEQ ID NO: 708336 - RNA, 22 nt, Human
ggcagugggaaauaagugagaa

SEQ ID NO: 708337 - RNA, 22 nt, Human
acccucaggcagaauguauucu

SEQ ID NO: 708338 - RNA, 22 nt, Human
cacccagagggcuugcugaaca

SEQ ID NO: 708339 - RNA, 22 nt, Human
aauucccauuugcagaaaauca

SEQ ID NO: 708340 - RNA, 22 nt, Human
aagcaauaggguaaucuacuca

SEQ ID NO: 708341 - RNA, 22 nt, Human
ucugugugaccauaagccagcu

SEQ ID NO: 708342 - RNA, 22 nt, Human
gagcucugauguuuaguggaga

SEQ ID NO: 708343 - RNA, 22 nt, Human
ugggagagaauaaucaauaggu

SEQ ID NO: 708344 - RNA, 22 nt, Human
cucugaaacuccugcaccuucu

SEQ ID NO: 708345 - RNA, 22 nt, Human
uguuuaaguucugcuccuuauu

SEQ ID NO: 708346 - RNA, 21 nt, Human
acugaacuuguguucuagagg

SEQ ID NO: 708347 - RNA, 22 nt, Human
cagcuggcagcccuggcccugc

SEQ ID NO: 708348 - RNA, 20 nt, Human
acugacagggaacuaaggcu

SEQ ID NO: 708349 - RNA, 22 nt, Human
gcucacuggccugaagaggacg

SEQ ID NO: 708350 - RNA, 22 nt, Human
caggugaccuauggucacuaca

SEQ ID NO: 708351 - RNA, 22 nt, Human
ucuuccaagguugcacacuauc

SEQ ID NO: 708352 - RNA, 22 nt, Human
ugaacuuuuauuugaugacagg

SEQ ID NO: 708353 - RNA, 22 nt, Human
gaugaagcuuugaagucuaauc

SEQ ID NO: 708354 - RNA, 22 nt, Human
cccugggaguccacugauguca

SEQ ID NO: 708355 - RNA, 22 nt, Human
aagagagucagucugagcacca

SEQ ID NO: 708356 - RNA, 22 nt, Human
caccauaaccaacaugucaguu

SEQ ID NO: 708357 - RNA, 22 nt, Human
gccagguguccucacagugagg

SEQ ID NO: 708358 - RNA, 22 nt, Human
gagccagcugagcugcacuguc

SEQ ID NO: 708359 - RNA, 22 nt, Human
uuucuugacugcuuaggaaugc

SEQ ID NO: 708360 - RNA, 21 nt, Human
uggcaggcagcuggaagcuug

SEQ ID NO: 708361 - RNA, 22 nt, Human
agcaggagacauggggguggug

SEQ ID NO: 708362 - RNA, 22 nt, Human
gggaaggcaggauucucuggug

SEQ ID NO: 708363 - RNA, 17 nt, Human
uuccugugguuugaucu

SEQ ID NO: 708364 - RNA, 22 nt, Human
acacaugaccuccgcagcagca

SEQ ID NO: 708365 - RNA, 22 nt, Human
cugccaggcagggagauggcug

SEQ ID NO: 708366 - RNA, 20 nt, Human
ucccagucagccagagugag

SEQ ID NO: 708367 - RNA, 22 nt, Human
ccuugaaauguucucacugggg

SEQ ID NO: 708368 - RNA, 22 nt, Human
guguguuucagaagccaggugu

SEQ ID NO: 708369 - RNA, 22 nt, Human
uguuucuugagaguauuacccu

SEQ ID NO: 708370 - RNA, 22 nt, Human
uauacaggaacuguuggcuccc

SEQ ID NO: 708371 - RNA, 22 nt, Human
cagguuucuaguucuaagaaua

SEQ ID NO: 708372 - RNA, 22 nt, Human
augugugugaugggcgccgcca

SEQ ID NO: 708373 - RNA, 22 nt, Human
aguguuucucagaagggccuau

SEQ ID NO: 708374 - RNA, 22 nt, Human
uccagccaaucagagcugaggc

SEQ ID NO: 708375 - RNA, 22 nt, Human
uguggaaugcuccuaagugaau

SEQ ID NO: 708376 - RNA, 22 nt, Human
ugcuugucacauacaggagcau

SEQ ID NO: 708377 - RNA, 22 nt, Human
ucaacaguugcacuggagaggu

SEQ ID NO: 708378 - RNA, 22 nt, Human
ggucagaaggauucugggaaau

SEQ ID NO: 708379 - RNA, 22 nt, Human
gaugccuccaaaugagggcaga

SEQ ID NO: 708380 - RNA, 22 nt, Human
uuuucuaucuccuagaacugcc

SEQ ID NO: 708381 - RNA, 22 nt, Human
cacugaaggaaggacuacugca

SEQ ID NO: 708382 - RNA, 22 nt, Human
ccuucuccccucugcagggugu

SEQ ID NO: 708383 - RNA, 22 nt, Human
cagcuucuagcaucggcuuuga

SEQ ID NO: 708384 - RNA, 22 nt, Human
aaggcaaauguguucuuuuagu

SEQ ID NO: 708385 - RNA, 22 nt, Human
ugguccuggugcaagugcauuu

SEQ ID NO: 708386 - RNA, 22 nt, Human
cucaccaggaacagcugcggag

SEQ ID NO: 708387 - RNA, 22 nt, Human
auugcuggcagcuggaucugca

SEQ ID NO: 708388 - RNA, 22 nt, Human
uacuauuuuugcaacguauaca

SEQ ID NO: 708389 - RNA, 20 nt, Human
gaaaucaguuaaugaugguu

SEQ ID NO: 708390 - RNA, 22 nt, Human
uucuaaacuucaauucuaaauu

SEQ ID NO: 708391 - RNA, 22 nt, Human
cuccuggacauggagcggagga

SEQ ID NO: 708392 - RNA, 22 nt, Human
cucuggcuuaguaugcuccaaa

SEQ ID NO: 708393 - RNA, 22 nt, Human
ugaggcagauauuuauuggguu

SEQ ID NO: 708394 - RNA, 17 nt, Human
gaacaguguaagacacu

SEQ ID NO: 708395 - RNA, 22 nt, Human
acagcagcuugucuguucuuua

SEQ ID NO: 708396 - RNA, 22 nt, Human
gaaauacaaagccagccauuuu

SEQ ID NO: 708397 - RNA, 21 nt, Human
gagacagacuuucguccccug

SEQ ID NO: 708398 - RNA, 22 nt, Human
auccaucuugauguaauagcca

SEQ ID NO: 708399 - RNA, 22 nt, Human
aaauaguccugggaauaguacu

SEQ ID NO: 708400 - RNA, 22 nt, Human
agcugugguucugggcagcgac

SEQ ID NO: 708401 - RNA, 22 nt, Human
ccucagucuugaauuagccaga

SEQ ID NO: 708402 - RNA, 22 nt, Human
uccuuaauucugugcaauaugu

SEQ ID NO: 708403 - RNA, 22 nt, Human
aguguuuauggaacccuggugg

SEQ ID NO: 708404 - RNA, 22 nt, Human
guguaaacaacagugguuugaa

SEQ ID NO: 708405 - RNA, 22 nt, Human
uccucucagugugguuguggga

SEQ ID NO: 708406 - RNA, 20 nt, Human
cacucuaaccauauuuccuc

SEQ ID NO: 708407 - RNA, 22 nt, Human
augcugaagagugcacaggcua

SEQ ID NO: 708408 - RNA, 22 nt, Human
acuguauacuucuguauacaau

SEQ ID NO: 708409 - RNA, 22 nt, Human
aaauauacggucccuaacaguc

SEQ ID NO: 708410 - RNA, 20 nt, Human
ucucugagcuucucuugggg

SEQ ID NO: 708411 - RNA, 22 nt, Human
ccacagaaccucagcuuugagc

SEQ ID NO: 708412 - RNA, 22 nt, Human
cuggggaccagugucuguuugu

SEQ ID NO: 708413 - RNA, 22 nt, Human
auccacuugccacuguauaguu

SEQ ID NO: 708414 - RNA, 22 nt, Human
gggggugaggacaggagcacug

SEQ ID NO: 708415 - RNA, 22 nt, Human
uggcuggaguauaggaguagga

SEQ ID NO: 708416 - RNA, 23 nt, Human
gugugccaagcacugugccagga

SEQ ID NO: 708417 - RNA, 22 nt, Human
caggagaccugguaagccaagu

SEQ ID NO: 708418 - RNA, 22 nt, Human
gagacaggauuuaaccaaagcu

SEQ ID NO: 708419 - RNA, 22 nt, Human
uuuauugacuucagugagucuu

SEQ ID NO: 708420 - RNA, 22 nt, Human
uauccuguuuugcacaauuaua

SEQ ID NO: 708421 - RNA, 22 nt, Human
guacagcauuugaaauuacugg

SEQ ID NO: 708422 - RNA, 22 nt, Human
ccugucucuuucaaucugagag

SEQ ID NO: 708423 - RNA, 22 nt, Human
aagugguaggaagagagcacug

SEQ ID NO: 708424 - RNA, 23 nt, Human
uggggcugauggagacggaccag

SEQ ID NO: 708425 - RNA, 22 nt, Human
aggcccuggcccccagagauuc

SEQ ID NO: 708426 - RNA, 20 nt, Human
guauauaaccauagugacua

SEQ ID NO: 708427 - RNA, 22 nt, Human
ggucugagugccagggagagaa

SEQ ID NO: 708428 - RNA, 22 nt, Human
agcuaagacuuagugacuuagu

SEQ ID NO: 708429 - RNA, 17 nt, Human
gauuuccugaaguucuu

SEQ ID NO: 708430 - RNA, 22 nt, Human
caaacauugggggcuucaacac

SEQ ID NO: 708431 - RNA, 22 nt, Human
guuaacuuucaggugcauguuu

SEQ ID NO: 708432 - RNA, 22 nt, Human
cucaggauagcugcgcagccug

SEQ ID NO: 708433 - RNA, 22 nt, Human
acaguuauuuucccagcauuua

SEQ ID NO: 708434 - RNA, 22 nt, Human
gggcuggagccagcuguggcug

SEQ ID NO: 708435 - RNA, 22 nt, Human
ggaugcuggggaccaaucucug

SEQ ID NO: 708436 - RNA, 22 nt, Human
agucagagucuauugcuguggu

SEQ ID NO: 708437 - RNA, 22 nt, Human
ucaucucaaaacccaaggggca

SEQ ID NO: 708438 - RNA, 22 nt, Human
ucuucaaauccuacagugucug

SEQ ID NO: 708439 - RNA, 22 nt, Human
auuuuuuguuaacucaggauag

SEQ ID NO: 708440 - RNA, 22 nt, Human
gcccucucuucugcagccucca

SEQ ID NO: 708441 - RNA, 22 nt, Human
guaauagucucaaacuccugga

SEQ ID NO: 708442 - RNA, 22 nt, Human
ucuuugugccaugcagugaggc

SEQ ID NO: 708443 - RNA, 22 nt, Human
cucagcaagacccccaccgugu

SEQ ID NO: 708444 - RNA, 22 nt, Human
gucuggagacuugggucaucaa

SEQ ID NO: 708445 - RNA, 22 nt, Human
accaugaugggaagcucagggc

SEQ ID NO: 708446 - RNA, 22 nt, Human
agucugcuuuugugaagagcug

SEQ ID NO: 708447 - RNA, 22 nt, Human
cagccacuugugaugcugggga

SEQ ID NO: 708448 - RNA, 22 nt, Human
aaguagcauuccaugguauaga

SEQ ID NO: 708449 - RNA, 22 nt, Human
cacacauggucaguggcuacuc

SEQ ID NO: 708450 - RNA, 22 nt, Human
cggggcuuggaccagccacccc

SEQ ID NO: 708451 - RNA, 22 nt, Human
gcagugcugaucccauggcaga

SEQ ID NO: 708452 - RNA, 21 nt, Human
uccaaaucccauucuguaguc

SEQ ID NO: 708453 - RNA, 22 nt, Human
gagguggugguggaggcauagc

SEQ ID NO: 708454 - RNA, 22 nt, Human
uucuaacucuacacuagcuuug

SEQ ID NO: 708455 - RNA, 22 nt, Human
guuucuuaccacuuggaccucu

SEQ ID NO: 708456 - RNA, 22 nt, Human
gccaggcugguuauuuaaugag

SEQ ID NO: 708457 - RNA, 22 nt, Human
agauaaaguccaaacuguguag

SEQ ID NO: 708458 - RNA, 22 nt, Human
ugcucccagcuguaggaauguu

SEQ ID NO: 708459 - RNA, 22 nt, Human
gcccaagccgccuuccagagac

SEQ ID NO: 708460 - RNA, 22 nt, Human
cagcaagaaaauucacaugcuc

SEQ ID NO: 708461 - RNA, 22 nt, Human
gaugggaggaaccugggucccu

SEQ ID NO: 708462 - RNA, 22 nt, Human
uuguguguguaacuuuaugaga

SEQ ID NO: 708463 - RNA, 22 nt, Human
cagagcaguccuugucaaucag

SEQ ID NO: 708464 - RNA, 22 nt, Human
uaguuuagaauguugcaauaca

SEQ ID NO: 708465 - RNA, 18 nt, Human
aaagaaggauuggagagc

SEQ ID NO: 708466 - RNA, 22 nt, Human
gaugagaaggcucagauccaaa

SEQ ID NO: 708467 - RNA, 22 nt, Human
uuagcuguggaagcuucagcca

SEQ ID NO: 708468 - RNA, 22 nt, Human
ggaggacacuggcucugccuuc

SEQ ID NO: 708469 - RNA, 22 nt, Human
ugaauacuauuucauaaugugg

SEQ ID NO: 708470 - RNA, 22 nt, Human
gagagguacacccuuuaaacuu

SEQ ID NO: 708471 - RNA, 22 nt, Human
uagcauuaucugucuuaucauu

SEQ ID NO: 708472 - RNA, 22 nt, Human
uuugcuugauuaggauauggaa

SEQ ID NO: 708473 - RNA, 22 nt, Human
aauuuguuagcauacucuaguu

SEQ ID NO: 708474 - RNA, 22 nt, Human
gcagggguggaggcuguccugu

SEQ ID NO: 708475 - RNA, 22 nt, Human
gcacccagcccagggcgugaug

SEQ ID NO: 708476 - RNA, 22 nt, Human
uugggccaaauagcuauuuacu

SEQ ID NO: 708477 - RNA, 22 nt, Human
aggaguguugaguuggguuuug

SEQ ID NO: 708478 - RNA, 16 nt, Human
ugugcauguucugugu

SEQ ID NO: 708479 - RNA, 22 nt, Human
gacaauacagaaagggacaugc

SEQ ID NO: 708480 - RNA, 22 nt, Human
cuggcuggucaucagcaguacg

SEQ ID NO: 708481 - RNA, 22 nt, Human
ucagggaaaggggagagucauu

SEQ ID NO: 708482 - RNA, 22 nt, Human
ccagcccugucaccaacuggag

SEQ ID NO: 708483 - RNA, 22 nt, Human
agugaaaacacuaguucuugcc

SEQ ID NO: 708484 - RNA, 22 nt, Human
acaagaauaaggauaagagauu

SEQ ID NO: 708485 - RNA, 22 nt, Human
ugcagugccucggcagugcagc

SEQ ID NO: 708486 - RNA, 22 nt, Human
acugacauuuuucccuaagcau

SEQ ID NO: 708487 - RNA, 18 nt, Human
ccagggagcuuauuagga

SEQ ID NO: 708488 - RNA, 22 nt, Human
cccaggaggcgcagguugcggu

SEQ ID NO: 708489 - RNA, 22 nt, Human
agcagcuccucuaggaacggau

SEQ ID NO: 708490 - RNA, 22 nt, Human
augcaugagucacucagugcag

SEQ ID NO: 708491 - RNA, 22 nt, Human
agauccaucaucauauuuucua

SEQ ID NO: 708492 - RNA, 22 nt, Human
uaugacauuuucccagauuuau

SEQ ID NO: 708493 - RNA, 22 nt, Human
ucagaagccaccuuuuguuggg

SEQ ID NO: 708494 - RNA, 22 nt, Human
agcauucuguggucuucuaugg

SEQ ID NO: 708495 - RNA, 22 nt, Human
cccugagcauucaugugagcuu

SEQ ID NO: 708496 - RNA, 22 nt, Human
uuuugcuuuaagauggagagga

SEQ ID NO: 708497 - RNA, 22 nt, Human
gcugcccacagcggguguuucg

SEQ ID NO: 708498 - RNA, 22 nt, Human
cagaggcagccgggggagaacg

SEQ ID NO: 708499 - RNA, 22 nt, Human
gcuucuggaagcugcuucugcc

SEQ ID NO: 708500 - RNA, 23 nt, Human
gaggugugaauucugggugcugc

SEQ ID NO: 708501 - RNA, 22 nt, Human
uacacugaauacuaguuuuccu

SEQ ID NO: 708502 - RNA, 23 nt, Human
cuacagguuaauuuucaguggaa

SEQ ID NO: 708503 - RNA, 22 nt, Human
augaugguggguaauguguaaa

SEQ ID NO: 708504 - RNA, 22 nt, Human
uucucuuuuugcaucucaaccu

SEQ ID NO: 708505 - RNA, 22 nt, Human
aagcauuuuugaaaugguagga

SEQ ID NO: 708506 - RNA, 22 nt, Human
ucccuccuuaauaagaggucug

SEQ ID NO: 708507 - RNA, 22 nt, Human
aguagcauaaauagugguagua

SEQ ID NO: 708508 - RNA, 22 nt, Human
ugaguucagauccuggcucugc

SEQ ID NO: 708509 - RNA, 22 nt, Human
uaggaacuaguagauguguaaa

SEQ ID NO: 708510 - RNA, 22 nt, Human
uugagaaaacacagaguuuauu

SEQ ID NO: 708511 - RNA, 22 nt, Human
gcagagcaguacucucuugacu

SEQ ID NO: 708512 - RNA, 22 nt, Human
cagaggucugacacugaauggu

SEQ ID NO: 708513 - RNA, 22 nt, Human
uagagaggccgcggguccccuc

SEQ ID NO: 708514 - RNA, 18 nt, Human
agguuugguggaaacaua

SEQ ID NO: 708515 - RNA, 22 nt, Human
agccuccuguagcccucaccca

SEQ ID NO: 708516 - RNA, 22 nt, Human
ugggggugaaagucuggacagu

SEQ ID NO: 708517 - RNA, 22 nt, Human
auggccuggccagagcucugcu

SEQ ID NO: 708518 - RNA, 22 nt, Human
auugaaagauuuugggcucaug

SEQ ID NO: 708519 - RNA, 22 nt, Human
gccuggucucuuucaugucagu

SEQ ID NO: 708520 - RNA, 22 nt, Human
aagacauuuaugaaaagugcug

SEQ ID NO: 708521 - RNA, 22 nt, Human
gagaaaaucuugggucaagaau

SEQ ID NO: 708522 - RNA, 22 nt, Human
gggcugcugcugccagcgacac

SEQ ID NO: 708523 - RNA, 22 nt, Human
acagauguuacaguaugaucuc

SEQ ID NO: 708524 - RNA, 20 nt, Human
cugcuuccaggcucaccccc

SEQ ID NO: 708525 - RNA, 22 nt, Human
auuauuaaagcuuaggucuuau

SEQ ID NO: 708526 - RNA, 22 nt, Human
uuacauguacugguuugacuua

SEQ ID NO: 708527 - RNA, 22 nt, Human
uugugggauggcucuucccaaa

SEQ ID NO: 708528 - RNA, 22 nt, Human
cuugacuucuucuagaaauaag

SEQ ID NO: 708529 - RNA, 22 nt, Human
uagcagaggcaaggaugugaau

SEQ ID NO: 708530 - RNA, 22 nt, Human
uuauugugucuugguuuaucuu

SEQ ID NO: 708531 - RNA, 22 nt, Human
uaggguccucaucuguaaauga

SEQ ID NO: 708532 - RNA, 18 nt, Human
uuuuaauuucaggggugg

SEQ ID NO: 708533 - RNA, 22 nt, Human
caggguugauuccuucugaggg

SEQ ID NO: 708534 - RNA, 22 nt, Human
agagaucuagcaccugcugguc

SEQ ID NO: 708535 - RNA, 22 nt, Human
ucagccuccuaauuuccuguga

SEQ ID NO: 708536 - RNA, 22 nt, Human
uucuucagcccauaucuuccag

SEQ ID NO: 708537 - RNA, 22 nt, Human
aaacagcuuguuucaggaaagu

SEQ ID NO: 708538 - RNA, 22 nt, Human
aaucauccugaagucaauaaag

SEQ ID NO: 708539 - RNA, 22 nt, Human
gggcuuggaguaggcugaugaa

SEQ ID NO: 708540 - RNA, 22 nt, Human
ugagccuggguggucgaggcug

SEQ ID NO: 708541 - RNA, 22 nt, Human
cuggcugcuuguuuugaugggu

SEQ ID NO: 708542 - RNA, 22 nt, Human
gacacagaauuccccuccaagu

SEQ ID NO: 708543 - RNA, 22 nt, Human
uaauauacuucccauaguuuga

SEQ ID NO: 708544 - RNA, 22 nt, Human
agggagcucugggggcacacgg

SEQ ID NO: 708545 - RNA, 23 nt, Human
ccaagcuucuaaugcugcugagc

SEQ ID NO: 708546 - RNA, 22 nt, Human
cacugguagagagaagacaagg

SEQ ID NO: 708547 - RNA, 22 nt, Human
cuacuucugugaugaaacuaca

SEQ ID NO: 708548 - RNA, 22 nt, Human
uggggcuaacgagagagcagag

SEQ ID NO: 708549 - RNA, 22 nt, Human
gcuaggucugugcgcagccgcu

SEQ ID NO: 708550 - RNA, 22 nt, Human
ccaggcauccauugcuuccucu

SEQ ID NO: 708551 - RNA, 22 nt, Human
uacagccucaucacgggagcug

SEQ ID NO: 708552 - RNA, 22 nt, Human
ucaugugacaggcacuguucug

SEQ ID NO: 708553 - RNA, 22 nt, Human
cacuguacagcauuaacaaggc

SEQ ID NO: 708554 - RNA, 22 nt, Human
aggucaagggagcugagggcca

SEQ ID NO: 708555 - RNA, 22 nt, Human
aacagccucagugagauuagga

SEQ ID NO: 708556 - RNA, 22 nt, Human
accuuaaaugugacauagucua

SEQ ID NO: 708557 - RNA, 20 nt, Human
ugugcccaauguccagguuc

SEQ ID NO: 708558 - RNA, 21 nt, Human
acauuauaauucauauuccac

SEQ ID NO: 708559 - RNA, 22 nt, Human
ucagagaaguaggcuaauggug

SEQ ID NO: 708560 - RNA, 22 nt, Human
ucucagaagugaucaggauguu

SEQ ID NO: 708561 - RNA, 22 nt, Human
uggagaugaacauggugauguu

SEQ ID NO: 708562 - RNA, 22 nt, Human
ggaggccaaggcgggcggauca

SEQ ID NO: 708563 - RNA, 22 nt, Human
gcuguacaggguuauccuuucc

SEQ ID NO: 708564 - RNA, 22 nt, Human
cugaggccucucuccuuggcuu

SEQ ID NO: 708565 - RNA, 22 nt, Human
augcuaaggcccaggagaaaau

SEQ ID NO: 708566 - RNA, 22 nt, Human
cccagcucucucaguucugcuu

SEQ ID NO: 708567 - RNA, 22 nt, Human
augaacucuucugguuauuuuu

SEQ ID NO: 708568 - RNA, 22 nt, Human
uccugggaguggccauguaaug

SEQ ID NO: 708569 - RNA, 22 nt, Human
gaauccaggguuguuugagcua

SEQ ID NO: 708570 - RNA, 22 nt, Human
ugccccugaccucaggcgaagg

SEQ ID NO: 708571 - RNA, 22 nt, Human
gagaccuggaggauguggaugg

SEQ ID NO: 708572 - RNA, 22 nt, Human
ugaagccagucaauguuaaguu

SEQ ID NO: 708573 - RNA, 22 nt, Human
cagaccuggaaaacaggcuugc

SEQ ID NO: 708574 - RNA, 22 nt, Human
acacacaugccuuuccuaagua

SEQ ID NO: 708575 - RNA, 23 nt, Human
uguguguguauucuacgcaaggu

SEQ ID NO: 708576 - RNA, 18 nt, Human
ucucuuuccucaguggag

SEQ ID NO: 708577 - RNA, 22 nt, Human
ucagaauuaagcucuuggucag

SEQ ID NO: 708578 - RNA, 22 nt, Human
cagaaacagacaugacgcagua

SEQ ID NO: 708579 - RNA, 22 nt, Human
aggacagcauaugggaaccagu

SEQ ID NO: 708580 - RNA, 22 nt, Human
uggaaauggaucugaugagucu

SEQ ID NO: 708581 - RNA, 22 nt, Human
guuaacuuccccaugucugcau

SEQ ID NO: 708582 - RNA, 22 nt, Human
ugagaggugaggcaugaggcau

SEQ ID NO: 708583 - RNA, 22 nt, Human
ugacaggaguggcuagugggag

SEQ ID NO: 708584 - RNA, 22 nt, Human
acuuugcagguacaugagcauc

SEQ ID NO: 708585 - RNA, 22 nt, Human
ugagugccugaacauagaguag

SEQ ID NO: 708586 - RNA, 22 nt, Human
uuugcaaauacagaggucuugc

SEQ ID NO: 708587 - RNA, 22 nt, Human
augcuguguauuuuacucuuuc

SEQ ID NO: 708588 - RNA, 22 nt, Human
auucugagcuacuaauuaggca

SEQ ID NO: 708589 - RNA, 22 nt, Human
ugaagacuuugcucuuaaccac

SEQ ID NO: 708590 - RNA, 22 nt, Human
agggcagcaaugcagcugcugc

SEQ ID NO: 708591 - RNA, 19 nt, Human
accaggcuuauggucagug

SEQ ID NO: 708592 - RNA, 23 nt, Human
ugaaucaauuaugggauucaaug

SEQ ID NO: 708593 - RNA, 22 nt, Human
aaguguuaaagacuugaacacu

SEQ ID NO: 708594 - RNA, 22 nt, Human
cagcugaaagaaggaaguguca

SEQ ID NO: 708595 - RNA, 18 nt, Human
cagcaucuucauuaggcc

SEQ ID NO: 708596 - RNA, 20 nt, Human
aggagaccaagccaagugga

SEQ ID NO: 708597 - RNA, 20 nt, Human
uaucuaaaugcuuacauuac

SEQ ID NO: 708598 - RNA, 22 nt, Human
uguuaauggcugaagacauccu

SEQ ID NO: 708599 - RNA, 22 nt, Human
cucuuuuucagccuuaccaaag

SEQ ID NO: 708600 - RNA, 18 nt, Human
agacccucuaagggcagu

SEQ ID NO: 708601 - RNA, 22 nt, Human
uccuggcaggucugagaggucu

SEQ ID NO: 708602 - RNA, 22 nt, Human
uacaaaucagaucaugaguuua

SEQ ID NO: 708603 - RNA, 22 nt, Human
ugucccaguucccaggguugcu

SEQ ID NO: 708604 - RNA, 22 nt, Human
ggucacauauccucgguuugga

SEQ ID NO: 708605 - RNA, 22 nt, Human
gcagacugcgagcgugcuggug

SEQ ID NO: 708606 - RNA, 22 nt, Human
ugcagaguaaaagcagaugcua

SEQ ID NO: 708607 - RNA, 22 nt, Human
ccagucuguucucaccucugag

SEQ ID NO: 708608 - RNA, 22 nt, Human
ccaggcagggcucaaggaaccu

SEQ ID NO: 708609 - RNA, 23 nt, Human
uucaaaacuggaaaaucagaugc

SEQ ID NO: 708610 - RNA, 22 nt, Human
cagggcagagggaaacuccuuu

SEQ ID NO: 708611 - RNA, 22 nt, Human
ugaaugcaagaaggaacaugaa

SEQ ID NO: 708612 - RNA, 22 nt, Human
auucacagggggagaaggguau

SEQ ID NO: 708613 - RNA, 18 nt, Human
ucugucuguguugucuuu

SEQ ID NO: 708614 - RNA, 20 nt, Human
gaugagacccaugcaugaga

SEQ ID NO: 708615 - RNA, 17 nt, Human
uucugugcuuccuggcu

SEQ ID NO: 708616 - RNA, 22 nt, Human
uuuccucacacagaagaucuug

SEQ ID NO: 708617 - RNA, 22 nt, Human
ugagcagagcaguaacaggagc

SEQ ID NO: 708618 - RNA, 22 nt, Human
uucacaguuuaauggcaaggau

SEQ ID NO: 708619 - RNA, 22 nt, Human
aggaaagacuggggccccagaa

SEQ ID NO: 708620 - RNA, 22 nt, Human
caugccaguuuugagaugcacc

SEQ ID NO: 708621 - RNA, 22 nt, Human
guagaauaaauguacacaucug

SEQ ID NO: 708622 - RNA, 22 nt, Human
acaugccuccauugagcugugg

SEQ ID NO: 708623 - RNA, 19 nt, Human
uguuucuuccuccaucuga

SEQ ID NO: 708624 - RNA, 22 nt, Human
gcucagaaauggcagauggaga

SEQ ID NO: 708625 - RNA, 22 nt, Human
cuugaucuacauagugaaaccc

SEQ ID NO: 708626 - RNA, 22 nt, Human
gggaccugccauugcucacagg

SEQ ID NO: 708627 - RNA, 22 nt, Human
augcuuaauacacuguuaaagg

SEQ ID NO: 708628 - RNA, 22 nt, Human
caggaaauguauaauuuuauaa

SEQ ID NO: 708629 - RNA, 22 nt, Human
agaaucagugagcaguugugau

SEQ ID NO: 708630 - RNA, 22 nt, Human
agcccagggaaccaggaagugg

SEQ ID NO: 708631 - RNA, 22 nt, Human
uucacacucucacucccugacc

SEQ ID NO: 708632 - RNA, 22 nt, Human
ucugggaaccagugcggcuggg

SEQ ID NO: 708633 - RNA, 22 nt, Human
guuaacauuucuaggugcaggg

SEQ ID NO: 708634 - RNA, 22 nt, Human
ccaucuguaucugacaaauucu

SEQ ID NO: 708635 - RNA, 22 nt, Human
guuuggcaguuuuagagugcaa

SEQ ID NO: 708636 - RNA, 22 nt, Human
uccuacaucagcucucaguagc

SEQ ID NO: 708637 - RNA, 22 nt, Human
uaguuaggguucugcagagaca

SEQ ID NO: 708638 - RNA, 22 nt, Human
acaauucuggguauuuauauag

SEQ ID NO: 708639 - RNA, 21 nt, Human
uagcaggagcgaauuuugaug

SEQ ID NO: 708640 - RNA, 22 nt, Human
cucuuaaugaccuuaauucaag

SEQ ID NO: 708641 - RNA, 22 nt, Human
caaguuuaaggcacugauaagu

SEQ ID NO: 708642 - RNA, 22 nt, Human
cuuuggaggaaaauugagguca

SEQ ID NO: 708643 - RNA, 22 nt, Human
gcaugcaggauagguugagcuc

SEQ ID NO: 708644 - RNA, 22 nt, Human
cuccagccagagugccucuguu

SEQ ID NO: 708645 - RNA, 22 nt, Human
agcuuuauagaaaggaucagug

SEQ ID NO: 708646 - RNA, 22 nt, Human
auuuauucuccagauggcgaga

SEQ ID NO: 708647 - RNA, 22 nt, Human
gugggagaagauuuggucaucu

SEQ ID NO: 708648 - RNA, 22 nt, Human
ggcagacuuuuucucugaaggg

SEQ ID NO: 708649 - RNA, 22 nt, Human
ugggcaugaguggacagagaag

SEQ ID NO: 708650 - RNA, 22 nt, Human
aggaaagcaauggcugagaaca

SEQ ID NO: 708651 - RNA, 22 nt, Human
uggccaccuuauggcuauugga

SEQ ID NO: 708652 - RNA, 22 nt, Human
uaacagucaugugcuacugcua

SEQ ID NO: 708653 - RNA, 22 nt, Human
gacagcuguggagaggcaugug

SEQ ID NO: 708654 - RNA, 22 nt, Human
cucagccaggagaguguucaca

SEQ ID NO: 708655 - RNA, 22 nt, Human
gaccacagauuccuaaguggca

SEQ ID NO: 708656 - RNA, 22 nt, Human
augaacaauaaucaugucuaug

SEQ ID NO: 708657 - RNA, 22 nt, Human
uuccugggcucuggcuggccua

SEQ ID NO: 708658 - RNA, 22 nt, Human
ucccagggucaguggugaggcc

SEQ ID NO: 708659 - RNA, 22 nt, Human
uuccauaauaaccugagagaaa

SEQ ID NO: 708660 - RNA, 21 nt, Human
ucagaggcacugagagcaaug

SEQ ID NO: 708661 - RNA, 22 nt, Human
agccuggcuuaauccuccuuuu

SEQ ID NO: 708662 - RNA, 22 nt, Human
ucucccaacauguggaggucag

SEQ ID NO: 708663 - RNA, 22 nt, Human
agcccagcuuccuucugucucu

SEQ ID NO: 708664 - RNA, 22 nt, Human
auucacaacaaaaggauaugag

SEQ ID NO: 708665 - RNA, 22 nt, Human
ugcugaaagaccguauuuaucu

SEQ ID NO: 708666 - RNA, 22 nt, Human
cugccaggacugacgucuucag

SEQ ID NO: 708667 - RNA, 22 nt, Human
aagggcucccaacucaucuuuu

SEQ ID NO: 708668 - RNA, 22 nt, Human
cagaugcuuggaggacacuugg

SEQ ID NO: 708669 - RNA, 22 nt, Human
augcaugcuucuuauaguacuu

SEQ ID NO: 708670 - RNA, 22 nt, Human
aucucugguccaaauguuaccu

SEQ ID NO: 708671 - RNA, 20 nt, Human
uugcacagagaaggaggcag

SEQ ID NO: 708672 - RNA, 22 nt, Human
uccccagggucccugcuuccau

SEQ ID NO: 708673 - RNA, 22 nt, Human
uuggaagcaguguacacuguac

SEQ ID NO: 708674 - RNA, 22 nt, Human
aagcaucuguaaagacccuuau

SEQ ID NO: 708675 - RNA, 22 nt, Human
uccugcagucugcacucugccu

SEQ ID NO: 708676 - RNA, 22 nt, Human
agugauauuagcaaaugguuau

SEQ ID NO: 708677 - RNA, 22 nt, Human
agaugguucagaauuauaaaga

SEQ ID NO: 708678 - RNA, 22 nt, Human
cuuuggcugcauucgaguugcu

SEQ ID NO: 708679 - RNA, 22 nt, Human
ucugagccaaaauaaacagcau

SEQ ID NO: 708680 - RNA, 22 nt, Human
agugcauucuccaucaucuagg

SEQ ID NO: 708681 - RNA, 20 nt, Human
gauuucaaagcagaguggcc

SEQ ID NO: 708682 - RNA, 22 nt, Human
gcacggcuaauuuuuguauuuu

SEQ ID NO: 708683 - RNA, 22 nt, Human
cuccucacacccacugcaacca

SEQ ID NO: 708684 - RNA, 22 nt, Human
aggccagcuguuacuagagcca

SEQ ID NO: 708685 - RNA, 22 nt, Human
aacaguguuuuucuucagcacu

SEQ ID NO: 708686 - RNA, 22 nt, Human
aggagaggaaucauuauuacaa

SEQ ID NO: 708687 - RNA, 22 nt, Human
cugccuuggaaaaugugguaau

SEQ ID NO: 708688 - RNA, 22 nt, Human
uagcaaguguuggugaagaugu

SEQ ID NO: 708689 - RNA, 22 nt, Human
uuuacagcuucuauacuaugug

SEQ ID NO: 708690 - RNA, 22 nt, Human
cugcagcuuuuugugcuuguaa

SEQ ID NO: 708691 - RNA, 22 nt, Human
uuaaaggaauugaguuucuugu

SEQ ID NO: 708692 - RNA, 22 nt, Human
acagcucugguccuuuagagag

SEQ ID NO: 708693 - RNA, 20 nt, Human
gauucugggcagucaguguc

SEQ ID NO: 708694 - RNA, 22 nt, Human
gauguccugcagaaacaugaga

SEQ ID NO: 708695 - RNA, 22 nt, Human
gcagagaagaugcccaggcuuc

SEQ ID NO: 708696 - RNA, 20 nt, Human
uggcuucauaaugguuucug

SEQ ID NO: 708697 - RNA, 22 nt, Human
uuagccauguugaagauuuaga

SEQ ID NO: 708698 - RNA, 22 nt, Human
uuaaagccugacuguggacuac

SEQ ID NO: 708699 - RNA, 22 nt, Human
cagcucugaagaaaggugucua

SEQ ID NO: 708700 - RNA, 22 nt, Human
caguuucuauggcugggcucug

SEQ ID NO: 708701 - RNA, 21 nt, Human
cucuugcugaugucuccuuua

SEQ ID NO: 708702 - RNA, 22 nt, Human
acagauauuuaagagcuuuugu

SEQ ID NO: 708703 - RNA, 22 nt, Human
uaaugagacucaauugugugug

SEQ ID NO: 708704 - RNA, 22 nt, Human
ucugggcuuggauuggcucugc

SEQ ID NO: 708705 - RNA, 22 nt, Human
agaacaaugcguauuuuacucc

SEQ ID NO: 708706 - RNA, 22 nt, Human
uucacaaaaaugcugaacaguu

SEQ ID NO: 708707 - RNA, 22 nt, Human
ucacaugucaagaagauaauuu

SEQ ID NO: 708708 - RNA, 22 nt, Human
gaugucuuaagcccagaaguuc

SEQ ID NO: 708709 - RNA, 22 nt, Human
ugggccagcacugggugcucau

SEQ ID NO: 708710 - RNA, 23 nt, Human
ccuggaguacuaaggggauggaa

SEQ ID NO: 708711 - RNA, 20 nt, Human
ucugugcauugccugcuggu

SEQ ID NO: 708712 - RNA, 22 nt, Human
ccaguggaguuuuuauacccag

SEQ ID NO: 708713 - RNA, 20 nt, Human
ggcagcaauucacccuaucc

SEQ ID NO: 708714 - RNA, 22 nt, Human
uguuucuucucacacaaacuca

SEQ ID NO: 708715 - RNA, 22 nt, Human
ugugaggauggaguucuacagg

SEQ ID NO: 708716 - RNA, 22 nt, Human
gggagcugagggaccucugugg

SEQ ID NO: 708717 - RNA, 22 nt, Human
cuguggcugucucuuucccaug

SEQ ID NO: 708718 - RNA, 22 nt, Human
gaucauuugacuuuauaaggcu

SEQ ID NO: 708719 - RNA, 22 nt, Human
gcaggccauucaggagaugugc

SEQ ID NO: 708720 - RNA, 22 nt, Human
agugcuggaaagggacggagga

SEQ ID NO: 708721 - RNA, 22 nt, Human
cuuaagauugucagcuucagcc

SEQ ID NO: 708722 - RNA, 19 nt, Human
uauauuugagugugcaugc

SEQ ID NO: 708723 - RNA, 22 nt, Human
gaagaagguggcccagggguag

SEQ ID NO: 708724 - RNA, 22 nt, Human
aaaugacagagcugggacuagu

SEQ ID NO: 708725 - RNA, 22 nt, Human
uaauuauagcauuggaguggcc

SEQ ID NO: 708726 - RNA, 22 nt, Human
auguguguacacacgugacucu

SEQ ID NO: 708727 - RNA, 22 nt, Human
ccucucugucacaccaguggcc

SEQ ID NO: 708728 - RNA, 22 nt, Human
agaaaugaagcaggaguuauua

SEQ ID NO: 708729 - RNA, 22 nt, Human
aaauucucuucagaggaaccag

SEQ ID NO: 708730 - RNA, 22 nt, Human
cagugcaugaaacaauaugcag

SEQ ID NO: 708731 - RNA, 22 nt, Human
ugugaaaugcuauugugacaaa

SEQ ID NO: 708732 - RNA, 22 nt, Human
agucagagaauguuuucaugga

SEQ ID NO: 708733 - RNA, 22 nt, Human
augcugagauaaggcuuuaguc

SEQ ID NO: 708734 - RNA, 22 nt, Human
uguaaacugcuucucaccaagg

SEQ ID NO: 708735 - RNA, 22 nt, Human
guuccugaaagaugaguaauua

SEQ ID NO: 708736 - RNA, 22 nt, Human
gugaggggccaagaguagggca

SEQ ID NO: 708737 - RNA, 22 nt, Human
gagcugccuacauugccaagag

SEQ ID NO: 708738 - RNA, 22 nt, Human
aagauguuagaggucaugcaga

SEQ ID NO: 708739 - RNA, 22 nt, Human
uuguuaaaauuggagccgagag

SEQ ID NO: 708740 - RNA, 22 nt, Human
gauacuuucucauuuacccaag

SEQ ID NO: 708741 - RNA, 22 nt, Human
cacagagaggcuugucuccaag

SEQ ID NO: 708742 - RNA, 22 nt, Human
cagaggacaauagaauggaaag

SEQ ID NO: 708743 - RNA, 21 nt, Human
ggaacuuucaugaaucuagca

SEQ ID NO: 708744 - RNA, 22 nt, Human
guccugggagaugggacccuga

SEQ ID NO: 708745 - RNA, 22 nt, Human
guuauguacuuuuuaaaucuug

SEQ ID NO: 708746 - RNA, 18 nt, Human
caauguuuuagaucucua

SEQ ID NO: 708747 - RNA, 23 nt, Human
aacucuggcuagcauagaauaga

SEQ ID NO: 708748 - RNA, 17 nt, Human
gaauaaguggauggcac

SEQ ID NO: 708749 - RNA, 22 nt, Human
ccagguguaggacaccaaggga

SEQ ID NO: 708750 - RNA, 22 nt, Human
agcuccaggcagcauuaauaaa

SEQ ID NO: 708751 - RNA, 22 nt, Human
aaggcuccagugaaugcuggca

SEQ ID NO: 708752 - RNA, 22 nt, Human
ugugaaaugaagauaauucuug

SEQ ID NO: 708753 - RNA, 22 nt, Human
gugcugugugauccaugcuggc

SEQ ID NO: 708754 - RNA, 22 nt, Human
ggggcagggagguuaucgccga

SEQ ID NO: 708755 - RNA, 22 nt, Human
uggccaugaaggaggcagcaga

SEQ ID NO: 708756 - RNA, 22 nt, Human
ugggcaccugaggccuggcagg

SEQ ID NO: 708757 - RNA, 22 nt, Human
gggagggaucugcuaggcaaug

SEQ ID NO: 708758 - RNA, 22 nt, Human
ucagaucuggugaaguuauagu

SEQ ID NO: 708759 - RNA, 22 nt, Human
auuuacaggacagcuuggcauu

SEQ ID NO: 708760 - RNA, 22 nt, Human
cauagugucugguaacauagua

SEQ ID NO: 708761 - RNA, 22 nt, Human
uaccauuugagagagaacauaa

SEQ ID NO: 708762 - RNA, 22 nt, Human
gcaggcuguagacaccaaacua

SEQ ID NO: 708763 - RNA, 22 nt, Human
uggccugaggcucggcaugggu

SEQ ID NO: 708764 - RNA, 17 nt, Human
uaucaagaagucuggcc

SEQ ID NO: 708765 - RNA, 22 nt, Human
uucauguuuguaggacugaggc

SEQ ID NO: 708766 - RNA, 18 nt, Human
gccagcccuccaaccucc

SEQ ID NO: 708767 - RNA, 22 nt, Human
guugaauauuuuaagaguuuug

SEQ ID NO: 708768 - RNA, 22 nt, Human
uaaaagagaauggauaacagag

SEQ ID NO: 708769 - RNA, 22 nt, Human
ugguccugcccacgcccaucug

SEQ ID NO: 708770 - RNA, 22 nt, Human
aagagaaagcagacuuugucau

SEQ ID NO: 708771 - RNA, 22 nt, Human
uauugacacuuuuuguguagcc

SEQ ID NO: 708772 - RNA, 18 nt, Human
uuggcuuugagaacuggu

SEQ ID NO: 708773 - RNA, 22 nt, Human
acagacuggccugucucgcacc

SEQ ID NO: 708774 - RNA, 22 nt, Human
ggcacuggccuggggccaagag

SEQ ID NO: 708775 - RNA, 22 nt, Human
cagagcagucuggagauccagc

SEQ ID NO: 708776 - RNA, 22 nt, Human
cugcugagcccuggcacaggug

SEQ ID NO: 708777 - RNA, 22 nt, Human
cuggggaacgcagcgagcagcg

SEQ ID NO: 708778 - RNA, 22 nt, Human
ccaaggcugucauucaguagcu

SEQ ID NO: 708779 - RNA, 21 nt, Human
ugcuuaccgccccagggcucc

SEQ ID NO: 708780 - RNA, 22 nt, Human
gucaggggaugugcugguggcc

SEQ ID NO: 708781 - RNA, 22 nt, Human
uucaccagcagcucacuaguca

SEQ ID NO: 708782 - RNA, 22 nt, Human
gcaguggggcaaucauagcuca

SEQ ID NO: 708783 - RNA, 22 nt, Human
gcuuccuguauccuccuguacc

SEQ ID NO: 708784 - RNA, 23 nt, Human
acuacagauacuccugcuguuug

SEQ ID NO: 708785 - RNA, 22 nt, Human
aggaugugccaccagcuuugca

SEQ ID NO: 708786 - RNA, 22 nt, Human
acuacacagggaugugacuacc

SEQ ID NO: 708787 - RNA, 22 nt, Human
cuguagagaaagcauggaagcu

SEQ ID NO: 708788 - RNA, 22 nt, Human
agcaggcagccuaggaagugaa

SEQ ID NO: 708789 - RNA, 20 nt, Human
gcugaggucauuaugccuca

SEQ ID NO: 708790 - RNA, 22 nt, Human
guguugaugacauuuuagaaac

SEQ ID NO: 708791 - RNA, 22 nt, Human
agccaggccagcugucuugagu

SEQ ID NO: 708792 - RNA, 22 nt, Human
cuagagaagaggcucagccagc

SEQ ID NO: 708793 - RNA, 18 nt, Human
cugggccagaguuucugc

SEQ ID NO: 708794 - RNA, 22 nt, Human
uuagaaaucugcugccaugcaa

SEQ ID NO: 708795 - RNA, 22 nt, Human
acucuaaaccccacucugcugg

SEQ ID NO: 708796 - RNA, 20 nt, Human
acgugugugugcacgcgcgc

SEQ ID NO: 708797 - RNA, 22 nt, Human
ggcuucccuuuccgagaggaga

SEQ ID NO: 708798 - RNA, 22 nt, Human
cuggacaaccacucagccucag

SEQ ID NO: 708799 - RNA, 22 nt, Human
ggccacugaccuacaucugggg

SEQ ID NO: 708800 - RNA, 22 nt, Human
gugucaauaaauagcggugugg

SEQ ID NO: 708801 - RNA, 22 nt, Human
uggaggauuccacuuacaugag

SEQ ID NO: 708802 - RNA, 22 nt, Human
ccagggauguggcagcaccaua

SEQ ID NO: 708803 - RNA, 22 nt, Human
acauccacauuuauucagucau

SEQ ID NO: 708804 - RNA, 22 nt, Human
ccuucuccugccuuggguucau

SEQ ID NO: 708805 - RNA, 18 nt, Human
gaggaaacaggcucugug

SEQ ID NO: 708806 - RNA, 22 nt, Human
ugcugcucuguaaagugaugag

SEQ ID NO: 708807 - RNA, 22 nt, Human
cauguggcacaaagaaggaaau

SEQ ID NO: 708808 - RNA, 22 nt, Human
gcugcagcagaaguucucagag

SEQ ID NO: 708809 - RNA, 22 nt, Human
uaagaaacccaggaauuucuua

SEQ ID NO: 708810 - RNA, 23 nt, Human
cugaggggaaaagggcuucaggc

SEQ ID NO: 708811 - RNA, 21 nt, Human
uaaaagaugacaagacagcuc

SEQ ID NO: 708812 - RNA, 21 nt, Human
ccugcagcaccagaaggagau

SEQ ID NO: 708813 - RNA, 22 nt, Human
ucuuucugguuauguauagaga

SEQ ID NO: 708814 - RNA, 22 nt, Human
cacagaauggaccaguuuuaga

SEQ ID NO: 708815 - RNA, 22 nt, Human
agugcacaccuuaguacaaagu

SEQ ID NO: 708816 - RNA, 22 nt, Human
aggaggccgauuucagaggucg

SEQ ID NO: 708817 - RNA, 22 nt, Human
uagaggauuuugcauuucauau

SEQ ID NO: 708818 - RNA, 22 nt, Human
ugacauuuaauuaacgaaugcu

SEQ ID NO: 708819 - RNA, 22 nt, Human
uuuaucugauauucagcgauuu

SEQ ID NO: 708820 - RNA, 22 nt, Human
ccccuuccuuccucagacagcc

SEQ ID NO: 708821 - RNA, 22 nt, Human
caucagcacuaugauuaaagua

SEQ ID NO: 708822 - RNA, 20 nt, Human
accuugaacccgccagccau

SEQ ID NO: 708823 - RNA, 22 nt, Human
aacuuuaaggcuauaaauuaug

SEQ ID NO: 708824 - RNA, 22 nt, Human
auauauuuuuugagacagaguc

SEQ ID NO: 708825 - RNA, 22 nt, Human
uggcuggcuuguucacugacug

SEQ ID NO: 708826 - RNA, 22 nt, Human
cagguccccuccccuaccaggc

SEQ ID NO: 708827 - RNA, 19 nt, Human
cugcagggaugugcagagu

SEQ ID NO: 708828 - RNA, 22 nt, Human
aaggcugacguuuguguuuauu

SEQ ID NO: 708829 - RNA, 22 nt, Human
caggccagaggcuguuguugcg

SEQ ID NO: 708830 - RNA, 22 nt, Human
gauggcagcauauugacagcau

SEQ ID NO: 708831 - RNA, 22 nt, Human
auucauccuuaccaguccccgg

SEQ ID NO: 708832 - RNA, 22 nt, Human
cuucaacuucccuagaugucau

SEQ ID NO: 708833 - RNA, 22 nt, Human
auggagagugaaagucucucua

SEQ ID NO: 708834 - RNA, 22 nt, Human
gucucaguuacucucccuggua

SEQ ID NO: 708835 - RNA, 22 nt, Human
ugacauaaguugguagaaagga

SEQ ID NO: 708836 - RNA, 21 nt, Human
ugaaugaucugguugccuuuu

SEQ ID NO: 708837 - RNA, 22 nt, Human
cauuggcacaaguagcuucauc

SEQ ID NO: 708838 - RNA, 21 nt, Human
uggcugcuggcccucucucca

SEQ ID NO: 708839 - RNA, 22 nt, Human
agugcagugguuaggagccagg

SEQ ID NO: 708840 - RNA, 22 nt, Human
ugcccacaucugcuuauuucau

SEQ ID NO: 708841 - RNA, 22 nt, Human
cagggcugucuccaaaggcccc

SEQ ID NO: 708842 - RNA, 22 nt, Human
gcucuggccagacccucagugg

SEQ ID NO: 708843 - RNA, 22 nt, Human
uagcaaggacguccaaagaacu

SEQ ID NO: 708844 - RNA, 22 nt, Human
uaaccagcaugaaaucugcagc

SEQ ID NO: 708845 - RNA, 22 nt, Human
ugggcucucacacauguucuga

SEQ ID NO: 708846 - RNA, 22 nt, Human
uggcaugcacagcccuguucgg

SEQ ID NO: 708847 - RNA, 22 nt, Human
ucucgacagccuggcacagugg

SEQ ID NO: 708848 - RNA, 22 nt, Human
cuggcauucuuguuucuggaaa

SEQ ID NO: 708849 - RNA, 22 nt, Human
aacauucugguucuaaaaaccu

SEQ ID NO: 708850 - RNA, 22 nt, Human
cuuuacagaaagagaacucugg

SEQ ID NO: 708851 - RNA, 22 nt, Human
gcagcacacgguggugcccugg

SEQ ID NO: 708852 - RNA, 22 nt, Human
ccagggagcggggcugggucuc

SEQ ID NO: 708853 - RNA, 22 nt, Human
gggagcugaaggagccggcggg

SEQ ID NO: 708854 - RNA, 22 nt, Human
gccagcccauuaaccccugucc

SEQ ID NO: 708855 - RNA, 22 nt, Human
cagguagguauggugcagucuu

SEQ ID NO: 708856 - RNA, 22 nt, Human
gcaccuggacagugacccuagc

SEQ ID NO: 708857 - RNA, 22 nt, Human
ucugaggaauucugcagugaga

SEQ ID NO: 708858 - RNA, 22 nt, Human
auugguuaagacgcaucaugcu

SEQ ID NO: 708859 - RNA, 22 nt, Human
cccuggauuuacaucauucuga

SEQ ID NO: 708860 - RNA, 21 nt, Human
cugcuuccucucuucauggca

SEQ ID NO: 708861 - RNA, 22 nt, Human
aacaguauggaagccauuagga

SEQ ID NO: 708862 - RNA, 20 nt, Human
ugggucugcuuggcuucagu

SEQ ID NO: 708863 - RNA, 20 nt, Human
ucagaugggagugagccauc

SEQ ID NO: 708864 - RNA, 22 nt, Human
ugaaaaaacaaguuggcccauu

SEQ ID NO: 708865 - RNA, 22 nt, Human
cagagcucagagcugccaggca

SEQ ID NO: 708866 - RNA, 22 nt, Human
ucaggacaacaagacuuguuua

SEQ ID NO: 708867 - RNA, 22 nt, Human
uggacagcuugcagagccaccc

SEQ ID NO: 708868 - RNA, 22 nt, Human
uccugcuucagguagagggggu

SEQ ID NO: 708869 - RNA, 22 nt, Human
gcugcuugauuagguugacacu

SEQ ID NO: 708870 - RNA, 22 nt, Human
ccuguuuagugaggugaggagu

SEQ ID NO: 708871 - RNA, 22 nt, Human
uaguugaagagaugaaugacca

SEQ ID NO: 708872 - RNA, 22 nt, Human
uuuacaaguuuacagaaugaug

SEQ ID NO: 708873 - RNA, 19 nt, Human
ggcuggaguggccaucugu

SEQ ID NO: 708874 - RNA, 22 nt, Human
aaagccaggggagggauuccca

SEQ ID NO: 708875 - RNA, 22 nt, Human
aaauagacacaugcguucauau

SEQ ID NO: 708876 - RNA, 22 nt, Human
ccaaacauuucaaauuuagaga

SEQ ID NO: 708877 - RNA, 22 nt, Human
auguacauuuagaucauuucug

SEQ ID NO: 708878 - RNA, 22 nt, Human
ugcaaauaggggacaacucuuu

SEQ ID NO: 708879 - RNA, 22 nt, Human
ugucauauguaauauguucauu

SEQ ID NO: 708880 - RNA, 22 nt, Human
guacagugccagacuucuaggu

SEQ ID NO: 708881 - RNA, 22 nt, Human
uccaguggcaggcggugagguc

SEQ ID NO: 708882 - RNA, 22 nt, Human
caccagcuucccaucgcggguc

SEQ ID NO: 708883 - RNA, 20 nt, Human
augcuuaaguguucauuauu

SEQ ID NO: 708884 - RNA, 22 nt, Human
caaucacugggauauuggugug

SEQ ID NO: 708885 - RNA, 22 nt, Human
cuguccucaccuuggcaggggg

SEQ ID NO: 708886 - RNA, 22 nt, Human
cauugacaguucuuuaaguugc

SEQ ID NO: 708887 - RNA, 22 nt, Human
aggcccaguccucugccgucug

SEQ ID NO: 708888 - RNA, 22 nt, Human
aaagaaauaccuuucucagcuu

SEQ ID NO: 708889 - RNA, 22 nt, Human
aacugcauuugcauaaguccau

SEQ ID NO: 708890 - RNA, 22 nt, Human
cagagcuguuacuauucaugaa

SEQ ID NO: 708891 - RNA, 19 nt, Human
agauggcuuggacugaaaa

SEQ ID NO: 708892 - RNA, 22 nt, Human
aggguucagugagguguacucc

SEQ ID NO: 708893 - RNA, 22 nt, Human
ucaaaacacuauuaccuuuaau

SEQ ID NO: 708894 - RNA, 22 nt, Human
uuggggagaaaugaaaugaagu

SEQ ID NO: 708895 - RNA, 22 nt, Human
aaaacaggaguuuugguaggcu

SEQ ID NO: 708896 - RNA, 22 nt, Human
agguggagaucagggacuaagg

SEQ ID NO: 708897 - RNA, 22 nt, Human
cagugcauaaucuaaauggggg

SEQ ID NO: 708898 - RNA, 22 nt, Human
agcauccagcauccuauagaaa

SEQ ID NO: 708899 - RNA, 22 nt, Human
ccaguguauuauuugagaaauu

SEQ ID NO: 708900 - RNA, 22 nt, Human
aguccaggaaaauaagcuaggu

SEQ ID NO: 708901 - RNA, 22 nt, Human
ucacagcacccugaggugcugg

SEQ ID NO: 708902 - RNA, 22 nt, Human
aggcaccgcuccucaguccaga

SEQ ID NO: 708903 - RNA, 22 nt, Human
agguccuguuucuucccugggg

SEQ ID NO: 708904 - RNA, 22 nt, Human
caggguucagugggcccucuug

SEQ ID NO: 708905 - RNA, 22 nt, Human
gcuguccagagcaugggagcaa

SEQ ID NO: 708906 - RNA, 22 nt, Human
gcugauguuucaaguauagcuu

SEQ ID NO: 708907 - RNA, 22 nt, Human
auguauuugcguauggacauac

SEQ ID NO: 708908 - RNA, 22 nt, Human
uagcuccuggcugcagggccuc

SEQ ID NO: 708909 - RNA, 22 nt, Human
gcuuauacucuggagaauaaga

SEQ ID NO: 708910 - RNA, 22 nt, Human
ggggcagcucccgagggcagga

SEQ ID NO: 708911 - RNA, 22 nt, Human
auuauuuggaauaggcauugca

SEQ ID NO: 708912 - RNA, 19 nt, Human
cugcugggugcugagggag

SEQ ID NO: 708913 - RNA, 22 nt, Human
caucauuuaauuauaggggcug

SEQ ID NO: 708914 - RNA, 22 nt, Human
ucucucuucuuuguuaagaaug

SEQ ID NO: 708915 - RNA, 22 nt, Human
uaggccagaggagcagcuuugg

SEQ ID NO: 708916 - RNA, 22 nt, Human
ugccaggcgugguggugcgcac

SEQ ID NO: 708917 - RNA, 22 nt, Human
augcacagacccaaaggccauc

SEQ ID NO: 708918 - RNA, 17 nt, Human
aggugcagaggcagagc

SEQ ID NO: 708919 - RNA, 22 nt, Human
gccagcuguaagcuggggugau

SEQ ID NO: 708920 - RNA, 18 nt, Human
cucaguguuugcugaaaa

SEQ ID NO: 708921 - RNA, 22 nt, Human
uuggcuucuuuagucaguuugg

SEQ ID NO: 708922 - RNA, 22 nt, Human
acuugguuggucucacccuguu

SEQ ID NO: 708923 - RNA, 22 nt, Human
ucccagagcucugacaccagcu

SEQ ID NO: 708924 - RNA, 22 nt, Human
aauaucagcacuuuugugguau

SEQ ID NO: 708925 - RNA, 22 nt, Human
uuuccuugggucucuuaguggc

SEQ ID NO: 708926 - RNA, 22 nt, Human
aaugauacauauguaucguuag

SEQ ID NO: 708927 - RNA, 22 nt, Human
uugaagaccuuuagugcuaugu

SEQ ID NO: 708928 - RNA, 18 nt, Human
uccauccucugcucuuca

SEQ ID NO: 708929 - RNA, 22 nt, Human
uccuuucccuuuccauccuggc

SEQ ID NO: 708930 - RNA, 22 nt, Human
aggagcacuaauuccugcagag

SEQ ID NO: 708931 - RNA, 22 nt, Human
aagcacaaugaacaucuuagau

SEQ ID NO: 708932 - RNA, 22 nt, Human
cugcacagcccucaagagccug

SEQ ID NO: 708933 - RNA, 22 nt, Human
gaauauuuucaguacagauggu

SEQ ID NO: 708934 - RNA, 22 nt, Human
ggcuggcugauaaaggguugag

SEQ ID NO: 708935 - RNA, 22 nt, Human
gcagguggggcugcuaccagaa

SEQ ID NO: 708936 - RNA, 22 nt, Human
agagucaccuuuuccucaggau

SEQ ID NO: 708937 - RNA, 19 nt, Human
accaggaguaucagagcug

SEQ ID NO: 708938 - RNA, 22 nt, Human
uugcagcuguugcaaagucucu

SEQ ID NO: 708939 - RNA, 22 nt, Human
gucaccagugcuaagaggugga

SEQ ID NO: 708940 - RNA, 22 nt, Human
aaaauuuugcccuauccuucau

SEQ ID NO: 708941 - RNA, 22 nt, Human
guucugcuuccuugcuugcgca

SEQ ID NO: 708942 - RNA, 22 nt, Human
agcucagcacugucagcacucc

SEQ ID NO: 708943 - RNA, 22 nt, Human
ucaggcuuauagguagugguua

SEQ ID NO: 708944 - RNA, 23 nt, Human
ccuggggagcuguauccagagug

SEQ ID NO: 708945 - RNA, 22 nt, Human
uagauuguucuuaacuuuauaa

SEQ ID NO: 708946 - RNA, 22 nt, Human
accucccagaaaguuuugcagg

SEQ ID NO: 708947 - RNA, 22 nt, Human
ucugcugugucccuggucuccu

SEQ ID NO: 708948 - RNA, 22 nt, Human
aaguuugacagaaguuucuaau

SEQ ID NO: 708949 - RNA, 22 nt, Human
agcagagcuuuuuggacucaga

SEQ ID NO: 708950 - RNA, 23 nt, Human
uggagccugggauacaauagaug

SEQ ID NO: 708951 - RNA, 22 nt, Human
cugcuccagacaccugcagggg

SEQ ID NO: 708952 - RNA, 22 nt, Human
guagagcaggacuugagauguu

SEQ ID NO: 708953 - RNA, 22 nt, Human
uaggcugagcuuguagaucgua

SEQ ID NO: 708954 - RNA, 22 nt, Human
aaacauucacucucaauuuuag

SEQ ID NO: 708955 - RNA, 22 nt, Human
uuuaccaagcuuuaauuacaua

SEQ ID NO: 708956 - RNA, 22 nt, Human
augucacauuggagcugcugga

SEQ ID NO: 708957 - RNA, 22 nt, Human
cauguguggagggcaugcaugg

SEQ ID NO: 708958 - RNA, 22 nt, Human
agugcccuggcccagcuggacc

SEQ ID NO: 708959 - RNA, 22 nt, Human
gggaagcagacggcggggaaau

SEQ ID NO: 708960 - RNA, 22 nt, Human
acauucaaaaagcaucugucac

SEQ ID NO: 708961 - RNA, 22 nt, Human
gcugccucccagagcccugcag

SEQ ID NO: 708962 - RNA, 22 nt, Human
ugcaggugugugcaagggaggg

SEQ ID NO: 708963 - RNA, 22 nt, Human
gcugggaggaucucucccuguc

SEQ ID NO: 708964 - RNA, 22 nt, Human
auggagacgcaagggaccuagg

SEQ ID NO: 708965 - RNA, 22 nt, Human
gucacaaagcgcgguggucggu

SEQ ID NO: 708966 - RNA, 22 nt, Human
gagccagccuccgccucucucc

SEQ ID NO: 708967 - RNA, 22 nt, Human
aacccuggggcagcugcuaggg

SEQ ID NO: 708968 - RNA, 19 nt, Human
gguuggagaagagcggccc

SEQ ID NO: 708969 - RNA, 22 nt, Human
ugcagcagccaagguucugugc

SEQ ID NO: 708970 - RNA, 22 nt, Human
ucacccagguaauagcaguuug

SEQ ID NO: 708971 - RNA, 21 nt, Human
ggucuucaaagcuuuuacgau

SEQ ID NO: 708972 - RNA, 22 nt, Human
ccugcccuagagaugacacaau

SEQ ID NO: 708973 - RNA, 22 nt, Human
ucauggaagagguauuuuuugu

SEQ ID NO: 708974 - RNA, 23 nt, Human
acuccccagucucuucuugccaa

SEQ ID NO: 708975 - RNA, 23 nt, Human
ggaggcucaaguaucacgggcag

SEQ ID NO: 708976 - RNA, 22 nt, Human
acacagaugauguuccaggaac

SEQ ID NO: 708977 - RNA, 22 nt, Human
caccugagcaacccugugcggg

SEQ ID NO: 708978 - RNA, 22 nt, Human
aucauaaaauugcaccauuucu

SEQ ID NO: 708979 - RNA, 22 nt, Human
acuuuggggaucuacggcugga

SEQ ID NO: 708980 - RNA, 22 nt, Human
aguggcaggaucucgguucacu

SEQ ID NO: 708981 - RNA, 22 nt, Human
ugucucagaauggcucauaaua

SEQ ID NO: 708982 - RNA, 21 nt, Human
cuggcucuguugucacccggc

SEQ ID NO: 708983 - RNA, 22 nt, Human
ucagcaggucugaggcggggcc

SEQ ID NO: 708984 - RNA, 22 nt, Human
aauuuuacauaggggauauggg

SEQ ID NO: 708985 - RNA, 22 nt, Human
aaaaguugcaaaauugcucuuc

SEQ ID NO: 708986 - RNA, 22 nt, Human
agccaguuggcuaugaggagga

SEQ ID NO: 708987 - RNA, 22 nt, Human
gccugcagugagugcagaaggu

SEQ ID NO: 708988 - RNA, 22 nt, Human
aggcagcauccagaggagaaug

SEQ ID NO: 708989 - RNA, 22 nt, Human
ggcuuugacaugcugaauuaaa

SEQ ID NO: 708990 - RNA, 22 nt, Human
aggauguggguuuucacauugu

SEQ ID NO: 708991 - RNA, 22 nt, Human
cuaaaugacuuccagugguuau

SEQ ID NO: 708992 - RNA, 22 nt, Human
gcccacacaccagcucaggagg

SEQ ID NO: 708993 - RNA, 22 nt, Human
caaauuuuguguguucucuagu

SEQ ID NO: 708994 - RNA, 22 nt, Human
gagcuuaaauggcuaaauauaa

SEQ ID NO: 708995 - RNA, 22 nt, Human
caggcagaaaguauucugugua

SEQ ID NO: 708996 - RNA, 22 nt, Human
uuggagagauuaucagaccagc

SEQ ID NO: 708997 - RNA, 20 nt, Human
acagugcauggggggacagc

SEQ ID NO: 708998 - RNA, 22 nt, Human
ucucccuuggucacagauuccu

SEQ ID NO: 708999 - RNA, 22 nt, Human
agcuucuuuaauucagcaugau

SEQ ID NO: 709000 - RNA, 22 nt, Human
uagaacagaguuccagugauca

SEQ ID NO: 709001 - RNA, 22 nt, Human
gcccugagaagaagucggaggg

SEQ ID NO: 709002 - RNA, 22 nt, Human
cccagccugaucucggccagcu

SEQ ID NO: 709003 - RNA, 22 nt, Human
ugugaauauccauuuguuucag

SEQ ID NO: 709004 - RNA, 22 nt, Human
cucugguuucgcaggaaauaga

SEQ ID NO: 709005 - RNA, 20 nt, Human
acuggacacugaggugagcu

SEQ ID NO: 709006 - RNA, 22 nt, Human
caguccugcuagugugaaaagc

SEQ ID NO: 709007 - RNA, 22 nt, Human
agcaaugcuaccgggugauucg

SEQ ID NO: 709008 - RNA, 22 nt, Human
cuuuaaauaauacaagguccag

SEQ ID NO: 709009 - RNA, 17 nt, Human
cucagagaggguaagua

SEQ ID NO: 709010 - RNA, 23 nt, Human
uccagcagagccuuccaggaggg

SEQ ID NO: 709011 - RNA, 20 nt, Human
acaaagacuggaaaagcaag

SEQ ID NO: 709012 - RNA, 22 nt, Human
uucaggaucaaguugccaguag

SEQ ID NO: 709013 - RNA, 22 nt, Human
uguucuuuagcagaccauguug

SEQ ID NO: 709014 - RNA, 22 nt, Human
gccaggcugcuggcugcugucc

SEQ ID NO: 709015 - RNA, 22 nt, Human
guuccuaaaucuggaggaccuc

SEQ ID NO: 709016 - RNA, 22 nt, Human
cugggcugcagcgggagcgacg

SEQ ID NO: 709017 - RNA, 23 nt, Human
acucaaaauuuggcauuugagga

SEQ ID NO: 709018 - RNA, 19 nt, Human
aucagcaagguaggaugug

SEQ ID NO: 709019 - RNA, 22 nt, Human
cagauggaacacagaaaggaga

SEQ ID NO: 709020 - RNA, 23 nt, Human
uuacaguaggaguuggaaaacca

SEQ ID NO: 709021 - RNA, 22 nt, Human
auuugccuuggugauuuguaaa

SEQ ID NO: 709022 - RNA, 22 nt, Human
aucugcaucagacuuugcauga

SEQ ID NO: 709023 - RNA, 22 nt, Human
cccagcucccugguauuugugc

SEQ ID NO: 709024 - RNA, 18 nt, Human
uuuuacucauagcaggcc

SEQ ID NO: 709025 - RNA, 22 nt, Human
agaucuauuagcaaacugccau

SEQ ID NO: 709026 - RNA, 22 nt, Human
agcagauggugucaugggaugg

SEQ ID NO: 709027 - RNA, 22 nt, Human
auauuaguguagguagcuaaua

SEQ ID NO: 709028 - RNA, 22 nt, Human
ccagcaggcagucauauccuuu

SEQ ID NO: 709029 - RNA, 22 nt, Human
cuagaauaucauaugaagagac

SEQ ID NO: 709030 - RNA, 22 nt, Human
auacaugauacuuaguacguag

SEQ ID NO: 709031 - RNA, 22 nt, Human
guggggagggagaugcugaagu

SEQ ID NO: 709032 - RNA, 22 nt, Human
auaacagauacucucugugagg

SEQ ID NO: 709033 - RNA, 22 nt, Human
ggccuugggcagacacgucaca

SEQ ID NO: 709034 - RNA, 22 nt, Human
acaguguucacuaagguuagcu

SEQ ID NO: 709035 - RNA, 22 nt, Human
guccugugcucagacauggggg

SEQ ID NO: 709036 - RNA, 22 nt, Human
agcuguggucuucaaguugccu

SEQ ID NO: 709037 - RNA, 22 nt, Human
auuuccuucggacaguuugggu

SEQ ID NO: 709038 - RNA, 22 nt, Human
augaaaguaccuguaauauguu

SEQ ID NO: 709039 - RNA, 22 nt, Human
guuguauauguagagaaugguc

SEQ ID NO: 709040 - RNA, 20 nt, Human
ggguaaaaggcaguguugca

SEQ ID NO: 709041 - RNA, 20 nt, Human
ccugaggguuuguguucuuu

SEQ ID NO: 709042 - RNA, 22 nt, Human
aaauugcugggucccacccaag

SEQ ID NO: 709043 - RNA, 22 nt, Human
aagaaauauugggccuuauaaa

SEQ ID NO: 709044 - RNA, 22 nt, Human
ggcagaccucuccagccccaca

SEQ ID NO: 709045 - RNA, 22 nt, Human
aggaauguguuucuaggcuguu

SEQ ID NO: 709046 - RNA, 22 nt, Human
ugagccugaguucaaggcugca

SEQ ID NO: 709047 - RNA, 22 nt, Human
auuugaaaucccuucuacugua

SEQ ID NO: 709048 - RNA, 22 nt, Human
gacugagggacagggcagugga

SEQ ID NO: 709049 - RNA, 22 nt, Human
uccaaauacauuuacuguauuu

SEQ ID NO: 709050 - RNA, 22 nt, Human
cuccagugucucagagcagaug

SEQ ID NO: 709051 - RNA, 22 nt, Human
augaugcaccauuauaagaguu

SEQ ID NO: 709052 - RNA, 22 nt, Human
agaccuggauuccaauccuacc

SEQ ID NO: 709053 - RNA, 21 nt, Human
cccaggagaagaaaagaugca

SEQ ID NO: 709054 - RNA, 22 nt, Human
ggcacaagguuuaaauaacauc

SEQ ID NO: 709055 - RNA, 22 nt, Human
ugggggagaguuuagaugauuu

SEQ ID NO: 709056 - RNA, 22 nt, Human
acccugccgugggcugcuugug

SEQ ID NO: 709057 - RNA, 22 nt, Human
aaacagcugucauuguuuuaaa

SEQ ID NO: 709058 - RNA, 22 nt, Human
uuggccacacucacuagagccc

SEQ ID NO: 709059 - RNA, 22 nt, Human
ggagccugggccuccugcccuu

SEQ ID NO: 709060 - RNA, 21 nt, Human
ugaggccaauagccccuggac

SEQ ID NO: 709061 - RNA, 22 nt, Human
gugggcugcccuugaggucagc

SEQ ID NO: 709062 - RNA, 22 nt, Human
aagauacaccaagagccuagua

SEQ ID NO: 709063 - RNA, 22 nt, Human
uauuccuuggcaaaaaauauau

SEQ ID NO: 709064 - RNA, 22 nt, Human
agccuccaucccaugcacaaag

SEQ ID NO: 709065 - RNA, 22 nt, Human
cuggcagauauuugcagacaug

SEQ ID NO: 709066 - RNA, 22 nt, Human
uccucagucagcuccguucuug

SEQ ID NO: 709067 - RNA, 22 nt, Human
agcggcuggaccagcguucaag

SEQ ID NO: 709068 - RNA, 22 nt, Human
ugugcaguuuuaaguggucuaa

SEQ ID NO: 709069 - RNA, 22 nt, Human
uuauaugaguaucauaucacuu

SEQ ID NO: 709070 - RNA, 22 nt, Human
gcacuugaggacgacucagcug

SEQ ID NO: 709071 - RNA, 22 nt, Human
guaaacaacacaaaucauuuga

SEQ ID NO: 709072 - RNA, 22 nt, Human
uaaauacuuaguuuugugucua

SEQ ID NO: 709073 - RNA, 22 nt, Human
guauuucccccagacucccugg

SEQ ID NO: 709074 - RNA, 22 nt, Human
uggagccagcgagccgaggcgg

SEQ ID NO: 709075 - RNA, 22 nt, Human
cccuggcagaaugucucugggc

SEQ ID NO: 709076 - RNA, 22 nt, Human
cagagagcuuagugugcugcau

SEQ ID NO: 709077 - RNA, 22 nt, Human
aggacuucuccgauaagucaga

SEQ ID NO: 709078 - RNA, 22 nt, Human
gggccagagcacagaggauguu

SEQ ID NO: 709079 - RNA, 22 nt, Human
uaauacacaagggccagcucuu

SEQ ID NO: 709080 - RNA, 22 nt, Human
ucaucaaaggauugcaugauuu

SEQ ID NO: 709081 - RNA, 22 nt, Human
ucacagaagagauauugacaga

SEQ ID NO: 709082 - RNA, 21 nt, Human
acucugucuugagccaucugu

SEQ ID NO: 709083 - RNA, 22 nt, Human
cagucucacccuggaggcccca

SEQ ID NO: 709084 - RNA, 22 nt, Human
accuguguuuucccucaguuuc

SEQ ID NO: 709085 - RNA, 22 nt, Human
aagucucauccguguagcucca

SEQ ID NO: 709086 - RNA, 22 nt, Human
aggcaguuguagagagggcucu

SEQ ID NO: 709087 - RNA, 22 nt, Human
agggcuuucuuuguaaaagaag

SEQ ID NO: 709088 - RNA, 22 nt, Human
gccuggugguauccuggcaaga

SEQ ID NO: 709089 - RNA, 22 nt, Human
agagcuguuuggacaucugagu

SEQ ID NO: 709090 - RNA, 22 nt, Human
auggagcuaaauuguaaucaua

SEQ ID NO: 709091 - RNA, 21 nt, Human
agcaggaggcagucacagcuc

SEQ ID NO: 709092 - RNA, 22 nt, Human
uggagcugauacagcuggcuuu

SEQ ID NO: 709093 - RNA, 22 nt, Human
ccuuugugguggcccagugugg

SEQ ID NO: 709094 - RNA, 22 nt, Human
gcacauacauauuagugucaca

SEQ ID NO: 709095 - RNA, 22 nt, Human
ccugaaacaguccuugcccuca

SEQ ID NO: 709096 - RNA, 22 nt, Human
gcagaccagccccuggagcugc

SEQ ID NO: 709097 - RNA, 22 nt, Human
ccucacagggccaggccccuca

SEQ ID NO: 709098 - RNA, 22 nt, Human
caguggauuagccagagcugga

SEQ ID NO: 709099 - RNA, 22 nt, Human
agcuauggaacagaguggcugu

SEQ ID NO: 709100 - RNA, 22 nt, Human
aacaguuauuaucacauuagug

SEQ ID NO: 709101 - RNA, 22 nt, Human
uggagggcaugcuguccauggg

SEQ ID NO: 709102 - RNA, 22 nt, Human
gugcagcugugugagagcucca

SEQ ID NO: 709103 - RNA, 22 nt, Human
gaauugcugaugaaucugauug

SEQ ID NO: 709104 - RNA, 22 nt, Human
acugcugauuaugaaagugaca

SEQ ID NO: 709105 - RNA, 20 nt, Human
cuugcccagggucuccugcc

SEQ ID NO: 709106 - RNA, 22 nt, Human
ccaggcuggaguguagucgcau

SEQ ID NO: 709107 - RNA, 22 nt, Human
gcacaggcucucuuggggacac

SEQ ID NO: 709108 - RNA, 22 nt, Human
agagaagagcaaugauaaauuu

SEQ ID NO: 709109 - RNA, 22 nt, Human
uucaguuucuaaagauguuccu

SEQ ID NO: 709110 - RNA, 22 nt, Human
aaagcugucaaggcaggaggcu

SEQ ID NO: 709111 - RNA, 23 nt, Human
ugcaagaguuccaaacuguucaa

SEQ ID NO: 709112 - RNA, 22 nt, Human
accacuuaucaucacuaucuca

SEQ ID NO: 709113 - RNA, 22 nt, Human
gggcagcuguaucugagcuuau

SEQ ID NO: 709114 - RNA, 22 nt, Human
uugcaggauuuuagagaugaca

SEQ ID NO: 709115 - RNA, 22 nt, Human
auccauuuuugcaaaguuguuc

SEQ ID NO: 709116 - RNA, 22 nt, Human
cauggcuucuaagugauaacgu

SEQ ID NO: 709117 - RNA, 22 nt, Human
uuccaagguguucugcugguuu

SEQ ID NO: 709118 - RNA, 22 nt, Human
gcuguuuccagacaaugucuuu

SEQ ID NO: 709119 - RNA, 22 nt, Human
caaggccuccugggcccagaga

SEQ ID NO: 709120 - RNA, 22 nt, Human
cagcagggggcagcgcagauca

SEQ ID NO: 709121 - RNA, 22 nt, Human
ucugccuggagaguucuucucu

SEQ ID NO: 709122 - RNA, 22 nt, Human
uuaugacaggaaaaucacagaa

SEQ ID NO: 709123 - RNA, 22 nt, Human
cugagggccuuggcuccugccc

SEQ ID NO: 709124 - RNA, 22 nt, Human
uccagccuugccacuuuucugu

SEQ ID NO: 709125 - RNA, 22 nt, Human
ccuccaggcugguuaucagcug

SEQ ID NO: 709126 - RNA, 22 nt, Human
ugcuauugugaacagugccaca

SEQ ID NO: 709127 - RNA, 22 nt, Human
gcugauguauauagugauugag

SEQ ID NO: 709128 - RNA, 22 nt, Human
gaacuauaugucuuaaagcuuu

SEQ ID NO: 709129 - RNA, 22 nt, Human
uggcuagcccuuguggggagag

SEQ ID NO: 709130 - RNA, 19 nt, Human
cauggcugcugcuugggag

SEQ ID NO: 709131 - RNA, 22 nt, Human
caccuagggcaucccugcccca

SEQ ID NO: 709132 - RNA, 22 nt, Human
aacaggaaacaaguuguuagga

SEQ ID NO: 709133 - RNA, 22 nt, Human
ucucagagcucacaccuccugg

SEQ ID NO: 709134 - RNA, 22 nt, Human
ucccucagauuggcaauuagau

SEQ ID NO: 709135 - RNA, 23 nt, Human
ugcuuggacaagacucuauuaag

SEQ ID NO: 709136 - RNA, 22 nt, Human
aaaucaguaaauguucauuaac

SEQ ID NO: 709137 - RNA, 22 nt, Human
agggccugcaucaggagcuugg

SEQ ID NO: 709138 - RNA, 22 nt, Human
auggccugggcccgcuucagau

SEQ ID NO: 709139 - RNA, 22 nt, Human
cauccugcggggagcagagggc

SEQ ID NO: 709140 - RNA, 22 nt, Human
cauuugauccucacaacaaucu

SEQ ID NO: 709141 - RNA, 22 nt, Human
uuuaguaaguucacugcaaagc

SEQ ID NO: 709142 - RNA, 23 nt, Human
agacauuuuaauaaggacuuuuu

SEQ ID NO: 709143 - RNA, 22 nt, Human
uuuaacauguucaagaaacaua

SEQ ID NO: 709144 - RNA, 22 nt, Human
guucacagcugggacaagacug

SEQ ID NO: 709145 - RNA, 22 nt, Human
uuacaaacaacagacauuuauu

SEQ ID NO: 709146 - RNA, 22 nt, Human
aggaagccaagccugacacuca

SEQ ID NO: 709147 - RNA, 22 nt, Human
uaaaagauuuuauaggaacaag

SEQ ID NO: 709148 - RNA, 22 nt, Human
acaauucucucauaucuuauua

SEQ ID NO: 709149 - RNA, 22 nt, Human
cagggcuccaugcagggacucc

SEQ ID NO: 709150 - RNA, 22 nt, Human
acugugugaaacaucaaugugu

SEQ ID NO: 709151 - RNA, 22 nt, Human
ggcaggaaguagcagucugagc

SEQ ID NO: 709152 - RNA, 22 nt, Human
uucacaaaaugguuuguugaug

SEQ ID NO: 709153 - RNA, 22 nt, Human
agacaguggcucagccccaguc

SEQ ID NO: 709154 - RNA, 22 nt, Human
uucaaaauuguucuaagcucug

SEQ ID NO: 709155 - RNA, 22 nt, Human
acauuugagaugccuuuuaggu

SEQ ID NO: 709156 - RNA, 22 nt, Human
aauuucagcuuaaguuguuugg

SEQ ID NO: 709157 - RNA, 22 nt, Human
cagaguguuagcgcugguuggg

SEQ ID NO: 709158 - RNA, 22 nt, Human
gcaguccuccugccucagccuc

SEQ ID NO: 709159 - RNA, 22 nt, Human
gcugccugauuuacauagugaa

SEQ ID NO: 709160 - RNA, 22 nt, Human
uggaauaaugaccacagaaaca

SEQ ID NO: 709161 - RNA, 22 nt, Human
auggcucucuagggcccagguu

SEQ ID NO: 709162 - RNA, 22 nt, Human
aaaggucagcugccaucguucu

SEQ ID NO: 709163 - RNA, 21 nt, Human
gccuucacucccagaguuugu

SEQ ID NO: 709164 - RNA, 20 nt, Human
ugcagggccuaaaaagggaa

SEQ ID NO: 709165 - RNA, 22 nt, Human
cacuccaggucccaguuccugg

SEQ ID NO: 709166 - RNA, 22 nt, Human
aucacacuggacauuggauacu

SEQ ID NO: 709167 - RNA, 22 nt, Human
cauggcaggaaaaugaacaggc

SEQ ID NO: 709168 - RNA, 22 nt, Human
aauauagaaucacuuuccuuca

SEQ ID NO: 709169 - RNA, 17 nt, Human
caaaccaguaagacugc

SEQ ID NO: 709170 - RNA, 22 nt, Human
ucagggacugcagagggaagcu

SEQ ID NO: 709171 - RNA, 22 nt, Human
aagccagugugacaggaaacuu

SEQ ID NO: 709172 - RNA, 22 nt, Human
gagcuggggcagcuuaggagug

SEQ ID NO: 709173 - RNA, 22 nt, Human
uccuggugaggcuagaaguguc

SEQ ID NO: 709174 - RNA, 22 nt, Human
ucaauguuuggaaauccuuugu

SEQ ID NO: 709175 - RNA, 22 nt, Human
uaauuguauggagaaggcugca

SEQ ID NO: 709176 - RNA, 22 nt, Human
gcagcagaguagacagagcccu

SEQ ID NO: 709177 - RNA, 22 nt, Human
guaaacaucgacccaacagggg

SEQ ID NO: 709178 - RNA, 22 nt, Human
cucagaaucugccaaguucagg

SEQ ID NO: 709179 - RNA, 22 nt, Human
agcuguggcaaccuugucagac

SEQ ID NO: 709180 - RNA, 22 nt, Human
aacaaacauuaccuggugcugg

SEQ ID NO: 709181 - RNA, 22 nt, Human
cugaacuuauugagugcuugcu

SEQ ID NO: 709182 - RNA, 22 nt, Human
guccuggcuuaguucgcuguaa

SEQ ID NO: 709183 - RNA, 22 nt, Human
cagcugugcuguauuaagcucu

SEQ ID NO: 709184 - RNA, 22 nt, Human
agccagcaggugcagaauucca

SEQ ID NO: 709185 - RNA, 22 nt, Human
gaaauacaguugggaggaggua

SEQ ID NO: 709186 - RNA, 22 nt, Human
cguggucucccacagaaagaag

SEQ ID NO: 709187 - RNA, 22 nt, Human
guuuucaugucuauugggcaua

SEQ ID NO: 709188 - RNA, 22 nt, Human
aggcucagggacucccucccuc

SEQ ID NO: 709189 - RNA, 22 nt, Human
aaacaaugaaauucauucuuca

SEQ ID NO: 709190 - RNA, 22 nt, Human
gguggcagucuuaagagaucuu

SEQ ID NO: 709191 - RNA, 22 nt, Human
uuuacaauugguuuucucuaau

SEQ ID NO: 709192 - RNA, 20 nt, Human
ggggaagaaaaggaugugau

SEQ ID NO: 709193 - RNA, 22 nt, Human
gcugcuaagcguuucuguucca

SEQ ID NO: 709194 - RNA, 22 nt, Human
ugcucugggaccgucauuaaaa

SEQ ID NO: 709195 - RNA, 22 nt, Human
cggggccuagucuaccucggca

SEQ ID NO: 709196 - RNA, 22 nt, Human
ggaaagaacccuggauggcugg

SEQ ID NO: 709197 - RNA, 19 nt, Human
ggcagucacggucaggagc

SEQ ID NO: 709198 - RNA, 22 nt, Human
aauuauggucacuguuccuggg

SEQ ID NO: 709199 - RNA, 22 nt, Human
guaaacauuuucaucugugccc

SEQ ID NO: 709200 - RNA, 17 nt, Human
caacuucacaaacuguc

SEQ ID NO: 709201 - RNA, 22 nt, Human
cugaggugugaaaugguggcaa

SEQ ID NO: 709202 - RNA, 22 nt, Human
auaagacacgccccacucacuc

SEQ ID NO: 709203 - RNA, 22 nt, Human
uugagguauauucacauauauc

SEQ ID NO: 709204 - RNA, 22 nt, Human
auuagcaugccaagcuuuuaga

SEQ ID NO: 709205 - RNA, 22 nt, Human
uguaggaauggauucuagaagg

SEQ ID NO: 709206 - RNA, 19 nt, Human
gcugugccucucuccugcu

SEQ ID NO: 709207 - RNA, 22 nt, Human
uagaaguuaaaggaauacagaa

SEQ ID NO: 709208 - RNA, 22 nt, Human
uaugagcuuccaguguugcaug

SEQ ID NO: 709209 - RNA, 22 nt, Human
ugcugccucaacugucaggaac

SEQ ID NO: 709210 - RNA, 22 nt, Human
guguccagagaacugugggagc

SEQ ID NO: 709211 - RNA, 22 nt, Human
ggcccucugccugugcuggcga

SEQ ID NO: 709212 - RNA, 22 nt, Human
ucucccacagccgugcuucaag

SEQ ID NO: 709213 - RNA, 22 nt, Human
auaggaugauaaaauuagaaac

SEQ ID NO: 709214 - RNA, 23 nt, Human
uacuacagggucuugcuaugaau

SEQ ID NO: 709215 - RNA, 22 nt, Human
cuggcuuuaaugucaucuuucu

SEQ ID NO: 709216 - RNA, 22 nt, Human
augcuuuaaacuauaaauccac

SEQ ID NO: 709217 - RNA, 22 nt, Human
uuucacagcuagugagcuucua

SEQ ID NO: 709218 - RNA, 23 nt, Human
acagaauaccauugacuaggugu

SEQ ID NO: 709219 - RNA, 22 nt, Human
ggcuucuaaggaguauccuuug

SEQ ID NO: 709220 - RNA, 22 nt, Human
uacaucauggcuucaugcugca

SEQ ID NO: 709221 - RNA, 22 nt, Human
augacagcauucaagacauaga

SEQ ID NO: 709222 - RNA, 23 nt, Human
uaaauuucuugauucuuauguga

SEQ ID NO: 709223 - RNA, 22 nt, Human
ccaggcuuuaagagguggaaac

SEQ ID NO: 709224 - RNA, 21 nt, Human
uugcuguuuucccaaugcagu

SEQ ID NO: 709225 - RNA, 22 nt, Human
uucccaaaauauaacaguuaac

SEQ ID NO: 709226 - RNA, 22 nt, Human
ucuagaaaaccaauauuacaug

SEQ ID NO: 709227 - RNA, 22 nt, Human
gcacccucugagcuccgcuccg

SEQ ID NO: 709228 - RNA, 22 nt, Human
auggcuuuugaugcuaagccaa

SEQ ID NO: 709229 - RNA, 22 nt, Human
uauugucuucaacucuacuuuu

SEQ ID NO: 709230 - RNA, 22 nt, Human
acugaccagauaugucauaccu

SEQ ID NO: 709231 - RNA, 22 nt, Human
cagcugccagcuucucuccauc

SEQ ID NO: 709232 - RNA, 22 nt, Human
guguggggagcugcagccacau

SEQ ID NO: 709233 - RNA, 22 nt, Human
agaaaacuugcucgagccuguu

SEQ ID NO: 709234 - RNA, 22 nt, Human
ccagcccugaacccugcugcau

SEQ ID NO: 709235 - RNA, 22 nt, Human
ccaggagcuggcauguggagag

SEQ ID NO: 709236 - RNA, 23 nt, Human
gaggccacauuccccugcuugag

SEQ ID NO: 709237 - RNA, 22 nt, Human
cuuuccuaguaguuacagaaug

SEQ ID NO: 709238 - RNA, 23 nt, Human
ccucccaccuauuucacuuucuu

SEQ ID NO: 709239 - RNA, 22 nt, Human
aauguguucacaggaaauacag

SEQ ID NO: 709240 - RNA, 22 nt, Human
cucacucagacauccagugcag

SEQ ID NO: 709241 - RNA, 22 nt, Human
aauauuucaaaaggaaacacag

SEQ ID NO: 709242 - RNA, 22 nt, Human
gaagcacauggcuauagcuauu

SEQ ID NO: 709243 - RNA, 22 nt, Human
acaggccagagguggggcagcc

SEQ ID NO: 709244 - RNA, 22 nt, Human
cgguccuguacuugaugagaua

SEQ ID NO: 709245 - RNA, 22 nt, Human
aucuggcucaccuggguaaaua

SEQ ID NO: 709246 - RNA, 22 nt, Human
gcacacauucggauucuuaacc

SEQ ID NO: 709247 - RNA, 22 nt, Human
uuacagaacugucuugaaauuu

SEQ ID NO: 709248 - RNA, 22 nt, Human
cucugugucugaguuauggucu

SEQ ID NO: 709249 - RNA, 22 nt, Human
agucacugggcugcuuccuaua

SEQ ID NO: 709250 - RNA, 22 nt, Human
uuucuguagugugguauguagg

SEQ ID NO: 709251 - RNA, 22 nt, Human
ugcauacuuuuaaugacuguuu

SEQ ID NO: 709252 - RNA, 22 nt, Human
ccuggagggcagcccauucugg

SEQ ID NO: 709253 - RNA, 22 nt, Human
uucugaggcacuggcucuccca

SEQ ID NO: 709254 - RNA, 22 nt, Human
ccugaagcucuuaagaccuuua

SEQ ID NO: 709255 - RNA, 22 nt, Human
ugacaaugauuagguagcuucu

SEQ ID NO: 709256 - RNA, 22 nt, Human
auaaauagugaagggagccggu

SEQ ID NO: 709257 - RNA, 19 nt, Human
ucagcaucaauuugguccu

SEQ ID NO: 709258 - RNA, 22 nt, Human
cccaggaauuggaggcugcagu

SEQ ID NO: 709259 - RNA, 22 nt, Human
aaaggcacugaucuuauccagu

SEQ ID NO: 709260 - RNA, 22 nt, Human
ggaggagauuccccucucacuu

SEQ ID NO: 709261 - RNA, 22 nt, Human
ucuacagagagucauagacuca

SEQ ID NO: 709262 - RNA, 22 nt, Human
ugauuacacaccacagugcucc

SEQ ID NO: 709263 - RNA, 22 nt, Human
ucuguaggacagagaaaugggg

SEQ ID NO: 709264 - RNA, 22 nt, Human
uuucaaagggaaguuaugaagu

SEQ ID NO: 709265 - RNA, 22 nt, Human
uaggauuuaggcuuuaacaucu

SEQ ID NO: 709266 - RNA, 22 nt, Human
aagcacaguucuuagaguuaca

SEQ ID NO: 709267 - RNA, 22 nt, Human
aggcuccacggcaggaugcugu

SEQ ID NO: 709268 - RNA, 22 nt, Human
caggauggucagaugcauuguc

SEQ ID NO: 709269 - RNA, 22 nt, Human
uuaaagggccgauuuccaggcc

SEQ ID NO: 709270 - RNA, 22 nt, Human
ucugucaccauucagcuugaau

SEQ ID NO: 709271 - RNA, 22 nt, Human
aaagcagccacagagagagcgu

SEQ ID NO: 709272 - RNA, 22 nt, Human
ggaguguggagaggacaugggu

SEQ ID NO: 709273 - RNA, 22 nt, Human
cacuggucagcaugguagacca

SEQ ID NO: 709274 - RNA, 22 nt, Human
caggaucugccaauauucaacc

SEQ ID NO: 709275 - RNA, 22 nt, Human
ucaagcuggcuguugcuauuuc

SEQ ID NO: 709276 - RNA, 22 nt, Human
cagcacuaauccugcaauuucu

SEQ ID NO: 709277 - RNA, 22 nt, Human
uggagcccacggaugucgcuuu

SEQ ID NO: 709278 - RNA, 22 nt, Human
agggucaguucugugagguguu

SEQ ID NO: 709279 - RNA, 22 nt, Human
agcauuuauuucuuagaaauug

SEQ ID NO: 709280 - RNA, 22 nt, Human
ccggcucggcgaccaggcugaa

SEQ ID NO: 709281 - RNA, 22 nt, Human
uagaaaagaagucuggccggga

SEQ ID NO: 709282 - RNA, 22 nt, Human
uuagugaaaagaaaaugagugg

SEQ ID NO: 709283 - RNA, 22 nt, Human
gcuaggaggaagaaugugaauu

SEQ ID NO: 709284 - RNA, 22 nt, Human
uucuuuucccaauauuuugcug

SEQ ID NO: 709285 - RNA, 20 nt, Human
cugcuccacccggcucucag

SEQ ID NO: 709286 - RNA, 21 nt, Human
ucccagcugggucagugcugc

SEQ ID NO: 709287 - RNA, 22 nt, Human
ggagacagugguagggccuaag

SEQ ID NO: 709288 - RNA, 22 nt, Human
caugcagugaaauugauaucca

SEQ ID NO: 709289 - RNA, 21 nt, Human
uuacuuuagaaauugccuuuu

SEQ ID NO: 709290 - RNA, 22 nt, Human
gcccagugcccuagaaugcacu

SEQ ID NO: 709291 - RNA, 22 nt, Human
aagaaauaagacuucucugucc

SEQ ID NO: 709292 - RNA, 22 nt, Human
uagauguguugccuggaguugu

SEQ ID NO: 709293 - RNA, 22 nt, Human
acuagccaaguuuuacgacuaa

SEQ ID NO: 709294 - RNA, 19 nt, Human
acagggcucuggacgccau

SEQ ID NO: 709295 - RNA, 22 nt, Human
cugagaaaugcauuuuuccagc

SEQ ID NO: 709296 - RNA, 22 nt, Human
cacugccugcuggcugucacuu

SEQ ID NO: 709297 - RNA, 22 nt, Human
aucugccugcaguggagguggg

SEQ ID NO: 709298 - RNA, 22 nt, Human
cuggcugugcagucuuccagaa

SEQ ID NO: 709299 - RNA, 22 nt, Human
uugggucuacguagaaagaaca

SEQ ID NO: 709300 - RNA, 22 nt, Human
gguauuuauaguggugcuuagu

SEQ ID NO: 709301 - RNA, 22 nt, Human
ugucccauggauaccaggcuau

SEQ ID NO: 709302 - RNA, 22 nt, Human
ucucucuugaaguauuagcuag

SEQ ID NO: 709303 - RNA, 22 nt, Human
aaugucugaggcucaucugagg

SEQ ID NO: 709304 - RNA, 18 nt, Human
uccuaacuuagauacucc

SEQ ID NO: 709305 - RNA, 22 nt, Human
gagaggaaagaaccaaugaccc

SEQ ID NO: 709306 - RNA, 22 nt, Human
cuaauacucauuucuguaacuc

SEQ ID NO: 709307 - RNA, 22 nt, Human
ggugaggggcgccucugcccgg

SEQ ID NO: 709308 - RNA, 22 nt, Human
ccuucuucuguguggcccaaga

SEQ ID NO: 709309 - RNA, 22 nt, Human
gccugaggaauugaggggguaa

SEQ ID NO: 709310 - RNA, 22 nt, Human
aaucuucuacuugacaguucuc

SEQ ID NO: 709311 - RNA, 22 nt, Human
agucaguguucuccggagaggc

SEQ ID NO: 709312 - RNA, 22 nt, Human
cugggccuggacgggcagaucu

SEQ ID NO: 709313 - RNA, 22 nt, Human
ggaggguuagcaaaggcacaga

SEQ ID NO: 709314 - RNA, 22 nt, Human
ggcagaguugguggagucaguu

SEQ ID NO: 709315 - RNA, 22 nt, Human
aacacuguacuggaagauggac

SEQ ID NO: 709316 - RNA, 22 nt, Human
uaguacagaaaaccucaggguc

SEQ ID NO: 709317 - RNA, 21 nt, Human
cuguggaagggaacuagaggg

SEQ ID NO: 709318 - RNA, 23 nt, Human
uggucucagccugugagagcuga

SEQ ID NO: 709319 - RNA, 22 nt, Human
aucuuugacugccauucuugac

SEQ ID NO: 709320 - RNA, 22 nt, Human
cagccucuugcacuuugaaggc

SEQ ID NO: 709321 - RNA, 22 nt, Human
aguggcugcuaugaucaggaca

SEQ ID NO: 709322 - RNA, 22 nt, Human
aaggggaguuagugauaaaacc

SEQ ID NO: 709323 - RNA, 22 nt, Human
guggaaguagauuugagaaggu

SEQ ID NO: 709324 - RNA, 22 nt, Human
uuuacagcauugcugaaaguuc

SEQ ID NO: 709325 - RNA, 22 nt, Human
ucucagagaaaugugucaccau

SEQ ID NO: 709326 - RNA, 20 nt, Human
uagggcucauuaugaucucc

SEQ ID NO: 709327 - RNA, 22 nt, Human
uggcccuuugguuuaugacuga

SEQ ID NO: 709328 - RNA, 22 nt, Human
ugagguggugcuaaucucugcu

SEQ ID NO: 709329 - RNA, 23 nt, Human
uggcacagcaggugugcuuuguu

SEQ ID NO: 709330 - RNA, 22 nt, Human
aaaugaugauuaaaaugaggua

SEQ ID NO: 709331 - RNA, 18 nt, Human
ugaacagaugaguugaag

SEQ ID NO: 709332 - RNA, 22 nt, Human
ccucagggacuccaugcugcag

SEQ ID NO: 709333 - RNA, 23 nt, Human
ugcaacaaugaggaaagcuacug

SEQ ID NO: 709334 - RNA, 22 nt, Human
agucacaucgauuauaaaauuu

SEQ ID NO: 709335 - RNA, 22 nt, Human
uuguaugaucccauuuagugaa

SEQ ID NO: 709336 - RNA, 22 nt, Human
uuauaacaucaaucagaguuaa

SEQ ID NO: 709337 - RNA, 22 nt, Human
uuauuauuggugaguuaaggaa

SEQ ID NO: 709338 - RNA, 18 nt, Human
auuuaugcuaaugggaua

SEQ ID NO: 709339 - RNA, 22 nt, Human
uacaauguuaaggaaagagaga

SEQ ID NO: 709340 - RNA, 22 nt, Human
gagccauacaaccuauaaagug

SEQ ID NO: 709341 - RNA, 22 nt, Human
uccaggcagggcagccaucaag

SEQ ID NO: 709342 - RNA, 22 nt, Human
acagcagacagucggcuuccug

SEQ ID NO: 709343 - RNA, 22 nt, Human
aagcaaggcccagagcaucagc

SEQ ID NO: 709344 - RNA, 19 nt, Human
gugauuucuuuccacaagc

SEQ ID NO: 709345 - RNA, 22 nt, Human
uagauucuuaguuucauagaau

SEQ ID NO: 709346 - RNA, 21 nt, Human
uuucucaccaugguauggaaa

SEQ ID NO: 709347 - RNA, 22 nt, Human
aggccaagauuuuggaucagcu

SEQ ID NO: 709348 - RNA, 22 nt, Human
uucaagcaccaaauuaguaggc

SEQ ID NO: 709349 - RNA, 22 nt, Human
acacaggagaaaagaucuccca

SEQ ID NO: 709350 - RNA, 22 nt, Human
ggagcaaaugccaagugggagg

SEQ ID NO: 709351 - RNA, 20 nt, Human
ucaggcaguggggaaaggca

SEQ ID NO: 709352 - RNA, 23 nt, Human
ucagugugcaagaauggagaagc

SEQ ID NO: 709353 - RNA, 22 nt, Human
guuuagaaaauagugaagcaag

SEQ ID NO: 709354 - RNA, 22 nt, Human
ccaggacacugcuucacagcag

SEQ ID NO: 709355 - RNA, 22 nt, Human
ucuuuaagggauguucugcuuu

SEQ ID NO: 709356 - RNA, 22 nt, Human
uuugucuaauugcaaggcaagu

SEQ ID NO: 709357 - RNA, 22 nt, Human
ggcuuuaaggaguaaaaaugcc

SEQ ID NO: 709358 - RNA, 22 nt, Human
gggccucugugcagaggggccu

SEQ ID NO: 709359 - RNA, 22 nt, Human
ccccagcagacucagggcaggu

SEQ ID NO: 709360 - RNA, 22 nt, Human
ucugagggugggagaaggagcu

SEQ ID NO: 709361 - RNA, 22 nt, Human
ucacagucggugacuucuugcu

SEQ ID NO: 709362 - RNA, 22 nt, Human
cugggggugagcagcagcgacg

SEQ ID NO: 709363 - RNA, 22 nt, Human
uugcagagccaugaggcuggcu

SEQ ID NO: 709364 - RNA, 22 nt, Human
uguauuugaaacagugcauggg

SEQ ID NO: 709365 - RNA, 21 nt, Human
ugacagcacaugcaaucggag

SEQ ID NO: 709366 - RNA, 22 nt, Human
acuuccugcaaucguccacucc

SEQ ID NO: 709367 - RNA, 22 nt, Human
gcagccagccccucugaccucu

SEQ ID NO: 709368 - RNA, 22 nt, Human
aagcuauacaaugcacaaauga

SEQ ID NO: 709369 - RNA, 22 nt, Human
aaaauuauucauggcuuuugga

SEQ ID NO: 709370 - RNA, 22 nt, Human
aagugagugaaaaugcagaaua

SEQ ID NO: 709371 - RNA, 22 nt, Human
uggcugccuagugucugagcag

SEQ ID NO: 709372 - RNA, 22 nt, Human
uuucaguguaagguuuccagga

SEQ ID NO: 709373 - RNA, 22 nt, Human
cuauuacauuucuggacauuca

SEQ ID NO: 709374 - RNA, 22 nt, Human
aaugagaauguaagugaagaga

SEQ ID NO: 709375 - RNA, 22 nt, Human
uaauuucacaguucaacgcaca

SEQ ID NO: 709376 - RNA, 22 nt, Human
cagaggccucacuuccagccag

SEQ ID NO: 709377 - RNA, 22 nt, Human
guaaaucccauccuuucucugg

SEQ ID NO: 709378 - RNA, 22 nt, Human
aggaagagcuggaccagaggac

SEQ ID NO: 709379 - RNA, 22 nt, Human
ucagcaguccuccaggaucaag

SEQ ID NO: 709380 - RNA, 22 nt, Human
uaaagguagugugacauauugu

SEQ ID NO: 709381 - RNA, 22 nt, Human
ugaacaaacugcauucuucacu

SEQ ID NO: 709382 - RNA, 22 nt, Human
auucuacacaacaugaugaugg

SEQ ID NO: 709383 - RNA, 22 nt, Human
ggucccaguccucucccugcua

SEQ ID NO: 709384 - RNA, 22 nt, Human
gagcaggcauucuaguggcuga

SEQ ID NO: 709385 - RNA, 22 nt, Human
ugccugcuagauauccagguga

SEQ ID NO: 709386 - RNA, 22 nt, Human
cccugcccuggagacacuuaaa

SEQ ID NO: 709387 - RNA, 22 nt, Human
uggagccauaacccuuucguac

SEQ ID NO: 709388 - RNA, 23 nt, Human
aaaugacauaugguuucugaagg

SEQ ID NO: 709389 - RNA, 22 nt, Human
ucagagguuacccaugggacag

SEQ ID NO: 709390 - RNA, 22 nt, Human
aaaggccauuacuugcuuuuag

SEQ ID NO: 709391 - RNA, 22 nt, Human
uccugagaaggcacagcuugca

SEQ ID NO: 709392 - RNA, 22 nt, Human
uuagaggggcugcugaauggga

SEQ ID NO: 709393 - RNA, 22 nt, Human
gugcugagugcagagugcagag

SEQ ID NO: 709394 - RNA, 19 nt, Human
uucuccagccugaccugag

SEQ ID NO: 709395 - RNA, 20 nt, Human
uguuucugacgguaggagag

SEQ ID NO: 709396 - RNA, 22 nt, Human
ccagcucuuggugcacuuacau

SEQ ID NO: 709397 - RNA, 22 nt, Human
cuggcuccaaggaagagguuuu

SEQ ID NO: 709398 - RNA, 22 nt, Human
ccccagccuuccaugggaauug

SEQ ID NO: 709399 - RNA, 20 nt, Human
cugcaguccccucugaauca

SEQ ID NO: 709400 - RNA, 22 nt, Human
auggaggaugugcagcaugggc

SEQ ID NO: 709401 - RNA, 22 nt, Human
ugucacaaaaaucaguaauugc

SEQ ID NO: 709402 - RNA, 20 nt, Human
ccugggcuccaggagccccg

SEQ ID NO: 709403 - RNA, 22 nt, Human
aacacugaaaugucuuaagauu

SEQ ID NO: 709404 - RNA, 22 nt, Human
cuaaacaagggauuauaauuga

SEQ ID NO: 709405 - RNA, 22 nt, Human
gacuuugagggauacaaacauu

SEQ ID NO: 709406 - RNA, 22 nt, Human
uggagcuggaauuucugggccu

SEQ ID NO: 709407 - RNA, 22 nt, Human
caguccuuauuccuauauuccu

SEQ ID NO: 709408 - RNA, 22 nt, Human
agaggaucuaagugaguccuca

SEQ ID NO: 709409 - RNA, 22 nt, Human
agcaggcacgcucccugcgcga

SEQ ID NO: 709410 - RNA, 22 nt, Human
agauaugucccugucuaauauu

SEQ ID NO: 709411 - RNA, 20 nt, Human
ucagugauuuugaagaggaa

SEQ ID NO: 709412 - RNA, 22 nt, Human
ggaaaagacagaauucuagaau

SEQ ID NO: 709413 - RNA, 22 nt, Human
ugccauauugcaaagugucugc

SEQ ID NO: 709414 - RNA, 22 nt, Human
ucuguuuugcauaauguucuuu

SEQ ID NO: 709415 - RNA, 22 nt, Human
gaaccugagcgggcagcaagcg

SEQ ID NO: 709416 - RNA, 22 nt, Human
uguauguauacacugaucauca

SEQ ID NO: 709417 - RNA, 22 nt, Human
cucacagaugcugugggucagg

SEQ ID NO: 709418 - RNA, 21 nt, Human
ugcagauaauugaaagcugac

SEQ ID NO: 709419 - RNA, 22 nt, Human
aaaucugggagcagcucggcca

SEQ ID NO: 709420 - RNA, 22 nt, Human
ucuaggagaaccaucagggagg

SEQ ID NO: 709421 - RNA, 22 nt, Human
uggaaugaauuuggcuuccucc

SEQ ID NO: 709422 - RNA, 22 nt, Human
cugccugguacuuuaggcacuu

SEQ ID NO: 709423 - RNA, 22 nt, Human
aaugaacaaaauaugcuuugca

SEQ ID NO: 709424 - RNA, 22 nt, Human
uuuacaacauaggccccaagaa

SEQ ID NO: 709425 - RNA, 22 nt, Human
acccuuccaaaugagcuuauua

SEQ ID NO: 709426 - RNA, 22 nt, Human
auugucuuuaaaaauauacaac

SEQ ID NO: 709427 - RNA, 22 nt, Human
ggcugagguguggggaacuaua

SEQ ID NO: 709428 - RNA, 22 nt, Human
gcagggauugugcagggggcua

SEQ ID NO: 709429 - RNA, 22 nt, Human
gcugucccuugucccaccuugc

SEQ ID NO: 709430 - RNA, 20 nt, Human
aguguauuuggguagagugu

SEQ ID NO: 709431 - RNA, 22 nt, Human
caggcuggacauuagauacaua

SEQ ID NO: 709432 - RNA, 20 nt, Human
aucaaaauccuauugagguu

SEQ ID NO: 709433 - RNA, 22 nt, Human
uuuauauuguaaaaaugguucu

SEQ ID NO: 709434 - RNA, 20 nt, Human
gacuucaauuucuaucuuuu

SEQ ID NO: 709435 - RNA, 22 nt, Human
guggggucucucuguaccuccc

SEQ ID NO: 709436 - RNA, 22 nt, Human
agcccagcuccuccacagaaua

SEQ ID NO: 709437 - RNA, 21 nt, Human
gggcuggaggaugggaagccc

SEQ ID NO: 709438 - RNA, 22 nt, Human
augcuuuacaguuuuccaaaca

SEQ ID NO: 709439 - RNA, 22 nt, Human
caaguccaggugggcaaauaaa

SEQ ID NO: 709440 - RNA, 22 nt, Human
accuuuaugauucacaauguau

SEQ ID NO: 709441 - RNA, 22 nt, Human
uugcuuauuugauuaaaugucu

SEQ ID NO: 709442 - RNA, 22 nt, Human
caucaaauaaagaaauuccuug

SEQ ID NO: 709443 - RNA, 22 nt, Human
ucugauguugaugcuucugccu

SEQ ID NO: 709444 - RNA, 22 nt, Human
uccuugaaugaauguucucucc

SEQ ID NO: 709445 - RNA, 22 nt, Human
ucaggcauggcucuuccucagg

SEQ ID NO: 709446 - RNA, 22 nt, Human
ucauggcaguuuaauaaguggu

SEQ ID NO: 709447 - RNA, 20 nt, Human
cguaaggcaagugcugcauc

SEQ ID NO: 709448 - RNA, 22 nt, Human
agaaugauagcuaguauuuacu

SEQ ID NO: 709449 - RNA, 22 nt, Human
uuuugaaagaguccugcuacag

SEQ ID NO: 709450 - RNA, 22 nt, Human
uacacagaaccugguguacagu

SEQ ID NO: 709451 - RNA, 22 nt, Human
ucauaguucuguuuugaaggau

SEQ ID NO: 709452 - RNA, 22 nt, Human
uugcuuuacggcaaggccccag

SEQ ID NO: 709453 - RNA, 22 nt, Human
gguaaauuuuaugugaugaaac

SEQ ID NO: 709454 - RNA, 22 nt, Human
uacacugaagugucuugguaua

SEQ ID NO: 709455 - RNA, 22 nt, Human
uucuaaagacucauggaagugg

SEQ ID NO: 709456 - RNA, 22 nt, Human
agggaagcuuguuacugagaag

SEQ ID NO: 709457 - RNA, 22 nt, Human
uguuaugaacuucuagaaaaca

SEQ ID NO: 709458 - RNA, 22 nt, Human
uuuacacauuauuuucagugug

SEQ ID NO: 709459 - RNA, 22 nt, Human
cauauuuauucuucugccagug

SEQ ID NO: 709460 - RNA, 20 nt, Human
uggaagacacugaagggcca

SEQ ID NO: 709461 - RNA, 22 nt, Human
uguaaacagccccauggagagc

SEQ ID NO: 709462 - RNA, 22 nt, Human
ccugcagacacuuguccagcaa

SEQ ID NO: 709463 - RNA, 22 nt, Human
agagggggaaaauagagguguu

SEQ ID NO: 709464 - RNA, 22 nt, Human
cauuuagagucuugcaauuuua

SEQ ID NO: 709465 - RNA, 22 nt, Human
ucagggaccccucugaguggag

SEQ ID NO: 709466 - RNA, 23 nt, Human
ggagccuccggugugugagaggc

SEQ ID NO: 709467 - RNA, 22 nt, Human
aguggcuucauuucugccagaa

SEQ ID NO: 709468 - RNA, 22 nt, Human
aaggcaguagguguuucaaacu

SEQ ID NO: 709469 - RNA, 22 nt, Human
cauaacauuaagccucuauuuc

SEQ ID NO: 709470 - RNA, 22 nt, Human
cagccccuuguccgguagccac

SEQ ID NO: 709471 - RNA, 22 nt, Human
agugucuuucucucuccaagug

SEQ ID NO: 709472 - RNA, 22 nt, Human
auucacacuuuacuucuuucca

SEQ ID NO: 709473 - RNA, 22 nt, Human
aaaucagaaaauauggagagga

SEQ ID NO: 709474 - RNA, 22 nt, Human
auuuuacuaaguggauaucugu

SEQ ID NO: 709475 - RNA, 22 nt, Human
cuuugugucuguuaauaauuau

SEQ ID NO: 709476 - RNA, 22 nt, Human
auggcucuagaauaccccucag

SEQ ID NO: 709477 - RNA, 22 nt, Human
uccugcuggacucugaguacaa

SEQ ID NO: 709478 - RNA, 22 nt, Human
ucagccagagggggcaaaggaa

SEQ ID NO: 709479 - RNA, 22 nt, Human
ccuggcacaucuaacucacucu

SEQ ID NO: 709480 - RNA, 22 nt, Human
uacaguuucucauuaugcucuc

SEQ ID NO: 709481 - RNA, 22 nt, Human
ggcacagggugauguugcaguu

SEQ ID NO: 709482 - RNA, 22 nt, Human
cucagggaggccucugcugguu

SEQ ID NO: 709483 - RNA, 19 nt, Human
agucagguggcuggugcca

SEQ ID NO: 709484 - RNA, 22 nt, Human
agugucugaaggauuuggcuuc

SEQ ID NO: 709485 - RNA, 22 nt, Human
agaagccaauccuugucucucu

SEQ ID NO: 709486 - RNA, 22 nt, Human
ccucccuuuuggugucugcaua

SEQ ID NO: 709487 - RNA, 22 nt, Human
cacacugucuuucagaaugguu

SEQ ID NO: 709488 - RNA, 22 nt, Human
uuucuugauuagcuguggcuca

SEQ ID NO: 709489 - RNA, 22 nt, Human
ucaaaacaaucauuggaugugc

SEQ ID NO: 709490 - RNA, 22 nt, Human
gugcaaaaguacuugcggauuu

SEQ ID NO: 709491 - RNA, 22 nt, Human
gcuacaggagauaaaggccucu

SEQ ID NO: 709492 - RNA, 22 nt, Human
agagguagagguugcagugagc

SEQ ID NO: 709493 - RNA, 22 nt, Human
auuguacagacaugggaaacaa

SEQ ID NO: 709494 - RNA, 22 nt, Human
caugaacaauuugcucacugau

SEQ ID NO: 709495 - RNA, 22 nt, Human
aauagauggguuaaacagcaaa

SEQ ID NO: 709496 - RNA, 22 nt, Human
ucauucugcaucacucuugcuc

SEQ ID NO: 709497 - RNA, 22 nt, Human
uagcaucucaaccuccugaaag

SEQ ID NO: 709498 - RNA, 22 nt, Human
caguuuuaucaucugugaaaug

SEQ ID NO: 709499 - RNA, 22 nt, Human
ccucaggaaccacauugcugcu

SEQ ID NO: 709500 - RNA, 22 nt, Human
gaggcagcaugguaccuuggag

SEQ ID NO: 709501 - RNA, 22 nt, Human
uccugcaggcuugaguccucag

SEQ ID NO: 709502 - RNA, 22 nt, Human
uguuacuuaucucacgugaugc

SEQ ID NO: 709503 - RNA, 22 nt, Human
cugugccaccugagggacucua

SEQ ID NO: 709504 - RNA, 22 nt, Human
agcuggugauguggucccucac

SEQ ID NO: 709505 - RNA, 22 nt, Human
acugggguuuaggccugggcaa

SEQ ID NO: 709506 - RNA, 22 nt, Human
ucucugugagaugccuuccuga

SEQ ID NO: 709507 - RNA, 22 nt, Human
ccacaucucgguccccucuuug

SEQ ID NO: 709508 - RNA, 22 nt, Human
cacaguggauugggugaugccc

SEQ ID NO: 709509 - RNA, 22 nt, Human
gcaagagacuuuuaugucugcc

SEQ ID NO: 709510 - RNA, 22 nt, Human
gccugagggcuccuagcaggcu

SEQ ID NO: 709511 - RNA, 22 nt, Human
uauuuugagguauuuuugagcu

SEQ ID NO: 709512 - RNA, 22 nt, Human
gagucagguuucugccuauaga

SEQ ID NO: 709513 - RNA, 22 nt, Human
gagauccuguaggcagcuaaga

SEQ ID NO: 709514 - RNA, 22 nt, Human
gagguccaggguggggccugag

SEQ ID NO: 709515 - RNA, 16 nt, Human
uggcacagagcagaua

SEQ ID NO: 709516 - RNA, 22 nt, Human
ucccacugcuuugcucugcuca

SEQ ID NO: 709517 - RNA, 22 nt, Human
auacagguggacuucaguuagu

SEQ ID NO: 709518 - RNA, 22 nt, Human
uuuagcaauuauuaaggguuga

SEQ ID NO: 709519 - RNA, 22 nt, Human
cuuugggauuucaugagagcua

SEQ ID NO: 709520 - RNA, 22 nt, Human
uuucagacucagaacuuagcaa

SEQ ID NO: 709521 - RNA, 22 nt, Human
uauacagaacugcacgugcacg

SEQ ID NO: 709522 - RNA, 22 nt, Human
uacaguguuucccccaggauag

SEQ ID NO: 709523 - RNA, 22 nt, Human
ucacagagagguuaagcaguug

SEQ ID NO: 709524 - RNA, 22 nt, Human
gacaugaauguuauacuuuauu

SEQ ID NO: 709525 - RNA, 21 nt, Human
uucauugaacuauuuguggag

SEQ ID NO: 709526 - RNA, 22 nt, Human
guuauuaaaguauuugauguua

SEQ ID NO: 709527 - RNA, 18 nt, Human
aaugcacacauuuacucc

SEQ ID NO: 709528 - RNA, 22 nt, Human
cugaagcaaaugaaacagcucu

SEQ ID NO: 709529 - RNA, 22 nt, Human
uuguaugcugaucaaaagcuuc

SEQ ID NO: 709530 - RNA, 22 nt, Human
ucaggcagaggauggggagcgu

SEQ ID NO: 709531 - RNA, 22 nt, Human
aaagccaguuucuggaaguacc

SEQ ID NO: 709532 - RNA, 22 nt, Human
cucugggaccacgugacucugc

SEQ ID NO: 709533 - RNA, 22 nt, Human
acaaaugcaaguuuuaugucaa

SEQ ID NO: 709534 - RNA, 22 nt, Human
ggaagaggcucucauugagggc

SEQ ID NO: 709535 - RNA, 22 nt, Human
aaggaagaggcagguuuugcug

SEQ ID NO: 709536 - RNA, 22 nt, Human
ccuccuuccugggacagagcug

SEQ ID NO: 709537 - RNA, 22 nt, Human
agcuugggugugccugcgagcu

SEQ ID NO: 709538 - RNA, 22 nt, Human
uggcccaaagcagcccagcagg

SEQ ID NO: 709539 - RNA, 22 nt, Human
ucagguccccaacucuucucac

SEQ ID NO: 709540 - RNA, 22 nt, Human
ucuacauuuucuuuauguacau

SEQ ID NO: 709541 - RNA, 22 nt, Human
gccagguggcugagugacugag

SEQ ID NO: 709542 - RNA, 22 nt, Human
acccaggaggcagagguugcag

SEQ ID NO: 709543 - RNA, 22 nt, Human
augcacuaugaugagcuagucu

SEQ ID NO: 709544 - RNA, 22 nt, Human
ccuaugccugucacucugcgcu

SEQ ID NO: 709545 - RNA, 22 nt, Human
caguucuuauuuggccaguguc

SEQ ID NO: 709546 - RNA, 22 nt, Human
acuguucauuuggauuucucug

SEQ ID NO: 709547 - RNA, 19 nt, Human
aggguggcaaaggagggug

SEQ ID NO: 709548 - RNA, 22 nt, Human
aaacacugguaugauguauagu

SEQ ID NO: 709549 - RNA, 22 nt, Human
ccaaagagcuagaauuauaggc

SEQ ID NO: 709550 - RNA, 22 nt, Human
uucugucuucucgguuguuuac

SEQ ID NO: 709551 - RNA, 22 nt, Human
uuuuccuguuaaaucugggcac

SEQ ID NO: 709552 - RNA, 22 nt, Human
ggaaggagccauaucauaucca

SEQ ID NO: 709553 - RNA, 22 nt, Human
gucagcuucccuuugguuuauu

SEQ ID NO: 709554 - RNA, 22 nt, Human
ggcauccaguucugaucaacaa

SEQ ID NO: 709555 - RNA, 22 nt, Human
guccagagaggcaggaggcuac

SEQ ID NO: 709556 - RNA, 22 nt, Human
aauggcuuacccuggauugugu

SEQ ID NO: 709557 - RNA, 22 nt, Human
gggcgcagccaauccuggcccu

SEQ ID NO: 709558 - RNA, 22 nt, Human
ugcuucuuuaaaugauagucaa

SEQ ID NO: 709559 - RNA, 22 nt, Human
gcuguaugaguucauguguaga

SEQ ID NO: 709560 - RNA, 22 nt, Human
uacauguucaaauuugucuuuc

SEQ ID NO: 709561 - RNA, 22 nt, Human
aaucuggcucagaagaagauga

SEQ ID NO: 709562 - RNA, 21 nt, Human
acccuuuguuuaugaaucagc

SEQ ID NO: 709563 - RNA, 22 nt, Human
ugauuuccaauaaggagaaugu

SEQ ID NO: 709564 - RNA, 22 nt, Human
cagaggcagaauggagauuugg

SEQ ID NO: 709565 - RNA, 22 nt, Human
uuggcaggaauauugcagaggu

SEQ ID NO: 709566 - RNA, 22 nt, Human
ugucuauguauacauguguaua

SEQ ID NO: 709567 - RNA, 22 nt, Human
ucuucagagacucugagccccu

SEQ ID NO: 709568 - RNA, 22 nt, Human
uccuggccuagcucacccugga

SEQ ID NO: 709569 - RNA, 22 nt, Human
acacauaagccuaaucaucucc

SEQ ID NO: 709570 - RNA, 22 nt, Human
cugcugccuuccaaaggccagg

SEQ ID NO: 709571 - RNA, 22 nt, Human
uaauugcuaaaugaaggagaag

SEQ ID NO: 709572 - RNA, 22 nt, Human
gucccauaaguagugcaacuug

SEQ ID NO: 709573 - RNA, 19 nt, Human
acccucucuguagaaagau

SEQ ID NO: 709574 - RNA, 22 nt, Human
ucugccuuucacacagacggcc

SEQ ID NO: 709575 - RNA, 22 nt, Human
uucuguuuccugccuucccauu

SEQ ID NO: 709576 - RNA, 22 nt, Human
gcacacagcuagauuaccauuc

SEQ ID NO: 709577 - RNA, 23 nt, Human
agagaaucauggaaacucuuucu

SEQ ID NO: 709578 - RNA, 22 nt, Human
ugugauuacugaauagaaaaua

SEQ ID NO: 709579 - RNA, 22 nt, Human
acacauauguaugcaucaugug

SEQ ID NO: 709580 - RNA, 22 nt, Human
ggcaggcuccagagcccucucc

SEQ ID NO: 709581 - RNA, 21 nt, Human
ucacaggcucagggagagagu

SEQ ID NO: 709582 - RNA, 22 nt, Human
auaaccuggauauaaacagaug

SEQ ID NO: 709583 - RNA, 22 nt, Human
ugaaauguugccaugaggucuc

SEQ ID NO: 709584 - RNA, 19 nt, Human
gcaggccaggaggcggagg

SEQ ID NO: 709585 - RNA, 22 nt, Human
uuauugggucccaacaaguugc

SEQ ID NO: 709586 - RNA, 22 nt, Human
cuggcuguaagcguguuuccua

SEQ ID NO: 709587 - RNA, 22 nt, Human
aaggccacuuuaccuuaaaucc

SEQ ID NO: 709588 - RNA, 22 nt, Human
ucccaggguuacagccagggca

SEQ ID NO: 709589 - RNA, 23 nt, Human
uuucauaugguguggaugaagaa

SEQ ID NO: 709590 - RNA, 22 nt, Human
cacaaaugguuguagacauuaa

SEQ ID NO: 709591 - RNA, 22 nt, Human
gucuaaacuuuacagagucaag

SEQ ID NO: 709592 - RNA, 22 nt, Human
aagugccugggcaacauagcaa

SEQ ID NO: 709593 - RNA, 22 nt, Human
gcacugcagguggguggagagg

SEQ ID NO: 709594 - RNA, 22 nt, Human
gaaggcacccuccaucacucac

SEQ ID NO: 709595 - RNA, 22 nt, Human
agaacagucguggugagagaaa

SEQ ID NO: 709596 - RNA, 22 nt, Human
aggagcagaacugauucugacu

SEQ ID NO: 709597 - RNA, 22 nt, Human
uagcacauuguugaccagaagg

SEQ ID NO: 709598 - RNA, 22 nt, Human
uugcaaauuaaagaggauagca

SEQ ID NO: 709599 - RNA, 22 nt, Human
agucuucuugaucuuuucagug

SEQ ID NO: 709600 - RNA, 22 nt, Human
acucucccugagagggaggcau

SEQ ID NO: 709601 - RNA, 22 nt, Human
ccacugucugcaggccucagca

SEQ ID NO: 709602 - RNA, 22 nt, Human
cagcaaaguaagcugacaugua

SEQ ID NO: 709603 - RNA, 22 nt, Human
ucacaugucacaaaacacugcc

SEQ ID NO: 709604 - RNA, 22 nt, Human
aaauguauccuacuuccugagu

SEQ ID NO: 709605 - RNA, 22 nt, Human
caggccuggagugcaauggcac

SEQ ID NO: 709606 - RNA, 22 nt, Human
ggccgggcaggucucagccagc

SEQ ID NO: 709607 - RNA, 22 nt, Human
uagcaaggugaaguauggguga

SEQ ID NO: 709608 - RNA, 22 nt, Human
gcuguccaugucuggccucagu

SEQ ID NO: 709609 - RNA, 22 nt, Human
agagacuguacguggcaaguau

SEQ ID NO: 709610 - RNA, 22 nt, Human
ccucucccacguggcagaggcu

SEQ ID NO: 709611 - RNA, 22 nt, Human
ucagccagaaagugauuuucag

SEQ ID NO: 709612 - RNA, 22 nt, Human
ucauggcuugcagauggccacc

SEQ ID NO: 709613 - RNA, 22 nt, Human
auguggcuguggacaccuuuca

SEQ ID NO: 709614 - RNA, 22 nt, Human
ggcaggagggcggacaaugacc

SEQ ID NO: 709615 - RNA, 22 nt, Human
ccaaaugcuccacugacuuugg

SEQ ID NO: 709616 - RNA, 22 nt, Human
gcugcccugucugcagcaggac

SEQ ID NO: 709617 - RNA, 22 nt, Human
auuacaaaagaagggagaaggu

SEQ ID NO: 709618 - RNA, 22 nt, Human
uaaauagaaucuaaacugcuca

SEQ ID NO: 709619 - RNA, 18 nt, Human
ugcuggguaacuguaugg

SEQ ID NO: 709620 - RNA, 22 nt, Human
agcagccccucggcgggugcgc

SEQ ID NO: 709621 - RNA, 22 nt, Human
guggccuccuccguccgccucu

SEQ ID NO: 709622 - RNA, 22 nt, Human
ucccucaggugguucuuguuuc

SEQ ID NO: 709623 - RNA, 22 nt, Human
gcuuccagacgaucauguaaga

SEQ ID NO: 709624 - RNA, 20 nt, Human
aucagaagugauauuaacca

SEQ ID NO: 709625 - RNA, 22 nt, Human
aaggcccucaugcgucagagcc

SEQ ID NO: 709626 - RNA, 22 nt, Human
agcagccaggaaucugcagagc

SEQ ID NO: 709627 - RNA, 22 nt, Human
gucaggaucucccaguacauau

SEQ ID NO: 709628 - RNA, 22 nt, Human
augccacauaaccaguucacuu

SEQ ID NO: 709629 - RNA, 22 nt, Human
ugagcaccuaccuuguccagug

SEQ ID NO: 709630 - RNA, 22 nt, Human
augcauaugcauggacacucag

SEQ ID NO: 709631 - RNA, 22 nt, Human
gggcucucaugaguguguggua

SEQ ID NO: 709632 - RNA, 22 nt, Human
cagcaucucguggcuggauaga

SEQ ID NO: 709633 - RNA, 22 nt, Human
cugggacuuuguaggccaguug

SEQ ID NO: 709634 - RNA, 22 nt, Human
cugagagugcucuuugauguca

SEQ ID NO: 709635 - RNA, 22 nt, Human
cacagaguggaggcuuggccug

SEQ ID NO: 709636 - RNA, 22 nt, Human
gagcaacacgcaguaguauacg

SEQ ID NO: 709637 - RNA, 22 nt, Human
cuuauacacccucuucccaggc

SEQ ID NO: 709638 - RNA, 22 nt, Human
agcaaauaauugucuuugaggg

SEQ ID NO: 709639 - RNA, 16 nt, Human
gccuggaguggcaggg

SEQ ID NO: 709640 - RNA, 22 nt, Human
uucuggcugaaaguuuauuuga

SEQ ID NO: 709641 - RNA, 22 nt, Human
cacagggaguuacagaagcacu

SEQ ID NO: 709642 - RNA, 22 nt, Human
ugaauauggcaacucuuguaac

SEQ ID NO: 709643 - RNA, 22 nt, Human
auucacaguucauuagcuguaa

SEQ ID NO: 709644 - RNA, 22 nt, Human
uccuuccaugguggggcugcuu

SEQ ID NO: 709645 - RNA, 22 nt, Human
ccugggcaauauagugaggccc

SEQ ID NO: 709646 - RNA, 22 nt, Human
auggcugccuagaggugagaug

SEQ ID NO: 709647 - RNA, 23 nt, Human
aaugacagugugugauugaagaa

SEQ ID NO: 709648 - RNA, 22 nt, Human
aagacaaugcauuacuaagaag

SEQ ID NO: 709649 - RNA, 22 nt, Human
agaauaguggcaaugacugcac

SEQ ID NO: 709650 - RNA, 22 nt, Human
uuuguuuacaaaaauaagcagu

SEQ ID NO: 709651 - RNA, 22 nt, Human
aggucauuccagccauuccccu

SEQ ID NO: 709652 - RNA, 22 nt, Human
gcaaacaagcugccugaagauu

SEQ ID NO: 709653 - RNA, 23 nt, Human
cccagcuggaaguuagaggacca

SEQ ID NO: 709654 - RNA, 22 nt, Human
gagggcagagucuaaugaugca

SEQ ID NO: 709655 - RNA, 22 nt, Human
ggucuccauuccuucaucucac

SEQ ID NO: 709656 - RNA, 22 nt, Human
aguuauuuacuccuuugucucu

SEQ ID NO: 709657 - RNA, 22 nt, Human
gagcagcuguccccaaagcuuc

SEQ ID NO: 709658 - RNA, 22 nt, Human
cuuuacugaagugaagaccugg

SEQ ID NO: 709659 - RNA, 22 nt, Human
cccuggaggcggagcuugcagu

SEQ ID NO: 709660 - RNA, 22 nt, Human
ucaguccucacuugguucuaag

SEQ ID NO: 709661 - RNA, 22 nt, Human
gaggcucagagggagcaugguc

SEQ ID NO: 709662 - RNA, 22 nt, Human
agcggcugucggccagccggag

SEQ ID NO: 709663 - RNA, 22 nt, Human
ggcucaggccuguaauccuagc

SEQ ID NO: 709664 - RNA, 22 nt, Human
auaguuuuauagauauugugua

SEQ ID NO: 709665 - RNA, 16 nt, Human
gcuccugggcccucga

SEQ ID NO: 709666 - RNA, 22 nt, Human
ggcuggcauccagggaaaucca

SEQ ID NO: 709667 - RNA, 22 nt, Human
ucuucagaaaauuaucacuugu

SEQ ID NO: 709668 - RNA, 18 nt, Human
cugucccauccucagguu

SEQ ID NO: 709669 - RNA, 22 nt, Human
gcagcaagucuaguuuguaggc

SEQ ID NO: 709670 - RNA, 22 nt, Human
uuguucaugguuguaaguuuga

SEQ ID NO: 709671 - RNA, 22 nt, Human
cagaggucuccaucacccuccu

SEQ ID NO: 709672 - RNA, 22 nt, Human
cuucaguuaguuucaugugagc

SEQ ID NO: 709673 - RNA, 22 nt, Human
ugagagauugcuguauguuuug

SEQ ID NO: 709674 - RNA, 22 nt, Human
uuggcugaccagaaccugcccc

SEQ ID NO: 709675 - RNA, 22 nt, Human
aggccaggauagcauggaucag

SEQ ID NO: 709676 - RNA, 22 nt, Human
ucuguacaguaccagauaguaa

SEQ ID NO: 709677 - RNA, 22 nt, Human
gaccacagaagccuugauaggg

SEQ ID NO: 709678 - RNA, 22 nt, Human
acagauguuagcaaugaugaug

SEQ ID NO: 709679 - RNA, 20 nt, Human
uccuaacuauaaaguggcuc

SEQ ID NO: 709680 - RNA, 22 nt, Human
agugaguggagagcucuagguu

SEQ ID NO: 709681 - RNA, 22 nt, Human
aaauugaaugauuaagugguga

SEQ ID NO: 709682 - RNA, 22 nt, Human
gcucacagagggugcuuaauac

SEQ ID NO: 709683 - RNA, 22 nt, Human
ucagagagcagaacuuuuuuac

SEQ ID NO: 709684 - RNA, 22 nt, Human
acaaaacaguguuccugccccu

SEQ ID NO: 709685 - RNA, 22 nt, Human
aggaagaaaacuaauuagaugg

SEQ ID NO: 709686 - RNA, 22 nt, Human
ggcacugauuccauucaugaag

SEQ ID NO: 709687 - RNA, 22 nt, Human
ucaggaggucugcugcggggug

SEQ ID NO: 709688 - RNA, 22 nt, Human
ccaggguuggcaagcaaggcuu

SEQ ID NO: 709689 - RNA, 22 nt, Human
gccucugggguggagcccagca

SEQ ID NO: 709690 - RNA, 22 nt, Human
aucuggaaaacacaguguagac

SEQ ID NO: 709691 - RNA, 22 nt, Human
cugggcugucccagggcggcag

SEQ ID NO: 709692 - RNA, 23 nt, Human
cagggcccugcucaauuucucca

SEQ ID NO: 709693 - RNA, 22 nt, Human
uccccucugguugacccaggag

SEQ ID NO: 709694 - RNA, 22 nt, Human
gacacagagacuugcaguugua

SEQ ID NO: 709695 - RNA, 22 nt, Human
aacauucaaguucugguuuaug

SEQ ID NO: 709696 - RNA, 22 nt, Human
cuggcaggcggcagagcccagg

SEQ ID NO: 709697 - RNA, 22 nt, Human
agagcaaauagagaagccagcu

SEQ ID NO: 709698 - RNA, 22 nt, Human
agcaauauuucagcuagcaggu

SEQ ID NO: 709699 - RNA, 22 nt, Human
gcuuccaggucauucucacccu

SEQ ID NO: 709700 - RNA, 22 nt, Human
uuuuguuuguguccacugcagu

SEQ ID NO: 709701 - RNA, 22 nt, Human
ggguggcuccuaugggcauagc

SEQ ID NO: 709702 - RNA, 22 nt, Human
gaggacgggcuucauggggccu

SEQ ID NO: 709703 - RNA, 22 nt, Human
gggagucagagagguaauggga

SEQ ID NO: 709704 - RNA, 22 nt, Human
auggaacaggcucagagaugcu

SEQ ID NO: 709705 - RNA, 22 nt, Human
ccucagagaaagguauggcuga

SEQ ID NO: 709706 - RNA, 22 nt, Human
cuggagccccagacagggagag

SEQ ID NO: 709707 - RNA, 22 nt, Human
acaucuaagccaauuuugauuu

SEQ ID NO: 709708 - RNA, 22 nt, Human
ccuaaguauuuucaguguuaac

SEQ ID NO: 709709 - RNA, 21 nt, Human
gcuauacagaauggccagagg

SEQ ID NO: 709710 - RNA, 22 nt, Human
uuccaggaaaacaguuggaagu

SEQ ID NO: 709711 - RNA, 22 nt, Human
auggauaacccaguucauuucu

SEQ ID NO: 709712 - RNA, 22 nt, Human
uuuaaagaaauuccucaucuuu

SEQ ID NO: 709713 - RNA, 22 nt, Human
ucugggaaugaggcccagcgau

SEQ ID NO: 709714 - RNA, 22 nt, Human
ugcaagacgugaaauugagaca

SEQ ID NO: 709715 - RNA, 22 nt, Human
auccaucccaucuucaccaggg

SEQ ID NO: 709716 - RNA, 19 nt, Human
agagucggggggacauagg

SEQ ID NO: 709717 - RNA, 22 nt, Human
gucuucuuuaaccuacuaaagc

SEQ ID NO: 709718 - RNA, 22 nt, Human
guuuuacaagguuaaucagcag

SEQ ID NO: 709719 - RNA, 23 nt, Human
gccuggguuguaacuagugcauc

SEQ ID NO: 709720 - RNA, 22 nt, Human
cagguggggcgcccucaggcag

SEQ ID NO: 709721 - RNA, 22 nt, Human
uaaucuguauuccuacuuugca

SEQ ID NO: 709722 - RNA, 22 nt, Human
cugcuuuguguggucccuccag

SEQ ID NO: 709723 - RNA, 22 nt, Human
agaggucucaguuauguuuaaa

SEQ ID NO: 709724 - RNA, 22 nt, Human
cccauggagugccugagggcca

SEQ ID NO: 709725 - RNA, 22 nt, Human
ccccacccaccuaagagaaacu

SEQ ID NO: 709726 - RNA, 22 nt, Human
caugauacuugaauuuggaagg

SEQ ID NO: 709727 - RNA, 22 nt, Human
ugccauagcaaugguaagcuga

SEQ ID NO: 709728 - RNA, 19 nt, Human
ucuguaacacucuagccuu

SEQ ID NO: 709729 - RNA, 17 nt, Human
guguaacuaugagccau

SEQ ID NO: 709730 - RNA, 23 nt, Human
uucaugaguuggacaagacuggg

SEQ ID NO: 709731 - RNA, 22 nt, Human
augcaggggcagcagagccugg

SEQ ID NO: 709732 - RNA, 22 nt, Human
auuucuccuccagauggugguu

SEQ ID NO: 709733 - RNA, 22 nt, Human
ggaucuggggcucugcugcuca

SEQ ID NO: 709734 - RNA, 22 nt, Human
aaguggggccuggugguacagu

SEQ ID NO: 709735 - RNA, 22 nt, Human
agucuuuaacauuuggagauug

SEQ ID NO: 709736 - RNA, 22 nt, Human
gagcacauguggagagucuggg

SEQ ID NO: 709737 - RNA, 22 nt, Human
aggacaagacaaggaccagaga

SEQ ID NO: 709738 - RNA, 23 nt, Human
uuacagcuaacugcuguuauuag

SEQ ID NO: 709739 - RNA, 22 nt, Human
acacuguguggucucucucgga

SEQ ID NO: 709740 - RNA, 22 nt, Human
gccagggcugugcagguuuguu

SEQ ID NO: 709741 - RNA, 22 nt, Human
acauauuaacugcacuacacua

SEQ ID NO: 709742 - RNA, 22 nt, Human
gaggggaugcagagaggcuuau

SEQ ID NO: 709743 - RNA, 22 nt, Human
auuuugcugugguacauuagga

SEQ ID NO: 709744 - RNA, 22 nt, Human
auuuauuauugugguuacuucu

SEQ ID NO: 709745 - RNA, 22 nt, Human
uccugcuuccuugucuuuagac

SEQ ID NO: 709746 - RNA, 22 nt, Human
uucaaagauaauguagcauuuu

SEQ ID NO: 709747 - RNA, 22 nt, Human
aacagugagaagguggacagga

SEQ ID NO: 709748 - RNA, 22 nt, Human
gcagagugccgagauggaagcg

SEQ ID NO: 709749 - RNA, 22 nt, Human
gcagggcacaaggacgcacagg

SEQ ID NO: 709750 - RNA, 22 nt, Human
uaucugauacaacagaauaaca

SEQ ID NO: 709751 - RNA, 22 nt, Human
ugacagugagcuugggguacuu

SEQ ID NO: 709752 - RNA, 22 nt, Human
ucuaccacuuauuagcucugug

SEQ ID NO: 709753 - RNA, 22 nt, Human
ucuaaagaagaggguucugcgg

SEQ ID NO: 709754 - RNA, 22 nt, Human
uaaucuguuucccaaggugaua

SEQ ID NO: 709755 - RNA, 22 nt, Human
aggcagcguagcaaggcuagua

SEQ ID NO: 709756 - RNA, 23 nt, Human
aguguuaaauuucgcaccuaaau

SEQ ID NO: 709757 - RNA, 22 nt, Human
gaaagaaucaacuaugucucug

SEQ ID NO: 709758 - RNA, 21 nt, Human
ucagaagugcagcccaggaau

SEQ ID NO: 709759 - RNA, 22 nt, Human
cugcugggggacacagguccgg

SEQ ID NO: 709760 - RNA, 22 nt, Human
agagcauccaucggccaggacc

SEQ ID NO: 709761 - RNA, 22 nt, Human
acaauggcaugcuagcaaaugg

SEQ ID NO: 709762 - RNA, 22 nt, Human
uggcacaggaucucagcggcca

SEQ ID NO: 709763 - RNA, 22 nt, Human
cccugggauugccuuggccuug

SEQ ID NO: 709764 - RNA, 22 nt, Human
agagcuguuugucuagagagug

SEQ ID NO: 709765 - RNA, 22 nt, Human
aaggucucaaguuuuccaaagu

SEQ ID NO: 709766 - RNA, 22 nt, Human
gugucugcugcacccucacacc

SEQ ID NO: 709767 - RNA, 22 nt, Human
gagagaccucagaaacaaucua

SEQ ID NO: 709768 - RNA, 22 nt, Human
gcaggcagagaaggaacauuua

SEQ ID NO: 709769 - RNA, 23 nt, Human
ucagugauguugaaccuagcagu

SEQ ID NO: 709770 - RNA, 22 nt, Human
aacagaauaguugauguacagu

SEQ ID NO: 709771 - RNA, 22 nt, Human
aacucaguucuuuccacaaugc

SEQ ID NO: 709772 - RNA, 20 nt, Human
gcacugaaauucaauguuug

SEQ ID NO: 709773 - RNA, 22 nt, Human
gaugcagaaaguagacaccauc

SEQ ID NO: 709774 - RNA, 17 nt, Human
gcugccaccuuuggagc

SEQ ID NO: 709775 - RNA, 22 nt, Human
aacugcauuuaacaaauacucu

SEQ ID NO: 709776 - RNA, 22 nt, Human
uuaauugguaaccucuggacua

SEQ ID NO: 709777 - RNA, 22 nt, Human
agcuauaguacuuggcuuuucu

SEQ ID NO: 709778 - RNA, 20 nt, Human
acacaguagcaauuagugca

SEQ ID NO: 709779 - RNA, 22 nt, Human
gcuucuggaagcauaugcaaga

SEQ ID NO: 709780 - RNA, 22 nt, Human
caguuuauaugucagagcugua

SEQ ID NO: 709781 - RNA, 22 nt, Human
aagcucagugaugccuccaggg

SEQ ID NO: 709782 - RNA, 22 nt, Human
cugagggcagugaugaagguga

SEQ ID NO: 709783 - RNA, 22 nt, Human
ggggggcagcuguccuggccau

SEQ ID NO: 709784 - RNA, 22 nt, Human
uucaguguucuuuucuguuagc

SEQ ID NO: 709785 - RNA, 22 nt, Human
ucccagaagagaugccacuuga

SEQ ID NO: 709786 - RNA, 22 nt, Human
cugugucucuccuuacaagacu

SEQ ID NO: 709787 - RNA, 22 nt, Human
auuucagagugagagugcucaa

SEQ ID NO: 709788 - RNA, 22 nt, Human
agcuccugcacccagccuugag

SEQ ID NO: 709789 - RNA, 22 nt, Human
gugcaggguagcgacggcagga

SEQ ID NO: 709790 - RNA, 22 nt, Human
caaauagacuuaagcaucugua

SEQ ID NO: 709791 - RNA, 21 nt, Human
ucauucgauuuccucuaucuc

SEQ ID NO: 709792 - RNA, 22 nt, Human
gccagccaguuugcugauggcu

SEQ ID NO: 709793 - RNA, 22 nt, Human
ucccuagguccuagucacagua

SEQ ID NO: 709794 - RNA, 22 nt, Human
augugacaauauuuggucuuau

SEQ ID NO: 709795 - RNA, 19 nt, Human
uggcagacacaccuucuuc

SEQ ID NO: 709796 - RNA, 20 nt, Human
ugcauuuguuauuuguacuc

SEQ ID NO: 709797 - RNA, 22 nt, Human
agaaauacugccuaagacugua

SEQ ID NO: 709798 - RNA, 22 nt, Human
uacagccacaggugacucucau

SEQ ID NO: 709799 - RNA, 22 nt, Human
uacuucaauuauaugccaguua

SEQ ID NO: 709800 - RNA, 22 nt, Human
uuuacaugaguagcagauguuc

SEQ ID NO: 709801 - RNA, 22 nt, Human
ucagcuggugaguggauagaca

SEQ ID NO: 709802 - RNA, 21 nt, Human
agaggccuuacaggauagacc

SEQ ID NO: 709803 - RNA, 22 nt, Human
cacauuugaaggaauuagcauu

SEQ ID NO: 709804 - RNA, 22 nt, Human
ccaaaggccaagcucagguaaa

SEQ ID NO: 709805 - RNA, 22 nt, Human
cugguggagggacaggcuuagc

SEQ ID NO: 709806 - RNA, 22 nt, Human
ugaccccacugugcucagaggu

SEQ ID NO: 709807 - RNA, 22 nt, Human
uacaaagagguaauugcauaua

SEQ ID NO: 709808 - RNA, 22 nt, Human
gcucaggagcucuugguggcgc

SEQ ID NO: 709809 - RNA, 22 nt, Human
ggcugguguuacagucggcagc

SEQ ID NO: 709810 - RNA, 22 nt, Human
gccugggagugcacagugaggu

SEQ ID NO: 709811 - RNA, 22 nt, Human
gcagauggugccaugucuugug

SEQ ID NO: 709812 - RNA, 22 nt, Human
cuuuagaaaucuggauguauuu

SEQ ID NO: 709813 - RNA, 22 nt, Human
uaggccuucggugugugcuugg

SEQ ID NO: 709814 - RNA, 22 nt, Human
aucuggcuggauucuuagcguu

SEQ ID NO: 709815 - RNA, 22 nt, Human
gagggguguggagccaucaguu

SEQ ID NO: 709816 - RNA, 22 nt, Human
ccagagcugauuccugggacuu

SEQ ID NO: 709817 - RNA, 22 nt, Human
ccagggagcccacaggacaaug

SEQ ID NO: 709818 - RNA, 22 nt, Human
cagcugaagguaggaaccagga

SEQ ID NO: 709819 - RNA, 20 nt, Human
gggugaggauggagaauuug

SEQ ID NO: 709820 - RNA, 22 nt, Human
ucacuguagagucuguuuccac

SEQ ID NO: 709821 - RNA, 22 nt, Human
cacuggaaccauccacauagug

SEQ ID NO: 709822 - RNA, 21 nt, Human
ucuggcaggaagacggauggg

SEQ ID NO: 709823 - RNA, 22 nt, Human
agggccacuggcugacggcugc

SEQ ID NO: 709824 - RNA, 22 nt, Human
ccgggagacuuugagcaccaug

SEQ ID NO: 709825 - RNA, 22 nt, Human
agguccuguccuuggucucuga

SEQ ID NO: 709826 - RNA, 23 nt, Human
uagaacaucggugucuuggagca

SEQ ID NO: 709827 - RNA, 22 nt, Human
ugucucagaggcaggaagagcc

SEQ ID NO: 709828 - RNA, 22 nt, Human
agaugacagcuacgggaugaaa

SEQ ID NO: 709829 - RNA, 19 nt, Human
acuugaaagcagagaguuu

SEQ ID NO: 709830 - RNA, 22 nt, Human
ucuguuccauguuuuguuccau

SEQ ID NO: 709831 - RNA, 17 nt, Human
ucaggcugugccuggua

SEQ ID NO: 709832 - RNA, 22 nt, Human
uugugucuuaaagauuaaaugg

SEQ ID NO: 709833 - RNA, 22 nt, Human
ugugccagaauguuuuuauaca

SEQ ID NO: 709834 - RNA, 17 nt, Human
ugauaguucauuuuaag

SEQ ID NO: 709835 - RNA, 22 nt, Human
ucucuucuugauuuucacugga

SEQ ID NO: 709836 - RNA, 22 nt, Human
uuggccagaucugaggauacug

SEQ ID NO: 709837 - RNA, 22 nt, Human
uaacuuuuacauuuggcucacu

SEQ ID NO: 709838 - RNA, 19 nt, Human
ugcugaggaugcaagaucc

SEQ ID NO: 709839 - RNA, 22 nt, Human
agagacagaucugagggaccuc

SEQ ID NO: 709840 - RNA, 23 nt, Human
acagacauuccauaauguacacc

SEQ ID NO: 709841 - RNA, 22 nt, Human
ugcuuaaaauaguucauuuuug

SEQ ID NO: 709842 - RNA, 22 nt, Human
gcuuccagccuuuucuccucug

SEQ ID NO: 709843 - RNA, 21 nt, Human
cuggaagaagcagcaggauuc

SEQ ID NO: 709844 - RNA, 22 nt, Human
uuugagaaaggggauuuaauuc

SEQ ID NO: 709845 - RNA, 22 nt, Human
cgcugggggaacagcgagggug

SEQ ID NO: 709846 - RNA, 22 nt, Human
ucugccccugcugggcacagag

SEQ ID NO: 709847 - RNA, 22 nt, Human
aaaguuuacagugcacaugggu

SEQ ID NO: 709848 - RNA, 22 nt, Human
agccagagaacagcaggaaaug

SEQ ID NO: 709849 - RNA, 19 nt, Human
cuggaaugauagagaccuc

SEQ ID NO: 709850 - RNA, 22 nt, Human
agucugucuaauauuauucagg

SEQ ID NO: 709851 - RNA, 22 nt, Human
uucuggaaguuuucuccugugg

SEQ ID NO: 709852 - RNA, 22 nt, Human
aaucgguugaacccaggaagug

SEQ ID NO: 709853 - RNA, 18 nt, Human
ggcagcaagaagggaggg

SEQ ID NO: 709854 - RNA, 22 nt, Human
gccacaggucggcuagaggguc

SEQ ID NO: 709855 - RNA, 22 nt, Human
ggcugcagagcuggugcccugg

SEQ ID NO: 709856 - RNA, 22 nt, Human
uuucuaagcuuaguaugaggca

SEQ ID NO: 709857 - RNA, 22 nt, Human
agcauauugucuuuggugucuc

SEQ ID NO: 709858 - RNA, 22 nt, Human
aauagcaauuacccuucaacuc

SEQ ID NO: 709859 - RNA, 22 nt, Human
cucccuccucaaauaucuuugu

SEQ ID NO: 709860 - RNA, 22 nt, Human
gcaauaaagauuuuacugucag

SEQ ID NO: 709861 - RNA, 22 nt, Human
agcuuucucucagccaggcugc

SEQ ID NO: 709862 - RNA, 22 nt, Human
gucaggaagcaagguugggcau

SEQ ID NO: 709863 - RNA, 22 nt, Human
agacagcaggggagucugguuu

SEQ ID NO: 709864 - RNA, 22 nt, Human
caaauacuggguaaguuaauuu

SEQ ID NO: 709865 - RNA, 22 nt, Human
ggcuggucuccaacccccgauc

SEQ ID NO: 709866 - RNA, 21 nt, Human
agucuggggaagggaucccag

SEQ ID NO: 709867 - RNA, 22 nt, Human
gccugcaagauggcuggucacu

SEQ ID NO: 709868 - RNA, 22 nt, Human
aaaugcuguaacugauauucug

SEQ ID NO: 709869 - RNA, 22 nt, Human
aaacuuuaaauuuguaccucug

SEQ ID NO: 709870 - RNA, 22 nt, Human
uuacuguuuugguaccucauug

SEQ ID NO: 709871 - RNA, 22 nt, Human
ugucaccucuuuggcugcagcu

SEQ ID NO: 709872 - RNA, 22 nt, Human
gauuuuuauauaaagugagaaa

SEQ ID NO: 709873 - RNA, 22 nt, Human
cucugggcaggacgccaggccu

SEQ ID NO: 709874 - RNA, 22 nt, Human
uucaaaggcaggauagcagcug

SEQ ID NO: 709875 - RNA, 22 nt, Human
uucaugccagcccuguguggua

SEQ ID NO: 709876 - RNA, 22 nt, Human
uauguagaagcugcucaaagaa

SEQ ID NO: 709877 - RNA, 22 nt, Human
acagcuuuuuacuaauagauug

SEQ ID NO: 709878 - RNA, 22 nt, Human
gaauagauauccuugagggucu

SEQ ID NO: 709879 - RNA, 22 nt, Human
ggagcucuccugaugugaagau

SEQ ID NO: 709880 - RNA, 22 nt, Human
caguacuugggggguucuaagu

SEQ ID NO: 709881 - RNA, 22 nt, Human
uggggcagcuccaucuauucca

SEQ ID NO: 709882 - RNA, 22 nt, Human
gcagcagagaacacaaugaugg

SEQ ID NO: 709883 - RNA, 22 nt, Human
cucccugaggacaggcccuguc

SEQ ID NO: 709884 - RNA, 22 nt, Human
uccugaggugcucagccaggaa

SEQ ID NO: 709885 - RNA, 22 nt, Human
agcucccaauugacuugaacua

SEQ ID NO: 709886 - RNA, 22 nt, Human
uuccacagguuucagacuguuc

SEQ ID NO: 709887 - RNA, 22 nt, Human
uaagcauacauucucuccuuuc

SEQ ID NO: 709888 - RNA, 22 nt, Human
gucaacauaggccucagugagg

SEQ ID NO: 709889 - RNA, 22 nt, Human
aaugucugccugaacuuuauau

SEQ ID NO: 709890 - RNA, 20 nt, Human
gccacugugcuuacacugcu

SEQ ID NO: 709891 - RNA, 22 nt, Human
auauuccuguuuuuaacacuuu

SEQ ID NO: 709892 - RNA, 22 nt, Human
guacauuuacugaugaaaagua

SEQ ID NO: 709893 - RNA, 22 nt, Human
aauguuuggacuggaagguccc

SEQ ID NO: 709894 - RNA, 22 nt, Human
cucuccagucauauucucaguc

SEQ ID NO: 709895 - RNA, 20 nt, Human
ugcuuuaugcuauacuuugu

SEQ ID NO: 709896 - RNA, 22 nt, Human
ggacagcuccugcacuugagua

SEQ ID NO: 709897 - RNA, 22 nt, Human
agcugucuuucauuaccucauu

SEQ ID NO: 709898 - RNA, 20 nt, Human
ucagagucaucaaagauggu

SEQ ID NO: 709899 - RNA, 22 nt, Human
aaggcagauauaaagacuagag

SEQ ID NO: 709900 - RNA, 22 nt, Human
gggcaguguggucgugccuuug

SEQ ID NO: 709901 - RNA, 22 nt, Human
gugcauuacauguaauaaaaua

SEQ ID NO: 709902 - RNA, 20 nt, Human
uuuccuaagugguuugcuga

SEQ ID NO: 709903 - RNA, 22 nt, Human
gacucagugauuugacaugccu

SEQ ID NO: 709904 - RNA, 22 nt, Human
uaugaagugaguuaugguugcu

SEQ ID NO: 709905 - RNA, 22 nt, Human
gccacugauuccaagucaauuu

SEQ ID NO: 709906 - RNA, 21 nt, Human
cagaggggcuagccuggcugc

SEQ ID NO: 709907 - RNA, 22 nt, Human
cucaaauguuuccacuucugcu

SEQ ID NO: 709908 - RNA, 22 nt, Human
ucuaagacacuguacuuucagu

SEQ ID NO: 709909 - RNA, 23 nt, Human
acauccaugaaucaucugcuuuc

SEQ ID NO: 709910 - RNA, 22 nt, Human
acuggcagaacgugaugcgggu

SEQ ID NO: 709911 - RNA, 22 nt, Human
aacauuuuuaagaccaagugcu

SEQ ID NO: 709912 - RNA, 22 nt, Human
aucuugcugcuacaaagugccc

SEQ ID NO: 709913 - RNA, 22 nt, Human
uucauuuguugacagagacaug

SEQ ID NO: 709914 - RNA, 20 nt, Human
ugucauuuauuuaucaaaug

SEQ ID NO: 709915 - RNA, 22 nt, Human
gacaguuaggacaacugacuuc

SEQ ID NO: 709916 - RNA, 22 nt, Human
uuagaauuauuguuuccuucua

SEQ ID NO: 709917 - RNA, 22 nt, Human
uccaucauguucacagcuauau

SEQ ID NO: 709918 - RNA, 22 nt, Human
uuuaugauuauuuuaaagcagc

SEQ ID NO: 709919 - RNA, 22 nt, Human
auacuguacgucccagauagga

SEQ ID NO: 709920 - RNA, 22 nt, Human
cuacauucugggaaaucagaug

SEQ ID NO: 709921 - RNA, 20 nt, Human
cuguggcucaugcaucugcc

SEQ ID NO: 709922 - RNA, 22 nt, Human
uuggagagaggcugcucaggcu

SEQ ID NO: 709923 - RNA, 22 nt, Human
caaguuuacaauguguaugugu

SEQ ID NO: 709924 - RNA, 22 nt, Human
uaaugcuuauguuaugcaauuu

SEQ ID NO: 709925 - RNA, 22 nt, Human
uauguaaaaauucaucaggcug

SEQ ID NO: 709926 - RNA, 23 nt, Human
agguccuggacauaugugcauca

SEQ ID NO: 709927 - RNA, 20 nt, Human
ucugggcagggcacauggaa

SEQ ID NO: 709928 - RNA, 23 nt, Human
ucucaaauaugaucugggucauc

SEQ ID NO: 709929 - RNA, 22 nt, Human
ggcugaguggcugggucuaguu

SEQ ID NO: 709930 - RNA, 22 nt, Human
ggcucuggugcccuggcuccca

SEQ ID NO: 709931 - RNA, 22 nt, Human
aaauuucuguuguuuugagcca

SEQ ID NO: 709932 - RNA, 22 nt, Human
aaugccucuuggaagaagacuu

SEQ ID NO: 709933 - RNA, 20 nt, Human
ggcagaccugcugagagccc

SEQ ID NO: 709934 - RNA, 22 nt, Human
ucucugugugccuucaucugcc

SEQ ID NO: 709935 - RNA, 22 nt, Human
uccugaggacuaacaggaagga

SEQ ID NO: 709936 - RNA, 22 nt, Human
aguguggacuuuuccuaggagg

SEQ ID NO: 709937 - RNA, 22 nt, Human
cagugcagguuuagggcugggg

SEQ ID NO: 709938 - RNA, 22 nt, Human
ugugaggaccucagcagagucu

SEQ ID NO: 709939 - RNA, 21 nt, Human
gcagggacaaagcuucaggag

SEQ ID NO: 709940 - RNA, 22 nt, Human
uaggucuguaaaugagagagac

SEQ ID NO: 709941 - RNA, 22 nt, Human
caguccuuagauuuuacugcca

SEQ ID NO: 709942 - RNA, 22 nt, Human
ggaugcaggacggcauggaugu

SEQ ID NO: 709943 - RNA, 22 nt, Human
guagaucugccuuaaccuggga

SEQ ID NO: 709944 - RNA, 22 nt, Human
ugucucugaacagcuuacuaaa

SEQ ID NO: 709945 - RNA, 22 nt, Human
gacauaaaugaaguuugacuau

SEQ ID NO: 709946 - RNA, 19 nt, Human
gcugugggacagcagggug

SEQ ID NO: 709947 - RNA, 22 nt, Human
aaagugcugggauuccaggcgu

SEQ ID NO: 709948 - RNA, 22 nt, Human
aggcuccaugcuaagcgauaug

SEQ ID NO: 709949 - RNA, 22 nt, Human
accacccaccucacagcauagu

SEQ ID NO: 709950 - RNA, 22 nt, Human
uugcagggaaauagaaauaaac

SEQ ID NO: 709951 - RNA, 22 nt, Human
uuggcugccuucaccccuggcc

SEQ ID NO: 709952 - RNA, 22 nt, Human
gaacuguggguaauauauuaga

SEQ ID NO: 709953 - RNA, 18 nt, Human
cccagcccaccauuucuc

SEQ ID NO: 709954 - RNA, 22 nt, Human
uggugucugcacucccuggcgu

SEQ ID NO: 709955 - RNA, 22 nt, Human
ucucagggugaggaaagaauuu

SEQ ID NO: 709956 - RNA, 23 nt, Human
gacaucuguuuugucccugugcu

SEQ ID NO: 709957 - RNA, 22 nt, Human
agguaggaguugauggauguuc

SEQ ID NO: 709958 - RNA, 22 nt, Human
aaaacauugaauugcacacuau

SEQ ID NO: 709959 - RNA, 22 nt, Human
agagacaggauaucugcucaug

SEQ ID NO: 709960 - RNA, 22 nt, Human
gagcuucagcgugugcuaaggg

SEQ ID NO: 709961 - RNA, 22 nt, Human
ggcagguggccaagugucuaag

SEQ ID NO: 709962 - RNA, 22 nt, Human
cacaccuguaauaccagcuacu

SEQ ID NO: 709963 - RNA, 17 nt, Human
agguggguggaucaccu

SEQ ID NO: 709964 - RNA, 22 nt, Human
augacaaaauucacagguguga

SEQ ID NO: 709965 - RNA, 22 nt, Human
uuggcuaaccuggguuaucagc

SEQ ID NO: 709966 - RNA, 22 nt, Human
ggccagcauggcaagaccaacu

SEQ ID NO: 709967 - RNA, 22 nt, Human
aggcccagagcaggaaaggguu

SEQ ID NO: 709968 - RNA, 22 nt, Human
acuguggggggcuuugcucagu

SEQ ID NO: 709969 - RNA, 22 nt, Human
gcuuggcccugccgccuggguc

SEQ ID NO: 709970 - RNA, 19 nt, Human
cagagagaccaaggcgcca

SEQ ID NO: 709971 - RNA, 22 nt, Human
ugucuuuggaauauuuagcuga

SEQ ID NO: 709972 - RNA, 22 nt, Human
ggacugggucacuaagauagua

SEQ ID NO: 709973 - RNA, 17 nt, Human
gcaggcacugcugccug

SEQ ID NO: 709974 - RNA, 22 nt, Human
gcccagcgagcagagguggacg

SEQ ID NO: 709975 - RNA, 22 nt, Human
uagcagcaauuucagaaguuug

SEQ ID NO: 709976 - RNA, 22 nt, Human
accauacauuaaaugacuuuca

SEQ ID NO: 709977 - RNA, 22 nt, Human
cugggaggcccacguugggaag

SEQ ID NO: 709978 - RNA, 18 nt, Human
gacaccagccucugcccc

SEQ ID NO: 709979 - RNA, 22 nt, Human
uucacacuguuuuucauagugg

SEQ ID NO: 709980 - RNA, 22 nt, Human
uuaacuugucagaaaauacagu

SEQ ID NO: 709981 - RNA, 22 nt, Human
guaaaauucuagcaucugaaag

SEQ ID NO: 709982 - RNA, 22 nt, Human
uggccugcaagcuaaaaaucua

SEQ ID NO: 709983 - RNA, 21 nt, Human
agugaagagugaaacacaugg

SEQ ID NO: 709984 - RNA, 22 nt, Human
ucugagccauaagaguacagga

SEQ ID NO: 709985 - RNA, 22 nt, Human
agcuccuccugugccaggccag

SEQ ID NO: 709986 - RNA, 22 nt, Human
ccuuuucuguuuccugucacug

SEQ ID NO: 709987 - RNA, 22 nt, Human
uaaagacaaacccacuaggguu

SEQ ID NO: 709988 - RNA, 22 nt, Human
cuucucccugggggcucuuuau

SEQ ID NO: 709989 - RNA, 22 nt, Human
aagcagcacagcaaugacucua

SEQ ID NO: 709990 - RNA, 22 nt, Human
ucaaggaauuuaguuuaguaaa

SEQ ID NO: 709991 - RNA, 22 nt, Human
uggugcaagucucugaggaggg

SEQ ID NO: 709992 - RNA, 22 nt, Human
guuuguuuuaagauaggaugga

SEQ ID NO: 709993 - RNA, 22 nt, Human
agaggccugugugcuccagugg

SEQ ID NO: 709994 - RNA, 23 nt, Human
gcacauacuacacagaaaauggc

SEQ ID NO: 709995 - RNA, 22 nt, Human
gucauuuucuagaauuauuuga

SEQ ID NO: 709996 - RNA, 22 nt, Human
gcaugcaugugugcagacaguc

SEQ ID NO: 709997 - RNA, 22 nt, Human
cugauuccagagucuguguucu

SEQ ID NO: 709998 - RNA, 22 nt, Human
ggcacauggagacuuggcauca

SEQ ID NO: 709999 - RNA, 22 nt, Human
ggcaggugaggcaugugccugg

SEQ ID NO: 710000 - RNA, 22 nt, Human
caugggcucucugagcuccagg

SEQ ID NO: 710001 - RNA, 22 nt, Human
ucuggcucuuugggugauugua

SEQ ID NO: 710002 - RNA, 22 nt, Human
ucaggagccugaaagaggucua

SEQ ID NO: 710003 - RNA, 22 nt, Human
ugagcagggacuuugaguguag

SEQ ID NO: 710004 - RNA, 22 nt, Human
caucucuucauuagcauuauug

SEQ ID NO: 710005 - RNA, 22 nt, Human
ugggccugugaugcugggcuau

SEQ ID NO: 710006 - RNA, 22 nt, Human
uugaggucauauauauuuggca

SEQ ID NO: 710007 - RNA, 22 nt, Human
uggcauguucucuuagcagcuc

SEQ ID NO: 710008 - RNA, 22 nt, Human
agugcuguccaguuucacaggu

SEQ ID NO: 710009 - RNA, 22 nt, Human
uacaguuacuguuauaugugcu

SEQ ID NO: 710010 - RNA, 22 nt, Human
caccugccucauuugucccugc

SEQ ID NO: 710011 - RNA, 22 nt, Human
gguacaauucugggguaugcuc

SEQ ID NO: 710012 - RNA, 22 nt, Human
cuggcuuccucaggagcagugg

SEQ ID NO: 710013 - RNA, 22 nt, Human
uuuauuaauuagugacccaaug

SEQ ID NO: 710014 - RNA, 22 nt, Human
cuguuaucuguuauugccaguu

SEQ ID NO: 710015 - RNA, 22 nt, Human
cuaaaugucagaguagcuugca

SEQ ID NO: 710016 - RNA, 22 nt, Human
gcaggcaggagcccaacugccu

SEQ ID NO: 710017 - RNA, 22 nt, Human
cuuagcaagaaucagcugcugg

SEQ ID NO: 710018 - RNA, 22 nt, Human
gacacagggacgugcucugccu

SEQ ID NO: 710019 - RNA, 22 nt, Human
uaacauugaguccacuaaacag

SEQ ID NO: 710020 - RNA, 22 nt, Human
ucugggaacugagcuccccuag

SEQ ID NO: 710021 - RNA, 22 nt, Human
uucccagagaaggaugaaaaag

SEQ ID NO: 710022 - RNA, 22 nt, Human
gguucccggaucuccgaguccc

SEQ ID NO: 710023 - RNA, 22 nt, Human
acugaggauuagcccaggcuag

SEQ ID NO: 710024 - RNA, 22 nt, Human
augccauugcuuuaaaauuaag

SEQ ID NO: 710025 - RNA, 22 nt, Human
cagcucuucagugccugagaua

SEQ ID NO: 710026 - RNA, 22 nt, Human
gcaaaugcucuccuuggucagg

SEQ ID NO: 710027 - RNA, 22 nt, Human
ugcuuaaaaacaguaugguagu

SEQ ID NO: 710028 - RNA, 22 nt, Human
gccuggccugaacuaggaggug

SEQ ID NO: 710029 - RNA, 22 nt, Human
ucugaaauaggcuucuuuuggu

SEQ ID NO: 710030 - RNA, 22 nt, Human
aggagucauaaaugugaacaaa

SEQ ID NO: 710031 - RNA, 23 nt, Human
uuucuguuggguauauauccaag

SEQ ID NO: 710032 - RNA, 21 nt, Human
uucuaacugggugggccuuga

SEQ ID NO: 710033 - RNA, 22 nt, Human
aagcacaccucccuggcaggag

SEQ ID NO: 710034 - RNA, 22 nt, Human
accugccuaucagcugccugcu

SEQ ID NO: 710035 - RNA, 22 nt, Human
ggcccugagcugaaguacugug

SEQ ID NO: 710036 - RNA, 22 nt, Human
ugcuugaugauugcugucuccc

SEQ ID NO: 710037 - RNA, 22 nt, Human
gagauguuaacuacauagcuac

SEQ ID NO: 710038 - RNA, 22 nt, Human
ccugagcuggagacauuacaua

SEQ ID NO: 710039 - RNA, 22 nt, Human
guuagugugacugaggaaugca

SEQ ID NO: 710040 - RNA, 22 nt, Human
ccagugcuucuuugcuagcugg

SEQ ID NO: 710041 - RNA, 22 nt, Human
uccuccuucgggacugcuugac

SEQ ID NO: 710042 - RNA, 21 nt, Human
cucuugucuuugcucaguagc

SEQ ID NO: 710043 - RNA, 22 nt, Human
uguccuggccaaggccuugcuu

SEQ ID NO: 710044 - RNA, 22 nt, Human
agaaauagcagagucaggcggg

SEQ ID NO: 710045 - RNA, 22 nt, Human
aaggauguggcauuuuucauau

SEQ ID NO: 710046 - RNA, 22 nt, Human
ggaaaauuuccuucaaaaugug

SEQ ID NO: 710047 - RNA, 20 nt, Human
uucugcuugcaaauaucaag

SEQ ID NO: 710048 - RNA, 23 nt, Human
agucucagcuggaaacauguguc

SEQ ID NO: 710049 - RNA, 22 nt, Human
cgcaggcaagagaguacaguua

SEQ ID NO: 710050 - RNA, 22 nt, Human
uccucacaagcaagcacaggua

SEQ ID NO: 710051 - RNA, 22 nt, Human
uggcuucaccucagcaugaagg

SEQ ID NO: 710052 - RNA, 22 nt, Human
aacaggcuuccaggagggacga

SEQ ID NO: 710053 - RNA, 22 nt, Human
uuccaggaggcauucuuaguuu

SEQ ID NO: 710054 - RNA, 22 nt, Human
ccucugccaccucccacgaggc

SEQ ID NO: 710055 - RNA, 22 nt, Human
uggggcugaggagccucacucu

SEQ ID NO: 710056 - RNA, 22 nt, Human
uuuaaaaguuaucaucugucca

SEQ ID NO: 710057 - RNA, 22 nt, Human
ucaggaagcugcucuggguggu

SEQ ID NO: 710058 - RNA, 22 nt, Human
ucaaggugcugugcugugcuag

SEQ ID NO: 710059 - RNA, 22 nt, Human
agguccaggcauuuggguuggg

SEQ ID NO: 710060 - RNA, 22 nt, Human
caguuaaacagauugaguguua

SEQ ID NO: 710061 - RNA, 22 nt, Human
gcugagagcggccagcugggaa

SEQ ID NO: 710062 - RNA, 22 nt, Human
aaugauaccgccaauauuacca

SEQ ID NO: 710063 - RNA, 22 nt, Human
uucagcauagcagcuucaggac

SEQ ID NO: 710064 - RNA, 22 nt, Human
cagugguauuugagagaaugga

SEQ ID NO: 710065 - RNA, 17 nt, Human
agugaggagauuggaag

SEQ ID NO: 710066 - RNA, 22 nt, Human
aaacaucuucucuugauucuuu

SEQ ID NO: 710067 - RNA, 22 nt, Human
ggcacagugauuaagagccagu

SEQ ID NO: 710068 - RNA, 22 nt, Human
aauaauguuaugucauucuucu

SEQ ID NO: 710069 - RNA, 22 nt, Human
aaguggcaguucaggaagcaga

SEQ ID NO: 710070 - RNA, 22 nt, Human
ugagcaggcaaacaaugguuau

SEQ ID NO: 710071 - RNA, 21 nt, Human
ugaucauuuguguaaaggaga

SEQ ID NO: 710072 - RNA, 22 nt, Human
uaggaacaguccuagaaaucug

SEQ ID NO: 710073 - RNA, 22 nt, Human
uagccaguuucuuuaacagcaa

SEQ ID NO: 710074 - RNA, 22 nt, Human
augauacaagcaaaacuaauca

SEQ ID NO: 710075 - RNA, 19 nt, Human
gggcaguggcacuagggag

SEQ ID NO: 710076 - RNA, 22 nt, Human
cagcacuggggccacuggaguu

SEQ ID NO: 710077 - RNA, 22 nt, Human
ucagaucuaauuggauuauuau

SEQ ID NO: 710078 - RNA, 22 nt, Human
ucacccaggauauugaagucag

SEQ ID NO: 710079 - RNA, 22 nt, Human
ugguauucuuucuguagaucau

SEQ ID NO: 710080 - RNA, 22 nt, Human
gaucacaugaguuaucuaacuu

SEQ ID NO: 710081 - RNA, 22 nt, Human
ucuggucaagacauccuaacau

SEQ ID NO: 710082 - RNA, 22 nt, Human
aauguacaauaagacaaagagg

SEQ ID NO: 710083 - RNA, 22 nt, Human
uucucuggggacugucucuauu

SEQ ID NO: 710084 - RNA, 22 nt, Human
uuacacagaaauuuuauugccu

SEQ ID NO: 710085 - RNA, 22 nt, Human
ugccauggaaucaccuccagcu

SEQ ID NO: 710086 - RNA, 19 nt, Human
ugcuugccugccuuuccca

SEQ ID NO: 710087 - RNA, 22 nt, Human
acuucucuucauagguggcaau

SEQ ID NO: 710088 - RNA, 22 nt, Human
cugcagggaugugaggcccguu

SEQ ID NO: 710089 - RNA, 22 nt, Human
auuauggauggaggcauuaguc

SEQ ID NO: 710090 - RNA, 22 nt, Human
uccugucugucuuuggucccuu

SEQ ID NO: 710091 - RNA, 21 nt, Human
uggccaaaaccauauuauuaa

SEQ ID NO: 710092 - RNA, 22 nt, Human
uauucucugcagcugaauguuu

SEQ ID NO: 710093 - RNA, 22 nt, Human
cagacacuauuguguauaaauc

SEQ ID NO: 710094 - RNA, 22 nt, Human
uagcuguucaaguuccuggaaa

SEQ ID NO: 710095 - RNA, 22 nt, Human
acauguuugccugcaggcuuag

SEQ ID NO: 710096 - RNA, 22 nt, Human
gagauguacaauguguauuaau

SEQ ID NO: 710097 - RNA, 22 nt, Human
caugcuuauauggaaaggaaga

SEQ ID NO: 710098 - RNA, 22 nt, Human
auuuaguuuaggaaaaguaggu

SEQ ID NO: 710099 - RNA, 22 nt, Human
uuccuuccagcuugugacaguc

SEQ ID NO: 710100 - RNA, 22 nt, Human
aaggcucuggguuucauaggug

SEQ ID NO: 710101 - RNA, 22 nt, Human
aaaucucaguguucuaagcauu

SEQ ID NO: 710102 - RNA, 22 nt, Human
aauucauacucuauauugcuuu

SEQ ID NO: 710103 - RNA, 20 nt, Human
acaaaugcauucugugacau

SEQ ID NO: 710104 - RNA, 22 nt, Human
aaaacaggugucagcaaacuau

SEQ ID NO: 710105 - RNA, 23 nt, Human
agcagcagugagaggugucuuac

SEQ ID NO: 710106 - RNA, 20 nt, Human
ugcacagggugggaagcaac

SEQ ID NO: 710107 - RNA, 22 nt, Human
ugaggcaggagaaucacaugaa

SEQ ID NO: 710108 - RNA, 22 nt, Human
aucugccugcuuaugaugccug

SEQ ID NO: 710109 - RNA, 20 nt, Human
cugcugugguccuuuauuuu

SEQ ID NO: 710110 - RNA, 22 nt, Human
cuuuccaaugcauuuccaaugu

SEQ ID NO: 710111 - RNA, 22 nt, Human
agauaaauuccuaagauuucag

SEQ ID NO: 710112 - RNA, 18 nt, Human
gcaggcccuguuucuggg

SEQ ID NO: 710113 - RNA, 22 nt, Human
agggaggagaauggacuccuuc

SEQ ID NO: 710114 - RNA, 18 nt, Human
cugaggccaacuacacug

SEQ ID NO: 710115 - RNA, 22 nt, Human
cccuuuccauggcucuccuagg

SEQ ID NO: 710116 - RNA, 22 nt, Human
uuucagcacuuuaggcagcagg

SEQ ID NO: 710117 - RNA, 22 nt, Human
ggagugacucacagcugggaca

SEQ ID NO: 710118 - RNA, 21 nt, Human
ccuccaggagcagagcccuga

SEQ ID NO: 710119 - RNA, 22 nt, Human
ugagaguuuugacgcuuguaac

SEQ ID NO: 710120 - RNA, 22 nt, Human
agcuccuguucugagagcagga

SEQ ID NO: 710121 - RNA, 22 nt, Human
gcagcagcucaguucugggagg

SEQ ID NO: 710122 - RNA, 22 nt, Human
uggaauguugauaaacauaggc

SEQ ID NO: 710123 - RNA, 22 nt, Human
caagagcucccagaccugggca

SEQ ID NO: 710124 - RNA, 18 nt, Human
uacagcuugaguugacug

SEQ ID NO: 710125 - RNA, 22 nt, Human
aggucagaagugccagggaauu

SEQ ID NO: 710126 - RNA, 22 nt, Human
uccuggauucugcccugaaggc

SEQ ID NO: 710127 - RNA, 22 nt, Human
cucaguuuugcuagcuggaguu

SEQ ID NO: 710128 - RNA, 22 nt, Human
ucugcuguugagcacaagugaa

SEQ ID NO: 710129 - RNA, 22 nt, Human
acuccauacaauggcaggcugu

SEQ ID NO: 710130 - RNA, 22 nt, Human
uuuccuccuagccuccagccgc

SEQ ID NO: 710131 - RNA, 22 nt, Human
auuguacaugcagugagucauc

SEQ ID NO: 710132 - RNA, 22 nt, Human
acauuucuucccuuuagcagaa

SEQ ID NO: 710133 - RNA, 22 nt, Human
cuuuggcugacgaggaggaggc

SEQ ID NO: 710134 - RNA, 22 nt, Human
cagacaggaaguucagaagaaa

SEQ ID NO: 710135 - RNA, 22 nt, Human
cuggccagcauuuuugcuuuag

SEQ ID NO: 710136 - RNA, 22 nt, Human
gauugaaauauaaauauguguu

SEQ ID NO: 710137 - RNA, 22 nt, Human
ccugaauaauuugugaaaagau

SEQ ID NO: 710138 - RNA, 20 nt, Human
ugugacaaaggcauauuuua

SEQ ID NO: 710139 - RNA, 22 nt, Human
gucugcugcagucguggcucua

SEQ ID NO: 710140 - RNA, 22 nt, Human
aaguaugucaaucauacuucaa

SEQ ID NO: 710141 - RNA, 22 nt, Human
cuuugcaagggauuucaugucu

SEQ ID NO: 710142 - RNA, 22 nt, Human
gcuaaucaauguuaaggcugug

SEQ ID NO: 710143 - RNA, 22 nt, Human
ugagucugggcauguucacuuu

SEQ ID NO: 710144 - RNA, 22 nt, Human
gagaaacaacacuugaugccuu

SEQ ID NO: 710145 - RNA, 22 nt, Human
acccagagucauggcacuuagc

SEQ ID NO: 710146 - RNA, 23 nt, Human
uccucgcaggagggagaugaugc

SEQ ID NO: 710147 - RNA, 22 nt, Human
uucagugucaauuuuuaaauau

SEQ ID NO: 710148 - RNA, 22 nt, Human
ccuuccuggcuguccgccugau

SEQ ID NO: 710149 - RNA, 22 nt, Human
ucagcucuguguacaguuagca

SEQ ID NO: 710150 - RNA, 22 nt, Human
uuucuccugaguuccacgcuac

SEQ ID NO: 710151 - RNA, 22 nt, Human
aauuacacagggaucacuuuuu

SEQ ID NO: 710152 - RNA, 23 nt, Human
auccaugugagaauagacuagca

SEQ ID NO: 710153 - RNA, 17 nt, Human
ugaggcucggugaggag

SEQ ID NO: 710154 - RNA, 22 nt, Human
gugugucuuuauaagaagaggg

SEQ ID NO: 710155 - RNA, 22 nt, Human
gcuucacaggcaaguuaagccu

SEQ ID NO: 710156 - RNA, 22 nt, Human
uggagagcaggggaugcgggcg

SEQ ID NO: 710157 - RNA, 22 nt, Human
aaaauucauggcuugggaaaag

SEQ ID NO: 710158 - RNA, 22 nt, Human
ucuggcuugucucagggucuga

SEQ ID NO: 710159 - RNA, 22 nt, Human
ccaaaggcggaacugagucucu

SEQ ID NO: 710160 - RNA, 22 nt, Human
uucuguuacaagugaaaaaaug

SEQ ID NO: 710161 - RNA, 22 nt, Human
guuccugggaggcaugggcugg

SEQ ID NO: 710162 - RNA, 20 nt, Human
ccuggaagagcuccccaggc

SEQ ID NO: 710163 - RNA, 22 nt, Human
agacaggcagaggcugcagagg

SEQ ID NO: 710164 - RNA, 22 nt, Human
ucagcauauguuuggagugucc

SEQ ID NO: 710165 - RNA, 22 nt, Human
accaggcccuccagcugcgugg

SEQ ID NO: 710166 - RNA, 22 nt, Human
acauugaugaaaagguaucauu

SEQ ID NO: 710167 - RNA, 22 nt, Human
ccugggaagagcugacaggagg

SEQ ID NO: 710168 - RNA, 21 nt, Human
gcaggguuugugcugugaguu

SEQ ID NO: 710169 - RNA, 22 nt, Human
accugagacuugggaugggaau

SEQ ID NO: 710170 - RNA, 23 nt, Human
ucucucuuagcuaugcuuauggc

SEQ ID NO: 710171 - RNA, 23 nt, Human
cuuuccuuucuuugacacccagc

SEQ ID NO: 710172 - RNA, 22 nt, Human
ccuuuagaauucugccccuccu

SEQ ID NO: 710173 - RNA, 21 nt, Human
cagugguugcugaauuagugg

SEQ ID NO: 710174 - RNA, 22 nt, Human
ccucuggcagccagccaguugu

SEQ ID NO: 710175 - RNA, 22 nt, Human
acauuuuacaguugucuggcua

SEQ ID NO: 710176 - RNA, 22 nt, Human
cuuagggaauugggaggaugcc

SEQ ID NO: 710177 - RNA, 22 nt, Human
gggggaugcucaggaggcugcu

SEQ ID NO: 710178 - RNA, 22 nt, Human
agcagcucaacagugucucuau

SEQ ID NO: 710179 - RNA, 22 nt, Human
cuuuacuucagcaagcuuuccu

SEQ ID NO: 710180 - RNA, 17 nt, Human
auggcuuccauugacca

SEQ ID NO: 710181 - RNA, 21 nt, Human
ccugugccagucuauguguuc

SEQ ID NO: 710182 - RNA, 22 nt, Human
cagagagggcggcccuggcuuc

SEQ ID NO: 710183 - RNA, 22 nt, Human
guggcugcagagccagcaagcu

SEQ ID NO: 710184 - RNA, 22 nt, Human
aauauuucuguagcuauguucu

SEQ ID NO: 710185 - RNA, 22 nt, Human
uuuauguuugacaaugaucugg

SEQ ID NO: 710186 - RNA, 22 nt, Human
ucugucauuagccuugacugua

SEQ ID NO: 710187 - RNA, 19 nt, Human
gccuuggcauucucugcuu

SEQ ID NO: 710188 - RNA, 22 nt, Human
uacuuguguucuacuagagaaa

SEQ ID NO: 710189 - RNA, 22 nt, Human
gaggccuggcucugcccuccug

SEQ ID NO: 710190 - RNA, 22 nt, Human
acagcugggaaucagcugggga

SEQ ID NO: 710191 - RNA, 22 nt, Human
aggcuagacuuuggcgaagcac

SEQ ID NO: 710192 - RNA, 22 nt, Human
uaggaaacuaauacagucugga

SEQ ID NO: 710193 - RNA, 22 nt, Human
caggcagugugacgcuaggguu

SEQ ID NO: 710194 - RNA, 22 nt, Human
guggcugcaucggggugaccag

SEQ ID NO: 710195 - RNA, 22 nt, Human
aauuuccagaccccauccacag

SEQ ID NO: 710196 - RNA, 19 nt, Human
aggucccucccucgaggcu

SEQ ID NO: 710197 - RNA, 22 nt, Human
gcaggggcggcuggguuuccag

SEQ ID NO: 710198 - RNA, 23 nt, Human
cagaagcaccuguugacugcugc

SEQ ID NO: 710199 - RNA, 22 nt, Human
uuaucuuggguaacuuugugca

SEQ ID NO: 710200 - RNA, 22 nt, Human
auguuuaagaaagucuuccaua

SEQ ID NO: 710201 - RNA, 22 nt, Human
agucugaaguagucuuuagugu

SEQ ID NO: 710202 - RNA, 17 nt, Human
augugucugaguguccu

SEQ ID NO: 710203 - RNA, 22 nt, Human
gagagagaggugcugccaggca

SEQ ID NO: 710204 - RNA, 22 nt, Human
gaggccacauuacuuggugggu

SEQ ID NO: 710205 - RNA, 22 nt, Human
aaauuauucaaaaagcuguguu

SEQ ID NO: 710206 - RNA, 22 nt, Human
guucagcaagaauguuucuauu

SEQ ID NO: 710207 - RNA, 22 nt, Human
ucagaaagugaacuguugacau

SEQ ID NO: 710208 - RNA, 22 nt, Human
uugaaguugguguggaaaguag

SEQ ID NO: 710209 - RNA, 22 nt, Human
aguccccuggcaggagggacgu

SEQ ID NO: 710210 - RNA, 22 nt, Human
uggcagauuuugaagacagaga

SEQ ID NO: 710211 - RNA, 22 nt, Human
gccuuaggggucagacagagcu

SEQ ID NO: 710212 - RNA, 17 nt, Human
ugagaaguaggcaucau

SEQ ID NO: 710213 - RNA, 22 nt, Human
cuguuaaaauguggucuuaaaa

SEQ ID NO: 710214 - RNA, 22 nt, Human
ccagagagucgaugggggacac

SEQ ID NO: 710215 - RNA, 22 nt, Human
aacaguuugagcuuugaauuuc

SEQ ID NO: 710216 - RNA, 22 nt, Human
aauagcaucuucugagacaaag

SEQ ID NO: 710217 - RNA, 19 nt, Human
ccaaaggaaguuucccucc

SEQ ID NO: 710218 - RNA, 22 nt, Human
agguacuaccagggauuuucag

SEQ ID NO: 710219 - RNA, 22 nt, Human
augaggaugggaagggagccaa

SEQ ID NO: 710220 - RNA, 22 nt, Human
acauucaaggccuucugacaca

SEQ ID NO: 710221 - RNA, 22 nt, Human
aacuugaaacuguuccagaaaa

SEQ ID NO: 710222 - RNA, 23 nt, Human
ugcucccaggugacgcugcuguu

SEQ ID NO: 710223 - RNA, 22 nt, Human
uagcacagcuucuugaugucac

SEQ ID NO: 710224 - RNA, 22 nt, Human
ugauuuccuagcugacaugaaa

SEQ ID NO: 710225 - RNA, 22 nt, Human
aguggcuugcucugccucagcc

SEQ ID NO: 710226 - RNA, 22 nt, Human
agaggcggagguugcagugagc

SEQ ID NO: 710227 - RNA, 22 nt, Human
caguaguguugcugagugucag

SEQ ID NO: 710228 - RNA, 22 nt, Human
uccugccuuagagcaaggaaaa

SEQ ID NO: 710229 - RNA, 22 nt, Human
aaaucuagaaguuuaaaaggau

SEQ ID NO: 710230 - RNA, 22 nt, Human
gcugccccgagccauccuucag

SEQ ID NO: 710231 - RNA, 22 nt, Human
gccaggcaaauuaaggaaugca

SEQ ID NO: 710232 - RNA, 22 nt, Human
gucugggcaggaaucugcauuc

SEQ ID NO: 710233 - RNA, 22 nt, Human
gcaacuuuagaaaaaucuauaa

SEQ ID NO: 710234 - RNA, 20 nt, Human
cagcuagugguaggagucgg

SEQ ID NO: 710235 - RNA, 22 nt, Human
aucuggagugggacacagaaau

SEQ ID NO: 710236 - RNA, 22 nt, Human
agcaccaggucgcuggcacgcu

SEQ ID NO: 710237 - RNA, 22 nt, Human
gcccggcagucacacacccagg

SEQ ID NO: 710238 - RNA, 22 nt, Human
aaagcuggcuuuuacaggggcu

SEQ ID NO: 710239 - RNA, 22 nt, Human
cuaagacaugcccugcaugaua

SEQ ID NO: 710240 - RNA, 22 nt, Human
ccagagggaagaggaagcgcug

SEQ ID NO: 710241 - RNA, 22 nt, Human
cagugggugccaucgugcccuu

SEQ ID NO: 710242 - RNA, 22 nt, Human
ucugaggccccugggcaggaug

SEQ ID NO: 710243 - RNA, 22 nt, Human
uuacauuuuaguuaaccuguga

SEQ ID NO: 710244 - RNA, 22 nt, Human
gcugugcugcgggaggauuccg

SEQ ID NO: 710245 - RNA, 22 nt, Human
uucacauuucauaccacagcuu

SEQ ID NO: 710246 - RNA, 22 nt, Human
ugugagcacuauggcuaggcuc

SEQ ID NO: 710247 - RNA, 22 nt, Human
caugaugucacagagaagcaca

SEQ ID NO: 710248 - RNA, 22 nt, Human
gguacaaaguuagauuuaacuu

SEQ ID NO: 710249 - RNA, 22 nt, Human
uccaggcaaagccuuguagacg

SEQ ID NO: 710250 - RNA, 20 nt, Human
uuggcucugaucaguggagc

SEQ ID NO: 710251 - RNA, 22 nt, Human
cuggcaugaaauggcaucucau

SEQ ID NO: 710252 - RNA, 22 nt, Human
uuauuuguggcauccauguugg

SEQ ID NO: 710253 - RNA, 22 nt, Human
acccagagcccuuagcacagac

SEQ ID NO: 710254 - RNA, 21 nt, Human
auguggccauuguaguccacg

SEQ ID NO: 710255 - RNA, 22 nt, Human
aaccagagugacacucuacaga

SEQ ID NO: 710256 - RNA, 22 nt, Human
acacuuauuucuugucuaacca

SEQ ID NO: 710257 - RNA, 21 nt, Human
ugucagcucccuguccugugu

SEQ ID NO: 710258 - RNA, 22 nt, Human
gcuucugugguugucacgacua

SEQ ID NO: 710259 - RNA, 22 nt, Human
acacagcuuucagucauuaucu

SEQ ID NO: 710260 - RNA, 20 nt, Human
cuuguacaugauaaagauuu

SEQ ID NO: 710261 - RNA, 22 nt, Human
auucagcauaaucaguagcuug

SEQ ID NO: 710262 - RNA, 22 nt, Human
aaugacaauggcagagguagaa

SEQ ID NO: 710263 - RNA, 22 nt, Human
uucauaugcagauuaacaaaua

SEQ ID NO: 710264 - RNA, 22 nt, Human
auucaguguaguuauuaucuuu

SEQ ID NO: 710265 - RNA, 22 nt, Human
uccuucagggggccgccugcac

SEQ ID NO: 710266 - RNA, 19 nt, Human
uccagggcuuuauggcuuu

SEQ ID NO: 710267 - RNA, 22 nt, Human
agugaaaagaugcauuucucug

SEQ ID NO: 710268 - RNA, 22 nt, Human
agccacagagcaggagaccuuu

SEQ ID NO: 710269 - RNA, 22 nt, Human
ucuccaggacugagcuccagcc

SEQ ID NO: 710270 - RNA, 22 nt, Human
uuucuuaguccuagagugauuu

SEQ ID NO: 710271 - RNA, 22 nt, Human
ucugccaggcuuggugcuagau

SEQ ID NO: 710272 - RNA, 22 nt, Human
uuucuaggucuuccauacugcc

SEQ ID NO: 710273 - RNA, 22 nt, Human
uaacacauuuuaagccauuuua

SEQ ID NO: 710274 - RNA, 22 nt, Human
gccuggggucccuuguuggcac

SEQ ID NO: 710275 - RNA, 22 nt, Human
gcugacugguucaggucccgcu

SEQ ID NO: 710276 - RNA, 22 nt, Human
ugcugcucaaugagaugccauc

SEQ ID NO: 710277 - RNA, 22 nt, Human
cuucacaguaaauccagaagaa

SEQ ID NO: 710278 - RNA, 18 nt, Human
guuaacaauuacuaacgc

SEQ ID NO: 710279 - RNA, 17 nt, Human
uguauuuguaccacagc

SEQ ID NO: 710280 - RNA, 22 nt, Human
gccucuggguuggugacaggcu

SEQ ID NO: 710281 - RNA, 22 nt, Human
aagugugggaaguugcuaaaau

SEQ ID NO: 710282 - RNA, 22 nt, Human
aaagugcugggauuacaagcgu

SEQ ID NO: 710283 - RNA, 22 nt, Human
cuugccagggacucagucaggg

SEQ ID NO: 710284 - RNA, 22 nt, Human
acugcauuaucaccaagaugua

SEQ ID NO: 710285 - RNA, 22 nt, Human
aguacauuuauuaaugguaaaa

SEQ ID NO: 710286 - RNA, 22 nt, Human
cagcccucugaagaggcgcuug

SEQ ID NO: 710287 - RNA, 22 nt, Human
augcaauaguaauucuagucug

SEQ ID NO: 710288 - RNA, 22 nt, Human
gucagcaaaaaauuuaugugag

SEQ ID NO: 710289 - RNA, 19 nt, Human
cucuuacagaauagacaca

SEQ ID NO: 710290 - RNA, 22 nt, Human
aacauguagcagaaacgacuaa

SEQ ID NO: 710291 - RNA, 22 nt, Human
agagccugcaucuagccucaga

SEQ ID NO: 710292 - RNA, 22 nt, Human
agguacugaaaaaauguuugca

SEQ ID NO: 710293 - RNA, 22 nt, Human
gacuggagugccuccaggaaag

SEQ ID NO: 710294 - RNA, 22 nt, Human
gagguccagccaagcggcaagg

SEQ ID NO: 710295 - RNA, 20 nt, Human
acaauauguagaugaauagc

SEQ ID NO: 710296 - RNA, 22 nt, Human
agcuccugcucuuugucccuaa

SEQ ID NO: 710297 - RNA, 22 nt, Human
ccaggaggucugaguguggaca

SEQ ID NO: 710298 - RNA, 22 nt, Human
caaagucagccagcuaguaggu

SEQ ID NO: 710299 - RNA, 22 nt, Human
cuguguuggcuuuucucuugua

SEQ ID NO: 710300 - RNA, 22 nt, Human
uacauagauuuugaaacuggac

SEQ ID NO: 710301 - RNA, 17 nt, Human
gcaccgugggcacacuc

SEQ ID NO: 710302 - RNA, 22 nt, Human
gagcagcagguggggcuggcuu

SEQ ID NO: 710303 - RNA, 22 nt, Human
augagcaguagguucauggcug

SEQ ID NO: 710304 - RNA, 22 nt, Human
uguggcuguugaggaccccaag

SEQ ID NO: 710305 - RNA, 22 nt, Human
ccuggccacucagguguggggc

SEQ ID NO: 710306 - RNA, 18 nt, Human
gcagagcagaagcucaag

SEQ ID NO: 710307 - RNA, 22 nt, Human
agugaacaaagguagugagcau

SEQ ID NO: 710308 - RNA, 20 nt, Human
acaguguuagguuuuuccuu

SEQ ID NO: 710309 - RNA, 22 nt, Human
augccaaagcccaaguucauca

SEQ ID NO: 710310 - RNA, 22 nt, Human
acagauaaauuuauaggagugu

SEQ ID NO: 710311 - RNA, 21 nt, Human
gacaggcaaggagucacuuag

SEQ ID NO: 710312 - RNA, 22 nt, Human
cacccaggcagguggcugagaa

SEQ ID NO: 710313 - RNA, 21 nt, Human
ugggcaccaaaaccuaggagu

SEQ ID NO: 710314 - RNA, 22 nt, Human
caugaacuccaagcuuccuucc

SEQ ID NO: 710315 - RNA, 22 nt, Human
auccuuggcacaguggaauuca

SEQ ID NO: 710316 - RNA, 22 nt, Human
aggaggaacucagaaagaaggu

SEQ ID NO: 710317 - RNA, 22 nt, Human
aguaucuucaaguuucuucuag

SEQ ID NO: 710318 - RNA, 22 nt, Human
ucuucagagcauuucugaggua

SEQ ID NO: 710319 - RNA, 22 nt, Human
aguuuucaguaaauauuaguga

SEQ ID NO: 710320 - RNA, 22 nt, Human
aggcucagugcaaaucauucug

SEQ ID NO: 710321 - RNA, 22 nt, Human
gaggacugaaacuuacaggaaa

SEQ ID NO: 710322 - RNA, 22 nt, Human
caugagugucaucucagcagcu

SEQ ID NO: 710323 - RNA, 22 nt, Human
guguccuuauaagaagagaugc

SEQ ID NO: 710324 - RNA, 22 nt, Human
uacugcaugguggaguggagcu

SEQ ID NO: 710325 - RNA, 22 nt, Human
gcagaggaucaggcucuggaaa

SEQ ID NO: 710326 - RNA, 22 nt, Human
ccuggggaccugccucagcccu

SEQ ID NO: 710327 - RNA, 22 nt, Human
cauaaugugugucauacagacu

SEQ ID NO: 710328 - RNA, 22 nt, Human
cgggcagauugggaagguucau

SEQ ID NO: 710329 - RNA, 22 nt, Human
accaggaagaacaggcaaggca

SEQ ID NO: 710330 - RNA, 22 nt, Human
uagggcucacugagaugaauau

SEQ ID NO: 710331 - RNA, 22 nt, Human
uauuauauuuaguaauguggag

SEQ ID NO: 710332 - RNA, 22 nt, Human
uuggagaauguuuuccugcagu

SEQ ID NO: 710333 - RNA, 22 nt, Human
cuggggcucucuggaaugcuug

SEQ ID NO: 710334 - RNA, 22 nt, Human
uuugacaucuaagaauucuuac

SEQ ID NO: 710335 - RNA, 22 nt, Human
gggugcugacuggggccugaaa

SEQ ID NO: 710336 - RNA, 22 nt, Human
guggcaguugcuguggcaauaa

SEQ ID NO: 710337 - RNA, 22 nt, Human
acaagugcauggaaucagcugu

SEQ ID NO: 710338 - RNA, 22 nt, Human
aagggcucugcugucucucccc

SEQ ID NO: 710339 - RNA, 19 nt, Human
acagugucuguauauaaau

SEQ ID NO: 710340 - RNA, 22 nt, Human
gagagcuguguucauucuacca

SEQ ID NO: 710341 - RNA, 22 nt, Human
aaugaauggguuuaauauuuua

SEQ ID NO: 710342 - RNA, 22 nt, Human
uauuguacaugguuaugcagga

SEQ ID NO: 710343 - RNA, 22 nt, Human
gaagcaaagagcuagugccgcu

SEQ ID NO: 710344 - RNA, 22 nt, Human
cagggucaagagacuccagcag

SEQ ID NO: 710345 - RNA, 22 nt, Human
ggcuccugcuguccuuugaagc

SEQ ID NO: 710346 - RNA, 20 nt, Human
aagcuggaagaccagcauug

SEQ ID NO: 710347 - RNA, 22 nt, Human
gcuccaggcgagcuggaccaga

SEQ ID NO: 710348 - RNA, 22 nt, Human
uacauguuuacuccaagucagg

SEQ ID NO: 710349 - RNA, 22 nt, Human
aggaaugucauagaauaaucau

SEQ ID NO: 710350 - RNA, 19 nt, Human
ccagagcccgccagauggg

SEQ ID NO: 710351 - RNA, 22 nt, Human
gucccaggugggcuccaccucu

SEQ ID NO: 710352 - RNA, 23 nt, Human
ucuuggcuggacaagucacucac

SEQ ID NO: 710353 - RNA, 22 nt, Human
auaaggaaccugggcuuaagag

SEQ ID NO: 710354 - RNA, 22 nt, Human
ugcaaacaguuaagaugcaggc

SEQ ID NO: 710355 - RNA, 22 nt, Human
uguccaccgguccugugauggg

SEQ ID NO: 710356 - RNA, 22 nt, Human
agcaguaagacuuuuuucugug

SEQ ID NO: 710357 - RNA, 23 nt, Human
ccuccugggcacaggccugaugg

SEQ ID NO: 710358 - RNA, 22 nt, Human
agaaauguauucuguauguuuu

SEQ ID NO: 710359 - RNA, 22 nt, Human
guuucagaaaugguuuaugcaa

SEQ ID NO: 710360 - RNA, 22 nt, Human
uuguaaacugcugcaggagugc

SEQ ID NO: 710361 - RNA, 21 nt, Human
gcugcccaacccugcaucucc

SEQ ID NO: 710362 - RNA, 22 nt, Human
ggcaugcaugcaagguggugua

SEQ ID NO: 710363 - RNA, 22 nt, Human
gcuggguggaucggaggcucug

SEQ ID NO: 710364 - RNA, 22 nt, Human
ucugaggcuaagagacagaggc

SEQ ID NO: 710365 - RNA, 22 nt, Human
gcugaggagcgagaacucugcu

SEQ ID NO: 710366 - RNA, 22 nt, Human
uguacagacuguauuuacaagu

SEQ ID NO: 710367 - RNA, 22 nt, Human
ucuuugcaaaauacaacaaugg

SEQ ID NO: 710368 - RNA, 19 nt, Human
uuuuggaaaugugaacagc

SEQ ID NO: 710369 - RNA, 21 nt, Human
uagcaggaggccccugcuugc

SEQ ID NO: 710370 - RNA, 22 nt, Human
agggcagcccuucugggagggc

SEQ ID NO: 710371 - RNA, 22 nt, Human
uaccuuugaucuggaauuuuaa

SEQ ID NO: 710372 - RNA, 22 nt, Human
gagcugccaguguaugaauucu

SEQ ID NO: 710373 - RNA, 18 nt, Human
acucaggaaaugaugaca

SEQ ID NO: 710374 - RNA, 22 nt, Human
gaacuuuguggggcugagagga

SEQ ID NO: 710375 - RNA, 22 nt, Human
caguccuuucugaaauccuaua

SEQ ID NO: 710376 - RNA, 22 nt, Human
gucuccuguccugcaggaugga

SEQ ID NO: 710377 - RNA, 22 nt, Human
gauaaugaugacaaugacaacc

SEQ ID NO: 710378 - RNA, 22 nt, Human
uuugagaagaguuugagguauu

SEQ ID NO: 710379 - RNA, 22 nt, Human
gagccagcuacauggucugcaa

SEQ ID NO: 710380 - RNA, 22 nt, Human
aaaaaccuuucauugcaaaugu

SEQ ID NO: 710381 - RNA, 22 nt, Human
guuccugagaaauaaagagaga

SEQ ID NO: 710382 - RNA, 22 nt, Human
cuggagugauacucagaaugug

SEQ ID NO: 710383 - RNA, 22 nt, Human
acugucuguccugcucuccgug

SEQ ID NO: 710384 - RNA, 16 nt, Human
gggagggaguuggugg

SEQ ID NO: 710385 - RNA, 22 nt, Human
ggccucucucccuggcuugcag

SEQ ID NO: 710386 - RNA, 22 nt, Human
auacauucaucacuuuuggucc

SEQ ID NO: 710387 - RNA, 22 nt, Human
ucuuucuuaaauagguggauug

SEQ ID NO: 710388 - RNA, 22 nt, Human
auggacagguacugcagugggu

SEQ ID NO: 710389 - RNA, 23 nt, Human
acuguuggugcagaagugccuug

SEQ ID NO: 710390 - RNA, 22 nt, Human
ucuugggggacuuuggcaugga

SEQ ID NO: 710391 - RNA, 22 nt, Human
acaaugucucauauucguguuc

SEQ ID NO: 710392 - RNA, 22 nt, Human
uuuagcaaauuagcaccucuaa

SEQ ID NO: 710393 - RNA, 22 nt, Human
ucuuuugugccaaguaaugaau

SEQ ID NO: 710394 - RNA, 22 nt, Human
aggagcugguagucucauuggg

SEQ ID NO: 710395 - RNA, 20 nt, Human
gaauguuucacuugcuccau

SEQ ID NO: 710396 - RNA, 22 nt, Human
guuaaagugaucuugucagguu

SEQ ID NO: 710397 - RNA, 22 nt, Human
uacuauuuugacaugaaauuga

SEQ ID NO: 710398 - RNA, 22 nt, Human
aggcugugagaaguccuucagu

SEQ ID NO: 710399 - RNA, 22 nt, Human
uauguugcaccaaccuaauaau

SEQ ID NO: 710400 - RNA, 20 nt, Human
ggauggccggaccagagccu

SEQ ID NO: 710401 - RNA, 22 nt, Human
uccucccugcacucagugaagu

SEQ ID NO: 710402 - RNA, 22 nt, Human
uaucuacaguuaauaugucauc

SEQ ID NO: 710403 - RNA, 18 nt, Human
ggguucaccugccuuugg

SEQ ID NO: 710404 - RNA, 22 nt, Human
cuagaaaaauacuuuauuguga

SEQ ID NO: 710405 - RNA, 22 nt, Human
ggccugcuuuccgagccugcag

SEQ ID NO: 710406 - RNA, 22 nt, Human
acaagucuguuaugcaccugga

SEQ ID NO: 710407 - RNA, 20 nt, Human
uucauucacguagcuguuga

SEQ ID NO: 710408 - RNA, 22 nt, Human
auuucugccauagccaggggau

SEQ ID NO: 710409 - RNA, 22 nt, Human
ccuguuguuuagcacuuagaac

SEQ ID NO: 710410 - RNA, 20 nt, Human
acaaaguauugaggacaagu

SEQ ID NO: 710411 - RNA, 22 nt, Human
ugaucauuaucaaacuggucau

SEQ ID NO: 710412 - RNA, 19 nt, Human
cugaggcaaguggugguca

SEQ ID NO: 710413 - RNA, 22 nt, Human
acuuaaagguuagcuauucuac

SEQ ID NO: 710414 - RNA, 22 nt, Human
ggagagcugguauaugaagaca

SEQ ID NO: 710415 - RNA, 22 nt, Human
gcugggcagugagugaguccuu

SEQ ID NO: 710416 - RNA, 22 nt, Human
cuuuugcacccagaguuauuug

SEQ ID NO: 710417 - RNA, 22 nt, Human
cucagagagacaaugugggaca

SEQ ID NO: 710418 - RNA, 22 nt, Human
cucggguaccaugcuaggcacu

SEQ ID NO: 710419 - RNA, 22 nt, Human
ucccagagcucuggagguugga

SEQ ID NO: 710420 - RNA, 22 nt, Human
caggguacagaguuuucuaaac

SEQ ID NO: 710421 - RNA, 22 nt, Human
uuaaauauuauguugucugcaa

SEQ ID NO: 710422 - RNA, 22 nt, Human
acugaggaacauauauaagaug

SEQ ID NO: 710423 - RNA, 22 nt, Human
acuccugugggcauggcacccc

SEQ ID NO: 710424 - RNA, 22 nt, Human
auggccaguguugagaucaggc

SEQ ID NO: 710425 - RNA, 22 nt, Human
cccagccaagugaucugaccgc

SEQ ID NO: 710426 - RNA, 22 nt, Human
cugcuuugacuguuaagaacca

SEQ ID NO: 710427 - RNA, 22 nt, Human
aguaugaauggaaacuaccuau

SEQ ID NO: 710428 - RNA, 22 nt, Human
caaagguaaagaucugcugugg

SEQ ID NO: 710429 - RNA, 22 nt, Human
ccagagcugcauccagcagguu

SEQ ID NO: 710430 - RNA, 22 nt, Human
ccaccagcuucagcagccgcgg

SEQ ID NO: 710431 - RNA, 22 nt, Human
ggcuggccagggcccucgcugg

SEQ ID NO: 710432 - RNA, 23 nt, Human
uucucaguccugcccagggaggc

SEQ ID NO: 710433 - RNA, 22 nt, Human
gauugaaagacuguuugggaga

SEQ ID NO: 710434 - RNA, 22 nt, Human
ggaugcugcugcacauccugca

SEQ ID NO: 710435 - RNA, 22 nt, Human
agcuuuauucaugauuucaggg

SEQ ID NO: 710436 - RNA, 22 nt, Human
agcagggcucacauuaguggau

SEQ ID NO: 710437 - RNA, 22 nt, Human
augugcuuauggucucugguug

SEQ ID NO: 710438 - RNA, 20 nt, Human
ugugucuuccuuucuuuaug

SEQ ID NO: 710439 - RNA, 22 nt, Human
guguacauauugagucugcuga

SEQ ID NO: 710440 - RNA, 21 nt, Human
acuguuauucccauuuucacc

SEQ ID NO: 710441 - RNA, 22 nt, Human
agaaagcacccugcacuuucug

SEQ ID NO: 710442 - RNA, 22 nt, Human
uugggaaauauggauuguuauu

SEQ ID NO: 710443 - RNA, 20 nt, Human
gaggcugcggacugcuggac

SEQ ID NO: 710444 - RNA, 22 nt, Human
ccugccugcguccucugagggc

SEQ ID NO: 710445 - RNA, 22 nt, Human
aauagcauccuguaucucuucc

SEQ ID NO: 710446 - RNA, 22 nt, Human
acauagaaggaagaguaguagg

SEQ ID NO: 710447 - RNA, 22 nt, Human
acaacuggcuuuuuagcuuguu

SEQ ID NO: 710448 - RNA, 22 nt, Human
acagggcagaaauguugcaucu

SEQ ID NO: 710449 - RNA, 22 nt, Human
acaaagcuagagaagagaauug

SEQ ID NO: 710450 - RNA, 22 nt, Human
gcucucugcagccuccuuggag

SEQ ID NO: 710451 - RNA, 22 nt, Human
auguuuccagauaugucacccu

SEQ ID NO: 710452 - RNA, 22 nt, Human
agagggugaaugagauagaaaa

SEQ ID NO: 710453 - RNA, 22 nt, Human
aagaaaggauauaugggaggua

SEQ ID NO: 710454 - RNA, 22 nt, Human
caugcagaugucaugaggcaug

SEQ ID NO: 710455 - RNA, 22 nt, Human
acuggaagccaguugacaauca

SEQ ID NO: 710456 - RNA, 22 nt, Human
caucacagggggcuagaagucu

SEQ ID NO: 710457 - RNA, 23 nt, Human
ugagaagccaggggagcgugagg

SEQ ID NO: 710458 - RNA, 22 nt, Human
agcagauaguagaacauguaua

SEQ ID NO: 710459 - RNA, 21 nt, Human
uggcugccuacaugcugcagg

SEQ ID NO: 710460 - RNA, 21 nt, Human
gugugcugauacauuggagaa

SEQ ID NO: 710461 - RNA, 22 nt, Human
uuucucugcuguguuggcagcu

SEQ ID NO: 710462 - RNA, 22 nt, Human
uuguauuaaaauguguuucugu

SEQ ID NO: 710463 - RNA, 22 nt, Human
cagugagggcccccuuccaggu

SEQ ID NO: 710464 - RNA, 20 nt, Human
ggccacagggugcuggugga

SEQ ID NO: 710465 - RNA, 22 nt, Human
aaaaugaggaacggaucauggc

SEQ ID NO: 710466 - RNA, 22 nt, Human
ccaggcuggauuuugcaguuca

SEQ ID NO: 710467 - RNA, 22 nt, Human
cagagguuugaucgaguagguc

SEQ ID NO: 710468 - RNA, 22 nt, Human
cagcaaggguuauaucaaagau

SEQ ID NO: 710469 - RNA, 22 nt, Human
auuaguguucuuaucuucuagg

SEQ ID NO: 710470 - RNA, 22 nt, Human
uccaaaggcaaaacuguggugu

SEQ ID NO: 710471 - RNA, 22 nt, Human
augguggacucuugauucaggc

SEQ ID NO: 710472 - RNA, 22 nt, Human
ugcucuggguucuugcuguuac

SEQ ID NO: 710473 - RNA, 22 nt, Human
ugccaccaggagaaccagugca

SEQ ID NO: 710474 - RNA, 22 nt, Human
cucuuaaagcuuccaguuucaa

SEQ ID NO: 710475 - RNA, 22 nt, Human
ucuugaaguccuuacauuugau

SEQ ID NO: 710476 - RNA, 22 nt, Human
aagcagcagccugaaguacguc

SEQ ID NO: 710477 - RNA, 20 nt, Human
ggagagcagggaagacagua

SEQ ID NO: 710478 - RNA, 22 nt, Human
uacugucugcuucuuauagcuu

SEQ ID NO: 710479 - RNA, 20 nt, Human
gugggcagagcaccaccugg

SEQ ID NO: 710480 - RNA, 22 nt, Human
guggagcccugguagggacccc

SEQ ID NO: 710481 - RNA, 22 nt, Human
ccacugauccugacuuuggagc

SEQ ID NO: 710482 - RNA, 22 nt, Human
uucagaauauuuguuuuacaug

SEQ ID NO: 710483 - RNA, 22 nt, Human
uauuuaaaaagaggccagcugg

SEQ ID NO: 710484 - RNA, 22 nt, Human
caggcuccauuaaucauccugc

SEQ ID NO: 710485 - RNA, 22 nt, Human
uuugcacacauucuuagaaaug

SEQ ID NO: 710486 - RNA, 22 nt, Human
caaaugcagauucaggaguucu

SEQ ID NO: 710487 - RNA, 22 nt, Human
ccaggcagccugcuccauucug

SEQ ID NO: 710488 - RNA, 22 nt, Human
cuggggcauugggagaggccug

SEQ ID NO: 710489 - RNA, 22 nt, Human
cuuuguuguuaauuggcgcuua

SEQ ID NO: 710490 - RNA, 22 nt, Human
cccaggaaauagccaggaggug

SEQ ID NO: 710491 - RNA, 22 nt, Human
ucagcccaacccugcacaagga

SEQ ID NO: 710492 - RNA, 22 nt, Human
uucuuuccuugccucagugaag

SEQ ID NO: 710493 - RNA, 22 nt, Human
gaaaucuugcucauugugacaa

SEQ ID NO: 710494 - RNA, 21 nt, Human
ugcuucccugggccacacuga

SEQ ID NO: 710495 - RNA, 22 nt, Human
cucuggcuccauuucccuaugu

SEQ ID NO: 710496 - RNA, 22 nt, Human
cuuucaguuaguaccuaguggc

SEQ ID NO: 710497 - RNA, 18 nt, Human
ugaggccucugcugggcc

SEQ ID NO: 710498 - RNA, 22 nt, Human
gcuggagaggggucacucugag

SEQ ID NO: 710499 - RNA, 22 nt, Human
ugcauauacccgcauuuacaua

SEQ ID NO: 710500 - RNA, 22 nt, Human
uguagaaacuacacaugcaaca

SEQ ID NO: 710501 - RNA, 19 nt, Human
acaaauuguccucaucaag

SEQ ID NO: 710502 - RNA, 22 nt, Human
uugauacaugcucuagaguuga

SEQ ID NO: 710503 - RNA, 18 nt, Human
gagguagauaagauuuuc

SEQ ID NO: 710504 - RNA, 22 nt, Human
ugacagaguccagaaguagugu

SEQ ID NO: 710505 - RNA, 22 nt, Human
ucugccuggaugauggcagggc

SEQ ID NO: 710506 - RNA, 22 nt, Human
gccaggcauguccucugcagaa

SEQ ID NO: 710507 - RNA, 22 nt, Human
ggaagaaaaugggcaacaggug

SEQ ID NO: 710508 - RNA, 22 nt, Human
aaacacugucucugguauugaa

SEQ ID NO: 710509 - RNA, 22 nt, Human
aaguacauggaggauagcugcu

SEQ ID NO: 710510 - RNA, 19 nt, Human
agcuuccauauucucuagu

SEQ ID NO: 710511 - RNA, 22 nt, Human
uggcugcuagccagagcuucag

SEQ ID NO: 710512 - RNA, 22 nt, Human
uccaugaggcagggaggcuggc

SEQ ID NO: 710513 - RNA, 22 nt, Human
cauaauauacuacauugaugaa

SEQ ID NO: 710514 - RNA, 22 nt, Human
uggggccugugacggguccaga

SEQ ID NO: 710515 - RNA, 22 nt, Human
aagcuggcaugucaccugagaa

SEQ ID NO: 710516 - RNA, 22 nt, Human
cugcagcaguacucagcagcca

SEQ ID NO: 710517 - RNA, 22 nt, Human
gcaaggcuuugugaauuuuaaa

SEQ ID NO: 710518 - RNA, 22 nt, Human
gcagaccucaggacaucauuag

SEQ ID NO: 710519 - RNA, 22 nt, Human
cucuuuacucuguguuauuguu

SEQ ID NO: 710520 - RNA, 22 nt, Human
cagaggcaggaagaugggcagu

SEQ ID NO: 710521 - RNA, 22 nt, Human
uuccuucaguucagggaacccu

SEQ ID NO: 710522 - RNA, 22 nt, Human
ccaugcuaggaacucucaggga

SEQ ID NO: 710523 - RNA, 20 nt, Human
cugcccugcccuggguccug

SEQ ID NO: 710524 - RNA, 22 nt, Human
uuaucucucacuuuuaaggaca

SEQ ID NO: 710525 - RNA, 23 nt, Human
agcagcaaaaauuuaucuuucug

SEQ ID NO: 710526 - RNA, 21 nt, Human
agagcugggacuugccugaga

SEQ ID NO: 710527 - RNA, 22 nt, Human
ugcauuuuugauaacuguguac

SEQ ID NO: 710528 - RNA, 22 nt, Human
ugugugucuuugccuccucuca

SEQ ID NO: 710529 - RNA, 22 nt, Human
aacacaggggguuacaaauugu

SEQ ID NO: 710530 - RNA, 23 nt, Human
cuucuagagucagcuccaaguuu

SEQ ID NO: 710531 - RNA, 22 nt, Human
ggcugccuugacccuggcuccg

SEQ ID NO: 710532 - RNA, 22 nt, Human
uucugggacauugcagguauuc

SEQ ID NO: 710533 - RNA, 22 nt, Human
ggaguaaggcucagaggaaaug

SEQ ID NO: 710534 - RNA, 22 nt, Human
guguggcugaaaucaaggcagg

SEQ ID NO: 710535 - RNA, 18 nt, Human
uauucuguccuaugaagc

SEQ ID NO: 710536 - RNA, 22 nt, Human
gucuaaacuuagggaucgaaca

SEQ ID NO: 710537 - RNA, 22 nt, Human
gcaaggcugugcacuuugcauu

SEQ ID NO: 710538 - RNA, 22 nt, Human
cuguggcaggugucuggggcag

SEQ ID NO: 710539 - RNA, 22 nt, Human
cacccagcacagagggaggcga

SEQ ID NO: 710540 - RNA, 22 nt, Human
guuuaauaauguugaauuacua

SEQ ID NO: 710541 - RNA, 22 nt, Human
gucugccuggaggcagcugcug

SEQ ID NO: 710542 - RNA, 22 nt, Human
uggccagaaccugcaguaggcc

SEQ ID NO: 710543 - RNA, 22 nt, Human
ggagccaguuuagaccucaguu

SEQ ID NO: 710544 - RNA, 22 nt, Human
gaguacauguauagagauuaac

SEQ ID NO: 710545 - RNA, 22 nt, Human
ucuggguccccgaggaaggaga

SEQ ID NO: 710546 - RNA, 22 nt, Human
gaggaaaugguuguucaggugg

SEQ ID NO: 710547 - RNA, 22 nt, Human
uugcaggguuaaaguaagguag

SEQ ID NO: 710548 - RNA, 22 nt, Human
acaguuuaggaugagagaacac

SEQ ID NO: 710549 - RNA, 22 nt, Human
aguugugagaaacagaaugagc

SEQ ID NO: 710550 - RNA, 22 nt, Human
gugacuguuuuuaggaggagua

SEQ ID NO: 710551 - RNA, 23 nt, Human
gcuguacaggaaccaguuuggag

SEQ ID NO: 710552 - RNA, 22 nt, Human
acugucuucauaucugugucuc

SEQ ID NO: 710553 - RNA, 22 nt, Human
aguauauuuugauuguaugugu

SEQ ID NO: 710554 - RNA, 22 nt, Human
auggcagggaccaagcugucau

SEQ ID NO: 710555 - RNA, 22 nt, Human
ugaggccucauaaugagauuuc

SEQ ID NO: 710556 - RNA, 22 nt, Human
aggugggcaccaggcuuguggu

SEQ ID NO: 710557 - RNA, 22 nt, Human
uacaaaaguaauuacgguuuuu

SEQ ID NO: 710558 - RNA, 21 nt, Human
aaagauguuucuuuuccucac

SEQ ID NO: 710559 - RNA, 22 nt, Human
cggcuuccagcaggugcugcgc

SEQ ID NO: 710560 - RNA, 22 nt, Human
ucugcuguguccccugugcggg

SEQ ID NO: 710561 - RNA, 22 nt, Human
ucugggaacgaaggcuaauaug

SEQ ID NO: 710562 - RNA, 22 nt, Human
uggcugugguuuaucccaguuc

SEQ ID NO: 710563 - RNA, 22 nt, Human
uggugacacgaaguuugcuauc

SEQ ID NO: 710564 - RNA, 22 nt, Human
cagcuuuuuagaaucuagggca

SEQ ID NO: 710565 - RNA, 22 nt, Human
cauuguuauagcauuacacacc

SEQ ID NO: 710566 - RNA, 22 nt, Human
gucccugggaaaggagagggca

SEQ ID NO: 710567 - RNA, 22 nt, Human
acuggacagguucaugguuuua

SEQ ID NO: 710568 - RNA, 22 nt, Human
acaaagucaaauugcagccgcc

SEQ ID NO: 710569 - RNA, 19 nt, Human
ucguggggaggugggcagc

SEQ ID NO: 710570 - RNA, 22 nt, Human
aguccagggcuuagucagcggg

SEQ ID NO: 710571 - RNA, 22 nt, Human
aaauugucuuuaaucaggucau

SEQ ID NO: 710572 - RNA, 22 nt, Human
uuugacuucugggcauuuuggu

SEQ ID NO: 710573 - RNA, 22 nt, Human
ucagccaguauuugagugcuca

SEQ ID NO: 710574 - RNA, 22 nt, Human
auagaauguauuauaguacaga

SEQ ID NO: 710575 - RNA, 22 nt, Human
cccagccagccucuucccauau

SEQ ID NO: 710576 - RNA, 17 nt, Human
cucuguggagguguuua

SEQ ID NO: 710577 - RNA, 22 nt, Human
ugugcccaacgugcagguuugu

SEQ ID NO: 710578 - RNA, 22 nt, Human
gacaucaggaagacaugagagg

SEQ ID NO: 710579 - RNA, 22 nt, Human
uagcagcauguaagugaguaga

SEQ ID NO: 710580 - RNA, 22 nt, Human
auccagugagugcagcuguugu

SEQ ID NO: 710581 - RNA, 22 nt, Human
uuuaagcagagaaaugauguau

SEQ ID NO: 710582 - RNA, 22 nt, Human
uagcacaguucacuaugauaca

SEQ ID NO: 710583 - RNA, 22 nt, Human
agcauaaguugguacagccacu

SEQ ID NO: 710584 - RNA, 22 nt, Human
ggucccaggauugguugcgcag

SEQ ID NO: 710585 - RNA, 22 nt, Human
caccaggaccccacgguggguu

SEQ ID NO: 710586 - RNA, 17 nt, Human
auguggcuaagcugcug

SEQ ID NO: 710587 - RNA, 22 nt, Human
uucacaaugccuuguugauggu

SEQ ID NO: 710588 - RNA, 22 nt, Human
cagcucuuccuagccaugccac

SEQ ID NO: 710589 - RNA, 22 nt, Human
cuggagauacugcucuccauau

SEQ ID NO: 710590 - RNA, 22 nt, Human
uuacagaaguuucagcguuuua

SEQ ID NO: 710591 - RNA, 22 nt, Human
ucagccagcugugugcuucugc

SEQ ID NO: 710592 - RNA, 22 nt, Human
gaagguuuacugaagauuuaaa

SEQ ID NO: 710593 - RNA, 22 nt, Human
uggcugugucccuguccagagu

SEQ ID NO: 710594 - RNA, 22 nt, Human
agugcagacugaaaugaccuuc

SEQ ID NO: 710595 - RNA, 22 nt, Human
cuggcaggagcuguggccguag

SEQ ID NO: 710596 - RNA, 22 nt, Human
auuguuaaaguaauaaccaugg

SEQ ID NO: 710597 - RNA, 22 nt, Human
aggggcugccuggcuuggcacu

SEQ ID NO: 710598 - RNA, 22 nt, Human
ucuguccaggcuuacuauauau

SEQ ID NO: 710599 - RNA, 22 nt, Human
acaacaucagcugagaccuuca

SEQ ID NO: 710600 - RNA, 22 nt, Human
cucucccagucaggcucaggau

SEQ ID NO: 710601 - RNA, 22 nt, Human
cccuuuaauuccaacacaggaa

SEQ ID NO: 710602 - RNA, 22 nt, Human
uucaggagcuggcugcgaagga

SEQ ID NO: 710603 - RNA, 22 nt, Human
auggcagaaaggcaugugggcc

SEQ ID NO: 710604 - RNA, 22 nt, Human
cccugugauguagcuagaguag

SEQ ID NO: 710605 - RNA, 22 nt, Human
auggcccaggccuccuguggcu

SEQ ID NO: 710606 - RNA, 22 nt, Human
gccuccugagaagccacaggcu

SEQ ID NO: 710607 - RNA, 22 nt, Human
ugucuagugguuuauaaaauca

SEQ ID NO: 710608 - RNA, 22 nt, Human
caaaguuuaaaguagauuucag

SEQ ID NO: 710609 - RNA, 22 nt, Human
aaauacuggcaagugcuaauuc

SEQ ID NO: 710610 - RNA, 22 nt, Human
guggaaugaauagauuugcauu

SEQ ID NO: 710611 - RNA, 22 nt, Human
cuggcuuuuagugugaagacuu

SEQ ID NO: 710612 - RNA, 22 nt, Human
gggcaggcugagcaugucaccu

SEQ ID NO: 710613 - RNA, 21 nt, Human
ccucucucauuguaaugaagu

SEQ ID NO: 710614 - RNA, 21 nt, Human
uugauuuagcagaucuagcug

SEQ ID NO: 710615 - RNA, 22 nt, Human
ccugagccuggcucaugcacuc

SEQ ID NO: 710616 - RNA, 19 nt, Human
cugggagguguucagagaa

SEQ ID NO: 710617 - RNA, 22 nt, Human
gaauaauauugacuuugcaggc

SEQ ID NO: 710618 - RNA, 23 nt, Human
agaagcugggagccuggggaugg

SEQ ID NO: 710619 - RNA, 22 nt, Human
aauagcauuuuuaagggaauca

SEQ ID NO: 710620 - RNA, 22 nt, Human
ccagauaucacugccguguugu

SEQ ID NO: 710621 - RNA, 21 nt, Human
uaugugucuguggaaaacuag

SEQ ID NO: 710622 - RNA, 22 nt, Human
uuuauuuggcauccagggagaa

SEQ ID NO: 710623 - RNA, 23 nt, Human
aggaaguuaugaagggagaauag

SEQ ID NO: 710624 - RNA, 18 nt, Human
ggcuucucacugaccuca

SEQ ID NO: 710625 - RNA, 22 nt, Human
aagugugugggcaggcaguggu

SEQ ID NO: 710626 - RNA, 22 nt, Human
aguguuucuggaaucaguguuu

SEQ ID NO: 710627 - RNA, 22 nt, Human
aucagcaaaaaugccuucagaa

SEQ ID NO: 710628 - RNA, 23 nt, Human
accagcugcccugaacuuugugc

SEQ ID NO: 710629 - RNA, 22 nt, Human
aagcaauguguuaaugaaugag

SEQ ID NO: 710630 - RNA, 22 nt, Human
ucagagagguuaaauaucuugu

SEQ ID NO: 710631 - RNA, 22 nt, Human
auguuaaaugguuuauuauuaa

SEQ ID NO: 710632 - RNA, 22 nt, Human
acaggcacucucauuaaaauag

SEQ ID NO: 710633 - RNA, 23 nt, Human
acugaagaugucuuaguggcccu

SEQ ID NO: 710634 - RNA, 22 nt, Human
gguagacugucaaacacuagcc

SEQ ID NO: 710635 - RNA, 21 nt, Human
uggcuucauuugcaacccacu

SEQ ID NO: 710636 - RNA, 22 nt, Human
uaguuuuagucccauuuuacag

SEQ ID NO: 710637 - RNA, 22 nt, Human
gcagcuuuaaacauuggaaaua

SEQ ID NO: 710638 - RNA, 22 nt, Human
ugaggaugguguuggagagggc

SEQ ID NO: 710639 - RNA, 22 nt, Human
uaagaacuuggcagcaagaaau

SEQ ID NO: 710640 - RNA, 22 nt, Human
accagcucagagcaggcuccug

SEQ ID NO: 710641 - RNA, 22 nt, Human
cagaugaggggcauauaacaau

SEQ ID NO: 710642 - RNA, 22 nt, Human
auauggaaugguaaucuacaau

SEQ ID NO: 710643 - RNA, 22 nt, Human
uucuggaggccccuuccuucuc

SEQ ID NO: 710644 - RNA, 22 nt, Human
uaaacaucugaauccugcuucc

SEQ ID NO: 710645 - RNA, 22 nt, Human
cccugcaggggaccugcagccu

SEQ ID NO: 710646 - RNA, 22 nt, Human
gcagcugcaauaggcaucaagc

SEQ ID NO: 710647 - RNA, 22 nt, Human
gagacagaugcugcuggagcau

SEQ ID NO: 710648 - RNA, 22 nt, Human
acugaguuauggguaugccuug

SEQ ID NO: 710649 - RNA, 22 nt, Human
ucaguaauauucuuuaaaauac

SEQ ID NO: 710650 - RNA, 22 nt, Human
aaggaugaacauuaauacauca

SEQ ID NO: 710651 - RNA, 22 nt, Human
cuggcagugacauugcaggugc

SEQ ID NO: 710652 - RNA, 22 nt, Human
agggguaguaggauaacaaauu

SEQ ID NO: 710653 - RNA, 22 nt, Human
ucuguccagagguccuggagac

SEQ ID NO: 710654 - RNA, 22 nt, Human
aggcagcuucugauuagcagcg

SEQ ID NO: 710655 - RNA, 22 nt, Human
uccagagagauaguggcuaaua

SEQ ID NO: 710656 - RNA, 22 nt, Human
ugggcuccggcggccucaggcu

SEQ ID NO: 710657 - RNA, 22 nt, Human
uucuuuucuuggcaggaguaga

SEQ ID NO: 710658 - RNA, 22 nt, Human
cagagggaguuucugagguugc

SEQ ID NO: 710659 - RNA, 22 nt, Human
ggccucagaccggagcuggcca

SEQ ID NO: 710660 - RNA, 22 nt, Human
cuaggcugcagaugcauggaau

SEQ ID NO: 710661 - RNA, 22 nt, Human
cagaguggcgacccccucagcu

SEQ ID NO: 710662 - RNA, 22 nt, Human
aagagguggaacagcaauucgu

SEQ ID NO: 710663 - RNA, 22 nt, Human
ugcugccucagcuuccugggcu

SEQ ID NO: 710664 - RNA, 17 nt, Human
gucugggcuuuagagac

SEQ ID NO: 710665 - RNA, 22 nt, Human
guccccuggcccccagcgucgg

SEQ ID NO: 710666 - RNA, 22 nt, Human
ucaguaaaugaaugaauauaug

SEQ ID NO: 710667 - RNA, 17 nt, Human
cugugcucgagugaugg

SEQ ID NO: 710668 - RNA, 22 nt, Human
aagacauguuuuaagaauauuu

SEQ ID NO: 710669 - RNA, 22 nt, Human
auugcaaucuggugaaaacagu

SEQ ID NO: 710670 - RNA, 22 nt, Human
cucuggacuuguacauacucag

SEQ ID NO: 710671 - RNA, 22 nt, Human
agaaaccuccauuuauucacuc

SEQ ID NO: 710672 - RNA, 22 nt, Human
auugacuuaaaggcucugguua

SEQ ID NO: 710673 - RNA, 22 nt, Human
ugcagggcaucuuugaagugug

SEQ ID NO: 710674 - RNA, 22 nt, Human
ccuugggcuugggcauagcuuu

SEQ ID NO: 710675 - RNA, 22 nt, Human
agauuuuaguguagaggacuug

SEQ ID NO: 710676 - RNA, 22 nt, Human
aggaaccagacagaacugaaug

SEQ ID NO: 710677 - RNA, 22 nt, Human
gcauccaaaccauucaucagcc

SEQ ID NO: 710678 - RNA, 22 nt, Human
cuuccucuagccuaguaaugcc

SEQ ID NO: 710679 - RNA, 22 nt, Human
gacuccagcauauacuuuuagu

SEQ ID NO: 710680 - RNA, 22 nt, Human
cccucccaagcacucugacaua

SEQ ID NO: 710681 - RNA, 22 nt, Human
caugagaaugaagaagacuuaa

SEQ ID NO: 710682 - RNA, 22 nt, Human
ccaaaagcagcugucugugaau

SEQ ID NO: 710683 - RNA, 22 nt, Human
ucagguccucugggucccagcc

SEQ ID NO: 710684 - RNA, 22 nt, Human
auaaaggcaacaccaggguaug

SEQ ID NO: 710685 - RNA, 22 nt, Human
auacagaaaaugaugcagaguu

SEQ ID NO: 710686 - RNA, 18 nt, Human
gugagcagagagcaucac

SEQ ID NO: 710687 - RNA, 22 nt, Human
uagaagaucuuaaaagcugacu

SEQ ID NO: 710688 - RNA, 22 nt, Human
uuuuagcacuaagugauaugcu

SEQ ID NO: 710689 - RNA, 22 nt, Human
gagccucguggcggccacugcg

SEQ ID NO: 710690 - RNA, 22 nt, Human
gccugccugcugugugcaaguu

SEQ ID NO: 710691 - RNA, 22 nt, Human
uagacauacagugcaguacaua

SEQ ID NO: 710692 - RNA, 20 nt, Human
augcuuucuugugugcugcu

SEQ ID NO: 710693 - RNA, 22 nt, Human
gaguuauuaauggcugaguuug

SEQ ID NO: 710694 - RNA, 22 nt, Human
uggccagaguccagugagccuu

SEQ ID NO: 710695 - RNA, 22 nt, Human
uuaacuucaacacucucuugua

SEQ ID NO: 710696 - RNA, 22 nt, Human
ugucucaguauacgaaacacuu

SEQ ID NO: 710697 - RNA, 22 nt, Human
ggcuugucauguugauguucuu

SEQ ID NO: 710698 - RNA, 22 nt, Human
gauagcaacauagaacagaauu

SEQ ID NO: 710699 - RNA, 22 nt, Human
ccaggguggggcaggcccacug

SEQ ID NO: 710700 - RNA, 22 nt, Human
acagcuguggccacuugcaucc

SEQ ID NO: 710701 - RNA, 22 nt, Human
aaaaugcaugagaaugugcucg

SEQ ID NO: 710702 - RNA, 22 nt, Human
auuauuugacuugagaacaggu

SEQ ID NO: 710703 - RNA, 22 nt, Human
agauuuagcugugaacagcuug

SEQ ID NO: 710704 - RNA, 22 nt, Human
ggcuuccagcugggccuuggag

SEQ ID NO: 710705 - RNA, 22 nt, Human
auacuguuuugugacuuaucuu

SEQ ID NO: 710706 - RNA, 22 nt, Human
agaggggaaggaugugauguga

SEQ ID NO: 710707 - RNA, 22 nt, Human
agggcucagaacaaugagugua

SEQ ID NO: 710708 - RNA, 22 nt, Human
ugggaagggucaguuucuucau

SEQ ID NO: 710709 - RNA, 22 nt, Human
acacugugucuagcauuuuaca

SEQ ID NO: 710710 - RNA, 22 nt, Human
aggcagcugaccacaguaugau

SEQ ID NO: 710711 - RNA, 22 nt, Human
ugccgugucccauugugcucug

SEQ ID NO: 710712 - RNA, 22 nt, Human
ccuucgagauuuaaacacugau

SEQ ID NO: 710713 - RNA, 22 nt, Human
guuugccugugauguacauuuc

SEQ ID NO: 710714 - RNA, 22 nt, Human
uaaugaggaaauagagggaaug

SEQ ID NO: 710715 - RNA, 22 nt, Human
gcuguggccgucagggaaaugg

SEQ ID NO: 710716 - RNA, 22 nt, Human
ucccagaaucuuuggaagagca

SEQ ID NO: 710717 - RNA, 22 nt, Human
acaguggggucuuaauagaaca

SEQ ID NO: 710718 - RNA, 22 nt, Human
acaguagucuuaauuucaugua

SEQ ID NO: 710719 - RNA, 22 nt, Human
aggcccuguaagguguggagau

SEQ ID NO: 710720 - RNA, 21 nt, Human
caugucuuccacacuguagua

SEQ ID NO: 710721 - RNA, 22 nt, Human
uuuacaacguuccuggugcuaa

SEQ ID NO: 710722 - RNA, 22 nt, Human
cauggcaggaggcugcuggcag

SEQ ID NO: 710723 - RNA, 22 nt, Human
uuacacucugguugugggccuu

SEQ ID NO: 710724 - RNA, 22 nt, Human
uccuuaggaaaaugaugagggg

SEQ ID NO: 710725 - RNA, 22 nt, Human
uuauuguuuacuaguuugcaga

SEQ ID NO: 710726 - RNA, 22 nt, Human
aauauaugugguauugaccagc

SEQ ID NO: 710727 - RNA, 22 nt, Human
ggcacagaguuggcagagcugc

SEQ ID NO: 710728 - RNA, 23 nt, Human
ccuggcacacaguugacauggaa

SEQ ID NO: 710729 - RNA, 22 nt, Human
cuccacucaacaagcccagugu

SEQ ID NO: 710730 - RNA, 18 nt, Human
ggcucaggcuauccuaac

SEQ ID NO: 710731 - RNA, 22 nt, Human
aaagucugaaagauaagaguga

SEQ ID NO: 710732 - RNA, 23 nt, Human
auugaacagagagaaaaacaucc

SEQ ID NO: 710733 - RNA, 22 nt, Human
acauucuggaugucugaugaga

SEQ ID NO: 710734 - RNA, 22 nt, Human
gagacugcauuguccaaggguu

SEQ ID NO: 710735 - RNA, 22 nt, Human
aacucagucauaaagcgaaugc

SEQ ID NO: 710736 - RNA, 22 nt, Human
gcugcaggcgccugcggucucu

SEQ ID NO: 710737 - RNA, 22 nt, Human
gugggagaaauuagcucuaguu

SEQ ID NO: 710738 - RNA, 22 nt, Human
gggcuguaggagcuggaauggg

SEQ ID NO: 710739 - RNA, 22 nt, Human
cacacauuaauaucaaaggcuc

SEQ ID NO: 710740 - RNA, 22 nt, Human
ucaggaaagaguuagaugauua

SEQ ID NO: 710741 - RNA, 22 nt, Human
ugauacaaucaugagagaggac

SEQ ID NO: 710742 - RNA, 20 nt, Human
acaguuuauccaguuagcag

SEQ ID NO: 710743 - RNA, 22 nt, Human
acugugagaguuuuucuaggag

SEQ ID NO: 710744 - RNA, 22 nt, Human
uucacaggaggguggaugcaug

SEQ ID NO: 710745 - RNA, 23 nt, Human
uguguuuaccugaggaucuuguu

SEQ ID NO: 710746 - RNA, 22 nt, Human
cagggagaggcugguggaguaa

SEQ ID NO: 710747 - RNA, 19 nt, Human
agguaggcaguggcaugga

SEQ ID NO: 710748 - RNA, 22 nt, Human
auuugcuucugcuaaacaacuu

SEQ ID NO: 710749 - RNA, 22 nt, Human
guuuccuuuuucugcccucaau

SEQ ID NO: 710750 - RNA, 16 nt, Human
cagcuuuaugucagug

SEQ ID NO: 710751 - RNA, 17 nt, Human
agcugccagggagugug

SEQ ID NO: 710752 - RNA, 22 nt, Human
aaacccugcccuucccaagaug

SEQ ID NO: 710753 - RNA, 22 nt, Human
cuggccugaucucaugcugucc

SEQ ID NO: 710754 - RNA, 22 nt, Human
gcaaagcaagcugucagccuca

SEQ ID NO: 710755 - RNA, 22 nt, Human
ucucuaguauaauauagcaaaa

SEQ ID NO: 710756 - RNA, 22 nt, Human
ucaaaaggacagaagaccuaaa

SEQ ID NO: 710757 - RNA, 22 nt, Human
caggugaccuuuguccuaaguu

SEQ ID NO: 710758 - RNA, 22 nt, Human
caggaugguggcaugaucagaa

SEQ ID NO: 710759 - RNA, 22 nt, Human
ggagucugugucuugaagcagu

SEQ ID NO: 710760 - RNA, 19 nt, Human
ggggccugugauggucaca

SEQ ID NO: 710761 - RNA, 22 nt, Human
cacugcuuuaaggcugaguaac

SEQ ID NO: 710762 - RNA, 22 nt, Human
gauauacagagcauucuuugau

SEQ ID NO: 710763 - RNA, 22 nt, Human
gcuuucucuucacugauguuca

SEQ ID NO: 710764 - RNA, 22 nt, Human
augcuuuauacaaaacacuuaa

SEQ ID NO: 710765 - RNA, 22 nt, Human
aaguugcuagugcuuuucugag

SEQ ID NO: 710766 - RNA, 22 nt, Human
acacuguuuuagggaagaaaau

SEQ ID NO: 710767 - RNA, 22 nt, Human
cccacagguggaagccucggaa

SEQ ID NO: 710768 - RNA, 22 nt, Human
uaguuuagugaaugguuaaaga

SEQ ID NO: 710769 - RNA, 20 nt, Human
uaggcaauuaguagauaaca

SEQ ID NO: 710770 - RNA, 22 nt, Human
acaaucagcacugaguuuaucu

SEQ ID NO: 710771 - RNA, 22 nt, Human
gcugcagcagcugcaggguugu

SEQ ID NO: 710772 - RNA, 19 nt, Human
uggucucugucucuuugca

SEQ ID NO: 710773 - RNA, 22 nt, Human
uucuucaacaaggacacuguua

SEQ ID NO: 710774 - RNA, 22 nt, Human
uggguaggggacguggaagaaa

SEQ ID NO: 710775 - RNA, 22 nt, Human
ucugaaauacugcagguucucu

SEQ ID NO: 710776 - RNA, 22 nt, Human
agucacaguuucccugagagag

SEQ ID NO: 710777 - RNA, 22 nt, Human
aaaaaugaaacggcugguuggc

SEQ ID NO: 710778 - RNA, 17 nt, Human
gaauccuucucuguucu

SEQ ID NO: 710779 - RNA, 22 nt, Human
agcugcccccagggcugugcuu

SEQ ID NO: 710780 - RNA, 22 nt, Human
ccagaugucccucucagguuug

SEQ ID NO: 710781 - RNA, 22 nt, Human
agagaaaacucauugagguguc

SEQ ID NO: 710782 - RNA, 22 nt, Human
caggcuuggagggcaguggcau

SEQ ID NO: 710783 - RNA, 22 nt, Human
ucaauaaaauuguuuuccuauc

SEQ ID NO: 710784 - RNA, 22 nt, Human
cccugcacagccuggcucucuu

SEQ ID NO: 710785 - RNA, 22 nt, Human
aucaucauucuuggauaaagca

SEQ ID NO: 710786 - RNA, 22 nt, Human
uaaauugaucguuugggaugaa

SEQ ID NO: 710787 - RNA, 22 nt, Human
guuaaugugucugacacaaugg

SEQ ID NO: 710788 - RNA, 22 nt, Human
cgugcucuggacucguggcaca

SEQ ID NO: 710789 - RNA, 22 nt, Human
ucagggcaagucucagaagguu

SEQ ID NO: 710790 - RNA, 22 nt, Human
aaucagacuauuaaagucucuu

SEQ ID NO: 710791 - RNA, 22 nt, Human
ugcaguccaagagucuccuggu

SEQ ID NO: 710792 - RNA, 22 nt, Human
aaggccaggacaccaggggacu

SEQ ID NO: 710793 - RNA, 22 nt, Human
aguguucauuuauucauucacu

SEQ ID NO: 710794 - RNA, 22 nt, Human
cuuccuggccauugccauggca

SEQ ID NO: 710795 - RNA, 22 nt, Human
gucugggcuucagaguuagaga

SEQ ID NO: 710796 - RNA, 22 nt, Human
aggaagcccuugucauuucugu

SEQ ID NO: 710797 - RNA, 22 nt, Human
cgcugccaggauccccugccgg

SEQ ID NO: 710798 - RNA, 22 nt, Human
uagagguguucauucucuccau

SEQ ID NO: 710799 - RNA, 22 nt, Human
augccugucucagggucuguuu

SEQ ID NO: 710800 - RNA, 22 nt, Human
guggucagccccggugagcccu

SEQ ID NO: 710801 - RNA, 22 nt, Human
cuggccuggggccucagcugcu

SEQ ID NO: 710802 - RNA, 22 nt, Human
ugccugggggacuaaggccaaa

SEQ ID NO: 710803 - RNA, 19 nt, Human
gcaggguguugacuguccc

SEQ ID NO: 710804 - RNA, 22 nt, Human
caaauccagaucccagucguag

SEQ ID NO: 710805 - RNA, 22 nt, Human
agugcuguuagguuaauauagu

SEQ ID NO: 710806 - RNA, 22 nt, Human
ggccugugguuucuaguagguu

SEQ ID NO: 710807 - RNA, 22 nt, Human
acacugcuucucuggcagagcc

SEQ ID NO: 710808 - RNA, 22 nt, Human
ggcuggcacugaggagagcucu

SEQ ID NO: 710809 - RNA, 22 nt, Human
aucucuuagcagucuagugacc

SEQ ID NO: 710810 - RNA, 22 nt, Human
ucaggaaggcacuugguguguu

SEQ ID NO: 710811 - RNA, 22 nt, Human
auguuucauccacuggccuuuc

SEQ ID NO: 710812 - RNA, 22 nt, Human
agagccaaggcugagagcuauu

SEQ ID NO: 710813 - RNA, 22 nt, Human
uccagggcauccacgcgugggg

SEQ ID NO: 710814 - RNA, 22 nt, Human
aucauucucugcuugagcacuc

SEQ ID NO: 710815 - RNA, 22 nt, Human
caggaaagaaaugagaacacca

SEQ ID NO: 710816 - RNA, 22 nt, Human
uggugucucuuaguacauagau

SEQ ID NO: 710817 - RNA, 22 nt, Human
cauccuucaaaggcuacaauua

SEQ ID NO: 710818 - RNA, 22 nt, Human
aagaaaaucaguucuggucagu

SEQ ID NO: 710819 - RNA, 22 nt, Human
caggacaauuuugagccaccug

SEQ ID NO: 710820 - RNA, 22 nt, Human
aaaaacagaaugugucuaacuc

SEQ ID NO: 710821 - RNA, 22 nt, Human
uaguuuaggucguacaagcaaa

SEQ ID NO: 710822 - RNA, 21 nt, Human
aucucgggcuucucgcccagc

SEQ ID NO: 710823 - RNA, 22 nt, Human
ugggaaggacgugucaguggca

SEQ ID NO: 710824 - RNA, 22 nt, Human
guagaucucagacuuugaaauu

SEQ ID NO: 710825 - RNA, 22 nt, Human
uggaauguaaacucugugaggg

SEQ ID NO: 710826 - RNA, 22 nt, Human
guucacagucuacauaguaaag

SEQ ID NO: 710827 - RNA, 22 nt, Human
uacaggagagauuuaguaauca

SEQ ID NO: 710828 - RNA, 22 nt, Human
aggaggccaggcccucaagccu

SEQ ID NO: 710829 - RNA, 22 nt, Human
ugggcucaagugaugcuccugu

SEQ ID NO: 710830 - RNA, 22 nt, Human
gagcaccaaggcucugccaugg

SEQ ID NO: 710831 - RNA, 22 nt, Human
ggccugcuguguacugauguca

SEQ ID NO: 710832 - RNA, 22 nt, Human
ugaggaagggcacacggacccu

SEQ ID NO: 710833 - RNA, 22 nt, Human
ugcuuucucucuaccccacuuu

SEQ ID NO: 710834 - RNA, 22 nt, Human
augcagagacagauguggcaug

SEQ ID NO: 710835 - RNA, 22 nt, Human
cuucagccagcuggggaugcgg

SEQ ID NO: 710836 - RNA, 18 nt, Human
gcugccugcauuccucac

SEQ ID NO: 710837 - RNA, 22 nt, Human
uaggauacaaauucuguaauuu

SEQ ID NO: 710838 - RNA, 22 nt, Human
auguacacacacaucuuugcgu

SEQ ID NO: 710839 - RNA, 22 nt, Human
uccuuuaacuugauuauuuuca

SEQ ID NO: 710840 - RNA, 22 nt, Human
uuugcuuucccuuguagaaagu

SEQ ID NO: 710841 - RNA, 22 nt, Human
acuaaagcucacagaguugaac

SEQ ID NO: 710842 - RNA, 22 nt, Human
accaccccaaaugaaccucugu

SEQ ID NO: 710843 - RNA, 22 nt, Human
gaggccaugccuccugaucagu

SEQ ID NO: 710844 - RNA, 22 nt, Human
augaagggugucccugugagca

SEQ ID NO: 710845 - RNA, 22 nt, Human
gcccaaggucacacacaggaag

SEQ ID NO: 710846 - RNA, 22 nt, Human
cuggaggagcauggacuggagu

SEQ ID NO: 710847 - RNA, 22 nt, Human
gugaaggacugaaugaaaaugu

SEQ ID NO: 710848 - RNA, 19 nt, Human
ggacacagaaagcugcauu

SEQ ID NO: 710849 - RNA, 22 nt, Human
auggccagagaggccagccugg

SEQ ID NO: 710850 - RNA, 22 nt, Human
acacugaagagcacuuucaaag

SEQ ID NO: 710851 - RNA, 20 nt, Human
uacaggaccuucuuuguauc

SEQ ID NO: 710852 - RNA, 22 nt, Human
cggcagagcggcgagccccucc

SEQ ID NO: 710853 - RNA, 18 nt, Human
ucucucugaagaguuccc

SEQ ID NO: 710854 - RNA, 22 nt, Human
auaggaaagaaaauuauguagg

SEQ ID NO: 710855 - RNA, 22 nt, Human
auacagaaaaguggauagccag

SEQ ID NO: 710856 - RNA, 22 nt, Human
gucuggaaauuuaagguaugag

SEQ ID NO: 710857 - RNA, 22 nt, Human
acaugugaaaucucauaguuag

SEQ ID NO: 710858 - RNA, 22 nt, Human
uacccaggggcugagcagaggu

SEQ ID NO: 710859 - RNA, 22 nt, Human
ccuggaggagcgcugaccagcu

SEQ ID NO: 710860 - RNA, 22 nt, Human
auguagcuugucccacaucaua

SEQ ID NO: 710861 - RNA, 22 nt, Human
guuugaaaguucaacaggaaaa

SEQ ID NO: 710862 - RNA, 22 nt, Human
aaccagaaggaaucugagcuga

SEQ ID NO: 710863 - RNA, 22 nt, Human
gcuguggaugcuauggaucauc

SEQ ID NO: 710864 - RNA, 22 nt, Human
ugcuucagcacuuugagagccu

SEQ ID NO: 710865 - RNA, 22 nt, Human
ccaggcccuugcaagucccacc

SEQ ID NO: 710866 - RNA, 22 nt, Human
uaaccucugagcuccagcuucu

SEQ ID NO: 710867 - RNA, 22 nt, Human
gagggccaggcggagacaggcg

SEQ ID NO: 710868 - RNA, 22 nt, Human
ggaugcaggaguugaagaagga

SEQ ID NO: 710869 - RNA, 22 nt, Human
uaccuggauaucauucauucuc

SEQ ID NO: 710870 - RNA, 22 nt, Human
uuauaaagauuguuauguaucu

SEQ ID NO: 710871 - RNA, 20 nt, Human
auguggcuuuuugaccugcu

SEQ ID NO: 710872 - RNA, 22 nt, Human
uaccaaagauuaaauagcaaca

SEQ ID NO: 710873 - RNA, 22 nt, Human
acuaggagaaaacuuacacuga

SEQ ID NO: 710874 - RNA, 22 nt, Human
augggcagcagcugccauucau

SEQ ID NO: 710875 - RNA, 22 nt, Human
aucugggucacaguggcaucua

SEQ ID NO: 710876 - RNA, 22 nt, Human
caggagcagaggguggucagca

SEQ ID NO: 710877 - RNA, 22 nt, Human
cugcacagccugucugggggcc

SEQ ID NO: 710878 - RNA, 20 nt, Human
agugugcauuuagagucugc

SEQ ID NO: 710879 - RNA, 22 nt, Human
ggucccuagagugggaugacuu

SEQ ID NO: 710880 - RNA, 17 nt, Human
cagacagauauccuggg

SEQ ID NO: 710881 - RNA, 22 nt, Human
gcugugauguggagggugcuga

SEQ ID NO: 710882 - RNA, 22 nt, Human
uaaaugugcacagguuagaagg

SEQ ID NO: 710883 - RNA, 22 nt, Human
gggcuccagaguccauguucuu

SEQ ID NO: 710884 - RNA, 22 nt, Human
ugacauuuaaucccuaaauauu

SEQ ID NO: 710885 - RNA, 22 nt, Human
aagacgcacccuuugagggcac

SEQ ID NO: 710886 - RNA, 22 nt, Human
ucuccaaauaguuauauuuaga

SEQ ID NO: 710887 - RNA, 22 nt, Human
ugugucucuuuguccuagagcu

SEQ ID NO: 710888 - RNA, 22 nt, Human
cuggcuuuaccucacuggggcu

SEQ ID NO: 710889 - RNA, 22 nt, Human
cagaugaagaucauagaauagu

SEQ ID NO: 710890 - RNA, 22 nt, Human
aaaguauguuguggcuuuuaaa

SEQ ID NO: 710891 - RNA, 22 nt, Human
augagguuuugauuggcacagg

SEQ ID NO: 710892 - RNA, 17 nt, Human
uggggaugguucaugag

SEQ ID NO: 710893 - RNA, 22 nt, Human
agaagccauucccuguaggcuc

SEQ ID NO: 710894 - RNA, 22 nt, Human
ccacuguaaccauuaucaccau

SEQ ID NO: 710895 - RNA, 22 nt, Human
ugggggugacuaucucgggaau

SEQ ID NO: 710896 - RNA, 22 nt, Human
ccucaggcagugguauggaugg

SEQ ID NO: 710897 - RNA, 23 nt, Human
auccucucuccaucccacugugc

SEQ ID NO: 710898 - RNA, 22 nt, Human
aagaucagcucccgagucugag

SEQ ID NO: 710899 - RNA, 22 nt, Human
gcccaaggucccauggcagcac

SEQ ID NO: 710900 - RNA, 22 nt, Human
acaaggaccaugaggcagaccc

SEQ ID NO: 710901 - RNA, 19 nt, Human
agccagggugagaaggagc

SEQ ID NO: 710902 - RNA, 22 nt, Human
cacucugacuggcccugcagga

SEQ ID NO: 710903 - RNA, 20 nt, Human
uguauauuuucugguguaaa

SEQ ID NO: 710904 - RNA, 22 nt, Human
ucccuccagaauggugaggaag

SEQ ID NO: 710905 - RNA, 22 nt, Human
ucagaaauguaagcugaugacu

SEQ ID NO: 710906 - RNA, 22 nt, Human
uuagccuuagaagcuuagcaaa

SEQ ID NO: 710907 - RNA, 22 nt, Human
uucuuuuaaugucuggcuuuca

SEQ ID NO: 710908 - RNA, 22 nt, Human
ggcagcuaggggcagggaauuc

SEQ ID NO: 710909 - RNA, 22 nt, Human
ucuuucaaagcaaaaugaggcu

SEQ ID NO: 710910 - RNA, 22 nt, Human
gugugucagguacugugcuagg

SEQ ID NO: 710911 - RNA, 22 nt, Human
uagacacaaaucucagugacac

SEQ ID NO: 710912 - RNA, 22 nt, Human
cagacccugggccacagaggag

SEQ ID NO: 710913 - RNA, 22 nt, Human
ugaagccacacuagcuuguccu

SEQ ID NO: 710914 - RNA, 22 nt, Human
uuuacacuuuccugggaacauc

SEQ ID NO: 710915 - RNA, 22 nt, Human
uucaagauaauaggaaugaaaa

SEQ ID NO: 710916 - RNA, 22 nt, Human
uuacaagugucagguacuggca

SEQ ID NO: 710917 - RNA, 22 nt, Human
cagcuucuguuuauugugugcc

SEQ ID NO: 710918 - RNA, 22 nt, Human
cugccucucagccugaccgcca

SEQ ID NO: 710919 - RNA, 22 nt, Human
agucagugggcuuggcacagaa

SEQ ID NO: 710920 - RNA, 22 nt, Human
ccuuggaggacugcugcuucuu

SEQ ID NO: 710921 - RNA, 22 nt, Human
guucugucugagcaccacagga

SEQ ID NO: 710922 - RNA, 22 nt, Human
ugcccucucaaguugagucaga

SEQ ID NO: 710923 - RNA, 22 nt, Human
uuuguacacaaccugugguagu

SEQ ID NO: 710924 - RNA, 22 nt, Human
acauguggucaaucuguguagg

SEQ ID NO: 710925 - RNA, 22 nt, Human
uagacauuuggaguuuuaugac

SEQ ID NO: 710926 - RNA, 22 nt, Human
agaaauucuaagcaucaauagc

SEQ ID NO: 710927 - RNA, 22 nt, Human
gacuucugaauuccuaucaggu

SEQ ID NO: 710928 - RNA, 22 nt, Human
cccagcugauuuuugcagagau

SEQ ID NO: 710929 - RNA, 22 nt, Human
aacaaaugauuguugguuggag

SEQ ID NO: 710930 - RNA, 22 nt, Human
cagcccagagauguuaucuagu

SEQ ID NO: 710931 - RNA, 22 nt, Human
agccccucuccgcccugagucg

SEQ ID NO: 710932 - RNA, 22 nt, Human
gcacccagaggucagcagugcu

SEQ ID NO: 710933 - RNA, 22 nt, Human
uccaggacuagcauuucugaua

SEQ ID NO: 710934 - RNA, 22 nt, Human
gggcugagagcuggaaucugag

SEQ ID NO: 710935 - RNA, 22 nt, Human
cugcuuuaacaaggcugaucag

SEQ ID NO: 710936 - RNA, 22 nt, Human
uacaauguuccuagcaggaaag

SEQ ID NO: 710937 - RNA, 22 nt, Human
ugacagagagguaaguuaugaa

SEQ ID NO: 710938 - RNA, 22 nt, Human
auuuucugagcacgugacagca

SEQ ID NO: 710939 - RNA, 22 nt, Human
acuuugcacuaaguuacucauu

SEQ ID NO: 710940 - RNA, 22 nt, Human
uuuuauguaauccuuacugucg

SEQ ID NO: 710941 - RNA, 22 nt, Human
guuuuuucaugaguaguuaucu

SEQ ID NO: 710942 - RNA, 22 nt, Human
ccugagcuuuaaaagccaugua

SEQ ID NO: 710943 - RNA, 20 nt, Human
ugcccagcaagagugcaguu

SEQ ID NO: 710944 - RNA, 21 nt, Human
ucucuucccaucaggacacua

SEQ ID NO: 710945 - RNA, 22 nt, Human
aaauccagguaguuugguuuga

SEQ ID NO: 710946 - RNA, 22 nt, Human
ccauggcuaaguaucuguagaa

SEQ ID NO: 710947 - RNA, 18 nt, Human
caaauucucauugauuuc

SEQ ID NO: 710948 - RNA, 22 nt, Human
uuguuucuuugaaguuucuaga

SEQ ID NO: 710949 - RNA, 22 nt, Human
gacauguauuaguacauauggu

SEQ ID NO: 710950 - RNA, 22 nt, Human
caagaggcuaaacugggcuauu

SEQ ID NO: 710951 - RNA, 22 nt, Human
gcugcugucacggugcuaaggg

SEQ ID NO: 710952 - RNA, 22 nt, Human
ugagaggaacaggcaguagguu

SEQ ID NO: 710953 - RNA, 22 nt, Human
uaguucaccccucuuuauuuuc

SEQ ID NO: 710954 - RNA, 22 nt, Human
ugggggaacuguugcgcgcggg

SEQ ID NO: 710955 - RNA, 22 nt, Human
caaaggcuuccacugcauccuu

SEQ ID NO: 710956 - RNA, 22 nt, Human
auuugcaggugucgauuagucu

SEQ ID NO: 710957 - RNA, 22 nt, Human
ggugccaggcuguagucagggu

SEQ ID NO: 710958 - RNA, 22 nt, Human
gagaggcugaaaucacaggagc

SEQ ID NO: 710959 - RNA, 21 nt, Human
cacugcagccuugaccugggc

SEQ ID NO: 710960 - RNA, 22 nt, Human
gcacaggaugauggguugaggg

SEQ ID NO: 710961 - RNA, 21 nt, Human
ggcagcugaccgcgcggugca

SEQ ID NO: 710962 - RNA, 22 nt, Human
caguaccagucaccacauugau

SEQ ID NO: 710963 - RNA, 22 nt, Human
uacugcugauuagagcugaggu

SEQ ID NO: 710964 - RNA, 22 nt, Human
caugcauggucaugcugggacu

SEQ ID NO: 710965 - RNA, 22 nt, Human
aaucaguuagaaggaagagaau

SEQ ID NO: 710966 - RNA, 22 nt, Human
ucagggcucagugggauagguc

SEQ ID NO: 710967 - RNA, 22 nt, Human
uauaaaacagaaagcacuaccu

SEQ ID NO: 710968 - RNA, 22 nt, Human
ugugcucuugucugugacuaac

SEQ ID NO: 710969 - RNA, 22 nt, Human
acaaauuuguguaguuauggca

SEQ ID NO: 710970 - RNA, 22 nt, Human
ugaugaaacugagguuccaaga

SEQ ID NO: 710971 - RNA, 22 nt, Human
uguaccacucuacuaaggguuc

SEQ ID NO: 710972 - RNA, 18 nt, Human
cggaucaugcgcugaggc

SEQ ID NO: 710973 - RNA, 22 nt, Human
guaggaagcucugaggcuaguu

SEQ ID NO: 710974 - RNA, 22 nt, Human
guagcagagggcccagguaacu

SEQ ID NO: 710975 - RNA, 22 nt, Human
gcucccugguauugcugccacu

SEQ ID NO: 710976 - RNA, 22 nt, Human
uuaacugagaggaucugaguag

SEQ ID NO: 710977 - RNA, 23 nt, Human
uggcaccaggcauucuaggggua

SEQ ID NO: 710978 - RNA, 22 nt, Human
ccuuccaggcuggaggcuuggg

SEQ ID NO: 710979 - RNA, 18 nt, Human
caguaacuauguuguuac

SEQ ID NO: 710980 - RNA, 22 nt, Human
ugugcguggauuccuguacuca

SEQ ID NO: 710981 - RNA, 22 nt, Human
uguguggcaagcuguaugcuag

SEQ ID NO: 710982 - RNA, 21 nt, Human
ggccugagcaccuguccaccu

SEQ ID NO: 710983 - RNA, 22 nt, Human
uuuguacaugaaugugcaccca

SEQ ID NO: 710984 - RNA, 22 nt, Human
guacagagaagguuacauauga

SEQ ID NO: 710985 - RNA, 22 nt, Human
gcaaagcacacccucagaguuu

SEQ ID NO: 710986 - RNA, 22 nt, Human
acauaaguuauggauaaaaugu

SEQ ID NO: 710987 - RNA, 22 nt, Human
gcagggcuguuuagugaauagg

SEQ ID NO: 710988 - RNA, 22 nt, Human
gcacacacuguuuuccucacau

SEQ ID NO: 710989 - RNA, 22 nt, Human
aacagugucaggauuacagaua

SEQ ID NO: 710990 - RNA, 22 nt, Human
ugccaggaggaggugggacaga

SEQ ID NO: 710991 - RNA, 21 nt, Human
acagcagggcuggcaugacag

SEQ ID NO: 710992 - RNA, 22 nt, Human
cuggggaccgagcaagcucugg

SEQ ID NO: 710993 - RNA, 21 nt, Human
ccuggcugcacaguugcuggu

SEQ ID NO: 710994 - RNA, 22 nt, Human
aguuucuugaagacugauguuu

SEQ ID NO: 710995 - RNA, 22 nt, Human
cucccugaguuuguggcuaagu

SEQ ID NO: 710996 - RNA, 20 nt, Human
cccugagaccagagagcagc

SEQ ID NO: 710997 - RNA, 22 nt, Human
ugaggcuuggagaggucaggga

SEQ ID NO: 710998 - RNA, 22 nt, Human
agagcagaggcauggccguggg

SEQ ID NO: 710999 - RNA, 22 nt, Human
ugcagagaagaggacaguucua

SEQ ID NO: 711000 - RNA, 22 nt, Human
aggcucugugacaaucaagcug

SEQ ID NO: 711001 - RNA, 22 nt, Human
gugauguggggaccguccuggc

SEQ ID NO: 711002 - RNA, 22 nt, Human
acagggccauuggaggauuaua

SEQ ID NO: 711003 - RNA, 22 nt, Human
ucuuccuuucauucauguguua

SEQ ID NO: 711004 - RNA, 22 nt, Human
ucugcccugcagggagcaguaa

SEQ ID NO: 711005 - RNA, 22 nt, Human
cacugauuaagucugcuagagg

SEQ ID NO: 711006 - RNA, 22 nt, Human
gaaauauuguacuggagauguu

SEQ ID NO: 711007 - RNA, 22 nt, Human
uguguauguuuugagguugcua

SEQ ID NO: 711008 - RNA, 22 nt, Human
uucauuccugagcccauauuua

SEQ ID NO: 711009 - RNA, 20 nt, Human
aucugcugagaaugaaaggc

SEQ ID NO: 711010 - RNA, 22 nt, Human
ccugaagggacuccagagagca

SEQ ID NO: 711011 - RNA, 16 nt, Human
ucauccaugacagcuc

SEQ ID NO: 711012 - RNA, 22 nt, Human
uuuguucaacaggugaaauaga

SEQ ID NO: 711013 - RNA, 22 nt, Human
uauuugucuaagaggcugacag

SEQ ID NO: 711014 - RNA, 23 nt, Human
acauuucaauacugagggucuga

SEQ ID NO: 711015 - RNA, 22 nt, Human
cuggcucaauaaauauuagcug

SEQ ID NO: 711016 - RNA, 22 nt, Human
aggcuccuugcucacaggcuca

SEQ ID NO: 711017 - RNA, 22 nt, Human
aguaugaagaugaugaaaaaua

SEQ ID NO: 711018 - RNA, 20 nt, Human
gcccaagcgccggccgcaga

SEQ ID NO: 711019 - RNA, 19 nt, Human
auucucugguuugcuggcu

SEQ ID NO: 711020 - RNA, 22 nt, Human
ggcaggaauaaauuauggacuu

SEQ ID NO: 711021 - RNA, 22 nt, Human
gagcugggacauggguccucuc

SEQ ID NO: 711022 - RNA, 22 nt, Human
uuccagcacagaaguauacauu

SEQ ID NO: 711023 - RNA, 22 nt, Human
uuccccaggggcuccugccuuu

SEQ ID NO: 711024 - RNA, 22 nt, Human
uccaagaugguugguguggugg

SEQ ID NO: 711025 - RNA, 22 nt, Human
ucuuggaagccucaagauacuc

SEQ ID NO: 711026 - RNA, 22 nt, Human
uguauuuucugaggagcauuag

SEQ ID NO: 711027 - RNA, 22 nt, Human
ucugcaaacuuaaguugaaaua

SEQ ID NO: 711028 - RNA, 22 nt, Human
ucagaggaucaugucccuacuc

SEQ ID NO: 711029 - RNA, 22 nt, Human
aauguacacugaaagccuauca

SEQ ID NO: 711030 - RNA, 22 nt, Human
uaguuuuagcagcaaugggaug

SEQ ID NO: 711031 - RNA, 17 nt, Human
agcauuuguguuaacag

SEQ ID NO: 711032 - RNA, 22 nt, Human
ugaaucaaagcugaaguuuuca

SEQ ID NO: 711033 - RNA, 22 nt, Human
uacauauguaaacauguauaaa

SEQ ID NO: 711034 - RNA, 22 nt, Human
agcacuggaguuuagugggauu

SEQ ID NO: 711035 - RNA, 22 nt, Human
aauaauguaggaugauaaauga

SEQ ID NO: 711036 - RNA, 22 nt, Human
gauaaauggcugaagaaauagu

SEQ ID NO: 711037 - RNA, 22 nt, Human
auuugucauauauaauacucuu

SEQ ID NO: 711038 - RNA, 22 nt, Human
aaauuaguacauugcaaagucc

SEQ ID NO: 711039 - RNA, 22 nt, Human
gcacugugacagcaagagugag

SEQ ID NO: 711040 - RNA, 22 nt, Human
uagaaagcaguaucuccauuuu

SEQ ID NO: 711041 - RNA, 22 nt, Human
cagcuugaaauauuaggagaug

SEQ ID NO: 711042 - RNA, 22 nt, Human
cuuccugguuugaagcucgccg

SEQ ID NO: 711043 - RNA, 22 nt, Human
gaugugaggugguaaacaggga

SEQ ID NO: 711044 - RNA, 22 nt, Human
ucagucuugcuucucuuggguc

SEQ ID NO: 711045 - RNA, 22 nt, Human
aagauguuacucaaccaggaua

SEQ ID NO: 711046 - RNA, 22 nt, Human
ccugggcuggaguacagcagug

SEQ ID NO: 711047 - RNA, 22 nt, Human
cugggagauaugaggaucugga

SEQ ID NO: 711048 - RNA, 22 nt, Human
agccuggcuuagcucucucacu

SEQ ID NO: 711049 - RNA, 22 nt, Human
uagucuggacuucuuaguguca

SEQ ID NO: 711050 - RNA, 22 nt, Human
cagugggaagggcagaggcuuu

SEQ ID NO: 711051 - RNA, 21 nt, Human
acucugccagucuccugcacu

SEQ ID NO: 711052 - RNA, 22 nt, Human
ucugggaggggcugccauugcu

SEQ ID NO: 711053 - RNA, 22 nt, Human
auguaugauauuuccaguauca

SEQ ID NO: 711054 - RNA, 22 nt, Human
ugugcccuguuaaaugcacagu

SEQ ID NO: 711055 - RNA, 22 nt, Human
ggcuucugaaacuguauugaga

SEQ ID NO: 711056 - RNA, 22 nt, Human
ugagccagaguggagugugccu

SEQ ID NO: 711057 - RNA, 22 nt, Human
uggcuuccugcacagugucugc

SEQ ID NO: 711058 - RNA, 17 nt, Human
ggccuugggcugcucuu

SEQ ID NO: 711059 - RNA, 22 nt, Human
gcagagacuccacugucuugug

SEQ ID NO: 711060 - RNA, 22 nt, Human
ugcaaaggaggaugggaaagaa

SEQ ID NO: 711061 - RNA, 19 nt, Human
cuggcagccugucuguguc

SEQ ID NO: 711062 - RNA, 22 nt, Human
uauggcuuuucuuccuccccca

SEQ ID NO: 711063 - RNA, 22 nt, Human
agcugccagcaucccggaaggg

SEQ ID NO: 711064 - RNA, 22 nt, Human
caggcaagcaaggggucuugaa

SEQ ID NO: 711065 - RNA, 22 nt, Human
gugcagcugccgaucagauagg

SEQ ID NO: 711066 - RNA, 22 nt, Human
agaauugguuggggaaugugga

SEQ ID NO: 711067 - RNA, 22 nt, Human
uccaguccuagaaacuggagag

SEQ ID NO: 711068 - RNA, 22 nt, Human
aauugcuucauuaacauuuagg

SEQ ID NO: 711069 - RNA, 22 nt, Human
uauuacaagaaagggcaugaau

SEQ ID NO: 711070 - RNA, 22 nt, Human
auuaggcauauaugcuuuuaau

SEQ ID NO: 711071 - RNA, 22 nt, Human
acauggaaaacuaacugcuuuu

SEQ ID NO: 711072 - RNA, 21 nt, Human
aagccagcccacagugguuug

SEQ ID NO: 711073 - RNA, 22 nt, Human
ccugggcuguaccugugcgcgg

SEQ ID NO: 711074 - RNA, 22 nt, Human
uuuuccucuguuauuaguguga

SEQ ID NO: 711075 - RNA, 22 nt, Human
uugaguguaaggaauguggggc

SEQ ID NO: 711076 - RNA, 22 nt, Human
auuuccaugucgguauuuuaua

SEQ ID NO: 711077 - RNA, 22 nt, Human
cagcgcugggguaggagcaccu

SEQ ID NO: 711078 - RNA, 22 nt, Human
auguuaaauaaucccuuaaagc

SEQ ID NO: 711079 - RNA, 19 nt, Human
ucaaaggcaaggaggaacu

SEQ ID NO: 711080 - RNA, 22 nt, Human
cacauucuguccuugaacugca

SEQ ID NO: 711081 - RNA, 22 nt, Human
agugaauucugcacuacugaag

SEQ ID NO: 711082 - RNA, 22 nt, Human
cuuccucuguguccugggcuug

SEQ ID NO: 711083 - RNA, 20 nt, Human
gggugggagagucugagggu

SEQ ID NO: 711084 - RNA, 22 nt, Human
acuggcaggcugcuggccggcg

SEQ ID NO: 711085 - RNA, 22 nt, Human
ggcagagcuuguuccuucuguu

SEQ ID NO: 711086 - RNA, 22 nt, Human
ugcugaggucacggcggccaga

SEQ ID NO: 711087 - RNA, 22 nt, Human
gaaggcaggcuucugauuaggu

SEQ ID NO: 711088 - RNA, 21 nt, Human
auuguuaucauugugcugugu

SEQ ID NO: 711089 - RNA, 22 nt, Human
auuugcugauggcauuugagcu

SEQ ID NO: 711090 - RNA, 22 nt, Human
cugccugugauuuuucucuagu

SEQ ID NO: 711091 - RNA, 22 nt, Human
aaaucucaauuugaauuguagc

SEQ ID NO: 711092 - RNA, 22 nt, Human
gagcagaugugugccaggaugc

SEQ ID NO: 711093 - RNA, 22 nt, Human
acaaaugucuccucuuuuguua

SEQ ID NO: 711094 - RNA, 22 nt, Human
ggccacugcugcucugguggag

SEQ ID NO: 711095 - RNA, 22 nt, Human
gaggagagaacauuccuccaua

SEQ ID NO: 711096 - RNA, 22 nt, Human
cuggccugaggccgccuucaga

SEQ ID NO: 711097 - RNA, 21 nt, Human
uuuuaacaaggauuucccuag

SEQ ID NO: 711098 - RNA, 22 nt, Human
uagcagggaagaugaucagaau

SEQ ID NO: 711099 - RNA, 22 nt, Human
uaggacuuuggcgucagaacug

SEQ ID NO: 711100 - RNA, 22 nt, Human
cagcugccacaggacuuucuga

SEQ ID NO: 711101 - RNA, 22 nt, Human
aaaugucagaaaacauggagug

SEQ ID NO: 711102 - RNA, 22 nt, Human
aggcacaguuucauccccgggc

SEQ ID NO: 711103 - RNA, 22 nt, Human
aaggcagcucagcucauggcag

SEQ ID NO: 711104 - RNA, 19 nt, Human
ccugaggaaaagaugauug

SEQ ID NO: 711105 - RNA, 22 nt, Human
uucaacaugcuuuauuucuaaa

SEQ ID NO: 711106 - RNA, 22 nt, Human
agauuucccaaauacuuguuau

SEQ ID NO: 711107 - RNA, 22 nt, Human
ucaugaguggauuaauauggcu

SEQ ID NO: 711108 - RNA, 22 nt, Human
ucaaacaugaaagcuugauuuu

SEQ ID NO: 711109 - RNA, 22 nt, Human
ccaguguucccucggguucaug

SEQ ID NO: 711110 - RNA, 23 nt, Human
agagagcucacuauauagcauug

SEQ ID NO: 711111 - RNA, 22 nt, Human
cucucuggguccucuuuuauag

SEQ ID NO: 711112 - RNA, 22 nt, Human
ccagagagaaaauggagggcca

SEQ ID NO: 711113 - RNA, 22 nt, Human
caggccaagucccaagugcggg

SEQ ID NO: 711114 - RNA, 22 nt, Human
uggagcagcugaacagaguuga

SEQ ID NO: 711115 - RNA, 22 nt, Human
gcaauuauuaugugacuuuuac

SEQ ID NO: 711116 - RNA, 22 nt, Human
agcaggugguaggcagucagca

SEQ ID NO: 711117 - RNA, 22 nt, Human
ugaaacuuuugagguucuucca

SEQ ID NO: 711118 - RNA, 22 nt, Human
uuugggaacuuaauuaugucug

SEQ ID NO: 711119 - RNA, 23 nt, Human
aaugcuggaaauucaggcaugau

SEQ ID NO: 711120 - RNA, 22 nt, Human
ugacaauggauauuaguugugg

SEQ ID NO: 711121 - RNA, 22 nt, Human
cauuucuaccaaaugugacugg

SEQ ID NO: 711122 - RNA, 22 nt, Human
agagugaaggccagguuacagu

SEQ ID NO: 711123 - RNA, 22 nt, Human
cuucugauuagcaaguuuguau

SEQ ID NO: 711124 - RNA, 23 nt, Human
ucacagggcacuggcugggguug

SEQ ID NO: 711125 - RNA, 22 nt, Human
aaagugcaguccaugaaauuaa

SEQ ID NO: 711126 - RNA, 17 nt, Human
acagcaggcccggaggg

SEQ ID NO: 711127 - RNA, 22 nt, Human
gaggauggaggugugagcuaug

SEQ ID NO: 711128 - RNA, 21 nt, Human
ggcagccugacccccagagag

SEQ ID NO: 711129 - RNA, 22 nt, Human
gacagggcgagacucagucuca

SEQ ID NO: 711130 - RNA, 22 nt, Human
accuucaacucaaaguguccca

SEQ ID NO: 711131 - RNA, 22 nt, Human
gcugggagcccuggucugcucc

SEQ ID NO: 711132 - RNA, 22 nt, Human
aguggcagguguuucguggugc

SEQ ID NO: 711133 - RNA, 22 nt, Human
uucaugaauguuccaugugagu

SEQ ID NO: 711134 - RNA, 22 nt, Human
auacacuacuaagcacagauug

SEQ ID NO: 711135 - RNA, 22 nt, Human
uagaauauacacuacagcuuaa

SEQ ID NO: 711136 - RNA, 22 nt, Human
aggcagaggagaaugaucuucc

SEQ ID NO: 711137 - RNA, 22 nt, Human
uagaauugggccuaacuuccau

SEQ ID NO: 711138 - RNA, 22 nt, Human
ucuuugaaaagggagauagaaa

SEQ ID NO: 711139 - RNA, 18 nt, Human
cagaagcaggcagugcag

SEQ ID NO: 711140 - RNA, 22 nt, Human
gaugucuucucaacuguagacc

SEQ ID NO: 711141 - RNA, 22 nt, Human
caguacuuuucuggcuuucuac

SEQ ID NO: 711142 - RNA, 22 nt, Human
acaauucaagaugagauucagg

SEQ ID NO: 711143 - RNA, 22 nt, Human
ucagcacuuuuuaaagcagcau

SEQ ID NO: 711144 - RNA, 22 nt, Human
ucauucucagacucuuggccuc

SEQ ID NO: 711145 - RNA, 22 nt, Human
gaugaugagauaaggauaacuu

SEQ ID NO: 711146 - RNA, 22 nt, Human
uggcagauaaaauaauagggaa

SEQ ID NO: 711147 - RNA, 22 nt, Human
aaagucacuuccuucugucagc

SEQ ID NO: 711148 - RNA, 22 nt, Human
cccagagggaagggaaugaggu

SEQ ID NO: 711149 - RNA, 22 nt, Human
gaguguguucuuuaugcuguga

SEQ ID NO: 711150 - RNA, 22 nt, Human
guauuagguuggugcaaaauug

SEQ ID NO: 711151 - RNA, 22 nt, Human
ccacuguauuuuggaagcagau

SEQ ID NO: 711152 - RNA, 22 nt, Human
cauaacuggggacacuucucua

SEQ ID NO: 711153 - RNA, 22 nt, Human
ugaaggugucuuugugaacauc

SEQ ID NO: 711154 - RNA, 22 nt, Human
ucuuccucuagaucugaggccc

SEQ ID NO: 711155 - RNA, 22 nt, Human
guccccagcugugacgagagcc

SEQ ID NO: 711156 - RNA, 22 nt, Human
aggucauugaaguuauuuucuu

SEQ ID NO: 711157 - RNA, 20 nt, Human
cugugccuccugcuaguccu

SEQ ID NO: 711158 - RNA, 22 nt, Human
agaagccagaggcaguggguac

SEQ ID NO: 711159 - RNA, 22 nt, Human
caaauaagaaccacaggggagu

SEQ ID NO: 711160 - RNA, 23 nt, Human
ugccaggguuuguuugugguuca

SEQ ID NO: 711161 - RNA, 22 nt, Human
uuaaaauuauggcccauuugga

SEQ ID NO: 711162 - RNA, 22 nt, Human
ucuccuaggcuggagugcagug

SEQ ID NO: 711163 - RNA, 22 nt, Human
uacugucucugcccuggccagg

SEQ ID NO: 711164 - RNA, 22 nt, Human
cacagcuuguuuagugacucac

SEQ ID NO: 711165 - RNA, 22 nt, Human
gacacagaaugggugcucagua

SEQ ID NO: 711166 - RNA, 22 nt, Human
ccugcagcuccggauuucuggg

SEQ ID NO: 711167 - RNA, 20 nt, Human
augccucuaauuuugcaaac

SEQ ID NO: 711168 - RNA, 22 nt, Human
cccugcccugggcagaaguggg

SEQ ID NO: 711169 - RNA, 22 nt, Human
uacugccuggagcauuggugcu

SEQ ID NO: 711170 - RNA, 19 nt, Human
gucacauuugucucccagg

SEQ ID NO: 711171 - RNA, 22 nt, Human
agggcucccgugaggugacugc

SEQ ID NO: 711172 - RNA, 22 nt, Human
ugcucugucaagaaaagaugcc

SEQ ID NO: 711173 - RNA, 21 nt, Human
gaauugugccccuugguguug

SEQ ID NO: 711174 - RNA, 22 nt, Human
gccaggcacugcucuaagcccu

SEQ ID NO: 711175 - RNA, 22 nt, Human
aggcagcaugcucugcuucuac

SEQ ID NO: 711176 - RNA, 22 nt, Human
ccauaaucuggcuuugagagag

SEQ ID NO: 711177 - RNA, 22 nt, Human
cugagaggcggagcuugcagug

SEQ ID NO: 711178 - RNA, 22 nt, Human
cagccaggccuggugaccaaag

SEQ ID NO: 711179 - RNA, 22 nt, Human
agucagucaaaauauaaauugu

SEQ ID NO: 711180 - RNA, 22 nt, Human
gaccagcucucugaagaaagag

SEQ ID NO: 711181 - RNA, 22 nt, Human
auaaaccuaugcuaagcugugg

SEQ ID NO: 711182 - RNA, 22 nt, Human
uuuuuuauagcaaugaacccac

SEQ ID NO: 711183 - RNA, 22 nt, Human
aaugucugucugcacguugcuu

SEQ ID NO: 711184 - RNA, 22 nt, Human
ucagccagggcagagcagguga

SEQ ID NO: 711185 - RNA, 22 nt, Human
uccugggauuaagguggugauu

SEQ ID NO: 711186 - RNA, 22 nt, Human
auucuuuagccagcagguauau

SEQ ID NO: 711187 - RNA, 22 nt, Human
gcuacaggggucaguccuuugc

SEQ ID NO: 711188 - RNA, 22 nt, Human
ccaggguugcagggagccagca

SEQ ID NO: 711189 - RNA, 22 nt, Human
uaacuucucugcuaucauagga

SEQ ID NO: 711190 - RNA, 20 nt, Human
uggcuuuaaguuuuuugcua

SEQ ID NO: 711191 - RNA, 22 nt, Human
caauaacugcugaggagaagca

SEQ ID NO: 711192 - RNA, 23 nt, Human
acacuuucaaauaugcacagagc

SEQ ID NO: 711193 - RNA, 18 nt, Human
cccugaggcuagcaugcu

SEQ ID NO: 711194 - RNA, 19 nt, Human
uagggcuggccgggcggug

SEQ ID NO: 711195 - RNA, 22 nt, Human
uguugguaaauagcuuagcaau

SEQ ID NO: 711196 - RNA, 22 nt, Human
uuggaacaggauucaauuaaag

SEQ ID NO: 711197 - RNA, 22 nt, Human
ugagaaccaugaaaagcuguca

SEQ ID NO: 711198 - RNA, 22 nt, Human
uucuggggccaauugccacugc

SEQ ID NO: 711199 - RNA, 22 nt, Human
ugugcagauagugauuucagaa

SEQ ID NO: 711200 - RNA, 22 nt, Human
ugauggaaauuugggaagcuuu

SEQ ID NO: 711201 - RNA, 22 nt, Human
uuggcaggaggcuucaguuccu

SEQ ID NO: 711202 - RNA, 22 nt, Human
uagcauuuauuccagauuugga

SEQ ID NO: 711203 - RNA, 22 nt, Human
uaaaauagccagugccccucug

SEQ ID NO: 711204 - RNA, 22 nt, Human
aagauaauguucuagcugucag

SEQ ID NO: 711205 - RNA, 22 nt, Human
uuguaaaguucuuaggaagcuc

SEQ ID NO: 711206 - RNA, 19 nt, Human
gagcgcagagggcagggga

SEQ ID NO: 711207 - RNA, 22 nt, Human
guggccagaggauuuguucagu

SEQ ID NO: 711208 - RNA, 22 nt, Human
gugacgugaggggcuccuguug

SEQ ID NO: 711209 - RNA, 22 nt, Human
caguauguuugggagacaugac

SEQ ID NO: 711210 - RNA, 22 nt, Human
ggcuggguuugacuccuggcuu

SEQ ID NO: 711211 - RNA, 22 nt, Human
gauuucaccugaucuugucauc

SEQ ID NO: 711212 - RNA, 22 nt, Human
ucucagagcuucaguuauuuuc

SEQ ID NO: 711213 - RNA, 22 nt, Human
uaguccagccuuggguguagcc

SEQ ID NO: 711214 - RNA, 22 nt, Human
aggcaacauaacacgaaagucu

SEQ ID NO: 711215 - RNA, 22 nt, Human
ggguucagguuggccugagcac

SEQ ID NO: 711216 - RNA, 22 nt, Human
cauugaaagagauaaagccuuu

SEQ ID NO: 711217 - RNA, 22 nt, Human
aauuccaggggguaccauucau

SEQ ID NO: 711218 - RNA, 22 nt, Human
aggccaccacccuaucuccugg

SEQ ID NO: 711219 - RNA, 22 nt, Human
uaguggagaaguggagucugug

SEQ ID NO: 711220 - RNA, 22 nt, Human
ugcugccaagcccgugcuccug

SEQ ID NO: 711221 - RNA, 22 nt, Human
agugaacaaguuaagaacacua

SEQ ID NO: 711222 - RNA, 22 nt, Human
acagcagaguggagaugagcac

SEQ ID NO: 711223 - RNA, 22 nt, Human
gcucugcuggaaguucucugga

SEQ ID NO: 711224 - RNA, 22 nt, Human
cuauacagagcauccuuaacuu

SEQ ID NO: 711225 - RNA, 19 nt, Human
gcuaggguugguggcgugc

SEQ ID NO: 711226 - RNA, 22 nt, Human
ggacuugccuuuaguuaaaaua

SEQ ID NO: 711227 - RNA, 22 nt, Human
ugaggcaggaggauugcaggau

SEQ ID NO: 711228 - RNA, 22 nt, Human
acacagagugguuuguagaaua

SEQ ID NO: 711229 - RNA, 22 nt, Human
gaaccucuuugugcuucagcuu

SEQ ID NO: 711230 - RNA, 22 nt, Human
acucuucuugcugcucauuaau

SEQ ID NO: 711231 - RNA, 22 nt, Human
aucaaagagcuugacaauccua

SEQ ID NO: 711232 - RNA, 22 nt, Human
aaggcacuguacuaguuaguua

SEQ ID NO: 711233 - RNA, 22 nt, Human
gauauacaauccacaguugauu

SEQ ID NO: 711234 - RNA, 22 nt, Human
ucauggggugacagaagggagg

SEQ ID NO: 711235 - RNA, 22 nt, Human
agcccaggaaguugaggcuugc

SEQ ID NO: 711236 - RNA, 22 nt, Human
gaugguuuggaaugaaguagcu

SEQ ID NO: 711237 - RNA, 22 nt, Human
cagggcucacucggcuggcguc

SEQ ID NO: 711238 - RNA, 22 nt, Human
caucuuuagggaccauuauucu

SEQ ID NO: 711239 - RNA, 22 nt, Human
ucagggcaggacaguguaggcc

SEQ ID NO: 711240 - RNA, 22 nt, Human
gaaagcagcuaagucuuaugau

SEQ ID NO: 711241 - RNA, 22 nt, Human
ugucucugugagaucugacgau

SEQ ID NO: 711242 - RNA, 22 nt, Human
guucuuggaccagcagcauuga

SEQ ID NO: 711243 - RNA, 22 nt, Human
agugauggggcccugcacugau

SEQ ID NO: 711244 - RNA, 22 nt, Human
ucaaaagaaacaccauguuccu

SEQ ID NO: 711245 - RNA, 22 nt, Human
acuucauguaguccaucagguu

SEQ ID NO: 711246 - RNA, 22 nt, Human
agagcuuugggacauuugcuag

SEQ ID NO: 711247 - RNA, 22 nt, Human
gaagcccagggcguggccgggc

SEQ ID NO: 711248 - RNA, 22 nt, Human
ugcagucuuccagcugcacaaa

SEQ ID NO: 711249 - RNA, 22 nt, Human
aaagcugcccagcugccuguuu

SEQ ID NO: 711250 - RNA, 22 nt, Human
auguacauguuuaagugaagga

SEQ ID NO: 711251 - RNA, 22 nt, Human
cuggaauguauguaucuuaaga

SEQ ID NO: 711252 - RNA, 22 nt, Human
ucugagagucucugaggcagau

SEQ ID NO: 711253 - RNA, 22 nt, Human
gaaagcacauacuauaaaucac

SEQ ID NO: 711254 - RNA, 22 nt, Human
caaauggcuggcauccuucuac

SEQ ID NO: 711255 - RNA, 22 nt, Human
ugcaaggcuauucacauguauu

SEQ ID NO: 711256 - RNA, 22 nt, Human
uuacagauggaucuagcaaaau

SEQ ID NO: 711257 - RNA, 22 nt, Human
aagcauggcugagugcaauggu

SEQ ID NO: 711258 - RNA, 22 nt, Human
aaucauucuuauuucacagcaa

SEQ ID NO: 711259 - RNA, 22 nt, Human
gcugugcagagcacaggguccc

SEQ ID NO: 711260 - RNA, 22 nt, Human
cuggaagaggacacacgaauca

SEQ ID NO: 711261 - RNA, 22 nt, Human
ucaguguucagcggugugugca

SEQ ID NO: 711262 - RNA, 22 nt, Human
ucacaaagcuuugauaagcaga

SEQ ID NO: 711263 - RNA, 22 nt, Human
uuauuuaggaggaaacugaggu

SEQ ID NO: 711264 - RNA, 22 nt, Human
gugugcacagagcuccaguguu

SEQ ID NO: 711265 - RNA, 22 nt, Human
uuuguguuuucccauacuauug

SEQ ID NO: 711266 - RNA, 22 nt, Human
augacacuguccuaguaaggaa

SEQ ID NO: 711267 - RNA, 22 nt, Human
augaaugaugccaguugaaaug

SEQ ID NO: 711268 - RNA, 22 nt, Human
gcucagggagcgauuuaccaug

SEQ ID NO: 711269 - RNA, 22 nt, Human
guugaggagguucagggugguu

SEQ ID NO: 711270 - RNA, 22 nt, Human
uucagaggggcuaaguacuugc

SEQ ID NO: 711271 - RNA, 22 nt, Human
ugccaggcugcccuccagucug

SEQ ID NO: 711272 - RNA, 22 nt, Human
caacauucaaccaacauuuaug

SEQ ID NO: 711273 - RNA, 22 nt, Human
gcauuagaaacuauugcugcaa

SEQ ID NO: 711274 - RNA, 22 nt, Human
cauggcagggcugugggcaggu

SEQ ID NO: 711275 - RNA, 21 nt, Human
ccugagguuucuggccucugu

SEQ ID NO: 711276 - RNA, 23 nt, Human
ucucagaaaggagaaguaauuug

SEQ ID NO: 711277 - RNA, 22 nt, Human
aagcagcaacaaacuggauaaa

SEQ ID NO: 711278 - RNA, 18 nt, Human
ucuuuuccuuccacuucc

SEQ ID NO: 711279 - RNA, 22 nt, Human
aaagaguugaggcaguuaucca

SEQ ID NO: 711280 - RNA, 22 nt, Human
gaaauacaggaaugccacacag

SEQ ID NO: 711281 - RNA, 22 nt, Human
aagagugacuuuucagcuguga

SEQ ID NO: 711282 - RNA, 20 nt, Human
ugccuuuccuguuucaucuu

SEQ ID NO: 711283 - RNA, 22 nt, Human
aacacuggacaggaggcuaggu

SEQ ID NO: 711284 - RNA, 22 nt, Human
ugcauuaugcuugugcuguaua

SEQ ID NO: 711285 - RNA, 22 nt, Human
aagaacaugauggccaugugca

SEQ ID NO: 711286 - RNA, 22 nt, Human
uggucaaaugccaaucuguagu

SEQ ID NO: 711287 - RNA, 22 nt, Human
cuggcuccaucacugggugaug

SEQ ID NO: 711288 - RNA, 19 nt, Human
acucuacaguguguacaac

SEQ ID NO: 711289 - RNA, 22 nt, Human
gcccaaagucacucagcuagga

SEQ ID NO: 711290 - RNA, 19 nt, Human
uucagcaggcugaagcuuc

SEQ ID NO: 711291 - RNA, 22 nt, Human
uuucugcauauguauguaugga

SEQ ID NO: 711292 - RNA, 22 nt, Human
uuucuacagguugauggguuug

SEQ ID NO: 711293 - RNA, 21 nt, Human
cuuuucucuccgcaggacauu

SEQ ID NO: 711294 - RNA, 22 nt, Human
aauucaaugguuuuuaggauau

SEQ ID NO: 711295 - RNA, 22 nt, Human
uugauuugggaauggucuggca

SEQ ID NO: 711296 - RNA, 22 nt, Human
gcuucuacccacgagaugcaaa

SEQ ID NO: 711297 - RNA, 22 nt, Human
aagauauagauaaaacuaugca

SEQ ID NO: 711298 - RNA, 22 nt, Human
uagacacuguaugagcugggug

SEQ ID NO: 711299 - RNA, 22 nt, Human
ccccacccucgcuccauuucgg

SEQ ID NO: 711300 - RNA, 22 nt, Human
cuuaaacugaaagcuacaagau

SEQ ID NO: 711301 - RNA, 22 nt, Human
ucaaaggcccauugucccguug

SEQ ID NO: 711302 - RNA, 22 nt, Human
agcaacagcccugagguucaug

SEQ ID NO: 711303 - RNA, 22 nt, Human
uuauucaguucccuucacucuc

SEQ ID NO: 711304 - RNA, 22 nt, Human
uuucacagugcucuguaaguau

SEQ ID NO: 711305 - RNA, 21 nt, Human
gcuuucuguggacucugcacc

SEQ ID NO: 711306 - RNA, 22 nt, Human
uaacaggcugaucauauauccu

SEQ ID NO: 711307 - RNA, 22 nt, Human
augaggccagggugccaugaaa

SEQ ID NO: 711308 - RNA, 20 nt, Human
ugcuuugauggaaauacagc

SEQ ID NO: 711309 - RNA, 22 nt, Human
agguccaguugccagaauggcc

SEQ ID NO: 711310 - RNA, 19 nt, Human
gcaugcuugguggcuucug

SEQ ID NO: 711311 - RNA, 22 nt, Human
ucgggguagacgccagcucgga

SEQ ID NO: 711312 - RNA, 22 nt, Human
gaggcaccagccccgcuagccu

SEQ ID NO: 711313 - RNA, 22 nt, Human
acacugacaccugcccucaggu

SEQ ID NO: 711314 - RNA, 22 nt, Human
cuguagcugacaggaucacuua

SEQ ID NO: 711315 - RNA, 21 nt, Human
cuacagaaucgagcauucugg

SEQ ID NO: 711316 - RNA, 18 nt, Human
agggcucucugcuggguu

SEQ ID NO: 711317 - RNA, 22 nt, Human
cuguaacagcugucagagcagg

SEQ ID NO: 711318 - RNA, 22 nt, Human
gaacuuuaucaaaaguuguuua

SEQ ID NO: 711319 - RNA, 23 nt, Human
acagggcuggcagcugcaagacc

SEQ ID NO: 711320 - RNA, 22 nt, Human
gugugacccaaggacacucucu

SEQ ID NO: 711321 - RNA, 22 nt, Human
ugagaagcaguuucaguaagaa

SEQ ID NO: 711322 - RNA, 22 nt, Human
caguucucugugccucgcuggg

SEQ ID NO: 711323 - RNA, 22 nt, Human
acagggcagcaacuuugugccu

SEQ ID NO: 711324 - RNA, 22 nt, Human
cagacccuuuucugagaggacc

SEQ ID NO: 711325 - RNA, 22 nt, Human
cugagguggccucugccgggga

SEQ ID NO: 711326 - RNA, 22 nt, Human
ggcuccagaaaucauagagcag

SEQ ID NO: 711327 - RNA, 22 nt, Human
uggucaaauuuagucucuggaa

SEQ ID NO: 711328 - RNA, 22 nt, Human
cccugcagcuuuugcauaguca

SEQ ID NO: 711329 - RNA, 22 nt, Human
uaauuuaauuucaugccagccu

SEQ ID NO: 711330 - RNA, 22 nt, Human
ccucacugucacuuauaguggu

SEQ ID NO: 711331 - RNA, 22 nt, Human
gcugugcccagcuccagcucug

SEQ ID NO: 711332 - RNA, 22 nt, Human
guacauuucucccaacacuaaa

SEQ ID NO: 711333 - RNA, 22 nt, Human
gagagacagcagaacgugcagc

SEQ ID NO: 711334 - RNA, 22 nt, Human
auguuauuuauugaaacacuuu

SEQ ID NO: 711335 - RNA, 22 nt, Human
auucuucacaaauauauagaag

SEQ ID NO: 711336 - RNA, 22 nt, Human
auuaaaauuccaagguaugcca

SEQ ID NO: 711337 - RNA, 22 nt, Human
uuuuaaugugcucugcaaugau

SEQ ID NO: 711338 - RNA, 22 nt, Human
aggaaaggauuggcuucucugu

SEQ ID NO: 711339 - RNA, 22 nt, Human
guggccuugcucacauguccag

SEQ ID NO: 711340 - RNA, 22 nt, Human
aaaagguaguugccaaauaagg

SEQ ID NO: 711341 - RNA, 20 nt, Human
ucuuccagguacagucugca

SEQ ID NO: 711342 - RNA, 22 nt, Human
gaggcaggcacuguuaucagca

SEQ ID NO: 711343 - RNA, 22 nt, Human
gcugccacuuggucaugucaug

SEQ ID NO: 711344 - RNA, 22 nt, Human
cugcaggauuucaugggcugac

SEQ ID NO: 711345 - RNA, 22 nt, Human
uaucucuugcaugcuuuuuaga

SEQ ID NO: 711346 - RNA, 17 nt, Human
auuugugauguaacguc

SEQ ID NO: 711347 - RNA, 22 nt, Human
cuccaggacagauucagggcca

SEQ ID NO: 711348 - RNA, 22 nt, Human
gcuuuacauaaacauuuauuau

SEQ ID NO: 711349 - RNA, 22 nt, Human
uugcugaauugaauccuuuggu

SEQ ID NO: 711350 - RNA, 22 nt, Human
ccacaucagaaauguuuacuca

SEQ ID NO: 711351 - RNA, 22 nt, Human
cucagggaauuauuucuguccu

SEQ ID NO: 711352 - RNA, 22 nt, Human
aaucuuggaaguguccacuggu

SEQ ID NO: 711353 - RNA, 22 nt, Human
uacacaaaggcacucuguuguu

SEQ ID NO: 711354 - RNA, 22 nt, Human
ggauaagaaaauuguaauaacu

SEQ ID NO: 711355 - RNA, 22 nt, Human
gagcaucgcugagaucccagac

SEQ ID NO: 711356 - RNA, 21 nt, Human
gugcacaguccugcacacagg

SEQ ID NO: 711357 - RNA, 22 nt, Human
gagggucccugcucagggccag

SEQ ID NO: 711358 - RNA, 22 nt, Human
cucaacaugccuacucagucug

SEQ ID NO: 711359 - RNA, 22 nt, Human
acuguaacacucauacugaagu

SEQ ID NO: 711360 - RNA, 21 nt, Human
agcaggcaaaggugaagucuu

SEQ ID NO: 711361 - RNA, 22 nt, Human
ccagcccugccucucagggccc

SEQ ID NO: 711362 - RNA, 22 nt, Human
ugcuuccuucccguucuucucc

SEQ ID NO: 711363 - RNA, 22 nt, Human
uauagcuaaggucagacuguuu

SEQ ID NO: 711364 - RNA, 22 nt, Human
uggcacccaguggagcugugcu

SEQ ID NO: 711365 - RNA, 22 nt, Human
auggcagcaaaugucuggcugg

SEQ ID NO: 711366 - RNA, 22 nt, Human
gggaagggacuuguuuaagguc

SEQ ID NO: 711367 - RNA, 22 nt, Human
cucuuuuagagaugaaaauugg

SEQ ID NO: 711368 - RNA, 22 nt, Human
ucacaggagcccaggggagcug

SEQ ID NO: 711369 - RNA, 22 nt, Human
ggccagcaguauauagcuaauu

SEQ ID NO: 711370 - RNA, 22 nt, Human
agaugcuggggccccucggaug

SEQ ID NO: 711371 - RNA, 21 nt, Human
caaguguggauguggaaggua

SEQ ID NO: 711372 - RNA, 22 nt, Human
auguccaauuucagagucucau

SEQ ID NO: 711373 - RNA, 22 nt, Human
aggauacacggggauuuaugua

SEQ ID NO: 711374 - RNA, 22 nt, Human
cucuaaauccacgguauaguug

SEQ ID NO: 711375 - RNA, 22 nt, Human
ugucaagucuaguugcuggcuu

SEQ ID NO: 711376 - RNA, 22 nt, Human
ucaggaaagguuuguugaaugg

SEQ ID NO: 711377 - RNA, 22 nt, Human
gcucugggaaggaucguaguga

SEQ ID NO: 711378 - RNA, 22 nt, Human
ggcuggccuguguggccgccac

SEQ ID NO: 711379 - RNA, 22 nt, Human
cuucugugcgccucuauucccu

SEQ ID NO: 711380 - RNA, 22 nt, Human
ugaacucucucaagugacagaa

SEQ ID NO: 711381 - RNA, 22 nt, Human
ucucauaauagcauuucucacc

SEQ ID NO: 711382 - RNA, 22 nt, Human
agaaacugaauuauuucugagg

SEQ ID NO: 711383 - RNA, 23 nt, Human
cauggaaaacugaaagcugaccu

SEQ ID NO: 711384 - RNA, 22 nt, Human
ucagcacaggucuugcaaaaca

SEQ ID NO: 711385 - RNA, 22 nt, Human
aaauugugagcuauagaucuag

SEQ ID NO: 711386 - RNA, 22 nt, Human
augcagggagguaagaggugcc

SEQ ID NO: 711387 - RNA, 21 nt, Human
agcaacucugacuagaugagg

SEQ ID NO: 711388 - RNA, 22 nt, Human
uuauuuugagagaaugugugcu

SEQ ID NO: 711389 - RNA, 22 nt, Human
cuuggggcagcccaggcugagc

SEQ ID NO: 711390 - RNA, 22 nt, Human
ggcugcugacuucauccagcuu

SEQ ID NO: 711391 - RNA, 22 nt, Human
ggcuccaggagggccuuggcca

SEQ ID NO: 711392 - RNA, 22 nt, Human
agggcugagacuaaggccagau

SEQ ID NO: 711393 - RNA, 22 nt, Human
ucaguucuuuauuucacaguga

SEQ ID NO: 711394 - RNA, 22 nt, Human
gucagggcacagugacagcucc

SEQ ID NO: 711395 - RNA, 22 nt, Human
cucagauguguuggauggaaaa

SEQ ID NO: 711396 - RNA, 22 nt, Human
uugcaggguugaccaauaggcu

SEQ ID NO: 711397 - RNA, 22 nt, Human
ugcagaggagucagccugggca

SEQ ID NO: 711398 - RNA, 22 nt, Human
cagagguguacagagggaggcc

SEQ ID NO: 711399 - RNA, 22 nt, Human
auuuaccagcugugcacugaua

SEQ ID NO: 711400 - RNA, 22 nt, Human
ugcuagugcaggguuuucaguu

SEQ ID NO: 711401 - RNA, 22 nt, Human
caggcagggagcuggaaaggau

SEQ ID NO: 711402 - RNA, 22 nt, Human
cagcagagggagccauugaaau

SEQ ID NO: 711403 - RNA, 22 nt, Human
ggucucuuugcuucagcuacag

SEQ ID NO: 711404 - RNA, 22 nt, Human
uccccaggaaggcccuuccugg

SEQ ID NO: 711405 - RNA, 22 nt, Human
gugugcaguagagaaagagcag

SEQ ID NO: 711406 - RNA, 22 nt, Human
ugcacacacggagauaggcuuu

SEQ ID NO: 711407 - RNA, 22 nt, Human
agagauggccuuaggugggaau

SEQ ID NO: 711408 - RNA, 20 nt, Human
cacaugcuguguguuucucu

SEQ ID NO: 711409 - RNA, 22 nt, Human
gacuguggccuuggaccauggg

SEQ ID NO: 711410 - RNA, 22 nt, Human
uucuuggaugcccucaugccuu

SEQ ID NO: 711411 - RNA, 22 nt, Human
aggcugcuucagcugcagggag

SEQ ID NO: 711412 - RNA, 22 nt, Human
gucuagaauaucuagaaagauc

SEQ ID NO: 711413 - RNA, 22 nt, Human
ugccuggccagacccuauagag

SEQ ID NO: 711414 - RNA, 22 nt, Human
aaauugucauuucugugcccua

SEQ ID NO: 711415 - RNA, 19 nt, Human
uguguucaaacuccaucuc

SEQ ID NO: 711416 - RNA, 22 nt, Human
augacagauagucuucauuugc

SEQ ID NO: 711417 - RNA, 22 nt, Human
uauuaaagggaaguuaugcaug

SEQ ID NO: 711418 - RNA, 20 nt, Human
ucacagaugaaaguucaaga

SEQ ID NO: 711419 - RNA, 22 nt, Human
aggcuuuaagcaagcauauugu

SEQ ID NO: 711420 - RNA, 22 nt, Human
auucagcaaacauuuauugugu

SEQ ID NO: 711421 - RNA, 22 nt, Human
aaggccaaagacaccuacacag

SEQ ID NO: 711422 - RNA, 22 nt, Human
caagaaacaccaaugacugcug

SEQ ID NO: 711423 - RNA, 22 nt, Human
cacucugggcucuuguuucaga

SEQ ID NO: 711424 - RNA, 22 nt, Human
acuuccuggcugggugaccugg

SEQ ID NO: 711425 - RNA, 22 nt, Human
uucucaaaacucaggguaucug

SEQ ID NO: 711426 - RNA, 22 nt, Human
cugugagucuucagcaaguguu

SEQ ID NO: 711427 - RNA, 22 nt, Human
aggcugugcacagggcaccugc

SEQ ID NO: 711428 - RNA, 22 nt, Human
cagcuccacuugaguggggccu

SEQ ID NO: 711429 - RNA, 22 nt, Human
ugguggcaauguccuggagaag

SEQ ID NO: 711430 - RNA, 18 nt, Human
uggcuggcucugucaucu

SEQ ID NO: 711431 - RNA, 22 nt, Human
gcagcucacagucuccgccauc

SEQ ID NO: 711432 - RNA, 22 nt, Human
aagaggggugugugucaaccca

SEQ ID NO: 711433 - RNA, 21 nt, Human
ccaaaggcuauguaucuucug

SEQ ID NO: 711434 - RNA, 22 nt, Human
auuauaggcuugagccaccgug

SEQ ID NO: 711435 - RNA, 22 nt, Human
ucugugcaguucuugucuugac

SEQ ID NO: 711436 - RNA, 22 nt, Human
aggcauggggcugcagucaggu

SEQ ID NO: 711437 - RNA, 22 nt, Human
uggcucagcagguuagaaacua

SEQ ID NO: 711438 - RNA, 22 nt, Human
uauuuuacagacuacuuuagau

SEQ ID NO: 711439 - RNA, 22 nt, Human
cugaaccacuaauauuuugauu

SEQ ID NO: 711440 - RNA, 22 nt, Human
uguaaucauuacaguacaugga

SEQ ID NO: 711441 - RNA, 22 nt, Human
agccccuugcugcccucuagag

SEQ ID NO: 711442 - RNA, 22 nt, Human
cagugaggaagcugucuggacc

SEQ ID NO: 711443 - RNA, 22 nt, Human
ggcugccaggagaagcucagug

SEQ ID NO: 711444 - RNA, 22 nt, Human
caagcccacugcucagagccaa

SEQ ID NO: 711445 - RNA, 22 nt, Human
ucauugaaugagaugcaauaga

SEQ ID NO: 711446 - RNA, 22 nt, Human
ugcugucuguuuacuggcuaua

SEQ ID NO: 711447 - RNA, 22 nt, Human
guuugcauguauuaagucaaua

SEQ ID NO: 711448 - RNA, 22 nt, Human
caguuuuugccauuaagaguaa

SEQ ID NO: 711449 - RNA, 22 nt, Human
acuucagagacuuuauggucca

SEQ ID NO: 711450 - RNA, 22 nt, Human
uguaaaguccaagaucaaagag

SEQ ID NO: 711451 - RNA, 22 nt, Human
ggggccccuguggcuugaugcc

SEQ ID NO: 711452 - RNA, 22 nt, Human
gccaugccugugucuccaggcc

SEQ ID NO: 711453 - RNA, 23 nt, Human
acuuuauugaccccaggucaguu

SEQ ID NO: 711454 - RNA, 22 nt, Human
uuagggacaaauuugcagaacc

SEQ ID NO: 711455 - RNA, 22 nt, Human
uacaguucuuugaaggaucuag

SEQ ID NO: 711456 - RNA, 23 nt, Human
aaaguuugaagcaacaguaguug

SEQ ID NO: 711457 - RNA, 22 nt, Human
ccagcucaucucagugaaaugc

SEQ ID NO: 711458 - RNA, 22 nt, Human
auucacagggacaaugggagag

SEQ ID NO: 711459 - RNA, 22 nt, Human
gccuuuauaucccugauaucua

SEQ ID NO: 711460 - RNA, 22 nt, Human
aaauagcagcuuugacagcaca

SEQ ID NO: 711461 - RNA, 22 nt, Human
acaucagagggcucacaugauc

SEQ ID NO: 711462 - RNA, 22 nt, Human
ugguaggagauauggucuccga

SEQ ID NO: 711463 - RNA, 22 nt, Human
gccucagugauaugugggacaa

SEQ ID NO: 711464 - RNA, 22 nt, Human
ugcagccaccaccucugcugaa

SEQ ID NO: 711465 - RNA, 22 nt, Human
ucuuagcauuuguuaauaccca

SEQ ID NO: 711466 - RNA, 22 nt, Human
gugugcagucugcuaggcaggg

SEQ ID NO: 711467 - RNA, 22 nt, Human
auuuccuaauuuagggauagac

SEQ ID NO: 711468 - RNA, 19 nt, Human
ccagucuccuugcagcauc

SEQ ID NO: 711469 - RNA, 22 nt, Human
cagcuggggcagccacgugcgg

SEQ ID NO: 711470 - RNA, 22 nt, Human
gagcaguugggcucuaggaagu

SEQ ID NO: 711471 - RNA, 22 nt, Human
gggaacuguuuaacagggguuu

SEQ ID NO: 711472 - RNA, 22 nt, Human
gggagggagaggacaguucuau

SEQ ID NO: 711473 - RNA, 22 nt, Human
uugggagauggggagauaauau

SEQ ID NO: 711474 - RNA, 22 nt, Human
aggcccaguuauccuacuuguu

SEQ ID NO: 711475 - RNA, 17 nt, Human
acagaggcaggagugga

SEQ ID NO: 711476 - RNA, 22 nt, Human
ugauuacaacagagucauccau

SEQ ID NO: 711477 - RNA, 22 nt, Human
uucagcucuaguaagcagacac

SEQ ID NO: 711478 - RNA, 19 nt, Human
aaacacagauuucuuacca

SEQ ID NO: 711479 - RNA, 22 nt, Human
uuagaaguaaggucagauuucu

SEQ ID NO: 711480 - RNA, 22 nt, Human
ggagaggagcuauugggggcuc

SEQ ID NO: 711481 - RNA, 22 nt, Human
ugcuucuggcagauugagugag

SEQ ID NO: 711482 - RNA, 22 nt, Human
ucuucccuaaucaccaucuuca

SEQ ID NO: 711483 - RNA, 22 nt, Human
agagccuggacuuuucugagcc

SEQ ID NO: 711484 - RNA, 22 nt, Human
aaacuuuaagacaguccucaag

SEQ ID NO: 711485 - RNA, 22 nt, Human
cccaggugggcaccucgaggaa

SEQ ID NO: 711486 - RNA, 22 nt, Human
ugcauguuucuguauguuaaug

SEQ ID NO: 711487 - RNA, 21 nt, Human
ucagacuugagcucuucuaca

SEQ ID NO: 711488 - RNA, 22 nt, Human
guccuugaguaagucauggugg

SEQ ID NO: 711489 - RNA, 22 nt, Human
agucuuaauagagaaaaacugu

SEQ ID NO: 711490 - RNA, 22 nt, Human
uuaaagcaggcaucauuccuca

SEQ ID NO: 711491 - RNA, 22 nt, Human
gaugucuuucuaauacuggcuu

SEQ ID NO: 711492 - RNA, 22 nt, Human
cugcuggcuucuagucauucaa

SEQ ID NO: 711493 - RNA, 22 nt, Human
agagauggagagcacuggggcu

SEQ ID NO: 711494 - RNA, 22 nt, Human
auauguguaaaugcauuuguuu

SEQ ID NO: 711495 - RNA, 22 nt, Human
ccugggugacagagugagaccu

SEQ ID NO: 711496 - RNA, 22 nt, Human
gaguguuccagaaacuggcccu

SEQ ID NO: 711497 - RNA, 22 nt, Human
cagaaggcauagaugaaggccu

SEQ ID NO: 711498 - RNA, 22 nt, Human
cugguccaguggaugcugaggg

SEQ ID NO: 711499 - RNA, 20 nt, Human
gcucugggugguaaaugacu

SEQ ID NO: 711500 - RNA, 23 nt, Human
uccuuuaaugcuggaauggcuag

SEQ ID NO: 711501 - RNA, 22 nt, Human
ccccagguggauggcucgcaua

SEQ ID NO: 711502 - RNA, 21 nt, Human
agacuuugcuugcagagaguc

SEQ ID NO: 711503 - RNA, 22 nt, Human
aggaagaaacugagcucugaca

SEQ ID NO: 711504 - RNA, 22 nt, Human
uugguaaauaacaaucacagug

SEQ ID NO: 711505 - RNA, 22 nt, Human
cccagugcuaugccuauuacau

SEQ ID NO: 711506 - RNA, 22 nt, Human
cccagcuugcgggcggcaggag

SEQ ID NO: 711507 - RNA, 19 nt, Human
ugcuuugcucuuggacuca

SEQ ID NO: 711508 - RNA, 22 nt, Human
cucagcauucaauguccagucc

SEQ ID NO: 711509 - RNA, 22 nt, Human
ucuuggcuggucauuuaaaauc

SEQ ID NO: 711510 - RNA, 22 nt, Human
cugagguggcgccucucuuuaa

SEQ ID NO: 711511 - RNA, 22 nt, Human
cagcaacaugugguaguguagg

SEQ ID NO: 711512 - RNA, 22 nt, Human
uucugaaagccaauucauugaa

SEQ ID NO: 711513 - RNA, 22 nt, Human
aggaaggaagagacaccauuug

SEQ ID NO: 711514 - RNA, 22 nt, Human
gcagaugccagaucaugcaggg

SEQ ID NO: 711515 - RNA, 22 nt, Human
agcucugggguggagcccagga

SEQ ID NO: 711516 - RNA, 23 nt, Human
aaggaucucugagaucauggcuu

SEQ ID NO: 711517 - RNA, 22 nt, Human
uuccuucuagcccaaguauugg

SEQ ID NO: 711518 - RNA, 22 nt, Human
ucuuucuuauuaugcucaaugu

SEQ ID NO: 711519 - RNA, 22 nt, Human
ucuccugcucccaacugcugca

SEQ ID NO: 711520 - RNA, 22 nt, Human
ugggggagagugcaagcaugaa

SEQ ID NO: 711521 - RNA, 22 nt, Human
gagggaggugauacugaacgua

SEQ ID NO: 711522 - RNA, 22 nt, Human
agaacagcagcacgucaagcug

SEQ ID NO: 711523 - RNA, 22 nt, Human
aucuagaggagggcugcuggau

SEQ ID NO: 711524 - RNA, 22 nt, Human
uuaaaccacugaguggagacua

SEQ ID NO: 711525 - RNA, 22 nt, Human
gccacacugcuucuuugagccu

SEQ ID NO: 711526 - RNA, 22 nt, Human
acagacaaguaguucagacaag

SEQ ID NO: 711527 - RNA, 22 nt, Human
uccaggagggguaggcaguaug

SEQ ID NO: 711528 - RNA, 22 nt, Human
ggaggaagugcaguucuacuac

SEQ ID NO: 711529 - RNA, 22 nt, Human
ccaugaguagcgauuucauuuu

SEQ ID NO: 711530 - RNA, 22 nt, Human
uuacccagggaccaagagaaac

SEQ ID NO: 711531 - RNA, 22 nt, Human
cccagugggucacugcaucuca

SEQ ID NO: 711532 - RNA, 22 nt, Human
ucaguguggguaagcaugcugu

SEQ ID NO: 711533 - RNA, 22 nt, Human
caucucuguguccccagagcuu

SEQ ID NO: 711534 - RNA, 22 nt, Human
gccaguggcaugcggcagggac

SEQ ID NO: 711535 - RNA, 22 nt, Human
cucugaauggacacuccagugu

SEQ ID NO: 711536 - RNA, 22 nt, Human
gugcuugggggaaguaacagac

SEQ ID NO: 711537 - RNA, 22 nt, Human
gucuucugucugucuggcaugu

SEQ ID NO: 711538 - RNA, 17 nt, Human
aguuaguguagcagugc

SEQ ID NO: 711539 - RNA, 22 nt, Human
gaggugaguggaucacgagguc

SEQ ID NO: 711540 - RNA, 22 nt, Human
gggcagugacaaaggggaugaa

SEQ ID NO: 711541 - RNA, 22 nt, Human
uccccaggagcaaugauucagu

SEQ ID NO: 711542 - RNA, 22 nt, Human
cucagagaggcaguggaaguca

SEQ ID NO: 711543 - RNA, 21 nt, Human
uagggggcagugggaugcuua

SEQ ID NO: 711544 - RNA, 22 nt, Human
agcuuuggcccuggagguuacu

SEQ ID NO: 711545 - RNA, 22 nt, Human
uucuguguugugacauucuaga

SEQ ID NO: 711546 - RNA, 18 nt, Human
gccagagguacuacugau

SEQ ID NO: 711547 - RNA, 22 nt, Human
gggaagauaguguugagggccc

SEQ ID NO: 711548 - RNA, 22 nt, Human
augcuuggcguuucacuuccug

SEQ ID NO: 711549 - RNA, 22 nt, Human
augaggucauucuuggauuaca

SEQ ID NO: 711550 - RNA, 22 nt, Human
uuucugcuuucagagugagaca

SEQ ID NO: 711551 - RNA, 22 nt, Human
acaggcuucagauguauuaacu

SEQ ID NO: 711552 - RNA, 22 nt, Human
uggagcaggcaucuuucucucu

SEQ ID NO: 711553 - RNA, 22 nt, Human
augaacagaggaauagaauucu

SEQ ID NO: 711554 - RNA, 22 nt, Human
uaaaguguuguacaaauguaug

SEQ ID NO: 711555 - RNA, 22 nt, Human
gucucccaaccccugugcccag

SEQ ID NO: 711556 - RNA, 20 nt, Human
gcagggcaagggauaugaaa

SEQ ID NO: 711557 - RNA, 22 nt, Human
uaguuaaagauucuguuaagag

SEQ ID NO: 711558 - RNA, 22 nt, Human
gcacagagacaguccugagauc

SEQ ID NO: 711559 - RNA, 22 nt, Human
caugaccccccaaggccugcag

SEQ ID NO: 711560 - RNA, 22 nt, Human
aagauggaguaguguaaugguu

SEQ ID NO: 711561 - RNA, 22 nt, Human
cuagauaagguggcuuggaauu

SEQ ID NO: 711562 - RNA, 22 nt, Human
gacugugacuucugaagcaaua

SEQ ID NO: 711563 - RNA, 22 nt, Human
gggaaggaaaguuauuagcaga

SEQ ID NO: 711564 - RNA, 22 nt, Human
agcuacuucccuguaggaaaca

SEQ ID NO: 711565 - RNA, 21 nt, Human
ggagcuggggagcuggcccca

SEQ ID NO: 711566 - RNA, 22 nt, Human
gagcccagcuugcacauggagc

SEQ ID NO: 711567 - RNA, 22 nt, Human
uuuuucaucugauugauaacuc

SEQ ID NO: 711568 - RNA, 22 nt, Human
acauuugacauuuaguaucagc

SEQ ID NO: 711569 - RNA, 21 nt, Human
cauauuaaaucggugccuuua

SEQ ID NO: 711570 - RNA, 22 nt, Human
agacagaauuugucagauaaau

SEQ ID NO: 711571 - RNA, 22 nt, Human
gcuguggucccucuguccucau

SEQ ID NO: 711572 - RNA, 22 nt, Human
cagcuuuauuucacguguuugu

SEQ ID NO: 711573 - RNA, 22 nt, Human
ccugaggacacacgcugcagga

SEQ ID NO: 711574 - RNA, 22 nt, Human
cauuguuaauugguaucuuaca

SEQ ID NO: 711575 - RNA, 22 nt, Human
gaggguccccaugcagagcuca

SEQ ID NO: 711576 - RNA, 22 nt, Human
ggaagccagagugcugggcagg

SEQ ID NO: 711577 - RNA, 22 nt, Human
uaagucguggaugauucuucgg

SEQ ID NO: 711578 - RNA, 22 nt, Human
cuucuagauuuuuguaauuguu

SEQ ID NO: 711579 - RNA, 22 nt, Human
uuuccuaagguagugauaauuu

SEQ ID NO: 711580 - RNA, 19 nt, Human
cacaguccuauguuuauca

SEQ ID NO: 711581 - RNA, 22 nt, Human
ucuggagccacaaaccucagcu

SEQ ID NO: 711582 - RNA, 22 nt, Human
gaagagagagcccugggguccg

SEQ ID NO: 711583 - RNA, 22 nt, Human
aauagcauccuaaaacauacuu

SEQ ID NO: 711584 - RNA, 22 nt, Human
guggccucugugcuccugccua

SEQ ID NO: 711585 - RNA, 22 nt, Human
cagagggcuguguaaggauguu

SEQ ID NO: 711586 - RNA, 22 nt, Human
ccugagagagaagcgaccuggu

SEQ ID NO: 711587 - RNA, 22 nt, Human
gcagccacuaguuuuccuguuu

SEQ ID NO: 711588 - RNA, 22 nt, Human
acaugcacugguugagggguuu

SEQ ID NO: 711589 - RNA, 22 nt, Human
ucaagaauuuggauaagaaaug

SEQ ID NO: 711590 - RNA, 22 nt, Human
ggcucagaggccagcagguaga

SEQ ID NO: 711591 - RNA, 22 nt, Human
uauagccauuuccaguggcauc

SEQ ID NO: 711592 - RNA, 22 nt, Human
caggaugugaggaggccauuug

SEQ ID NO: 711593 - RNA, 22 nt, Human
gucuucaguggcaaauggaucu

SEQ ID NO: 711594 - RNA, 22 nt, Human
uuaaugucaacauuucugaaga

SEQ ID NO: 711595 - RNA, 22 nt, Human
ugugucuguuuugcucaccauu

SEQ ID NO: 711596 - RNA, 22 nt, Human
ucucuccuguguucugauguuu

SEQ ID NO: 711597 - RNA, 22 nt, Human
auguuuccgugagcauccuuga

SEQ ID NO: 711598 - RNA, 22 nt, Human
caaaaaacacagaugucugugu

SEQ ID NO: 711599 - RNA, 22 nt, Human
cuggcccauggugagcucuggg

SEQ ID NO: 711600 - RNA, 22 nt, Human
uugcuucuuagauauuccucuc

SEQ ID NO: 711601 - RNA, 22 nt, Human
ucauggaaggaugcccugcaag

SEQ ID NO: 711602 - RNA, 21 nt, Human
aggcucagcagguguauaaag

SEQ ID NO: 711603 - RNA, 21 nt, Human
aguccuugaaacucuuucuug

SEQ ID NO: 711604 - RNA, 22 nt, Human
uguggcugaucaaagcgcucag

SEQ ID NO: 711605 - RNA, 22 nt, Human
ucuuuacaagucacauuuucug

SEQ ID NO: 711606 - RNA, 22 nt, Human
guauuccugcaaauagcaguga

SEQ ID NO: 711607 - RNA, 22 nt, Human
agcugcagauucuaucuagaag

SEQ ID NO: 711608 - RNA, 22 nt, Human
ucagcaauccucccacaggugg

SEQ ID NO: 711609 - RNA, 22 nt, Human
agguucaaauuguugcaguuuc

SEQ ID NO: 711610 - RNA, 22 nt, Human
ugaaguuguuaagguugccauu

SEQ ID NO: 711611 - RNA, 22 nt, Human
gaguaauuuucuugauuucuua

SEQ ID NO: 711612 - RNA, 22 nt, Human
cugugccucccuuuacuuugag

SEQ ID NO: 711613 - RNA, 22 nt, Human
aaaggaggccacauggcuagga

SEQ ID NO: 711614 - RNA, 22 nt, Human
ccagaggagcaggcuggcucca

SEQ ID NO: 711615 - RNA, 22 nt, Human
gaggaagggacuuuauuaucug

SEQ ID NO: 711616 - RNA, 22 nt, Human
aagcaccuggguuauaucuuag

SEQ ID NO: 711617 - RNA, 22 nt, Human
ccuggcuuuagcugccuucccu

SEQ ID NO: 711618 - RNA, 22 nt, Human
auauuuaacuggucccaauaua

SEQ ID NO: 711619 - RNA, 22 nt, Human
acugagcaucagggcugggaac

SEQ ID NO: 711620 - RNA, 22 nt, Human
ugggcugcagagcccggccuuc

SEQ ID NO: 711621 - RNA, 17 nt, Human
uggaagugaggacacug

SEQ ID NO: 711622 - RNA, 22 nt, Human
uaauucuuguucagagguagua

SEQ ID NO: 711623 - RNA, 22 nt, Human
cugcccuguaucuucucccaau

SEQ ID NO: 711624 - RNA, 22 nt, Human
uuucccagagguaugaauaagu

SEQ ID NO: 711625 - RNA, 22 nt, Human
agugcuuuccuucuugugacau

SEQ ID NO: 711626 - RNA, 22 nt, Human
ccuuggagaccugggucugugc

SEQ ID NO: 711627 - RNA, 22 nt, Human
acagggaaagggacagcagcag

SEQ ID NO: 711628 - RNA, 22 nt, Human
uucucugggaacauaaaugaag

SEQ ID NO: 711629 - RNA, 22 nt, Human
uaagugucucucgaauuaugcu

SEQ ID NO: 711630 - RNA, 22 nt, Human
cagagccacugcauuuuacagc

SEQ ID NO: 711631 - RNA, 22 nt, Human
ucuuggagaauggcagagaagc

SEQ ID NO: 711632 - RNA, 22 nt, Human
uuucacaggaguccuuucuaua

SEQ ID NO: 711633 - RNA, 22 nt, Human
uguauguguccuaauucaagca

SEQ ID NO: 711634 - RNA, 21 nt, Human
aaauacagaugcaaaucuguu

SEQ ID NO: 711635 - RNA, 22 nt, Human
ugcacagacauacacauauaug

SEQ ID NO: 711636 - RNA, 23 nt, Human
agguggccaccagaauguuaagg

SEQ ID NO: 711637 - RNA, 22 nt, Human
cuuccugcaggacagccaucug

SEQ ID NO: 711638 - RNA, 22 nt, Human
ggugggaggacuguuugaggca

SEQ ID NO: 711639 - RNA, 20 nt, Human
cagaccugcacccacuucga

SEQ ID NO: 711640 - RNA, 22 nt, Human
guuucucuuaacacauaaagua

SEQ ID NO: 711641 - RNA, 22 nt, Human
ucuaacuugaacucaugacugu

SEQ ID NO: 711642 - RNA, 22 nt, Human
guccacagcuggccagggccuc

SEQ ID NO: 711643 - RNA, 22 nt, Human
aaagucauuuguauauacccuu

SEQ ID NO: 711644 - RNA, 22 nt, Human
ccaucugacugccacccaggcc

SEQ ID NO: 711645 - RNA, 22 nt, Human
ucaauuaagaggcuaaguuacu

SEQ ID NO: 711646 - RNA, 22 nt, Human
cugcuucacccugccugagaac

SEQ ID NO: 711647 - RNA, 22 nt, Human
ucaggaagugcugaggcugcuu

SEQ ID NO: 711648 - RNA, 22 nt, Human
ucuucuguccuaagucaaagca

SEQ ID NO: 711649 - RNA, 22 nt, Human
auugacaaaucugaacauacgg

SEQ ID NO: 711650 - RNA, 23 nt, Human
cuggucagaggcugcuggaaggg

SEQ ID NO: 711651 - RNA, 23 nt, Human
uggcucagggucucuuaugaagu

SEQ ID NO: 711652 - RNA, 22 nt, Human
ucucuuuguggccaggagagga

SEQ ID NO: 711653 - RNA, 22 nt, Human
ugggugaggagaggcugucuaa

SEQ ID NO: 711654 - RNA, 22 nt, Human
aguccaugguucugacucaucu

SEQ ID NO: 711655 - RNA, 22 nt, Human
ucugggaacacuuugugagcuc

SEQ ID NO: 711656 - RNA, 22 nt, Human
acagcauuuaaagaaaaugaac

SEQ ID NO: 711657 - RNA, 22 nt, Human
aacucaguuacauauuagaaua

SEQ ID NO: 711658 - RNA, 22 nt, Human
cucuggacagcccuccaggaag

SEQ ID NO: 711659 - RNA, 22 nt, Human
ucagagccccuccgcuguccca

SEQ ID NO: 711660 - RNA, 19 nt, Human
agggucaggacaaggacuu

SEQ ID NO: 711661 - RNA, 20 nt, Human
ucuugagaacaauuucuggc

SEQ ID NO: 711662 - RNA, 22 nt, Human
ggccucugaggacagccuuggc

SEQ ID NO: 711663 - RNA, 22 nt, Human
aggguggccaugagggagagau

SEQ ID NO: 711664 - RNA, 23 nt, Human
gcugacugugaaauucuggagcu

SEQ ID NO: 711665 - RNA, 22 nt, Human
ccuucagagguguagauugcgu

SEQ ID NO: 711666 - RNA, 22 nt, Human
guuauugacucucuuguggcuu

SEQ ID NO: 711667 - RNA, 22 nt, Human
ucuccuucgaggcccagcuccc

SEQ ID NO: 711668 - RNA, 22 nt, Human
uccagccuuccuuuucacucuc

SEQ ID NO: 711669 - RNA, 22 nt, Human
gacagcuucuagaaauggucac

SEQ ID NO: 711670 - RNA, 22 nt, Human
ggagaggggaacuuguugcuug

SEQ ID NO: 711671 - RNA, 22 nt, Human
acugucaggauggcagcuuguu

SEQ ID NO: 711672 - RNA, 22 nt, Human
ccugggguauauaggugaauau

SEQ ID NO: 711673 - RNA, 22 nt, Human
gccuggcugcucagccacucac

SEQ ID NO: 711674 - RNA, 22 nt, Human
cucucuggcacuucauugcugu

SEQ ID NO: 711675 - RNA, 22 nt, Human
uugaauuagacuuugcuacagg

SEQ ID NO: 711676 - RNA, 22 nt, Human
ugugcccagacugccucaguga

SEQ ID NO: 711677 - RNA, 22 nt, Human
auaaccuguuucagacauuugu

SEQ ID NO: 711678 - RNA, 22 nt, Human
uacaaucacccaaagagccaga

SEQ ID NO: 711679 - RNA, 22 nt, Human
ucagcccaguuaagaaccuguu

SEQ ID NO: 711680 - RNA, 22 nt, Human
uucugaaaacacacuuugcagc

SEQ ID NO: 711681 - RNA, 22 nt, Human
uggaauucccaaguaacuuuua

SEQ ID NO: 711682 - RNA, 22 nt, Human
gggauccauccgugcagcagag

SEQ ID NO: 711683 - RNA, 22 nt, Human
gcuuugccuguagcauuggccu

SEQ ID NO: 711684 - RNA, 22 nt, Human
cuugcaggcagggacacugucu

SEQ ID NO: 711685 - RNA, 22 nt, Human
auucaguuucauggcacagcua

SEQ ID NO: 711686 - RNA, 22 nt, Human
uacuuuucuguguggcagucac

SEQ ID NO: 711687 - RNA, 22 nt, Human
uggagcuggcuuguggaaguug

SEQ ID NO: 711688 - RNA, 21 nt, Human
ucaacccuugcgucaccaagc

SEQ ID NO: 711689 - RNA, 22 nt, Human
cagcagcuuuugcauucucauu

SEQ ID NO: 711690 - RNA, 22 nt, Human
aagauggcuuagaguccuggug

SEQ ID NO: 711691 - RNA, 22 nt, Human
gcaaacauguugugagauacca

SEQ ID NO: 711692 - RNA, 22 nt, Human
gccuccuggauuuuagugccau

SEQ ID NO: 711693 - RNA, 22 nt, Human
cuggggcuggugaggcaggcuc

SEQ ID NO: 711694 - RNA, 21 nt, Human
ggcuuuaugcucacccagccu

SEQ ID NO: 711695 - RNA, 22 nt, Human
aagcagcacaguaauauuggug

SEQ ID NO: 711696 - RNA, 22 nt, Human
aaacacuucuuaggucuuaagu

SEQ ID NO: 711697 - RNA, 22 nt, Human
gcuggcugagcacugguuuaua

SEQ ID NO: 711698 - RNA, 22 nt, Human
uguaugaaucucauuuguuuaa

SEQ ID NO: 711699 - RNA, 22 nt, Human
uaacaucuuuagcagcucgaac

SEQ ID NO: 711700 - RNA, 22 nt, Human
auucacaaagucacccuuacac

SEQ ID NO: 711701 - RNA, 22 nt, Human
uugagcaggauggcuaugcaca

SEQ ID NO: 711702 - RNA, 22 nt, Human
cccaggcugugcaaacuucaaa

SEQ ID NO: 711703 - RNA, 22 nt, Human
gucucugccuggggggaucaga

SEQ ID NO: 711704 - RNA, 22 nt, Human
ucuagaccuggcacugcccugu

SEQ ID NO: 711705 - RNA, 19 nt, Human
ccugggaggcggagguugc

SEQ ID NO: 711706 - RNA, 22 nt, Human
ugugcagaguugaagacaggag

SEQ ID NO: 711707 - RNA, 22 nt, Human
cagggacaugacuggucucugu

SEQ ID NO: 711708 - RNA, 22 nt, Human
aguggcaguuugggagcuacag

SEQ ID NO: 711709 - RNA, 21 nt, Human
ccauucuuagucaagugucuc

SEQ ID NO: 711710 - RNA, 21 nt, Human
agccaggguggacacuguaug

SEQ ID NO: 711711 - RNA, 19 nt, Human
uaaaucuguauucuucaaa

SEQ ID NO: 711712 - RNA, 22 nt, Human
ugggcaagcucuggguggacac

SEQ ID NO: 711713 - RNA, 22 nt, Human
uuccuugaccacugcauaauga

SEQ ID NO: 711714 - RNA, 22 nt, Human
aucuucugauuuauggagcaau

SEQ ID NO: 711715 - RNA, 22 nt, Human
cucugcuuggaacuggacagaa

SEQ ID NO: 711716 - RNA, 22 nt, Human
agcucugcuucuugggaagaug

SEQ ID NO: 711717 - RNA, 20 nt, Human
ccuccuggucaggugugcag

SEQ ID NO: 711718 - RNA, 22 nt, Human
ugugaaaucugaugaauugacc

SEQ ID NO: 711719 - RNA, 23 nt, Human
uauucagcagugggauuuguugu

SEQ ID NO: 711720 - RNA, 22 nt, Human
gagcagugacuggagcaugaga

SEQ ID NO: 711721 - RNA, 22 nt, Human
uggcuaaucuuaaggcuuuugc

SEQ ID NO: 711722 - RNA, 19 nt, Human
cucuuuccauuguauuugc

SEQ ID NO: 711723 - RNA, 22 nt, Human
caagaugccccugguagggauc

SEQ ID NO: 711724 - RNA, 22 nt, Human
uggagcagagaugggagcccaa

SEQ ID NO: 711725 - RNA, 22 nt, Human
uuuacaagaaaucaugaugcua

SEQ ID NO: 711726 - RNA, 22 nt, Human
ggcugaugagcuuagcuagaga

SEQ ID NO: 711727 - RNA, 22 nt, Human
gaggcucacugggcaaagacuc

SEQ ID NO: 711728 - RNA, 22 nt, Human
ccaggaggugcuggaagaaagc

SEQ ID NO: 711729 - RNA, 22 nt, Human
uccagagaucacacugggcagg

SEQ ID NO: 711730 - RNA, 22 nt, Human
auaaugcagcuuuucaauggcc

SEQ ID NO: 711731 - RNA, 22 nt, Human
agagaccuuuguuauucuagga

SEQ ID NO: 711732 - RNA, 22 nt, Human
gacuuuaugaagagaugaccaa

SEQ ID NO: 711733 - RNA, 22 nt, Human
agaggggacagccaccugcccg

SEQ ID NO: 711734 - RNA, 22 nt, Human
ugaguauuuuaaguucucaauc

SEQ ID NO: 711735 - RNA, 22 nt, Human
aaggcugugucagaagcucccu

SEQ ID NO: 711736 - RNA, 22 nt, Human
cacccagcagcacuuaagacua

SEQ ID NO: 711737 - RNA, 22 nt, Human
gagugucugaauuagagcacaa

SEQ ID NO: 711738 - RNA, 22 nt, Human
gugguccuggcaaccaugguga

SEQ ID NO: 711739 - RNA, 22 nt, Human
uugguuuugggauguacaaagg

SEQ ID NO: 711740 - RNA, 22 nt, Human
cuuccugaaucuuccauguaua

SEQ ID NO: 711741 - RNA, 22 nt, Human
cacacuagucuauccauuagcu

SEQ ID NO: 711742 - RNA, 22 nt, Human
uuauacacguuuauggagcuac

SEQ ID NO: 711743 - RNA, 22 nt, Human
cugaaacauugcaauaacaaag

SEQ ID NO: 711744 - RNA, 22 nt, Human
ggcuucagaggggagguagugc

SEQ ID NO: 711745 - RNA, 22 nt, Human
gcuugagaacuucaacucagug

SEQ ID NO: 711746 - RNA, 22 nt, Human
gccaagaguuuccagcugcaag

SEQ ID NO: 711747 - RNA, 22 nt, Human
gccugggagaaugaccuccaac

SEQ ID NO: 711748 - RNA, 22 nt, Human
guuugaaagaccaauuagauuu

SEQ ID NO: 711749 - RNA, 22 nt, Human
uggcagcuuccugcucauagga

SEQ ID NO: 711750 - RNA, 18 nt, Human
augucugugcacuggaua

SEQ ID NO: 711751 - RNA, 21 nt, Human
gaagagaguccucauccugag

SEQ ID NO: 711752 - RNA, 20 nt, Human
ccuaggcaugcugagucucc

SEQ ID NO: 711753 - RNA, 22 nt, Human
uauggcuggaauacugaaaggc

SEQ ID NO: 711754 - RNA, 22 nt, Human
aaggccagcuggagggaugagg

SEQ ID NO: 711755 - RNA, 22 nt, Human
uaaagguugaaaacugacugcc

SEQ ID NO: 711756 - RNA, 22 nt, Human
gcagagcugguacuugagccug

SEQ ID NO: 711757 - RNA, 22 nt, Human
aacagaggauguuugaaauuca

SEQ ID NO: 711758 - RNA, 22 nt, Human
uaguccauuuucacacugcuga

SEQ ID NO: 711759 - RNA, 22 nt, Human
acaaacuucccagacaagcucc

SEQ ID NO: 711760 - RNA, 22 nt, Human
guucacagaaauuguguaccuc

SEQ ID NO: 711761 - RNA, 22 nt, Human
agaaggggagaagcuaccagga

SEQ ID NO: 711762 - RNA, 22 nt, Human
aagcccuuggcgcacaccgggc

SEQ ID NO: 711763 - RNA, 22 nt, Human
uugcaaaagcaauugcaguuuu

SEQ ID NO: 711764 - RNA, 23 nt, Human
ggcucagaaaaaguccuggccuc

SEQ ID NO: 711765 - RNA, 22 nt, Human
ucccuugguuaaauauguagga

SEQ ID NO: 711766 - RNA, 19 nt, Human
ccugcugcaccacuuguua

SEQ ID NO: 711767 - RNA, 22 nt, Human
uccuucucuacaaauccaggca

SEQ ID NO: 711768 - RNA, 22 nt, Human
aggccugggcaagaaggggcgu

SEQ ID NO: 711769 - RNA, 22 nt, Human
guggcagcaaaauccugcauuc

SEQ ID NO: 711770 - RNA, 22 nt, Human
ccagguggugccucuguucgca

SEQ ID NO: 711771 - RNA, 22 nt, Human
augccaguaagucucagcuagg

SEQ ID NO: 711772 - RNA, 23 nt, Human
guacacauaguguaguuauauuu

SEQ ID NO: 711773 - RNA, 22 nt, Human
ugagacuuggcacugaggaacu

SEQ ID NO: 711774 - RNA, 22 nt, Human
auauaacucuuguucuuauagu

SEQ ID NO: 711775 - RNA, 22 nt, Human
agucaaauaagagagagauguu

SEQ ID NO: 711776 - RNA, 22 nt, Human
acagggagucugaggggauagu

SEQ ID NO: 711777 - RNA, 22 nt, Human
guggcagguuccguagacagca

SEQ ID NO: 711778 - RNA, 18 nt, Human
aaguaugccuauguuauu

SEQ ID NO: 711779 - RNA, 22 nt, Human
ugaggccaggacccccagcagg

SEQ ID NO: 711780 - RNA, 22 nt, Human
acagccagggcauugucgccga

SEQ ID NO: 711781 - RNA, 22 nt, Human
cugaggagagaucacguggugu

SEQ ID NO: 711782 - RNA, 21 nt, Human
uucuacaggaugaaugaaaac

SEQ ID NO: 711783 - RNA, 22 nt, Human
aggcaguuuaggcagcgauuua

SEQ ID NO: 711784 - RNA, 22 nt, Human
uuacauguacaaacaauucuua

SEQ ID NO: 711785 - RNA, 22 nt, Human
gccaaaggauucuauggagaua

SEQ ID NO: 711786 - RNA, 22 nt, Human
ugccuucuugaauaugguucuu

SEQ ID NO: 711787 - RNA, 22 nt, Human
uucacauuggugauauguuucu

SEQ ID NO: 711788 - RNA, 22 nt, Human
augcauauucuuagccccuccu

SEQ ID NO: 711789 - RNA, 22 nt, Human
cacagagaauacugcucuugcu

SEQ ID NO: 711790 - RNA, 22 nt, Human
gggcacugaacacccucuucgc

SEQ ID NO: 711791 - RNA, 20 nt, Human
aguggccacugcagagaugc

SEQ ID NO: 711792 - RNA, 22 nt, Human
ucagggaacaauguuauggcuu

SEQ ID NO: 711793 - RNA, 20 nt, Human
ugaaggccauuuguuccaga

SEQ ID NO: 711794 - RNA, 22 nt, Human
cguggcugguggaccugagggc

SEQ ID NO: 711795 - RNA, 21 nt, Human
gggugcuguggucaugcagga

SEQ ID NO: 711796 - RNA, 22 nt, Human
aaugcuaaaauggcacuaaagu

SEQ ID NO: 711797 - RNA, 22 nt, Human
aaucauugcuccuuucucuggu

SEQ ID NO: 711798 - RNA, 22 nt, Human
uagugcauaacauuuaaagguc

SEQ ID NO: 711799 - RNA, 18 nt, Human
cccucuccugcuaguggg

SEQ ID NO: 711800 - RNA, 22 nt, Human
uuuuuguggugcagacuaaagc

SEQ ID NO: 711801 - RNA, 22 nt, Human
auuguuaaacugaagcauuacu

SEQ ID NO: 711802 - RNA, 22 nt, Human
aggagccagaauccagacucgg

SEQ ID NO: 711803 - RNA, 22 nt, Human
uucagacuggcuacauuuucau

SEQ ID NO: 711804 - RNA, 22 nt, Human
acaaugaagggagacacuugcu

SEQ ID NO: 711805 - RNA, 22 nt, Human
ugucaaaaccagcaauuuuguu

SEQ ID NO: 711806 - RNA, 22 nt, Human
gcuauugugacagcuuuucgcc

SEQ ID NO: 711807 - RNA, 21 nt, Human
agcugagguaaggcaagagag

SEQ ID NO: 711808 - RNA, 22 nt, Human
gacccuccuacuacccuggaaa

SEQ ID NO: 711809 - RNA, 22 nt, Human
ugaggcaggagguugagaacug

SEQ ID NO: 711810 - RNA, 22 nt, Human
ccauaaaguaggaaacacuaca

SEQ ID NO: 711811 - RNA, 22 nt, Human
ugauaauguucgagaaugaaga

SEQ ID NO: 711812 - RNA, 22 nt, Human
aggggugaaagagggcccucaa

SEQ ID NO: 711813 - RNA, 22 nt, Human
uuuccauguuaucuugcagacu

SEQ ID NO: 711814 - RNA, 18 nt, Human
ggcuuugcugggguuucu

SEQ ID NO: 711815 - RNA, 21 nt, Human
uucucuggauaggccaguccu

SEQ ID NO: 711816 - RNA, 22 nt, Human
uuccuggggggauagauuucac

SEQ ID NO: 711817 - RNA, 22 nt, Human
uuucacagauccuacagcuugu

SEQ ID NO: 711818 - RNA, 22 nt, Human
ucaggaaauggugauuugguug

SEQ ID NO: 711819 - RNA, 22 nt, Human
aggcagcuaagauggauaauga

SEQ ID NO: 711820 - RNA, 22 nt, Human
ugcauccuuccauggguuucaa

SEQ ID NO: 711821 - RNA, 23 nt, Human
ugucaucuccagacucccagugc

SEQ ID NO: 711822 - RNA, 22 nt, Human
gucuggaguggggccugagaau

SEQ ID NO: 711823 - RNA, 22 nt, Human
cccuggagguggagguugcagg

SEQ ID NO: 711824 - RNA, 22 nt, Human
ucaaauucuauucuauacucag

SEQ ID NO: 711825 - RNA, 22 nt, Human
ggcccucuuuuauccaucauaa

SEQ ID NO: 711826 - RNA, 22 nt, Human
auugcuuuucagacaaugaggc

SEQ ID NO: 711827 - RNA, 21 nt, Human
cagaccauugcaugagcaggu

SEQ ID NO: 711828 - RNA, 22 nt, Human
aggcuucagccuagagcuggag

SEQ ID NO: 711829 - RNA, 22 nt, Human
gccuuauuuuacuuggauucug

SEQ ID NO: 711830 - RNA, 20 nt, Human
uucugcuuuugcuuagggac

SEQ ID NO: 711831 - RNA, 22 nt, Human
cagcuuucaucagugacacuca

SEQ ID NO: 711832 - RNA, 22 nt, Human
cugggagcugaggcugacgcug

SEQ ID NO: 711833 - RNA, 22 nt, Human
caggaagucgcagagcuggggg

SEQ ID NO: 711834 - RNA, 22 nt, Human
aggccagccucaggcagggacc

SEQ ID NO: 711835 - RNA, 22 nt, Human
ugacauuuaagccucugauuuc

SEQ ID NO: 711836 - RNA, 22 nt, Human
acugagguagggcacaccuagg

SEQ ID NO: 711837 - RNA, 22 nt, Human
uuaauccaauauccuggcuauu

SEQ ID NO: 711838 - RNA, 22 nt, Human
agaggaagcugagaugccucuu

SEQ ID NO: 711839 - RNA, 22 nt, Human
agcugccucccugugcuugucc

SEQ ID NO: 711840 - RNA, 22 nt, Human
ucucugggagccaggaugacac

SEQ ID NO: 711841 - RNA, 23 nt, Human
agggccuggcguggagugugugc

SEQ ID NO: 711842 - RNA, 22 nt, Human
aggucagcugcugauaggcagc

SEQ ID NO: 711843 - RNA, 22 nt, Human
aguuccauccuuccacugcccu

SEQ ID NO: 711844 - RNA, 22 nt, Human
cagcucuuuauugccaauauuc

SEQ ID NO: 711845 - RNA, 22 nt, Human
agggugcauguuugcaagagug

SEQ ID NO: 711846 - RNA, 22 nt, Human
ggcugcaggaugcccagccgug

SEQ ID NO: 711847 - RNA, 22 nt, Human
uggcauggcuacuggaauggcg

SEQ ID NO: 711848 - RNA, 22 nt, Human
cuggcccugucagcacagaauc

SEQ ID NO: 711849 - RNA, 22 nt, Human
accaaggcuaaaauaacauguu

SEQ ID NO: 711850 - RNA, 22 nt, Human
uagaaguugcucaauaaauguu

SEQ ID NO: 711851 - RNA, 22 nt, Human
uacacagauaugugaucaauca

SEQ ID NO: 711852 - RNA, 21 nt, Human
caggaacauucuuuacauuua

SEQ ID NO: 711853 - RNA, 22 nt, Human
cauucccacguguucuuugcuu

SEQ ID NO: 711854 - RNA, 22 nt, Human
auauuaaugggauuuagucagg

SEQ ID NO: 711855 - RNA, 22 nt, Human
ggcuggaauagagacugacugg

SEQ ID NO: 711856 - RNA, 22 nt, Human
ucuggccugaaaguccaugcuu

SEQ ID NO: 711857 - RNA, 21 nt, Human
agugucucuggaagcacgugu

SEQ ID NO: 711858 - RNA, 22 nt, Human
aucauguuaaauauuucaaucu

SEQ ID NO: 711859 - RNA, 22 nt, Human
gagccagacugccugaagcuca

SEQ ID NO: 711860 - RNA, 22 nt, Human
cuggaggaaaacaacugcagac

SEQ ID NO: 711861 - RNA, 22 nt, Human
agagguauuagauuugcauagg

SEQ ID NO: 711862 - RNA, 22 nt, Human
ccagggcucugcuucugccaug

SEQ ID NO: 711863 - RNA, 22 nt, Human
aaugacuguagucauauuaagg

SEQ ID NO: 711864 - RNA, 22 nt, Human
uugcccugcguuaccaucucuu

SEQ ID NO: 711865 - RNA, 20 nt, Human
ccagaggguagggccgcccc

SEQ ID NO: 711866 - RNA, 22 nt, Human
agaaucauuauauuuauuaagc

SEQ ID NO: 711867 - RNA, 22 nt, Human
ucacaaauguuugcaugugucu

SEQ ID NO: 711868 - RNA, 22 nt, Human
uguuucauuaguacugacaaua

SEQ ID NO: 711869 - RNA, 22 nt, Human
ucauugaauuucacagcuuuau

SEQ ID NO: 711870 - RNA, 22 nt, Human
uggaaggagcuaaggaccuggg

SEQ ID NO: 711871 - RNA, 22 nt, Human
ugaacuuagugggaauaucucu

SEQ ID NO: 711872 - RNA, 21 nt, Human
aucagaaguuuuggucaguag

SEQ ID NO: 711873 - RNA, 23 nt, Human
ucugagaagguuucagccagacu

SEQ ID NO: 711874 - RNA, 23 nt, Human
uuuuccagaaucgacucuguaga

SEQ ID NO: 711875 - RNA, 22 nt, Human
aauaugcacucugauuuagcag

SEQ ID NO: 711876 - RNA, 22 nt, Human
agaaaagaggcuuucuaagcau

SEQ ID NO: 711877 - RNA, 22 nt, Human
cuucuucaauagcaagcgcaua

SEQ ID NO: 711878 - RNA, 22 nt, Human
aggcagugcaugcaaaggucgg

SEQ ID NO: 711879 - RNA, 22 nt, Human
uuagggaaguguuauucucagg

SEQ ID NO: 711880 - RNA, 22 nt, Human
cugagcauccagcagguacugc

SEQ ID NO: 711881 - RNA, 22 nt, Human
gcuuugaagacuuuuccagggu

SEQ ID NO: 711882 - RNA, 22 nt, Human
cagggcugugcccaucuucccc

SEQ ID NO: 711883 - RNA, 22 nt, Human
aaaagggacuacucucagcucc

SEQ ID NO: 711884 - RNA, 22 nt, Human
cacuuugaagagcuuuuugaca

SEQ ID NO: 711885 - RNA, 22 nt, Human
auccacagucagaacgggccua

SEQ ID NO: 711886 - RNA, 22 nt, Human
acauuucucaucuaguagagua

SEQ ID NO: 711887 - RNA, 22 nt, Human
aggaguuuauccgagggcauaa

SEQ ID NO: 711888 - RNA, 22 nt, Human
uuggccagacacuaccccccuu

SEQ ID NO: 711889 - RNA, 22 nt, Human
augcauaugcaucuguguacau

SEQ ID NO: 711890 - RNA, 22 nt, Human
uggcuucagaucugccccggag

SEQ ID NO: 711891 - RNA, 22 nt, Human
gcacagcagcugcucaguugcu

SEQ ID NO: 711892 - RNA, 22 nt, Human
cucccagggucuaggcugcugg

SEQ ID NO: 711893 - RNA, 18 nt, Human
ucuccuggguaggggccu

SEQ ID NO: 711894 - RNA, 20 nt, Human
aucagaggauagggaagugg

SEQ ID NO: 711895 - RNA, 22 nt, Human
ggaaggaacaaacccugugugg

SEQ ID NO: 711896 - RNA, 22 nt, Human
cauauuuuaguugcugaacagc

SEQ ID NO: 711897 - RNA, 22 nt, Human
cugucccacaagcagugugcac

SEQ ID NO: 711898 - RNA, 20 nt, Human
aggcuccuccaggaugugug

SEQ ID NO: 711899 - RNA, 22 nt, Human
caguggcugagaguggacacug

SEQ ID NO: 711900 - RNA, 20 nt, Human
agggucaguagcacagagcu

SEQ ID NO: 711901 - RNA, 22 nt, Human
guggucccuucuggcccugguc

SEQ ID NO: 711902 - RNA, 21 nt, Human
gcugccaccgcgugcuccagg

SEQ ID NO: 711903 - RNA, 17 nt, Human
cucuuuauaaagaguua

SEQ ID NO: 711904 - RNA, 22 nt, Human
cagggguguuuuuggccaggag

SEQ ID NO: 711905 - RNA, 21 nt, Human
aaagagguuaauauuguaagu

SEQ ID NO: 711906 - RNA, 22 nt, Human
cuagcacugagaauagugcaua

SEQ ID NO: 711907 - RNA, 22 nt, Human
cuguggcugaacucugaagagg

SEQ ID NO: 711908 - RNA, 22 nt, Human
auuuucauuuugcagggugaga

SEQ ID NO: 711909 - RNA, 22 nt, Human
cucugacuuuaaauacaggaug

SEQ ID NO: 711910 - RNA, 18 nt, Human
aggagccuuugcacugga

SEQ ID NO: 711911 - RNA, 22 nt, Human
ugcucuguucaguguaucuugu

SEQ ID NO: 711912 - RNA, 22 nt, Human
aaaugucaaggugauagaugca

SEQ ID NO: 711913 - RNA, 22 nt, Human
aauguuuucucugugaacacau

SEQ ID NO: 711914 - RNA, 22 nt, Human
cucaggauuaaggaaucuaaau

SEQ ID NO: 711915 - RNA, 22 nt, Human
cauugaaaauguugcaggcugu

SEQ ID NO: 711916 - RNA, 22 nt, Human
uucauggaguugagaaggcuaa

SEQ ID NO: 711917 - RNA, 22 nt, Human
uggggagauuguuaaauuuaga

SEQ ID NO: 711918 - RNA, 22 nt, Human
aggcacaguggcucacaccugu

SEQ ID NO: 711919 - RNA, 22 nt, Human
cccagcugcaccucuauggccu

SEQ ID NO: 711920 - RNA, 22 nt, Human
uucugccugccccagagaggcc

SEQ ID NO: 711921 - RNA, 22 nt, Human
ucauccgugaagccaaagaaau

SEQ ID NO: 711922 - RNA, 22 nt, Human
uaauuauagccgcuauuuugcu

SEQ ID NO: 711923 - RNA, 22 nt, Human
gaacauugcuuuauuucuucua

SEQ ID NO: 711924 - RNA, 22 nt, Human
uaaacugcuucucucagucugu

SEQ ID NO: 711925 - RNA, 22 nt, Human
gaguuuggguggaaggagggua

SEQ ID NO: 711926 - RNA, 21 nt, Human
cugggcucaugguguuacaga

SEQ ID NO: 711927 - RNA, 22 nt, Human
guacagauuaauaauauacuga

SEQ ID NO: 711928 - RNA, 22 nt, Human
ucuucucuguggccugguggug

SEQ ID NO: 711929 - RNA, 22 nt, Human
uaaagugcuuccuaacccagag

SEQ ID NO: 711930 - RNA, 22 nt, Human
uuucucggcagagaugaugggc

SEQ ID NO: 711931 - RNA, 22 nt, Human
aacucagcauccugcacagaga

SEQ ID NO: 711932 - RNA, 20 nt, Human
aggaggggauagaaucaaag

SEQ ID NO: 711933 - RNA, 22 nt, Human
gaauguuuuucauuggugacuc

SEQ ID NO: 711934 - RNA, 22 nt, Human
ggccucugggguccugagccca

SEQ ID NO: 711935 - RNA, 22 nt, Human
gugggccaggccggagugcaga

SEQ ID NO: 711936 - RNA, 21 nt, Human
agcauucuuggccaguccacc

SEQ ID NO: 711937 - RNA, 22 nt, Human
gcugugugaaaacugggccugg

SEQ ID NO: 711938 - RNA, 22 nt, Human
ugaagcagcaaaugaugggaga

SEQ ID NO: 711939 - RNA, 19 nt, Human
gcagcugugggaagagcca

SEQ ID NO: 711940 - RNA, 19 nt, Human
gcuuuucuccuucaagcca

SEQ ID NO: 711941 - RNA, 22 nt, Human
uggccacacccaccuagaggag

SEQ ID NO: 711942 - RNA, 22 nt, Human
uucaagaugccagggacgcggc

SEQ ID NO: 711943 - RNA, 22 nt, Human
cauugaaacagauguacccaug

SEQ ID NO: 711944 - RNA, 22 nt, Human
cacuuaaaucuguugagaaaaa

SEQ ID NO: 711945 - RNA, 22 nt, Human
agcuccuguggcagcucuucug

SEQ ID NO: 711946 - RNA, 22 nt, Human
uaguguggccccaagaggaucu

SEQ ID NO: 711947 - RNA, 22 nt, Human
uuguuuccagcaaauaguccau

SEQ ID NO: 711948 - RNA, 22 nt, Human
agagagggcauagaaaaaggga

SEQ ID NO: 711949 - RNA, 22 nt, Human
ugagucucccaaguaguuggaa

SEQ ID NO: 711950 - RNA, 22 nt, Human
cagaggaagcuggguguggagu

SEQ ID NO: 711951 - RNA, 21 nt, Human
uucuccaggcaaccauuucag

SEQ ID NO: 711952 - RNA, 22 nt, Human
acugugcagguagaugccuggg

SEQ ID NO: 711953 - RNA, 22 nt, Human
uacauaguuccauuuacaggaa

SEQ ID NO: 711954 - RNA, 22 nt, Human
aggaauauuacuuugcuuuuau

SEQ ID NO: 711955 - RNA, 22 nt, Human
gcagcgaggugaugaaauagcu

SEQ ID NO: 711956 - RNA, 22 nt, Human
gagauuuucagcuugacuggga

SEQ ID NO: 711957 - RNA, 22 nt, Human
ucagccaguugccccaguuagu

SEQ ID NO: 711958 - RNA, 22 nt, Human
ggaacugaaugucucgguauaa

SEQ ID NO: 711959 - RNA, 22 nt, Human
uuggaaaauguauuucuagaag

SEQ ID NO: 711960 - RNA, 22 nt, Human
cauuuacagcagacugaugaaa

SEQ ID NO: 711961 - RNA, 22 nt, Human
gagccaggcaccuucuguguug

SEQ ID NO: 711962 - RNA, 23 nt, Human
ggcucccuccuagcuuucccaau

SEQ ID NO: 711963 - RNA, 22 nt, Human
gcagcugcaggcaggcuugcug

SEQ ID NO: 711964 - RNA, 22 nt, Human
aaagccacguggccuggggagc

SEQ ID NO: 711965 - RNA, 21 nt, Human
ucugaugguagaugagaugug

SEQ ID NO: 711966 - RNA, 22 nt, Human
ucuuuuauagugaauuuucuug

SEQ ID NO: 711967 - RNA, 22 nt, Human
uacagucuuuggaaagagauag

SEQ ID NO: 711968 - RNA, 22 nt, Human
ugcacacauguuuacaagcauc

SEQ ID NO: 711969 - RNA, 22 nt, Human
aucuuugcccagagacucagcc

SEQ ID NO: 711970 - RNA, 22 nt, Human
cuguacaaaagaaaguuccuau

SEQ ID NO: 711971 - RNA, 22 nt, Human
uucuggggcuaauacagagguc

SEQ ID NO: 711972 - RNA, 22 nt, Human
uaguuuaguaagaggagagcug

SEQ ID NO: 711973 - RNA, 22 nt, Human
agcagaaucuguccuuggaaga

SEQ ID NO: 711974 - RNA, 22 nt, Human
cccuuagcucaauuucuugccc

SEQ ID NO: 711975 - RNA, 22 nt, Human
uauucccauuccacuuaucaag

SEQ ID NO: 711976 - RNA, 22 nt, Human
agggauggagugcggcccggac

SEQ ID NO: 711977 - RNA, 22 nt, Human
gucugagggacagaguccuggc

SEQ ID NO: 711978 - RNA, 22 nt, Human
gagcccaggaaguggaggcuga

SEQ ID NO: 711979 - RNA, 22 nt, Human
ugaagaagccaauugguaggcu

SEQ ID NO: 711980 - RNA, 22 nt, Human
cagggugccuguccucagcaaa

SEQ ID NO: 711981 - RNA, 22 nt, Human
ccugugccauccugagcauccc

SEQ ID NO: 711982 - RNA, 22 nt, Human
aggcugccucgugagcucgcug

SEQ ID NO: 711983 - RNA, 20 nt, Human
uggagcugugguaaggagca

SEQ ID NO: 711984 - RNA, 22 nt, Human
uggaaagguaggauuucaagac

SEQ ID NO: 711985 - RNA, 22 nt, Human
cccuggcagagggggcaggugc

SEQ ID NO: 711986 - RNA, 22 nt, Human
ugccaagagguccaggugggaa

SEQ ID NO: 711987 - RNA, 22 nt, Human
cccacagggcugcugauggcag

SEQ ID NO: 711988 - RNA, 22 nt, Human
acguguucaauuuccaucugac

SEQ ID NO: 711989 - RNA, 22 nt, Human
ggaacauguagagggccuguag

SEQ ID NO: 711990 - RNA, 21 nt, Human
gguuacaacaguuaaacagag

SEQ ID NO: 711991 - RNA, 22 nt, Human
ugcaacaaggccucauuucuug

SEQ ID NO: 711992 - RNA, 22 nt, Human
cugucuggauauaccuuggcca

SEQ ID NO: 711993 - RNA, 22 nt, Human
ugcaggcucucugcugccagau

SEQ ID NO: 711994 - RNA, 22 nt, Human
aagggaggccagagguuuugca

SEQ ID NO: 711995 - RNA, 22 nt, Human
aauucugcuucaucagcucuuu

SEQ ID NO: 711996 - RNA, 22 nt, Human
cugcuuggcauugguaaagaau

SEQ ID NO: 711997 - RNA, 22 nt, Human
gaacuccagaugacucaggaac

SEQ ID NO: 711998 - RNA, 22 nt, Human
ucaggcccagagucacggaucc

SEQ ID NO: 711999 - RNA, 22 nt, Human
ccucaggcugcucacacuuguc

SEQ ID NO: 712000 - RNA, 22 nt, Human
cucccucccuacgugagcucac

SEQ ID NO: 712001 - RNA, 18 nt, Human
aagauucugcuucucucu

SEQ ID NO: 712002 - RNA, 22 nt, Human
ucugcucugagagggccaucag

SEQ ID NO: 712003 - RNA, 20 nt, Human
uccagggcccuggcuccucu

SEQ ID NO: 712004 - RNA, 22 nt, Human
agagccccugguggagugagaa

SEQ ID NO: 712005 - RNA, 22 nt, Human
uagauucuacagcucagcuguc

SEQ ID NO: 712006 - RNA, 21 nt, Human
aguccaggaggaggccagguu

SEQ ID NO: 712007 - RNA, 22 nt, Human
cacacauuucagaugcuacaau

SEQ ID NO: 712008 - RNA, 22 nt, Human
uguucuuacggaacuuaucuuu

SEQ ID NO: 712009 - RNA, 22 nt, Human
caaaugcaaaauauaacccugu

SEQ ID NO: 712010 - RNA, 22 nt, Human
ucuguggcugucuuuccagagg

SEQ ID NO: 712011 - RNA, 22 nt, Human
uauuauugacauuuacuuggug

SEQ ID NO: 712012 - RNA, 23 nt, Human
cugauuugagcagaauaaaauag

SEQ ID NO: 712013 - RNA, 22 nt, Human
ucugagcauugaauuuucuucc

SEQ ID NO: 712014 - RNA, 22 nt, Human
cagagccaggugguguuggggc

SEQ ID NO: 712015 - RNA, 22 nt, Human
uccucagcauuagcacagacau

SEQ ID NO: 712016 - RNA, 22 nt, Human
uuuugugacagaaagauuaagu

SEQ ID NO: 712017 - RNA, 22 nt, Human
uggcuuccaguaaucaggauuu

SEQ ID NO: 712018 - RNA, 22 nt, Human
ugagaaggaaacaauggcuuuu

SEQ ID NO: 712019 - RNA, 22 nt, Human
agaggccaggcagcccaaggug

SEQ ID NO: 712020 - RNA, 22 nt, Human
caguccugcuggccuucccugg

SEQ ID NO: 712021 - RNA, 22 nt, Human
ugccuguuauuguuggcuuagu

SEQ ID NO: 712022 - RNA, 22 nt, Human
uucaguuucguuaucuaugaga

SEQ ID NO: 712023 - RNA, 22 nt, Human
gccaggaggggagaguguguca

SEQ ID NO: 712024 - RNA, 22 nt, Human
cgucacuucuuagucuauuuuc

SEQ ID NO: 712025 - RNA, 22 nt, Human
cugucucaagacugcaggcacu

SEQ ID NO: 712026 - RNA, 22 nt, Human
cugaggcuuugugugcaugccu

SEQ ID NO: 712027 - RNA, 20 nt, Human
agaggcuuucuuguagucag

SEQ ID NO: 712028 - RNA, 22 nt, Human
cuauuacugacuucuguauuua

SEQ ID NO: 712029 - RNA, 22 nt, Human
ccagaugaggucaugcuggguu

SEQ ID NO: 712030 - RNA, 22 nt, Human
uuuacagcuagacauaccugag

SEQ ID NO: 712031 - RNA, 22 nt, Human
aaggccagaguacuagaggcug

SEQ ID NO: 712032 - RNA, 21 nt, Human
ucccagggccaggugccauca

SEQ ID NO: 712033 - RNA, 23 nt, Human
ucucagugcacgcaccaugccug

SEQ ID NO: 712034 - RNA, 22 nt, Human
agcuggcagucggccuugaugc

SEQ ID NO: 712035 - RNA, 22 nt, Human
ucuucagcucugaggcucuggc

SEQ ID NO: 712036 - RNA, 22 nt, Human
aaacugaaacaucaucauguug

SEQ ID NO: 712037 - RNA, 16 nt, Human
aggcgaagguucauuu

SEQ ID NO: 712038 - RNA, 22 nt, Human
aaugcauuaaaguuagagacuu

SEQ ID NO: 712039 - RNA, 22 nt, Human
uggucagugugacauuuuuuaa

SEQ ID NO: 712040 - RNA, 22 nt, Human
cacuggaaccaagacccagggc

SEQ ID NO: 712041 - RNA, 22 nt, Human
cucugcugagccagagucccca

SEQ ID NO: 712042 - RNA, 22 nt, Human
cucagcugcagccuggcuggca

SEQ ID NO: 712043 - RNA, 22 nt, Human
uuuguuaauucuuauguuagag

SEQ ID NO: 712044 - RNA, 22 nt, Human
ugggcaccuagcaacccuucuc

SEQ ID NO: 712045 - RNA, 21 nt, Human
uguucacauggagcagaaugu

SEQ ID NO: 712046 - RNA, 22 nt, Human
gagggagggaaaguuuaacacu

SEQ ID NO: 712047 - RNA, 22 nt, Human
augugcuugacuacucucuauu

SEQ ID NO: 712048 - RNA, 22 nt, Human
agcagcauggcugacuaaagac

SEQ ID NO: 712049 - RNA, 22 nt, Human
cuguguauugaaaaaggguuaa

SEQ ID NO: 712050 - RNA, 22 nt, Human
agucccagaugacccagcuacu

SEQ ID NO: 712051 - RNA, 22 nt, Human
caucuaccuccacccuauauau

SEQ ID NO: 712052 - RNA, 22 nt, Human
gacaaaacugagaucacacugu

SEQ ID NO: 712053 - RNA, 22 nt, Human
gggccuggcaugcagccccguu

SEQ ID NO: 712054 - RNA, 22 nt, Human
cagaaauuggaauagagaaaua

SEQ ID NO: 712055 - RNA, 18 nt, Human
cgugaguggaggcugcgg

SEQ ID NO: 712056 - RNA, 22 nt, Human
aaauggcaggcucuuugcuagu

SEQ ID NO: 712057 - RNA, 22 nt, Human
cagcuauuuaucuuucaugaua

SEQ ID NO: 712058 - RNA, 22 nt, Human
ucugucucaaguucuugcacuc

SEQ ID NO: 712059 - RNA, 22 nt, Human
cugucaccucugcccuuugccc

SEQ ID NO: 712060 - RNA, 22 nt, Human
aacagcuuugcuucuggagaca

SEQ ID NO: 712061 - RNA, 22 nt, Human
ugucuccauagaguagcuugau

SEQ ID NO: 712062 - RNA, 22 nt, Human
gagcaacacuccacauugcuag

SEQ ID NO: 712063 - RNA, 22 nt, Human
ugaauucuggcccucucacuua

SEQ ID NO: 712064 - RNA, 22 nt, Human
ucacagaacacaaaugccacuu

SEQ ID NO: 712065 - RNA, 22 nt, Human
ugcaaacaggagaguaaguaua

SEQ ID NO: 712066 - RNA, 22 nt, Human
acaguggaguugggguagcccu

SEQ ID NO: 712067 - RNA, 22 nt, Human
gucccuggaauggacucugcgc

SEQ ID NO: 712068 - RNA, 22 nt, Human
ucaggcugaaaggacuccaguu

SEQ ID NO: 712069 - RNA, 21 nt, Human
cagcaaggaagucgaguaggu

SEQ ID NO: 712070 - RNA, 22 nt, Human
auggccucuagcugagaccaau

SEQ ID NO: 712071 - RNA, 22 nt, Human
augcugugguagacagcauucc

SEQ ID NO: 712072 - RNA, 22 nt, Human
ggagaaggaauauuggaguagg

SEQ ID NO: 712073 - RNA, 23 nt, Human
cgugucugugggcgauccggccu

SEQ ID NO: 712074 - RNA, 22 nt, Human
ugagggaguguggauacaguag

SEQ ID NO: 712075 - RNA, 22 nt, Human
ggaggaggcaaguaccagaugc

SEQ ID NO: 712076 - RNA, 22 nt, Human
auuuaauuuacauuugacagag

SEQ ID NO: 712077 - RNA, 22 nt, Human
gugagagcucagcugcccuggg

SEQ ID NO: 712078 - RNA, 22 nt, Human
cuccugccaccgcgguguccug

SEQ ID NO: 712079 - RNA, 22 nt, Human
ugccucauaacacuccuggagu

SEQ ID NO: 712080 - RNA, 18 nt, Human
agggucagugucacuggc

SEQ ID NO: 712081 - RNA, 19 nt, Human
gacuacagggggaagaagu

SEQ ID NO: 712082 - RNA, 22 nt, Human
guacugaauaacaaagucuguc

SEQ ID NO: 712083 - RNA, 22 nt, Human
caggggcuguggcacauggugu

SEQ ID NO: 712084 - RNA, 22 nt, Human
cuguguagucagguggucccac

SEQ ID NO: 712085 - RNA, 22 nt, Human
aagauguugacuccuuugaugu

SEQ ID NO: 712086 - RNA, 22 nt, Human
ggagcagcuugcaugcucaggg

SEQ ID NO: 712087 - RNA, 22 nt, Human
acacacuuuugcuaaaaauugu

SEQ ID NO: 712088 - RNA, 22 nt, Human
uccugagauaggaguugaaggc

SEQ ID NO: 712089 - RNA, 22 nt, Human
uacaaugagcugagccagaggc

SEQ ID NO: 712090 - RNA, 22 nt, Human
cagucccagacccagaaggugg

SEQ ID NO: 712091 - RNA, 22 nt, Human
cugcaggagugaaagcaggccu

SEQ ID NO: 712092 - RNA, 22 nt, Human
auaucacagguguuuaccugau

SEQ ID NO: 712093 - RNA, 17 nt, Human
uuauuuuuugggcugag

SEQ ID NO: 712094 - RNA, 21 nt, Human
acagacaguccagagaaaaga

SEQ ID NO: 712095 - RNA, 22 nt, Human
gugaacauugaggcagaaagga

SEQ ID NO: 712096 - RNA, 22 nt, Human
cuacagcuggccuuggaaaacu

SEQ ID NO: 712097 - RNA, 22 nt, Human
uuaaaacugcaaauccuacuga

SEQ ID NO: 712098 - RNA, 22 nt, Human
cuuuucaugccagcccaucaca

SEQ ID NO: 712099 - RNA, 23 nt, Human
cuggccuccgacacuggccaaga

SEQ ID NO: 712100 - RNA, 21 nt, Human
aagaagcaauuuauuggaagg

SEQ ID NO: 712101 - RNA, 22 nt, Human
ccuggguccuggcagccuccug

SEQ ID NO: 712102 - RNA, 22 nt, Human
aucuuuacaguguaagugcaga

SEQ ID NO: 712103 - RNA, 22 nt, Human
gcucucugaggugcuggcagag

SEQ ID NO: 712104 - RNA, 22 nt, Human
cagggaggaugggcuguuuugc

SEQ ID NO: 712105 - RNA, 22 nt, Human
uucuuuguaaagccacaguccu

SEQ ID NO: 712106 - RNA, 22 nt, Human
uccucccuugggguuucguuau

SEQ ID NO: 712107 - RNA, 22 nt, Human
uagaagcacugacagaguuuga

SEQ ID NO: 712108 - RNA, 22 nt, Human
ggagaggaaaugccagcacuuc

SEQ ID NO: 712109 - RNA, 22 nt, Human
ucucuuuagugcuuagacgucu

SEQ ID NO: 712110 - RNA, 22 nt, Human
gagggguccaggaggcacuuac

SEQ ID NO: 712111 - RNA, 22 nt, Human
ugagcuccuggucacaauuauc

SEQ ID NO: 712112 - RNA, 22 nt, Human
acacacugaauuuuguggaaac

SEQ ID NO: 712113 - RNA, 22 nt, Human
uucacacagaaucugaggagcu

SEQ ID NO: 712114 - RNA, 22 nt, Human
ggcaccagggaaggaaggcugg

SEQ ID NO: 712115 - RNA, 22 nt, Human
aggcugccuagguucaacaccu

SEQ ID NO: 712116 - RNA, 22 nt, Human
uacaguuucuguccuuguggag

SEQ ID NO: 712117 - RNA, 22 nt, Human
ugcagggagggcccagcaaucu

SEQ ID NO: 712118 - RNA, 22 nt, Human
cuccacucaggugcuuaaguug

SEQ ID NO: 712119 - RNA, 18 nt, Human
auugcuuuuguaccaacc

SEQ ID NO: 712120 - RNA, 22 nt, Human
cucccaggccaugcucuagcca

SEQ ID NO: 712121 - RNA, 22 nt, Human
cauuaaauuccuuguucucaaa

SEQ ID NO: 712122 - RNA, 22 nt, Human
cacuugaaugaaagagacuccu

SEQ ID NO: 712123 - RNA, 22 nt, Human
uuuguuaaggaguauugcuucu

SEQ ID NO: 712124 - RNA, 22 nt, Human
gccaggagagcuccuucagguu

SEQ ID NO: 712125 - RNA, 22 nt, Human
acacugucucauaugaggggac

SEQ ID NO: 712126 - RNA, 22 nt, Human
ugcuccuuucauccaauucuca

SEQ ID NO: 712127 - RNA, 22 nt, Human
cuugcacagaacucuuagaggu

SEQ ID NO: 712128 - RNA, 18 nt, Human
agaaggagcuaugggcag

SEQ ID NO: 712129 - RNA, 22 nt, Human
caugaaauguguuaaucucuug

SEQ ID NO: 712130 - RNA, 22 nt, Human
uucuaacuaaagucuuuguuuu

SEQ ID NO: 712131 - RNA, 22 nt, Human
uauaccaaaauaucagaaaggg

SEQ ID NO: 712132 - RNA, 23 nt, Human
gcccaugcuguugggcccgagca

SEQ ID NO: 712133 - RNA, 22 nt, Human
gaggaguggaguugcuggguug

SEQ ID NO: 712134 - RNA, 22 nt, Human
acuuucaagaacuucuuuaaug

SEQ ID NO: 712135 - RNA, 22 nt, Human
uaagaagcaguucacaaguaaa

SEQ ID NO: 712136 - RNA, 22 nt, Human
ucucagggagggcgagucagcg

SEQ ID NO: 712137 - RNA, 22 nt, Human
aggauagaagccccauguucuu

SEQ ID NO: 712138 - RNA, 22 nt, Human
uuauuuccuaaaucucuuuguu

SEQ ID NO: 712139 - RNA, 22 nt, Human
cuggcuuucuauuuggugcuau

SEQ ID NO: 712140 - RNA, 18 nt, Human
uuccuucugauguauaug

SEQ ID NO: 712141 - RNA, 22 nt, Human
gagcugagccuggguggaccgc

SEQ ID NO: 712142 - RNA, 23 nt, Human
acugggaaguuuggagagacgca

SEQ ID NO: 712143 - RNA, 21 nt, Human
cugccaccugcuccaucagca

SEQ ID NO: 712144 - RNA, 22 nt, Human
uucucugagauagacuaagugg

SEQ ID NO: 712145 - RNA, 22 nt, Human
uagguucaugaaauuuucagga

SEQ ID NO: 712146 - RNA, 22 nt, Human
ucugggccagugauuuuuccag

SEQ ID NO: 712147 - RNA, 22 nt, Human
uaugagaaagucguaugucucc

SEQ ID NO: 712148 - RNA, 20 nt, Human
gcugaggauuccuggccccu

SEQ ID NO: 712149 - RNA, 22 nt, Human
cuuucucuugagcaagagcugu

SEQ ID NO: 712150 - RNA, 22 nt, Human
ucuccaaaucaaucaauaugaa

SEQ ID NO: 712151 - RNA, 20 nt, Human
uugaggcaugucuagaagua

SEQ ID NO: 712152 - RNA, 22 nt, Human
ccugggugucaugggcagcugg

SEQ ID NO: 712153 - RNA, 22 nt, Human
gccuccuguuaugccaugugcc

SEQ ID NO: 712154 - RNA, 22 nt, Human
uuuucugaccuaucuacauuua

SEQ ID NO: 712155 - RNA, 22 nt, Human
gcuuugugaauuauuacucaca

SEQ ID NO: 712156 - RNA, 22 nt, Human
uugcucagcacuggagccagcu

SEQ ID NO: 712157 - RNA, 22 nt, Human
gcuuccuugggaaaauuagaug

SEQ ID NO: 712158 - RNA, 22 nt, Human
gcugaaaugucuuuagcagugu

SEQ ID NO: 712159 - RNA, 22 nt, Human
cuggaaaguacagugugucaca

SEQ ID NO: 712160 - RNA, 20 nt, Human
ugaugcuggucugaauugca

SEQ ID NO: 712161 - RNA, 22 nt, Human
aagacaagcaucaaaucaggca

SEQ ID NO: 712162 - RNA, 22 nt, Human
cacagcagggaugaauggagug

SEQ ID NO: 712163 - RNA, 22 nt, Human
ggcaaggggucaggcugagaca

SEQ ID NO: 712164 - RNA, 22 nt, Human
ugucucugcuuuccuugcaggg

SEQ ID NO: 712165 - RNA, 22 nt, Human
caaauacuaaacauaagauuuu

SEQ ID NO: 712166 - RNA, 22 nt, Human
aaaguuuggauccagcaaaaga

SEQ ID NO: 712167 - RNA, 22 nt, Human
acugaaaaaguaugauucacug

SEQ ID NO: 712168 - RNA, 22 nt, Human
ucuuccuugccuugcuucauca

SEQ ID NO: 712169 - RNA, 22 nt, Human
ugcauuccacacccauagagau

SEQ ID NO: 712170 - RNA, 22 nt, Human
agugcccggggugccagacaca

SEQ ID NO: 712171 - RNA, 22 nt, Human
uguucuagcaacacaguuuugg

SEQ ID NO: 712172 - RNA, 22 nt, Human
gagguuuuaaguugaaggggga

SEQ ID NO: 712173 - RNA, 21 nt, Human
uuggcagucagaaaugugagg

SEQ ID NO: 712174 - RNA, 22 nt, Human
agugcagggggaaagggugucu

SEQ ID NO: 712175 - RNA, 22 nt, Human
cagcagaguaauucucaccucu

SEQ ID NO: 712176 - RNA, 22 nt, Human
accaugucauuuauuggccaaa

SEQ ID NO: 712177 - RNA, 22 nt, Human
guguaugcagaaacaugcaaag

SEQ ID NO: 712178 - RNA, 17 nt, Human
aggaaagucugcugucc

SEQ ID NO: 712179 - RNA, 22 nt, Human
cucuuuagucacagggcuucau

SEQ ID NO: 712180 - RNA, 22 nt, Human
gugggcuucccuuaagccagag

SEQ ID NO: 712181 - RNA, 22 nt, Human
uguucuaaauugcuagcuggaa

SEQ ID NO: 712182 - RNA, 22 nt, Human
ggaugggagcagaggacgacca

SEQ ID NO: 712183 - RNA, 21 nt, Human
ucagagaauggccuacucuca

SEQ ID NO: 712184 - RNA, 22 nt, Human
uccaggucccagacugggcagc

SEQ ID NO: 712185 - RNA, 22 nt, Human
cagcaacucuccugugcucaaa

SEQ ID NO: 712186 - RNA, 22 nt, Human
acccugggaccuggagguggau

SEQ ID NO: 712187 - RNA, 22 nt, Human
cauggcuuggagcaggaugaga

SEQ ID NO: 712188 - RNA, 22 nt, Human
uuucuucauagaccuugucuug

SEQ ID NO: 712189 - RNA, 19 nt, Human
aggcucugagcuccuggag

SEQ ID NO: 712190 - RNA, 22 nt, Human
ugcauuuuacuuaccuguuagu

SEQ ID NO: 712191 - RNA, 22 nt, Human
aaguucaaggaagccuccaguu

SEQ ID NO: 712192 - RNA, 22 nt, Human
gccgaacuugagggccaggcgg

SEQ ID NO: 712193 - RNA, 22 nt, Human
uuucugagaaauuaaacacuuu

SEQ ID NO: 712194 - RNA, 22 nt, Human
auucugggugacuacgugauca

SEQ ID NO: 712195 - RNA, 22 nt, Human
ccauuaaacuuguggacccagu

SEQ ID NO: 712196 - RNA, 19 nt, Human
ggcugcugaagagaauuac

SEQ ID NO: 712197 - RNA, 22 nt, Human
ucacuucugaagguaguuggca

SEQ ID NO: 712198 - RNA, 22 nt, Human
uucagagccacuucaagucuaa

SEQ ID NO: 712199 - RNA, 22 nt, Human
uucuuaacuggaaaaugucaga

SEQ ID NO: 712200 - RNA, 22 nt, Human
uuuccacacugcagccagcaaa

SEQ ID NO: 712201 - RNA, 22 nt, Human
ucagccagcucuuggacucuga

SEQ ID NO: 712202 - RNA, 22 nt, Human
ccagaggucucucuauacuggg

SEQ ID NO: 712203 - RNA, 22 nt, Human
gccuggaggguugagguuuugu

SEQ ID NO: 712204 - RNA, 22 nt, Human
ucuggagcuugaagcuuugguu

SEQ ID NO: 712205 - RNA, 19 nt, Human
agacaaugggguuggcagu

SEQ ID NO: 712206 - RNA, 22 nt, Human
cguuuaaccagcacgcuuggcc

SEQ ID NO: 712207 - RNA, 22 nt, Human
auauuugugguaaagguaagaa

SEQ ID NO: 712208 - RNA, 22 nt, Human
uauggaugaguuccugaggagu

SEQ ID NO: 712209 - RNA, 22 nt, Human
gcuggcucugaugggcuccagg

SEQ ID NO: 712210 - RNA, 21 nt, Human
auucagaguaauucaucuuua

SEQ ID NO: 712211 - RNA, 22 nt, Human
agcaggcuccuuccuucucugg

SEQ ID NO: 712212 - RNA, 22 nt, Human
ucagagaguuuucacuagggug

SEQ ID NO: 712213 - RNA, 22 nt, Human
gagagggguuugccauccuaug

SEQ ID NO: 712214 - RNA, 22 nt, Human
gagcacugauuuauuuuugucu

SEQ ID NO: 712215 - RNA, 22 nt, Human
ucacaagacugagcuugcuuga

SEQ ID NO: 712216 - RNA, 22 nt, Human
cauauuguaaaagguugaaucc

SEQ ID NO: 712217 - RNA, 22 nt, Human
caggaacacaaugagucucaaa

SEQ ID NO: 712218 - RNA, 22 nt, Human
ucagcaguggguccugagggug

SEQ ID NO: 712219 - RNA, 22 nt, Human
aacuucagagcugugugguuug

SEQ ID NO: 712220 - RNA, 22 nt, Human
ggagcuggcuacagagaacucc

SEQ ID NO: 712221 - RNA, 22 nt, Human
uccugggcuuuguuucucuccu

SEQ ID NO: 712222 - RNA, 22 nt, Human
auggcuucucgcuggcaccugu

SEQ ID NO: 712223 - RNA, 22 nt, Human
uaagaguuacugguuuagaacc

SEQ ID NO: 712224 - RNA, 22 nt, Human
aggagccugaaucagaggguga

SEQ ID NO: 712225 - RNA, 22 nt, Human
uucauauugcuuccguggagug

SEQ ID NO: 712226 - RNA, 22 nt, Human
gugaccagagcgggagauuggg

SEQ ID NO: 712227 - RNA, 22 nt, Human
gugcugaggugggugggcagcc

SEQ ID NO: 712228 - RNA, 22 nt, Human
agacaaauuuccugcaaugaag

SEQ ID NO: 712229 - RNA, 22 nt, Human
accagccccaccgggacugcag

SEQ ID NO: 712230 - RNA, 22 nt, Human
ggaggaguguggggcacucugc

SEQ ID NO: 712231 - RNA, 22 nt, Human
cccucucucaggcugacagccu

SEQ ID NO: 712232 - RNA, 22 nt, Human
aguaaaugaaagcaauuuuaga

SEQ ID NO: 712233 - RNA, 22 nt, Human
aauugcaauuuucuuaaggucu

SEQ ID NO: 712234 - RNA, 22 nt, Human
auguaacacccacuuuuauagc

SEQ ID NO: 712235 - RNA, 22 nt, Human
cucugagaugcuugaagaggau

SEQ ID NO: 712236 - RNA, 22 nt, Human
uggcacugggaugcuacuguua

SEQ ID NO: 712237 - RNA, 22 nt, Human
uacugugugacccuggguaggu

SEQ ID NO: 712238 - RNA, 20 nt, Human
acaaggaaccaggagguggc

SEQ ID NO: 712239 - RNA, 23 nt, Human
aagaguuuagagucuugcagagu

SEQ ID NO: 712240 - RNA, 18 nt, Human
auuucuacuacuauaaag

SEQ ID NO: 712241 - RNA, 22 nt, Human
uuuuuaguagagguggguuuca

SEQ ID NO: 712242 - RNA, 22 nt, Human
uuccccugucacagugguucuc

SEQ ID NO: 712243 - RNA, 22 nt, Human
auaauugaugaggcuuuggaca

SEQ ID NO: 712244 - RNA, 21 nt, Human
caucuuagguuguacauauau

SEQ ID NO: 712245 - RNA, 22 nt, Human
uugaaugaauucuacuuccaga

SEQ ID NO: 712246 - RNA, 22 nt, Human
uagucuaagaaaucuuuacuuu

SEQ ID NO: 712247 - RNA, 22 nt, Human
cucagcuaguaacguacauguc

SEQ ID NO: 712248 - RNA, 22 nt, Human
gcuuccaguccucagaggcugg

SEQ ID NO: 712249 - RNA, 22 nt, Human
aagcagaaaaacugagcuccaa

SEQ ID NO: 712250 - RNA, 22 nt, Human
acuggggauuagggacucagug

SEQ ID NO: 712251 - RNA, 23 nt, Human
ucucaguuccagaggcuacaagu

SEQ ID NO: 712252 - RNA, 22 nt, Human
uccacacuugcugucugcugag

SEQ ID NO: 712253 - RNA, 22 nt, Human
ggcaguagccagggacuggcag

SEQ ID NO: 712254 - RNA, 20 nt, Human
ggcucugcuugugagcagcc

SEQ ID NO: 712255 - RNA, 22 nt, Human
ggcugggagcuggacaggccgg

SEQ ID NO: 712256 - RNA, 22 nt, Human
cagacaaagcggaaacuguuua

SEQ ID NO: 712257 - RNA, 23 nt, Human
gaagucagcccuacagagagcag

SEQ ID NO: 712258 - RNA, 22 nt, Human
aaguacuucuagauggauaauc

SEQ ID NO: 712259 - RNA, 22 nt, Human
ggguccagguuuagucauuugu

SEQ ID NO: 712260 - RNA, 20 nt, Human
aggcugaguucuaugcacuu

SEQ ID NO: 712261 - RNA, 22 nt, Human
aacagcuguucgcagauguagg

SEQ ID NO: 712262 - RNA, 22 nt, Human
caggacacuacagaugggaggg

SEQ ID NO: 712263 - RNA, 22 nt, Human
uauguacauacaugugcauacg

SEQ ID NO: 712264 - RNA, 22 nt, Human
uucagcuugcuuagucuccuuc

SEQ ID NO: 712265 - RNA, 22 nt, Human
ggcagagucagaggugguucug

SEQ ID NO: 712266 - RNA, 22 nt, Human
ucaggaacccuggucuccugcu

SEQ ID NO: 712267 - RNA, 22 nt, Human
gcuggcuuccuucugcagcuag

SEQ ID NO: 712268 - RNA, 19 nt, Human
aguuaaugagcuuuugauc

SEQ ID NO: 712269 - RNA, 22 nt, Human
uaacacugugucugccauaucc

SEQ ID NO: 712270 - RNA, 22 nt, Human
uccuggagggaggcggugcuac

SEQ ID NO: 712271 - RNA, 22 nt, Human
uuuguagauagaaaaaugauua

SEQ ID NO: 712272 - RNA, 22 nt, Human
gagcuucccucugcagucccug

SEQ ID NO: 712273 - RNA, 22 nt, Human
ucauugcagaaauaaaggugaa

SEQ ID NO: 712274 - RNA, 22 nt, Human
ugccuuuuccaguuucuagggg

SEQ ID NO: 712275 - RNA, 22 nt, Human
uuagaaaggagcuuauuucuuu

SEQ ID NO: 712276 - RNA, 22 nt, Human
uuaaugcuugucuagaucuucu

SEQ ID NO: 712277 - RNA, 20 nt, Human
aucaucucaaagcugagguu

SEQ ID NO: 712278 - RNA, 20 nt, Human
agggucugcuggguaggaca

SEQ ID NO: 712279 - RNA, 22 nt, Human
caugcuucaugcaaaauucuga

SEQ ID NO: 712280 - RNA, 22 nt, Human
uuaauuaagagauacugcagua

SEQ ID NO: 712281 - RNA, 22 nt, Human
ucccucucuggcuggggugcgg

SEQ ID NO: 712282 - RNA, 22 nt, Human
gucacuguauccagguuccagc

SEQ ID NO: 712283 - RNA, 22 nt, Human
uccuggguccauggcagccgaa

SEQ ID NO: 712284 - RNA, 22 nt, Human
caguaauagauuugagaguggu

SEQ ID NO: 712285 - RNA, 22 nt, Human
accuugaugccuuuccaagaug

SEQ ID NO: 712286 - RNA, 19 nt, Human
ggccagccaccucgccugg

SEQ ID NO: 712287 - RNA, 23 nt, Human
ucaugcccaggcuccagauguca

SEQ ID NO: 712288 - RNA, 22 nt, Human
caugcacacacgugcauguacg

SEQ ID NO: 712289 - RNA, 22 nt, Human
uuuccucugcugccauugcccc

SEQ ID NO: 712290 - RNA, 22 nt, Human
ucuacacauuuguaaaggcauu

SEQ ID NO: 712291 - RNA, 22 nt, Human
uagcuuuaaugaguugguaaga

SEQ ID NO: 712292 - RNA, 22 nt, Human
uugcuuuaucucuuaugccuca

SEQ ID NO: 712293 - RNA, 22 nt, Human
auucagacuaugaacacgucag

SEQ ID NO: 712294 - RNA, 22 nt, Human
ggcacagcugaugcagacacac

SEQ ID NO: 712295 - RNA, 23 nt, Human
cagaugugcaacucuaggcaaug

SEQ ID NO: 712296 - RNA, 22 nt, Human
ggugagaggcagugcuguggaa

SEQ ID NO: 712297 - RNA, 22 nt, Human
acugggaaucucaggaacaugg

SEQ ID NO: 712298 - RNA, 22 nt, Human
guuuccuauggcugcugcagga

SEQ ID NO: 712299 - RNA, 22 nt, Human
gaaguauuacucugaauguauu

SEQ ID NO: 712300 - RNA, 22 nt, Human
uaggccuaguuacugcuuacuu

SEQ ID NO: 712301 - RNA, 22 nt, Human
agcagagaggagguggcccugu

SEQ ID NO: 712302 - RNA, 22 nt, Human
ugugugggugguaaggaaggcc

SEQ ID NO: 712303 - RNA, 17 nt, Human
ccuuucucuuucaucuc

SEQ ID NO: 712304 - RNA, 20 nt, Human
aaguuucaugcucuggggau

SEQ ID NO: 712305 - RNA, 22 nt, Human
acaggccauaaaggcaggcccu

SEQ ID NO: 712306 - RNA, 22 nt, Human
gcugcuggaacaaaucacccca

SEQ ID NO: 712307 - RNA, 22 nt, Human
gugugguggcccuccuucaggc

SEQ ID NO: 712308 - RNA, 22 nt, Human
gaauaauagcagaaauuagcag

SEQ ID NO: 712309 - RNA, 22 nt, Human
cacaaggacuggauggaguggg

SEQ ID NO: 712310 - RNA, 22 nt, Human
uucucugccucuagcuauauuc

SEQ ID NO: 712311 - RNA, 22 nt, Human
cagcuggcccuuugguagccuu

SEQ ID NO: 712312 - RNA, 21 nt, Human
uuacacacugcuucuagaaug

SEQ ID NO: 712313 - RNA, 22 nt, Human
cugcccagaagccagaugggca

SEQ ID NO: 712314 - RNA, 22 nt, Human
uaaauugagauuauuaggguaa

SEQ ID NO: 712315 - RNA, 22 nt, Human
agagccugggaauuugcauguu

SEQ ID NO: 712316 - RNA, 22 nt, Human
agcuggcccucgagagccaauu

SEQ ID NO: 712317 - RNA, 22 nt, Human
agcaggugaucgcgugugcucc

SEQ ID NO: 712318 - RNA, 17 nt, Human
gggcuuuagguggugua

SEQ ID NO: 712319 - RNA, 22 nt, Human
cugcuccuccccaucaggcagc

SEQ ID NO: 712320 - RNA, 19 nt, Human
caugagcugcucacuuccc

SEQ ID NO: 712321 - RNA, 22 nt, Human
aagcaucuuaaaaaguaucaga

SEQ ID NO: 712322 - RNA, 22 nt, Human
cauugcugcuuccaggcacagg

SEQ ID NO: 712323 - RNA, 22 nt, Human
uugcaacauuguaaguuuauau

SEQ ID NO: 712324 - RNA, 22 nt, Human
auaaaugugaauuagagcuuug

SEQ ID NO: 712325 - RNA, 22 nt, Human
acuuucuauucccacagagaua

SEQ ID NO: 712326 - RNA, 17 nt, Human
acaggcagaucaccuga

SEQ ID NO: 712327 - RNA, 22 nt, Human
gagcaaggaggguggggccuuu

SEQ ID NO: 712328 - RNA, 22 nt, Human
ccagagaaagugaagcaaaugu

SEQ ID NO: 712329 - RNA, 22 nt, Human
auuuguucagcauugaauuugg

SEQ ID NO: 712330 - RNA, 17 nt, Human
cuuugcagcagacaugu

SEQ ID NO: 712331 - RNA, 22 nt, Human
ccuggacacccauuccuuggcu

SEQ ID NO: 712332 - RNA, 18 nt, Human
acagggaugggguaagug

SEQ ID NO: 712333 - RNA, 22 nt, Human
aggcagcagccacaaggccuga

SEQ ID NO: 712334 - RNA, 22 nt, Human
aucacauuguuagcauagacug

SEQ ID NO: 712335 - RNA, 22 nt, Human
gccccucccagucaggagcacu

SEQ ID NO: 712336 - RNA, 21 nt, Human
gggagggauggaaaugauguu

SEQ ID NO: 712337 - RNA, 22 nt, Human
uggcaggguuggccaccuuacc

SEQ ID NO: 712338 - RNA, 22 nt, Human
ugaacagauggcccagcagagg

SEQ ID NO: 712339 - RNA, 22 nt, Human
ucucuaguugaggacugagcag

SEQ ID NO: 712340 - RNA, 22 nt, Human
uuugaaacucugaacauguuuc

SEQ ID NO: 712341 - RNA, 23 nt, Human
ucugcuucuguauuuuuucccau

SEQ ID NO: 712342 - RNA, 19 nt, Human
ggcuccuguggcugcagcc

SEQ ID NO: 712343 - RNA, 23 nt, Human
aggagccaggaaccagcuucccc

SEQ ID NO: 712344 - RNA, 22 nt, Human
uagaaagugguugagaguuuag

SEQ ID NO: 712345 - RNA, 22 nt, Human
aaugugguuaacccauuuaaga

SEQ ID NO: 712346 - RNA, 22 nt, Human
ucaccucuuuuuuaacaggcuu

SEQ ID NO: 712347 - RNA, 22 nt, Human
caguuuuuagauuaguuggugg

SEQ ID NO: 712348 - RNA, 22 nt, Human
cugcucuguuucuuagcugggu

SEQ ID NO: 712349 - RNA, 22 nt, Human
ugggaggacuugugggcuucau

SEQ ID NO: 712350 - RNA, 19 nt, Human
agcagggagugguuguggg

SEQ ID NO: 712351 - RNA, 22 nt, Human
uucuauaagacucauauuucuu

SEQ ID NO: 712352 - RNA, 19 nt, Human
uggaacaaacugcaaugac

SEQ ID NO: 712353 - RNA, 22 nt, Human
gugcauauaugugcagcaucaa

SEQ ID NO: 712354 - RNA, 22 nt, Human
cugcagggauugcuucuguaua

SEQ ID NO: 712355 - RNA, 22 nt, Human
uucucagaggagucgggagcug

SEQ ID NO: 712356 - RNA, 22 nt, Human
agagccugcaucaggcuugggg

SEQ ID NO: 712357 - RNA, 22 nt, Human
ucagaacaguucuuaauauugc

SEQ ID NO: 712358 - RNA, 21 nt, Human
cucuccagugguuccugauuc

SEQ ID NO: 712359 - RNA, 22 nt, Human
cccugcugcauggccuccacga

SEQ ID NO: 712360 - RNA, 22 nt, Human
ucuaacuuagggaauacuuuag

SEQ ID NO: 712361 - RNA, 22 nt, Human
uaacugugaaguaauuguggau

SEQ ID NO: 712362 - RNA, 22 nt, Human
uggcauccucucuucugagugc

SEQ ID NO: 712363 - RNA, 22 nt, Human
uuaccauagaaacuuccuuuuu

SEQ ID NO: 712364 - RNA, 22 nt, Human
ucccacagugguacagcccuga

SEQ ID NO: 712365 - RNA, 22 nt, Human
uaaaacuuaacuauccagauua

SEQ ID NO: 712366 - RNA, 22 nt, Human
uccagagcuaauucagcagcug

SEQ ID NO: 712367 - RNA, 22 nt, Human
ucuguuauacaacaaguaacag

SEQ ID NO: 712368 - RNA, 22 nt, Human
agcugaaauuuuacugaguaua

SEQ ID NO: 712369 - RNA, 22 nt, Human
ugcuguguuacugagauccggc

SEQ ID NO: 712370 - RNA, 22 nt, Human
acaggcucaguucacuggauuu

SEQ ID NO: 712371 - RNA, 22 nt, Human
cuauuauuagauaaucuacuug

SEQ ID NO: 712372 - RNA, 22 nt, Human
ggaauugguuucaagggaaagu

SEQ ID NO: 712373 - RNA, 22 nt, Human
uggcagaugugguuugagacag

SEQ ID NO: 712374 - RNA, 22 nt, Human
gaguaauucugguaaaucauug

SEQ ID NO: 712375 - RNA, 22 nt, Human
uuuuggaugagcccagauuucu

SEQ ID NO: 712376 - RNA, 22 nt, Human
cacugcagcaccaugcagggcu

SEQ ID NO: 712377 - RNA, 22 nt, Human
uauuacacagugaaagcaugga

SEQ ID NO: 712378 - RNA, 22 nt, Human
uaaagcuagccaaccacugucu

SEQ ID NO: 712379 - RNA, 22 nt, Human
uguguucaguaugacauucaca

SEQ ID NO: 712380 - RNA, 23 nt, Human
uucuaagguaugguuuauaccug

SEQ ID NO: 712381 - RNA, 22 nt, Human
ugcugcacucaccaacagauaa

SEQ ID NO: 712382 - RNA, 22 nt, Human
uggcuaguaggugaguagugcu

SEQ ID NO: 712383 - RNA, 22 nt, Human
ggcugcugaaguguggcaaucu

SEQ ID NO: 712384 - RNA, 22 nt, Human
agcucucuuccagauccacuug

SEQ ID NO: 712385 - RNA, 22 nt, Human
ggggagaguccuuuccaguucc

SEQ ID NO: 712386 - RNA, 22 nt, Human
gagacagccuacuccagucuca

SEQ ID NO: 712387 - RNA, 22 nt, Human
gcaaauaauauacuuugaucuc

SEQ ID NO: 712388 - RNA, 22 nt, Human
gugauuaaugccaaugggccuu

SEQ ID NO: 712389 - RNA, 22 nt, Human
gaggccacaguccugaggcauc

SEQ ID NO: 712390 - RNA, 20 nt, Human
cccuggagagaagcuccacg

SEQ ID NO: 712391 - RNA, 22 nt, Human
gaagaaacugaaagggguuggu

SEQ ID NO: 712392 - RNA, 22 nt, Human
uucucuccuacccaguauccau

SEQ ID NO: 712393 - RNA, 20 nt, Human
uggaccacccuccucuuugc

SEQ ID NO: 712394 - RNA, 22 nt, Human
agaugacagccaaggagaugaa

SEQ ID NO: 712395 - RNA, 22 nt, Human
ucuguucaugaaauaucuuuuu

SEQ ID NO: 712396 - RNA, 22 nt, Human
ucugcagagggagugcuggguc

SEQ ID NO: 712397 - RNA, 22 nt, Human
gauuucuugauaaguaguguga

SEQ ID NO: 712398 - RNA, 22 nt, Human
auucaguguuugcagcaacuuu

SEQ ID NO: 712399 - RNA, 22 nt, Human
aaauugucaguuaucugggaua

SEQ ID NO: 712400 - RNA, 22 nt, Human
aaugccuucccauuuauacuuu

SEQ ID NO: 712401 - RNA, 22 nt, Human
acuucaugcuuuagagagauga

SEQ ID NO: 712402 - RNA, 22 nt, Human
agaguuugggguaugauuguuu

SEQ ID NO: 712403 - RNA, 22 nt, Human
auucaaacaggaagaaaucauu

SEQ ID NO: 712404 - RNA, 22 nt, Human
aggcuccuuauggcuuuggggu

SEQ ID NO: 712405 - RNA, 22 nt, Human
ggggagcuugguuauucaugca

SEQ ID NO: 712406 - RNA, 22 nt, Human
gcugaggcaguccacccuugug

SEQ ID NO: 712407 - RNA, 22 nt, Human
aacaucugugaacuccgaaaau

SEQ ID NO: 712408 - RNA, 22 nt, Human
guuauguauugggaaauccaag

SEQ ID NO: 712409 - RNA, 22 nt, Human
cccccaccugaggacagucuua

SEQ ID NO: 712410 - RNA, 22 nt, Human
ugucuuuugccaaagaucaguu

SEQ ID NO: 712411 - RNA, 19 nt, Human
ccugggagucagcugaagg

SEQ ID NO: 712412 - RNA, 22 nt, Human
gguuugcacgauauuuccaugg

SEQ ID NO: 712413 - RNA, 22 nt, Human
aagcccuggaacuuuccuagcc

SEQ ID NO: 712414 - RNA, 22 nt, Human
ugucuucuguauucaagucuau

SEQ ID NO: 712415 - RNA, 22 nt, Human
agggucugaccaccaguaggga

SEQ ID NO: 712416 - RNA, 22 nt, Human
agcacagagcucggggaaugga

SEQ ID NO: 712417 - RNA, 22 nt, Human
uuggaacuggauuucauguagc

SEQ ID NO: 712418 - RNA, 22 nt, Human
gcagcuggcccugacacgcaga

SEQ ID NO: 712419 - RNA, 22 nt, Human
guuuauaugugugccacucuua

SEQ ID NO: 712420 - RNA, 22 nt, Human
ccauugaaggcacuugagcaga

SEQ ID NO: 712421 - RNA, 22 nt, Human
caggccucuccuuagucuggca

SEQ ID NO: 712422 - RNA, 23 nt, Human
cuuguuauaagaagacugucugg

SEQ ID NO: 712423 - RNA, 22 nt, Human
acucaggagggaucagcuauca

SEQ ID NO: 712424 - RNA, 22 nt, Human
uuaaaggcgauaaggcaguguu

SEQ ID NO: 712425 - RNA, 23 nt, Human
ugaugggaaggaacgacuaccac

SEQ ID NO: 712426 - RNA, 22 nt, Human
agugcccugucacuggaacuga

SEQ ID NO: 712427 - RNA, 22 nt, Human
uuucucuggcauuagguauaaa

SEQ ID NO: 712428 - RNA, 22 nt, Human
uauuuacuguauuugaaguuga

SEQ ID NO: 712429 - RNA, 20 nt, Human
uggcaggacuggcuccaccc

SEQ ID NO: 712430 - RNA, 22 nt, Human
acccuggguauuucccaaacuu

SEQ ID NO: 712431 - RNA, 22 nt, Human
ugaaagaaggguggaaaaugua

SEQ ID NO: 712432 - RNA, 22 nt, Human
cagccugcauuuguaucuguau

SEQ ID NO: 712433 - RNA, 22 nt, Human
gacacuuuaggccaccaugcaa

SEQ ID NO: 712434 - RNA, 22 nt, Human
auuugucuuugagugcccugcu

SEQ ID NO: 712435 - RNA, 22 nt, Human
ugcaggugaaaauuaugaggau

SEQ ID NO: 712436 - RNA, 22 nt, Human
ugagcaaggagcagucuuucuu

SEQ ID NO: 712437 - RNA, 22 nt, Human
guuguaaauacaguacugaaac

SEQ ID NO: 712438 - RNA, 22 nt, Human
ccauccugucuguggccucagg

SEQ ID NO: 712439 - RNA, 22 nt, Human
uuagccauggacugaauugacu

SEQ ID NO: 712440 - RNA, 22 nt, Human
caacuuuaaauggcuaugucug

SEQ ID NO: 712441 - RNA, 22 nt, Human
aauuccucuaucuuucuucaag

SEQ ID NO: 712442 - RNA, 22 nt, Human
cucaaauagaacugaucuauaa

SEQ ID NO: 712443 - RNA, 22 nt, Human
uaaaggcuuuauuuuccaguca

SEQ ID NO: 712444 - RNA, 22 nt, Human
acuagaaaguuuccagaguuau

SEQ ID NO: 712445 - RNA, 22 nt, Human
accagcugccaagggcuacacu

SEQ ID NO: 712446 - RNA, 23 nt, Human
ugcuccagguacagaacuccagg

SEQ ID NO: 712447 - RNA, 22 nt, Human
gugugagcaucaaagccuguca

SEQ ID NO: 712448 - RNA, 22 nt, Human
cucugugucugaagcccuauuu

SEQ ID NO: 712449 - RNA, 22 nt, Human
agaaaucuaagaugcucaagga

SEQ ID NO: 712450 - RNA, 22 nt, Human
aauuucuugggagcucagagaa

SEQ ID NO: 712451 - RNA, 22 nt, Human
uuucuugaaguccuaacccuca

SEQ ID NO: 712452 - RNA, 22 nt, Human
cuccugggcuaugucugcuugg

SEQ ID NO: 712453 - RNA, 22 nt, Human
caguuuaaggcaggacauggga

SEQ ID NO: 712454 - RNA, 21 nt, Human
uucugcuguucaccaccaccc

SEQ ID NO: 712455 - RNA, 22 nt, Human
ggaggcucuuauuuguucaaca

SEQ ID NO: 712456 - RNA, 22 nt, Human
agauacaacucagaaguguggu

SEQ ID NO: 712457 - RNA, 22 nt, Human
aggugcagcaugaguccaacgg

SEQ ID NO: 712458 - RNA, 22 nt, Human
cauguaguccuaaugcugguga

SEQ ID NO: 712459 - RNA, 22 nt, Human
ugcugccugugccaggaggguc

SEQ ID NO: 712460 - RNA, 22 nt, Human
auuuauauuuugggagcuccug

SEQ ID NO: 712461 - RNA, 22 nt, Human
guuccucagcccuuacuuagcc

SEQ ID NO: 712462 - RNA, 22 nt, Human
uaacagagauagaaauguaaag

SEQ ID NO: 712463 - RNA, 22 nt, Human
cugagcuuggcuuaucuccagc

SEQ ID NO: 712464 - RNA, 21 nt, Human
aguguguucuuggcauuaccu

SEQ ID NO: 712465 - RNA, 22 nt, Human
guggucaucauuaguauuauua

SEQ ID NO: 712466 - RNA, 22 nt, Human
agaagaaaugaggccguucugc

SEQ ID NO: 712467 - RNA, 22 nt, Human
ucaggcuguaaauggugugggu

SEQ ID NO: 712468 - RNA, 22 nt, Human
ucuccauaggcaguucauaaca

SEQ ID NO: 712469 - RNA, 22 nt, Human
agguccugggaguucuagugug

SEQ ID NO: 712470 - RNA, 22 nt, Human
uagcaauguguugacuugguca

SEQ ID NO: 712471 - RNA, 22 nt, Human
caugaaauguuagaauuagaca

SEQ ID NO: 712472 - RNA, 22 nt, Human
uggcccuguguccugcugccag

SEQ ID NO: 712473 - RNA, 22 nt, Human
auuucuuccucugucaguaacu

SEQ ID NO: 712474 - RNA, 21 nt, Human
ucugugcugccgucaacaucc

SEQ ID NO: 712475 - RNA, 22 nt, Human
agggacagucuacuguucacug

SEQ ID NO: 712476 - RNA, 22 nt, Human
aaccuguuuugguugcauuuca

SEQ ID NO: 712477 - RNA, 22 nt, Human
aaccugagauaauaggagagua

SEQ ID NO: 712478 - RNA, 22 nt, Human
gucccugggaugcccuucuggg

SEQ ID NO: 712479 - RNA, 23 nt, Human
ugaggcugauugauuuuugcuca

SEQ ID NO: 712480 - RNA, 22 nt, Human
cggggcaggagucccuguagag

SEQ ID NO: 712481 - RNA, 22 nt, Human
caucagaagaaagacaaaugau

SEQ ID NO: 712482 - RNA, 22 nt, Human
cugcuuuaacagaugauggugu

SEQ ID NO: 712483 - RNA, 22 nt, Human
cacauacuuguguguacauaug

SEQ ID NO: 712484 - RNA, 22 nt, Human
acuugaauaggaaagccacaaa

SEQ ID NO: 712485 - RNA, 22 nt, Human
aagaugugaaauugucucuggg

SEQ ID NO: 712486 - RNA, 19 nt, Human
uacaaugauguuaccuuug

SEQ ID NO: 712487 - RNA, 19 nt, Human
agccagcagcguagcaucu

SEQ ID NO: 712488 - RNA, 22 nt, Human
gagaaaugagugauucacuuuu

SEQ ID NO: 712489 - RNA, 21 nt, Human
ugggccaguagaaaggaaggc

SEQ ID NO: 712490 - RNA, 22 nt, Human
acacaguaggccaccaugucau

SEQ ID NO: 712491 - RNA, 22 nt, Human
uggcugccgacuggcucuuggc

SEQ ID NO: 712492 - RNA, 22 nt, Human
ucuguacacuucagcaugcauc

SEQ ID NO: 712493 - RNA, 22 nt, Human
auggccagccugguacuuggca

SEQ ID NO: 712494 - RNA, 22 nt, Human
ucaguuagggccucagaagaca

SEQ ID NO: 712495 - RNA, 22 nt, Human
uguacauuuagagcucaauaga

SEQ ID NO: 712496 - RNA, 22 nt, Human
aaagcauuauucuguggaaaaa

SEQ ID NO: 712497 - RNA, 22 nt, Human
aaagccagcaaggugaguuuca

SEQ ID NO: 712498 - RNA, 22 nt, Human
cagcagcccacgcgugcugucc

SEQ ID NO: 712499 - RNA, 22 nt, Human
ggccuugggaggagggucagaa

SEQ ID NO: 712500 - RNA, 22 nt, Human
aucacaguggcagggauuuggg

SEQ ID NO: 712501 - RNA, 23 nt, Human
aguguguaagguacuuugcugcu

SEQ ID NO: 712502 - RNA, 22 nt, Human
cugaggggucgugggagcccag

SEQ ID NO: 712503 - RNA, 19 nt, Human
gcagccaggugcucuaccu

SEQ ID NO: 712504 - RNA, 22 nt, Human
aaaguuuggauuagcaguuaga

SEQ ID NO: 712505 - RNA, 22 nt, Human
auugugaauagugccgcaguaa

SEQ ID NO: 712506 - RNA, 22 nt, Human
cuuggggauuuuaaagaccucu

SEQ ID NO: 712507 - RNA, 22 nt, Human
ugacauuuaucuucuacaauga

SEQ ID NO: 712508 - RNA, 22 nt, Human
ggaaggguucaggugggccugc

SEQ ID NO: 712509 - RNA, 22 nt, Human
augacaauacuucaauaagcug

SEQ ID NO: 712510 - RNA, 22 nt, Human
cacagacccagaagggaugaag

SEQ ID NO: 712511 - RNA, 22 nt, Human
uggcuccaucauccaugcaaga

SEQ ID NO: 712512 - RNA, 21 nt, Human
aacaugauauguguauggauu

SEQ ID NO: 712513 - RNA, 22 nt, Human
ucuguguccugcuagcugucuu

SEQ ID NO: 712514 - RNA, 19 nt, Human
uguguguuuauauauguau

SEQ ID NO: 712515 - RNA, 22 nt, Human
uuuaucuguuguaccugcauug

SEQ ID NO: 712516 - RNA, 22 nt, Human
caccugagcacuggggccgccc

SEQ ID NO: 712517 - RNA, 22 nt, Human
uucauguaccguguaccaggca

SEQ ID NO: 712518 - RNA, 22 nt, Human
aguggguacugggcaggcagag

SEQ ID NO: 712519 - RNA, 22 nt, Human
aggcaggcugcuauggaguaga

SEQ ID NO: 712520 - RNA, 22 nt, Human
uacacuguagguggcaggcagc

SEQ ID NO: 712521 - RNA, 22 nt, Human
ucugggcugguugugcuugcuu

SEQ ID NO: 712522 - RNA, 22 nt, Human
agaaaucuuugaaguguaaugu

SEQ ID NO: 712523 - RNA, 22 nt, Human
gcuacaggagcugucacaugcu

SEQ ID NO: 712524 - RNA, 19 nt, Human
cuucauucuucagcuuuug

SEQ ID NO: 712525 - RNA, 22 nt, Human
ccaggacugcagggggcgagga

SEQ ID NO: 712526 - RNA, 22 nt, Human
augaggcuaugaauggggagau

SEQ ID NO: 712527 - RNA, 22 nt, Human
gcugguccacauccugguacgu

SEQ ID NO: 712528 - RNA, 22 nt, Human
acaugcauggcugcuuaaauua

SEQ ID NO: 712529 - RNA, 22 nt, Human
cagauuuagaguggggcuugga

SEQ ID NO: 712530 - RNA, 21 nt, Human
guccucagcugaugggagcug

SEQ ID NO: 712531 - RNA, 22 nt, Human
ggcguggcagucaggaaaaggu

SEQ ID NO: 712532 - RNA, 21 nt, Human
ugggacagugauggcuccucc

SEQ ID NO: 712533 - RNA, 17 nt, Human
uggaaggcuucaauauu

SEQ ID NO: 712534 - RNA, 23 nt, Human
uugagcucaguagcucugcuggu

SEQ ID NO: 712535 - RNA, 23 nt, Human
cccuggagcuagucugagcgggg

SEQ ID NO: 712536 - RNA, 22 nt, Human
caaagucagggaagaguggcug

SEQ ID NO: 712537 - RNA, 22 nt, Human
agcuguguguuuccacugagcu

SEQ ID NO: 712538 - RNA, 22 nt, Human
aauaaguugccuguugaaucau

SEQ ID NO: 712539 - RNA, 22 nt, Human
ucacaugaguauuauuuuccaa

SEQ ID NO: 712540 - RNA, 22 nt, Human
agcaggcaccagggcucguccu

SEQ ID NO: 712541 - RNA, 21 nt, Human
ggguccugggaugggauccag

SEQ ID NO: 712542 - RNA, 22 nt, Human
uauuaagagauguaugaagaga

SEQ ID NO: 712543 - RNA, 22 nt, Human
auuauuugcuuggcucaucuaa

SEQ ID NO: 712544 - RNA, 22 nt, Human
cuucauuuggagaacugugcuu

SEQ ID NO: 712545 - RNA, 21 nt, Human
ugcuccuuagcugccccugcc

SEQ ID NO: 712546 - RNA, 22 nt, Human
uuaaaaauauguagggcccgau

SEQ ID NO: 712547 - RNA, 22 nt, Human
auuuccuauggauacaggcaga

SEQ ID NO: 712548 - RNA, 22 nt, Human
uggagucagaaugcgacaggcc

SEQ ID NO: 712549 - RNA, 22 nt, Human
cacaccagauggcagcguggga

SEQ ID NO: 712550 - RNA, 22 nt, Human
ugggcucugcugcguaccaguu

SEQ ID NO: 712551 - RNA, 22 nt, Human
cucugaccauucccuugauuuu

SEQ ID NO: 712552 - RNA, 21 nt, Human
uaucuacaguguccauucagu

SEQ ID NO: 712553 - RNA, 22 nt, Human
aagggcagagggaaucccacau

SEQ ID NO: 712554 - RNA, 20 nt, Human
agaggcuuccuugggaggag

SEQ ID NO: 712555 - RNA, 22 nt, Human
uauggaaagcucuuuuugauug

SEQ ID NO: 712556 - RNA, 22 nt, Human
uagaacuuagcacuagacuugu

SEQ ID NO: 712557 - RNA, 22 nt, Human
gcuuugcuuccuguucuagccu

SEQ ID NO: 712558 - RNA, 22 nt, Human
agagcacaaauuaguuggucuu

SEQ ID NO: 712559 - RNA, 22 nt, Human
agcuuuggagacugacuccauc

SEQ ID NO: 712560 - RNA, 22 nt, Human
cuggccacaugugugcugagca

SEQ ID NO: 712561 - RNA, 22 nt, Human
uacugaaacuuuucuucaacug

SEQ ID NO: 712562 - RNA, 22 nt, Human
agacucuggcaugcuaacuagu

SEQ ID NO: 712563 - RNA, 20 nt, Human
agaacuguuguuuggguccu

SEQ ID NO: 712564 - RNA, 22 nt, Human
ggugauucugugaggggcugac

SEQ ID NO: 712565 - RNA, 17 nt, Human
gaaagguccuagaaauc

SEQ ID NO: 712566 - RNA, 22 nt, Human
aggccugaaguguggagugggg

SEQ ID NO: 712567 - RNA, 22 nt, Human
augggcugggaauacacagggg

SEQ ID NO: 712568 - RNA, 22 nt, Human
uucauuuggccucugcuuaaaa

SEQ ID NO: 712569 - RNA, 22 nt, Human
uguuauuauguuuccagagccu

SEQ ID NO: 712570 - RNA, 22 nt, Human
ugaagcccugugucagcuucca

SEQ ID NO: 712571 - RNA, 22 nt, Human
cugaggagauccccccagaagu

SEQ ID NO: 712572 - RNA, 22 nt, Human
ucugcgcugccuugauccuugg

SEQ ID NO: 712573 - RNA, 22 nt, Human
acuucauguugcucuuggcuau

SEQ ID NO: 712574 - RNA, 22 nt, Human
ggguccuggaaucugcauuuua

SEQ ID NO: 712575 - RNA, 21 nt, Human
ucugccagcugaagaggugga

SEQ ID NO: 712576 - RNA, 22 nt, Human
cucaucuguauauagugaauga

SEQ ID NO: 712577 - RNA, 22 nt, Human
gcuggaccaggugugcacaggc

SEQ ID NO: 712578 - RNA, 22 nt, Human
cacauuuaaaaaauccacgauc

SEQ ID NO: 712579 - RNA, 22 nt, Human
ucucaggcaucuguguggcaca

SEQ ID NO: 712580 - RNA, 22 nt, Human
uuaggaagagcuuucaaucacu

SEQ ID NO: 712581 - RNA, 22 nt, Human
acauucuuucgaugucugauuu

SEQ ID NO: 712582 - RNA, 22 nt, Human
uagauucuguuuccucugguuu

SEQ ID NO: 712583 - RNA, 22 nt, Human
uuugcagucuggccugcuuugg

SEQ ID NO: 712584 - RNA, 22 nt, Human
ccugggcuuucaaaaccagccu

SEQ ID NO: 712585 - RNA, 22 nt, Human
aucugaagaaugaauggaauua

SEQ ID NO: 712586 - RNA, 22 nt, Human
ggccucugguucacagggagga

SEQ ID NO: 712587 - RNA, 22 nt, Human
aagguauauguacaauagacau

SEQ ID NO: 712588 - RNA, 22 nt, Human
guuacacacaauauauccuaaa

SEQ ID NO: 712589 - RNA, 22 nt, Human
aaugucuucaguguauacaugg

SEQ ID NO: 712590 - RNA, 22 nt, Human
gcaguaggggcuggagggcugu

SEQ ID NO: 712591 - RNA, 20 nt, Human
uuacacuuuguagcauuuuu

SEQ ID NO: 712592 - RNA, 22 nt, Human
ggaacacucgucaaauagcggg

SEQ ID NO: 712593 - RNA, 22 nt, Human
agggcgacaauggagagcguuu

SEQ ID NO: 712594 - RNA, 22 nt, Human
ccaguacaccucacuucccuuu

SEQ ID NO: 712595 - RNA, 22 nt, Human
gcaggcugaaacucggggucua

SEQ ID NO: 712596 - RNA, 17 nt, Human
ccagagaugccucaggc

SEQ ID NO: 712597 - RNA, 22 nt, Human
agacacagaaguugcuguuggg

SEQ ID NO: 712598 - RNA, 18 nt, Human
accugccuguucuucucu

SEQ ID NO: 712599 - RNA, 22 nt, Human
uucuggagccccaagaucugua

SEQ ID NO: 712600 - RNA, 22 nt, Human
ucuuauuauuguuguaaaagca

SEQ ID NO: 712601 - RNA, 22 nt, Human
ugacaaauacaauaagaucugu

SEQ ID NO: 712602 - RNA, 22 nt, Human
agauguguuucuaguuccugca

SEQ ID NO: 712603 - RNA, 22 nt, Human
ugacaaaacugcaauuacuuuu

SEQ ID NO: 712604 - RNA, 22 nt, Human
ugucucuucagcccauggcuuc

SEQ ID NO: 712605 - RNA, 22 nt, Human
uaggcagcgcuuggcugugcuu

SEQ ID NO: 712606 - RNA, 22 nt, Human
ggguuccaaacauagucuuccu

SEQ ID NO: 712607 - RNA, 22 nt, Human
ucacagaauugacaugggaauc

SEQ ID NO: 712608 - RNA, 22 nt, Human
ccagaggcuggggaaggauaca

SEQ ID NO: 712609 - RNA, 22 nt, Human
acagcuacaucaaacucagaag

SEQ ID NO: 712610 - RNA, 18 nt, Human
ugagacagcuaccacuug

SEQ ID NO: 712611 - RNA, 22 nt, Human
gcagcccaggacccuggacaga

SEQ ID NO: 712612 - RNA, 22 nt, Human
agaacaguuuguuggagacugu

SEQ ID NO: 712613 - RNA, 22 nt, Human
ugaacucucccccauugcccuc

SEQ ID NO: 712614 - RNA, 21 nt, Human
acucccugcauaagugauuua

SEQ ID NO: 712615 - RNA, 22 nt, Human
uuuaacacuaguuucuuuaacu

SEQ ID NO: 712616 - RNA, 22 nt, Human
aaucacauuugcccccauauuc

SEQ ID NO: 712617 - RNA, 22 nt, Human
aacccauguuggaagcuuauca

SEQ ID NO: 712618 - RNA, 22 nt, Human
gaugauuugaggauuucaugag

SEQ ID NO: 712619 - RNA, 22 nt, Human
ucuaaaaaagucuguucacuug

SEQ ID NO: 712620 - RNA, 22 nt, Human
ucugagcugggucuugacagcu

SEQ ID NO: 712621 - RNA, 22 nt, Human
uguacuugcuuauuagaaaucu

SEQ ID NO: 712622 - RNA, 22 nt, Human
uugauucuagaaucuucccucu

SEQ ID NO: 712623 - RNA, 22 nt, Human
cugcugugggcaggguagcugg

SEQ ID NO: 712624 - RNA, 22 nt, Human
uccugggucugggugucugagg

SEQ ID NO: 712625 - RNA, 22 nt, Human
auaaaguucugcuggcauauau

SEQ ID NO: 712626 - RNA, 22 nt, Human
gcugggcucaccaggccacuag

SEQ ID NO: 712627 - RNA, 22 nt, Human
auacaguauuaccuguucagga

SEQ ID NO: 712628 - RNA, 22 nt, Human
cacccuguacaaauggacaucu

SEQ ID NO: 712629 - RNA, 22 nt, Human
cuccuggcucgcccccagcuga

SEQ ID NO: 712630 - RNA, 22 nt, Human
ggucagccuuggauuugguagc

SEQ ID NO: 712631 - RNA, 22 nt, Human
uuccacucuucucuggacuuau

SEQ ID NO: 712632 - RNA, 22 nt, Human
agauggcuagauugcaagaacu

SEQ ID NO: 712633 - RNA, 18 nt, Human
agagcagcggcaucacac

SEQ ID NO: 712634 - RNA, 22 nt, Human
uaaggaauaucauaagaaguag

SEQ ID NO: 712635 - RNA, 18 nt, Human
gcccugguggagcuggug

SEQ ID NO: 712636 - RNA, 23 nt, Human
aaaugucuucuagcucuugagaa

SEQ ID NO: 712637 - RNA, 22 nt, Human
uuccaguccagggcuguuucca

SEQ ID NO: 712638 - RNA, 22 nt, Human
gugacaguggucacuuguaguu

SEQ ID NO: 712639 - RNA, 22 nt, Human
guguaaguaucuuuguaucuuu

SEQ ID NO: 712640 - RNA, 22 nt, Human
uguaggaguccaaucaggagac

SEQ ID NO: 712641 - RNA, 19 nt, Human
agaaguuagacauugcaau

SEQ ID NO: 712642 - RNA, 22 nt, Human
aaugcacauaaauauggucuua

SEQ ID NO: 712643 - RNA, 22 nt, Human
ugauauggaaggaagauguaca

SEQ ID NO: 712644 - RNA, 22 nt, Human
gccaccagggggugcaaggucc

SEQ ID NO: 712645 - RNA, 22 nt, Human
aaguaacacggaacuugaagca

SEQ ID NO: 712646 - RNA, 22 nt, Human
aagcagaggguauggccagguu

SEQ ID NO: 712647 - RNA, 22 nt, Human
agcuagccuaggcagagugcau

SEQ ID NO: 712648 - RNA, 22 nt, Human
uuucacuagaacguucuuguuu

SEQ ID NO: 712649 - RNA, 23 nt, Human
uaggcaggacucagauaugacag

SEQ ID NO: 712650 - RNA, 22 nt, Human
auggcugugagacaaagagcug

SEQ ID NO: 712651 - RNA, 22 nt, Human
uccauuuuguagguaugcuaca

SEQ ID NO: 712652 - RNA, 22 nt, Human
ucaucuugcugccauugcuuua

SEQ ID NO: 712653 - RNA, 22 nt, Human
uguuuuuaaaauguccugguua

SEQ ID NO: 712654 - RNA, 22 nt, Human
ucuggcuucaagucccagcucu

SEQ ID NO: 712655 - RNA, 22 nt, Human
ucuccccaaaggacucacucuc

SEQ ID NO: 712656 - RNA, 22 nt, Human
uuuuuauaggucagggcaaguc

SEQ ID NO: 712657 - RNA, 22 nt, Human
uucacccacuagagaacucagg

SEQ ID NO: 712658 - RNA, 23 nt, Human
aggcagugucucuuauccugucc

SEQ ID NO: 712659 - RNA, 22 nt, Human
auuugccuguaagacaaggccu

SEQ ID NO: 712660 - RNA, 22 nt, Human
ccugagagugguguacaggaga

SEQ ID NO: 712661 - RNA, 22 nt, Human
acagggcagagugaaaugcuau

SEQ ID NO: 712662 - RNA, 22 nt, Human
augucuuuuaugauuacgggau

SEQ ID NO: 712663 - RNA, 22 nt, Human
ugguuagucaguaccugagugu

SEQ ID NO: 712664 - RNA, 22 nt, Human
aguggcagagugcacucaggca

SEQ ID NO: 712665 - RNA, 22 nt, Human
cuguggcugcgcccugggggag

SEQ ID NO: 712666 - RNA, 22 nt, Human
cugcauguguuucugcuggguu

SEQ ID NO: 712667 - RNA, 22 nt, Human
ugaugggacugccagcugcuga

SEQ ID NO: 712668 - RNA, 20 nt, Human
uacagccuauucaccacaua

SEQ ID NO: 712669 - RNA, 22 nt, Human
ucagaauuuaaaauguguagau

SEQ ID NO: 712670 - RNA, 22 nt, Human
cuucagagaacuugaucgcugc

SEQ ID NO: 712671 - RNA, 21 nt, Human
ugcauuccuccauccaacagg

SEQ ID NO: 712672 - RNA, 22 nt, Human
agggcuuguggucguggcugug

SEQ ID NO: 712673 - RNA, 22 nt, Human
caaaguaacugccuuuccaauu

SEQ ID NO: 712674 - RNA, 22 nt, Human
gcccagguuggagagcaguggc

SEQ ID NO: 712675 - RNA, 22 nt, Human
ucccugcuugcucucagcccuu

SEQ ID NO: 712676 - RNA, 20 nt, Human
aaaguguaagcauauaauua

SEQ ID NO: 712677 - RNA, 22 nt, Human
uugagcuguauaccuaugacug

SEQ ID NO: 712678 - RNA, 22 nt, Human
ccaggcuguaagagugauguug

SEQ ID NO: 712679 - RNA, 22 nt, Human
aagauggucuugagauauuaua

SEQ ID NO: 712680 - RNA, 22 nt, Human
cagaucuuguacucauuauuga

SEQ ID NO: 712681 - RNA, 22 nt, Human
ucacagaauaaauugagaagac

SEQ ID NO: 712682 - RNA, 22 nt, Human
augccaggaacaaacaguggug

SEQ ID NO: 712683 - RNA, 22 nt, Human
ggaaguguuuccuugggcagca

SEQ ID NO: 712684 - RNA, 22 nt, Human
uccuucaaagcuccuagugagc

SEQ ID NO: 712685 - RNA, 22 nt, Human
gcuguacaaauuccacaagaga

SEQ ID NO: 712686 - RNA, 22 nt, Human
caggcugaggcaguaggguuug

SEQ ID NO: 712687 - RNA, 22 nt, Human
uucauucccuuauauuagcauu

SEQ ID NO: 712688 - RNA, 23 nt, Human
uaaauuaccuuuccagugcaggg

SEQ ID NO: 712689 - RNA, 22 nt, Human
augcauguauuaucuagaugag

SEQ ID NO: 712690 - RNA, 22 nt, Human
gaccacagguaugggcuuggca

SEQ ID NO: 712691 - RNA, 22 nt, Human
uaccaaaagcuuguuucauaca

SEQ ID NO: 712692 - RNA, 22 nt, Human
ggagagagagauuguguuuauu

SEQ ID NO: 712693 - RNA, 22 nt, Human
caggcauggaaaagcccagagg

SEQ ID NO: 712694 - RNA, 22 nt, Human
cagagguauugcaaaagccuag

SEQ ID NO: 712695 - RNA, 22 nt, Human
gcacaugaguuaagcuggggca

SEQ ID NO: 712696 - RNA, 22 nt, Human
gcucuguguauguggcaggugc

SEQ ID NO: 712697 - RNA, 22 nt, Human
acugccaggauggcacuagagg

SEQ ID NO: 712698 - RNA, 22 nt, Human
caggccagugugcuucccaggc

SEQ ID NO: 712699 - RNA, 18 nt, Human
ucuguggagagggcaguu

SEQ ID NO: 712700 - RNA, 22 nt, Human
gccuccucuugagggucaggga

SEQ ID NO: 712701 - RNA, 22 nt, Human
aagaacauguuaaaagauucac

SEQ ID NO: 712702 - RNA, 22 nt, Human
ucuggagaagcccagggagcug

SEQ ID NO: 712703 - RNA, 19 nt, Human
cccacaggaggacauaugg

SEQ ID NO: 712704 - RNA, 22 nt, Human
uaguuucauaugcaaaauagua

SEQ ID NO: 712705 - RNA, 22 nt, Human
acucagcuugcacacaucaaug

SEQ ID NO: 712706 - RNA, 22 nt, Human
gcagguggauuaucagaagugc

SEQ ID NO: 712707 - RNA, 22 nt, Human
aaagagaaaaugaucuguacau

SEQ ID NO: 712708 - RNA, 20 nt, Human
ucccucagcacuucuaccuc

SEQ ID NO: 712709 - RNA, 22 nt, Human
uucugcugagugggcaggugca

SEQ ID NO: 712710 - RNA, 22 nt, Human
acacauuaucucauuaaauacu

SEQ ID NO: 712711 - RNA, 22 nt, Human
aaacuccugcauacucagaagc

SEQ ID NO: 712712 - RNA, 21 nt, Human
uacaagauagagguaauauau

SEQ ID NO: 712713 - RNA, 22 nt, Human
acucucagggacagggucuggg

SEQ ID NO: 712714 - RNA, 22 nt, Human
ccagugcauugccgugucuagg

SEQ ID NO: 712715 - RNA, 22 nt, Human
ccugagcugcggggcagugcuc

SEQ ID NO: 712716 - RNA, 22 nt, Human
caaauguauguuuuccuaugua

SEQ ID NO: 712717 - RNA, 22 nt, Human
ugugcuuacuuugaauuauaua

SEQ ID NO: 712718 - RNA, 22 nt, Human
cccaggcagcccuucugacgca

SEQ ID NO: 712719 - RNA, 22 nt, Human
gggaauuauagcugucacaggc

SEQ ID NO: 712720 - RNA, 22 nt, Human
gggcagagagcuggaacuccuu

SEQ ID NO: 712721 - RNA, 22 nt, Human
gccacaggcuccagcaucagua

SEQ ID NO: 712722 - RNA, 22 nt, Human
uuaaaagaccuguugagguuag

SEQ ID NO: 712723 - RNA, 22 nt, Human
uuaaaggcugaucuuaauauua

SEQ ID NO: 712724 - RNA, 22 nt, Human
uuuacaacccaaguccagagag

SEQ ID NO: 712725 - RNA, 22 nt, Human
uuucuaguccucaugcaucauu

SEQ ID NO: 712726 - RNA, 22 nt, Human
uucaagguaugguagcugguca

SEQ ID NO: 712727 - RNA, 22 nt, Human
uucauugugauucuuggcuagc

SEQ ID NO: 712728 - RNA, 21 nt, Human
aaguuugggauucaguuucca

SEQ ID NO: 712729 - RNA, 22 nt, Human
uuugcauuccugccugcauuca

SEQ ID NO: 712730 - RNA, 18 nt, Human
uggaagcuggugagcaga

SEQ ID NO: 712731 - RNA, 22 nt, Human
gaagccagccuugucugccucu

SEQ ID NO: 712732 - RNA, 18 nt, Human
uagcacagagcaggaugu

SEQ ID NO: 712733 - RNA, 22 nt, Human
acuguguuaaauacagagaugg

SEQ ID NO: 712734 - RNA, 22 nt, Human
ggagcccaagucugcacucggc

SEQ ID NO: 712735 - RNA, 22 nt, Human
gccucaaaaguguuguagaggg

SEQ ID NO: 712736 - RNA, 22 nt, Human
cucagccaugucaugccuaccu

SEQ ID NO: 712737 - RNA, 22 nt, Human
augggccacacacgauugggug

SEQ ID NO: 712738 - RNA, 22 nt, Human
gauaaacacaaggugauuucau

SEQ ID NO: 712739 - RNA, 22 nt, Human
gagggaggggagcuccacccuc

SEQ ID NO: 712740 - RNA, 22 nt, Human
ucuguauauauuaaugaaauuc

SEQ ID NO: 712741 - RNA, 22 nt, Human
auauugaacccuacagacugua

SEQ ID NO: 712742 - RNA, 22 nt, Human
ccugagagugcgugccuccuua

SEQ ID NO: 712743 - RNA, 22 nt, Human
gcucugcugagauaucugggag

SEQ ID NO: 712744 - RNA, 22 nt, Human
cuuuaucagaaaacacauuagg

SEQ ID NO: 712745 - RNA, 22 nt, Human
ggucucgagccaggcagcugca

SEQ ID NO: 712746 - RNA, 22 nt, Human
cuucagcccagccuccgccucc

SEQ ID NO: 712747 - RNA, 22 nt, Human
acaccauacucauguugguucc

SEQ ID NO: 712748 - RNA, 22 nt, Human
ccugaggggcugcaggccagcu

SEQ ID NO: 712749 - RNA, 22 nt, Human
cauggaauuuucuaggcauaaa

SEQ ID NO: 712750 - RNA, 22 nt, Human
ugugccuucccucugcugauuu

SEQ ID NO: 712751 - RNA, 22 nt, Human
ccaaaguuuuuauaguuagcau

SEQ ID NO: 712752 - RNA, 19 nt, Human
ugugucucuguguagccug

SEQ ID NO: 712753 - RNA, 22 nt, Human
cuugcuuuaucugguuucucau

SEQ ID NO: 712754 - RNA, 22 nt, Human
uaucacaggugugauuuacauu

SEQ ID NO: 712755 - RNA, 22 nt, Human
ccagagaggcaaaacuccuucc

SEQ ID NO: 712756 - RNA, 22 nt, Human
cugcccugcuggagaucacagu

SEQ ID NO: 712757 - RNA, 22 nt, Human
uuuuugcaccaaccuaauagaa

SEQ ID NO: 712758 - RNA, 19 nt, Human
gaggcccaugagggugcuc

SEQ ID NO: 712759 - RNA, 22 nt, Human
caaacauuuguuggaaccccug

SEQ ID NO: 712760 - RNA, 22 nt, Human
ugucugccaccccaucaagcuc

SEQ ID NO: 712761 - RNA, 20 nt, Human
uagauguuuccugucauaaa

SEQ ID NO: 712762 - RNA, 22 nt, Human
cagggguggcugcagcagaggu

SEQ ID NO: 712763 - RNA, 22 nt, Human
uacagauauagagauuuauaga

SEQ ID NO: 712764 - RNA, 22 nt, Human
agucacaguucugcugucugag

SEQ ID NO: 712765 - RNA, 23 nt, Human
aaaggcaggccuaggacauauug

SEQ ID NO: 712766 - RNA, 22 nt, Human
ugcugaugcuguucuguuagga

SEQ ID NO: 712767 - RNA, 22 nt, Human
gggauggggucaacauguaccu

SEQ ID NO: 712768 - RNA, 22 nt, Human
cucaggaugcaauuccaucaag

SEQ ID NO: 712769 - RNA, 22 nt, Human
gugucccaggagaggagacaau

SEQ ID NO: 712770 - RNA, 22 nt, Human
aagcugugaaauagauuacaca

SEQ ID NO: 712771 - RNA, 22 nt, Human
ugggccagcugaagugccgccc

SEQ ID NO: 712772 - RNA, 22 nt, Human
ucauccuuuugcaugggaaggc

SEQ ID NO: 712773 - RNA, 22 nt, Human
augaauccagcaaacagugagg

SEQ ID NO: 712774 - RNA, 22 nt, Human
ggagaaggugcuggucacugug

SEQ ID NO: 712775 - RNA, 22 nt, Human
gucacacagggccuccaaauca

SEQ ID NO: 712776 - RNA, 22 nt, Human
aucaggauagucuguaaauugu

SEQ ID NO: 712777 - RNA, 22 nt, Human
ggagaggugaauggcugcucua

SEQ ID NO: 712778 - RNA, 19 nt, Human
ggugaccaccuggucagug

SEQ ID NO: 712779 - RNA, 22 nt, Human
ucagagagugcaaaauauagcu

SEQ ID NO: 712780 - RNA, 22 nt, Human
uuugcaaaugaagcucugagga

SEQ ID NO: 712781 - RNA, 22 nt, Human
aguuucuagcaaggauuguuga

SEQ ID NO: 712782 - RNA, 22 nt, Human
caggcugggcuccggagauaaa

SEQ ID NO: 712783 - RNA, 22 nt, Human
gcucaggcccagcggcuggugu

SEQ ID NO: 712784 - RNA, 22 nt, Human
uucuucagugccccucuaguag

SEQ ID NO: 712785 - RNA, 22 nt, Human
ccagacccugcucuggggcucu

SEQ ID NO: 712786 - RNA, 22 nt, Human
aagaguuucuuuauuaaccuuu

SEQ ID NO: 712787 - RNA, 22 nt, Human
gucaggacaggcucuggacuga

SEQ ID NO: 712788 - RNA, 17 nt, Human
ugcuucaucccgauccu

SEQ ID NO: 712789 - RNA, 22 nt, Human
cucagagggucuccuccagaau

SEQ ID NO: 712790 - RNA, 22 nt, Human
ucauccugucucacuuuuugcu

SEQ ID NO: 712791 - RNA, 22 nt, Human
aaugcuuuuugcgaaaugugca

SEQ ID NO: 712792 - RNA, 22 nt, Human
gagacaucauaaugaaguuucc

SEQ ID NO: 712793 - RNA, 22 nt, Human
agacagagauacuauguuguca

SEQ ID NO: 712794 - RNA, 22 nt, Human
uggcugaguucuccaggaguag

SEQ ID NO: 712795 - RNA, 22 nt, Human
ccuggaaggugaugguacagca

SEQ ID NO: 712796 - RNA, 22 nt, Human
gggcaggugaccucuuguccug

SEQ ID NO: 712797 - RNA, 22 nt, Human
gaggcugcuuugaugacaggag

SEQ ID NO: 712798 - RNA, 22 nt, Human
augcaugugugaauuauuugac

SEQ ID NO: 712799 - RNA, 22 nt, Human
ugaaaaacacuaauuggaaagc

SEQ ID NO: 712800 - RNA, 22 nt, Human
uugcauugaaaauauauuuuaa

SEQ ID NO: 712801 - RNA, 22 nt, Human
uguccucacaggaaugaacuuu

SEQ ID NO: 712802 - RNA, 22 nt, Human
auugaaagguuuugagcagaua

SEQ ID NO: 712803 - RNA, 22 nt, Human
aggaaugauaguaaaagagaau

SEQ ID NO: 712804 - RNA, 22 nt, Human
cagcagggaagcugugcuguuu

SEQ ID NO: 712805 - RNA, 22 nt, Human
acaggcucuggggcaggauggc

SEQ ID NO: 712806 - RNA, 22 nt, Human
guggguggaucaugaggucagg

SEQ ID NO: 712807 - RNA, 22 nt, Human
uggguuaagccucauucauagc

SEQ ID NO: 712808 - RNA, 22 nt, Human
aacaaaugauaccaguucucaa

SEQ ID NO: 712809 - RNA, 22 nt, Human
ugagcaggcgcagcaggagguc

SEQ ID NO: 712810 - RNA, 22 nt, Human
caugcugauucuuccugagcuu

SEQ ID NO: 712811 - RNA, 19 nt, Human
uguacauauagagcucagu

SEQ ID NO: 712812 - RNA, 22 nt, Human
cugcuguguuccuccugcaucu

SEQ ID NO: 712813 - RNA, 22 nt, Human
caggccugagacaucugagaua

SEQ ID NO: 712814 - RNA, 22 nt, Human
auggaguuuggggucaaauacu

SEQ ID NO: 712815 - RNA, 22 nt, Human
auuugcauaauagugauuugua

SEQ ID NO: 712816 - RNA, 22 nt, Human
uuugcaaauuucgucuccucag

SEQ ID NO: 712817 - RNA, 22 nt, Human
gcugcucugggucugcccagcu

SEQ ID NO: 712818 - RNA, 17 nt, Human
ucagagggaugagcagg

SEQ ID NO: 712819 - RNA, 22 nt, Human
ggcacagggagccgcaguugca

SEQ ID NO: 712820 - RNA, 22 nt, Human
gcucucagaagagccaggcuac

SEQ ID NO: 712821 - RNA, 19 nt, Human
agguggucuaggcuggaga

SEQ ID NO: 712822 - RNA, 22 nt, Human
caugcaugucagggauccugga

SEQ ID NO: 712823 - RNA, 22 nt, Human
uauguguacaucugguugagca

SEQ ID NO: 712824 - RNA, 22 nt, Human
ugugggcaggcccgggucugag

SEQ ID NO: 712825 - RNA, 22 nt, Human
cccagagccucauucuguuggg

SEQ ID NO: 712826 - RNA, 23 nt, Human
ccucucuuuuuaggugguguuug

SEQ ID NO: 712827 - RNA, 22 nt, Human
aacccgggaggcagagguugug

SEQ ID NO: 712828 - RNA, 22 nt, Human
aacaaaccuggguggagaaagg

SEQ ID NO: 712829 - RNA, 22 nt, Human
cugggucucaggaguucugagg

SEQ ID NO: 712830 - RNA, 22 nt, Human
aagagacuauggugucuaugaa

SEQ ID NO: 712831 - RNA, 19 nt, Human
aggagcacugccagcacca

SEQ ID NO: 712832 - RNA, 22 nt, Human
ugagaugguugaccagagagca

SEQ ID NO: 712833 - RNA, 18 nt, Human
cuuccucaucgcucuccc

SEQ ID NO: 712834 - RNA, 22 nt, Human
uuucacaacguuguggugagag

SEQ ID NO: 712835 - RNA, 22 nt, Human
uuacagaguucgcaccuggugg

SEQ ID NO: 712836 - RNA, 22 nt, Human
ugugugaagcacauguucaagg

SEQ ID NO: 712837 - RNA, 21 nt, Human
ugaggccugccagucucagaa

SEQ ID NO: 712838 - RNA, 22 nt, Human
ucuuuccaaguaauacuuccca

SEQ ID NO: 712839 - RNA, 22 nt, Human
ucuaagccaggacugagagacg

SEQ ID NO: 712840 - RNA, 22 nt, Human
aacuuguauauguuauucagag

SEQ ID NO: 712841 - RNA, 22 nt, Human
cuguuuaucccuuuggucagca

SEQ ID NO: 712842 - RNA, 22 nt, Human
cuggccacugguggucauaggc

SEQ ID NO: 712843 - RNA, 22 nt, Human
ugguguggggauaagcacucug

SEQ ID NO: 712844 - RNA, 22 nt, Human
ugugucugaacuaguugcucuc

SEQ ID NO: 712845 - RNA, 18 nt, Human
auuguuaauagaguacuu

SEQ ID NO: 712846 - RNA, 22 nt, Human
agauucaggacuggccacagcc

SEQ ID NO: 712847 - RNA, 22 nt, Human
ucagagaaguaagguggggugc

SEQ ID NO: 712848 - RNA, 16 nt, Human
gcacacagccagccuu

SEQ ID NO: 712849 - RNA, 22 nt, Human
cugcuguggccagccaggucaa

SEQ ID NO: 712850 - RNA, 21 nt, Human
uggcccuggccacggcugcca

SEQ ID NO: 712851 - RNA, 21 nt, Human
gccagcugcagggcuuccuug

SEQ ID NO: 712852 - RNA, 22 nt, Human
aacuuuucauugaaucauguca

SEQ ID NO: 712853 - RNA, 22 nt, Human
gaguccaguuguucacagaggc

SEQ ID NO: 712854 - RNA, 22 nt, Human
uacauacaagcauucaauuuua

SEQ ID NO: 712855 - RNA, 22 nt, Human
guguagcauauagcaagagcau

SEQ ID NO: 712856 - RNA, 22 nt, Human
aaggaggccuggcagaugaaga

SEQ ID NO: 712857 - RNA, 21 nt, Human
cucugcugagcuccauuuuca

SEQ ID NO: 712858 - RNA, 22 nt, Human
uguaggacauguacuuguaaca

SEQ ID NO: 712859 - RNA, 22 nt, Human
cuucccuucugcagaucuuugg

SEQ ID NO: 712860 - RNA, 22 nt, Human
ggucuggauuucugcuucuuuc

SEQ ID NO: 712861 - RNA, 22 nt, Human
uaauggcuaaaauucagaagaa

SEQ ID NO: 712862 - RNA, 22 nt, Human
cuccucccaauugccaagugcu

SEQ ID NO: 712863 - RNA, 22 nt, Human
auuucucuuagcaagacauuac

SEQ ID NO: 712864 - RNA, 20 nt, Human
ucccucaguuuccagcccug

SEQ ID NO: 712865 - RNA, 22 nt, Human
uagccaaagaagguauauuugu

SEQ ID NO: 712866 - RNA, 22 nt, Human
gguucaguggaauguguugacc

SEQ ID NO: 712867 - RNA, 22 nt, Human
gagaugcuauggcuauuccccu

SEQ ID NO: 712868 - RNA, 22 nt, Human
cuuguugcaaacauucacucca

SEQ ID NO: 712869 - RNA, 22 nt, Human
cccaggagacauauagaaggac

SEQ ID NO: 712870 - RNA, 22 nt, Human
uucucuuacauuuucucagccu

SEQ ID NO: 712871 - RNA, 22 nt, Human
ucucugaguuguaaaaaauagu

SEQ ID NO: 712872 - RNA, 18 nt, Human
uaggagagaauuuauuua

SEQ ID NO: 712873 - RNA, 22 nt, Human
auucauguggggagccuucugu

SEQ ID NO: 712874 - RNA, 22 nt, Human
cuuuacaaagcaauuuugucuc

SEQ ID NO: 712875 - RNA, 22 nt, Human
gcagcccaagccugagcauccu

SEQ ID NO: 712876 - RNA, 22 nt, Human
auucacaguuacugcugaacca

SEQ ID NO: 712877 - RNA, 22 nt, Human
ggcaaagcggcccuguggccag

SEQ ID NO: 712878 - RNA, 22 nt, Human
uaauggaaguuaaauaugguau

SEQ ID NO: 712879 - RNA, 22 nt, Human
cugcauguguuauauuugguuc

SEQ ID NO: 712880 - RNA, 22 nt, Human
cuuccuucaauauaauuuuuac

SEQ ID NO: 712881 - RNA, 22 nt, Human
agagcagguggcaacucuggga

SEQ ID NO: 712882 - RNA, 22 nt, Human
ggccucuggugccugaagcgcc

SEQ ID NO: 712883 - RNA, 22 nt, Human
ggcagcugcacguugucccguc

SEQ ID NO: 712884 - RNA, 19 nt, Human
ggaccagguccugggcagc

SEQ ID NO: 712885 - RNA, 22 nt, Human
ucugcuguaaccuucagaggua

SEQ ID NO: 712886 - RNA, 22 nt, Human
augcaugagaauaucccaugcu

SEQ ID NO: 712887 - RNA, 22 nt, Human
agcugcugcggaaagaugccac

SEQ ID NO: 712888 - RNA, 22 nt, Human
gagagagaagugggugucaccu

SEQ ID NO: 712889 - RNA, 22 nt, Human
uaggcagaauugugggcucuaa

SEQ ID NO: 712890 - RNA, 22 nt, Human
agugucagccugggcaaggaac

SEQ ID NO: 712891 - RNA, 22 nt, Human
ugcugcuuuuguauaucagaga

SEQ ID NO: 712892 - RNA, 22 nt, Human
ggagggagguuagauucaagcu

SEQ ID NO: 712893 - RNA, 22 nt, Human
uggccuggcagagcaaggccug

SEQ ID NO: 712894 - RNA, 22 nt, Human
aaacauugaccucauccuggca

SEQ ID NO: 712895 - RNA, 22 nt, Human
cuguccagucagaacgucauua

SEQ ID NO: 712896 - RNA, 22 nt, Human
ccagcccuacaguaucaccugu

SEQ ID NO: 712897 - RNA, 22 nt, Human
cugucuguuaucucaccagucc

SEQ ID NO: 712898 - RNA, 22 nt, Human
caggaaugccuucuucagccau

SEQ ID NO: 712899 - RNA, 22 nt, Human
agcugccuuauggaguaugaaa

SEQ ID NO: 712900 - RNA, 22 nt, Human
gcugccugggcaggaggcgcug

SEQ ID NO: 712901 - RNA, 22 nt, Human
ugagugaaaaauuugccuggag

SEQ ID NO: 712902 - RNA, 22 nt, Human
auucaguuagccacagcuauuc

SEQ ID NO: 712903 - RNA, 22 nt, Human
uguuccuguacugcuguggcuu

SEQ ID NO: 712904 - RNA, 22 nt, Human
uggaaggcuuggaauacuucca

SEQ ID NO: 712905 - RNA, 22 nt, Human
uuuacaacuuucuguucuguau

SEQ ID NO: 712906 - RNA, 22 nt, Human
gcucaagagagaugcaguucuu

SEQ ID NO: 712907 - RNA, 20 nt, Human
guauucuguauucugcucag

SEQ ID NO: 712908 - RNA, 22 nt, Human
uggcccugcugggucagagcug

SEQ ID NO: 712909 - RNA, 22 nt, Human
ggaaaaaugacacauaucucaa

SEQ ID NO: 712910 - RNA, 22 nt, Human
cuggguucuauuuuuggcuuca

SEQ ID NO: 712911 - RNA, 22 nt, Human
gaggcuggcagaaaagcacagg

SEQ ID NO: 712912 - RNA, 22 nt, Human
aaacaucauaggcaugcaugau

SEQ ID NO: 712913 - RNA, 22 nt, Human
uucugacaguaaucaguuugcu

SEQ ID NO: 712914 - RNA, 22 nt, Human
agauaauuugaguaaauuaauu

SEQ ID NO: 712915 - RNA, 22 nt, Human
gaggacagugugaucugccagc

SEQ ID NO: 712916 - RNA, 22 nt, Human
acaagccaauuacugugccagg

SEQ ID NO: 712917 - RNA, 22 nt, Human
gccaauuuaucuuacucgugcu

SEQ ID NO: 712918 - RNA, 22 nt, Human
cacuguggcaaccugugcccaa

SEQ ID NO: 712919 - RNA, 22 nt, Human
cuugggagacacaagaagacau

SEQ ID NO: 712920 - RNA, 22 nt, Human
ccugagagggggcccuagaaau

SEQ ID NO: 712921 - RNA, 22 nt, Human
uuguuaaaauauuggagaaagg

SEQ ID NO: 712922 - RNA, 22 nt, Human
uggcaguccccugugccuggaa

SEQ ID NO: 712923 - RNA, 22 nt, Human
cguucacaucguauuauuggga

SEQ ID NO: 712924 - RNA, 22 nt, Human
uaguuuagagaauuggggauga

SEQ ID NO: 712925 - RNA, 22 nt, Human
agugcuuucuugcuccaucagu

SEQ ID NO: 712926 - RNA, 22 nt, Human
cugcucuagguuccugcauaug

SEQ ID NO: 712927 - RNA, 22 nt, Human
uuccagccagauuugcuggguu

SEQ ID NO: 712928 - RNA, 22 nt, Human
ggcaggcaggagcgugcuuggg

SEQ ID NO: 712929 - RNA, 22 nt, Human
guggccuggcgagcuggcgcgg

SEQ ID NO: 712930 - RNA, 22 nt, Human
agcccaggcagagggaugcuug

SEQ ID NO: 712931 - RNA, 21 nt, Human
uucugagacucauuugaacuc

SEQ ID NO: 712932 - RNA, 20 nt, Human
auaaaacucuaaucuggccu

SEQ ID NO: 712933 - RNA, 22 nt, Human
augaaauuaaucaacacauaca

SEQ ID NO: 712934 - RNA, 22 nt, Human
aagacacuuucuaaauagaagu

SEQ ID NO: 712935 - RNA, 22 nt, Human
caugagcugcugggagccuguc

SEQ ID NO: 712936 - RNA, 22 nt, Human
gggcuggcaucaguugccgaga

SEQ ID NO: 712937 - RNA, 22 nt, Human
ccauuauccauuuugagucuua

SEQ ID NO: 712938 - RNA, 22 nt, Human
ccccaaggugcucacugucugg

SEQ ID NO: 712939 - RNA, 22 nt, Human
acagaugcaaggaaaugauugc

SEQ ID NO: 712940 - RNA, 22 nt, Human
uggcuuuaagaagacugacagc

SEQ ID NO: 712941 - RNA, 22 nt, Human
gagguggaaggcaggaacaaau

SEQ ID NO: 712942 - RNA, 22 nt, Human
uggcuucuuuccacuguccugu

SEQ ID NO: 712943 - RNA, 22 nt, Human
gcuggucagagagaaaggaggc

SEQ ID NO: 712944 - RNA, 22 nt, Human
uagacauuuuaagacauauacc

SEQ ID NO: 712945 - RNA, 21 nt, Human
ugauuuccaucuuaaaauaaa

SEQ ID NO: 712946 - RNA, 22 nt, Human
uaaacaauuccucucuaggcau

SEQ ID NO: 712947 - RNA, 22 nt, Human
uuauuuggauuuagcuuaucaa

SEQ ID NO: 712948 - RNA, 21 nt, Human
ggcaacagauauuuugcuuag

SEQ ID NO: 712949 - RNA, 22 nt, Human
gcaggcaccacggcucaggucu

SEQ ID NO: 712950 - RNA, 22 nt, Human
cuagaaaugcucaagagaaagu

SEQ ID NO: 712951 - RNA, 22 nt, Human
acucucagggcuccagggaaag

SEQ ID NO: 712952 - RNA, 22 nt, Human
aagcauaacuugcugcacauag

SEQ ID NO: 712953 - RNA, 19 nt, Human
guguacagcucagugaauu

SEQ ID NO: 712954 - RNA, 22 nt, Human
ccuuuuauacucuguccucugg

SEQ ID NO: 712955 - RNA, 22 nt, Human
cagagccagagaccugcugugc

SEQ ID NO: 712956 - RNA, 19 nt, Human
ucccaggaagcaaauguca

SEQ ID NO: 712957 - RNA, 22 nt, Human
cagagugggcugucagccacca

SEQ ID NO: 712958 - RNA, 22 nt, Human
gucaucuucgcagagugauuuu

SEQ ID NO: 712959 - RNA, 22 nt, Human
agaagaacuuagcuuucuaucu

SEQ ID NO: 712960 - RNA, 22 nt, Human
acugucuccucaucaugccugg

SEQ ID NO: 712961 - RNA, 22 nt, Human
auucaauaaauaugcuacaugg

SEQ ID NO: 712962 - RNA, 22 nt, Human
auuguaaguagaaauguuaugg

SEQ ID NO: 712963 - RNA, 22 nt, Human
cuugggugugaccuuggcauug

SEQ ID NO: 712964 - RNA, 20 nt, Human
cccagggaccugagcuccau

SEQ ID NO: 712965 - RNA, 21 nt, Human
aaaauguagacuuuucccuga

SEQ ID NO: 712966 - RNA, 22 nt, Human
cuaaauaaucccucuggucuua

SEQ ID NO: 712967 - RNA, 22 nt, Human
agcuggguggugcugagccuug

SEQ ID NO: 712968 - RNA, 22 nt, Human
gcugaauaggacugucaucucu

SEQ ID NO: 712969 - RNA, 22 nt, Human
ugggugggagcacccugucugg

SEQ ID NO: 712970 - RNA, 22 nt, Human
uuugaaguccaucuggcccagu

SEQ ID NO: 712971 - RNA, 22 nt, Human
guuauaaaaugcacaguuguuu

SEQ ID NO: 712972 - RNA, 19 nt, Human
uuacaucugcaacacuggu

SEQ ID NO: 712973 - RNA, 22 nt, Human
gccucaguugaucugugugagc

SEQ ID NO: 712974 - RNA, 22 nt, Human
caggcccugggcaggcacagag

SEQ ID NO: 712975 - RNA, 22 nt, Human
ucauuuauaaggaugcaauuaa

SEQ ID NO: 712976 - RNA, 22 nt, Human
uucuggcuuuaggcuuuucaag

SEQ ID NO: 712977 - RNA, 22 nt, Human
guggccagagugucauuuuauu

SEQ ID NO: 712978 - RNA, 22 nt, Human
agaaggcacucacacuggcacg

SEQ ID NO: 712979 - RNA, 22 nt, Human
uuucaaaguaaggauuuucauc

SEQ ID NO: 712980 - RNA, 18 nt, Human
uuuccaagaagagagcuc

SEQ ID NO: 712981 - RNA, 22 nt, Human
cuccuguggcuuucugauuuca

SEQ ID NO: 712982 - RNA, 22 nt, Human
aguguuagauucuuacucaguu

SEQ ID NO: 712983 - RNA, 22 nt, Human
gggggugguucuaaguccuaua

SEQ ID NO: 712984 - RNA, 22 nt, Human
gcaguucuacuuauccauagac

SEQ ID NO: 712985 - RNA, 20 nt, Human
cccugagacgacugagcucc

SEQ ID NO: 712986 - RNA, 17 nt, Human
aggagcuggggguggug

SEQ ID NO: 712987 - RNA, 22 nt, Human
cacacauugguuuuacuccuuu

SEQ ID NO: 712988 - RNA, 22 nt, Human
uuucucagucacaugaaccaau

SEQ ID NO: 712989 - RNA, 22 nt, Human
uacaauuuaguggugugugguu

SEQ ID NO: 712990 - RNA, 22 nt, Human
uguuaaacagcugucuucuuca

SEQ ID NO: 712991 - RNA, 22 nt, Human
uaacuguacaacugguuaguca

SEQ ID NO: 712992 - RNA, 22 nt, Human
uacauugugauguuucaauaca

SEQ ID NO: 712993 - RNA, 22 nt, Human
aguggcugauuacaaacugagu

SEQ ID NO: 712994 - RNA, 22 nt, Human
acuacagugugauaagaggggc

SEQ ID NO: 712995 - RNA, 22 nt, Human
acagaaaaguuuacuuuugcuc

SEQ ID NO: 712996 - RNA, 22 nt, Human
cagagggcuucagguucaggau

SEQ ID NO: 712997 - RNA, 22 nt, Human
gacacaaaguuugucagaaauu

SEQ ID NO: 712998 - RNA, 22 nt, Human
ccucccuuggccauagccagcc

SEQ ID NO: 712999 - RNA, 22 nt, Human
cuucagccucaucucagcccgu

SEQ ID NO: 713000 - RNA, 22 nt, Human
ucuucacaucauguuuuuuaau

SEQ ID NO: 713001 - RNA, 21 nt, Human
gcacucagucacuacucaaga

SEQ ID NO: 713002 - RNA, 22 nt, Human
cuaguguuuauuaaucaugagg

SEQ ID NO: 713003 - RNA, 19 nt, Human
ugccuggacaaaugugggg

SEQ ID NO: 713004 - RNA, 22 nt, Human
guccagcuccagggaggcaggc

SEQ ID NO: 713005 - RNA, 22 nt, Human
ucuuuuauuaggcugaaauggg

SEQ ID NO: 713006 - RNA, 22 nt, Human
ugacagacuacugccucuauug

SEQ ID NO: 713007 - RNA, 22 nt, Human
ggagggugcauuuuacccugug

SEQ ID NO: 713008 - RNA, 22 nt, Human
caucaucuugaaugacugugau

SEQ ID NO: 713009 - RNA, 22 nt, Human
uaccugucaaaagacauggaga

SEQ ID NO: 713010 - RNA, 22 nt, Human
cugcucuccccaggccagucug

SEQ ID NO: 713011 - RNA, 22 nt, Human
ggagggacccacugcggugacc

SEQ ID NO: 713012 - RNA, 22 nt, Human
ggagccaguauuuaguggucuu

SEQ ID NO: 713013 - RNA, 22 nt, Human
uggaagauaagagauugggaag

SEQ ID NO: 713014 - RNA, 22 nt, Human
uuucacucagcucucauugucu

SEQ ID NO: 713015 - RNA, 22 nt, Human
uguagcuuuauauuguguuggg

SEQ ID NO: 713016 - RNA, 22 nt, Human
aguauaaugaaaugugucagua

SEQ ID NO: 713017 - RNA, 22 nt, Human
cuuggagugaaugggggcaggu

SEQ ID NO: 713018 - RNA, 22 nt, Human
uuuaucuggacugugauauaaa

SEQ ID NO: 713019 - RNA, 22 nt, Human
uaccauaacguaaugaacuuga

SEQ ID NO: 713020 - RNA, 22 nt, Human
uuaacauacaucaugaacaaug

SEQ ID NO: 713021 - RNA, 22 nt, Human
aaauucaguuuuaauaaucacu

SEQ ID NO: 713022 - RNA, 19 nt, Human
aauauuuuagccucuuccu

SEQ ID NO: 713023 - RNA, 22 nt, Human
gccacagcaacaauaaugcagc

SEQ ID NO: 713024 - RNA, 21 nt, Human
cuuauucacuguuauuuauca

SEQ ID NO: 713025 - RNA, 22 nt, Human
auaagaugagaucagcuuucug

SEQ ID NO: 713026 - RNA, 22 nt, Human
uuuccuugccuccuguccuucu

SEQ ID NO: 713027 - RNA, 22 nt, Human
uaugcuccaaagacauguugcc

SEQ ID NO: 713028 - RNA, 22 nt, Human
agcagccaguucucugugguag

SEQ ID NO: 713029 - RNA, 22 nt, Human
ccagaauagaaggcagcuguca

SEQ ID NO: 713030 - RNA, 22 nt, Human
caugcacaagggaugaugaaau

SEQ ID NO: 713031 - RNA, 22 nt, Human
uguguguauaauaaugucugca

SEQ ID NO: 713032 - RNA, 19 nt, Human
gcugcagaggugaagaaga

SEQ ID NO: 713033 - RNA, 22 nt, Human
caccugccugguccuuagggcu

SEQ ID NO: 713034 - RNA, 22 nt, Human
agggucuugaggaucugaacug

SEQ ID NO: 713035 - RNA, 22 nt, Human
ucaguguuuccugugguacagc

SEQ ID NO: 713036 - RNA, 20 nt, Human
gagcugugcucucaggagcc

SEQ ID NO: 713037 - RNA, 22 nt, Human
ucugggaggucacauuggucuu

SEQ ID NO: 713038 - RNA, 22 nt, Human
ugacuuccugcacucaggugau

SEQ ID NO: 713039 - RNA, 22 nt, Human
gggcuggagccuggcggugguu

SEQ ID NO: 713040 - RNA, 22 nt, Human
cugaggcugggcauggggucca

SEQ ID NO: 713041 - RNA, 22 nt, Human
uacaaaguuugggguccucaaa

SEQ ID NO: 713042 - RNA, 22 nt, Human
aauuaauucaguuuuuaaggga

SEQ ID NO: 713043 - RNA, 22 nt, Human
ucugagcuccaugcaggaggcu

SEQ ID NO: 713044 - RNA, 22 nt, Human
cuguggaaucaucaggucuuac

SEQ ID NO: 713045 - RNA, 22 nt, Human
acauguacauacacauauguaa

SEQ ID NO: 713046 - RNA, 22 nt, Human
cugugcaguggggcucuggguu

SEQ ID NO: 713047 - RNA, 20 nt, Human
acauguacuaaugaauacag

SEQ ID NO: 713048 - RNA, 22 nt, Human
guacuuccagccaagugagaca

SEQ ID NO: 713049 - RNA, 22 nt, Human
uccuccagcccucuaggaaaau

SEQ ID NO: 713050 - RNA, 22 nt, Human
gcuggcugcuaggacagcuaca

SEQ ID NO: 713051 - RNA, 22 nt, Human
aagcaggcuugguguggccgcu

SEQ ID NO: 713052 - RNA, 22 nt, Human
aucaggaugacuauaaggcugc

SEQ ID NO: 713053 - RNA, 22 nt, Human
auuucuguuauaccuuucucag

SEQ ID NO: 713054 - RNA, 22 nt, Human
aguguauugauuggaacagccu

SEQ ID NO: 713055 - RNA, 22 nt, Human
uauucauguguuggaaaggaac

SEQ ID NO: 713056 - RNA, 22 nt, Human
gagugugggucucagcuuuaag

SEQ ID NO: 713057 - RNA, 22 nt, Human
caacuauagggagagugguuaa

SEQ ID NO: 713058 - RNA, 22 nt, Human
gugugagugaaaguaguuugau

SEQ ID NO: 713059 - RNA, 22 nt, Human
ugcuggaacuuagcaugcucuc

SEQ ID NO: 713060 - RNA, 23 nt, Human
uggucugaagccucagguuccuc

SEQ ID NO: 713061 - RNA, 22 nt, Human
uacacauguauuuauguguaca

SEQ ID NO: 713062 - RNA, 17 nt, Human
cucuuuugucuucuucc

SEQ ID NO: 713063 - RNA, 22 nt, Human
guggcuuuauaggaagaggaac

SEQ ID NO: 713064 - RNA, 22 nt, Human
uguguggcguugcguggcuagg

SEQ ID NO: 713065 - RNA, 22 nt, Human
auguccagaguguccuggaaag

SEQ ID NO: 713066 - RNA, 22 nt, Human
ucccaggacaggccacauggaa

SEQ ID NO: 713067 - RNA, 22 nt, Human
aagaguuagcucaauaacuuga

SEQ ID NO: 713068 - RNA, 22 nt, Human
cugcugacucauuuucaacacu

SEQ ID NO: 713069 - RNA, 22 nt, Human
gugcacaggugggaaaaugagu

SEQ ID NO: 713070 - RNA, 22 nt, Human
uugggcagaggccaggaggaug

SEQ ID NO: 713071 - RNA, 22 nt, Human
uggccaguagauaggcaggcaa

SEQ ID NO: 713072 - RNA, 22 nt, Human
uuuguggaacucucuucuugca

SEQ ID NO: 713073 - RNA, 22 nt, Human
agcagcaucucuuauugcagug

SEQ ID NO: 713074 - RNA, 20 nt, Human
caccuggauaugacccagcu

SEQ ID NO: 713075 - RNA, 22 nt, Human
cauauaaauacaacauguguua

SEQ ID NO: 713076 - RNA, 23 nt, Human
cugggccuauggucugaauccaa

SEQ ID NO: 713077 - RNA, 22 nt, Human
cuggucugcaaggccauauaga

SEQ ID NO: 713078 - RNA, 22 nt, Human
caaauaguuuuucauguauuau

SEQ ID NO: 713079 - RNA, 22 nt, Human
aguggcuguccuggcucuaacu

SEQ ID NO: 713080 - RNA, 22 nt, Human
accagcucagaagccagaaaga

SEQ ID NO: 713081 - RNA, 22 nt, Human
gcauucauauggaaggaaacua

SEQ ID NO: 713082 - RNA, 22 nt, Human
aggacuaauuucaggggauaua

SEQ ID NO: 713083 - RNA, 23 nt, Human
gggaucuguaaguugaagacaaa

SEQ ID NO: 713084 - RNA, 22 nt, Human
gcugcccacaaccccgugucua

SEQ ID NO: 713085 - RNA, 22 nt, Human
cccagcacucagcaggcucaua

SEQ ID NO: 713086 - RNA, 22 nt, Human
aggccagcaagaaagagagucu

SEQ ID NO: 713087 - RNA, 21 nt, Human
aguggggucucuguggaggcc

SEQ ID NO: 713088 - RNA, 19 nt, Human
aaacucauagacucauauu

SEQ ID NO: 713089 - RNA, 22 nt, Human
uucucucuuacugccaugcugu

SEQ ID NO: 713090 - RNA, 22 nt, Human
ccuggcugugcauugccggccc

SEQ ID NO: 713091 - RNA, 20 nt, Human
acugcuucuuucucugaccu

SEQ ID NO: 713092 - RNA, 22 nt, Human
auguuuagucauucagcuccuu

SEQ ID NO: 713093 - RNA, 22 nt, Human
ugaccucuguccugcagucugg

SEQ ID NO: 713094 - RNA, 22 nt, Human
ugucuggaugucuggagcaucg

SEQ ID NO: 713095 - RNA, 22 nt, Human
uaagugggugaagaggaaauau

SEQ ID NO: 713096 - RNA, 22 nt, Human
ugaaagcauuagucuaagguag

SEQ ID NO: 713097 - RNA, 22 nt, Human
cuuccuggaugaagcccagcau

SEQ ID NO: 713098 - RNA, 22 nt, Human
uugauuugauuguaauggcucu

SEQ ID NO: 713099 - RNA, 22 nt, Human
aaacuugagucacuucucuucc

SEQ ID NO: 713100 - RNA, 22 nt, Human
auuaaauguuccuuaaauuaua

SEQ ID NO: 713101 - RNA, 22 nt, Human
acucugugcuggggaccucauc

SEQ ID NO: 713102 - RNA, 22 nt, Human
agcccagccggauucccaguuc

SEQ ID NO: 713103 - RNA, 22 nt, Human
ucauggauuaaauuauuaaguu

SEQ ID NO: 713104 - RNA, 22 nt, Human
agaggaagccauugcuuacuga

SEQ ID NO: 713105 - RNA, 22 nt, Human
gggaugaauugagucagaaggg

SEQ ID NO: 713106 - RNA, 22 nt, Human
cauaaaguaggcaagcauucca

SEQ ID NO: 713107 - RNA, 22 nt, Human
ccugagcagggcucugcagggc

SEQ ID NO: 713108 - RNA, 22 nt, Human
ggucugaauuccagccccucug

SEQ ID NO: 713109 - RNA, 22 nt, Human
ccugugggcuugaguguagggu

SEQ ID NO: 713110 - RNA, 22 nt, Human
ccagucuccuaagagccccuga

SEQ ID NO: 713111 - RNA, 22 nt, Human
gagaggccauggggugggaugc

SEQ ID NO: 713112 - RNA, 22 nt, Human
gggcuggaagacaggaaaugcu

SEQ ID NO: 713113 - RNA, 22 nt, Human
agggcucagggcacgucaucca

SEQ ID NO: 713114 - RNA, 22 nt, Human
ccucugggcggagaucugcugc

SEQ ID NO: 713115 - RNA, 22 nt, Human
ccagccuucugggacucucauc

SEQ ID NO: 713116 - RNA, 21 nt, Human
ucucuggcgguguuuggcucc

SEQ ID NO: 713117 - RNA, 22 nt, Human
acaugauuaaaagauuuuaaag

SEQ ID NO: 713118 - RNA, 22 nt, Human
aguguguacauaauuguacgcc

SEQ ID NO: 713119 - RNA, 22 nt, Human
ggcuggcgggugggugaaagac

SEQ ID NO: 713120 - RNA, 22 nt, Human
ugcaguggaagagguggagauc

SEQ ID NO: 713121 - RNA, 22 nt, Human
uugaggaaaggaauuuauuuua

SEQ ID NO: 713122 - RNA, 22 nt, Human
aggccagaugucgggcuagaag

SEQ ID NO: 713123 - RNA, 22 nt, Human
uuauuauggcaguuuucuaggu

SEQ ID NO: 713124 - RNA, 22 nt, Human
uucuucugaaacauaaucaaua

SEQ ID NO: 713125 - RNA, 22 nt, Human
acuuccaggaggugucacugaa

SEQ ID NO: 713126 - RNA, 23 nt, Human
aaagaugugaguauucauauggc

SEQ ID NO: 713127 - RNA, 22 nt, Human
ggagccugggcauuaguaauuu

SEQ ID NO: 713128 - RNA, 22 nt, Human
aauaucugucucuaaugcauau

SEQ ID NO: 713129 - RNA, 22 nt, Human
aacaucugggcccugauuuugg

SEQ ID NO: 713130 - RNA, 22 nt, Human
ccaucagcaugggagcaugggc

SEQ ID NO: 713131 - RNA, 22 nt, Human
ccuccacugcuucccagcuuug

SEQ ID NO: 713132 - RNA, 22 nt, Human
cucuggcucugacaguugaucc

SEQ ID NO: 713133 - RNA, 22 nt, Human
cccaggcugguccugaacuccu

SEQ ID NO: 713134 - RNA, 22 nt, Human
agccuggcccugcugaacucug

SEQ ID NO: 713135 - RNA, 22 nt, Human
caaccucauagaaagaaaaugu

SEQ ID NO: 713136 - RNA, 22 nt, Human
ugggccugacucaccugccucc

SEQ ID NO: 713137 - RNA, 22 nt, Human
accagggcccgggagagcucuc

SEQ ID NO: 713138 - RNA, 22 nt, Human
caauguuugaguaggagcauaa

SEQ ID NO: 713139 - RNA, 21 nt, Human
agccagcaacacagcaucucc

SEQ ID NO: 713140 - RNA, 22 nt, Human
ucucagaauuguguccacuggg

SEQ ID NO: 713141 - RNA, 19 nt, Human
aacaucauggcucuuucca

SEQ ID NO: 713142 - RNA, 20 nt, Human
cuaaccuuaaccaucaccag

SEQ ID NO: 713143 - RNA, 22 nt, Human
uuccagagaguuauuccccugg

SEQ ID NO: 713144 - RNA, 22 nt, Human
aaguuacagucagagguuaaca

SEQ ID NO: 713145 - RNA, 22 nt, Human
gcuuuuauugucuuuacgacga

SEQ ID NO: 713146 - RNA, 22 nt, Human
uaauuacagguccaaaacaauc

SEQ ID NO: 713147 - RNA, 22 nt, Human
aggcugagccacggggcuggcu

SEQ ID NO: 713148 - RNA, 22 nt, Human
ucccagggugaaaugcaguagg

SEQ ID NO: 713149 - RNA, 22 nt, Human
uauagaaguaagcauugugaug

SEQ ID NO: 713150 - RNA, 22 nt, Human
uccagcccuccugggaucacag

SEQ ID NO: 713151 - RNA, 22 nt, Human
gggcacagagggucuugaagaa

SEQ ID NO: 713152 - RNA, 22 nt, Human
ugguuuaccccuguccuauauc

SEQ ID NO: 713153 - RNA, 22 nt, Human
aagggugguguaggagaucaaa

SEQ ID NO: 713154 - RNA, 22 nt, Human
cugaagaggacgcagcagcaag

SEQ ID NO: 713155 - RNA, 22 nt, Human
agagaagcauucuucucagggc

SEQ ID NO: 713156 - RNA, 22 nt, Human
uacauuagcucaucuauuuauu

SEQ ID NO: 713157 - RNA, 22 nt, Human
gcaggcugaguugggaaaccaa

SEQ ID NO: 713158 - RNA, 22 nt, Human
uucugagccucauucaugaggc

SEQ ID NO: 713159 - RNA, 22 nt, Human
agccaccucugugcaggccucg

SEQ ID NO: 713160 - RNA, 22 nt, Human
ucucagagauuuauggaaaacu

SEQ ID NO: 713161 - RNA, 22 nt, Human
ucagcccugaggacagaggcag

SEQ ID NO: 713162 - RNA, 22 nt, Human
caaggaaguuuuaggagaggaa

SEQ ID NO: 713163 - RNA, 22 nt, Human
ugcagaagcugcaggucagugg

SEQ ID NO: 713164 - RNA, 22 nt, Human
ccuacaguuauauucuugauug

SEQ ID NO: 713165 - RNA, 22 nt, Human
cucucuuugauguauaaauaau

SEQ ID NO: 713166 - RNA, 22 nt, Human
aaaguuuuagaacuaggaagca

SEQ ID NO: 713167 - RNA, 17 nt, Human
cagaaggaagcauggca

SEQ ID NO: 713168 - RNA, 22 nt, Human
guuguacaggcagggaaacuga

SEQ ID NO: 713169 - RNA, 22 nt, Human
gggucaagccguugcccaaggc

SEQ ID NO: 713170 - RNA, 22 nt, Human
uuucacauagaaagugauuuac

SEQ ID NO: 713171 - RNA, 22 nt, Human
uuuaaaguuuuugcacauucug

SEQ ID NO: 713172 - RNA, 22 nt, Human
aacugcauaauauaucaugcag

SEQ ID NO: 713173 - RNA, 22 nt, Human
cauucauauuugcaguauaccu

SEQ ID NO: 713174 - RNA, 22 nt, Human
auccaugaagguacuucucagg

SEQ ID NO: 713175 - RNA, 22 nt, Human
cuccacagguguacuguaccuu

SEQ ID NO: 713176 - RNA, 22 nt, Human
cccugccaaucccgucucucug

SEQ ID NO: 713177 - RNA, 22 nt, Human
gaagugaagguuacucuagauu

SEQ ID NO: 713178 - RNA, 22 nt, Human
ccugcagguaaggcuaacugcc

SEQ ID NO: 713179 - RNA, 21 nt, Human
ucucugagacacucuggagcc

SEQ ID NO: 713180 - RNA, 22 nt, Human
auugcuuacuaaucaucuucag

SEQ ID NO: 713181 - RNA, 22 nt, Human
aagggaggggauguaagccugg

SEQ ID NO: 713182 - RNA, 22 nt, Human
auggaagaacgcucaggguuac

SEQ ID NO: 713183 - RNA, 22 nt, Human
gcccucuguuauugcauccuua

SEQ ID NO: 713184 - RNA, 22 nt, Human
ggccugcuucucagugagcuug

SEQ ID NO: 713185 - RNA, 22 nt, Human
uaaaagacccucuagaguccca

SEQ ID NO: 713186 - RNA, 22 nt, Human
uauagugugugagagagugaaa

SEQ ID NO: 713187 - RNA, 23 nt, Human
gccugggacucaggaggagcuca

SEQ ID NO: 713188 - RNA, 22 nt, Human
ucauuuuuagcgcgcaaaaguu

SEQ ID NO: 713189 - RNA, 21 nt, Human
uuucgcauguguuaacuguga

SEQ ID NO: 713190 - RNA, 21 nt, Human
acacagaggcaucaucacuuu

SEQ ID NO: 713191 - RNA, 22 nt, Human
acucuuugucuguugccgcuua

SEQ ID NO: 713192 - RNA, 22 nt, Human
gcagcccagagcgcaggacccc

SEQ ID NO: 713193 - RNA, 22 nt, Human
gagaacacuuauggauuauucu

SEQ ID NO: 713194 - RNA, 20 nt, Human
uccucagaagacauuugggg

SEQ ID NO: 713195 - RNA, 22 nt, Human
gagagggcaaacuuguagcuaa

SEQ ID NO: 713196 - RNA, 21 nt, Human
uuugaaagcuacaucuauagc

SEQ ID NO: 713197 - RNA, 22 nt, Human
aaagagcacccucaaugucuga

SEQ ID NO: 713198 - RNA, 22 nt, Human
auguuaccuuguucuccaaaaa

SEQ ID NO: 713199 - RNA, 22 nt, Human
agugcacuggcaccaucucagc

SEQ ID NO: 713200 - RNA, 21 nt, Human
acuccaaacaaguuaagcugu

SEQ ID NO: 713201 - RNA, 22 nt, Human
ggugacuggagggacccaggcc

SEQ ID NO: 713202 - RNA, 22 nt, Human
uaaauuagggacuuuaguuaau

SEQ ID NO: 713203 - RNA, 22 nt, Human
gcagcuggauuucaagagggag

SEQ ID NO: 713204 - RNA, 22 nt, Human
aaucaggacccacucuacaguu

SEQ ID NO: 713205 - RNA, 22 nt, Human
aacuuuggcaagucagacuucu

SEQ ID NO: 713206 - RNA, 22 nt, Human
gccaggugagaggacugaggcu

SEQ ID NO: 713207 - RNA, 22 nt, Human
ugagcccuugacaucgcccacu

SEQ ID NO: 713208 - RNA, 22 nt, Human
uucaaaccuucacuugcagagu

SEQ ID NO: 713209 - RNA, 22 nt, Human
gccuauuuuauuaugcauguaa

SEQ ID NO: 713210 - RNA, 22 nt, Human
aguuucagaauuuaugcagaca

SEQ ID NO: 713211 - RNA, 22 nt, Human
auguaucaacaaauuguacagu

SEQ ID NO: 713212 - RNA, 22 nt, Human
ggcccagcugggcggggacacg

SEQ ID NO: 713213 - RNA, 22 nt, Human
agcuagccauguggcuccugug

SEQ ID NO: 713214 - RNA, 22 nt, Human
cuuuuuuaagguagcuccuccu

SEQ ID NO: 713215 - RNA, 22 nt, Human
gagcaggcucugccuguguguc

SEQ ID NO: 713216 - RNA, 22 nt, Human
aguggaggcacuaauuggauuu

SEQ ID NO: 713217 - RNA, 22 nt, Human
uggaggagaauuuauggucgaa

SEQ ID NO: 713218 - RNA, 22 nt, Human
ccuggggaaaagcaggcauuua

SEQ ID NO: 713219 - RNA, 22 nt, Human
ccugaggucagcgguucccaca

SEQ ID NO: 713220 - RNA, 22 nt, Human
uaucuguucaauggaagaugac

SEQ ID NO: 713221 - RNA, 22 nt, Human
cugucauuuaagacauucugga

SEQ ID NO: 713222 - RNA, 22 nt, Human
aaggcucugcaaaaccuccaag

SEQ ID NO: 713223 - RNA, 22 nt, Human
cacagaaaaaggcuugaaaauc

SEQ ID NO: 713224 - RNA, 22 nt, Human
uaacacauauuucaagaguagu

SEQ ID NO: 713225 - RNA, 22 nt, Human
aggguuaauugguguccugagg

SEQ ID NO: 713226 - RNA, 22 nt, Human
aaauguggguaaugggacugga

SEQ ID NO: 713227 - RNA, 22 nt, Human
aguucauggaagauucaaugga

SEQ ID NO: 713228 - RNA, 22 nt, Human
caggccaauaaaugugauggcc

SEQ ID NO: 713229 - RNA, 22 nt, Human
acaucuguuugagaaaaagaag

SEQ ID NO: 713230 - RNA, 22 nt, Human
uaacacauaagcugagaccaug

SEQ ID NO: 713231 - RNA, 22 nt, Human
uuuuaaaggcagauuauggcuu

SEQ ID NO: 713232 - RNA, 22 nt, Human
aaaaccacaauuacuuuugcac

SEQ ID NO: 713233 - RNA, 22 nt, Human
uugaggucccugccuugccuuc

SEQ ID NO: 713234 - RNA, 22 nt, Human
auuauguagcuaaaaauugugu

SEQ ID NO: 713235 - RNA, 22 nt, Human
aguccguggccagacucaagag

SEQ ID NO: 713236 - RNA, 22 nt, Human
auaguugagaucagauucaacu

SEQ ID NO: 713237 - RNA, 22 nt, Human
uccuggagaauccugccaccug

SEQ ID NO: 713238 - RNA, 23 nt, Human
agaggcaggaguggcuugcccgg

SEQ ID NO: 713239 - RNA, 22 nt, Human
uuagaucaauacuaaagaaguu

SEQ ID NO: 713240 - RNA, 22 nt, Human
ggcugcagagcugggugggccu

SEQ ID NO: 713241 - RNA, 18 nt, Human
uccaggcuggauugauga

SEQ ID NO: 713242 - RNA, 22 nt, Human
acuuaaaaccagacagcgucau

SEQ ID NO: 713243 - RNA, 22 nt, Human
gauugcuugauacccagucaau

SEQ ID NO: 713244 - RNA, 22 nt, Human
cagauuacuuuguagcagucag

SEQ ID NO: 713245 - RNA, 22 nt, Human
agauuuccugcacugccuuuga

SEQ ID NO: 713246 - RNA, 21 nt, Human
acuggaagugggucaggaagu

SEQ ID NO: 713247 - RNA, 22 nt, Human
gcugaggaagucagguggccca

SEQ ID NO: 713248 - RNA, 22 nt, Human
aggccaguguggcuggagcaca

SEQ ID NO: 713249 - RNA, 22 nt, Human
agcugggacucaacugucuggg

SEQ ID NO: 713250 - RNA, 22 nt, Human
ugcaggaggccccauggaaccg

SEQ ID NO: 713251 - RNA, 22 nt, Human
uuaaagcccagcauauacuagg

SEQ ID NO: 713252 - RNA, 22 nt, Human
acuguauuuuggguguauuuuc

SEQ ID NO: 713253 - RNA, 22 nt, Human
uuaacacauauuuaucaauugc

SEQ ID NO: 713254 - RNA, 22 nt, Human
gacaauaaagugauacauggga

SEQ ID NO: 713255 - RNA, 19 nt, Human
gaauuuuaggacuucagca

SEQ ID NO: 713256 - RNA, 22 nt, Human
aagcacagaccagaucuccagg

SEQ ID NO: 713257 - RNA, 22 nt, Human
gcugugagcugccugugucaca

SEQ ID NO: 713258 - RNA, 22 nt, Human
ugcuuuauucccuucugaugug

SEQ ID NO: 713259 - RNA, 22 nt, Human
acaugcaagcagccgugcagau

SEQ ID NO: 713260 - RNA, 22 nt, Human
uuucuuuugaauaguguguggu

SEQ ID NO: 713261 - RNA, 22 nt, Human
guggauuacaagacaguugaga

SEQ ID NO: 713262 - RNA, 22 nt, Human
agugcaugccuuccuguggaug

SEQ ID NO: 713263 - RNA, 22 nt, Human
agacggauuaccugaggucagg

SEQ ID NO: 713264 - RNA, 19 nt, Human
aggugcaggucacagggga

SEQ ID NO: 713265 - RNA, 22 nt, Human
auggcagacacaggcaggcaga

SEQ ID NO: 713266 - RNA, 22 nt, Human
ugagcuggagucgugagcaaag

SEQ ID NO: 713267 - RNA, 22 nt, Human
aguaaaucagaccucauuaugu

SEQ ID NO: 713268 - RNA, 22 nt, Human
ucucuggcuggcaccccaggga

SEQ ID NO: 713269 - RNA, 22 nt, Human
caggguugcaugcaucuguggg

SEQ ID NO: 713270 - RNA, 22 nt, Human
ccucacuggccagccaggggug

SEQ ID NO: 713271 - RNA, 22 nt, Human
ucaggcuuugcucuguugauuu

SEQ ID NO: 713272 - RNA, 22 nt, Human
gaauguuucauguguauguuag

SEQ ID NO: 713273 - RNA, 22 nt, Human
cugggaagaaauugugggaggc

SEQ ID NO: 713274 - RNA, 22 nt, Human
ucugcugucacucauuugcuuc

SEQ ID NO: 713275 - RNA, 22 nt, Human
gaggcccugaagacagcugggg

SEQ ID NO: 713276 - RNA, 22 nt, Human
uuccccuugauaaugcaguaag

SEQ ID NO: 713277 - RNA, 22 nt, Human
cuggccaacuugcuuguuggca

SEQ ID NO: 713278 - RNA, 22 nt, Human
cugggcugccagguaggcacac

SEQ ID NO: 713279 - RNA, 22 nt, Human
ugugacuggaguccagcccacu

SEQ ID NO: 713280 - RNA, 22 nt, Human
aggcugaggcagguggaucacu

SEQ ID NO: 713281 - RNA, 22 nt, Human
uuaaaagucugaugauuuacau

SEQ ID NO: 713282 - RNA, 22 nt, Human
uagaggcaaccaguguugagaa

SEQ ID NO: 713283 - RNA, 22 nt, Human
ccuccccugcucagaacucugg

SEQ ID NO: 713284 - RNA, 22 nt, Human
agacauuuccuagacaucaaug

SEQ ID NO: 713285 - RNA, 22 nt, Human
ucaggacagccagggugcagac

SEQ ID NO: 713286 - RNA, 22 nt, Human
uggcugcagaucaagggcaggc

SEQ ID NO: 713287 - RNA, 22 nt, Human
gagggaaagguuaauacaugau

SEQ ID NO: 713288 - RNA, 22 nt, Human
uuggcccuagaugauuaaguug

SEQ ID NO: 713289 - RNA, 22 nt, Human
aagcaucucauucuugccuguc

SEQ ID NO: 713290 - RNA, 22 nt, Human
auccaggcuggguguggcuacu

SEQ ID NO: 713291 - RNA, 22 nt, Human
augauucagcaauuuuauaucu

SEQ ID NO: 713292 - RNA, 22 nt, Human
ugguuuggguaguuauuauuau

SEQ ID NO: 713293 - RNA, 22 nt, Human
uaaauucuacaacuucaaagau

SEQ ID NO: 713294 - RNA, 22 nt, Human
uuucaucuucccagagaccuug

SEQ ID NO: 713295 - RNA, 21 nt, Human
gcagagaaugaacuuuggcuu

SEQ ID NO: 713296 - RNA, 22 nt, Human
aaguuuaguagggacagaugga

SEQ ID NO: 713297 - RNA, 22 nt, Human
uaaaugcagcaguuucuguucu

SEQ ID NO: 713298 - RNA, 22 nt, Human
agguuuucacaggaaguauguu

SEQ ID NO: 713299 - RNA, 22 nt, Human
cucaagucugauggguuagguu

SEQ ID NO: 713300 - RNA, 21 nt, Human
acuguuaagacguagcugggg

SEQ ID NO: 713301 - RNA, 22 nt, Human
caguagugaaaagcagcccagc

SEQ ID NO: 713302 - RNA, 22 nt, Human
uuuacuguguccaucugugacu

SEQ ID NO: 713303 - RNA, 22 nt, Human
gacccuggcagguagccucaca

SEQ ID NO: 713304 - RNA, 22 nt, Human
aaauacagaguugcuuaaaagc

SEQ ID NO: 713305 - RNA, 22 nt, Human
agucacaauaccgugugucagu

SEQ ID NO: 713306 - RNA, 22 nt, Human
uuaagcauggaagugaaauaau

SEQ ID NO: 713307 - RNA, 22 nt, Human
aguucugcaugaaaaaggacua

SEQ ID NO: 713308 - RNA, 19 nt, Human
gaaaggcugcugcuaccug

SEQ ID NO: 713309 - RNA, 22 nt, Human
uccuggaguuuguggugauaug

SEQ ID NO: 713310 - RNA, 22 nt, Human
ucucugguuauuaacuaacucc

SEQ ID NO: 713311 - RNA, 22 nt, Human
aaugugaaaccgcacagaauaa

SEQ ID NO: 713312 - RNA, 22 nt, Human
uggacucagugcugccauuccc

SEQ ID NO: 713313 - RNA, 22 nt, Human
ucaaagucucugcuucuguaac

SEQ ID NO: 713314 - RNA, 22 nt, Human
aauaauacuucguaaaguuguu

SEQ ID NO: 713315 - RNA, 22 nt, Human
ugaagaggccaaacuaucauug

SEQ ID NO: 713316 - RNA, 18 nt, Human
caugucugcgccacaagg

SEQ ID NO: 713317 - RNA, 22 nt, Human
gccagaaagaggaggaccuggg

SEQ ID NO: 713318 - RNA, 22 nt, Human
gggacuggaguagaggccggug

SEQ ID NO: 713319 - RNA, 22 nt, Human
caagacaugcaauugccacuuu

SEQ ID NO: 713320 - RNA, 22 nt, Human
acuaauuguauaguugauguaa

SEQ ID NO: 713321 - RNA, 22 nt, Human
cugccuggaaugccagcuucuc

SEQ ID NO: 713322 - RNA, 22 nt, Human
guccugggaggggcugguccug

SEQ ID NO: 713323 - RNA, 22 nt, Human
aagaaugucucuggugaggcgc

SEQ ID NO: 713324 - RNA, 22 nt, Human
agaggaauuucuggaaggaggc

SEQ ID NO: 713325 - RNA, 22 nt, Human
uaggacagagcugguuacaaug

SEQ ID NO: 713326 - RNA, 22 nt, Human
uguuaaaccaguuuugcaucau

SEQ ID NO: 713327 - RNA, 22 nt, Human
aaacacagggauauauauucca

SEQ ID NO: 713328 - RNA, 22 nt, Human
auguaacugaaggaaaugcaug

SEQ ID NO: 713329 - RNA, 22 nt, Human
ugaggcucagaaauguaaguuu

SEQ ID NO: 713330 - RNA, 22 nt, Human
cacugacuccaaaaauaaagaa

SEQ ID NO: 713331 - RNA, 22 nt, Human
uacagaaauugccaccagcucu

SEQ ID NO: 713332 - RNA, 23 nt, Human
agcaggaaaccgagggugauguu

SEQ ID NO: 713333 - RNA, 22 nt, Human
gcuucuauuauuuggagcugag

SEQ ID NO: 713334 - RNA, 22 nt, Human
uugcauugaaugcacauuuuua

SEQ ID NO: 713335 - RNA, 22 nt, Human
ccucuugccaaucagcuacaga

SEQ ID NO: 713336 - RNA, 22 nt, Human
agcaugcacaugacuggcuuaa

SEQ ID NO: 713337 - RNA, 22 nt, Human
ucugugcuuucccugccuucuu

SEQ ID NO: 713338 - RNA, 22 nt, Human
cuccagguuacuuagccuagcu

SEQ ID NO: 713339 - RNA, 22 nt, Human
aucucauaaacacacauauaug

SEQ ID NO: 713340 - RNA, 22 nt, Human
gcagaaacuuggagaagccagg

SEQ ID NO: 713341 - RNA, 22 nt, Human
uagugcuuaaaaguggaagaga

SEQ ID NO: 713342 - RNA, 22 nt, Human
guguguggaaaguuuuccaugg

SEQ ID NO: 713343 - RNA, 20 nt, Human
cgcauaguuuccaucauucc

SEQ ID NO: 713344 - RNA, 22 nt, Human
caaaaguaauugugguuuuugc

SEQ ID NO: 713345 - RNA, 22 nt, Human
gugcuuccuccuuaaacuguca

SEQ ID NO: 713346 - RNA, 22 nt, Human
auguguaugauaccuuugcuga

SEQ ID NO: 713347 - RNA, 22 nt, Human
uauacagugccucuuccauuag

SEQ ID NO: 713348 - RNA, 22 nt, Human
gagcaucugaugagauuggauu

SEQ ID NO: 713349 - RNA, 21 nt, Human
gcuuuagauuuagugagccag

SEQ ID NO: 713350 - RNA, 22 nt, Human
agggcaaggguugaagauaaga

SEQ ID NO: 713351 - RNA, 22 nt, Human
uucuaaucugggcuucugcagu

SEQ ID NO: 713352 - RNA, 21 nt, Human
agcacagcuuuaagccaugug

SEQ ID NO: 713353 - RNA, 22 nt, Human
uacacagauuuaaaagcaggga

SEQ ID NO: 713354 - RNA, 22 nt, Human
gcucugggugaacuuggagcaa

SEQ ID NO: 713355 - RNA, 22 nt, Human
ucugauaucgcacuaaacucug

SEQ ID NO: 713356 - RNA, 22 nt, Human
agguucgggcacuuacaaaugg

SEQ ID NO: 713357 - RNA, 22 nt, Human
aguggcagguguguaguauccc

SEQ ID NO: 713358 - RNA, 22 nt, Human
uucucuacuugagauuuuaaug

SEQ ID NO: 713359 - RNA, 22 nt, Human
uuuaaaugcuuuaagcaagggu

SEQ ID NO: 713360 - RNA, 22 nt, Human
uguguccauucaggcacugacc

SEQ ID NO: 713361 - RNA, 22 nt, Human
cucuuuaagcuccuaacagcca

SEQ ID NO: 713362 - RNA, 22 nt, Human
uccuuggaggucaacgggacgg

SEQ ID NO: 713363 - RNA, 22 nt, Human
augcccugggagugcuguacca

SEQ ID NO: 713364 - RNA, 22 nt, Human
uccagcuguaguggauuugaga

SEQ ID NO: 713365 - RNA, 22 nt, Human
uccuuggagguguucaucugcc

SEQ ID NO: 713366 - RNA, 22 nt, Human
acuggcucagaguuccuagaga

SEQ ID NO: 713367 - RNA, 22 nt, Human
gaaacagcacguuuggagagau

SEQ ID NO: 713368 - RNA, 22 nt, Human
gaggccuggucuaugagauguu

SEQ ID NO: 713369 - RNA, 14 nt, Human
uccagagcuuuccg

SEQ ID NO: 713370 - RNA, 22 nt, Human
acuucaugaacauguggccugu

SEQ ID NO: 713371 - RNA, 22 nt, Human
uucaaacaaaacuguucccaua

SEQ ID NO: 713372 - RNA, 22 nt, Human
auuccuugcucucaucaaccuu

SEQ ID NO: 713373 - RNA, 22 nt, Human
aaggccaccaccagcgaggggg

SEQ ID NO: 713374 - RNA, 22 nt, Human
auucauuccaggucagucagac

SEQ ID NO: 713375 - RNA, 22 nt, Human
auacaaguugcccaaaugauua

SEQ ID NO: 713376 - RNA, 22 nt, Human
guuuuccugaaacugauggugu

SEQ ID NO: 713377 - RNA, 22 nt, Human
agcugcccugguaagauugaug

SEQ ID NO: 713378 - RNA, 20 nt, Human
ucaauuuucuacaacauuug

SEQ ID NO: 713379 - RNA, 22 nt, Human
ugcucuagccuguaaaacauga

SEQ ID NO: 713380 - RNA, 22 nt, Human
ucacuguuuccuguacuggaca

SEQ ID NO: 713381 - RNA, 22 nt, Human
uuugcauuugcaaauaaugaaa

SEQ ID NO: 713382 - RNA, 22 nt, Human
ccugggcaacauagggagaccc

SEQ ID NO: 713383 - RNA, 22 nt, Human
gggcagcuagcccucuagccca

SEQ ID NO: 713384 - RNA, 22 nt, Human
ucauuuaauaauuuuugaguag

SEQ ID NO: 713385 - RNA, 22 nt, Human
cuguacucaagguaaaccagga

SEQ ID NO: 713386 - RNA, 22 nt, Human
ccucggagaaaggcagcuccac

SEQ ID NO: 713387 - RNA, 22 nt, Human
gauuucagggugcagaugauga

SEQ ID NO: 713388 - RNA, 22 nt, Human
aaagcagcaaauacuuuugcac

SEQ ID NO: 713389 - RNA, 22 nt, Human
caggagcuggauaggaccacaa

SEQ ID NO: 713390 - RNA, 22 nt, Human
ucuccacuauuuucuagcucuu

SEQ ID NO: 713391 - RNA, 22 nt, Human
acuuggccuuauuuccacagaa

SEQ ID NO: 713392 - RNA, 22 nt, Human
augauggagguguccuggauuu

SEQ ID NO: 713393 - RNA, 22 nt, Human
ucuucuucccaucccucaaaug

SEQ ID NO: 713394 - RNA, 22 nt, Human
aagcacagaugcaagggggacc

SEQ ID NO: 713395 - RNA, 22 nt, Human
gggugggacugaagucugaggg

SEQ ID NO: 713396 - RNA, 22 nt, Human
gaaagagaaccugggccuagau

SEQ ID NO: 713397 - RNA, 22 nt, Human
ucuuggaacccuaugugauuuc

SEQ ID NO: 713398 - RNA, 19 nt, Human
gugggccaggcagaaggcu

SEQ ID NO: 713399 - RNA, 22 nt, Human
cgugugcgugcauaugcacaag

SEQ ID NO: 713400 - RNA, 22 nt, Human
agaggcuggguacgggccaccu

SEQ ID NO: 713401 - RNA, 22 nt, Human
ugaacauuggcacaaggcagca

SEQ ID NO: 713402 - RNA, 22 nt, Human
uguaaggugcucauguauuucu

SEQ ID NO: 713403 - RNA, 22 nt, Human
ucacagaaacagaauggcacag

SEQ ID NO: 713404 - RNA, 20 nt, Human
auggaggaagggcaagagaa

SEQ ID NO: 713405 - RNA, 18 nt, Human
ccaauguuggccccaagg

SEQ ID NO: 713406 - RNA, 22 nt, Human
cccaggagguggagguugcagu

SEQ ID NO: 713407 - RNA, 22 nt, Human
cuccuggcacugucuugaccca

SEQ ID NO: 713408 - RNA, 22 nt, Human
gcaguggggcgcugggaguugg

SEQ ID NO: 713409 - RNA, 22 nt, Human
ccugugggcccuggacagagac

SEQ ID NO: 713410 - RNA, 23 nt, Human
uuuaacauuugaacauguggcca

SEQ ID NO: 713411 - RNA, 22 nt, Human
agcaguggaccucagugcuauu

SEQ ID NO: 713412 - RNA, 22 nt, Human
ugggugguuuaugaguggguuu

SEQ ID NO: 713413 - RNA, 22 nt, Human
ggcaggguaaaccgagguaagu

SEQ ID NO: 713414 - RNA, 22 nt, Human
uggcucaucuaucagaaagucc

SEQ ID NO: 713415 - RNA, 22 nt, Human
ucuggccuacuggaguccauga

SEQ ID NO: 713416 - RNA, 22 nt, Human
uauuggauugagacauuuuaga

SEQ ID NO: 713417 - RNA, 22 nt, Human
gcccuguguguuugcacugauu

SEQ ID NO: 713418 - RNA, 22 nt, Human
auacaugugugugcauacaugu

SEQ ID NO: 713419 - RNA, 21 nt, Human
auuuacaaaacagucccuucc

SEQ ID NO: 713420 - RNA, 16 nt, Human
agggguacaguucauc

SEQ ID NO: 713421 - RNA, 22 nt, Human
ugagcagcuacuguguucaggg

SEQ ID NO: 713422 - RNA, 23 nt, Human
uaguuacauuauugucagagcug

SEQ ID NO: 713423 - RNA, 19 nt, Human
gagguucacgcgcuggaug

SEQ ID NO: 713424 - RNA, 20 nt, Human
aaacagcuaaaccagcucuc

SEQ ID NO: 713425 - RNA, 22 nt, Human
uugacuucccagacuuguguuu

SEQ ID NO: 713426 - RNA, 22 nt, Human
uccauccauguaggaagauggu

SEQ ID NO: 713427 - RNA, 22 nt, Human
gguaggaguauuuugcagcagu

SEQ ID NO: 713428 - RNA, 22 nt, Human
caggcccugccuugagggaccu

SEQ ID NO: 713429 - RNA, 22 nt, Human
uguuuauuuucaggauggauug

SEQ ID NO: 713430 - RNA, 22 nt, Human
ucacauuuguucuugaaucuaa

SEQ ID NO: 713431 - RNA, 22 nt, Human
agggaugauuucagugucugcc

SEQ ID NO: 713432 - RNA, 22 nt, Human
accagcuggcccaugagcacgu

SEQ ID NO: 713433 - RNA, 22 nt, Human
augaguguuuagaaaacacugg

SEQ ID NO: 713434 - RNA, 22 nt, Human
auguucuauaucauuauuguga

SEQ ID NO: 713435 - RNA, 19 nt, Human
gacucacaccuuccgcugu

SEQ ID NO: 713436 - RNA, 22 nt, Human
ggccugagcagacagcaugaug

SEQ ID NO: 713437 - RNA, 22 nt, Human
ugagcccucuucccauuuuauu

SEQ ID NO: 713438 - RNA, 22 nt, Human
ucuucaaauacagucauauuga

SEQ ID NO: 713439 - RNA, 22 nt, Human
uaacacacugaaggugagaugg

SEQ ID NO: 713440 - RNA, 22 nt, Human
gcacugagcaccagccacagau

SEQ ID NO: 713441 - RNA, 22 nt, Human
gggcugauucgauggggguaga

SEQ ID NO: 713442 - RNA, 22 nt, Human
aaggaucaaguggauuuucuua

SEQ ID NO: 713443 - RNA, 22 nt, Human
ggcagugacuguucagacgucc

SEQ ID NO: 713444 - RNA, 22 nt, Human
ucugaggcuauguucaggcuaa

SEQ ID NO: 713445 - RNA, 22 nt, Human
gcuaugcaggagccuaaugaca

SEQ ID NO: 713446 - RNA, 22 nt, Human
cuguucuuuaguuccacugcaa

SEQ ID NO: 713447 - RNA, 22 nt, Human
augaagauucuauuuaucacuu

SEQ ID NO: 713448 - RNA, 22 nt, Human
agccucugugacucacagguca

SEQ ID NO: 713449 - RNA, 22 nt, Human
cccugcuuucaaccuucuagcu

SEQ ID NO: 713450 - RNA, 22 nt, Human
aggccaggcaacauucugaagu

SEQ ID NO: 713451 - RNA, 22 nt, Human
cuguaggagugggaauuuauug

SEQ ID NO: 713452 - RNA, 22 nt, Human
agcugagagccccugcccugug

SEQ ID NO: 713453 - RNA, 22 nt, Human
auguccuuuuaaaaugugagaa

SEQ ID NO: 713454 - RNA, 22 nt, Human
uuugugugaaaauauuuaaguu

SEQ ID NO: 713455 - RNA, 19 nt, Human
agagaccacagagcugccu

SEQ ID NO: 713456 - RNA, 22 nt, Human
uauucaugggaggucacaacuu

SEQ ID NO: 713457 - RNA, 22 nt, Human
caggaagcuggucagauccugu

SEQ ID NO: 713458 - RNA, 22 nt, Human
cagacagggguaaccuuccuca

SEQ ID NO: 713459 - RNA, 22 nt, Human
ccugccuguaagauggguacaa

SEQ ID NO: 713460 - RNA, 23 nt, Human
aggcccugccugucccucuuuuu

SEQ ID NO: 713461 - RNA, 18 nt, Human
accacaugauaucuugcc

SEQ ID NO: 713462 - RNA, 18 nt, Human
uggcugcuggaguagggu

SEQ ID NO: 713463 - RNA, 22 nt, Human
agcccagcggagcgggcccggg

SEQ ID NO: 713464 - RNA, 22 nt, Human
uggccagcagaguucacucucu

SEQ ID NO: 713465 - RNA, 22 nt, Human
uucaggagcuagggaugugaaa

SEQ ID NO: 713466 - RNA, 22 nt, Human
uauguauaaaugcaugugugga

SEQ ID NO: 713467 - RNA, 22 nt, Human
gaagccccaaacccucgccauc

SEQ ID NO: 713468 - RNA, 23 nt, Human
aagcccugaagguuucaggcccu

SEQ ID NO: 713469 - RNA, 22 nt, Human
gagagcugauagaugagcuacu

SEQ ID NO: 713470 - RNA, 22 nt, Human
cuuugcuuacuggugucugcau

SEQ ID NO: 713471 - RNA, 22 nt, Human
ucaguccaggggcugugauguc

SEQ ID NO: 713472 - RNA, 22 nt, Human
aagggcucuguugccauuucag

SEQ ID NO: 713473 - RNA, 22 nt, Human
ugcugcaggcagccccucuacu

SEQ ID NO: 713474 - RNA, 22 nt, Human
ucaagcucauuccucuaaccuc

SEQ ID NO: 713475 - RNA, 22 nt, Human
ugaaagguuauuuaggucugcu

SEQ ID NO: 713476 - RNA, 19 nt, Human
cagccucaaucccucgggc

SEQ ID NO: 713477 - RNA, 22 nt, Human
caguuauuaugaggucauuagg

SEQ ID NO: 713478 - RNA, 22 nt, Human
cugccucuggccucaggcccag

SEQ ID NO: 713479 - RNA, 22 nt, Human
ggagcccucaccggcgagugcc

SEQ ID NO: 713480 - RNA, 22 nt, Human
ucaucucucaggauaccagcag

SEQ ID NO: 713481 - RNA, 22 nt, Human
uauugucuguccgggucaaagc

SEQ ID NO: 713482 - RNA, 22 nt, Human
guggcugcucgggcuccggccc

SEQ ID NO: 713483 - RNA, 22 nt, Human
cagagucaauguccaagaagcu

SEQ ID NO: 713484 - RNA, 22 nt, Human
ucagcauucuuuacaaggauga

SEQ ID NO: 713485 - RNA, 22 nt, Human
uuauucagcagggacuuccuuu

SEQ ID NO: 713486 - RNA, 22 nt, Human
gcugggcuggaaggccaaggca

SEQ ID NO: 713487 - RNA, 22 nt, Human
cuguuucagcuacuguuccaug

SEQ ID NO: 713488 - RNA, 22 nt, Human
cccuggaggcggauguugcagu

SEQ ID NO: 713489 - RNA, 22 nt, Human
aguguuggaccgagguggagcc

SEQ ID NO: 713490 - RNA, 22 nt, Human
cugcacaguguuggaagcugcc

SEQ ID NO: 713491 - RNA, 22 nt, Human
ucuucagauaaagggagaguau

SEQ ID NO: 713492 - RNA, 22 nt, Human
uaggaugacugauagugauucc

SEQ ID NO: 713493 - RNA, 22 nt, Human
cugagcaugcuacaugcagcac

SEQ ID NO: 713494 - RNA, 22 nt, Human
gaggggccuggcgaggacaugu

SEQ ID NO: 713495 - RNA, 22 nt, Human
aacaacugaaaagcuuuuucug

SEQ ID NO: 713496 - RNA, 22 nt, Human
aacuucaccuuuuugccacacu

SEQ ID NO: 713497 - RNA, 22 nt, Human
uugcaaauuauauaagggaugc

SEQ ID NO: 713498 - RNA, 22 nt, Human
uauccauaguuuauagaucaag

SEQ ID NO: 713499 - RNA, 22 nt, Human
uguaugcuuugguuguuucucu

SEQ ID NO: 713500 - RNA, 22 nt, Human
cucaggagcuuccucagcccau

SEQ ID NO: 713501 - RNA, 19 nt, Human
gaauacagauaauaagcag

SEQ ID NO: 713502 - RNA, 22 nt, Human
aagagguuuaacugacucacag

SEQ ID NO: 713503 - RNA, 22 nt, Human
ucccugcuuggaaugacccuua

SEQ ID NO: 713504 - RNA, 22 nt, Human
gcccuguguauccccugugcuu

SEQ ID NO: 713505 - RNA, 22 nt, Human
cucuccagaauaugccgccgug

SEQ ID NO: 713506 - RNA, 22 nt, Human
uagaaacccugccuuaguagcu

SEQ ID NO: 713507 - RNA, 22 nt, Human
agagcagcuuuucggaaccacu

SEQ ID NO: 713508 - RNA, 22 nt, Human
augguuuaagggagaauauuga

SEQ ID NO: 713509 - RNA, 22 nt, Human
ugucuacugcugacacuaacag

SEQ ID NO: 713510 - RNA, 23 nt, Human
cauguacagaguuugauaaagug

SEQ ID NO: 713511 - RNA, 22 nt, Human
cugugccugcaggccacaucaa

SEQ ID NO: 713512 - RNA, 22 nt, Human
gcuucucgggccugaugucguc

SEQ ID NO: 713513 - RNA, 22 nt, Human
uagauuuguguuugggaugaga

SEQ ID NO: 713514 - RNA, 22 nt, Human
ucauugacaguuguuucaaaua

SEQ ID NO: 713515 - RNA, 22 nt, Human
ucugccuguggauacaugcucu

SEQ ID NO: 713516 - RNA, 22 nt, Human
acagcuugaaucuuaagcucuu

SEQ ID NO: 713517 - RNA, 22 nt, Human
cuccucagggcugguuacaugg

SEQ ID NO: 713518 - RNA, 22 nt, Human
cacccaggcaaggauucugcaa

SEQ ID NO: 713519 - RNA, 22 nt, Human
aauagcauguaaguuuaaaaga

SEQ ID NO: 713520 - RNA, 22 nt, Human
uuccuggggacuuaccgucauu

SEQ ID NO: 713521 - RNA, 19 nt, Human
ucugcccacaagaaaggga

SEQ ID NO: 713522 - RNA, 22 nt, Human
uaauguuuagaagcagacagcu

SEQ ID NO: 713523 - RNA, 22 nt, Human
aucguuuacccugagugauugc

SEQ ID NO: 713524 - RNA, 20 nt, Human
ugacaaaugaucugauuuuc

SEQ ID NO: 713525 - RNA, 22 nt, Human
uguuuuaugagccauauaaccu

SEQ ID NO: 713526 - RNA, 22 nt, Human
cagcuguguaugagagcaugcu

SEQ ID NO: 713527 - RNA, 22 nt, Human
cuugccugcuggagcagggcuc

SEQ ID NO: 713528 - RNA, 22 nt, Human
ugugcccugccuacaucaccuu

SEQ ID NO: 713529 - RNA, 22 nt, Human
cuuagcuagaggcaauuauguu

SEQ ID NO: 713530 - RNA, 22 nt, Human
caagggcaggagaggauggaug

SEQ ID NO: 713531 - RNA, 22 nt, Human
ucugaaauuccuuccagacuuu

SEQ ID NO: 713532 - RNA, 22 nt, Human
ucaggcagagcuguggagcucu

SEQ ID NO: 713533 - RNA, 22 nt, Human
ucccucugguccucgguggaga

SEQ ID NO: 713534 - RNA, 22 nt, Human
acucaggcuucaggcacagcug

SEQ ID NO: 713535 - RNA, 22 nt, Human
ucucagucagccuugauguccc

SEQ ID NO: 713536 - RNA, 22 nt, Human
uccuccagaccacuucugugcg

SEQ ID NO: 713537 - RNA, 22 nt, Human
aggcuggagggcaauggcaaga

SEQ ID NO: 713538 - RNA, 23 nt, Human
uccaccccagcugaggcuuagcc

SEQ ID NO: 713539 - RNA, 22 nt, Human
uagcucugaccaagagacugag

SEQ ID NO: 713540 - RNA, 22 nt, Human
acagggcuauauuccucagagc

SEQ ID NO: 713541 - RNA, 22 nt, Human
aaguaugacauuuaagacaauu

SEQ ID NO: 713542 - RNA, 20 nt, Human
gcucugugguuugagucucc

SEQ ID NO: 713543 - RNA, 22 nt, Human
gagagcugggcuuugggugaag

SEQ ID NO: 713544 - RNA, 22 nt, Human
ugaaaugcuguagagacuguau

SEQ ID NO: 713545 - RNA, 22 nt, Human
cagagcugguguuacaagucca

SEQ ID NO: 713546 - RNA, 22 nt, Human
ccugagaucagugcauuuggug

SEQ ID NO: 713547 - RNA, 22 nt, Human
cagggcugagaauuuagagaca

SEQ ID NO: 713548 - RNA, 22 nt, Human
auacauguuguaccauauguuu

SEQ ID NO: 713549 - RNA, 22 nt, Human
uugaaagauagugaagccagcc

SEQ ID NO: 713550 - RNA, 22 nt, Human
gggcuccaucacaggcuccauc

SEQ ID NO: 713551 - RNA, 22 nt, Human
gagcuggugcucuugucaagac

SEQ ID NO: 713552 - RNA, 22 nt, Human
uaggaaggccugucacuacuug

SEQ ID NO: 713553 - RNA, 22 nt, Human
gccaggcagccacccucugcga

SEQ ID NO: 713554 - RNA, 22 nt, Human
aaggcugguuccaucccuggug

SEQ ID NO: 713555 - RNA, 22 nt, Human
uuguuucaaauauuucagaaua

SEQ ID NO: 713556 - RNA, 22 nt, Human
agacccagaaagcagcugcauu

SEQ ID NO: 713557 - RNA, 22 nt, Human
uggcuucuggccaggcacagga

SEQ ID NO: 713558 - RNA, 22 nt, Human
uagcaaugcucuaugaugaaaa

SEQ ID NO: 713559 - RNA, 22 nt, Human
uugaagcaggaaaauuucuauu

SEQ ID NO: 713560 - RNA, 22 nt, Human
cagguuuaguuccacacagcuc

SEQ ID NO: 713561 - RNA, 22 nt, Human
acuuggcaaguaucuauaaagu

SEQ ID NO: 713562 - RNA, 22 nt, Human
aaaagagucuuaggcagucaua

SEQ ID NO: 713563 - RNA, 22 nt, Human
uagucagauauaugacuuacgu

SEQ ID NO: 713564 - RNA, 22 nt, Human
gccaccagggggcuccagugag

SEQ ID NO: 713565 - RNA, 22 nt, Human
uuugagguuagcuagcagauca

SEQ ID NO: 713566 - RNA, 22 nt, Human
ucucacagugcaggucugucuc

SEQ ID NO: 713567 - RNA, 20 nt, Human
agacaugguagugauucagg

SEQ ID NO: 713568 - RNA, 19 nt, Human
cugucccucccagguauga

SEQ ID NO: 713569 - RNA, 22 nt, Human
ccugcuuaacauugccaugaca

SEQ ID NO: 713570 - RNA, 22 nt, Human
cugaagagacuggagggggcau

SEQ ID NO: 713571 - RNA, 22 nt, Human
acucccuugugaacucauucuu

SEQ ID NO: 713572 - RNA, 22 nt, Human
gaggggcuggcacgauggcugc

SEQ ID NO: 713573 - RNA, 22 nt, Human
acugugcaaugaguaauaaacu

SEQ ID NO: 713574 - RNA, 22 nt, Human
uccaugcagagaacugaaguac

SEQ ID NO: 713575 - RNA, 22 nt, Human
aaagguuagacagcucugcaua

SEQ ID NO: 713576 - RNA, 22 nt, Human
aagauguuaaauugggggcauu

SEQ ID NO: 713577 - RNA, 22 nt, Human
uucucagauuccccuuuuaaua

SEQ ID NO: 713578 - RNA, 22 nt, Human
agcaaacauucagcagauuggc

SEQ ID NO: 713579 - RNA, 22 nt, Human
gccagcucuguggcuguacuug

SEQ ID NO: 713580 - RNA, 22 nt, Human
uucauucauucaugaauguuaa

SEQ ID NO: 713581 - RNA, 22 nt, Human
aucaggauucaccccagagcug

SEQ ID NO: 713582 - RNA, 22 nt, Human
aggcugcucugcgaagucagcu

SEQ ID NO: 713583 - RNA, 22 nt, Human
ccaggagccacucaggcccaca

SEQ ID NO: 713584 - RNA, 22 nt, Human
ugccagggcugcuacuggcuga

SEQ ID NO: 713585 - RNA, 22 nt, Human
ugaucagcaucuucccagcucg

SEQ ID NO: 713586 - RNA, 22 nt, Human
gaauuuuucuggaagcaauuau

SEQ ID NO: 713587 - RNA, 22 nt, Human
ucucuguaucagcaccugcugg

SEQ ID NO: 713588 - RNA, 22 nt, Human
auaaaguggagguaguauucau

SEQ ID NO: 713589 - RNA, 22 nt, Human
caaaugcauaguuuauaagaag

SEQ ID NO: 713590 - RNA, 22 nt, Human
guuuccuguuucucagcagccc

SEQ ID NO: 713591 - RNA, 22 nt, Human
gucaggcccuggcagccgugac

SEQ ID NO: 713592 - RNA, 22 nt, Human
cugggcucaagaagucuucccu

SEQ ID NO: 713593 - RNA, 22 nt, Human
auccacucucccauucaugcau

SEQ ID NO: 713594 - RNA, 19 nt, Human
augucccaccgccccugag

SEQ ID NO: 713595 - RNA, 22 nt, Human
gccuggcuaauuuugguauuuu

SEQ ID NO: 713596 - RNA, 22 nt, Human
ucaguuuauggucuaguucaug

SEQ ID NO: 713597 - RNA, 22 nt, Human
cuauugaauuaacuauuaaagu

SEQ ID NO: 713598 - RNA, 22 nt, Human
ugagcucuucuaacuaauugug

SEQ ID NO: 713599 - RNA, 22 nt, Human
aaaugguaaugucuuucuguuu

SEQ ID NO: 713600 - RNA, 22 nt, Human
ugcuccagcaccaagagcucca

SEQ ID NO: 713601 - RNA, 22 nt, Human
uggccugucuuguugugcuaga

SEQ ID NO: 713602 - RNA, 22 nt, Human
uauuuccuguggauacuuuuag

SEQ ID NO: 713603 - RNA, 22 nt, Human
uugagaauguguuuugcuaagu

SEQ ID NO: 713604 - RNA, 22 nt, Human
guagcagcagagcagguccucc

SEQ ID NO: 713605 - RNA, 22 nt, Human
cagagccaucaugauauggagu

SEQ ID NO: 713606 - RNA, 22 nt, Human
uuuuaugugcuggacuggcagu

SEQ ID NO: 713607 - RNA, 21 nt, Human
cagugccccagcuacaaaagg

SEQ ID NO: 713608 - RNA, 22 nt, Human
ugaggugguucaagagccuugu

SEQ ID NO: 713609 - RNA, 22 nt, Human
cugaagccaugugcucacuggu

SEQ ID NO: 713610 - RNA, 22 nt, Human
agagccugagaggauaaugggg

SEQ ID NO: 713611 - RNA, 22 nt, Human
aagacaauccuggacagucagc

SEQ ID NO: 713612 - RNA, 22 nt, Human
aauguguuauuucagaauccag

SEQ ID NO: 713613 - RNA, 17 nt, Human
acaugggcugagacucc

SEQ ID NO: 713614 - RNA, 21 nt, Human
ucagagaacccggcaggcaag

SEQ ID NO: 713615 - RNA, 22 nt, Human
gcuuccaggcuuccuaccuuug

SEQ ID NO: 713616 - RNA, 22 nt, Human
ugagcagacucugcagagccac

SEQ ID NO: 713617 - RNA, 22 nt, Human
cugggccucauccucagaguuu

SEQ ID NO: 713618 - RNA, 23 nt, Human
uuucacagaaggauuguagggcc

SEQ ID NO: 713619 - RNA, 22 nt, Human
gucaguaggaaccuagggucaa

SEQ ID NO: 713620 - RNA, 22 nt, Human
uagauuuaagacccugaauuug

SEQ ID NO: 713621 - RNA, 22 nt, Human
uuuggcuuaacuuacaugauau

SEQ ID NO: 713622 - RNA, 20 nt, Human
ucuggacucuaagguauauu

SEQ ID NO: 713623 - RNA, 22 nt, Human
cagcuuuccccgugccucagcc

SEQ ID NO: 713624 - RNA, 22 nt, Human
gcacugggaaugcugaugggcu

SEQ ID NO: 713625 - RNA, 22 nt, Human
agacgagggcccccaggacagc

SEQ ID NO: 713626 - RNA, 22 nt, Human
cacauaaucaccaaguccuuuc

SEQ ID NO: 713627 - RNA, 22 nt, Human
uucugggaggccuuugugucug

SEQ ID NO: 713628 - RNA, 22 nt, Human
ucugagguccuacuauaagugg

SEQ ID NO: 713629 - RNA, 22 nt, Human
ucucugggucucaguuuguaca

SEQ ID NO: 713630 - RNA, 22 nt, Human
caauaguaaauuacggaggaga

SEQ ID NO: 713631 - RNA, 23 nt, Human
ggagaggggugugggcaucuuua

SEQ ID NO: 713632 - RNA, 20 nt, Human
ucaaagaagauucagcucaa

SEQ ID NO: 713633 - RNA, 22 nt, Human
gcugcuguacuuggggggugcu

SEQ ID NO: 713634 - RNA, 22 nt, Human
uguuaacuaauggucuaacauu

SEQ ID NO: 713635 - RNA, 18 nt, Human
ugaaacaagaauggugca

SEQ ID NO: 713636 - RNA, 22 nt, Human
augggcugaaagaguaagcugu

SEQ ID NO: 713637 - RNA, 22 nt, Human
cugacugugagagcaggaaugg

SEQ ID NO: 713638 - RNA, 22 nt, Human
uacuauuuauggagugguuauu

SEQ ID NO: 713639 - RNA, 22 nt, Human
uucuuugugcauccaauuuucu

SEQ ID NO: 713640 - RNA, 22 nt, Human
aguggcugaauauauuuuacua

SEQ ID NO: 713641 - RNA, 22 nt, Human
ugaggcaggaugcuugcacagg

SEQ ID NO: 713642 - RNA, 22 nt, Human
uuccagagcuuugcgcuuggaa

SEQ ID NO: 713643 - RNA, 22 nt, Human
acauauuuccaugcagcauguc

SEQ ID NO: 713644 - RNA, 23 nt, Human
gcuucugccauuugcuagcugug

SEQ ID NO: 713645 - RNA, 22 nt, Human
cuguuuguuggcuauugacagu

SEQ ID NO: 713646 - RNA, 19 nt, Human
ccucugcuccaguuuccuu

SEQ ID NO: 713647 - RNA, 22 nt, Human
gccagcagggcccaaaugcugg

SEQ ID NO: 713648 - RNA, 22 nt, Human
cagcaaaacagccguugccugg

SEQ ID NO: 713649 - RNA, 22 nt, Human
gggcuccagccagcuccuugug

SEQ ID NO: 713650 - RNA, 22 nt, Human
gaggcagagaccuucaggaccu

SEQ ID NO: 713651 - RNA, 18 nt, Human
gucugccaacaacuauca

SEQ ID NO: 713652 - RNA, 20 nt, Human
uggucuggagccagugagga

SEQ ID NO: 713653 - RNA, 22 nt, Human
ugcuagaaaucugaaacuagca

SEQ ID NO: 713654 - RNA, 22 nt, Human
aauucaguaaucauuaaugaug

SEQ ID NO: 713655 - RNA, 22 nt, Human
cacaauuuggacuucacugguu

SEQ ID NO: 713656 - RNA, 19 nt, Human
ugaggcacaugauaagaac

SEQ ID NO: 713657 - RNA, 22 nt, Human
ugggaagggaguuucuuggagu

SEQ ID NO: 713658 - RNA, 22 nt, Human
agauaugacuagaagcucauuu

SEQ ID NO: 713659 - RNA, 21 nt, Human
gcugggccuguacuugcccug

SEQ ID NO: 713660 - RNA, 22 nt, Human
agucuggaguagagccuagaaa

SEQ ID NO: 713661 - RNA, 22 nt, Human
cuuuacaggaaaagguggcugu

SEQ ID NO: 713662 - RNA, 22 nt, Human
ucugcugguuccgaauuaggcc

SEQ ID NO: 713663 - RNA, 22 nt, Human
cugcugcaaucuggcuuccaug

SEQ ID NO: 713664 - RNA, 22 nt, Human
uaauauaccaaacuguaauuuu

SEQ ID NO: 713665 - RNA, 22 nt, Human
gcuccugucuuggggcacuggc

SEQ ID NO: 713666 - RNA, 16 nt, Human
gcuggaguccuggagc

SEQ ID NO: 713667 - RNA, 18 nt, Human
auggcucaggaauggcuu

SEQ ID NO: 713668 - RNA, 22 nt, Human
ccaggcacucacggggcacugg

SEQ ID NO: 713669 - RNA, 22 nt, Human
gguuucaacucagcuaguaagg

SEQ ID NO: 713670 - RNA, 22 nt, Human
agcuguuuaugcacuccugccu

SEQ ID NO: 713671 - RNA, 22 nt, Human
cugcccugggauggucugugcg

SEQ ID NO: 713672 - RNA, 22 nt, Human
aggcagcuggaaaacuccaggc

SEQ ID NO: 713673 - RNA, 22 nt, Human
ccaaggagcaaggcucaacaag

SEQ ID NO: 713674 - RNA, 21 nt, Human
acagucuccccagaucucucc

SEQ ID NO: 713675 - RNA, 22 nt, Human
ggugggugcagggggcuucuua

SEQ ID NO: 713676 - RNA, 22 nt, Human
ccucagacuugauaauuggguu

SEQ ID NO: 713677 - RNA, 22 nt, Human
agaggaggccaggcccacaccu

SEQ ID NO: 713678 - RNA, 22 nt, Human
ggccucugcccucacuccuguc

SEQ ID NO: 713679 - RNA, 22 nt, Human
agggagcaaagguuucaggguu

SEQ ID NO: 713680 - RNA, 22 nt, Human
gccuggcuccuaagagcacaac

SEQ ID NO: 713681 - RNA, 20 nt, Human
ugcacauggcagccaucuag

SEQ ID NO: 713682 - RNA, 17 nt, Human
cuccuggccaccccucu

SEQ ID NO: 713683 - RNA, 22 nt, Human
accugagccuagggagguugag

SEQ ID NO: 713684 - RNA, 22 nt, Human
aagccaggugugcccaggaucc

SEQ ID NO: 713685 - RNA, 22 nt, Human
cagaguguugaccauaagccca

SEQ ID NO: 713686 - RNA, 22 nt, Human
ucucagaggugcccuggcaucu

SEQ ID NO: 713687 - RNA, 22 nt, Human
aaauugcuugagauuagucucc

SEQ ID NO: 713688 - RNA, 21 nt, Human
cccuaacucuaaaggauccau

SEQ ID NO: 713689 - RNA, 22 nt, Human
gggagcugcggucuugcgaaga

SEQ ID NO: 713690 - RNA, 22 nt, Human
uacugucuauacacuugauuac

SEQ ID NO: 713691 - RNA, 22 nt, Human
accucccucgccguccacucug

SEQ ID NO: 713692 - RNA, 22 nt, Human
cccagaguggagggugcagaau

SEQ ID NO: 713693 - RNA, 22 nt, Human
uguuuucuguguagagaucaca

SEQ ID NO: 713694 - RNA, 22 nt, Human
ugaauaauuccuuuuugucaag

SEQ ID NO: 713695 - RNA, 18 nt, Human
uuaauguggcuuacuaug

SEQ ID NO: 713696 - RNA, 22 nt, Human
gagguuccccauuguacuggcu

SEQ ID NO: 713697 - RNA, 22 nt, Human
ucccugggguaucgcugaggca

SEQ ID NO: 713698 - RNA, 22 nt, Human
gggaccugaggagggguuucag

SEQ ID NO: 713699 - RNA, 22 nt, Human
caguuuaggagagacgcguucu

SEQ ID NO: 713700 - RNA, 22 nt, Human
agccauaucaagcauucuucac

SEQ ID NO: 713701 - RNA, 22 nt, Human
uucagacaggcagcugggcugg

SEQ ID NO: 713702 - RNA, 22 nt, Human
aucagcuuaauucucaacaggu

SEQ ID NO: 713703 - RNA, 22 nt, Human
agcugcccagcuaggaagaagg

SEQ ID NO: 713704 - RNA, 22 nt, Human
uggugggagugagggcaugcca

SEQ ID NO: 713705 - RNA, 22 nt, Human
guggcuucuggcugggccucag

SEQ ID NO: 713706 - RNA, 22 nt, Human
uucacaggauauaugugcaggg

SEQ ID NO: 713707 - RNA, 22 nt, Human
acuggcagugucguuuacauga

SEQ ID NO: 713708 - RNA, 20 nt, Human
caggaugauuggacacgaug

SEQ ID NO: 713709 - RNA, 23 nt, Human
acuauaaaguuguucugauuuac

SEQ ID NO: 713710 - RNA, 22 nt, Human
auuugcaaagucguaucuguga

SEQ ID NO: 713711 - RNA, 21 nt, Human
agcugcuccagggagcucagg

SEQ ID NO: 713712 - RNA, 22 nt, Human
aaagauguuaauagcaccauuu

SEQ ID NO: 713713 - RNA, 22 nt, Human
aaaguauauuuacuuacuguga

SEQ ID NO: 713714 - RNA, 22 nt, Human
acaggccuagcuaaugcuuucc

SEQ ID NO: 713715 - RNA, 22 nt, Human
aucuuuuuugucuuggucacug

SEQ ID NO: 713716 - RNA, 22 nt, Human
acaaugcagccuauggauccag

SEQ ID NO: 713717 - RNA, 22 nt, Human
auucaucagcuaauggacauuu

SEQ ID NO: 713718 - RNA, 22 nt, Human
gaucugaaccuugccuguuggg

SEQ ID NO: 713719 - RNA, 22 nt, Human
uuacagcaaagugcgcagaccu

SEQ ID NO: 713720 - RNA, 22 nt, Human
aagaugugaacagaaccacagg

SEQ ID NO: 713721 - RNA, 22 nt, Human
aauauuuaugacaggaaguagc

SEQ ID NO: 713722 - RNA, 22 nt, Human
uucagugugaagcuucugaaag

SEQ ID NO: 713723 - RNA, 22 nt, Human
ggacaggguuggggcauauaaa

SEQ ID NO: 713724 - RNA, 22 nt, Human
aggaagauguguuuagcagguu

SEQ ID NO: 713725 - RNA, 19 nt, Human
aauugccugucucugccag

SEQ ID NO: 713726 - RNA, 23 nt, Human
gaaucaguggcuaacaaggaaac

SEQ ID NO: 713727 - RNA, 22 nt, Human
ugacccuuagugaacauuagaa

SEQ ID NO: 713728 - RNA, 22 nt, Human
cacauacauucauguuacucua

SEQ ID NO: 713729 - RNA, 22 nt, Human
ccccaggacguggcccucauag

SEQ ID NO: 713730 - RNA, 22 nt, Human
ucucuucuuuggggugggcuca

SEQ ID NO: 713731 - RNA, 22 nt, Human
auguacaggucuuggcaaaggg

SEQ ID NO: 713732 - RNA, 23 nt, Human
auaaauuacuaucucccuagagc

SEQ ID NO: 713733 - RNA, 20 nt, Human
acagcagccuugcuagaaac

SEQ ID NO: 713734 - RNA, 22 nt, Human
cacgggagacgugaucuuggac

SEQ ID NO: 713735 - RNA, 22 nt, Human
uacaggacagauguuuacagga

SEQ ID NO: 713736 - RNA, 22 nt, Human
cagcauuucaggaggcugaggu

SEQ ID NO: 713737 - RNA, 17 nt, Human
auuuagcaaguagacag

SEQ ID NO: 713738 - RNA, 22 nt, Human
gcagucauggaaaaauguauac

SEQ ID NO: 713739 - RNA, 22 nt, Human
ggucuggaugcugagguuccca

SEQ ID NO: 713740 - RNA, 21 nt, Human
aacaaagggaugcucaucuuu

SEQ ID NO: 713741 - RNA, 22 nt, Human
aagugauacguguuuauuucca

SEQ ID NO: 713742 - RNA, 22 nt, Human
auucugcucauuuuauuuccag

SEQ ID NO: 713743 - RNA, 22 nt, Human
aaaucuuucccuuuacuaucca

SEQ ID NO: 713744 - RNA, 22 nt, Human
ucuccucuccuuucauguuguu

SEQ ID NO: 713745 - RNA, 22 nt, Human
ucuggcuugaacaauuagguaa

SEQ ID NO: 713746 - RNA, 18 nt, Human
gaacuuuuggcuuugugu

SEQ ID NO: 713747 - RNA, 22 nt, Human
agugcuuugaacgaaaggcuga

SEQ ID NO: 713748 - RNA, 19 nt, Human
gcuaggcuggccuugaggg

SEQ ID NO: 713749 - RNA, 22 nt, Human
ucacagcaaaugcugcuucuca

SEQ ID NO: 713750 - RNA, 22 nt, Human
uagguuuaggagugaaggugaa

SEQ ID NO: 713751 - RNA, 22 nt, Human
uagacauuggccauuccugugg

SEQ ID NO: 713752 - RNA, 22 nt, Human
uuguuaaaggcaaaacaagcac

SEQ ID NO: 713753 - RNA, 22 nt, Human
cacugagcaagucaguacagca

SEQ ID NO: 713754 - RNA, 17 nt, Human
gacagcugggcgcacgc

SEQ ID NO: 713755 - RNA, 22 nt, Human
gcucgcagaucaccugggggcg

SEQ ID NO: 713756 - RNA, 17 nt, Human
ugcgaugucuguguuug

SEQ ID NO: 713757 - RNA, 22 nt, Human
ccacuggagacuggucucugug

SEQ ID NO: 713758 - RNA, 22 nt, Human
ucaggaagugccuaggcuggcc

SEQ ID NO: 713759 - RNA, 22 nt, Human
ggagaggcgaugagucacagcc

SEQ ID NO: 713760 - RNA, 22 nt, Human
aagcugagccaguggcaagugc

SEQ ID NO: 713761 - RNA, 22 nt, Human
gacuuugauuaaaucaagcaaa

SEQ ID NO: 713762 - RNA, 22 nt, Human
ugauuagauugagucaaccuug

SEQ ID NO: 713763 - RNA, 22 nt, Human
cugugcaguggcagcguguggg

SEQ ID NO: 713764 - RNA, 22 nt, Human
ugccaggcccucccacagauua

SEQ ID NO: 713765 - RNA, 22 nt, Human
acacaguaguuugucauugcua

SEQ ID NO: 713766 - RNA, 20 nt, Human
cuggggagcugcucccacga

SEQ ID NO: 713767 - RNA, 22 nt, Human
cucagcagugacaagagaguau

SEQ ID NO: 713768 - RNA, 22 nt, Human
ucuagcaagcucgugcucaagg

SEQ ID NO: 713769 - RNA, 22 nt, Human
auucagaauggcaaacuucuag

SEQ ID NO: 713770 - RNA, 18 nt, Human
gcagcuagccaggggggc

SEQ ID NO: 713771 - RNA, 18 nt, Human
aaaaugcaggcgacaugg

SEQ ID NO: 713772 - RNA, 22 nt, Human
uccugccuaccuugcggaggug

SEQ ID NO: 713773 - RNA, 22 nt, Human
aaccaagaggguuuuccuugaa

SEQ ID NO: 713774 - RNA, 17 nt, Human
agguguggucaagggag

SEQ ID NO: 713775 - RNA, 22 nt, Human
ggggaaauuguggcugacagug

SEQ ID NO: 713776 - RNA, 22 nt, Human
gaugcacuuucuuuucaacagu

SEQ ID NO: 713777 - RNA, 22 nt, Human
accacaguuuaguccaaugaca

SEQ ID NO: 713778 - RNA, 22 nt, Human
uccaggucaucuuggagagcug

SEQ ID NO: 713779 - RNA, 21 nt, Human
ggauuuuaaaaacugcaccug

SEQ ID NO: 713780 - RNA, 22 nt, Human
auacaucaugcuccauauauuu

SEQ ID NO: 713781 - RNA, 22 nt, Human
ugccuguguggucugcgcauua

SEQ ID NO: 713782 - RNA, 22 nt, Human
gggcuguguaucaguuaucuau

SEQ ID NO: 713783 - RNA, 20 nt, Human
uucaaagacccucaggucca

SEQ ID NO: 713784 - RNA, 22 nt, Human
cuggagggauguaggguguauu

SEQ ID NO: 713785 - RNA, 22 nt, Human
cuggccagcugacagcagggcu

SEQ ID NO: 713786 - RNA, 22 nt, Human
aguuuucuuucgcaaagguaca

SEQ ID NO: 713787 - RNA, 22 nt, Human
uuucagaaacgauuaugaacac

SEQ ID NO: 713788 - RNA, 22 nt, Human
uaccucuggacauuguggagca

SEQ ID NO: 713789 - RNA, 22 nt, Human
ucugguggcacgugucuugcau

SEQ ID NO: 713790 - RNA, 22 nt, Human
gucaggauuuuaaaaucccagu

SEQ ID NO: 713791 - RNA, 22 nt, Human
ccugcucuagacucugggaagg

SEQ ID NO: 713792 - RNA, 22 nt, Human
caggaggaaaguuccacucaac

SEQ ID NO: 713793 - RNA, 22 nt, Human
cucugggugucuuaggagcuca

SEQ ID NO: 713794 - RNA, 22 nt, Human
aaugcuacagaagugaucuugg

SEQ ID NO: 713795 - RNA, 22 nt, Human
ucagccucucugaguccagacc

SEQ ID NO: 713796 - RNA, 22 nt, Human
gccuuuggauauauucagggau

SEQ ID NO: 713797 - RNA, 22 nt, Human
auuucugauaguaaaggucuuu

SEQ ID NO: 713798 - RNA, 21 nt, Human
ggccaacauggucucaucucu

SEQ ID NO: 713799 - RNA, 22 nt, Human
cugcagcuggagcaucuucuca

SEQ ID NO: 713800 - RNA, 22 nt, Human
ccagaggagggcucugaugagg

SEQ ID NO: 713801 - RNA, 22 nt, Human
uggccugccugggagcagcagg

SEQ ID NO: 713802 - RNA, 22 nt, Human
uuguccugcaaccucacauggc

SEQ ID NO: 713803 - RNA, 23 nt, Human
ucauuccacaaauacuuaucuag

SEQ ID NO: 713804 - RNA, 22 nt, Human
ugagcacagcucgcaccagcuu

SEQ ID NO: 713805 - RNA, 22 nt, Human
ucccagggauccuccgggucgc

SEQ ID NO: 713806 - RNA, 22 nt, Human
ugagccaaggccucaagaauuu

SEQ ID NO: 713807 - RNA, 22 nt, Human
aaagcuaguaauauuuuaaucc

SEQ ID NO: 713808 - RNA, 22 nt, Human
gggccccugggaauucugugau

SEQ ID NO: 713809 - RNA, 22 nt, Human
agaaagggagcguggaucaauu

SEQ ID NO: 713810 - RNA, 22 nt, Human
uuccaggaugggcuguccuacu

SEQ ID NO: 713811 - RNA, 22 nt, Human
auauccagcagcaggugaguau

SEQ ID NO: 713812 - RNA, 22 nt, Human
gcagcuggucuggccuagagua

SEQ ID NO: 713813 - RNA, 22 nt, Human
aguacaugcagaacuaacagau

SEQ ID NO: 713814 - RNA, 23 nt, Human
uguguauguaucuaugcauaggu

SEQ ID NO: 713815 - RNA, 22 nt, Human
ugagccaggaguuugaggcugu

SEQ ID NO: 713816 - RNA, 22 nt, Human
gaaaugaugucugugcugccac

SEQ ID NO: 713817 - RNA, 22 nt, Human
gaacuucuucaacauaauggac

SEQ ID NO: 713818 - RNA, 20 nt, Human
cuuguuaaauaugcagguag

SEQ ID NO: 713819 - RNA, 22 nt, Human
cucuccuugcagauggcugccu

SEQ ID NO: 713820 - RNA, 22 nt, Human
acuccacaccacgggggccgcc

SEQ ID NO: 713821 - RNA, 22 nt, Human
cugaaggagcauagucaguuuu

SEQ ID NO: 713822 - RNA, 22 nt, Human
uauaaagagucucaaagaaguu

SEQ ID NO: 713823 - RNA, 22 nt, Human
uacuuuggguuuagaauaaacu

SEQ ID NO: 713824 - RNA, 22 nt, Human
aggaacugaugagcagccaggg

SEQ ID NO: 713825 - RNA, 22 nt, Human
aaaguuggauuucauccucaug

SEQ ID NO: 713826 - RNA, 22 nt, Human
uccagaccuagggcaccccagu

SEQ ID NO: 713827 - RNA, 22 nt, Human
cagaggccuuucuacagugaua

SEQ ID NO: 713828 - RNA, 22 nt, Human
guugaugaaaaugaauugcaug

SEQ ID NO: 713829 - RNA, 22 nt, Human
agagcagaguggcuguagcuug

SEQ ID NO: 713830 - RNA, 22 nt, Human
gcuguggggagagaacacacaa

SEQ ID NO: 713831 - RNA, 22 nt, Human
gggaaggcagugggaggaacug

SEQ ID NO: 713832 - RNA, 22 nt, Human
ugcagggccagacuggguugga

SEQ ID NO: 713833 - RNA, 22 nt, Human
ugcuuugaaagauaauacuguc

SEQ ID NO: 713834 - RNA, 19 nt, Human
acaaagcugugagcagcuu

SEQ ID NO: 713835 - RNA, 22 nt, Human
agaguccaugaagacagcugag

SEQ ID NO: 713836 - RNA, 22 nt, Human
aagugauuucugccugcauguu

SEQ ID NO: 713837 - RNA, 22 nt, Human
gcuggagccuucugcucuguug

SEQ ID NO: 713838 - RNA, 22 nt, Human
gcaguccuuaggagaggaagua

SEQ ID NO: 713839 - RNA, 22 nt, Human
aaacacaauguuucuuuguucu

SEQ ID NO: 713840 - RNA, 22 nt, Human
agaggcaacauggggaacagau

SEQ ID NO: 713841 - RNA, 22 nt, Human
gggccacggaaggaccaguggg

SEQ ID NO: 713842 - RNA, 22 nt, Human
ucagaaacacucuucuucuguc

SEQ ID NO: 713843 - RNA, 23 nt, Human
ggucagugaguucguuucucugg

SEQ ID NO: 713844 - RNA, 22 nt, Human
ugaaaacuccaaguuucaucag

SEQ ID NO: 713845 - RNA, 23 nt, Human
ugacagagcacagugggggagau

SEQ ID NO: 713846 - RNA, 22 nt, Human
ucaguugccuccauagucaucc

SEQ ID NO: 713847 - RNA, 22 nt, Human
ucaguguuagacaaguuuggaa

SEQ ID NO: 713848 - RNA, 22 nt, Human
uccuggacuggcucagcacccu

SEQ ID NO: 713849 - RNA, 22 nt, Human
uuagugucuucuucauccucug

SEQ ID NO: 713850 - RNA, 22 nt, Human
ggagcuguagaucagcuaaucu

SEQ ID NO: 713851 - RNA, 22 nt, Human
ugccaaauuagaguucccaggc

SEQ ID NO: 713852 - RNA, 22 nt, Human
aaagugcagcugaaaacauccu

SEQ ID NO: 713853 - RNA, 22 nt, Human
gucaggaaaaauugauaauuuu

SEQ ID NO: 713854 - RNA, 22 nt, Human
ucacaguaucagguggagugga

SEQ ID NO: 713855 - RNA, 22 nt, Human
uguaaacauaccagagccaagu

SEQ ID NO: 713856 - RNA, 21 nt, Human
cugucuggccgcgggcuccgc

SEQ ID NO: 713857 - RNA, 22 nt, Human
auaaugcgaggagaaaaugaag

SEQ ID NO: 713858 - RNA, 22 nt, Human
ugcaggugccaucgcugcucau

SEQ ID NO: 713859 - RNA, 22 nt, Human
gccucagcucccagcccaggcu

SEQ ID NO: 713860 - RNA, 22 nt, Human
uuccaguucccaugaggauuaa

SEQ ID NO: 713861 - RNA, 22 nt, Human
ucaggagggcuaagacuguagc

SEQ ID NO: 713862 - RNA, 22 nt, Human
aaguuccuuagccuuagggcuu

SEQ ID NO: 713863 - RNA, 22 nt, Human
cuaaagacacaauaaguagcuu

SEQ ID NO: 713864 - RNA, 22 nt, Human
ucacuugacccuucucuagccu

SEQ ID NO: 713865 - RNA, 22 nt, Human
agaugaguagguagcauuagua

SEQ ID NO: 713866 - RNA, 22 nt, Human
acugcacacuuagcaucuggga

SEQ ID NO: 713867 - RNA, 22 nt, Human
ucuuucucucuaaucaagcaca

SEQ ID NO: 713868 - RNA, 22 nt, Human
ggaaaaggccauuguuucucug

SEQ ID NO: 713869 - RNA, 22 nt, Human
acccaggccauuggcaagaguc

SEQ ID NO: 713870 - RNA, 22 nt, Human
cuuccaaacccaggguaugggc

SEQ ID NO: 713871 - RNA, 21 nt, Human
aggagaccggcuuguuugugc

SEQ ID NO: 713872 - RNA, 21 nt, Human
caauaaacugcacauugagac

SEQ ID NO: 713873 - RNA, 22 nt, Human
cuuccagguccuucuugagaag

SEQ ID NO: 713874 - RNA, 22 nt, Human
ucagcugcauaagucaccuugc

SEQ ID NO: 713875 - RNA, 22 nt, Human
acucaugguagcacaggcugug

SEQ ID NO: 713876 - RNA, 22 nt, Human
ccaggcucugagccucacucuu

SEQ ID NO: 713877 - RNA, 22 nt, Human
uggcucagcuuacuuuugaggg

SEQ ID NO: 713878 - RNA, 22 nt, Human
uguauuuucugaagauaaucaa

SEQ ID NO: 713879 - RNA, 22 nt, Human
auagaucauugauacuugcauc

SEQ ID NO: 713880 - RNA, 22 nt, Human
aucucuguaaaccauaaauuga

SEQ ID NO: 713881 - RNA, 22 nt, Human
uccugaauccaggagaguaggg

SEQ ID NO: 713882 - RNA, 22 nt, Human
gugacucuacuuaagauuaagc

SEQ ID NO: 713883 - RNA, 22 nt, Human
aaaguaaccuaguaauaguguc

SEQ ID NO: 713884 - RNA, 22 nt, Human
uucuuucugaauacaguugagu

SEQ ID NO: 713885 - RNA, 22 nt, Human
uuuauuuggcaucucugccaag

SEQ ID NO: 713886 - RNA, 22 nt, Human
uugaagcagagaaauacuugaa

SEQ ID NO: 713887 - RNA, 22 nt, Human
ucugggaagacggauggacccu

SEQ ID NO: 713888 - RNA, 22 nt, Human
agccaacuccagccccugcagc

SEQ ID NO: 713889 - RNA, 22 nt, Human
acagacagauuuugucugaugu

SEQ ID NO: 713890 - RNA, 22 nt, Human
gguccugucugacaucacugcu

SEQ ID NO: 713891 - RNA, 22 nt, Human
aggccagcccugggcugagaga

SEQ ID NO: 713892 - RNA, 22 nt, Human
aaagcaauaguaaugguaauag

SEQ ID NO: 713893 - RNA, 22 nt, Human
ugcuuucaccuguuugcaccca

SEQ ID NO: 713894 - RNA, 22 nt, Human
ucccagugagguccuggcuguc

SEQ ID NO: 713895 - RNA, 22 nt, Human
uuagaaaaauguucaguaguuu

SEQ ID NO: 713896 - RNA, 22 nt, Human
agaauugcuggaauuugcuuua

SEQ ID NO: 713897 - RNA, 22 nt, Human
cagcccaguaccaagcaguugg

SEQ ID NO: 713898 - RNA, 22 nt, Human
acuccagaggcagcugugcuga

SEQ ID NO: 713899 - RNA, 22 nt, Human
agcccagcaaagggagguucag

SEQ ID NO: 713900 - RNA, 22 nt, Human
uuacacuaagcuacuucuauau

SEQ ID NO: 713901 - RNA, 22 nt, Human
cauccguugugcuguugcucuc

SEQ ID NO: 713902 - RNA, 22 nt, Human
agcagugggugacagagcugag

SEQ ID NO: 713903 - RNA, 22 nt, Human
gccagaggggcucgaaggcgcg

SEQ ID NO: 713904 - RNA, 23 nt, Human
uggcuggcgccugccucacccug

SEQ ID NO: 713905 - RNA, 22 nt, Human
aacauuucugagaauaucaguu

SEQ ID NO: 713906 - RNA, 16 nt, Human
ccagaggccuggccuc

SEQ ID NO: 713907 - RNA, 22 nt, Human
gucuugaucuccugaccuugug

SEQ ID NO: 713908 - RNA, 22 nt, Human
cugugggagaggugccuggauu

SEQ ID NO: 713909 - RNA, 22 nt, Human
uaaagcaauuugagcaaguucu

SEQ ID NO: 713910 - RNA, 22 nt, Human
gcuggcuggaaugggagaagaa

SEQ ID NO: 713911 - RNA, 22 nt, Human
gaagauaacuuuaaaaaguggc

SEQ ID NO: 713912 - RNA, 22 nt, Human
cagacugggcugguggaaagcu

SEQ ID NO: 713913 - RNA, 22 nt, Human
uccaggucuggccugcuaggca

SEQ ID NO: 713914 - RNA, 22 nt, Human
guccagccugaagagugggggc

SEQ ID NO: 713915 - RNA, 19 nt, Human
uccagcugguaugcccaga

SEQ ID NO: 713916 - RNA, 22 nt, Human
guuaacaaauguaaagcaauua

SEQ ID NO: 713917 - RNA, 22 nt, Human
aagcacagugggcagagcagcc

SEQ ID NO: 713918 - RNA, 22 nt, Human
ucucagagcuucagaaagcacc

SEQ ID NO: 713919 - RNA, 22 nt, Human
gcugugagaaacagggaguguc

SEQ ID NO: 713920 - RNA, 22 nt, Human
aaauauuauugcuuaaggggag

SEQ ID NO: 713921 - RNA, 22 nt, Human
uuggaaaacuuacacagagcug

SEQ ID NO: 713922 - RNA, 22 nt, Human
caggaaggcccaccuguccugu

SEQ ID NO: 713923 - RNA, 22 nt, Human
cuggcagguggauggggacucc

SEQ ID NO: 713924 - RNA, 22 nt, Human
cgcgguggcggccuccagcgcc

SEQ ID NO: 713925 - RNA, 22 nt, Human
guuauguaaucuaacacucagu

SEQ ID NO: 713926 - RNA, 22 nt, Human
gaggccacagucaguguucauc

SEQ ID NO: 713927 - RNA, 22 nt, Human
ggagccuuccagacugcccaca

SEQ ID NO: 713928 - RNA, 22 nt, Human
ugaaagaagugucacauugcca

SEQ ID NO: 713929 - RNA, 23 nt, Human
gcaggaguuccuggacuccagga

SEQ ID NO: 713930 - RNA, 18 nt, Human
ugucaguaaagugacaga

SEQ ID NO: 713931 - RNA, 17 nt, Human
caucuuuaaaauccuga

SEQ ID NO: 713932 - RNA, 22 nt, Human
gccaggcuccccggaucccugg

SEQ ID NO: 713933 - RNA, 22 nt, Human
ucuuguccuaagagcuggauuc

SEQ ID NO: 713934 - RNA, 22 nt, Human
ggcagugacuggggacccccaa

SEQ ID NO: 713935 - RNA, 22 nt, Human
uccugaagccugagugaugacu

SEQ ID NO: 713936 - RNA, 22 nt, Human
uacagccuucaucuuugccuug

SEQ ID NO: 713937 - RNA, 22 nt, Human
auucaucuaugacucuaaugug

SEQ ID NO: 713938 - RNA, 22 nt, Human
gagugucuguggggcauggaca

SEQ ID NO: 713939 - RNA, 22 nt, Human
cugccaugcaguuagucccuca

SEQ ID NO: 713940 - RNA, 22 nt, Human
gagccagaaaagcugccugacu

SEQ ID NO: 713941 - RNA, 22 nt, Human
cucucugugguggcugucccau

SEQ ID NO: 713942 - RNA, 22 nt, Human
aagacugugucuauggcuacuc

SEQ ID NO: 713943 - RNA, 22 nt, Human
accagcagcugccagaguggag

SEQ ID NO: 713944 - RNA, 22 nt, Human
uagauucucagaauuuuagaaa

SEQ ID NO: 713945 - RNA, 22 nt, Human
ggcaggguggcccuccagugag

SEQ ID NO: 713946 - RNA, 22 nt, Human
ccaggagauuuuuccauagcac

SEQ ID NO: 713947 - RNA, 20 nt, Human
cugcugugauucccuccucc

SEQ ID NO: 713948 - RNA, 22 nt, Human
ucaggcaggaagccccugcaca

SEQ ID NO: 713949 - RNA, 19 nt, Human
ucugggguguggccuggca

SEQ ID NO: 713950 - RNA, 22 nt, Human
cuauacuacuauacagauguaa

SEQ ID NO: 713951 - RNA, 19 nt, Human
ccagaggcagcuucuguaa

SEQ ID NO: 713952 - RNA, 22 nt, Human
uuucagucuguaaaggugagga

SEQ ID NO: 713953 - RNA, 22 nt, Human
gcaauacaguugaagagauuga

SEQ ID NO: 713954 - RNA, 22 nt, Human
ucucuccuuaucauuguguuua

SEQ ID NO: 713955 - RNA, 22 nt, Human
cagugcaguuucccagaugcug

SEQ ID NO: 713956 - RNA, 22 nt, Human
uuuucugaaguuuaagacauuu

SEQ ID NO: 713957 - RNA, 22 nt, Human
acagcuacucugcagauaaauc

SEQ ID NO: 713958 - RNA, 17 nt, Human
gaacagcagaggggaca

SEQ ID NO: 713959 - RNA, 22 nt, Human
aggccagcuucuacccucuguu

SEQ ID NO: 713960 - RNA, 18 nt, Human
gggcacuggggacuggag

SEQ ID NO: 713961 - RNA, 22 nt, Human
gcaaagaaagccaaggucuaac

SEQ ID NO: 713962 - RNA, 19 nt, Human
aucugccuguuaucacaua

SEQ ID NO: 713963 - RNA, 22 nt, Human
cuuccucugcggcgccgggcgc

SEQ ID NO: 713964 - RNA, 22 nt, Human
ugagaauauuguuuuagugagg

SEQ ID NO: 713965 - RNA, 21 nt, Human
agcuggugucagagcucuggg

SEQ ID NO: 713966 - RNA, 22 nt, Human
cagaagaggacuggguagcuca

SEQ ID NO: 713967 - RNA, 22 nt, Human
gcuucugcaggguccucgcugu

SEQ ID NO: 713968 - RNA, 22 nt, Human
acauucuucagcuuugucaggc

SEQ ID NO: 713969 - RNA, 19 nt, Human
aaaccuguuaguagagcac

SEQ ID NO: 713970 - RNA, 22 nt, Human
agcaugcauuuuuggacugugc

SEQ ID NO: 713971 - RNA, 22 nt, Human
uggagagaugucuguucaaggu

SEQ ID NO: 713972 - RNA, 22 nt, Human
agcagcaggugcuucuggaucu

SEQ ID NO: 713973 - RNA, 22 nt, Human
ccuuccaggugcaggcaagccu

SEQ ID NO: 713974 - RNA, 22 nt, Human
ucagccugcuccaagugcugcc

SEQ ID NO: 713975 - RNA, 22 nt, Human
ggcugccuccucgagacaggau

SEQ ID NO: 713976 - RNA, 21 nt, Human
uccuuccuugagguccuuucc

SEQ ID NO: 713977 - RNA, 22 nt, Human
aaagucuccacugggaaccaaa

SEQ ID NO: 713978 - RNA, 22 nt, Human
agcucuccacacauaggacuag

SEQ ID NO: 713979 - RNA, 22 nt, Human
ucucuggggaaaaggcugauac

SEQ ID NO: 713980 - RNA, 22 nt, Human
ucagagucaacuguugccuguu

SEQ ID NO: 713981 - RNA, 20 nt, Human
uuugaacuuuguacucuguu

SEQ ID NO: 713982 - RNA, 22 nt, Human
gcucagaggcacgaccucuugg

SEQ ID NO: 713983 - RNA, 22 nt, Human
aguuacuugagacguuuaugaa

SEQ ID NO: 713984 - RNA, 17 nt, Human
ccuuagggcaguguggu

SEQ ID NO: 713985 - RNA, 19 nt, Human
gucuguguauuuguugcug

SEQ ID NO: 713986 - RNA, 22 nt, Human
cagaacuucauauugacguuag

SEQ ID NO: 713987 - RNA, 22 nt, Human
guuauucugcacaccuuuaaaa

SEQ ID NO: 713988 - RNA, 22 nt, Human
gcuccaggcagcauaguggaug

SEQ ID NO: 713989 - RNA, 22 nt, Human
ggcucccucaccaccaucacau

SEQ ID NO: 713990 - RNA, 22 nt, Human
aggccugggacgggagccguga

SEQ ID NO: 713991 - RNA, 22 nt, Human
ugggcuuaggucggaggcggcc

SEQ ID NO: 713992 - RNA, 22 nt, Human
cugugaugacaggcagggccaa

SEQ ID NO: 713993 - RNA, 19 nt, Human
ucccuggcgccucucgggc

SEQ ID NO: 713994 - RNA, 22 nt, Human
cauggcuucgcgcguccccgcu

SEQ ID NO: 713995 - RNA, 22 nt, Human
ugagccagauaagggcucacgc

SEQ ID NO: 713996 - RNA, 18 nt, Human
ggagcugggccccacucc

SEQ ID NO: 713997 - RNA, 22 nt, Human
uuaaagcaccuccuuggaugug

SEQ ID NO: 713998 - RNA, 22 nt, Human
agcacagcuuagcaccuggcac

SEQ ID NO: 713999 - RNA, 22 nt, Human
cuggcugggagcgagcugcuca

SEQ ID NO: 714000 - RNA, 22 nt, Human
acaggggcaggcaggacccuuu

SEQ ID NO: 714001 - RNA, 18 nt, Human
cugcuuacaaaaauaccc

SEQ ID NO: 714002 - RNA, 22 nt, Human
gucccugcccuccugggacuca

SEQ ID NO: 714003 - RNA, 22 nt, Human
aagagcauaugguucucaaagc

SEQ ID NO: 714004 - RNA, 22 nt, Human
gugugccuaugaguggugaaca

SEQ ID NO: 714005 - RNA, 22 nt, Human
uacaguuuuucacugaagaugu

SEQ ID NO: 714006 - RNA, 22 nt, Human
uucaacauuugaaaugaaugaa

SEQ ID NO: 714007 - RNA, 22 nt, Human
agaaaaguuuucugagacugac

SEQ ID NO: 714008 - RNA, 22 nt, Human
agagguuucuuaggggcuuccu

SEQ ID NO: 714009 - RNA, 22 nt, Human
caagagcugcaaauagcgugac

SEQ ID NO: 714010 - RNA, 22 nt, Human
ugcagcuggauuuaucuuuucc

SEQ ID NO: 714011 - RNA, 22 nt, Human
gugcacagaagcagaagcuaga

SEQ ID NO: 714012 - RNA, 22 nt, Human
ugauucaaauauuguguaugau

SEQ ID NO: 714013 - RNA, 22 nt, Human
uauuuguauguguguacauaua

SEQ ID NO: 714014 - RNA, 21 nt, Human
gggcagcacgucauuccugug

SEQ ID NO: 714015 - RNA, 22 nt, Human
agguuggcugcucuuuuccuaa

SEQ ID NO: 714016 - RNA, 22 nt, Human
caaaugaauuucccugcaaaug

SEQ ID NO: 714017 - RNA, 22 nt, Human
cagcuacacuucuggguguguc

SEQ ID NO: 714018 - RNA, 22 nt, Human
gccugcagggugaugggcugcc

SEQ ID NO: 714019 - RNA, 22 nt, Human
aaacugaggcucccgagggugu

SEQ ID NO: 714020 - RNA, 22 nt, Human
acagggcauuuccucuaugugu

SEQ ID NO: 714021 - RNA, 22 nt, Human
aucaagaauguucauucuucua

SEQ ID NO: 714022 - RNA, 23 nt, Human
uguaaaaugggguaguguuacca

SEQ ID NO: 714023 - RNA, 22 nt, Human
cgauggaauuggaaagaggaau

SEQ ID NO: 714024 - RNA, 22 nt, Human
cagacucugaugcagccuugug

SEQ ID NO: 714025 - RNA, 22 nt, Human
aggaggccgcugaugggcuccc

SEQ ID NO: 714026 - RNA, 22 nt, Human
gaaaccucuuagccucucuuug

SEQ ID NO: 714027 - RNA, 22 nt, Human
aauccauuuacucuuuacaaga

SEQ ID NO: 714028 - RNA, 22 nt, Human
uuccuggugaccucacugguag

SEQ ID NO: 714029 - RNA, 22 nt, Human
gggcagagguucaacuucaaca

SEQ ID NO: 714030 - RNA, 22 nt, Human
aacaguaaagacagaauuuauc

SEQ ID NO: 714031 - RNA, 22 nt, Human
gcuccugggcccugggcuaacu

SEQ ID NO: 714032 - RNA, 20 nt, Human
ucauuguguugccaauuccc

SEQ ID NO: 714033 - RNA, 23 nt, Human
ucaguacucugcuggguauagag

SEQ ID NO: 714034 - RNA, 22 nt, Human
caggcagcugaggacuuugcua

SEQ ID NO: 714035 - RNA, 22 nt, Human
uaaagccacgcuggaaaucagg

SEQ ID NO: 714036 - RNA, 22 nt, Human
ucaggcaggcagagggcaaaug

SEQ ID NO: 714037 - RNA, 22 nt, Human
cuuuacagaauaagaauacugg

SEQ ID NO: 714038 - RNA, 23 nt, Human
auggucagaauuuuccagcugag

SEQ ID NO: 714039 - RNA, 22 nt, Human
uccaagagaauacuggagagua

SEQ ID NO: 714040 - RNA, 22 nt, Human
aggggccugguuggccucuguu

SEQ ID NO: 714041 - RNA, 22 nt, Human
ugccaucugcacccaccugccc

SEQ ID NO: 714042 - RNA, 17 nt, Human
gccucugcuugugucau

SEQ ID NO: 714043 - RNA, 22 nt, Human
uuccauaaaggugauaguauac

SEQ ID NO: 714044 - RNA, 22 nt, Human
acuggccaggagcuggaaauac

SEQ ID NO: 714045 - RNA, 22 nt, Human
gauggaggaaaaguuggaaugc

SEQ ID NO: 714046 - RNA, 20 nt, Human
cuguguagugcucagguaag

SEQ ID NO: 714047 - RNA, 22 nt, Human
cuucaguguucccaucuguaaa

SEQ ID NO: 714048 - RNA, 22 nt, Human
agcugguuagcaaucuaaguga

SEQ ID NO: 714049 - RNA, 22 nt, Human
ucaggagggaguguggauagag

SEQ ID NO: 714050 - RNA, 22 nt, Human
guccagggcuaaaucagguucc

SEQ ID NO: 714051 - RNA, 22 nt, Human
uuucagccagugaugcugaaga

SEQ ID NO: 714052 - RNA, 22 nt, Human
gccuggagaaaggaagguggga

SEQ ID NO: 714053 - RNA, 22 nt, Human
gucuggggaagucagggcauca

SEQ ID NO: 714054 - RNA, 22 nt, Human
gccagccagaguccaucugaga

SEQ ID NO: 714055 - RNA, 21 nt, Human
uucacaguggauaacuuucug

SEQ ID NO: 714056 - RNA, 23 nt, Human
agaugaaagcuucccaucacagu

SEQ ID NO: 714057 - RNA, 22 nt, Human
agucaucucagguagcauuuac

SEQ ID NO: 714058 - RNA, 22 nt, Human
auugcacuccagcccugcugac

SEQ ID NO: 714059 - RNA, 22 nt, Human
uagccccagcuacucggaagcu

SEQ ID NO: 714060 - RNA, 22 nt, Human
auaaggcagugacuucaucuau

SEQ ID NO: 714061 - RNA, 22 nt, Human
auaugcagagagcaugaauagg

SEQ ID NO: 714062 - RNA, 22 nt, Human
agggccaaguccaggaccucgg

SEQ ID NO: 714063 - RNA, 22 nt, Human
auugaaagauaggcuacugugg

SEQ ID NO: 714064 - RNA, 17 nt, Human
gagccacccugugcgag

SEQ ID NO: 714065 - RNA, 22 nt, Human
cauuugcaagagauaaauguuu

SEQ ID NO: 714066 - RNA, 22 nt, Human
cagggcagccaggccccguggg

SEQ ID NO: 714067 - RNA, 22 nt, Human
caggauggugugagugugagga

SEQ ID NO: 714068 - RNA, 22 nt, Human
guguguaaaccuccaaucuggg

SEQ ID NO: 714069 - RNA, 22 nt, Human
ucuuccagcaaugugaaaucac

SEQ ID NO: 714070 - RNA, 22 nt, Human
ggcccugaagugauugugaguu

SEQ ID NO: 714071 - RNA, 22 nt, Human
auuccacaugaaaggagcugaa

SEQ ID NO: 714072 - RNA, 22 nt, Human
auguucuuguucaaaugucagu

SEQ ID NO: 714073 - RNA, 22 nt, Human
uaagaacuucggacauguuauc

SEQ ID NO: 714074 - RNA, 22 nt, Human
ucugugauaguuuuucagcuau

SEQ ID NO: 714075 - RNA, 22 nt, Human
uaacauuacggacaucugucag

SEQ ID NO: 714076 - RNA, 22 nt, Human
gaagcuguguugauggcaugga

SEQ ID NO: 714077 - RNA, 22 nt, Human
guaaacaucagccacucuauuu

SEQ ID NO: 714078 - RNA, 22 nt, Human
aaaggcacagaagggaaaccaa

SEQ ID NO: 714079 - RNA, 22 nt, Human
aggcccugggagcagagaugca

SEQ ID NO: 714080 - RNA, 22 nt, Human
gagccugccucuagucucuaga

SEQ ID NO: 714081 - RNA, 21 nt, Human
ccaggggcaaauugucguuuc

SEQ ID NO: 714082 - RNA, 22 nt, Human
ccagagccugcugagccccauu

SEQ ID NO: 714083 - RNA, 22 nt, Human
agggcugaagggaggugcucau

SEQ ID NO: 714084 - RNA, 22 nt, Human
guuugucaggagguugaaguca

SEQ ID NO: 714085 - RNA, 22 nt, Human
aggagccaaauuuuagacucug

SEQ ID NO: 714086 - RNA, 22 nt, Human
ggcuguggggccggguacagug

SEQ ID NO: 714087 - RNA, 22 nt, Human
uuguguggauaauauuacuuga

SEQ ID NO: 714088 - RNA, 22 nt, Human
uagaaguucaugcgaauuauuu

SEQ ID NO: 714089 - RNA, 22 nt, Human
cuucagcaccucagcuggagag

SEQ ID NO: 714090 - RNA, 22 nt, Human
acccacagaaccugugacaaca

SEQ ID NO: 714091 - RNA, 22 nt, Human
ucagguaaguguaauauauaga

SEQ ID NO: 714092 - RNA, 22 nt, Human
uccuuuugcugggaucaucagg

SEQ ID NO: 714093 - RNA, 22 nt, Human
accauuuaaggaaaauguauca

SEQ ID NO: 714094 - RNA, 22 nt, Human
gcugggacugagacagugaccu

SEQ ID NO: 714095 - RNA, 22 nt, Human
auacagcuuaugcauauaucuc

SEQ ID NO: 714096 - RNA, 22 nt, Human
gaggaagaagggauuagaacuc

SEQ ID NO: 714097 - RNA, 22 nt, Human
cuccagguagcuaaguccuggg

SEQ ID NO: 714098 - RNA, 22 nt, Human
cuggccugggagcugcuagcgu

SEQ ID NO: 714099 - RNA, 22 nt, Human
guacauuuaggauucauugaaa

SEQ ID NO: 714100 - RNA, 22 nt, Human
guugcagacacuccacagucga

SEQ ID NO: 714101 - RNA, 22 nt, Human
gagaggggcccaagccacauag

SEQ ID NO: 714102 - RNA, 22 nt, Human
ggucagugacuuuuuucugugg

SEQ ID NO: 714103 - RNA, 22 nt, Human
auucuucuugagucuuggacuc

SEQ ID NO: 714104 - RNA, 22 nt, Human
aauagcugauuagccuacaaua

SEQ ID NO: 714105 - RNA, 22 nt, Human
acaguuucuccauuuacaccuu

SEQ ID NO: 714106 - RNA, 22 nt, Human
aacagcaggcaccaaggcuaug

SEQ ID NO: 714107 - RNA, 22 nt, Human
uuuaguguggcacugauguuca

SEQ ID NO: 714108 - RNA, 22 nt, Human
ggccaggcugguuccuugaccu

SEQ ID NO: 714109 - RNA, 22 nt, Human
auaucagaaauaguaagcagag

SEQ ID NO: 714110 - RNA, 22 nt, Human
aaguugguaggagacagaaggu

SEQ ID NO: 714111 - RNA, 22 nt, Human
gaaauguaauucucuugaagau

SEQ ID NO: 714112 - RNA, 23 nt, Human
ucugugccaguuuccaugucugu

SEQ ID NO: 714113 - RNA, 22 nt, Human
uuccugugauauuagccacugu

SEQ ID NO: 714114 - RNA, 22 nt, Human
aggagcuggccuagaaaggaga

SEQ ID NO: 714115 - RNA, 22 nt, Human
uacuguauuugauaagugaagu

SEQ ID NO: 714116 - RNA, 23 nt, Human
ucagcagcagaagugcugggaug

SEQ ID NO: 714117 - RNA, 22 nt, Human
ucuggcaccacugagucugcag

SEQ ID NO: 714118 - RNA, 22 nt, Human
acagagcucccagccaucuccu

SEQ ID NO: 714119 - RNA, 18 nt, Human
cugcuucugucugccagu

SEQ ID NO: 714120 - RNA, 22 nt, Human
gcacagcaauuucuauaagcuc

SEQ ID NO: 714121 - RNA, 21 nt, Human
ucuugaaaauuguagcaguuu

SEQ ID NO: 714122 - RNA, 17 nt, Human
guccugggaggagagag

SEQ ID NO: 714123 - RNA, 22 nt, Human
aacuuacaaggaugauagcugc

SEQ ID NO: 714124 - RNA, 23 nt, Human
cgugcuuccaggcccagcugagc

SEQ ID NO: 714125 - RNA, 22 nt, Human
gcagagcagcaaauggaaagga

SEQ ID NO: 714126 - RNA, 22 nt, Human
cucugcuguucuuauguguccu

SEQ ID NO: 714127 - RNA, 22 nt, Human
ucuuuagugaccaucucauucu

SEQ ID NO: 714128 - RNA, 22 nt, Human
gugggcuggagcaaugauuuca

SEQ ID NO: 714129 - RNA, 22 nt, Human
cagggcacuuaaauugccucgu

SEQ ID NO: 714130 - RNA, 22 nt, Human
auagaaauguauuuuggacuag

SEQ ID NO: 714131 - RNA, 22 nt, Human
uggaggcccacacuggguagau

SEQ ID NO: 714132 - RNA, 22 nt, Human
acuguacaugcaucuugucuau

SEQ ID NO: 714133 - RNA, 22 nt, Human
caaggaaaaagcgagcucgggg

SEQ ID NO: 714134 - RNA, 22 nt, Human
agagacagaggcaauauagcuu

SEQ ID NO: 714135 - RNA, 22 nt, Human
aggauccuguauggagaagcug

SEQ ID NO: 714136 - RNA, 22 nt, Human
uaagcauucaaugcuuagcacu

SEQ ID NO: 714137 - RNA, 22 nt, Human
aagggcucucugcauugaaauu

SEQ ID NO: 714138 - RNA, 22 nt, Human
cuuggggaugcaaagccagugu

SEQ ID NO: 714139 - RNA, 22 nt, Human
gaauugcuaggcugcauguguc

SEQ ID NO: 714140 - RNA, 22 nt, Human
aggagucuguugaaaugucuau

SEQ ID NO: 714141 - RNA, 21 nt, Human
cugggcuuucucucaaagaca

SEQ ID NO: 714142 - RNA, 22 nt, Human
ucuuagcaaauacuacuuagaa

SEQ ID NO: 714143 - RNA, 22 nt, Human
ugcugcucucagccaccaggaa

SEQ ID NO: 714144 - RNA, 22 nt, Human
guuagggaucaggaacaagagc

SEQ ID NO: 714145 - RNA, 22 nt, Human
cugcccuguggcucugagucau

SEQ ID NO: 714146 - RNA, 21 nt, Human
gaaaauacaaugagcuugacc

SEQ ID NO: 714147 - RNA, 17 nt, Human
gugaagagucauugaau

SEQ ID NO: 714148 - RNA, 20 nt, Human
caggaaccaaagaggacucc

SEQ ID NO: 714149 - RNA, 22 nt, Human
ccuggagcacucucccuggcug

SEQ ID NO: 714150 - RNA, 22 nt, Human
ugauaugugaagcuauuaguuc

SEQ ID NO: 714151 - RNA, 22 nt, Human
accugagaccuaaucugacugu

SEQ ID NO: 714152 - RNA, 20 nt, Human
gugcagcacuuggggguagg

SEQ ID NO: 714153 - RNA, 22 nt, Human
guggcaguagacagugcaucua

SEQ ID NO: 714154 - RNA, 19 nt, Human
agaagcccagaucccagcc

SEQ ID NO: 714155 - RNA, 22 nt, Human
acauauugagcucuaaaaguac

SEQ ID NO: 714156 - RNA, 20 nt, Human
gugugugcuccaugcaugcu

SEQ ID NO: 714157 - RNA, 22 nt, Human
uacacaguaaaugguaaauaca

SEQ ID NO: 714158 - RNA, 17 nt, Human
agaacuguaguagcucc

SEQ ID NO: 714159 - RNA, 22 nt, Human
gaggagccuggccccacaucca

SEQ ID NO: 714160 - RNA, 22 nt, Human
ccucccugggugacgggcuccu

SEQ ID NO: 714161 - RNA, 22 nt, Human
gaggucuggaccaagucgcccc

SEQ ID NO: 714162 - RNA, 22 nt, Human
uaagauuacagugagaaauaaa

SEQ ID NO: 714163 - RNA, 22 nt, Human
agcagcacacgggagaaagaca

SEQ ID NO: 714164 - RNA, 22 nt, Human
caaccugaugaauugaauuuaa

SEQ ID NO: 714165 - RNA, 22 nt, Human
auuuuugcccugcaguacauaa

SEQ ID NO: 714166 - RNA, 22 nt, Human
augaggcccaggaaucuguauu

SEQ ID NO: 714167 - RNA, 22 nt, Human
caucaaauaggaauauuuggca

SEQ ID NO: 714168 - RNA, 22 nt, Human
uucugcauuucuaauaaguucc

SEQ ID NO: 714169 - RNA, 22 nt, Human
gggggaagacugggcuagugau

SEQ ID NO: 714170 - RNA, 22 nt, Human
aggccaaguuacuugggaaagc

SEQ ID NO: 714171 - RNA, 22 nt, Human
uauuucaccucacccaggagaa

SEQ ID NO: 714172 - RNA, 22 nt, Human
gcacagccacguaaugugguca

SEQ ID NO: 714173 - RNA, 22 nt, Human
gaggccaggggccuggagauga

SEQ ID NO: 714174 - RNA, 22 nt, Human
guuuaaccauugcauauccaua

SEQ ID NO: 714175 - RNA, 21 nt, Human
aggaaaggaaguccccagggu

SEQ ID NO: 714176 - RNA, 23 nt, Human
ugccaaaguuuaccuaacacugg

SEQ ID NO: 714177 - RNA, 22 nt, Human
caaaucacaaugugagacugag

SEQ ID NO: 714178 - RNA, 22 nt, Human
uugggcacggacagguggggau

SEQ ID NO: 714179 - RNA, 23 nt, Human
aggagaagagauuuccacaugca

SEQ ID NO: 714180 - RNA, 22 nt, Human
uuccugagaaauuuguaccugg

SEQ ID NO: 714181 - RNA, 22 nt, Human
gaggaagaagcaaaccagcuaa

SEQ ID NO: 714182 - RNA, 22 nt, Human
ugcauuguuugauaggugaauu

SEQ ID NO: 714183 - RNA, 22 nt, Human
gcuucuguauuuauuguccuuu

SEQ ID NO: 714184 - RNA, 22 nt, Human
auauguauugagugccaacugu

SEQ ID NO: 714185 - RNA, 22 nt, Human
gcuugaguuuugggacaaagcc

SEQ ID NO: 714186 - RNA, 22 nt, Human
ggccugcugacccaaguccugu

SEQ ID NO: 714187 - RNA, 22 nt, Human
gggcucugugguugugcuuugu

SEQ ID NO: 714188 - RNA, 22 nt, Human
uaguguuuaguacauaugcaua

SEQ ID NO: 714189 - RNA, 22 nt, Human
ccccucuugugggcucagguca

SEQ ID NO: 714190 - RNA, 22 nt, Human
ggcaaagccuuccagcuguuac

SEQ ID NO: 714191 - RNA, 22 nt, Human
auucaguuccuugugauuguag

SEQ ID NO: 714192 - RNA, 22 nt, Human
agaccuggaguggggccucagg

SEQ ID NO: 714193 - RNA, 22 nt, Human
ucacuguauuugcugaugcaua

SEQ ID NO: 714194 - RNA, 19 nt, Human
gcagaugaugaggcugguc

SEQ ID NO: 714195 - RNA, 22 nt, Human
cccugaggaaaggguggagggc

SEQ ID NO: 714196 - RNA, 22 nt, Human
agcagaguuucucaacaucagc

SEQ ID NO: 714197 - RNA, 21 nt, Human
agcuuccagagcacauuccau

SEQ ID NO: 714198 - RNA, 22 nt, Human
ucugugucuguuacuucacugc

SEQ ID NO: 714199 - RNA, 22 nt, Human
gcugggcuccaggccaggguga

SEQ ID NO: 714200 - RNA, 22 nt, Human
auuucuggacugaaaaggaagu

SEQ ID NO: 714201 - RNA, 17 nt, Human
uguaagcaggugagaga

SEQ ID NO: 714202 - RNA, 22 nt, Human
ucagggaaauucaagggagauu

SEQ ID NO: 714203 - RNA, 22 nt, Human
gugggagcauggucccagugcc

SEQ ID NO: 714204 - RNA, 22 nt, Human
caggcucgguccaguggcaccc

SEQ ID NO: 714205 - RNA, 22 nt, Human
agcuguuuucuaaugcauuuga

SEQ ID NO: 714206 - RNA, 22 nt, Human
ucuguggagugaccugggcuuu

SEQ ID NO: 714207 - RNA, 22 nt, Human
ccuggucccauugcggcugccu

SEQ ID NO: 714208 - RNA, 22 nt, Human
gggcagaggggcgcuucccucu

SEQ ID NO: 714209 - RNA, 19 nt, Human
uuucagacauuucaaauuu

SEQ ID NO: 714210 - RNA, 22 nt, Human
acuagaaagcaaaagccauuuc

SEQ ID NO: 714211 - RNA, 22 nt, Human
acguguguuuaacaaaccugca

SEQ ID NO: 714212 - RNA, 22 nt, Human
gcaggaguuaaaauauguaaug

SEQ ID NO: 714213 - RNA, 22 nt, Human
cuuuuagcuguuuccauggcaa

SEQ ID NO: 714214 - RNA, 22 nt, Human
uguggcagucucacuggagggc

SEQ ID NO: 714215 - RNA, 22 nt, Human
ccucuuugacuauaguaguuaa

SEQ ID NO: 714216 - RNA, 22 nt, Human
uugauacaggcucuauuucauc

SEQ ID NO: 714217 - RNA, 22 nt, Human
ccucccugggugcugggauugc

SEQ ID NO: 714218 - RNA, 21 nt, Human
gacauccaugugaguggcagu

SEQ ID NO: 714219 - RNA, 21 nt, Human
ggucuuccaaauaaggagaaa

SEQ ID NO: 714220 - RNA, 22 nt, Human
uucaggaagugcugccuggugu

SEQ ID NO: 714221 - RNA, 22 nt, Human
cacaauuuuucuuagguccugg

SEQ ID NO: 714222 - RNA, 22 nt, Human
gauauguaugaggaguauguau

SEQ ID NO: 714223 - RNA, 22 nt, Human
ugagaaaaguacauggagaagc

SEQ ID NO: 714224 - RNA, 19 nt, Human
uccaggagcaaagccaguu

SEQ ID NO: 714225 - RNA, 22 nt, Human
caaacuuacuguguuuaaagag

SEQ ID NO: 714226 - RNA, 22 nt, Human
aagaaacugaaaguggcuucau

SEQ ID NO: 714227 - RNA, 22 nt, Human
caggggccaaggguccagaccu

SEQ ID NO: 714228 - RNA, 22 nt, Human
acagaggccucggccugcccag

SEQ ID NO: 714229 - RNA, 22 nt, Human
gcaaauacauguugagcaccua

SEQ ID NO: 714230 - RNA, 22 nt, Human
cagaggcaggauaagaacugcg

SEQ ID NO: 714231 - RNA, 20 nt, Human
auaaaauaacugccacaaga

SEQ ID NO: 714232 - RNA, 22 nt, Human
cacaguggcaaaggggcuuggg

SEQ ID NO: 714233 - RNA, 19 nt, Human
agcccccagacagcaggcc

SEQ ID NO: 714234 - RNA, 22 nt, Human
ccugggcucaagugauccuccu

SEQ ID NO: 714235 - RNA, 22 nt, Human
gugcaaacaucauagaguguac

SEQ ID NO: 714236 - RNA, 22 nt, Human
guacaauagcaguuuucccuuu

SEQ ID NO: 714237 - RNA, 22 nt, Human
gcuauuguuuauuuugaaucua

SEQ ID NO: 714238 - RNA, 22 nt, Human
aacaacagcugcuaaagaguug

SEQ ID NO: 714239 - RNA, 22 nt, Human
aagggcugggucugguuaaccc

SEQ ID NO: 714240 - RNA, 22 nt, Human
aaauuaagggugagaagaguug

SEQ ID NO: 714241 - RNA, 22 nt, Human
gacuccagaaucuggacggucc

SEQ ID NO: 714242 - RNA, 22 nt, Human
acaagguuugguaccacaucca

SEQ ID NO: 714243 - RNA, 21 nt, Human
ugucuccuguuggcacauggc

SEQ ID NO: 714244 - RNA, 22 nt, Human
ucugggcaguucggauccucug

SEQ ID NO: 714245 - RNA, 22 nt, Human
auuuucagugaucauagcacac

SEQ ID NO: 714246 - RNA, 22 nt, Human
uacaaugacucucaguuuggcu

SEQ ID NO: 714247 - RNA, 20 nt, Human
aggagggaccuggauuggcg

SEQ ID NO: 714248 - RNA, 22 nt, Human
gcugagguuuucugccugcuca

SEQ ID NO: 714249 - RNA, 22 nt, Human
auuuaauuugugucuuuagcug

SEQ ID NO: 714250 - RNA, 22 nt, Human
gcacagggccuggcacauaaga

SEQ ID NO: 714251 - RNA, 20 nt, Human
cccaggagcugugccccauc

SEQ ID NO: 714252 - RNA, 22 nt, Human
aaaaggaggcaaacagccuaga

SEQ ID NO: 714253 - RNA, 20 nt, Human
aggguggggacguucugacu

SEQ ID NO: 714254 - RNA, 22 nt, Human
uccccacacuuucacuccuggc

SEQ ID NO: 714255 - RNA, 22 nt, Human
cugagggaacuugggcaagucu

SEQ ID NO: 714256 - RNA, 22 nt, Human
ugauugcuucuuugcuaucugu

SEQ ID NO: 714257 - RNA, 22 nt, Human
uuggaaagggaggaauguagac

SEQ ID NO: 714258 - RNA, 22 nt, Human
uggcucugcgucuguucguggg

SEQ ID NO: 714259 - RNA, 22 nt, Human
agggcagcacagcugugcuccu

SEQ ID NO: 714260 - RNA, 22 nt, Human
auguacaccaggugaagaugaa

SEQ ID NO: 714261 - RNA, 22 nt, Human
aucuggaggcauuacucugucu

SEQ ID NO: 714262 - RNA, 20 nt, Human
uuuuuccuucucuacaggca

SEQ ID NO: 714263 - RNA, 22 nt, Human
aacaaaggccguuaauaaccac

SEQ ID NO: 714264 - RNA, 22 nt, Human
cuucaaggaagccacguuggga

SEQ ID NO: 714265 - RNA, 20 nt, Human
ggcaagcaacugagggagga

SEQ ID NO: 714266 - RNA, 22 nt, Human
uuucaguuguccuguuaauagc

SEQ ID NO: 714267 - RNA, 22 nt, Human
ucacauacacuaggauauuuuu

SEQ ID NO: 714268 - RNA, 22 nt, Human
ucagggcugacugcuacucucc

SEQ ID NO: 714269 - RNA, 22 nt, Human
aguaaacuguggguacagaugu

SEQ ID NO: 714270 - RNA, 22 nt, Human
caugggcugcugacaggggcuc

SEQ ID NO: 714271 - RNA, 22 nt, Human
aaguucaagucugcaucuuuuu

SEQ ID NO: 714272 - RNA, 22 nt, Human
ggcugggcucgcugauuggcug

SEQ ID NO: 714273 - RNA, 18 nt, Human
ccuacaucauugugagag

SEQ ID NO: 714274 - RNA, 22 nt, Human
acucaucuauuagauaucuguu

SEQ ID NO: 714275 - RNA, 22 nt, Human
cucucugucuuggcauuugguc

SEQ ID NO: 714276 - RNA, 22 nt, Human
gagcagaucucaggccuucugu

SEQ ID NO: 714277 - RNA, 22 nt, Human
agucugaagauauucuugcagg

SEQ ID NO: 714278 - RNA, 22 nt, Human
ggcuuucuagaucuagcucugu

SEQ ID NO: 714279 - RNA, 22 nt, Human
uugcugaucugaaacguuacug

SEQ ID NO: 714280 - RNA, 22 nt, Human
aaauauguaaccaaggugaagu

SEQ ID NO: 714281 - RNA, 22 nt, Human
gaagagcugcacacuggggacu

SEQ ID NO: 714282 - RNA, 22 nt, Human
gcuuucaaggaauuugguauuu

SEQ ID NO: 714283 - RNA, 22 nt, Human
ucacagcaccaggaucucucca

SEQ ID NO: 714284 - RNA, 22 nt, Human
gaaggagagggucaaggauaau

SEQ ID NO: 714285 - RNA, 22 nt, Human
gcaguacacacauauguauucg

SEQ ID NO: 714286 - RNA, 22 nt, Human
uuucacagaaaggauaacauua

SEQ ID NO: 714287 - RNA, 19 nt, Human
ccucacccugcagaggagg

SEQ ID NO: 714288 - RNA, 22 nt, Human
aagcagcaugauuguaauacua

SEQ ID NO: 714289 - RNA, 22 nt, Human
uaauacacacucucauuccuaa

SEQ ID NO: 714290 - RNA, 22 nt, Human
uaacacaugucugggaugugaa

SEQ ID NO: 714291 - RNA, 22 nt, Human
agcuggccuucggugucacugg

SEQ ID NO: 714292 - RNA, 22 nt, Human
ggcuucugaaccaggcccugga

SEQ ID NO: 714293 - RNA, 21 nt, Human
uggguggaagcgggaggccgc

SEQ ID NO: 714294 - RNA, 22 nt, Human
auggcugugagcaggcagcuuc

SEQ ID NO: 714295 - RNA, 22 nt, Human
uuauucuuggaucugagucucu

SEQ ID NO: 714296 - RNA, 22 nt, Human
uucccuuccucacucuacuugu

SEQ ID NO: 714297 - RNA, 22 nt, Human
ggaggggugagaauggcugccu

SEQ ID NO: 714298 - RNA, 22 nt, Human
cgccucagccguggucaucuuc

SEQ ID NO: 714299 - RNA, 19 nt, Human
ccaggucuggggccagauu

SEQ ID NO: 714300 - RNA, 22 nt, Human
agugauuuugcuuugaagugac

SEQ ID NO: 714301 - RNA, 22 nt, Human
ugccacacaauuacugcugcua

SEQ ID NO: 714302 - RNA, 22 nt, Human
ggcaccaucagcugugcagggg

SEQ ID NO: 714303 - RNA, 23 nt, Human
gccaugaguucccuuucacuugu

SEQ ID NO: 714304 - RNA, 22 nt, Human
aggugagggugccagugcaugg

SEQ ID NO: 714305 - RNA, 22 nt, Human
auuccacuuauaugaaguaacg

SEQ ID NO: 714306 - RNA, 22 nt, Human
acuuugaaggggaacauuuuaa

SEQ ID NO: 714307 - RNA, 22 nt, Human
ggcugagacaaccugggaccca

SEQ ID NO: 714308 - RNA, 22 nt, Human
uuagcaguuuccauuuugguca

SEQ ID NO: 714309 - RNA, 22 nt, Human
gaagcccauuuguacagcacau

SEQ ID NO: 714310 - RNA, 22 nt, Human
caguggucugugcuucuguaca

SEQ ID NO: 714311 - RNA, 22 nt, Human
cuggcugugucuuggaggagcu

SEQ ID NO: 714312 - RNA, 22 nt, Human
gacugugggcuccuugagggca

SEQ ID NO: 714313 - RNA, 22 nt, Human
ccaggcugcucacaagcugccc

SEQ ID NO: 714314 - RNA, 22 nt, Human
ugugggaaaugggaguggaaga

SEQ ID NO: 714315 - RNA, 22 nt, Human
agauacaugucaagagacuuau

SEQ ID NO: 714316 - RNA, 22 nt, Human
uauacagcuauggcaagacaaa

SEQ ID NO: 714317 - RNA, 22 nt, Human
gucuaaacaaaaaugcaccuuu

SEQ ID NO: 714318 - RNA, 22 nt, Human
gcauuuggaacuugguugagau

SEQ ID NO: 714319 - RNA, 22 nt, Human
gugucauuaaccaccaugcaaa

SEQ ID NO: 714320 - RNA, 22 nt, Human
aaucaguuaggguguuaaugag

SEQ ID NO: 714321 - RNA, 22 nt, Human
auccugucuaugaguagauaau

SEQ ID NO: 714322 - RNA, 22 nt, Human
gggcacagcccagugggguccc

SEQ ID NO: 714323 - RNA, 22 nt, Human
cagugagauaccacagagcaaa

SEQ ID NO: 714324 - RNA, 22 nt, Human
ggaccugcauuuuaacaagauc

SEQ ID NO: 714325 - RNA, 22 nt, Human
cacauaaguggguuccauugca

SEQ ID NO: 714326 - RNA, 22 nt, Human
acuguggccaaagccucuggga

SEQ ID NO: 714327 - RNA, 22 nt, Human
aggcuggagugcuggagugcug

SEQ ID NO: 714328 - RNA, 22 nt, Human
aggccagcucuacccuuggacu

SEQ ID NO: 714329 - RNA, 22 nt, Human
gcuccucucccagagcugcagg

SEQ ID NO: 714330 - RNA, 22 nt, Human
cagaaaccucccugaauauuuu

SEQ ID NO: 714331 - RNA, 22 nt, Human
acagccauagaugcuuauguaa

SEQ ID NO: 714332 - RNA, 22 nt, Human
uuucagaccuggaugugggggc

SEQ ID NO: 714333 - RNA, 22 nt, Human
gugugccaccagucaaggugaa

SEQ ID NO: 714334 - RNA, 22 nt, Human
ccccucuuguacuagacaguuu

SEQ ID NO: 714335 - RNA, 22 nt, Human
agccaaucauccucagacucuc

SEQ ID NO: 714336 - RNA, 18 nt, Human
ccucugccuuuguagagc

SEQ ID NO: 714337 - RNA, 22 nt, Human
agggcgcugaaauacuaacaug

SEQ ID NO: 714338 - RNA, 22 nt, Human
ugaaaccauucucagguacacu

SEQ ID NO: 714339 - RNA, 22 nt, Human
uggcucugggcaccguguccac

SEQ ID NO: 714340 - RNA, 22 nt, Human
ucuaacauugaauggcugauua

SEQ ID NO: 714341 - RNA, 22 nt, Human
aacaaauggaacacaaaucuuu

SEQ ID NO: 714342 - RNA, 22 nt, Human
ucacccaggguguuuggugucu

SEQ ID NO: 714343 - RNA, 21 nt, Human
cuggagcuuggugagaagugu

SEQ ID NO: 714344 - RNA, 22 nt, Human
ugcugccuuuguggggucacug

SEQ ID NO: 714345 - RNA, 22 nt, Human
uccuucuacacugccucugaga

SEQ ID NO: 714346 - RNA, 22 nt, Human
cucugcaggccuugaguguggu

SEQ ID NO: 714347 - RNA, 22 nt, Human
uuugcuugacccuugugcugaa

SEQ ID NO: 714348 - RNA, 22 nt, Human
auaagguaugaaaaguaaaugg

SEQ ID NO: 714349 - RNA, 22 nt, Human
cuuuacugccaugcauuuauaa

SEQ ID NO: 714350 - RNA, 22 nt, Human
uacuuuggaagaguucauacag

SEQ ID NO: 714351 - RNA, 23 nt, Human
ggcuccugcuucaugucccaccu

SEQ ID NO: 714352 - RNA, 23 nt, Human
augcaggacuuauaagguaaggu

SEQ ID NO: 714353 - RNA, 22 nt, Human
ucuagaaaaaaacugcugugga

SEQ ID NO: 714354 - RNA, 22 nt, Human
ugucucuuggauugcuugcucu

SEQ ID NO: 714355 - RNA, 22 nt, Human
cacaccugugagucucggcuug

SEQ ID NO: 714356 - RNA, 22 nt, Human
uuuaauaucucacacuuccaug

SEQ ID NO: 714357 - RNA, 22 nt, Human
ggagugaagcaaauaaugcugg

SEQ ID NO: 714358 - RNA, 22 nt, Human
ucaguggagcuaagcaugagau

SEQ ID NO: 714359 - RNA, 18 nt, Human
gcuuugcacucauguugu

SEQ ID NO: 714360 - RNA, 21 nt, Human
uccugggggguaggugaguuu

SEQ ID NO: 714361 - RNA, 22 nt, Human
cucugagcucgugcaguacuuc

SEQ ID NO: 714362 - RNA, 22 nt, Human
acccugagggugcuggguuucu

SEQ ID NO: 714363 - RNA, 22 nt, Human
aaccacauggcucaguggacau

SEQ ID NO: 714364 - RNA, 22 nt, Human
auguauguuaguguauuaucua

SEQ ID NO: 714365 - RNA, 22 nt, Human
gacagucccccagcagcaaacc

SEQ ID NO: 714366 - RNA, 22 nt, Human
uuauuuccugacacagcugauu

SEQ ID NO: 714367 - RNA, 22 nt, Human
ugugagaagggugaggcuuuua

SEQ ID NO: 714368 - RNA, 22 nt, Human
augaaagugaagguuuacuaag

SEQ ID NO: 714369 - RNA, 22 nt, Human
acuguggauaagucagagaugu

SEQ ID NO: 714370 - RNA, 22 nt, Human
cauguuggcugaggcuguauuu

SEQ ID NO: 714371 - RNA, 22 nt, Human
uuaagcaacacacauuaauuau

SEQ ID NO: 714372 - RNA, 22 nt, Human
agcaccauugcaaauauggcag

SEQ ID NO: 714373 - RNA, 22 nt, Human
ccagccucaucgccugccuguc

SEQ ID NO: 714374 - RNA, 22 nt, Human
ggcgugggaaguggggcuucug

SEQ ID NO: 714375 - RNA, 22 nt, Human
ccagcagcugacaccaguccca

SEQ ID NO: 714376 - RNA, 21 nt, Human
acugagggccagagaggaccu

SEQ ID NO: 714377 - RNA, 22 nt, Human
uuaauuuuaaccuguuuguguc

SEQ ID NO: 714378 - RNA, 22 nt, Human
uaccugcacagccagccaugug

SEQ ID NO: 714379 - RNA, 22 nt, Human
ugccucccucucugccacugga

SEQ ID NO: 714380 - RNA, 22 nt, Human
agagugggccucugagucccag

SEQ ID NO: 714381 - RNA, 22 nt, Human
uuucacaacugcuuauuugaga

SEQ ID NO: 714382 - RNA, 22 nt, Human
ucaggacaacauguugcuaauc

SEQ ID NO: 714383 - RNA, 22 nt, Human
ugguggggucaucgucagaugc

SEQ ID NO: 714384 - RNA, 22 nt, Human
uauuacagcuuugauuaucugg

SEQ ID NO: 714385 - RNA, 22 nt, Human
uggaggcauuugauguucauaa

SEQ ID NO: 714386 - RNA, 22 nt, Human
aggcucugggaagcagugaguu

SEQ ID NO: 714387 - RNA, 22 nt, Human
agaaguauuuggcuaaaagaca

SEQ ID NO: 714388 - RNA, 20 nt, Human
ggaagcuguggguccccagg

SEQ ID NO: 714389 - RNA, 22 nt, Human
cucaacauuuaacagugaaaaa

SEQ ID NO: 714390 - RNA, 22 nt, Human
agggcugagaaugacagggccg

SEQ ID NO: 714391 - RNA, 17 nt, Human
ccagcccucgcgcuuuu

SEQ ID NO: 714392 - RNA, 22 nt, Human
cccagcccagcguucgaggggu

SEQ ID NO: 714393 - RNA, 23 nt, Human
acugagcaauguuuacauacuug

SEQ ID NO: 714394 - RNA, 22 nt, Human
aauaaacugcucaauugcauca

SEQ ID NO: 714395 - RNA, 22 nt, Human
uuauuagaucuguuagggaucc

SEQ ID NO: 714396 - RNA, 22 nt, Human
aauacagcagauggagacaaau

SEQ ID NO: 714397 - RNA, 22 nt, Human
aagaucaagaucagagaacagc

SEQ ID NO: 714398 - RNA, 22 nt, Human
agugauggugagugagaagcuc

SEQ ID NO: 714399 - RNA, 22 nt, Human
agagcugaauucaagugcuggc

SEQ ID NO: 714400 - RNA, 22 nt, Human
uguccagcggccuggcugcuga

SEQ ID NO: 714401 - RNA, 22 nt, Human
acagcagagaacuuuagagggu

SEQ ID NO: 714402 - RNA, 22 nt, Human
guguuccauguuugagguaguu

SEQ ID NO: 714403 - RNA, 16 nt, Human
acuuccaggggagccc

SEQ ID NO: 714404 - RNA, 22 nt, Human
agcccacuguuuucauuucucu

SEQ ID NO: 714405 - RNA, 22 nt, Human
aagucauuaucucuucuaaucu

SEQ ID NO: 714406 - RNA, 22 nt, Human
acaaaauuguguuaaacuuuau

SEQ ID NO: 714407 - RNA, 22 nt, Human
ccagggcuccauugcucauccu

SEQ ID NO: 714408 - RNA, 22 nt, Human
uugaauaauguguauguuguua

SEQ ID NO: 714409 - RNA, 22 nt, Human
caaaaguaccuugugugcuuug

SEQ ID NO: 714410 - RNA, 23 nt, Human
agcuggaaauggccgagcucugc

SEQ ID NO: 714411 - RNA, 22 nt, Human
cugggagguggagguugcauug

SEQ ID NO: 714412 - RNA, 22 nt, Human
cauuauguucaguagcuuaaaa

SEQ ID NO: 714413 - RNA, 22 nt, Human
ucacuugaccucuugaacuccu

SEQ ID NO: 714414 - RNA, 22 nt, Human
uuugaaugagaauuauugucau

SEQ ID NO: 714415 - RNA, 22 nt, Human
ccacuuugaaccacugaggugg

SEQ ID NO: 714416 - RNA, 22 nt, Human
uaauuucuaauucauuuucagu

SEQ ID NO: 714417 - RNA, 17 nt, Human
ggucugugucuagggaa

SEQ ID NO: 714418 - RNA, 22 nt, Human
acugcugauuauugaaguagag

SEQ ID NO: 714419 - RNA, 22 nt, Human
agcauuuucugagaguauagau

SEQ ID NO: 714420 - RNA, 22 nt, Human
uuucaguuacugcuauaucauu

SEQ ID NO: 714421 - RNA, 22 nt, Human
aucaaaucauugcauuaauguu

SEQ ID NO: 714422 - RNA, 22 nt, Human
aggcuguggaugcuuaacaaau

SEQ ID NO: 714423 - RNA, 22 nt, Human
gcuucuguggugaggucaccuu

SEQ ID NO: 714424 - RNA, 22 nt, Human
ccagcucuggcuucuugcuggg

SEQ ID NO: 714425 - RNA, 22 nt, Human
uacacauguccaaggugucacc

SEQ ID NO: 714426 - RNA, 22 nt, Human
aaagaacuuauccuagaauuug

SEQ ID NO: 714427 - RNA, 22 nt, Human
ucccacagucucacaaugcaua

SEQ ID NO: 714428 - RNA, 22 nt, Human
ugcagauacaguauguggaagc

SEQ ID NO: 714429 - RNA, 22 nt, Human
aaacucuggauuggaguccagc

SEQ ID NO: 714430 - RNA, 22 nt, Human
gagcaaggcggcaucucucuga

SEQ ID NO: 714431 - RNA, 22 nt, Human
auuguaucuugucauuaugcau

SEQ ID NO: 714432 - RNA, 22 nt, Human
cuggaaagaccugcuugcuuuu

SEQ ID NO: 714433 - RNA, 22 nt, Human
acugcugauuuuaggacuguua

SEQ ID NO: 714434 - RNA, 22 nt, Human
uaugcgugccucugucugucug

SEQ ID NO: 714435 - RNA, 22 nt, Human
gcacagaacagagaaauagcca

SEQ ID NO: 714436 - RNA, 22 nt, Human
ggcgcaggccuuggauccuggu

SEQ ID NO: 714437 - RNA, 22 nt, Human
acagagcaacuuuauuucaugg

SEQ ID NO: 714438 - RNA, 22 nt, Human
cacacagugggaaaaccugaag

SEQ ID NO: 714439 - RNA, 22 nt, Human
uguaaaacaaaauuuguggaga

SEQ ID NO: 714440 - RNA, 22 nt, Human
agagggcccauguugggcugcu

SEQ ID NO: 714441 - RNA, 22 nt, Human
ugcaagagcuguggcaaaagca

SEQ ID NO: 714442 - RNA, 22 nt, Human
guccugggaaggaagccaggga

SEQ ID NO: 714443 - RNA, 19 nt, Human
gcugggagcagacccuccc

SEQ ID NO: 714444 - RNA, 22 nt, Human
agauauuuugugugauguuuca

SEQ ID NO: 714445 - RNA, 22 nt, Human
ccucugugccucaguuucaugu

SEQ ID NO: 714446 - RNA, 22 nt, Human
uggcugugugccaggcugucug

SEQ ID NO: 714447 - RNA, 22 nt, Human
uauguacaugauuucauuugcu

SEQ ID NO: 714448 - RNA, 22 nt, Human
auucugggccccaucccagacc

SEQ ID NO: 714449 - RNA, 22 nt, Human
acaucugagcaacagaacacua

SEQ ID NO: 714450 - RNA, 22 nt, Human
aagccaguguccagaaugggca

SEQ ID NO: 714451 - RNA, 22 nt, Human
aaacauugagugccuuugguau

SEQ ID NO: 714452 - RNA, 22 nt, Human
uguaaauaaugcauguaaauca

SEQ ID NO: 714453 - RNA, 22 nt, Human
gugcacacucuuggggcacuuu

SEQ ID NO: 714454 - RNA, 22 nt, Human
cauccugacccaugggagggga

SEQ ID NO: 714455 - RNA, 22 nt, Human
accuucagacaucaacuaucuc

SEQ ID NO: 714456 - RNA, 22 nt, Human
ggaagccaggccaaugagaaca

SEQ ID NO: 714457 - RNA, 22 nt, Human
ugcuuaauccaaccuggcugac

SEQ ID NO: 714458 - RNA, 22 nt, Human
ugcacagauagugauagauagc

SEQ ID NO: 714459 - RNA, 22 nt, Human
cuggcuucugggccagggcaga

SEQ ID NO: 714460 - RNA, 22 nt, Human
caugcaugccuggcucacagag

SEQ ID NO: 714461 - RNA, 22 nt, Human
agcuggugugccacuguugggg

SEQ ID NO: 714462 - RNA, 22 nt, Human
agccuagguuuccgauucucuu

SEQ ID NO: 714463 - RNA, 22 nt, Human
cacugugucagaguaugaugau

SEQ ID NO: 714464 - RNA, 22 nt, Human
acacugguguaguuuucugcag

SEQ ID NO: 714465 - RNA, 22 nt, Human
aauuucaaugcacucaugguug

SEQ ID NO: 714466 - RNA, 22 nt, Human
ccuggcacaugauagaugcuca

SEQ ID NO: 714467 - RNA, 22 nt, Human
ucuauuugcugguugcuucugu

SEQ ID NO: 714468 - RNA, 22 nt, Human
auggauaauggugauaguugca

SEQ ID NO: 714469 - RNA, 22 nt, Human
uuuuauucauagggauggagag

SEQ ID NO: 714470 - RNA, 22 nt, Human
cagacacaccaggcccauucug

SEQ ID NO: 714471 - RNA, 21 nt, Human
ugaaaugagaaugcugagcac

SEQ ID NO: 714472 - RNA, 22 nt, Human
cuaguuaguucugggucauccu

SEQ ID NO: 714473 - RNA, 22 nt, Human
ggcucaggaugagccuucucau

SEQ ID NO: 714474 - RNA, 22 nt, Human
ugucucugagaugacucccacc

SEQ ID NO: 714475 - RNA, 22 nt, Human
gugcaaaagcaauugcaguuuu

SEQ ID NO: 714476 - RNA, 22 nt, Human
uuauaggccaucuaaguaauuu

SEQ ID NO: 714477 - RNA, 22 nt, Human
gggaggagcuuggagauucacu

SEQ ID NO: 714478 - RNA, 22 nt, Human
ucugaggcuucagacuguacug

SEQ ID NO: 714479 - RNA, 22 nt, Human
ucuggcucucauacucgccagu

SEQ ID NO: 714480 - RNA, 22 nt, Human
ugcuugggcggccagcauggcg

SEQ ID NO: 714481 - RNA, 22 nt, Human
acacugcuaaacaguaaagaug

SEQ ID NO: 714482 - RNA, 22 nt, Human
agcagcaggcuagggaacugcu

SEQ ID NO: 714483 - RNA, 22 nt, Human
aguagcaguuuggcugaauuua

SEQ ID NO: 714484 - RNA, 22 nt, Human
ucuucacaggagccugccugcc

SEQ ID NO: 714485 - RNA, 22 nt, Human
aaaggcuggaaacugaagauaa

SEQ ID NO: 714486 - RNA, 22 nt, Human
cuucuuaaauuggauugcuauu

SEQ ID NO: 714487 - RNA, 22 nt, Human
uccucaggaucuaggagugcuu

SEQ ID NO: 714488 - RNA, 22 nt, Human
auauucugccucacuacaguug

SEQ ID NO: 714489 - RNA, 22 nt, Human
ucaguuuagaguuauuuaaucu

SEQ ID NO: 714490 - RNA, 22 nt, Human
acagccuggacuggcucucugc

SEQ ID NO: 714491 - RNA, 22 nt, Human
uucacaauuaacuuuauacuua

SEQ ID NO: 714492 - RNA, 22 nt, Human
aagcaacuccuaggaggaaagg

SEQ ID NO: 714493 - RNA, 22 nt, Human
ugagucugauuuuucuagcauu

SEQ ID NO: 714494 - RNA, 22 nt, Human
cagucagaggucuucuaaaaca

SEQ ID NO: 714495 - RNA, 22 nt, Human
gcuggcuuuauggggcuugugg

SEQ ID NO: 714496 - RNA, 22 nt, Human
uccaugcagaggagcugguggc

SEQ ID NO: 714497 - RNA, 22 nt, Human
uccucagggcggccuccgucuu

SEQ ID NO: 714498 - RNA, 19 nt, Human
gaggaacuggcuugguucc

SEQ ID NO: 714499 - RNA, 22 nt, Human
gcaguguucuaaauugggugug

SEQ ID NO: 714500 - RNA, 22 nt, Human
aaugcuuugucugcuccagacu

SEQ ID NO: 714501 - RNA, 22 nt, Human
uccgguccggguacuccucucu

SEQ ID NO: 714502 - RNA, 18 nt, Human
gcccaugguaaaugcugu

SEQ ID NO: 714503 - RNA, 22 nt, Human
cuggaagggaaaucucuuggca

SEQ ID NO: 714504 - RNA, 22 nt, Human
uuacagaugggguugcaauaaa

SEQ ID NO: 714505 - RNA, 22 nt, Human
acuuccaaauaccaucacauug

SEQ ID NO: 714506 - RNA, 22 nt, Human
aggucugguguugaugaauucc

SEQ ID NO: 714507 - RNA, 22 nt, Human
aagaaagugaugagcuacagau

SEQ ID NO: 714508 - RNA, 22 nt, Human
aaucuucuuucuuaacaguaca

SEQ ID NO: 714509 - RNA, 22 nt, Human
aggcuguggugggcuuugagcc

SEQ ID NO: 714510 - RNA, 23 nt, Human
uuacaaguucugaaauuuccuuc

SEQ ID NO: 714511 - RNA, 22 nt, Human
uacaucaugaaagcauacauca

SEQ ID NO: 714512 - RNA, 22 nt, Human
aauugcuugucuucuucccuac

SEQ ID NO: 714513 - RNA, 22 nt, Human
ucucaguggaucucagaauuuu

SEQ ID NO: 714514 - RNA, 22 nt, Human
guagcagaaucagugcuacaga

SEQ ID NO: 714515 - RNA, 22 nt, Human
aaagucaguuggccagaucacu

SEQ ID NO: 714516 - RNA, 19 nt, Human
ggccuggcuaucccugcug

SEQ ID NO: 714517 - RNA, 22 nt, Human
agacugaaacaaucugcaggca

SEQ ID NO: 714518 - RNA, 22 nt, Human
gaagcuaaaccacagcuaagaa

SEQ ID NO: 714519 - RNA, 22 nt, Human
uuacaugaugauuucauaaaca

SEQ ID NO: 714520 - RNA, 22 nt, Human
auacaacugcucucagauaagu

SEQ ID NO: 714521 - RNA, 22 nt, Human
agguaugccaauuaggucaagu

SEQ ID NO: 714522 - RNA, 19 nt, Human
gcaggugagccguggcucc

SEQ ID NO: 714523 - RNA, 22 nt, Human
aaguuuacuggggagaucaccu

SEQ ID NO: 714524 - RNA, 22 nt, Human
ucccagaaucuccagugcuaca

SEQ ID NO: 714525 - RNA, 22 nt, Human
gcucaaaggccagguagcagca

SEQ ID NO: 714526 - RNA, 22 nt, Human
cccucugcugccuggcuggguc

SEQ ID NO: 714527 - RNA, 22 nt, Human
ugugaggcuggcaggggccagg

SEQ ID NO: 714528 - RNA, 17 nt, Human
ucugaggugaggaugca

SEQ ID NO: 714529 - RNA, 22 nt, Human
gugcagugagcagugcagcacc

SEQ ID NO: 714530 - RNA, 22 nt, Human
uggcuggauaucaggcaagggg

SEQ ID NO: 714531 - RNA, 22 nt, Human
uugcaucacaguaucucuguaa

SEQ ID NO: 714532 - RNA, 22 nt, Human
gagcaucuccuaccuacuccuu

SEQ ID NO: 714533 - RNA, 19 nt, Human
auggcucugggaucacugc

SEQ ID NO: 714534 - RNA, 22 nt, Human
caaguuacauuagaaaucaugc

SEQ ID NO: 714535 - RNA, 22 nt, Human
uuuguacagugauguuguaugc

SEQ ID NO: 714536 - RNA, 22 nt, Human
agaauauugaaaguucuugaca

SEQ ID NO: 714537 - RNA, 22 nt, Human
gagcugguccacaaucugcagg

SEQ ID NO: 714538 - RNA, 22 nt, Human
uguuuucaucacagaauguaac

SEQ ID NO: 714539 - RNA, 22 nt, Human
ugaacacauaaggcuuuccugu

SEQ ID NO: 714540 - RNA, 22 nt, Human
agacagacacaugguaacagau

SEQ ID NO: 714541 - RNA, 20 nt, Human
aguguuuagaauacuauuau

SEQ ID NO: 714542 - RNA, 22 nt, Human
uaucuuuaaugcuuggagguua

SEQ ID NO: 714543 - RNA, 22 nt, Human
gcucugggccauccuggccggg

SEQ ID NO: 714544 - RNA, 22 nt, Human
acagaauuaucaggaaauguua

SEQ ID NO: 714545 - RNA, 22 nt, Human
uaaguguugguaauuacaauga

SEQ ID NO: 714546 - RNA, 22 nt, Human
auuuuccucaagccucuggaag

SEQ ID NO: 714547 - RNA, 22 nt, Human
agcagaggacaguucuuaggaa

SEQ ID NO: 714548 - RNA, 22 nt, Human
acaauguuuugaaacaucuagg

SEQ ID NO: 714549 - RNA, 22 nt, Human
guggccagccagggugcugaug

SEQ ID NO: 714550 - RNA, 22 nt, Human
uaauuucaauagcuugcauaau

SEQ ID NO: 714551 - RNA, 22 nt, Human
agacuaaauaguuacagguagg

SEQ ID NO: 714552 - RNA, 22 nt, Human
caguggagugggacuggucuga

SEQ ID NO: 714553 - RNA, 22 nt, Human
uaggaugaucuuguagagagau

SEQ ID NO: 714554 - RNA, 22 nt, Human
uccaggagggggagccgugccg

SEQ ID NO: 714555 - RNA, 22 nt, Human
guaggcagguggaggagugaag

SEQ ID NO: 714556 - RNA, 22 nt, Human
agggggugggaagucuagaauc

SEQ ID NO: 714557 - RNA, 22 nt, Human
uguuuaacuaguuuucacacuu

SEQ ID NO: 714558 - RNA, 22 nt, Human
cagcaaauacuacuaguuuuua

SEQ ID NO: 714559 - RNA, 22 nt, Human
cccaggaaagaaaguauauggu

SEQ ID NO: 714560 - RNA, 22 nt, Human
guggcagaguugcugacuagaa

SEQ ID NO: 714561 - RNA, 22 nt, Human
aaccauguacuuuauucuguuu

SEQ ID NO: 714562 - RNA, 23 nt, Human
aagcauucgccuucacccuccuc

SEQ ID NO: 714563 - RNA, 22 nt, Human
uugaccuauguuucuucaucug

SEQ ID NO: 714564 - RNA, 22 nt, Human
cuggaucugaacaucgguauca

SEQ ID NO: 714565 - RNA, 22 nt, Human
ggccuuccuggcggcucagggu

SEQ ID NO: 714566 - RNA, 22 nt, Human
augagugauggguacauuggcu

SEQ ID NO: 714567 - RNA, 22 nt, Human
aggauccugcgcuuugggggag

SEQ ID NO: 714568 - RNA, 22 nt, Human
ccuuuggggcuuuacuguggaa

SEQ ID NO: 714569 - RNA, 22 nt, Human
cuguggcuucuagguccccgau

SEQ ID NO: 714570 - RNA, 22 nt, Human
aacacauggguguuuauuguac

SEQ ID NO: 714571 - RNA, 22 nt, Human
uacaguuccaggaucauagggu

SEQ ID NO: 714572 - RNA, 23 nt, Human
ugcuggagaagcaaaguucugag

SEQ ID NO: 714573 - RNA, 22 nt, Human
cuuuuuauagcuauguccuaug

SEQ ID NO: 714574 - RNA, 22 nt, Human
ggcagcucugugucugggaagc

SEQ ID NO: 714575 - RNA, 22 nt, Human
ucuuugaauccuuuacaucuga

SEQ ID NO: 714576 - RNA, 22 nt, Human
uuacaaagguaguuuugucuau

SEQ ID NO: 714577 - RNA, 22 nt, Human
cugugggagaagcuagcacagg

SEQ ID NO: 714578 - RNA, 22 nt, Human
ccaggccucuggcugcuuaguc

SEQ ID NO: 714579 - RNA, 22 nt, Human
ucugaggccuugggacagaagu

SEQ ID NO: 714580 - RNA, 22 nt, Human
caccaugacugguugagagagg

SEQ ID NO: 714581 - RNA, 22 nt, Human
uccaggaccaaagacacaugua

SEQ ID NO: 714582 - RNA, 22 nt, Human
ccuuuucuaaucuuaagaaugu

SEQ ID NO: 714583 - RNA, 22 nt, Human
aaagugcaaucaguuagaccau

SEQ ID NO: 714584 - RNA, 22 nt, Human
ggcucccugccuguccucaguc

SEQ ID NO: 714585 - RNA, 22 nt, Human
ucuuagcagacuuggcuacugu

SEQ ID NO: 714586 - RNA, 22 nt, Human
uuggcgucuuuuccauggaaag

SEQ ID NO: 714587 - RNA, 22 nt, Human
uacauagcaaggaaaugacaga

SEQ ID NO: 714588 - RNA, 22 nt, Human
ugacacagauuagagacauacc

SEQ ID NO: 714589 - RNA, 22 nt, Human
uauuucuguuuauuuguacauc

SEQ ID NO: 714590 - RNA, 22 nt, Human
gagcucauacccucuucucuuu

SEQ ID NO: 714591 - RNA, 22 nt, Human
uggcugaggucuggggcuucug

SEQ ID NO: 714592 - RNA, 22 nt, Human
ccacuguggaaagcaguucaga

SEQ ID NO: 714593 - RNA, 22 nt, Human
caugugggaagaggccagcugg

SEQ ID NO: 714594 - RNA, 22 nt, Human
cagggcuuggaucuguggucag

SEQ ID NO: 714595 - RNA, 22 nt, Human
ucagcuccagaguugcacagug

SEQ ID NO: 714596 - RNA, 22 nt, Human
cccucaugccagacagcaugca

SEQ ID NO: 714597 - RNA, 21 nt, Human
gcucuggccuacuguucccuc

SEQ ID NO: 714598 - RNA, 22 nt, Human
acuggcacuauguuggagaaau

SEQ ID NO: 714599 - RNA, 22 nt, Human
gcaguaggagaagaggaugcuu

SEQ ID NO: 714600 - RNA, 22 nt, Human
ugacugaggccugauaacaguu

SEQ ID NO: 714601 - RNA, 22 nt, Human
ccuuccagccccaucucaucgu

SEQ ID NO: 714602 - RNA, 22 nt, Human
ccaggccccagggcuggcuuuc

SEQ ID NO: 714603 - RNA, 22 nt, Human
aggaaggagggcagauauuaag

SEQ ID NO: 714604 - RNA, 22 nt, Human
acuugcuugggccaucucgcuu

SEQ ID NO: 714605 - RNA, 22 nt, Human
gacucucaagcacaaguccacc

SEQ ID NO: 714606 - RNA, 22 nt, Human
aaucagcaaaugcuuacucagg

SEQ ID NO: 714607 - RNA, 22 nt, Human
ggugcugccuauagucugaaac

SEQ ID NO: 714608 - RNA, 22 nt, Human
gagcuagggguagucaggagac

SEQ ID NO: 714609 - RNA, 22 nt, Human
auagugggaauuacgauauacu

SEQ ID NO: 714610 - RNA, 22 nt, Human
aaugaggcuugcauugugaacu

SEQ ID NO: 714611 - RNA, 22 nt, Human
gucccucacuggaccauaugaa

SEQ ID NO: 714612 - RNA, 19 nt, Human
agcaggcagguggcccagg

SEQ ID NO: 714613 - RNA, 22 nt, Human
accugucaucccggcugcaccg

SEQ ID NO: 714614 - RNA, 22 nt, Human
agggagaagguuuagcugugag

SEQ ID NO: 714615 - RNA, 22 nt, Human
ggagcagagcauuucacagccu

SEQ ID NO: 714616 - RNA, 21 nt, Human
ccaaagaacugccauuuguca

SEQ ID NO: 714617 - RNA, 18 nt, Human
uccagcaggucugaggug

SEQ ID NO: 714618 - RNA, 22 nt, Human
uuggaacagaaacagacaaaua

SEQ ID NO: 714619 - RNA, 22 nt, Human
uucauucugggcucuaaggaac

SEQ ID NO: 714620 - RNA, 22 nt, Human
ccaggagucuggaugagguguc

SEQ ID NO: 714621 - RNA, 20 nt, Human
uccagcccagcagccugaca

SEQ ID NO: 714622 - RNA, 17 nt, Human
uccaugagacaugaaga

SEQ ID NO: 714623 - RNA, 22 nt, Human
ggcuucaagucguauauuuggg

SEQ ID NO: 714624 - RNA, 22 nt, Human
uuuccuggaccaacugagauug

SEQ ID NO: 714625 - RNA, 22 nt, Human
ggcuccagaggccuuaccugca

SEQ ID NO: 714626 - RNA, 22 nt, Human
aagagccaggacagauccagcu

SEQ ID NO: 714627 - RNA, 22 nt, Human
aaggcaauguuagcaacauaau

SEQ ID NO: 714628 - RNA, 23 nt, Human
aaguuaguuucaauaaagcaauu

SEQ ID NO: 714629 - RNA, 22 nt, Human
ucuguacaccaggggccauucu

SEQ ID NO: 714630 - RNA, 16 nt, Human
agaggcuguaauggaa

SEQ ID NO: 714631 - RNA, 22 nt, Human
gcuuaaaucccaaugcuagacc

SEQ ID NO: 714632 - RNA, 22 nt, Human
uccucagaagaaccccuagauu

SEQ ID NO: 714633 - RNA, 20 nt, Human
augauuuugcacuaacuuca

SEQ ID NO: 714634 - RNA, 20 nt, Human
cugaacacagaauaagcaca

SEQ ID NO: 714635 - RNA, 22 nt, Human
gguaccaugagaugccacuaau

SEQ ID NO: 714636 - RNA, 19 nt, Human
ucaagauggauggcuccca

SEQ ID NO: 714637 - RNA, 22 nt, Human
cagagccaacgccaccugccca

SEQ ID NO: 714638 - RNA, 22 nt, Human
acaguguaauaugggagucagu

SEQ ID NO: 714639 - RNA, 22 nt, Human
ccacugugcccagccucauggg

SEQ ID NO: 714640 - RNA, 19 nt, Human
uguacaaggauuaugcagg

SEQ ID NO: 714641 - RNA, 22 nt, Human
cagcuucuuugggauucuuuau

SEQ ID NO: 714642 - RNA, 22 nt, Human
uccagaggcaaaaagguaugga

SEQ ID NO: 714643 - RNA, 22 nt, Human
auaauguguucaucuuacaauu

SEQ ID NO: 714644 - RNA, 20 nt, Human
gcuguuaguugggggcuccc

SEQ ID NO: 714645 - RNA, 19 nt, Human
gggagcugucugcccgugg

SEQ ID NO: 714646 - RNA, 20 nt, Human
uccagccacuuccgcugguc

SEQ ID NO: 714647 - RNA, 22 nt, Human
cuggagaggccccaagauauuu

SEQ ID NO: 714648 - RNA, 22 nt, Human
auucaguguggacccauuuaaa

SEQ ID NO: 714649 - RNA, 22 nt, Human
cauguauauuucuguaugugca

SEQ ID NO: 714650 - RNA, 22 nt, Human
ugagcaggggagagcgaaugug

SEQ ID NO: 714651 - RNA, 19 nt, Human
ugcagccacgugagagacu

SEQ ID NO: 714652 - RNA, 22 nt, Human
cagaaauggucuguucagcuua

SEQ ID NO: 714653 - RNA, 22 nt, Human
ugggaugccggcaggaggcaau

SEQ ID NO: 714654 - RNA, 22 nt, Human
uaauauuucuacccugcugccu

SEQ ID NO: 714655 - RNA, 22 nt, Human
agcugcaggaaguagaagcgga

SEQ ID NO: 714656 - RNA, 22 nt, Human
uggagaaggacagccugagaaa

SEQ ID NO: 714657 - RNA, 22 nt, Human
caaggcuucacguccccagugc

SEQ ID NO: 714658 - RNA, 22 nt, Human
uuuagaguugaguauucauugg

SEQ ID NO: 714659 - RNA, 22 nt, Human
uggaaugagcuggcuaauaacc

SEQ ID NO: 714660 - RNA, 22 nt, Human
cucuccucugaaguggugaccc

SEQ ID NO: 714661 - RNA, 22 nt, Human
uccuggaguauuucuguggugu

SEQ ID NO: 714662 - RNA, 22 nt, Human
aacuagagcuuccagcuucuug

SEQ ID NO: 714663 - RNA, 22 nt, Human
ucagcagacaguuagcuauauu

SEQ ID NO: 714664 - RNA, 22 nt, Human
uccugagguggauugagcagag

SEQ ID NO: 714665 - RNA, 22 nt, Human
uaucauuguguuauuucuucca

SEQ ID NO: 714666 - RNA, 22 nt, Human
auaaugcauuuagaauaauuca

SEQ ID NO: 714667 - RNA, 22 nt, Human
aauuuguuacacagcaauauaa

SEQ ID NO: 714668 - RNA, 22 nt, Human
caucugaauaucccaggcauau

SEQ ID NO: 714669 - RNA, 22 nt, Human
uguuuacugcauucuauuugcu

SEQ ID NO: 714670 - RNA, 22 nt, Human
cacauuccuggugcucagcagc

SEQ ID NO: 714671 - RNA, 22 nt, Human
gggaccuggggacuccuuguuc

SEQ ID NO: 714672 - RNA, 18 nt, Human
uuaaguuuuacugcuuua

SEQ ID NO: 714673 - RNA, 19 nt, Human
acuguagcacugcaguaua

SEQ ID NO: 714674 - RNA, 22 nt, Human
ugcucugaaggggaagggaugg

SEQ ID NO: 714675 - RNA, 22 nt, Human
cagaugugccuccagggcuuug

SEQ ID NO: 714676 - RNA, 22 nt, Human
gagguacagaguguuccaaugu

SEQ ID NO: 714677 - RNA, 22 nt, Human
auagaauagcauagaaaauuga

SEQ ID NO: 714678 - RNA, 19 nt, Human
uccuucagucagaucuggg

SEQ ID NO: 714679 - RNA, 22 nt, Human
aggcuggaguguagcagugcag

SEQ ID NO: 714680 - RNA, 22 nt, Human
auaccuguguauccacaagcgu

SEQ ID NO: 714681 - RNA, 22 nt, Human
cacacaugugagcagagaggcg

SEQ ID NO: 714682 - RNA, 22 nt, Human
ucuguggcuaucauacugaagg

SEQ ID NO: 714683 - RNA, 23 nt, Human
auacauacagucuuacugacuuu

SEQ ID NO: 714684 - RNA, 22 nt, Human
aggcucagauccuuguguccug

SEQ ID NO: 714685 - RNA, 22 nt, Human
uggcaguagagcuggaacuuga

SEQ ID NO: 714686 - RNA, 22 nt, Human
ggcuagaacuuuacacuuugca

SEQ ID NO: 714687 - RNA, 22 nt, Human
uugaggcagguccggguccuuc

SEQ ID NO: 714688 - RNA, 22 nt, Human
uauuaugaucccagcccuggag

SEQ ID NO: 714689 - RNA, 22 nt, Human
agaggcccuggcuagagcagcu

SEQ ID NO: 714690 - RNA, 22 nt, Human
caggguggcaggcaccauggcc

SEQ ID NO: 714691 - RNA, 22 nt, Human
gaaggcugaugacagauucugc

SEQ ID NO: 714692 - RNA, 22 nt, Human
uguguacaucucuucucacauu

SEQ ID NO: 714693 - RNA, 22 nt, Human
uuuucaguugugcucucuaguu

SEQ ID NO: 714694 - RNA, 22 nt, Human
ccuggggcuccagagcagcgga

SEQ ID NO: 714695 - RNA, 22 nt, Human
ggagccagcucccuccuuguga

SEQ ID NO: 714696 - RNA, 22 nt, Human
cauuuucaugaguuucuguuca

SEQ ID NO: 714697 - RNA, 23 nt, Human
ugaagcccagugauuuuguuuca

SEQ ID NO: 714698 - RNA, 22 nt, Human
caucacagguccugaugacauu

SEQ ID NO: 714699 - RNA, 22 nt, Human
ucuaaggacaaggucuuggaga

SEQ ID NO: 714700 - RNA, 22 nt, Human
uaggaagcugagcagcauuccu

SEQ ID NO: 714701 - RNA, 22 nt, Human
uucccacaggaugagagcugag

SEQ ID NO: 714702 - RNA, 22 nt, Human
augucacagcucccauuccucc

SEQ ID NO: 714703 - RNA, 22 nt, Human
gaggcugcugagagcccuguuu

SEQ ID NO: 714704 - RNA, 22 nt, Human
aacuucaagcuucgucccuucg

SEQ ID NO: 714705 - RNA, 23 nt, Human
cauuucaacgaauuuuccuucug

SEQ ID NO: 714706 - RNA, 22 nt, Human
gucugcccucacgccagcuggg

SEQ ID NO: 714707 - RNA, 22 nt, Human
aucuggcuugacuuugcgacuu

SEQ ID NO: 714708 - RNA, 22 nt, Human
agaacagccaauaaaagagggg

SEQ ID NO: 714709 - RNA, 22 nt, Human
agucauauggcuauuuaguggg

SEQ ID NO: 714710 - RNA, 22 nt, Human
uaagaaauuuaguuauagaaug

SEQ ID NO: 714711 - RNA, 22 nt, Human
augucuuggguuucaguuuacu

SEQ ID NO: 714712 - RNA, 22 nt, Human
ucuucagaggaagucagucuuu

SEQ ID NO: 714713 - RNA, 19 nt, Human
ggaagagaggaaaggugga

SEQ ID NO: 714714 - RNA, 22 nt, Human
cugauacaaugcuaauaaauuu

SEQ ID NO: 714715 - RNA, 22 nt, Human
cugagcugucaggaauggaaag

SEQ ID NO: 714716 - RNA, 22 nt, Human
cuguggucaccaggcuggggcc

SEQ ID NO: 714717 - RNA, 22 nt, Human
ucugggccuauagaagucuacc

SEQ ID NO: 714718 - RNA, 22 nt, Human
cagagggcccccuggccacagu

SEQ ID NO: 714719 - RNA, 22 nt, Human
uucucagaaaagcaagcuuucu

SEQ ID NO: 714720 - RNA, 22 nt, Human
aggaaaaaccuguuaaugguag

SEQ ID NO: 714721 - RNA, 22 nt, Human
gcagggaagggaaacagagacc

SEQ ID NO: 714722 - RNA, 22 nt, Human
ggcaggugcugggagcaucuca

SEQ ID NO: 714723 - RNA, 19 nt, Human
guacagugguaagcuauga

SEQ ID NO: 714724 - RNA, 22 nt, Human
uaaaugauaauaaugcuagugu

SEQ ID NO: 714725 - RNA, 22 nt, Human
aggcuggcggugacugcucuga

SEQ ID NO: 714726 - RNA, 20 nt, Human
uggcaucucucaauuguagg

SEQ ID NO: 714727 - RNA, 22 nt, Human
caggaaaugcguaguugaacuu

SEQ ID NO: 714728 - RNA, 22 nt, Human
caauagcagcuucugaaugcaa

SEQ ID NO: 714729 - RNA, 20 nt, Human
cuggggacagcaauggcugu

SEQ ID NO: 714730 - RNA, 22 nt, Human
ggcuccaggagaugcugggcag

SEQ ID NO: 714731 - RNA, 18 nt, Human
uacuuuauucccccucca

SEQ ID NO: 714732 - RNA, 22 nt, Human
gcaggguauaauacuuagguga

SEQ ID NO: 714733 - RNA, 22 nt, Human
cuuauguaaacuacagauaaua

SEQ ID NO: 714734 - RNA, 22 nt, Human
ggcaaacagacuugaccaucuu

SEQ ID NO: 714735 - RNA, 22 nt, Human
ucaggcugcaucuguaagggug

SEQ ID NO: 714736 - RNA, 20 nt, Human
agucacaugcauacacaagu

SEQ ID NO: 714737 - RNA, 22 nt, Human
agugcuuugugcucucacugca

SEQ ID NO: 714738 - RNA, 22 nt, Human
caggauuaaggugaggggagua

SEQ ID NO: 714739 - RNA, 23 nt, Human
uuucucauccagagagucagucc

SEQ ID NO: 714740 - RNA, 20 nt, Human
gggcuggauaauucuuugcu

SEQ ID NO: 714741 - RNA, 22 nt, Human
uaacguuugauaacuucuguuc

SEQ ID NO: 714742 - RNA, 22 nt, Human
ugccuguguggggucugccgcc

SEQ ID NO: 714743 - RNA, 21 nt, Human
uuagcaguuguugauuuccag

SEQ ID NO: 714744 - RNA, 22 nt, Human
uauaugcaauuuuuuagugcaa

SEQ ID NO: 714745 - RNA, 22 nt, Human
guccugugugacuucccaaaug

SEQ ID NO: 714746 - RNA, 22 nt, Human
gagcccagcucuaccucagacu

SEQ ID NO: 714747 - RNA, 22 nt, Human
uucuuuccaaccagauauuggu

SEQ ID NO: 714748 - RNA, 22 nt, Human
ucagaagacuacuaggacacau

SEQ ID NO: 714749 - RNA, 22 nt, Human
ugacaaagacaaagauaugucc

SEQ ID NO: 714750 - RNA, 22 nt, Human
auguuuacugguuuauagaaua

SEQ ID NO: 714751 - RNA, 22 nt, Human
uaaaguguguauauacauaugg

SEQ ID NO: 714752 - RNA, 22 nt, Human
cccagaggugcuucagaggugc

SEQ ID NO: 714753 - RNA, 22 nt, Human
gcugagccuagcugucuccugu

SEQ ID NO: 714754 - RNA, 22 nt, Human
uauuaauaagugacuacuagcu

SEQ ID NO: 714755 - RNA, 22 nt, Human
ucucugggccuguuuucucauc

SEQ ID NO: 714756 - RNA, 22 nt, Human
guaaccugucggaaagccuugu

SEQ ID NO: 714757 - RNA, 22 nt, Human
cugcagguugagcagccagguu

SEQ ID NO: 714758 - RNA, 22 nt, Human
aggacuuuagagccagaaagac

SEQ ID NO: 714759 - RNA, 19 nt, Human
cacuaagaugagauauagc

SEQ ID NO: 714760 - RNA, 22 nt, Human
cagguggccuugccaucuccug

SEQ ID NO: 714761 - RNA, 18 nt, Human
ccucccucauuuucccag

SEQ ID NO: 714762 - RNA, 22 nt, Human
aggcaccucagcugagccuggg

SEQ ID NO: 714763 - RNA, 22 nt, Human
gauauguauugaaugaucauuu

SEQ ID NO: 714764 - RNA, 22 nt, Human
acauguguacuuuuaaggaugu

SEQ ID NO: 714765 - RNA, 22 nt, Human
ugaggacauuaggaagugaagg

SEQ ID NO: 714766 - RNA, 22 nt, Human
uauugcugccauuuuccaaugu

SEQ ID NO: 714767 - RNA, 22 nt, Human
gguaaauuuuauguuauguaua

SEQ ID NO: 714768 - RNA, 22 nt, Human
aucacaguuacucaaauaauga

SEQ ID NO: 714769 - RNA, 22 nt, Human
cugcuuugauuagaagaguaca

SEQ ID NO: 714770 - RNA, 22 nt, Human
gcaugcagugcaauucaaugua

SEQ ID NO: 714771 - RNA, 22 nt, Human
gcugcuccagcugugcugcaga

SEQ ID NO: 714772 - RNA, 22 nt, Human
uaccugaauuaccaaaagcuuu

SEQ ID NO: 714773 - RNA, 22 nt, Human
auguccaguacuucuaaauggu

SEQ ID NO: 714774 - RNA, 22 nt, Human
uggagguguauaagguagcuuc

SEQ ID NO: 714775 - RNA, 22 nt, Human
gcugaggccaguuuaaugagga

SEQ ID NO: 714776 - RNA, 22 nt, Human
ucuaaggagccaggacuauuag

SEQ ID NO: 714777 - RNA, 18 nt, Human
acugggccagcaggcagg

SEQ ID NO: 714778 - RNA, 22 nt, Human
cucccucuguccgaggccggcu

SEQ ID NO: 714779 - RNA, 22 nt, Human
gcuucagcuuugucuccuuggg

SEQ ID NO: 714780 - RNA, 22 nt, Human
aauauaguucugguauuguuaa

SEQ ID NO: 714781 - RNA, 22 nt, Human
uuagaagugaaauagcuguaca

SEQ ID NO: 714782 - RNA, 22 nt, Human
ggcacagggggcugaggacuag

SEQ ID NO: 714783 - RNA, 22 nt, Human
ugcagcagggaccucuauguga

SEQ ID NO: 714784 - RNA, 20 nt, Human
aaaagcagccagagauggua

SEQ ID NO: 714785 - RNA, 22 nt, Human
augugugguuuguaaaugauuu

SEQ ID NO: 714786 - RNA, 22 nt, Human
uggcaauguuagcaaagcauuu

SEQ ID NO: 714787 - RNA, 22 nt, Human
uucucacaggaaguaggacuuu

SEQ ID NO: 714788 - RNA, 22 nt, Human
caugauagguauuuaauuaaau

SEQ ID NO: 714789 - RNA, 22 nt, Human
ugugaagaucaggguccuagag

SEQ ID NO: 714790 - RNA, 22 nt, Human
uuauuuguaucaaggacgguug

SEQ ID NO: 714791 - RNA, 22 nt, Human
gugaaguucaagcuugccaucu

SEQ ID NO: 714792 - RNA, 22 nt, Human
agacaggugcucgcccaagucc

SEQ ID NO: 714793 - RNA, 22 nt, Human
aacaucuuuuuguuugcugaaa

SEQ ID NO: 714794 - RNA, 22 nt, Human
aucagcuucauaaaguugguca

SEQ ID NO: 714795 - RNA, 22 nt, Human
uucucagacuuccagcaccagc

SEQ ID NO: 714796 - RNA, 22 nt, Human
auugucucugaauuuucagcug

SEQ ID NO: 714797 - RNA, 22 nt, Human
uuucagucaugaguuguuuuca

SEQ ID NO: 714798 - RNA, 22 nt, Human
uugucaucauccucuuuggggu

SEQ ID NO: 714799 - RNA, 22 nt, Human
uaguauuuaaucacuuuugucu

SEQ ID NO: 714800 - RNA, 22 nt, Human
acugucaccaucagagcgggaa

SEQ ID NO: 714801 - RNA, 22 nt, Human
ucguuuuagguggacauugugu

SEQ ID NO: 714802 - RNA, 22 nt, Human
augaaauguauucagauaugua

SEQ ID NO: 714803 - RNA, 19 nt, Human
agaaucaucuugaagugau

SEQ ID NO: 714804 - RNA, 22 nt, Human
aagaaugagcucaaagaucuua

SEQ ID NO: 714805 - RNA, 22 nt, Human
ccucuccuugcacccgucccgc

SEQ ID NO: 714806 - RNA, 22 nt, Human
uccaguucuaggucacucucug

SEQ ID NO: 714807 - RNA, 22 nt, Human
uuguggcuucuacgcccacagg

SEQ ID NO: 714808 - RNA, 22 nt, Human
ugguaaggauuguagaaacgaa

SEQ ID NO: 714809 - RNA, 15 nt, Human
uaacuuuuuugggcu

SEQ ID NO: 714810 - RNA, 22 nt, Human
cugcagggcagaagggcauaga

SEQ ID NO: 714811 - RNA, 19 nt, Human
ccucugccagcccgccucu

SEQ ID NO: 714812 - RNA, 21 nt, Human
ucagggcagcugcucuucaga

SEQ ID NO: 714813 - RNA, 22 nt, Human
agggcagcagcggcccaggccu

SEQ ID NO: 714814 - RNA, 22 nt, Human
ugagaugaauaacuccugcuaa

SEQ ID NO: 714815 - RNA, 22 nt, Human
gaagaacuuuagggcagaauuu

SEQ ID NO: 714816 - RNA, 22 nt, Human
uuuggucuuuuguaaguuaucu

SEQ ID NO: 714817 - RNA, 22 nt, Human
uccuuuggagcuugacugguag

SEQ ID NO: 714818 - RNA, 22 nt, Human
gguggacaaaugaaugacugaa

SEQ ID NO: 714819 - RNA, 22 nt, Human
uuuacauggaauauugucuugu

SEQ ID NO: 714820 - RNA, 22 nt, Human
uuaaaguauagaggacaaaaac

SEQ ID NO: 714821 - RNA, 22 nt, Human
gaggggcguccugagugggccu

SEQ ID NO: 714822 - RNA, 22 nt, Human
uggcuccuaggauggugccugg

SEQ ID NO: 714823 - RNA, 22 nt, Human
uucuaaucccagcucuacuacu

SEQ ID NO: 714824 - RNA, 21 nt, Human
uguggucuuuuaguuccauca

SEQ ID NO: 714825 - RNA, 22 nt, Human
uggcucagcugacucggcuucu

SEQ ID NO: 714826 - RNA, 22 nt, Human
aaggccuucuaccaaggcuggg

SEQ ID NO: 714827 - RNA, 19 nt, Human
ugcuccaggccuugccgca

SEQ ID NO: 714828 - RNA, 22 nt, Human
uugguuuagagagugugguuac

SEQ ID NO: 714829 - RNA, 22 nt, Human
auggaauuucuccggcuccacc

SEQ ID NO: 714830 - RNA, 22 nt, Human
uuucucugaggcuggccucccu

SEQ ID NO: 714831 - RNA, 22 nt, Human
cagacuuuugacauuaauacag

SEQ ID NO: 714832 - RNA, 22 nt, Human
aacuacagcucuugucuuucug

SEQ ID NO: 714833 - RNA, 22 nt, Human
agcagcagaucaaacaggcuug

SEQ ID NO: 714834 - RNA, 22 nt, Human
cccaggcuggagugcaauggug

SEQ ID NO: 714835 - RNA, 20 nt, Human
gauggcuuuagaagcuggua

SEQ ID NO: 714836 - RNA, 22 nt, Human
aacacaugaaaguuggugagua

SEQ ID NO: 714837 - RNA, 22 nt, Human
acagugcuggcuacaacccugg

SEQ ID NO: 714838 - RNA, 22 nt, Human
cuuaauguggaccugguuucua

SEQ ID NO: 714839 - RNA, 22 nt, Human
auaacauggaguuugucauuua

SEQ ID NO: 714840 - RNA, 22 nt, Human
gcugaaggaggcucugguacua

SEQ ID NO: 714841 - RNA, 22 nt, Human
gcuggccccgagugcuacgcuc

SEQ ID NO: 714842 - RNA, 22 nt, Human
uaauauauuucugcuaagcuca

SEQ ID NO: 714843 - RNA, 22 nt, Human
guccagagguccaggaucaagg

SEQ ID NO: 714844 - RNA, 22 nt, Human
augguuuguaacccaauacucc

SEQ ID NO: 714845 - RNA, 20 nt, Human
aaggcacuaugucugcuagc

SEQ ID NO: 714846 - RNA, 22 nt, Human
auacaugugugagcgaagaugu

SEQ ID NO: 714847 - RNA, 22 nt, Human
gucugccccacaggcucaguug

SEQ ID NO: 714848 - RNA, 22 nt, Human
augcugggaagacaagguggag

SEQ ID NO: 714849 - RNA, 22 nt, Human
auuccuuguauaucuacaugca

SEQ ID NO: 714850 - RNA, 21 nt, Human
ccuggcacuggccugcugagc

SEQ ID NO: 714851 - RNA, 22 nt, Human
auguguaaaaggcauguuuuau

SEQ ID NO: 714852 - RNA, 19 nt, Human
cguaccugacacagaacag

SEQ ID NO: 714853 - RNA, 22 nt, Human
ggcaggcuccguguuccauucc

SEQ ID NO: 714854 - RNA, 22 nt, Human
aucagcaagauguaauuucuau

SEQ ID NO: 714855 - RNA, 22 nt, Human
ggccucagugggccgcugcagg

SEQ ID NO: 714856 - RNA, 22 nt, Human
uggaggacaggacuggacagcc

SEQ ID NO: 714857 - RNA, 22 nt, Human
ugaguaaaagugaaucuuaugu

SEQ ID NO: 714858 - RNA, 22 nt, Human
uauuuccaccuauuauuuucug

SEQ ID NO: 714859 - RNA, 22 nt, Human
cagauggauuuuguaggcugau

SEQ ID NO: 714860 - RNA, 22 nt, Human
uucuuuuaauguucugaaguuu

SEQ ID NO: 714861 - RNA, 22 nt, Human
gcaaaugaguuguaacauaaaa

SEQ ID NO: 714862 - RNA, 22 nt, Human
gcccuggagggccagcgacugg

SEQ ID NO: 714863 - RNA, 21 nt, Human
uccaaaaaggagcguccuucu

SEQ ID NO: 714864 - RNA, 22 nt, Human
uggcagaguucgcugugccuuu

SEQ ID NO: 714865 - RNA, 22 nt, Human
aagaggccucaccucacugccc

SEQ ID NO: 714866 - RNA, 22 nt, Human
auauaguaagcagucuguaaau

SEQ ID NO: 714867 - RNA, 22 nt, Human
ccugggucccaucccagaguga

SEQ ID NO: 714868 - RNA, 22 nt, Human
ucuguuuccucuuguguaaagu

SEQ ID NO: 714869 - RNA, 22 nt, Human
cuugcaggcccagccuuacaag

SEQ ID NO: 714870 - RNA, 22 nt, Human
gugcacaaucuucauauggcgu

SEQ ID NO: 714871 - RNA, 22 nt, Human
ccuggcaggcuggggacagugc

SEQ ID NO: 714872 - RNA, 22 nt, Human
uccagccaagccuugguagcug

SEQ ID NO: 714873 - RNA, 22 nt, Human
agaagacagagucuacauucua

SEQ ID NO: 714874 - RNA, 22 nt, Human
cccugguucagguuucucugaa

SEQ ID NO: 714875 - RNA, 22 nt, Human
ugccagagaagacccagucacu

SEQ ID NO: 714876 - RNA, 22 nt, Human
gaguaggguuuccagguuagag

SEQ ID NO: 714877 - RNA, 22 nt, Human
ccugugugaagguuaggcaggu

SEQ ID NO: 714878 - RNA, 23 nt, Human
uucauacagaaacaucacuucau

SEQ ID NO: 714879 - RNA, 22 nt, Human
ugcuggggagugauugaccauc

SEQ ID NO: 714880 - RNA, 21 nt, Human
ucuaaugacauccucugacaa

SEQ ID NO: 714881 - RNA, 22 nt, Human
ucucugcccaaguuucucaagu

SEQ ID NO: 714882 - RNA, 22 nt, Human
uauuucaggcuauauuucuugu

SEQ ID NO: 714883 - RNA, 22 nt, Human
agggggucguccggaagaccug

SEQ ID NO: 714884 - RNA, 22 nt, Human
ugaccuuucaacccuucuuggc

SEQ ID NO: 714885 - RNA, 22 nt, Human
ggaguucacugugcaggcucug

SEQ ID NO: 714886 - RNA, 22 nt, Human
cacacaggaaaauuggaauuaa

SEQ ID NO: 714887 - RNA, 22 nt, Human
uguguaaaaugagccuaaaguc

SEQ ID NO: 714888 - RNA, 21 nt, Human
aaguggagaagaaaagcugga

SEQ ID NO: 714889 - RNA, 22 nt, Human
cacagccuuuaggguacacaca

SEQ ID NO: 714890 - RNA, 22 nt, Human
ucagaacauuaaggauuugaag

SEQ ID NO: 714891 - RNA, 22 nt, Human
ucugugucacugaggccugugu

SEQ ID NO: 714892 - RNA, 22 nt, Human
agggcagcugugagccacugug

SEQ ID NO: 714893 - RNA, 22 nt, Human
cacaggcugcccgcagcuggga

SEQ ID NO: 714894 - RNA, 22 nt, Human
uccuccuuguuuugucucugcu

SEQ ID NO: 714895 - RNA, 22 nt, Human
gucagagcugugcaaggcugag

SEQ ID NO: 714896 - RNA, 22 nt, Human
uucucucuguuauggauuuuac

SEQ ID NO: 714897 - RNA, 22 nt, Human
cugcaggagcaagccugggaga

SEQ ID NO: 714898 - RNA, 22 nt, Human
cuagugaacgugguacuaugga

SEQ ID NO: 714899 - RNA, 22 nt, Human
cugugccuggggggcagagcug

SEQ ID NO: 714900 - RNA, 22 nt, Human
uggcagagucugggcuugggca

SEQ ID NO: 714901 - RNA, 22 nt, Human
ugguaaggucuucacucagauu

SEQ ID NO: 714902 - RNA, 22 nt, Human
guuccuaagcuguggcccugga

SEQ ID NO: 714903 - RNA, 22 nt, Human
ucaggcugcccguucagggcuc

SEQ ID NO: 714904 - RNA, 22 nt, Human
cauagaauggauugacaagauu

SEQ ID NO: 714905 - RNA, 22 nt, Human
auguuaacugaagccauucucg

SEQ ID NO: 714906 - RNA, 22 nt, Human
gaggagguggagucaugcagag

SEQ ID NO: 714907 - RNA, 22 nt, Human
aguauuuagcauagugguuagu

SEQ ID NO: 714908 - RNA, 22 nt, Human
uugcaaauuauuuuagucccuu

SEQ ID NO: 714909 - RNA, 22 nt, Human
ugcuccagcuggagaugggggc

SEQ ID NO: 714910 - RNA, 22 nt, Human
agggcauuggcacagaucugcu

SEQ ID NO: 714911 - RNA, 22 nt, Human
ugaggguggccuuguguggacu

SEQ ID NO: 714912 - RNA, 22 nt, Human
ucaguuccuguugcacagcauc

SEQ ID NO: 714913 - RNA, 22 nt, Human
uccagaaacugcugagauaaga

SEQ ID NO: 714914 - RNA, 18 nt, Human
aagggcuggccuuuggag

SEQ ID NO: 714915 - RNA, 22 nt, Human
cagcaggcugcgauugcucauu

SEQ ID NO: 714916 - RNA, 22 nt, Human
auaaugcgccucagaaaacaga

SEQ ID NO: 714917 - RNA, 22 nt, Human
cuggcucaauuuguacugcugu

SEQ ID NO: 714918 - RNA, 22 nt, Human
aguguguccagaaaucuguauu

SEQ ID NO: 714919 - RNA, 22 nt, Human
uuugcauaggauggacauuuua

SEQ ID NO: 714920 - RNA, 22 nt, Human
aauuuucugccuagcaaaaacu

SEQ ID NO: 714921 - RNA, 22 nt, Human
aaguuugaugaguuucuggagg

SEQ ID NO: 714922 - RNA, 22 nt, Human
agucccaguucgguucuuccuc

SEQ ID NO: 714923 - RNA, 22 nt, Human
ggugcucaagagggcauccucu

SEQ ID NO: 714924 - RNA, 19 nt, Human
agcaggcuaggcugccucu

SEQ ID NO: 714925 - RNA, 22 nt, Human
agcacagaauggcuuggaagcc

SEQ ID NO: 714926 - RNA, 22 nt, Human
uaagauaaguggguugagaugg

SEQ ID NO: 714927 - RNA, 22 nt, Human
ggcuagaagucagaggucaaga

SEQ ID NO: 714928 - RNA, 22 nt, Human
cuggccuuggaagggagcccgu

SEQ ID NO: 714929 - RNA, 22 nt, Human
uaaaugacauucuuaagucuug

SEQ ID NO: 714930 - RNA, 22 nt, Human
caauauauaggaacaacuuagg

SEQ ID NO: 714931 - RNA, 22 nt, Human
cuuccucacggugcaacaggaa

SEQ ID NO: 714932 - RNA, 22 nt, Human
gcccaggagaggccagggcuga

SEQ ID NO: 714933 - RNA, 22 nt, Human
agggcagagcacugaauuggga

SEQ ID NO: 714934 - RNA, 22 nt, Human
gggcacugacagggucccaacu

SEQ ID NO: 714935 - RNA, 20 nt, Human
accagguggcugaugacacc

SEQ ID NO: 714936 - RNA, 22 nt, Human
uucucuaggaguucugggauca

SEQ ID NO: 714937 - RNA, 22 nt, Human
uugaaaguagcagcugcauaug

SEQ ID NO: 714938 - RNA, 22 nt, Human
uggagguguggagucaaaggga

SEQ ID NO: 714939 - RNA, 22 nt, Human
uucuaagcucugaaauaaaucu

SEQ ID NO: 714940 - RNA, 22 nt, Human
ucacagacaauuguuuuggugu

SEQ ID NO: 714941 - RNA, 22 nt, Human
uuuaucugugguaaauaacauu

SEQ ID NO: 714942 - RNA, 22 nt, Human
cagaagggcagcacugggaagg

SEQ ID NO: 714943 - RNA, 22 nt, Human
auauaaagagcuuaguauagug

SEQ ID NO: 714944 - RNA, 22 nt, Human
gugagaaauggaacuucauacg

SEQ ID NO: 714945 - RNA, 22 nt, Human
ugagggugggccugcaggaaga

SEQ ID NO: 714946 - RNA, 22 nt, Human
aagcagcauaauugcuauuuua

SEQ ID NO: 714947 - RNA, 22 nt, Human
gcugcucuuuucagagaugaga

SEQ ID NO: 714948 - RNA, 22 nt, Human
cugcaucucugcuagucaguca

SEQ ID NO: 714949 - RNA, 22 nt, Human
gcguggggcagcccagggcuuc

SEQ ID NO: 714950 - RNA, 22 nt, Human
ucugacuuggugcuaccagcca

SEQ ID NO: 714951 - RNA, 22 nt, Human
gagugccagauggaccucuugg

SEQ ID NO: 714952 - RNA, 22 nt, Human
ugggcucauguuucuuugagga

SEQ ID NO: 714953 - RNA, 22 nt, Human
uucuuggaaauacauucaauaa

SEQ ID NO: 714954 - RNA, 22 nt, Human
cugugccaggcccgggugggug

SEQ ID NO: 714955 - RNA, 22 nt, Human
ucaguucucucaugccugcccu

SEQ ID NO: 714956 - RNA, 22 nt, Human
gggcugaaaggccgccucagau

SEQ ID NO: 714957 - RNA, 22 nt, Human
ggccugcuggcuccagcgcccg

SEQ ID NO: 714958 - RNA, 20 nt, Human
gcaggcuccgggcuugggag

SEQ ID NO: 714959 - RNA, 22 nt, Human
uagugcuuuauuguuccugaaa

SEQ ID NO: 714960 - RNA, 22 nt, Human
aucuauacccaucaugauuuaa

SEQ ID NO: 714961 - RNA, 22 nt, Human
cagcuccugaggacugcuggga

SEQ ID NO: 714962 - RNA, 23 nt, Human
auuuuuugucuuuguaacuagau

SEQ ID NO: 714963 - RNA, 22 nt, Human
aacuuuuucugggauggagggu

SEQ ID NO: 714964 - RNA, 22 nt, Human
ugagagaggggacugccugcuu

SEQ ID NO: 714965 - RNA, 22 nt, Human
ccuggacuguguccugugguca

SEQ ID NO: 714966 - RNA, 22 nt, Human
cuuugauuccaggcacauguuu

SEQ ID NO: 714967 - RNA, 22 nt, Human
cugagcagccccaccagccauu

SEQ ID NO: 714968 - RNA, 22 nt, Human
acagugcugaucuagacugacc

SEQ ID NO: 714969 - RNA, 22 nt, Human
uuggaugaagucuagcuuuagu

SEQ ID NO: 714970 - RNA, 22 nt, Human
agaagaaacugucggggauauu

SEQ ID NO: 714971 - RNA, 22 nt, Human
ugaggaugagaugagauaacac

SEQ ID NO: 714972 - RNA, 22 nt, Human
augcuguguuugagaaccuagg

SEQ ID NO: 714973 - RNA, 22 nt, Human
ucucccacagucucccauggcu

SEQ ID NO: 714974 - RNA, 22 nt, Human
gcccuguccuccugacugagug

SEQ ID NO: 714975 - RNA, 22 nt, Human
ugaggccucugugccauccagg

SEQ ID NO: 714976 - RNA, 22 nt, Human
uauacacaaacaagggguuaag

SEQ ID NO: 714977 - RNA, 22 nt, Human
aggcuggcuuugguagcauggu

SEQ ID NO: 714978 - RNA, 22 nt, Human
gcagcugccuauucagggcuug

SEQ ID NO: 714979 - RNA, 22 nt, Human
gagguccagagcagguucagug

SEQ ID NO: 714980 - RNA, 22 nt, Human
gaucuguuauaaucucuuuuau

SEQ ID NO: 714981 - RNA, 22 nt, Human
caggauccccaggucgccgucc

SEQ ID NO: 714982 - RNA, 22 nt, Human
aauagcauguucaugauaaaau

SEQ ID NO: 714983 - RNA, 20 nt, Human
uggagugcuguguugagaag

SEQ ID NO: 714984 - RNA, 23 nt, Human
ugguggcagaaguagcagaugac

SEQ ID NO: 714985 - RNA, 22 nt, Human
guaagcaucugucucuucugca

SEQ ID NO: 714986 - RNA, 22 nt, Human
uggcacuggcgcaggauggcgg

SEQ ID NO: 714987 - RNA, 22 nt, Human
cagcccugcggagguguauacu

SEQ ID NO: 714988 - RNA, 22 nt, Human
ggcuggagauaugucuggaaca

SEQ ID NO: 714989 - RNA, 22 nt, Human
uaguuucuggguuggcuucuac

SEQ ID NO: 714990 - RNA, 22 nt, Human
acucacaggacucugcauauag

SEQ ID NO: 714991 - RNA, 21 nt, Human
gauaaagcagcuugccuaagg

SEQ ID NO: 714992 - RNA, 22 nt, Human
ugagacagcagauuagcaauga

SEQ ID NO: 714993 - RNA, 22 nt, Human
ugaguguguauuauguaucagg

SEQ ID NO: 714994 - RNA, 22 nt, Human
cggucugaucuggaaauagggc

SEQ ID NO: 714995 - RNA, 22 nt, Human
ccagcuccuucugucuguggag

SEQ ID NO: 714996 - RNA, 22 nt, Human
ugcagaaaucacauuuaacccu

SEQ ID NO: 714997 - RNA, 22 nt, Human
gcucccugacucaguuccugag

SEQ ID NO: 714998 - RNA, 22 nt, Human
agaugugguuauucucuuccuu

SEQ ID NO: 714999 - RNA, 22 nt, Human
gcagagccaggagagacccuug

SEQ ID NO: 715000 - RNA, 22 nt, Human
uaugagauaauagauguguaaa

SEQ ID NO: 715001 - RNA, 22 nt, Human
uaaguuccuggaaggcaaggau

SEQ ID NO: 715002 - RNA, 22 nt, Human
agguggggaaaccagcgauccc

SEQ ID NO: 715003 - RNA, 21 nt, Human
aauucccagaaacagcacaag

SEQ ID NO: 715004 - RNA, 22 nt, Human
ucucuuaggagaaauucauaaa

SEQ ID NO: 715005 - RNA, 21 nt, Human
gcugcugccccuagugaggcc

SEQ ID NO: 715006 - RNA, 23 nt, Human
ucaaacauauugugagacacagg

SEQ ID NO: 715007 - RNA, 22 nt, Human
aaaggcaugccuccauuucuau

SEQ ID NO: 715008 - RNA, 22 nt, Human
ucacuuuugaucccuaugcagu

SEQ ID NO: 715009 - RNA, 22 nt, Human
cugcaucugcauaaucaacuuc

SEQ ID NO: 715010 - RNA, 22 nt, Human
uaacaucuaagggagagaaagu

SEQ ID NO: 715011 - RNA, 22 nt, Human
cuuccugggacaccuaacucua

SEQ ID NO: 715012 - RNA, 22 nt, Human
uggggagagaccggaauguuuc

SEQ ID NO: 715013 - RNA, 22 nt, Human
ccugccaggacauugcuugaag

SEQ ID NO: 715014 - RNA, 22 nt, Human
gaugaugggauccagcaaugua

SEQ ID NO: 715015 - RNA, 22 nt, Human
ucacuugaaccugggaggcaga

SEQ ID NO: 715016 - RNA, 22 nt, Human
gggcuuggccccagaagagcua

SEQ ID NO: 715017 - RNA, 21 nt, Human
gcucucugcaugguggcucag

SEQ ID NO: 715018 - RNA, 22 nt, Human
ccauuggagaguuuuaagaagg

SEQ ID NO: 715019 - RNA, 20 nt, Human
uuuagcacauuguacaaaac

SEQ ID NO: 715020 - RNA, 22 nt, Human
uucuuaaucccacaaaucuuca

SEQ ID NO: 715021 - RNA, 22 nt, Human
agggcagccucucagccuaggu

SEQ ID NO: 715022 - RNA, 22 nt, Human
uaguuuuuucaacaaauggugc

SEQ ID NO: 715023 - RNA, 22 nt, Human
ucacagaaguugaauuugcaug

SEQ ID NO: 715024 - RNA, 22 nt, Human
guauucuugaguggcaacuagg

SEQ ID NO: 715025 - RNA, 22 nt, Human
cuuuggaaggaacaggauucuc

SEQ ID NO: 715026 - RNA, 22 nt, Human
uaugagaacugacagagugcca

SEQ ID NO: 715027 - RNA, 22 nt, Human
acaggccugacacacagagggc

SEQ ID NO: 715028 - RNA, 22 nt, Human
gucagcagugucagcucugggg

SEQ ID NO: 715029 - RNA, 22 nt, Human
aaggggauuuaagguaagaaga

SEQ ID NO: 715030 - RNA, 22 nt, Human
accaaggagacaaagguguauu

SEQ ID NO: 715031 - RNA, 22 nt, Human
agcaaauaaagacaauuauguc

SEQ ID NO: 715032 - RNA, 22 nt, Human
gauuaauucaggaucaggaaau

SEQ ID NO: 715033 - RNA, 22 nt, Human
ugcuuucauugccugcgguuuu

SEQ ID NO: 715034 - RNA, 22 nt, Human
cucaggagagucuuauaucucc

SEQ ID NO: 715035 - RNA, 22 nt, Human
uucuuuuacauuaagauuucag

SEQ ID NO: 715036 - RNA, 22 nt, Human
ucugcuggugaugaccucauaa

SEQ ID NO: 715037 - RNA, 22 nt, Human
ggcaggcaucauguggucauua

SEQ ID NO: 715038 - RNA, 22 nt, Human
aagaugugucucaucagggugu

SEQ ID NO: 715039 - RNA, 22 nt, Human
agacuuuaaugugcaaaugaaa

SEQ ID NO: 715040 - RNA, 22 nt, Human
ggaagagaaaugagucaagacu

SEQ ID NO: 715041 - RNA, 22 nt, Human
aggcuucaccagacucuuaauc

SEQ ID NO: 715042 - RNA, 22 nt, Human
agcuggcagcucucagggguac

SEQ ID NO: 715043 - RNA, 22 nt, Human
uggccugauuuugcuaagagaa

SEQ ID NO: 715044 - RNA, 22 nt, Human
uccugccuugccugggacauca

SEQ ID NO: 715045 - RNA, 20 nt, Human
uauuacacacaaugagcagu

SEQ ID NO: 715046 - RNA, 22 nt, Human
accucagcuauuucaaaacaga

SEQ ID NO: 715047 - RNA, 22 nt, Human
gcagggagggccuuucaugaca

SEQ ID NO: 715048 - RNA, 22 nt, Human
guauugcaauuacucuucuucu

SEQ ID NO: 715049 - RNA, 22 nt, Human
ugcagagggacagccacagcuc

SEQ ID NO: 715050 - RNA, 22 nt, Human
augaccaguguugcuggccccg

SEQ ID NO: 715051 - RNA, 22 nt, Human
uauguguauugagcauuguuac

SEQ ID NO: 715052 - RNA, 22 nt, Human
uaugacuauagggcuuaguguu

SEQ ID NO: 715053 - RNA, 22 nt, Human
ggcugaaaccguuauccacuga

SEQ ID NO: 715054 - RNA, 22 nt, Human
aagagggaggugcgggugcaga

SEQ ID NO: 715055 - RNA, 22 nt, Human
gugcaugcacacaugugugagg

SEQ ID NO: 715056 - RNA, 22 nt, Human
ccugucuguuugcccauucuug

SEQ ID NO: 715057 - RNA, 22 nt, Human
gaucuugagcaaguugcauccc

SEQ ID NO: 715058 - RNA, 22 nt, Human
ugcaggugugguuccucagcca

SEQ ID NO: 715059 - RNA, 22 nt, Human
cuggaggggccauccacagucu

SEQ ID NO: 715060 - RNA, 22 nt, Human
uuucugcagucucucagaagcc

SEQ ID NO: 715061 - RNA, 17 nt, Human
ucagggaaugagguugu

SEQ ID NO: 715062 - RNA, 22 nt, Human
auauuacacacgguaucacggg

SEQ ID NO: 715063 - RNA, 22 nt, Human
aacaaguaaguuuauauauauu

SEQ ID NO: 715064 - RNA, 22 nt, Human
cacuucucugauaaucucaguu

SEQ ID NO: 715065 - RNA, 22 nt, Human
gaccagcuacuuguacaguuca

SEQ ID NO: 715066 - RNA, 22 nt, Human
ccucaggcugucuuccuucugg

SEQ ID NO: 715067 - RNA, 22 nt, Human
uagugugguaaauaaauguuuu

SEQ ID NO: 715068 - RNA, 22 nt, Human
ccggggacuuaaagugaaggaa

SEQ ID NO: 715069 - RNA, 22 nt, Human
ugcucugggggaagccagcugu

SEQ ID NO: 715070 - RNA, 22 nt, Human
auggccaaaucuaaacuguugg

SEQ ID NO: 715071 - RNA, 22 nt, Human
cuaucuuucgauucuagcuuaa

SEQ ID NO: 715072 - RNA, 22 nt, Human
aucugccuggucuuugaugcag

SEQ ID NO: 715073 - RNA, 22 nt, Human
ugugcacauauacucauauucc

SEQ ID NO: 715074 - RNA, 22 nt, Human
caggaggugaaggagaaccagu

SEQ ID NO: 715075 - RNA, 22 nt, Human
aggccagcugccacccgguccg

SEQ ID NO: 715076 - RNA, 22 nt, Human
cccaggucugugccagcucuga

SEQ ID NO: 715077 - RNA, 22 nt, Human
agggacaguauccaucucacag

SEQ ID NO: 715078 - RNA, 22 nt, Human
augagguggucuucaguagguc

SEQ ID NO: 715079 - RNA, 22 nt, Human
ugcccugccaagacugaguggu

SEQ ID NO: 715080 - RNA, 22 nt, Human
ccagagccucuuaugaagaucg

SEQ ID NO: 715081 - RNA, 22 nt, Human
agugccuggaccccaugacaua

SEQ ID NO: 715082 - RNA, 22 nt, Human
guggcagagagcaagugucuga

SEQ ID NO: 715083 - RNA, 22 nt, Human
gcucccugugcucugagugaua

SEQ ID NO: 715084 - RNA, 22 nt, Human
ugcuuuauugcaucaguguggg

SEQ ID NO: 715085 - RNA, 22 nt, Human
acugugcuuucucuggaggcau

SEQ ID NO: 715086 - RNA, 22 nt, Human
ggcuggaaguccaagaucaagg

SEQ ID NO: 715087 - RNA, 22 nt, Human
acauagcucagcauaaucgugg

SEQ ID NO: 715088 - RNA, 20 nt, Human
acuuuacagagaagacugac

SEQ ID NO: 715089 - RNA, 22 nt, Human
uucuagcaugccuuuuagcaca

SEQ ID NO: 715090 - RNA, 22 nt, Human
caaaagauacuugcaucuaacu

SEQ ID NO: 715091 - RNA, 22 nt, Human
auaugaaguuacagguaagaaa

SEQ ID NO: 715092 - RNA, 22 nt, Human
cagaggcuaagaugagugggug

SEQ ID NO: 715093 - RNA, 22 nt, Human
uuugacuccugccuucuccugu

SEQ ID NO: 715094 - RNA, 22 nt, Human
aaacagaugaguuauaauagcc

SEQ ID NO: 715095 - RNA, 22 nt, Human
aagaggcagcccgcugaggcug

SEQ ID NO: 715096 - RNA, 22 nt, Human
ggacauuuuucuuccuacaaug

SEQ ID NO: 715097 - RNA, 22 nt, Human
uagcagcacagaaagccuggag

SEQ ID NO: 715098 - RNA, 22 nt, Human
uuuaaaauuuagaccucuccac

SEQ ID NO: 715099 - RNA, 22 nt, Human
guauaucucuuacauacacaca

SEQ ID NO: 715100 - RNA, 22 nt, Human
uguuuauuacaguucuuggaau

SEQ ID NO: 715101 - RNA, 22 nt, Human
uguacacaaccuacagucugcu

SEQ ID NO: 715102 - RNA, 22 nt, Human
aacacuucucaucacugcaagc

SEQ ID NO: 715103 - RNA, 22 nt, Human
ugagcauggugggugcagagca

SEQ ID NO: 715104 - RNA, 22 nt, Human
ggucugaaucacugugccuauc

SEQ ID NO: 715105 - RNA, 22 nt, Human
cuuucaguuacaguuacacaca

SEQ ID NO: 715106 - RNA, 22 nt, Human
gggccaagggugcguggcagga

SEQ ID NO: 715107 - RNA, 21 nt, Human
uuuauucucagauacagggag

SEQ ID NO: 715108 - RNA, 22 nt, Human
uuguacaaguuuugagcuuaag

SEQ ID NO: 715109 - RNA, 19 nt, Human
ggcugggcccuguuucucc

SEQ ID NO: 715110 - RNA, 22 nt, Human
ucucuggcacauaauaaggucu

SEQ ID NO: 715111 - RNA, 22 nt, Human
uauauuguuggugggaauauaa

SEQ ID NO: 715112 - RNA, 22 nt, Human
agagagaagcaaucaguggcca

SEQ ID NO: 715113 - RNA, 22 nt, Human
ucucugaagagcucagacuagu

SEQ ID NO: 715114 - RNA, 22 nt, Human
uugcccuggggcuggccuggca

SEQ ID NO: 715115 - RNA, 22 nt, Human
gauggugcaggugaagugcugg

SEQ ID NO: 715116 - RNA, 22 nt, Human
ucuguguugauaauuuuggaga

SEQ ID NO: 715117 - RNA, 23 nt, Human
gugugcaggauuauuugcagaca

SEQ ID NO: 715118 - RNA, 22 nt, Human
cucacagauauuugcuucaggu

SEQ ID NO: 715119 - RNA, 17 nt, Human
uccuggauccauggugg

SEQ ID NO: 715120 - RNA, 22 nt, Human
caccucucagcuaggaguaagu

SEQ ID NO: 715121 - RNA, 19 nt, Human
gaauguuucugucucuucu

SEQ ID NO: 715122 - RNA, 20 nt, Human
ucacaugcauauucguuucu

SEQ ID NO: 715123 - RNA, 22 nt, Human
ccagcugaggcagccacacagg

SEQ ID NO: 715124 - RNA, 22 nt, Human
cuuuauguguacuuuccauuuu

SEQ ID NO: 715125 - RNA, 22 nt, Human
uacagugauagagaguagcuau

SEQ ID NO: 715126 - RNA, 22 nt, Human
uccuguguuacugccuggagcg

SEQ ID NO: 715127 - RNA, 22 nt, Human
aaaagggcaaaaccaucaugga

SEQ ID NO: 715128 - RNA, 22 nt, Human
uucaaaugguuagacuguuagc

SEQ ID NO: 715129 - RNA, 22 nt, Human
cagggcuuugugugccugggga

SEQ ID NO: 715130 - RNA, 22 nt, Human
ucagccucauuuucugcucugu

SEQ ID NO: 715131 - RNA, 22 nt, Human
uggccaccccuuucucugcacu

SEQ ID NO: 715132 - RNA, 22 nt, Human
ugaacuuuuucucuacgggcca

SEQ ID NO: 715133 - RNA, 22 nt, Human
aaccuuuauuugguacuauucu

SEQ ID NO: 715134 - RNA, 18 nt, Human
ucucuuuuccccucauug

SEQ ID NO: 715135 - RNA, 22 nt, Human
acauuugauaauuauaaagaca

SEQ ID NO: 715136 - RNA, 22 nt, Human
ccaguggacaauuucugaggaa

SEQ ID NO: 715137 - RNA, 22 nt, Human
caguugcagaggcagagugcua

SEQ ID NO: 715138 - RNA, 22 nt, Human
agagcugauuugauuacagugc

SEQ ID NO: 715139 - RNA, 22 nt, Human
uuuguacuggaagaacaugcaa

SEQ ID NO: 715140 - RNA, 22 nt, Human
gggcaaggcagaagaguuggag

SEQ ID NO: 715141 - RNA, 22 nt, Human
uacacauuacauaauacuaucu

SEQ ID NO: 715142 - RNA, 22 nt, Human
gccuccccaaagugcugacagc

SEQ ID NO: 715143 - RNA, 20 nt, Human
uuugaauguaaagcauguca

SEQ ID NO: 715144 - RNA, 22 nt, Human
ugaaaaacuuuaauccauaaag

SEQ ID NO: 715145 - RNA, 22 nt, Human
gcugaggucaggagcugugggg

SEQ ID NO: 715146 - RNA, 22 nt, Human
agcuggucuuaaauguguccag

SEQ ID NO: 715147 - RNA, 22 nt, Human
acucucccacguucgacucuaa

SEQ ID NO: 715148 - RNA, 22 nt, Human
uggcagagagagugcagucgac

SEQ ID NO: 715149 - RNA, 22 nt, Human
cagauuaguugugcuauggccu

SEQ ID NO: 715150 - RNA, 22 nt, Human
cacaggagcuguggggcagugu

SEQ ID NO: 715151 - RNA, 22 nt, Human
acccaugugcucuuuuguaccc

SEQ ID NO: 715152 - RNA, 22 nt, Human
uuagaaccacugaagacucaca

SEQ ID NO: 715153 - RNA, 22 nt, Human
uucugaauuucuguguaucuua

SEQ ID NO: 715154 - RNA, 22 nt, Human
gaacagcauguaagaagcuacu

SEQ ID NO: 715155 - RNA, 22 nt, Human
gacuagggaaucauucuuggau

SEQ ID NO: 715156 - RNA, 22 nt, Human
ugugccaggcacuugcccaggc

SEQ ID NO: 715157 - RNA, 22 nt, Human
gcuuuaagucucaguuuguuag

SEQ ID NO: 715158 - RNA, 22 nt, Human
ucagggcagccuaaggcaccuc

SEQ ID NO: 715159 - RNA, 22 nt, Human
guggacaugcauacauauguuu

SEQ ID NO: 715160 - RNA, 22 nt, Human
aggucacacuuggaucauagaa

SEQ ID NO: 715161 - RNA, 22 nt, Human
aacacaaucuuccaguuugcug

SEQ ID NO: 715162 - RNA, 18 nt, Human
aggcccuggccucgaaca

SEQ ID NO: 715163 - RNA, 22 nt, Human
gaauuuaaaggccagaccugag

SEQ ID NO: 715164 - RNA, 22 nt, Human
cccuccauuaaaacagaccuau

SEQ ID NO: 715165 - RNA, 22 nt, Human
gggcccuggauuuaagcaugga

SEQ ID NO: 715166 - RNA, 22 nt, Human
auugucuuuaaccucugagggg

SEQ ID NO: 715167 - RNA, 18 nt, Human
cugggcucgagagauccu

SEQ ID NO: 715168 - RNA, 22 nt, Human
ugcagguacuugacaacuuggg

SEQ ID NO: 715169 - RNA, 22 nt, Human
aguucacucuuuaugagaaagu

SEQ ID NO: 715170 - RNA, 22 nt, Human
agccugccucagacucaggaua

SEQ ID NO: 715171 - RNA, 22 nt, Human
ugucugaaacuuaugauauacu

SEQ ID NO: 715172 - RNA, 22 nt, Human
ugcucuguccagugcaccauca

SEQ ID NO: 715173 - RNA, 22 nt, Human
gaggcagcaaaauauaucauaa

SEQ ID NO: 715174 - RNA, 21 nt, Human
augugcuuagcugcugguagu

SEQ ID NO: 715175 - RNA, 22 nt, Human
agagagcauugaggaaaucuuc

SEQ ID NO: 715176 - RNA, 22 nt, Human
aagucagaaaucaucuagugua

SEQ ID NO: 715177 - RNA, 22 nt, Human
ugcugccucugcugauauggcc

SEQ ID NO: 715178 - RNA, 22 nt, Human
uagauaacagcacuggccucgc

SEQ ID NO: 715179 - RNA, 22 nt, Human
auuguaaaaguauucuaagauu

SEQ ID NO: 715180 - RNA, 19 nt, Human
auagucuuuccaauuauac

SEQ ID NO: 715181 - RNA, 22 nt, Human
agagguggccaugggcgcugga

SEQ ID NO: 715182 - RNA, 22 nt, Human
cuucucauucaagcaaaacaga

SEQ ID NO: 715183 - RNA, 22 nt, Human
uguaaagguaggugcaaaauga

SEQ ID NO: 715184 - RNA, 22 nt, Human
ccagcuggcccagcugugcucc

SEQ ID NO: 715185 - RNA, 16 nt, Human
ugccugcucugaucuc

SEQ ID NO: 715186 - RNA, 22 nt, Human
ugugcagagcggggaagagcac

SEQ ID NO: 715187 - RNA, 22 nt, Human
ggaaaaauagaguauacuuuaa

SEQ ID NO: 715188 - RNA, 22 nt, Human
cccaggucccgccccagcucua

SEQ ID NO: 715189 - RNA, 22 nt, Human
auacaagugauauaauuguuuc

SEQ ID NO: 715190 - RNA, 20 nt, Human
ggcauccuuuuggucacagc

SEQ ID NO: 715191 - RNA, 22 nt, Human
agaaaagguugaaaguaggauu

SEQ ID NO: 715192 - RNA, 22 nt, Human
augucuucuguggagacaggua

SEQ ID NO: 715193 - RNA, 22 nt, Human
augguccuuauggccgugauau

SEQ ID NO: 715194 - RNA, 22 nt, Human
caccaggaugggcagguagguc

SEQ ID NO: 715195 - RNA, 23 nt, Human
gaacccagcucugccacuugcca

SEQ ID NO: 715196 - RNA, 22 nt, Human
ggggcucacaccucccuaaggg

SEQ ID NO: 715197 - RNA, 22 nt, Human
gcagagauccaggguauagguu

SEQ ID NO: 715198 - RNA, 22 nt, Human
ucugaggaccuacugaagaguu

SEQ ID NO: 715199 - RNA, 22 nt, Human
gaacacugacauuuuccugacu

SEQ ID NO: 715200 - RNA, 22 nt, Human
cauucaaaagcuccauguuugu

SEQ ID NO: 715201 - RNA, 22 nt, Human
uguccaggcuaaagugcagugg

SEQ ID NO: 715202 - RNA, 22 nt, Human
ccugagcagcucugaggggcga

SEQ ID NO: 715203 - RNA, 22 nt, Human
auuccugagacuuaucuguuuc

SEQ ID NO: 715204 - RNA, 22 nt, Human
ccagcccaaagucaccccggga

SEQ ID NO: 715205 - RNA, 22 nt, Human
acuucauguuucuauuagcuca

SEQ ID NO: 715206 - RNA, 22 nt, Human
ugcagaaacagaguuuugccau

SEQ ID NO: 715207 - RNA, 21 nt, Human
uuuguccaccuguguucacca

SEQ ID NO: 715208 - RNA, 22 nt, Human
ggcuguggcagcuggaaguggu

SEQ ID NO: 715209 - RNA, 23 nt, Human
ugagcucuauggaggacugaacc

SEQ ID NO: 715210 - RNA, 22 nt, Human
uucauucuuugaaucugaggua

SEQ ID NO: 715211 - RNA, 22 nt, Human
ggcucagguugggucacaugac

SEQ ID NO: 715212 - RNA, 22 nt, Human
aaauaucuuaggaguauaugag

SEQ ID NO: 715213 - RNA, 22 nt, Human
aagcaauguuagaggccuuagg

SEQ ID NO: 715214 - RNA, 22 nt, Human
cuggcaguggaggaagaaaacu

SEQ ID NO: 715215 - RNA, 22 nt, Human
caauuucucgaacucuaaucca

SEQ ID NO: 715216 - RNA, 21 nt, Human
cugcccuagauggcucuggaa

SEQ ID NO: 715217 - RNA, 22 nt, Human
ggucucaaggaauauaaugagu

SEQ ID NO: 715218 - RNA, 22 nt, Human
augaaauauucuuugguaagaa

SEQ ID NO: 715219 - RNA, 23 nt, Human
caggcucccggaccaggauccgc

SEQ ID NO: 715220 - RNA, 23 nt, Human
uucuggauguucuagucugagag

SEQ ID NO: 715221 - RNA, 22 nt, Human
gcacacagaauugauucacugu

SEQ ID NO: 715222 - RNA, 22 nt, Human
uccuaacugcccugggcaaggu

SEQ ID NO: 715223 - RNA, 18 nt, Human
uccugggaaaggcauaca

SEQ ID NO: 715224 - RNA, 22 nt, Human
cuacugaugauguugguugugg

SEQ ID NO: 715225 - RNA, 22 nt, Human
ucugcauugucccagaagugac

SEQ ID NO: 715226 - RNA, 22 nt, Human
gucugccucuauugccuaccug

SEQ ID NO: 715227 - RNA, 22 nt, Human
ucuggcucucaacaaauauuua

SEQ ID NO: 715228 - RNA, 22 nt, Human
ccaugcugugacacaguaguua

SEQ ID NO: 715229 - RNA, 22 nt, Human
cacagagaccccuucuggggcc

SEQ ID NO: 715230 - RNA, 22 nt, Human
aaugauugucauuccaaaaagu

SEQ ID NO: 715231 - RNA, 22 nt, Human
acaauguguuuuuauacauuug

SEQ ID NO: 715232 - RNA, 20 nt, Human
acuaugaaguuagcccucca

SEQ ID NO: 715233 - RNA, 22 nt, Human
aauccuggcugcguuggccagc

SEQ ID NO: 715234 - RNA, 18 nt, Human
agagggaaagcaggcuga

SEQ ID NO: 715235 - RNA, 22 nt, Human
cuggguccuggugcugaguucu

SEQ ID NO: 715236 - RNA, 22 nt, Human
uugcauuuaaguagauguuaca

SEQ ID NO: 715237 - RNA, 22 nt, Human
ccgggagcaggcgccaccgcca

SEQ ID NO: 715238 - RNA, 22 nt, Human
auuccaguucuccucucuaaag

SEQ ID NO: 715239 - RNA, 22 nt, Human
aagcugugcaggaacugcuugc

SEQ ID NO: 715240 - RNA, 22 nt, Human
ucugucuccucugaggugccag

SEQ ID NO: 715241 - RNA, 21 nt, Human
acagccaggaacaugaggggc

SEQ ID NO: 715242 - RNA, 22 nt, Human
cagagccaaaugcugugguuau

SEQ ID NO: 715243 - RNA, 22 nt, Human
uugacaaucccuguuagaagug

SEQ ID NO: 715244 - RNA, 22 nt, Human
aggccaagugcugggacaggug

SEQ ID NO: 715245 - RNA, 20 nt, Human
aauuuuaucuccauccuuug

SEQ ID NO: 715246 - RNA, 22 nt, Human
uucuuccucagcagggcugccu

SEQ ID NO: 715247 - RNA, 22 nt, Human
caugcauaugucaaaaaagcua

SEQ ID NO: 715248 - RNA, 22 nt, Human
uuauuccauuauuucacuuagg

SEQ ID NO: 715249 - RNA, 22 nt, Human
ucaaugcaacuuccaccuccca

SEQ ID NO: 715250 - RNA, 22 nt, Human
gggaaggagguggcuugaagug

SEQ ID NO: 715251 - RNA, 22 nt, Human
ucucaguguguuuucucucaga

SEQ ID NO: 715252 - RNA, 22 nt, Human
gagugcuggaggugugaguggg

SEQ ID NO: 715253 - RNA, 22 nt, Human
uauggcuaauucuuuacugacc

SEQ ID NO: 715254 - RNA, 22 nt, Human
auggcccaaacugcaauuacuu

SEQ ID NO: 715255 - RNA, 22 nt, Human
aaacuguaaguuugaggggaaa

SEQ ID NO: 715256 - RNA, 22 nt, Human
uuccaugugaguacacugugau

SEQ ID NO: 715257 - RNA, 22 nt, Human
aauauuucuggugcuucucacu

SEQ ID NO: 715258 - RNA, 22 nt, Human
cacaggccugggguugagcggg

SEQ ID NO: 715259 - RNA, 21 nt, Human
aggugcaggccucaagcccca

SEQ ID NO: 715260 - RNA, 22 nt, Human
aagcccugacuaugaagacaua

SEQ ID NO: 715261 - RNA, 20 nt, Human
cagaaagaagguagauuuuu

SEQ ID NO: 715262 - RNA, 21 nt, Human
aggggacagaguagcuccagg

SEQ ID NO: 715263 - RNA, 22 nt, Human
uggaggcaacugaagauguagu

SEQ ID NO: 715264 - RNA, 22 nt, Human
cccugcagugugaccucaccua

SEQ ID NO: 715265 - RNA, 22 nt, Human
gaucugaaucaauagaauaacu

SEQ ID NO: 715266 - RNA, 22 nt, Human
ggacagcauucuacuguaggca

SEQ ID NO: 715267 - RNA, 22 nt, Human
cuucaagucgccaaaugcugaa

SEQ ID NO: 715268 - RNA, 22 nt, Human
gacaggugcuaagggaccuggc

SEQ ID NO: 715269 - RNA, 22 nt, Human
acaaggcaguacaaugaugaca

SEQ ID NO: 715270 - RNA, 22 nt, Human
agagacaaugccaaugcacacg

SEQ ID NO: 715271 - RNA, 23 nt, Human
gaaguucuuucuucucaugcugu

SEQ ID NO: 715272 - RNA, 22 nt, Human
cuggagcagguuuaggaguccc

SEQ ID NO: 715273 - RNA, 22 nt, Human
uaaauucacuccugguagaccu

SEQ ID NO: 715274 - RNA, 22 nt, Human
ugcuugaaagggguuucccagu

SEQ ID NO: 715275 - RNA, 22 nt, Human
uuugcaaaugcucugcagagcu

SEQ ID NO: 715276 - RNA, 22 nt, Human
cagagagagucugucccugaag

SEQ ID NO: 715277 - RNA, 22 nt, Human
ucagguccaagauggccaucca

SEQ ID NO: 715278 - RNA, 22 nt, Human
gacaaggcaaccagggaggcuu

SEQ ID NO: 715279 - RNA, 22 nt, Human
acaguuuuuucaacauuggaau

SEQ ID NO: 715280 - RNA, 22 nt, Human
uauugcugaggauugaggcuug

SEQ ID NO: 715281 - RNA, 19 nt, Human
uuugcagugguuccuuugu

SEQ ID NO: 715282 - RNA, 21 nt, Human
uccugcagaaugccuuccuac

SEQ ID NO: 715283 - RNA, 21 nt, Human
aaucaagaguacugguguggc

SEQ ID NO: 715284 - RNA, 22 nt, Human
uaccagcaaugcuagucaacuc

SEQ ID NO: 715285 - RNA, 22 nt, Human
gcagagccaugggagguuuuug

SEQ ID NO: 715286 - RNA, 22 nt, Human
ggcugcaggaacgacggagggg

SEQ ID NO: 715287 - RNA, 22 nt, Human
gagugcuggggugcagagaggu

SEQ ID NO: 715288 - RNA, 22 nt, Human
agacaacaccaaaugcuagugu

SEQ ID NO: 715289 - RNA, 22 nt, Human
uguuaucacuuagacaugcuag

SEQ ID NO: 715290 - RNA, 22 nt, Human
gaggccacagcuaucagggaca

SEQ ID NO: 715291 - RNA, 22 nt, Human
ugggccuguuucccuucagggc

SEQ ID NO: 715292 - RNA, 22 nt, Human
uguaaauggucagauaaaccua

SEQ ID NO: 715293 - RNA, 22 nt, Human
cugggucuggugucaggcgacg

SEQ ID NO: 715294 - RNA, 22 nt, Human
ggcugcaguugugugaaggccg

SEQ ID NO: 715295 - RNA, 20 nt, Human
aguguuugcucacagucucc

SEQ ID NO: 715296 - RNA, 22 nt, Human
gcagcaacgcggcccuacugcu

SEQ ID NO: 715297 - RNA, 22 nt, Human
ucuuuguacaggaaggcacugu

SEQ ID NO: 715298 - RNA, 21 nt, Human
uucugagcacucaucacuguc

SEQ ID NO: 715299 - RNA, 22 nt, Human
aaguccaguuuuuccagguggu

SEQ ID NO: 715300 - RNA, 22 nt, Human
gcuggcugcagauuuuagaggu

SEQ ID NO: 715301 - RNA, 22 nt, Human
auuccuugcacaucagauaguu

SEQ ID NO: 715302 - RNA, 22 nt, Human
uaggagacauugaucccaagaa

SEQ ID NO: 715303 - RNA, 22 nt, Human
ggaggagcacuucugagcucag

SEQ ID NO: 715304 - RNA, 22 nt, Human
caagaguuuaaaucaauggcca

SEQ ID NO: 715305 - RNA, 22 nt, Human
ccuccuggguucaagcgauucu

SEQ ID NO: 715306 - RNA, 22 nt, Human
uggccgggccgggcgccuccac

SEQ ID NO: 715307 - RNA, 22 nt, Human
agcugugugcauuugggucuca

SEQ ID NO: 715308 - RNA, 22 nt, Human
gcuggagcuugagaggacaggg

SEQ ID NO: 715309 - RNA, 22 nt, Human
ccugaguggagggauucugcag

SEQ ID NO: 715310 - RNA, 22 nt, Human
ugggcuguggagcaccuuugca

SEQ ID NO: 715311 - RNA, 22 nt, Human
uuagucuucuuccuuauauguu

SEQ ID NO: 715312 - RNA, 22 nt, Human
ugcugccuggagccuuuuguuu

SEQ ID NO: 715313 - RNA, 22 nt, Human
cucagccugugaagagcagagg

SEQ ID NO: 715314 - RNA, 22 nt, Human
uagcagaggcuacugcuccuug

SEQ ID NO: 715315 - RNA, 22 nt, Human
cagaagcuuugcucauaaccau

SEQ ID NO: 715316 - RNA, 22 nt, Human
cagggcccaagacacaaugagg

SEQ ID NO: 715317 - RNA, 22 nt, Human
gaccuggguaaggggcugacaa

SEQ ID NO: 715318 - RNA, 22 nt, Human
agaacucucgcuggaucagacu

SEQ ID NO: 715319 - RNA, 22 nt, Human
aaugucuuuaaagugcaauaga

SEQ ID NO: 715320 - RNA, 22 nt, Human
ccagaugguuugcaugggaggg

SEQ ID NO: 715321 - RNA, 22 nt, Human
agugcucacucuccacagugcc

SEQ ID NO: 715322 - RNA, 22 nt, Human
aggcagggcugggauuagacuc

SEQ ID NO: 715323 - RNA, 22 nt, Human
aaaggcauggaacagauucucc

SEQ ID NO: 715324 - RNA, 22 nt, Human
uaagauaauaaguaugucuaug

SEQ ID NO: 715325 - RNA, 22 nt, Human
uggaccccagacaagccagggu

SEQ ID NO: 715326 - RNA, 22 nt, Human
gucaugccagcggagcucggga

SEQ ID NO: 715327 - RNA, 22 nt, Human
uaucugcaucugcauguguauu

SEQ ID NO: 715328 - RNA, 22 nt, Human
uccaugucuucaugugucuaac

SEQ ID NO: 715329 - RNA, 22 nt, Human
ugcccucugccuccucugcaga

SEQ ID NO: 715330 - RNA, 20 nt, Human
cucaguaaaagcacaggguc

SEQ ID NO: 715331 - RNA, 22 nt, Human
agcugcucuuugaaggacacuu

SEQ ID NO: 715332 - RNA, 22 nt, Human
gcugcuguguuggagagggacu

SEQ ID NO: 715333 - RNA, 18 nt, Human
ggcagugcagucucaggg

SEQ ID NO: 715334 - RNA, 22 nt, Human
aaguggcauguauaagaaagaa

SEQ ID NO: 715335 - RNA, 22 nt, Human
cugacauuuacugagcacuuac

SEQ ID NO: 715336 - RNA, 21 nt, Human
auggaaauuggcaaaugcuac

SEQ ID NO: 715337 - RNA, 22 nt, Human
aaguguguauuguuuaugcugc

SEQ ID NO: 715338 - RNA, 22 nt, Human
cuguggggccaaauucuccucu

SEQ ID NO: 715339 - RNA, 22 nt, Human
cagauuuaagagauaaacagug

SEQ ID NO: 715340 - RNA, 22 nt, Human
cuccaggcccacgucgaggagg

SEQ ID NO: 715341 - RNA, 22 nt, Human
ugcuucuagacacugcaauuga

SEQ ID NO: 715342 - RNA, 22 nt, Human
gagucaguaauggauaugucau

SEQ ID NO: 715343 - RNA, 22 nt, Human
uccugggcacaagugagucucc

SEQ ID NO: 715344 - RNA, 22 nt, Human
cagagcugcacauucuaugaug

SEQ ID NO: 715345 - RNA, 22 nt, Human
cagggugagugggaagcagcgu

SEQ ID NO: 715346 - RNA, 20 nt, Human
agacaguggggagcuccuag

SEQ ID NO: 715347 - RNA, 22 nt, Human
caacuuuagaccccaaguagcu

SEQ ID NO: 715348 - RNA, 22 nt, Human
caaagauaugacauggaaaaug

SEQ ID NO: 715349 - RNA, 22 nt, Human
aacacuuuccugccuuucugau

SEQ ID NO: 715350 - RNA, 22 nt, Human
cccagaggggucgucugagggg

SEQ ID NO: 715351 - RNA, 22 nt, Human
ugcccaaggauccauuggcugg

SEQ ID NO: 715352 - RNA, 22 nt, Human
uuguauaagaaguuggcagaua

SEQ ID NO: 715353 - RNA, 20 nt, Human
ucucgcacucggagcagccg

SEQ ID NO: 715354 - RNA, 22 nt, Human
cccugagucaucauugcggaag

SEQ ID NO: 715355 - RNA, 22 nt, Human
ccuggagcuuggucacgcugcg

SEQ ID NO: 715356 - RNA, 22 nt, Human
uucuauguggauauagaacugc

SEQ ID NO: 715357 - RNA, 22 nt, Human
aaguauuucagcgguucuuugu

SEQ ID NO: 715358 - RNA, 22 nt, Human
cuuuacagcuuagugguaugga

SEQ ID NO: 715359 - RNA, 22 nt, Human
uuucacaauuuuaaggagcaaa

SEQ ID NO: 715360 - RNA, 22 nt, Human
aacaccuucuccuugcaggcca

SEQ ID NO: 715361 - RNA, 22 nt, Human
aaugucaugggaauuuauucau

SEQ ID NO: 715362 - RNA, 22 nt, Human
ugcuuaauguacgugaguguac

SEQ ID NO: 715363 - RNA, 22 nt, Human
aagaaaugcugauguuggaugg

SEQ ID NO: 715364 - RNA, 19 nt, Human
aacuacagcgcacuguccu

SEQ ID NO: 715365 - RNA, 22 nt, Human
gggcagguuggcaucccgggca

SEQ ID NO: 715366 - RNA, 22 nt, Human
cagagcagccuccagggggagc

SEQ ID NO: 715367 - RNA, 22 nt, Human
ucagugcagaauagugaugcau

SEQ ID NO: 715368 - RNA, 22 nt, Human
auguguuuugguaauuucugcu

SEQ ID NO: 715369 - RNA, 23 nt, Human
agaccugcaucugauaggcccug

SEQ ID NO: 715370 - RNA, 22 nt, Human
ggaggggcauaguucaccauca

SEQ ID NO: 715371 - RNA, 22 nt, Human
caguaauaagcuggagggugug

SEQ ID NO: 715372 - RNA, 22 nt, Human
cgaggcaggcaggcggaggaua

SEQ ID NO: 715373 - RNA, 17 nt, Human
ggcuucagggagcuggg

SEQ ID NO: 715374 - RNA, 22 nt, Human
caucauuuuguauccaagggga

SEQ ID NO: 715375 - RNA, 22 nt, Human
gaaacguuggcauaaguuuaug

SEQ ID NO: 715376 - RNA, 22 nt, Human
ugaaaauuuccaucaguuauau

SEQ ID NO: 715377 - RNA, 22 nt, Human
aggauggaauuagguagcaagu

SEQ ID NO: 715378 - RNA, 18 nt, Human
aggacuccugggaguugg

SEQ ID NO: 715379 - RNA, 22 nt, Human
gaacuguguacauuguagauaa

SEQ ID NO: 715380 - RNA, 22 nt, Human
ggcccagcgaggccaccuacag

SEQ ID NO: 715381 - RNA, 22 nt, Human
agcuuccuacaaccaucucaga

SEQ ID NO: 715382 - RNA, 22 nt, Human
acagggcuggggcacuuggcug

SEQ ID NO: 715383 - RNA, 22 nt, Human
gcuccaggcagagccucuuucg

SEQ ID NO: 715384 - RNA, 22 nt, Human
aagaacuuuaaagcacuuauga

SEQ ID NO: 715385 - RNA, 22 nt, Human
ggacugggaaucagggagaugc

SEQ ID NO: 715386 - RNA, 22 nt, Human
cccauuuaaacacaagcuuuca

SEQ ID NO: 715387 - RNA, 22 nt, Human
cuccucagcugggaggaguccc

SEQ ID NO: 715388 - RNA, 22 nt, Human
ugcagaggcuggcucgccgggu

SEQ ID NO: 715389 - RNA, 18 nt, Human
auaaagugcuaauaaugg

SEQ ID NO: 715390 - RNA, 22 nt, Human
uuucucucagccuguagaaacu

SEQ ID NO: 715391 - RNA, 22 nt, Human
ucugccaggcauugugcugcuc

SEQ ID NO: 715392 - RNA, 22 nt, Human
uuugaaguggaaaaggauuuaa

SEQ ID NO: 715393 - RNA, 20 nt, Human
aggcccugugcaucuuguuu

SEQ ID NO: 715394 - RNA, 22 nt, Human
cggagaggugggggcagcaucu

SEQ ID NO: 715395 - RNA, 22 nt, Human
ggaaacacaugaucagacaucu

SEQ ID NO: 715396 - RNA, 21 nt, Human
ucccuugggaaacuuucuuga

SEQ ID NO: 715397 - RNA, 22 nt, Human
acauggcaggaaucauguguuu

SEQ ID NO: 715398 - RNA, 22 nt, Human
aaaaguauuuauggcuauguaa

SEQ ID NO: 715399 - RNA, 22 nt, Human
uuuaauugcauuuaaagaugga

SEQ ID NO: 715400 - RNA, 22 nt, Human
gcggagggcgagcccgcggagc

SEQ ID NO: 715401 - RNA, 22 nt, Human
uacauugagcacguacuaugug

SEQ ID NO: 715402 - RNA, 22 nt, Human
aaucaggagugugcacuuugau

SEQ ID NO: 715403 - RNA, 22 nt, Human
ugguggucauagcagaggccgu

SEQ ID NO: 715404 - RNA, 22 nt, Human
gaaaaagugaccuugguagcua

SEQ ID NO: 715405 - RNA, 22 nt, Human
aagacauuagaaucagccuguu

SEQ ID NO: 715406 - RNA, 22 nt, Human
ugcuuuauggagcccaucucau

SEQ ID NO: 715407 - RNA, 22 nt, Human
caggaagucuuugcccaggcca

SEQ ID NO: 715408 - RNA, 22 nt, Human
agcuggcacuagcguuuccaag

SEQ ID NO: 715409 - RNA, 22 nt, Human
aucacaauguacguuaaaaugu

SEQ ID NO: 715410 - RNA, 22 nt, Human
agccucuccagagccuggcaga

SEQ ID NO: 715411 - RNA, 22 nt, Human
cagcacuguucccagaccacug

SEQ ID NO: 715412 - RNA, 22 nt, Human
agcugagauuguuuccauuucu

SEQ ID NO: 715413 - RNA, 22 nt, Human
caggcagaggcuuuucauggcu

SEQ ID NO: 715414 - RNA, 22 nt, Human
auuuguagugaagugaaaauaa

SEQ ID NO: 715415 - RNA, 22 nt, Human
uugacuuuaaagcuuugucucu

SEQ ID NO: 715416 - RNA, 18 nt, Human
acaaaugugucacaggaa

SEQ ID NO: 715417 - RNA, 22 nt, Human
uguuuauugcagugcugggcug

SEQ ID NO: 715418 - RNA, 22 nt, Human
guaguguguaggcacugugcuc

SEQ ID NO: 715419 - RNA, 22 nt, Human
cuguuucagaacuucuuaaaaa

SEQ ID NO: 715420 - RNA, 22 nt, Human
uggcuggcaaggcuggagucag

SEQ ID NO: 715421 - RNA, 17 nt, Human
uagcugccccgaaugcu

SEQ ID NO: 715422 - RNA, 22 nt, Human
cccagcagauggcuaugugcua

SEQ ID NO: 715423 - RNA, 22 nt, Human
uggcuggcaguaggcuaguggc

SEQ ID NO: 715424 - RNA, 22 nt, Human
accugagaaugggggcaugugu

SEQ ID NO: 715425 - RNA, 22 nt, Human
gaggcugccccuuccucagcug

SEQ ID NO: 715426 - RNA, 22 nt, Human
auguagaccuuucuuugugauu

SEQ ID NO: 715427 - RNA, 22 nt, Human
aagcauggagcaauagaaugac

SEQ ID NO: 715428 - RNA, 20 nt, Human
gagauggacagaugaagggg

SEQ ID NO: 715429 - RNA, 22 nt, Human
uguuuacaagccacuuguuaag

SEQ ID NO: 715430 - RNA, 22 nt, Human
ugauuccacucugaggaucgua

SEQ ID NO: 715431 - RNA, 22 nt, Human
uguuucaugaaacauguuuagg

SEQ ID NO: 715432 - RNA, 22 nt, Human
ucccuaggagaauugccgcagc

SEQ ID NO: 715433 - RNA, 18 nt, Human
ggcugagguugacuagaa

SEQ ID NO: 715434 - RNA, 22 nt, Human
acuugucuuuguaaaauagaaa

SEQ ID NO: 715435 - RNA, 22 nt, Human
ccacauuucuucacuuguccca

SEQ ID NO: 715436 - RNA, 22 nt, Human
uauuauggggggaacaucacuc

SEQ ID NO: 715437 - RNA, 22 nt, Human
uccuucaguuaaagaucucaca

SEQ ID NO: 715438 - RNA, 22 nt, Human
cuuuggauuuuuaucaggcaau

SEQ ID NO: 715439 - RNA, 22 nt, Human
aagaaacaaccacugcucuccu

SEQ ID NO: 715440 - RNA, 18 nt, Human
gucacuguguuucugagc

SEQ ID NO: 715441 - RNA, 22 nt, Human
aggcuggagugcaguggcguga

SEQ ID NO: 715442 - RNA, 22 nt, Human
agggagaacaguugcagcagac

SEQ ID NO: 715443 - RNA, 22 nt, Human
ggaggcuccaugagcuccugca

SEQ ID NO: 715444 - RNA, 22 nt, Human
acucacaagugaugugaauggc

SEQ ID NO: 715445 - RNA, 22 nt, Human
uuccuggggcuccagcuaccag

SEQ ID NO: 715446 - RNA, 22 nt, Human
uccugagagucaagaaugcagg

SEQ ID NO: 715447 - RNA, 22 nt, Human
acagaugaggaaacagggucag

SEQ ID NO: 715448 - RNA, 19 nt, Human
ccuguguugggagugugag

SEQ ID NO: 715449 - RNA, 22 nt, Human
auggcaguggaaugggaugagu

SEQ ID NO: 715450 - RNA, 22 nt, Human
cuggccaggcuugggacagaca

SEQ ID NO: 715451 - RNA, 22 nt, Human
uaagcaaugagauaaucauggg

SEQ ID NO: 715452 - RNA, 22 nt, Human
ugcugggccuuuaccuccaggg

SEQ ID NO: 715453 - RNA, 22 nt, Human
gcucccacaaccuucuugcucc

SEQ ID NO: 715454 - RNA, 22 nt, Human
ggccaaggcucuugagggcuga

SEQ ID NO: 715455 - RNA, 22 nt, Human
uacaaaggcagguuucccagga

SEQ ID NO: 715456 - RNA, 22 nt, Human
uuucaaacauuccugggagacu

SEQ ID NO: 715457 - RNA, 22 nt, Human
aguccggggucuggacaccugg

SEQ ID NO: 715458 - RNA, 22 nt, Human
cugaguucuaggcugccaccuu

SEQ ID NO: 715459 - RNA, 22 nt, Human
aaagucuuaauguaaguuuagu

SEQ ID NO: 715460 - RNA, 20 nt, Human
cuugccaguucccuggcaga

SEQ ID NO: 715461 - RNA, 20 nt, Human
uuuacauuuugaaacaguga

SEQ ID NO: 715462 - RNA, 22 nt, Human
caucucauccugcccuaaaaca

SEQ ID NO: 715463 - RNA, 22 nt, Human
cugcaccauccuucaugcucug

SEQ ID NO: 715464 - RNA, 20 nt, Human
ugcaggcuucgcucuaggag

SEQ ID NO: 715465 - RNA, 22 nt, Human
cugcagggagcagauggcgugu

SEQ ID NO: 715466 - RNA, 22 nt, Human
ugggaagaggcgggaggcuguu

SEQ ID NO: 715467 - RNA, 22 nt, Human
gcaggccuaagagaaggcauug

SEQ ID NO: 715468 - RNA, 22 nt, Human
caggcagcucugcuuuuccuaa

SEQ ID NO: 715469 - RNA, 22 nt, Human
auuugcagaagggagggggacc

SEQ ID NO: 715470 - RNA, 22 nt, Human
agaaauagucacauuggaggaa

SEQ ID NO: 715471 - RNA, 22 nt, Human
acagagacugggagcaagaggc

SEQ ID NO: 715472 - RNA, 22 nt, Human
gcugaggaggugugguuaggug

SEQ ID NO: 715473 - RNA, 22 nt, Human
uguacaauguggccaguguuaa

SEQ ID NO: 715474 - RNA, 22 nt, Human
cugaagcuugauaaacuauaaa

SEQ ID NO: 715475 - RNA, 22 nt, Human
uguuuugucuaaucuaaauucu

SEQ ID NO: 715476 - RNA, 22 nt, Human
ccugagaauaauucuccauagc

SEQ ID NO: 715477 - RNA, 22 nt, Human
uuggaucauggaaugucugcuu

SEQ ID NO: 715478 - RNA, 22 nt, Human
guuucucuguaccucuguccca

SEQ ID NO: 715479 - RNA, 22 nt, Human
aaggggaaaaaguguuaggagu

SEQ ID NO: 715480 - RNA, 22 nt, Human
ugguuaaaaugcagauucagua

SEQ ID NO: 715481 - RNA, 22 nt, Human
acaguacagugcagaggaagau

SEQ ID NO: 715482 - RNA, 22 nt, Human
ccagggccaagagaccucgagg

SEQ ID NO: 715483 - RNA, 22 nt, Human
auuuucucuuuguauaugcuag

SEQ ID NO: 715484 - RNA, 22 nt, Human
uggcucucuuguaagguaguag

SEQ ID NO: 715485 - RNA, 19 nt, Human
ggccagcugucuccugcua

SEQ ID NO: 715486 - RNA, 22 nt, Human
uugaugaguuauccauuugacu

SEQ ID NO: 715487 - RNA, 22 nt, Human
gugugaaaaugugcacaauaug

SEQ ID NO: 715488 - RNA, 22 nt, Human
aauugagugcagccagcccagu

SEQ ID NO: 715489 - RNA, 22 nt, Human
agugacugggcagggcagggcc

SEQ ID NO: 715490 - RNA, 22 nt, Human
uacauuauuucaucagucaucu

SEQ ID NO: 715491 - RNA, 22 nt, Human
cuggcugaggcagagccugggg

SEQ ID NO: 715492 - RNA, 21 nt, Human
uauuucuuugacucucucccu

SEQ ID NO: 715493 - RNA, 22 nt, Human
ucaccaggcaacuauguacucc

SEQ ID NO: 715494 - RNA, 22 nt, Human
guuaaaugcagauucugacuca

SEQ ID NO: 715495 - RNA, 22 nt, Human
gggcagugggaccaggcaccag

SEQ ID NO: 715496 - RNA, 22 nt, Human
guacaaaugaaaauagaccacu

SEQ ID NO: 715497 - RNA, 22 nt, Human
uuuagcaauaucauaaggaaga

SEQ ID NO: 715498 - RNA, 22 nt, Human
acagaguaucuaucaggaguau

SEQ ID NO: 715499 - RNA, 22 nt, Human
ucaggcagaguggaagcugcaa

SEQ ID NO: 715500 - RNA, 22 nt, Human
gccaccugccaacuugcuggaa

SEQ ID NO: 715501 - RNA, 22 nt, Human
aacagauaauuucuaaguuacu

SEQ ID NO: 715502 - RNA, 22 nt, Human
cacagcauucacagaaagacau

SEQ ID NO: 715503 - RNA, 22 nt, Human
aaaggcagugugauacuguggu

SEQ ID NO: 715504 - RNA, 22 nt, Human
guugaauaucguguucuuguuu

SEQ ID NO: 715505 - RNA, 22 nt, Human
uugccaggagacaaagugggcc

SEQ ID NO: 715506 - RNA, 22 nt, Human
gcccaggccggagagcagugcu

SEQ ID NO: 715507 - RNA, 22 nt, Human
agggccagcugaugagaaugag

SEQ ID NO: 715508 - RNA, 22 nt, Human
acccaugaguguaucuuuaaaa

SEQ ID NO: 715509 - RNA, 20 nt, Human
aagggcagagggaacagacu

SEQ ID NO: 715510 - RNA, 19 nt, Human
ucagaacucagaaugugua

SEQ ID NO: 715511 - RNA, 22 nt, Human
uaauuuuacuuccugagcaccu

SEQ ID NO: 715512 - RNA, 21 nt, Human
ggcugcuggggguuggcacag

SEQ ID NO: 715513 - RNA, 22 nt, Human
ggaggggagucucccaaagccg

SEQ ID NO: 715514 - RNA, 22 nt, Human
uugaagcagcucaggaggcuua

SEQ ID NO: 715515 - RNA, 22 nt, Human
ccuaggcccauuaauuccccuu

SEQ ID NO: 715516 - RNA, 22 nt, Human
acaauguuuuuguucaaagagu

SEQ ID NO: 715517 - RNA, 20 nt, Human
accuggagagauuauuacca

SEQ ID NO: 715518 - RNA, 15 nt, Human
gccccaggaaucaaa

SEQ ID NO: 715519 - RNA, 22 nt, Human
agugcccugggccuuccaggac

SEQ ID NO: 715520 - RNA, 22 nt, Human
uggcugcugcuuggucuucuuc

SEQ ID NO: 715521 - RNA, 23 nt, Human
uaggggcuggcguggagccugcg

SEQ ID NO: 715522 - RNA, 22 nt, Human
ugcccuggcucuccacuaguuu

SEQ ID NO: 715523 - RNA, 22 nt, Human
agcuucuugggcuuuacacaaa

SEQ ID NO: 715524 - RNA, 22 nt, Human
uauggguaggguuugauaagau

SEQ ID NO: 715525 - RNA, 22 nt, Human
uggcccugucugcacacaggau

SEQ ID NO: 715526 - RNA, 22 nt, Human
gcugaagcugacacauagugcu

SEQ ID NO: 715527 - RNA, 22 nt, Human
acagagagaauuggguuuacag

SEQ ID NO: 715528 - RNA, 22 nt, Human
ggcucucuccuuggcuuucaga

SEQ ID NO: 715529 - RNA, 22 nt, Human
agagcuggagcagccccacugg

SEQ ID NO: 715530 - RNA, 22 nt, Human
auauucuggguuagauauguuu

SEQ ID NO: 715531 - RNA, 22 nt, Human
uccaggagucuagccucaggcc

SEQ ID NO: 715532 - RNA, 22 nt, Human
ggguggccuuaggcaagucacu

SEQ ID NO: 715533 - RNA, 22 nt, Human
uuucauaauacuguacaugaaa

SEQ ID NO: 715534 - RNA, 22 nt, Human
ggagaggauguuuuaguaacuu

SEQ ID NO: 715535 - RNA, 22 nt, Human
cagagaacuccaguggcuggcg

SEQ ID NO: 715536 - RNA, 22 nt, Human
ugcugccuaacagaacucuuuc

SEQ ID NO: 715537 - RNA, 22 nt, Human
caagggaagaggacagggaccu

SEQ ID NO: 715538 - RNA, 22 nt, Human
cccuggagggauuucucaauca

SEQ ID NO: 715539 - RNA, 22 nt, Human
gcuggagguuucaccugaguuu

SEQ ID NO: 715540 - RNA, 22 nt, Human
gaauuacaaagugagacaagcu

SEQ ID NO: 715541 - RNA, 22 nt, Human
caggguuucaccauguuagcag

SEQ ID NO: 715542 - RNA, 22 nt, Human
agaggccagaaggcgcaccccg

SEQ ID NO: 715543 - RNA, 22 nt, Human
cuggccuggagccucugggugg

SEQ ID NO: 715544 - RNA, 22 nt, Human
acagagaccaguuacagcgucc

SEQ ID NO: 715545 - RNA, 22 nt, Human
ugucuccaacucacuguauacu

SEQ ID NO: 715546 - RNA, 22 nt, Human
caaauucaaauuucaucagugu

SEQ ID NO: 715547 - RNA, 22 nt, Human
auaaaaguuuccaaucaugccu

SEQ ID NO: 715548 - RNA, 22 nt, Human
ggaagaggcugguagugcccgu

SEQ ID NO: 715549 - RNA, 22 nt, Human
aaaugccucauuuucucucacu

SEQ ID NO: 715550 - RNA, 22 nt, Human
gcucuggauccggcugggucug

SEQ ID NO: 715551 - RNA, 22 nt, Human
caggcucccuaagucagcagcc

SEQ ID NO: 715552 - RNA, 22 nt, Human
uuccuuccugucuuccuuacug

SEQ ID NO: 715553 - RNA, 22 nt, Human
ggccagcucuuguccacggagg

SEQ ID NO: 715554 - RNA, 22 nt, Human
ggucagagcuggagagauaggg

SEQ ID NO: 715555 - RNA, 22 nt, Human
ggguuaaagagcccaauguaug

SEQ ID NO: 715556 - RNA, 22 nt, Human
acaggcugcugggcuccgugcu

SEQ ID NO: 715557 - RNA, 22 nt, Human
acacauguauaugcuugugugu

SEQ ID NO: 715558 - RNA, 22 nt, Human
uuuacagaugaggauacugagg

SEQ ID NO: 715559 - RNA, 22 nt, Human
aggcagagaaaaaccagauaug

SEQ ID NO: 715560 - RNA, 22 nt, Human
acagaugaggcuggcgagggca

SEQ ID NO: 715561 - RNA, 22 nt, Human
ugcagagaaaguguagacaggc

SEQ ID NO: 715562 - RNA, 22 nt, Human
cacugagagaugugucacagca

SEQ ID NO: 715563 - RNA, 22 nt, Human
cuucacaaagcucucuuuaugu

SEQ ID NO: 715564 - RNA, 19 nt, Human
gguuaauguuaggauacuu

SEQ ID NO: 715565 - RNA, 21 nt, Human
ucuggcaggcacgggcccagc

SEQ ID NO: 715566 - RNA, 20 nt, Human
uccaagggcagcagaaucag

SEQ ID NO: 715567 - RNA, 22 nt, Human
auauggcuguugguagccaaca

SEQ ID NO: 715568 - RNA, 22 nt, Human
aggccaagcucccagagaagcu

SEQ ID NO: 715569 - RNA, 22 nt, Human
acucuuuaacagacuuugaucu

SEQ ID NO: 715570 - RNA, 22 nt, Human
uaacaucuuauuggcaaagaua

SEQ ID NO: 715571 - RNA, 22 nt, Human
auuuguauauuuaagaggguag

SEQ ID NO: 715572 - RNA, 22 nt, Human
agcaucuggauggaaagcaagg

SEQ ID NO: 715573 - RNA, 20 nt, Human
ggcaggugcuguccccuccu

SEQ ID NO: 715574 - RNA, 22 nt, Human
uacaagcugacccugaagauga

SEQ ID NO: 715575 - RNA, 22 nt, Human
ucuagcagggaaagcagagaau

SEQ ID NO: 715576 - RNA, 22 nt, Human
uuucacagauauaagauuucac

SEQ ID NO: 715577 - RNA, 22 nt, Human
uacagagaacucauagaaagaa

SEQ ID NO: 715578 - RNA, 22 nt, Human
aggugggguucagucucagccg

SEQ ID NO: 715579 - RNA, 22 nt, Human
aggaggaaagaaggcccccagc

SEQ ID NO: 715580 - RNA, 22 nt, Human
ugccucagaguugucccuacca

SEQ ID NO: 715581 - RNA, 22 nt, Human
ucagagguaagggcugagagga

SEQ ID NO: 715582 - RNA, 22 nt, Human
agggaggaaggauguuccaaag

SEQ ID NO: 715583 - RNA, 22 nt, Human
cucugcccgugccuuucccagu

SEQ ID NO: 715584 - RNA, 22 nt, Human
gaaaauguuuccuguuauuugc

SEQ ID NO: 715585 - RNA, 22 nt, Human
uagauuaacaguuuuguugaag

SEQ ID NO: 715586 - RNA, 22 nt, Human
cauuacagaauauguaaugauc

SEQ ID NO: 715587 - RNA, 22 nt, Human
uugaagcauuugcuauagcauu

SEQ ID NO: 715588 - RNA, 22 nt, Human
aaaguacaauauugagauugau

SEQ ID NO: 715589 - RNA, 22 nt, Human
auugaaaaugacauuugugccc

SEQ ID NO: 715590 - RNA, 22 nt, Human
auguggggacaaaaugauggcc

SEQ ID NO: 715591 - RNA, 22 nt, Human
agggcuagaguugagaugggga

SEQ ID NO: 715592 - RNA, 22 nt, Human
ugguccuugcuauagagugaua

SEQ ID NO: 715593 - RNA, 22 nt, Human
ucucagagaacaguuggugcuu

SEQ ID NO: 715594 - RNA, 22 nt, Human
accccaggucaucugagagucc

SEQ ID NO: 715595 - RNA, 22 nt, Human
agggcagccauugagggauucu

SEQ ID NO: 715596 - RNA, 22 nt, Human
acugaggucuaucaugagccag

SEQ ID NO: 715597 - RNA, 22 nt, Human
ucuccagggacugaggcuggag

SEQ ID NO: 715598 - RNA, 22 nt, Human
uucacagugcugcaccuggcuu

SEQ ID NO: 715599 - RNA, 22 nt, Human
ugcuucuguucuuucaccuacg

SEQ ID NO: 715600 - RNA, 17 nt, Human
aacugcuuuuuuuagcc

SEQ ID NO: 715601 - RNA, 22 nt, Human
ucugcaggccucgacaaggcca

SEQ ID NO: 715602 - RNA, 22 nt, Human
aaugcugcaagaggugaaaaga

SEQ ID NO: 715603 - RNA, 22 nt, Human
uagaguguccaacacauaggag

SEQ ID NO: 715604 - RNA, 19 nt, Human
aaagugaaugcuguuuucu

SEQ ID NO: 715605 - RNA, 22 nt, Human
uauaggaaauuuaucuccuggg

SEQ ID NO: 715606 - RNA, 22 nt, Human
ggucacaugagaugcugcccuc

SEQ ID NO: 715607 - RNA, 22 nt, Human
gauaaauuaucagggguuuaaa

SEQ ID NO: 715608 - RNA, 22 nt, Human
ucucugguggcuccaucaguag

SEQ ID NO: 715609 - RNA, 22 nt, Human
aggaaaaucgagucuggaggca

SEQ ID NO: 715610 - RNA, 22 nt, Human
ucacacaugcuaagccagagau

SEQ ID NO: 715611 - RNA, 22 nt, Human
gugcauuuaggucacaugaugu

SEQ ID NO: 715612 - RNA, 22 nt, Human
cuguuggaugugacacuguuag

SEQ ID NO: 715613 - RNA, 19 nt, Human
ggcuggcaagugacagugu

SEQ ID NO: 715614 - RNA, 22 nt, Human
cucuguacaggagacaucucua

SEQ ID NO: 715615 - RNA, 22 nt, Human
gcaguggcuaggagucuggcgu

SEQ ID NO: 715616 - RNA, 22 nt, Human
agugaugugggagaguauagcu

SEQ ID NO: 715617 - RNA, 22 nt, Human
uauggguaagaucuuuuguauu

SEQ ID NO: 715618 - RNA, 22 nt, Human
cugucccagauguucucagcac

SEQ ID NO: 715619 - RNA, 22 nt, Human
auuacaguaaaugcuacaggca

SEQ ID NO: 715620 - RNA, 21 nt, Human
agcauucaaaagaugccauaa

SEQ ID NO: 715621 - RNA, 22 nt, Human
agcguguggagaacuaagcaga

SEQ ID NO: 715622 - RNA, 22 nt, Human
gaucuguuugccuagagauuua

SEQ ID NO: 715623 - RNA, 23 nt, Human
aaaggcacagcauugucuagcag

SEQ ID NO: 715624 - RNA, 22 nt, Human
ggcuaggcgggcacauggugga

SEQ ID NO: 715625 - RNA, 22 nt, Human
cagggccauuggcguggcuguc

SEQ ID NO: 715626 - RNA, 22 nt, Human
gacaucauagggugggaggaaa

SEQ ID NO: 715627 - RNA, 22 nt, Human
uagcccaugaugguggaaggca

SEQ ID NO: 715628 - RNA, 22 nt, Human
cacagcuucuccuugauaucgc

SEQ ID NO: 715629 - RNA, 22 nt, Human
cuuccagaguugcguucucggu

SEQ ID NO: 715630 - RNA, 22 nt, Human
uuucuuuuccaauaucccuacu

SEQ ID NO: 715631 - RNA, 22 nt, Human
uuucucccuuuauaagacugua

SEQ ID NO: 715632 - RNA, 22 nt, Human
agcacuauuccaaugauccaau

SEQ ID NO: 715633 - RNA, 22 nt, Human
ucagcuuuccuugcuuuagauu

SEQ ID NO: 715634 - RNA, 22 nt, Human
aguaaagcauugucuucagagu

SEQ ID NO: 715635 - RNA, 22 nt, Human
ucacugaagacugggcucuaaa

SEQ ID NO: 715636 - RNA, 22 nt, Human
guccaggcugaccccuagagga

SEQ ID NO: 715637 - RNA, 22 nt, Human
uuagcuuuagagccauuacugg

SEQ ID NO: 715638 - RNA, 22 nt, Human
agggccccaguaagauuacaug

SEQ ID NO: 715639 - RNA, 23 nt, Human
ucuguacaauugagaagagaaca

SEQ ID NO: 715640 - RNA, 22 nt, Human
acuuccugggcaugcagagucc

SEQ ID NO: 715641 - RNA, 22 nt, Human
acucagcucaggagcuggcugg

SEQ ID NO: 715642 - RNA, 22 nt, Human
gugcauuauucuuaccuuucuu

SEQ ID NO: 715643 - RNA, 22 nt, Human
aauguaaagcucaggucaggag

SEQ ID NO: 715644 - RNA, 22 nt, Human
gggucaggccucaaggugggcu

SEQ ID NO: 715645 - RNA, 22 nt, Human
aagauguugcauuagaauaccu

SEQ ID NO: 715646 - RNA, 22 nt, Human
gagguggcuccaggagcaaugc

SEQ ID NO: 715647 - RNA, 22 nt, Human
aagcagcuucccuggcuccugg

SEQ ID NO: 715648 - RNA, 22 nt, Human
auuucagacuguguuggaaaau

SEQ ID NO: 715649 - RNA, 22 nt, Human
agacauuuuacauucuuccauu

SEQ ID NO: 715650 - RNA, 22 nt, Human
uccuguccacagcccugaccuc

SEQ ID NO: 715651 - RNA, 22 nt, Human
aaaagaugaaauggugucuugg

SEQ ID NO: 715652 - RNA, 22 nt, Human
cagcacuucagcauucagauuu

SEQ ID NO: 715653 - RNA, 17 nt, Human
cgugagcagcaggugcc

SEQ ID NO: 715654 - RNA, 22 nt, Human
ucauucuuuaccaaguugucac

SEQ ID NO: 715655 - RNA, 22 nt, Human
uaaagcaauuacucaguggcuu

SEQ ID NO: 715656 - RNA, 22 nt, Human
cagcaggcccagaguuucaugg

SEQ ID NO: 715657 - RNA, 22 nt, Human
cccaggcuggcacugcugaagu

SEQ ID NO: 715658 - RNA, 22 nt, Human
cccuugggcuuccacccagccc

SEQ ID NO: 715659 - RNA, 22 nt, Human
agggaugguggagguugcaagu

SEQ ID NO: 715660 - RNA, 22 nt, Human
agagccuggucugagauaggac

SEQ ID NO: 715661 - RNA, 22 nt, Human
gacagggaggagcagagcuucu

SEQ ID NO: 715662 - RNA, 22 nt, Human
cuaaaguccuuaucaaguguaa

SEQ ID NO: 715663 - RNA, 22 nt, Human
cuggcagcuuauuagaaaugca

SEQ ID NO: 715664 - RNA, 22 nt, Human
uacagagagcuccggacauuca

SEQ ID NO: 715665 - RNA, 22 nt, Human
caggcugccaaggcuggggagg

SEQ ID NO: 715666 - RNA, 22 nt, Human
agcagcaauaauaaaguaauac

SEQ ID NO: 715667 - RNA, 22 nt, Human
ugcauuugaguugggagcaggc

SEQ ID NO: 715668 - RNA, 22 nt, Human
augugaaauauuaagccgagga

SEQ ID NO: 715669 - RNA, 22 nt, Human
uccagagccugcgcacuggcug

SEQ ID NO: 715670 - RNA, 22 nt, Human
cauccagggcagccauggccug

SEQ ID NO: 715671 - RNA, 22 nt, Human
cacaagcuccuuauguggagaa

SEQ ID NO: 715672 - RNA, 22 nt, Human
gcagauggcugagccugcagau

SEQ ID NO: 715673 - RNA, 22 nt, Human
ccuucucuaccaugugaggaaa

SEQ ID NO: 715674 - RNA, 22 nt, Human
agcagggcucuguggagggugg

SEQ ID NO: 715675 - RNA, 22 nt, Human
ggggagaauuaccaaaagcgcu

SEQ ID NO: 715676 - RNA, 22 nt, Human
gauuggagaguggaacaugcug

SEQ ID NO: 715677 - RNA, 22 nt, Human
ugcaugcacguaucugcgugug

SEQ ID NO: 715678 - RNA, 22 nt, Human
cugugagaugaccaacugacug

SEQ ID NO: 715679 - RNA, 22 nt, Human
ucucaggaaauaggauuugagu

SEQ ID NO: 715680 - RNA, 22 nt, Human
cagugccugugggcuucuucca

SEQ ID NO: 715681 - RNA, 22 nt, Human
ccauaaucguguguuaaauaau

SEQ ID NO: 715682 - RNA, 22 nt, Human
gugcucacugugagacguccug

SEQ ID NO: 715683 - RNA, 22 nt, Human
cauuuacauuuaagguuaauau

SEQ ID NO: 715684 - RNA, 22 nt, Human
uucucccugguauuuacuuagu

SEQ ID NO: 715685 - RNA, 22 nt, Human
ugcccuggcauuggguuggaua

SEQ ID NO: 715686 - RNA, 22 nt, Human
uuaugaaguuccuguuacagug

SEQ ID NO: 715687 - RNA, 22 nt, Human
acucauguaagcggaauguagu

SEQ ID NO: 715688 - RNA, 22 nt, Human
ucaguugccaguauuuuauaua

SEQ ID NO: 715689 - RNA, 22 nt, Human
ugucagcaguaucucuaucuca

SEQ ID NO: 715690 - RNA, 22 nt, Human
uugacagcaaagauugugccua

SEQ ID NO: 715691 - RNA, 22 nt, Human
acccagagucagacagccaugg

SEQ ID NO: 715692 - RNA, 23 nt, Human
ugagaagccgccgggcagccugg

SEQ ID NO: 715693 - RNA, 22 nt, Human
uauguacucaucaacuauugaa

SEQ ID NO: 715694 - RNA, 23 nt, Human
cagaugagguuggcagcaugguc

SEQ ID NO: 715695 - RNA, 22 nt, Human
guucacaggguuaggaaucacu

SEQ ID NO: 715696 - RNA, 22 nt, Human
ugucuuuuggagcaucuuucuu

SEQ ID NO: 715697 - RNA, 22 nt, Human
uuugaacaagagcuucacauua

SEQ ID NO: 715698 - RNA, 22 nt, Human
gagauuuauugacuuaacagua

SEQ ID NO: 715699 - RNA, 17 nt, Human
gguggccugcaguggcu

SEQ ID NO: 715700 - RNA, 22 nt, Human
cagauuuaccuaacuccaaguu

SEQ ID NO: 715701 - RNA, 23 nt, Human
ggagcugcuguugggggagcugc

SEQ ID NO: 715702 - RNA, 22 nt, Human
agcagcuggaacauaugaagaa

SEQ ID NO: 715703 - RNA, 22 nt, Human
agaaagaggaugcagaucucau

SEQ ID NO: 715704 - RNA, 22 nt, Human
cugggcugcuguccacuagggu

SEQ ID NO: 715705 - RNA, 22 nt, Human
gagagguggugaggacuugucu

SEQ ID NO: 715706 - RNA, 22 nt, Human
ucagaagcauguggggagccug

SEQ ID NO: 715707 - RNA, 22 nt, Human
ggagggcucccugggaguggau

SEQ ID NO: 715708 - RNA, 22 nt, Human
agaaguuauccaccuuagaugc

SEQ ID NO: 715709 - RNA, 22 nt, Human
cagugggagcaaauacacucau

SEQ ID NO: 715710 - RNA, 22 nt, Human
ggaguagcugcauuccgagcac

SEQ ID NO: 715711 - RNA, 22 nt, Human
ccuguggcuuccacgaccuaau

SEQ ID NO: 715712 - RNA, 22 nt, Human
uacauguauugauuucucuucu

SEQ ID NO: 715713 - RNA, 22 nt, Human
cuucuguguuuuacuauaugua

SEQ ID NO: 715714 - RNA, 22 nt, Human
uuuaauguuugagucaguauau

SEQ ID NO: 715715 - RNA, 23 nt, Human
auccuguuguaggcaguaauuag

SEQ ID NO: 715716 - RNA, 22 nt, Human
ugaacagucauuuagaaugugc

SEQ ID NO: 715717 - RNA, 22 nt, Human
auacggguuguuaaaaaaucau

SEQ ID NO: 715718 - RNA, 23 nt, Human
ccagggagguugauugguuaccc

SEQ ID NO: 715719 - RNA, 22 nt, Human
ucugucugagugguguuagagu

SEQ ID NO: 715720 - RNA, 22 nt, Human
aagauuacuacggaacaugacc

SEQ ID NO: 715721 - RNA, 22 nt, Human
uuuuucuugugcuggaucuaau

SEQ ID NO: 715722 - RNA, 22 nt, Human
uuaaaugacgggacuggguuuu

SEQ ID NO: 715723 - RNA, 22 nt, Human
gucccagggaugcagacaugag

SEQ ID NO: 715724 - RNA, 22 nt, Human
gcugggcaccucucccagauug

SEQ ID NO: 715725 - RNA, 22 nt, Human
aagccaaugauacgggugaucu

SEQ ID NO: 715726 - RNA, 22 nt, Human
uaaugucuagaucagaccucga

SEQ ID NO: 715727 - RNA, 23 nt, Human
uuuuaauuuggacauaagaagau

SEQ ID NO: 715728 - RNA, 22 nt, Human
aggauuugaaauauuuaguaaa

SEQ ID NO: 715729 - RNA, 22 nt, Human
aagucagaaauaucugccauca

SEQ ID NO: 715730 - RNA, 22 nt, Human
aucauacagccuuuguuagugu

SEQ ID NO: 715731 - RNA, 22 nt, Human
cugcugugugaccauggacagg

SEQ ID NO: 715732 - RNA, 22 nt, Human
acuaaauuugucaaugacacuu

SEQ ID NO: 715733 - RNA, 22 nt, Human
agcuggcaaggcaauuuggauu

SEQ ID NO: 715734 - RNA, 22 nt, Human
ugcaggcugcaccccugcccug

SEQ ID NO: 715735 - RNA, 22 nt, Human
agacuguuaauuucaauuaaaa

SEQ ID NO: 715736 - RNA, 22 nt, Human
ucucaggagccacagcgggagu

SEQ ID NO: 715737 - RNA, 21 nt, Human
ggccuuggcgggggccgaauu

SEQ ID NO: 715738 - RNA, 18 nt, Human
uacuguggaucagggguu

SEQ ID NO: 715739 - RNA, 22 nt, Human
uggcugccuuucaccucaucuc

SEQ ID NO: 715740 - RNA, 22 nt, Human
aaaugucuacuccuguguuuau

SEQ ID NO: 715741 - RNA, 23 nt, Human
gccaucugguauuuccugacuuc

SEQ ID NO: 715742 - RNA, 22 nt, Human
uucaugugaauauauuugucuu

SEQ ID NO: 715743 - RNA, 22 nt, Human
cggcagggcuccaugcauuucu

SEQ ID NO: 715744 - RNA, 19 nt, Human
ucuccaaaaccaaucacua

SEQ ID NO: 715745 - RNA, 22 nt, Human
acaauagaaauaauuaagcaca

SEQ ID NO: 715746 - RNA, 22 nt, Human
aggaaacuaauuaguagaauaa

SEQ ID NO: 715747 - RNA, 22 nt, Human
acugccaaugguaguuugaugg

SEQ ID NO: 715748 - RNA, 22 nt, Human
ggcggagguugcaguaagccga

SEQ ID NO: 715749 - RNA, 22 nt, Human
ucccagaacccugccagguccu

SEQ ID NO: 715750 - RNA, 22 nt, Human
auucaaguacaguuuucuucuu

SEQ ID NO: 715751 - RNA, 22 nt, Human
ugaaguuagaacuaugaggaua

SEQ ID NO: 715752 - RNA, 22 nt, Human
gcugugggccauggccaaguga

SEQ ID NO: 715753 - RNA, 22 nt, Human
caggagagauaugaguccccac

SEQ ID NO: 715754 - RNA, 21 nt, Human
uccuggccagggcacuaggca

SEQ ID NO: 715755 - RNA, 22 nt, Human
gauggguauuggcagaagaggg

SEQ ID NO: 715756 - RNA, 23 nt, Human
acaugggagggacauggaggcug

SEQ ID NO: 715757 - RNA, 16 nt, Human
cuacccagugagaagg

SEQ ID NO: 715758 - RNA, 22 nt, Human
aagcaauucacaguucacuuaa

SEQ ID NO: 715759 - RNA, 22 nt, Human
ccugggagccaagccucugugu

SEQ ID NO: 715760 - RNA, 22 nt, Human
uacagggacauggaacaggcuc

SEQ ID NO: 715761 - RNA, 22 nt, Human
uucagcaaauggacuguucagg

SEQ ID NO: 715762 - RNA, 22 nt, Human
uaguaucuuucuauauuuccca

SEQ ID NO: 715763 - RNA, 20 nt, Human
uccagcugggaacagcugau

SEQ ID NO: 715764 - RNA, 22 nt, Human
gccugcagccccucugcaguag

SEQ ID NO: 715765 - RNA, 22 nt, Human
gagcaggcuugcagagaagggg

SEQ ID NO: 715766 - RNA, 22 nt, Human
uuuaaugggauccaucugguua

SEQ ID NO: 715767 - RNA, 22 nt, Human
cauguauagcaaauauuuguuc

SEQ ID NO: 715768 - RNA, 22 nt, Human
cugcagcuuauuugcuguguga

SEQ ID NO: 715769 - RNA, 22 nt, Human
aggcagggaccaguuguuuucu

SEQ ID NO: 715770 - RNA, 20 nt, Human
gcugcuuucaaaugacacgu

SEQ ID NO: 715771 - RNA, 22 nt, Human
uguuuagacucaaaauugaaag

SEQ ID NO: 715772 - RNA, 22 nt, Human
uaaaacuuugaaggugcucagu

SEQ ID NO: 715773 - RNA, 22 nt, Human
uacaaguaaauuguagauacca

SEQ ID NO: 715774 - RNA, 23 nt, Human
agucaguguaaguuuggaaugca

SEQ ID NO: 715775 - RNA, 22 nt, Human
ggcaggggugaggccacucuga

SEQ ID NO: 715776 - RNA, 22 nt, Human
uccuggagaaacucagagaucu

SEQ ID NO: 715777 - RNA, 22 nt, Human
ggagaaggcgaagucauucuuu

SEQ ID NO: 715778 - RNA, 22 nt, Human
accagaagcuggagcacaagga

SEQ ID NO: 715779 - RNA, 22 nt, Human
gacauuggcuguucauugggau

SEQ ID NO: 715780 - RNA, 22 nt, Human
gggcagcaaaucugagucuggu

SEQ ID NO: 715781 - RNA, 22 nt, Human
aaguuuagggaagucugagcgc

SEQ ID NO: 715782 - RNA, 22 nt, Human
uuaugcauauagcagauacgag

SEQ ID NO: 715783 - RNA, 22 nt, Human
guuuuuccugcugacuuggguc

SEQ ID NO: 715784 - RNA, 22 nt, Human
uucugcauucaaauuaugugag

SEQ ID NO: 715785 - RNA, 20 nt, Human
ugauuuucugaaacagcaca

SEQ ID NO: 715786 - RNA, 23 nt, Human
ucucagugaaucucagaauucgc

SEQ ID NO: 715787 - RNA, 22 nt, Human
acacauuagugcucugucucau

SEQ ID NO: 715788 - RNA, 22 nt, Human
uccugcagaucaaagccuuuga

SEQ ID NO: 715789 - RNA, 22 nt, Human
uacaaaguauauuucuagcugu

SEQ ID NO: 715790 - RNA, 22 nt, Human
guccugagggcccaggcauucu

SEQ ID NO: 715791 - RNA, 22 nt, Human
uuacacguguguguaucuguau

SEQ ID NO: 715792 - RNA, 22 nt, Human
aggccugaaggaagaugagcug

SEQ ID NO: 715793 - RNA, 19 nt, Human
uuauucugucagagcacac

SEQ ID NO: 715794 - RNA, 22 nt, Human
agcagagugccccaucacaagg

SEQ ID NO: 715795 - RNA, 22 nt, Human
auugagaguguauagcugaucu

SEQ ID NO: 715796 - RNA, 22 nt, Human
gcucucucccuaggcaagugag

SEQ ID NO: 715797 - RNA, 20 nt, Human
uacaggagugaguggguggg

SEQ ID NO: 715798 - RNA, 22 nt, Human
ugugugcacugccuuuugugga

SEQ ID NO: 715799 - RNA, 22 nt, Human
agagugaaguaauuguuaggau

SEQ ID NO: 715800 - RNA, 23 nt, Human
guuuuacaggugagaaaauggag

SEQ ID NO: 715801 - RNA, 22 nt, Human
gcagcuguguaaugagcccaca

SEQ ID NO: 715802 - RNA, 22 nt, Human
agagcuggcugguagcccugau

SEQ ID NO: 715803 - RNA, 22 nt, Human
agacacagauuuuggaaaagau

SEQ ID NO: 715804 - RNA, 22 nt, Human
cucagcagagaccagggaggaa

SEQ ID NO: 715805 - RNA, 22 nt, Human
caaugaaagcaacugccuauaa

SEQ ID NO: 715806 - RNA, 22 nt, Human
ucaaucacguguuccauguucu

SEQ ID NO: 715807 - RNA, 22 nt, Human
guggccauuuggaaggcaagua

SEQ ID NO: 715808 - RNA, 22 nt, Human
acaguggaagaagcacugaacu

SEQ ID NO: 715809 - RNA, 22 nt, Human
acagugugugggaaaugugacu

SEQ ID NO: 715810 - RNA, 22 nt, Human
ccagggucacaaauaacugcag

SEQ ID NO: 715811 - RNA, 20 nt, Human
caguccugccccuuggggac

SEQ ID NO: 715812 - RNA, 22 nt, Human
caggccacgccccggcguguga

SEQ ID NO: 715813 - RNA, 21 nt, Human
ugcaggaguguaaugugaccc

SEQ ID NO: 715814 - RNA, 22 nt, Human
auguguauuuuguacuauuggg

SEQ ID NO: 715815 - RNA, 22 nt, Human
gcuuccagcaccagcagagggg

SEQ ID NO: 715816 - RNA, 22 nt, Human
acccaggauaaucuguguaucu

SEQ ID NO: 715817 - RNA, 22 nt, Human
aucuuucagagcuccaucaggg

SEQ ID NO: 715818 - RNA, 22 nt, Human
ugaaggugaaugucuaugggga

SEQ ID NO: 715819 - RNA, 22 nt, Human
aagaauaucuguuuuauuuagg

SEQ ID NO: 715820 - RNA, 22 nt, Human
gcucucuuuccauguggaggau

SEQ ID NO: 715821 - RNA, 22 nt, Human
auggaacaucagguuaagaaau

SEQ ID NO: 715822 - RNA, 22 nt, Human
aguguuguaugggaugacugcu

SEQ ID NO: 715823 - RNA, 21 nt, Human
gcuccagaacucuaugcuaac

SEQ ID NO: 715824 - RNA, 22 nt, Human
acagugagauccaagggcaggc

SEQ ID NO: 715825 - RNA, 22 nt, Human
uacaagugugcaccaccauguc

SEQ ID NO: 715826 - RNA, 22 nt, Human
agcaggcacaagaaagggaggu

SEQ ID NO: 715827 - RNA, 22 nt, Human
cuucuuguuuuagcccucauac

SEQ ID NO: 715828 - RNA, 22 nt, Human
ccauucuuucagugucucaugu

SEQ ID NO: 715829 - RNA, 18 nt, Human
agcagagagugaauggga

SEQ ID NO: 715830 - RNA, 22 nt, Human
gagucugaugucccccaggcca

SEQ ID NO: 715831 - RNA, 22 nt, Human
ggagccugugggaugagaugug

SEQ ID NO: 715832 - RNA, 22 nt, Human
acaguggauauauuaaaugaga

SEQ ID NO: 715833 - RNA, 22 nt, Human
ggcgcuggccacgguggcucug

SEQ ID NO: 715834 - RNA, 22 nt, Human
accaggcccaccgcaugcuccu

SEQ ID NO: 715835 - RNA, 23 nt, Human
ucuggcuuccaguggguucaacc

SEQ ID NO: 715836 - RNA, 18 nt, Human
auacagagaccucaagga

SEQ ID NO: 715837 - RNA, 22 nt, Human
acucuguacuuucuuguugugu

SEQ ID NO: 715838 - RNA, 22 nt, Human
ugaacauuccugaaugaagcau

SEQ ID NO: 715839 - RNA, 22 nt, Human
uguuaucagagagaggugcugu

SEQ ID NO: 715840 - RNA, 18 nt, Human
gccagagggcccaagguc

SEQ ID NO: 715841 - RNA, 20 nt, Human
aucugcuugccuguccucgg

SEQ ID NO: 715842 - RNA, 22 nt, Human
cucauggauauaagaacuguuu

SEQ ID NO: 715843 - RNA, 22 nt, Human
agccuccaguagcugaagagac

SEQ ID NO: 715844 - RNA, 22 nt, Human
uuccagagguucucagcccugu

SEQ ID NO: 715845 - RNA, 22 nt, Human
cuaguucugccauucaguguca

SEQ ID NO: 715846 - RNA, 22 nt, Human
gaucugggcuggagacugagaa

SEQ ID NO: 715847 - RNA, 22 nt, Human
uuacacuucuaaaaaaagcagg

SEQ ID NO: 715848 - RNA, 22 nt, Human
gcacagagcuggcccuccaggc

SEQ ID NO: 715849 - RNA, 19 nt, Human
uuuaugucauugaggucau

SEQ ID NO: 715850 - RNA, 22 nt, Human
uucacuguacugacugucuuau

SEQ ID NO: 715851 - RNA, 22 nt, Human
gcuucugggcaccugaacagga

SEQ ID NO: 715852 - RNA, 22 nt, Human
cagggcacagaucggggcgcac

SEQ ID NO: 715853 - RNA, 22 nt, Human
uuugggcugguuugccaugccc

SEQ ID NO: 715854 - RNA, 22 nt, Human
cucauaaugugacuguauuuga

SEQ ID NO: 715855 - RNA, 20 nt, Human
uuugacaccuugggagagac

SEQ ID NO: 715856 - RNA, 22 nt, Human
gcaguguugagccagcuggggg

SEQ ID NO: 715857 - RNA, 22 nt, Human
gcccacaggggaccugguggcu

SEQ ID NO: 715858 - RNA, 22 nt, Human
ucucucuucagagauaccuugc

SEQ ID NO: 715859 - RNA, 21 nt, Human
guucuugcaggauuuccuucc

SEQ ID NO: 715860 - RNA, 17 nt, Human
uaaagaucagccaugua

SEQ ID NO: 715861 - RNA, 22 nt, Human
ugaaggaaugaguauacuguuu

SEQ ID NO: 715862 - RNA, 22 nt, Human
ucacauuguucuuaguuuaccu

SEQ ID NO: 715863 - RNA, 22 nt, Human
guguggcugccagccaagaggc

SEQ ID NO: 715864 - RNA, 22 nt, Human
ucucugggccucaguuuucuca

SEQ ID NO: 715865 - RNA, 21 nt, Human
ucugcccuccaggagcucaua

SEQ ID NO: 715866 - RNA, 22 nt, Human
ccuuucuacagaugccucuugc

SEQ ID NO: 715867 - RNA, 22 nt, Human
uuuagaggggaaaguggcuggu

SEQ ID NO: 715868 - RNA, 22 nt, Human
cugcucucuguuccccuggauc

SEQ ID NO: 715869 - RNA, 22 nt, Human
acccuccacuuuaucugucuuu

SEQ ID NO: 715870 - RNA, 22 nt, Human
aaaggcucuaacaaggagagag

SEQ ID NO: 715871 - RNA, 21 nt, Human
cucaaaugccaguuuuauuua

SEQ ID NO: 715872 - RNA, 22 nt, Human
cauuuguauguuccuccuuagg

SEQ ID NO: 715873 - RNA, 22 nt, Human
ucuuaaagccaagcauaaacca

SEQ ID NO: 715874 - RNA, 22 nt, Human
auagcuguuagauuggggucga

SEQ ID NO: 715875 - RNA, 22 nt, Human
uggcugccagcuccucgccuug

SEQ ID NO: 715876 - RNA, 22 nt, Human
ucagggagggaccugaggcugg

SEQ ID NO: 715877 - RNA, 22 nt, Human
cuggcacauuguaauauauaca

SEQ ID NO: 715878 - RNA, 22 nt, Human
cacuuaagcaguuaauuuaucu

SEQ ID NO: 715879 - RNA, 22 nt, Human
acagcaggagccuucauaugcu

SEQ ID NO: 715880 - RNA, 22 nt, Human
gauauuuuuaguauuucugccu

SEQ ID NO: 715881 - RNA, 17 nt, Human
cccugccaccaggaagc

SEQ ID NO: 715882 - RNA, 22 nt, Human
uguacacguggccaucuuuaca

SEQ ID NO: 715883 - RNA, 22 nt, Human
caaauuccucagaaucagaaaa

SEQ ID NO: 715884 - RNA, 22 nt, Human
ggugcccagcaagcuuucaaug

SEQ ID NO: 715885 - RNA, 22 nt, Human
aaacuuuuccugcucuuguccu

SEQ ID NO: 715886 - RNA, 22 nt, Human
gccuggcugagguggggaggca

SEQ ID NO: 715887 - RNA, 22 nt, Human
cuuaaagucuauccuuucuaga

SEQ ID NO: 715888 - RNA, 23 nt, Human
ucuccuggcugcacuguggccac

SEQ ID NO: 715889 - RNA, 22 nt, Human
cugauucccuggugccuccguu

SEQ ID NO: 715890 - RNA, 22 nt, Human
gcacugaaugccaaaguguagg

SEQ ID NO: 715891 - RNA, 22 nt, Human
ucaaauacauggucaaucaacu

SEQ ID NO: 715892 - RNA, 22 nt, Human
cagcccaggcucagauguuggg

SEQ ID NO: 715893 - RNA, 22 nt, Human
uucuccagacccuccugcagac

SEQ ID NO: 715894 - RNA, 22 nt, Human
auuacucugucugccucugacc

SEQ ID NO: 715895 - RNA, 22 nt, Human
aucugcuuccuccuuagggaaa

SEQ ID NO: 715896 - RNA, 22 nt, Human
cuuaaaaucuggcaguuagcua

SEQ ID NO: 715897 - RNA, 22 nt, Human
acucucuugggggagagcagag

SEQ ID NO: 715898 - RNA, 22 nt, Human
augcuauaaacucuaggucauu

SEQ ID NO: 715899 - RNA, 22 nt, Human
caccugccaaauggggaugcug

SEQ ID NO: 715900 - RNA, 22 nt, Human
ugugagaguauaaucucucugu

SEQ ID NO: 715901 - RNA, 19 nt, Human
gcacacaguagggcuggca

SEQ ID NO: 715902 - RNA, 22 nt, Human
uucagcaaggcaugugcaggag

SEQ ID NO: 715903 - RNA, 22 nt, Human
gauaauguggauuuauugugau

SEQ ID NO: 715904 - RNA, 22 nt, Human
cagcagcugguugaauccuucu

SEQ ID NO: 715905 - RNA, 22 nt, Human
guacaguaaauguaaauggauu

SEQ ID NO: 715906 - RNA, 22 nt, Human
aaaugagguuaauacagugcuu

SEQ ID NO: 715907 - RNA, 22 nt, Human
uccauauuaacuaaaacuagaa

SEQ ID NO: 715908 - RNA, 22 nt, Human
uaaauguguguagccaucugug

SEQ ID NO: 715909 - RNA, 22 nt, Human
aggcaggugggucacuugaguc

SEQ ID NO: 715910 - RNA, 22 nt, Human
gcaggcaggcuuccuugaacug

SEQ ID NO: 715911 - RNA, 22 nt, Human
uaaggcagccucaggguagggu

SEQ ID NO: 715912 - RNA, 22 nt, Human
uccuggagcugacuccguuuga

SEQ ID NO: 715913 - RNA, 22 nt, Human
uauuuauaccaggugaucggag

SEQ ID NO: 715914 - RNA, 22 nt, Human
gcucaggaaauaguuuaguguu

SEQ ID NO: 715915 - RNA, 22 nt, Human
gccuggagugcaguggcgugau

SEQ ID NO: 715916 - RNA, 22 nt, Human
augcaaaucuuaaguaugugug

SEQ ID NO: 715917 - RNA, 22 nt, Human
gagaagcaauuuccaacugugc

SEQ ID NO: 715918 - RNA, 22 nt, Human
uggccacccagcugacgccuuc

SEQ ID NO: 715919 - RNA, 22 nt, Human
agagaccuuccugacuccagag

SEQ ID NO: 715920 - RNA, 22 nt, Human
cagcccugccauggagccuccu

SEQ ID NO: 715921 - RNA, 22 nt, Human
cagucuaccuuucagacauuga

SEQ ID NO: 715922 - RNA, 22 nt, Human
ucagcagacuaggcagauuacu

SEQ ID NO: 715923 - RNA, 22 nt, Human
gauuuauaaagguugcacugga

SEQ ID NO: 715924 - RNA, 22 nt, Human
gagucacauuaauuuaauuuua

SEQ ID NO: 715925 - RNA, 22 nt, Human
ugcccagcaauaaaccagaaga

SEQ ID NO: 715926 - RNA, 21 nt, Human
ccaggcaugacugcagagagc

SEQ ID NO: 715927 - RNA, 19 nt, Human
gaaagucauagagcuuguc

SEQ ID NO: 715928 - RNA, 22 nt, Human
uucuagaugcuuauaggcauau

SEQ ID NO: 715929 - RNA, 23 nt, Human
aagcacagaaugguuuaggaguu

SEQ ID NO: 715930 - RNA, 22 nt, Human
ugcuucuggcuuaucucgugcc

SEQ ID NO: 715931 - RNA, 22 nt, Human
acuuuacaaacuccucacuguu

SEQ ID NO: 715932 - RNA, 22 nt, Human
acuguggcaaagaagcaggcuc

SEQ ID NO: 715933 - RNA, 22 nt, Human
ucucugugugggagaucuuuuu

SEQ ID NO: 715934 - RNA, 22 nt, Human
gggaagaguaacuagcccaugu

SEQ ID NO: 715935 - RNA, 22 nt, Human
ccucacugaagaggugacauuu

SEQ ID NO: 715936 - RNA, 22 nt, Human
gcauuuaaauuugaacuucaga

SEQ ID NO: 715937 - RNA, 22 nt, Human
agucagugaaggcauugcucaa

SEQ ID NO: 715938 - RNA, 22 nt, Human
uggaaacacccacgcaugcaua

SEQ ID NO: 715939 - RNA, 22 nt, Human
uggcaugaguauaggcuucuca

SEQ ID NO: 715940 - RNA, 22 nt, Human
cucugggagaggacacuuggag

SEQ ID NO: 715941 - RNA, 22 nt, Human
ugcccacaggaagacaccagcg

SEQ ID NO: 715942 - RNA, 22 nt, Human
ucaaaugcugccuuugugugcc

SEQ ID NO: 715943 - RNA, 22 nt, Human
ugaggaagugguuguaugguuu

SEQ ID NO: 715944 - RNA, 22 nt, Human
gcucucucuuggggauucagca

SEQ ID NO: 715945 - RNA, 22 nt, Human
uccaggccacugcagaggcucu

SEQ ID NO: 715946 - RNA, 22 nt, Human
ucugauauaaaagugacauuca

SEQ ID NO: 715947 - RNA, 22 nt, Human
uacaggaaagaaauuugaacuc

SEQ ID NO: 715948 - RNA, 22 nt, Human
auaaaaucagaguuggauugga

SEQ ID NO: 715949 - RNA, 22 nt, Human
gcucucuuugugccacuuaagg

SEQ ID NO: 715950 - RNA, 22 nt, Human
ggaaaucaugggagaguuggaa

SEQ ID NO: 715951 - RNA, 22 nt, Human
acaggcaaggccagugagaaau

SEQ ID NO: 715952 - RNA, 22 nt, Human
augacaaaaugaaugcagcuag

SEQ ID NO: 715953 - RNA, 22 nt, Human
uacaguauauacuguguguaga

SEQ ID NO: 715954 - RNA, 19 nt, Human
uucuccagggacuuaggga

SEQ ID NO: 715955 - RNA, 22 nt, Human
cagcagagguuggaacaguucu

SEQ ID NO: 715956 - RNA, 22 nt, Human
gagaggugaaaggauaguuuga

SEQ ID NO: 715957 - RNA, 22 nt, Human
gccuggggaacuugauccuguc

SEQ ID NO: 715958 - RNA, 22 nt, Human
uccagacucacucaugugacua

SEQ ID NO: 715959 - RNA, 22 nt, Human
cccaaagggugucagcagcaag

SEQ ID NO: 715960 - RNA, 22 nt, Human
cccaggaggccaagguugcagu

SEQ ID NO: 715961 - RNA, 22 nt, Human
cuggacagaaaaggccacugga

SEQ ID NO: 715962 - RNA, 22 nt, Human
cuguaacuuagcaugguuacua

SEQ ID NO: 715963 - RNA, 20 nt, Human
agccaaaggagaacagugcu

SEQ ID NO: 715964 - RNA, 22 nt, Human
gcugcccugacaagcuacuccc

SEQ ID NO: 715965 - RNA, 22 nt, Human
uggcucugccccauaccccugc

SEQ ID NO: 715966 - RNA, 22 nt, Human
caggacccaucagccaggcacu

SEQ ID NO: 715967 - RNA, 22 nt, Human
guaaaggcucugauaaguacug

SEQ ID NO: 715968 - RNA, 22 nt, Human
augcaccacaucacuucugcuc

SEQ ID NO: 715969 - RNA, 22 nt, Human
auugagaaaauucgagcaaguu

SEQ ID NO: 715970 - RNA, 22 nt, Human
cacuacuugaaagaauuacaga

SEQ ID NO: 715971 - RNA, 18 nt, Human
uuugcaaaggaaguaugg

SEQ ID NO: 715972 - RNA, 22 nt, Human
acuaaagucagacugcauugau

SEQ ID NO: 715973 - RNA, 22 nt, Human
agaaaugacaagacugaucagg

SEQ ID NO: 715974 - RNA, 22 nt, Human
uucucugaucuugcuagacuga

SEQ ID NO: 715975 - RNA, 22 nt, Human
agcagcaccuguccucgcugcu

SEQ ID NO: 715976 - RNA, 20 nt, Human
auuuggcaugaaguauugau

SEQ ID NO: 715977 - RNA, 22 nt, Human
agccugucugucuccaaagcug

SEQ ID NO: 715978 - RNA, 22 nt, Human
agcagcaacuuauuuuucuuau

SEQ ID NO: 715979 - RNA, 22 nt, Human
uaugucuuaauccuuccuuagg

SEQ ID NO: 715980 - RNA, 22 nt, Human
ugacagaaauaguucuuaauuu

SEQ ID NO: 715981 - RNA, 17 nt, Human
ccucuuccucucagcug

SEQ ID NO: 715982 - RNA, 22 nt, Human
aggcuucaagguucuuggcagg

SEQ ID NO: 715983 - RNA, 22 nt, Human
uguuacaauauuaucaacugag

SEQ ID NO: 715984 - RNA, 22 nt, Human
gauuuucugagccuucaaauuu

SEQ ID NO: 715985 - RNA, 18 nt, Human
agcuguuguugacucugu

SEQ ID NO: 715986 - RNA, 22 nt, Human
cuuuaucuaggguaagaaaacc

SEQ ID NO: 715987 - RNA, 22 nt, Human
gagacagagaucuugcugaguc

SEQ ID NO: 715988 - RNA, 22 nt, Human
ugucagcauugaugaaaugugg

SEQ ID NO: 715989 - RNA, 22 nt, Human
caggggaguuuuaugcaacaga

SEQ ID NO: 715990 - RNA, 22 nt, Human
uucaaaucagaccgaaggcaac

SEQ ID NO: 715991 - RNA, 23 nt, Human
cuuuuaacuagaguaucagcugc

SEQ ID NO: 715992 - RNA, 22 nt, Human
ggccagguaagagugcagccgc

SEQ ID NO: 715993 - RNA, 22 nt, Human
acugcacacacagaauuuaggg

SEQ ID NO: 715994 - RNA, 22 nt, Human
gcaaauauucaagacuuuucca

SEQ ID NO: 715995 - RNA, 22 nt, Human
ucugagguuuucauguuuucug

SEQ ID NO: 715996 - RNA, 22 nt, Human
ugggcugagcagugaagcucau

SEQ ID NO: 715997 - RNA, 22 nt, Human
agcuggaacccgggugggcagc

SEQ ID NO: 715998 - RNA, 22 nt, Human
ggaggcucagugaggaaaugga

SEQ ID NO: 715999 - RNA, 22 nt, Human
ccuuuucuguguggguaauuua

SEQ ID NO: 716000 - RNA, 19 nt, Human
ucucuggcaguucagagca

SEQ ID NO: 716001 - RNA, 20 nt, Human
gggcagcuccccucauucug

SEQ ID NO: 716002 - RNA, 22 nt, Human
agggcucagagcaaaagggcac

SEQ ID NO: 716003 - RNA, 22 nt, Human
ugcguaguacgaauuugugccu

SEQ ID NO: 716004 - RNA, 22 nt, Human
augaaggcuguguagauggaug

SEQ ID NO: 716005 - RNA, 22 nt, Human
uucacaguauagguuuccagcg

SEQ ID NO: 716006 - RNA, 22 nt, Human
agacaggccacucuggucuggu

SEQ ID NO: 716007 - RNA, 22 nt, Human
gggaggcgccgaggguagcuaa

SEQ ID NO: 716008 - RNA, 22 nt, Human
ggcccucccugagccagguggg

SEQ ID NO: 716009 - RNA, 22 nt, Human
agauggguaacuggagucugcu

SEQ ID NO: 716010 - RNA, 22 nt, Human
gcugggucuggcugugagccgg

SEQ ID NO: 716011 - RNA, 22 nt, Human
acucagcacagcacugggaacc

SEQ ID NO: 716012 - RNA, 22 nt, Human
ugccagggacccugucggcccu

SEQ ID NO: 716013 - RNA, 22 nt, Human
gcuggcaguuuccucaccgagg

SEQ ID NO: 716014 - RNA, 22 nt, Human
agggcugcaggcaagauauggc

SEQ ID NO: 716015 - RNA, 23 nt, Human
aacgacagcuacaggcaucccac

SEQ ID NO: 716016 - RNA, 22 nt, Human
uaggaaauuggaaacucuucac

SEQ ID NO: 716017 - RNA, 22 nt, Human
cagggagcucugggccggacuc

SEQ ID NO: 716018 - RNA, 18 nt, Human
uuuuccuuccaccuugaa

SEQ ID NO: 716019 - RNA, 22 nt, Human
guuauaaaugacugcaaaaguu

SEQ ID NO: 716020 - RNA, 22 nt, Human
cuuuuaagggauaauaagaugu

SEQ ID NO: 716021 - RNA, 23 nt, Human
auugugagauuacuaucacacug

SEQ ID NO: 716022 - RNA, 22 nt, Human
agagagccugaguggcagcuau

SEQ ID NO: 716023 - RNA, 22 nt, Human
ucaagagaagugcuccacagua

SEQ ID NO: 716024 - RNA, 22 nt, Human
aaugccuugccugcuacaacuu

SEQ ID NO: 716025 - RNA, 22 nt, Human
aaugggagguaguaugggaggu

SEQ ID NO: 716026 - RNA, 21 nt, Human
uauuugcugccaucuuugagg

SEQ ID NO: 716027 - RNA, 22 nt, Human
ucugcugccaugcagagcagua

SEQ ID NO: 716028 - RNA, 22 nt, Human
aucaaguuuucuuaguugacug

SEQ ID NO: 716029 - RNA, 22 nt, Human
acagaugaguuaaagcagagug

SEQ ID NO: 716030 - RNA, 17 nt, Human
agaaaagagaccagcag

SEQ ID NO: 716031 - RNA, 22 nt, Human
cagcagagaccaagugauuuga

SEQ ID NO: 716032 - RNA, 22 nt, Human
uggcagagugcggcauccccug

SEQ ID NO: 716033 - RNA, 22 nt, Human
cccuggaggcaaagguugcagu

SEQ ID NO: 716034 - RNA, 15 nt, Human
ggaacauuucuguuu

SEQ ID NO: 716035 - RNA, 22 nt, Human
guuauuuuaucucugagagguu

SEQ ID NO: 716036 - RNA, 22 nt, Human
uucuggaaauguugcugaggcc

SEQ ID NO: 716037 - RNA, 22 nt, Human
gaauaauuuugaucagaaggga

SEQ ID NO: 716038 - RNA, 22 nt, Human
gagugccaagagaagaggcugg

SEQ ID NO: 716039 - RNA, 22 nt, Human
aagaacaugaacacaauguuua

SEQ ID NO: 716040 - RNA, 20 nt, Human
gggaugagaguccuagcucu

SEQ ID NO: 716041 - RNA, 22 nt, Human
agauauucugccuaacagguuu

SEQ ID NO: 716042 - RNA, 21 nt, Human
ucuauaacuauagugacagau

SEQ ID NO: 716043 - RNA, 22 nt, Human
cacagcagaaauaugaaggcag

SEQ ID NO: 716044 - RNA, 22 nt, Human
aaaaguuauugaugcaggacaa

SEQ ID NO: 716045 - RNA, 22 nt, Human
cucugugccucaguuuucuucu

SEQ ID NO: 716046 - RNA, 22 nt, Human
uccauuuucaucucauguauaa

SEQ ID NO: 716047 - RNA, 22 nt, Human
uggcucugaccagguagaggag

SEQ ID NO: 716048 - RNA, 22 nt, Human
cccugaggcccuccuggggucu

SEQ ID NO: 716049 - RNA, 18 nt, Human
gugcugugggcaguggcc

SEQ ID NO: 716050 - RNA, 22 nt, Human
gacagcugggaggaugacauaa

SEQ ID NO: 716051 - RNA, 22 nt, Human
aaaggagauaaagggcccuuca

SEQ ID NO: 716052 - RNA, 22 nt, Human
auggaaaaggcugauuucauua

SEQ ID NO: 716053 - RNA, 22 nt, Human
gcacagccuugcccugugcccu

SEQ ID NO: 716054 - RNA, 22 nt, Human
agcugucuccagauacaggauu

SEQ ID NO: 716055 - RNA, 18 nt, Human
uacaggaagggguucucg

SEQ ID NO: 716056 - RNA, 22 nt, Human
ggcccuguuagagcucccacaa

SEQ ID NO: 716057 - RNA, 22 nt, Human
ccugccuggcugucagcagagc

SEQ ID NO: 716058 - RNA, 22 nt, Human
uaggcagggauuaggguugauu

SEQ ID NO: 716059 - RNA, 22 nt, Human
gggaggaaggcuugggugagua

SEQ ID NO: 716060 - RNA, 22 nt, Human
uagguucacuuagcugugggaa

SEQ ID NO: 716061 - RNA, 22 nt, Human
gcaauacugagauuauuguacu

SEQ ID NO: 716062 - RNA, 22 nt, Human
ggagccuggcaaugcugcgucc

SEQ ID NO: 716063 - RNA, 22 nt, Human
acaaggcugcugugauugggaa

SEQ ID NO: 716064 - RNA, 22 nt, Human
aucuuccaggugccggggguca

SEQ ID NO: 716065 - RNA, 18 nt, Human
aggagaaagggaccaggg

SEQ ID NO: 716066 - RNA, 22 nt, Human
ucaucugucccaggcuuuuuuc

SEQ ID NO: 716067 - RNA, 22 nt, Human
cuuuuucugauguuccaugauu

SEQ ID NO: 716068 - RNA, 22 nt, Human
aaagaauuuguacacccuacua

SEQ ID NO: 716069 - RNA, 22 nt, Human
caguggcauacuuggcugauau

SEQ ID NO: 716070 - RNA, 22 nt, Human
gagggcagaaaauuaugcggug

SEQ ID NO: 716071 - RNA, 20 nt, Human
cucugggcugcguugcaaac

SEQ ID NO: 716072 - RNA, 22 nt, Human
aaaggaagaugccaggacucug

SEQ ID NO: 716073 - RNA, 22 nt, Human
agcuggucagaguggggauaga

SEQ ID NO: 716074 - RNA, 18 nt, Human
acauuuaggagagucaau

SEQ ID NO: 716075 - RNA, 18 nt, Human
gagaaggccacuuguuuu

SEQ ID NO: 716076 - RNA, 22 nt, Human
aguacacaagacacauuuaaaa

SEQ ID NO: 716077 - RNA, 22 nt, Human
ugcuuacaacuuuauugaggaa

SEQ ID NO: 716078 - RNA, 22 nt, Human
cuggccaggcucucacgugguc

SEQ ID NO: 716079 - RNA, 22 nt, Human
uuugucauguuuuguaaugucu

SEQ ID NO: 716080 - RNA, 22 nt, Human
aaugaguucugguucauuuuau

SEQ ID NO: 716081 - RNA, 22 nt, Human
ucagauuucuagcguuuggcca

SEQ ID NO: 716082 - RNA, 16 nt, Human
cagcccugaggaagaa

SEQ ID NO: 716083 - RNA, 22 nt, Human
aguguuuaaguuacacacauau

SEQ ID NO: 716084 - RNA, 22 nt, Human
caggcuugagggcaggcccagu

SEQ ID NO: 716085 - RNA, 22 nt, Human
gauuucagccccgcucccagcu

SEQ ID NO: 716086 - RNA, 22 nt, Human
aaaugucugucucaugaggaaa

SEQ ID NO: 716087 - RNA, 23 nt, Human
uaugagaacccauacgcugucuu

SEQ ID NO: 716088 - RNA, 22 nt, Human
auuagaaaauacaugggcuguc

SEQ ID NO: 716089 - RNA, 22 nt, Human
guuucaauuugaaugcgaggcu

SEQ ID NO: 716090 - RNA, 22 nt, Human
agcugccuaguagauugauugg

SEQ ID NO: 716091 - RNA, 22 nt, Human
ucucagccucaccucuauggag

SEQ ID NO: 716092 - RNA, 22 nt, Human
caugaacagcuaacauuuuggg

SEQ ID NO: 716093 - RNA, 22 nt, Human
uggagcccaggagaggauaaac

SEQ ID NO: 716094 - RNA, 22 nt, Human
uccagggcaggugcugggcucu

SEQ ID NO: 716095 - RNA, 22 nt, Human
uuaggaaaauggaguccuuuua

SEQ ID NO: 716096 - RNA, 22 nt, Human
ggccucuguuuggagccaggau

SEQ ID NO: 716097 - RNA, 22 nt, Human
cagagacaggaucucgaagacu

SEQ ID NO: 716098 - RNA, 22 nt, Human
ucucuggaagcgcagaucuguu

SEQ ID NO: 716099 - RNA, 22 nt, Human
acacaucuauauugcaucugca

SEQ ID NO: 716100 - RNA, 22 nt, Human
aagcccaguuucacacugagac

SEQ ID NO: 716101 - RNA, 22 nt, Human
gagcuuuaggagaaggagguca

SEQ ID NO: 716102 - RNA, 22 nt, Human
uuuggcuugcacuggcaccaac

SEQ ID NO: 716103 - RNA, 22 nt, Human
ugcugcaggcaauagaaaaccu

SEQ ID NO: 716104 - RNA, 22 nt, Human
caagggaccugagauggucucu

SEQ ID NO: 716105 - RNA, 22 nt, Human
aagauuuucagcuaauggugca

SEQ ID NO: 716106 - RNA, 22 nt, Human
cccccuggcaggcuggccucuc

SEQ ID NO: 716107 - RNA, 23 nt, Human
cuguggcaaguccugcaccugcc

SEQ ID NO: 716108 - RNA, 22 nt, Human
agcauccacucacugggagagg

SEQ ID NO: 716109 - RNA, 22 nt, Human
agugucugcuuugagucaggug

SEQ ID NO: 716110 - RNA, 16 nt, Human
aggcuccaagagcugu

SEQ ID NO: 716111 - RNA, 22 nt, Human
gaauuguaugcugucuugauag

SEQ ID NO: 716112 - RNA, 22 nt, Human
aagcuuuucucaguguccuugg

SEQ ID NO: 716113 - RNA, 22 nt, Human
uggaaucaguuacaugugguug

SEQ ID NO: 716114 - RNA, 22 nt, Human
gaggugggguuuuguucuugaa

SEQ ID NO: 716115 - RNA, 22 nt, Human
gugagccauucuacuccuaacc

SEQ ID NO: 716116 - RNA, 22 nt, Human
uucacauaaugauacaaagcuu

SEQ ID NO: 716117 - RNA, 22 nt, Human
ccucugaggugagcccagcugg

SEQ ID NO: 716118 - RNA, 22 nt, Human
gagcacaguaaagcagugucac

SEQ ID NO: 716119 - RNA, 22 nt, Human
acagaaugcguagugcauguug

SEQ ID NO: 716120 - RNA, 22 nt, Human
agagaaggaaagcugacauggg

SEQ ID NO: 716121 - RNA, 22 nt, Human
ucagauuucuucuugcaacggc

SEQ ID NO: 716122 - RNA, 22 nt, Human
cauuucuagacaaguccuggag

SEQ ID NO: 716123 - RNA, 21 nt, Human
gggaucugaggcaagucuccu

SEQ ID NO: 716124 - RNA, 22 nt, Human
agaagugguguguggccgagcu

SEQ ID NO: 716125 - RNA, 22 nt, Human
ccuggccaguuuccaggcccug

SEQ ID NO: 716126 - RNA, 22 nt, Human
agugggugauaagaccaaggag

SEQ ID NO: 716127 - RNA, 23 nt, Human
ucucaagaggaagcagggcucau

SEQ ID NO: 716128 - RNA, 22 nt, Human
agccaggguaagguacuuagua

SEQ ID NO: 716129 - RNA, 22 nt, Human
cuacagaagccguggucaggaa

SEQ ID NO: 716130 - RNA, 22 nt, Human
cuuccaauagcaacaaagauua

SEQ ID NO: 716131 - RNA, 21 nt, Human
uggcagguucaaaggccuauc

SEQ ID NO: 716132 - RNA, 17 nt, Human
cagcuuuaugcuacugu

SEQ ID NO: 716133 - RNA, 22 nt, Human
uccagggccaugaaguugcaca

SEQ ID NO: 716134 - RNA, 22 nt, Human
gauaccagacagggagggagaa

SEQ ID NO: 716135 - RNA, 22 nt, Human
ucacuuaaaaauucuaguuaug

SEQ ID NO: 716136 - RNA, 22 nt, Human
cccagggaagccauuucugacu

SEQ ID NO: 716137 - RNA, 20 nt, Human
agguccugggacuggcagag

SEQ ID NO: 716138 - RNA, 22 nt, Human
ggcagcugaccuagcaccaucc

SEQ ID NO: 716139 - RNA, 22 nt, Human
gggcacugagaauuuuccacuu

SEQ ID NO: 716140 - RNA, 22 nt, Human
ucagagaguuggaaagaauuaa

SEQ ID NO: 716141 - RNA, 22 nt, Human
ccaggaugacccccacuuuccu

SEQ ID NO: 716142 - RNA, 22 nt, Human
uacacugugagguuuccaaggg

SEQ ID NO: 716143 - RNA, 20 nt, Human
acucaaaucaccugccucaa

SEQ ID NO: 716144 - RNA, 22 nt, Human
aaucauaauuuugugaauguag

SEQ ID NO: 716145 - RNA, 20 nt, Human
uuuauucagccuacccucuu

SEQ ID NO: 716146 - RNA, 22 nt, Human
gccacugucauacccuggcaau

SEQ ID NO: 716147 - RNA, 22 nt, Human
uucuucuccuaaggagaguccu

SEQ ID NO: 716148 - RNA, 22 nt, Human
aggggaagauuauacuuuugaa

SEQ ID NO: 716149 - RNA, 22 nt, Human
gagacagaucucggcuccaugc

SEQ ID NO: 716150 - RNA, 22 nt, Human
uucccacacaauuaagucauuu

SEQ ID NO: 716151 - RNA, 21 nt, Human
ggugcucgcugaugaggagug

SEQ ID NO: 716152 - RNA, 18 nt, Human
uccaggucccaggggaag

SEQ ID NO: 716153 - RNA, 22 nt, Human
cucuuuacugcuacuacaaaga

SEQ ID NO: 716154 - RNA, 22 nt, Human
agccacagguguuggccagugu

SEQ ID NO: 716155 - RNA, 22 nt, Human
aucucuccuucagcugaggccc

SEQ ID NO: 716156 - RNA, 21 nt, Human
acagcagacaggcuuaggacc

SEQ ID NO: 716157 - RNA, 17 nt, Human
ccugagugggagaggaa

SEQ ID NO: 716158 - RNA, 22 nt, Human
ucucagaaauacuauguuguca

SEQ ID NO: 716159 - RNA, 22 nt, Human
ugaugaaaauguucagcaauua

SEQ ID NO: 716160 - RNA, 22 nt, Human
ucagccagaggcuucuugguuu

SEQ ID NO: 716161 - RNA, 22 nt, Human
uuuguucugaaaacucaagucc

SEQ ID NO: 716162 - RNA, 22 nt, Human
uccagggaucuuuagagucuuu

SEQ ID NO: 716163 - RNA, 22 nt, Human
uggugcaaaacuaauugcgguu

SEQ ID NO: 716164 - RNA, 22 nt, Human
aagagcugcacauauuuauauc

SEQ ID NO: 716165 - RNA, 22 nt, Human
ccugggacucggccaggacaga

SEQ ID NO: 716166 - RNA, 22 nt, Human
cugagguaugugggacuagccu

SEQ ID NO: 716167 - RNA, 22 nt, Human
cugcuagcccaggaugcaggga

SEQ ID NO: 716168 - RNA, 22 nt, Human
gcugucugcugggucgcucagg

SEQ ID NO: 716169 - RNA, 22 nt, Human
aguagcaauggcucugagcuau

SEQ ID NO: 716170 - RNA, 22 nt, Human
uaauuccuagaaauuauucuca

SEQ ID NO: 716171 - RNA, 22 nt, Human
ucuuccuggauggggguugaug

SEQ ID NO: 716172 - RNA, 22 nt, Human
auuucaaggcuauuaauauaaa

SEQ ID NO: 716173 - RNA, 22 nt, Human
accagggcugggauaggucagg

SEQ ID NO: 716174 - RNA, 22 nt, Human
uuugauucuaaguucugucaac

SEQ ID NO: 716175 - RNA, 22 nt, Human
agacauaggauuccacauagca

SEQ ID NO: 716176 - RNA, 22 nt, Human
aagaaggcuucagagcccagga

SEQ ID NO: 716177 - RNA, 22 nt, Human
aaaauggguuucuucaaccuca

SEQ ID NO: 716178 - RNA, 22 nt, Human
cugucccucaguucugggcaaa

SEQ ID NO: 716179 - RNA, 21 nt, Human
gccugagcaugucuucagguc

SEQ ID NO: 716180 - RNA, 22 nt, Human
ccacugccagcuuuguccuccc

SEQ ID NO: 716181 - RNA, 22 nt, Human
ugcuggcuacugauggcaggcc

SEQ ID NO: 716182 - RNA, 22 nt, Human
agccaggcgggucuuugcuccu

SEQ ID NO: 716183 - RNA, 22 nt, Human
auuucagggagucauuuacaca

SEQ ID NO: 716184 - RNA, 22 nt, Human
auucugcuaguuaauaucucuc

SEQ ID NO: 716185 - RNA, 21 nt, Human
ccuuuacaauuuugcauuccu

SEQ ID NO: 716186 - RNA, 22 nt, Human
gcugccaguaguuggagcucca

SEQ ID NO: 716187 - RNA, 22 nt, Human
cauuauggaagugaagagcucu

SEQ ID NO: 716188 - RNA, 22 nt, Human
aucauguugcucaaaauuaaac

SEQ ID NO: 716189 - RNA, 22 nt, Human
ggcuguggggaccaacaggacu

SEQ ID NO: 716190 - RNA, 22 nt, Human
guguguauuuaaaggauaguug

SEQ ID NO: 716191 - RNA, 22 nt, Human
cucugccaucucacuggguccu

SEQ ID NO: 716192 - RNA, 22 nt, Human
aguguucagugauugucaaccg

SEQ ID NO: 716193 - RNA, 22 nt, Human
uguggccugggagcugaggucu

SEQ ID NO: 716194 - RNA, 22 nt, Human
cugggcaguuuuacaucauugc

SEQ ID NO: 716195 - RNA, 21 nt, Human
ugcuggugagcucauguggcu

SEQ ID NO: 716196 - RNA, 22 nt, Human
aaaucaguuagugguaggauug

SEQ ID NO: 716197 - RNA, 22 nt, Human
ucagcacuauacauuuugaaua

SEQ ID NO: 716198 - RNA, 22 nt, Human
ucauccugcacuggcuccuccu

SEQ ID NO: 716199 - RNA, 22 nt, Human
cuuuccucuggcacugucuggu

SEQ ID NO: 716200 - RNA, 22 nt, Human
acagauaaggcaguuaagaguu

SEQ ID NO: 716201 - RNA, 20 nt, Human
uuugucuguuaaguguuucu

SEQ ID NO: 716202 - RNA, 17 nt, Human
auuucccagcagugcua

SEQ ID NO: 716203 - RNA, 22 nt, Human
ucgaaggaaccucaauuuucgu

SEQ ID NO: 716204 - RNA, 22 nt, Human
ugcagcugauuaaagggcagac

SEQ ID NO: 716205 - RNA, 22 nt, Human
auacuuucugaccaauuaauug

SEQ ID NO: 716206 - RNA, 22 nt, Human
cugugccaguguauuccuguga

SEQ ID NO: 716207 - RNA, 22 nt, Human
accuucaagaaacauuuccuug

SEQ ID NO: 716208 - RNA, 22 nt, Human
ggugagaggccugagagcugga

SEQ ID NO: 716209 - RNA, 22 nt, Human
cuggcucacuagcccugcccug

SEQ ID NO: 716210 - RNA, 22 nt, Human
cucagacccccagagcugcuaa

SEQ ID NO: 716211 - RNA, 22 nt, Human
uucuaacuggugcagugcugca

SEQ ID NO: 716212 - RNA, 22 nt, Human
gccaccuguuucagaugugguu

SEQ ID NO: 716213 - RNA, 19 nt, Human
guggcagcagauuuggugu

SEQ ID NO: 716214 - RNA, 22 nt, Human
gagcuggcaggaggcuccccga

SEQ ID NO: 716215 - RNA, 22 nt, Human
uuauuauugugguugcauuauc

SEQ ID NO: 716216 - RNA, 22 nt, Human
cugucauuucuuuagcaauggg

SEQ ID NO: 716217 - RNA, 22 nt, Human
uggcauguuugcuugugcauau

SEQ ID NO: 716218 - RNA, 22 nt, Human
auguuucaccaguuuuauaaga

SEQ ID NO: 716219 - RNA, 22 nt, Human
cugugucuguggaauagcgaau

SEQ ID NO: 716220 - RNA, 20 nt, Human
aaauuguguuugugagcucc

SEQ ID NO: 716221 - RNA, 22 nt, Human
acguuuucuagagaauaugcag

SEQ ID NO: 716222 - RNA, 22 nt, Human
ugaaaugagagcacagaauaaa

SEQ ID NO: 716223 - RNA, 22 nt, Human
cuauuuggccagaagaggguca

SEQ ID NO: 716224 - RNA, 22 nt, Human
ucagcaggcaccggaaguguuu

SEQ ID NO: 716225 - RNA, 22 nt, Human
cacugggaccuaggacugagcu

SEQ ID NO: 716226 - RNA, 22 nt, Human
gaccagucauuacucaugcccu

SEQ ID NO: 716227 - RNA, 22 nt, Human
uaccuugggcuauuaucuuuga

SEQ ID NO: 716228 - RNA, 22 nt, Human
ccacagggcacagacaggaagc

SEQ ID NO: 716229 - RNA, 22 nt, Human
acucacagucccuguaggagug

SEQ ID NO: 716230 - RNA, 22 nt, Human
uucagcagagaaauuacauaau

SEQ ID NO: 716231 - RNA, 22 nt, Human
gaggggaaaguucugcacaagg

SEQ ID NO: 716232 - RNA, 22 nt, Human
agugggcaaaacagcucagagc

SEQ ID NO: 716233 - RNA, 21 nt, Human
agauuguauggaggugagagg

SEQ ID NO: 716234 - RNA, 22 nt, Human
accuggcugagaacgugcagcu

SEQ ID NO: 716235 - RNA, 22 nt, Human
gccacauuagcccucaccaucu

SEQ ID NO: 716236 - RNA, 22 nt, Human
uuaguacaagagauuaauuacu

SEQ ID NO: 716237 - RNA, 22 nt, Human
aacugaacauaaugaaagccaa

SEQ ID NO: 716238 - RNA, 22 nt, Human
aaacagcuuguaagguguaauu

SEQ ID NO: 716239 - RNA, 22 nt, Human
cuguacaggagacgucugugca

SEQ ID NO: 716240 - RNA, 22 nt, Human
gaaauaaccucaugcaccauga

SEQ ID NO: 716241 - RNA, 22 nt, Human
gagggaaacagauggguugugg

SEQ ID NO: 716242 - RNA, 22 nt, Human
gaaugaaaaccuuggcucaaau

SEQ ID NO: 716243 - RNA, 22 nt, Human
gcugagugaaaguuugcugugu

SEQ ID NO: 716244 - RNA, 22 nt, Human
agucagaguuuugaggugugac

SEQ ID NO: 716245 - RNA, 20 nt, Human
ugcagcuucucaucuucaaa

SEQ ID NO: 716246 - RNA, 23 nt, Human
ugugucauaaaauuaaaacuuca

SEQ ID NO: 716247 - RNA, 22 nt, Human
caagucaacucaaauuguuauc

SEQ ID NO: 716248 - RNA, 22 nt, Human
uccuagaacagcccaccuggaa

SEQ ID NO: 716249 - RNA, 22 nt, Human
auucucaaaacauaacuucacu

SEQ ID NO: 716250 - RNA, 22 nt, Human
caacuuuaauuugggugucaga

SEQ ID NO: 716251 - RNA, 22 nt, Human
cacaguaucuuuugaguaagca

SEQ ID NO: 716252 - RNA, 22 nt, Human
agaguuuguugaauuuacuugg

SEQ ID NO: 716253 - RNA, 22 nt, Human
auugucuuacauacuguggagg

SEQ ID NO: 716254 - RNA, 22 nt, Human
acagcagcgugaaguguguuau

SEQ ID NO: 716255 - RNA, 22 nt, Human
guuauucaacuugugucucuua

SEQ ID NO: 716256 - RNA, 20 nt, Human
gagauccucaucuguaaagu

SEQ ID NO: 716257 - RNA, 22 nt, Human
auuacaguggacagcuaugcac

SEQ ID NO: 716258 - RNA, 20 nt, Human
uuuauucacagagaagaguu

SEQ ID NO: 716259 - RNA, 22 nt, Human
cacaggaaugaacagggaaaga

SEQ ID NO: 716260 - RNA, 22 nt, Human
gcagguggaagcagcagacuca

SEQ ID NO: 716261 - RNA, 22 nt, Human
gagucaggaugcaaggggaugg

SEQ ID NO: 716262 - RNA, 23 nt, Human
ugauugaaaugaggaguauuugu

SEQ ID NO: 716263 - RNA, 22 nt, Human
acucagaaugucacugagggac

SEQ ID NO: 716264 - RNA, 22 nt, Human
acagggcucccagcaggucugu

SEQ ID NO: 716265 - RNA, 20 nt, Human
uguuugugccagcuuuguca

SEQ ID NO: 716266 - RNA, 22 nt, Human
ugggauagauugauggauagag

SEQ ID NO: 716267 - RNA, 22 nt, Human
cugggaugugaggagcgccucu

SEQ ID NO: 716268 - RNA, 19 nt, Human
auacaagacuagcauuuac

SEQ ID NO: 716269 - RNA, 22 nt, Human
uaggccacggaaagcagguugc

SEQ ID NO: 716270 - RNA, 22 nt, Human
auccaguaugagguagggcuug

SEQ ID NO: 716271 - RNA, 22 nt, Human
uuggcagggcaucagacacgug

SEQ ID NO: 716272 - RNA, 22 nt, Human
gacuggcucacuccacuccuau

SEQ ID NO: 716273 - RNA, 22 nt, Human
ucagaaauacuaucagcuuuug

SEQ ID NO: 716274 - RNA, 22 nt, Human
aggggcucaaagugugcaggga

SEQ ID NO: 716275 - RNA, 22 nt, Human
cuccucuggcuuccuggaggca

SEQ ID NO: 716276 - RNA, 22 nt, Human
gccugccccuuccugggcaggg

SEQ ID NO: 716277 - RNA, 22 nt, Human
ugugaauagauugaagcuuugg

SEQ ID NO: 716278 - RNA, 22 nt, Human
ccucaggcaagucacuuaacau

SEQ ID NO: 716279 - RNA, 22 nt, Human
gacagcugaacaggugggauaa

SEQ ID NO: 716280 - RNA, 22 nt, Human
ccucuauagaugugugcaucua

SEQ ID NO: 716281 - RNA, 22 nt, Human
agaaaucucaguaucucaggga

SEQ ID NO: 716282 - RNA, 22 nt, Human
aggucagacagggugucuuucu

SEQ ID NO: 716283 - RNA, 22 nt, Human
aaugagcuucuauaaucuuguc

SEQ ID NO: 716284 - RNA, 22 nt, Human
auguacauucuaaguaugugua

SEQ ID NO: 716285 - RNA, 22 nt, Human
gggguccuggaggccagcugga

SEQ ID NO: 716286 - RNA, 22 nt, Human
cuggccaauauagggaaaucuu

SEQ ID NO: 716287 - RNA, 22 nt, Human
caucucaugggcaugccaagcu

SEQ ID NO: 716288 - RNA, 22 nt, Human
acaucuuuuuggaaacggcuga

SEQ ID NO: 716289 - RNA, 22 nt, Human
ugcaugcauguuuuuacccaca

SEQ ID NO: 716290 - RNA, 22 nt, Human
auuucucauuaagaucuuccaa

SEQ ID NO: 716291 - RNA, 22 nt, Human
gcagggcuccacuguggccaag

SEQ ID NO: 716292 - RNA, 22 nt, Human
ugugugugcacgugcgcgcgag

SEQ ID NO: 716293 - RNA, 22 nt, Human
gaggcauuaaagggaaucuucu

SEQ ID NO: 716294 - RNA, 22 nt, Human
aauugcaacagguagacuuuuc

SEQ ID NO: 716295 - RNA, 22 nt, Human
cugcuccacaccguccauacuc

SEQ ID NO: 716296 - RNA, 22 nt, Human
uacauguaauuuucauaguaag

SEQ ID NO: 716297 - RNA, 19 nt, Human
uuugauaucugaauuaugc

SEQ ID NO: 716298 - RNA, 22 nt, Human
acaaacuaaaauucuuuauuga

SEQ ID NO: 716299 - RNA, 17 nt, Human
ugcaggcuccugucccu

SEQ ID NO: 716300 - RNA, 22 nt, Human
acugcauugagguuucauacuu

SEQ ID NO: 716301 - RNA, 21 nt, Human
uggaccaggaaggugguggug

SEQ ID NO: 716302 - RNA, 22 nt, Human
gagagacccagacaccaugcau

SEQ ID NO: 716303 - RNA, 22 nt, Human
uacagagaugugaaaagcucua

SEQ ID NO: 716304 - RNA, 22 nt, Human
uuugagcagagaaaggacauga

SEQ ID NO: 716305 - RNA, 22 nt, Human
uuccugaaaauacagggagaga

SEQ ID NO: 716306 - RNA, 22 nt, Human
uuucuucaauugcuaacaagga

SEQ ID NO: 716307 - RNA, 22 nt, Human
gugagcaguggccaggguccua

SEQ ID NO: 716308 - RNA, 22 nt, Human
uuucagaggaggaaggcaguua

SEQ ID NO: 716309 - RNA, 22 nt, Human
aggaacugggcucagcaaacau

SEQ ID NO: 716310 - RNA, 19 nt, Human
cucuggccucuggaugcug

SEQ ID NO: 716311 - RNA, 22 nt, Human
cagaggccuauccaguguccau

SEQ ID NO: 716312 - RNA, 17 nt, Human
ucugugauaguguagau

SEQ ID NO: 716313 - RNA, 23 nt, Human
ugaggaaguaauuguaaaggucu

SEQ ID NO: 716314 - RNA, 22 nt, Human
uuggaaggaauuaaggucauga

SEQ ID NO: 716315 - RNA, 22 nt, Human
uugcuuccucuaguuucuugaa

SEQ ID NO: 716316 - RNA, 20 nt, Human
ucucuggccagaaacaacag

SEQ ID NO: 716317 - RNA, 22 nt, Human
gagagcugcauucucagacaca

SEQ ID NO: 716318 - RNA, 22 nt, Human
ugacuauuuuuuauagauucca

SEQ ID NO: 716319 - RNA, 22 nt, Human
aauuucuaauugaaucucucuu

SEQ ID NO: 716320 - RNA, 22 nt, Human
auuggcacugcacaugauugcu

SEQ ID NO: 716321 - RNA, 23 nt, Human
aaguacauauauuuagauaguga

SEQ ID NO: 716322 - RNA, 22 nt, Human
auuccuuggcauucuggacuug

SEQ ID NO: 716323 - RNA, 22 nt, Human
guugaaauccuaacccccuagu

SEQ ID NO: 716324 - RNA, 22 nt, Human
cugcuccuggucauccuccacu

SEQ ID NO: 716325 - RNA, 22 nt, Human
uguaugcagggcuuguaugcag

SEQ ID NO: 716326 - RNA, 22 nt, Human
agguacauuugauaaaaauagc

SEQ ID NO: 716327 - RNA, 22 nt, Human
uagugcuuggcccuaccagaua

SEQ ID NO: 716328 - RNA, 22 nt, Human
caguaaauaguggagauguggg

SEQ ID NO: 716329 - RNA, 22 nt, Human
ucacauuugauaaugcccauug

SEQ ID NO: 716330 - RNA, 22 nt, Human
aggagcugggcugcugcuggga

SEQ ID NO: 716331 - RNA, 22 nt, Human
ugauuuuacuuagcaugauguu

SEQ ID NO: 716332 - RNA, 22 nt, Human
gagcugugaaaagugccugggg

SEQ ID NO: 716333 - RNA, 22 nt, Human
uuagggaaggcugcugucagcu

SEQ ID NO: 716334 - RNA, 22 nt, Human
gcccaggaugguguguaguggu

SEQ ID NO: 716335 - RNA, 17 nt, Human
aggcuccuccuaagguc

SEQ ID NO: 716336 - RNA, 22 nt, Human
ucuuuggcugccugaagcccaa

SEQ ID NO: 716337 - RNA, 22 nt, Human
ugcauaguucuccuuccuccuc

SEQ ID NO: 716338 - RNA, 22 nt, Human
acccucagaguaggcacugcug

SEQ ID NO: 716339 - RNA, 22 nt, Human
cauccauagccucaauaaauag

SEQ ID NO: 716340 - RNA, 22 nt, Human
uacuugcuuggauuucaccaga

SEQ ID NO: 716341 - RNA, 22 nt, Human
uaguuucuucaccuguaaaaug

SEQ ID NO: 716342 - RNA, 22 nt, Human
uucagugucacaagagcaagcc

SEQ ID NO: 716343 - RNA, 22 nt, Human
uuuaaauucugucugccgcuua

SEQ ID NO: 716344 - RNA, 22 nt, Human
uauucagugcgggaacucagcc

SEQ ID NO: 716345 - RNA, 22 nt, Human
cagcaaggccauuggaugcagu

SEQ ID NO: 716346 - RNA, 22 nt, Human
cagaggcuagacugugcuuccu

SEQ ID NO: 716347 - RNA, 22 nt, Human
ucuguggcaugguaucuggagg

SEQ ID NO: 716348 - RNA, 22 nt, Human
ccaguguucaucaagaaaaugu

SEQ ID NO: 716349 - RNA, 22 nt, Human
auaucacagcucuuucauugcu

SEQ ID NO: 716350 - RNA, 22 nt, Human
acaaggcugaacagugaagccg

SEQ ID NO: 716351 - RNA, 22 nt, Human
cugagcccuugcuuaugcuucc

SEQ ID NO: 716352 - RNA, 22 nt, Human
uuauuuccuagggaauuugccu

SEQ ID NO: 716353 - RNA, 22 nt, Human
uuuccuuccaaaugcccgggag

SEQ ID NO: 716354 - RNA, 22 nt, Human
auuacagugccaccucgugguc

SEQ ID NO: 716355 - RNA, 15 nt, Human
ugcagagguaccugg

SEQ ID NO: 716356 - RNA, 22 nt, Human
uaagaauuguguugaauagagu

SEQ ID NO: 716357 - RNA, 22 nt, Human
uaguaugggaagaacuuuguag

SEQ ID NO: 716358 - RNA, 22 nt, Human
auccacagaaggaacuugaaag

SEQ ID NO: 716359 - RNA, 22 nt, Human
agaucaaagccaugagagauuu

SEQ ID NO: 716360 - RNA, 22 nt, Human
uguuugcaacaacuagauggag

SEQ ID NO: 716361 - RNA, 22 nt, Human
agggaggaucugcuccuugucu

SEQ ID NO: 716362 - RNA, 22 nt, Human
ccagcugcagguguuccagaug

SEQ ID NO: 716363 - RNA, 22 nt, Human
cuugaugacucaggaggaggag

SEQ ID NO: 716364 - RNA, 22 nt, Human
ugauggaagagcuaacaauauc

SEQ ID NO: 716365 - RNA, 22 nt, Human
aggccucagcucagugugacag

SEQ ID NO: 716366 - RNA, 22 nt, Human
uuaacauuugugaagcauuuag

SEQ ID NO: 716367 - RNA, 22 nt, Human
uucagggagagcgggacgggug

SEQ ID NO: 716368 - RNA, 22 nt, Human
uaaaugcuaucgcauaaaaccu

SEQ ID NO: 716369 - RNA, 22 nt, Human
uuucuuguuucauggugucuca

SEQ ID NO: 716370 - RNA, 22 nt, Human
caaggcagcuauugucuccaua

SEQ ID NO: 716371 - RNA, 22 nt, Human
ucugcauuuuuaacaagauccc

SEQ ID NO: 716372 - RNA, 22 nt, Human
ggccugagcuugggcagcguau

SEQ ID NO: 716373 - RNA, 22 nt, Human
ugggaaggauacguuacaagau

SEQ ID NO: 716374 - RNA, 22 nt, Human
ucagguggcugguugcuggcua

SEQ ID NO: 716375 - RNA, 22 nt, Human
cccacaggcccugcugccuuga

SEQ ID NO: 716376 - RNA, 22 nt, Human
ucugggaagauguuucaaaggu

SEQ ID NO: 716377 - RNA, 22 nt, Human
aagcugccauagaacgagaggu

SEQ ID NO: 716378 - RNA, 22 nt, Human
agcaaagcuuccauaaagcagc

SEQ ID NO: 716379 - RNA, 17 nt, Human
ugagagcagggcugggc

SEQ ID NO: 716380 - RNA, 22 nt, Human
cagagguuaccuagagcaagaa

SEQ ID NO: 716381 - RNA, 22 nt, Human
gggcucugcgcucagcuccagc

SEQ ID NO: 716382 - RNA, 18 nt, Human
agcugguggggagacagc

SEQ ID NO: 716383 - RNA, 22 nt, Human
uguaagaaaaguaaauagugac

SEQ ID NO: 716384 - RNA, 22 nt, Human
cguguggucccggcaaggcaag

SEQ ID NO: 716385 - RNA, 22 nt, Human
cauuacuucucaugcuucaugc

SEQ ID NO: 716386 - RNA, 22 nt, Human
aucuaggauuugaaugcacagu

SEQ ID NO: 716387 - RNA, 22 nt, Human
gggcucuggauggagccugcag

SEQ ID NO: 716388 - RNA, 22 nt, Human
cauguguuaaucuuucugcaaa

SEQ ID NO: 716389 - RNA, 17 nt, Human
uuuucuccugcccauuc

SEQ ID NO: 716390 - RNA, 22 nt, Human
gcauuucugugcauacacauga

SEQ ID NO: 716391 - RNA, 22 nt, Human
gagcuccagcaucucugccaaa

SEQ ID NO: 716392 - RNA, 22 nt, Human
cacugcuuuuucuccucacugg

SEQ ID NO: 716393 - RNA, 22 nt, Human
uauaaagaauccagaagagaca

SEQ ID NO: 716394 - RNA, 22 nt, Human
aaacugauaaaauaaguacauu

SEQ ID NO: 716395 - RNA, 22 nt, Human
aagcauuuuaguaaugaacuug

SEQ ID NO: 716396 - RNA, 22 nt, Human
cacauucuugaguuacagucua

SEQ ID NO: 716397 - RNA, 22 nt, Human
uucuacaugguugcucagaggg

SEQ ID NO: 716398 - RNA, 22 nt, Human
cagagauggggccagcugcucc

SEQ ID NO: 716399 - RNA, 22 nt, Human
aauacagagaauguuauuugga

SEQ ID NO: 716400 - RNA, 22 nt, Human
cccaggaaaagcagugccagca

SEQ ID NO: 716401 - RNA, 22 nt, Human
gugcucuccuggcugcccugac

SEQ ID NO: 716402 - RNA, 22 nt, Human
accuccagcuuuuuagagacau

SEQ ID NO: 716403 - RNA, 22 nt, Human
auccuuccagaguuauucucaa

SEQ ID NO: 716404 - RNA, 22 nt, Human
cguggccacccaguggugcgug

SEQ ID NO: 716405 - RNA, 22 nt, Human
ggcagcaguuacaaaugugcag

SEQ ID NO: 716406 - RNA, 22 nt, Human
acagcaggcaugaagaaauguu

SEQ ID NO: 716407 - RNA, 22 nt, Human
aguacaguagggugcuguuagu

SEQ ID NO: 716408 - RNA, 22 nt, Human
uggcuucauucuguaguuaaaa

SEQ ID NO: 716409 - RNA, 20 nt, Human
agucacaguaucagucuuag

SEQ ID NO: 716410 - RNA, 22 nt, Human
uggccugaguugucugcaggcc

SEQ ID NO: 716411 - RNA, 22 nt, Human
agucaugacuccauuggucaag

SEQ ID NO: 716412 - RNA, 22 nt, Human
gggcgaggacugacucugggca

SEQ ID NO: 716413 - RNA, 22 nt, Human
uuucaagagcaggaaaaagguc

SEQ ID NO: 716414 - RNA, 22 nt, Human
gcacaggaggccgaugcucaug

SEQ ID NO: 716415 - RNA, 22 nt, Human
ucagaggagcugcagaacgcug

SEQ ID NO: 716416 - RNA, 22 nt, Human
ccccagcacucugacucuuacc

SEQ ID NO: 716417 - RNA, 22 nt, Human
ugcuggcuguauaugugagagu

SEQ ID NO: 716418 - RNA, 21 nt, Human
acagaguaguugaaacagaga

SEQ ID NO: 716419 - RNA, 22 nt, Human
uacauacauguauguguguauu

SEQ ID NO: 716420 - RNA, 18 nt, Human
ucccucagaauuauagaa

SEQ ID NO: 716421 - RNA, 22 nt, Human
cuucuugcaauuuucaucuuau

SEQ ID NO: 716422 - RNA, 23 nt, Human
ggccuggcccagggcccugauga

SEQ ID NO: 716423 - RNA, 22 nt, Human
gggcugcugcccaggaggcacc

SEQ ID NO: 716424 - RNA, 22 nt, Human
gcuguucagggcacucaugggc

SEQ ID NO: 716425 - RNA, 22 nt, Human
ucccagaggcaguugguaacuu

SEQ ID NO: 716426 - RNA, 22 nt, Human
gucacacagguugaaaugcagu

SEQ ID NO: 716427 - RNA, 22 nt, Human
ccugggaaggugaggcccugga

SEQ ID NO: 716428 - RNA, 22 nt, Human
ucaguuucuccaucgcuccagu

SEQ ID NO: 716429 - RNA, 22 nt, Human
agggacacgagguccugcuggg

SEQ ID NO: 716430 - RNA, 22 nt, Human
aagcucagcagccaggcccugu

SEQ ID NO: 716431 - RNA, 22 nt, Human
uucaaacaguguagaauauaug

SEQ ID NO: 716432 - RNA, 22 nt, Human
gucaggacaagguggucuccag

SEQ ID NO: 716433 - RNA, 22 nt, Human
gugcaaaaguaauggcaguuuu

SEQ ID NO: 716434 - RNA, 22 nt, Human
cagaggcauauaauugcugggg

SEQ ID NO: 716435 - RNA, 22 nt, Human
gcaagagcgcucucuuucauua

SEQ ID NO: 716436 - RNA, 22 nt, Human
acagagauggcuuuucagaggc

SEQ ID NO: 716437 - RNA, 22 nt, Human
aaugugucauuucccacaggug

SEQ ID NO: 716438 - RNA, 22 nt, Human
uuuacagaauguugaauuuggg

SEQ ID NO: 716439 - RNA, 22 nt, Human
gcagcuggugcaaaugucacuc

SEQ ID NO: 716440 - RNA, 22 nt, Human
uacauuaaggauauggacauga

SEQ ID NO: 716441 - RNA, 22 nt, Human
uggagagucucaaggcaggaaa

SEQ ID NO: 716442 - RNA, 22 nt, Human
agaaaaggcuugaagagguuuu

SEQ ID NO: 716443 - RNA, 22 nt, Human
gugggcagauuauagaugaugc

SEQ ID NO: 716444 - RNA, 22 nt, Human
auacaguagacaaucucaugaa

SEQ ID NO: 716445 - RNA, 23 nt, Human
ccagcgcucacucagagcauguu

SEQ ID NO: 716446 - RNA, 22 nt, Human
ucucugggguagggcccaggac

SEQ ID NO: 716447 - RNA, 22 nt, Human
uuuaggauaacuccaguuuucc

SEQ ID NO: 716448 - RNA, 22 nt, Human
cccaguggggagcugagguuca

SEQ ID NO: 716449 - RNA, 22 nt, Human
uaguacaguuuuggcacaugga

SEQ ID NO: 716450 - RNA, 22 nt, Human
uacagcuugauguuuguguguu

SEQ ID NO: 716451 - RNA, 22 nt, Human
aucuacaggauuuuacagaguu

SEQ ID NO: 716452 - RNA, 22 nt, Human
ucaguuuucucaucuguaauuu

SEQ ID NO: 716453 - RNA, 21 nt, Human
uucagcaguccucuagagaua

SEQ ID NO: 716454 - RNA, 22 nt, Human
cauucccugucucuucaauccu

SEQ ID NO: 716455 - RNA, 22 nt, Human
uccccaaguaaagauccugaga

SEQ ID NO: 716456 - RNA, 20 nt, Human
aacauuguuuguaaaagcag

SEQ ID NO: 716457 - RNA, 22 nt, Human
acauugaagugucuggccuccu

SEQ ID NO: 716458 - RNA, 22 nt, Human
gugaaauuguauuuggcauuga

SEQ ID NO: 716459 - RNA, 23 nt, Human
gaggcagcuccugcagugcccug

SEQ ID NO: 716460 - RNA, 19 nt, Human
ucaaguccuaggcccacaa

SEQ ID NO: 716461 - RNA, 22 nt, Human
aagguauaucugauccaugagg

SEQ ID NO: 716462 - RNA, 22 nt, Human
aucuuuuuaucuguuuggaaca

SEQ ID NO: 716463 - RNA, 22 nt, Human
cacaaaugugcagaaaugugag

SEQ ID NO: 716464 - RNA, 22 nt, Human
uuuagagaggcucuguaaaaug

SEQ ID NO: 716465 - RNA, 23 nt, Human
gcucugagggcuuaucccuccca

SEQ ID NO: 716466 - RNA, 22 nt, Human
gcucaaugcucaaugcugcaaa

SEQ ID NO: 716467 - RNA, 22 nt, Human
cucuuuucaaaauuucacugca

SEQ ID NO: 716468 - RNA, 22 nt, Human
ugagaauuuuuggcagaaacaa

SEQ ID NO: 716469 - RNA, 22 nt, Human
ucagaggugcaagaaguucuga

SEQ ID NO: 716470 - RNA, 22 nt, Human
auuguauuagcacaauacaauu

SEQ ID NO: 716471 - RNA, 22 nt, Human
cuacauguagguuuccuuaauu

SEQ ID NO: 716472 - RNA, 22 nt, Human
uucaggauuauacucucuuccc

SEQ ID NO: 716473 - RNA, 22 nt, Human
agggagaggagcguuucacauc

SEQ ID NO: 716474 - RNA, 22 nt, Human
augcugagacuggagcagcugg

SEQ ID NO: 716475 - RNA, 22 nt, Human
aaggagggaaagcagugcuucu

SEQ ID NO: 716476 - RNA, 22 nt, Human
acagcagaccacuacuaguagg

SEQ ID NO: 716477 - RNA, 22 nt, Human
aagaaaccaacccugccagcac

SEQ ID NO: 716478 - RNA, 22 nt, Human
cacuuuaaaacugacagcccuu

SEQ ID NO: 716479 - RNA, 22 nt, Human
cuggcugcuugggacagccaug

SEQ ID NO: 716480 - RNA, 22 nt, Human
gaaaauuuagaacugaacuucu

SEQ ID NO: 716481 - RNA, 22 nt, Human
ugauucuagguccauuauuugc

SEQ ID NO: 716482 - RNA, 22 nt, Human
ucccaggaaaacacucgaggac

SEQ ID NO: 716483 - RNA, 22 nt, Human
agcugcagcccuccugcauggc

SEQ ID NO: 716484 - RNA, 22 nt, Human
ugauugacuuuagaauagcacu

SEQ ID NO: 716485 - RNA, 23 nt, Human
caaauguaguguguccaccccug

SEQ ID NO: 716486 - RNA, 22 nt, Human
uuagggcaggcaugagagaacu

SEQ ID NO: 716487 - RNA, 19 nt, Human
uccuggcacaguggaacca

SEQ ID NO: 716488 - RNA, 22 nt, Human
aaagcaugauuagauagaugau

SEQ ID NO: 716489 - RNA, 21 nt, Human
ccuucuccacagggucuccgg

SEQ ID NO: 716490 - RNA, 22 nt, Human
uuccucagcucagcgagagaga

SEQ ID NO: 716491 - RNA, 22 nt, Human
cagggucaggaggaucuggcuu

SEQ ID NO: 716492 - RNA, 22 nt, Human
gccagcagggcggagccaucua

SEQ ID NO: 716493 - RNA, 21 nt, Human
uguccuggucacugcucuccc

SEQ ID NO: 716494 - RNA, 22 nt, Human
ggcuaggcaggcucagagccua

SEQ ID NO: 716495 - RNA, 22 nt, Human
guacaaguucuacucuauaaau

SEQ ID NO: 716496 - RNA, 20 nt, Human
accaggccccgggcccugca

SEQ ID NO: 716497 - RNA, 22 nt, Human
caaugugugcuuacaggccagu

SEQ ID NO: 716498 - RNA, 22 nt, Human
acaugcaaaugugcaugcaugu

SEQ ID NO: 716499 - RNA, 22 nt, Human
cccacccacucugaccagaagc

SEQ ID NO: 716500 - RNA, 22 nt, Human
agccagcuggagaccacuguuu

SEQ ID NO: 716501 - RNA, 22 nt, Human
uauucugcuucccguggcacaa

SEQ ID NO: 716502 - RNA, 22 nt, Human
uagcucaaagguuaagugugga

SEQ ID NO: 716503 - RNA, 22 nt, Human
gcacagcuccgcuuccucacac

SEQ ID NO: 716504 - RNA, 22 nt, Human
ucauauaaguuuaaaacuaucu

SEQ ID NO: 716505 - RNA, 22 nt, Human
gcaucuucacacaaagccagug

SEQ ID NO: 716506 - RNA, 22 nt, Human
uauuuaucgagugucuacuaug

SEQ ID NO: 716507 - RNA, 22 nt, Human
aaaugcugcagcuaguguguuu

SEQ ID NO: 716508 - RNA, 22 nt, Human
gcugggagcaaguacucaucuu

SEQ ID NO: 716509 - RNA, 22 nt, Human
agcaguguucaaugauacacug

SEQ ID NO: 716510 - RNA, 22 nt, Human
ucacaucaacauuauagcauga

SEQ ID NO: 716511 - RNA, 22 nt, Human
uggcucugaucagauguccagu

SEQ ID NO: 716512 - RNA, 22 nt, Human
agagucaguuaugucaagugcu

SEQ ID NO: 716513 - RNA, 22 nt, Human
gccuggaguucagccaaguccc

SEQ ID NO: 716514 - RNA, 22 nt, Human
ugcuggcaucuuaauguucugu

SEQ ID NO: 716515 - RNA, 22 nt, Human
cacacagaaccgcucgccacuu

SEQ ID NO: 716516 - RNA, 23 nt, Human
cccagaccuugugcugcccuugg

SEQ ID NO: 716517 - RNA, 22 nt, Human
acaaugcaauaggagcuagaaa

SEQ ID NO: 716518 - RNA, 22 nt, Human
acacuuuagaaaaaagaauggu

SEQ ID NO: 716519 - RNA, 22 nt, Human
gagccugggacugggggucaug

SEQ ID NO: 716520 - RNA, 22 nt, Human
ucauugaagugacugaaagauu

SEQ ID NO: 716521 - RNA, 22 nt, Human
cggcuggguagaggugccgggu

SEQ ID NO: 716522 - RNA, 22 nt, Human
gcagccucaaacuccccagcuc

SEQ ID NO: 716523 - RNA, 22 nt, Human
ggguggagguggguuuugagau

SEQ ID NO: 716524 - RNA, 22 nt, Human
uccuggaggacagaggcaucuc

SEQ ID NO: 716525 - RNA, 21 nt, Human
uagcacagcuguagacaguuu

SEQ ID NO: 716526 - RNA, 22 nt, Human
aggugggaacccagcagggccc

SEQ ID NO: 716527 - RNA, 22 nt, Human
gcucccugaaaagaacaaaguc

SEQ ID NO: 716528 - RNA, 22 nt, Human
cagcuccugggccaucuccuag

SEQ ID NO: 716529 - RNA, 21 nt, Human
cucugcugucuaccagcuguu

SEQ ID NO: 716530 - RNA, 22 nt, Human
uucuaccuacccucugcauaca

SEQ ID NO: 716531 - RNA, 22 nt, Human
gcuguguggcugugccgucacg

SEQ ID NO: 716532 - RNA, 22 nt, Human
agagcccucuucacugccccuu

SEQ ID NO: 716533 - RNA, 22 nt, Human
aaggagcucccggcagaccagg

SEQ ID NO: 716534 - RNA, 22 nt, Human
ccucagagacaguaacuggaau

SEQ ID NO: 716535 - RNA, 22 nt, Human
guuuauuaacugucaagugauu

SEQ ID NO: 716536 - RNA, 22 nt, Human
aaaccucuggguuccgugguuu

SEQ ID NO: 716537 - RNA, 20 nt, Human
ugaaaaggucaggagacaug

SEQ ID NO: 716538 - RNA, 22 nt, Human
cagcauggagacaaagugggca

SEQ ID NO: 716539 - RNA, 22 nt, Human
cguuuauuuugaagauuccacu

SEQ ID NO: 716540 - RNA, 22 nt, Human
ucucccacuggccuuguaugau

SEQ ID NO: 716541 - RNA, 22 nt, Human
cugggccacuccagaugcccac

SEQ ID NO: 716542 - RNA, 23 nt, Human
ugggucucuaguacaggcaggca

SEQ ID NO: 716543 - RNA, 22 nt, Human
auauguuuuucacagguuuaag

SEQ ID NO: 716544 - RNA, 18 nt, Human
cugggucuccaggcugcc

SEQ ID NO: 716545 - RNA, 19 nt, Human
gauuuaaacguggcucuau

SEQ ID NO: 716546 - RNA, 23 nt, Human
gaccuggcuuugaaucuugacuc

SEQ ID NO: 716547 - RNA, 22 nt, Human
ggcugugcgucauccggcugca

SEQ ID NO: 716548 - RNA, 22 nt, Human
cucagugugaaugcucaguaaa

SEQ ID NO: 716549 - RNA, 22 nt, Human
ugacaggaugaugagcaggggg

SEQ ID NO: 716550 - RNA, 22 nt, Human
gaagugggcuuuguggucagcu

SEQ ID NO: 716551 - RNA, 22 nt, Human
ucacuugauccuucccugaaau

SEQ ID NO: 716552 - RNA, 22 nt, Human
cagggagccugaauguuccagg

SEQ ID NO: 716553 - RNA, 22 nt, Human
uagucaaauggcagggauauuu

SEQ ID NO: 716554 - RNA, 22 nt, Human
cugagccagcuggcaugugcua

SEQ ID NO: 716555 - RNA, 21 nt, Human
ggucaguggcuuucuugcacc

SEQ ID NO: 716556 - RNA, 22 nt, Human
ugaguucaaagacagguauagg

SEQ ID NO: 716557 - RNA, 23 nt, Human
ugaguguguucccugugagauuu

SEQ ID NO: 716558 - RNA, 22 nt, Human
ugcaggugucugggggcaacag

SEQ ID NO: 716559 - RNA, 22 nt, Human
uuccaugaaggagacugagaag

SEQ ID NO: 716560 - RNA, 22 nt, Human
cuggagaagagguaguauguag

SEQ ID NO: 716561 - RNA, 22 nt, Human
auucagagauuguuauucagac

SEQ ID NO: 716562 - RNA, 22 nt, Human
cagccaggagcucccccugcuc

SEQ ID NO: 716563 - RNA, 20 nt, Human
cugccuggaggccucuaccu

SEQ ID NO: 716564 - RNA, 22 nt, Human
uuuuggucaacaguacaugcgg

SEQ ID NO: 716565 - RNA, 22 nt, Human
auucaguuaaaaacuguacuuc

SEQ ID NO: 716566 - RNA, 17 nt, Human
auucuuugaugucucug

SEQ ID NO: 716567 - RNA, 22 nt, Human
guuuugaaaugaaagaaccaag

SEQ ID NO: 716568 - RNA, 22 nt, Human
ucucuugacugcuaaaauuaga

SEQ ID NO: 716569 - RNA, 22 nt, Human
aucauggaagccuaucuugaga

SEQ ID NO: 716570 - RNA, 22 nt, Human
cagggcaggacagauacauuac

SEQ ID NO: 716571 - RNA, 23 nt, Human
uuaggcacuuaguagggccagag

SEQ ID NO: 716572 - RNA, 22 nt, Human
gaggaaaauaacaacuaagggc

SEQ ID NO: 716573 - RNA, 22 nt, Human
uguauuaacauuaauaaaaugg

SEQ ID NO: 716574 - RNA, 22 nt, Human
gucuuuuucuacgauagcgccu

SEQ ID NO: 716575 - RNA, 22 nt, Human
cacuguauuauuaggaaugaca

SEQ ID NO: 716576 - RNA, 22 nt, Human
gaggcuaagguucugccagaag

SEQ ID NO: 716577 - RNA, 22 nt, Human
aaaguucaugguguuauagaaa

SEQ ID NO: 716578 - RNA, 21 nt, Human
agaaaaacacgauauaagccc

SEQ ID NO: 716579 - RNA, 22 nt, Human
uuaaggaaggagucuuaaaugg

SEQ ID NO: 716580 - RNA, 22 nt, Human
caggcuggaguuaccuuuaggg

SEQ ID NO: 716581 - RNA, 22 nt, Human
ucaggauggcuucugcaucaaa

SEQ ID NO: 716582 - RNA, 22 nt, Human
guucuucaggccauccucccag

SEQ ID NO: 716583 - RNA, 22 nt, Human
ucacugaaagaaugacauuaug

SEQ ID NO: 716584 - RNA, 22 nt, Human
gcccuccuuugcuucuccuagu

SEQ ID NO: 716585 - RNA, 22 nt, Human
accccacagcauacaaaggcac

SEQ ID NO: 716586 - RNA, 22 nt, Human
uuuguucauuuugagcucauca

SEQ ID NO: 716587 - RNA, 22 nt, Human
uccuucagcugcuaggaaauga

SEQ ID NO: 716588 - RNA, 19 nt, Human
uuuacagggaauggagacc

SEQ ID NO: 716589 - RNA, 22 nt, Human
ucugcagaagccauggccuugc

SEQ ID NO: 716590 - RNA, 22 nt, Human
cccacacacauuuaugauagga

SEQ ID NO: 716591 - RNA, 22 nt, Human
accagagcuggcagaguaucaa

SEQ ID NO: 716592 - RNA, 22 nt, Human
acuggauggugucaugagcagc

SEQ ID NO: 716593 - RNA, 22 nt, Human
uaggcuggaggaagcagugccu

SEQ ID NO: 716594 - RNA, 17 nt, Human
cucugggucuccugcuu

SEQ ID NO: 716595 - RNA, 22 nt, Human
uucauguaggcugcaaugcaca

SEQ ID NO: 716596 - RNA, 22 nt, Human
uuugcaaacacuuaagaagaga

SEQ ID NO: 716597 - RNA, 22 nt, Human
ggaggagacccugugucaguuu

SEQ ID NO: 716598 - RNA, 22 nt, Human
uaugucacauuguaacagugug

SEQ ID NO: 716599 - RNA, 21 nt, Human
cagggccaauccugaccucua

SEQ ID NO: 716600 - RNA, 22 nt, Human
aguguaucaugguuggcagaca

SEQ ID NO: 716601 - RNA, 22 nt, Human
gagagcuggguucaaguagcug

SEQ ID NO: 716602 - RNA, 22 nt, Human
augcgagugaugcagaguggcu

SEQ ID NO: 716603 - RNA, 22 nt, Human
uaacagaaaggcucaggugcuc

SEQ ID NO: 716604 - RNA, 22 nt, Human
uugcuuugguagcagcuauaga

SEQ ID NO: 716605 - RNA, 22 nt, Human
acguguguuggucagggggccc

SEQ ID NO: 716606 - RNA, 22 nt, Human
uucucugggguucaguaucucu

SEQ ID NO: 716607 - RNA, 22 nt, Human
acaagagucugcauuucuaaca

SEQ ID NO: 716608 - RNA, 22 nt, Human
gucucacacagaguagauuuug

SEQ ID NO: 716609 - RNA, 18 nt, Human
ggcagaugacaggagaga

SEQ ID NO: 716610 - RNA, 22 nt, Human
gcacaugagcugcugggauggg

SEQ ID NO: 716611 - RNA, 22 nt, Human
ggguggagccaguugacucugu

SEQ ID NO: 716612 - RNA, 22 nt, Human
caggcauggugagaacucagcc

SEQ ID NO: 716613 - RNA, 22 nt, Human
uacuauacucuccauuuuauag

SEQ ID NO: 716614 - RNA, 22 nt, Human
cccagagcugagggggcacguu

SEQ ID NO: 716615 - RNA, 22 nt, Human
caucacaaaaugauuauucccu

SEQ ID NO: 716616 - RNA, 22 nt, Human
cuggcucugucacccuuucucc

SEQ ID NO: 716617 - RNA, 18 nt, Human
ugauucugugaugugguc

SEQ ID NO: 716618 - RNA, 22 nt, Human
gcuugcaugauuggagugggug

SEQ ID NO: 716619 - RNA, 22 nt, Human
cccagacuccucuggcuggugg

SEQ ID NO: 716620 - RNA, 22 nt, Human
aaggccuugccugacagcacca

SEQ ID NO: 716621 - RNA, 22 nt, Human
cagcuguugcagcacugagaga

SEQ ID NO: 716622 - RNA, 21 nt, Human
auauuucucauaagguuaugg

SEQ ID NO: 716623 - RNA, 21 nt, Human
gcuggcuuuauucugcguuug

SEQ ID NO: 716624 - RNA, 22 nt, Human
ugaggcuugucucagauggggg

SEQ ID NO: 716625 - RNA, 22 nt, Human
cucagaaaggguugcugagggc

SEQ ID NO: 716626 - RNA, 18 nt, Human
ucaaaauauuucugugga

SEQ ID NO: 716627 - RNA, 22 nt, Human
cugcugugugcuuacuuggguu

SEQ ID NO: 716628 - RNA, 22 nt, Human
acacuaaugagaaaggaauuaa

SEQ ID NO: 716629 - RNA, 22 nt, Human
cuuaugcugagaaugaaagaau

SEQ ID NO: 716630 - RNA, 22 nt, Human
uaagacaauucuucagucacaa

SEQ ID NO: 716631 - RNA, 23 nt, Human
uggcauagugaggggcacagaga

SEQ ID NO: 716632 - RNA, 20 nt, Human
ccugugcuuaucacuugcug

SEQ ID NO: 716633 - RNA, 22 nt, Human
auagaaaggucuuuggcagaca

SEQ ID NO: 716634 - RNA, 20 nt, Human
aacacugaggccuacucuuc

SEQ ID NO: 716635 - RNA, 19 nt, Human
uggccagguacugucugcu

SEQ ID NO: 716636 - RNA, 22 nt, Human
aacuauauaaucugaaagugaa

SEQ ID NO: 716637 - RNA, 22 nt, Human
aacuacaauauguauguaugua

SEQ ID NO: 716638 - RNA, 22 nt, Human
cuuagaaaugcagauucucagg

SEQ ID NO: 716639 - RNA, 22 nt, Human
gccucugcaccaguacugugcc

SEQ ID NO: 716640 - RNA, 23 nt, Human
ugggccaguucuguugaaagcca

SEQ ID NO: 716641 - RNA, 22 nt, Human
aucagaauggagcccacauggu

SEQ ID NO: 716642 - RNA, 22 nt, Human
uugugucuggaaugcguggagc

SEQ ID NO: 716643 - RNA, 22 nt, Human
agcacugggaacgcauggggcc

SEQ ID NO: 716644 - RNA, 22 nt, Human
ugggccacaguucaccaauccc

SEQ ID NO: 716645 - RNA, 22 nt, Human
uucuauaugacuucuaggcagg

SEQ ID NO: 716646 - RNA, 22 nt, Human
acugggaguucuccaugucccu

SEQ ID NO: 716647 - RNA, 22 nt, Human
gagucacauacuauguaauaga

SEQ ID NO: 716648 - RNA, 22 nt, Human
uccaggagucagacagauggug

SEQ ID NO: 716649 - RNA, 22 nt, Human
caggcauguggcccagggguga

SEQ ID NO: 716650 - RNA, 22 nt, Human
cugcugggcuccucaugugacu

SEQ ID NO: 716651 - RNA, 21 nt, Human
caauuacagauggcucagggg

SEQ ID NO: 716652 - RNA, 22 nt, Human
caggcacacauccgugagagau

SEQ ID NO: 716653 - RNA, 22 nt, Human
gauacagacaccacucuuuucc

SEQ ID NO: 716654 - RNA, 22 nt, Human
uggaacacaagucauugagggg

SEQ ID NO: 716655 - RNA, 22 nt, Human
guucauauuuaacuaagauagg

SEQ ID NO: 716656 - RNA, 22 nt, Human
gccaagcucuuuaaaggccaaa

SEQ ID NO: 716657 - RNA, 22 nt, Human
gaagaaauguguucaagguagg

SEQ ID NO: 716658 - RNA, 22 nt, Human
agucucugggcaugguugugac

SEQ ID NO: 716659 - RNA, 22 nt, Human
uccuagaagauggaucagagaa

SEQ ID NO: 716660 - RNA, 22 nt, Human
auguagcaugaggcacugugcc

SEQ ID NO: 716661 - RNA, 22 nt, Human
agcugagcauuugauccaccuc

SEQ ID NO: 716662 - RNA, 22 nt, Human
caguauuuguucccuaucaaug

SEQ ID NO: 716663 - RNA, 22 nt, Human
uagauguuuugauauuugcuga

SEQ ID NO: 716664 - RNA, 22 nt, Human
ugccagcaguagcaguaggcca

SEQ ID NO: 716665 - RNA, 22 nt, Human
uccuucagugucccgcucaggu

SEQ ID NO: 716666 - RNA, 22 nt, Human
uugacagaugugaaagugagca

SEQ ID NO: 716667 - RNA, 22 nt, Human
guuauucaauggcuuauaagga

SEQ ID NO: 716668 - RNA, 22 nt, Human
cuguuguauuuccaacuaugua

SEQ ID NO: 716669 - RNA, 22 nt, Human
guguugcucuguuuggggguug

SEQ ID NO: 716670 - RNA, 22 nt, Human
cauuuguuaaccaguguggauu

SEQ ID NO: 716671 - RNA, 22 nt, Human
cucuuuuucaccucugucagcg

SEQ ID NO: 716672 - RNA, 22 nt, Human
ccacuggaagaugcugagguca

SEQ ID NO: 716673 - RNA, 18 nt, Human
ggaaaaggagugucuagc

SEQ ID NO: 716674 - RNA, 22 nt, Human
aaguuuaggccaaauuagauuu

SEQ ID NO: 716675 - RNA, 22 nt, Human
ccuggcugaggggccaaggacc

SEQ ID NO: 716676 - RNA, 22 nt, Human
gccuggaguagcauggcaagcc

SEQ ID NO: 716677 - RNA, 22 nt, Human
uauacuauuauugucaguuuau

SEQ ID NO: 716678 - RNA, 22 nt, Human
guggcccagcccuacagaggac

SEQ ID NO: 716679 - RNA, 22 nt, Human
agguaaggcuguaagcuaagcc

SEQ ID NO: 716680 - RNA, 22 nt, Human
aacuuaaacaagcucccaaguu

SEQ ID NO: 716681 - RNA, 22 nt, Human
ccugcacaugugugcgccugua

SEQ ID NO: 716682 - RNA, 22 nt, Human
ggcagcuguggacgucgucauu

SEQ ID NO: 716683 - RNA, 22 nt, Human
caggagucccucuggccagcau

SEQ ID NO: 716684 - RNA, 22 nt, Human
gccuuuggugacaggcaugugu

SEQ ID NO: 716685 - RNA, 22 nt, Human
guauuuuucauuccaagugaga

SEQ ID NO: 716686 - RNA, 22 nt, Human
agugcugaacauagaauggaca

SEQ ID NO: 716687 - RNA, 22 nt, Human
uuuauauguuuguacaauuaag

SEQ ID NO: 716688 - RNA, 22 nt, Human
agacaacuagaaaacuagacag

SEQ ID NO: 716689 - RNA, 22 nt, Human
gagggaccuuuacacagacauu

SEQ ID NO: 716690 - RNA, 22 nt, Human
aaacucuauaggcagaagcaau

SEQ ID NO: 716691 - RNA, 23 nt, Human
agggaagggggcuuauuccacag

SEQ ID NO: 716692 - RNA, 18 nt, Human
ggaugcugugugcuccuu

SEQ ID NO: 716693 - RNA, 22 nt, Human
gaggccacgugcuuauguuucu

SEQ ID NO: 716694 - RNA, 22 nt, Human
acauuucucccugcaugccugc

SEQ ID NO: 716695 - RNA, 22 nt, Human
ggcagcuguaagaugagugaau

SEQ ID NO: 716696 - RNA, 22 nt, Human
cucucuggacuugaguaucagc

SEQ ID NO: 716697 - RNA, 22 nt, Human
ucugugacucauaucuguagau

SEQ ID NO: 716698 - RNA, 22 nt, Human
cagcccuggccucuucgcuuuc

SEQ ID NO: 716699 - RNA, 19 nt, Human
aggcugcccagucucugcc

SEQ ID NO: 716700 - RNA, 22 nt, Human
ucugucacucccugaugaugaa

SEQ ID NO: 716701 - RNA, 22 nt, Human
uauacacauuuuuaccuauagu

SEQ ID NO: 716702 - RNA, 22 nt, Human
uaccaguaauaguaugugagau

SEQ ID NO: 716703 - RNA, 19 nt, Human
aaguucucagaguucaaag

SEQ ID NO: 716704 - RNA, 22 nt, Human
gauaaaguagauuuguucuaga

SEQ ID NO: 716705 - RNA, 22 nt, Human
guggcagucuuuggcaaugaca

SEQ ID NO: 716706 - RNA, 22 nt, Human
uuacacuuuaaauccagcuugu

SEQ ID NO: 716707 - RNA, 22 nt, Human
auucauucuugguaugaacagc

SEQ ID NO: 716708 - RNA, 22 nt, Human
guuacaaaggaagcuucacugc

SEQ ID NO: 716709 - RNA, 22 nt, Human
agucuuagaacuacagugccua

SEQ ID NO: 716710 - RNA, 22 nt, Human
accagcauccuuccuauuaaca

SEQ ID NO: 716711 - RNA, 22 nt, Human
gugcauuugugcaugcacaugu

SEQ ID NO: 716712 - RNA, 22 nt, Human
gcagggaugcugaggcucagug

SEQ ID NO: 716713 - RNA, 22 nt, Human
ccacagaggacaacugccuggc

SEQ ID NO: 716714 - RNA, 22 nt, Human
caggggcucccugggugccagu

SEQ ID NO: 716715 - RNA, 19 nt, Human
aggcuuggauuguggccaa

SEQ ID NO: 716716 - RNA, 22 nt, Human
gacacaggggggcgcuagaaga

SEQ ID NO: 716717 - RNA, 22 nt, Human
uguggagcucagaaguagcagu

SEQ ID NO: 716718 - RNA, 22 nt, Human
guccagccccugacucccaggc

SEQ ID NO: 716719 - RNA, 22 nt, Human
aaggcccuggcaggaagcagga

SEQ ID NO: 716720 - RNA, 21 nt, Human
uucuuucugaaucugaaguau

SEQ ID NO: 716721 - RNA, 22 nt, Human
caugcagauuugcugagauaau

SEQ ID NO: 716722 - RNA, 22 nt, Human
agcagguguauauaaggcugag

SEQ ID NO: 716723 - RNA, 22 nt, Human
augcugaaggugaauugacaau

SEQ ID NO: 716724 - RNA, 23 nt, Human
ccaggaagaggccauccacaguc

SEQ ID NO: 716725 - RNA, 22 nt, Human
uaaaugcaagggaaaggcaaga

SEQ ID NO: 716726 - RNA, 17 nt, Human
ggcugugccaggugaga

SEQ ID NO: 716727 - RNA, 22 nt, Human
gcuggagaaacugcagcugagg

SEQ ID NO: 716728 - RNA, 22 nt, Human
ggaggccaggaugggaacucaa

SEQ ID NO: 716729 - RNA, 22 nt, Human
aagauuucucuccuggaaagca

SEQ ID NO: 716730 - RNA, 22 nt, Human
aguggcuggcauaggaacagac

SEQ ID NO: 716731 - RNA, 22 nt, Human
cucagacuugcuuuuuauggaa

SEQ ID NO: 716732 - RNA, 20 nt, Human
aggagcugaauuagaggguu

SEQ ID NO: 716733 - RNA, 22 nt, Human
uguguuuacuucuaugcaguuu

SEQ ID NO: 716734 - RNA, 22 nt, Human
cccauuuuugugugaguaauga

SEQ ID NO: 716735 - RNA, 22 nt, Human
ugccuucucuucccugggagcu

SEQ ID NO: 716736 - RNA, 18 nt, Human
acccaguuugaaggaaag

SEQ ID NO: 716737 - RNA, 22 nt, Human
aggaugggccugggauaugcuu

SEQ ID NO: 716738 - RNA, 23 nt, Human
uuucaacaaugcuuagagaaaac

SEQ ID NO: 716739 - RNA, 22 nt, Human
gccuggcagugaugucuuuugg

SEQ ID NO: 716740 - RNA, 22 nt, Human
ccucccuggccagagcagcagc

SEQ ID NO: 716741 - RNA, 22 nt, Human
cacccacauuccaucacucugc

SEQ ID NO: 716742 - RNA, 22 nt, Human
auuuauugagacuuaacaaccc

SEQ ID NO: 716743 - RNA, 20 nt, Human
ggcaggugcucgcuuggucu

SEQ ID NO: 716744 - RNA, 17 nt, Human
ccaggagagaugcuugu

SEQ ID NO: 716745 - RNA, 22 nt, Human
ugaagccagcuuuggaagacac

SEQ ID NO: 716746 - RNA, 22 nt, Human
uugucaagaaaaauggaugaag

SEQ ID NO: 716747 - RNA, 22 nt, Human
auggcucugagaaccugagcua

SEQ ID NO: 716748 - RNA, 22 nt, Human
ugucagaggcucagggucucag

SEQ ID NO: 716749 - RNA, 19 nt, Human
cagcugccuuuucuuugca

SEQ ID NO: 716750 - RNA, 22 nt, Human
agggagagguugaaaccucagu

SEQ ID NO: 716751 - RNA, 22 nt, Human
uuaauuuauguccaaaccagau

SEQ ID NO: 716752 - RNA, 22 nt, Human
cccuggugguacggcacuggca

SEQ ID NO: 716753 - RNA, 22 nt, Human
gugcugaggccaaugucagggu

SEQ ID NO: 716754 - RNA, 22 nt, Human
ucuccuaauuaaaugcucuuau

SEQ ID NO: 716755 - RNA, 22 nt, Human
cacugcuauuauuagacaaugu

SEQ ID NO: 716756 - RNA, 22 nt, Human
cuguauaugugcauacacacac

SEQ ID NO: 716757 - RNA, 18 nt, Human
guuaauuuugaaguucau

SEQ ID NO: 716758 - RNA, 22 nt, Human
ggagacacuggaaaguauuaca

SEQ ID NO: 716759 - RNA, 22 nt, Human
ucauuucuuaacuagagugaac

SEQ ID NO: 716760 - RNA, 22 nt, Human
ugauucaacuuucuugaaugca

SEQ ID NO: 716761 - RNA, 22 nt, Human
agguauuuuauagauaaguaaa

SEQ ID NO: 716762 - RNA, 17 nt, Human
ccucagcuucuuuccuc

SEQ ID NO: 716763 - RNA, 22 nt, Human
ugagcccagaagcccacucggc

SEQ ID NO: 716764 - RNA, 22 nt, Human
aucuuuucuguuugcuaugucu

SEQ ID NO: 716765 - RNA, 21 nt, Human
augauacugaagcacaacuau

SEQ ID NO: 716766 - RNA, 22 nt, Human
ugaagcagauggucuggucauu

SEQ ID NO: 716767 - RNA, 22 nt, Human
caugcuauauaggaagagcacu

SEQ ID NO: 716768 - RNA, 22 nt, Human
caggcccugggcaggaucagcc

SEQ ID NO: 716769 - RNA, 22 nt, Human
ggucccuggaagucccucuucu

SEQ ID NO: 716770 - RNA, 22 nt, Human
guucuacuuucugugucuuuga

SEQ ID NO: 716771 - RNA, 22 nt, Human
gcagagugaggaagagcuucca

SEQ ID NO: 716772 - RNA, 22 nt, Human
auuuagacuucuugcagguaau

SEQ ID NO: 716773 - RNA, 22 nt, Human
ggagcugcacgcucugaagccu

SEQ ID NO: 716774 - RNA, 22 nt, Human
cuggugaauauuggaggcauug

SEQ ID NO: 716775 - RNA, 22 nt, Human
gaugaggucuacauuguuaaaa

SEQ ID NO: 716776 - RNA, 22 nt, Human
ggugaggcguccccaccauggg

SEQ ID NO: 716777 - RNA, 22 nt, Human
aguacaauuauauuuagauggu

SEQ ID NO: 716778 - RNA, 22 nt, Human
uagaggagcggcgagcugagcu

SEQ ID NO: 716779 - RNA, 22 nt, Human
ggcauuuaguuuucauauucug

SEQ ID NO: 716780 - RNA, 22 nt, Human
agcugccucugcugguuuagaa

SEQ ID NO: 716781 - RNA, 22 nt, Human
gcugagcugaggcagggcuggg

SEQ ID NO: 716782 - RNA, 22 nt, Human
uggagacugugcuaagggaguu

SEQ ID NO: 716783 - RNA, 22 nt, Human
gagggaaaauaaaauugcagua

SEQ ID NO: 716784 - RNA, 17 nt, Human
cuguggccaccuggaug

SEQ ID NO: 716785 - RNA, 22 nt, Human
ugcugcagcagugcgggcagcu

SEQ ID NO: 716786 - RNA, 22 nt, Human
aucugaaacucugacauugucu

SEQ ID NO: 716787 - RNA, 22 nt, Human
auuguauacaagcuuaauuguu

SEQ ID NO: 716788 - RNA, 22 nt, Human
aaaauuguaggaacugaaucaa

SEQ ID NO: 716789 - RNA, 20 nt, Human
caucauuuuaaaaucucucc

SEQ ID NO: 716790 - RNA, 22 nt, Human
cuccagugcuucuagaaaauac

SEQ ID NO: 716791 - RNA, 20 nt, Human
gguagcugcugcaguuggua

SEQ ID NO: 716792 - RNA, 22 nt, Human
uguauucucucaauauuucaua

SEQ ID NO: 716793 - RNA, 22 nt, Human
ugagcugucuaugguccugucu

SEQ ID NO: 716794 - RNA, 22 nt, Human
cagacagguagggacagaacau

SEQ ID NO: 716795 - RNA, 22 nt, Human
acaugcacucucacugugcucu

SEQ ID NO: 716796 - RNA, 22 nt, Human
ucacaaauauuuuaacaguagg

SEQ ID NO: 716797 - RNA, 22 nt, Human
aagcacacaucucuggcugggu

SEQ ID NO: 716798 - RNA, 22 nt, Human
augacaguucuuuagagaugua

SEQ ID NO: 716799 - RNA, 22 nt, Human
auguguauacuugugcuuacuc

SEQ ID NO: 716800 - RNA, 22 nt, Human
aaacagcugcacugcugauguc

SEQ ID NO: 716801 - RNA, 23 nt, Human
uccaggagaaccccugucugucc

SEQ ID NO: 716802 - RNA, 22 nt, Human
uuauggcuucugugaagaauuu

SEQ ID NO: 716803 - RNA, 22 nt, Human
aguccuuccggcagauuucacu

SEQ ID NO: 716804 - RNA, 22 nt, Human
cagcucuuuuucacacaacaug

SEQ ID NO: 716805 - RNA, 22 nt, Human
ugcaaggcccagacaagagcuc

SEQ ID NO: 716806 - RNA, 22 nt, Human
aaugacauggagcaucuuuuca

SEQ ID NO: 716807 - RNA, 22 nt, Human
agcagacauaucucaugucaca

SEQ ID NO: 716808 - RNA, 22 nt, Human
agggcucugagcuggaccaccu

SEQ ID NO: 716809 - RNA, 22 nt, Human
cugugcugggugugcuuaugau

SEQ ID NO: 716810 - RNA, 22 nt, Human
ugacagggugauuaugagagcu

SEQ ID NO: 716811 - RNA, 22 nt, Human
ccugagggcgccgagcucccag

SEQ ID NO: 716812 - RNA, 22 nt, Human
ugaguccaagagccagugggaa

SEQ ID NO: 716813 - RNA, 22 nt, Human
augacaauggacauaguuaaaa

SEQ ID NO: 716814 - RNA, 22 nt, Human
aguguuuagucaaguaagacgc

SEQ ID NO: 716815 - RNA, 22 nt, Human
gggcacuguggggcccaugcug

SEQ ID NO: 716816 - RNA, 22 nt, Human
uucugucauuuagcauugucau

SEQ ID NO: 716817 - RNA, 22 nt, Human
ugccugaaugaucagucagauu

SEQ ID NO: 716818 - RNA, 19 nt, Human
gcucagagacaccuguugc

SEQ ID NO: 716819 - RNA, 22 nt, Human
uuccucucaacaugccugccgg

SEQ ID NO: 716820 - RNA, 22 nt, Human
uucucacauucagaacuuuuau

SEQ ID NO: 716821 - RNA, 22 nt, Human
ucauucuugaucacuaguuagu

SEQ ID NO: 716822 - RNA, 22 nt, Human
gacuggccuggggcugggcaca

SEQ ID NO: 716823 - RNA, 22 nt, Human
gugccugcaggugccggcuuca

SEQ ID NO: 716824 - RNA, 22 nt, Human
ucacuguaaacuaggucagucc

SEQ ID NO: 716825 - RNA, 22 nt, Human
aaauagcagccuuuaguuaaca

SEQ ID NO: 716826 - RNA, 22 nt, Human
augacauugacagaccugcugc

SEQ ID NO: 716827 - RNA, 22 nt, Human
cagugucucccccagguucugu

SEQ ID NO: 716828 - RNA, 22 nt, Human
gcaagcugaugugauagugaaa

SEQ ID NO: 716829 - RNA, 22 nt, Human
ugaacauugucacauuccuagc

SEQ ID NO: 716830 - RNA, 22 nt, Human
cacauacaaggcacacuggagg

SEQ ID NO: 716831 - RNA, 22 nt, Human
uugacaguauagcuuuaccuau

SEQ ID NO: 716832 - RNA, 22 nt, Human
uugagacacuuugggcaucacu

SEQ ID NO: 716833 - RNA, 22 nt, Human
caagugucuucaaaggcuaaaa

SEQ ID NO: 716834 - RNA, 22 nt, Human
acaggauggagauaauagaaaa

SEQ ID NO: 716835 - RNA, 23 nt, Human
cugcccugaucuugaucuauugu

SEQ ID NO: 716836 - RNA, 22 nt, Human
ucauccaugucagagcauguau

SEQ ID NO: 716837 - RNA, 22 nt, Human
uuauucugucaaacuuauacau

SEQ ID NO: 716838 - RNA, 22 nt, Human
caggugggccaugaaaaaugac

SEQ ID NO: 716839 - RNA, 22 nt, Human
uggagcugccuggcaccuacag

SEQ ID NO: 716840 - RNA, 22 nt, Human
guugaaagaugucuugguuccc

SEQ ID NO: 716841 - RNA, 22 nt, Human
ccuggcaggcaagaggaaggga

SEQ ID NO: 716842 - RNA, 22 nt, Human
uccauuauacuucugauucaaa

SEQ ID NO: 716843 - RNA, 22 nt, Human
augucacaggcaacaagauugc

SEQ ID NO: 716844 - RNA, 22 nt, Human
acagaauaagguuuaucucucc

SEQ ID NO: 716845 - RNA, 22 nt, Human
uggcuucacaauuucauaacua

SEQ ID NO: 716846 - RNA, 22 nt, Human
gcugcccaauuacagggccgug

SEQ ID NO: 716847 - RNA, 22 nt, Human
ggaggccuugccugcaggcaca

SEQ ID NO: 716848 - RNA, 22 nt, Human
cccaggagguggagguugcagc

SEQ ID NO: 716849 - RNA, 22 nt, Human
gaggggagcaugaucuagauug

SEQ ID NO: 716850 - RNA, 22 nt, Human
uacaucuauacugaucuacauu

SEQ ID NO: 716851 - RNA, 20 nt, Human
cuuaaacacagagauagauu

SEQ ID NO: 716852 - RNA, 22 nt, Human
agcccagggaguugauuagcau

SEQ ID NO: 716853 - RNA, 22 nt, Human
aaagccagcucugagcugcacc

SEQ ID NO: 716854 - RNA, 22 nt, Human
ugaaggcccagccacagaaugg

SEQ ID NO: 716855 - RNA, 22 nt, Human
auugaacuuaacaguaaguggc

SEQ ID NO: 716856 - RNA, 22 nt, Human
ucacagcauugucacaaggcug

SEQ ID NO: 716857 - RNA, 22 nt, Human
aggcuggcccaccucuugucuu

SEQ ID NO: 716858 - RNA, 22 nt, Human
uuuuuauaacucuuuugugaca

SEQ ID NO: 716859 - RNA, 22 nt, Human
uagcagaagaacaacaugaucu

SEQ ID NO: 716860 - RNA, 19 nt, Human
ugcugcuguccuugcaggg

SEQ ID NO: 716861 - RNA, 19 nt, Human
auacaguaagguguuugcc

SEQ ID NO: 716862 - RNA, 22 nt, Human
agcugagggcaggaugggguga

SEQ ID NO: 716863 - RNA, 22 nt, Human
ucuuaacagugcuacagagcag

SEQ ID NO: 716864 - RNA, 22 nt, Human
uucagaaagguuaaucuggauu

SEQ ID NO: 716865 - RNA, 21 nt, Human
aagcuucccugcucuccaggg

SEQ ID NO: 716866 - RNA, 22 nt, Human
gcugcccuguuuagccaggguu

SEQ ID NO: 716867 - RNA, 22 nt, Human
ccaggcucugacauagauggga

SEQ ID NO: 716868 - RNA, 22 nt, Human
gcuggcccagcgcccagggcag

SEQ ID NO: 716869 - RNA, 22 nt, Human
aucugcauguccccauggaucc

SEQ ID NO: 716870 - RNA, 22 nt, Human
augcuguuauucuaauguguga

SEQ ID NO: 716871 - RNA, 22 nt, Human
auguuauaguuauaaaaugagg

SEQ ID NO: 716872 - RNA, 22 nt, Human
caggcaugagccaggccccucc

SEQ ID NO: 716873 - RNA, 22 nt, Human
aagauacaucauucaggaguga

SEQ ID NO: 716874 - RNA, 22 nt, Human
ucauugucuugauaugauuguc

SEQ ID NO: 716875 - RNA, 22 nt, Human
ucucucuugucaccccaucugc

SEQ ID NO: 716876 - RNA, 22 nt, Human
uuugaaaggaaguuaauacuuu

SEQ ID NO: 716877 - RNA, 22 nt, Human
cuucuggaggcuccagggaggu

SEQ ID NO: 716878 - RNA, 22 nt, Human
uaaggcacccuucugaguagag

SEQ ID NO: 716879 - RNA, 22 nt, Human
acuuuacauuugaucucucuaa

SEQ ID NO: 716880 - RNA, 18 nt, Human
auauucaagaagacagag

SEQ ID NO: 716881 - RNA, 22 nt, Human
ucuuucuugcaaggaugcagga

SEQ ID NO: 716882 - RNA, 18 nt, Human
uuugaaggauggccugga

SEQ ID NO: 716883 - RNA, 23 nt, Human
uagauguauuaagugcauuuuca

SEQ ID NO: 716884 - RNA, 22 nt, Human
uggaacaaacauggugauggcu

SEQ ID NO: 716885 - RNA, 22 nt, Human
gcaguggauggccagcaggggc

SEQ ID NO: 716886 - RNA, 22 nt, Human
auauuuguuuggcagaguucag

SEQ ID NO: 716887 - RNA, 22 nt, Human
ccuguacauggccaucuuuacc

SEQ ID NO: 716888 - RNA, 22 nt, Human
agaugugagaaucaagugacca

SEQ ID NO: 716889 - RNA, 22 nt, Human
gggagccaaggagagaggccuu

SEQ ID NO: 716890 - RNA, 22 nt, Human
ugccugcaucuuggaggcccca

SEQ ID NO: 716891 - RNA, 22 nt, Human
cagaggaagcagacacaucuug

SEQ ID NO: 716892 - RNA, 22 nt, Human
aggcacuucauggguucaagga

SEQ ID NO: 716893 - RNA, 22 nt, Human
agcagguggccuccugucuguc

SEQ ID NO: 716894 - RNA, 21 nt, Human
uggcugaguggaugcaugaau

SEQ ID NO: 716895 - RNA, 22 nt, Human
aucuugugcugacaaaacacau

SEQ ID NO: 716896 - RNA, 22 nt, Human
acaguguuucacuuaaccguuu

SEQ ID NO: 716897 - RNA, 22 nt, Human
ucauuaaauguuuguugugcca

SEQ ID NO: 716898 - RNA, 22 nt, Human
uguggcugggcuaauaggcaaa

SEQ ID NO: 716899 - RNA, 22 nt, Human
gacaugcugaauaacuauauga

SEQ ID NO: 716900 - RNA, 21 nt, Human
agcagccauggaugguaugua

SEQ ID NO: 716901 - RNA, 22 nt, Human
aagggggcacagucacuguaau

SEQ ID NO: 716902 - RNA, 22 nt, Human
acuucaaaugugacaaugugaa

SEQ ID NO: 716903 - RNA, 22 nt, Human
gccuggugaaaggcagagagcg

SEQ ID NO: 716904 - RNA, 22 nt, Human
agcuucuucugauuugucaguc

SEQ ID NO: 716905 - RNA, 22 nt, Human
uucuguuacauggggcacagug

SEQ ID NO: 716906 - RNA, 22 nt, Human
auaugccauuagcuagaaauaa

SEQ ID NO: 716907 - RNA, 22 nt, Human
uuucauuauacagcuucauaaa

SEQ ID NO: 716908 - RNA, 22 nt, Human
cugccugugugugccugcagaa

SEQ ID NO: 716909 - RNA, 22 nt, Human
uccguauuugacuauugcaccg

SEQ ID NO: 716910 - RNA, 22 nt, Human
augaaaugaaguuggccuggcu

SEQ ID NO: 716911 - RNA, 22 nt, Human
cuacagcagagaccagccacau

SEQ ID NO: 716912 - RNA, 22 nt, Human
cugggccuccacgggccaucac

SEQ ID NO: 716913 - RNA, 22 nt, Human
ccuugcucaagcuagugacggg

SEQ ID NO: 716914 - RNA, 22 nt, Human
uccucugguccugcagcagauc

SEQ ID NO: 716915 - RNA, 22 nt, Human
auuggaaauacaguagaaaaau

SEQ ID NO: 716916 - RNA, 22 nt, Human
ugagcugggcugggcugagcug

SEQ ID NO: 716917 - RNA, 22 nt, Human
uguguucaagauuaguucuagu

SEQ ID NO: 716918 - RNA, 22 nt, Human
ugugaaaugcuauuuccaugag

SEQ ID NO: 716919 - RNA, 22 nt, Human
gcauuuccugugcuuggcauau

SEQ ID NO: 716920 - RNA, 22 nt, Human
cuacaguagaguaggccucuga

SEQ ID NO: 716921 - RNA, 22 nt, Human
ugcucacugaacucuugcuguc

SEQ ID NO: 716922 - RNA, 22 nt, Human
uuuacaguuaagaaauguuacc

SEQ ID NO: 716923 - RNA, 17 nt, Human
ucucaggcacguguggc

SEQ ID NO: 716924 - RNA, 22 nt, Human
cauggcuuuuagcccuacauga

SEQ ID NO: 716925 - RNA, 22 nt, Human
caaagguauucucauuuuggaa

SEQ ID NO: 716926 - RNA, 22 nt, Human
ucuggcaggcaaucggcucugg

SEQ ID NO: 716927 - RNA, 22 nt, Human
uuucagagucuggcugcagccu

SEQ ID NO: 716928 - RNA, 22 nt, Human
ucucccucauuccugcuuccau

SEQ ID NO: 716929 - RNA, 20 nt, Human
gaacagucuucugagccaca

SEQ ID NO: 716930 - RNA, 22 nt, Human
agagccaggcggcugggcaccu

SEQ ID NO: 716931 - RNA, 22 nt, Human
gucccugcaucaccacgggacu

SEQ ID NO: 716932 - RNA, 20 nt, Human
gaaacauuggcagcaacuga

SEQ ID NO: 716933 - RNA, 21 nt, Human
uaauaauuccacuacagagua

SEQ ID NO: 716934 - RNA, 22 nt, Human
cagggcagugaagaacacacgu

SEQ ID NO: 716935 - RNA, 20 nt, Human
ucaguuuaaauccuggcuuu

SEQ ID NO: 716936 - RNA, 22 nt, Human
caggcuaaagcuuugagcaugu

SEQ ID NO: 716937 - RNA, 22 nt, Human
agcugaagcaacaacaggaugg

SEQ ID NO: 716938 - RNA, 22 nt, Human
guggauggacaugggcaagagg

SEQ ID NO: 716939 - RNA, 22 nt, Human
gcucugggguuggaaagugauc

SEQ ID NO: 716940 - RNA, 22 nt, Human
uccaagaucaagguguuggcag

SEQ ID NO: 716941 - RNA, 22 nt, Human
ccucugccugcacaucauccug

SEQ ID NO: 716942 - RNA, 22 nt, Human
uaaaggaaucaguuuuagagau

SEQ ID NO: 716943 - RNA, 22 nt, Human
aauuucucgguuuugauauugu

SEQ ID NO: 716944 - RNA, 22 nt, Human
aagcccuguuaggcacugggga

SEQ ID NO: 716945 - RNA, 22 nt, Human
uggcccuggcugaguuagauuu

SEQ ID NO: 716946 - RNA, 22 nt, Human
uggcugguuuuggugagcuccg

SEQ ID NO: 716947 - RNA, 22 nt, Human
ccuugggacccugcuggagguu

SEQ ID NO: 716948 - RNA, 20 nt, Human
auguuaaauagcauuuagag

SEQ ID NO: 716949 - RNA, 22 nt, Human
auugacuuccauagcuaccugg

SEQ ID NO: 716950 - RNA, 22 nt, Human
cacagcuggugacagagcccag

SEQ ID NO: 716951 - RNA, 22 nt, Human
ggaagcugugcucucaggccuc

SEQ ID NO: 716952 - RNA, 22 nt, Human
aggcacugagaggcuguguugc

SEQ ID NO: 716953 - RNA, 22 nt, Human
uucacaguggcuuaggcuaugg

SEQ ID NO: 716954 - RNA, 23 nt, Human
acugugggcaccacagagagugu

SEQ ID NO: 716955 - RNA, 22 nt, Human
uguggacucgcauggcugaggc

SEQ ID NO: 716956 - RNA, 22 nt, Human
aggucucaaucucaggugguca

SEQ ID NO: 716957 - RNA, 22 nt, Human
acugaagcuuggguggaacuua

SEQ ID NO: 716958 - RNA, 22 nt, Human
augaggcucucaggggagcugu

SEQ ID NO: 716959 - RNA, 21 nt, Human
gguuaaaagacacaucuguuu

SEQ ID NO: 716960 - RNA, 22 nt, Human
ccacugugagcaugaacaggac

SEQ ID NO: 716961 - RNA, 21 nt, Human
uccucuccaugaucuguuugu

SEQ ID NO: 716962 - RNA, 22 nt, Human
agggccuggaacugugggcagg

SEQ ID NO: 716963 - RNA, 22 nt, Human
cagcagccuggccccuccucgg

SEQ ID NO: 716964 - RNA, 22 nt, Human
cagcacauagcaugcuugucag

SEQ ID NO: 716965 - RNA, 22 nt, Human
caagcagauauuuuagucaaga

SEQ ID NO: 716966 - RNA, 22 nt, Human
agacaggagagggaacugccgg

SEQ ID NO: 716967 - RNA, 22 nt, Human
gaguggagcaaaagagguagau

SEQ ID NO: 716968 - RNA, 22 nt, Human
gccuagggguaagaguacuggc

SEQ ID NO: 716969 - RNA, 22 nt, Human
agaccccauaccucagcaggua

SEQ ID NO: 716970 - RNA, 22 nt, Human
gucaggauuggggucaugaguc

SEQ ID NO: 716971 - RNA, 22 nt, Human
uggcucuccagagccuauggua

SEQ ID NO: 716972 - RNA, 23 nt, Human
uuuagucaguugacagccauaua

SEQ ID NO: 716973 - RNA, 22 nt, Human
ugaggguagcuggaucacggag

SEQ ID NO: 716974 - RNA, 22 nt, Human
ugcuuuuuccccuucuggcgag

SEQ ID NO: 716975 - RNA, 22 nt, Human
ucacugcagacaaccucaguca

SEQ ID NO: 716976 - RNA, 22 nt, Human
aacagcuauuagaacuucaugg

SEQ ID NO: 716977 - RNA, 22 nt, Human
acccaggagcucugggguccuc

SEQ ID NO: 716978 - RNA, 20 nt, Human
ugacaaagaguaagaggagg

SEQ ID NO: 716979 - RNA, 22 nt, Human
cugggcaccuuugcagcaggcu

SEQ ID NO: 716980 - RNA, 22 nt, Human
aucuccaguuagcaguacugau

SEQ ID NO: 716981 - RNA, 22 nt, Human
ccccagagagcaccaugaagcc

SEQ ID NO: 716982 - RNA, 22 nt, Human
cccaguguuacgugacagccug

SEQ ID NO: 716983 - RNA, 22 nt, Human
uaggccaccaggguuccauuua

SEQ ID NO: 716984 - RNA, 22 nt, Human
gcugcagacuucucaucucauu

SEQ ID NO: 716985 - RNA, 22 nt, Human
auucugcagguggaggauggca

SEQ ID NO: 716986 - RNA, 22 nt, Human
ugguccuggagaguguuccaua

SEQ ID NO: 716987 - RNA, 19 nt, Human
uguguguauuucaguucuu

SEQ ID NO: 716988 - RNA, 22 nt, Human
aucaagaguuauauuucauagu

SEQ ID NO: 716989 - RNA, 22 nt, Human
uccucagucacgguagcacauu

SEQ ID NO: 716990 - RNA, 22 nt, Human
aggcucugagucuggugucugc

SEQ ID NO: 716991 - RNA, 22 nt, Human
cagagucuggacugcaggcucc

SEQ ID NO: 716992 - RNA, 22 nt, Human
uucagcaacucaaaccuauuag

SEQ ID NO: 716993 - RNA, 22 nt, Human
agcauagaauaagcugaaguca

SEQ ID NO: 716994 - RNA, 22 nt, Human
gcaauaaaguagcagcucauca

SEQ ID NO: 716995 - RNA, 22 nt, Human
ggccaccuggguucgacugggc

SEQ ID NO: 716996 - RNA, 22 nt, Human
ucugcaacgcacugcaaaaccu

SEQ ID NO: 716997 - RNA, 22 nt, Human
uuauggaauaaccuuucugaaa

SEQ ID NO: 716998 - RNA, 22 nt, Human
aaaggccaauaaagacaagcug

SEQ ID NO: 716999 - RNA, 21 nt, Human
cucacaggaugcaguguuacu

SEQ ID NO: 717000 - RNA, 22 nt, Human
gacagcagggacauguaggaag

SEQ ID NO: 717001 - RNA, 22 nt, Human
ugcuggaggccugacuguguuu

SEQ ID NO: 717002 - RNA, 22 nt, Human
acuguggcaaaagaacauugga

SEQ ID NO: 717003 - RNA, 22 nt, Human
gcaaugauauugaagugaugaa

SEQ ID NO: 717004 - RNA, 22 nt, Human
ggccuuggguauagguggguau

SEQ ID NO: 717005 - RNA, 22 nt, Human
gcacccuguuuauccugaguuc

SEQ ID NO: 717006 - RNA, 22 nt, Human
agagccagcauuugggcccugc

SEQ ID NO: 717007 - RNA, 22 nt, Human
augugcaaauccaaugugaaug

SEQ ID NO: 717008 - RNA, 22 nt, Human
uguccugggaaugggaugcagu

SEQ ID NO: 717009 - RNA, 22 nt, Human
uuucaguuugaaggaaaggcca

SEQ ID NO: 717010 - RNA, 22 nt, Human
uggcccugccgcacuauccuca

SEQ ID NO: 717011 - RNA, 22 nt, Human
aacaauguaaucuacucugcuc

SEQ ID NO: 717012 - RNA, 22 nt, Human
uugcauugauguuccuucuugc

SEQ ID NO: 717013 - RNA, 22 nt, Human
aagagaugcuuuacaucggaug

SEQ ID NO: 717014 - RNA, 22 nt, Human
cuggguguagauggaaguuugg

SEQ ID NO: 717015 - RNA, 22 nt, Human
gggaggaaaugugcagcgaauu

SEQ ID NO: 717016 - RNA, 22 nt, Human
ggagcuguaacgagccauugcu

SEQ ID NO: 717017 - RNA, 18 nt, Human
ugcaaauggcuguuugau

SEQ ID NO: 717018 - RNA, 22 nt, Human
uugaauucauuucucauugagu

SEQ ID NO: 717019 - RNA, 19 nt, Human
ggccuugcucuguggcagc

SEQ ID NO: 717020 - RNA, 22 nt, Human
gaggucugggauggggccugaa

SEQ ID NO: 717021 - RNA, 23 nt, Human
aacauacuguuuaauauucacag

SEQ ID NO: 717022 - RNA, 22 nt, Human
agucuauuuuugguucuucggg

SEQ ID NO: 717023 - RNA, 22 nt, Human
auuucuguauccugcugucaga

SEQ ID NO: 717024 - RNA, 22 nt, Human
acagagucucagggaugaaagc

SEQ ID NO: 717025 - RNA, 22 nt, Human
uuuccacacaggcucuacuacu

SEQ ID NO: 717026 - RNA, 22 nt, Human
guacugaacuuaaaaauccccu

SEQ ID NO: 717027 - RNA, 22 nt, Human
aacauguaccuacaaucagaau

SEQ ID NO: 717028 - RNA, 22 nt, Human
aagcucagaguagcucagcguc

SEQ ID NO: 717029 - RNA, 22 nt, Human
ugauuuccccagucuugcugcu

SEQ ID NO: 717030 - RNA, 22 nt, Human
caggagacaaguuagcagcuga

SEQ ID NO: 717031 - RNA, 22 nt, Human
cagugaggugcccagccugccc

SEQ ID NO: 717032 - RNA, 22 nt, Human
agaugcauggaaaucucauuac

SEQ ID NO: 717033 - RNA, 22 nt, Human
auugauaucaguuugcugauug

SEQ ID NO: 717034 - RNA, 22 nt, Human
uaggacaggcuaaaagggauaa

SEQ ID NO: 717035 - RNA, 22 nt, Human
gagauaaauuuuugauaaauau

SEQ ID NO: 717036 - RNA, 22 nt, Human
acagaggaaggcugagcugccc

SEQ ID NO: 717037 - RNA, 22 nt, Human
uggggccagcggggaggacuca

SEQ ID NO: 717038 - RNA, 22 nt, Human
gcaaacagaaaugcaggacgcu

SEQ ID NO: 717039 - RNA, 22 nt, Human
gugcucugccuggggucauggc

SEQ ID NO: 717040 - RNA, 22 nt, Human
acaagguuuaaauagccaucag

SEQ ID NO: 717041 - RNA, 22 nt, Human
acuuauuagacaucuucauugu

SEQ ID NO: 717042 - RNA, 22 nt, Human
acauauauguaaaguacuuugu

SEQ ID NO: 717043 - RNA, 22 nt, Human
auuaggauguguauauuguguu

SEQ ID NO: 717044 - RNA, 22 nt, Human
cuggccaguguggcucugaucu

SEQ ID NO: 717045 - RNA, 22 nt, Human
gcuggcuggaggagggagguug

SEQ ID NO: 717046 - RNA, 19 nt, Human
ggcauccacagcuggagag

SEQ ID NO: 717047 - RNA, 22 nt, Human
aggucaggagguuaagagucuu

SEQ ID NO: 717048 - RNA, 22 nt, Human
ugggaagguacacgggaaagag

SEQ ID NO: 717049 - RNA, 22 nt, Human
uugcauuguaggauguuagaag

SEQ ID NO: 717050 - RNA, 22 nt, Human
augaggcaggagugcaguggca

SEQ ID NO: 717051 - RNA, 22 nt, Human
uuuguuaaaaugcagauucugu

SEQ ID NO: 717052 - RNA, 22 nt, Human
agggcugguauguccaugaaag

SEQ ID NO: 717053 - RNA, 19 nt, Human
aagcuccagcagauccuuu

SEQ ID NO: 717054 - RNA, 22 nt, Human
uagaaucaagcaguagagcaga

SEQ ID NO: 717055 - RNA, 22 nt, Human
cugcccauaaacuuuccaccug

SEQ ID NO: 717056 - RNA, 22 nt, Human
gggcuggagacaagugagccgc

SEQ ID NO: 717057 - RNA, 22 nt, Human
agcccuggaagccacaguccua

SEQ ID NO: 717058 - RNA, 22 nt, Human
uucaaagugcauguuccucaga

SEQ ID NO: 717059 - RNA, 22 nt, Human
cccugggagaaguugagggcug

SEQ ID NO: 717060 - RNA, 22 nt, Human
ccuggagcuuuuccaguugaca

SEQ ID NO: 717061 - RNA, 22 nt, Human
acugggccagaucagagcaacu

SEQ ID NO: 717062 - RNA, 22 nt, Human
gggaagagaccguacccuggcc

SEQ ID NO: 717063 - RNA, 22 nt, Human
uccaggcaaaaggaacugcuug

SEQ ID NO: 717064 - RNA, 22 nt, Human
uuuccagguaucaagcuucagg

SEQ ID NO: 717065 - RNA, 22 nt, Human
cuuguauugcaaacuggccagg

SEQ ID NO: 717066 - RNA, 17 nt, Human
uccagagaggcuucccu

SEQ ID NO: 717067 - RNA, 22 nt, Human
aaacaaacaauuaguugugugg

SEQ ID NO: 717068 - RNA, 22 nt, Human
cugggcagcuccauaccaccca

SEQ ID NO: 717069 - RNA, 22 nt, Human
cuggcucccagcuuucagggag

SEQ ID NO: 717070 - RNA, 22 nt, Human
ucuugcacuucaugaauauguu

SEQ ID NO: 717071 - RNA, 22 nt, Human
ccagauagggaugagagugcua

SEQ ID NO: 717072 - RNA, 22 nt, Human
gcucuuuguauuuuggaaucaa

SEQ ID NO: 717073 - RNA, 22 nt, Human
ccugagcuggaagagcuugugc

SEQ ID NO: 717074 - RNA, 22 nt, Human
gugcaugugcauccauguguac

SEQ ID NO: 717075 - RNA, 22 nt, Human
ugcccucuuaggucugcgcagc

SEQ ID NO: 717076 - RNA, 22 nt, Human
ugaucuuuucuauuuaugguag

SEQ ID NO: 717077 - RNA, 22 nt, Human
ggacaggguaaguacuagugug

SEQ ID NO: 717078 - RNA, 22 nt, Human
gugcuuccucugccaacacucu

SEQ ID NO: 717079 - RNA, 22 nt, Human
ugccugggguuggcaaacugcu

SEQ ID NO: 717080 - RNA, 22 nt, Human
uguaguaagugcgcaauaaaua

SEQ ID NO: 717081 - RNA, 22 nt, Human
auauucucugcugcuuuugugu

SEQ ID NO: 717082 - RNA, 18 nt, Human
uggcuucagaguaaaaug

SEQ ID NO: 717083 - RNA, 22 nt, Human
ggaugcugggagacagcaggca

SEQ ID NO: 717084 - RNA, 21 nt, Human
ccauccacugagugguucccu

SEQ ID NO: 717085 - RNA, 20 nt, Human
agcugcucucauccagaccu

SEQ ID NO: 717086 - RNA, 22 nt, Human
gcagggguagagauugcuggug

SEQ ID NO: 717087 - RNA, 22 nt, Human
caggagaaacauaauuuucugg

SEQ ID NO: 717088 - RNA, 22 nt, Human
acacuucucauuugauacuaac

SEQ ID NO: 717089 - RNA, 22 nt, Human
augcaguggcuucagugucagu

SEQ ID NO: 717090 - RNA, 22 nt, Human
agcauuugauauguuuaaaaag

SEQ ID NO: 717091 - RNA, 22 nt, Human
ggcuggaggagaauggguguga

SEQ ID NO: 717092 - RNA, 22 nt, Human
ucuagcugaggguaggagaccu

SEQ ID NO: 717093 - RNA, 22 nt, Human
accucccagcucugagcuuggg

SEQ ID NO: 717094 - RNA, 22 nt, Human
ucagucuuugcuuaugacaaua

SEQ ID NO: 717095 - RNA, 22 nt, Human
cuuagaaaucgaacucagguua

SEQ ID NO: 717096 - RNA, 18 nt, Human
uauuucccaauggaaaca

SEQ ID NO: 717097 - RNA, 22 nt, Human
gccuccugaaaggaagagcucc

SEQ ID NO: 717098 - RNA, 22 nt, Human
uuccuagaaugguuagaaaaua

SEQ ID NO: 717099 - RNA, 22 nt, Human
gauuucccuauaguuuucucuu

SEQ ID NO: 717100 - RNA, 22 nt, Human
aggcucuggcuacuacagagcu

SEQ ID NO: 717101 - RNA, 22 nt, Human
ucaagaguuggucaaauccaaa

SEQ ID NO: 717102 - RNA, 19 nt, Human
uccaggcauccuucaggcu

SEQ ID NO: 717103 - RNA, 22 nt, Human
uuuuccuuagcuucucugcgag

SEQ ID NO: 717104 - RNA, 22 nt, Human
uugcugaaguuaaugcuugcaa

SEQ ID NO: 717105 - RNA, 22 nt, Human
cagggacccgcacagguagcau

SEQ ID NO: 717106 - RNA, 22 nt, Human
aguggcauuuuaauggauguca

SEQ ID NO: 717107 - RNA, 22 nt, Human
ggcuccugggaugggacugagc

SEQ ID NO: 717108 - RNA, 22 nt, Human
ugcacacagccagugaguggca

SEQ ID NO: 717109 - RNA, 22 nt, Human
uauuaucauugguaauaugguc

SEQ ID NO: 717110 - RNA, 22 nt, Human
caucuuugcacccucaaaaccu

SEQ ID NO: 717111 - RNA, 22 nt, Human
cuggcuuucucugugguguuca

SEQ ID NO: 717112 - RNA, 22 nt, Human
uaaugcuucuguuaggaucuuc

SEQ ID NO: 717113 - RNA, 22 nt, Human
cucuccaggcugggacaggacc

SEQ ID NO: 717114 - RNA, 23 nt, Human
gccucuggagccccagugcucag

SEQ ID NO: 717115 - RNA, 22 nt, Human
ucuccaggcuuaaucucagcuu

SEQ ID NO: 717116 - RNA, 22 nt, Human
ucugccgugcgaggucccacca

SEQ ID NO: 717117 - RNA, 22 nt, Human
ccuucagccucaagauccuuca

SEQ ID NO: 717118 - RNA, 22 nt, Human
caagaugaaacuacagggagga

SEQ ID NO: 717119 - RNA, 22 nt, Human
ugcagcauuauguagcuguuuu

SEQ ID NO: 717120 - RNA, 22 nt, Human
agcacuuguagacuagaauuuu

SEQ ID NO: 717121 - RNA, 22 nt, Human
caggcuuaggagucagccugcu

SEQ ID NO: 717122 - RNA, 22 nt, Human
ugcacaaaggcucccugcugag

SEQ ID NO: 717123 - RNA, 22 nt, Human
ccacaggcugcugcaggucccg

SEQ ID NO: 717124 - RNA, 22 nt, Human
ucccugggaccggcagcucaca

SEQ ID NO: 717125 - RNA, 22 nt, Human
ucuagggagcucuagcaguggu

SEQ ID NO: 717126 - RNA, 22 nt, Human
uccaggagcauccaggugaagc

SEQ ID NO: 717127 - RNA, 22 nt, Human
uuuaaggaaaaaauguacuuag

SEQ ID NO: 717128 - RNA, 19 nt, Human
aagcagcccuggcaagagc

SEQ ID NO: 717129 - RNA, 20 nt, Human
gccagcuggucccaauuaug

SEQ ID NO: 717130 - RNA, 22 nt, Human
uuaauacaagcauaugcacaca

SEQ ID NO: 717131 - RNA, 21 nt, Human
uuugccuucacgaagcauccu

SEQ ID NO: 717132 - RNA, 22 nt, Human
gaccagcuggugaaaaccaauu

SEQ ID NO: 717133 - RNA, 22 nt, Human
ccagggcaucacauccaguguu

SEQ ID NO: 717134 - RNA, 22 nt, Human
uauuugcugacagugcuggagc

SEQ ID NO: 717135 - RNA, 22 nt, Human
cugggucucuuaccaugugacu

SEQ ID NO: 717136 - RNA, 22 nt, Human
ugcugccuuucugaauggugga

SEQ ID NO: 717137 - RNA, 22 nt, Human
agucugaaccagauggcaaggu

SEQ ID NO: 717138 - RNA, 22 nt, Human
uucuguuuauaauuugcaguug

SEQ ID NO: 717139 - RNA, 22 nt, Human
gcacagguugcaaaaguucaca

SEQ ID NO: 717140 - RNA, 22 nt, Human
cugaaauaaaguugcuaaaauu

SEQ ID NO: 717141 - RNA, 22 nt, Human
aauuaaaagauaacccaugagu

SEQ ID NO: 717142 - RNA, 22 nt, Human
cucagagucugcauuucuguca

SEQ ID NO: 717143 - RNA, 22 nt, Human
cugugcuggugaaacccacaga

SEQ ID NO: 717144 - RNA, 22 nt, Human
acagcugugaagcaagcacucu

SEQ ID NO: 717145 - RNA, 22 nt, Human
agcuggcauuacaggagcaugc

SEQ ID NO: 717146 - RNA, 22 nt, Human
aguaaacauagaauguucuucc

SEQ ID NO: 717147 - RNA, 22 nt, Human
gcacagcacagcaacauguuuu

SEQ ID NO: 717148 - RNA, 22 nt, Human
ccagcagagugggguuuagagu

SEQ ID NO: 717149 - RNA, 22 nt, Human
cucccucucuaaggcaaagaga

SEQ ID NO: 717150 - RNA, 22 nt, Human
guguuuagugugcagacaugca

SEQ ID NO: 717151 - RNA, 22 nt, Human
ccagggcauguaacuaauggug

SEQ ID NO: 717152 - RNA, 22 nt, Human
uaggaagagcuauaggucccca

SEQ ID NO: 717153 - RNA, 22 nt, Human
gaggcagcggcucacagagaaa

SEQ ID NO: 717154 - RNA, 20 nt, Human
auguucuucauuuaauguuc

SEQ ID NO: 717155 - RNA, 17 nt, Human
aggucugagaguaucug

SEQ ID NO: 717156 - RNA, 22 nt, Human
aaacuguauuccauccucauca

SEQ ID NO: 717157 - RNA, 22 nt, Human
gacaucuggaggagaugaaugg

SEQ ID NO: 717158 - RNA, 22 nt, Human
aauuauauguuaaucuucaauu

SEQ ID NO: 717159 - RNA, 22 nt, Human
cuggcagcgguuugcagccugg

SEQ ID NO: 717160 - RNA, 22 nt, Human
cuuauucuacuccacaagcucu

SEQ ID NO: 717161 - RNA, 22 nt, Human
ucaggagacuuaugucacagug

SEQ ID NO: 717162 - RNA, 22 nt, Human
uaaggcaggacuggauagcuau

SEQ ID NO: 717163 - RNA, 22 nt, Human
caagcuuguuucuccugggggu

SEQ ID NO: 717164 - RNA, 22 nt, Human
uacaguagaauuuuuaguaacu

SEQ ID NO: 717165 - RNA, 22 nt, Human
accucuggccuucaggcaucau

SEQ ID NO: 717166 - RNA, 22 nt, Human
ggcagcaaguggugggagacuu

SEQ ID NO: 717167 - RNA, 22 nt, Human
ucaguguggaaaauccuuuggc

SEQ ID NO: 717168 - RNA, 18 nt, Human
ucagcuggguuucugggu

SEQ ID NO: 717169 - RNA, 22 nt, Human
cagacagcugcuuucuugcugu

SEQ ID NO: 717170 - RNA, 22 nt, Human
agucuucacucuucacuacuau

SEQ ID NO: 717171 - RNA, 22 nt, Human
gccagagaaugaaaaucagauu

SEQ ID NO: 717172 - RNA, 22 nt, Human
agcugguucauucauucauggu

SEQ ID NO: 717173 - RNA, 22 nt, Human
cauucacaauggauugcuucaa

SEQ ID NO: 717174 - RNA, 21 nt, Human
aaggccugcuuacugcuaguu

SEQ ID NO: 717175 - RNA, 22 nt, Human
gggugggguguaucggauccua

SEQ ID NO: 717176 - RNA, 19 nt, Human
ccuguacauuauucucccc

SEQ ID NO: 717177 - RNA, 22 nt, Human
auggaugaguccuugagacaca

SEQ ID NO: 717178 - RNA, 22 nt, Human
ggcgccagcccaggccgucgug

SEQ ID NO: 717179 - RNA, 17 nt, Human
cuuuuaauuuacuuccc

SEQ ID NO: 717180 - RNA, 22 nt, Human
ucaaggaagucuuauugcacag

SEQ ID NO: 717181 - RNA, 22 nt, Human
agacacuggugaagaaaucagg

SEQ ID NO: 717182 - RNA, 22 nt, Human
auuuuugagcugugaacauagc

SEQ ID NO: 717183 - RNA, 22 nt, Human
uauaggaaacauacgugacuag

SEQ ID NO: 717184 - RNA, 22 nt, Human
uucugagggcuaauguacugua

SEQ ID NO: 717185 - RNA, 22 nt, Human
aagacauuguggagauguugcu

SEQ ID NO: 717186 - RNA, 22 nt, Human
aguuagaauauaauuauguuaa

SEQ ID NO: 717187 - RNA, 20 nt, Human
agcuccugaggguuacuuuc

SEQ ID NO: 717188 - RNA, 22 nt, Human
uguguuuauaguguaucuucca

SEQ ID NO: 717189 - RNA, 22 nt, Human
auuuccaugccuuagcuuaagg

SEQ ID NO: 717190 - RNA, 22 nt, Human
ccaaauaauauuucagaaccau

SEQ ID NO: 717191 - RNA, 22 nt, Human
agccaggcuacuccuugcugac

SEQ ID NO: 717192 - RNA, 22 nt, Human
gccaggaugacuauacaacagc

SEQ ID NO: 717193 - RNA, 22 nt, Human
cagagcagugggguuggucaga

SEQ ID NO: 717194 - RNA, 22 nt, Human
uuuuaguuguacugucaacagu

SEQ ID NO: 717195 - RNA, 22 nt, Human
aauugcuuguuucuuuaacuga

SEQ ID NO: 717196 - RNA, 22 nt, Human
gucaauaauuuuauggagagaa

SEQ ID NO: 717197 - RNA, 22 nt, Human
ugcaggcuggauuugcuuuugu

SEQ ID NO: 717198 - RNA, 22 nt, Human
uuuccugccuggaccucugcuu

SEQ ID NO: 717199 - RNA, 22 nt, Human
cuagagcuguucugugcacuca

SEQ ID NO: 717200 - RNA, 22 nt, Human
uuguggaaauacagacuccaag

SEQ ID NO: 717201 - RNA, 23 nt, Human
ugggauggauucaccagugugcu

SEQ ID NO: 717202 - RNA, 22 nt, Human
aguuuuucugcuggucucacua

SEQ ID NO: 717203 - RNA, 22 nt, Human
acaauacuuaccaauguuuuug

SEQ ID NO: 717204 - RNA, 22 nt, Human
gaaaauacaaauagccuugaaa

SEQ ID NO: 717205 - RNA, 22 nt, Human
uugcugauucaugauuugagaa

SEQ ID NO: 717206 - RNA, 22 nt, Human
accuggagcuuccaacucaacu

SEQ ID NO: 717207 - RNA, 22 nt, Human
ggauugagagcacugguagcug

SEQ ID NO: 717208 - RNA, 18 nt, Human
gaggaucagaaaucugua

SEQ ID NO: 717209 - RNA, 22 nt, Human
uguagcucuccagccagcaagg

SEQ ID NO: 717210 - RNA, 22 nt, Human
ggucugccacaagauuuuugag

SEQ ID NO: 717211 - RNA, 22 nt, Human
gcuuuuuuagguaagacccagg

SEQ ID NO: 717212 - RNA, 22 nt, Human
aagauuuucucaacuguauuug

SEQ ID NO: 717213 - RNA, 23 nt, Human
ucuucaugcccaggccuuggugc

SEQ ID NO: 717214 - RNA, 22 nt, Human
cucccaggacucagaggagaag

SEQ ID NO: 717215 - RNA, 22 nt, Human
aucuucaguuuucagugagcca

SEQ ID NO: 717216 - RNA, 20 nt, Human
ggguggaguugcggucugug

SEQ ID NO: 717217 - RNA, 22 nt, Human
augagucacucagcagaaaagg

SEQ ID NO: 717218 - RNA, 22 nt, Human
acucagagugcaucuccuauuu

SEQ ID NO: 717219 - RNA, 22 nt, Human
gggauaggaaacuuagguacac

SEQ ID NO: 717220 - RNA, 22 nt, Human
uguguauauguaaauauaguug

SEQ ID NO: 717221 - RNA, 22 nt, Human
uuaugcaaggacuuauuacagu

SEQ ID NO: 717222 - RNA, 22 nt, Human
aguucucauugcaugagacaga

SEQ ID NO: 717223 - RNA, 22 nt, Human
ugggugagcggcugcacacccg

SEQ ID NO: 717224 - RNA, 19 nt, Human
gucccugggcagaggcacc

SEQ ID NO: 717225 - RNA, 22 nt, Human
uucuuagugguagucaucuuug

SEQ ID NO: 717226 - RNA, 22 nt, Human
aagcacagguugaggauuauuc

SEQ ID NO: 717227 - RNA, 22 nt, Human
ugccuacccugcccgcagacac

SEQ ID NO: 717228 - RNA, 17 nt, Human
uggcuucccugggccac

SEQ ID NO: 717229 - RNA, 23 nt, Human
augaggucagccauaagacggaa

SEQ ID NO: 717230 - RNA, 22 nt, Human
gacuucaaaagcugacauucau

SEQ ID NO: 717231 - RNA, 22 nt, Human
ucuucagauggccaguuguccc

SEQ ID NO: 717232 - RNA, 22 nt, Human
cucagccagugaucuuuccuuu

SEQ ID NO: 717233 - RNA, 22 nt, Human
acugucugcccugagaugccag

SEQ ID NO: 717234 - RNA, 22 nt, Human
aguauuuagagacacaagacgg

SEQ ID NO: 717235 - RNA, 22 nt, Human
cugugucucauccgccucuggc

SEQ ID NO: 717236 - RNA, 22 nt, Human
auuaauguguagccaacuuaau

SEQ ID NO: 717237 - RNA, 17 nt, Human
caguccucugcucuaag

SEQ ID NO: 717238 - RNA, 22 nt, Human
aaaaguaauugcaauuuuguag

SEQ ID NO: 717239 - RNA, 22 nt, Human
ugugucugcccuuaguacaucu

SEQ ID NO: 717240 - RNA, 22 nt, Human
ucccaccaggugaccauuucau

SEQ ID NO: 717241 - RNA, 22 nt, Human
uuauuguggacuacuguucugg

SEQ ID NO: 717242 - RNA, 22 nt, Human
cagccagugguugaagaugcag

SEQ ID NO: 717243 - RNA, 22 nt, Human
ucaagcaacagaacugugagac

SEQ ID NO: 717244 - RNA, 22 nt, Human
gaacaguauuuccaggaauccc

SEQ ID NO: 717245 - RNA, 22 nt, Human
uccaggaguggggcagaggucu

SEQ ID NO: 717246 - RNA, 22 nt, Human
caguggcaaugggacagagcac

SEQ ID NO: 717247 - RNA, 21 nt, Human
ucucugggcccuccugugggg

SEQ ID NO: 717248 - RNA, 22 nt, Human
ugcagggcuuccucuuggaguu

SEQ ID NO: 717249 - RNA, 22 nt, Human
acccugaagaaacuucuaagug

SEQ ID NO: 717250 - RNA, 20 nt, Human
gugaagggagucaggugugc

SEQ ID NO: 717251 - RNA, 22 nt, Human
ugacagugcggguacaucauag

SEQ ID NO: 717252 - RNA, 22 nt, Human
uggcucauggaauuagcuauua

SEQ ID NO: 717253 - RNA, 22 nt, Human
ccaggacagugaacauguaaga

SEQ ID NO: 717254 - RNA, 22 nt, Human
cuccugggcugggaacucagcc

SEQ ID NO: 717255 - RNA, 22 nt, Human
uggcuuccuggacagaugcggu

SEQ ID NO: 717256 - RNA, 22 nt, Human
agauauggccucauacagacau

SEQ ID NO: 717257 - RNA, 22 nt, Human
gucacuuucacacuuuauugcu

SEQ ID NO: 717258 - RNA, 22 nt, Human
ggagcugcuuugaucugaagaa

SEQ ID NO: 717259 - RNA, 22 nt, Human
cuugcugggguaagucugugcu

SEQ ID NO: 717260 - RNA, 22 nt, Human
guggcagaggcugugaggaugc

SEQ ID NO: 717261 - RNA, 22 nt, Human
uuccuucuaauuuuacaccuga

SEQ ID NO: 717262 - RNA, 22 nt, Human
ugggacucacucuuuuggccag

SEQ ID NO: 717263 - RNA, 22 nt, Human
aauucacaguucugcaccuuac

SEQ ID NO: 717264 - RNA, 22 nt, Human
aauguacaucucaguguaguac

SEQ ID NO: 717265 - RNA, 22 nt, Human
gcuuugcaggaaaccagugcau

SEQ ID NO: 717266 - RNA, 22 nt, Human
uggguccuggaaggcgacaggu

SEQ ID NO: 717267 - RNA, 22 nt, Human
uggcagcaaaaccagaaucaga

SEQ ID NO: 717268 - RNA, 22 nt, Human
cccagcucuuuuagcggcaucu

SEQ ID NO: 717269 - RNA, 22 nt, Human
ugggcucuagacuuuagugugg

SEQ ID NO: 717270 - RNA, 22 nt, Human
auaacuucagggcugugacaga

SEQ ID NO: 717271 - RNA, 18 nt, Human
ccugucugggguccccac

SEQ ID NO: 717272 - RNA, 22 nt, Human
gcuccaggaagggaaaucucca

SEQ ID NO: 717273 - RNA, 22 nt, Human
aagauguugggugccuccggaa

SEQ ID NO: 717274 - RNA, 22 nt, Human
ccagcaucuaugugcuguugau

SEQ ID NO: 717275 - RNA, 22 nt, Human
uagugucucuuccuguuugaaa

SEQ ID NO: 717276 - RNA, 22 nt, Human
ggcugugcuuuguuagguuguc

SEQ ID NO: 717277 - RNA, 22 nt, Human
auuuaugacaaccaaagaguga

SEQ ID NO: 717278 - RNA, 20 nt, Human
ccaaggauuggcaagcagca

SEQ ID NO: 717279 - RNA, 22 nt, Human
cgcgcugcagacagcggaggcc

SEQ ID NO: 717280 - RNA, 19 nt, Human
uucuccaggcugcagaggg

SEQ ID NO: 717281 - RNA, 22 nt, Human
cuguccaccuuugauaggcucu

SEQ ID NO: 717282 - RNA, 20 nt, Human
agaaucugacccagagagac

SEQ ID NO: 717283 - RNA, 20 nt, Human
aggguucccuuguucagcag

SEQ ID NO: 717284 - RNA, 16 nt, Human
gcaggaguaccacuug

SEQ ID NO: 717285 - RNA, 22 nt, Human
aaagacuuucaccuagcaaaga

SEQ ID NO: 717286 - RNA, 22 nt, Human
ucagcaggcgguuccuuguggg

SEQ ID NO: 717287 - RNA, 22 nt, Human
auaugcauuuaccuggcauaua

SEQ ID NO: 717288 - RNA, 22 nt, Human
aaauucagcauccugcacugga

SEQ ID NO: 717289 - RNA, 22 nt, Human
ucugaaauuguuaguaaaaaug

SEQ ID NO: 717290 - RNA, 22 nt, Human
gcaggggaguggcaggcccgga

SEQ ID NO: 717291 - RNA, 22 nt, Human
ccagaggagcauggccuugaga

SEQ ID NO: 717292 - RNA, 22 nt, Human
cauuuacuguugaaucccuagc

SEQ ID NO: 717293 - RNA, 22 nt, Human
auuuccagcagcauauuugucu

SEQ ID NO: 717294 - RNA, 19 nt, Human
ccagcccauaguccaucac

SEQ ID NO: 717295 - RNA, 22 nt, Human
acuuuguuuccauauuuguagc

SEQ ID NO: 717296 - RNA, 22 nt, Human
uuucuucuugaguaaccagauu

SEQ ID NO: 717297 - RNA, 22 nt, Human
aggggagcgacauuccgugccg

SEQ ID NO: 717298 - RNA, 18 nt, Human
ugagaggcuauuuuuugc

SEQ ID NO: 717299 - RNA, 22 nt, Human
aucuaagauguauugagcacuu

SEQ ID NO: 717300 - RNA, 22 nt, Human
cugggggcaauggucagagugu

SEQ ID NO: 717301 - RNA, 22 nt, Human
gugucccagccccacaggccug

SEQ ID NO: 717302 - RNA, 22 nt, Human
agaggcugagaaacccucuucu

SEQ ID NO: 717303 - RNA, 22 nt, Human
ugcaggugccucuugagcuugu

SEQ ID NO: 717304 - RNA, 22 nt, Human
aagucugaucauuucuucuaua

SEQ ID NO: 717305 - RNA, 22 nt, Human
augccacuguacucaacaauag

SEQ ID NO: 717306 - RNA, 22 nt, Human
uacauuguacuuacaaauagug

SEQ ID NO: 717307 - RNA, 22 nt, Human
agcauuugaaaacuauuuaauu

SEQ ID NO: 717308 - RNA, 22 nt, Human
auucugaguuagagucagccag

SEQ ID NO: 717309 - RNA, 22 nt, Human
cuugagaaucuucucugaagag

SEQ ID NO: 717310 - RNA, 22 nt, Human
caggcacaaaaggaccccagca

SEQ ID NO: 717311 - RNA, 22 nt, Human
aaacauugaugggaaguuuaau

SEQ ID NO: 717312 - RNA, 22 nt, Human
gcuguucauagaaauggucuca

SEQ ID NO: 717313 - RNA, 22 nt, Human
agaaaggguucucugaggugcu

SEQ ID NO: 717314 - RNA, 22 nt, Human
agcaugaaaacaugaaacagca

SEQ ID NO: 717315 - RNA, 22 nt, Human
acagggcuuagaaaucuguugc

SEQ ID NO: 717316 - RNA, 20 nt, Human
aaguuggcuccuccuagcaa

SEQ ID NO: 717317 - RNA, 22 nt, Human
ccaccccaaaugaagaccucuc

SEQ ID NO: 717318 - RNA, 22 nt, Human
cagcaggcagccauuucacugu

SEQ ID NO: 717319 - RNA, 22 nt, Human
uucugcuaccuuucuguaccuu

SEQ ID NO: 717320 - RNA, 22 nt, Human
aaauuccagaaacucaguauau

SEQ ID NO: 717321 - RNA, 22 nt, Human
ucuggaagaacggggcaugcug

SEQ ID NO: 717322 - RNA, 22 nt, Human
guggagaggagcagcuaccuca

SEQ ID NO: 717323 - RNA, 22 nt, Human
aaacugcaggucaugacccauu

SEQ ID NO: 717324 - RNA, 22 nt, Human
caggguuucuguugagaagucc

SEQ ID NO: 717325 - RNA, 22 nt, Human
aagacugaguucaaaucacagc

SEQ ID NO: 717326 - RNA, 18 nt, Human
auguggcuagugcuacug

SEQ ID NO: 717327 - RNA, 22 nt, Human
uagagucuaguguauacaaagu

SEQ ID NO: 717328 - RNA, 22 nt, Human
uggaaauguauuugggcaugcc

SEQ ID NO: 717329 - RNA, 22 nt, Human
uccauguguuuuccuguccaca

SEQ ID NO: 717330 - RNA, 22 nt, Human
ucuugcuaggagcuauggaaga

SEQ ID NO: 717331 - RNA, 22 nt, Human
auccaggcugcuaugaggauga

SEQ ID NO: 717332 - RNA, 22 nt, Human
uuauuauguggaugaaagaugu

SEQ ID NO: 717333 - RNA, 22 nt, Human
cuucagaauccagaaucagaau

SEQ ID NO: 717334 - RNA, 22 nt, Human
ccugggccuggcgggucggcuc

SEQ ID NO: 717335 - RNA, 22 nt, Human
aacaaaguuucaggaagauaga

SEQ ID NO: 717336 - RNA, 19 nt, Human
uccaugcccaggcaccaag

SEQ ID NO: 717337 - RNA, 22 nt, Human
ugagaacggauacuaagggcug

SEQ ID NO: 717338 - RNA, 22 nt, Human
uauaaccuuuucuuuauccucc

SEQ ID NO: 717339 - RNA, 22 nt, Human
ugcagaaauucagaaagcauaa

SEQ ID NO: 717340 - RNA, 22 nt, Human
caugcagugguaaaaagucagg

SEQ ID NO: 717341 - RNA, 22 nt, Human
auuuaucaccaguuagcugacu

SEQ ID NO: 717342 - RNA, 22 nt, Human
gcccaggaggucaaguagcuau

SEQ ID NO: 717343 - RNA, 22 nt, Human
caggacugauguuccuccagcc

SEQ ID NO: 717344 - RNA, 22 nt, Human
cuacauuucccagcugccuucc

SEQ ID NO: 717345 - RNA, 22 nt, Human
gugcccaggcccaaggcaccac

SEQ ID NO: 717346 - RNA, 22 nt, Human
agugggaccggugcuauuccag

SEQ ID NO: 717347 - RNA, 22 nt, Human
aaucauaauuguauacauucau

SEQ ID NO: 717348 - RNA, 22 nt, Human
aggcagaggaaggguggauuug

SEQ ID NO: 717349 - RNA, 22 nt, Human
cagcacauaguagguauucacu

SEQ ID NO: 717350 - RNA, 22 nt, Human
auggcccugccaggaggaacaa

SEQ ID NO: 717351 - RNA, 22 nt, Human
uaaaacaccuguagugucugcc

SEQ ID NO: 717352 - RNA, 23 nt, Human
uucagacugccuucagcauuguc

SEQ ID NO: 717353 - RNA, 22 nt, Human
gaagaacaccugcugcccagug

SEQ ID NO: 717354 - RNA, 22 nt, Human
auguugcacaaaguccauccau

SEQ ID NO: 717355 - RNA, 22 nt, Human
gagcacaggcugcugugaacug

SEQ ID NO: 717356 - RNA, 22 nt, Human
aagcagguuaugaaauauagaa

SEQ ID NO: 717357 - RNA, 22 nt, Human
cagcccucucugggccccaagg

SEQ ID NO: 717358 - RNA, 22 nt, Human
gucauugcaguggcaaaucaca

SEQ ID NO: 717359 - RNA, 22 nt, Human
ucuucacauucacguaacauag

SEQ ID NO: 717360 - RNA, 19 nt, Human
caguaucauugcacauagu

SEQ ID NO: 717361 - RNA, 22 nt, Human
aaaaaugaauucuucaguggca

SEQ ID NO: 717362 - RNA, 22 nt, Human
ucuuuaagaguucauuugcaug

SEQ ID NO: 717363 - RNA, 22 nt, Human
uuuaauauccaguggauacaaa

SEQ ID NO: 717364 - RNA, 22 nt, Human
gcugucucgccugacacuggcu

SEQ ID NO: 717365 - RNA, 22 nt, Human
gggauggaggguagagcaagug

SEQ ID NO: 717366 - RNA, 22 nt, Human
cagccagaucagggcagggguu

SEQ ID NO: 717367 - RNA, 22 nt, Human
gaacuaaaugaaauuacuggug

SEQ ID NO: 717368 - RNA, 22 nt, Human
uacuguguugugcugaaaggga

SEQ ID NO: 717369 - RNA, 22 nt, Human
aacucuacuugggacuccucug

SEQ ID NO: 717370 - RNA, 22 nt, Human
gucugagcgcuggagcuugugu

SEQ ID NO: 717371 - RNA, 22 nt, Human
uagaacucuggucuucucaucc

SEQ ID NO: 717372 - RNA, 22 nt, Human
uggcacugaagcuggaaagccu

SEQ ID NO: 717373 - RNA, 23 nt, Human
cagucugcagcccacuugggcag

SEQ ID NO: 717374 - RNA, 22 nt, Human
cccucacuguccuugggcccuu

SEQ ID NO: 717375 - RNA, 22 nt, Human
ccagcuccaggacugggagcug

SEQ ID NO: 717376 - RNA, 22 nt, Human
cuggcccagagagcagagcuua

SEQ ID NO: 717377 - RNA, 22 nt, Human
gcugagucagauugcagucuug

SEQ ID NO: 717378 - RNA, 19 nt, Human
ucucagaauuggcaaucau

SEQ ID NO: 717379 - RNA, 22 nt, Human
ucugcugcagcaggauucucug

SEQ ID NO: 717380 - RNA, 22 nt, Human
uucuuuucuuuaggcauugugu

SEQ ID NO: 717381 - RNA, 23 nt, Human
ggauaaaucucagcuucuuccau

SEQ ID NO: 717382 - RNA, 22 nt, Human
gcauaauauacaugcuugaucc

SEQ ID NO: 717383 - RNA, 22 nt, Human
agugggaggcggcugacgggcg

SEQ ID NO: 717384 - RNA, 21 nt, Human
cuguccucagauguggacgag

SEQ ID NO: 717385 - RNA, 22 nt, Human
agcaagacucagcaggauacca

SEQ ID NO: 717386 - RNA, 22 nt, Human
gccuuugcugugacaaugcugg

SEQ ID NO: 717387 - RNA, 22 nt, Human
aucuucaacuugaucauuugaa

SEQ ID NO: 717388 - RNA, 22 nt, Human
accaggaggccuggagcacaaa

SEQ ID NO: 717389 - RNA, 22 nt, Human
aaagguuuauugcuaugguugu

SEQ ID NO: 717390 - RNA, 21 nt, Human
uuacuuuugcaccaaccuaau

SEQ ID NO: 717391 - RNA, 22 nt, Human
ccagagucaggagcucauguga

SEQ ID NO: 717392 - RNA, 22 nt, Human
ucaggcaggcucagaggaaaac

SEQ ID NO: 717393 - RNA, 22 nt, Human
aacaagaagggaaggcaugauu

SEQ ID NO: 717394 - RNA, 22 nt, Human
gcuccucuauuccccacauuuu

SEQ ID NO: 717395 - RNA, 22 nt, Human
uuauuuagucuagaugaauuuu

SEQ ID NO: 717396 - RNA, 22 nt, Human
uggacaacugguuuuugacaaa

SEQ ID NO: 717397 - RNA, 22 nt, Human
uagggcugccauuugcuuuucu

SEQ ID NO: 717398 - RNA, 21 nt, Human
cuugucuugcuuagaauagac

SEQ ID NO: 717399 - RNA, 22 nt, Human
uuaaaagagcagcccagcauau

SEQ ID NO: 717400 - RNA, 22 nt, Human
uucaugcacuauuucuucuagc

SEQ ID NO: 717401 - RNA, 22 nt, Human
ucaggaaaguguucucagagga

SEQ ID NO: 717402 - RNA, 22 nt, Human
uuaaagaggcaugggaauguau

SEQ ID NO: 717403 - RNA, 22 nt, Human
aguggcuuggcugcacuacagg

SEQ ID NO: 717404 - RNA, 22 nt, Human
ugggcuuugagcucggucaccu

SEQ ID NO: 717405 - RNA, 22 nt, Human
aguuuuauguucacagaaggau

SEQ ID NO: 717406 - RNA, 22 nt, Human
ucaauuacuaaccaaauaaugu

SEQ ID NO: 717407 - RNA, 19 nt, Human
gaucagagugucagcuugu

SEQ ID NO: 717408 - RNA, 22 nt, Human
aaaaguaauugcaguuuuguca

SEQ ID NO: 717409 - RNA, 22 nt, Human
agccaggcuaaaugagccauga

SEQ ID NO: 717410 - RNA, 22 nt, Human
ggagcccugcccuaggcagcuc

SEQ ID NO: 717411 - RNA, 22 nt, Human
ugcuguguuccucaguuucaug

SEQ ID NO: 717412 - RNA, 22 nt, Human
aucacauuacaaaggacuccag

SEQ ID NO: 717413 - RNA, 22 nt, Human
aagauucuugacuagaaugauu

SEQ ID NO: 717414 - RNA, 22 nt, Human
aagaagcauucuuucauugguu

SEQ ID NO: 717415 - RNA, 22 nt, Human
cgcgcucauuuccgccuccuuc

SEQ ID NO: 717416 - RNA, 22 nt, Human
aggggcaaaugugagccuggaa

SEQ ID NO: 717417 - RNA, 20 nt, Human
gcuugcuuugucugaugggc

SEQ ID NO: 717418 - RNA, 22 nt, Human
uaaagucagggagauugaggcu

SEQ ID NO: 717419 - RNA, 22 nt, Human
aagagcagccuccaggggugga

SEQ ID NO: 717420 - RNA, 23 nt, Human
uggggccaagugaggaagggucu

SEQ ID NO: 717421 - RNA, 22 nt, Human
gagguacaugaggauacacagg

SEQ ID NO: 717422 - RNA, 22 nt, Human
uaguuucugguucuugcucugg

SEQ ID NO: 717423 - RNA, 22 nt, Human
uaugcacauucacacaaaaaug

SEQ ID NO: 717424 - RNA, 22 nt, Human
uggcuucugggacuugugagca

SEQ ID NO: 717425 - RNA, 22 nt, Human
gaguuguucaacgugugugaaa

SEQ ID NO: 717426 - RNA, 22 nt, Human
ugucuucgcuacaaugaaaagg

SEQ ID NO: 717427 - RNA, 22 nt, Human
uaugaaggauacaccucugauu

SEQ ID NO: 717428 - RNA, 22 nt, Human
aaauugucucuauuuugauucg

SEQ ID NO: 717429 - RNA, 20 nt, Human
gcuguggccgugccagacuc

SEQ ID NO: 717430 - RNA, 22 nt, Human
gaggaaggauuuaguuugaggg

SEQ ID NO: 717431 - RNA, 22 nt, Human
acugcugugaucugauguaauu

SEQ ID NO: 717432 - RNA, 22 nt, Human
aguauugugacucaaguauucu

SEQ ID NO: 717433 - RNA, 22 nt, Human
gaucuugagcaaguuguguaac

SEQ ID NO: 717434 - RNA, 22 nt, Human
uaaugacauuguauccacagag

SEQ ID NO: 717435 - RNA, 22 nt, Human
cucugagcagaggccguggcua

SEQ ID NO: 717436 - RNA, 22 nt, Human
acaugugcagacagcaagcagg

SEQ ID NO: 717437 - RNA, 22 nt, Human
aucuguaaaugcaaauguagcu

SEQ ID NO: 717438 - RNA, 22 nt, Human
cucagaguggggcucccugagg

SEQ ID NO: 717439 - RNA, 22 nt, Human
ggcggccugugggucggccuca

SEQ ID NO: 717440 - RNA, 22 nt, Human
aagcauuugugaaauucagaug

SEQ ID NO: 717441 - RNA, 22 nt, Human
cccgggagguggagacugcagu

SEQ ID NO: 717442 - RNA, 22 nt, Human
agaagugcuccagugaguuggg

SEQ ID NO: 717443 - RNA, 22 nt, Human
cccaguaaucggagaguacuua

SEQ ID NO: 717444 - RNA, 22 nt, Human
uguggaugagggagugaacaaa

SEQ ID NO: 717445 - RNA, 22 nt, Human
cugagaguauuggcaggcuugg

SEQ ID NO: 717446 - RNA, 22 nt, Human
ugccugcucuugagacuuacaa

SEQ ID NO: 717447 - RNA, 22 nt, Human
uuccacucuccagucaauuuca

SEQ ID NO: 717448 - RNA, 22 nt, Human
auuuaagacugacuucaccagu

SEQ ID NO: 717449 - RNA, 22 nt, Human
agacaauacauuuauucccuuu

SEQ ID NO: 717450 - RNA, 22 nt, Human
guucauucugaaaagcagcuug

SEQ ID NO: 717451 - RNA, 22 nt, Human
cagcuuccaucuccacugcccu

SEQ ID NO: 717452 - RNA, 22 nt, Human
gcuaaaucuccuacaaugcaca

SEQ ID NO: 717453 - RNA, 20 nt, Human
acuguuggaaguggagaaug

SEQ ID NO: 717454 - RNA, 23 nt, Human
aaauaugucugagggcaaagaau

SEQ ID NO: 717455 - RNA, 22 nt, Human
cuuucaaugugccugccuuggg

SEQ ID NO: 717456 - RNA, 22 nt, Human
uuuuaaaucuccaguugacccc

SEQ ID NO: 717457 - RNA, 22 nt, Human
aggucugccucacucacuucug

SEQ ID NO: 717458 - RNA, 19 nt, Human
gggugaggaagagcguugc

SEQ ID NO: 717459 - RNA, 22 nt, Human
aagguagauguugucaugccca

SEQ ID NO: 717460 - RNA, 22 nt, Human
uacaccugcugagccuguccuc

SEQ ID NO: 717461 - RNA, 22 nt, Human
ucugucugcaccuaagcacagu

SEQ ID NO: 717462 - RNA, 22 nt, Human
auuagaaugcaggguucauugu

SEQ ID NO: 717463 - RNA, 22 nt, Human
ucucacacuaaugcucuaucag

SEQ ID NO: 717464 - RNA, 19 nt, Human
ucaguggaugaacauguuu

SEQ ID NO: 717465 - RNA, 22 nt, Human
gccucuguggcucagccuugcu

SEQ ID NO: 717466 - RNA, 21 nt, Human
ucagcagcaucugccuagagu

SEQ ID NO: 717467 - RNA, 22 nt, Human
cagggugccaaagaacaaauau

SEQ ID NO: 717468 - RNA, 22 nt, Human
agagcuagaaggaagcauuucu

SEQ ID NO: 717469 - RNA, 22 nt, Human
auucugggcgccuauggcugca

SEQ ID NO: 717470 - RNA, 22 nt, Human
cacugcucgcugcagcauggcc

SEQ ID NO: 717471 - RNA, 22 nt, Human
cgcaggcuggcgcggaguggca

SEQ ID NO: 717472 - RNA, 22 nt, Human
cagaaacuauguaagaaaguga

SEQ ID NO: 717473 - RNA, 22 nt, Human
agggucagggagugaguauuua

SEQ ID NO: 717474 - RNA, 22 nt, Human
ccaguguuugaugggauuuuca

SEQ ID NO: 717475 - RNA, 22 nt, Human
ggcagggagagcaugcugauaa

SEQ ID NO: 717476 - RNA, 22 nt, Human
cuguuaaucugcuugcaugaug

SEQ ID NO: 717477 - RNA, 22 nt, Human
uguuuauaauaugcagugagca

SEQ ID NO: 717478 - RNA, 21 nt, Human
gugugaguagcaugugucuca

SEQ ID NO: 717479 - RNA, 22 nt, Human
uccugcacaccuugagcuugga

SEQ ID NO: 717480 - RNA, 22 nt, Human
ucaccacugaacagaccuuugg

SEQ ID NO: 717481 - RNA, 22 nt, Human
ugugaggaacccggaauguggg

SEQ ID NO: 717482 - RNA, 22 nt, Human
ggcuggagaagggugguugaca

SEQ ID NO: 717483 - RNA, 22 nt, Human
ggcuggucccggguccuccggc

SEQ ID NO: 717484 - RNA, 22 nt, Human
aauauccauugggagcaaaugg

SEQ ID NO: 717485 - RNA, 22 nt, Human
cuccaaauacaauauuguuguu

SEQ ID NO: 717486 - RNA, 22 nt, Human
uuccaauuguucuuuggaaucu

SEQ ID NO: 717487 - RNA, 22 nt, Human
ucacugucugaaagaaauggcc

SEQ ID NO: 717488 - RNA, 22 nt, Human
gguuuauugaaggccaccccac

SEQ ID NO: 717489 - RNA, 22 nt, Human
cugucuuuucauacuuucccuc

SEQ ID NO: 717490 - RNA, 22 nt, Human
cgcggcgcgcccccgggugugu

SEQ ID NO: 717491 - RNA, 22 nt, Human
guacauuucucuuguucuuauu

SEQ ID NO: 717492 - RNA, 22 nt, Human
ggcagcauauauucagugggca

SEQ ID NO: 717493 - RNA, 22 nt, Human
uuuagacacacuuuguauauuu

SEQ ID NO: 717494 - RNA, 22 nt, Human
caaaugcaggucauaaccugag

SEQ ID NO: 717495 - RNA, 23 nt, Human
cucagggauagaaaggaagacag

SEQ ID NO: 717496 - RNA, 22 nt, Human
uccaagcuacugaagguuuggg

SEQ ID NO: 717497 - RNA, 22 nt, Human
gugugcugcccaacucgcagau

SEQ ID NO: 717498 - RNA, 22 nt, Human
gacacaugucagacggacaccc

SEQ ID NO: 717499 - RNA, 22 nt, Human
cgcagggccgcgagcgggacca

SEQ ID NO: 717500 - RNA, 22 nt, Human
ucaggaaggcgccccaucagga

SEQ ID NO: 717501 - RNA, 22 nt, Human
aggaccugagaguuggaaaucc

SEQ ID NO: 717502 - RNA, 22 nt, Human
aguaaaauuguauuggaaaaca

SEQ ID NO: 717503 - RNA, 22 nt, Human
uggacagcgaaagugccuggga

SEQ ID NO: 717504 - RNA, 22 nt, Human
gagcugugauuggugucucacu

SEQ ID NO: 717505 - RNA, 22 nt, Human
acuugauuuuuauaauaaaugg

SEQ ID NO: 717506 - RNA, 22 nt, Human
ugaaccaggaggcagccagcac

SEQ ID NO: 717507 - RNA, 22 nt, Human
uagaaacaugagagaaacucuu

SEQ ID NO: 717508 - RNA, 22 nt, Human
cuggagcugccagacgggcaca

SEQ ID NO: 717509 - RNA, 22 nt, Human
ccgcgcgcgugggcguccaggg

SEQ ID NO: 717510 - RNA, 20 nt, Human
auccuggaauccaaauggag

SEQ ID NO: 717511 - RNA, 22 nt, Human
caugucuuccuugcacacacac

SEQ ID NO: 717512 - RNA, 22 nt, Human
gauuucuguaacacuucagaua

SEQ ID NO: 717513 - RNA, 22 nt, Human
ucuuucugcacuuaguggggcu

SEQ ID NO: 717514 - RNA, 22 nt, Human
ccugagcaaaggcccagaggga

SEQ ID NO: 717515 - RNA, 22 nt, Human
ccuggagaccugauggcagcgg

SEQ ID NO: 717516 - RNA, 22 nt, Human
gaagugcaaaaccacaugguaa

SEQ ID NO: 717517 - RNA, 18 nt, Human
ucugagguggacgaggag

SEQ ID NO: 717518 - RNA, 22 nt, Human
ugaaguuuaagguuagauaagu

SEQ ID NO: 717519 - RNA, 22 nt, Human
auuaaauguuggacguauacau

SEQ ID NO: 717520 - RNA, 22 nt, Human
gaggcugggaaguccaagauca

SEQ ID NO: 717521 - RNA, 22 nt, Human
ggcacugaaguggguguugggu

SEQ ID NO: 717522 - RNA, 22 nt, Human
uucuucauucccuuacuuccga

SEQ ID NO: 717523 - RNA, 22 nt, Human
ggaaggggugucgcccauggau

SEQ ID NO: 717524 - RNA, 22 nt, Human
gggaaggcugccugagggaugg

SEQ ID NO: 717525 - RNA, 22 nt, Human
agcugguaugaacaggauagga

SEQ ID NO: 717526 - RNA, 22 nt, Human
aaggcacucauucaaggagaua

SEQ ID NO: 717527 - RNA, 22 nt, Human
ggagggggacugacacugauuu

SEQ ID NO: 717528 - RNA, 22 nt, Human
agggcucugggguggcagagau

SEQ ID NO: 717529 - RNA, 22 nt, Human
ggagaugcaauguagaaucugg

SEQ ID NO: 717530 - RNA, 22 nt, Human
ugagccugggagauggaggcug

SEQ ID NO: 717531 - RNA, 21 nt, Human
acaguuuuaaggagcacaugg

SEQ ID NO: 717532 - RNA, 22 nt, Human
cagcugugagcagccaguugcc

SEQ ID NO: 717533 - RNA, 22 nt, Human
gccuggagagcacugugcgcuu

SEQ ID NO: 717534 - RNA, 22 nt, Human
guauuuucaugauuucagacca

SEQ ID NO: 717535 - RNA, 22 nt, Human
gccugcccugaaagaggugaag

SEQ ID NO: 717536 - RNA, 22 nt, Human
ccaggucuuguuugacaucaau

SEQ ID NO: 717537 - RNA, 22 nt, Human
aagcagcuuuugaagagugagg

SEQ ID NO: 717538 - RNA, 22 nt, Human
gcugggagaggcccugaaguga

SEQ ID NO: 717539 - RNA, 22 nt, Human
cagucacauggaugauggauag

SEQ ID NO: 717540 - RNA, 22 nt, Human
uuccuugagaugacugucuugu

SEQ ID NO: 717541 - RNA, 22 nt, Human
acugaacacuuuugaaagauua

SEQ ID NO: 717542 - RNA, 20 nt, Human
uccagguaacaucucucugg

SEQ ID NO: 717543 - RNA, 22 nt, Human
cuaaaugccuuuccuaccuaac

SEQ ID NO: 717544 - RNA, 22 nt, Human
ccacagggauaggaauggggcu

SEQ ID NO: 717545 - RNA, 22 nt, Human
gcuggccagggcugcucgcgga

SEQ ID NO: 717546 - RNA, 22 nt, Human
gcuuagucaauuauaaauaggc

SEQ ID NO: 717547 - RNA, 21 nt, Human
cuggaggguagaguugggcug

SEQ ID NO: 717548 - RNA, 22 nt, Human
ccucagcagacacgcuucucac

SEQ ID NO: 717549 - RNA, 22 nt, Human
uguggacugugcugccacagug

SEQ ID NO: 717550 - RNA, 22 nt, Human
cuguaaauaugaagaauauaug

SEQ ID NO: 717551 - RNA, 22 nt, Human
caguuucuucaucaguuaagca

SEQ ID NO: 717552 - RNA, 22 nt, Human
gagggggaaagucccuggaguc

SEQ ID NO: 717553 - RNA, 22 nt, Human
gagcagcaguuguuacaaugau

SEQ ID NO: 717554 - RNA, 22 nt, Human
agagaaacccuucaguguuuug

SEQ ID NO: 717555 - RNA, 22 nt, Human
ggagcugaugacgucaccaugg

SEQ ID NO: 717556 - RNA, 22 nt, Human
caguguuuuguuacuugggcac

SEQ ID NO: 717557 - RNA, 22 nt, Human
uaaaucacauuuucuuuguguu

SEQ ID NO: 717558 - RNA, 22 nt, Human
cucuucaggauggcuugugaug

SEQ ID NO: 717559 - RNA, 22 nt, Human
uaccaugaucaggcucauccuu

SEQ ID NO: 717560 - RNA, 22 nt, Human
ugucccucugaggcuucccugg

SEQ ID NO: 717561 - RNA, 22 nt, Human
uucuggaaguguuagaaucugg

SEQ ID NO: 717562 - RNA, 22 nt, Human
ccugucugagccagggugggca

SEQ ID NO: 717563 - RNA, 18 nt, Human
ugauggaggagggcuggu

SEQ ID NO: 717564 - RNA, 20 nt, Human
cucuccucacccgugucagg

SEQ ID NO: 717565 - RNA, 22 nt, Human
uugaggucuucagcugacaccu

SEQ ID NO: 717566 - RNA, 22 nt, Human
gacagcugcauccucagacaca

SEQ ID NO: 717567 - RNA, 22 nt, Human
ucaagcaaguguuugguguaaa

SEQ ID NO: 717568 - RNA, 22 nt, Human
uuacaaaguucugaguucaaac

SEQ ID NO: 717569 - RNA, 17 nt, Human
gaaaggaggcaacacug

SEQ ID NO: 717570 - RNA, 22 nt, Human
ugcuugauuaagccuuguuugc

SEQ ID NO: 717571 - RNA, 22 nt, Human
gugcuguuuugagugcuacccc

SEQ ID NO: 717572 - RNA, 22 nt, Human
ugcacugauguuuugccaagga

SEQ ID NO: 717573 - RNA, 22 nt, Human
gccugugaccccuccaucugcu

SEQ ID NO: 717574 - RNA, 22 nt, Human
uccgggagcugaacgucuugcg

SEQ ID NO: 717575 - RNA, 22 nt, Human
cagguggguguaugaaugcaaa

SEQ ID NO: 717576 - RNA, 22 nt, Human
ucuuuagcuagaaauacucuaa

SEQ ID NO: 717577 - RNA, 22 nt, Human
ugacuuuaaagcucacucuuuu

SEQ ID NO: 717578 - RNA, 22 nt, Human
cccuguuaaugucaaccugccu

SEQ ID NO: 717579 - RNA, 22 nt, Human
ucucuuucuuuguaugucuauu

SEQ ID NO: 717580 - RNA, 22 nt, Human
uucaucauuacagucauguuau

SEQ ID NO: 717581 - RNA, 17 nt, Human
ccugcccagagacagau

SEQ ID NO: 717582 - RNA, 22 nt, Human
aaaugcagauugucauucagga

SEQ ID NO: 717583 - RNA, 22 nt, Human
uucugucacagugcugguauca

SEQ ID NO: 717584 - RNA, 22 nt, Human
aaaugucugagacuucugaacu

SEQ ID NO: 717585 - RNA, 18 nt, Human
ugaggcugaauauggggc

SEQ ID NO: 717586 - RNA, 23 nt, Human
uuuggcuccauggguggcucauu

SEQ ID NO: 717587 - RNA, 22 nt, Human
ugggccacugcugcggaaggcg

SEQ ID NO: 717588 - RNA, 20 nt, Human
agaauucuuacccuuugaug

SEQ ID NO: 717589 - RNA, 22 nt, Human
agcugccucucuugagguuacg

SEQ ID NO: 717590 - RNA, 22 nt, Human
gcaaaggcuagagacacaggga

SEQ ID NO: 717591 - RNA, 22 nt, Human
caggaggcuccuagggcucugu

SEQ ID NO: 717592 - RNA, 22 nt, Human
gagcaggccuggggugaggccu

SEQ ID NO: 717593 - RNA, 22 nt, Human
aggccuuccucggagacaggga

SEQ ID NO: 717594 - RNA, 20 nt, Human
ucagcucugugccugggaug

SEQ ID NO: 717595 - RNA, 22 nt, Human
aagauguugcaagggacucuuc

SEQ ID NO: 717596 - RNA, 22 nt, Human
gagaagcagguuuagcagacaa

SEQ ID NO: 717597 - RNA, 22 nt, Human
uuggggagguugccacauucca

SEQ ID NO: 717598 - RNA, 22 nt, Human
gagcugggaagauagcuugagc

SEQ ID NO: 717599 - RNA, 22 nt, Human
cugugaggccuuuggccagaua

SEQ ID NO: 717600 - RNA, 22 nt, Human
uaaaugcucagaccuuauucca

SEQ ID NO: 717601 - RNA, 19 nt, Human
gagguggguccccgcagcc

SEQ ID NO: 717602 - RNA, 22 nt, Human
gcucaguuauccgugugugacu

SEQ ID NO: 717603 - RNA, 22 nt, Human
aaaggccacacagagcagggag

SEQ ID NO: 717604 - RNA, 22 nt, Human
gaauacuuuuguuaggaaaacg

SEQ ID NO: 717605 - RNA, 22 nt, Human
ccuuccagguuuuggcuccauu

SEQ ID NO: 717606 - RNA, 22 nt, Human
agcgagguuuugcagauacagc

SEQ ID NO: 717607 - RNA, 22 nt, Human
uccagacucuuuaaguucauuu

SEQ ID NO: 717608 - RNA, 22 nt, Human
uauuugucuuucuuauaagaau

SEQ ID NO: 717609 - RNA, 22 nt, Human
cccaggcucuuaugugacuugc

SEQ ID NO: 717610 - RNA, 22 nt, Human
uuagggacagcucuguagguga

SEQ ID NO: 717611 - RNA, 22 nt, Human
cagguggcugagcugaccuuug

SEQ ID NO: 717612 - RNA, 21 nt, Human
agguuccagcagccagagaau

SEQ ID NO: 717613 - RNA, 22 nt, Human
acuguaauguuuuaaagcagag

SEQ ID NO: 717614 - RNA, 22 nt, Human
uauacagaaccgccugaagucu

SEQ ID NO: 717615 - RNA, 22 nt, Human
cuccugugcaugcaucucccua

SEQ ID NO: 717616 - RNA, 22 nt, Human
uuauuguaggccuauuguagaa

SEQ ID NO: 717617 - RNA, 22 nt, Human
aggccagccuuguaaaugccuc

SEQ ID NO: 717618 - RNA, 22 nt, Human
uagcccagcaugagcagagcug

SEQ ID NO: 717619 - RNA, 22 nt, Human
cagcugagcaucacuagucugg

SEQ ID NO: 717620 - RNA, 22 nt, Human
cagcaguaauuagugcugcaug

SEQ ID NO: 717621 - RNA, 22 nt, Human
ccauccugcauugcuauucaga

SEQ ID NO: 717622 - RNA, 22 nt, Human
gcugaggauauagcaggaacaa

SEQ ID NO: 717623 - RNA, 23 nt, Human
cagaggguuccauggagcauggu

SEQ ID NO: 717624 - RNA, 22 nt, Human
auauauacaacuagauuaaaag

SEQ ID NO: 717625 - RNA, 22 nt, Human
uauuuauaaucugccaaagaga

SEQ ID NO: 717626 - RNA, 22 nt, Human
caaaauaccacgacuuguuuua

SEQ ID NO: 717627 - RNA, 23 nt, Human
agagaaagggauaacacguugaa

SEQ ID NO: 717628 - RNA, 22 nt, Human
aguuuacaguucucaucgcaac

SEQ ID NO: 717629 - RNA, 22 nt, Human
gaauugaauucauuuacucaaa

SEQ ID NO: 717630 - RNA, 22 nt, Human
uuguuuuggagaugagcuaaaa

SEQ ID NO: 717631 - RNA, 22 nt, Human
agugguaacuaaguccugcuua

SEQ ID NO: 717632 - RNA, 22 nt, Human
uuuauucaucaucuguucauau

SEQ ID NO: 717633 - RNA, 22 nt, Human
uucuuucuuuguaguccugaac

SEQ ID NO: 717634 - RNA, 22 nt, Human
gaacaaacagucaggacagucu

SEQ ID NO: 717635 - RNA, 22 nt, Human
aguggcugcuggaguggagaug

SEQ ID NO: 717636 - RNA, 22 nt, Human
augaagacuauuugaaggugcc

SEQ ID NO: 717637 - RNA, 22 nt, Human
aggucacauggauaaugaucag

SEQ ID NO: 717638 - RNA, 22 nt, Human
uucccucucacuuaaagcuugg

SEQ ID NO: 717639 - RNA, 22 nt, Human
cugugcccuuuguccucgucuc

SEQ ID NO: 717640 - RNA, 22 nt, Human
cagauaacugaaauaucauacc

SEQ ID NO: 717641 - RNA, 21 nt, Human
uuugauucuuccucuccccag

SEQ ID NO: 717642 - RNA, 22 nt, Human
aagcuuccugcaugggacugcu

SEQ ID NO: 717643 - RNA, 19 nt, Human
ggccacuccuggugacugg

SEQ ID NO: 717644 - RNA, 22 nt, Human
auuuuagagcuccaaguacagc

SEQ ID NO: 717645 - RNA, 22 nt, Human
gucaggauuauuuuauuaaaag

SEQ ID NO: 717646 - RNA, 22 nt, Human
ucuaugaaugacacagauaaua

SEQ ID NO: 717647 - RNA, 22 nt, Human
aaauuuuaaggcuggaacuuaa

SEQ ID NO: 717648 - RNA, 22 nt, Human
gcuugaaaauucauagguauuu

SEQ ID NO: 717649 - RNA, 22 nt, Human
aguauguagugcaaucagucag

SEQ ID NO: 717650 - RNA, 22 nt, Human
ccaaaguccauaguuuacuuua

SEQ ID NO: 717651 - RNA, 22 nt, Human
ucuggagaaggaagagucuuug

SEQ ID NO: 717652 - RNA, 22 nt, Human
ugcaucaaccuaauaucagcuc

SEQ ID NO: 717653 - RNA, 20 nt, Human
cugggcucaagugauccucc

SEQ ID NO: 717654 - RNA, 22 nt, Human
acaugucuccacccaucuuaaa

SEQ ID NO: 717655 - RNA, 22 nt, Human
ugucugaagcacugggcguugc

SEQ ID NO: 717656 - RNA, 22 nt, Human
ucugggagggagccucagaauc

SEQ ID NO: 717657 - RNA, 22 nt, Human
cccuggagggcagacagaugcc

SEQ ID NO: 717658 - RNA, 22 nt, Human
ugccugggccuucccaccucug

SEQ ID NO: 717659 - RNA, 22 nt, Human
aucaggauguuuggcugucaua

SEQ ID NO: 717660 - RNA, 22 nt, Human
uguaugugcaauguuuauaugu

SEQ ID NO: 717661 - RNA, 20 nt, Human
uuugagaccagucugcccaa

SEQ ID NO: 717662 - RNA, 22 nt, Human
cacagaauaauucacauggcuc

SEQ ID NO: 717663 - RNA, 22 nt, Human
guuuacaugcagaaaaucaaug

SEQ ID NO: 717664 - RNA, 19 nt, Human
uccugaagauuuccucagc

SEQ ID NO: 717665 - RNA, 22 nt, Human
caagauggacauaaggagagaa

SEQ ID NO: 717666 - RNA, 22 nt, Human
augaaugcugggacaaauauau

SEQ ID NO: 717667 - RNA, 22 nt, Human
uucugaaugauagucuugaacu

SEQ ID NO: 717668 - RNA, 23 nt, Human
ucauugugacugugccacauaac

SEQ ID NO: 717669 - RNA, 22 nt, Human
aucagugcuucauagcccuggu

SEQ ID NO: 717670 - RNA, 22 nt, Human
cuggcacaaaagaaaacugcca

SEQ ID NO: 717671 - RNA, 22 nt, Human
agggacacaugugauuauuuau

SEQ ID NO: 717672 - RNA, 22 nt, Human
cugagcaguagagggucucuuu

SEQ ID NO: 717673 - RNA, 22 nt, Human
aauaacagauuuucaagcugug

SEQ ID NO: 717674 - RNA, 22 nt, Human
uuauacauguguuuugagauga

SEQ ID NO: 717675 - RNA, 22 nt, Human
uauugguguacuuauagcagag

SEQ ID NO: 717676 - RNA, 22 nt, Human
gaccaccagagguccgugggua

SEQ ID NO: 717677 - RNA, 17 nt, Human
uguuugguugauuggug

SEQ ID NO: 717678 - RNA, 22 nt, Human
uuucacauggaagcucucgaga

SEQ ID NO: 717679 - RNA, 22 nt, Human
uccuggagugucuuccccaagg

SEQ ID NO: 717680 - RNA, 21 nt, Human
aucagaaucucuagauuugga

SEQ ID NO: 717681 - RNA, 22 nt, Human
auuccuuggaacagaugcgaag

SEQ ID NO: 717682 - RNA, 22 nt, Human
gccgagcacagugcagcugccu

SEQ ID NO: 717683 - RNA, 22 nt, Human
auucuagaacagagguuucuaa

SEQ ID NO: 717684 - RNA, 22 nt, Human
ugcagcaccacaccuggcuaau

SEQ ID NO: 717685 - RNA, 22 nt, Human
uaauccuggugaguuugaaaaa

SEQ ID NO: 717686 - RNA, 22 nt, Human
ccugggcucaagcgaucuuguc

SEQ ID NO: 717687 - RNA, 22 nt, Human
ucuucaugucaugguauauuga

SEQ ID NO: 717688 - RNA, 23 nt, Human
aaugggugcaacuauccaugaca

SEQ ID NO: 717689 - RNA, 22 nt, Human
ccagaggugagggggauucuug

SEQ ID NO: 717690 - RNA, 21 nt, Human
ucaggcugucugcugguucca

SEQ ID NO: 717691 - RNA, 22 nt, Human
aggugccagaugcacagcugaa

SEQ ID NO: 717692 - RNA, 22 nt, Human
cuagagaggcagauguccugug

SEQ ID NO: 717693 - RNA, 22 nt, Human
uguguuuugaacucaucuacug

SEQ ID NO: 717694 - RNA, 22 nt, Human
gagaccucuugguaucgcuagg

SEQ ID NO: 717695 - RNA, 20 nt, Human
agaagcugauacugauggaa

SEQ ID NO: 717696 - RNA, 22 nt, Human
accacugggcgggcagccugcu

SEQ ID NO: 717697 - RNA, 22 nt, Human
gugcaggggccuccccuugcug

SEQ ID NO: 717698 - RNA, 22 nt, Human
aucugcuucgcgccaauuucau

SEQ ID NO: 717699 - RNA, 22 nt, Human
aggaucuuauguaauaauuaug

SEQ ID NO: 717700 - RNA, 22 nt, Human
gaucccauguaggagaauguua

SEQ ID NO: 717701 - RNA, 22 nt, Human
ugccuggguguaaagggccaac

SEQ ID NO: 717702 - RNA, 22 nt, Human
ggagccuggccuggcucugugu

SEQ ID NO: 717703 - RNA, 22 nt, Human
auaccuuuaggcauuuugcauc

SEQ ID NO: 717704 - RNA, 22 nt, Human
ugaaaugaagggcuuguucugg

SEQ ID NO: 717705 - RNA, 21 nt, Human
ucugucugguuuuagaguggc

SEQ ID NO: 717706 - RNA, 22 nt, Human
gcuggggccugaacagucagcu

SEQ ID NO: 717707 - RNA, 22 nt, Human
accucuuaauauugcaccuucu

SEQ ID NO: 717708 - RNA, 23 nt, Human
ugagcaagugaccaacugucugu

SEQ ID NO: 717709 - RNA, 22 nt, Human
agccagagagccccagguucua

SEQ ID NO: 717710 - RNA, 22 nt, Human
cuccagggaaaggggcguccgc

SEQ ID NO: 717711 - RNA, 22 nt, Human
aucucuaauuuaaaaaguaaca

SEQ ID NO: 717712 - RNA, 22 nt, Human
ccugaggaccagcacccaucug

SEQ ID NO: 717713 - RNA, 22 nt, Human
ccaggugucaugcgugugaccc

SEQ ID NO: 717714 - RNA, 22 nt, Human
agcaugcugggucauuuuugcc

SEQ ID NO: 717715 - RNA, 22 nt, Human
aggcuguguucugguucuuagc

SEQ ID NO: 717716 - RNA, 20 nt, Human
ucugcucagcccucaguggc

SEQ ID NO: 717717 - RNA, 22 nt, Human
gggaaauuguaacaagucuguu

SEQ ID NO: 717718 - RNA, 22 nt, Human
gcccagagagaugaagugaugg

SEQ ID NO: 717719 - RNA, 22 nt, Human
acagacagaggcuccaugagga

SEQ ID NO: 717720 - RNA, 22 nt, Human
cuguccugaaagggagauuggg

SEQ ID NO: 717721 - RNA, 22 nt, Human
uuccugggaggcuguguacuug

SEQ ID NO: 717722 - RNA, 22 nt, Human
ggaggcagaacuucccgucagu

SEQ ID NO: 717723 - RNA, 22 nt, Human
ugcauggacucaucagacaaga

SEQ ID NO: 717724 - RNA, 20 nt, Human
gacauucauaguuauuacca

SEQ ID NO: 717725 - RNA, 22 nt, Human
gcacacaugcaugcacaggagu

SEQ ID NO: 717726 - RNA, 22 nt, Human
gcugucugcaagccaggaaaug

SEQ ID NO: 717727 - RNA, 22 nt, Human
gguggguauugaauacaggugu

SEQ ID NO: 717728 - RNA, 22 nt, Human
gcaggucuagaagcugccucug

SEQ ID NO: 717729 - RNA, 22 nt, Human
acauuucagauguaaugugaug

SEQ ID NO: 717730 - RNA, 22 nt, Human
cucaagucccgcaguguuccuc

SEQ ID NO: 717731 - RNA, 19 nt, Human
ucugagguggaacuggggg

SEQ ID NO: 717732 - RNA, 22 nt, Human
gaccucucaggaaucucacaug

SEQ ID NO: 717733 - RNA, 22 nt, Human
ugcuccugcugcaugcaucucc

SEQ ID NO: 717734 - RNA, 22 nt, Human
aggugcacugucuaauuagguc

SEQ ID NO: 717735 - RNA, 22 nt, Human
ggcuucacugacugguucuagg

SEQ ID NO: 717736 - RNA, 22 nt, Human
aggcagugaugagucaugaaua

SEQ ID NO: 717737 - RNA, 22 nt, Human
uccuggaucagcgggggcaggc

SEQ ID NO: 717738 - RNA, 19 nt, Human
agcugcuggcccagggacc

SEQ ID NO: 717739 - RNA, 22 nt, Human
ucuaacuauacaaagaaaacau

SEQ ID NO: 717740 - RNA, 22 nt, Human
guguaaauuuguacuuguaaau

SEQ ID NO: 717741 - RNA, 22 nt, Human
uugcuguagcucauuucacucu

SEQ ID NO: 717742 - RNA, 22 nt, Human
ucuccuuucuggagccugcuca

SEQ ID NO: 717743 - RNA, 22 nt, Human
cgcugugugcagacugaaaaug

SEQ ID NO: 717744 - RNA, 22 nt, Human
ucccagggcuuuucucaugcuu

SEQ ID NO: 717745 - RNA, 22 nt, Human
gggaggcucugcucagcccccg

SEQ ID NO: 717746 - RNA, 20 nt, Human
gggcagccucgggagugggu

SEQ ID NO: 717747 - RNA, 22 nt, Human
gucacaguguaucucuucagcu

SEQ ID NO: 717748 - RNA, 22 nt, Human
cuggaaggcggagguuguagug

SEQ ID NO: 717749 - RNA, 22 nt, Human
uagauacuuauaaucuuccaag

SEQ ID NO: 717750 - RNA, 22 nt, Human
ccugggcuccacuccaagagca

SEQ ID NO: 717751 - RNA, 22 nt, Human
cccaggcuggccuccgcagugc

SEQ ID NO: 717752 - RNA, 22 nt, Human
agccuucucugaaauucuguuu

SEQ ID NO: 717753 - RNA, 22 nt, Human
acugcucucugcaaguagaugg

SEQ ID NO: 717754 - RNA, 22 nt, Human
gcacauggacaauggaggugca

SEQ ID NO: 717755 - RNA, 22 nt, Human
uuccugaaaauacagggagacc

SEQ ID NO: 717756 - RNA, 22 nt, Human
ccuaaggaaagccaaagaggcc

SEQ ID NO: 717757 - RNA, 22 nt, Human
uuccagagaaaagguuuauuuc

SEQ ID NO: 717758 - RNA, 22 nt, Human
uuuuaauacugcuauuguagga

SEQ ID NO: 717759 - RNA, 22 nt, Human
ugcagguucugaccagccaacu

SEQ ID NO: 717760 - RNA, 22 nt, Human
aaguuucauguggagguagacu

SEQ ID NO: 717761 - RNA, 22 nt, Human
cacugccuggaaggagagacau

SEQ ID NO: 717762 - RNA, 22 nt, Human
ggcaucuccaaaacaugaacuc

SEQ ID NO: 717763 - RNA, 22 nt, Human
ugacagugcaugugacaaagga

SEQ ID NO: 717764 - RNA, 22 nt, Human
uagauuuuaggagauuuuacug

SEQ ID NO: 717765 - RNA, 22 nt, Human
gauguguguuuauacauauauu

SEQ ID NO: 717766 - RNA, 22 nt, Human
auggggugaccaugagcauuua

SEQ ID NO: 717767 - RNA, 22 nt, Human
aaaucugggucaagguggagug

SEQ ID NO: 717768 - RNA, 22 nt, Human
ggcugucugugguggagcguug

SEQ ID NO: 717769 - RNA, 22 nt, Human
uacacauaggaggguaauaaaa

SEQ ID NO: 717770 - RNA, 22 nt, Human
gccagggaaacugcagaccagc

SEQ ID NO: 717771 - RNA, 22 nt, Human
ugaaacacaagccugguuagug

SEQ ID NO: 717772 - RNA, 22 nt, Human
caaggaggcagugggacuugaa

SEQ ID NO: 717773 - RNA, 22 nt, Human
cuggccacugauuccuccccug

SEQ ID NO: 717774 - RNA, 22 nt, Human
gaaaacugugauuagaaugccu

SEQ ID NO: 717775 - RNA, 22 nt, Human
cucagaggcaagcaaggagcug

SEQ ID NO: 717776 - RNA, 22 nt, Human
aaugaacaucaaaugccuacca

SEQ ID NO: 717777 - RNA, 22 nt, Human
uaacaguauccccauuugcaag

SEQ ID NO: 717778 - RNA, 20 nt, Human
cggacuuucuucucagggca

SEQ ID NO: 717779 - RNA, 22 nt, Human
aacaagauguuuugauauaugu

SEQ ID NO: 717780 - RNA, 22 nt, Human
aaaaaccucaauuacuuuugca

SEQ ID NO: 717781 - RNA, 22 nt, Human
ugaggauuggcaaaacucaggg

SEQ ID NO: 717782 - RNA, 22 nt, Human
augacaaaagaagacaugaggu

SEQ ID NO: 717783 - RNA, 22 nt, Human
uaacaacuugcuuuuaucuuag

SEQ ID NO: 717784 - RNA, 22 nt, Human
cccacaggcaggugcaugggcu

SEQ ID NO: 717785 - RNA, 22 nt, Human
cacagcuaugagcagccuagcu

SEQ ID NO: 717786 - RNA, 23 nt, Human
ugcagggcaaguuagagacccca

SEQ ID NO: 717787 - RNA, 20 nt, Human
ugcagcuucaccugugucau

SEQ ID NO: 717788 - RNA, 22 nt, Human
caagcugccaccagaagagcau

SEQ ID NO: 717789 - RNA, 21 nt, Human
acagaugggaugagcacacug

SEQ ID NO: 717790 - RNA, 22 nt, Human
agaggccaccuucucuugagaa

SEQ ID NO: 717791 - RNA, 22 nt, Human
augcuuccacuguucugcucuc

SEQ ID NO: 717792 - RNA, 22 nt, Human
cagggcuugguuggaaccaccc

SEQ ID NO: 717793 - RNA, 22 nt, Human
gagggggagaugugcacacacu

SEQ ID NO: 717794 - RNA, 22 nt, Human
ccuuagcaacugucauagagca

SEQ ID NO: 717795 - RNA, 22 nt, Human
cacugaagccacuggaagagga

SEQ ID NO: 717796 - RNA, 22 nt, Human
agugugugcuguuccccggagg

SEQ ID NO: 717797 - RNA, 22 nt, Human
uauuaugagccaggugcugucu

SEQ ID NO: 717798 - RNA, 22 nt, Human
ggggaagaggcgugauggaucc

SEQ ID NO: 717799 - RNA, 22 nt, Human
ucuuaacauauuauuuuagcac

SEQ ID NO: 717800 - RNA, 22 nt, Human
ccaguguuuaggaauaaaaugu

SEQ ID NO: 717801 - RNA, 22 nt, Human
augaagcaggcacagcuucagg

SEQ ID NO: 717802 - RNA, 22 nt, Human
gcugacuguccgcugcucccgg

SEQ ID NO: 717803 - RNA, 22 nt, Human
aauuacuuaagagaaacuuuga

SEQ ID NO: 717804 - RNA, 22 nt, Human
gcucuggcacuggcgcgggaug

SEQ ID NO: 717805 - RNA, 22 nt, Human
agggcucuguuggggucagcac

SEQ ID NO: 717806 - RNA, 22 nt, Human
agcgcgcugucagacuggcucg

SEQ ID NO: 717807 - RNA, 22 nt, Human
agaaccaguuuaagauuugggu

SEQ ID NO: 717808 - RNA, 22 nt, Human
aagauacaaaugucaauauugg

SEQ ID NO: 717809 - RNA, 22 nt, Human
ucucagggccccaaaggcuagu

SEQ ID NO: 717810 - RNA, 22 nt, Human
ugguggcagcugagugucaggu

SEQ ID NO: 717811 - RNA, 21 nt, Human
ccagguacauggagaaugugg

SEQ ID NO: 717812 - RNA, 22 nt, Human
gcugagaguguaggauguuuac

SEQ ID NO: 717813 - RNA, 22 nt, Human
ucacuaaguuacauuuaguauu

SEQ ID NO: 717814 - RNA, 22 nt, Human
guuuaagaaaauucauguuguu

SEQ ID NO: 717815 - RNA, 22 nt, Human
gcagugugaugcuuccagccac

SEQ ID NO: 717816 - RNA, 22 nt, Human
aaucuaagccaccaguaguuuc

SEQ ID NO: 717817 - RNA, 22 nt, Human
aaaauauguauaacucuucugc

SEQ ID NO: 717818 - RNA, 22 nt, Human
ugacagucugcaguuuuaaaaa

SEQ ID NO: 717819 - RNA, 22 nt, Human
aauuaauggaaaguaaggaagg

SEQ ID NO: 717820 - RNA, 22 nt, Human
gucugcccucacaugcacucuu

SEQ ID NO: 717821 - RNA, 19 nt, Human
uaguacaaaagcagccaua

SEQ ID NO: 717822 - RNA, 22 nt, Human
acauucugaaugccugacagua

SEQ ID NO: 717823 - RNA, 22 nt, Human
acuucacacagcaaauuuaucu

SEQ ID NO: 717824 - RNA, 22 nt, Human
uggaaugucauaccauaaaaga

SEQ ID NO: 717825 - RNA, 22 nt, Human
guacacacaaucucuggucagu

SEQ ID NO: 717826 - RNA, 22 nt, Human
agccuaggguucugaugucacu

SEQ ID NO: 717827 - RNA, 19 nt, Human
agcuggagauuggagggca

SEQ ID NO: 717828 - RNA, 22 nt, Human
cugcugucaaaaaucacuccau

SEQ ID NO: 717829 - RNA, 22 nt, Human
acugcacagaauuaugguuggu

SEQ ID NO: 717830 - RNA, 22 nt, Human
ccagggucucugcugccugaga

SEQ ID NO: 717831 - RNA, 22 nt, Human
gcagggaccuaugacgauggaa

SEQ ID NO: 717832 - RNA, 22 nt, Human
agugcauguucacuggcauggu

SEQ ID NO: 717833 - RNA, 22 nt, Human
cugccuagauuugaauccuggc

SEQ ID NO: 717834 - RNA, 22 nt, Human
ccuggucaccccucucucugca

SEQ ID NO: 717835 - RNA, 22 nt, Human
ggaaucagagcagaggcuguua

SEQ ID NO: 717836 - RNA, 23 nt, Human
gcaugcaacuugcaguaguauuc

SEQ ID NO: 717837 - RNA, 22 nt, Human
cuucucuggcuccucagcgccc

SEQ ID NO: 717838 - RNA, 21 nt, Human
uaucaaggcacuuuuuaaaga

SEQ ID NO: 717839 - RNA, 22 nt, Human
aggucugagcucagggccuggc

SEQ ID NO: 717840 - RNA, 22 nt, Human
uuuaaauaggacuccugggggu

SEQ ID NO: 717841 - RNA, 22 nt, Human
uccucaguaaggcauggcuuug

SEQ ID NO: 717842 - RNA, 22 nt, Human
gcuggugcauuagcugcaguuc

SEQ ID NO: 717843 - RNA, 23 nt, Human
cacaccuguuaagaagagugccu

SEQ ID NO: 717844 - RNA, 22 nt, Human
cuuuuuguuguauaagcccuuu

SEQ ID NO: 717845 - RNA, 22 nt, Human
uuugugaaaugaagucacaacu

SEQ ID NO: 717846 - RNA, 22 nt, Human
gugucacaggcccagcucuuca

SEQ ID NO: 717847 - RNA, 22 nt, Human
caguuuauaguuguuaugugug

SEQ ID NO: 717848 - RNA, 22 nt, Human
ucacugaaccagggaucucuag

SEQ ID NO: 717849 - RNA, 22 nt, Human
aagggcugcauuugauguguca

SEQ ID NO: 717850 - RNA, 22 nt, Human
aaggccuucucuugugucugug

SEQ ID NO: 717851 - RNA, 20 nt, Human
aggcccugccagggacggag

SEQ ID NO: 717852 - RNA, 22 nt, Human
gauaauauuagaagauacaaau

SEQ ID NO: 717853 - RNA, 22 nt, Human
aauacuuugccaaguucgaaga

SEQ ID NO: 717854 - RNA, 22 nt, Human
auugaggcagcauaguucaggg

SEQ ID NO: 717855 - RNA, 22 nt, Human
gcuagaaacuguuuaaucucuu

SEQ ID NO: 717856 - RNA, 22 nt, Human
gagucgagcagaaagccgucgg

SEQ ID NO: 717857 - RNA, 22 nt, Human
ggcccugagucuagcugcucuu

SEQ ID NO: 717858 - RNA, 22 nt, Human
uaaaggcuuuuagugaugguaa

SEQ ID NO: 717859 - RNA, 22 nt, Human
acuaaguaguuucacauauaau

SEQ ID NO: 717860 - RNA, 22 nt, Human
acagcagcgucaacuuaaaauu

SEQ ID NO: 717861 - RNA, 22 nt, Human
cagcaucguguggaaaguggua

SEQ ID NO: 717862 - RNA, 22 nt, Human
acagaucuacauugucugaccc

SEQ ID NO: 717863 - RNA, 22 nt, Human
ugagcaucuuuuuacagguuua

SEQ ID NO: 717864 - RNA, 22 nt, Human
agacaauuucaaaguaauauua

SEQ ID NO: 717865 - RNA, 22 nt, Human
agaguuuguacuuuacccugag

SEQ ID NO: 717866 - RNA, 22 nt, Human
gcacccagagggcagggucucc

SEQ ID NO: 717867 - RNA, 20 nt, Human
uacaguguauguauuuaggc

SEQ ID NO: 717868 - RNA, 22 nt, Human
uguuucuugggugcucacauca

SEQ ID NO: 717869 - RNA, 21 nt, Human
aaccugagacccacgggacua

SEQ ID NO: 717870 - RNA, 22 nt, Human
caagggcucuaagucacaagau

SEQ ID NO: 717871 - RNA, 23 nt, Human
uuaguguaaggcaggcacaguug

SEQ ID NO: 717872 - RNA, 22 nt, Human
gacauggauacuugauaagggg

SEQ ID NO: 717873 - RNA, 21 nt, Human
aaagaaaucucccauugguag

SEQ ID NO: 717874 - RNA, 23 nt, Human
gccaaguagggggaaagcccgug

SEQ ID NO: 717875 - RNA, 22 nt, Human
aggagcuggaguccaggcaagu

SEQ ID NO: 717876 - RNA, 22 nt, Human
uagcaucuuuuucugucuucua

SEQ ID NO: 717877 - RNA, 23 nt, Human
ucucccucaugccuaggccuggg

SEQ ID NO: 717878 - RNA, 22 nt, Human
uguuagaaguuaaucacuaauu

SEQ ID NO: 717879 - RNA, 22 nt, Human
caauuuuauugguccaaauaca

SEQ ID NO: 717880 - RNA, 22 nt, Human
uugcaaauaaacaaguauacau

SEQ ID NO: 717881 - RNA, 22 nt, Human
acaucuguaaucuagucaaccc

SEQ ID NO: 717882 - RNA, 22 nt, Human
cugugaccuccaggaaggggug

SEQ ID NO: 717883 - RNA, 22 nt, Human
uuaaaauagccagugccccucu

SEQ ID NO: 717884 - RNA, 22 nt, Human
uaaggcagcauaauuaggccac

SEQ ID NO: 717885 - RNA, 22 nt, Human
ugagaggucaaagggcauggag

SEQ ID NO: 717886 - RNA, 22 nt, Human
caauagcuauguaaccugaaga

SEQ ID NO: 717887 - RNA, 22 nt, Human
acacuaaucuuuuauuugguuu

SEQ ID NO: 717888 - RNA, 22 nt, Human
gugacuguaauuaccuuagcaa

SEQ ID NO: 717889 - RNA, 22 nt, Human
uguuucuaucuggaucaauaga

SEQ ID NO: 717890 - RNA, 22 nt, Human
cucagcuccaggugugcaucuu

SEQ ID NO: 717891 - RNA, 22 nt, Human
ucuguccauucagccauccauc

SEQ ID NO: 717892 - RNA, 23 nt, Human
agcuuuuagguggaaauggcacu

SEQ ID NO: 717893 - RNA, 22 nt, Human
ugagagauuuucaugagugcuu

SEQ ID NO: 717894 - RNA, 22 nt, Human
gaucaugugauuugaaguaaug

SEQ ID NO: 717895 - RNA, 22 nt, Human
uggaccugcguaggugcugggc

SEQ ID NO: 717896 - RNA, 22 nt, Human
acaucacaguaguuaagccaga

SEQ ID NO: 717897 - RNA, 20 nt, Human
aggaacuggaagggaggaaa

SEQ ID NO: 717898 - RNA, 22 nt, Human
cuagaauuuuaauuggguauau

SEQ ID NO: 717899 - RNA, 21 nt, Human
uaaagcuagaaccuuagcuuu

SEQ ID NO: 717900 - RNA, 22 nt, Human
acugggccaacuauuuguucua

SEQ ID NO: 717901 - RNA, 22 nt, Human
uuguucagaaguuuaaagaauu

SEQ ID NO: 717902 - RNA, 22 nt, Human
gggcugaucgcuugagcucagg

SEQ ID NO: 717903 - RNA, 22 nt, Human
agcaggggucucugcuaaugaa

SEQ ID NO: 717904 - RNA, 22 nt, Human
ucacagaagguggccauagcug

SEQ ID NO: 717905 - RNA, 22 nt, Human
acugggcuuaugcuguggagua

SEQ ID NO: 717906 - RNA, 19 nt, Human
cuguacagguugcuucugg

SEQ ID NO: 717907 - RNA, 22 nt, Human
acuguuuugugccuuaguuucc

SEQ ID NO: 717908 - RNA, 22 nt, Human
caggaggaaacuggauucacuu

SEQ ID NO: 717909 - RNA, 22 nt, Human
gagccagccuucuucugagguc

SEQ ID NO: 717910 - RNA, 22 nt, Human
aaugucuuuauuucagguuuac

SEQ ID NO: 717911 - RNA, 22 nt, Human
uccaggccccugccugggccug

SEQ ID NO: 717912 - RNA, 22 nt, Human
aaacucuggggguggagcccag

SEQ ID NO: 717913 - RNA, 17 nt, Human
cucagaguugcuuuguc

SEQ ID NO: 717914 - RNA, 18 nt, Human
ugcagccuguagucuugu

SEQ ID NO: 717915 - RNA, 20 nt, Human
acugccuugguucaguaggu

SEQ ID NO: 717916 - RNA, 22 nt, Human
agaggucauaucucagaagaga

SEQ ID NO: 717917 - RNA, 22 nt, Human
uuacagauacauuucuuuuguu

SEQ ID NO: 717918 - RNA, 22 nt, Human
uacacauacauugcuuacaagg

SEQ ID NO: 717919 - RNA, 22 nt, Human
gcaggaagcauagaagaaugcc

SEQ ID NO: 717920 - RNA, 23 nt, Human
auccagccuggggguuuaaccac

SEQ ID NO: 717921 - RNA, 22 nt, Human
auuuccaccggcucaggaaguu

SEQ ID NO: 717922 - RNA, 22 nt, Human
aaagcagucucagacuuaagca

SEQ ID NO: 717923 - RNA, 22 nt, Human
gcucugacuuccugcgcuccag

SEQ ID NO: 717924 - RNA, 21 nt, Human
ucacacacguuuccaagggca

SEQ ID NO: 717925 - RNA, 22 nt, Human
acuuugcaauacuuaauacaaa

SEQ ID NO: 717926 - RNA, 22 nt, Human
ccauuuggcaagaaagagucau

SEQ ID NO: 717927 - RNA, 18 nt, Human
ccugaggugggaggaagg

SEQ ID NO: 717928 - RNA, 22 nt, Human
acuuccuguguuggucuugcug

SEQ ID NO: 717929 - RNA, 22 nt, Human
gccccaggggaggugcccugca

SEQ ID NO: 717930 - RNA, 22 nt, Human
auuauuauuguugauguuaggg

SEQ ID NO: 717931 - RNA, 23 nt, Human
uccagggauuaaugaagucaguc

SEQ ID NO: 717932 - RNA, 23 nt, Human
uaucucagaggaauguaguuacu

SEQ ID NO: 717933 - RNA, 22 nt, Human
agacacagaacacaaaagcaua

SEQ ID NO: 717934 - RNA, 22 nt, Human
auucagcugacuuugauucauu

SEQ ID NO: 717935 - RNA, 22 nt, Human
ugugcccauuccacuugaguac

SEQ ID NO: 717936 - RNA, 22 nt, Human
cugacucccaaagaggacgcgu

SEQ ID NO: 717937 - RNA, 23 nt, Human
agugaauucaguuuaaaacagag

SEQ ID NO: 717938 - RNA, 20 nt, Human
acuggagccaucucagccua

SEQ ID NO: 717939 - RNA, 22 nt, Human
uuauucugugaacaugguuaau

SEQ ID NO: 717940 - RNA, 22 nt, Human
aaauggcuccaguugacuuuuu

SEQ ID NO: 717941 - RNA, 22 nt, Human
ugugggacagggacagcaagag

SEQ ID NO: 717942 - RNA, 22 nt, Human
uucaaacuguguaauuuauaaa

SEQ ID NO: 717943 - RNA, 23 nt, Human
uaugugugggucuacuagaaguc

SEQ ID NO: 717944 - RNA, 22 nt, Human
uagaaacauucaguugcagucc

SEQ ID NO: 717945 - RNA, 22 nt, Human
ccugcacagccggaccccugcu

SEQ ID NO: 717946 - RNA, 21 nt, Human
ugggagagcguugcuguccuc

SEQ ID NO: 717947 - RNA, 22 nt, Human
ucuggggauaagacccagguau

SEQ ID NO: 717948 - RNA, 22 nt, Human
cauuuauauaaaauguccagaa

SEQ ID NO: 717949 - RNA, 21 nt, Human
agugugugauaggcaggaaga

SEQ ID NO: 717950 - RNA, 22 nt, Human
aagcccuggcaaugucagauga

SEQ ID NO: 717951 - RNA, 22 nt, Human
uacagauacagaucuagauaca

SEQ ID NO: 717952 - RNA, 22 nt, Human
caaagugcuggaauuauagggg

SEQ ID NO: 717953 - RNA, 22 nt, Human
aguggguggcgcagaggaggaa

SEQ ID NO: 717954 - RNA, 22 nt, Human
aguggagguuacagcuguacau

SEQ ID NO: 717955 - RNA, 22 nt, Human
cagcagaucaauguagaauauu

SEQ ID NO: 717956 - RNA, 22 nt, Human
caguccugucuuuaugacuuca

SEQ ID NO: 717957 - RNA, 22 nt, Human
augggaagguuuugagagcggg

SEQ ID NO: 717958 - RNA, 22 nt, Human
cacaguccuacagagaucagag

SEQ ID NO: 717959 - RNA, 22 nt, Human
uccagggaugguaaugagcagu

SEQ ID NO: 717960 - RNA, 22 nt, Human
uuuuccuuugaaaggugagggc

SEQ ID NO: 717961 - RNA, 22 nt, Human
cagcuucuuacgagcugguacu

SEQ ID NO: 717962 - RNA, 22 nt, Human
ccaggccucccuuuuccagcca

SEQ ID NO: 717963 - RNA, 22 nt, Human
agcccucugcaaacaccugaua

SEQ ID NO: 717964 - RNA, 18 nt, Human
gcuuucuguagaaaaggg

SEQ ID NO: 717965 - RNA, 22 nt, Human
acagcagccagccacugugagc

SEQ ID NO: 717966 - RNA, 22 nt, Human
cuggacacacuggagucuggca

SEQ ID NO: 717967 - RNA, 22 nt, Human
ccucaaaucuuuagaguuauuu

SEQ ID NO: 717968 - RNA, 22 nt, Human
uuuguguuggaagaaaugcuac

SEQ ID NO: 717969 - RNA, 22 nt, Human
cagagccugcugccuucugaag

SEQ ID NO: 717970 - RNA, 18 nt, Human
ugucucaggcugaaacag

SEQ ID NO: 717971 - RNA, 22 nt, Human
uuccaaaugcccaucuacacag

SEQ ID NO: 717972 - RNA, 22 nt, Human
ucuuaagaaagugacaaauagg

SEQ ID NO: 717973 - RNA, 22 nt, Human
ggagcucauaacaagguagcca

SEQ ID NO: 717974 - RNA, 22 nt, Human
augaaggacaacaggggagcag

SEQ ID NO: 717975 - RNA, 22 nt, Human
ugucauugguacaaauugauug

SEQ ID NO: 717976 - RNA, 22 nt, Human
caggcucccugccagggccggc

SEQ ID NO: 717977 - RNA, 22 nt, Human
caagggaaggcuaagggcaaca

SEQ ID NO: 717978 - RNA, 22 nt, Human
auggcucucuccuuacugcugc

SEQ ID NO: 717979 - RNA, 22 nt, Human
caggggcugagaaggaacgucc

SEQ ID NO: 717980 - RNA, 22 nt, Human
uggaacacaucucgcugcaggg

SEQ ID NO: 717981 - RNA, 22 nt, Human
aaucauguuuacgugacauguc

SEQ ID NO: 717982 - RNA, 22 nt, Human
ugucuauucaauauccauuucu

SEQ ID NO: 717983 - RNA, 22 nt, Human
uacuccagacauucuguccucg

SEQ ID NO: 717984 - RNA, 22 nt, Human
cuccuacaguguuugaguccag

SEQ ID NO: 717985 - RNA, 22 nt, Human
acauacauauguuuaaaugcau

SEQ ID NO: 717986 - RNA, 22 nt, Human
acaugcauauacuuaaauaugu

SEQ ID NO: 717987 - RNA, 22 nt, Human
gauacacacccuugauaggacu

SEQ ID NO: 717988 - RNA, 22 nt, Human
gcccagcuccauucuuggugag

SEQ ID NO: 717989 - RNA, 22 nt, Human
ccaggugugauuuggcaguguc

SEQ ID NO: 717990 - RNA, 22 nt, Human
agagguauauauucuccauauu

SEQ ID NO: 717991 - RNA, 22 nt, Human
uuggaaagauuauuauuaugaa

SEQ ID NO: 717992 - RNA, 22 nt, Human
agggccaccucucuggguuccc

SEQ ID NO: 717993 - RNA, 22 nt, Human
acacugugacaaaggcuguucu

SEQ ID NO: 717994 - RNA, 22 nt, Human
cagcaggauuugaaaggaagag

SEQ ID NO: 717995 - RNA, 18 nt, Human
uggagggcuugcugcagc

SEQ ID NO: 717996 - RNA, 22 nt, Human
ugggagagcacugcagccccgg

SEQ ID NO: 717997 - RNA, 22 nt, Human
acaugcuaugagagauuacuuc

SEQ ID NO: 717998 - RNA, 22 nt, Human
acuguaaauuacauaagaacag

SEQ ID NO: 717999 - RNA, 22 nt, Human
cuggcagcuucaggacacucgg

SEQ ID NO: 718000 - RNA, 18 nt, Human
uagaggggaagaccuuua

SEQ ID NO: 718001 - RNA, 22 nt, Human
auauuguguguacaaguaguua

SEQ ID NO: 718002 - RNA, 22 nt, Human
gugggcagagcaagggaacuca

SEQ ID NO: 718003 - RNA, 20 nt, Human
ggacugaaaacacaaaccug

SEQ ID NO: 718004 - RNA, 22 nt, Human
cauuugcauaugaagaaguaag

SEQ ID NO: 718005 - RNA, 22 nt, Human
cacccaggacaggccagaugug

SEQ ID NO: 718006 - RNA, 22 nt, Human
aguauaugccagagagauagcu

SEQ ID NO: 718007 - RNA, 22 nt, Human
agaguuggcccacguguaggcg

SEQ ID NO: 718008 - RNA, 22 nt, Human
auuucccagggcccucauaguu

SEQ ID NO: 718009 - RNA, 22 nt, Human
ccagcucuaaacggcucugugg

SEQ ID NO: 718010 - RNA, 22 nt, Human
aguccgccugcugccguggcag

SEQ ID NO: 718011 - RNA, 22 nt, Human
uccucagauaccuggcagauca

SEQ ID NO: 718012 - RNA, 22 nt, Human
cagucucugucaucucauggga

SEQ ID NO: 718013 - RNA, 22 nt, Human
cuacagaaacacuggacaugug

SEQ ID NO: 718014 - RNA, 22 nt, Human
ucagagaggcaauacuguuuaa

SEQ ID NO: 718015 - RNA, 22 nt, Human
accaggcagucaccguccagga

SEQ ID NO: 718016 - RNA, 22 nt, Human
uuaauuacaaaacacauagguu

SEQ ID NO: 718017 - RNA, 22 nt, Human
caugagugaguaucucaagaua

SEQ ID NO: 718018 - RNA, 22 nt, Human
ugcugccagagagacagggacu

SEQ ID NO: 718019 - RNA, 22 nt, Human
auaaguguguaaggcauucugu

SEQ ID NO: 718020 - RNA, 22 nt, Human
agucuggccuugccuugucgag

SEQ ID NO: 718021 - RNA, 22 nt, Human
uuuguaaaauuagggaauucaa

SEQ ID NO: 718022 - RNA, 18 nt, Human
uccucagccucaccuagc

SEQ ID NO: 718023 - RNA, 22 nt, Human
gcacugcagccucagauggugg

SEQ ID NO: 718024 - RNA, 21 nt, Human
ugcaauauauauuugccugaa

SEQ ID NO: 718025 - RNA, 22 nt, Human
caggaagggaaaauaguucggg

SEQ ID NO: 718026 - RNA, 22 nt, Human
cugggaaggggaagguccucuc

SEQ ID NO: 718027 - RNA, 22 nt, Human
uucugggcaccaccacagacuu

SEQ ID NO: 718028 - RNA, 22 nt, Human
guuauacuuaugugcaaaaaua

SEQ ID NO: 718029 - RNA, 22 nt, Human
uucaaauuaccacauuugcuua

SEQ ID NO: 718030 - RNA, 22 nt, Human
guguuaauggcuaugaacugau

SEQ ID NO: 718031 - RNA, 21 nt, Human
cucuggaggcaagggagagug

SEQ ID NO: 718032 - RNA, 22 nt, Human
uggcccuguucuguaccucaua

SEQ ID NO: 718033 - RNA, 22 nt, Human
ggccaccuccgugaaggaauga

SEQ ID NO: 718034 - RNA, 22 nt, Human
gacacugaagucacuaagcagg

SEQ ID NO: 718035 - RNA, 22 nt, Human
aagauacauaaagguagagucu

SEQ ID NO: 718036 - RNA, 22 nt, Human
uaacaacaugcaauuuaaccuu

SEQ ID NO: 718037 - RNA, 23 nt, Human
aaaugcagggucgcagguuacag

SEQ ID NO: 718038 - RNA, 22 nt, Human
cagguuuacaaaguaaagugug

SEQ ID NO: 718039 - RNA, 22 nt, Human
cuuaacaagcccaacuuucauu

SEQ ID NO: 718040 - RNA, 22 nt, Human
uucaggagaauuccaagaagua

SEQ ID NO: 718041 - RNA, 22 nt, Human
aaaauaucagcaaagggugaca

SEQ ID NO: 718042 - RNA, 22 nt, Human
cugccugcugauuaguauuguc

SEQ ID NO: 718043 - RNA, 22 nt, Human
aucaaaaccuugacuuuuaaug

SEQ ID NO: 718044 - RNA, 22 nt, Human
uuccuucuggagcccggggagc

SEQ ID NO: 718045 - RNA, 22 nt, Human
cugcccucgggcccucccauag

SEQ ID NO: 718046 - RNA, 22 nt, Human
auguaaguauucaaaauauuuc

SEQ ID NO: 718047 - RNA, 22 nt, Human
uccugagugagagcugggaggu

SEQ ID NO: 718048 - RNA, 22 nt, Human
ugaggggccgcccaagcacuuc

SEQ ID NO: 718049 - RNA, 22 nt, Human
aaugcaaacuucuuguuacuug

SEQ ID NO: 718050 - RNA, 22 nt, Human
ugucccugguggaggcuggcag

SEQ ID NO: 718051 - RNA, 22 nt, Human
ucagaagcaggagugugcacaa

SEQ ID NO: 718052 - RNA, 22 nt, Human
uuuaaccaguuuacaaagaauu

SEQ ID NO: 718053 - RNA, 22 nt, Human
ggugcccugccaggaugugcca

SEQ ID NO: 718054 - RNA, 22 nt, Human
ggggucugcugcggagcagaga

SEQ ID NO: 718055 - RNA, 22 nt, Human
uccagaggcuccaaagggagau

SEQ ID NO: 718056 - RNA, 21 nt, Human
ucuuuucucagcuuugugguu

SEQ ID NO: 718057 - RNA, 23 nt, Human
ucugggcauaucuagucacaucg

SEQ ID NO: 718058 - RNA, 22 nt, Human
cuucccuuucuggugacuucuc

SEQ ID NO: 718059 - RNA, 18 nt, Human
gcuccuggagucugacuc

SEQ ID NO: 718060 - RNA, 22 nt, Human
cuucaguuagaguuuacaaagu

SEQ ID NO: 718061 - RNA, 22 nt, Human
uccuuuggacacauuuuuuaua

SEQ ID NO: 718062 - RNA, 22 nt, Human
uacuguuuucuuuauaguacag

SEQ ID NO: 718063 - RNA, 22 nt, Human
gagaaagcuucuuucccacagg

SEQ ID NO: 718064 - RNA, 22 nt, Human
uggucugagcggggccauucag

SEQ ID NO: 718065 - RNA, 22 nt, Human
ugccugcuuguuuaccuacucc

SEQ ID NO: 718066 - RNA, 22 nt, Human
cagcacacagugacucgcaccu

SEQ ID NO: 718067 - RNA, 22 nt, Human
ugcagaagacacaagguaacgu

SEQ ID NO: 718068 - RNA, 22 nt, Human
ggcaggaaaacaaugagccagg

SEQ ID NO: 718069 - RNA, 22 nt, Human
uguggaagaaacaagacacuuu

SEQ ID NO: 718070 - RNA, 22 nt, Human
gucuuccuaauuugcuauuagg

SEQ ID NO: 718071 - RNA, 22 nt, Human
auggaucacagugccgugggug

SEQ ID NO: 718072 - RNA, 22 nt, Human
gaagcccacguuuggugaugua

SEQ ID NO: 718073 - RNA, 22 nt, Human
auguuaaauagccauuuguuug

SEQ ID NO: 718074 - RNA, 22 nt, Human
ugcuggagcaucugagagcauc

SEQ ID NO: 718075 - RNA, 22 nt, Human
aaauugcauugagcugcuuauu

SEQ ID NO: 718076 - RNA, 22 nt, Human
uauugacaggugccugcagaca

SEQ ID NO: 718077 - RNA, 22 nt, Human
uaauguuugagauguuggauuu

SEQ ID NO: 718078 - RNA, 22 nt, Human
uggguuaacaguuuauaccaga

SEQ ID NO: 718079 - RNA, 22 nt, Human
ggcuccauccaaggccuucuag

SEQ ID NO: 718080 - RNA, 22 nt, Human
uuugcugaacuaaaauucugaa

SEQ ID NO: 718081 - RNA, 22 nt, Human
aaagacauuagcuuagauguca

SEQ ID NO: 718082 - RNA, 22 nt, Human
uagucaacuagugagcauaugg

SEQ ID NO: 718083 - RNA, 22 nt, Human
auaauccugcuuuuucacuauu

SEQ ID NO: 718084 - RNA, 22 nt, Human
uuuguaacauuauggacugcuu

SEQ ID NO: 718085 - RNA, 23 nt, Human
uaugugcauauguguaagaauac

SEQ ID NO: 718086 - RNA, 22 nt, Human
acugagaaagaccacauggaga

SEQ ID NO: 718087 - RNA, 22 nt, Human
ugagaagcauuaggaagaacau

SEQ ID NO: 718088 - RNA, 23 nt, Human
ugauggccgcccuuugcccuguc

SEQ ID NO: 718089 - RNA, 22 nt, Human
cccagagaucuuguccuuucca

SEQ ID NO: 718090 - RNA, 22 nt, Human
ccugaggcuuaaucugucccaa

SEQ ID NO: 718091 - RNA, 22 nt, Human
ucuaggaggcggagauugcagu

SEQ ID NO: 718092 - RNA, 22 nt, Human
uuugugcagguauaggcggaga

SEQ ID NO: 718093 - RNA, 23 nt, Human
ucugauguucucuuaugcuguag

SEQ ID NO: 718094 - RNA, 22 nt, Human
cuggcacauagucagcacucaa

SEQ ID NO: 718095 - RNA, 22 nt, Human
aauuggaaaaagacuuaauugc

SEQ ID NO: 718096 - RNA, 22 nt, Human
gggagcaggagccugccugcca

SEQ ID NO: 718097 - RNA, 21 nt, Human
ugcagccauucagcccuaugc

SEQ ID NO: 718098 - RNA, 23 nt, Human
gggauauggaccuuggaggaguc

SEQ ID NO: 718099 - RNA, 22 nt, Human
acagugagcccacuccaggaga

SEQ ID NO: 718100 - RNA, 22 nt, Human
ggagguucugauuugucacaac

SEQ ID NO: 718101 - RNA, 22 nt, Human
aagaaaugugaauauugaauag

SEQ ID NO: 718102 - RNA, 22 nt, Human
cagcauuuaaugcagugcuucc

SEQ ID NO: 718103 - RNA, 22 nt, Human
cagccacagcugggugccugac

SEQ ID NO: 718104 - RNA, 22 nt, Human
uccuggccuccguucucugcau

SEQ ID NO: 718105 - RNA, 22 nt, Human
gcccaccuaaccugcucaccuu

SEQ ID NO: 718106 - RNA, 22 nt, Human
uagugucucggggcccaggauu

SEQ ID NO: 718107 - RNA, 22 nt, Human
acccaggagcaggcugggcagu

SEQ ID NO: 718108 - RNA, 22 nt, Human
augaccagccgagauaaacaga

SEQ ID NO: 718109 - RNA, 22 nt, Human
caaggacacucccugcugggca

SEQ ID NO: 718110 - RNA, 22 nt, Human
uaagcaaaggauuuugaucuuu

SEQ ID NO: 718111 - RNA, 23 nt, Human
aggaaguuaaggcagacagacag

SEQ ID NO: 718112 - RNA, 22 nt, Human
uagggcagccuuauagcuccca

SEQ ID NO: 718113 - RNA, 22 nt, Human
ucuaacauuguuuuucacagau

SEQ ID NO: 718114 - RNA, 22 nt, Human
ucccuaaacucugaacugauuc

SEQ ID NO: 718115 - RNA, 22 nt, Human
caacaauaugcugaguuuuuca

SEQ ID NO: 718116 - RNA, 22 nt, Human
aacaacuugcguucagagaugu

SEQ ID NO: 718117 - RNA, 22 nt, Human
cucacagguucugcagcucaca

SEQ ID NO: 718118 - RNA, 22 nt, Human
caagagcuacccugugccauau

SEQ ID NO: 718119 - RNA, 22 nt, Human
aaauucauauguugaaaugcua

SEQ ID NO: 718120 - RNA, 22 nt, Human
gacucugugggaggaggcucag

SEQ ID NO: 718121 - RNA, 22 nt, Human
aaauccuaagcagaggaauuua

SEQ ID NO: 718122 - RNA, 22 nt, Human
agcucugggccaggaacccuaa

SEQ ID NO: 718123 - RNA, 22 nt, Human
ugcucugguaacucacuuccau

SEQ ID NO: 718124 - RNA, 22 nt, Human
cucucaggcuugggucguggca

SEQ ID NO: 718125 - RNA, 22 nt, Human
cacagggccuugugugacugca

SEQ ID NO: 718126 - RNA, 18 nt, Human
cugacccuuuuacauucc

SEQ ID NO: 718127 - RNA, 22 nt, Human
agagcugagaauguggcuuccu

SEQ ID NO: 718128 - RNA, 22 nt, Human
caggaaaugaaagcuagcuaau

SEQ ID NO: 718129 - RNA, 22 nt, Human
uuuucuaacuuuacacucgaaa

SEQ ID NO: 718130 - RNA, 22 nt, Human
aggccacagguggaagccagag

SEQ ID NO: 718131 - RNA, 22 nt, Human
cagcccuggcccaggugccuua

SEQ ID NO: 718132 - RNA, 23 nt, Human
cagcacaguacauuuccugucuc

SEQ ID NO: 718133 - RNA, 22 nt, Human
cucuaaauccaaauaagugucc

SEQ ID NO: 718134 - RNA, 22 nt, Human
aggaauuuuguauggauacugu

SEQ ID NO: 718135 - RNA, 19 nt, Human
ugcaagcuuuuucuuguua

SEQ ID NO: 718136 - RNA, 22 nt, Human
aggggacauuuagcaaugacua

SEQ ID NO: 718137 - RNA, 22 nt, Human
cauuaacaauuguuuaugcugu

SEQ ID NO: 718138 - RNA, 22 nt, Human
ugaugggaaaaugaggccuggg

SEQ ID NO: 718139 - RNA, 22 nt, Human
cggagcagagccacucgggccg

SEQ ID NO: 718140 - RNA, 22 nt, Human
ugucauggugcuauuuaauuag

SEQ ID NO: 718141 - RNA, 22 nt, Human
uguuccuaaauaugaauggaga

SEQ ID NO: 718142 - RNA, 22 nt, Human
cuggaagaguccuaaacagaua

SEQ ID NO: 718143 - RNA, 22 nt, Human
uucuguggucucccaugucugu

SEQ ID NO: 718144 - RNA, 22 nt, Human
uuccuaaugucuacuuuaguuc

SEQ ID NO: 718145 - RNA, 22 nt, Human
uuucaagcauaacugggaagag

SEQ ID NO: 718146 - RNA, 22 nt, Human
uuagccaggggagcagcuuguc

SEQ ID NO: 718147 - RNA, 22 nt, Human
acugccugaugugguucuaaau

SEQ ID NO: 718148 - RNA, 22 nt, Human
auugucucuuaaauguggaaau

SEQ ID NO: 718149 - RNA, 22 nt, Human
aggagcugcuuaaaugguuggu

SEQ ID NO: 718150 - RNA, 22 nt, Human
agucuggguggcugagcuacag

SEQ ID NO: 718151 - RNA, 22 nt, Human
ucccccacucuaaaggagccuu

SEQ ID NO: 718152 - RNA, 22 nt, Human
ugccaccccucugcacccucag

SEQ ID NO: 718153 - RNA, 22 nt, Human
uccucuucugcccaucagaggc

SEQ ID NO: 718154 - RNA, 22 nt, Human
gcuucaugcuugcuccaaagcu

SEQ ID NO: 718155 - RNA, 22 nt, Human
uuuguuaaauauuuauugagug

SEQ ID NO: 718156 - RNA, 22 nt, Human
cuggggugugcucagagcaggg

SEQ ID NO: 718157 - RNA, 22 nt, Human
ucagaagaagguauauuuauac

SEQ ID NO: 718158 - RNA, 22 nt, Human
uuuuuguucccagagaauuugu

SEQ ID NO: 718159 - RNA, 22 nt, Human
ggauucuacugaucagcaccac

SEQ ID NO: 718160 - RNA, 22 nt, Human
ccugagccgagcgcucuuucuc

SEQ ID NO: 718161 - RNA, 22 nt, Human
cugcagcagccuccagccuugg

SEQ ID NO: 718162 - RNA, 22 nt, Human
ggcaggcagccuccauccacag

SEQ ID NO: 718163 - RNA, 22 nt, Human
auggcaguacguugaaaauuuu

SEQ ID NO: 718164 - RNA, 22 nt, Human
uugcccagaguccacagcguac

SEQ ID NO: 718165 - RNA, 22 nt, Human
ccaggacccugcaaacccuguu

SEQ ID NO: 718166 - RNA, 22 nt, Human
cagcagaguuuggcuucuaaug

SEQ ID NO: 718167 - RNA, 22 nt, Human
guugaaagaucauguggcugcc

SEQ ID NO: 718168 - RNA, 22 nt, Human
uuaagugucauaauuuccaaga

SEQ ID NO: 718169 - RNA, 22 nt, Human
gccugagugcaucugcagacau

SEQ ID NO: 718170 - RNA, 22 nt, Human
gggcaugcaggacuguggcaga

SEQ ID NO: 718171 - RNA, 22 nt, Human
ucuuucaaugagcauucuuucc

SEQ ID NO: 718172 - RNA, 22 nt, Human
auggccaggguggcacuguggu

SEQ ID NO: 718173 - RNA, 22 nt, Human
accaggcagagcugggccuuaa

SEQ ID NO: 718174 - RNA, 22 nt, Human
aguguacauucuguuugaggua

SEQ ID NO: 718175 - RNA, 22 nt, Human
ugcuuaaaaugaugauuauuuu

SEQ ID NO: 718176 - RNA, 22 nt, Human
uucagacuucuugacuggcuuu

SEQ ID NO: 718177 - RNA, 22 nt, Human
aaaugcaccuugcugugagacu

SEQ ID NO: 718178 - RNA, 22 nt, Human
aauccauugcugugcugccagg

SEQ ID NO: 718179 - RNA, 22 nt, Human
acugggaauggagccugggccu

SEQ ID NO: 718180 - RNA, 22 nt, Human
uucauauauaugcacuacguac

SEQ ID NO: 718181 - RNA, 22 nt, Human
cagaauguauucucauaaagcc

SEQ ID NO: 718182 - RNA, 22 nt, Human
uuugggaacucuaucauggaaa

SEQ ID NO: 718183 - RNA, 22 nt, Human
caaucacucugcaacauuccug

SEQ ID NO: 718184 - RNA, 22 nt, Human
uucaagcagggauuggugaugg

SEQ ID NO: 718185 - RNA, 22 nt, Human
acugcucaaggaucugguaggg

SEQ ID NO: 718186 - RNA, 22 nt, Human
uuugacaucaauacccuagaau

SEQ ID NO: 718187 - RNA, 22 nt, Human
uggcagcaauuagcuagagcug

SEQ ID NO: 718188 - RNA, 22 nt, Human
gugggcaggguugcuuucuccg

SEQ ID NO: 718189 - RNA, 22 nt, Human
aauauuuuaggcuuuccaggcu

SEQ ID NO: 718190 - RNA, 22 nt, Human
uauuuauucuuuguacugccuu

SEQ ID NO: 718191 - RNA, 22 nt, Human
ucucucuucaacccuuaacuag

SEQ ID NO: 718192 - RNA, 22 nt, Human
ucuuucuguaagcuccauggaa

SEQ ID NO: 718193 - RNA, 22 nt, Human
agaagaaagauugaagguuccu

SEQ ID NO: 718194 - RNA, 22 nt, Human
ggagcugggguuggcaucuucc

SEQ ID NO: 718195 - RNA, 22 nt, Human
ucuuggcuaguaccuuccugcc

SEQ ID NO: 718196 - RNA, 22 nt, Human
ucagaacaggacuggcugccau

SEQ ID NO: 718197 - RNA, 22 nt, Human
gaucauuugcaggaaacauuaa

SEQ ID NO: 718198 - RNA, 22 nt, Human
uaugcuuuuaaccuguaacuga

SEQ ID NO: 718199 - RNA, 20 nt, Human
ggccuuggguuucgccuguu

SEQ ID NO: 718200 - RNA, 19 nt, Human
gcugcagaguauucuuggg

SEQ ID NO: 718201 - RNA, 22 nt, Human
auguccagccaaccacuggauu

SEQ ID NO: 718202 - RNA, 22 nt, Human
guggccagcaagugcugccucu

SEQ ID NO: 718203 - RNA, 17 nt, Human
gcacaaaucaauuacua

SEQ ID NO: 718204 - RNA, 22 nt, Human
aggcccuucuugguggcucagg

SEQ ID NO: 718205 - RNA, 22 nt, Human
augcaaaauaaggcagaaacau

SEQ ID NO: 718206 - RNA, 22 nt, Human
gcuccuucaggugguagcuguu

SEQ ID NO: 718207 - RNA, 22 nt, Human
cccagagauguccugagugaua

SEQ ID NO: 718208 - RNA, 22 nt, Human
gacuuuaaagccugacauuuua

SEQ ID NO: 718209 - RNA, 23 nt, Human
uuacaaggaagugcacagauggg

SEQ ID NO: 718210 - RNA, 22 nt, Human
cauuucugggagacaugcuaga

SEQ ID NO: 718211 - RNA, 22 nt, Human
cugggcuugaguuccugcucgu

SEQ ID NO: 718212 - RNA, 22 nt, Human
gugggcaguucaauucugggag

SEQ ID NO: 718213 - RNA, 22 nt, Human
agucaaauaagacugucauaag

SEQ ID NO: 718214 - RNA, 22 nt, Human
auaaaaggaaagccuguuguga

SEQ ID NO: 718215 - RNA, 22 nt, Human
aaucagcagaagagaggucuua

SEQ ID NO: 718216 - RNA, 22 nt, Human
uuaauucagucaaagaaaccau

SEQ ID NO: 718217 - RNA, 22 nt, Human
ccagcaucuguccuuucccuca

SEQ ID NO: 718218 - RNA, 22 nt, Human
acagcauugcuccaucucaaga

SEQ ID NO: 718219 - RNA, 22 nt, Human
ugugugccccagaugaguagcu

SEQ ID NO: 718220 - RNA, 22 nt, Human
gacuguacuugagagaggaacu

SEQ ID NO: 718221 - RNA, 22 nt, Human
cacaaggaccucagauggauga

SEQ ID NO: 718222 - RNA, 22 nt, Human
cagagcuggguuugggaaaccu

SEQ ID NO: 718223 - RNA, 22 nt, Human
gagcgggaggaacggcucgggc

SEQ ID NO: 718224 - RNA, 22 nt, Human
cagugcugggcagaggagagcg

SEQ ID NO: 718225 - RNA, 22 nt, Human
cacauccuaucagucacgguuu

SEQ ID NO: 718226 - RNA, 22 nt, Human
cugaaagguauaaauaagacuu

SEQ ID NO: 718227 - RNA, 22 nt, Human
uucaacauuuaucaguuuauca

SEQ ID NO: 718228 - RNA, 22 nt, Human
agaagaaaugugaaggccacug

SEQ ID NO: 718229 - RNA, 22 nt, Human
ucaaaggaguuuaaguuacugg

SEQ ID NO: 718230 - RNA, 22 nt, Human
gggcuucuugcaggggcaacau

SEQ ID NO: 718231 - RNA, 22 nt, Human
gggcugaggaacauauuuuguu

SEQ ID NO: 718232 - RNA, 22 nt, Human
aagcucaggcuggaccuggcuu

SEQ ID NO: 718233 - RNA, 22 nt, Human
uauucaaaguaccuucauugcc

SEQ ID NO: 718234 - RNA, 22 nt, Human
uguggccagccacaggcauggu

SEQ ID NO: 718235 - RNA, 22 nt, Human
ccagggcugagcugugaccaug

SEQ ID NO: 718236 - RNA, 19 nt, Human
augucucuguagcacauac

SEQ ID NO: 718237 - RNA, 22 nt, Human
guuacagucaggagauauuuug

SEQ ID NO: 718238 - RNA, 22 nt, Human
gugaggggaguaaagccauguu

SEQ ID NO: 718239 - RNA, 22 nt, Human
ugcaggcugccuucacagagcc

SEQ ID NO: 718240 - RNA, 22 nt, Human
uaagugaauauuuucuucugua

SEQ ID NO: 718241 - RNA, 22 nt, Human
ccagucuggcaggagggggaac

SEQ ID NO: 718242 - RNA, 22 nt, Human
agagggcauuaacucugucuug

SEQ ID NO: 718243 - RNA, 19 nt, Human
caguuuaugcuuuggggac

SEQ ID NO: 718244 - RNA, 22 nt, Human
cuuggcugaacuccaggaugca

SEQ ID NO: 718245 - RNA, 22 nt, Human
caugggccauggugaagccagg

SEQ ID NO: 718246 - RNA, 22 nt, Human
uuccuguggcugucacuccugg

SEQ ID NO: 718247 - RNA, 22 nt, Human
ugccugucuucaggagugucac

SEQ ID NO: 718248 - RNA, 22 nt, Human
uauuuauauucugccuucugcu

SEQ ID NO: 718249 - RNA, 22 nt, Human
agaggccagcacugcagggaag

SEQ ID NO: 718250 - RNA, 22 nt, Human
cugagcagcaacccagagccuc

SEQ ID NO: 718251 - RNA, 22 nt, Human
gcaugugucccucagucugugc

SEQ ID NO: 718252 - RNA, 22 nt, Human
agacccacacuuugaguagcaa

SEQ ID NO: 718253 - RNA, 22 nt, Human
uacuuuuuagcacagugugugc

SEQ ID NO: 718254 - RNA, 22 nt, Human
auugcugugaugauguucugag

SEQ ID NO: 718255 - RNA, 17 nt, Human
ggagagugggaauggcc

SEQ ID NO: 718256 - RNA, 18 nt, Human
gcucugcccaggcugccc

SEQ ID NO: 718257 - RNA, 22 nt, Human
cugugcuggauucugaggcuac

SEQ ID NO: 718258 - RNA, 22 nt, Human
gucugaaacgcauuguuaucga

SEQ ID NO: 718259 - RNA, 22 nt, Human
gucugcuguucagagauguugc

SEQ ID NO: 718260 - RNA, 22 nt, Human
uuuugugagaugcguaugaaug

SEQ ID NO: 718261 - RNA, 22 nt, Human
gacaaagagaaguaacaguacc

SEQ ID NO: 718262 - RNA, 22 nt, Human
gaggcaaggccgcacgucucag

SEQ ID NO: 718263 - RNA, 22 nt, Human
uuugugcagugguuaagaccau

SEQ ID NO: 718264 - RNA, 22 nt, Human
cuggacucacuauggcuucaga

SEQ ID NO: 718265 - RNA, 22 nt, Human
acacagaguauuuagaaggggu

SEQ ID NO: 718266 - RNA, 22 nt, Human
auuccagaugaauugcauaguu

SEQ ID NO: 718267 - RNA, 22 nt, Human
agggcugggcugcuuguuguca

SEQ ID NO: 718268 - RNA, 22 nt, Human
aaggccugggaggccucucuuc

SEQ ID NO: 718269 - RNA, 22 nt, Human
ucaccauuggcaauuauaaaac

SEQ ID NO: 718270 - RNA, 17 nt, Human
gagccccuuuccaaguu

SEQ ID NO: 718271 - RNA, 22 nt, Human
caggguaguaauuuaauacaag

SEQ ID NO: 718272 - RNA, 22 nt, Human
auccugucuuuguuuuaaauau

SEQ ID NO: 718273 - RNA, 22 nt, Human
uuguuuuaucuuucuacagacu

SEQ ID NO: 718274 - RNA, 19 nt, Human
acugagaccacagacaagu

SEQ ID NO: 718275 - RNA, 22 nt, Human
agagcagugcugaagaguaggg

SEQ ID NO: 718276 - RNA, 22 nt, Human
ucucagggaguugaggcugccu

SEQ ID NO: 718277 - RNA, 22 nt, Human
gagcuaaggucacaagaagcag

SEQ ID NO: 718278 - RNA, 21 nt, Human
ucuguacuuugcuuccaugcu

SEQ ID NO: 718279 - RNA, 22 nt, Human
cuuuacuguuuggugcucuauu

SEQ ID NO: 718280 - RNA, 22 nt, Human
cugugucuaaucuuauacauca

SEQ ID NO: 718281 - RNA, 20 nt, Human
ucuguuauugcauguacaua

SEQ ID NO: 718282 - RNA, 22 nt, Human
agauguaccagguauuacagga

SEQ ID NO: 718283 - RNA, 20 nt, Human
uccaugaguuagagacuaua

SEQ ID NO: 718284 - RNA, 22 nt, Human
augucuguacgaguuacaaugg

SEQ ID NO: 718285 - RNA, 22 nt, Human
aagacauuuauuugaaucaauu

SEQ ID NO: 718286 - RNA, 22 nt, Human
gaaauuguaaaggauugcgcca

SEQ ID NO: 718287 - RNA, 21 nt, Human
uccccucacuugucuucugag

SEQ ID NO: 718288 - RNA, 22 nt, Human
aguguucuucuucaaagcucug

SEQ ID NO: 718289 - RNA, 22 nt, Human
uacauuaucuuguuaucuuuca

SEQ ID NO: 718290 - RNA, 22 nt, Human
auaaacaguagagaaagguggu

SEQ ID NO: 718291 - RNA, 23 nt, Human
uccaugagaugugggcuucuagu

SEQ ID NO: 718292 - RNA, 22 nt, Human
aaucaucccaacugagaauccc

SEQ ID NO: 718293 - RNA, 22 nt, Human
gcccuucaguuacuccuugaug

SEQ ID NO: 718294 - RNA, 22 nt, Human
uaucuguauccccaucuagcua

SEQ ID NO: 718295 - RNA, 22 nt, Human
gugagcagccucaccugagggu

SEQ ID NO: 718296 - RNA, 22 nt, Human
auggaauaggcugcucuuuaaa

SEQ ID NO: 718297 - RNA, 22 nt, Human
cgaugggggcaguguuacauug

SEQ ID NO: 718298 - RNA, 23 nt, Human
ccucaaauguagccuuuuuccca

SEQ ID NO: 718299 - RNA, 22 nt, Human
cugagggccugaggaccuagau

SEQ ID NO: 718300 - RNA, 22 nt, Human
cuucaugaugaccaacugccau

SEQ ID NO: 718301 - RNA, 23 nt, Human
uugcuuagagaccuccucaucag

SEQ ID NO: 718302 - RNA, 22 nt, Human
aagaccugccagccucauccug

SEQ ID NO: 718303 - RNA, 22 nt, Human
agagcuggcugcugcggugcuu

SEQ ID NO: 718304 - RNA, 22 nt, Human
aagucacacaguuaacaugagg

SEQ ID NO: 718305 - RNA, 22 nt, Human
uggaaccuaaaaaugucauugc

SEQ ID NO: 718306 - RNA, 22 nt, Human
gacagaguuguugauguaugcu

SEQ ID NO: 718307 - RNA, 22 nt, Human
uagcagggaaggugugcugagc

SEQ ID NO: 718308 - RNA, 22 nt, Human
gcuguguguucaauaaugugau

SEQ ID NO: 718309 - RNA, 22 nt, Human
uguaagaauaaugauuucuaag

SEQ ID NO: 718310 - RNA, 22 nt, Human
ggagaaggguauguguggcgga

SEQ ID NO: 718311 - RNA, 22 nt, Human
cggcuggggcuguccccaugac

SEQ ID NO: 718312 - RNA, 22 nt, Human
augcauguauucaugugugaca

SEQ ID NO: 718313 - RNA, 22 nt, Human
aaauggaucuguggaauacauu

SEQ ID NO: 718314 - RNA, 20 nt, Human
uuauuucucauucuccuacu

SEQ ID NO: 718315 - RNA, 22 nt, Human
cugagccaugagccugcgccca

SEQ ID NO: 718316 - RNA, 22 nt, Human
agguccugucuuaucucuguaa

SEQ ID NO: 718317 - RNA, 22 nt, Human
auuggcaaggcugcggugucug

SEQ ID NO: 718318 - RNA, 22 nt, Human
aggccucauaguagaccugccc

SEQ ID NO: 718319 - RNA, 22 nt, Human
gcugauccuuuuaugucuagcu

SEQ ID NO: 718320 - RNA, 22 nt, Human
cuuuaaggugaugagagaugcu

SEQ ID NO: 718321 - RNA, 22 nt, Human
acaucauuguccguugucauga

SEQ ID NO: 718322 - RNA, 22 nt, Human
aggcucagaggugagcaucugc

SEQ ID NO: 718323 - RNA, 22 nt, Human
gacagggacgaggcuucaggca

SEQ ID NO: 718324 - RNA, 22 nt, Human
aagauauucaaagauuuauuag

SEQ ID NO: 718325 - RNA, 22 nt, Human
uuagcugaguggugcuggcuca

SEQ ID NO: 718326 - RNA, 22 nt, Human
aaacacuguacaaucugcaggg

SEQ ID NO: 718327 - RNA, 22 nt, Human
uaacuuuaugacaugucuugcu

SEQ ID NO: 718328 - RNA, 22 nt, Human
gcagcugccaguccccuuccag

SEQ ID NO: 718329 - RNA, 22 nt, Human
agcacaggugaaacagucaggu

SEQ ID NO: 718330 - RNA, 22 nt, Human
uauacagauggaaagauacaca

SEQ ID NO: 718331 - RNA, 22 nt, Human
ugggcagaaugugggauccaga

SEQ ID NO: 718332 - RNA, 22 nt, Human
aguuauuuuggaaaaugaguca

SEQ ID NO: 718333 - RNA, 22 nt, Human
ucugucacucuagagauggcag

SEQ ID NO: 718334 - RNA, 22 nt, Human
aacacuguaacagcaucauuuu

SEQ ID NO: 718335 - RNA, 22 nt, Human
ugaauauguauuucuuauuuac

SEQ ID NO: 718336 - RNA, 21 nt, Human
cuucuuggggagcagcuagac

SEQ ID NO: 718337 - RNA, 22 nt, Human
uucauauuugaaacagaaguua

SEQ ID NO: 718338 - RNA, 22 nt, Human
ugcugaggaauuugguuuaugu

SEQ ID NO: 718339 - RNA, 22 nt, Human
cacauagauaggcagaagaaca

SEQ ID NO: 718340 - RNA, 22 nt, Human
uuccucuguaugcuuugcugcu

SEQ ID NO: 718341 - RNA, 22 nt, Human
aaguguguugacugaauugggg

SEQ ID NO: 718342 - RNA, 23 nt, Human
uuggcagcgggucaggcuguggg

SEQ ID NO: 718343 - RNA, 22 nt, Human
ucugggugacccugggcaaggc

SEQ ID NO: 718344 - RNA, 22 nt, Human
ucauauaagagcuuuagaguca

SEQ ID NO: 718345 - RNA, 22 nt, Human
gagggcucugucuggaagggaa

SEQ ID NO: 718346 - RNA, 19 nt, Human
cccaaggcccugggcaggc

SEQ ID NO: 718347 - RNA, 22 nt, Human
acuggaggggaaaaugguagua

SEQ ID NO: 718348 - RNA, 22 nt, Human
cuacaggaaggaucuugcucaa

SEQ ID NO: 718349 - RNA, 23 nt, Human
uuuguucacuccugggaaagaca

SEQ ID NO: 718350 - RNA, 22 nt, Human
aagagacuggaaacuaggguca

SEQ ID NO: 718351 - RNA, 22 nt, Human
cacagguggcuccaaguuagag

SEQ ID NO: 718352 - RNA, 22 nt, Human
aucagagaccggucaagucaug

SEQ ID NO: 718353 - RNA, 22 nt, Human
agggcuccuaugaugcucugcc

SEQ ID NO: 718354 - RNA, 22 nt, Human
ucuuccagagccuccaucccua

SEQ ID NO: 718355 - RNA, 23 nt, Human
ccagcucccaggucugaggacug

SEQ ID NO: 718356 - RNA, 22 nt, Human
uguguuucagaaccuucuuuca

SEQ ID NO: 718357 - RNA, 22 nt, Human
gcagcaguggucuguagaagga

SEQ ID NO: 718358 - RNA, 22 nt, Human
cccugggaggcuuccaggcaga

SEQ ID NO: 718359 - RNA, 22 nt, Human
aaaugugcuucuuacucucaau

SEQ ID NO: 718360 - RNA, 21 nt, Human
agcuuuucuguuuuauaucua

SEQ ID NO: 718361 - RNA, 18 nt, Human
gcugcaggcgccugcggu

SEQ ID NO: 718362 - RNA, 22 nt, Human
agcuggguggccucuccucggg

SEQ ID NO: 718363 - RNA, 22 nt, Human
uuggaaagcaagcuggacauac

SEQ ID NO: 718364 - RNA, 22 nt, Human
acacauuuacauguuuacguau

SEQ ID NO: 718365 - RNA, 22 nt, Human
ccugcuggcugguagaguuccg

SEQ ID NO: 718366 - RNA, 22 nt, Human
auucagcaguuccugcuucagu

SEQ ID NO: 718367 - RNA, 22 nt, Human
aggcuucaggaagucuccuggg

SEQ ID NO: 718368 - RNA, 22 nt, Human
uucugcaucucacagccagugc

SEQ ID NO: 718369 - RNA, 22 nt, Human
gaaacugugaucguguucuggg

SEQ ID NO: 718370 - RNA, 22 nt, Human
cggcuucaaagggagcgagauc

SEQ ID NO: 718371 - RNA, 22 nt, Human
ucacaugcuacugagccagacc

SEQ ID NO: 718372 - RNA, 22 nt, Human
ugaggggagcccgcccuggacg

SEQ ID NO: 718373 - RNA, 22 nt, Human
gcccugaggcaaaagaacaguc

SEQ ID NO: 718374 - RNA, 22 nt, Human
ccucugcaaagaauuugucucc

SEQ ID NO: 718375 - RNA, 22 nt, Human
acacagggcaaugcuuugaccu

SEQ ID NO: 718376 - RNA, 19 nt, Human
gguggguuggugguucccu

SEQ ID NO: 718377 - RNA, 22 nt, Human
aggcucucuagaaacugugccu

SEQ ID NO: 718378 - RNA, 22 nt, Human
aaauuccauuuugugacuauuc

SEQ ID NO: 718379 - RNA, 22 nt, Human
guaucuuuaucccucguuggag

SEQ ID NO: 718380 - RNA, 22 nt, Human
cuggguucucugcuuagggccu

SEQ ID NO: 718381 - RNA, 18 nt, Human
acucugggaccuguuauu

SEQ ID NO: 718382 - RNA, 22 nt, Human
uguggcuccacuccacauuaau

SEQ ID NO: 718383 - RNA, 22 nt, Human
aucaggaucacugggagucuug

SEQ ID NO: 718384 - RNA, 22 nt, Human
gggaauguaaucauggaaugcu

SEQ ID NO: 718385 - RNA, 22 nt, Human
ccagaggaguugaggcuuuggg

SEQ ID NO: 718386 - RNA, 17 nt, Human
uccagagcacagagcuc

SEQ ID NO: 718387 - RNA, 19 nt, Human
ucugguucauuucugcugu

SEQ ID NO: 718388 - RNA, 22 nt, Human
ugccauuuaaaaaugaccaaau

SEQ ID NO: 718389 - RNA, 19 nt, Human
aucacaugucaagagcagg

SEQ ID NO: 718390 - RNA, 22 nt, Human
cagucucucagcuuucagcugu

SEQ ID NO: 718391 - RNA, 22 nt, Human
gcugcugccuguagccagggug

SEQ ID NO: 718392 - RNA, 22 nt, Human
aggggcuccucucugagaguag

SEQ ID NO: 718393 - RNA, 22 nt, Human
uucaggccuaauuucuagcccc

SEQ ID NO: 718394 - RNA, 22 nt, Human
cucucugaggcaggccuguggg

SEQ ID NO: 718395 - RNA, 22 nt, Human
cagcccuuuccuucucagcuuu

SEQ ID NO: 718396 - RNA, 22 nt, Human
ugagaccuuggggagcccuguu

SEQ ID NO: 718397 - RNA, 22 nt, Human
ccucuggcucacagcaccaacu

SEQ ID NO: 718398 - RNA, 16 nt, Human
ucucuggguugcacag

SEQ ID NO: 718399 - RNA, 21 nt, Human
uggcagaguugaguaguuaug

SEQ ID NO: 718400 - RNA, 18 nt, Human
acugugugaauuagcucc

SEQ ID NO: 718401 - RNA, 22 nt, Human
guccugggggcagcugugucca

SEQ ID NO: 718402 - RNA, 22 nt, Human
uguuacaguggcuuuuuaaaca

SEQ ID NO: 718403 - RNA, 22 nt, Human
agcaaaauaagguaauuuauug

SEQ ID NO: 718404 - RNA, 22 nt, Human
ccacagagagugucagccuuug

SEQ ID NO: 718405 - RNA, 22 nt, Human
aggccagggucccacacucgca

SEQ ID NO: 718406 - RNA, 22 nt, Human
cauauucaagggguaaggcaaa

SEQ ID NO: 718407 - RNA, 22 nt, Human
gggagcugcacacgccccggaa

SEQ ID NO: 718408 - RNA, 22 nt, Human
uuucaggauuaguuuaagcagg

SEQ ID NO: 718409 - RNA, 22 nt, Human
ccugucauaauguccgauguca

SEQ ID NO: 718410 - RNA, 22 nt, Human
cccaggcuagaaaggccaacaa

SEQ ID NO: 718411 - RNA, 22 nt, Human
agugcagagagcaauacucuac

SEQ ID NO: 718412 - RNA, 22 nt, Human
aucucagacauguuguccauga

SEQ ID NO: 718413 - RNA, 22 nt, Human
acagccagugacuggacaagcu

SEQ ID NO: 718414 - RNA, 22 nt, Human
uucauuuuuaccgcgugucaaa

SEQ ID NO: 718415 - RNA, 21 nt, Human
acagcuggccgcgcgggucgg

SEQ ID NO: 718416 - RNA, 22 nt, Human
aacuuuuaaaauacacagacaa

SEQ ID NO: 718417 - RNA, 22 nt, Human
ggaaauauugauugcucuguau

SEQ ID NO: 718418 - RNA, 22 nt, Human
ugcugcucuucaccauggccuc

SEQ ID NO: 718419 - RNA, 22 nt, Human
uggacaugagcugagugggugu

SEQ ID NO: 718420 - RNA, 22 nt, Human
gaguucugaacugugaaaugca

SEQ ID NO: 718421 - RNA, 22 nt, Human
uuccuccacgugacaggagcca

SEQ ID NO: 718422 - RNA, 22 nt, Human
acauuuagaugguguuauagua

SEQ ID NO: 718423 - RNA, 22 nt, Human
acaugaaaccugagucuaacuc

SEQ ID NO: 718424 - RNA, 22 nt, Human
cuauuuggauguuagccucagu

SEQ ID NO: 718425 - RNA, 18 nt, Human
aagaggcuguucuguggg

SEQ ID NO: 718426 - RNA, 22 nt, Human
cacagaggcucaaagccaggug

SEQ ID NO: 718427 - RNA, 22 nt, Human
uaaucacagaaaugcccauuca

SEQ ID NO: 718428 - RNA, 22 nt, Human
aggaugagauugcuguguugua

SEQ ID NO: 718429 - RNA, 22 nt, Human
guuuuggagucaggcuuagaug

SEQ ID NO: 718430 - RNA, 22 nt, Human
uucucuuauucuggauaugcag

SEQ ID NO: 718431 - RNA, 22 nt, Human
ucucuagacauggggaauguca

SEQ ID NO: 718432 - RNA, 22 nt, Human
gcacagagaggcugugagcgcc

SEQ ID NO: 718433 - RNA, 22 nt, Human
guggccuuauuauguacaaaau

SEQ ID NO: 718434 - RNA, 22 nt, Human
ugggagcaguucagguguggcu

SEQ ID NO: 718435 - RNA, 22 nt, Human
agagcuucacuggagagcacau

SEQ ID NO: 718436 - RNA, 22 nt, Human
agcugaaucuugacuaggaaga

SEQ ID NO: 718437 - RNA, 22 nt, Human
uuccuaaaagaauacacuggau

SEQ ID NO: 718438 - RNA, 22 nt, Human
guuaacuuuuuacagaaaugaa

SEQ ID NO: 718439 - RNA, 22 nt, Human
ugcaaagaagccacagucccag

SEQ ID NO: 718440 - RNA, 22 nt, Human
acuguacacauucgucaagacu

SEQ ID NO: 718441 - RNA, 22 nt, Human
cccugcacacucgugucuugac

SEQ ID NO: 718442 - RNA, 22 nt, Human
acugggccugauugggucggag

SEQ ID NO: 718443 - RNA, 17 nt, Human
aagacaagacaaaugca

SEQ ID NO: 718444 - RNA, 22 nt, Human
ccacucugauuggucaccucug

SEQ ID NO: 718445 - RNA, 22 nt, Human
auaucacaguaguuguuuaguu

SEQ ID NO: 718446 - RNA, 22 nt, Human
guauuagacugagaaauggagu

SEQ ID NO: 718447 - RNA, 22 nt, Human
gaggcucauugcauugugcauu

SEQ ID NO: 718448 - RNA, 22 nt, Human
uagagcuauuuaucagccagaa

SEQ ID NO: 718449 - RNA, 19 nt, Human
ggccccucucacaggaguu

SEQ ID NO: 718450 - RNA, 22 nt, Human
auacaugaucacuguauuauaa

SEQ ID NO: 718451 - RNA, 22 nt, Human
cuucuuccaagcuuaugcucaa

SEQ ID NO: 718452 - RNA, 22 nt, Human
ccagagguggucauagaaagca

SEQ ID NO: 718453 - RNA, 22 nt, Human
cccaaggacacgggcagggaca

SEQ ID NO: 718454 - RNA, 22 nt, Human
cagcagcugacuccaagagagc

SEQ ID NO: 718455 - RNA, 22 nt, Human
agggcuuuguggcagucacuau

SEQ ID NO: 718456 - RNA, 22 nt, Human
ggucccaagcaaugcccuuggc

SEQ ID NO: 718457 - RNA, 22 nt, Human
acagggaacaggaauauacaaa

SEQ ID NO: 718458 - RNA, 22 nt, Human
gaagggcuuucugggagaagag

SEQ ID NO: 718459 - RNA, 22 nt, Human
aaggcacaacacaagaggguga

SEQ ID NO: 718460 - RNA, 22 nt, Human
ggcuccugauaggagaaugcgg

SEQ ID NO: 718461 - RNA, 22 nt, Human
agcuuucacgauuuggaacagg

SEQ ID NO: 718462 - RNA, 21 nt, Human
gcagaaaggaaucuuaggucc

SEQ ID NO: 718463 - RNA, 22 nt, Human
gcaugcaacucccaguucugcc

SEQ ID NO: 718464 - RNA, 22 nt, Human
gcucagaguggccuggcuaggg

SEQ ID NO: 718465 - RNA, 22 nt, Human
ucugccugugcuguguuuucau

SEQ ID NO: 718466 - RNA, 22 nt, Human
uggcccugcuaugauccugcaa

SEQ ID NO: 718467 - RNA, 22 nt, Human
uccagcucuggcuuggcuagcu

SEQ ID NO: 718468 - RNA, 22 nt, Human
ucucagugcagcuugacagaga

SEQ ID NO: 718469 - RNA, 22 nt, Human
cuagggccaaaggcugugaugc

SEQ ID NO: 718470 - RNA, 22 nt, Human
uuuccaauuugguagucaucgg

SEQ ID NO: 718471 - RNA, 22 nt, Human
ucuuggcugugcaugcaucuuc

SEQ ID NO: 718472 - RNA, 22 nt, Human
gucugagaaucuugcauaucau

SEQ ID NO: 718473 - RNA, 19 nt, Human
gaguuauugccagggcaug

SEQ ID NO: 718474 - RNA, 22 nt, Human
ugcagagaguuagggcccguau

SEQ ID NO: 718475 - RNA, 22 nt, Human
augcuugaaaaccccaugaaua

SEQ ID NO: 718476 - RNA, 20 nt, Human
ucugcccaccccggcuccca

SEQ ID NO: 718477 - RNA, 22 nt, Human
caagacaagaucuaagcaugcu

SEQ ID NO: 718478 - RNA, 22 nt, Human
ugagagcugcugagacuguccu

SEQ ID NO: 718479 - RNA, 22 nt, Human
aucaccaaggcuuuaggaauuu

SEQ ID NO: 718480 - RNA, 22 nt, Human
agcccagguucuaaagccaaac

SEQ ID NO: 718481 - RNA, 22 nt, Human
gacacagagauaggccuguguu

SEQ ID NO: 718482 - RNA, 20 nt, Human
cagcuucaaugucagcuuga

SEQ ID NO: 718483 - RNA, 17 nt, Human
ugaauucaaucugcacu

SEQ ID NO: 718484 - RNA, 22 nt, Human
acagguggagugguuagcaggc

SEQ ID NO: 718485 - RNA, 22 nt, Human
cugcucuggucucuucauguuu

SEQ ID NO: 718486 - RNA, 22 nt, Human
ucagggcugcagaagaggcagg

SEQ ID NO: 718487 - RNA, 22 nt, Human
agauggaaaauauagacagaga

SEQ ID NO: 718488 - RNA, 22 nt, Human
aguacuucagaggcugcccagg

SEQ ID NO: 718489 - RNA, 22 nt, Human
ucaaagacuauauauuuuauuu

SEQ ID NO: 718490 - RNA, 22 nt, Human
agugcuuuagcauccaacuguc

SEQ ID NO: 718491 - RNA, 22 nt, Human
uguccauggggaaggggaagug

SEQ ID NO: 718492 - RNA, 22 nt, Human
cagaaacugcuccccugguagg

SEQ ID NO: 718493 - RNA, 22 nt, Human
uuggaauugaggauuuacauag

SEQ ID NO: 718494 - RNA, 22 nt, Human
caaggcugcuggcuucugagcu

SEQ ID NO: 718495 - RNA, 22 nt, Human
cugagcccauugggugcuguua

SEQ ID NO: 718496 - RNA, 22 nt, Human
ucugcagcuucuugccagagag

SEQ ID NO: 718497 - RNA, 22 nt, Human
gccagaucugacauaguggaag

SEQ ID NO: 718498 - RNA, 22 nt, Human
ugcuccuuccucauccugugca

SEQ ID NO: 718499 - RNA, 22 nt, Human
uugaucaaaucagcuacugagg

SEQ ID NO: 718500 - RNA, 22 nt, Human
ucuagcuuggcguuugccuucu

SEQ ID NO: 718501 - RNA, 22 nt, Human
uggcuucucccuccccaucuag

SEQ ID NO: 718502 - RNA, 22 nt, Human
agcaaagauguccggggcaagc

SEQ ID NO: 718503 - RNA, 22 nt, Human
cagaggucaagaucugaaguga

SEQ ID NO: 718504 - RNA, 22 nt, Human
uaaaucucacuggguauauugg

SEQ ID NO: 718505 - RNA, 22 nt, Human
uccuucaguuaucacaguacug

SEQ ID NO: 718506 - RNA, 22 nt, Human
gagaaggcuggucuuaagucga

SEQ ID NO: 718507 - RNA, 17 nt, Human
aggcaugaggcaucacu

SEQ ID NO: 718508 - RNA, 21 nt, Human
cccaagggaggcaggauaagg

SEQ ID NO: 718509 - RNA, 22 nt, Human
uguaacaaaauaccuuggauug

SEQ ID NO: 718510 - RNA, 22 nt, Human
cugcagcuccucucugugcccc

SEQ ID NO: 718511 - RNA, 22 nt, Human
gucuggagccacugcugcugcu

SEQ ID NO: 718512 - RNA, 23 nt, Human
gcuguccuccugggcccagcagc

SEQ ID NO: 718513 - RNA, 22 nt, Human
cucccugcuuguuucccuucag

SEQ ID NO: 718514 - RNA, 22 nt, Human
gcaggugauucacccugggccu

SEQ ID NO: 718515 - RNA, 22 nt, Human
caguggugaagagcaggggcuc

SEQ ID NO: 718516 - RNA, 23 nt, Human
caggaaaugaauccaggaggaug

SEQ ID NO: 718517 - RNA, 22 nt, Human
agcucauggugcuaucucaggg

SEQ ID NO: 718518 - RNA, 22 nt, Human
uggggcaguuaauaaacauucu

SEQ ID NO: 718519 - RNA, 22 nt, Human
aggcacagaauggcauucagug

SEQ ID NO: 718520 - RNA, 22 nt, Human
uuguacaaaugcauauuccugg

SEQ ID NO: 718521 - RNA, 20 nt, Human
uguaaauaggcauuguaguu

SEQ ID NO: 718522 - RNA, 20 nt, Human
ccuggcugcauucaggacgg

SEQ ID NO: 718523 - RNA, 22 nt, Human
cugcauaugagaauaggagaaa

SEQ ID NO: 718524 - RNA, 22 nt, Human
gaccuggaggauccucuucuug

SEQ ID NO: 718525 - RNA, 22 nt, Human
uucaagauggccccagugagcc

SEQ ID NO: 718526 - RNA, 22 nt, Human
gggagagcgcgcuagggccgag

SEQ ID NO: 718527 - RNA, 21 nt, Human
uucugggccaugcugcuucuc

SEQ ID NO: 718528 - RNA, 21 nt, Human
ugauggaaaggauuuuggguc

SEQ ID NO: 718529 - RNA, 22 nt, Human
auugauauauuauuucuaacug

SEQ ID NO: 718530 - RNA, 22 nt, Human
aaacaaugaaauauuuuuaugg

SEQ ID NO: 718531 - RNA, 22 nt, Human
gucauuuuuuucguaauagugg

SEQ ID NO: 718532 - RNA, 19 nt, Human
guguccauggagcauggag

SEQ ID NO: 718533 - RNA, 22 nt, Human
auuaaauuaaguggcuaauuua

SEQ ID NO: 718534 - RNA, 22 nt, Human
cagcacaguuugcuuggcagag

SEQ ID NO: 718535 - RNA, 22 nt, Human
guuuauucuucagcaacaucug

SEQ ID NO: 718536 - RNA, 22 nt, Human
augaccugaggccuuacucuag

SEQ ID NO: 718537 - RNA, 21 nt, Human
ugcaagaaucaggaagcugcc

SEQ ID NO: 718538 - RNA, 22 nt, Human
augcuggggccucagaccagaa

SEQ ID NO: 718539 - RNA, 22 nt, Human
ucugucaucucuaaaauagaaa

SEQ ID NO: 718540 - RNA, 22 nt, Human
aguuaacacaaguaagauucca

SEQ ID NO: 718541 - RNA, 22 nt, Human
cuuggccagacagggagcucca

SEQ ID NO: 718542 - RNA, 22 nt, Human
cugggagucaccaggagcaagg

SEQ ID NO: 718543 - RNA, 22 nt, Human
aguaacagagcauggguucaga

SEQ ID NO: 718544 - RNA, 22 nt, Human
cacagacuccccgccauagugg

SEQ ID NO: 718545 - RNA, 22 nt, Human
gggaaagacccugagucuuauu

SEQ ID NO: 718546 - RNA, 22 nt, Human
aggucauuuccuuagaggcaga

SEQ ID NO: 718547 - RNA, 22 nt, Human
gaaauauuacaguggaggggau

SEQ ID NO: 718548 - RNA, 22 nt, Human
aguucugguugcccaugacauc

SEQ ID NO: 718549 - RNA, 22 nt, Human
agaauuagucacaauuauagga

SEQ ID NO: 718550 - RNA, 22 nt, Human
ugucaccuuuacccuuuuauag

SEQ ID NO: 718551 - RNA, 22 nt, Human
ugagccagugugguaaagcuga

SEQ ID NO: 718552 - RNA, 19 nt, Human
aaaagucuauucaauuaca

SEQ ID NO: 718553 - RNA, 22 nt, Human
caggcagaguuagagcaacugg

SEQ ID NO: 718554 - RNA, 22 nt, Human
auguuaugugcaagauacauaa

SEQ ID NO: 718555 - RNA, 22 nt, Human
ggaggaagagguuguucucuca

SEQ ID NO: 718556 - RNA, 22 nt, Human
ugcugccuuugggaccuggccu

SEQ ID NO: 718557 - RNA, 22 nt, Human
uuuuauugucaaugaagacaga

SEQ ID NO: 718558 - RNA, 22 nt, Human
cuggugucugauucuccccuga

SEQ ID NO: 718559 - RNA, 22 nt, Human
uaggcuuccgagucuugguauc

SEQ ID NO: 718560 - RNA, 22 nt, Human
caagcaggaugaagcccaggga

SEQ ID NO: 718561 - RNA, 22 nt, Human
ggcugccugaggcugaggcccg

SEQ ID NO: 718562 - RNA, 22 nt, Human
aaaaaguuucaacugccaacuc

SEQ ID NO: 718563 - RNA, 22 nt, Human
uauaggaaaggaguggucacaa

SEQ ID NO: 718564 - RNA, 22 nt, Human
uacacaugacaguggacugaga

SEQ ID NO: 718565 - RNA, 22 nt, Human
gugccugggguugagcuaugaa

SEQ ID NO: 718566 - RNA, 22 nt, Human
aggagaaggaggccccucacac

SEQ ID NO: 718567 - RNA, 22 nt, Human
cugccucugcgucccacagagu

SEQ ID NO: 718568 - RNA, 20 nt, Human
augcauauauguggugucug

SEQ ID NO: 718569 - RNA, 22 nt, Human
acuuugggcacagugaggccag

SEQ ID NO: 718570 - RNA, 22 nt, Human
ccagggacuuugcauuguuuau

SEQ ID NO: 718571 - RNA, 21 nt, Human
ucuuccugcuccacacucccc

SEQ ID NO: 718572 - RNA, 22 nt, Human
gaacauacaagaauuaaguaca

SEQ ID NO: 718573 - RNA, 22 nt, Human
agcugcccuuuaugaugcugaa

SEQ ID NO: 718574 - RNA, 22 nt, Human
uuuauacuucauaaugucuauu

SEQ ID NO: 718575 - RNA, 22 nt, Human
gaggcugaacagguucucauga

SEQ ID NO: 718576 - RNA, 22 nt, Human
ugucuccugagagcuggacaga

SEQ ID NO: 718577 - RNA, 22 nt, Human
cugugcguugugaaauguuuag

SEQ ID NO: 718578 - RNA, 22 nt, Human
aggccagaaaugucagggagug

SEQ ID NO: 718579 - RNA, 22 nt, Human
uguuucagucccuguguucaau

SEQ ID NO: 718580 - RNA, 22 nt, Human
ggccagcagaccucagggacuc

SEQ ID NO: 718581 - RNA, 22 nt, Human
acuacacuccaauuuucuaggu

SEQ ID NO: 718582 - RNA, 22 nt, Human
uauuuccaaaagccuauuauga

SEQ ID NO: 718583 - RNA, 22 nt, Human
cacagcugugagaagggagccu

SEQ ID NO: 718584 - RNA, 22 nt, Human
ggggcacuuccaggcugaggcu

SEQ ID NO: 718585 - RNA, 20 nt, Human
uaaacaguauuuacuaggag

SEQ ID NO: 718586 - RNA, 22 nt, Human
gaacuuguuguaagaaaauaug

SEQ ID NO: 718587 - RNA, 22 nt, Human
cauuuacaauguacagguugug

SEQ ID NO: 718588 - RNA, 18 nt, Human
ugcuggcaacuacuauug

SEQ ID NO: 718589 - RNA, 22 nt, Human
auggcccaaaaccuccucccuc

SEQ ID NO: 718590 - RNA, 22 nt, Human
cagggaagaauaguuagcaaag

SEQ ID NO: 718591 - RNA, 22 nt, Human
ccagcccucacugaggccucuc

SEQ ID NO: 718592 - RNA, 22 nt, Human
aagccaugcaagccacaaggug

SEQ ID NO: 718593 - RNA, 22 nt, Human
ucuuuagugacaguugugcaag

SEQ ID NO: 718594 - RNA, 22 nt, Human
acaggcugccacuugcauccaa

SEQ ID NO: 718595 - RNA, 22 nt, Human
uagugaaaccugacagaucaug

SEQ ID NO: 718596 - RNA, 22 nt, Human
uacuucaacaccauaugguccu

SEQ ID NO: 718597 - RNA, 22 nt, Human
aagagaaugacaaggagaaccu

SEQ ID NO: 718598 - RNA, 22 nt, Human
ucaaauaguugacauuaacuug

SEQ ID NO: 718599 - RNA, 22 nt, Human
agagacuguggcucuuugaagg

SEQ ID NO: 718600 - RNA, 21 nt, Human
gccaccucgucucggagcagc

SEQ ID NO: 718601 - RNA, 22 nt, Human
acugaaggaaacuuuuguguuu

SEQ ID NO: 718602 - RNA, 22 nt, Human
acacaugaggaugaggggauca

SEQ ID NO: 718603 - RNA, 22 nt, Human
ucuguguguugucaggaggauu

SEQ ID NO: 718604 - RNA, 22 nt, Human
agggugcaaaagcaaggacagu

SEQ ID NO: 718605 - RNA, 22 nt, Human
ccacugcccccugaagaccagg

SEQ ID NO: 718606 - RNA, 22 nt, Human
aauccaugcaugcaaggaaagg

SEQ ID NO: 718607 - RNA, 22 nt, Human
guggugagauugcuggaucaaa

SEQ ID NO: 718608 - RNA, 22 nt, Human
ccucagaccccacagggccugu

SEQ ID NO: 718609 - RNA, 22 nt, Human
aaacuguauguugagaugacag

SEQ ID NO: 718610 - RNA, 22 nt, Human
uuucuuaugugcagagugagua

SEQ ID NO: 718611 - RNA, 21 nt, Human
ucucuguggccuacccucuac

SEQ ID NO: 718612 - RNA, 22 nt, Human
cugggcugauuuagucacguuu

SEQ ID NO: 718613 - RNA, 22 nt, Human
gagcccagggugaaauagcagc

SEQ ID NO: 718614 - RNA, 22 nt, Human
aagcauaaaacguuacaacaug

SEQ ID NO: 718615 - RNA, 22 nt, Human
ccacacagauaaguguuuucua

SEQ ID NO: 718616 - RNA, 22 nt, Human
cagggcucuuccggagcaggga

SEQ ID NO: 718617 - RNA, 20 nt, Human
agaaauacaugcaugcauga

SEQ ID NO: 718618 - RNA, 22 nt, Human
agacaguaauaaaauagguaag

SEQ ID NO: 718619 - RNA, 22 nt, Human
uggggugaggcagccacauuua

SEQ ID NO: 718620 - RNA, 22 nt, Human
uucaacaagucuuuuuucacug

SEQ ID NO: 718621 - RNA, 22 nt, Human
cugaggccuaagacaugaauga

SEQ ID NO: 718622 - RNA, 22 nt, Human
cuggagcuggcccaggcuggcc

SEQ ID NO: 718623 - RNA, 19 nt, Human
aagauugccuuguuccauu

SEQ ID NO: 718624 - RNA, 22 nt, Human
ugaagcaggaaccagcagcauu

SEQ ID NO: 718625 - RNA, 22 nt, Human
gugcccucaugaaacgaaggau

SEQ ID NO: 718626 - RNA, 22 nt, Human
ugaggccaaugacccugggcag

SEQ ID NO: 718627 - RNA, 22 nt, Human
agaaugaauuaaucaacuggaa

SEQ ID NO: 718628 - RNA, 22 nt, Human
ucaaauaccagcuuuuccagaa

SEQ ID NO: 718629 - RNA, 22 nt, Human
accucugcaacccuggaauggg

SEQ ID NO: 718630 - RNA, 22 nt, Human
cuguggcacauguggcaaggcc

SEQ ID NO: 718631 - RNA, 22 nt, Human
cugugaauuaaguauuguuauc

SEQ ID NO: 718632 - RNA, 22 nt, Human
aagguagcuugcuuccugagua

SEQ ID NO: 718633 - RNA, 22 nt, Human
gccccagaaaguucaaggcaca

SEQ ID NO: 718634 - RNA, 22 nt, Human
aauaaaauggucaguuuucuca

SEQ ID NO: 718635 - RNA, 22 nt, Human
cacaucagggcugcuugggggu

SEQ ID NO: 718636 - RNA, 22 nt, Human
uguaucuucaguuugucuuucc

SEQ ID NO: 718637 - RNA, 18 nt, Human
auuuaaugaacugaaagc

SEQ ID NO: 718638 - RNA, 22 nt, Human
agcagggcuugccgcuuguccu

SEQ ID NO: 718639 - RNA, 22 nt, Human
uuagaguuuuaucauugccuua

SEQ ID NO: 718640 - RNA, 22 nt, Human
uuucuucuaugugugauauuuu

SEQ ID NO: 718641 - RNA, 22 nt, Human
ggaaaacugaggcucucagcag

SEQ ID NO: 718642 - RNA, 22 nt, Human
ucagcccaggagguugagacua

SEQ ID NO: 718643 - RNA, 22 nt, Human
ugaaacaaaauuaagauucucg

SEQ ID NO: 718644 - RNA, 23 nt, Human
agcuucauugaccuccgcagggg

SEQ ID NO: 718645 - RNA, 23 nt, Human
ugcuggaacccagggccuaacac

SEQ ID NO: 718646 - RNA, 22 nt, Human
augaacacauguacacauuucu

SEQ ID NO: 718647 - RNA, 22 nt, Human
ugcacagcuggcucuccuuuuc

SEQ ID NO: 718648 - RNA, 22 nt, Human
gagggagaaggacuaucaggcu

SEQ ID NO: 718649 - RNA, 22 nt, Human
ggaaggaagugaccaggauauc

SEQ ID NO: 718650 - RNA, 19 nt, Human
uccaggaggcugccauuga

SEQ ID NO: 718651 - RNA, 20 nt, Human
cugcaucugugacuugcaaa

SEQ ID NO: 718652 - RNA, 22 nt, Human
uugaaugauccuaucuagcaca

SEQ ID NO: 718653 - RNA, 22 nt, Human
aggugcugaacuggugaggucu

SEQ ID NO: 718654 - RNA, 22 nt, Human
acacaugaaagacauuaaggug

SEQ ID NO: 718655 - RNA, 22 nt, Human
cccaacuacucucaggcagcuu

SEQ ID NO: 718656 - RNA, 22 nt, Human
aguuuacagaugcuacaggagc

SEQ ID NO: 718657 - RNA, 22 nt, Human
gcaggagcuggaaagugauguu

SEQ ID NO: 718658 - RNA, 22 nt, Human
gguguucuuaguggcacuggca

SEQ ID NO: 718659 - RNA, 22 nt, Human
ucaggaagcucuugcugauucu

SEQ ID NO: 718660 - RNA, 22 nt, Human
acuucccugugggcagguagug

SEQ ID NO: 718661 - RNA, 22 nt, Human
caaaugcagucccuuuguugcu

SEQ ID NO: 718662 - RNA, 22 nt, Human
aaggaacucuagagccuugaac

SEQ ID NO: 718663 - RNA, 22 nt, Human
cacagguccuuccugcccuggg

SEQ ID NO: 718664 - RNA, 22 nt, Human
cagcugccaugacauguccugc

SEQ ID NO: 718665 - RNA, 22 nt, Human
uacacagaggcugaugucuuag

SEQ ID NO: 718666 - RNA, 22 nt, Human
uaucacacauaacuaagcugca

SEQ ID NO: 718667 - RNA, 23 nt, Human
uuucauguuggcaugacugacuu

SEQ ID NO: 718668 - RNA, 22 nt, Human
ucugacaagucaagucuugacu

SEQ ID NO: 718669 - RNA, 22 nt, Human
gcuucugggguucuggcaugcu

SEQ ID NO: 718670 - RNA, 22 nt, Human
aguugcugauucugucugugau

SEQ ID NO: 718671 - RNA, 22 nt, Human
uuaaaugaacgagauaugcaac

SEQ ID NO: 718672 - RNA, 22 nt, Human
ucaugcaaggcugaaacauggu

SEQ ID NO: 718673 - RNA, 22 nt, Human
gcccuguggacagugagaagug

SEQ ID NO: 718674 - RNA, 22 nt, Human
ugccugcccugaaaacugccca

SEQ ID NO: 718675 - RNA, 22 nt, Human
ugcucuggggagcuccucugcg

SEQ ID NO: 718676 - RNA, 23 nt, Human
uccagagcucaugcucucaacca

SEQ ID NO: 718677 - RNA, 22 nt, Human
cuuaggaugaguuuuugcguuu

SEQ ID NO: 718678 - RNA, 23 nt, Human
uggcuucugccccauucucucca

SEQ ID NO: 718679 - RNA, 22 nt, Human
agguaggauagauaggaagacc

SEQ ID NO: 718680 - RNA, 23 nt, Human
aaccagauaaauggcuccagggc

SEQ ID NO: 718681 - RNA, 22 nt, Human
cauucugcauuuggaaggggca

SEQ ID NO: 718682 - RNA, 22 nt, Human
aaauuccaccagaaucaguaau

SEQ ID NO: 718683 - RNA, 22 nt, Human
uucucugggaucuggcaaaagg

SEQ ID NO: 718684 - RNA, 22 nt, Human
ugagccagaggaggcugugugg

SEQ ID NO: 718685 - RNA, 22 nt, Human
cagucccaccaggaucgcucuu

SEQ ID NO: 718686 - RNA, 22 nt, Human
gcuuuacugucuggaaaguuug

SEQ ID NO: 718687 - RNA, 22 nt, Human
aguguggucgggagcgcggggc

SEQ ID NO: 718688 - RNA, 21 nt, Human
uagggcaggcauuggaagaga

SEQ ID NO: 718689 - RNA, 22 nt, Human
guguguacaaauuucauguaaa

SEQ ID NO: 718690 - RNA, 21 nt, Human
aggcugcuggcucaggguccu

SEQ ID NO: 718691 - RNA, 22 nt, Human
cugcauguuuucuuaauuguga

SEQ ID NO: 718692 - RNA, 22 nt, Human
uuccugggcaggacgagagucu

SEQ ID NO: 718693 - RNA, 22 nt, Human
cugccaggcacugggcucugca

SEQ ID NO: 718694 - RNA, 22 nt, Human
gcugucugccgcaggcugccac

SEQ ID NO: 718695 - RNA, 22 nt, Human
ucugggcagccaugugccuggc

SEQ ID NO: 718696 - RNA, 22 nt, Human
uuagcaagaaagauugcagcac

SEQ ID NO: 718697 - RNA, 22 nt, Human
cagcuccaaagccccacugucc

SEQ ID NO: 718698 - RNA, 22 nt, Human
gugcacagauucagagguuuug

SEQ ID NO: 718699 - RNA, 22 nt, Human
augagagucucagagucucuuc

SEQ ID NO: 718700 - RNA, 22 nt, Human
agccaggugcaguggcacacac

SEQ ID NO: 718701 - RNA, 22 nt, Human
agaauucucuuccauugaaaca

SEQ ID NO: 718702 - RNA, 22 nt, Human
auuaaugucuaccaguugugug

SEQ ID NO: 718703 - RNA, 22 nt, Human
aaccacagagcccccucagaug

SEQ ID NO: 718704 - RNA, 22 nt, Human
cugaggcaugaaugugggcuuu

SEQ ID NO: 718705 - RNA, 22 nt, Human
aggcacugauucuguuuuccau

SEQ ID NO: 718706 - RNA, 22 nt, Human
aguggcugacaacuggguuaac

SEQ ID NO: 718707 - RNA, 19 nt, Human
acaaaugauguugcacuga

SEQ ID NO: 718708 - RNA, 19 nt, Human
aucuuacagagcagaguac

SEQ ID NO: 718709 - RNA, 22 nt, Human
cuggugaccggaccucaguuuu

SEQ ID NO: 718710 - RNA, 22 nt, Human
aguccaggaguugggugacauu

SEQ ID NO: 718711 - RNA, 22 nt, Human
gaacaacucuucuugagagaug

SEQ ID NO: 718712 - RNA, 20 nt, Human
caguuuaacuuugagcaguu

SEQ ID NO: 718713 - RNA, 22 nt, Human
ccugggcaaauuauguuacuca

SEQ ID NO: 718714 - RNA, 22 nt, Human
uagaugaccuuguguuaggcaa

SEQ ID NO: 718715 - RNA, 22 nt, Human
gcuguguucauuuugcauaugu

SEQ ID NO: 718716 - RNA, 23 nt, Human
aggcaguggugguaacaugucaa

SEQ ID NO: 718717 - RNA, 22 nt, Human
guucucaguucaggaaggacau

SEQ ID NO: 718718 - RNA, 22 nt, Human
ugagacaggcuuccuucuuggg

SEQ ID NO: 718719 - RNA, 22 nt, Human
cgguuaguuauuuuucagauau

SEQ ID NO: 718720 - RNA, 22 nt, Human
uuacacagugcacaagcagagu

SEQ ID NO: 718721 - RNA, 22 nt, Human
guggcagcggugugcaaggagg

SEQ ID NO: 718722 - RNA, 22 nt, Human
uuuacagcugcuggcaagcuug

SEQ ID NO: 718723 - RNA, 22 nt, Human
cuugagaaaggaacaggaagcu

SEQ ID NO: 718724 - RNA, 22 nt, Human
uuggcacuuugaaugagcucag

SEQ ID NO: 718725 - RNA, 22 nt, Human
aaggcugagguagggccuaaaa

SEQ ID NO: 718726 - RNA, 20 nt, Human
uuccucaggagaggauguua

SEQ ID NO: 718727 - RNA, 22 nt, Human
cagccugagccuucuguagcaa

SEQ ID NO: 718728 - RNA, 21 nt, Human
cuggacugaggagacagucgc

SEQ ID NO: 718729 - RNA, 22 nt, Human
ccagcuccgggaguugcugcug

SEQ ID NO: 718730 - RNA, 22 nt, Human
uaguuucuaaacugaacuguca

SEQ ID NO: 718731 - RNA, 22 nt, Human
uaaaaaucuuaugaauggcaag

SEQ ID NO: 718732 - RNA, 22 nt, Human
aguuucaugagacagauuuuca

SEQ ID NO: 718733 - RNA, 22 nt, Human
ugaggcuuagagaagaugggau

SEQ ID NO: 718734 - RNA, 22 nt, Human
ugcuucauuaaaacaauauuuu

SEQ ID NO: 718735 - RNA, 22 nt, Human
caaacauucaaguacaagucuu

SEQ ID NO: 718736 - RNA, 22 nt, Human
gcagaagcccggucagcgcacg

SEQ ID NO: 718737 - RNA, 22 nt, Human
uauggcuuuuaacugucguaug

SEQ ID NO: 718738 - RNA, 22 nt, Human
uguguguacucuccaguccuga

SEQ ID NO: 718739 - RNA, 22 nt, Human
uuuccucacuucaugagaguuu

SEQ ID NO: 718740 - RNA, 20 nt, Human
ucaggcuggugggcuuuccc

SEQ ID NO: 718741 - RNA, 22 nt, Human
ucacucaaugguaucaggaggu

SEQ ID NO: 718742 - RNA, 22 nt, Human
acaguaacucuuuuacccuccu

SEQ ID NO: 718743 - RNA, 22 nt, Human
agcagcugauggggaaggaguu

SEQ ID NO: 718744 - RNA, 22 nt, Human
aaagugcugggauuacaagugu

SEQ ID NO: 718745 - RNA, 22 nt, Human
gcucaggggaaugggcugccgu

SEQ ID NO: 718746 - RNA, 22 nt, Human
uguuuaauaauucuaugauagu

SEQ ID NO: 718747 - RNA, 22 nt, Human
cagcagcaugaauucgagccac

SEQ ID NO: 718748 - RNA, 22 nt, Human
ucugggaaauagaggacccuag

SEQ ID NO: 718749 - RNA, 22 nt, Human
cuuaucaaacuggagcaggcuu

SEQ ID NO: 718750 - RNA, 17 nt, Human
uucaaagcuuaucaagg

SEQ ID NO: 718751 - RNA, 19 nt, Human
ucagugugugggagguggu

SEQ ID NO: 718752 - RNA, 22 nt, Human
aguguuuauugugugccacaca

SEQ ID NO: 718753 - RNA, 22 nt, Human
aaguucuacuguggguaaaaug

SEQ ID NO: 718754 - RNA, 22 nt, Human
aggcaaauccagauuuuuccac

SEQ ID NO: 718755 - RNA, 22 nt, Human
ucucacaucugcccugugcugg

SEQ ID NO: 718756 - RNA, 22 nt, Human
ugagaauauuugaagauguuag

SEQ ID NO: 718757 - RNA, 22 nt, Human
guuauucuugguggcccugcug

SEQ ID NO: 718758 - RNA, 22 nt, Human
ugaaacaauuagaauguaauga

SEQ ID NO: 718759 - RNA, 22 nt, Human
gucucagaccacccucuuuggc

SEQ ID NO: 718760 - RNA, 22 nt, Human
ucugauaagacagcugauuuga

SEQ ID NO: 718761 - RNA, 22 nt, Human
agaaaacagaaagucauuggug

SEQ ID NO: 718762 - RNA, 22 nt, Human
cccccaaaguuugcacggauaa

SEQ ID NO: 718763 - RNA, 22 nt, Human
uccacagggaugccugcggcuu

SEQ ID NO: 718764 - RNA, 22 nt, Human
cuguauuucuuggacaguugcu

SEQ ID NO: 718765 - RNA, 22 nt, Human
ucccuguggauaucugcagcug

SEQ ID NO: 718766 - RNA, 20 nt, Human
auguuuuauaaaagaacggg

SEQ ID NO: 718767 - RNA, 22 nt, Human
ucagcaucuucagcauggggaa

SEQ ID NO: 718768 - RNA, 22 nt, Human
aaaacauaaacugacagcccau

SEQ ID NO: 718769 - RNA, 22 nt, Human
ucuacaaagguugaggugcccu

SEQ ID NO: 718770 - RNA, 22 nt, Human
uuuuuuccagcuucuagaggcc

SEQ ID NO: 718771 - RNA, 22 nt, Human
uuccugggacuggagcagccca

SEQ ID NO: 718772 - RNA, 22 nt, Human
aaauaugauacucccuuuuagu

SEQ ID NO: 718773 - RNA, 22 nt, Human
uggggagacuggccgagauccu

SEQ ID NO: 718774 - RNA, 22 nt, Human
auuauuuauccucuuggucuau

SEQ ID NO: 718775 - RNA, 22 nt, Human
ccucuucugagugagacucccu

SEQ ID NO: 718776 - RNA, 22 nt, Human
ucauuucuaucuaugcagcuuc

SEQ ID NO: 718777 - RNA, 22 nt, Human
agacagggucuugaucagagcu

SEQ ID NO: 718778 - RNA, 22 nt, Human
ggcagacacucaaaagcuggga

SEQ ID NO: 718779 - RNA, 20 nt, Human
gcaauguugguuccugucac

SEQ ID NO: 718780 - RNA, 20 nt, Human
uggcccaguggggcagggug

SEQ ID NO: 718781 - RNA, 18 nt, Human
uucaccagguagauaggg

SEQ ID NO: 718782 - RNA, 22 nt, Human
aaugugaucgcuuuagaagcuu

SEQ ID NO: 718783 - RNA, 22 nt, Human
gcagcucugacaaugccuggaa

SEQ ID NO: 718784 - RNA, 22 nt, Human
uucagcacaguucaagauggua

SEQ ID NO: 718785 - RNA, 21 nt, Human
aggcuguccuuugccagcccu

SEQ ID NO: 718786 - RNA, 20 nt, Human
uacuguuguugcuguugcca

SEQ ID NO: 718787 - RNA, 22 nt, Human
ggagcuggccgccuaugugcag

SEQ ID NO: 718788 - RNA, 22 nt, Human
uuggcucaggaccccugugacu

SEQ ID NO: 718789 - RNA, 21 nt, Human
uguuuuccaccuugaggcaag

SEQ ID NO: 718790 - RNA, 22 nt, Human
cugccuuugugaucaguucuuu

SEQ ID NO: 718791 - RNA, 22 nt, Human
agucucugagguucagaugccu

SEQ ID NO: 718792 - RNA, 22 nt, Human
gcagggaagacccggagcagcg

SEQ ID NO: 718793 - RNA, 22 nt, Human
cugggagaucuccugagggcag

SEQ ID NO: 718794 - RNA, 22 nt, Human
gcucagggcuaaggcugagggg

SEQ ID NO: 718795 - RNA, 22 nt, Human
cugggaggacaacuuggagcuc

SEQ ID NO: 718796 - RNA, 21 nt, Human
aacugcaaaugaugcuggaga

SEQ ID NO: 718797 - RNA, 22 nt, Human
uucccacacccauauugugauu

SEQ ID NO: 718798 - RNA, 22 nt, Human
uuucuuccuaaauaugauuucc

SEQ ID NO: 718799 - RNA, 22 nt, Human
acaaguuaccaaaaaagauuca

SEQ ID NO: 718800 - RNA, 22 nt, Human
gauucuuuggccuuuauugaca

SEQ ID NO: 718801 - RNA, 22 nt, Human
cgcagagggcaggcagugcugg

SEQ ID NO: 718802 - RNA, 22 nt, Human
acaggcuggaggaggaccaaga

SEQ ID NO: 718803 - RNA, 22 nt, Human
gcagaggcauuucugacgcugc

SEQ ID NO: 718804 - RNA, 22 nt, Human
cugggcagaguccggaagaugg

SEQ ID NO: 718805 - RNA, 22 nt, Human
auguagaacagguuaaugacag

SEQ ID NO: 718806 - RNA, 22 nt, Human
uucuuuuagaauuuccuaaggu

SEQ ID NO: 718807 - RNA, 22 nt, Human
aguguaugcagguuuucaaugu

SEQ ID NO: 718808 - RNA, 20 nt, Human
gcuggcugaacugaaagcaa

SEQ ID NO: 718809 - RNA, 22 nt, Human
uagaacuagaacaaggauuuga

SEQ ID NO: 718810 - RNA, 19 nt, Human
agguggccauguccagccu

SEQ ID NO: 718811 - RNA, 22 nt, Human
ccugagguggcugcagcacugc

SEQ ID NO: 718812 - RNA, 22 nt, Human
aggucugauuuuuuauucccag

SEQ ID NO: 718813 - RNA, 22 nt, Human
ucaggcuuggugcuccagugcc

SEQ ID NO: 718814 - RNA, 17 nt, Human
agcagaagucagaggga

SEQ ID NO: 718815 - RNA, 22 nt, Human
cagugcuguugggcccagagag

SEQ ID NO: 718816 - RNA, 22 nt, Human
ccacugauucugccaggucucu

SEQ ID NO: 718817 - RNA, 20 nt, Human
uguauuuaaugaaggcuuuu

SEQ ID NO: 718818 - RNA, 22 nt, Human
agguuugguuugacaagacuga

SEQ ID NO: 718819 - RNA, 22 nt, Human
gggacacagccaucuguguuuu

SEQ ID NO: 718820 - RNA, 22 nt, Human
uaaaacuagugguugggacuaa

SEQ ID NO: 718821 - RNA, 22 nt, Human
ugaggccugacagaccaagccu

SEQ ID NO: 718822 - RNA, 22 nt, Human
auacacuugaccuggagugaag

SEQ ID NO: 718823 - RNA, 22 nt, Human
acaguaaugauucugagucucu

SEQ ID NO: 718824 - RNA, 22 nt, Human
cuuucacagcuugaaaaguauu

SEQ ID NO: 718825 - RNA, 22 nt, Human
uauguucucugcucuaggaugu

SEQ ID NO: 718826 - RNA, 19 nt, Human
cagaguuacauggcugugg

SEQ ID NO: 718827 - RNA, 22 nt, Human
auguucuuccaaaucuguaaca

SEQ ID NO: 718828 - RNA, 22 nt, Human
ucuguguuuuaaacaguagaaa

SEQ ID NO: 718829 - RNA, 22 nt, Human
uucugggaacaaaguggagugg

SEQ ID NO: 718830 - RNA, 22 nt, Human
ggcacucaauaaauguugccaa

SEQ ID NO: 718831 - RNA, 22 nt, Human
ucuguacaacaaagggaugaga

SEQ ID NO: 718832 - RNA, 22 nt, Human
gcaaaauuaaacuuagcaucau

SEQ ID NO: 718833 - RNA, 22 nt, Human
acagaccaaaaaaggauauugg

SEQ ID NO: 718834 - RNA, 23 nt, Human
caguacuuaguguagcguuaauu

SEQ ID NO: 718835 - RNA, 22 nt, Human
ggcuccugaggaccaggcacag

SEQ ID NO: 718836 - RNA, 22 nt, Human
ucauggaugggcccagcucugu

SEQ ID NO: 718837 - RNA, 22 nt, Human
aaggcugacucaacagggggcc

SEQ ID NO: 718838 - RNA, 19 nt, Human
agacucugugugagacuuu

SEQ ID NO: 718839 - RNA, 22 nt, Human
cucagucugucuugucuguguu

SEQ ID NO: 718840 - RNA, 22 nt, Human
auccaggcugcgggucucaagu

SEQ ID NO: 718841 - RNA, 22 nt, Human
uguguucuccaacuguagauuu

SEQ ID NO: 718842 - RNA, 17 nt, Human
cugagccccgggcagcu

SEQ ID NO: 718843 - RNA, 22 nt, Human
cacuguggugugagggcugaug

SEQ ID NO: 718844 - RNA, 22 nt, Human
uuuaaugauagcuguuucacau

SEQ ID NO: 718845 - RNA, 22 nt, Human
agcaaauauuuuguugaagugc

SEQ ID NO: 718846 - RNA, 22 nt, Human
cugggucuggcuacugcuuccu

SEQ ID NO: 718847 - RNA, 22 nt, Human
uauucuggguaccaaacuucaa

SEQ ID NO: 718848 - RNA, 22 nt, Human
ugcugggauauagcuucuaggg

SEQ ID NO: 718849 - RNA, 22 nt, Human
cuuguauuaugguucgcuuagu

SEQ ID NO: 718850 - RNA, 22 nt, Human
auuucaguguugguuagcaagc

SEQ ID NO: 718851 - RNA, 22 nt, Human
agggcacaggcuccggguccag

SEQ ID NO: 718852 - RNA, 20 nt, Human
agugacagagacuguguggc

SEQ ID NO: 718853 - RNA, 18 nt, Human
gauggaaaguguaugagu

SEQ ID NO: 718854 - RNA, 22 nt, Human
gaagccacaacuuuuucuuagc

SEQ ID NO: 718855 - RNA, 22 nt, Human
aguuuguaugccaacagcaaag

SEQ ID NO: 718856 - RNA, 22 nt, Human
uuuggaucacuguuccucuggg

SEQ ID NO: 718857 - RNA, 22 nt, Human
aucuacaacggguggaguaggg

SEQ ID NO: 718858 - RNA, 21 nt, Human
aagccucaagcagaagacaga

SEQ ID NO: 718859 - RNA, 18 nt, Human
gaggaaacaaggcagagg

SEQ ID NO: 718860 - RNA, 22 nt, Human
ucacuuugcccuguaccuuggg

SEQ ID NO: 718861 - RNA, 22 nt, Human
uucugcugcgacccaggaguua

SEQ ID NO: 718862 - RNA, 22 nt, Human
uggagcagaaauggccucuugu

SEQ ID NO: 718863 - RNA, 22 nt, Human
ccagggcugccgcaucccuggu

SEQ ID NO: 718864 - RNA, 22 nt, Human
ccauuauccacgggcuuccuga

SEQ ID NO: 718865 - RNA, 22 nt, Human
uauuaauucuugccaauucucc

SEQ ID NO: 718866 - RNA, 22 nt, Human
guucuucaucuuaaccaucugu

SEQ ID NO: 718867 - RNA, 22 nt, Human
uuggcuaugcuuguguucaguu

SEQ ID NO: 718868 - RNA, 22 nt, Human
aaacacuucaaggacuucuguc

SEQ ID NO: 718869 - RNA, 22 nt, Human
acuugggaugguggccagagcg

SEQ ID NO: 718870 - RNA, 22 nt, Human
ugcuucugacauguucuugguu

SEQ ID NO: 718871 - RNA, 22 nt, Human
auacacuguucacuagaucuuc

SEQ ID NO: 718872 - RNA, 22 nt, Human
uaaauuacccuuuagggaauug

SEQ ID NO: 718873 - RNA, 22 nt, Human
gcuggguccaugguccucgggu

SEQ ID NO: 718874 - RNA, 22 nt, Human
ucaucaaagucaaagaaugacu

SEQ ID NO: 718875 - RNA, 22 nt, Human
auugacaagaaagauauuuuua

SEQ ID NO: 718876 - RNA, 22 nt, Human
auucugggagguagaacugaaa

SEQ ID NO: 718877 - RNA, 22 nt, Human
gcuggccagcccucuuccucca

SEQ ID NO: 718878 - RNA, 22 nt, Human
ccagagguuacuuugccuugga

SEQ ID NO: 718879 - RNA, 22 nt, Human
uuacaguagcuuuauuuggagu

SEQ ID NO: 718880 - RNA, 21 nt, Human
uuucuaaguaacuggcagcau

SEQ ID NO: 718881 - RNA, 22 nt, Human
acacaggcaaugugagugggag

SEQ ID NO: 718882 - RNA, 22 nt, Human
ggcccagccuggcaacaaugac

SEQ ID NO: 718883 - RNA, 22 nt, Human
ggagggaaugucuagcauucuu

SEQ ID NO: 718884 - RNA, 22 nt, Human
ugcaucuguaguggaaaccuua

SEQ ID NO: 718885 - RNA, 22 nt, Human
ugcacagaucugguggcaagga

SEQ ID NO: 718886 - RNA, 23 nt, Human
uggccuggagagaaaagaugagu

SEQ ID NO: 718887 - RNA, 22 nt, Human
agcuggcugccuucuccuuagg

SEQ ID NO: 718888 - RNA, 23 nt, Human
ugguccugguugaggugggcccc

SEQ ID NO: 718889 - RNA, 22 nt, Human
ggagauaauccagggagggacu

SEQ ID NO: 718890 - RNA, 22 nt, Human
gagguauugacuaugggauggc

SEQ ID NO: 718891 - RNA, 22 nt, Human
uagcuuuccuuguugccugugc

SEQ ID NO: 718892 - RNA, 22 nt, Human
uguggaaaguggucuaagcaca

SEQ ID NO: 718893 - RNA, 22 nt, Human
uacaguaacauguuguacaagc

SEQ ID NO: 718894 - RNA, 22 nt, Human
uauuuccacccucaguaaggaa

SEQ ID NO: 718895 - RNA, 22 nt, Human
ucccuccuggccgucaccgcug

SEQ ID NO: 718896 - RNA, 22 nt, Human
uacaguaacuggaauucuucuu

SEQ ID NO: 718897 - RNA, 22 nt, Human
agaugguugguccauaggccua

SEQ ID NO: 718898 - RNA, 18 nt, Human
uccuagugaaaugccugu

SEQ ID NO: 718899 - RNA, 22 nt, Human
uauuaucuaguaacugauagug

SEQ ID NO: 718900 - RNA, 22 nt, Human
ccucacugcuauguguuugcuc

SEQ ID NO: 718901 - RNA, 22 nt, Human
uucugaauccucgaaacauagc

SEQ ID NO: 718902 - RNA, 22 nt, Human
acucucagaggguggcagcaau

SEQ ID NO: 718903 - RNA, 22 nt, Human
acaguagugcucaaucaguguu

SEQ ID NO: 718904 - RNA, 22 nt, Human
gagcagcugguaggugaaccca

SEQ ID NO: 718905 - RNA, 22 nt, Human
aggagcugcuuuggugcgguuu

SEQ ID NO: 718906 - RNA, 19 nt, Human
caguggagauuggaggagg

SEQ ID NO: 718907 - RNA, 22 nt, Human
ucugaaauaacugaugccagau

SEQ ID NO: 718908 - RNA, 16 nt, Human
uuuauuuacuaguguu

SEQ ID NO: 718909 - RNA, 22 nt, Human
ucagaguguuuuacuaaacaag

SEQ ID NO: 718910 - RNA, 22 nt, Human
uuccucucgcucuccggggccc

SEQ ID NO: 718911 - RNA, 22 nt, Human
auuuccuaggguagaugucaca

SEQ ID NO: 718912 - RNA, 22 nt, Human
cagcccucaucccgccugcguu

SEQ ID NO: 718913 - RNA, 22 nt, Human
ugagaaaauuacuauaauuguc

SEQ ID NO: 718914 - RNA, 22 nt, Human
ggcaggagcucagguugguucc

SEQ ID NO: 718915 - RNA, 22 nt, Human
ucaguguuggucaagaaucagu

SEQ ID NO: 718916 - RNA, 21 nt, Human
ccagacuggccuaugugguag

SEQ ID NO: 718917 - RNA, 22 nt, Human
acucuggcagcagaaccagugu

SEQ ID NO: 718918 - RNA, 19 nt, Human
accaggagacagugagcuu

SEQ ID NO: 718919 - RNA, 22 nt, Human
cucugugggccagagaggcccc

SEQ ID NO: 718920 - RNA, 22 nt, Human
uugucuggucaaaucacuugua

SEQ ID NO: 718921 - RNA, 22 nt, Human
cugacucagcagcugaugaucc

SEQ ID NO: 718922 - RNA, 22 nt, Human
gagcuaagagucuagaaaggcu

SEQ ID NO: 718923 - RNA, 22 nt, Human
gcaauauaaccaguugucaugc

SEQ ID NO: 718924 - RNA, 22 nt, Human
gacagacaggugugguaggcac

SEQ ID NO: 718925 - RNA, 22 nt, Human
cauuucacgcacacucauuacu

SEQ ID NO: 718926 - RNA, 16 nt, Human
agguggagaaguucac

SEQ ID NO: 718927 - RNA, 22 nt, Human
gcagcuccuuuaggcugcaaag

SEQ ID NO: 718928 - RNA, 22 nt, Human
auagcaaauauuuuaaugagca

SEQ ID NO: 718929 - RNA, 22 nt, Human
agaagagcccuuuaagggggaa

SEQ ID NO: 718930 - RNA, 22 nt, Human
ggcagcaugggugccuuuguga

SEQ ID NO: 718931 - RNA, 22 nt, Human
cgccggcuugaggcaggcggca

SEQ ID NO: 718932 - RNA, 22 nt, Human
ucagggcauccauugccuguug

SEQ ID NO: 718933 - RNA, 22 nt, Human
cagucacuggaauagcugagga

SEQ ID NO: 718934 - RNA, 22 nt, Human
aaggaggacacccaggacuggg

SEQ ID NO: 718935 - RNA, 22 nt, Human
cucugcugcuuugccaguggaa

SEQ ID NO: 718936 - RNA, 22 nt, Human
ugcuggcccaugaagacgcagu

SEQ ID NO: 718937 - RNA, 22 nt, Human
cugagaggugacagcgugcugg

SEQ ID NO: 718938 - RNA, 22 nt, Human
cagaugaaguuugccuagagcu

SEQ ID NO: 718939 - RNA, 22 nt, Human
ugcauaaagugccauaguauua

SEQ ID NO: 718940 - RNA, 22 nt, Human
uggcucagaggggaagugguuu

SEQ ID NO: 718941 - RNA, 22 nt, Human
agaagcugccuacaugaccagc

SEQ ID NO: 718942 - RNA, 22 nt, Human
ccuucaaggcaaggagggcugg

SEQ ID NO: 718943 - RNA, 18 nt, Human
ggcaugugagugcugagg

SEQ ID NO: 718944 - RNA, 21 nt, Human
aaaguguucagaccaguucug

SEQ ID NO: 718945 - RNA, 22 nt, Human
cucugggcaggaccaguggacc

SEQ ID NO: 718946 - RNA, 22 nt, Human
ggcuggacuuucugcugggcuc

SEQ ID NO: 718947 - RNA, 20 nt, Human
aacagggggcugcagagggc

SEQ ID NO: 718948 - RNA, 22 nt, Human
caggaaauauaggaaaaggaac

SEQ ID NO: 718949 - RNA, 22 nt, Human
acauguguggccgcuguagaca

SEQ ID NO: 718950 - RNA, 22 nt, Human
guuuguuuguagggaagccgug

SEQ ID NO: 718951 - RNA, 22 nt, Human
cccagggcuuuucucacuagac

SEQ ID NO: 718952 - RNA, 22 nt, Human
ugccauuugccccagcacuguc

SEQ ID NO: 718953 - RNA, 22 nt, Human
uucaugaaauucucguguaccu

SEQ ID NO: 718954 - RNA, 22 nt, Human
aguccuucacguccugcuuauu

SEQ ID NO: 718955 - RNA, 22 nt, Human
gcugacugauggacacagcacc

SEQ ID NO: 718956 - RNA, 22 nt, Human
guccagaaggaggucaaguugg

SEQ ID NO: 718957 - RNA, 22 nt, Human
auuaagaugugggaaaauuuaa

SEQ ID NO: 718958 - RNA, 19 nt, Human
gcugcugcuccucccucgc

SEQ ID NO: 718959 - RNA, 22 nt, Human
uuuguacauauaaaucuuguau

SEQ ID NO: 718960 - RNA, 22 nt, Human
auaguaugagcucauacacuug

SEQ ID NO: 718961 - RNA, 22 nt, Human
ucucccucuguaagaucagggg

SEQ ID NO: 718962 - RNA, 22 nt, Human
uuacgcagcugcuccaggaagc

SEQ ID NO: 718963 - RNA, 23 nt, Human
auggagcugguacuagcuaccuc

SEQ ID NO: 718964 - RNA, 17 nt, Human
agugagaaugucaugua

SEQ ID NO: 718965 - RNA, 22 nt, Human
uaauuuaugaugcaaagaaaag

SEQ ID NO: 718966 - RNA, 22 nt, Human
cugccucaugcugccugcagcc

SEQ ID NO: 718967 - RNA, 22 nt, Human
aacuccagggggucaauauuua

SEQ ID NO: 718968 - RNA, 22 nt, Human
gaagcuccguacuaugacuuuu

SEQ ID NO: 718969 - RNA, 18 nt, Human
cugccacuuaauguggug

SEQ ID NO: 718970 - RNA, 22 nt, Human
aacucuuuggucucaggaaagg

SEQ ID NO: 718971 - RNA, 23 nt, Human
uguguacacaauagaugagguuu

SEQ ID NO: 718972 - RNA, 19 nt, Human
uauguguguguauuuacau

SEQ ID NO: 718973 - RNA, 22 nt, Human
aaacuucagggaauaaaagagu

SEQ ID NO: 718974 - RNA, 22 nt, Human
cuggcuuucugcacagaauugg

SEQ ID NO: 718975 - RNA, 22 nt, Human
ccacagaguugaugcaauaaga

SEQ ID NO: 718976 - RNA, 22 nt, Human
ugcucuaguggguagagcauug

SEQ ID NO: 718977 - RNA, 20 nt, Human
caacaugagcaagugaacug

SEQ ID NO: 718978 - RNA, 22 nt, Human
cauggcuucugaucaaggaacu

SEQ ID NO: 718979 - RNA, 22 nt, Human
agcagggaggucuagcacgugg

SEQ ID NO: 718980 - RNA, 22 nt, Human
uccugggagacccagcugugga

SEQ ID NO: 718981 - RNA, 22 nt, Human
gaaugaaagauuugcauucuau

SEQ ID NO: 718982 - RNA, 22 nt, Human
aggcagccagauggcagccugc

SEQ ID NO: 718983 - RNA, 22 nt, Human
caaaauuguugaugcugcuuug

SEQ ID NO: 718984 - RNA, 22 nt, Human
uaaagcuguucagugcagaaag

SEQ ID NO: 718985 - RNA, 22 nt, Human
cuggagcucuguguguuccuga

SEQ ID NO: 718986 - RNA, 22 nt, Human
ucacaguauagaguuauuuugg

SEQ ID NO: 718987 - RNA, 22 nt, Human
ucagcuuugaucucaggcaauc

SEQ ID NO: 718988 - RNA, 21 nt, Human
gggcagcagcagcaacaaggg

SEQ ID NO: 718989 - RNA, 22 nt, Human
gggcuggucuggcuuagucagg

SEQ ID NO: 718990 - RNA, 22 nt, Human
uccugaagcaguuagcaugagc

SEQ ID NO: 718991 - RNA, 20 nt, Human
aggggucuagcagcagugcu

SEQ ID NO: 718992 - RNA, 23 nt, Human
cucccuggcccuugggagaccug

SEQ ID NO: 718993 - RNA, 22 nt, Human
guucuucagaggggaaagaacc

SEQ ID NO: 718994 - RNA, 22 nt, Human
gccagugugcaagaaaacagaa

SEQ ID NO: 718995 - RNA, 22 nt, Human
aacauugauugcaucuguucac

SEQ ID NO: 718996 - RNA, 22 nt, Human
ucagaacuauaguaguuucaug

SEQ ID NO: 718997 - RNA, 22 nt, Human
uugacuucagccuguacuugua

SEQ ID NO: 718998 - RNA, 20 nt, Human
uccuuuccuccuucuaaaug

SEQ ID NO: 718999 - RNA, 22 nt, Human
gcugaauaggcacagagggcau

SEQ ID NO: 719000 - RNA, 22 nt, Human
uaugaacuuuugaugugacaug

SEQ ID NO: 719001 - RNA, 22 nt, Human
uugggcuccuguugauccuguc

SEQ ID NO: 719002 - RNA, 22 nt, Human
gggcugcugccaccagguggau

SEQ ID NO: 719003 - RNA, 22 nt, Human
acuguaaaagaaggucuuugca

SEQ ID NO: 719004 - RNA, 21 nt, Human
ucaaaucauguacugaccaca

SEQ ID NO: 719005 - RNA, 21 nt, Human
cuggucuggccaauaaggucc

SEQ ID NO: 719006 - RNA, 22 nt, Human
gcugggaaccaugggaaggcag

SEQ ID NO: 719007 - RNA, 22 nt, Human
ucccuguguccaugccaggagg

SEQ ID NO: 719008 - RNA, 22 nt, Human
cugugagggcagggaccagagg

SEQ ID NO: 719009 - RNA, 22 nt, Human
gagugaugucuguagugaagaa

SEQ ID NO: 719010 - RNA, 21 nt, Human
ccaguauuauuucucuaugua

SEQ ID NO: 719011 - RNA, 22 nt, Human
cagcaguguggaagcugagggg

SEQ ID NO: 719012 - RNA, 22 nt, Human
uccugucuaaagaccugcaggc

SEQ ID NO: 719013 - RNA, 22 nt, Human
ugucagcagaaaucuggucugc

SEQ ID NO: 719014 - RNA, 22 nt, Human
cugggcagcugugcaaacaaua

SEQ ID NO: 719015 - RNA, 22 nt, Human
uaguuuagccccacgugugcuu

SEQ ID NO: 719016 - RNA, 22 nt, Human
caggucuguuuucaaggucagu

SEQ ID NO: 719017 - RNA, 22 nt, Human
gcuguuagucaguggaugcccc

SEQ ID NO: 719018 - RNA, 22 nt, Human
cugucugaauccuaagcuuccu

SEQ ID NO: 719019 - RNA, 22 nt, Human
uuucugaauuccuaggauguug

SEQ ID NO: 719020 - RNA, 22 nt, Human
uauaguaaaauuuucauuuaug

SEQ ID NO: 719021 - RNA, 22 nt, Human
acaguugguuaacacaaauauu

SEQ ID NO: 719022 - RNA, 18 nt, Human
gucagaggauggggaaau

SEQ ID NO: 719023 - RNA, 22 nt, Human
guggucagguuaucagaucaua

SEQ ID NO: 719024 - RNA, 22 nt, Human
ugcaaaaugacuucugaaaaga

SEQ ID NO: 719025 - RNA, 22 nt, Human
aauuucaguugcuaauaaguuc

SEQ ID NO: 719026 - RNA, 22 nt, Human
aaccaggugacucauggugagc

SEQ ID NO: 719027 - RNA, 22 nt, Human
acagcccagcucuuucucugca

SEQ ID NO: 719028 - RNA, 22 nt, Human
uaaucucuuuaugagaagaagg

SEQ ID NO: 719029 - RNA, 22 nt, Human
auguaaggcugccuaugacacu

SEQ ID NO: 719030 - RNA, 22 nt, Human
gagagguguguuucagauaaga

SEQ ID NO: 719031 - RNA, 22 nt, Human
gggcaugagaggcaggcaagug

SEQ ID NO: 719032 - RNA, 22 nt, Human
agaaguuaauuccugaaauucu

SEQ ID NO: 719033 - RNA, 22 nt, Human
uaucuuuagaggaagagaaucu

SEQ ID NO: 719034 - RNA, 22 nt, Human
gaguaauuuauccagugaagua

SEQ ID NO: 719035 - RNA, 22 nt, Human
acacaagucccuccauacucuc

SEQ ID NO: 719036 - RNA, 22 nt, Human
cagccagggagcaaagaguuga

SEQ ID NO: 719037 - RNA, 23 nt, Human
acucagugagggccuugggcugc

SEQ ID NO: 719038 - RNA, 22 nt, Human
uaacuucaagucuguggaucag

SEQ ID NO: 719039 - RNA, 22 nt, Human
ucaugguucaugaguguccuuu

SEQ ID NO: 719040 - RNA, 22 nt, Human
cccagggguucugagcagcagc

SEQ ID NO: 719041 - RNA, 22 nt, Human
uggagagcuguugaaaugcaga

SEQ ID NO: 719042 - RNA, 22 nt, Human
ccugugggagguucugugaguc

SEQ ID NO: 719043 - RNA, 22 nt, Human
ucuguagcaagugagaggcauu

SEQ ID NO: 719044 - RNA, 22 nt, Human
agcaauuauuguauaagaacaa

SEQ ID NO: 719045 - RNA, 22 nt, Human
cugcugugcacccaggaaggcu

SEQ ID NO: 719046 - RNA, 22 nt, Human
uucauucagugagacuaggacg

SEQ ID NO: 719047 - RNA, 22 nt, Human
uucaagaucuuccaaaggauac

SEQ ID NO: 719048 - RNA, 22 nt, Human
uauguaguacuuagugcauaca

SEQ ID NO: 719049 - RNA, 22 nt, Human
uucaggaggugagcaagaaggg

SEQ ID NO: 719050 - RNA, 22 nt, Human
cagaauaaaaacuccuaugucu

SEQ ID NO: 719051 - RNA, 22 nt, Human
ucaauagaaaugcagagucuca

SEQ ID NO: 719052 - RNA, 22 nt, Human
auauuuauaaggcaggcaagua

SEQ ID NO: 719053 - RNA, 22 nt, Human
gugcaugcaguaaguguuuuaa

SEQ ID NO: 719054 - RNA, 22 nt, Human
acauuucuuucuauucaguagc

SEQ ID NO: 719055 - RNA, 22 nt, Human
aaggcugaauucaaggguaggc

SEQ ID NO: 719056 - RNA, 17 nt, Human
cuccuggcagccucagg

SEQ ID NO: 719057 - RNA, 22 nt, Human
ucuggcucccagccugcucuca

SEQ ID NO: 719058 - RNA, 22 nt, Human
agguucuugguguccagauuuc

SEQ ID NO: 719059 - RNA, 22 nt, Human
acaaggaggucuggggggcccu

SEQ ID NO: 719060 - RNA, 22 nt, Human
uuuagagguuagaggcugauag

SEQ ID NO: 719061 - RNA, 22 nt, Human
aggcugagcaaagggccuuacc

SEQ ID NO: 719062 - RNA, 20 nt, Human
cugggcagguguuugaucuc

SEQ ID NO: 719063 - RNA, 20 nt, Human
uccaauuuaagaauuuagag

SEQ ID NO: 719064 - RNA, 22 nt, Human
ugccugccuaggaagcugugaa

SEQ ID NO: 719065 - RNA, 22 nt, Human
uggaggccaugccagagcccua

SEQ ID NO: 719066 - RNA, 18 nt, Human
cccacacagcaguagcuc

SEQ ID NO: 719067 - RNA, 22 nt, Human
ccugcaagagcggagaagccag

SEQ ID NO: 719068 - RNA, 19 nt, Human
agggaauccggcugaggga

SEQ ID NO: 719069 - RNA, 22 nt, Human
aagcccagcugaaagcauuuuu

SEQ ID NO: 719070 - RNA, 22 nt, Human
gccaggcagcuagcaaccccug

SEQ ID NO: 719071 - RNA, 22 nt, Human
ugggaugagggugagccacaug

SEQ ID NO: 719072 - RNA, 22 nt, Human
uaaguuuucuggaauaacuugg

SEQ ID NO: 719073 - RNA, 22 nt, Human
ugugugaguaaggcugagagag

SEQ ID NO: 719074 - RNA, 22 nt, Human
augucacaguugcaacaugaau

SEQ ID NO: 719075 - RNA, 22 nt, Human
acuggcagaggauagcacuaau

SEQ ID NO: 719076 - RNA, 22 nt, Human
uuauguaugaauauaguagaag

SEQ ID NO: 719077 - RNA, 22 nt, Human
uuucugaagucuucuaacagau

SEQ ID NO: 719078 - RNA, 22 nt, Human
uagcaaaauguggauguaguug

SEQ ID NO: 719079 - RNA, 22 nt, Human
ugucaccuggaaaucacucuaa

SEQ ID NO: 719080 - RNA, 22 nt, Human
ugggauggagccugaguauagu

SEQ ID NO: 719081 - RNA, 22 nt, Human
ucuccaggaaagacacuggacu

SEQ ID NO: 719082 - RNA, 22 nt, Human
aacaaaacauuugucuuguuuc

SEQ ID NO: 719083 - RNA, 23 nt, Human
ucucccugagguuguuagcauua

SEQ ID NO: 719084 - RNA, 22 nt, Human
ugucauguuucauguuuguagg

SEQ ID NO: 719085 - RNA, 22 nt, Human
uccauaggaucugcuucauacu

SEQ ID NO: 719086 - RNA, 22 nt, Human
aauaauuuuagcucagaguugu

SEQ ID NO: 719087 - RNA, 21 nt, Human
ugcuccagggcagcuuccagc

SEQ ID NO: 719088 - RNA, 22 nt, Human
ccaguggaauuaaaaauaagug

SEQ ID NO: 719089 - RNA, 22 nt, Human
cuuguaauuauaauguacuguu

SEQ ID NO: 719090 - RNA, 20 nt, Human
cugugcuuuggaaccuggaa

SEQ ID NO: 719091 - RNA, 22 nt, Human
guuauguaugggggccuuauga

SEQ ID NO: 719092 - RNA, 22 nt, Human
uugcagauuaaaacacugagcu

SEQ ID NO: 719093 - RNA, 22 nt, Human
uaggaagcuaugggagauguga

SEQ ID NO: 719094 - RNA, 22 nt, Human
ugcucugguccucccucggcgc

SEQ ID NO: 719095 - RNA, 22 nt, Human
cugccagucuaugcugcucggc

SEQ ID NO: 719096 - RNA, 22 nt, Human
auagucuuacuuuucucugcua

SEQ ID NO: 719097 - RNA, 22 nt, Human
uuuuuaucuacagauucucagc

SEQ ID NO: 719098 - RNA, 22 nt, Human
caaccaguagcugaguucaaaa

SEQ ID NO: 719099 - RNA, 22 nt, Human
cucacaggguucuaucgaagag

SEQ ID NO: 719100 - RNA, 22 nt, Human
cugucuucccgaggcccuggag

SEQ ID NO: 719101 - RNA, 21 nt, Human
caaaagagacugauucuugga

SEQ ID NO: 719102 - RNA, 22 nt, Human
ggguggucuggcaggcuggaaa

SEQ ID NO: 719103 - RNA, 22 nt, Human
aaccucaggcucucuggacaau

SEQ ID NO: 719104 - RNA, 22 nt, Human
caucuugaagguuucuuuagcu

SEQ ID NO: 719105 - RNA, 22 nt, Human
agcucaggcucugcagggacua

SEQ ID NO: 719106 - RNA, 22 nt, Human
cagagcagaaaccugggugauu

SEQ ID NO: 719107 - RNA, 22 nt, Human
uuuccuuucugguuuggucaua

SEQ ID NO: 719108 - RNA, 22 nt, Human
guccuucauaucauggauuaua

SEQ ID NO: 719109 - RNA, 22 nt, Human
ucaauacacaugccgcuguucu

SEQ ID NO: 719110 - RNA, 22 nt, Human
uggaaagaugaagauguuuaag

SEQ ID NO: 719111 - RNA, 22 nt, Human
gaaggggacuggcagcugcaga

SEQ ID NO: 719112 - RNA, 22 nt, Human
uuccuuaauaucccuuuuggaa

SEQ ID NO: 719113 - RNA, 22 nt, Human
uaagucaucccauaacagugcu

SEQ ID NO: 719114 - RNA, 22 nt, Human
gggcaugguggugcacaccugu

SEQ ID NO: 719115 - RNA, 22 nt, Human
ugaaaugcaacaguuauuuuug

SEQ ID NO: 719116 - RNA, 22 nt, Human
ucuucuguggcucucaccaccc

SEQ ID NO: 719117 - RNA, 22 nt, Human
gucugcuguagguaggacagca

SEQ ID NO: 719118 - RNA, 22 nt, Human
aacaggcaauuuaggacucuuu

SEQ ID NO: 719119 - RNA, 22 nt, Human
acuguagcugccacuggaugca

SEQ ID NO: 719120 - RNA, 22 nt, Human
cuucucugacagucuguuucac

SEQ ID NO: 719121 - RNA, 22 nt, Human
aauuacuuaacucucugggccu

SEQ ID NO: 719122 - RNA, 22 nt, Human
ugcugucaagaaaacaagcaau

SEQ ID NO: 719123 - RNA, 22 nt, Human
uccagccaccaccuugauugcc

SEQ ID NO: 719124 - RNA, 22 nt, Human
uggcuucauggcugugcaaucu

SEQ ID NO: 719125 - RNA, 22 nt, Human
cuuuacaaccuaaguugaagcu

SEQ ID NO: 719126 - RNA, 22 nt, Human
uacacuguguaaaaugcacuuu

SEQ ID NO: 719127 - RNA, 16 nt, Human
ccuuuucucaucucua

SEQ ID NO: 719128 - RNA, 22 nt, Human
acaguucugagcuauaauugcu

SEQ ID NO: 719129 - RNA, 22 nt, Human
ucccugagacucuggaguguaa

SEQ ID NO: 719130 - RNA, 22 nt, Human
caggagacucagcauccaggau

SEQ ID NO: 719131 - RNA, 22 nt, Human
gcaggccugacuguagggggca

SEQ ID NO: 719132 - RNA, 21 nt, Human
gaaggagaaagcaagugcugc

SEQ ID NO: 719133 - RNA, 22 nt, Human
cugaaaggagagcugcaaggau

SEQ ID NO: 719134 - RNA, 22 nt, Human
ggcagaagacaggcaaaucaug

SEQ ID NO: 719135 - RNA, 22 nt, Human
gucuuauuaugagguuagacuu

SEQ ID NO: 719136 - RNA, 22 nt, Human
uggccuuccuggugacucauga

SEQ ID NO: 719137 - RNA, 22 nt, Human
gaauguuuaaaaggugcaguuu

SEQ ID NO: 719138 - RNA, 22 nt, Human
gucacccacucccugcugcugu

SEQ ID NO: 719139 - RNA, 23 nt, Human
agaggggagcaucugcuggcuga

SEQ ID NO: 719140 - RNA, 23 nt, Human
auccugcugauggcccuccagga

SEQ ID NO: 719141 - RNA, 22 nt, Human
uaauaccacugugcucauuaua

SEQ ID NO: 719142 - RNA, 22 nt, Human
aggggagagaacauaaggaagu

SEQ ID NO: 719143 - RNA, 22 nt, Human
guugaacuauguuuuaucugac

SEQ ID NO: 719144 - RNA, 22 nt, Human
accagaggaggaauuaccuucc

SEQ ID NO: 719145 - RNA, 22 nt, Human
ucuccugcuucaacugauggac

SEQ ID NO: 719146 - RNA, 22 nt, Human
uaaaggcuucugcagggacuga

SEQ ID NO: 719147 - RNA, 22 nt, Human
caggaaagagcugccaggcagg

SEQ ID NO: 719148 - RNA, 22 nt, Human
ccagaggcuggguucaccucag

SEQ ID NO: 719149 - RNA, 22 nt, Human
aacacagggacucccaggagaa

SEQ ID NO: 719150 - RNA, 22 nt, Human
aucaaaguuucccagaaguugu

SEQ ID NO: 719151 - RNA, 22 nt, Human
agcagcaaggaagcgaggaugg

SEQ ID NO: 719152 - RNA, 22 nt, Human
gcaggcucaaaagcugguagga

SEQ ID NO: 719153 - RNA, 22 nt, Human
uucagggacuuagugucaguuu

SEQ ID NO: 719154 - RNA, 22 nt, Human
ccuccagcugccucagucucuu

SEQ ID NO: 719155 - RNA, 22 nt, Human
gugccugggacuugcuccggau

SEQ ID NO: 719156 - RNA, 18 nt, Human
gggcucugauccuucacc

SEQ ID NO: 719157 - RNA, 22 nt, Human
uuguaaaugaccuuuucuaauu

SEQ ID NO: 719158 - RNA, 22 nt, Human
cccucccuuccaaguugaggac

SEQ ID NO: 719159 - RNA, 22 nt, Human
cuaaacaagauacuaaugaggu

SEQ ID NO: 719160 - RNA, 22 nt, Human
aguucuaagaugcuccacagag

SEQ ID NO: 719161 - RNA, 22 nt, Human
gagccugcccagcccuguccac

SEQ ID NO: 719162 - RNA, 22 nt, Human
gggcggggcuuccguccuccac

SEQ ID NO: 719163 - RNA, 22 nt, Human
uggccacuccucccugcaggcu

SEQ ID NO: 719164 - RNA, 22 nt, Human
cuguggcuccauagaaguugca

SEQ ID NO: 719165 - RNA, 22 nt, Human
ucacaauacucacucaauggcu

SEQ ID NO: 719166 - RNA, 22 nt, Human
uggcagagaugaagaguuguuu

SEQ ID NO: 719167 - RNA, 22 nt, Human
gguuuaagacaggcuucacagu

SEQ ID NO: 719168 - RNA, 22 nt, Human
ggaagaggcugagccagguccc

SEQ ID NO: 719169 - RNA, 22 nt, Human
cagaggucagguuggacauuau

SEQ ID NO: 719170 - RNA, 22 nt, Human
uuugcuuucuugauucagauua

SEQ ID NO: 719171 - RNA, 22 nt, Human
uaucugugaaauguguuuguau

SEQ ID NO: 719172 - RNA, 22 nt, Human
ugcuggagaacugcucuguguu

SEQ ID NO: 719173 - RNA, 22 nt, Human
cucauccacccucacuaggaaa

SEQ ID NO: 719174 - RNA, 20 nt, Human
gcaccugaaugcaucuugga

SEQ ID NO: 719175 - RNA, 22 nt, Human
gagagcugaggggccuggcacu

SEQ ID NO: 719176 - RNA, 22 nt, Human
cuacuuuaauuuucugcagaga

SEQ ID NO: 719177 - RNA, 22 nt, Human
cagguuggagaucugucuaugg

SEQ ID NO: 719178 - RNA, 22 nt, Human
cagcaggaaagacaucugagca

SEQ ID NO: 719179 - RNA, 22 nt, Human
cuucccuuccccucacggagac

SEQ ID NO: 719180 - RNA, 22 nt, Human
auuuggggcucaccagggcuga

SEQ ID NO: 719181 - RNA, 22 nt, Human
agguaugugcuauuguuauauu

SEQ ID NO: 719182 - RNA, 22 nt, Human
ugauagaaaggaaauuaauugg

SEQ ID NO: 719183 - RNA, 22 nt, Human
augggcagggcaguguauaaga

SEQ ID NO: 719184 - RNA, 22 nt, Human
cugccaccaugccccagcagag

SEQ ID NO: 719185 - RNA, 22 nt, Human
gacaggugaaacagcaagguaa

SEQ ID NO: 719186 - RNA, 22 nt, Human
uuucacaugguacugccuguuu

SEQ ID NO: 719187 - RNA, 22 nt, Human
ucuuuguuauugugaauagggu

SEQ ID NO: 719188 - RNA, 19 nt, Human
uucuuugaguucuucugag

SEQ ID NO: 719189 - RNA, 22 nt, Human
accugucuauaaaagugaauac

SEQ ID NO: 719190 - RNA, 22 nt, Human
auccuuuauaagacuuguauuc

SEQ ID NO: 719191 - RNA, 22 nt, Human
gcuacuuugcagcuagcuagga

SEQ ID NO: 719192 - RNA, 20 nt, Human
accagagaccugaaucaguu

SEQ ID NO: 719193 - RNA, 22 nt, Human
aagucagauaggugaguccaaa

SEQ ID NO: 719194 - RNA, 22 nt, Human
ucugccugagcagagggaggcc

SEQ ID NO: 719195 - RNA, 22 nt, Human
caaagcaaggcucaguuugaac

SEQ ID NO: 719196 - RNA, 18 nt, Human
agugucuggauauuuggg

SEQ ID NO: 719197 - RNA, 22 nt, Human
uaggaaccagagcacucugggc

SEQ ID NO: 719198 - RNA, 17 nt, Human
gcucuggcacaggauug

SEQ ID NO: 719199 - RNA, 22 nt, Human
gaaggcuguuucugguagugau

SEQ ID NO: 719200 - RNA, 22 nt, Human
cugccagggcauccuguggugg

SEQ ID NO: 719201 - RNA, 22 nt, Human
cuauuugggguagaagauggau

SEQ ID NO: 719202 - RNA, 22 nt, Human
cugcugcauuacucuucucaag

SEQ ID NO: 719203 - RNA, 22 nt, Human
acagccugagaguggagcuggc

SEQ ID NO: 719204 - RNA, 22 nt, Human
uuucacaggaguuguaccauuu

SEQ ID NO: 719205 - RNA, 22 nt, Human
uguggcugggaagaagguaacu

SEQ ID NO: 719206 - RNA, 22 nt, Human
cccaauaaaauucauuuucauu

SEQ ID NO: 719207 - RNA, 22 nt, Human
gcagaggguccugugccagcag

SEQ ID NO: 719208 - RNA, 22 nt, Human
agagaucucugaagcugcugcu

SEQ ID NO: 719209 - RNA, 23 nt, Human
auuucccauugugucagcagagc

SEQ ID NO: 719210 - RNA, 22 nt, Human
uagaauaaguugaugauauaug

SEQ ID NO: 719211 - RNA, 22 nt, Human
gugaccagugaugcugaggagu

SEQ ID NO: 719212 - RNA, 22 nt, Human
cagaugcuaaguuaucagcagg

SEQ ID NO: 719213 - RNA, 22 nt, Human
gagggagggacuagcauucucu

SEQ ID NO: 719214 - RNA, 22 nt, Human
uccuguguuacccuugcaguga

SEQ ID NO: 719215 - RNA, 22 nt, Human
ucaguccagcuccucauuuccc

SEQ ID NO: 719216 - RNA, 22 nt, Human
uuuguucauuaguacaguugua

SEQ ID NO: 719217 - RNA, 20 nt, Human
gccaugaggggaggugacug

SEQ ID NO: 719218 - RNA, 22 nt, Human
agaccagggucccacagagucu

SEQ ID NO: 719219 - RNA, 22 nt, Human
cugucauuggcagggagugugu

SEQ ID NO: 719220 - RNA, 22 nt, Human
gaggcuccgguaguagccuuga

SEQ ID NO: 719221 - RNA, 22 nt, Human
aagaggccuuggucugaccuga

SEQ ID NO: 719222 - RNA, 22 nt, Human
ccaggacaaguguggccauggc

SEQ ID NO: 719223 - RNA, 22 nt, Human
cauagacauucagcacucacua

SEQ ID NO: 719224 - RNA, 22 nt, Human
cucagggaggagcuucugggcc

SEQ ID NO: 719225 - RNA, 20 nt, Human
agcaguuuccuaacucagcu

SEQ ID NO: 719226 - RNA, 22 nt, Human
gugacauuuacgaaucuuaucc

SEQ ID NO: 719227 - RNA, 22 nt, Human
gggccccaguccucccacgugg

SEQ ID NO: 719228 - RNA, 22 nt, Human
agcgggcucaaguggccagcag

SEQ ID NO: 719229 - RNA, 22 nt, Human
agggccagaugaagccacaagc

SEQ ID NO: 719230 - RNA, 22 nt, Human
uagcagcucacuaacucugcgu

SEQ ID NO: 719231 - RNA, 22 nt, Human
gucaaacauagggacuuugugg

SEQ ID NO: 719232 - RNA, 22 nt, Human
gcauugaaccaucuagauuucu

SEQ ID NO: 719233 - RNA, 22 nt, Human
cucccagagaccaagcugagaa

SEQ ID NO: 719234 - RNA, 19 nt, Human
gagcagcugcacccauuga

SEQ ID NO: 719235 - RNA, 22 nt, Human
uaucaucugcaaagcacaucua

SEQ ID NO: 719236 - RNA, 22 nt, Human
cuggcgugaagguggccaugag

SEQ ID NO: 719237 - RNA, 22 nt, Human
aaugcuuauuauuaauagaaug

SEQ ID NO: 719238 - RNA, 18 nt, Human
uauaaccuguuuugaugg

SEQ ID NO: 719239 - RNA, 22 nt, Human
ggguggagagaaagaaacguga

SEQ ID NO: 719240 - RNA, 22 nt, Human
gcugccugaucauacaccaggg

SEQ ID NO: 719241 - RNA, 22 nt, Human
ucaauagcaaucaagccuucca

SEQ ID NO: 719242 - RNA, 22 nt, Human
agggccugugcugaguagacga

SEQ ID NO: 719243 - RNA, 22 nt, Human
aagagcaucgguggagccccca

SEQ ID NO: 719244 - RNA, 22 nt, Human
cugccugcaugcugccauagcu

SEQ ID NO: 719245 - RNA, 22 nt, Human
cagccucugagccuuggcagau

SEQ ID NO: 719246 - RNA, 22 nt, Human
agagggaaauccaggagugcuu

SEQ ID NO: 719247 - RNA, 22 nt, Human
uuucuuuguaguagcauaauca

SEQ ID NO: 719248 - RNA, 21 nt, Human
gcaacuuaucgcauucugcag

SEQ ID NO: 719249 - RNA, 19 nt, Human
uuugaugagaauuuaagca

SEQ ID NO: 719250 - RNA, 18 nt, Human
aggcagcagcaucuucuc

SEQ ID NO: 719251 - RNA, 22 nt, Human
uccagcugcuagcuagaugcaa

SEQ ID NO: 719252 - RNA, 22 nt, Human
cugucugcccuggccagagccc

SEQ ID NO: 719253 - RNA, 22 nt, Human
gugcuuccaucuagagggucac

SEQ ID NO: 719254 - RNA, 22 nt, Human
auucacaugcccaagcagcacc

SEQ ID NO: 719255 - RNA, 22 nt, Human
ucugggagagucacaggcauug

SEQ ID NO: 719256 - RNA, 22 nt, Human
uaauacagaaguguauuaaaau

SEQ ID NO: 719257 - RNA, 22 nt, Human
aacagugaguugaugacugaau

SEQ ID NO: 719258 - RNA, 22 nt, Human
gggcugacaguuuccccugaaa

SEQ ID NO: 719259 - RNA, 22 nt, Human
uccugggaggaacauuuaccua

SEQ ID NO: 719260 - RNA, 22 nt, Human
gcuagaaaucgacuucagaauu

SEQ ID NO: 719261 - RNA, 22 nt, Human
agcagcaguccuuuguguaauu

SEQ ID NO: 719262 - RNA, 22 nt, Human
cuguuaauggaggacuacagga

SEQ ID NO: 719263 - RNA, 22 nt, Human
cucugggcccacuuaaaucugg

SEQ ID NO: 719264 - RNA, 22 nt, Human
auaggaaaucgcuauuaaccua

SEQ ID NO: 719265 - RNA, 22 nt, Human
aggucugagucccagggguacc

SEQ ID NO: 719266 - RNA, 22 nt, Human
cagagccucagaauccugugga

SEQ ID NO: 719267 - RNA, 22 nt, Human
uucaacuaauguuuauuuuaug

SEQ ID NO: 719268 - RNA, 22 nt, Human
uguuuuauauaagcagagcggu

SEQ ID NO: 719269 - RNA, 22 nt, Human
ucuuggaauaccccgaagguca

SEQ ID NO: 719270 - RNA, 22 nt, Human
uccuugggaaaucacuagcacu

SEQ ID NO: 719271 - RNA, 22 nt, Human
gaaguuaucaggauuaaaguug

SEQ ID NO: 719272 - RNA, 22 nt, Human
ggggagcaauugcccccuuaga

SEQ ID NO: 719273 - RNA, 22 nt, Human
uuauggaauggagaaagucugc

SEQ ID NO: 719274 - RNA, 20 nt, Human
ggaaggcuguuuuuccacca

SEQ ID NO: 719275 - RNA, 22 nt, Human
cagaaauauuuauugagugaca

SEQ ID NO: 719276 - RNA, 20 nt, Human
ugccccaggccugcaccugc

SEQ ID NO: 719277 - RNA, 22 nt, Human
uacaacaguaaucaagguuuuu

SEQ ID NO: 719278 - RNA, 22 nt, Human
uauaucagcaaagcauuuaaaa

SEQ ID NO: 719279 - RNA, 22 nt, Human
uauuuccuugagacggagucuc

SEQ ID NO: 719280 - RNA, 22 nt, Human
augauucuaaacuuaaggggga

SEQ ID NO: 719281 - RNA, 22 nt, Human
agugguggagccaggaaaugug

SEQ ID NO: 719282 - RNA, 22 nt, Human
ggaauauagccaguaacaguca

SEQ ID NO: 719283 - RNA, 22 nt, Human
auuucccaugugaaucaauugg

SEQ ID NO: 719284 - RNA, 22 nt, Human
ccaguucuaaacauaaagcuaa

SEQ ID NO: 719285 - RNA, 22 nt, Human
ugggucagagcagaccucugga

SEQ ID NO: 719286 - RNA, 22 nt, Human
cuuucugauguaaggaacuagg

SEQ ID NO: 719287 - RNA, 22 nt, Human
acccaggguagagugcaguggc

SEQ ID NO: 719288 - RNA, 22 nt, Human
ugaacccaggagguugcaguga

SEQ ID NO: 719289 - RNA, 22 nt, Human
uauguacaccggggaagguggg

SEQ ID NO: 719290 - RNA, 22 nt, Human
cugugaauugcaacaauugcaa

SEQ ID NO: 719291 - RNA, 22 nt, Human
uucagaaugcuauuucugaaau

SEQ ID NO: 719292 - RNA, 22 nt, Human
uuuauucucuaguuggucagau

SEQ ID NO: 719293 - RNA, 22 nt, Human
gucacacuagggccaaguggag

SEQ ID NO: 719294 - RNA, 22 nt, Human
uguguacacaaugauugcagag

SEQ ID NO: 719295 - RNA, 22 nt, Human
caucaaauggcaagugaaagcu

SEQ ID NO: 719296 - RNA, 22 nt, Human
gaaacuuacuuacucacauuuc

SEQ ID NO: 719297 - RNA, 19 nt, Human
aggagccuugagcagugag

SEQ ID NO: 719298 - RNA, 22 nt, Human
ccugggccuauccuagaaccaa

SEQ ID NO: 719299 - RNA, 21 nt, Human
uucaucagccagaaaucaagc

SEQ ID NO: 719300 - RNA, 22 nt, Human
acagagguggaccucagcaggc

SEQ ID NO: 719301 - RNA, 22 nt, Human
ggagaguuguuuuugccuagau

SEQ ID NO: 719302 - RNA, 22 nt, Human
agcugcugaagugagagaauug

SEQ ID NO: 719303 - RNA, 22 nt, Human
accugucugggcuacauuugca

SEQ ID NO: 719304 - RNA, 21 nt, Human
aguacaucucaaauguaaauc

SEQ ID NO: 719305 - RNA, 22 nt, Human
ugcuucugcucagcuuccuacu

SEQ ID NO: 719306 - RNA, 22 nt, Human
agaaaguucugugaguuguuca

SEQ ID NO: 719307 - RNA, 22 nt, Human
ucugaaaguaucuggaucuuuu

SEQ ID NO: 719308 - RNA, 22 nt, Human
agugcucuaacagucaaaaaag

SEQ ID NO: 719309 - RNA, 22 nt, Human
gaaccacaaugugaagaaggag

SEQ ID NO: 719310 - RNA, 22 nt, Human
ucucugagguuguuuccagcac

SEQ ID NO: 719311 - RNA, 22 nt, Human
cucucccuaugccucccaggag

SEQ ID NO: 719312 - RNA, 22 nt, Human
ccuagucuuccgcguccccacc

SEQ ID NO: 719313 - RNA, 19 nt, Human
uccaggggcuccaccuccu

SEQ ID NO: 719314 - RNA, 22 nt, Human
aguguuuauuuacagaugguuu

SEQ ID NO: 719315 - RNA, 22 nt, Human
gauggcuuugugcaccaugauu

SEQ ID NO: 719316 - RNA, 22 nt, Human
uugcagggauuaccuuauuuuu

SEQ ID NO: 719317 - RNA, 20 nt, Human
aagauucugauuuguagcgu

SEQ ID NO: 719318 - RNA, 22 nt, Human
augaagaugguucaacuggccu

SEQ ID NO: 719319 - RNA, 22 nt, Human
caaugcuucugagggaauuaca

SEQ ID NO: 719320 - RNA, 22 nt, Human
gaauuguauugauuuuucagag

SEQ ID NO: 719321 - RNA, 22 nt, Human
uaucagaaggcacauggagucu

SEQ ID NO: 719322 - RNA, 22 nt, Human
auuuuagcuguccaguggauug

SEQ ID NO: 719323 - RNA, 22 nt, Human
gcaggcccagagucgcuggccu

SEQ ID NO: 719324 - RNA, 22 nt, Human
cugagccagggccacacaugga

SEQ ID NO: 719325 - RNA, 22 nt, Human
agucccuugagggaguacuguu

SEQ ID NO: 719326 - RNA, 22 nt, Human
gcaggacauucagugaaugggc

SEQ ID NO: 719327 - RNA, 22 nt, Human
agccagaggccagccugccuca

SEQ ID NO: 719328 - RNA, 22 nt, Human
ugaggugguccaaagacuguuu

SEQ ID NO: 719329 - RNA, 22 nt, Human
gcagagcugcagcgaggccugg

SEQ ID NO: 719330 - RNA, 22 nt, Human
ugaagacaguuuuacucaugag

SEQ ID NO: 719331 - RNA, 22 nt, Human
guggagaccuccuaggaugugu

SEQ ID NO: 719332 - RNA, 23 nt, Human
ccuccucauaucuuugacuagug

SEQ ID NO: 719333 - RNA, 22 nt, Human
ccaaagucuggagcagcagagc

SEQ ID NO: 719334 - RNA, 22 nt, Human
gggguggaucaggcaggcccag

SEQ ID NO: 719335 - RNA, 22 nt, Human
aauuccagucucugcucuauuu

SEQ ID NO: 719336 - RNA, 22 nt, Human
guggcuugaccaucccugcuac

SEQ ID NO: 719337 - RNA, 22 nt, Human
aaucugaagggagauacaugua

SEQ ID NO: 719338 - RNA, 22 nt, Human
aagcucaggaaagagucugguu

SEQ ID NO: 719339 - RNA, 22 nt, Human
cuggcugugugcccccggcacc

SEQ ID NO: 719340 - RNA, 22 nt, Human
aacaggcuucuucugggcuccu

SEQ ID NO: 719341 - RNA, 22 nt, Human
gaggggcuguggagcucucugg

SEQ ID NO: 719342 - RNA, 22 nt, Human
aauauucuaauaaaugcccauc

SEQ ID NO: 719343 - RNA, 22 nt, Human
gcggcgccugggacccgccagc

SEQ ID NO: 719344 - RNA, 22 nt, Human
aaagacuugggagcaguaugcu

SEQ ID NO: 719345 - RNA, 22 nt, Human
cugccuggccugaucuccacgc

SEQ ID NO: 719346 - RNA, 22 nt, Human
auauacaaagggcaaccucgcu

SEQ ID NO: 719347 - RNA, 19 nt, Human
gucuuacaggcaacaugag

SEQ ID NO: 719348 - RNA, 22 nt, Human
acaugcuuuaacuuauuuugau

SEQ ID NO: 719349 - RNA, 20 nt, Human
uggaggcaccuguggagauc

SEQ ID NO: 719350 - RNA, 22 nt, Human
aacugcagagaacaucuggguu

SEQ ID NO: 719351 - RNA, 22 nt, Human
gggcaggaacaaaucaaaugau

SEQ ID NO: 719352 - RNA, 22 nt, Human
cuguaauucacuagggucagcg

SEQ ID NO: 719353 - RNA, 22 nt, Human
gcuguggccaacaaaccacuuu

SEQ ID NO: 719354 - RNA, 22 nt, Human
ccaggugcacucaagaccugcu

SEQ ID NO: 719355 - RNA, 22 nt, Human
gagagugaaggcuucccagcaa

SEQ ID NO: 719356 - RNA, 20 nt, Human
ccagucucuaucagaaauaa

SEQ ID NO: 719357 - RNA, 22 nt, Human
guaaaauugcaauuacuuuugc

SEQ ID NO: 719358 - RNA, 20 nt, Human
uagaggggacaaucauugcc

SEQ ID NO: 719359 - RNA, 22 nt, Human
gcagagauccuugcuggaugac

SEQ ID NO: 719360 - RNA, 22 nt, Human
aguuaacucauuuuauaaugcc

SEQ ID NO: 719361 - RNA, 23 nt, Human
gugcucuucaguuuuagggucau

SEQ ID NO: 719362 - RNA, 22 nt, Human
cuggcaguuugccaggagcucg

SEQ ID NO: 719363 - RNA, 22 nt, Human
ucaaaaauguuuuauauuggua

SEQ ID NO: 719364 - RNA, 17 nt, Human
uuucagauucacuuucu

SEQ ID NO: 719365 - RNA, 22 nt, Human
aguuuucugggaucacuggaau

SEQ ID NO: 719366 - RNA, 22 nt, Human
guaguaauuguuuuaagccacc

SEQ ID NO: 719367 - RNA, 19 nt, Human
agcaaccugucagagaugc

SEQ ID NO: 719368 - RNA, 22 nt, Human
gagaggccauggcugugcagug

SEQ ID NO: 719369 - RNA, 22 nt, Human
uggaacacuggcuuuccacugu

SEQ ID NO: 719370 - RNA, 22 nt, Human
agcaaugacuggcuauaugauu

SEQ ID NO: 719371 - RNA, 22 nt, Human
acacugugagcugaagggcugc

SEQ ID NO: 719372 - RNA, 22 nt, Human
aaauaaguaaugucuuccuuuu

SEQ ID NO: 719373 - RNA, 22 nt, Human
gcucugggaauucagaaagccu

SEQ ID NO: 719374 - RNA, 22 nt, Human
auggcagggcccuuggcuccca

SEQ ID NO: 719375 - RNA, 22 nt, Human
cagaugcugccugggaaugucu

SEQ ID NO: 719376 - RNA, 22 nt, Human
uagaauguuaagaauauguaua

SEQ ID NO: 719377 - RNA, 22 nt, Human
uucugaagggcuaagugucuau

SEQ ID NO: 719378 - RNA, 22 nt, Human
uauugcuuaaaaaauaugugag

SEQ ID NO: 719379 - RNA, 22 nt, Human
augucugcguuauaucaauauc

SEQ ID NO: 719380 - RNA, 22 nt, Human
cagccagaucaaacucagaugu

SEQ ID NO: 719381 - RNA, 22 nt, Human
gugacauuuauuagaugcuuac

SEQ ID NO: 719382 - RNA, 22 nt, Human
agcuaaugggagacccuuucac

SEQ ID NO: 719383 - RNA, 22 nt, Human
uugcaaaaaccacaauuacuuu

SEQ ID NO: 719384 - RNA, 22 nt, Human
ccugucagaugaaguaauugug

SEQ ID NO: 719385 - RNA, 18 nt, Human
cccaggcuuugugggucu

SEQ ID NO: 719386 - RNA, 22 nt, Human
auucaaguucuucugucuuugc

SEQ ID NO: 719387 - RNA, 22 nt, Human
caggcuucaugaauuaugcacc

SEQ ID NO: 719388 - RNA, 22 nt, Human
uauauuaucauaaaaccauuca

SEQ ID NO: 719389 - RNA, 22 nt, Human
aguguggguuuuauggagcccu

SEQ ID NO: 719390 - RNA, 20 nt, Human
auauaauaaauuuugguuac

SEQ ID NO: 719391 - RNA, 22 nt, Human
ugauuauauucuaacuucauaa

SEQ ID NO: 719392 - RNA, 22 nt, Human
gaacuacaggugcagcaaguga

SEQ ID NO: 719393 - RNA, 21 nt, Human
agggucaggaaccaggguacc

SEQ ID NO: 719394 - RNA, 22 nt, Human
cagggagcuuucccaggacccu

SEQ ID NO: 719395 - RNA, 19 nt, Human
guggccugcgcugggugcg

SEQ ID NO: 719396 - RNA, 22 nt, Human
uggccagaacucagacaugugg

SEQ ID NO: 719397 - RNA, 22 nt, Human
gcuucuccagaccuucaucccc

SEQ ID NO: 719398 - RNA, 22 nt, Human
uacaguaggauuuucagggucu

SEQ ID NO: 719399 - RNA, 22 nt, Human
ugggaacauuuugagcugagag

SEQ ID NO: 719400 - RNA, 23 nt, Human
ugcugaaguguuggcccugccca

SEQ ID NO: 719401 - RNA, 18 nt, Human
augugagagaaucuucuu

SEQ ID NO: 719402 - RNA, 20 nt, Human
ggcuccuucuuucauggccc

SEQ ID NO: 719403 - RNA, 22 nt, Human
gcagaggagaugaagauacuuu

SEQ ID NO: 719404 - RNA, 21 nt, Human
aacugcuggucuuuucugucu

SEQ ID NO: 719405 - RNA, 22 nt, Human
cacagcccugcgccccaguuug

SEQ ID NO: 719406 - RNA, 22 nt, Human
ucaaacagaggaacaauuguuu

SEQ ID NO: 719407 - RNA, 22 nt, Human
agggacacugaugagaaauucu

SEQ ID NO: 719408 - RNA, 22 nt, Human
uggaaccaucaaagagauccug

SEQ ID NO: 719409 - RNA, 22 nt, Human
uguugacaauaaagucuaccau

SEQ ID NO: 719410 - RNA, 22 nt, Human
acacuggaccauuuaaacuuga

SEQ ID NO: 719411 - RNA, 22 nt, Human
ucauguuucucuuacagcagcu

SEQ ID NO: 719412 - RNA, 22 nt, Human
aacugaaaguuucaccugaggu

SEQ ID NO: 719413 - RNA, 22 nt, Human
aaagugggaacaauggagagug

SEQ ID NO: 719414 - RNA, 22 nt, Human
cucuggaauggguguuucuaac

SEQ ID NO: 719415 - RNA, 22 nt, Human
gugcccuggagggguugaaggg

SEQ ID NO: 719416 - RNA, 23 nt, Human
ugucugguuucuuuuauuuagca

SEQ ID NO: 719417 - RNA, 23 nt, Human
agaauuguaaauagaauauaccu

SEQ ID NO: 719418 - RNA, 18 nt, Human
acaguaaagaaaggaauu

SEQ ID NO: 719419 - RNA, 22 nt, Human
guggguggagacugggugcaag

SEQ ID NO: 719420 - RNA, 22 nt, Human
cagcuaccaugguuuguuccag

SEQ ID NO: 719421 - RNA, 22 nt, Human
uacacuuguucaaacagcaaaa

SEQ ID NO: 719422 - RNA, 22 nt, Human
cuacauggagaagaaaauucuu

SEQ ID NO: 719423 - RNA, 22 nt, Human
ucauauuucaaaauggcuggag

SEQ ID NO: 719424 - RNA, 22 nt, Human
ugccugggccucugaggaaggc

SEQ ID NO: 719425 - RNA, 22 nt, Human
uacaaaugccugacacacagau

SEQ ID NO: 719426 - RNA, 22 nt, Human
uuauucaggaggugcucgaagg

SEQ ID NO: 719427 - RNA, 22 nt, Human
aggagagaauguuccaggcuug

SEQ ID NO: 719428 - RNA, 22 nt, Human
aacuaauacauuaauacaugug

SEQ ID NO: 719429 - RNA, 22 nt, Human
ccucuauguacacauuuccagc

SEQ ID NO: 719430 - RNA, 22 nt, Human
ccauuacuuuccaauauaucag

SEQ ID NO: 719431 - RNA, 22 nt, Human
acagcugggugucccacuucug

SEQ ID NO: 719432 - RNA, 22 nt, Human
cuggaaugccucccugucagag

SEQ ID NO: 719433 - RNA, 16 nt, Human
gagggcagaggcggaa

SEQ ID NO: 719434 - RNA, 22 nt, Human
ccugccuggggacaaaggaggg

SEQ ID NO: 719435 - RNA, 22 nt, Human
cuggucaggaagguggggacag

SEQ ID NO: 719436 - RNA, 23 nt, Human
gagagagauugcuaaaccacucc

SEQ ID NO: 719437 - RNA, 21 nt, Human
gguugguguguccaguggcca

SEQ ID NO: 719438 - RNA, 22 nt, Human
auuagagguacaaaccuucacu

SEQ ID NO: 719439 - RNA, 22 nt, Human
uggccagccauaaaagaaccca

SEQ ID NO: 719440 - RNA, 22 nt, Human
cagcacaguuucuggcccgccg

SEQ ID NO: 719441 - RNA, 22 nt, Human
cuucuugugcugggccagcuuc

SEQ ID NO: 719442 - RNA, 22 nt, Human
ucgagcucuggagccaaggaug

SEQ ID NO: 719443 - RNA, 22 nt, Human
uguccucuccaacagccucugu

SEQ ID NO: 719444 - RNA, 23 nt, Human
augguuuaugucacacuuuugau

SEQ ID NO: 719445 - RNA, 22 nt, Human
uugaggcauuacuguaaugaga

SEQ ID NO: 719446 - RNA, 22 nt, Human
auggccaagaaguauuccugac

SEQ ID NO: 719447 - RNA, 22 nt, Human
augcuggucugcagaguuggga

SEQ ID NO: 719448 - RNA, 22 nt, Human
ggucacaucuaaauggagcauu

SEQ ID NO: 719449 - RNA, 22 nt, Human
gaaaggcaucuucagucucuga

SEQ ID NO: 719450 - RNA, 22 nt, Human
uuuuucucuaaguagucccaaa

SEQ ID NO: 719451 - RNA, 22 nt, Human
uggcccugguggcacagccugc

SEQ ID NO: 719452 - RNA, 22 nt, Human
gccugcagcugcuuccacacac

SEQ ID NO: 719453 - RNA, 22 nt, Human
gagcuaggauaucaugagggua

SEQ ID NO: 719454 - RNA, 22 nt, Human
cugggagucuggccucuggucc

SEQ ID NO: 719455 - RNA, 18 nt, Human
ugaauuaguuugugguuu

SEQ ID NO: 719456 - RNA, 19 nt, Human
ucucagaggaaaaauugcu

SEQ ID NO: 719457 - RNA, 21 nt, Human
ugcuggaaaaagugguucuag

SEQ ID NO: 719458 - RNA, 22 nt, Human
uugucuuuggaaauuuaauguu

SEQ ID NO: 719459 - RNA, 22 nt, Human
cugcuguguggugaaacucagu

SEQ ID NO: 719460 - RNA, 22 nt, Human
gagcuagaguuuguaggguaga

SEQ ID NO: 719461 - RNA, 22 nt, Human
gaugagggccugguggcugugc

SEQ ID NO: 719462 - RNA, 22 nt, Human
guaugucaaaaucugcaugaua

SEQ ID NO: 719463 - RNA, 22 nt, Human
ugugaggauguuaaggggauga

SEQ ID NO: 719464 - RNA, 22 nt, Human
cagugucuuucagacucagaaa

SEQ ID NO: 719465 - RNA, 22 nt, Human
ggcuccaggaaccuccucuccu

SEQ ID NO: 719466 - RNA, 22 nt, Human
cuacaaauauguuaagguguuu

SEQ ID NO: 719467 - RNA, 22 nt, Human
uuguaaacuggauagaccuauu

SEQ ID NO: 719468 - RNA, 22 nt, Human
aucugggcauggaggaaagaga

SEQ ID NO: 719469 - RNA, 22 nt, Human
agcuguccugugggagggagug

SEQ ID NO: 719470 - RNA, 22 nt, Human
gggcuucuugccauggggacgg

SEQ ID NO: 719471 - RNA, 19 nt, Human
cuuuggaggaugaggcugg

SEQ ID NO: 719472 - RNA, 22 nt, Human
aucauucagugaccacuuccca

SEQ ID NO: 719473 - RNA, 22 nt, Human
uucccagaggagauuugcuuau

SEQ ID NO: 719474 - RNA, 22 nt, Human
ugucaacagauacuagagagcu

SEQ ID NO: 719475 - RNA, 22 nt, Human
aaugcauuccacugagauuugu

SEQ ID NO: 719476 - RNA, 22 nt, Human
ccauccaugguguugguuguau

SEQ ID NO: 719477 - RNA, 22 nt, Human
ggccuagggaguggccaugccu

SEQ ID NO: 719478 - RNA, 22 nt, Human
cucuugaagcaggggccaguuc

SEQ ID NO: 719479 - RNA, 18 nt, Human
cagaaaguuauuuacucu

SEQ ID NO: 719480 - RNA, 22 nt, Human
ggccauggaccccgagcugacc

SEQ ID NO: 719481 - RNA, 22 nt, Human
accugucaaguccagcgcaaca

SEQ ID NO: 719482 - RNA, 22 nt, Human
aggccugagguuccugugcuca

SEQ ID NO: 719483 - RNA, 22 nt, Human
uaaaacuucucauuuuuauggu

SEQ ID NO: 719484 - RNA, 22 nt, Human
agauuugcggcuuuacuuugca

SEQ ID NO: 719485 - RNA, 22 nt, Human
cuguaucugucagcuggucucg

SEQ ID NO: 719486 - RNA, 22 nt, Human
ggccuggaaggacagcgugaug

SEQ ID NO: 719487 - RNA, 22 nt, Human
auuuugaaaccaaguuauuucc

SEQ ID NO: 719488 - RNA, 22 nt, Human
agcacaguugguaaaauuguua

SEQ ID NO: 719489 - RNA, 22 nt, Human
ucagcucugcaaggucaccucc

SEQ ID NO: 719490 - RNA, 22 nt, Human
uguauuuucagaguggcauuuc

SEQ ID NO: 719491 - RNA, 22 nt, Human
gugcccugaucgcuaggcuccc

SEQ ID NO: 719492 - RNA, 22 nt, Human
uucuaaguuacuguuauggucu

SEQ ID NO: 719493 - RNA, 22 nt, Human
guuaaacugaaaggcucguuca

SEQ ID NO: 719494 - RNA, 22 nt, Human
aagugacacauggcacuucuau

SEQ ID NO: 719495 - RNA, 22 nt, Human
ugagccugcaauaagcacagcc

SEQ ID NO: 719496 - RNA, 22 nt, Human
cugucugcuaugcuuguuguca

SEQ ID NO: 719497 - RNA, 22 nt, Human
agccaaaggcaccagagacacu

SEQ ID NO: 719498 - RNA, 22 nt, Human
aguuuucuuucaucuaucagca

SEQ ID NO: 719499 - RNA, 22 nt, Human
agaaauacugugagagcagccu

SEQ ID NO: 719500 - RNA, 22 nt, Human
aaaaauaggucaaccguguaug

SEQ ID NO: 719501 - RNA, 22 nt, Human
ccugggcaaaugccagagacaa

SEQ ID NO: 719502 - RNA, 22 nt, Human
uucuuucucacucuuuaggaag

SEQ ID NO: 719503 - RNA, 22 nt, Human
ccucugcucugguccaugugcu

SEQ ID NO: 719504 - RNA, 22 nt, Human
acuccagggguugcuauuuaca

SEQ ID NO: 719505 - RNA, 22 nt, Human
ucccaccuuccguggaacccgu

SEQ ID NO: 719506 - RNA, 22 nt, Human
uaauuuugucccccugcacaua

SEQ ID NO: 719507 - RNA, 22 nt, Human
uaggaaagaaaugaguagugau

SEQ ID NO: 719508 - RNA, 22 nt, Human
gcugaaauuagacugcagaagu

SEQ ID NO: 719509 - RNA, 23 nt, Human
aaggguccauagcuaucauuaca

SEQ ID NO: 719510 - RNA, 22 nt, Human
uggcagucuuguaggcaucucc

SEQ ID NO: 719511 - RNA, 22 nt, Human
aguuggagaagaggucgggaau

SEQ ID NO: 719512 - RNA, 18 nt, Human
uccagggcuuccuccucu

SEQ ID NO: 719513 - RNA, 22 nt, Human
cacucugagcccaagcaggcug

SEQ ID NO: 719514 - RNA, 22 nt, Human
ugcuugugagaguuuuuucaga

SEQ ID NO: 719515 - RNA, 17 nt, Human
uggcgcucccagggugc

SEQ ID NO: 719516 - RNA, 23 nt, Human
uccccucaggcagccagugcccu

SEQ ID NO: 719517 - RNA, 22 nt, Human
gccuggaggggacagucucugg

SEQ ID NO: 719518 - RNA, 22 nt, Human
agucaggauuuaaacucagaca

SEQ ID NO: 719519 - RNA, 22 nt, Human
uuuaaagagaaugugaaggagu

SEQ ID NO: 719520 - RNA, 22 nt, Human
agaaaacacugcccccucucuc

SEQ ID NO: 719521 - RNA, 22 nt, Human
aacagugcugauuauuuuaccu

SEQ ID NO: 719522 - RNA, 22 nt, Human
gcagugacauaccuggagggca

SEQ ID NO: 719523 - RNA, 22 nt, Human
aggcucagucuguucaugcacu

SEQ ID NO: 719524 - RNA, 22 nt, Human
gcugguuucacccaaccgaugu

SEQ ID NO: 719525 - RNA, 22 nt, Human
aagggcuggaucucucugagca

SEQ ID NO: 719526 - RNA, 22 nt, Human
uuaacaaaaauaucaggcauca

SEQ ID NO: 719527 - RNA, 22 nt, Human
aaggcuaugaucuuuuucauga

SEQ ID NO: 719528 - RNA, 22 nt, Human
augugugugugcgcgcgcagga

SEQ ID NO: 719529 - RNA, 22 nt, Human
uaaggccaauuacauauguuca

SEQ ID NO: 719530 - RNA, 22 nt, Human
ggagacagugacuuagagacug

SEQ ID NO: 719531 - RNA, 23 nt, Human
cauggggagcagugcuccugacc

SEQ ID NO: 719532 - RNA, 18 nt, Human
ucuuuuguccccugcugc

SEQ ID NO: 719533 - RNA, 22 nt, Human
cccaaggccuucaagccagcuc

SEQ ID NO: 719534 - RNA, 22 nt, Human
aagcaguuuuucaacuguuuag

SEQ ID NO: 719535 - RNA, 19 nt, Human
uggcugggugccaauggcc

SEQ ID NO: 719536 - RNA, 22 nt, Human
cacagcaaagacacucucaacu

SEQ ID NO: 719537 - RNA, 22 nt, Human
uauaagaaacaaggcaaauuuu

SEQ ID NO: 719538 - RNA, 22 nt, Human
aauuuuacuucccucaguguag

SEQ ID NO: 719539 - RNA, 22 nt, Human
gccaggugggagacagacagca

SEQ ID NO: 719540 - RNA, 22 nt, Human
gaguccagcucauugucuggga

SEQ ID NO: 719541 - RNA, 22 nt, Human
ugagauaauaaauagcuuucuu

SEQ ID NO: 719542 - RNA, 22 nt, Human
acacacaauuaguuuuaugcuu

SEQ ID NO: 719543 - RNA, 22 nt, Human
ugugccagucauccagaugugu

SEQ ID NO: 719544 - RNA, 22 nt, Human
gcagauggcagcccaggcuggg

SEQ ID NO: 719545 - RNA, 22 nt, Human
aggaggcugguucaggccauau

SEQ ID NO: 719546 - RNA, 22 nt, Human
acaguuagguccuaaaauucug

SEQ ID NO: 719547 - RNA, 22 nt, Human
gaggcuguuggcugaucugagu

SEQ ID NO: 719548 - RNA, 22 nt, Human
aguguccaacucagcuugucaa

SEQ ID NO: 719549 - RNA, 22 nt, Human
agagccuuuggagcugcuauua

SEQ ID NO: 719550 - RNA, 22 nt, Human
ugacacugcauauauugaaguu

SEQ ID NO: 719551 - RNA, 22 nt, Human
acauacacgggaaaccucuuuu

SEQ ID NO: 719552 - RNA, 22 nt, Human
cagcgaggugaaggguacaagc

SEQ ID NO: 719553 - RNA, 22 nt, Human
cuggaagagugacuuugcauuu

SEQ ID NO: 719554 - RNA, 22 nt, Human
caugcucuccauuggacacaga

SEQ ID NO: 719555 - RNA, 20 nt, Human
cgcccaggagggcccaugug

SEQ ID NO: 719556 - RNA, 22 nt, Human
uuucucuguucucuaacuguaa

SEQ ID NO: 719557 - RNA, 22 nt, Human
guaugugugcaaauguaaauau

SEQ ID NO: 719558 - RNA, 22 nt, Human
gcugaggacauacacauugugc

SEQ ID NO: 719559 - RNA, 22 nt, Human
guggaagaggcaagauagcucu

SEQ ID NO: 719560 - RNA, 17 nt, Human
cucugggcagccugggg

SEQ ID NO: 719561 - RNA, 22 nt, Human
uuggccagugaaccaggccugg

SEQ ID NO: 719562 - RNA, 23 nt, Human
cacggcagccuccgagggugcug

SEQ ID NO: 719563 - RNA, 22 nt, Human
uugaaauaucaaguuauuagug

SEQ ID NO: 719564 - RNA, 22 nt, Human
aaagcagcagaaucucucaggg

SEQ ID NO: 719565 - RNA, 21 nt, Human
ucaaagacuggggcugugugc

SEQ ID NO: 719566 - RNA, 22 nt, Human
aaaccuuucugcucucagcgua

SEQ ID NO: 719567 - RNA, 22 nt, Human
uugcagggaaacaguuuaggaa

SEQ ID NO: 719568 - RNA, 22 nt, Human
acaggagaaaucuggucaaaag

SEQ ID NO: 719569 - RNA, 22 nt, Human
aggcccuauucaauggggccca

SEQ ID NO: 719570 - RNA, 22 nt, Human
acuuggaaagaugcaacacagu

SEQ ID NO: 719571 - RNA, 22 nt, Human
auaauggcuugugguguuauuc

SEQ ID NO: 719572 - RNA, 22 nt, Human
agcccaggugacucauacaccc

SEQ ID NO: 719573 - RNA, 22 nt, Human
uuggccaauuuagaacguguug

SEQ ID NO: 719574 - RNA, 22 nt, Human
acaccaugaugagugauguagc

SEQ ID NO: 719575 - RNA, 22 nt, Human
gaacacauuucucugacuguag

SEQ ID NO: 719576 - RNA, 23 nt, Human
uggcucugagcuuccugguggcc

SEQ ID NO: 719577 - RNA, 22 nt, Human
ccagccaguccagcauuggugu

SEQ ID NO: 719578 - RNA, 21 nt, Human
uguccuuaaugcaauguccuu

SEQ ID NO: 719579 - RNA, 23 nt, Human
ugucacauuuaguuggcauuguu

SEQ ID NO: 719580 - RNA, 22 nt, Human
uauuuugacuauuaaaccaaca

SEQ ID NO: 719581 - RNA, 22 nt, Human
ccauuuaacacagaguuuucca

SEQ ID NO: 719582 - RNA, 22 nt, Human
cuuacgugauaacuucucaaaa

SEQ ID NO: 719583 - RNA, 22 nt, Human
gugaggugggcuggccagagac

SEQ ID NO: 719584 - RNA, 22 nt, Human
uucuuacagaguuuacagagcc

SEQ ID NO: 719585 - RNA, 22 nt, Human
uuuuaaagagaugcugugcaua

SEQ ID NO: 719586 - RNA, 22 nt, Human
uaaaugcuuagauucauagaaa

SEQ ID NO: 719587 - RNA, 22 nt, Human
acagcaggcacacaaggauaga

SEQ ID NO: 719588 - RNA, 22 nt, Human
gacacagaugaucaggugugga

SEQ ID NO: 719589 - RNA, 22 nt, Human
uguggaggauucugaugccagc

SEQ ID NO: 719590 - RNA, 22 nt, Human
acccacagccgcugugcguccc

SEQ ID NO: 719591 - RNA, 22 nt, Human
uggcccuuguucaaauauguca

SEQ ID NO: 719592 - RNA, 22 nt, Human
caguccagccaguagggugugg

SEQ ID NO: 719593 - RNA, 22 nt, Human
ccugaccagagugagggcuuag

SEQ ID NO: 719594 - RNA, 22 nt, Human
aggcuucagguuugcuuugcag

SEQ ID NO: 719595 - RNA, 22 nt, Human
uagaaaguacuaaauuuaacug

SEQ ID NO: 719596 - RNA, 22 nt, Human
uguggcaggcaagauguacaga

SEQ ID NO: 719597 - RNA, 22 nt, Human
ugggagaggcugccaucuugca

SEQ ID NO: 719598 - RNA, 19 nt, Human
auagcuugucagcugcucc

SEQ ID NO: 719599 - RNA, 22 nt, Human
agaaagcacgggccccaggcuc

SEQ ID NO: 719600 - RNA, 22 nt, Human
agcaucagccucuguccuggag

SEQ ID NO: 719601 - RNA, 22 nt, Human
uacagaaagaccucucgggaaa

SEQ ID NO: 719602 - RNA, 22 nt, Human
auuagaaaaucuggaggugggg

SEQ ID NO: 719603 - RNA, 22 nt, Human
aacugcaaaaaugguagucuua

SEQ ID NO: 719604 - RNA, 22 nt, Human
ucucuguauucugauauucacu

SEQ ID NO: 719605 - RNA, 22 nt, Human
caggcaagauuagagaugagca

SEQ ID NO: 719606 - RNA, 22 nt, Human
ugauuaauaucaccaccauugg

SEQ ID NO: 719607 - RNA, 22 nt, Human
cacugcuuauaaauucuaggca

SEQ ID NO: 719608 - RNA, 22 nt, Human
caugaaauauuaguaacuguuu

SEQ ID NO: 719609 - RNA, 22 nt, Human
agaucuggcccucagcuugauu

SEQ ID NO: 719610 - RNA, 22 nt, Human
ucacaccaguuuccuuucaauu

SEQ ID NO: 719611 - RNA, 22 nt, Human
gcuuccagggcucagucacugc

SEQ ID NO: 719612 - RNA, 22 nt, Human
gcagggacagggcagggccuuu

SEQ ID NO: 719613 - RNA, 17 nt, Human
agcacuugaaaauuucu

SEQ ID NO: 719614 - RNA, 22 nt, Human
ucccugugucuuccucuugccc

SEQ ID NO: 719615 - RNA, 22 nt, Human
cugcaaaagucauugugguuuu

SEQ ID NO: 719616 - RNA, 22 nt, Human
ugugaaaaaaguucuagaagga

SEQ ID NO: 719617 - RNA, 20 nt, Human
aaaaucucccagaaacuuau

SEQ ID NO: 719618 - RNA, 22 nt, Human
uucugggcuaccuucccggcag

SEQ ID NO: 719619 - RNA, 22 nt, Human
ccuggcucuucgggaguuuguu

SEQ ID NO: 719620 - RNA, 22 nt, Human
caguagccacuagacacaugua

SEQ ID NO: 719621 - RNA, 22 nt, Human
uauuucagcccuacuacuuggc

SEQ ID NO: 719622 - RNA, 22 nt, Human
ggucagagggugggcugccugu

SEQ ID NO: 719623 - RNA, 18 nt, Human
gcugcugguggagggagc

SEQ ID NO: 719624 - RNA, 22 nt, Human
uccagccaggauggcccaggga

SEQ ID NO: 719625 - RNA, 22 nt, Human
gagcucuuccccaucuuacauc

SEQ ID NO: 719626 - RNA, 22 nt, Human
uggcauguguguguaggauaca

SEQ ID NO: 719627 - RNA, 22 nt, Human
uucuaaagagaaugcguuucug

SEQ ID NO: 719628 - RNA, 22 nt, Human
agucacauaguguuuuggaauc

SEQ ID NO: 719629 - RNA, 22 nt, Human
uuaggauuugaaaaggggcaga

SEQ ID NO: 719630 - RNA, 22 nt, Human
gccaccauguagcccauuagag

SEQ ID NO: 719631 - RNA, 22 nt, Human
gaggaggcuaagugggcucugg

SEQ ID NO: 719632 - RNA, 22 nt, Human
agguucagaugacuuuuaugcu

SEQ ID NO: 719633 - RNA, 22 nt, Human
gacugaacaguaagaggcuuua

SEQ ID NO: 719634 - RNA, 22 nt, Human
uuugcagcaaggagagagcauu

SEQ ID NO: 719635 - RNA, 22 nt, Human
ugaaaucuuauacuuugguagu

SEQ ID NO: 719636 - RNA, 22 nt, Human
ucugggaauuuauuggcacuuu

SEQ ID NO: 719637 - RNA, 22 nt, Human
guggccaaacaccaguuuagga

SEQ ID NO: 719638 - RNA, 20 nt, Human
ucauuacagugcuaagaugu

SEQ ID NO: 719639 - RNA, 22 nt, Human
uugguacauguuaaggaagagu

SEQ ID NO: 719640 - RNA, 22 nt, Human
ucuucauuuuacaggcagaccu

SEQ ID NO: 719641 - RNA, 22 nt, Human
gcagcugcuggagggaggcagg

SEQ ID NO: 719642 - RNA, 22 nt, Human
aaacucaugccauuaauccuuu

SEQ ID NO: 719643 - RNA, 22 nt, Human
cagugccugggacccggcugug

SEQ ID NO: 719644 - RNA, 22 nt, Human
aggagcugauagucuauggaga

SEQ ID NO: 719645 - RNA, 22 nt, Human
guccuuggagguguggaaucug

SEQ ID NO: 719646 - RNA, 22 nt, Human
ugcugugcaaaggugaugugag

SEQ ID NO: 719647 - RNA, 20 nt, Human
cugcacugaacaugucugag

SEQ ID NO: 719648 - RNA, 22 nt, Human
ugagggguaaguaaaggaauug

SEQ ID NO: 719649 - RNA, 22 nt, Human
gaggucaaggucaagagacaga

SEQ ID NO: 719650 - RNA, 22 nt, Human
gcuuucugccugggcuccauuu

SEQ ID NO: 719651 - RNA, 22 nt, Human
ucccaggcuaggccucugcguu

SEQ ID NO: 719652 - RNA, 22 nt, Human
cuagagaacaacauucauaugg

SEQ ID NO: 719653 - RNA, 22 nt, Human
uggcaguggcacugcccccaua

SEQ ID NO: 719654 - RNA, 22 nt, Human
agucugggaggcuuauaaacag

SEQ ID NO: 719655 - RNA, 22 nt, Human
aaguuuagauauagguauucug

SEQ ID NO: 719656 - RNA, 22 nt, Human
gccugaggaaugcuccugacuu

SEQ ID NO: 719657 - RNA, 23 nt, Human
ugcaaauaacaaggaguuuaagg

SEQ ID NO: 719658 - RNA, 22 nt, Human
ucacaucugaaaaaauauugag

SEQ ID NO: 719659 - RNA, 22 nt, Human
uuguugaauggauaaauaaauu

SEQ ID NO: 719660 - RNA, 22 nt, Human
ucuggcagugagcaacuugaca

SEQ ID NO: 719661 - RNA, 22 nt, Human
ucacgagaggcacagaauagag

SEQ ID NO: 719662 - RNA, 22 nt, Human
acagugcaaacccucgggaaag

SEQ ID NO: 719663 - RNA, 22 nt, Human
agcagcagggucauugcucuuu

SEQ ID NO: 719664 - RNA, 23 nt, Human
ccagcuccgugagccucgggcuc

SEQ ID NO: 719665 - RNA, 22 nt, Human
uggaaacacucaagcuuauauu

SEQ ID NO: 719666 - RNA, 22 nt, Human
ugagcacuuuaaaauauuccca

SEQ ID NO: 719667 - RNA, 22 nt, Human
cuucaaauucgaggaguagaug

SEQ ID NO: 719668 - RNA, 22 nt, Human
augcugaggacaaagagaucaa

SEQ ID NO: 719669 - RNA, 22 nt, Human
cagggagaggccucuguugccc

SEQ ID NO: 719670 - RNA, 22 nt, Human
cugggccucucagcucccgcgg

SEQ ID NO: 719671 - RNA, 22 nt, Human
gcucagugaaacaucaaauagu

SEQ ID NO: 719672 - RNA, 22 nt, Human
aaggcccuggaugguuuugaga

SEQ ID NO: 719673 - RNA, 22 nt, Human
aguagaaauguaagaaggauua

SEQ ID NO: 719674 - RNA, 22 nt, Human
ugauggaaauauguaaucuggu

SEQ ID NO: 719675 - RNA, 22 nt, Human
ucagaggaaagggaacauaguc

SEQ ID NO: 719676 - RNA, 22 nt, Human
ugcauuaaaaccaucgaccauc

SEQ ID NO: 719677 - RNA, 22 nt, Human
uagaagaaagugaagcugggga

SEQ ID NO: 719678 - RNA, 22 nt, Human
guggcaggagugggccuugaag

SEQ ID NO: 719679 - RNA, 22 nt, Human
gugcuuccucagagguucccau

SEQ ID NO: 719680 - RNA, 22 nt, Human
uuccugagaacauggcagcuua

SEQ ID NO: 719681 - RNA, 22 nt, Human
uuucuagaucaaacuuuuauau

SEQ ID NO: 719682 - RNA, 21 nt, Human
auuuagaaggaaauuuugcaa

SEQ ID NO: 719683 - RNA, 22 nt, Human
cccuggcauaaaacuucuccag

SEQ ID NO: 719684 - RNA, 22 nt, Human
gccccuguuguggcuuugucua

SEQ ID NO: 719685 - RNA, 22 nt, Human
agcagguuuaaacucuaaugca

SEQ ID NO: 719686 - RNA, 22 nt, Human
uggaacaaucccgguuuagcuc

SEQ ID NO: 719687 - RNA, 22 nt, Human
gugaacaggagaaagugaugga

SEQ ID NO: 719688 - RNA, 22 nt, Human
ggagggguggucgcgaagagca

SEQ ID NO: 719689 - RNA, 22 nt, Human
ucagaucaggaugcagcaacau

SEQ ID NO: 719690 - RNA, 22 nt, Human
uagugauuaaaggcagaauguu

SEQ ID NO: 719691 - RNA, 22 nt, Human
gaaugcagugacggaggcuuac

SEQ ID NO: 719692 - RNA, 22 nt, Human
gcagugugucuggaguacaugg

SEQ ID NO: 719693 - RNA, 22 nt, Human
ugggagcugggguuggacgucu

SEQ ID NO: 719694 - RNA, 22 nt, Human
agcacagaugugaguggaggcu

SEQ ID NO: 719695 - RNA, 20 nt, Human
uaggacaggcagccgagggg

SEQ ID NO: 719696 - RNA, 22 nt, Human
uggcaguguauagguggcuccu

SEQ ID NO: 719697 - RNA, 22 nt, Human
ucccugucuaauaugccaugaa

SEQ ID NO: 719698 - RNA, 22 nt, Human
gcccaggaaguugaggcugccg

SEQ ID NO: 719699 - RNA, 22 nt, Human
guacauauuaaaggucuauaaa

SEQ ID NO: 719700 - RNA, 23 nt, Human
gcccugacugcggccucccacuc

SEQ ID NO: 719701 - RNA, 22 nt, Human
gacaugaaccuaccauaaugau

SEQ ID NO: 719702 - RNA, 22 nt, Human
gcugccugucugcugacccagg

SEQ ID NO: 719703 - RNA, 23 nt, Human
ucauuucacagugagcuuccuag

SEQ ID NO: 719704 - RNA, 22 nt, Human
guuuucugccugaaggugacca

SEQ ID NO: 719705 - RNA, 22 nt, Human
uuaauccaauaacaagguucaa

SEQ ID NO: 719706 - RNA, 22 nt, Human
caaugcuaggcagauccugcgu

SEQ ID NO: 719707 - RNA, 22 nt, Human
aggcugaggggcgagggacccu

SEQ ID NO: 719708 - RNA, 21 nt, Human
cuguccuggucuagaggcaca

SEQ ID NO: 719709 - RNA, 22 nt, Human
aaauacuguagauaauagaguu

SEQ ID NO: 719710 - RNA, 23 nt, Human
acucagugaagcaaacagauagu

SEQ ID NO: 719711 - RNA, 17 nt, Human
gcugccugcaacugacu

SEQ ID NO: 719712 - RNA, 22 nt, Human
cucacagcauggaauuuucugg

SEQ ID NO: 719713 - RNA, 21 nt, Human
aguucauacugaguaacaaaa

SEQ ID NO: 719714 - RNA, 22 nt, Human
uuucuauaacuggacuggauug

SEQ ID NO: 719715 - RNA, 22 nt, Human
ugccugggcucaccgccucuuu

SEQ ID NO: 719716 - RNA, 22 nt, Human
aagauacagugaaagggcauug

SEQ ID NO: 719717 - RNA, 22 nt, Human
cagugguggaaugaggaauugu

SEQ ID NO: 719718 - RNA, 22 nt, Human
ugcuucuguuacauaccagaac

SEQ ID NO: 719719 - RNA, 22 nt, Human
aaggcugugguucuauacagaa

SEQ ID NO: 719720 - RNA, 22 nt, Human
uuggaaauacagcaguuacuuu

SEQ ID NO: 719721 - RNA, 22 nt, Human
uggccucugggaaagcagauuc

SEQ ID NO: 719722 - RNA, 20 nt, Human
ugcaggugggcccuucuggg

SEQ ID NO: 719723 - RNA, 17 nt, Human
agguggcugcugcgccu

SEQ ID NO: 719724 - RNA, 22 nt, Human
gucuggaagugucuuguuaagu

SEQ ID NO: 719725 - RNA, 22 nt, Human
uggcuuuauccaucaucgccaa

SEQ ID NO: 719726 - RNA, 22 nt, Human
caugucaauaaauauaacugca

SEQ ID NO: 719727 - RNA, 22 nt, Human
gccuggagaggaagccggugga

SEQ ID NO: 719728 - RNA, 22 nt, Human
gagcuuggcagugucacuaggg

SEQ ID NO: 719729 - RNA, 22 nt, Human
uugaauaaaugagcagugaauu

SEQ ID NO: 719730 - RNA, 22 nt, Human
ugauauggcuaaagaaaguuuc

SEQ ID NO: 719731 - RNA, 22 nt, Human
agcaggcagcugggggaguuga

SEQ ID NO: 719732 - RNA, 19 nt, Human
ggcggguggacuggagccc

SEQ ID NO: 719733 - RNA, 22 nt, Human
ugggaccugcuccuggaaugag

SEQ ID NO: 719734 - RNA, 22 nt, Human
ggcaggcuugauauggggggac

SEQ ID NO: 719735 - RNA, 22 nt, Human
uugcuuccuuuacagaugggca

SEQ ID NO: 719736 - RNA, 22 nt, Human
agauccguggauuauaauuuag

SEQ ID NO: 719737 - RNA, 22 nt, Human
ugucagcacaucuguaaucaca

SEQ ID NO: 719738 - RNA, 22 nt, Human
ccuggagguggagguugcagug

SEQ ID NO: 719739 - RNA, 22 nt, Human
ccuuggcuaggcagcggcuguc

SEQ ID NO: 719740 - RNA, 22 nt, Human
ccugggucuauagacuucaaga

SEQ ID NO: 719741 - RNA, 22 nt, Human
gugcaaaaguaauugcaguacu

SEQ ID NO: 719742 - RNA, 22 nt, Human
ucuaaacacgucucuuugaaua

SEQ ID NO: 719743 - RNA, 23 nt, Human
ugggccuggaaagccuuagagag

SEQ ID NO: 719744 - RNA, 22 nt, Human
aagugaguggccuggagaggug

SEQ ID NO: 719745 - RNA, 22 nt, Human
aaggacugacaaaugucuuccu

SEQ ID NO: 719746 - RNA, 22 nt, Human
agcugcccagguucauugggcc

SEQ ID NO: 719747 - RNA, 22 nt, Human
gaguauauaauuaauuggucug

SEQ ID NO: 719748 - RNA, 22 nt, Human
uuuugcuuuuguaacacagugu

SEQ ID NO: 719749 - RNA, 22 nt, Human
aggcuguggcauuaaacguuug

SEQ ID NO: 719750 - RNA, 17 nt, Human
gaggagcuccaguaggu

SEQ ID NO: 719751 - RNA, 22 nt, Human
cuuggcugucauaagguccugg

SEQ ID NO: 719752 - RNA, 22 nt, Human
aauacuugucagaugaauaaga

SEQ ID NO: 719753 - RNA, 22 nt, Human
gcaacacagaucuucuuuguug

SEQ ID NO: 719754 - RNA, 22 nt, Human
auauucaucguguagaaauacu

SEQ ID NO: 719755 - RNA, 22 nt, Human
uguugugacccagaccaagaag

SEQ ID NO: 719756 - RNA, 22 nt, Human
gcaugcaugauguuggcagugg

SEQ ID NO: 719757 - RNA, 22 nt, Human
cugggcaaauugugccagcuau

SEQ ID NO: 719758 - RNA, 22 nt, Human
caggagugaguuggggucuaca

SEQ ID NO: 719759 - RNA, 22 nt, Human
uggguccuucaaagcugggucu

SEQ ID NO: 719760 - RNA, 22 nt, Human
acugagggguuggagagugagg

SEQ ID NO: 719761 - RNA, 22 nt, Human
gcucugagcacugugcggcugg

SEQ ID NO: 719762 - RNA, 22 nt, Human
agcccugcacaguucgggagga

SEQ ID NO: 719763 - RNA, 22 nt, Human
ggaugagguagaugaacaaggg

SEQ ID NO: 719764 - RNA, 22 nt, Human
uagagagcuguuugaaagcagg

SEQ ID NO: 719765 - RNA, 22 nt, Human
ggcuccuguccccucagcugcu

SEQ ID NO: 719766 - RNA, 17 nt, Human
uguuccauuugaccacc

SEQ ID NO: 719767 - RNA, 22 nt, Human
ucuuccaguguagacaucugcc

SEQ ID NO: 719768 - RNA, 22 nt, Human
gaggcuccauggaggaguaugg

SEQ ID NO: 719769 - RNA, 22 nt, Human
aagugccugaccuagccuggag

SEQ ID NO: 719770 - RNA, 22 nt, Human
uauuguccaauaggauguuccu

SEQ ID NO: 719771 - RNA, 21 nt, Human
aaggucuguaaagugacagga

SEQ ID NO: 719772 - RNA, 16 nt, Human
aaggagggaagagaau

SEQ ID NO: 719773 - RNA, 22 nt, Human
cagcccacgucagggccacuca

SEQ ID NO: 719774 - RNA, 22 nt, Human
uucccucugcgcauugaauuuc

SEQ ID NO: 719775 - RNA, 22 nt, Human
uugcugggucagaagccaggag

SEQ ID NO: 719776 - RNA, 22 nt, Human
aacaauuacuaccaaggccugu

SEQ ID NO: 719777 - RNA, 22 nt, Human
uaagugaaauaagucagauaca

SEQ ID NO: 719778 - RNA, 22 nt, Human
auccgcuuaucucagcuggcag

SEQ ID NO: 719779 - RNA, 22 nt, Human
accuggaggcagagguugcagu

SEQ ID NO: 719780 - RNA, 22 nt, Human
ucccuggggcaguggcucggag

SEQ ID NO: 719781 - RNA, 22 nt, Human
ucucagcuugaguggaugagcu

SEQ ID NO: 719782 - RNA, 22 nt, Human
ugagaaagccuuuagucccagg

SEQ ID NO: 719783 - RNA, 22 nt, Human
gcuucuaauuuuuuacagaaua

SEQ ID NO: 719784 - RNA, 22 nt, Human
uaauuguaaaguaguaguacag

SEQ ID NO: 719785 - RNA, 22 nt, Human
gagguauuuuugcaugccugau

SEQ ID NO: 719786 - RNA, 22 nt, Human
uuuagugugacaguccccagua

SEQ ID NO: 719787 - RNA, 18 nt, Human
ugucauugccagggaagc

SEQ ID NO: 719788 - RNA, 22 nt, Human
uaaggagagaauuuagagguuu

SEQ ID NO: 719789 - RNA, 22 nt, Human
uauauuaaagugcuuugcagug

SEQ ID NO: 719790 - RNA, 22 nt, Human
uauuuaauuugcucauugugau

SEQ ID NO: 719791 - RNA, 22 nt, Human
aagcaucucaccugcccccacg

SEQ ID NO: 719792 - RNA, 22 nt, Human
cuuacauuaaguaagagauuga

SEQ ID NO: 719793 - RNA, 22 nt, Human
acuccagggcugaacgaggccc

SEQ ID NO: 719794 - RNA, 22 nt, Human
aggcugaguuucucauucucgc

SEQ ID NO: 719795 - RNA, 22 nt, Human
gaaaaggccacuccuaggagcu

SEQ ID NO: 719796 - RNA, 22 nt, Human
aagaggcgccggguacguggcg

SEQ ID NO: 719797 - RNA, 22 nt, Human
ugaggccucauuuagggagagg

SEQ ID NO: 719798 - RNA, 22 nt, Human
accacaucgggcggacacuggg

SEQ ID NO: 719799 - RNA, 22 nt, Human
gaucgauucagugugccuaccc

SEQ ID NO: 719800 - RNA, 22 nt, Human
uuaucuuagaggugauuguauu

SEQ ID NO: 719801 - RNA, 22 nt, Human
acacauauauacauauuugugc

SEQ ID NO: 719802 - RNA, 22 nt, Human
ucaggaguccugccugcagccu

SEQ ID NO: 719803 - RNA, 22 nt, Human
cugcugugccucuuuucacgug

SEQ ID NO: 719804 - RNA, 22 nt, Human
cagcaucucccaggcauuugcc

SEQ ID NO: 719805 - RNA, 21 nt, Human
gacacaaaggguaguaauggu

SEQ ID NO: 719806 - RNA, 22 nt, Human
gcagggcagccacaggcccccu

SEQ ID NO: 719807 - RNA, 22 nt, Human
ggcagcaugugugguccgcugg

SEQ ID NO: 719808 - RNA, 22 nt, Human
uggcauccuuuaucugcaggcu

SEQ ID NO: 719809 - RNA, 22 nt, Human
gccuggaaugcaaugugacgaa

SEQ ID NO: 719810 - RNA, 22 nt, Human
gcugggccccaucccucgagca

SEQ ID NO: 719811 - RNA, 22 nt, Human
aagcugccuugcugaggagaaa

SEQ ID NO: 719812 - RNA, 22 nt, Human
acauucaagaugcauucacuua

SEQ ID NO: 719813 - RNA, 22 nt, Human
ggccaggcuggucucagacuuc

SEQ ID NO: 719814 - RNA, 22 nt, Human
uuuaccacagaaaaaaguaacu

SEQ ID NO: 719815 - RNA, 22 nt, Human
cugaggccagcugcagagcucu

SEQ ID NO: 719816 - RNA, 22 nt, Human
agucacauagcucugguuucuu

SEQ ID NO: 719817 - RNA, 22 nt, Human
gcugggaugcgucuucccaggc

SEQ ID NO: 719818 - RNA, 21 nt, Human
acuaugucauuuaagucacug

SEQ ID NO: 719819 - RNA, 22 nt, Human
caaaugcaggucagcagguguc

SEQ ID NO: 719820 - RNA, 22 nt, Human
uuuuuuaguuaggucagaaugu

SEQ ID NO: 719821 - RNA, 22 nt, Human
uaacaauaguguuugcuaguca

SEQ ID NO: 719822 - RNA, 22 nt, Human
agcuuagaauguguuaggaaag

SEQ ID NO: 719823 - RNA, 22 nt, Human
cugaggcuaaccucgagagaca

SEQ ID NO: 719824 - RNA, 17 nt, Human
cccucuggggagggagg

SEQ ID NO: 719825 - RNA, 22 nt, Human
uuaaagcugcugaauccuauuu

SEQ ID NO: 719826 - RNA, 22 nt, Human
uucagagagaccaaguggcgug

SEQ ID NO: 719827 - RNA, 22 nt, Human
uggcuucuuucuuuccaugugu

SEQ ID NO: 719828 - RNA, 22 nt, Human
uaccuggauccugguagacauc

SEQ ID NO: 719829 - RNA, 22 nt, Human
ucaaaugcuguauuguaguaau

SEQ ID NO: 719830 - RNA, 22 nt, Human
uacuuuucaagcagcugguuau

SEQ ID NO: 719831 - RNA, 19 nt, Human
gugagcuucuuguaagagg

SEQ ID NO: 719832 - RNA, 22 nt, Human
gaauuuuagaauaugugggcuu

SEQ ID NO: 719833 - RNA, 22 nt, Human
aaccaggaauugcagggcugca

SEQ ID NO: 719834 - RNA, 22 nt, Human
aagaagcuguagggauuaacuc

SEQ ID NO: 719835 - RNA, 22 nt, Human
gccuguggccgacugagagccu

SEQ ID NO: 719836 - RNA, 22 nt, Human
aaugucuaugauccuuuaaguu

SEQ ID NO: 719837 - RNA, 22 nt, Human
caggugggagcgaggagcuacu

SEQ ID NO: 719838 - RNA, 22 nt, Human
cugugcuuagccaucacauuca

SEQ ID NO: 719839 - RNA, 23 nt, Human
ugggaguguugggaucucugcuc

SEQ ID NO: 719840 - RNA, 22 nt, Human
aaugcaaagcucuuuaauccuu

SEQ ID NO: 719841 - RNA, 22 nt, Human
ucucuuaacugguucagcaauu

SEQ ID NO: 719842 - RNA, 22 nt, Human
cagcaagggauaaacaaggacg

SEQ ID NO: 719843 - RNA, 22 nt, Human
gagccaggggucagcuccgagg

SEQ ID NO: 719844 - RNA, 22 nt, Human
ugaaaaaccucaguccgcuuua

SEQ ID NO: 719845 - RNA, 22 nt, Human
ugaguccaccuuaguauauggg

SEQ ID NO: 719846 - RNA, 22 nt, Human
aaaguucacugaccagcacugg

SEQ ID NO: 719847 - RNA, 22 nt, Human
ucagcccagggacagaggcccc

SEQ ID NO: 719848 - RNA, 22 nt, Human
uagggagaugcaagggacggag

SEQ ID NO: 719849 - RNA, 22 nt, Human
gugggcagaacauuuguaggcu

SEQ ID NO: 719850 - RNA, 22 nt, Human
gcugagguggcugccuuaguaa

SEQ ID NO: 719851 - RNA, 22 nt, Human
uuauauguuucuguuuggaggc

SEQ ID NO: 719852 - RNA, 22 nt, Human
cuauuaggcuuccauuucaugc

SEQ ID NO: 719853 - RNA, 22 nt, Human
cucugaaagacaagcucucauu

SEQ ID NO: 719854 - RNA, 21 nt, Human
agacagaacaacugcucucca

SEQ ID NO: 719855 - RNA, 22 nt, Human
uuagaacaaagccaccagguga

SEQ ID NO: 719856 - RNA, 22 nt, Human
uacauauuugucuuuguacugu

SEQ ID NO: 719857 - RNA, 22 nt, Human
gggccacauugaagggugggua

SEQ ID NO: 719858 - RNA, 22 nt, Human
caguuuuagggcaaugugaaga

SEQ ID NO: 719859 - RNA, 22 nt, Human
ucagggcuccggaaguggccuc

SEQ ID NO: 719860 - RNA, 22 nt, Human
ucuggggugugaccugagcaug

SEQ ID NO: 719861 - RNA, 22 nt, Human
ggacagagggcaggagcccaga

SEQ ID NO: 719862 - RNA, 22 nt, Human
ugagaaaagguugagaugauaa

SEQ ID NO: 719863 - RNA, 22 nt, Human
ugagacaggagaggccccuccu

SEQ ID NO: 719864 - RNA, 22 nt, Human
auucaguuuuuauuggaccagc

SEQ ID NO: 719865 - RNA, 22 nt, Human
caauugaacagaugaguuaaau

SEQ ID NO: 719866 - RNA, 22 nt, Human
ucagaggagaaguugggaaaau

SEQ ID NO: 719867 - RNA, 22 nt, Human
gcuggccugagggccgaggcuc

SEQ ID NO: 719868 - RNA, 22 nt, Human
uguuucauguggacauaguugu

SEQ ID NO: 719869 - RNA, 18 nt, Human
cgauguguaugugauuug

SEQ ID NO: 719870 - RNA, 22 nt, Human
ugggccugggagggcagacgcu

SEQ ID NO: 719871 - RNA, 18 nt, Human
aagcaggguccauugugc

SEQ ID NO: 719872 - RNA, 22 nt, Human
auuuauuggaugcuuacuuggg

SEQ ID NO: 719873 - RNA, 22 nt, Human
uguuuaagauccgucagucacu

SEQ ID NO: 719874 - RNA, 22 nt, Human
auucaguugucuacuacugccu

SEQ ID NO: 719875 - RNA, 22 nt, Human
ccauccuggccuugcuguccac

SEQ ID NO: 719876 - RNA, 22 nt, Human
agcucaggucauuccagggaug

SEQ ID NO: 719877 - RNA, 22 nt, Human
gcaggagugacauggaugugga

SEQ ID NO: 719878 - RNA, 22 nt, Human
acaugcuagguacagaucuaaa

SEQ ID NO: 719879 - RNA, 22 nt, Human
ugucuuuggggcuguaccuguu

SEQ ID NO: 719880 - RNA, 22 nt, Human
uaacauuccauggaucugcaga

SEQ ID NO: 719881 - RNA, 22 nt, Human
ggagagauaggaguccuggacu

SEQ ID NO: 719882 - RNA, 21 nt, Human
uucugcugugccaugccucug

SEQ ID NO: 719883 - RNA, 22 nt, Human
ugcaaggauauuuagucuagug

SEQ ID NO: 719884 - RNA, 22 nt, Human
aacuucauuuauaaugucauua

SEQ ID NO: 719885 - RNA, 22 nt, Human
ugaaagcauaugcuaaagacca

SEQ ID NO: 719886 - RNA, 22 nt, Human
cugugccuuggcgcugugccac

SEQ ID NO: 719887 - RNA, 22 nt, Human
ugggcagaggacagggaagauc

SEQ ID NO: 719888 - RNA, 22 nt, Human
agagucagucacuggcacuuug

SEQ ID NO: 719889 - RNA, 23 nt, Human
ucucugaguuguacuuucccuug

SEQ ID NO: 719890 - RNA, 22 nt, Human
ugaggauggggagauggugucu

SEQ ID NO: 719891 - RNA, 22 nt, Human
ugguccuggggaucugcaguga

SEQ ID NO: 719892 - RNA, 22 nt, Human
ccagccuucaccugcucugguc

SEQ ID NO: 719893 - RNA, 22 nt, Human
aaugaucaccugguaaagagag

SEQ ID NO: 719894 - RNA, 22 nt, Human
cugggccagauccagccucaca

SEQ ID NO: 719895 - RNA, 22 nt, Human
ugcaggaacagaacucacuccc

SEQ ID NO: 719896 - RNA, 22 nt, Human
caucaaaguugauauccaauua

SEQ ID NO: 719897 - RNA, 18 nt, Human
agagaugguguagaguuu

SEQ ID NO: 719898 - RNA, 22 nt, Human
ugugcugcucucagugacagcc

SEQ ID NO: 719899 - RNA, 22 nt, Human
gcaguccugggauucuguccuu

SEQ ID NO: 719900 - RNA, 22 nt, Human
aggucauuaaaguuaaaugagg

SEQ ID NO: 719901 - RNA, 22 nt, Human
acguuauaucugaaaaaaguga

SEQ ID NO: 719902 - RNA, 22 nt, Human
acugggaagucagagagaggcu

SEQ ID NO: 719903 - RNA, 22 nt, Human
agcauggggcuccgcaaugaac

SEQ ID NO: 719904 - RNA, 22 nt, Human
aggccagagaggggaccagccu

SEQ ID NO: 719905 - RNA, 22 nt, Human
aucuguuaacaaagaagacagc

SEQ ID NO: 719906 - RNA, 22 nt, Human
aaaugcauaucaaagacuugaa

SEQ ID NO: 719907 - RNA, 22 nt, Human
uauggcuuccaggcuggccagg

SEQ ID NO: 719908 - RNA, 22 nt, Human
uuucucugccaguuauuuuccu

SEQ ID NO: 719909 - RNA, 17 nt, Human
uucugcuguuuccccuu

SEQ ID NO: 719910 - RNA, 22 nt, Human
uuacauacaaaggcuggguuau

SEQ ID NO: 719911 - RNA, 22 nt, Human
cuggagccacugggucuuguau

SEQ ID NO: 719912 - RNA, 21 nt, Human
ugccagcauuaaacagucauu

SEQ ID NO: 719913 - RNA, 22 nt, Human
aacacuuuuuccuccugucugg

SEQ ID NO: 719914 - RNA, 23 nt, Human
uggccaggcauaaaggugggugg

SEQ ID NO: 719915 - RNA, 22 nt, Human
aagaguuaagcaacagauacca

SEQ ID NO: 719916 - RNA, 21 nt, Human
agacccugcauauguucagua

SEQ ID NO: 719917 - RNA, 20 nt, Human
ugcugagguugacaugccca

SEQ ID NO: 719918 - RNA, 22 nt, Human
gaucccugcccucagccuggac

SEQ ID NO: 719919 - RNA, 22 nt, Human
acugcuucuccaaugaauuaga

SEQ ID NO: 719920 - RNA, 22 nt, Human
gggcaagcucuucagaagcucu

SEQ ID NO: 719921 - RNA, 22 nt, Human
uccagaaaugcaagccaggugu

SEQ ID NO: 719922 - RNA, 22 nt, Human
gggcugacaaucucuuuacuua

SEQ ID NO: 719923 - RNA, 22 nt, Human
aucauuuacaaacucagcauug

SEQ ID NO: 719924 - RNA, 17 nt, Human
acauacacuggugaaca

SEQ ID NO: 719925 - RNA, 22 nt, Human
ccagugccugugggcauggugc

SEQ ID NO: 719926 - RNA, 22 nt, Human
cugccuggaugaauggcgccuu

SEQ ID NO: 719927 - RNA, 22 nt, Human
caaggccuaaucauacugcuaa

SEQ ID NO: 719928 - RNA, 22 nt, Human
acacagggcggaaagcaugaga

SEQ ID NO: 719929 - RNA, 22 nt, Human
uaacuucuuugguuuaaagaga

SEQ ID NO: 719930 - RNA, 22 nt, Human
uuaauuaaauucaugagcauug

SEQ ID NO: 719931 - RNA, 22 nt, Human
aauggcuuuaaguagucucaca

SEQ ID NO: 719932 - RNA, 22 nt, Human
gcuccaggaggaugaccuuccu

SEQ ID NO: 719933 - RNA, 22 nt, Human
gcacagccggaccgaggaaaag

SEQ ID NO: 719934 - RNA, 22 nt, Human
ucuuugaacuuggcugaucucu

SEQ ID NO: 719935 - RNA, 22 nt, Human
cauguuauuuauccauuaaaca

SEQ ID NO: 719936 - RNA, 22 nt, Human
uggguagacauuccugaaacuc

SEQ ID NO: 719937 - RNA, 22 nt, Human
caucauuuguuugcaugcagga

SEQ ID NO: 719938 - RNA, 22 nt, Human
uaacaguacauccuuuucucuu

SEQ ID NO: 719939 - RNA, 22 nt, Human
ccagggggcuuggugaggccau

SEQ ID NO: 719940 - RNA, 22 nt, Human
ccaggaagcugugagauuccaa

SEQ ID NO: 719941 - RNA, 22 nt, Human
aaaggucaagcuggacucaggu

SEQ ID NO: 719942 - RNA, 22 nt, Human
auuuugaaauacuugaaggaaa

SEQ ID NO: 719943 - RNA, 22 nt, Human
ucuccaggagaaauaugaagga

SEQ ID NO: 719944 - RNA, 22 nt, Human
ugucagaacucuauugaugucc

SEQ ID NO: 719945 - RNA, 22 nt, Human
uggcuggaggaaggaacugagg

SEQ ID NO: 719946 - RNA, 22 nt, Human
uguuuacucacuguauccacaa

SEQ ID NO: 719947 - RNA, 22 nt, Human
aguugcucuaggugaggucuuu

SEQ ID NO: 719948 - RNA, 22 nt, Human
ggucaggggcugcucuacagag

SEQ ID NO: 719949 - RNA, 22 nt, Human
gugacagauuugcugcgcaugg

SEQ ID NO: 719950 - RNA, 22 nt, Human
guguguggcauguccuauuuug

SEQ ID NO: 719951 - RNA, 20 nt, Human
auacacauucauagaaaaau

SEQ ID NO: 719952 - RNA, 22 nt, Human
uggugcugauaauggcaggauu

SEQ ID NO: 719953 - RNA, 22 nt, Human
aagccacugagauuucacugca

SEQ ID NO: 719954 - RNA, 22 nt, Human
cuaauacacccuauugcuuguu

SEQ ID NO: 719955 - RNA, 22 nt, Human
agugcucugucauuggugggau

SEQ ID NO: 719956 - RNA, 22 nt, Human
gccugcuguugagggaagagcu

SEQ ID NO: 719957 - RNA, 22 nt, Human
uuauuuugguaaauguuugccu

SEQ ID NO: 719958 - RNA, 22 nt, Human
cuccagcugcuggucugagacu

SEQ ID NO: 719959 - RNA, 22 nt, Human
augcacacguacccuacaaggc

SEQ ID NO: 719960 - RNA, 22 nt, Human
aaguucaaggugauaguggcag

SEQ ID NO: 719961 - RNA, 22 nt, Human
uaaugcuuccuauauagcacuc

SEQ ID NO: 719962 - RNA, 22 nt, Human
cugaggccuggccccaccacag

SEQ ID NO: 719963 - RNA, 22 nt, Human
cuggggacucauucagagcaua

SEQ ID NO: 719964 - RNA, 22 nt, Human
gugcagcaaacuagugcgaggg

SEQ ID NO: 719965 - RNA, 22 nt, Human
gagagaaagccccugcaucccu

SEQ ID NO: 719966 - RNA, 22 nt, Human
aauguguauaagggagagcuaa

SEQ ID NO: 719967 - RNA, 17 nt, Human
gcagugaaaagagauca

SEQ ID NO: 719968 - RNA, 22 nt, Human
gaugauggguugaugugaaggg

SEQ ID NO: 719969 - RNA, 22 nt, Human
ugccugaacaugaauaguuuau

SEQ ID NO: 719970 - RNA, 22 nt, Human
auuauauugaguauaaccagag

SEQ ID NO: 719971 - RNA, 22 nt, Human
uugcauuugacaaauuauuuaa

SEQ ID NO: 719972 - RNA, 22 nt, Human
ccggcgucucuuccacuuccua

SEQ ID NO: 719973 - RNA, 22 nt, Human
acagguagucugaacacugggu

SEQ ID NO: 719974 - RNA, 20 nt, Human
gauacacagcacagagggcc

SEQ ID NO: 719975 - RNA, 22 nt, Human
gaggaacagcagccacaugucc

SEQ ID NO: 719976 - RNA, 22 nt, Human
cagcuuccacagacuuggcucg

SEQ ID NO: 719977 - RNA, 22 nt, Human
uagcuuuaagacauggugaaug

SEQ ID NO: 719978 - RNA, 22 nt, Human
cuguguagagcggcugcgagcg

SEQ ID NO: 719979 - RNA, 22 nt, Human
aaacagugacugguacauaaua

SEQ ID NO: 719980 - RNA, 22 nt, Human
cccaggcugggaacgauucuag

SEQ ID NO: 719981 - RNA, 19 nt, Human
aguggcagaucuggaagua

SEQ ID NO: 719982 - RNA, 22 nt, Human
caggaaaaaugccaggagucag

SEQ ID NO: 719983 - RNA, 22 nt, Human
uauuuuguaauuggucauagcu

SEQ ID NO: 719984 - RNA, 22 nt, Human
uuaaagcacuaaaugaugaggg

SEQ ID NO: 719985 - RNA, 22 nt, Human
uuuuucauugcagccucucucc

SEQ ID NO: 719986 - RNA, 22 nt, Human
acaguacauagaucucuacccu

SEQ ID NO: 719987 - RNA, 23 nt, Human
caacuuuuggcuacaugcuuagc

SEQ ID NO: 719988 - RNA, 23 nt, Human
uuauaaauauuuucagguguguu

SEQ ID NO: 719989 - RNA, 22 nt, Human
agcugggcagacugcagugguu

SEQ ID NO: 719990 - RNA, 22 nt, Human
gccucccugagucacccaagca

SEQ ID NO: 719991 - RNA, 22 nt, Human
ggcagugagucccggagaggcc

SEQ ID NO: 719992 - RNA, 22 nt, Human
gcaugcaauuaugguauuagau

SEQ ID NO: 719993 - RNA, 22 nt, Human
ugagaggccccagcucuuggcc

SEQ ID NO: 719994 - RNA, 22 nt, Human
cgaggaggaaacgcggagaacu

SEQ ID NO: 719995 - RNA, 21 nt, Human
ugucacagauucucagcuugc

SEQ ID NO: 719996 - RNA, 22 nt, Human
aaaucaugguggaagaaacaga

SEQ ID NO: 719997 - RNA, 22 nt, Human
uguagaaagcucuucugaaauc

SEQ ID NO: 719998 - RNA, 22 nt, Human
cuuaguuuuugcccuggaguuu

SEQ ID NO: 719999 - RNA, 19 nt, Human
ggacuguugccaggccucu

SEQ ID NO: 720000 - RNA, 22 nt, Human
acuuguuugccuaaaauuuuga

SEQ ID NO: 720001 - RNA, 22 nt, Human
aaagugcugggauuaccggcau

SEQ ID NO: 720002 - RNA, 22 nt, Human
ggugaaauuccuuguggaaagu

SEQ ID NO: 720003 - RNA, 22 nt, Human
uaaaggcagccacugagcucaa

SEQ ID NO: 720004 - RNA, 22 nt, Human
uuggcucagcaucuuggugcca

SEQ ID NO: 720005 - RNA, 22 nt, Human
cucugacagccuucauuaugca

SEQ ID NO: 720006 - RNA, 22 nt, Human
cuggcucugacuccgcauauuu

SEQ ID NO: 720007 - RNA, 21 nt, Human
cagcuucuucugugaccuggu

SEQ ID NO: 720008 - RNA, 22 nt, Human
auggccaggcaccucuggcuga

SEQ ID NO: 720009 - RNA, 19 nt, Human
agagccagacagcauagga

SEQ ID NO: 720010 - RNA, 22 nt, Human
auggcuggugauacuggaguga

SEQ ID NO: 720011 - RNA, 22 nt, Human
uccuggagcuucaguuuccuuu

SEQ ID NO: 720012 - RNA, 22 nt, Human
ccugugaggucaucugugguaa

SEQ ID NO: 720013 - RNA, 22 nt, Human
aagcaagacagaaguuacugcc

SEQ ID NO: 720014 - RNA, 22 nt, Human
ucugcacacaauuuaucuuucu

SEQ ID NO: 720015 - RNA, 22 nt, Human
gagggauggugugagaggcuca

SEQ ID NO: 720016 - RNA, 22 nt, Human
ccuguaggaacgccuucauuug

SEQ ID NO: 720017 - RNA, 22 nt, Human
agagcaucuaacacauaagccu

SEQ ID NO: 720018 - RNA, 20 nt, Human
uuugcuguggguguaagaau

SEQ ID NO: 720019 - RNA, 22 nt, Human
gcaggcaccggguugcuccccu

SEQ ID NO: 720020 - RNA, 22 nt, Human
uguuaaaugagauuggaauuug

SEQ ID NO: 720021 - RNA, 22 nt, Human
uccagacugcccugcacaugug

SEQ ID NO: 720022 - RNA, 17 nt, Human
uuugaaaggaugucagu

SEQ ID NO: 720023 - RNA, 22 nt, Human
ccaggagagcaaaggucacucu

SEQ ID NO: 720024 - RNA, 22 nt, Human
gcagagugagccgaggcugcuc

SEQ ID NO: 720025 - RNA, 20 nt, Human
acacugugcuaaggauuuuc

SEQ ID NO: 720026 - RNA, 22 nt, Human
aguuuauuguauaugguaguuu

SEQ ID NO: 720027 - RNA, 22 nt, Human
gaaaggagggcucacaaaagug

SEQ ID NO: 720028 - RNA, 21 nt, Human
agagacugucacugcaguacc

SEQ ID NO: 720029 - RNA, 22 nt, Human
ucuuuucugccacagccugagc

SEQ ID NO: 720030 - RNA, 22 nt, Human
ucugccagguggggagaggcca

SEQ ID NO: 720031 - RNA, 22 nt, Human
cagaggcuucaagucauucucc

SEQ ID NO: 720032 - RNA, 22 nt, Human
guacauuucauuuaaaugaugu

SEQ ID NO: 720033 - RNA, 22 nt, Human
agaguuugggugggacagcuug

SEQ ID NO: 720034 - RNA, 18 nt, Human
ggcaggauuucaacuuuc

SEQ ID NO: 720035 - RNA, 22 nt, Human
cauggcacugagcagguaugca

SEQ ID NO: 720036 - RNA, 22 nt, Human
ggaggcugaggccccucacagg

SEQ ID NO: 720037 - RNA, 22 nt, Human
caugagauaauuuuucuccagu

SEQ ID NO: 720038 - RNA, 22 nt, Human
uuucauaaugucacagucaaaa

SEQ ID NO: 720039 - RNA, 22 nt, Human
uggcuuccuguuucccagaaag

SEQ ID NO: 720040 - RNA, 22 nt, Human
uaaauaucaccuggaauuguua

SEQ ID NO: 720041 - RNA, 22 nt, Human
aagguuagugcaucuuuuguuu

SEQ ID NO: 720042 - RNA, 22 nt, Human
auuauuagacuuauaugguagu

SEQ ID NO: 720043 - RNA, 19 nt, Human
auuugcuugucugcucugc

SEQ ID NO: 720044 - RNA, 22 nt, Human
augcugguugcuaagcagcgau

SEQ ID NO: 720045 - RNA, 22 nt, Human
uuggagccaugcccagcucucu

SEQ ID NO: 720046 - RNA, 22 nt, Human
ggcuggcuugccaagcucaggg

SEQ ID NO: 720047 - RNA, 22 nt, Human
agaggccacuuugccugugaug

SEQ ID NO: 720048 - RNA, 22 nt, Human
auucaaaccccauagacaacuu

SEQ ID NO: 720049 - RNA, 22 nt, Human
guacauuuauuuuugcagcaua

SEQ ID NO: 720050 - RNA, 22 nt, Human
aaucacauagccaucucuuuga

SEQ ID NO: 720051 - RNA, 22 nt, Human
agcugucuuucugccuccugau

SEQ ID NO: 720052 - RNA, 22 nt, Human
cuauuuuccgcagcaggaagua

SEQ ID NO: 720053 - RNA, 22 nt, Human
acaggcaaacacagaaaguagg

SEQ ID NO: 720054 - RNA, 22 nt, Human
aaucuagaguucccagcauaaa

SEQ ID NO: 720055 - RNA, 22 nt, Human
ugccuggguucccaccccaaag

SEQ ID NO: 720056 - RNA, 18 nt, Human
uaagagcagacuguaggc

SEQ ID NO: 720057 - RNA, 22 nt, Human
ccagggcucaggcucccagugg

SEQ ID NO: 720058 - RNA, 22 nt, Human
gugcugggugcugcagacaggu

SEQ ID NO: 720059 - RNA, 23 nt, Human
accaggagccaagaucucccugg

SEQ ID NO: 720060 - RNA, 22 nt, Human
caaccucuaucggucaggaagc

SEQ ID NO: 720061 - RNA, 22 nt, Human
ugccagugaaacguggucucau

SEQ ID NO: 720062 - RNA, 22 nt, Human
cguguuucagccagggccaccu

SEQ ID NO: 720063 - RNA, 22 nt, Human
acuucucugcuaccugcaaaga

SEQ ID NO: 720064 - RNA, 22 nt, Human
ccugcagaccacacucaguccu

SEQ ID NO: 720065 - RNA, 22 nt, Human
cugauggaugcuacguaagagg

SEQ ID NO: 720066 - RNA, 19 nt, Human
cccuggaggaguguuggcu

SEQ ID NO: 720067 - RNA, 22 nt, Human
cccaggagguggagguugcggu

SEQ ID NO: 720068 - RNA, 20 nt, Human
uccuggccucccuggggcuc

SEQ ID NO: 720069 - RNA, 22 nt, Human
acagaggcugaucuucaagccc

SEQ ID NO: 720070 - RNA, 22 nt, Human
ugaagcagcuucuuucugucaa

SEQ ID NO: 720071 - RNA, 22 nt, Human
gccaggagggaaaggacaauuu

SEQ ID NO: 720072 - RNA, 22 nt, Human
uuuuguuuaaaauccuggaugg

SEQ ID NO: 720073 - RNA, 22 nt, Human
agaugcugaauuauugugcuuu

SEQ ID NO: 720074 - RNA, 22 nt, Human
agugucuuuagcaaguuuaguc

SEQ ID NO: 720075 - RNA, 22 nt, Human
cuguauuuaguuaaaaugcuaa

SEQ ID NO: 720076 - RNA, 22 nt, Human
agcauuucuuggcccauuguag

SEQ ID NO: 720077 - RNA, 22 nt, Human
cuuauuugcccauguuucuuua

SEQ ID NO: 720078 - RNA, 20 nt, Human
ugcuggggacauacagggug

SEQ ID NO: 720079 - RNA, 22 nt, Human
cagguacauucguagacccauu

SEQ ID NO: 720080 - RNA, 22 nt, Human
cugugcccaggccccuggggau

SEQ ID NO: 720081 - RNA, 22 nt, Human
ggaauacaaaucuuuguucucu

SEQ ID NO: 720082 - RNA, 19 nt, Human
ucaaagucugagucacuuu

SEQ ID NO: 720083 - RNA, 22 nt, Human
gagaugcugucaggcuaucugu

SEQ ID NO: 720084 - RNA, 22 nt, Human
ucugaggccuuggcagcuaagg

SEQ ID NO: 720085 - RNA, 22 nt, Human
uaaaucacaaauuuucucauuu

SEQ ID NO: 720086 - RNA, 22 nt, Human
agcagguguuagggauccaaug

SEQ ID NO: 720087 - RNA, 22 nt, Human
gcucuugauacaucaagaacuu

SEQ ID NO: 720088 - RNA, 22 nt, Human
cauggcuuguaauaaauuuaua

SEQ ID NO: 720089 - RNA, 22 nt, Human
uggucaggggcuucugagcugu

SEQ ID NO: 720090 - RNA, 22 nt, Human
gaggagcucugcuccauccuuc

SEQ ID NO: 720091 - RNA, 22 nt, Human
ggacagugcgagacacaguaac

SEQ ID NO: 720092 - RNA, 22 nt, Human
uacuaguuucuaccuuacagaa

SEQ ID NO: 720093 - RNA, 22 nt, Human
auucauaacggcaaaugucacc

SEQ ID NO: 720094 - RNA, 22 nt, Human
guguaaggccccagguucuuua

SEQ ID NO: 720095 - RNA, 22 nt, Human
cuuauuagaguuguguucuguu

SEQ ID NO: 720096 - RNA, 22 nt, Human
ucugcuuuuucauugacugaaa

SEQ ID NO: 720097 - RNA, 22 nt, Human
uugcugccugaggagcaacacu

SEQ ID NO: 720098 - RNA, 22 nt, Human
caggauguaugucuuauucuuc

SEQ ID NO: 720099 - RNA, 22 nt, Human
uacaaagguaucuuuccuagau

SEQ ID NO: 720100 - RNA, 23 nt, Human
caggagauggcugcugugucagc

SEQ ID NO: 720101 - RNA, 22 nt, Human
uccaggggcugucuuggaaucu

SEQ ID NO: 720102 - RNA, 22 nt, Human
aacacuucaagcagaagguugg

SEQ ID NO: 720103 - RNA, 22 nt, Human
uaguucuacucaaagugugauc

SEQ ID NO: 720104 - RNA, 22 nt, Human
uuugugaauucuuggaagauug

SEQ ID NO: 720105 - RNA, 22 nt, Human
gcugcucucauagauggcuuca

SEQ ID NO: 720106 - RNA, 22 nt, Human
guauauuuugaucacccucuau

SEQ ID NO: 720107 - RNA, 22 nt, Human
gcugucugucucugucccacca

SEQ ID NO: 720108 - RNA, 22 nt, Human
gcucgcgccgcaccgguccacc

SEQ ID NO: 720109 - RNA, 22 nt, Human
aucagacucugcauugcagucu

SEQ ID NO: 720110 - RNA, 22 nt, Human
gagucauugcacacuagcucag

SEQ ID NO: 720111 - RNA, 22 nt, Human
cccaggcuggagugcaauggca

SEQ ID NO: 720112 - RNA, 22 nt, Human
gcacagcccugagcgcaugucu

SEQ ID NO: 720113 - RNA, 22 nt, Human
uagcuguuaaguuguuuggaaa

SEQ ID NO: 720114 - RNA, 22 nt, Human
ucauaaaguuacccaaauuuua

SEQ ID NO: 720115 - RNA, 22 nt, Human
guucuaauauuuuaaaagccaa

SEQ ID NO: 720116 - RNA, 22 nt, Human
ucagcucuguuuugaguggaac

SEQ ID NO: 720117 - RNA, 22 nt, Human
agaaggcucauuugacugcauu

SEQ ID NO: 720118 - RNA, 22 nt, Human
aucuggcuauugacauguuaua

SEQ ID NO: 720119 - RNA, 22 nt, Human
ucagugcucugagguccagggu

SEQ ID NO: 720120 - RNA, 22 nt, Human
cagaacaugauauaaacagaag

SEQ ID NO: 720121 - RNA, 22 nt, Human
cuggaaguauaggggagaugau

SEQ ID NO: 720122 - RNA, 22 nt, Human
ucucagcugccugcccugcucc

SEQ ID NO: 720123 - RNA, 22 nt, Human
cagauggcaacagcucugugac

SEQ ID NO: 720124 - RNA, 22 nt, Human
acuacaucuugcauaucuauaa

SEQ ID NO: 720125 - RNA, 22 nt, Human
aaguauugugggaaagcagaaa

SEQ ID NO: 720126 - RNA, 19 nt, Human
agcaggccacagggccagc

SEQ ID NO: 720127 - RNA, 22 nt, Human
cucugcagagccuccagcccag

SEQ ID NO: 720128 - RNA, 22 nt, Human
gcacagcucuccccaagacgaa

SEQ ID NO: 720129 - RNA, 22 nt, Human
gaggccagaugucaugucuuau

SEQ ID NO: 720130 - RNA, 22 nt, Human
aggaccagccuccaggucucuu

SEQ ID NO: 720131 - RNA, 22 nt, Human
aauaagaugugcuugaguuugg

SEQ ID NO: 720132 - RNA, 22 nt, Human
gcaggcuccaaggccugggaga

SEQ ID NO: 720133 - RNA, 22 nt, Human
caggccagguggcaggcaaaac

SEQ ID NO: 720134 - RNA, 22 nt, Human
agcuaucaguaggaccauguuc

SEQ ID NO: 720135 - RNA, 22 nt, Human
acuaguauugccuacuguacau

SEQ ID NO: 720136 - RNA, 22 nt, Human
aggggagcaacauagucacucu

SEQ ID NO: 720137 - RNA, 22 nt, Human
cuggaaaucacuacuagucaau

SEQ ID NO: 720138 - RNA, 22 nt, Human
cagccuguggcagaggucuaau

SEQ ID NO: 720139 - RNA, 22 nt, Human
uacgaauccuguggaugaaugu

SEQ ID NO: 720140 - RNA, 22 nt, Human
ccucugugggccgggccugcug

SEQ ID NO: 720141 - RNA, 22 nt, Human
agugcagagaccuggucaggca

SEQ ID NO: 720142 - RNA, 22 nt, Human
uugagucaguaauuccauuucu

SEQ ID NO: 720143 - RNA, 22 nt, Human
uggagaguggauaugggagcaa

SEQ ID NO: 720144 - RNA, 22 nt, Human
ugcauugggagagauuagggca

SEQ ID NO: 720145 - RNA, 19 nt, Human
aagguggcagcagguauua

SEQ ID NO: 720146 - RNA, 22 nt, Human
cugaguccuugggcuuagagug

SEQ ID NO: 720147 - RNA, 22 nt, Human
agccuauuccaggaugagcuca

SEQ ID NO: 720148 - RNA, 22 nt, Human
uacuguggggauauugauugua

SEQ ID NO: 720149 - RNA, 21 nt, Human
uggcucugcucagagcagucc

SEQ ID NO: 720150 - RNA, 21 nt, Human
ggcaguaagauuuacuuuaag

SEQ ID NO: 720151 - RNA, 22 nt, Human
ugcagggcccucauuccugucc

SEQ ID NO: 720152 - RNA, 22 nt, Human
uuuaauuuguauuucuagaggg

SEQ ID NO: 720153 - RNA, 22 nt, Human
auccccacgauauagccaaagc

SEQ ID NO: 720154 - RNA, 22 nt, Human
uauugaucuggauauuuagaca

SEQ ID NO: 720155 - RNA, 22 nt, Human
gaaccucuaguuuguucuuuga

SEQ ID NO: 720156 - RNA, 20 nt, Human
ugccaugguaacagagugug

SEQ ID NO: 720157 - RNA, 22 nt, Human
uuuuauauggcacauugguugg

SEQ ID NO: 720158 - RNA, 22 nt, Human
ggcugagcaauuuugaugacau

SEQ ID NO: 720159 - RNA, 22 nt, Human
aaguggagcuauaggcucagau

SEQ ID NO: 720160 - RNA, 22 nt, Human
uuuuacaagcugagucguuaaa

SEQ ID NO: 720161 - RNA, 16 nt, Human
cagccugcagugguca

SEQ ID NO: 720162 - RNA, 22 nt, Human
agugggagauaacuuaacagcu

SEQ ID NO: 720163 - RNA, 22 nt, Human
ggccugcuccgggggcugagcu

SEQ ID NO: 720164 - RNA, 22 nt, Human
gauuucuacuugaacuugcuaa

SEQ ID NO: 720165 - RNA, 22 nt, Human
agcuggugaggguugaggggua

SEQ ID NO: 720166 - RNA, 22 nt, Human
agcucugggucacggcugccga

SEQ ID NO: 720167 - RNA, 22 nt, Human
guccaggccaugguggacacag

SEQ ID NO: 720168 - RNA, 22 nt, Human
gggcaggugugcagagcuguug

SEQ ID NO: 720169 - RNA, 22 nt, Human
gcugcugggggaacaguuaaaa

SEQ ID NO: 720170 - RNA, 22 nt, Human
gaacuuuaaucccuugggcuua

SEQ ID NO: 720171 - RNA, 22 nt, Human
caucaguguggcaguucacugu

SEQ ID NO: 720172 - RNA, 22 nt, Human
guagagucaggacggcaauucu

SEQ ID NO: 720173 - RNA, 21 nt, Human
ucugagcugaguccucuaggu

SEQ ID NO: 720174 - RNA, 22 nt, Human
gccucugcaacuccgccuuggu

SEQ ID NO: 720175 - RNA, 22 nt, Human
aaugcauauguaggcaagcagu

SEQ ID NO: 720176 - RNA, 22 nt, Human
gagcuacugaaauauugauuuu

SEQ ID NO: 720177 - RNA, 21 nt, Human
gaucuuuacuuuccuacuuac

SEQ ID NO: 720178 - RNA, 22 nt, Human
cccucugcucaggugcauaggc

SEQ ID NO: 720179 - RNA, 22 nt, Human
ccugggucuucagucugcuggu

SEQ ID NO: 720180 - RNA, 22 nt, Human
gcacauguugcuaguuacuugc

SEQ ID NO: 720181 - RNA, 22 nt, Human
ccaggcucaggccugcucguug

SEQ ID NO: 720182 - RNA, 22 nt, Human
acacugagcugagcauucuugu

SEQ ID NO: 720183 - RNA, 22 nt, Human
aggccagcgcugcuagcucccg

SEQ ID NO: 720184 - RNA, 22 nt, Human
cccugagccacacagagcaggu

SEQ ID NO: 720185 - RNA, 22 nt, Human
aagcacugugccucauaucuga

SEQ ID NO: 720186 - RNA, 22 nt, Human
uucuggaauauuugacacaauu

SEQ ID NO: 720187 - RNA, 22 nt, Human
cagguggucaggcagaugggcu

SEQ ID NO: 720188 - RNA, 22 nt, Human
agcagcaaguguaacugaauau

SEQ ID NO: 720189 - RNA, 22 nt, Human
gagcuaagcccuggagaggucg

SEQ ID NO: 720190 - RNA, 22 nt, Human
ggagagugggagcaacuguugc

SEQ ID NO: 720191 - RNA, 22 nt, Human
gcuggagaugcuaugcagaggg

SEQ ID NO: 720192 - RNA, 22 nt, Human
auggcaguuuuagaacuuuuca

SEQ ID NO: 720193 - RNA, 22 nt, Human
gucuggaaccaagacguguagc

SEQ ID NO: 720194 - RNA, 22 nt, Human
accuucaccuccacaccuuggg

SEQ ID NO: 720195 - RNA, 22 nt, Human
ucccagcaagaaaggggguggc

SEQ ID NO: 720196 - RNA, 22 nt, Human
uucagaguuagacgaaaagcaa

SEQ ID NO: 720197 - RNA, 22 nt, Human
uguuagcaaggauaauuaugau

SEQ ID NO: 720198 - RNA, 22 nt, Human
aaguuccucuucucugcaggga

SEQ ID NO: 720199 - RNA, 22 nt, Human
uggacagccaugcaaaugagcu

SEQ ID NO: 720200 - RNA, 22 nt, Human
acagcagucuuaacacauugca

SEQ ID NO: 720201 - RNA, 22 nt, Human
gggcccugcguccggaagucug

SEQ ID NO: 720202 - RNA, 22 nt, Human
gucucugugccuucuccccacc

SEQ ID NO: 720203 - RNA, 22 nt, Human
cucaggauuuacuaauuucaag

SEQ ID NO: 720204 - RNA, 22 nt, Human
uucuuuaccagugaaauguuau

SEQ ID NO: 720205 - RNA, 22 nt, Human
agaguuauggacuuaaugcagg

SEQ ID NO: 720206 - RNA, 22 nt, Human
uggccuuguguuuuagagaaag

SEQ ID NO: 720207 - RNA, 22 nt, Human
cacacaugguagcagguacaag

SEQ ID NO: 720208 - RNA, 22 nt, Human
gaaaguuuucauauauaccaaa

SEQ ID NO: 720209 - RNA, 22 nt, Human
caggguggaagcuguagagugg

SEQ ID NO: 720210 - RNA, 22 nt, Human
cuucaugaggccggcuuuaucc

SEQ ID NO: 720211 - RNA, 23 nt, Human
ugacaguguauuugacuauaugg

SEQ ID NO: 720212 - RNA, 22 nt, Human
uucaacuuuggagauuuaauaa

SEQ ID NO: 720213 - RNA, 22 nt, Human
gcuccucuucucccacugaaug

SEQ ID NO: 720214 - RNA, 22 nt, Human
aaauucuuuggccuacuuugaa

SEQ ID NO: 720215 - RNA, 22 nt, Human
agcuccagccgcugauggguuu

SEQ ID NO: 720216 - RNA, 22 nt, Human
ucagauauagucauuuaaauaa

SEQ ID NO: 720217 - RNA, 22 nt, Human
cuauuuguaagagccccacacc

SEQ ID NO: 720218 - RNA, 22 nt, Human
ugugaggacauuggaggacuca

SEQ ID NO: 720219 - RNA, 22 nt, Human
caacagugauucugcaugagga

SEQ ID NO: 720220 - RNA, 22 nt, Human
gcccugagauucuuggauucug

SEQ ID NO: 720221 - RNA, 22 nt, Human
ugucucugucuuccagggcugu

SEQ ID NO: 720222 - RNA, 22 nt, Human
uauauuagugagauuuauccau

SEQ ID NO: 720223 - RNA, 22 nt, Human
guggcaguucugugucucuugu

SEQ ID NO: 720224 - RNA, 22 nt, Human
cagugucucaguuucacuugaa

SEQ ID NO: 720225 - RNA, 22 nt, Human
cuggagccccaggcugugcaga

SEQ ID NO: 720226 - RNA, 22 nt, Human
aaguccuuggagaauagaaagg

SEQ ID NO: 720227 - RNA, 22 nt, Human
uccuaaaggcugcuuuuauauu

SEQ ID NO: 720228 - RNA, 22 nt, Human
uuacacuuuggcaagcuauuaa

SEQ ID NO: 720229 - RNA, 22 nt, Human
cacaguccugccagagggccuu

SEQ ID NO: 720230 - RNA, 22 nt, Human
aaaguugcuggcuuugguucau

SEQ ID NO: 720231 - RNA, 22 nt, Human
uccauucauucagguauuuagu

SEQ ID NO: 720232 - RNA, 19 nt, Human
uaaaaugucuguggucagu

SEQ ID NO: 720233 - RNA, 22 nt, Human
uaacuuuaggaauagguaaucu

SEQ ID NO: 720234 - RNA, 22 nt, Human
ccagggcugguggcugcagagg

SEQ ID NO: 720235 - RNA, 21 nt, Human
acuuugggcacuuuccugccc

SEQ ID NO: 720236 - RNA, 22 nt, Human
uugcagcuuagugauguuaucu

SEQ ID NO: 720237 - RNA, 22 nt, Human
acugggaagacaagaaagauag

SEQ ID NO: 720238 - RNA, 22 nt, Human
gcuucuaucccuccacugcacu

SEQ ID NO: 720239 - RNA, 22 nt, Human
agaaaucaauaucuauauguug

SEQ ID NO: 720240 - RNA, 22 nt, Human
ugagcagggacuuuggagucug

SEQ ID NO: 720241 - RNA, 22 nt, Human
gugagagcugcuagacuguuau

SEQ ID NO: 720242 - RNA, 22 nt, Human
uggguggaauaaaucaguucug

SEQ ID NO: 720243 - RNA, 22 nt, Human
uuuuccuuuggaagaugcauau

SEQ ID NO: 720244 - RNA, 22 nt, Human
uuugauaauacacaagagaaag

SEQ ID NO: 720245 - RNA, 22 nt, Human
augcugacuucucucugcagug

SEQ ID NO: 720246 - RNA, 22 nt, Human
agugggcaggcagggugcgcag

SEQ ID NO: 720247 - RNA, 20 nt, Human
uuucacaucugucccuuuaa

SEQ ID NO: 720248 - RNA, 22 nt, Human
aacauguugaguugaaaguagc

SEQ ID NO: 720249 - RNA, 22 nt, Human
uuccuggggugaagauauuuuu

SEQ ID NO: 720250 - RNA, 22 nt, Human
ccuuuuucugaguuguagcuuc

SEQ ID NO: 720251 - RNA, 22 nt, Human
ugggaagaguuagagacagcug

SEQ ID NO: 720252 - RNA, 22 nt, Human
aaagcuucuauucacuuacuug

SEQ ID NO: 720253 - RNA, 22 nt, Human
cugccuucaucucugagcuggg

SEQ ID NO: 720254 - RNA, 20 nt, Human
agccuggcaaacacccccag

SEQ ID NO: 720255 - RNA, 22 nt, Human
gcaagggugugaaccaaugaga

SEQ ID NO: 720256 - RNA, 22 nt, Human
ucccucuacagggaagcgcuuu

SEQ ID NO: 720257 - RNA, 22 nt, Human
aauuaugagguagauaucacau

SEQ ID NO: 720258 - RNA, 22 nt, Human
uggccuggcucacagugagauu

SEQ ID NO: 720259 - RNA, 22 nt, Human
ucucuucuagcuucuugugguu

SEQ ID NO: 720260 - RNA, 22 nt, Human
aagauucucacugcucaacuuu

SEQ ID NO: 720261 - RNA, 22 nt, Human
gcugaagagcaaggcugggucu

SEQ ID NO: 720262 - RNA, 22 nt, Human
agggccugggaagaggaacccu

SEQ ID NO: 720263 - RNA, 22 nt, Human
ucuguaaauccugcucagcaac

SEQ ID NO: 720264 - RNA, 21 nt, Human
cuacuuaaguaggggauuagg

SEQ ID NO: 720265 - RNA, 22 nt, Human
gaagacuacuguugcacucaua

SEQ ID NO: 720266 - RNA, 22 nt, Human
ucugugcucuucucaguaucac

SEQ ID NO: 720267 - RNA, 22 nt, Human
agagcccugugguucugguaag

SEQ ID NO: 720268 - RNA, 22 nt, Human
agauguuuuggagacacuaacc

SEQ ID NO: 720269 - RNA, 21 nt, Human
gggagcuggaaacugggugac

SEQ ID NO: 720270 - RNA, 22 nt, Human
gagguaucuuagagaguguaga

SEQ ID NO: 720271 - RNA, 22 nt, Human
uugagauagguggaaucucuuu

SEQ ID NO: 720272 - RNA, 22 nt, Human
uaaugucagcauaguuuauuuu

SEQ ID NO: 720273 - RNA, 22 nt, Human
caaaucauggcucuagcuuaca

SEQ ID NO: 720274 - RNA, 22 nt, Human
ucagauuugaauauuccuuucg

SEQ ID NO: 720275 - RNA, 22 nt, Human
gccugggacuggauguguuugu

SEQ ID NO: 720276 - RNA, 22 nt, Human
cucuacuccaaaaggcuacaau

SEQ ID NO: 720277 - RNA, 22 nt, Human
ucuuucuuauuagccauuguuc

SEQ ID NO: 720278 - RNA, 22 nt, Human
gaaugcuaagcaugugggaguu

SEQ ID NO: 720279 - RNA, 22 nt, Human
gcagcaguaggaaauaacacag

SEQ ID NO: 720280 - RNA, 22 nt, Human
uuagcaguucauugauuaucgu

SEQ ID NO: 720281 - RNA, 22 nt, Human
gugccucccgggaccaugcacu

SEQ ID NO: 720282 - RNA, 20 nt, Human
ccagaagagaugaucaucca

SEQ ID NO: 720283 - RNA, 22 nt, Human
uucuucugagagaaaaagcuca

SEQ ID NO: 720284 - RNA, 22 nt, Human
caguguaucauuagugugauga

SEQ ID NO: 720285 - RNA, 22 nt, Human
auuuucuagauagaugaugcau

SEQ ID NO: 720286 - RNA, 22 nt, Human
cagcccugcacgcugccuccgc

SEQ ID NO: 720287 - RNA, 22 nt, Human
cugcuuuagguggaauguucua

SEQ ID NO: 720288 - RNA, 22 nt, Human
acccaggauagagugcugcagu

SEQ ID NO: 720289 - RNA, 22 nt, Human
gucauugacuagaauuccaaag

SEQ ID NO: 720290 - RNA, 22 nt, Human
augggagaaacaucaugaggca

SEQ ID NO: 720291 - RNA, 22 nt, Human
uauaaauuaaugugcccaugag

SEQ ID NO: 720292 - RNA, 22 nt, Human
gaacaaacauuuuuggcaguau

SEQ ID NO: 720293 - RNA, 22 nt, Human
uccagagccccagucuaguggg

SEQ ID NO: 720294 - RNA, 22 nt, Human
gcucuucuaaagaauguacagg

SEQ ID NO: 720295 - RNA, 22 nt, Human
agacagugauguaagcaggagu

SEQ ID NO: 720296 - RNA, 22 nt, Human
ggagagguuauccguguuaugu

SEQ ID NO: 720297 - RNA, 22 nt, Human
ugaagaucugucaaccccauau

SEQ ID NO: 720298 - RNA, 22 nt, Human
uucucaggaacucagugucagc

SEQ ID NO: 720299 - RNA, 19 nt, Human
ugggccucacaaugcuccc

SEQ ID NO: 720300 - RNA, 22 nt, Human
uucacagugccagggggcaggc

SEQ ID NO: 720301 - RNA, 22 nt, Human
ugcagggacacgaagacaaaua

SEQ ID NO: 720302 - RNA, 22 nt, Human
cugucuguucagauucauuacu

SEQ ID NO: 720303 - RNA, 18 nt, Human
uccauuguucuacuguga

SEQ ID NO: 720304 - RNA, 22 nt, Human
uccagguagggaauaaauguca

SEQ ID NO: 720305 - RNA, 22 nt, Human
cacaugaaggcuggggucguga

SEQ ID NO: 720306 - RNA, 22 nt, Human
ccuacacaucucaccucacagg

SEQ ID NO: 720307 - RNA, 22 nt, Human
acaaaggcagagaauucaacau

SEQ ID NO: 720308 - RNA, 22 nt, Human
acuagggaaaguuauguucaca

SEQ ID NO: 720309 - RNA, 22 nt, Human
aggcccuguuguagcauuuugg

SEQ ID NO: 720310 - RNA, 22 nt, Human
cuagauaaggauuucucaacuu

SEQ ID NO: 720311 - RNA, 22 nt, Human
cuccucugucuaccacgagggu

SEQ ID NO: 720312 - RNA, 22 nt, Human
aaagaucauucucugguccaga

SEQ ID NO: 720313 - RNA, 22 nt, Human
uucacaggugagcauuaggccg

SEQ ID NO: 720314 - RNA, 22 nt, Human
ugcuugucuucaggaaugcuga

SEQ ID NO: 720315 - RNA, 22 nt, Human
aaugaauucgagugaaggaaag

SEQ ID NO: 720316 - RNA, 22 nt, Human
aauggcugggaguguauuuugg

SEQ ID NO: 720317 - RNA, 22 nt, Human
uggccugggcaugaagcaucgu

SEQ ID NO: 720318 - RNA, 22 nt, Human
uucuuucccaguagaugugaaa

SEQ ID NO: 720319 - RNA, 22 nt, Human
gugcuuccugccuggugccuuu

SEQ ID NO: 720320 - RNA, 22 nt, Human
acauuucuccuugcaggaguca

SEQ ID NO: 720321 - RNA, 22 nt, Human
gggugacauuaggaagauagac

SEQ ID NO: 720322 - RNA, 22 nt, Human
auucuaggcuugaaacaugaag

SEQ ID NO: 720323 - RNA, 22 nt, Human
uuuguacauccuaauucugagu

SEQ ID NO: 720324 - RNA, 21 nt, Human
ugcagaaaugguuuuucuaag

SEQ ID NO: 720325 - RNA, 22 nt, Human
aagugcaaugaauagcugcaau

SEQ ID NO: 720326 - RNA, 22 nt, Human
uccucacacccauaccacugac

SEQ ID NO: 720327 - RNA, 22 nt, Human
ucugacaauuagccuaguccug

SEQ ID NO: 720328 - RNA, 22 nt, Human
ucagagguucuucucaguggcc

SEQ ID NO: 720329 - RNA, 19 nt, Human
agcauuuggaauucuacac

SEQ ID NO: 720330 - RNA, 22 nt, Human
auguaaacuuuaccagcucuga

SEQ ID NO: 720331 - RNA, 22 nt, Human
ugcaaaauaaugaacgauuuuu

SEQ ID NO: 720332 - RNA, 22 nt, Human
cuacaacauuaugcuuucuguc

SEQ ID NO: 720333 - RNA, 22 nt, Human
ggcugugguggcaucccugagc

SEQ ID NO: 720334 - RNA, 22 nt, Human
ugucaaauuuuuauugcaguau

SEQ ID NO: 720335 - RNA, 23 nt, Human
ggaagcucacguaguccugcacu

SEQ ID NO: 720336 - RNA, 20 nt, Human
uccugagaccugggaagguu

SEQ ID NO: 720337 - RNA, 22 nt, Human
gugaacaucagauuacaugaga

SEQ ID NO: 720338 - RNA, 22 nt, Human
gaggccagauacucucuucugc

SEQ ID NO: 720339 - RNA, 22 nt, Human
auuuguacucaggaauucugcu

SEQ ID NO: 720340 - RNA, 22 nt, Human
uccaguccuaucugcccuugga

SEQ ID NO: 720341 - RNA, 22 nt, Human
gaucauagcgucuucuugcagc

SEQ ID NO: 720342 - RNA, 22 nt, Human
ggaggggauuuaguagaugcua

SEQ ID NO: 720343 - RNA, 22 nt, Human
cuucagaaccagccagaagagg

SEQ ID NO: 720344 - RNA, 22 nt, Human
aggagcagcuucugaaccaugu

SEQ ID NO: 720345 - RNA, 22 nt, Human
auguuuacugaaaagauuucaa

SEQ ID NO: 720346 - RNA, 22 nt, Human
ugcauuugcaauggguacacaa

SEQ ID NO: 720347 - RNA, 22 nt, Human
uugaaagaacucuucagagaua

SEQ ID NO: 720348 - RNA, 22 nt, Human
acaguggaauggugggccugca

SEQ ID NO: 720349 - RNA, 22 nt, Human
caaccuggcccuagcccuggga

SEQ ID NO: 720350 - RNA, 22 nt, Human
gcugggaagaacaggagagaau

SEQ ID NO: 720351 - RNA, 21 nt, Human
ccaggcuccugaggcugguca

SEQ ID NO: 720352 - RNA, 22 nt, Human
uuauucaggcucucuuuggcua

SEQ ID NO: 720353 - RNA, 22 nt, Human
gugaggucaccggccguugcca

SEQ ID NO: 720354 - RNA, 22 nt, Human
ucaaaaguggccuguaaaaucu

SEQ ID NO: 720355 - RNA, 22 nt, Human
uggggucugaguaucugcauuu

SEQ ID NO: 720356 - RNA, 22 nt, Human
cagggugagccucuggagcccu

SEQ ID NO: 720357 - RNA, 22 nt, Human
auugaaagaguuuucugcugca

SEQ ID NO: 720358 - RNA, 22 nt, Human
agcugugggccugggagagcug

SEQ ID NO: 720359 - RNA, 22 nt, Human
aaugcaaagaguugcuuaucaa

SEQ ID NO: 720360 - RNA, 22 nt, Human
cugaguucugcccaaggucugg

SEQ ID NO: 720361 - RNA, 22 nt, Human
uacaauguaauucugauuaugu

SEQ ID NO: 720362 - RNA, 22 nt, Human
cuauagaaaauuguaucacacg

SEQ ID NO: 720363 - RNA, 22 nt, Human
cacaggaggcaaugguaagauu

SEQ ID NO: 720364 - RNA, 22 nt, Human
guuauauuggcagaagagaaga

SEQ ID NO: 720365 - RNA, 22 nt, Human
caguggguaggaaaggcucuuc

SEQ ID NO: 720366 - RNA, 22 nt, Human
ccaccaugggaagagagacuaa

SEQ ID NO: 720367 - RNA, 22 nt, Human
agcuuuauuaacucuccaggug

SEQ ID NO: 720368 - RNA, 22 nt, Human
ucagacuuuuaaagacugaaug

SEQ ID NO: 720369 - RNA, 22 nt, Human
aaaguauuugugauuuuuacca

SEQ ID NO: 720370 - RNA, 22 nt, Human
ugcagcauucuuggccacuacu

SEQ ID NO: 720371 - RNA, 22 nt, Human
gcaguauauacucuuugagggg

SEQ ID NO: 720372 - RNA, 22 nt, Human
gggucagggcugccugggcuca

SEQ ID NO: 720373 - RNA, 19 nt, Human
ccagcccugucacuucuug

SEQ ID NO: 720374 - RNA, 22 nt, Human
cucuggagguugagcccagcaa

SEQ ID NO: 720375 - RNA, 22 nt, Human
ggcuucucccauucuucagggg

SEQ ID NO: 720376 - RNA, 22 nt, Human
aaauacauacacuguacguggc

SEQ ID NO: 720377 - RNA, 22 nt, Human
ucacaguaaaagcauggaagag

SEQ ID NO: 720378 - RNA, 22 nt, Human
cagggacauaagaggaacaugg

SEQ ID NO: 720379 - RNA, 22 nt, Human
gccuggcaggccucaugagggg

SEQ ID NO: 720380 - RNA, 22 nt, Human
uuuccucugagugagcugggag

SEQ ID NO: 720381 - RNA, 22 nt, Human
cauaagaauauuccauccuuug

SEQ ID NO: 720382 - RNA, 22 nt, Human
gcucucuguuauuaagaucuuu

SEQ ID NO: 720383 - RNA, 22 nt, Human
ugaacacacaccuauguacaaa

SEQ ID NO: 720384 - RNA, 22 nt, Human
augcuucuugagauagaaacac

SEQ ID NO: 720385 - RNA, 22 nt, Human
aggggccaccaccaaggaaggu

SEQ ID NO: 720386 - RNA, 22 nt, Human
ggacaggccgccucgguggggg

SEQ ID NO: 720387 - RNA, 22 nt, Human
ggcuuucaacacaggcuuuccu

SEQ ID NO: 720388 - RNA, 22 nt, Human
aagacaauuugauacuaguugc

SEQ ID NO: 720389 - RNA, 22 nt, Human
cccuggaggcuggaggcaguag

SEQ ID NO: 720390 - RNA, 22 nt, Human
gucccuggagcugagcagugcu

SEQ ID NO: 720391 - RNA, 22 nt, Human
uugaucugccucauucuuguuc

SEQ ID NO: 720392 - RNA, 22 nt, Human
ggcuucaggggucugucugcac

SEQ ID NO: 720393 - RNA, 22 nt, Human
ggagggcaacuuuucaguaggu

SEQ ID NO: 720394 - RNA, 22 nt, Human
aagguauuuucuaauguauacu

SEQ ID NO: 720395 - RNA, 22 nt, Human
aguccagaccccggcagcuggu

SEQ ID NO: 720396 - RNA, 22 nt, Human
cagggugccucccgcucgccgg

SEQ ID NO: 720397 - RNA, 19 nt, Human
acaugcauauggacaguug

SEQ ID NO: 720398 - RNA, 22 nt, Human
ccagcgcuucccaucagggagg

SEQ ID NO: 720399 - RNA, 22 nt, Human
uggcuucuccagaaaucuuggu

SEQ ID NO: 720400 - RNA, 22 nt, Human
cacaugcauuggcaaaagugua

SEQ ID NO: 720401 - RNA, 22 nt, Human
guggccuggaaaggcuggucug

SEQ ID NO: 720402 - RNA, 22 nt, Human
ugucccuggagcuucugucccc

SEQ ID NO: 720403 - RNA, 22 nt, Human
guggaaaacugagaaaauugcu

SEQ ID NO: 720404 - RNA, 22 nt, Human
gacauugaacaaguuuccugac

SEQ ID NO: 720405 - RNA, 22 nt, Human
cccaaaaugugcauguucgaau

SEQ ID NO: 720406 - RNA, 22 nt, Human
uucaagaugacccagucacacg

SEQ ID NO: 720407 - RNA, 22 nt, Human
cuccugucagaagcauccugag

SEQ ID NO: 720408 - RNA, 22 nt, Human
uggcaggcucugaguagcaccu

SEQ ID NO: 720409 - RNA, 22 nt, Human
ugucucugucucccagguugug

SEQ ID NO: 720410 - RNA, 22 nt, Human
aaauaaguuagcagauuccagu

SEQ ID NO: 720411 - RNA, 22 nt, Human
cuggacaggcuggggacugcaa

SEQ ID NO: 720412 - RNA, 22 nt, Human
acuuuggguaagccaggugcua

SEQ ID NO: 720413 - RNA, 22 nt, Human
gggaucagaaacauagcccuga

SEQ ID NO: 720414 - RNA, 22 nt, Human
uccugcagccauuagaggucaa

SEQ ID NO: 720415 - RNA, 22 nt, Human
ucuucaaacugaaaauuuagaa

SEQ ID NO: 720416 - RNA, 22 nt, Human
uuuucuguuuacagagggaccu

SEQ ID NO: 720417 - RNA, 22 nt, Human
aauguuuucccagugcagacga

SEQ ID NO: 720418 - RNA, 22 nt, Human
gacucagauuuagaggguaaga

SEQ ID NO: 720419 - RNA, 20 nt, Human
ggcagagcuaugucuguugc

SEQ ID NO: 720420 - RNA, 22 nt, Human
aggucucacuuuguggaaguga

SEQ ID NO: 720421 - RNA, 20 nt, Human
ucauggaaucucacucuagu

SEQ ID NO: 720422 - RNA, 22 nt, Human
uugggguacgcaggucugggag

SEQ ID NO: 720423 - RNA, 19 nt, Human
ccagggcuccaagcugagu

SEQ ID NO: 720424 - RNA, 22 nt, Human
guucuacaugacacucaacauu

SEQ ID NO: 720425 - RNA, 22 nt, Human
aggcagcuuaagcccuggccca

SEQ ID NO: 720426 - RNA, 22 nt, Human
ccuuugggguccugccugggcu

SEQ ID NO: 720427 - RNA, 22 nt, Human
ccaaggacuggacacacagguu

SEQ ID NO: 720428 - RNA, 22 nt, Human
aggacagcauuuucagcaucuc

SEQ ID NO: 720429 - RNA, 22 nt, Human
cauguuuuguguacagaauauu

SEQ ID NO: 720430 - RNA, 22 nt, Human
acuguacuuuucuuggcuagau

SEQ ID NO: 720431 - RNA, 22 nt, Human
uccagagcugagcagucauucu

SEQ ID NO: 720432 - RNA, 22 nt, Human
uucugagaaggcuguggacaca

SEQ ID NO: 720433 - RNA, 22 nt, Human
ccucugggugggaggccgggcg

SEQ ID NO: 720434 - RNA, 22 nt, Human
cugagguauugaaguaucuucu

SEQ ID NO: 720435 - RNA, 22 nt, Human
aaugcaguuucauuuguagaau

SEQ ID NO: 720436 - RNA, 21 nt, Human
uuggccugauaucuuggagca

SEQ ID NO: 720437 - RNA, 22 nt, Human
uccugggaaguugcaucaccgu

SEQ ID NO: 720438 - RNA, 22 nt, Human
caggugcucccagagaagugcu

SEQ ID NO: 720439 - RNA, 22 nt, Human
agggugguggcgaugaggacau

SEQ ID NO: 720440 - RNA, 22 nt, Human
uaugccagacugugagcuucuu

SEQ ID NO: 720441 - RNA, 22 nt, Human
ugucacauugaauaugauuuau

SEQ ID NO: 720442 - RNA, 20 nt, Human
ugcuuccuggccacugcggg

SEQ ID NO: 720443 - RNA, 22 nt, Human
ugcaguguuuuucagggcauau

SEQ ID NO: 720444 - RNA, 22 nt, Human
cacacaguaggcacucauuaau

SEQ ID NO: 720445 - RNA, 22 nt, Human
aggcccugggcaguucuguagc

SEQ ID NO: 720446 - RNA, 22 nt, Human
gcugccugcucacccggccugg

SEQ ID NO: 720447 - RNA, 22 nt, Human
aaugauggauuuagacaagcug

SEQ ID NO: 720448 - RNA, 22 nt, Human
agcaccugccugcauuggcuau

SEQ ID NO: 720449 - RNA, 22 nt, Human
gacaggcuuccuaagugccaga

SEQ ID NO: 720450 - RNA, 22 nt, Human
aauguuuuacagaucccauuag

SEQ ID NO: 720451 - RNA, 22 nt, Human
uaacaaugggaaggacugauga

SEQ ID NO: 720452 - RNA, 22 nt, Human
uugcagggcuggaacauggaau

SEQ ID NO: 720453 - RNA, 22 nt, Human
uucugcaugaacaguuuauucc

SEQ ID NO: 720454 - RNA, 22 nt, Human
gaaaggagggaaacagagcggu

SEQ ID NO: 720455 - RNA, 22 nt, Human
cucagagagugaauuccugccu

SEQ ID NO: 720456 - RNA, 22 nt, Human
acccugggacuuccgaguugag

SEQ ID NO: 720457 - RNA, 22 nt, Human
uugaaauggaagugaaaauucu

SEQ ID NO: 720458 - RNA, 22 nt, Human
ccucugugcuuuguccagccuc

SEQ ID NO: 720459 - RNA, 22 nt, Human
uuuuaacuuaaaauacauagau

SEQ ID NO: 720460 - RNA, 22 nt, Human
ggaggguggcagcguccugggc

SEQ ID NO: 720461 - RNA, 22 nt, Human
ucagguggcuuggagggggacg

SEQ ID NO: 720462 - RNA, 22 nt, Human
acaguuugcccugacauucucc

SEQ ID NO: 720463 - RNA, 23 nt, Human
gucagggcuggggucagagugac

SEQ ID NO: 720464 - RNA, 22 nt, Human
aguacaugugguccuggccaga

SEQ ID NO: 720465 - RNA, 22 nt, Human
cauggccagcccccaguuccuc

SEQ ID NO: 720466 - RNA, 22 nt, Human
ggccucgcggcuucugguggcu

SEQ ID NO: 720467 - RNA, 22 nt, Human
agccagggugagagggcuuugu

SEQ ID NO: 720468 - RNA, 22 nt, Human
aauaauauuugaagcuucaaag

SEQ ID NO: 720469 - RNA, 22 nt, Human
aaguguuucaauaauuuggacc

SEQ ID NO: 720470 - RNA, 18 nt, Human
cagaugcuaggccuccag

SEQ ID NO: 720471 - RNA, 22 nt, Human
gcccuuaggcaagcagaagccc

SEQ ID NO: 720472 - RNA, 22 nt, Human
acacagcucacaacgugugcau

SEQ ID NO: 720473 - RNA, 22 nt, Human
cugugugugcuacaggcuucca

SEQ ID NO: 720474 - RNA, 22 nt, Human
agcaggcaggaaggcagcacug

SEQ ID NO: 720475 - RNA, 22 nt, Human
cugaaaauguuacacaggaaga

SEQ ID NO: 720476 - RNA, 22 nt, Human
acauugugauccgacugauuaa

SEQ ID NO: 720477 - RNA, 22 nt, Human
cugggccugguguggcaccugc

SEQ ID NO: 720478 - RNA, 22 nt, Human
auggcugcuuucccuuagcacc

SEQ ID NO: 720479 - RNA, 22 nt, Human
acugcagagcuuuucaguugag

SEQ ID NO: 720480 - RNA, 22 nt, Human
agcagauguucccuggucccuu

SEQ ID NO: 720481 - RNA, 23 nt, Human
agccuucaggcaaugucaguaga

SEQ ID NO: 720482 - RNA, 22 nt, Human
cuauggaagggaugcaaagaaa

SEQ ID NO: 720483 - RNA, 22 nt, Human
guuuuccugagcccagagaugc

SEQ ID NO: 720484 - RNA, 22 nt, Human
acauacacaagcguacaugaac

SEQ ID NO: 720485 - RNA, 22 nt, Human
ugugaaauugaaugcccauugc

SEQ ID NO: 720486 - RNA, 22 nt, Human
ugugcccaucucccagcuugac

SEQ ID NO: 720487 - RNA, 22 nt, Human
guuuaauuuuagguugucaagc

SEQ ID NO: 720488 - RNA, 22 nt, Human
auguggcuuaguuaggugcccc

SEQ ID NO: 720489 - RNA, 22 nt, Human
aaguucccgaggaccacaguug

SEQ ID NO: 720490 - RNA, 23 nt, Human
aggugccaacugagagcugagag

SEQ ID NO: 720491 - RNA, 19 nt, Human
gagaaaccccgucuuuagg

SEQ ID NO: 720492 - RNA, 22 nt, Human
ucaguuuaauacccagaugccu

SEQ ID NO: 720493 - RNA, 20 nt, Human
gagauggcuaagugcugaac

SEQ ID NO: 720494 - RNA, 22 nt, Human
aaaauguguuuaugcauuucgu

SEQ ID NO: 720495 - RNA, 23 nt, Human
agcuucauuauuuuccaugaucu

SEQ ID NO: 720496 - RNA, 19 nt, Human
gcugaacaagucagcaacc

SEQ ID NO: 720497 - RNA, 22 nt, Human
aaagaacaucggagugggcggg

SEQ ID NO: 720498 - RNA, 22 nt, Human
uaacacauuuuccucauacgga

SEQ ID NO: 720499 - RNA, 22 nt, Human
gcacccaggccggcgacugcag

SEQ ID NO: 720500 - RNA, 22 nt, Human
ucccagauuguugauggcuuaa

SEQ ID NO: 720501 - RNA, 20 nt, Human
uggggccuguuucugugguu

SEQ ID NO: 720502 - RNA, 22 nt, Human
cccagacucaucccugggagcu

SEQ ID NO: 720503 - RNA, 22 nt, Human
caggcccagcccagcccuucga

SEQ ID NO: 720504 - RNA, 22 nt, Human
ugugauauuugaguauugucaa

SEQ ID NO: 720505 - RNA, 22 nt, Human
cuuauucagaaggagaaaugga

SEQ ID NO: 720506 - RNA, 22 nt, Human
aaagucaaaaugcucuccuguc

SEQ ID NO: 720507 - RNA, 22 nt, Human
ugaaccagagucuccagugguu

SEQ ID NO: 720508 - RNA, 21 nt, Human
aucucuucaaggcugauuuac

SEQ ID NO: 720509 - RNA, 22 nt, Human
uuacacuuggguguggauuuua

SEQ ID NO: 720510 - RNA, 22 nt, Human
agcugccuuuugagaaagcuca

SEQ ID NO: 720511 - RNA, 22 nt, Human
accaaaugcuuggcugcuguga

SEQ ID NO: 720512 - RNA, 23 nt, Human
cuuauucauucauguagcccauu

SEQ ID NO: 720513 - RNA, 22 nt, Human
ugccuggauucgguuguuguca

SEQ ID NO: 720514 - RNA, 22 nt, Human
agucuucagcagccuucucagg

SEQ ID NO: 720515 - RNA, 22 nt, Human
ggagccagaguuuaauguggag

SEQ ID NO: 720516 - RNA, 22 nt, Human
ucuuacauauacgucauuuagu

SEQ ID NO: 720517 - RNA, 22 nt, Human
ccagcuccucuugucucuagca

SEQ ID NO: 720518 - RNA, 22 nt, Human
gcucugagagagcaaagucacc

SEQ ID NO: 720519 - RNA, 22 nt, Human
aggucuccucauauucugccuc

SEQ ID NO: 720520 - RNA, 23 nt, Human
cccugcaucugucccucaccagu

SEQ ID NO: 720521 - RNA, 22 nt, Human
ugagaaaugggucugcugaaga

SEQ ID NO: 720522 - RNA, 22 nt, Human
aucaccugcacaaauguguucc

SEQ ID NO: 720523 - RNA, 22 nt, Human
acuuuuugcauaguaagugucu

SEQ ID NO: 720524 - RNA, 22 nt, Human
ucacacguccuugcuacuccuc

SEQ ID NO: 720525 - RNA, 22 nt, Human
ucccaaauauaaugcaagagac

SEQ ID NO: 720526 - RNA, 22 nt, Human
ucuaaagagaguggguacaugu

SEQ ID NO: 720527 - RNA, 22 nt, Human
cuucucuugguaguucuuguug

SEQ ID NO: 720528 - RNA, 22 nt, Human
ugagaaugccauaagagcuauu

SEQ ID NO: 720529 - RNA, 22 nt, Human
uuccuugagguauucaguuuua

SEQ ID NO: 720530 - RNA, 22 nt, Human
cagggugccucugcucccacca

SEQ ID NO: 720531 - RNA, 22 nt, Human
guaaaggcccauucaaacagcu

SEQ ID NO: 720532 - RNA, 22 nt, Human
agugauucccagacuuccuggg

SEQ ID NO: 720533 - RNA, 22 nt, Human
ugucauuuauucucuuauucua

SEQ ID NO: 720534 - RNA, 22 nt, Human
aggaagccaugguggacgucua

SEQ ID NO: 720535 - RNA, 22 nt, Human
uuacaaagcaggucagcugaaa

SEQ ID NO: 720536 - RNA, 22 nt, Human
gucuggagccacccuaagcauu

SEQ ID NO: 720537 - RNA, 22 nt, Human
cagcaucuguauccuaggcuga

SEQ ID NO: 720538 - RNA, 22 nt, Human
agggaguuagaaauccaggaua

SEQ ID NO: 720539 - RNA, 22 nt, Human
ugucagccuugcuuuagcgguu

SEQ ID NO: 720540 - RNA, 22 nt, Human
gucccuggguagcucaguggcu

SEQ ID NO: 720541 - RNA, 22 nt, Human
aagaagcagagcuguggguguu

SEQ ID NO: 720542 - RNA, 22 nt, Human
acugggccuacccagauuggca

SEQ ID NO: 720543 - RNA, 22 nt, Human
gcuucucaauucucacccucca

SEQ ID NO: 720544 - RNA, 22 nt, Human
cugcuuugcauagcugccagag

SEQ ID NO: 720545 - RNA, 22 nt, Human
gcccaucaucacuguggaggcu

SEQ ID NO: 720546 - RNA, 22 nt, Human
accugucaugucaauguucagu

SEQ ID NO: 720547 - RNA, 22 nt, Human
ugucaugaguuauuucauagga

SEQ ID NO: 720548 - RNA, 22 nt, Human
caggacagagcccagacugugu

SEQ ID NO: 720549 - RNA, 22 nt, Human
gacuguggggggcggacacaag

SEQ ID NO: 720550 - RNA, 22 nt, Human
cagugcugguguaggcugacca

SEQ ID NO: 720551 - RNA, 22 nt, Human
ucagagcagcauuuuacaggau

SEQ ID NO: 720552 - RNA, 22 nt, Human
gcauugguucaagguugugcag

SEQ ID NO: 720553 - RNA, 22 nt, Human
ugagguggcacacacuuccugc

SEQ ID NO: 720554 - RNA, 22 nt, Human
agcugccaggccccugagaacc

SEQ ID NO: 720555 - RNA, 22 nt, Human
cucugcuuuuuaaaaggagucc

SEQ ID NO: 720556 - RNA, 22 nt, Human
aacacugagcuauuacggugga

SEQ ID NO: 720557 - RNA, 22 nt, Human
acaguuuauaaaaauaaugagg

SEQ ID NO: 720558 - RNA, 22 nt, Human
aauuaggggaggacguaucaua

SEQ ID NO: 720559 - RNA, 22 nt, Human
ggcuggacugccucccagaguc

SEQ ID NO: 720560 - RNA, 22 nt, Human
ucaggagcuugguagugugauu

SEQ ID NO: 720561 - RNA, 22 nt, Human
auggaauuuggacuggaagucc

SEQ ID NO: 720562 - RNA, 22 nt, Human
guguccauucacugcaacacuu

SEQ ID NO: 720563 - RNA, 22 nt, Human
gguguagcucugugucccacug

SEQ ID NO: 720564 - RNA, 22 nt, Human
acaagaauuauuucuaguuaac

SEQ ID NO: 720565 - RNA, 22 nt, Human
ucuccaggccuuucccaucuua

SEQ ID NO: 720566 - RNA, 22 nt, Human
gcauuuguuugggcuaaucuua

SEQ ID NO: 720567 - RNA, 19 nt, Human
acagaaauguaagugagac

SEQ ID NO: 720568 - RNA, 23 nt, Human
cagcucagcacauaggagguacu

SEQ ID NO: 720569 - RNA, 22 nt, Human
agguaggauggguggagaugau

SEQ ID NO: 720570 - RNA, 22 nt, Human
ccccagcugagauuugaggaga

SEQ ID NO: 720571 - RNA, 22 nt, Human
uucccagacuccacacugaggc

SEQ ID NO: 720572 - RNA, 22 nt, Human
gcuucugaugucagacuucugg

SEQ ID NO: 720573 - RNA, 22 nt, Human
agccacagggggugagggacaa

SEQ ID NO: 720574 - RNA, 22 nt, Human
cauuaaacaaccuugaaucaau

SEQ ID NO: 720575 - RNA, 22 nt, Human
ggaggaaauccuuaguaaggca

SEQ ID NO: 720576 - RNA, 22 nt, Human
ggccugugcugucagcccuagu

SEQ ID NO: 720577 - RNA, 22 nt, Human
uuuuuaucuuguaugugucucu

SEQ ID NO: 720578 - RNA, 22 nt, Human
ugugacagccaguaaaguaagc

SEQ ID NO: 720579 - RNA, 22 nt, Human
gucccugacacccggguggagg

SEQ ID NO: 720580 - RNA, 18 nt, Human
ucuuuaaguugucagagu

SEQ ID NO: 720581 - RNA, 22 nt, Human
agucaguauuuauuacuuagcu

SEQ ID NO: 720582 - RNA, 22 nt, Human
gcagcuggggccacacuuaggc

SEQ ID NO: 720583 - RNA, 22 nt, Human
gaggagcugucaccgugacuca

SEQ ID NO: 720584 - RNA, 22 nt, Human
gcccugugagucaugcggcaga

SEQ ID NO: 720585 - RNA, 22 nt, Human
uggcaccaggcgggguggcugu

SEQ ID NO: 720586 - RNA, 22 nt, Human
uacagcuuuucauauuuguguu

SEQ ID NO: 720587 - RNA, 18 nt, Human
aggcaggcuggagugacu

SEQ ID NO: 720588 - RNA, 22 nt, Human
ggcuggcaccugcccuccgcug

SEQ ID NO: 720589 - RNA, 22 nt, Human
uccuggccucgcuguccaccuu

SEQ ID NO: 720590 - RNA, 22 nt, Human
cuuuaguuugcuguccccuggg

SEQ ID NO: 720591 - RNA, 22 nt, Human
caauagaaggcacagauaggua

SEQ ID NO: 720592 - RNA, 22 nt, Human
uccagcagagucucugaggggg

SEQ ID NO: 720593 - RNA, 22 nt, Human
cugagcaggauauucacagcag

SEQ ID NO: 720594 - RNA, 22 nt, Human
uauugcuuauaauuuguugcaa

SEQ ID NO: 720595 - RNA, 22 nt, Human
ccccugaagacaauggagaggu

SEQ ID NO: 720596 - RNA, 22 nt, Human
gggaggacgguccagggcaaag

SEQ ID NO: 720597 - RNA, 22 nt, Human
agcugcagcguucauuuuucca

SEQ ID NO: 720598 - RNA, 22 nt, Human
gggcuccaggagcccuaagaga

SEQ ID NO: 720599 - RNA, 22 nt, Human
cuguucuguaagcugcuguugu

SEQ ID NO: 720600 - RNA, 22 nt, Human
gcauucaucuuccuccaugcag

SEQ ID NO: 720601 - RNA, 22 nt, Human
ccaggucuaucaaguugggcuc

SEQ ID NO: 720602 - RNA, 22 nt, Human
agaaggaagccaggagggugca

SEQ ID NO: 720603 - RNA, 22 nt, Human
acucccagaacaugcucuucuu

SEQ ID NO: 720604 - RNA, 22 nt, Human
uggucccugaucuaaugucuca

SEQ ID NO: 720605 - RNA, 22 nt, Human
uucauucuuauuugugaucugg

SEQ ID NO: 720606 - RNA, 17 nt, Human
ggcuggagcagcucccc

SEQ ID NO: 720607 - RNA, 22 nt, Human
uuugcugugggauauccaugug

SEQ ID NO: 720608 - RNA, 22 nt, Human
aaucugaauauuuauguguauu

SEQ ID NO: 720609 - RNA, 22 nt, Human
accuggagaaagccucucccug

SEQ ID NO: 720610 - RNA, 22 nt, Human
cucuccagagcccuuccggccc

SEQ ID NO: 720611 - RNA, 22 nt, Human
ucagaauugauuuucaaaacag

SEQ ID NO: 720612 - RNA, 21 nt, Human
ugacauuuaguagcauuguca

SEQ ID NO: 720613 - RNA, 22 nt, Human
uuccuucuuccaaacccaucau

SEQ ID NO: 720614 - RNA, 22 nt, Human
guggagacuucuacuagagacc

SEQ ID NO: 720615 - RNA, 22 nt, Human
uccagccugguugcgggcaucc

SEQ ID NO: 720616 - RNA, 22 nt, Human
cauguauagguccauagugaau

SEQ ID NO: 720617 - RNA, 22 nt, Human
cagcuggaucugccucgagcca

SEQ ID NO: 720618 - RNA, 23 nt, Human
aaccugaacuagggucuugcaua

SEQ ID NO: 720619 - RNA, 22 nt, Human
cagaggcagaggucaucucugg

SEQ ID NO: 720620 - RNA, 22 nt, Human
ggucucagcuggaguccuuggu

SEQ ID NO: 720621 - RNA, 22 nt, Human
cagggcuugcaggagaaaguuu

SEQ ID NO: 720622 - RNA, 22 nt, Human
cccucucugcugcauagaggaa

SEQ ID NO: 720623 - RNA, 18 nt, Human
ugucuuuggaccacugaa

SEQ ID NO: 720624 - RNA, 22 nt, Human
ugagcagaaaagaaugcugagc

SEQ ID NO: 720625 - RNA, 22 nt, Human
uccugccucuugccuucuucac

SEQ ID NO: 720626 - RNA, 22 nt, Human
gggcuggauuacugaacugagu

SEQ ID NO: 720627 - RNA, 22 nt, Human
cagagcagaagcgguccucaca

SEQ ID NO: 720628 - RNA, 22 nt, Human
cauuuguuaauuacuauuaucu

SEQ ID NO: 720629 - RNA, 22 nt, Human
uucucuuaucuggcauuauugg

SEQ ID NO: 720630 - RNA, 22 nt, Human
uggcuucacccguccuccccac

SEQ ID NO: 720631 - RNA, 22 nt, Human
gaggccugguuuccagcauccu

SEQ ID NO: 720632 - RNA, 20 nt, Human
cccagagcacuuuuucaugu

SEQ ID NO: 720633 - RNA, 23 nt, Human
ucuauuacuuauuguacucugga

SEQ ID NO: 720634 - RNA, 22 nt, Human
uggauaaauggugcuaucaccc

SEQ ID NO: 720635 - RNA, 22 nt, Human
acacagcuagugaguggcagag

SEQ ID NO: 720636 - RNA, 22 nt, Human
uccugcagcugauaaauacagu

SEQ ID NO: 720637 - RNA, 21 nt, Human
ccaggcagagcugugaguucu

SEQ ID NO: 720638 - RNA, 21 nt, Human
ggccucugccuugccccacuc

SEQ ID NO: 720639 - RNA, 22 nt, Human
gagccuggauagccuuguucca

SEQ ID NO: 720640 - RNA, 21 nt, Human
ucaauacaggugcaugugucu

SEQ ID NO: 720641 - RNA, 22 nt, Human
aggcauucuagaaguagaagua

SEQ ID NO: 720642 - RNA, 22 nt, Human
auuuccauguccaaaaauuagu

SEQ ID NO: 720643 - RNA, 22 nt, Human
aauuauggaauuuuuagagaag

SEQ ID NO: 720644 - RNA, 22 nt, Human
caguccugaauacuggacggug

SEQ ID NO: 720645 - RNA, 22 nt, Human
agauguuuguguuaucuccauu

SEQ ID NO: 720646 - RNA, 22 nt, Human
caaaguccuagaacagugcuug

SEQ ID NO: 720647 - RNA, 22 nt, Human
cugggacauauugcuaguguug

SEQ ID NO: 720648 - RNA, 22 nt, Human
cagcaugagaaaaugaaucaga

SEQ ID NO: 720649 - RNA, 22 nt, Human
gggaccuggucuagcacugagc

SEQ ID NO: 720650 - RNA, 22 nt, Human
cacuggaccaaggaaacucuuc

SEQ ID NO: 720651 - RNA, 22 nt, Human
acaauuccugagaauacuuguu

SEQ ID NO: 720652 - RNA, 22 nt, Human
aggcugcccugccgccaguggg

SEQ ID NO: 720653 - RNA, 22 nt, Human
uccagccacuugcacaguuaaa

SEQ ID NO: 720654 - RNA, 22 nt, Human
gcuccucugucaaaugagagug

SEQ ID NO: 720655 - RNA, 22 nt, Human
ugccauggugacugcaggaggu

SEQ ID NO: 720656 - RNA, 22 nt, Human
gaagcaucagcaauggcuggaa

SEQ ID NO: 720657 - RNA, 22 nt, Human
agcaaagcaguggcuaagcuga

SEQ ID NO: 720658 - RNA, 22 nt, Human
ugccaggccaauucuauuugac

SEQ ID NO: 720659 - RNA, 22 nt, Human
ugggcuggcugaacuucaaccu

SEQ ID NO: 720660 - RNA, 22 nt, Human
aaacauuuuucuaggucuuggu

SEQ ID NO: 720661 - RNA, 22 nt, Human
cugccagcaaugugaccaugcu

SEQ ID NO: 720662 - RNA, 22 nt, Human
uggcccugccacucacugcuga

SEQ ID NO: 720663 - RNA, 22 nt, Human
gaauguccuccuggaucacucc

SEQ ID NO: 720664 - RNA, 21 nt, Human
acaggcucuggggaugcuggg

SEQ ID NO: 720665 - RNA, 22 nt, Human
ggagagaacuggcuccuucuag

SEQ ID NO: 720666 - RNA, 22 nt, Human
uuggaauugugaacuaagugau

SEQ ID NO: 720667 - RNA, 22 nt, Human
cuuaguuucucuguauguuuac

SEQ ID NO: 720668 - RNA, 20 nt, Human
cucagcagauucuucuagaa

SEQ ID NO: 720669 - RNA, 22 nt, Human
acuuuacaagcuuauagccuag

SEQ ID NO: 720670 - RNA, 22 nt, Human
uuaagagguggucgugucugug

SEQ ID NO: 720671 - RNA, 22 nt, Human
ggagucuguuuuacaugcagga

SEQ ID NO: 720672 - RNA, 22 nt, Human
aaugcacagcuaaagugguucc

SEQ ID NO: 720673 - RNA, 22 nt, Human
ugugaaauugagaaacuuucac

SEQ ID NO: 720674 - RNA, 22 nt, Human
uccuggcagcccgcaggugcug

SEQ ID NO: 720675 - RNA, 22 nt, Human
ucaggaguacuggugucuacag

SEQ ID NO: 720676 - RNA, 19 nt, Human
ucaggcaguuauucacaaa

SEQ ID NO: 720677 - RNA, 22 nt, Human
ccugucacauauuugcuguuca

SEQ ID NO: 720678 - RNA, 22 nt, Human
auucuggguucaugagugagcu

SEQ ID NO: 720679 - RNA, 22 nt, Human
cagcagaguaggugcuacuucu

SEQ ID NO: 720680 - RNA, 23 nt, Human
caggaaauguucuugaagccuga

SEQ ID NO: 720681 - RNA, 22 nt, Human
acuguugaagugccagcuugau

SEQ ID NO: 720682 - RNA, 22 nt, Human
ucuugacauucaaucauguaua

SEQ ID NO: 720683 - RNA, 22 nt, Human
ugugaaauucuugaaaugcaca

SEQ ID NO: 720684 - RNA, 22 nt, Human
uccaugugcuuccucaggggaa

SEQ ID NO: 720685 - RNA, 22 nt, Human
gagggccuggcacagggaggcu

SEQ ID NO: 720686 - RNA, 22 nt, Human
ggucugagauauuuguucagcu

SEQ ID NO: 720687 - RNA, 22 nt, Human
ccugaggaugccagcaugggug

SEQ ID NO: 720688 - RNA, 17 nt, Human
aggauguggagaaaauu

SEQ ID NO: 720689 - RNA, 22 nt, Human
uuuuucaagacaaccugcaugu

SEQ ID NO: 720690 - RNA, 20 nt, Human
ugugugaauuagggcauguu

SEQ ID NO: 720691 - RNA, 22 nt, Human
auucugcuaguaacagaugaag

SEQ ID NO: 720692 - RNA, 18 nt, Human
uccccugcucuggugcuc

SEQ ID NO: 720693 - RNA, 22 nt, Human
agccaggacagggcagcucgcu

SEQ ID NO: 720694 - RNA, 19 nt, Human
uuugugaagaaaaugaugc

SEQ ID NO: 720695 - RNA, 22 nt, Human
caguguuuugagaagggcacgu

SEQ ID NO: 720696 - RNA, 22 nt, Human
aagccaaggagaauggccucag

SEQ ID NO: 720697 - RNA, 22 nt, Human
uaaauguggagacucaggaguc

SEQ ID NO: 720698 - RNA, 22 nt, Human
ccacagcuucgcagucugcugc

SEQ ID NO: 720699 - RNA, 22 nt, Human
uucaugcuuguuccuccaccug

SEQ ID NO: 720700 - RNA, 19 nt, Human
ucugcagaggaauucuuca

SEQ ID NO: 720701 - RNA, 22 nt, Human
caggcgggacgugggaggauca

SEQ ID NO: 720702 - RNA, 23 nt, Human
gugcuuuaugaucugcugucccu

SEQ ID NO: 720703 - RNA, 23 nt, Human
uaacaauggacuccucuuagcua

SEQ ID NO: 720704 - RNA, 22 nt, Human
gugcuuaaccuaguuucuagua

SEQ ID NO: 720705 - RNA, 19 nt, Human
auuccucaaggacagaaau

SEQ ID NO: 720706 - RNA, 22 nt, Human
gauacauuucaaggaggacugg

SEQ ID NO: 720707 - RNA, 22 nt, Human
caggaacauuguagaauugaaa

SEQ ID NO: 720708 - RNA, 21 nt, Human
cauugagauaggagagauugu

SEQ ID NO: 720709 - RNA, 22 nt, Human
gucugccuuuaucaucuccuua

SEQ ID NO: 720710 - RNA, 22 nt, Human
cagccccucccucaggcaggug

SEQ ID NO: 720711 - RNA, 22 nt, Human
aacaaugcaguuaaugggaaga

SEQ ID NO: 720712 - RNA, 22 nt, Human
ucaguugcaugggaaguucaga

SEQ ID NO: 720713 - RNA, 22 nt, Human
auuucuuaugaauauugacugu

SEQ ID NO: 720714 - RNA, 22 nt, Human
cugcuuuaaaacccucagcugg

SEQ ID NO: 720715 - RNA, 22 nt, Human
auauuugugguuuuuggcuccu

SEQ ID NO: 720716 - RNA, 22 nt, Human
cucagggacuuggauccuggcc

SEQ ID NO: 720717 - RNA, 22 nt, Human
acaggaguagggcugguggaga

SEQ ID NO: 720718 - RNA, 22 nt, Human
cagauugagucugggaaaaggc

SEQ ID NO: 720719 - RNA, 22 nt, Human
cugccacucugggugggccugg

SEQ ID NO: 720720 - RNA, 22 nt, Human
uaaugcacaugacugaacuauu

SEQ ID NO: 720721 - RNA, 22 nt, Human
aaagcuuuguaaauaaacaggu

SEQ ID NO: 720722 - RNA, 22 nt, Human
aaagguuuauuuguugcucaca

SEQ ID NO: 720723 - RNA, 19 nt, Human
ggcagaagguguaggggga

SEQ ID NO: 720724 - RNA, 22 nt, Human
cauagcaacagcaucaagucaa

SEQ ID NO: 720725 - RNA, 22 nt, Human
aaagugcaguaacuugcccaag

SEQ ID NO: 720726 - RNA, 22 nt, Human
aaagguuaagguguucaagaaa

SEQ ID NO: 720727 - RNA, 23 nt, Human
auuuacagguuaaaugaaaucag

SEQ ID NO: 720728 - RNA, 22 nt, Human
uugcauaugaagcugacuuaaa

SEQ ID NO: 720729 - RNA, 22 nt, Human
cugagcagugguucuugagcgc

SEQ ID NO: 720730 - RNA, 22 nt, Human
uuccuugguacagaguagcuuu

SEQ ID NO: 720731 - RNA, 22 nt, Human
augugagcuccggcagguggaa

SEQ ID NO: 720732 - RNA, 22 nt, Human
gcagcuggcucugggaaaaacu

SEQ ID NO: 720733 - RNA, 22 nt, Human
ugcagcuccugugcugagugug

SEQ ID NO: 720734 - RNA, 22 nt, Human
uaggggugggauccaggaauua

SEQ ID NO: 720735 - RNA, 22 nt, Human
gaagcagugugaacccauguaa

SEQ ID NO: 720736 - RNA, 22 nt, Human
acaguguagaauccuguacuua

SEQ ID NO: 720737 - RNA, 22 nt, Human
ucucacugcaaauauuauguau

SEQ ID NO: 720738 - RNA, 22 nt, Human
gcaaugucugcaaugggugugg

SEQ ID NO: 720739 - RNA, 22 nt, Human
uuuccucuaaacgcauuugcuu

SEQ ID NO: 720740 - RNA, 22 nt, Human
gcaucauuuucuucuuccugca

SEQ ID NO: 720741 - RNA, 22 nt, Human
uacagaaauacugggggguucu

SEQ ID NO: 720742 - RNA, 22 nt, Human
aaacuugggugacccugagcaa

SEQ ID NO: 720743 - RNA, 22 nt, Human
agcuccugucucaagggagccu

SEQ ID NO: 720744 - RNA, 22 nt, Human
caggaacagcaccaggagcuag

SEQ ID NO: 720745 - RNA, 22 nt, Human
ucagcugccucucccuggaaga

SEQ ID NO: 720746 - RNA, 18 nt, Human
agggcugaugaguuuggg

SEQ ID NO: 720747 - RNA, 22 nt, Human
ucuuucagaaacuuugucugcg

SEQ ID NO: 720748 - RNA, 22 nt, Human
cagaggaagagauacaagcccu

SEQ ID NO: 720749 - RNA, 22 nt, Human
uccuuguaaaggagcucuaaca

SEQ ID NO: 720750 - RNA, 22 nt, Human
cuggcuuccaccauggccccug

SEQ ID NO: 720751 - RNA, 22 nt, Human
cauggcuugcuaguggcccaag

SEQ ID NO: 720752 - RNA, 22 nt, Human
ugaguaggugguuaagcaugga

SEQ ID NO: 720753 - RNA, 22 nt, Human
ugaggcaggacauggacaacug

SEQ ID NO: 720754 - RNA, 20 nt, Human
auguccuguugcugccccag

SEQ ID NO: 720755 - RNA, 22 nt, Human
aaacuucaacuggaaugggcua

SEQ ID NO: 720756 - RNA, 22 nt, Human
ugcagggaagcaaggguggcuc

SEQ ID NO: 720757 - RNA, 22 nt, Human
cugugcuuaccugcccagguga

SEQ ID NO: 720758 - RNA, 21 nt, Human
uucauaaaccauucucaugca

SEQ ID NO: 720759 - RNA, 22 nt, Human
acugucacuaacuaagucuagu

SEQ ID NO: 720760 - RNA, 22 nt, Human
ucaguccuacacgcucagggac

SEQ ID NO: 720761 - RNA, 22 nt, Human
acagacuuguucccuagugagu

SEQ ID NO: 720762 - RNA, 22 nt, Human
cagauauauuuuauuuggucaa

SEQ ID NO: 720763 - RNA, 22 nt, Human
uuuguuuugaacuagcucagaa

SEQ ID NO: 720764 - RNA, 22 nt, Human
auggagagagaaggcuugcugu

SEQ ID NO: 720765 - RNA, 22 nt, Human
ucccagagcaguacuccaggag

SEQ ID NO: 720766 - RNA, 22 nt, Human
ucaugcagauaagaauaaguaa

SEQ ID NO: 720767 - RNA, 22 nt, Human
gggucagagccguaacaggacu

SEQ ID NO: 720768 - RNA, 22 nt, Human
gauuuuucaguauaaaauauau

SEQ ID NO: 720769 - RNA, 22 nt, Human
acucuguagccuguaagagagc

SEQ ID NO: 720770 - RNA, 23 nt, Human
cacaacuaaucagaaucucuagg

SEQ ID NO: 720771 - RNA, 22 nt, Human
cuaaaugcccuacaaugacugg

SEQ ID NO: 720772 - RNA, 18 nt, Human
uuguagcaaauggcagug

SEQ ID NO: 720773 - RNA, 22 nt, Human
ggccucugccccagccacaccu

SEQ ID NO: 720774 - RNA, 22 nt, Human
aaaccuauuggcaagaauaaua

SEQ ID NO: 720775 - RNA, 22 nt, Human
ccccaccugugcgucugccgca

SEQ ID NO: 720776 - RNA, 22 nt, Human
aguguuuaccccaaucaguuua

SEQ ID NO: 720777 - RNA, 22 nt, Human
ucuguguuugccauccuugcuc

SEQ ID NO: 720778 - RNA, 22 nt, Human
uagagcugaguugacuccauuu

SEQ ID NO: 720779 - RNA, 22 nt, Human
acaguguuuugucuggcagggc

SEQ ID NO: 720780 - RNA, 22 nt, Human
gugggccuugcagggugcaggg

SEQ ID NO: 720781 - RNA, 22 nt, Human
caacuuuaugauugguuuguca

SEQ ID NO: 720782 - RNA, 22 nt, Human
uuucaaaggaggcugagaggau

SEQ ID NO: 720783 - RNA, 22 nt, Human
acaguguguuggaggagacugu

SEQ ID NO: 720784 - RNA, 22 nt, Human
agcugccuggccggagccacug

SEQ ID NO: 720785 - RNA, 22 nt, Human
augagauaggaacaaacuuaca

SEQ ID NO: 720786 - RNA, 22 nt, Human
cagcauaucugaguugaaagag

SEQ ID NO: 720787 - RNA, 22 nt, Human
aacuucuaaucuguacaguuuu

SEQ ID NO: 720788 - RNA, 22 nt, Human
guggugcaggugucacugcaga

SEQ ID NO: 720789 - RNA, 21 nt, Human
auguccuggcuaccagcgcag

SEQ ID NO: 720790 - RNA, 22 nt, Human
gaaugaauagguguccagaugg

SEQ ID NO: 720791 - RNA, 22 nt, Human
gcccuuggaacagccuccugcu

SEQ ID NO: 720792 - RNA, 22 nt, Human
ugaaugauuucuuaggcaauug

SEQ ID NO: 720793 - RNA, 22 nt, Human
cugaggaagagguaccauuugu

SEQ ID NO: 720794 - RNA, 22 nt, Human
cucucucuuguguugcugcaga

SEQ ID NO: 720795 - RNA, 22 nt, Human
cucaggucgcuauuucucuuac

SEQ ID NO: 720796 - RNA, 22 nt, Human
cuggagagaaaugacaaagcua

SEQ ID NO: 720797 - RNA, 22 nt, Human
augcagggaccuuugcuuuggu

SEQ ID NO: 720798 - RNA, 22 nt, Human
gauguucuagaagugugguguu

SEQ ID NO: 720799 - RNA, 22 nt, Human
aggccagacagcuagaaacagg

SEQ ID NO: 720800 - RNA, 22 nt, Human
ucaggaacauaaugugagucag

SEQ ID NO: 720801 - RNA, 22 nt, Human
uggaacacaucuaaggaagcag

SEQ ID NO: 720802 - RNA, 22 nt, Human
augaggucacaguguuuggcau

SEQ ID NO: 720803 - RNA, 22 nt, Human
guccugugcccuggguggcgcu

SEQ ID NO: 720804 - RNA, 22 nt, Human
augcacacaagcuuauguauua

SEQ ID NO: 720805 - RNA, 22 nt, Human
aaaacugaaccuugagaucuuu

SEQ ID NO: 720806 - RNA, 23 nt, Human
gcugagguacauuuacaggaaga

SEQ ID NO: 720807 - RNA, 22 nt, Human
aaugcuuauggguuccauaaua

SEQ ID NO: 720808 - RNA, 22 nt, Human
gucuuauuagguuaacccugcu

SEQ ID NO: 720809 - RNA, 22 nt, Human
ccaggaaggccuggaugccccc

SEQ ID NO: 720810 - RNA, 22 nt, Human
augauacaucuucaugucagug

SEQ ID NO: 720811 - RNA, 23 nt, Human
augcaacauugccaguaugggca

SEQ ID NO: 720812 - RNA, 22 nt, Human
uccuggcuggaauuucucacuc

SEQ ID NO: 720813 - RNA, 22 nt, Human
gugugagagacugaagaaagcc

SEQ ID NO: 720814 - RNA, 22 nt, Human
auacacuucauguuuucaucug

SEQ ID NO: 720815 - RNA, 23 nt, Human
caauuguauaaagcaaaugguuu

SEQ ID NO: 720816 - RNA, 22 nt, Human
aacaucagaauauccauguugg

SEQ ID NO: 720817 - RNA, 22 nt, Human
gcccgcagagaucuuuaacaaa

SEQ ID NO: 720818 - RNA, 22 nt, Human
cagcugccccauaaaucacagu

SEQ ID NO: 720819 - RNA, 18 nt, Human
uggcucuggacuugcucc

SEQ ID NO: 720820 - RNA, 22 nt, Human
ugacacugaccuaaagaccugg

SEQ ID NO: 720821 - RNA, 22 nt, Human
aggaagcgugggucuggcugga

SEQ ID NO: 720822 - RNA, 18 nt, Human
ccuggcacacuggcucau

SEQ ID NO: 720823 - RNA, 22 nt, Human
aaaacaguuuuugcuaacugcu

SEQ ID NO: 720824 - RNA, 22 nt, Human
auauucuuauccuuuucucugu

SEQ ID NO: 720825 - RNA, 22 nt, Human
gcuggcagggacagcugcgugu

SEQ ID NO: 720826 - RNA, 22 nt, Human
acccucagcuucuuggauuaau

SEQ ID NO: 720827 - RNA, 22 nt, Human
uggauauguuggaggugaaggu

SEQ ID NO: 720828 - RNA, 19 nt, Human
ucugggaagccgggcucca

SEQ ID NO: 720829 - RNA, 22 nt, Human
cauagauucuuauuuccaucuu

SEQ ID NO: 720830 - RNA, 22 nt, Human
aggaccuguagggccugcaucc

SEQ ID NO: 720831 - RNA, 22 nt, Human
gcugcuccgucugagcucuggu

SEQ ID NO: 720832 - RNA, 22 nt, Human
cagcaggcaggugggccaaguc

SEQ ID NO: 720833 - RNA, 22 nt, Human
ccucuggacuugggacagugag

SEQ ID NO: 720834 - RNA, 22 nt, Human
auuuauugagagggaggggaau

SEQ ID NO: 720835 - RNA, 22 nt, Human
uggcaggaaaguaacagagcac

SEQ ID NO: 720836 - RNA, 22 nt, Human
uucuguuacuguuggucauaac

SEQ ID NO: 720837 - RNA, 22 nt, Human
agaaaguuguuuuagccaaacc

SEQ ID NO: 720838 - RNA, 23 nt, Human
acagccuucuggggcuucugggc

SEQ ID NO: 720839 - RNA, 22 nt, Human
ucacagugacuuacagagauug

SEQ ID NO: 720840 - RNA, 23 nt, Human
uggccucuccccaccuggcagaa

SEQ ID NO: 720841 - RNA, 22 nt, Human
aaacacuuccuguaacaugaca

SEQ ID NO: 720842 - RNA, 22 nt, Human
agcccagcugcuauguaccugg

SEQ ID NO: 720843 - RNA, 23 nt, Human
gccuucagcucgggaaggcuccc

SEQ ID NO: 720844 - RNA, 22 nt, Human
augaggucuggcaaucagaaac

SEQ ID NO: 720845 - RNA, 22 nt, Human
gaucuucucuuuaguagaaaca

SEQ ID NO: 720846 - RNA, 22 nt, Human
ccuguacauuagcugugaauug

SEQ ID NO: 720847 - RNA, 22 nt, Human
ccuggggcuuucuuuguaucau

SEQ ID NO: 720848 - RNA, 22 nt, Human
ugccuggcaucuagcccuggga

SEQ ID NO: 720849 - RNA, 22 nt, Human
uucaaugagcccggggccauag

SEQ ID NO: 720850 - RNA, 22 nt, Human
uugccaggagacaucuggagcc

SEQ ID NO: 720851 - RNA, 22 nt, Human
cagguaggaggcucccuagucc

SEQ ID NO: 720852 - RNA, 22 nt, Human
agggucugacugaauggaaaag

SEQ ID NO: 720853 - RNA, 22 nt, Human
gcuuucuguggugauguaaagg

SEQ ID NO: 720854 - RNA, 22 nt, Human
ucccaaagucaagcugugucuu

SEQ ID NO: 720855 - RNA, 22 nt, Human
ugaaugauacagaauuauguag

SEQ ID NO: 720856 - RNA, 22 nt, Human
ugccuuccuggagcugaaggcu

SEQ ID NO: 720857 - RNA, 22 nt, Human
aaacucaagucuaugaacaagg

SEQ ID NO: 720858 - RNA, 22 nt, Human
ucugggcuuuaagaacucuguu

SEQ ID NO: 720859 - RNA, 22 nt, Human
ucuggccacccgaggccccugc

SEQ ID NO: 720860 - RNA, 22 nt, Human
aggaccugaaauucuugcuuuu

SEQ ID NO: 720861 - RNA, 22 nt, Human
uggcuucauuauuguuuuuccu

SEQ ID NO: 720862 - RNA, 22 nt, Human
gccagccaagauugagaaggua

SEQ ID NO: 720863 - RNA, 21 nt, Human
gugugucuaauguaguggaaa

SEQ ID NO: 720864 - RNA, 22 nt, Human
cuugagcuaggaaggcugaggc

SEQ ID NO: 720865 - RNA, 22 nt, Human
ccucagugcguacugaacagug

SEQ ID NO: 720866 - RNA, 22 nt, Human
ugauuucaaguagugacaugcu

SEQ ID NO: 720867 - RNA, 22 nt, Human
aggacacacugcaagagccugg

SEQ ID NO: 720868 - RNA, 22 nt, Human
uccagcccucuggcccgcggug

SEQ ID NO: 720869 - RNA, 22 nt, Human
agaaguuugguccuauaaacuc

SEQ ID NO: 720870 - RNA, 22 nt, Human
cugcagauuggccugauguuca

SEQ ID NO: 720871 - RNA, 22 nt, Human
uacaaguauggaaugauucuca

SEQ ID NO: 720872 - RNA, 22 nt, Human
guguuauuagagcauuaauuuu

SEQ ID NO: 720873 - RNA, 22 nt, Human
ucuucuccauaaucaacacucu

SEQ ID NO: 720874 - RNA, 22 nt, Human
ccagugcaccauuucccucugu

SEQ ID NO: 720875 - RNA, 22 nt, Human
cagcgucucguugugggccucg

SEQ ID NO: 720876 - RNA, 22 nt, Human
gccaaaucuggauuuagcaaga

SEQ ID NO: 720877 - RNA, 22 nt, Human
cccaaggcauggcaugguggca

SEQ ID NO: 720878 - RNA, 22 nt, Human
uuaauuguaaaguuugccuguu

SEQ ID NO: 720879 - RNA, 22 nt, Human
aauuuguuuucaagucacugga

SEQ ID NO: 720880 - RNA, 22 nt, Human
gugcauguuaaugguguacaaa

SEQ ID NO: 720881 - RNA, 22 nt, Human
cccugagaacaacuuagggguc

SEQ ID NO: 720882 - RNA, 21 nt, Human
agagaagaggacuuucucaca

SEQ ID NO: 720883 - RNA, 22 nt, Human
gucuuauuuaaggacaagaaga

SEQ ID NO: 720884 - RNA, 22 nt, Human
uacaguaucuucuggcaagcau

SEQ ID NO: 720885 - RNA, 22 nt, Human
ccagugcgagccugugcuggcc

SEQ ID NO: 720886 - RNA, 22 nt, Human
uccuggccacccgacagaaguc

SEQ ID NO: 720887 - RNA, 17 nt, Human
uauguaguacuuauaaa

SEQ ID NO: 720888 - RNA, 22 nt, Human
gaggccacuuccuacuggagga

SEQ ID NO: 720889 - RNA, 22 nt, Human
gaguggggucugggcaucaguc

SEQ ID NO: 720890 - RNA, 20 nt, Human
ugcuccaucuaaagugauua

SEQ ID NO: 720891 - RNA, 22 nt, Human
augcugaaggccauccugcauc

SEQ ID NO: 720892 - RNA, 22 nt, Human
aauaguucuagcucagaagcuc

SEQ ID NO: 720893 - RNA, 22 nt, Human
ugaaacaagggccaugggaaac

SEQ ID NO: 720894 - RNA, 22 nt, Human
auaguaaauuaucguggagaga

SEQ ID NO: 720895 - RNA, 22 nt, Human
uagcugagagcucacuugagga

SEQ ID NO: 720896 - RNA, 22 nt, Human
cccaggcuggagggcaguguca

SEQ ID NO: 720897 - RNA, 22 nt, Human
ucauuuuucucuuacacguaga

SEQ ID NO: 720898 - RNA, 23 nt, Human
uggcagcagaucuuaaagugacc

SEQ ID NO: 720899 - RNA, 17 nt, Human
agauggcaggaggcaga

SEQ ID NO: 720900 - RNA, 22 nt, Human
auuugcuuguaaauguaugccu

SEQ ID NO: 720901 - RNA, 23 nt, Human
guaggaauuuucacuuccucuug

SEQ ID NO: 720902 - RNA, 22 nt, Human
uggcacuuuacacccauuuggc

SEQ ID NO: 720903 - RNA, 22 nt, Human
gcugggaggaauuuggggaaua

SEQ ID NO: 720904 - RNA, 22 nt, Human
uuaauuaauuaguuaagcaugu

SEQ ID NO: 720905 - RNA, 22 nt, Human
ggccuuccuucccagccuacug

SEQ ID NO: 720906 - RNA, 22 nt, Human
ugcauuguaggauguuuagcag

SEQ ID NO: 720907 - RNA, 17 nt, Human
gcccaggaaggacggcc

SEQ ID NO: 720908 - RNA, 22 nt, Human
ucugccugcgcucacggggccg

SEQ ID NO: 720909 - RNA, 22 nt, Human
gauacagaaaggcugcauugag

SEQ ID NO: 720910 - RNA, 22 nt, Human
gcaugcagacagucugagacca

SEQ ID NO: 720911 - RNA, 22 nt, Human
guuucuggcgccggggcaggcc

SEQ ID NO: 720912 - RNA, 20 nt, Human
aggcugagggugauuguguc

SEQ ID NO: 720913 - RNA, 22 nt, Human
gagcugggcgagccggggaagu

SEQ ID NO: 720914 - RNA, 22 nt, Human
ccaggugggaggaaagcagaga

SEQ ID NO: 720915 - RNA, 16 nt, Human
uugcaaggcguuuaua

SEQ ID NO: 720916 - RNA, 22 nt, Human
aauacagaggggucacaauuca

SEQ ID NO: 720917 - RNA, 22 nt, Human
gcagcaucuagggcacuggccu

SEQ ID NO: 720918 - RNA, 20 nt, Human
uauuaugaccuguguucugg

SEQ ID NO: 720919 - RNA, 22 nt, Human
guccuuggagcuccccucugua

SEQ ID NO: 720920 - RNA, 22 nt, Human
aguguccuugauuccuguuguu

SEQ ID NO: 720921 - RNA, 22 nt, Human
caguguuucugugcccaguggg

SEQ ID NO: 720922 - RNA, 22 nt, Human
gugccaaaagcuauaauuuggu

SEQ ID NO: 720923 - RNA, 22 nt, Human
uugcagcugugagcuuuacacg

SEQ ID NO: 720924 - RNA, 22 nt, Human
ucuccagggugagcuaggccag

SEQ ID NO: 720925 - RNA, 22 nt, Human
uucugccaaaggcuuuguuuug

SEQ ID NO: 720926 - RNA, 22 nt, Human
ucagcccaggaaugagccuucu

SEQ ID NO: 720927 - RNA, 22 nt, Human
ugugggaggauucagaauuggg

SEQ ID NO: 720928 - RNA, 22 nt, Human
gggcugaguuccugccucacuc

SEQ ID NO: 720929 - RNA, 22 nt, Human
ugaaucaguauaaauucucaaa

SEQ ID NO: 720930 - RNA, 22 nt, Human
cagcuucauguccagguacugu

SEQ ID NO: 720931 - RNA, 23 nt, Human
agcuucaucuugcugugucucag

SEQ ID NO: 720932 - RNA, 22 nt, Human
gcgcaggagccgcggagggccg

SEQ ID NO: 720933 - RNA, 22 nt, Human
aaauuggcaguucagggaauua

SEQ ID NO: 720934 - RNA, 22 nt, Human
gcagugaagauggcagguuggg

SEQ ID NO: 720935 - RNA, 20 nt, Human
acauccuggugacuagaacu

SEQ ID NO: 720936 - RNA, 22 nt, Human
aaaugccucugcuguacacaau

SEQ ID NO: 720937 - RNA, 22 nt, Human
cacagucccauucgagaguaau

SEQ ID NO: 720938 - RNA, 22 nt, Human
ucacagaagcaucauacccgga

SEQ ID NO: 720939 - RNA, 22 nt, Human
ggcaguggcuccucucuacucc

SEQ ID NO: 720940 - RNA, 22 nt, Human
caucuuauuuucuucuagugcu

SEQ ID NO: 720941 - RNA, 19 nt, Human
cauacaauuaccauaggau

SEQ ID NO: 720942 - RNA, 22 nt, Human
gugggcagacaugauagaagga

SEQ ID NO: 720943 - RNA, 22 nt, Human
cuggcugccagcauuuggggga

SEQ ID NO: 720944 - RNA, 22 nt, Human
aagacacuaagcuuucaggaua

SEQ ID NO: 720945 - RNA, 22 nt, Human
ccugggauuuccugagcacucu

SEQ ID NO: 720946 - RNA, 22 nt, Human
uuacuugaaaaccaccaguauu

SEQ ID NO: 720947 - RNA, 20 nt, Human
cccagcccgggccgcgcucg

SEQ ID NO: 720948 - RNA, 22 nt, Human
uugggguaaaaugucguaagag

SEQ ID NO: 720949 - RNA, 22 nt, Human
gccucugcgccucagccgaccu

SEQ ID NO: 720950 - RNA, 22 nt, Human
acacagcuucaaagucuaauuc

SEQ ID NO: 720951 - RNA, 22 nt, Human
aauaagcugcuaggaacuuagu

SEQ ID NO: 720952 - RNA, 22 nt, Human
ucagggacauuuagacacugau

SEQ ID NO: 720953 - RNA, 22 nt, Human
gaugcugugguaagccccaccg

SEQ ID NO: 720954 - RNA, 20 nt, Human
cuccaaggcuugcaggaggc

SEQ ID NO: 720955 - RNA, 22 nt, Human
acagcagaguugaguaguugca

SEQ ID NO: 720956 - RNA, 22 nt, Human
uauauagaaaagcagauguugg

SEQ ID NO: 720957 - RNA, 22 nt, Human
agggcugaaguuauggcugagc

SEQ ID NO: 720958 - RNA, 22 nt, Human
uccucccugaguggggacagcu

SEQ ID NO: 720959 - RNA, 22 nt, Human
cuggagauaaguaaagaggcaa

SEQ ID NO: 720960 - RNA, 22 nt, Human
agaauaaaucaaauguccugag

SEQ ID NO: 720961 - RNA, 21 nt, Human
gccucugcugucuuauuguga

SEQ ID NO: 720962 - RNA, 18 nt, Human
ggagccagucugucucug

SEQ ID NO: 720963 - RNA, 22 nt, Human
ucacagccuggucacucugccc

SEQ ID NO: 720964 - RNA, 22 nt, Human
ugcccaggauugugaggucagg

SEQ ID NO: 720965 - RNA, 22 nt, Human
cucuccagccacagaagcugcu

SEQ ID NO: 720966 - RNA, 22 nt, Human
acagugauuucauccuucuggg

SEQ ID NO: 720967 - RNA, 22 nt, Human
agauacagccugccagguucuu

SEQ ID NO: 720968 - RNA, 22 nt, Human
gaccucagauuuucccaggcca

SEQ ID NO: 720969 - RNA, 18 nt, Human
acauuucucucugcguga

SEQ ID NO: 720970 - RNA, 22 nt, Human
acugccuggcagagguuugcaa

SEQ ID NO: 720971 - RNA, 22 nt, Human
cuggaaggagcccgggcggauc

SEQ ID NO: 720972 - RNA, 22 nt, Human
guggcacaggguuguuggucau

SEQ ID NO: 720973 - RNA, 22 nt, Human
caguagcacuagauaugugugg

SEQ ID NO: 720974 - RNA, 22 nt, Human
ggugaauaagcugaacacuugg

SEQ ID NO: 720975 - RNA, 22 nt, Human
ugggcuacucugggagccuaac

SEQ ID NO: 720976 - RNA, 22 nt, Human
uuucuucuuucccagugauggg

SEQ ID NO: 720977 - RNA, 22 nt, Human
ugcuucugacugggucaguuga

SEQ ID NO: 720978 - RNA, 22 nt, Human
aggcacuguucccaguuauccu

SEQ ID NO: 720979 - RNA, 19 nt, Human
cugggacuccugauaccuu

SEQ ID NO: 720980 - RNA, 22 nt, Human
gcugagccaugaggccucuugc

SEQ ID NO: 720981 - RNA, 22 nt, Human
cugucacugaugcuccugccac

SEQ ID NO: 720982 - RNA, 23 nt, Human
acagaaaguucugcuggacagag

SEQ ID NO: 720983 - RNA, 22 nt, Human
cuggcuggccaugcagcgccag

SEQ ID NO: 720984 - RNA, 22 nt, Human
cuguuggaugguuuccaaaaga

SEQ ID NO: 720985 - RNA, 22 nt, Human
ggagggcaucaaucaggccugg

SEQ ID NO: 720986 - RNA, 22 nt, Human
acagauuuuaaaugacacuccc

SEQ ID NO: 720987 - RNA, 22 nt, Human
aggacagggauucaaacuccca

SEQ ID NO: 720988 - RNA, 17 nt, Human
caguggcagaucuucuc

SEQ ID NO: 720989 - RNA, 22 nt, Human
ugcagccaucgcagagucugua

SEQ ID NO: 720990 - RNA, 22 nt, Human
caugcuggucagccaguggaug

SEQ ID NO: 720991 - RNA, 22 nt, Human
cuugauggaggggccaggcuuu

SEQ ID NO: 720992 - RNA, 22 nt, Human
uggcagugaugcggcaggacau

SEQ ID NO: 720993 - RNA, 22 nt, Human
guuaauuuaguagaguccagau

SEQ ID NO: 720994 - RNA, 22 nt, Human
gcucuguuaacaguccagcuuu

SEQ ID NO: 720995 - RNA, 22 nt, Human
cugucaucacaguugagcagcc

SEQ ID NO: 720996 - RNA, 22 nt, Human
augcuucuguguauguuucagg

SEQ ID NO: 720997 - RNA, 22 nt, Human
aagcccuggauuaaagaugcca

SEQ ID NO: 720998 - RNA, 20 nt, Human
uccuucagacuuuggaguug

SEQ ID NO: 720999 - RNA, 22 nt, Human
agucugaguaucucugagccag

SEQ ID NO: 721000 - RNA, 22 nt, Human
aggaacaacugauucagucaac

SEQ ID NO: 721001 - RNA, 22 nt, Human
gacagcuuaggaaguuucuauu

SEQ ID NO: 721002 - RNA, 22 nt, Human
cugggagaauuuguugaaggau

SEQ ID NO: 721003 - RNA, 22 nt, Human
gcugugagcacugcugggugga

SEQ ID NO: 721004 - RNA, 22 nt, Human
agggcucaguaaacgguggauu

SEQ ID NO: 721005 - RNA, 22 nt, Human
ggcuuuugaauuccaaggcauu

SEQ ID NO: 721006 - RNA, 22 nt, Human
ucaggaacauuuaaccacaggg

SEQ ID NO: 721007 - RNA, 21 nt, Human
ugcugcugaucgggguuggcu

SEQ ID NO: 721008 - RNA, 22 nt, Human
guuaaccaaggcaccaagugua

SEQ ID NO: 721009 - RNA, 22 nt, Human
aaaggauuagagauaccaugcc

SEQ ID NO: 721010 - RNA, 22 nt, Human
ggucccaugaaagagggaggcc

SEQ ID NO: 721011 - RNA, 22 nt, Human
gggcacagagaagguuuuagug

SEQ ID NO: 721012 - RNA, 22 nt, Human
ucucagaaaugacaggagguac

SEQ ID NO: 721013 - RNA, 22 nt, Human
ucaggucuauagaagaggaggg

SEQ ID NO: 721014 - RNA, 22 nt, Human
cucccagccuucgccagucuga

SEQ ID NO: 721015 - RNA, 21 nt, Human
gccaccccuggcacaggugcu

SEQ ID NO: 721016 - RNA, 22 nt, Human
aaguauuucuggccugugaaag

SEQ ID NO: 721017 - RNA, 22 nt, Human
ggcuggcucagggcuugagaga

SEQ ID NO: 721018 - RNA, 22 nt, Human
accagggcggcuugaggaggca

SEQ ID NO: 721019 - RNA, 22 nt, Human
uaacaaugguuuugcugauaau

SEQ ID NO: 721020 - RNA, 19 nt, Human
acugggaaaaaggcacugg

SEQ ID NO: 721021 - RNA, 22 nt, Human
cauggccuugagugacugcacu

SEQ ID NO: 721022 - RNA, 22 nt, Human
uccaggggugauuuuugacuug

SEQ ID NO: 721023 - RNA, 22 nt, Human
cuucuuccugcugcagccucca

SEQ ID NO: 721024 - RNA, 22 nt, Human
ugugaucuuagacaacucacug

SEQ ID NO: 721025 - RNA, 22 nt, Human
gcaguguuuuucaaugcuucca

SEQ ID NO: 721026 - RNA, 22 nt, Human
cuccccuccuuaggucuucuag

SEQ ID NO: 721027 - RNA, 22 nt, Human
aaacacuaauaacaguggcugg

SEQ ID NO: 721028 - RNA, 22 nt, Human
ucugcauauuuaucaugagucu

SEQ ID NO: 721029 - RNA, 22 nt, Human
gaaagcacaggcucaggaacag

SEQ ID NO: 721030 - RNA, 22 nt, Human
uguaauaccacuguuggacauu

SEQ ID NO: 721031 - RNA, 22 nt, Human
ugccacaguuucauggauucug

SEQ ID NO: 721032 - RNA, 22 nt, Human
cagaagaugcagugucugagaa

SEQ ID NO: 721033 - RNA, 22 nt, Human
caaaaccuaaacagacugucca

SEQ ID NO: 721034 - RNA, 22 nt, Human
uacugaggguaugaagccaagg

SEQ ID NO: 721035 - RNA, 19 nt, Human
cuucuccagcuucuagaag

SEQ ID NO: 721036 - RNA, 22 nt, Human
aggaagcacuggaagggguugg

SEQ ID NO: 721037 - RNA, 22 nt, Human
uuuagacauagcugaaaucauu

SEQ ID NO: 721038 - RNA, 22 nt, Human
aguggcagccuuguucauuaug

SEQ ID NO: 721039 - RNA, 22 nt, Human
uuggcccacucucagaaugugg

SEQ ID NO: 721040 - RNA, 22 nt, Human
ucuccagaguaaccuuggagca

SEQ ID NO: 721041 - RNA, 22 nt, Human
cuucuucucuacauccuuugau

SEQ ID NO: 721042 - RNA, 22 nt, Human
guugucagguaaaacaguaugg

SEQ ID NO: 721043 - RNA, 22 nt, Human
gugccuguaaguuguaugggcu

SEQ ID NO: 721044 - RNA, 22 nt, Human
caggacaggaguggggucaaag

SEQ ID NO: 721045 - RNA, 19 nt, Human
ugcccaggccagguugggc

SEQ ID NO: 721046 - RNA, 22 nt, Human
ccauuuaguaaggaagaacagc

SEQ ID NO: 721047 - RNA, 19 nt, Human
ggcacuggggccaggacca

SEQ ID NO: 721048 - RNA, 22 nt, Human
uuuacgacugcuaaaugccugc

SEQ ID NO: 721049 - RNA, 20 nt, Human
caugcaacagauuauuuccc

SEQ ID NO: 721050 - RNA, 22 nt, Human
agguggccaagacuguuugaca

SEQ ID NO: 721051 - RNA, 22 nt, Human
aaugcugagggaugagagaggc

SEQ ID NO: 721052 - RNA, 22 nt, Human
uuugcauucuagaaaaauuucu

SEQ ID NO: 721053 - RNA, 20 nt, Human
ugggcacagcuuuggagggc

SEQ ID NO: 721054 - RNA, 22 nt, Human
ggcuccagguuuaaggguaugu

SEQ ID NO: 721055 - RNA, 22 nt, Human
ccccucccugaccugguugggc

SEQ ID NO: 721056 - RNA, 22 nt, Human
cagagguagcaugcuguggcuu

SEQ ID NO: 721057 - RNA, 22 nt, Human
acuuguguuaccaagguuuggu

SEQ ID NO: 721058 - RNA, 22 nt, Human
aggacaguguggaagagggugc

SEQ ID NO: 721059 - RNA, 22 nt, Human
ucagccaguuaaggcuuagaca

SEQ ID NO: 721060 - RNA, 22 nt, Human
aguagaauagauggauacuauu

SEQ ID NO: 721061 - RNA, 22 nt, Human
uggcagagcaaaaagauagaau

SEQ ID NO: 721062 - RNA, 19 nt, Human
ugagagugaggaaggcuuc

SEQ ID NO: 721063 - RNA, 22 nt, Human
acugugccacaauucaccaggg

SEQ ID NO: 721064 - RNA, 21 nt, Human
cauuugaucccucaucaggau

SEQ ID NO: 721065 - RNA, 22 nt, Human
cauguaaaaagaagaaucugga

SEQ ID NO: 721066 - RNA, 22 nt, Human
cuggggcugcgguggaggagcc

SEQ ID NO: 721067 - RNA, 22 nt, Human
agggcuccugaggcccuucugg

SEQ ID NO: 721068 - RNA, 22 nt, Human
uuugaacugauaaucuucuguu

SEQ ID NO: 721069 - RNA, 22 nt, Human
cgugucugggcucccauggcag

SEQ ID NO: 721070 - RNA, 22 nt, Human
ccagcagcccacaggcgucccu

SEQ ID NO: 721071 - RNA, 22 nt, Human
caugcauacacaggucaggcag

SEQ ID NO: 721072 - RNA, 22 nt, Human
acacaaaguuggaugacaaaau

SEQ ID NO: 721073 - RNA, 21 nt, Human
gaggccacuaauaggggcaga

SEQ ID NO: 721074 - RNA, 18 nt, Human
gcacauguaagaguaaag

SEQ ID NO: 721075 - RNA, 22 nt, Human
auauacaguauguacugugguu

SEQ ID NO: 721076 - RNA, 22 nt, Human
gggcuggacugcauugccucgc

SEQ ID NO: 721077 - RNA, 22 nt, Human
gggacacagguaucucaaauga

SEQ ID NO: 721078 - RNA, 22 nt, Human
gcugccuuugugagccaagggg

SEQ ID NO: 721079 - RNA, 22 nt, Human
aucaguuugagugcugugucaa

SEQ ID NO: 721080 - RNA, 22 nt, Human
gggcaggugauuuuggcuccau

SEQ ID NO: 721081 - RNA, 22 nt, Human
ucugcacaauugaucauggcaa

SEQ ID NO: 721082 - RNA, 22 nt, Human
ucugaacauuuuuugcagccua

SEQ ID NO: 721083 - RNA, 22 nt, Human
cugggcucagcccaugcugucc

SEQ ID NO: 721084 - RNA, 17 nt, Human
ccucccacaccgcccug

SEQ ID NO: 721085 - RNA, 22 nt, Human
uacaucaaaucaauguuccagu

SEQ ID NO: 721086 - RNA, 22 nt, Human
aaagucaucauuucuuuucaaa

SEQ ID NO: 721087 - RNA, 22 nt, Human
cacaauuauagaagaaagcaua

SEQ ID NO: 721088 - RNA, 22 nt, Human
aaaaugugcaguuuuuaagcug

SEQ ID NO: 721089 - RNA, 22 nt, Human
agugaaauugcuguaagaggaa

SEQ ID NO: 721090 - RNA, 22 nt, Human
uagauauaucugucauacuggu

SEQ ID NO: 721091 - RNA, 22 nt, Human
guguaugaggggagaauguuuu

SEQ ID NO: 721092 - RNA, 22 nt, Human
gaaggccacggaauggagcugg

SEQ ID NO: 721093 - RNA, 22 nt, Human
uaaggaaacaacuuguauuuuu

SEQ ID NO: 721094 - RNA, 22 nt, Human
gaguccaggcuguugcucaucu

SEQ ID NO: 721095 - RNA, 22 nt, Human
gucaggaaguggcauuggagaa

SEQ ID NO: 721096 - RNA, 22 nt, Human
gggcucagaggaguggccuggg

SEQ ID NO: 721097 - RNA, 22 nt, Human
gggucaggcucagcagggcagc

SEQ ID NO: 721098 - RNA, 22 nt, Human
uuacaacacuacuuauccuuga

SEQ ID NO: 721099 - RNA, 22 nt, Human
ucacauguguuuucucaccaac

SEQ ID NO: 721100 - RNA, 22 nt, Human
caggcagccaggggaccugucc

SEQ ID NO: 721101 - RNA, 22 nt, Human
gcccucaggcagggagucuuuc

SEQ ID NO: 721102 - RNA, 22 nt, Human
ugugauuuccagccauuaaaaa

SEQ ID NO: 721103 - RNA, 22 nt, Human
aguggcaguagaugagcugguu

SEQ ID NO: 721104 - RNA, 18 nt, Human
cagauccaggcagcuauu

SEQ ID NO: 721105 - RNA, 22 nt, Human
aagcaucuuagaccugaguucc

SEQ ID NO: 721106 - RNA, 22 nt, Human
gcaggaguguggugggacaucc

SEQ ID NO: 721107 - RNA, 22 nt, Human
guacauuuugagguuaaaacaa

SEQ ID NO: 721108 - RNA, 22 nt, Human
acauugaacauggcaggacauu

SEQ ID NO: 721109 - RNA, 19 nt, Human
gcucugugaugcugagggg

SEQ ID NO: 721110 - RNA, 22 nt, Human
uuaaagcuggcguuacaguuug

SEQ ID NO: 721111 - RNA, 22 nt, Human
ugagguaggugguaagagauac

SEQ ID NO: 721112 - RNA, 22 nt, Human
cuuuguuaucuguaaaugguua

SEQ ID NO: 721113 - RNA, 22 nt, Human
cacccccagcagggaaaggagg

SEQ ID NO: 721114 - RNA, 22 nt, Human
uuggaacuuaacccugauaggu

SEQ ID NO: 721115 - RNA, 22 nt, Human
gccaggacccuggagggcaucu

SEQ ID NO: 721116 - RNA, 22 nt, Human
agcaggcaggaaugguggaaca

SEQ ID NO: 721117 - RNA, 22 nt, Human
gaaguugauagaguacaugauu

SEQ ID NO: 721118 - RNA, 22 nt, Human
agcagccuauucuucucuugga

SEQ ID NO: 721119 - RNA, 22 nt, Human
gagucuccuacuggcuguccuu

SEQ ID NO: 721120 - RNA, 22 nt, Human
acugugggggagccagucccau

SEQ ID NO: 721121 - RNA, 22 nt, Human
agaagcucggguaagcuccauu

SEQ ID NO: 721122 - RNA, 22 nt, Human
cccagcucccauguucuccaau

SEQ ID NO: 721123 - RNA, 22 nt, Human
cauuauauuuuacugcauggga

SEQ ID NO: 721124 - RNA, 22 nt, Human
agaacaaaauuagaggagugca

SEQ ID NO: 721125 - RNA, 22 nt, Human
agcauggacaguggcagcagug

SEQ ID NO: 721126 - RNA, 22 nt, Human
uggagaugcacgagcaggugga

SEQ ID NO: 721127 - RNA, 22 nt, Human
cuccaugggggcuggccugugu

SEQ ID NO: 721128 - RNA, 22 nt, Human
cccaaguuaaaauucagugcuc

SEQ ID NO: 721129 - RNA, 22 nt, Human
ugccaggggaccuagggauguc

SEQ ID NO: 721130 - RNA, 22 nt, Human
guuuaaauaauuaggggccugu

SEQ ID NO: 721131 - RNA, 22 nt, Human
aggggcuuguggaguugcuggu

SEQ ID NO: 721132 - RNA, 22 nt, Human
acccagccauguucaguucucu

SEQ ID NO: 721133 - RNA, 19 nt, Human
agccacagaacuugcagga

SEQ ID NO: 721134 - RNA, 18 nt, Human
gaugaggcugucugagaa

SEQ ID NO: 721135 - RNA, 22 nt, Human
acaggcagugauuuccucuggu

SEQ ID NO: 721136 - RNA, 22 nt, Human
uaagagaugcuuuucuaaauaa

SEQ ID NO: 721137 - RNA, 22 nt, Human
auguguguguuuaauccucaaa

SEQ ID NO: 721138 - RNA, 22 nt, Human
ggcucuucuacuucagaugggg

SEQ ID NO: 721139 - RNA, 22 nt, Human
gaugggguuuugccaggcuggu

SEQ ID NO: 721140 - RNA, 22 nt, Human
ucagcaggugaacaucaugcca

SEQ ID NO: 721141 - RNA, 22 nt, Human
gcugcugguccucagagcucau

SEQ ID NO: 721142 - RNA, 22 nt, Human
uaaagguacgaagugagggauu

SEQ ID NO: 721143 - RNA, 22 nt, Human
uucaacaucaagaaugcaugga

SEQ ID NO: 721144 - RNA, 22 nt, Human
accuuagaaaaucaaaauuaga

SEQ ID NO: 721145 - RNA, 22 nt, Human
agcaggugggcaugaaagcuga

SEQ ID NO: 721146 - RNA, 22 nt, Human
cugccucuugacagaucguggc

SEQ ID NO: 721147 - RNA, 22 nt, Human
ccaggcccccgagcagaagaca

SEQ ID NO: 721148 - RNA, 22 nt, Human
cauaauuagucauguuaugcau

SEQ ID NO: 721149 - RNA, 22 nt, Human
aaaaguauaggguuuggaguca

SEQ ID NO: 721150 - RNA, 22 nt, Human
uuccucagacccucauugugag

SEQ ID NO: 721151 - RNA, 22 nt, Human
gaugaagcuaaaucuaagguuu

SEQ ID NO: 721152 - RNA, 20 nt, Human
aguggggagucaggagugcc

SEQ ID NO: 721153 - RNA, 22 nt, Human
acccagcaugacaccugcacau

SEQ ID NO: 721154 - RNA, 22 nt, Human
ugcagcaguuuaaugcaggguu

SEQ ID NO: 721155 - RNA, 22 nt, Human
acucuaaauagccucuuaaaca

SEQ ID NO: 721156 - RNA, 22 nt, Human
uacaguagaaugcggugccagu

SEQ ID NO: 721157 - RNA, 21 nt, Human
ucacaggucaaugugugaagg

SEQ ID NO: 721158 - RNA, 22 nt, Human
gagccagauuuuaugcaagaca

SEQ ID NO: 721159 - RNA, 22 nt, Human
cauguguggucuguggcuaucu

SEQ ID NO: 721160 - RNA, 22 nt, Human
uccuggcuccuggagaccugcu

SEQ ID NO: 721161 - RNA, 22 nt, Human
uuuagaguccaaguucuucacu

SEQ ID NO: 721162 - RNA, 22 nt, Human
ccagaagucaggaaugagucuu

SEQ ID NO: 721163 - RNA, 22 nt, Human
agacauauuggcuugcuuuaau

SEQ ID NO: 721164 - RNA, 22 nt, Human
cuagaucagauugcuguuucua

SEQ ID NO: 721165 - RNA, 22 nt, Human
ccagccuuacugcccuucagug

SEQ ID NO: 721166 - RNA, 20 nt, Human
guccagaguaaugugcugac

SEQ ID NO: 721167 - RNA, 22 nt, Human
acauguuuggcucuaugcuaua

SEQ ID NO: 721168 - RNA, 22 nt, Human
cuggccagccucccagguaccc

SEQ ID NO: 721169 - RNA, 22 nt, Human
uccagagaucucucuucccugu

SEQ ID NO: 721170 - RNA, 22 nt, Human
uuccuucagcaaguccugagca

SEQ ID NO: 721171 - RNA, 22 nt, Human
uaaaugcaaugugcuuuaccag

SEQ ID NO: 721172 - RNA, 22 nt, Human
cugugaauguuauaucucaaug

SEQ ID NO: 721173 - RNA, 22 nt, Human
augcagguccaaacgcuagugu

SEQ ID NO: 721174 - RNA, 22 nt, Human
uggcagcauuuuuuccagaaca

SEQ ID NO: 721175 - RNA, 22 nt, Human
acuuuagaaguaaggaugaguu

SEQ ID NO: 721176 - RNA, 21 nt, Human
caggaaacugaggccaugggg

SEQ ID NO: 721177 - RNA, 22 nt, Human
ccugccugucaucgccugcgcc

SEQ ID NO: 721178 - RNA, 22 nt, Human
aauaaucuugacuacugaauca

SEQ ID NO: 721179 - RNA, 22 nt, Human
auacacuuguacauuuuuuaau

SEQ ID NO: 721180 - RNA, 22 nt, Human
auaugguaagaguauauuuacu

SEQ ID NO: 721181 - RNA, 22 nt, Human
gaggccuggcugggaggaggug

SEQ ID NO: 721182 - RNA, 22 nt, Human
agauggggcagaauggagccau

SEQ ID NO: 721183 - RNA, 22 nt, Human
uucauuaauucauucagugacu

SEQ ID NO: 721184 - RNA, 22 nt, Human
ucuggcccaugauccugcuaac

SEQ ID NO: 721185 - RNA, 22 nt, Human
guggacuggcagugaccuuggu

SEQ ID NO: 721186 - RNA, 22 nt, Human
ccuggccagcagccccuuccuc

SEQ ID NO: 721187 - RNA, 22 nt, Human
accucugcaguagggcugugcc

SEQ ID NO: 721188 - RNA, 22 nt, Human
uaauugcagaacuuugggaggc

SEQ ID NO: 721189 - RNA, 22 nt, Human
guggcuagaaaaauaugggugc

SEQ ID NO: 721190 - RNA, 22 nt, Human
auauacaggugguauguguaaa

SEQ ID NO: 721191 - RNA, 22 nt, Human
ggcugcagcccucgccuagcca

SEQ ID NO: 721192 - RNA, 22 nt, Human
cacagagcaggugcugggaaga

SEQ ID NO: 721193 - RNA, 22 nt, Human
guuuggggucugcagagcggcg

SEQ ID NO: 721194 - RNA, 22 nt, Human
gagagcuauuuggcaagcauuu

SEQ ID NO: 721195 - RNA, 22 nt, Human
aauucaaagacuagaauuuugc

SEQ ID NO: 721196 - RNA, 22 nt, Human
ccaggguuauaaaugcaucugu

SEQ ID NO: 721197 - RNA, 20 nt, Human
uccaggcuccuccacuuagu

SEQ ID NO: 721198 - RNA, 19 nt, Human
agccagaguggcccagggg

SEQ ID NO: 721199 - RNA, 22 nt, Human
ugugugugacucauacuagaac

SEQ ID NO: 721200 - RNA, 22 nt, Human
auggacagcaacuggaagcuuc

SEQ ID NO: 721201 - RNA, 22 nt, Human
cugggcuguucugccccugggu

SEQ ID NO: 721202 - RNA, 22 nt, Human
uuuguaacugagugcucagagc

SEQ ID NO: 721203 - RNA, 22 nt, Human
ucacugggcccugaggugggac

SEQ ID NO: 721204 - RNA, 22 nt, Human
acaggaguuuaagaaauauuuc

SEQ ID NO: 721205 - RNA, 22 nt, Human
uuuugcaaugagaugcuuguca

SEQ ID NO: 721206 - RNA, 22 nt, Human
gagcucauucauucauugccug

SEQ ID NO: 721207 - RNA, 22 nt, Human
ucacacugugaagagacaagca

SEQ ID NO: 721208 - RNA, 22 nt, Human
gcagcagggagcagggguguca

SEQ ID NO: 721209 - RNA, 22 nt, Human
cucagcaacccuagaacauuug

SEQ ID NO: 721210 - RNA, 22 nt, Human
cacuauaauccuguuuuagaac

SEQ ID NO: 721211 - RNA, 22 nt, Human
gugccgcgacgcagucggugcc

SEQ ID NO: 721212 - RNA, 22 nt, Human
caaaacuaucaggcucaaagcu

SEQ ID NO: 721213 - RNA, 21 nt, Human
ccagccucagaucagggagcu

SEQ ID NO: 721214 - RNA, 22 nt, Human
cccuggcaaaacacucucuuga

SEQ ID NO: 721215 - RNA, 22 nt, Human
aauaagaucuuaaagguuauau

SEQ ID NO: 721216 - RNA, 20 nt, Human
uucucuagccuuccccuggg

SEQ ID NO: 721217 - RNA, 22 nt, Human
ugccagucucacccuggguccu

SEQ ID NO: 721218 - RNA, 22 nt, Human
ugugaagcauagauucuguaga

SEQ ID NO: 721219 - RNA, 22 nt, Human
acacagaguuugacacauggga

SEQ ID NO: 721220 - RNA, 22 nt, Human
aaggcccuucggcuuccucagc

SEQ ID NO: 721221 - RNA, 22 nt, Human
ugccauauugaugugcuguacc

SEQ ID NO: 721222 - RNA, 22 nt, Human
agauacaucauuuauaccuuca

SEQ ID NO: 721223 - RNA, 22 nt, Human
cagaauuuuucgaauguacugu

SEQ ID NO: 721224 - RNA, 22 nt, Human
ucagaacuacauggacauguua

SEQ ID NO: 721225 - RNA, 22 nt, Human
auaaucagaauucaugaaagau

SEQ ID NO: 721226 - RNA, 22 nt, Human
cagagcuggcucugcauguaca

SEQ ID NO: 721227 - RNA, 22 nt, Human
ugcauuggucauuugaaaauau

SEQ ID NO: 721228 - RNA, 22 nt, Human
ggagcccuucuauuccauggag

SEQ ID NO: 721229 - RNA, 22 nt, Human
ucucugaauuguuuaaguuauu

SEQ ID NO: 721230 - RNA, 22 nt, Human
ugugaggaguaggcugagggug

SEQ ID NO: 721231 - RNA, 22 nt, Human
uuggcaauggaccagccacugg

SEQ ID NO: 721232 - RNA, 22 nt, Human
auucucugaagucuuucagggc

SEQ ID NO: 721233 - RNA, 22 nt, Human
caacagagagaccagaaacagg

SEQ ID NO: 721234 - RNA, 22 nt, Human
caauacuuccuuguuagaggca

SEQ ID NO: 721235 - RNA, 22 nt, Human
ggcuccugagaaugggccauca

SEQ ID NO: 721236 - RNA, 22 nt, Human
uacaguuucccagcagaugcaa

SEQ ID NO: 721237 - RNA, 22 nt, Human
caucuggcagacccugccuccg

SEQ ID NO: 721238 - RNA, 22 nt, Human
cccagcucucgcacuuacuagc

SEQ ID NO: 721239 - RNA, 22 nt, Human
uuugcauugcagugguuuacag

SEQ ID NO: 721240 - RNA, 22 nt, Human
acugcuuuaucugagaaguccu

SEQ ID NO: 721241 - RNA, 22 nt, Human
aagaugcuuauugcuccugcag

SEQ ID NO: 721242 - RNA, 22 nt, Human
acugaucacagauauguauauu

SEQ ID NO: 721243 - RNA, 22 nt, Human
cugccugcucuauccaggccug

SEQ ID NO: 721244 - RNA, 22 nt, Human
augcaccacagauaucugcgua

SEQ ID NO: 721245 - RNA, 22 nt, Human
ggcaccaggggauguaaugucc

SEQ ID NO: 721246 - RNA, 22 nt, Human
gaacaaagacauggaggaggau

SEQ ID NO: 721247 - RNA, 22 nt, Human
aaugaaacuguauauagacugu

SEQ ID NO: 721248 - RNA, 22 nt, Human
acagggaaggauuuagugggaa

SEQ ID NO: 721249 - RNA, 22 nt, Human
gccucaggugcaucucucauuc

SEQ ID NO: 721250 - RNA, 21 nt, Human
aaacugaagagacaggaacuu

SEQ ID NO: 721251 - RNA, 22 nt, Human
uucuuaaagaggcaaaacacag

SEQ ID NO: 721252 - RNA, 22 nt, Human
uuuaacuugaucaguagagcau

SEQ ID NO: 721253 - RNA, 22 nt, Human
ggcaagggacggccgugagaca

SEQ ID NO: 721254 - RNA, 22 nt, Human
gcucugugagccacuugaugua

SEQ ID NO: 721255 - RNA, 22 nt, Human
auggccagucaagccucuggcu

SEQ ID NO: 721256 - RNA, 22 nt, Human
aaggagcuuguucgccuuccuc

SEQ ID NO: 721257 - RNA, 22 nt, Human
acaugucuuuuaaagucuaaua

SEQ ID NO: 721258 - RNA, 22 nt, Human
cuagggaacaagaugcccaggg

SEQ ID NO: 721259 - RNA, 22 nt, Human
uuuguuagagugugggaggcug

SEQ ID NO: 721260 - RNA, 22 nt, Human
ccugugcccucagccuggcucu

SEQ ID NO: 721261 - RNA, 22 nt, Human
gaaaggccagcucacagaugag

SEQ ID NO: 721262 - RNA, 22 nt, Human
uaggaagguguuuuuaaggagc

SEQ ID NO: 721263 - RNA, 22 nt, Human
gcuuugcuggcuugaaaugcug

SEQ ID NO: 721264 - RNA, 21 nt, Human
aagguagcauggguugcagcc

SEQ ID NO: 721265 - RNA, 22 nt, Human
gacuuuugaauaagguaggaua

SEQ ID NO: 721266 - RNA, 22 nt, Human
ccugugggccaaggaccugcca

SEQ ID NO: 721267 - RNA, 22 nt, Human
gggauggcugccugcaucagga

SEQ ID NO: 721268 - RNA, 22 nt, Human
cucucuauggaugcaguuuuuc

SEQ ID NO: 721269 - RNA, 22 nt, Human
ggcuccugaaagacuaugggaa

SEQ ID NO: 721270 - RNA, 22 nt, Human
ucugccugcaguguggcagggc

SEQ ID NO: 721271 - RNA, 22 nt, Human
aaaggucuuuuuucuaacacca

SEQ ID NO: 721272 - RNA, 22 nt, Human
gcagaugaggaagcuaaugcug

SEQ ID NO: 721273 - RNA, 22 nt, Human
aggcucugugcagccugcaucu

SEQ ID NO: 721274 - RNA, 22 nt, Human
ugccugaggagucagggcaggu

SEQ ID NO: 721275 - RNA, 22 nt, Human
uggagggaacccaggcugcucu

SEQ ID NO: 721276 - RNA, 22 nt, Human
gagggccaacuagcaccacuuu

SEQ ID NO: 721277 - RNA, 22 nt, Human
cacaccagcauggucucagugu

SEQ ID NO: 721278 - RNA, 22 nt, Human
uucauucauguauugucuaugg

SEQ ID NO: 721279 - RNA, 21 nt, Human
ucucacugucugcuuuguuua

SEQ ID NO: 721280 - RNA, 22 nt, Human
acagcugugaaaauccacagga

SEQ ID NO: 721281 - RNA, 22 nt, Human
uuuaaucuucaaaauagucuua

SEQ ID NO: 721282 - RNA, 22 nt, Human
uuuggaauuaugcuuaaaguuu

SEQ ID NO: 721283 - RNA, 22 nt, Human
ucauacaagaucacuuuggcca

SEQ ID NO: 721284 - RNA, 22 nt, Human
aagaguucucagaaacgugggu

SEQ ID NO: 721285 - RNA, 22 nt, Human
acaugggaucaaugaggcaggc

SEQ ID NO: 721286 - RNA, 22 nt, Human
uugugagcauguuuacuugauu

SEQ ID NO: 721287 - RNA, 22 nt, Human
cauuuucagcacccaucugaaa

SEQ ID NO: 721288 - RNA, 22 nt, Human
aguguaugaguuucaguucuuc

SEQ ID NO: 721289 - RNA, 22 nt, Human
aagaggaauggguguguuuaug

SEQ ID NO: 721290 - RNA, 20 nt, Human
ucugcagauaagggaaagac

SEQ ID NO: 721291 - RNA, 22 nt, Human
agcuaagguguccuggaggccc

SEQ ID NO: 721292 - RNA, 22 nt, Human
uggcccucguccgacagguggg

SEQ ID NO: 721293 - RNA, 22 nt, Human
cacacuguugaggacgagaugu

SEQ ID NO: 721294 - RNA, 22 nt, Human
cacacaaauauucuggaggcaa

SEQ ID NO: 721295 - RNA, 22 nt, Human
cuuuucuucucacggcugucag

SEQ ID NO: 721296 - RNA, 22 nt, Human
gccuccugguugcuucuccaac

SEQ ID NO: 721297 - RNA, 22 nt, Human
cucugcuugugucaggcaugcu

SEQ ID NO: 721298 - RNA, 22 nt, Human
cuguggcugugaaacuucucag

SEQ ID NO: 721299 - RNA, 18 nt, Human
cucuuaagccuuugucaa

SEQ ID NO: 721300 - RNA, 22 nt, Human
cucugcaaucugagcacuugua

SEQ ID NO: 721301 - RNA, 23 nt, Human
ugagacacucauucauggaguau

SEQ ID NO: 721302 - RNA, 22 nt, Human
ucgauaauaucuuacaugugcu

SEQ ID NO: 721303 - RNA, 22 nt, Human
uugcauuuguggcauggguguu

SEQ ID NO: 721304 - RNA, 22 nt, Human
gagcuaagaccugagggcaagu

SEQ ID NO: 721305 - RNA, 22 nt, Human
agggaagaaucacugggauguu

SEQ ID NO: 721306 - RNA, 22 nt, Human
uuucaaauggagucgugaaaug

SEQ ID NO: 721307 - RNA, 22 nt, Human
uuuuaugagaaugcgccacuug

SEQ ID NO: 721308 - RNA, 22 nt, Human
accaggcaguauggugcugcaa

SEQ ID NO: 721309 - RNA, 23 nt, Human
cugugcccggggcuccaccugau

SEQ ID NO: 721310 - RNA, 23 nt, Human
gcagugugaauccaguguuucag

SEQ ID NO: 721311 - RNA, 22 nt, Human
agagaacaaauuaaaggugguu

SEQ ID NO: 721312 - RNA, 22 nt, Human
ggcugggcaaacaagacucuuc

SEQ ID NO: 721313 - RNA, 22 nt, Human
gucugaggguugugcuggagga

SEQ ID NO: 721314 - RNA, 22 nt, Human
agcaggucuugcucucaacagg

SEQ ID NO: 721315 - RNA, 22 nt, Human
ugcauaacuagaguaauuacag

SEQ ID NO: 721316 - RNA, 20 nt, Human
ggcccagugaaccaggacgg

SEQ ID NO: 721317 - RNA, 20 nt, Human
aagagcugacucacaguggu

SEQ ID NO: 721318 - RNA, 22 nt, Human
gcacccagaauaaggacaggac

SEQ ID NO: 721319 - RNA, 20 nt, Human
acuuuggggucuuucucaga

SEQ ID NO: 721320 - RNA, 22 nt, Human
gcacagaacacuggugaguccc

SEQ ID NO: 721321 - RNA, 18 nt, Human
cuccuccacagccccugc

SEQ ID NO: 721322 - RNA, 22 nt, Human
acaugccagcccauuuaaaugg

SEQ ID NO: 721323 - RNA, 23 nt, Human
uccugcagauaagcugguugaca

SEQ ID NO: 721324 - RNA, 22 nt, Human
ucccucagaugagcuccuagca

SEQ ID NO: 721325 - RNA, 22 nt, Human
acuuuguauaagacaauaaaga

SEQ ID NO: 721326 - RNA, 22 nt, Human
gugaacaaaauagcacauauua

SEQ ID NO: 721327 - RNA, 19 nt, Human
gcuggcagauguggccgug

SEQ ID NO: 721328 - RNA, 22 nt, Human
ucagggcaaaagggaaaccauu

SEQ ID NO: 721329 - RNA, 22 nt, Human
uauucacaggcuggagugaugu

SEQ ID NO: 721330 - RNA, 22 nt, Human
ugggagcucacaggccuggcuc

SEQ ID NO: 721331 - RNA, 22 nt, Human
ccuccaucuccagcuucugccu

SEQ ID NO: 721332 - RNA, 22 nt, Human
gcuacaguagauaaggacgguc

SEQ ID NO: 721333 - RNA, 22 nt, Human
gccucugcaucaucacuccagc

SEQ ID NO: 721334 - RNA, 22 nt, Human
cuggccuuuuguuucuggagaa

SEQ ID NO: 721335 - RNA, 22 nt, Human
uggccuuggagaggcacggccc

SEQ ID NO: 721336 - RNA, 22 nt, Human
ucagaaagguucuauguuuuac

SEQ ID NO: 721337 - RNA, 22 nt, Human
cagcuguguaaacacaugugua

SEQ ID NO: 721338 - RNA, 22 nt, Human
cauguggcuuuggcaugugccc

SEQ ID NO: 721339 - RNA, 22 nt, Human
ugugaaauguguguauaauuaa

SEQ ID NO: 721340 - RNA, 22 nt, Human
ugcaggcucugugugugccugg

SEQ ID NO: 721341 - RNA, 22 nt, Human
ugggccugggucuuugcugcca

SEQ ID NO: 721342 - RNA, 22 nt, Human
ucucaaauuuguuagauaaaau

SEQ ID NO: 721343 - RNA, 22 nt, Human
gcucccaccaggcagaccuacc

SEQ ID NO: 721344 - RNA, 22 nt, Human
cccaggagauggugcguggucu

SEQ ID NO: 721345 - RNA, 22 nt, Human
uguuuccagaauguagcugcuu

SEQ ID NO: 721346 - RNA, 23 nt, Human
uaggccagggugaccuggggaga

SEQ ID NO: 721347 - RNA, 22 nt, Human
uuuaucugucauuucccauauc

SEQ ID NO: 721348 - RNA, 22 nt, Human
agagagaggggcgagcaaacac

SEQ ID NO: 721349 - RNA, 22 nt, Human
guuuacauuaaguauuagcauc

SEQ ID NO: 721350 - RNA, 21 nt, Human
aaugucauugaauggugagac

SEQ ID NO: 721351 - RNA, 22 nt, Human
cagcuacacaccagaacuauua

SEQ ID NO: 721352 - RNA, 22 nt, Human
ucugcaggaaaaaagugccugg

SEQ ID NO: 721353 - RNA, 22 nt, Human
uaaaucuccuguuuuucaucua

SEQ ID NO: 721354 - RNA, 22 nt, Human
uaugcuuugcaauuggaaaagg

SEQ ID NO: 721355 - RNA, 22 nt, Human
gaguccuuaauacacuggugga

SEQ ID NO: 721356 - RNA, 22 nt, Human
cccaggucccggggccagcugc

SEQ ID NO: 721357 - RNA, 22 nt, Human
ccuccagggccccucucacugg

SEQ ID NO: 721358 - RNA, 22 nt, Human
auucaguuaagggucuugagau

SEQ ID NO: 721359 - RNA, 22 nt, Human
uccuggggaggguucuggcucc

SEQ ID NO: 721360 - RNA, 22 nt, Human
ugaauaguucuacuacuugaca

SEQ ID NO: 721361 - RNA, 22 nt, Human
auggcugugaaaugguaggugg

SEQ ID NO: 721362 - RNA, 22 nt, Human
aaacuguuucccuccauaaccu

SEQ ID NO: 721363 - RNA, 22 nt, Human
aucuguaacaucaguagcagaa

SEQ ID NO: 721364 - RNA, 22 nt, Human
gggaucuguguugcgauggauu

SEQ ID NO: 721365 - RNA, 22 nt, Human
aagagauguugaaguuuauuag

SEQ ID NO: 721366 - RNA, 22 nt, Human
gaaaucuuuuaaccauucauuu

SEQ ID NO: 721367 - RNA, 22 nt, Human
cuuccaggguccaggaagagcc

SEQ ID NO: 721368 - RNA, 22 nt, Human
ugcccugcugugccuggagcca

SEQ ID NO: 721369 - RNA, 23 nt, Human
aggaugugcauaugaccuaauca

SEQ ID NO: 721370 - RNA, 22 nt, Human
gagccagcgccuugccucuggg

SEQ ID NO: 721371 - RNA, 22 nt, Human
caggagcaugcugaugccagaa

SEQ ID NO: 721372 - RNA, 22 nt, Human
ucucuccugcacugaauuaugu

SEQ ID NO: 721373 - RNA, 22 nt, Human
uugaaaggugcugugugcugau

SEQ ID NO: 721374 - RNA, 22 nt, Human
ccagugugauuguugcaagaau

SEQ ID NO: 721375 - RNA, 22 nt, Human
uuacacacaauuagcauaguaa

SEQ ID NO: 721376 - RNA, 22 nt, Human
gcuccagaugaaugcacuuguu

SEQ ID NO: 721377 - RNA, 22 nt, Human
ugcacuacugugauacacagcc

SEQ ID NO: 721378 - RNA, 22 nt, Human
ugucuccaccaucaucuuacca

SEQ ID NO: 721379 - RNA, 20 nt, Human
uggguccugcuucuuccuga

SEQ ID NO: 721380 - RNA, 23 nt, Human
agcuccagaacauagcacaggaa

SEQ ID NO: 721381 - RNA, 22 nt, Human
gggcucuggacccaggcaagag

SEQ ID NO: 721382 - RNA, 22 nt, Human
gcugggcuggccgccgagaucg

SEQ ID NO: 721383 - RNA, 22 nt, Human
uugggcuuuaauuccagagagg

SEQ ID NO: 721384 - RNA, 22 nt, Human
cuguuacaagagagagacauga

SEQ ID NO: 721385 - RNA, 22 nt, Human
uauuuucuggggagagugaacc

SEQ ID NO: 721386 - RNA, 22 nt, Human
gucugcuuuucugaauugccug

SEQ ID NO: 721387 - RNA, 22 nt, Human
aagacugucugggacaagauga

SEQ ID NO: 721388 - RNA, 22 nt, Human
caugauggaugugcacuucgcu

SEQ ID NO: 721389 - RNA, 16 nt, Human
gcuggagggagggguu

SEQ ID NO: 721390 - RNA, 22 nt, Human
gcuggcaggauaacuucuaagc

SEQ ID NO: 721391 - RNA, 22 nt, Human
ucauuauucucuuuaauguucu

SEQ ID NO: 721392 - RNA, 22 nt, Human
ggccuccuguuggcuaguguga

SEQ ID NO: 721393 - RNA, 22 nt, Human
gaauagauagcuuggaugguug

SEQ ID NO: 721394 - RNA, 22 nt, Human
guggcagcuguguugcaguuuu

SEQ ID NO: 721395 - RNA, 22 nt, Human
ucagagaaaugaaguagggauu

SEQ ID NO: 721396 - RNA, 22 nt, Human
cugggcauauacgugcaaguca

SEQ ID NO: 721397 - RNA, 22 nt, Human
gcaagcaguuguggcuucugag

SEQ ID NO: 721398 - RNA, 22 nt, Human
uuacuguaugagugugguaguc

SEQ ID NO: 721399 - RNA, 22 nt, Human
uuugaucuaugcgugguuuccc

SEQ ID NO: 721400 - RNA, 22 nt, Human
aucauuuuuaagagacucuucu

SEQ ID NO: 721401 - RNA, 22 nt, Human
aaaggagaguagguuacuccau

SEQ ID NO: 721402 - RNA, 22 nt, Human
accugagggagauuaggccuga

SEQ ID NO: 721403 - RNA, 22 nt, Human
cagcacagugaccagacccacu

SEQ ID NO: 721404 - RNA, 22 nt, Human
uucuucugaaacagugacagac

SEQ ID NO: 721405 - RNA, 22 nt, Human
uuuccuuugaggguccuacacu

SEQ ID NO: 721406 - RNA, 22 nt, Human
caacacugauuauggcugagcu

SEQ ID NO: 721407 - RNA, 22 nt, Human
uggggaagcacuuugaacuuaa

SEQ ID NO: 721408 - RNA, 20 nt, Human
ucacaauaugagcucauaca

SEQ ID NO: 721409 - RNA, 22 nt, Human
acagaguuaaaguggaguuuaa

SEQ ID NO: 721410 - RNA, 22 nt, Human
acacuucagcuccacaaacauu

SEQ ID NO: 721411 - RNA, 22 nt, Human
gcugcccugccucagacuccuc

SEQ ID NO: 721412 - RNA, 20 nt, Human
uccugccacaccucaguugc

SEQ ID NO: 721413 - RNA, 22 nt, Human
auuagcauugcuacucucaaga

SEQ ID NO: 721414 - RNA, 22 nt, Human
uggagcagugguccuggagaug

SEQ ID NO: 721415 - RNA, 22 nt, Human
cacuguguaagaagaugggcuu

SEQ ID NO: 721416 - RNA, 20 nt, Human
ucauauuuuugcccugggcc

SEQ ID NO: 721417 - RNA, 22 nt, Human
cugagccaaggggacagugaca

SEQ ID NO: 721418 - RNA, 22 nt, Human
agguuucugcuguccuccuucu

SEQ ID NO: 721419 - RNA, 22 nt, Human
agcagcuguuagaaacaggaag

SEQ ID NO: 721420 - RNA, 22 nt, Human
acagauuugaucugagaacaaa

SEQ ID NO: 721421 - RNA, 22 nt, Human
ugcuuguccgaggugaguacuu

SEQ ID NO: 721422 - RNA, 22 nt, Human
ggaacacagugccuuacaaacu

SEQ ID NO: 721423 - RNA, 22 nt, Human
agcucuuuugcucuccaaguuu

SEQ ID NO: 721424 - RNA, 22 nt, Human
ucaaggagcccacagucuaaug

SEQ ID NO: 721425 - RNA, 22 nt, Human
uguagaaaauuggagcauucau

SEQ ID NO: 721426 - RNA, 22 nt, Human
uucccagagauaagacgucuua

SEQ ID NO: 721427 - RNA, 22 nt, Human
acagauauuuggggaaagacgu

SEQ ID NO: 721428 - RNA, 22 nt, Human
ggcgccagcacugcagcgccuc

SEQ ID NO: 721429 - RNA, 22 nt, Human
ggcugggccagggccuguggac

SEQ ID NO: 721430 - RNA, 22 nt, Human
uucuuucugggaagaguucaga

SEQ ID NO: 721431 - RNA, 17 nt, Human
guggcugcacacacaug

SEQ ID NO: 721432 - RNA, 22 nt, Human
acagccuguuugaucuggugcu

SEQ ID NO: 721433 - RNA, 22 nt, Human
ugagaggcagaauggugccugc

SEQ ID NO: 721434 - RNA, 22 nt, Human
gagggugcagcugggccccacg

SEQ ID NO: 721435 - RNA, 22 nt, Human
acaaaugaacauauaagcuuga

SEQ ID NO: 721436 - RNA, 22 nt, Human
agucugaaauaaugucacuaag

SEQ ID NO: 721437 - RNA, 22 nt, Human
agugcaaaauucagaagcaauu

SEQ ID NO: 721438 - RNA, 20 nt, Human
ugcuccaggaacacuggccg

SEQ ID NO: 721439 - RNA, 22 nt, Human
agcccaggucucaaaguacagg

SEQ ID NO: 721440 - RNA, 22 nt, Human
agagcacagccaccauuuacaa

SEQ ID NO: 721441 - RNA, 21 nt, Human
cauccguuuauaucucugugg

SEQ ID NO: 721442 - RNA, 20 nt, Human
acaugaacagggcuacagca

SEQ ID NO: 721443 - RNA, 22 nt, Human
acugcccuguaacugccaggua

SEQ ID NO: 721444 - RNA, 23 nt, Human
ucccucaggccuuaucuccaucu

SEQ ID NO: 721445 - RNA, 22 nt, Human
gcacaagaaaucauggacugaa

SEQ ID NO: 721446 - RNA, 20 nt, Human
agugaguuaucagcuacagu

SEQ ID NO: 721447 - RNA, 22 nt, Human
caaaggcugccacuguggcugu

SEQ ID NO: 721448 - RNA, 22 nt, Human
cuuuaguuaguagauaauggca

SEQ ID NO: 721449 - RNA, 22 nt, Human
caggaaaucagaacucaagugg

SEQ ID NO: 721450 - RNA, 22 nt, Human
ugagagaaacguuccuuacauc

SEQ ID NO: 721451 - RNA, 22 nt, Human
uacagaagcugagacacugaga

SEQ ID NO: 721452 - RNA, 22 nt, Human
aguguaugucaaguauauacac

SEQ ID NO: 721453 - RNA, 22 nt, Human
gggucccuggaauuacuugaca

SEQ ID NO: 721454 - RNA, 22 nt, Human
uaggagggcccugaaaauggca

SEQ ID NO: 721455 - RNA, 22 nt, Human
gaggaaaaugggacaggcugua

SEQ ID NO: 721456 - RNA, 22 nt, Human
aacagcuaccuucucacugugc

SEQ ID NO: 721457 - RNA, 22 nt, Human
cauugcacgggcgucugucugu

SEQ ID NO: 721458 - RNA, 22 nt, Human
aggcuguggugaugauuggguc

SEQ ID NO: 721459 - RNA, 22 nt, Human
ucccagcuguguggaggagaug

SEQ ID NO: 721460 - RNA, 22 nt, Human
ccugaccacccuuggacaaggu

SEQ ID NO: 721461 - RNA, 23 nt, Human
cugcuguguuggucucgauggga

SEQ ID NO: 721462 - RNA, 22 nt, Human
ucuggacuuucggugcaagagu

SEQ ID NO: 721463 - RNA, 22 nt, Human
cugggaggcggagguuguagug

SEQ ID NO: 721464 - RNA, 20 nt, Human
ggcuuucugugauccucagu

SEQ ID NO: 721465 - RNA, 22 nt, Human
uuuuauugucuguauugccuau

SEQ ID NO: 721466 - RNA, 23 nt, Human
aggagccaggugcagcccuugug

SEQ ID NO: 721467 - RNA, 21 nt, Human
gggagcugacagcagcacggc

SEQ ID NO: 721468 - RNA, 22 nt, Human
aacugcuuguaaauaauguuga

SEQ ID NO: 721469 - RNA, 22 nt, Human
cucuuaguuuaucuuugacaaa

SEQ ID NO: 721470 - RNA, 22 nt, Human
aagcacagagaugggcacgccu

SEQ ID NO: 721471 - RNA, 22 nt, Human
acacugugaucuugagaaaggu

SEQ ID NO: 721472 - RNA, 22 nt, Human
uaugguuauguaaucaguuguu

SEQ ID NO: 721473 - RNA, 23 nt, Human
augaaaugcuggcucagggaggu

SEQ ID NO: 721474 - RNA, 22 nt, Human
uaggaacaacugcagguacaag

SEQ ID NO: 721475 - RNA, 22 nt, Human
aacaggagucauugucauuauu

SEQ ID NO: 721476 - RNA, 22 nt, Human
uacagcauuuuguagaguacua

SEQ ID NO: 721477 - RNA, 22 nt, Human
acaggagccaaacacaugccag

SEQ ID NO: 721478 - RNA, 22 nt, Human
ccacugagugagcagagcaggg

SEQ ID NO: 721479 - RNA, 22 nt, Human
uuauuaggaacucaggauuuuu

SEQ ID NO: 721480 - RNA, 22 nt, Human
guccuucagggagucaaacacu

SEQ ID NO: 721481 - RNA, 22 nt, Human
cuacagaaucuaccucaagcca

SEQ ID NO: 721482 - RNA, 19 nt, Human
gccuaugucuucaaaucau

SEQ ID NO: 721483 - RNA, 22 nt, Human
aggaucauguggucauuccuga

SEQ ID NO: 721484 - RNA, 22 nt, Human
guucuucaguaaaauuaaaugu

SEQ ID NO: 721485 - RNA, 22 nt, Human
uccuucaggguugaggccgacu

SEQ ID NO: 721486 - RNA, 23 nt, Human
gcccugcccuuagcacacucaca

SEQ ID NO: 721487 - RNA, 22 nt, Human
ggcagccauggacacuggcuag

SEQ ID NO: 721488 - RNA, 19 nt, Human
ugcugacugggccucaccg

SEQ ID NO: 721489 - RNA, 22 nt, Human
ucuggcccugcugcugugagca

SEQ ID NO: 721490 - RNA, 22 nt, Human
auccugggcaguuuugagugcu

SEQ ID NO: 721491 - RNA, 23 nt, Human
ugggcgaggcaggaguggagcac

SEQ ID NO: 721492 - RNA, 22 nt, Human
aauuagggaaaacauuugcuuu

SEQ ID NO: 721493 - RNA, 22 nt, Human
uguuucuuauccaaguggucug

SEQ ID NO: 721494 - RNA, 22 nt, Human
uguuuuauuucuccaagaggga

SEQ ID NO: 721495 - RNA, 19 nt, Human
ugcucuggagccagcucuc

SEQ ID NO: 721496 - RNA, 22 nt, Human
agcagcagauuauggucuacau

SEQ ID NO: 721497 - RNA, 18 nt, Human
agagacagcagcaaaaga

SEQ ID NO: 721498 - RNA, 22 nt, Human
aacuauaaugggguuaggaaau

SEQ ID NO: 721499 - RNA, 22 nt, Human
uccagcauauauagagaaugag

SEQ ID NO: 721500 - RNA, 22 nt, Human
cuuuauucugcaaauugccuug

SEQ ID NO: 721501 - RNA, 23 nt, Human
uugaaagguagcuggcagcuaga

SEQ ID NO: 721502 - RNA, 22 nt, Human
uggaccagcagccccagugccu

SEQ ID NO: 721503 - RNA, 21 nt, Human
ccauaaucuuaggaucaaaau

SEQ ID NO: 721504 - RNA, 22 nt, Human
gaugcauuacaaaagugauuau

SEQ ID NO: 721505 - RNA, 22 nt, Human
aggacugaugauggugcugaca

SEQ ID NO: 721506 - RNA, 22 nt, Human
guuuggcacuaugaugaggcua

SEQ ID NO: 721507 - RNA, 22 nt, Human
aagcuggagaguuaggugaaua

SEQ ID NO: 721508 - RNA, 22 nt, Human
uuggcaaugucuaaacacauuu

SEQ ID NO: 721509 - RNA, 22 nt, Human
gcugaagagagaugcguccagc

SEQ ID NO: 721510 - RNA, 22 nt, Human
cccugagagugagugccaccuu

SEQ ID NO: 721511 - RNA, 22 nt, Human
gagccagagauccaggauggcu

SEQ ID NO: 721512 - RNA, 22 nt, Human
caaugcaaugcaaugcaaugca

SEQ ID NO: 721513 - RNA, 22 nt, Human
gagggaccccaggcuggcccuu

SEQ ID NO: 721514 - RNA, 22 nt, Human
uagcaucuaacaucuuaggacu

SEQ ID NO: 721515 - RNA, 22 nt, Human
agggccucuaccauccaagguu

SEQ ID NO: 721516 - RNA, 22 nt, Human
cagcauuggguuaccuuuguuu

SEQ ID NO: 721517 - RNA, 22 nt, Human
ugcucagggacaauggagaggg

SEQ ID NO: 721518 - RNA, 22 nt, Human
guuaacuugguagucuaagugu

SEQ ID NO: 721519 - RNA, 22 nt, Human
aggagcuccagcccagggaagu

SEQ ID NO: 721520 - RNA, 22 nt, Human
cucugagaggugagaagcagca

SEQ ID NO: 721521 - RNA, 22 nt, Human
ggugucugcuucccuccagcug

SEQ ID NO: 721522 - RNA, 21 nt, Human
ugcagccucugcccagcagug

SEQ ID NO: 721523 - RNA, 19 nt, Human
uaggcccuagcucugcagu

SEQ ID NO: 721524 - RNA, 22 nt, Human
ugagagccagaagggccugagg

SEQ ID NO: 721525 - RNA, 22 nt, Human
uuuacagacaacuuaauagggg

SEQ ID NO: 721526 - RNA, 22 nt, Human
acgaagacgccguucuugccga

SEQ ID NO: 721527 - RNA, 22 nt, Human
aacuucagggggcacauucaag

SEQ ID NO: 721528 - RNA, 22 nt, Human
uagcagcucugauucugggccc

SEQ ID NO: 721529 - RNA, 22 nt, Human
agcuccagagccacauccauca

SEQ ID NO: 721530 - RNA, 22 nt, Human
guggagggugagcucauguuug

SEQ ID NO: 721531 - RNA, 22 nt, Human
gcugcugucagugguggcaguu

SEQ ID NO: 721532 - RNA, 23 nt, Human
ucucuuaucacaauucauuuugc

SEQ ID NO: 721533 - RNA, 22 nt, Human
acaguauauuuucuugauuguu

SEQ ID NO: 721534 - RNA, 21 nt, Human
ugaaacaaucagacagagucu

SEQ ID NO: 721535 - RNA, 22 nt, Human
cagcugcuguucaguuuuguuu

SEQ ID NO: 721536 - RNA, 22 nt, Human
aacaguuuaugauaaauucuua

SEQ ID NO: 721537 - RNA, 22 nt, Human
uaaaguguaugccaucucucau

SEQ ID NO: 721538 - RNA, 20 nt, Human
ucucccaggcucagggaaga

SEQ ID NO: 721539 - RNA, 22 nt, Human
gauuaaguaacugaacacuuug

SEQ ID NO: 721540 - RNA, 22 nt, Human
aggcuuuggaaucagaguucug

SEQ ID NO: 721541 - RNA, 22 nt, Human
caggcucccgaaaucacccaug

SEQ ID NO: 721542 - RNA, 22 nt, Human
uaauccuuuagguuaaaagagg

SEQ ID NO: 721543 - RNA, 22 nt, Human
cucucugcuguauccuuaggcu

SEQ ID NO: 721544 - RNA, 22 nt, Human
ucuuggccccaccugugccagc

SEQ ID NO: 721545 - RNA, 22 nt, Human
uugaaaaaauugguagaggaug

SEQ ID NO: 721546 - RNA, 22 nt, Human
cugcucugugguccaugagaca

SEQ ID NO: 721547 - RNA, 22 nt, Human
uagcacagagcuuuuaaacuuc

SEQ ID NO: 721548 - RNA, 22 nt, Human
gccugagagacccauggggcaa

SEQ ID NO: 721549 - RNA, 16 nt, Human
acccucagaaacugcu

SEQ ID NO: 721550 - RNA, 22 nt, Human
acauuaucccuggcacaacugc

SEQ ID NO: 721551 - RNA, 22 nt, Human
ggagucagaauggcaggguggu

SEQ ID NO: 721552 - RNA, 22 nt, Human
auguuguguuugacuguuaccc

SEQ ID NO: 721553 - RNA, 18 nt, Human
gggaucaggcugccuagg

SEQ ID NO: 721554 - RNA, 22 nt, Human
ugacaaacccugcaaauagcuc

SEQ ID NO: 721555 - RNA, 22 nt, Human
augauugaaaaugacauugcca

SEQ ID NO: 721556 - RNA, 23 nt, Human
uuugugaaaguguugagaggaga

SEQ ID NO: 721557 - RNA, 22 nt, Human
uucuacauauauuuuucucacu

SEQ ID NO: 721558 - RNA, 22 nt, Human
ccuucucucugaagaccccaaa

SEQ ID NO: 721559 - RNA, 22 nt, Human
gucuuuaguugaaacauguggu

SEQ ID NO: 721560 - RNA, 22 nt, Human
cugggggcagcaagaagccaug

SEQ ID NO: 721561 - RNA, 22 nt, Human
aaaugugaguuauagcaauaga

SEQ ID NO: 721562 - RNA, 21 nt, Human
uaaaccuggcgcuguucaaag

SEQ ID NO: 721563 - RNA, 22 nt, Human
ugccugggaaccaauccuggcu

SEQ ID NO: 721564 - RNA, 22 nt, Human
uggacaggcuccuagggguucc

SEQ ID NO: 721565 - RNA, 21 nt, Human
gccacugcacuccagccuggg

SEQ ID NO: 721566 - RNA, 22 nt, Human
cacacaugugggauccgcaggg

SEQ ID NO: 721567 - RNA, 22 nt, Human
uuagccaugugggaaaaacagc

SEQ ID NO: 721568 - RNA, 22 nt, Human
uuccuuggauacaaguaacuuu

SEQ ID NO: 721569 - RNA, 22 nt, Human
acuuggagagcauugcugggga

SEQ ID NO: 721570 - RNA, 22 nt, Human
ggaggccaccugaccugcuguu

SEQ ID NO: 721571 - RNA, 22 nt, Human
acaggaugauaaaggauggcca

SEQ ID NO: 721572 - RNA, 21 nt, Human
aagugccacccacagaugcau

SEQ ID NO: 721573 - RNA, 22 nt, Human
aggccucagccugccaggccug

SEQ ID NO: 721574 - RNA, 17 nt, Human
uuccucucacauuuuuu

SEQ ID NO: 721575 - RNA, 22 nt, Human
gggacacucaaugagaccugca

SEQ ID NO: 721576 - RNA, 22 nt, Human
ugcugaggacaccuagccuucu

SEQ ID NO: 721577 - RNA, 22 nt, Human
gcugcuggcgcugggcguccgg

SEQ ID NO: 721578 - RNA, 21 nt, Human
guuauugaccuccaggcuggc

SEQ ID NO: 721579 - RNA, 22 nt, Human
cagcugccuucugcgggaaguc

SEQ ID NO: 721580 - RNA, 22 nt, Human
cacucuaagaacacaaaggccc

SEQ ID NO: 721581 - RNA, 22 nt, Human
ccaaggagcugcaggcacuugu

SEQ ID NO: 721582 - RNA, 22 nt, Human
acaugcuacagugaaggaggaa

SEQ ID NO: 721583 - RNA, 22 nt, Human
caugcacagagcuuggucauug

SEQ ID NO: 721584 - RNA, 22 nt, Human
cacaugaagauucaacuggaug

SEQ ID NO: 721585 - RNA, 22 nt, Human
cugcuguccaggagugcccugu

SEQ ID NO: 721586 - RNA, 22 nt, Human
caccagcagaagacugagggug

SEQ ID NO: 721587 - RNA, 22 nt, Human
cccugaggggaguggugaggug

SEQ ID NO: 721588 - RNA, 22 nt, Human
cuccauugaacauccucucaga

SEQ ID NO: 721589 - RNA, 22 nt, Human
uauggcuucuuuugcaacuacu

SEQ ID NO: 721590 - RNA, 22 nt, Human
uucuucuucaagugcugcauuc

SEQ ID NO: 721591 - RNA, 22 nt, Human
agcaauaauuuaggccuuuccu

SEQ ID NO: 721592 - RNA, 22 nt, Human
ugcuaaauaaguggaauagaca

SEQ ID NO: 721593 - RNA, 22 nt, Human
ugggaaggcagucacuguccua

SEQ ID NO: 721594 - RNA, 22 nt, Human
aagggcuguuauguuuuuauac

SEQ ID NO: 721595 - RNA, 22 nt, Human
cagguauaacgugcauguugua

SEQ ID NO: 721596 - RNA, 22 nt, Human
uacaaaaggaagagggaucuua

SEQ ID NO: 721597 - RNA, 22 nt, Human
uaguaacagauuuauacagucu

SEQ ID NO: 721598 - RNA, 22 nt, Human
augaucauggaagugcacccau

SEQ ID NO: 721599 - RNA, 22 nt, Human
agcagagcccuuccauggccuu

SEQ ID NO: 721600 - RNA, 22 nt, Human
ccuggagaggcgcugcagagga

SEQ ID NO: 721601 - RNA, 21 nt, Human
agcugcagucaagccagaggu

SEQ ID NO: 721602 - RNA, 22 nt, Human
cugggugguucuaacuguugau

SEQ ID NO: 721603 - RNA, 22 nt, Human
uuuccagggcucuguagaagaa

SEQ ID NO: 721604 - RNA, 22 nt, Human
cugaggcucagcgugaggaaag

SEQ ID NO: 721605 - RNA, 22 nt, Human
ggaagggccucgggcgugggac

SEQ ID NO: 721606 - RNA, 22 nt, Human
guuuuucucugaaauaguugac

SEQ ID NO: 721607 - RNA, 22 nt, Human
uugaggcccggcaggccgagcg

SEQ ID NO: 721608 - RNA, 21 nt, Human
accaaaaccuauacuuucugu

SEQ ID NO: 721609 - RNA, 22 nt, Human
cucuuuguggaacggcaguguc

SEQ ID NO: 721610 - RNA, 22 nt, Human
uuugagaaguaauucaagacau

SEQ ID NO: 721611 - RNA, 22 nt, Human
cucccaguguuguuuucugaug

SEQ ID NO: 721612 - RNA, 22 nt, Human
cugcuuuaauguaagauauacc

SEQ ID NO: 721613 - RNA, 22 nt, Human
uuagaaauacaagugagguuga

SEQ ID NO: 721614 - RNA, 22 nt, Human
acacaauaaauuuauccuuuga

SEQ ID NO: 721615 - RNA, 22 nt, Human
acauuguuugagaauacagaug

SEQ ID NO: 721616 - RNA, 22 nt, Human
auguuacaguugaguaaauuaa

SEQ ID NO: 721617 - RNA, 22 nt, Human
aagacaugcaauuagcaaggaa

SEQ ID NO: 721618 - RNA, 22 nt, Human
agagagcuguccugggacaccc

SEQ ID NO: 721619 - RNA, 22 nt, Human
agcacaguuuucauugcagggu

SEQ ID NO: 721620 - RNA, 22 nt, Human
cauuuccacucugggagucaga

SEQ ID NO: 721621 - RNA, 22 nt, Human
gcuggccucuggagaagggcuu

SEQ ID NO: 721622 - RNA, 22 nt, Human
agaacagcaacaucagacaaag

SEQ ID NO: 721623 - RNA, 22 nt, Human
aggcccugcugaggccucccuc

SEQ ID NO: 721624 - RNA, 22 nt, Human
agagaugacugauggcugauua

SEQ ID NO: 721625 - RNA, 21 nt, Human
cagaggguuucucagguguuu

SEQ ID NO: 721626 - RNA, 22 nt, Human
ugcugccuccuuccugccagga

SEQ ID NO: 721627 - RNA, 22 nt, Human
ggcagauggaagaggcuggguc

SEQ ID NO: 721628 - RNA, 22 nt, Human
auacaucuuccuuuuaaaaugc

SEQ ID NO: 721629 - RNA, 22 nt, Human
ugaaaguauuugauuucuauua

SEQ ID NO: 721630 - RNA, 22 nt, Human
uccacagggccuuucuggugug

SEQ ID NO: 721631 - RNA, 22 nt, Human
cugagcuguuuaaucccagaua

SEQ ID NO: 721632 - RNA, 22 nt, Human
aguggggccgcgguccugcccu

SEQ ID NO: 721633 - RNA, 22 nt, Human
gaggugggagggcagucccuaa

SEQ ID NO: 721634 - RNA, 22 nt, Human
auacagaagaacuauagccacu

SEQ ID NO: 721635 - RNA, 22 nt, Human
ugugcacauaaaacaguacuag

SEQ ID NO: 721636 - RNA, 22 nt, Human
agaaaugggccuugggacacaa

SEQ ID NO: 721637 - RNA, 22 nt, Human
ggucugugaucuuauggauucu

SEQ ID NO: 721638 - RNA, 22 nt, Human
auggcagaccugggcuggagaa

SEQ ID NO: 721639 - RNA, 22 nt, Human
aaggcagggaaaguggauuagg

SEQ ID NO: 721640 - RNA, 23 nt, Human
acaggcucuuaaucagugcuccu

SEQ ID NO: 721641 - RNA, 22 nt, Human
accguauauguuugcugugccc

SEQ ID NO: 721642 - RNA, 17 nt, Human
agccagcaguagcuggu

SEQ ID NO: 721643 - RNA, 22 nt, Human
agugugugaccuuuuaauuuaa

SEQ ID NO: 721644 - RNA, 22 nt, Human
cuggucaggggauggggcucag

SEQ ID NO: 721645 - RNA, 22 nt, Human
aguacaaaaugcagcaucauca

SEQ ID NO: 721646 - RNA, 22 nt, Human
ucagcagggcugggagcuguga

SEQ ID NO: 721647 - RNA, 22 nt, Human
cucagcuucuaccuccugagug

SEQ ID NO: 721648 - RNA, 22 nt, Human
cagagcggccacuagagggcgc

SEQ ID NO: 721649 - RNA, 22 nt, Human
ugagcuucuuuauuuggccaga

SEQ ID NO: 721650 - RNA, 22 nt, Human
ucugaagagucuugcaagaaag

SEQ ID NO: 721651 - RNA, 18 nt, Human
ggauaggaccuuaggcag

SEQ ID NO: 721652 - RNA, 22 nt, Human
cuccacucaccagaugccagga

SEQ ID NO: 721653 - RNA, 22 nt, Human
cugaggaggcuaauuugaggau

SEQ ID NO: 721654 - RNA, 22 nt, Human
acagccuuauugcgagcaaggc

SEQ ID NO: 721655 - RNA, 22 nt, Human
ggcuggaaacucagguaggguu

SEQ ID NO: 721656 - RNA, 22 nt, Human
caggugggccgggguuuguucu

SEQ ID NO: 721657 - RNA, 22 nt, Human
uauuaugaggggcagagggcau

SEQ ID NO: 721658 - RNA, 22 nt, Human
gagggggcgaacagaagcaagg

SEQ ID NO: 721659 - RNA, 22 nt, Human
gaaaggccacgugccaagauua

SEQ ID NO: 721660 - RNA, 23 nt, Human
uccaagggcuacaaacacagacc

SEQ ID NO: 721661 - RNA, 22 nt, Human
uccaauguuccugcuuucagcu

SEQ ID NO: 721662 - RNA, 22 nt, Human
auucacacacauuuagagcaga

SEQ ID NO: 721663 - RNA, 22 nt, Human
ucccuggacaacagacuucacu

SEQ ID NO: 721664 - RNA, 22 nt, Human
cuuaaauuuucaucuacaagaa

SEQ ID NO: 721665 - RNA, 22 nt, Human
gcucugcuugcaucaugacugc

SEQ ID NO: 721666 - RNA, 22 nt, Human
gaguuacagagaggauuauggu

SEQ ID NO: 721667 - RNA, 22 nt, Human
aggccagguggucaugcuugcu

SEQ ID NO: 721668 - RNA, 22 nt, Human
auaaggcagucacuggaauguu

SEQ ID NO: 721669 - RNA, 22 nt, Human
ucuguuggagccuaggaugaca

SEQ ID NO: 721670 - RNA, 22 nt, Human
aagacauucaugaagaagggau

SEQ ID NO: 721671 - RNA, 22 nt, Human
gugaaggauaaggaucuaaauu

SEQ ID NO: 721672 - RNA, 22 nt, Human
uuuucuuccuggauuuuggcau

SEQ ID NO: 721673 - RNA, 22 nt, Human
ggaggccaugaggcucuaggug

SEQ ID NO: 721674 - RNA, 22 nt, Human
gcagacaggcccaguggaggga

SEQ ID NO: 721675 - RNA, 22 nt, Human
ggugccagccuagugcaguggu

SEQ ID NO: 721676 - RNA, 18 nt, Human
cacaggcucccagugagg

SEQ ID NO: 721677 - RNA, 22 nt, Human
gugccucucauuggcugagccc

SEQ ID NO: 721678 - RNA, 22 nt, Human
auucuguuacuuggugaucuuc

SEQ ID NO: 721679 - RNA, 22 nt, Human
cuguuauuaaaaagcucaggcu

SEQ ID NO: 721680 - RNA, 22 nt, Human
agcuggcauugcagggagcugc

SEQ ID NO: 721681 - RNA, 22 nt, Human
cagugcaauuacaagcuaauuc

SEQ ID NO: 721682 - RNA, 22 nt, Human
ucuggagccuuggaugggaaag

SEQ ID NO: 721683 - RNA, 22 nt, Human
acaaugcaccagcaucuucacc

SEQ ID NO: 721684 - RNA, 22 nt, Human
agaggccgggugccugcucaga

SEQ ID NO: 721685 - RNA, 23 nt, Human
acaaccagcacuggagggcacca

SEQ ID NO: 721686 - RNA, 22 nt, Human
aggugacaucccggcagcagag

SEQ ID NO: 721687 - RNA, 22 nt, Human
uacaguaguaucuucauuuguu

SEQ ID NO: 721688 - RNA, 18 nt, Human
gcaggagauggguggggu

SEQ ID NO: 721689 - RNA, 22 nt, Human
gucagcaugagcaagggcugac

SEQ ID NO: 721690 - RNA, 22 nt, Human
aauaugugggugcuaaucaaaa

SEQ ID NO: 721691 - RNA, 22 nt, Human
gcugggccgaccugggcugcag

SEQ ID NO: 721692 - RNA, 23 nt, Human
agcuucgccuuccuuucucugca

SEQ ID NO: 721693 - RNA, 22 nt, Human
gagagaacccuaaaugagauau

SEQ ID NO: 721694 - RNA, 22 nt, Human
gagagagaaccccgugcccuuc

SEQ ID NO: 721695 - RNA, 22 nt, Human
gcacaggcaauagauacagcua

SEQ ID NO: 721696 - RNA, 22 nt, Human
agaucuuuaaaaguuauuauua

SEQ ID NO: 721697 - RNA, 22 nt, Human
aggguucugccagugucuugag

SEQ ID NO: 721698 - RNA, 22 nt, Human
ccagcagguguagggcucaugg

SEQ ID NO: 721699 - RNA, 22 nt, Human
ugucuguaauagucacuaugug

SEQ ID NO: 721700 - RNA, 22 nt, Human
ucucugaaggggagcuguuuaa

SEQ ID NO: 721701 - RNA, 22 nt, Human
ugucacaacagaggaacugaau

SEQ ID NO: 721702 - RNA, 22 nt, Human
aaguaugcuaauuaacuagcac

SEQ ID NO: 721703 - RNA, 22 nt, Human
gaaguucuuuauagcaguguga

SEQ ID NO: 721704 - RNA, 22 nt, Human
gcagaaggucuggcacuucagg

SEQ ID NO: 721705 - RNA, 22 nt, Human
cugaggcacccaucuucuccug

SEQ ID NO: 721706 - RNA, 22 nt, Human
agcaaugaccagugaucuugua

SEQ ID NO: 721707 - RNA, 22 nt, Human
gaguucaguguuucuaguagug

SEQ ID NO: 721708 - RNA, 22 nt, Human
gacugcaaccuuagacuagaaa

SEQ ID NO: 721709 - RNA, 22 nt, Human
aaucuuucccuauuaaaugugg

SEQ ID NO: 721710 - RNA, 22 nt, Human
uaaagagccauuguaugguuuu

SEQ ID NO: 721711 - RNA, 22 nt, Human
gccuggcuccuaaggacuggcu

SEQ ID NO: 721712 - RNA, 19 nt, Human
acagggcuuggccugacau

SEQ ID NO: 721713 - RNA, 22 nt, Human
accuuuggauaauuugaguuug

SEQ ID NO: 721714 - RNA, 20 nt, Human
uacagaaugcaauaaaaugg

SEQ ID NO: 721715 - RNA, 22 nt, Human
auuguacagguuggaggaagug

SEQ ID NO: 721716 - RNA, 22 nt, Human
uuuguucugaaaaucuucccuu

SEQ ID NO: 721717 - RNA, 22 nt, Human
gugcuccuggccacaugaagcu

SEQ ID NO: 721718 - RNA, 22 nt, Human
aaacauagauaauagauagaug

SEQ ID NO: 721719 - RNA, 22 nt, Human
ccugggcuuucggcggcuuccu

SEQ ID NO: 721720 - RNA, 22 nt, Human
gcucugcuguguuuguucagca

SEQ ID NO: 721721 - RNA, 22 nt, Human
uuugcaguagacaucuuauuuu

SEQ ID NO: 721722 - RNA, 22 nt, Human
acacaguaugcaucuagaaauu

SEQ ID NO: 721723 - RNA, 20 nt, Human
gaggccucagccucagcucc

SEQ ID NO: 721724 - RNA, 22 nt, Human
gauucaauguugcagauggaau

SEQ ID NO: 721725 - RNA, 22 nt, Human
caugucuuuguuaugcucacca

SEQ ID NO: 721726 - RNA, 22 nt, Human
acacuucagcaguaugcuuggg

SEQ ID NO: 721727 - RNA, 23 nt, Human
aauuacaaccaagaacuggaagg

SEQ ID NO: 721728 - RNA, 22 nt, Human
ucacaucucucauugccucugc

SEQ ID NO: 721729 - RNA, 22 nt, Human
guguauaacuaucuaucuagua

SEQ ID NO: 721730 - RNA, 22 nt, Human
cacaggcuugucagcaugaggc

SEQ ID NO: 721731 - RNA, 22 nt, Human
uccagguaucuggcuuccacau

SEQ ID NO: 721732 - RNA, 22 nt, Human
ggcagugagcuggagggaagga

SEQ ID NO: 721733 - RNA, 22 nt, Human
gugugggcagggccgugcuccc

SEQ ID NO: 721734 - RNA, 22 nt, Human
ucacacuaggauguuguuucua

SEQ ID NO: 721735 - RNA, 22 nt, Human
ucgccagggaugcuguaaggaa

SEQ ID NO: 721736 - RNA, 22 nt, Human
uaaaggcacugcgucccucaaa

SEQ ID NO: 721737 - RNA, 22 nt, Human
uccugugggcucucggccucca

SEQ ID NO: 721738 - RNA, 22 nt, Human
ucaugcuuugguugcuguccuu

SEQ ID NO: 721739 - RNA, 22 nt, Human
ggccaugggaagagguggagag

SEQ ID NO: 721740 - RNA, 22 nt, Human
agggacccugaugacugaggag

SEQ ID NO: 721741 - RNA, 21 nt, Human
ucuuuuaacaccaggaauucc

SEQ ID NO: 721742 - RNA, 22 nt, Human
uuucuucucugauuaaggcuca

SEQ ID NO: 721743 - RNA, 22 nt, Human
agcaaagaagacacaggcuuca

SEQ ID NO: 721744 - RNA, 22 nt, Human
auggcuggcacuggccuggguu

SEQ ID NO: 721745 - RNA, 22 nt, Human
ccugaacagucugaaaggagac

SEQ ID NO: 721746 - RNA, 18 nt, Human
auggaggcagagagcuga

SEQ ID NO: 721747 - RNA, 22 nt, Human
ugagccaagaucaugccguugu

SEQ ID NO: 721748 - RNA, 22 nt, Human
accuguggaucagauucuugua

SEQ ID NO: 721749 - RNA, 22 nt, Human
gaugggcaucaaacaugacgug

SEQ ID NO: 721750 - RNA, 18 nt, Human
agcagguggcgucugcag

SEQ ID NO: 721751 - RNA, 22 nt, Human
aucgcaauguuuagaauuuugu

SEQ ID NO: 721752 - RNA, 22 nt, Human
ugccaggcccugugcuggaugc

SEQ ID NO: 721753 - RNA, 22 nt, Human
gagagaagggggauaugagccu

SEQ ID NO: 721754 - RNA, 22 nt, Human
aggucaggaggccucugccauu

SEQ ID NO: 721755 - RNA, 22 nt, Human
uggccugccucccggcuucuuu

SEQ ID NO: 721756 - RNA, 22 nt, Human
guuguacaauuguuucacaugc

SEQ ID NO: 721757 - RNA, 19 nt, Human
ggcugccuggagcgagggc

SEQ ID NO: 721758 - RNA, 22 nt, Human
uccugccucacaguugaaguuu

SEQ ID NO: 721759 - RNA, 22 nt, Human
auggggggaugaaggaguccaa

SEQ ID NO: 721760 - RNA, 22 nt, Human
ccaccacuucuggcuucuggug

SEQ ID NO: 721761 - RNA, 22 nt, Human
uggaguucucaggugagggcuu

SEQ ID NO: 721762 - RNA, 22 nt, Human
cagcaugcccagacugagcuaa

SEQ ID NO: 721763 - RNA, 22 nt, Human
aaaggcaugugcaacuacaaau

SEQ ID NO: 721764 - RNA, 19 nt, Human
cccuugguagacagcugca

SEQ ID NO: 721765 - RNA, 22 nt, Human
cacaggggcaaacuguagggga

SEQ ID NO: 721766 - RNA, 22 nt, Human
ucacugcagagaccucuaguca

SEQ ID NO: 721767 - RNA, 22 nt, Human
acuguuuucuuagcucccugcu

SEQ ID NO: 721768 - RNA, 22 nt, Human
cagcagcuagaggaagggcaga

SEQ ID NO: 721769 - RNA, 19 nt, Human
ugagcuggcugagccucuc

SEQ ID NO: 721770 - RNA, 19 nt, Human
uucacauuggaagaaguag

SEQ ID NO: 721771 - RNA, 22 nt, Human
aauucacauguugaaguccuaa

SEQ ID NO: 721772 - RNA, 22 nt, Human
auuguauuauaauuaggccaaa

SEQ ID NO: 721773 - RNA, 22 nt, Human
aagaguuucugggucaaggauu

SEQ ID NO: 721774 - RNA, 22 nt, Human
cagaaggcuggcagauugagau

SEQ ID NO: 721775 - RNA, 22 nt, Human
agcagcauucucugguaugggg

SEQ ID NO: 721776 - RNA, 22 nt, Human
acugagcaaugcagugggagcg

SEQ ID NO: 721777 - RNA, 22 nt, Human
guauuuuuagguaaggaaagua

SEQ ID NO: 721778 - RNA, 22 nt, Human
uuugcaaauaaauaagugcucg

SEQ ID NO: 721779 - RNA, 22 nt, Human
ucuaguguuuuggaacauggaa

SEQ ID NO: 721780 - RNA, 22 nt, Human
aaugcuuccaaaauaccaagcc

SEQ ID NO: 721781 - RNA, 22 nt, Human
ucuuggccagaugcacuuccuc

SEQ ID NO: 721782 - RNA, 22 nt, Human
uucugcucaguaguaagagugc

SEQ ID NO: 721783 - RNA, 22 nt, Human
cugggcaguaugaauauucaaa

SEQ ID NO: 721784 - RNA, 22 nt, Human
cugggcacaaguggcccuggau

SEQ ID NO: 721785 - RNA, 22 nt, Human
cuucucuacuuccuggaagggg

SEQ ID NO: 721786 - RNA, 18 nt, Human
uucuccagaaaacauagc

SEQ ID NO: 721787 - RNA, 22 nt, Human
gugcuggcaccccucuccaguu

SEQ ID NO: 721788 - RNA, 22 nt, Human
aaaagucuacaagcuucaacaa

SEQ ID NO: 721789 - RNA, 22 nt, Human
acacaccaugauuuauuuaccc

SEQ ID NO: 721790 - RNA, 22 nt, Human
caucaguaaggcaacauagcuu

SEQ ID NO: 721791 - RNA, 21 nt, Human
ggcuguggagccaugacucac

SEQ ID NO: 721792 - RNA, 22 nt, Human
cucagugcugaggaaaguugaa

SEQ ID NO: 721793 - RNA, 22 nt, Human
guguuccuggacagcaagugag

SEQ ID NO: 721794 - RNA, 22 nt, Human
agcagaacugaugagacuugag

SEQ ID NO: 721795 - RNA, 22 nt, Human
ugcagagauccuggacugagcg

SEQ ID NO: 721796 - RNA, 22 nt, Human
acagcugcauucuuaacaggaa

SEQ ID NO: 721797 - RNA, 22 nt, Human
uuaacacagggggagacaaagu

SEQ ID NO: 721798 - RNA, 22 nt, Human
cccagugucaccaacaggacac

SEQ ID NO: 721799 - RNA, 22 nt, Human
gccagcucucauuguauaggcu

SEQ ID NO: 721800 - RNA, 22 nt, Human
acaggccugagauuuugcauuu

SEQ ID NO: 721801 - RNA, 22 nt, Human
aaagcuguuguauggcccuugg

SEQ ID NO: 721802 - RNA, 22 nt, Human
acagacugugaguaugcauagu

SEQ ID NO: 721803 - RNA, 22 nt, Human
ugcagggaauccagucuagggu

SEQ ID NO: 721804 - RNA, 22 nt, Human
uccucaguaaggaucgucagcu

SEQ ID NO: 721805 - RNA, 22 nt, Human
cacaaaguauaacuugauggaa

SEQ ID NO: 721806 - RNA, 22 nt, Human
uccugggaaguggcuggcugag

SEQ ID NO: 721807 - RNA, 22 nt, Human
uaauuucuggagggagaaagag

SEQ ID NO: 721808 - RNA, 22 nt, Human
guggcccucagcaguugccaag

SEQ ID NO: 721809 - RNA, 22 nt, Human
uuggcacagagcugcagccugg

SEQ ID NO: 721810 - RNA, 22 nt, Human
cuguggaaggacuuagcgauac

SEQ ID NO: 721811 - RNA, 22 nt, Human
agcuucuggaagccuggcagca

SEQ ID NO: 721812 - RNA, 22 nt, Human
augucuuuggcuuugacauggc

SEQ ID NO: 721813 - RNA, 22 nt, Human
aacuguggagauucggaaggua

SEQ ID NO: 721814 - RNA, 22 nt, Human
cagcaagaggguaagguugaag

SEQ ID NO: 721815 - RNA, 22 nt, Human
cagaaguaagauuacugugagu

SEQ ID NO: 721816 - RNA, 22 nt, Human
ccacacuuugagaugacuagga

SEQ ID NO: 721817 - RNA, 21 nt, Human
ggguggguggaauuaggagug

SEQ ID NO: 721818 - RNA, 23 nt, Human
ucagucuuggcuucugauuuucc

SEQ ID NO: 721819 - RNA, 22 nt, Human
cugagcauggccgguccauggu

SEQ ID NO: 721820 - RNA, 22 nt, Human
gaguccuuuucauagcaguggg

SEQ ID NO: 721821 - RNA, 23 nt, Human
auuucuaggggauuuucuggugc

SEQ ID NO: 721822 - RNA, 22 nt, Human
ugaaguuuucugguugauuaag

SEQ ID NO: 721823 - RNA, 22 nt, Human
gaauggcauagcuuucuuuaca

SEQ ID NO: 721824 - RNA, 22 nt, Human
gacaaugugcaauugcagcuag

SEQ ID NO: 721825 - RNA, 22 nt, Human
auuguacauaugauguauguaa

SEQ ID NO: 721826 - RNA, 22 nt, Human
cugaggccuguguuggggcagu

SEQ ID NO: 721827 - RNA, 22 nt, Human
uacaguagucgucuuauuuuga

SEQ ID NO: 721828 - RNA, 22 nt, Human
ggggaccuggccacccauccuu

SEQ ID NO: 721829 - RNA, 22 nt, Human
aggcugaggaucguacuuucca

SEQ ID NO: 721830 - RNA, 22 nt, Human
gcugugcuggaaggggaccugc

SEQ ID NO: 721831 - RNA, 22 nt, Human
ccaggguugcuuuagauucuga

SEQ ID NO: 721832 - RNA, 22 nt, Human
caaggugaacuugcuguacagc

SEQ ID NO: 721833 - RNA, 22 nt, Human
aguggggaagauuuugcaguca

SEQ ID NO: 721834 - RNA, 22 nt, Human
uggaucugcucuaugaacugcu

SEQ ID NO: 721835 - RNA, 22 nt, Human
gcagggcuggggcugcuccuga

SEQ ID NO: 721836 - RNA, 20 nt, Human
gagccuuccccucaccacug

SEQ ID NO: 721837 - RNA, 22 nt, Human
gugcccagcuccaccucacaga

SEQ ID NO: 721838 - RNA, 22 nt, Human
ugcucaggaggaggcugugagg

SEQ ID NO: 721839 - RNA, 22 nt, Human
uagcaggguccaaugugaggca

SEQ ID NO: 721840 - RNA, 22 nt, Human
acagaugguuauugucauuucu

SEQ ID NO: 721841 - RNA, 22 nt, Human
uacacauguuuggcaaguaugu

SEQ ID NO: 721842 - RNA, 22 nt, Human
ggguuggggcccagcagucugc

SEQ ID NO: 721843 - RNA, 22 nt, Human
aaagagccagcuaccucaguuu

SEQ ID NO: 721844 - RNA, 22 nt, Human
auucaguuuuugaagggaaauu

SEQ ID NO: 721845 - RNA, 22 nt, Human
uggaggaaguggacaguugugu

SEQ ID NO: 721846 - RNA, 22 nt, Human
gggcacuggaggccaaggagcu

SEQ ID NO: 721847 - RNA, 22 nt, Human
ucucuggcagacaccucccuga

SEQ ID NO: 721848 - RNA, 22 nt, Human
gggcuccaucggacuuggguuu

SEQ ID NO: 721849 - RNA, 22 nt, Human
cagugaaguuuaaaguguagau

SEQ ID NO: 721850 - RNA, 22 nt, Human
acaucucagaacugaguaaccg

SEQ ID NO: 721851 - RNA, 22 nt, Human
aggggaggcagcgauaaaccug

SEQ ID NO: 721852 - RNA, 19 nt, Human
ucgagucaagacacuaggc

SEQ ID NO: 721853 - RNA, 22 nt, Human
agagucagcuuaugacacaguc

SEQ ID NO: 721854 - RNA, 22 nt, Human
guccuguggaaagcuagccgcu

SEQ ID NO: 721855 - RNA, 22 nt, Human
ucucuugauauauuacauagag

SEQ ID NO: 721856 - RNA, 22 nt, Human
acugaugaaagguaagacucca

SEQ ID NO: 721857 - RNA, 22 nt, Human
auuuucaguguaaauguuuuau

SEQ ID NO: 721858 - RNA, 22 nt, Human
acaguggaaagaaacgaauuag

SEQ ID NO: 721859 - RNA, 22 nt, Human
cugagcaauuucagcucucacu

SEQ ID NO: 721860 - RNA, 22 nt, Human
ccuguccccucacaaugccacu

SEQ ID NO: 721861 - RNA, 22 nt, Human
auuugucuucaguagguucuuc

SEQ ID NO: 721862 - RNA, 20 nt, Human
cagauucuccacuaacauau

SEQ ID NO: 721863 - RNA, 22 nt, Human
uuuagucugacuauuaccucca

SEQ ID NO: 721864 - RNA, 22 nt, Human
ccugagcucaagaaggugacca

SEQ ID NO: 721865 - RNA, 19 nt, Human
auauauguauacaaugugg

SEQ ID NO: 721866 - RNA, 19 nt, Human
ucagugcuccuauguccuu

SEQ ID NO: 721867 - RNA, 22 nt, Human
agcacaugcacagugcuacacu

SEQ ID NO: 721868 - RNA, 22 nt, Human
uuacuugauagggggauggggu

SEQ ID NO: 721869 - RNA, 22 nt, Human
gagcuuggccucuugaacgugg

SEQ ID NO: 721870 - RNA, 22 nt, Human
aacugcuuguagugacuugccu

SEQ ID NO: 721871 - RNA, 22 nt, Human
cuacaaugacagaauugaguag

SEQ ID NO: 721872 - RNA, 22 nt, Human
ccucugagaacaccuggcgucc

SEQ ID NO: 721873 - RNA, 22 nt, Human
uggaguucauccaugacagcuu

SEQ ID NO: 721874 - RNA, 22 nt, Human
ugcuucauuuugacuuagccag

SEQ ID NO: 721875 - RNA, 22 nt, Human
ggcagugguuagaaacaugagc

SEQ ID NO: 721876 - RNA, 22 nt, Human
agguaaaaugagucuccauuau

SEQ ID NO: 721877 - RNA, 22 nt, Human
accaucuuaaggggacuucuua

SEQ ID NO: 721878 - RNA, 22 nt, Human
gcagcuuuggagguggaacucu

SEQ ID NO: 721879 - RNA, 22 nt, Human
gguguguagcauguuuaagacc

SEQ ID NO: 721880 - RNA, 22 nt, Human
aggcuccaagagguuaagucac

SEQ ID NO: 721881 - RNA, 22 nt, Human
cagcaugguggagcugcucuuu

SEQ ID NO: 721882 - RNA, 22 nt, Human
agucagaggaaugggccaggcu

SEQ ID NO: 721883 - RNA, 22 nt, Human
ucauacauaacuuguacaguga

SEQ ID NO: 721884 - RNA, 22 nt, Human
gggguaggcaggugaucugauc

SEQ ID NO: 721885 - RNA, 22 nt, Human
uaucuagauauuuggauaaaug

SEQ ID NO: 721886 - RNA, 19 nt, Human
ucagcccaucagacucaca

SEQ ID NO: 721887 - RNA, 22 nt, Human
aacaaaguacuuuucagugcuu

SEQ ID NO: 721888 - RNA, 22 nt, Human
augauuucuauauaaacuuaaa

SEQ ID NO: 721889 - RNA, 17 nt, Human
ugaagaugcauggcagc

SEQ ID NO: 721890 - RNA, 22 nt, Human
aaggaagguucauagucaaaga

SEQ ID NO: 721891 - RNA, 18 nt, Human
ucugagggugcgggagcu

SEQ ID NO: 721892 - RNA, 22 nt, Human
aggaagaaaugugacuucaaac

SEQ ID NO: 721893 - RNA, 22 nt, Human
agcuuucaggauaaugaaaaag

SEQ ID NO: 721894 - RNA, 22 nt, Human
uguaugaagacuucuucugugu

SEQ ID NO: 721895 - RNA, 22 nt, Human
agcgcgcucuaggacaccgcgg

SEQ ID NO: 721896 - RNA, 23 nt, Human
acuuucccauagcauggcuuccu

SEQ ID NO: 721897 - RNA, 22 nt, Human
cauggaaggcaaaagacacaga

SEQ ID NO: 721898 - RNA, 22 nt, Human
acugugugcuggacaugauguu

SEQ ID NO: 721899 - RNA, 22 nt, Human
uugugcaauuuaaaaucuuccu

SEQ ID NO: 721900 - RNA, 22 nt, Human
gcugucuuccuugcuccaaggg

SEQ ID NO: 721901 - RNA, 22 nt, Human
uggcagagcccagaacugagca

SEQ ID NO: 721902 - RNA, 22 nt, Human
uguuuaaucuucaggacagucu

SEQ ID NO: 721903 - RNA, 22 nt, Human
aacacuucccgaccauauggcu

SEQ ID NO: 721904 - RNA, 22 nt, Human
ucaugcagaggaaggcuaguuu

SEQ ID NO: 721905 - RNA, 22 nt, Human
ggccuaagugguuaaauggcuu

SEQ ID NO: 721906 - RNA, 22 nt, Human
uguuuccuuucuggugagcaua

SEQ ID NO: 721907 - RNA, 22 nt, Human
ucugcugaacuugcugcccaga

SEQ ID NO: 721908 - RNA, 18 nt, Human
agcaggacuguggggugg

SEQ ID NO: 721909 - RNA, 22 nt, Human
aagucaugaguccucuucugug

SEQ ID NO: 721910 - RNA, 23 nt, Human
cuucucagaagucugugccagga

SEQ ID NO: 721911 - RNA, 22 nt, Human
gcaguauaaguggauuaugucc

SEQ ID NO: 721912 - RNA, 22 nt, Human
ucuccaggugagggugguuaga

SEQ ID NO: 721913 - RNA, 22 nt, Human
auguagagcuccuugauccucc

SEQ ID NO: 721914 - RNA, 22 nt, Human
uuacaugggcuugugaguccuu

SEQ ID NO: 721915 - RNA, 22 nt, Human
uuauuuaauuuucucacucaga

SEQ ID NO: 721916 - RNA, 22 nt, Human
aacagcuaguaccaauccacua

SEQ ID NO: 721917 - RNA, 22 nt, Human
cagagggcucggcggccgcucc

SEQ ID NO: 721918 - RNA, 22 nt, Human
uaaagugcccagggaaagcggg

SEQ ID NO: 721919 - RNA, 22 nt, Human
ucuggagaggaggauguggaca

SEQ ID NO: 721920 - RNA, 22 nt, Human
uuucuaaguaaacacagcauac

SEQ ID NO: 721921 - RNA, 22 nt, Human
gauugcgucugugucaccuuca

SEQ ID NO: 721922 - RNA, 22 nt, Human
acauguguauagccuguauaga

SEQ ID NO: 721923 - RNA, 20 nt, Human
aaagcauuuacuugugauug

SEQ ID NO: 721924 - RNA, 19 nt, Human
cagaggugauauaugccca

SEQ ID NO: 721925 - RNA, 22 nt, Human
uaaugaacaugcaucgugugua

SEQ ID NO: 721926 - RNA, 19 nt, Human
ggagccagcuguggaaggc

SEQ ID NO: 721927 - RNA, 22 nt, Human
uguuacaguacuacaauucugc

SEQ ID NO: 721928 - RNA, 22 nt, Human
aauaacagugccaugaaauuga

SEQ ID NO: 721929 - RNA, 22 nt, Human
ucaggagcucuucccuggugug

SEQ ID NO: 721930 - RNA, 22 nt, Human
agaggcaaggcaggauucuucu

SEQ ID NO: 721931 - RNA, 22 nt, Human
ucccagaggacuguuggugcua

SEQ ID NO: 721932 - RNA, 22 nt, Human
cguccauauuccugagggcuca

SEQ ID NO: 721933 - RNA, 22 nt, Human
ggcaggcauggccacucccuag

SEQ ID NO: 721934 - RNA, 22 nt, Human
aaaggcaguggguauguggauc

SEQ ID NO: 721935 - RNA, 22 nt, Human
ucugauaauggacuucucaucu

SEQ ID NO: 721936 - RNA, 19 nt, Human
ucuccagcuuugggcuuuu

SEQ ID NO: 721937 - RNA, 22 nt, Human
agcagccagaaagggcagucga

SEQ ID NO: 721938 - RNA, 22 nt, Human
aaacuguaaagcaggugaguag

SEQ ID NO: 721939 - RNA, 23 nt, Human
gggcauggaguguagguggaagg

SEQ ID NO: 721940 - RNA, 21 nt, Human
cugcccauuugugaugucccc

SEQ ID NO: 721941 - RNA, 22 nt, Human
ugugccuacugauagagccaag

SEQ ID NO: 721942 - RNA, 22 nt, Human
caggaaauggcugaauaaauuc

SEQ ID NO: 721943 - RNA, 22 nt, Human
caggaggcagagguugcagcga

SEQ ID NO: 721944 - RNA, 22 nt, Human
ccccacaacucauguugaaacu

SEQ ID NO: 721945 - RNA, 22 nt, Human
acaaugucaccucucauguuuu

SEQ ID NO: 721946 - RNA, 22 nt, Human
agagaugaaaaggguacugagg

SEQ ID NO: 721947 - RNA, 23 nt, Human
uuauuuggauuuuaguggaaaga

SEQ ID NO: 721948 - RNA, 22 nt, Human
gcccuggccuggcgcguuguca

SEQ ID NO: 721949 - RNA, 22 nt, Human
agggguggccugccuuacuccc

SEQ ID NO: 721950 - RNA, 22 nt, Human
cuagagaauugucuugagaguu

SEQ ID NO: 721951 - RNA, 22 nt, Human
agggaauucacuggaacgcccu

SEQ ID NO: 721952 - RNA, 22 nt, Human
acauuuaguaugagucucugua

SEQ ID NO: 721953 - RNA, 22 nt, Human
aaacucugaugcuuauugggaa

SEQ ID NO: 721954 - RNA, 22 nt, Human
uucaagucauguuaacugcuuc

SEQ ID NO: 721955 - RNA, 23 nt, Human
aguuuuuaauggucauagcugag

SEQ ID NO: 721956 - RNA, 22 nt, Human
auucuucugccuacuuucaucc

SEQ ID NO: 721957 - RNA, 22 nt, Human
aacagauggccaagugcauggg

SEQ ID NO: 721958 - RNA, 22 nt, Human
cagggccucauugucaguccug

SEQ ID NO: 721959 - RNA, 22 nt, Human
caggcagcucgaugccuuguug

SEQ ID NO: 721960 - RNA, 22 nt, Human
cugcccacuuggccaccuucua

SEQ ID NO: 721961 - RNA, 22 nt, Human
agccaggccuuuucucaagguu

SEQ ID NO: 721962 - RNA, 22 nt, Human
cuuaauuuuuguaguagaugga

SEQ ID NO: 721963 - RNA, 22 nt, Human
cauuugaaaccuggaaucuacc

SEQ ID NO: 721964 - RNA, 22 nt, Human
aacaaugccaacagcaugcugg

SEQ ID NO: 721965 - RNA, 22 nt, Human
ucacaaaucauuuuaucugugu

SEQ ID NO: 721966 - RNA, 22 nt, Human
ccacucugauuucaagggagau

SEQ ID NO: 721967 - RNA, 22 nt, Human
cuuaaaggucauucuguugaua

SEQ ID NO: 721968 - RNA, 22 nt, Human
acugugauguucucuaucuugg

SEQ ID NO: 721969 - RNA, 22 nt, Human
uaauaccuugaucucucuuguc

SEQ ID NO: 721970 - RNA, 21 nt, Human
ggacaccagucacacuggauu

SEQ ID NO: 721971 - RNA, 17 nt, Human
aggagggaaauagcuug

SEQ ID NO: 721972 - RNA, 22 nt, Human
uguacagacuuugcagugugca

SEQ ID NO: 721973 - RNA, 22 nt, Human
gagcagacgcugcagucuuggg

SEQ ID NO: 721974 - RNA, 22 nt, Human
agacaacaucuaguuuggugga

SEQ ID NO: 721975 - RNA, 22 nt, Human
uuacaauaguuccuucuuuugu

SEQ ID NO: 721976 - RNA, 22 nt, Human
gcucagucuuugugggguacgg

SEQ ID NO: 721977 - RNA, 22 nt, Human
ggcagcugguucuuuccauuaa

SEQ ID NO: 721978 - RNA, 22 nt, Human
acccgggaggcaggagucauag

SEQ ID NO: 721979 - RNA, 22 nt, Human
cugagcgcgggaccugaggcug

SEQ ID NO: 721980 - RNA, 22 nt, Human
aagacauuuugaaauuggaagc

SEQ ID NO: 721981 - RNA, 22 nt, Human
gccaucucggagcuaucaaagg

SEQ ID NO: 721982 - RNA, 22 nt, Human
uuugugugcuugguauugaaga

SEQ ID NO: 721983 - RNA, 20 nt, Human
agaagcugagacuggguuuu

SEQ ID NO: 721984 - RNA, 22 nt, Human
gggcuucucugggaguccuggu

SEQ ID NO: 721985 - RNA, 22 nt, Human
acaggcucucuauugagugcag

SEQ ID NO: 721986 - RNA, 17 nt, Human
cuccucucuggguuacu

SEQ ID NO: 721987 - RNA, 22 nt, Human
accccagguccagguuacagag

SEQ ID NO: 721988 - RNA, 22 nt, Human
uacacauuuugcggguacaugu

SEQ ID NO: 721989 - RNA, 22 nt, Human
uacauuccuucguuuagagauu

SEQ ID NO: 721990 - RNA, 22 nt, Human
guggcucucgccagccugcggg

SEQ ID NO: 721991 - RNA, 22 nt, Human
guuuuuccuugcugaggacccg

SEQ ID NO: 721992 - RNA, 22 nt, Human
cuacaguacuggaugcucagcc

SEQ ID NO: 721993 - RNA, 22 nt, Human
ugguggcaaaucaggacacuuc

SEQ ID NO: 721994 - RNA, 20 nt, Human
gaagccagaggggaaaggag

SEQ ID NO: 721995 - RNA, 22 nt, Human
cuuuccuagauggccaucuuuc

SEQ ID NO: 721996 - RNA, 22 nt, Human
gagcugccagacaugggaauga

SEQ ID NO: 721997 - RNA, 22 nt, Human
cagcuggcugcaugaugccaaa

SEQ ID NO: 721998 - RNA, 22 nt, Human
uccuggaguugucuguacucau

SEQ ID NO: 721999 - RNA, 22 nt, Human
cuggcagggcucuuugggugcu

SEQ ID NO: 722000 - RNA, 22 nt, Human
agccagugacauacgauuggga

SEQ ID NO: 722001 - RNA, 22 nt, Human
uggcucagaacuacuucuaguu

SEQ ID NO: 722002 - RNA, 22 nt, Human
auguacacuuuggaagagucac

SEQ ID NO: 722003 - RNA, 22 nt, Human
uucuuguucuccucauuuagag

SEQ ID NO: 722004 - RNA, 22 nt, Human
uaaagguaacaugaacugcuuu

SEQ ID NO: 722005 - RNA, 22 nt, Human
ccuggcuccagcugccuguccu

SEQ ID NO: 722006 - RNA, 22 nt, Human
gucuggcauucuuccuggagaa

SEQ ID NO: 722007 - RNA, 22 nt, Human
auccuugaacuuagacacuagg

SEQ ID NO: 722008 - RNA, 22 nt, Human
aucuuucucugcacuauacaau

SEQ ID NO: 722009 - RNA, 22 nt, Human
caagaucaagguaucagcagau

SEQ ID NO: 722010 - RNA, 22 nt, Human
agccuuguuggucugaguuugg

SEQ ID NO: 722011 - RNA, 22 nt, Human
gaggcugaugcugccucacaga

SEQ ID NO: 722012 - RNA, 22 nt, Human
aaguaaauaucuguuuauagca

SEQ ID NO: 722013 - RNA, 22 nt, Human
augcugugccuggaaagcggcu

SEQ ID NO: 722014 - RNA, 22 nt, Human
ucccugcucagcucaccuggca

SEQ ID NO: 722015 - RNA, 22 nt, Human
gccuggagggucccucucugga

SEQ ID NO: 722016 - RNA, 22 nt, Human
ugaggcagcaauugauuauuca

SEQ ID NO: 722017 - RNA, 19 nt, Human
ugggugugaccaucucugc

SEQ ID NO: 722018 - RNA, 22 nt, Human
aguaaacauuuucauauuuucu

SEQ ID NO: 722019 - RNA, 22 nt, Human
cggauccucagucgugcgggag

SEQ ID NO: 722020 - RNA, 22 nt, Human
ugggguagguaugaaaacuagg

SEQ ID NO: 722021 - RNA, 17 nt, Human
ucucuuucccuuucugc

SEQ ID NO: 722022 - RNA, 22 nt, Human
uuuaagaguuaaacuuugaccu

SEQ ID NO: 722023 - RNA, 22 nt, Human
uggaagggagcuggaauuugga

SEQ ID NO: 722024 - RNA, 22 nt, Human
aaaugucuuucuucugcuacgu

SEQ ID NO: 722025 - RNA, 22 nt, Human
agggauguaaauucuucuucuu

SEQ ID NO: 722026 - RNA, 22 nt, Human
acaggcauauuucuagauuaca

SEQ ID NO: 722027 - RNA, 22 nt, Human
aagguggcccugagcaugacaa

SEQ ID NO: 722028 - RNA, 22 nt, Human
uagcagaaccagucagugagcc

SEQ ID NO: 722029 - RNA, 19 nt, Human
uucucuauuaugucuucuc

SEQ ID NO: 722030 - RNA, 22 nt, Human
aggcacuggguaauuaguagcu

SEQ ID NO: 722031 - RNA, 22 nt, Human
uagagcaguuggcagcuguauu

SEQ ID NO: 722032 - RNA, 22 nt, Human
aggccugagcagaggaguggac

SEQ ID NO: 722033 - RNA, 22 nt, Human
uuagaaaauuugcuucuuugga

SEQ ID NO: 722034 - RNA, 22 nt, Human
uaugcaaaguccuaagaaagaa

SEQ ID NO: 722035 - RNA, 22 nt, Human
aggagaauuaggaacucaagau

SEQ ID NO: 722036 - RNA, 20 nt, Human
gaaccuggggaaggaguagg

SEQ ID NO: 722037 - RNA, 22 nt, Human
acaauaaguauugggcuuuuga

SEQ ID NO: 722038 - RNA, 22 nt, Human
aauuaugguggaucccaguggg

SEQ ID NO: 722039 - RNA, 22 nt, Human
aauaugugagguauguucagug

SEQ ID NO: 722040 - RNA, 22 nt, Human
gagggugggcuuuguuccucca

SEQ ID NO: 722041 - RNA, 19 nt, Human
ucucagagcccuagaggcc

SEQ ID NO: 722042 - RNA, 22 nt, Human
ugauucauauguaacaucccug

SEQ ID NO: 722043 - RNA, 22 nt, Human
ucugagcuuucuugugcucaag

SEQ ID NO: 722044 - RNA, 22 nt, Human
ggauacaacuagaagauggcag

SEQ ID NO: 722045 - RNA, 22 nt, Human
aagcaaagagauaaccuuuugg

SEQ ID NO: 722046 - RNA, 22 nt, Human
ucuugcuagaaucauuuggaga

SEQ ID NO: 722047 - RNA, 22 nt, Human
agugaguuuagggugcaggugu

SEQ ID NO: 722048 - RNA, 22 nt, Human
augaucauacagagcccuggua

SEQ ID NO: 722049 - RNA, 22 nt, Human
gagaaaaugucagacuuggucg

SEQ ID NO: 722050 - RNA, 22 nt, Human
gauuugucacgguugagagcca

SEQ ID NO: 722051 - RNA, 22 nt, Human
aaggcaggaugggaaaagauuu

SEQ ID NO: 722052 - RNA, 22 nt, Human
ccuuguccucugguuuccuguu

SEQ ID NO: 722053 - RNA, 22 nt, Human
uccugaagcucucuuaaggaaa

SEQ ID NO: 722054 - RNA, 22 nt, Human
cucuuugacgugcccauguccc

SEQ ID NO: 722055 - RNA, 22 nt, Human
gcucaccuucguccagcagccg

SEQ ID NO: 722056 - RNA, 22 nt, Human
cuugaaucuucugaguauuugc

SEQ ID NO: 722057 - RNA, 22 nt, Human
agcuacucagaguuccacucua

SEQ ID NO: 722058 - RNA, 22 nt, Human
caaggcaggaagccugucuuau

SEQ ID NO: 722059 - RNA, 22 nt, Human
uccagccucauuucuccugcuu

SEQ ID NO: 722060 - RNA, 19 nt, Human
aauuagggagucgguuaag

SEQ ID NO: 722061 - RNA, 20 nt, Human
gggcccugggauucagagca

SEQ ID NO: 722062 - RNA, 22 nt, Human
ugccucugugugcaggugagca

SEQ ID NO: 722063 - RNA, 22 nt, Human
aggcugagcuggcccuugaaau

SEQ ID NO: 722064 - RNA, 22 nt, Human
aacuggaaccuuuuauucaguc

SEQ ID NO: 722065 - RNA, 22 nt, Human
uuccacagucauccugggaauu

SEQ ID NO: 722066 - RNA, 22 nt, Human
cuggagaccucuccugagagug

SEQ ID NO: 722067 - RNA, 22 nt, Human
gauuucuucauucauuagaugg

SEQ ID NO: 722068 - RNA, 21 nt, Human
guuauacauucuauggauuug

SEQ ID NO: 722069 - RNA, 18 nt, Human
cauugacaguauaucuuu

SEQ ID NO: 722070 - RNA, 22 nt, Human
uuacacagacauggcaucauga

SEQ ID NO: 722071 - RNA, 22 nt, Human
aguucaggcauaaggcaugaac

SEQ ID NO: 722072 - RNA, 22 nt, Human
uggcuucugcauauuuuuagag

SEQ ID NO: 722073 - RNA, 22 nt, Human
uggcugcugcucacucagccuc

SEQ ID NO: 722074 - RNA, 22 nt, Human
uaguuuauaguuagcgagcacg

SEQ ID NO: 722075 - RNA, 22 nt, Human
aacaucuuguccuuagauuaaa

SEQ ID NO: 722076 - RNA, 22 nt, Human
acaggcacaccuuccugcaggc

SEQ ID NO: 722077 - RNA, 22 nt, Human
acagguggcuuauuggcugauu

SEQ ID NO: 722078 - RNA, 22 nt, Human
uccagucaucucccuucacauu

SEQ ID NO: 722079 - RNA, 22 nt, Human
augaggcaaucaugguccaguu

SEQ ID NO: 722080 - RNA, 22 nt, Human
uguucuaagcugccaaaaugcu

SEQ ID NO: 722081 - RNA, 22 nt, Human
cagaggaggcgguauacacugc

SEQ ID NO: 722082 - RNA, 22 nt, Human
ucuggcucuccagugcucuuag

SEQ ID NO: 722083 - RNA, 22 nt, Human
cacugaacuccuuguuuguccu

SEQ ID NO: 722084 - RNA, 22 nt, Human
uggaacaaauuacaauuaacuu

SEQ ID NO: 722085 - RNA, 22 nt, Human
uagagguagauggucagccaau

SEQ ID NO: 722086 - RNA, 21 nt, Human
ggggccucuccacacagccgg

SEQ ID NO: 722087 - RNA, 22 nt, Human
gcagugcauuacucacauguuu

SEQ ID NO: 722088 - RNA, 22 nt, Human
gaggcacugcugggccccugua

SEQ ID NO: 722089 - RNA, 23 nt, Human
ugagagccuggcagccuggguuc

SEQ ID NO: 722090 - RNA, 22 nt, Human
uggugacaccccaucucuaaag

SEQ ID NO: 722091 - RNA, 22 nt, Human
ucuucagacuguuguucuuuug

SEQ ID NO: 722092 - RNA, 22 nt, Human
gcagagaugagcuaucaggaca

SEQ ID NO: 722093 - RNA, 22 nt, Human
uccuuagagacaagaccaguuu

SEQ ID NO: 722094 - RNA, 18 nt, Human
acaaucugaaaccuguca

SEQ ID NO: 722095 - RNA, 22 nt, Human
gugcagagaaaugagaagucga

SEQ ID NO: 722096 - RNA, 22 nt, Human
uggcagguggagacagcagagc

SEQ ID NO: 722097 - RNA, 22 nt, Human
accaggguugagucagcugcgu

SEQ ID NO: 722098 - RNA, 22 nt, Human
gucuuugcugucuuugcucuca

SEQ ID NO: 722099 - RNA, 22 nt, Human
aaugucuuuugcaguucaagau

SEQ ID NO: 722100 - RNA, 22 nt, Human
ucugaaauaggagccauguaga

SEQ ID NO: 722101 - RNA, 22 nt, Human
caggcagagaggagcauuuaau

SEQ ID NO: 722102 - RNA, 22 nt, Human
uccuucuguagucccugucccu

SEQ ID NO: 722103 - RNA, 22 nt, Human
ugcagagagaccccugggccag

SEQ ID NO: 722104 - RNA, 22 nt, Human
acuucauguacuguucaaggcc

SEQ ID NO: 722105 - RNA, 22 nt, Human
aagucacaaagugcuguacaug

SEQ ID NO: 722106 - RNA, 20 nt, Human
aauuagauguuuaaucaaua

SEQ ID NO: 722107 - RNA, 22 nt, Human
uuuuaagaaauguaugacuguc

SEQ ID NO: 722108 - RNA, 22 nt, Human
gucugggcuuagggacauggca

SEQ ID NO: 722109 - RNA, 22 nt, Human
ccaggagcgcgugaacaggcug

SEQ ID NO: 722110 - RNA, 22 nt, Human
uucauuguagcuugacuaauua

SEQ ID NO: 722111 - RNA, 22 nt, Human
uuauugcaacuccuaaauagag

SEQ ID NO: 722112 - RNA, 22 nt, Human
aacaaugccugaugaccuccug

SEQ ID NO: 722113 - RNA, 22 nt, Human
ggguggagccugagaauuugca

SEQ ID NO: 722114 - RNA, 22 nt, Human
uacagggcaugugcagacacau

SEQ ID NO: 722115 - RNA, 22 nt, Human
uggaguuccuuugaaaggcucu

SEQ ID NO: 722116 - RNA, 22 nt, Human
ugugugacccccagugaagccu

SEQ ID NO: 722117 - RNA, 22 nt, Human
caguauaaugcccccugugggg

SEQ ID NO: 722118 - RNA, 21 nt, Human
uggagcugaauuuuuggcauc

SEQ ID NO: 722119 - RNA, 22 nt, Human
uuuagugauaagaauuaugaaa

SEQ ID NO: 722120 - RNA, 22 nt, Human
gugggaguggggaagcagagug

SEQ ID NO: 722121 - RNA, 22 nt, Human
uucucagugaaguuuagaacau

SEQ ID NO: 722122 - RNA, 22 nt, Human
gaggugugaggaaugaaugggg

SEQ ID NO: 722123 - RNA, 22 nt, Human
aucuggguucaccaugcuccug

SEQ ID NO: 722124 - RNA, 17 nt, Human
gcuguaguuugauaaga

SEQ ID NO: 722125 - RNA, 22 nt, Human
ucuggaaguuagaggaggaaag

SEQ ID NO: 722126 - RNA, 23 nt, Human
gugcacagucaagcccagcuuag

SEQ ID NO: 722127 - RNA, 20 nt, Human
auguuucucugucgugauuu

SEQ ID NO: 722128 - RNA, 22 nt, Human
uuguguauuuuuugauacuaac

SEQ ID NO: 722129 - RNA, 22 nt, Human
cgcauccagggcgcaggaucug

SEQ ID NO: 722130 - RNA, 22 nt, Human
aguccaaagcagaugagggcca

SEQ ID NO: 722131 - RNA, 22 nt, Human
agggcugcuauguugauucaga

SEQ ID NO: 722132 - RNA, 22 nt, Human
cuggcugguuacuauuucuggu

SEQ ID NO: 722133 - RNA, 22 nt, Human
ugcacacauucuauggggcuga

SEQ ID NO: 722134 - RNA, 22 nt, Human
aacacagggcagcugcugggaa

SEQ ID NO: 722135 - RNA, 22 nt, Human
uggcucagaugcucuuccagug

SEQ ID NO: 722136 - RNA, 22 nt, Human
ccucaggggcuuuucguuguug

SEQ ID NO: 722137 - RNA, 23 nt, Human
auauuuccagguuagugagguaa

SEQ ID NO: 722138 - RNA, 22 nt, Human
gguaaaaaucacaaauacuuua

SEQ ID NO: 722139 - RNA, 22 nt, Human
ucucagucuuugcaaggaugcu

SEQ ID NO: 722140 - RNA, 22 nt, Human
ucaagaugaaagauguagccau

SEQ ID NO: 722141 - RNA, 22 nt, Human
ucacuuuuugauaucauucugc

SEQ ID NO: 722142 - RNA, 22 nt, Human
guucugcugugucucagcaggu

SEQ ID NO: 722143 - RNA, 22 nt, Human
agcccaggagguggagguugca

SEQ ID NO: 722144 - RNA, 22 nt, Human
uacugaagcaccauuaaagaca

SEQ ID NO: 722145 - RNA, 22 nt, Human
agacucugaagucauugcauga

SEQ ID NO: 722146 - RNA, 23 nt, Human
uuuggcauguuaacuucacuuac

SEQ ID NO: 722147 - RNA, 22 nt, Human
ccuuucccgcuuugagggcaag

SEQ ID NO: 722148 - RNA, 22 nt, Human
uguguuauugccacugaagacc

SEQ ID NO: 722149 - RNA, 22 nt, Human
gguuuaaaagccaugcaugggg

SEQ ID NO: 722150 - RNA, 22 nt, Human
gccagagggauuccuggugugu

SEQ ID NO: 722151 - RNA, 22 nt, Human
cacugaaauauuaauaucuuau

SEQ ID NO: 722152 - RNA, 22 nt, Human
uggcucagucuggguugacuga

SEQ ID NO: 722153 - RNA, 22 nt, Human
guuucauuuacaucuguaggua

SEQ ID NO: 722154 - RNA, 22 nt, Human
ugugucauugccaugaaaaggc

SEQ ID NO: 722155 - RNA, 22 nt, Human
gccagcagcgagaguuuaaccu

SEQ ID NO: 722156 - RNA, 20 nt, Human
ugccugccccugcuuuuucc

SEQ ID NO: 722157 - RNA, 22 nt, Human
auuuguugaauaaauuaguauu

SEQ ID NO: 722158 - RNA, 22 nt, Human
uucaugucugccuuuucaagug

SEQ ID NO: 722159 - RNA, 22 nt, Human
uggacuccagugucuguguucu

SEQ ID NO: 722160 - RNA, 22 nt, Human
ggggaugguagaccggugacgu

SEQ ID NO: 722161 - RNA, 22 nt, Human
agagaagcagggagucaucugu

SEQ ID NO: 722162 - RNA, 22 nt, Human
uaccagcaucacagcauguugg

SEQ ID NO: 722163 - RNA, 22 nt, Human
gcuucagacugugcuucuguug

SEQ ID NO: 722164 - RNA, 22 nt, Human
acugucugcaaaacucauacuc

SEQ ID NO: 722165 - RNA, 17 nt, Human
gcuugggcugccuguug

SEQ ID NO: 722166 - RNA, 22 nt, Human
aggauaaaugaucuagauuuuc

SEQ ID NO: 722167 - RNA, 22 nt, Human
uguggugagaaacugguagauu

SEQ ID NO: 722168 - RNA, 22 nt, Human
cucuuuaguuugaaauccacau

SEQ ID NO: 722169 - RNA, 22 nt, Human
aucugcuugaaacuucuuauac

SEQ ID NO: 722170 - RNA, 22 nt, Human
ucacagaagaaguagauugcau

SEQ ID NO: 722171 - RNA, 22 nt, Human
cccaggagguggagcuugcagu

SEQ ID NO: 722172 - RNA, 22 nt, Human
ccauccuggccucgcuguccac

SEQ ID NO: 722173 - RNA, 22 nt, Human
accaucagucacauguagagaa

SEQ ID NO: 722174 - RNA, 16 nt, Human
ccucugggauguuugc

SEQ ID NO: 722175 - RNA, 22 nt, Human
agaaacuaagucauaacucuuu

SEQ ID NO: 722176 - RNA, 22 nt, Human
agccccugggaguagcugcugc

SEQ ID NO: 722177 - RNA, 22 nt, Human
cuggaguaaguuaagauguucc

SEQ ID NO: 722178 - RNA, 22 nt, Human
acaggggaauuuacugucauua

SEQ ID NO: 722179 - RNA, 22 nt, Human
gaaggccauuagagccugugcc

SEQ ID NO: 722180 - RNA, 22 nt, Human
ggaggccaucuggcuggaggcu

SEQ ID NO: 722181 - RNA, 22 nt, Human
agggcucacugggaggcuauaa

SEQ ID NO: 722182 - RNA, 22 nt, Human
caguagcaggauuugggauuau

SEQ ID NO: 722183 - RNA, 22 nt, Human
acaacuucaauugggauucucc

SEQ ID NO: 722184 - RNA, 22 nt, Human
ugcaauaaguuguguuaucacu

SEQ ID NO: 722185 - RNA, 22 nt, Human
aaauaaguaguuuaguguugug

SEQ ID NO: 722186 - RNA, 22 nt, Human
agcuucucaggagucugaggca

SEQ ID NO: 722187 - RNA, 22 nt, Human
ugaacacuguauauucuucuug

SEQ ID NO: 722188 - RNA, 22 nt, Human
gcagcugcagguggucccaugc

SEQ ID NO: 722189 - RNA, 22 nt, Human
ggcuagggaaaaugauuggaua

SEQ ID NO: 722190 - RNA, 22 nt, Human
auuagcaaucacgcagucauuu

SEQ ID NO: 722191 - RNA, 22 nt, Human
ggcuuccuaauacucccuacac

SEQ ID NO: 722192 - RNA, 22 nt, Human
gccagccuucuguggccugcaa

SEQ ID NO: 722193 - RNA, 22 nt, Human
uggaagggggaagacagcucug

SEQ ID NO: 722194 - RNA, 22 nt, Human
caugagaagggguggaguuaga

SEQ ID NO: 722195 - RNA, 22 nt, Human
auacuuuggucacuauuauugg

SEQ ID NO: 722196 - RNA, 22 nt, Human
ccugagauggggauuauuccaa

SEQ ID NO: 722197 - RNA, 22 nt, Human
acauaacacucuucucuaguga

SEQ ID NO: 722198 - RNA, 20 nt, Human
aaaaagacaaaacgaguugg

SEQ ID NO: 722199 - RNA, 18 nt, Human
aaacuguauuucuuucua

SEQ ID NO: 722200 - RNA, 22 nt, Human
uuugaaagaaaccagugaguga

SEQ ID NO: 722201 - RNA, 22 nt, Human
uuaacauuguccuuagcagauu

SEQ ID NO: 722202 - RNA, 22 nt, Human
agcaggugaauuccuggaugug

SEQ ID NO: 722203 - RNA, 22 nt, Human
uaagacuucauuaguaauaugg

SEQ ID NO: 722204 - RNA, 21 nt, Human
acugccuggggugcuggccaa

SEQ ID NO: 722205 - RNA, 22 nt, Human
ucuguaaagauguuuauaccuu

SEQ ID NO: 722206 - RNA, 22 nt, Human
caagcucugcgggcuccaagau

SEQ ID NO: 722207 - RNA, 22 nt, Human
agcaggcugggcaauaugggca

SEQ ID NO: 722208 - RNA, 18 nt, Human
ugauucaaguugcccucc

SEQ ID NO: 722209 - RNA, 22 nt, Human
gauuugucuauauucaaauaug

SEQ ID NO: 722210 - RNA, 22 nt, Human
uuuaucuauuguauuguugaug

SEQ ID NO: 722211 - RNA, 22 nt, Human
ugaggccagucucaucacaggc

SEQ ID NO: 722212 - RNA, 23 nt, Human
gugcaugugucuuuacaguagca

SEQ ID NO: 722213 - RNA, 22 nt, Human
uggaacaagggcguggcggucg

SEQ ID NO: 722214 - RNA, 22 nt, Human
cugaggaggggccugagugaga

SEQ ID NO: 722215 - RNA, 17 nt, Human
cagcccugccguuccca

SEQ ID NO: 722216 - RNA, 22 nt, Human
ccagcauucacacugguuccuu

SEQ ID NO: 722217 - RNA, 22 nt, Human
augauuuccaguuguugcuaag

SEQ ID NO: 722218 - RNA, 22 nt, Human
gcaucucuuacccacgagccag

SEQ ID NO: 722219 - RNA, 18 nt, Human
gccucccuggcuacacuu

SEQ ID NO: 722220 - RNA, 22 nt, Human
uacaccauucccagguggauuu

SEQ ID NO: 722221 - RNA, 22 nt, Human
agauaacauuuauugaauguaa

SEQ ID NO: 722222 - RNA, 22 nt, Human
caaguccaacaguuuuucagac

SEQ ID NO: 722223 - RNA, 22 nt, Human
aggaggcaggaagucuauggga

SEQ ID NO: 722224 - RNA, 22 nt, Human
agcugccuccuggugccccauc

SEQ ID NO: 722225 - RNA, 22 nt, Human
ggcugaagaacugggagucuca

SEQ ID NO: 722226 - RNA, 21 nt, Human
uucacagaugggaaaacugag

SEQ ID NO: 722227 - RNA, 22 nt, Human
cugugggagcacaugacagaua

SEQ ID NO: 722228 - RNA, 22 nt, Human
augacauaaagcuaugcuaggu

SEQ ID NO: 722229 - RNA, 21 nt, Human
ucugacaaucucauuucaaac

SEQ ID NO: 722230 - RNA, 20 nt, Human
agccagccacuuccugcucc

SEQ ID NO: 722231 - RNA, 20 nt, Human
ggcuucuuuacaucuguguu

SEQ ID NO: 722232 - RNA, 22 nt, Human
augugcaauuauuaagaagaga

SEQ ID NO: 722233 - RNA, 22 nt, Human
gagguggccaagcgaggaaggg

SEQ ID NO: 722234 - RNA, 22 nt, Human
uauuucuauuccccaggcaagu

SEQ ID NO: 722235 - RNA, 22 nt, Human
gaggagaaugcgcaccacauau

SEQ ID NO: 722236 - RNA, 22 nt, Human
uuucugugaauuauaaaauuug

SEQ ID NO: 722237 - RNA, 22 nt, Human
ugcaggagacauaauagggacu

SEQ ID NO: 722238 - RNA, 22 nt, Human
cuuauuugaauguaugaguuuu

SEQ ID NO: 722239 - RNA, 18 nt, Human
aagccagagaccacugcc

SEQ ID NO: 722240 - RNA, 22 nt, Human
augcuaaacuaugaucauuuuc

SEQ ID NO: 722241 - RNA, 22 nt, Human
auggguggccccgugugcaguc

SEQ ID NO: 722242 - RNA, 22 nt, Human
ugggucagagcugugcugccca

SEQ ID NO: 722243 - RNA, 22 nt, Human
uauggaaaaauguaucuuguca

SEQ ID NO: 722244 - RNA, 22 nt, Human
ggcccagaagccagaagccucc

SEQ ID NO: 722245 - RNA, 22 nt, Human
augcacuuuguaaucuguucaa

SEQ ID NO: 722246 - RNA, 22 nt, Human
uuucagagaacugaguccuugc

SEQ ID NO: 722247 - RNA, 22 nt, Human
acccaggagccgugagagguua

SEQ ID NO: 722248 - RNA, 22 nt, Human
uagaacaugcucauguauaaau

SEQ ID NO: 722249 - RNA, 22 nt, Human
gcaaagacugcaauuacuuuug

SEQ ID NO: 722250 - RNA, 22 nt, Human
uggauuaguuucaaggcagcaa

SEQ ID NO: 722251 - RNA, 22 nt, Human
uagguaguuuccuguuguuggg

SEQ ID NO: 722252 - RNA, 22 nt, Human
augugagaauaacucaaaacaa

SEQ ID NO: 722253 - RNA, 21 nt, Human
auuggcacaccuuuuauugga

SEQ ID NO: 722254 - RNA, 22 nt, Human
aacaugcucuuccuggcuaguc

SEQ ID NO: 722255 - RNA, 22 nt, Human
aaagcauggcaugaagaacaug

SEQ ID NO: 722256 - RNA, 22 nt, Human
acaggaguggagaggugccucu

SEQ ID NO: 722257 - RNA, 22 nt, Human
aaggaucuuucuuuuuaccauu

SEQ ID NO: 722258 - RNA, 22 nt, Human
ugugagcuuaggacagggcuau

SEQ ID NO: 722259 - RNA, 22 nt, Human
caguacuuugaagauauuuuag

SEQ ID NO: 722260 - RNA, 22 nt, Human
agaucugaguaugauuugccug

SEQ ID NO: 722261 - RNA, 22 nt, Human
ugagcaguaggucugaauagug

SEQ ID NO: 722262 - RNA, 22 nt, Human
ucuguuuucucuguauuuugac

SEQ ID NO: 722263 - RNA, 22 nt, Human
uccucaggaugugggguagaau

SEQ ID NO: 722264 - RNA, 22 nt, Human
cagcaggaagguuuccccugca

SEQ ID NO: 722265 - RNA, 22 nt, Human
acagacagacagagaacuauuc

SEQ ID NO: 722266 - RNA, 22 nt, Human
auggccaguuagaaaucaaaaa

SEQ ID NO: 722267 - RNA, 20 nt, Human
ugggagcuggugaggucuca

SEQ ID NO: 722268 - RNA, 22 nt, Human
agcucuguguucacagcacuaa

SEQ ID NO: 722269 - RNA, 22 nt, Human
auuacuguuggcaaagucuuau

SEQ ID NO: 722270 - RNA, 22 nt, Human
gggccagugggaccugggucuc

SEQ ID NO: 722271 - RNA, 22 nt, Human
aaacuugacagugagacaguuu

SEQ ID NO: 722272 - RNA, 22 nt, Human
guuucucacaaggcugcaaucc

SEQ ID NO: 722273 - RNA, 22 nt, Human
ccuuuaauuuacaauguuaauu

SEQ ID NO: 722274 - RNA, 22 nt, Human
uaaauuuuuguuaacagccucu

SEQ ID NO: 722275 - RNA, 22 nt, Human
uuacagcacagugcuuuuacug

SEQ ID NO: 722276 - RNA, 20 nt, Human
ccugcugggaacccucugaa

SEQ ID NO: 722277 - RNA, 22 nt, Human
cagggaugagagauggcacaga

SEQ ID NO: 722278 - RNA, 22 nt, Human
gcacccaugcucuugucucagg

SEQ ID NO: 722279 - RNA, 22 nt, Human
cucaguuuccucaacugcaaaa

SEQ ID NO: 722280 - RNA, 22 nt, Human
gcagcccugcagcuccacaccg

SEQ ID NO: 722281 - RNA, 22 nt, Human
ucagcccaccugguguggggcu

SEQ ID NO: 722282 - RNA, 22 nt, Human
ggucugaggugggacccaggaa

SEQ ID NO: 722283 - RNA, 19 nt, Human
agaaaaacugguacugcug

SEQ ID NO: 722284 - RNA, 22 nt, Human
accccaggaaguggaggucaug

SEQ ID NO: 722285 - RNA, 22 nt, Human
ggugggagccaacacccuucug

SEQ ID NO: 722286 - RNA, 22 nt, Human
uuucucucugacugggagcuga

SEQ ID NO: 722287 - RNA, 22 nt, Human
uacucucuggaaauuauaguga

SEQ ID NO: 722288 - RNA, 22 nt, Human
agcaggagcugugggaagaugg

SEQ ID NO: 722289 - RNA, 22 nt, Human
uggcugugccucuuuccaggcc

SEQ ID NO: 722290 - RNA, 22 nt, Human
ccaggagacaaagaugacugcu

SEQ ID NO: 722291 - RNA, 23 nt, Human
uccaggagcaugcuggcuggcga

SEQ ID NO: 722292 - RNA, 22 nt, Human
gcuccuggauguucaagucggc

SEQ ID NO: 722293 - RNA, 22 nt, Human
gaagcagcgaaguggaagggac

SEQ ID NO: 722294 - RNA, 22 nt, Human
agggagagaaguuauacaagau

SEQ ID NO: 722295 - RNA, 22 nt, Human
cagggccuucguaaguguccgg

SEQ ID NO: 722296 - RNA, 22 nt, Human
caaaguuaugaaugauaagauu

SEQ ID NO: 722297 - RNA, 22 nt, Human
cugcugucaaaggaaauauuug

SEQ ID NO: 722298 - RNA, 22 nt, Human
ugggacuuaauaugcccuugau

SEQ ID NO: 722299 - RNA, 22 nt, Human
gccauucauauuuuagcauuaa

SEQ ID NO: 722300 - RNA, 22 nt, Human
ugaugaaaauaugauucugagg

SEQ ID NO: 722301 - RNA, 22 nt, Human
aagcacagggugucugcauuca

SEQ ID NO: 722302 - RNA, 22 nt, Human
aagccaguauucaauggggcua

SEQ ID NO: 722303 - RNA, 22 nt, Human
aguauguggcacagaauuucuu

SEQ ID NO: 722304 - RNA, 22 nt, Human
gaagggcugcaggucugggccc

SEQ ID NO: 722305 - RNA, 22 nt, Human
ucagaggugagcuucuugcuaa

SEQ ID NO: 722306 - RNA, 22 nt, Human
uuuuauucucagcuccagagag

SEQ ID NO: 722307 - RNA, 22 nt, Human
caaguccucaaagggcucugcu

SEQ ID NO: 722308 - RNA, 22 nt, Human
gcugaggguaacacuucgggau

SEQ ID NO: 722309 - RNA, 22 nt, Human
uaucauucuucucaccuuugaa

SEQ ID NO: 722310 - RNA, 22 nt, Human
auucuguaauugaacuguguug

SEQ ID NO: 722311 - RNA, 22 nt, Human
uccaggggagacuagacccaca

SEQ ID NO: 722312 - RNA, 22 nt, Human
agaaucaauuagauucuaugag

SEQ ID NO: 722313 - RNA, 22 nt, Human
aaagccagaguguguuagagac

SEQ ID NO: 722314 - RNA, 22 nt, Human
aaauccaguggguccucaugag

SEQ ID NO: 722315 - RNA, 22 nt, Human
gaaguucuuagucucauuugca

SEQ ID NO: 722316 - RNA, 22 nt, Human
gcacagccacugagugagaacc

SEQ ID NO: 722317 - RNA, 23 nt, Human
cucaccaagcgccgccgcugugu

SEQ ID NO: 722318 - RNA, 22 nt, Human
acuuucucaggaauucacagac

SEQ ID NO: 722319 - RNA, 22 nt, Human
cuccaaggguugugggugguca

SEQ ID NO: 722320 - RNA, 22 nt, Human
uuccuuccauagcaaaacaugc

SEQ ID NO: 722321 - RNA, 22 nt, Human
uuccuggucccguucuucacug

SEQ ID NO: 722322 - RNA, 22 nt, Human
auccuugagccaaugacugauu

SEQ ID NO: 722323 - RNA, 22 nt, Human
uuaaugcagcucuaccacacag

SEQ ID NO: 722324 - RNA, 22 nt, Human
gaagaacugaaaguugaugcac

SEQ ID NO: 722325 - RNA, 22 nt, Human
agccaggaagaaggucacacca

SEQ ID NO: 722326 - RNA, 22 nt, Human
gaugaaggggcuggugcccucu

SEQ ID NO: 722327 - RNA, 22 nt, Human
acuggccuaucagcaugagucu

SEQ ID NO: 722328 - RNA, 22 nt, Human
auuggagacagaugggcuccag

SEQ ID NO: 722329 - RNA, 22 nt, Human
auucaaaguacuagcuauuuuu

SEQ ID NO: 722330 - RNA, 22 nt, Human
uccacagugguggaauuguuca

SEQ ID NO: 722331 - RNA, 22 nt, Human
uaagaacagauaaaguuucccc

SEQ ID NO: 722332 - RNA, 22 nt, Human
gaggagcuguucccucaccucu

SEQ ID NO: 722333 - RNA, 22 nt, Human
cugucagagauggggagucaga

SEQ ID NO: 722334 - RNA, 22 nt, Human
ucccuacuguuagggacucagc

SEQ ID NO: 722335 - RNA, 22 nt, Human
guuugccugccgacgcucucau

SEQ ID NO: 722336 - RNA, 22 nt, Human
ugaguccacuuuaaaaugucag

SEQ ID NO: 722337 - RNA, 22 nt, Human
auuguagcccaugcauaaaccg

SEQ ID NO: 722338 - RNA, 18 nt, Human
uggccccuuaucaguccu

SEQ ID NO: 722339 - RNA, 22 nt, Human
agcccaggaaucugcaucuuga

SEQ ID NO: 722340 - RNA, 22 nt, Human
ccaagaggggcagagggcugca

SEQ ID NO: 722341 - RNA, 22 nt, Human
gcagcaaucuucacagugucau

SEQ ID NO: 722342 - RNA, 22 nt, Human
ucaaacuguuuacagugagaua

SEQ ID NO: 722343 - RNA, 22 nt, Human
acauugaauucaaaauuacuga

SEQ ID NO: 722344 - RNA, 23 nt, Human
ccuucuguuaaccaucugggggg

SEQ ID NO: 722345 - RNA, 22 nt, Human
ucaggcugguccccacagugga

SEQ ID NO: 722346 - RNA, 22 nt, Human
gguggacaguguuagcucuggg

SEQ ID NO: 722347 - RNA, 22 nt, Human
caggaggagcauuagcgucuca

SEQ ID NO: 722348 - RNA, 22 nt, Human
aacagaauuguacaccagggag

SEQ ID NO: 722349 - RNA, 22 nt, Human
auuucuugugggaaaugcagca

SEQ ID NO: 722350 - RNA, 22 nt, Human
acacaugcucauaaauaaauag

SEQ ID NO: 722351 - RNA, 22 nt, Human
gcugucugggaggccuccacuu

SEQ ID NO: 722352 - RNA, 20 nt, Human
augggcugguuaggaagugu

SEQ ID NO: 722353 - RNA, 22 nt, Human
ucaggaagcauccugagguguc

SEQ ID NO: 722354 - RNA, 22 nt, Human
aacaggcagcagacugaaucug

SEQ ID NO: 722355 - RNA, 22 nt, Human
cugucccuucccaagcccagcc

SEQ ID NO: 722356 - RNA, 22 nt, Human
gcaaagcagaacccucucuauc

SEQ ID NO: 722357 - RNA, 22 nt, Human
aggguagggccguagggccaug

SEQ ID NO: 722358 - RNA, 22 nt, Human
ucugucaccccuguuucuggcu

SEQ ID NO: 722359 - RNA, 22 nt, Human
aucuguuauuuacccaucucug

SEQ ID NO: 722360 - RNA, 22 nt, Human
guuaagugaaugucaugucagg

SEQ ID NO: 722361 - RNA, 22 nt, Human
guguguggcaaacugggccugc

SEQ ID NO: 722362 - RNA, 22 nt, Human
uuucaacaggaugauaauaggc

SEQ ID NO: 722363 - RNA, 22 nt, Human
gugcaggaucucagaacaagug

SEQ ID NO: 722364 - RNA, 22 nt, Human
ucuucaauuuagaauggauuua

SEQ ID NO: 722365 - RNA, 21 nt, Human
cagugggcugcugcgcuccag

SEQ ID NO: 722366 - RNA, 17 nt, Human
cagaggagcuuuggggg

SEQ ID NO: 722367 - RNA, 22 nt, Human
aaugcacaugccacauguggua

SEQ ID NO: 722368 - RNA, 22 nt, Human
augugaaaaauuucuuauuaca

SEQ ID NO: 722369 - RNA, 22 nt, Human
agcauguguggagaaauauuuu

SEQ ID NO: 722370 - RNA, 22 nt, Human
aagaggugccagggguuuugua

SEQ ID NO: 722371 - RNA, 22 nt, Human
aagccaggagcgaggccucggc

SEQ ID NO: 722372 - RNA, 22 nt, Human
uguuuacaaggagaauuugagg

SEQ ID NO: 722373 - RNA, 22 nt, Human
uaacaacucaguuuguuccuug

SEQ ID NO: 722374 - RNA, 22 nt, Human
agccacaaaggcuugccucgga

SEQ ID NO: 722375 - RNA, 22 nt, Human
acauacuugaagcaagugauca

SEQ ID NO: 722376 - RNA, 22 nt, Human
cucucuggaagggggagcugau

SEQ ID NO: 722377 - RNA, 22 nt, Human
acaagauagcuuagaagauuca

SEQ ID NO: 722378 - RNA, 22 nt, Human
cacugccugugagcugugugcc

SEQ ID NO: 722379 - RNA, 22 nt, Human
aaguccuuuccaguccugugau

SEQ ID NO: 722380 - RNA, 22 nt, Human
cauuaucugagaguguccuaca

SEQ ID NO: 722381 - RNA, 22 nt, Human
agguuccagggauuaggaugug

SEQ ID NO: 722382 - RNA, 23 nt, Human
cagaaauaaacugguuuguagau

SEQ ID NO: 722383 - RNA, 22 nt, Human
aauacuuaugugaccucauuuu

SEQ ID NO: 722384 - RNA, 22 nt, Human
uuucauugacaguugggggaaa

SEQ ID NO: 722385 - RNA, 22 nt, Human
ucaaagguuaacucuguuguuc

SEQ ID NO: 722386 - RNA, 22 nt, Human
aagauucuuaaauuuguuucuc

SEQ ID NO: 722387 - RNA, 22 nt, Human
ccaaaauguuugaaugcaugug

SEQ ID NO: 722388 - RNA, 23 nt, Human
aaaugcacaguauugauuuuuaa

SEQ ID NO: 722389 - RNA, 22 nt, Human
uuacacaaacacauuccagaua

SEQ ID NO: 722390 - RNA, 22 nt, Human
uuuaaugaauaauucaaaucug

SEQ ID NO: 722391 - RNA, 22 nt, Human
auacagcugccuucuaacuaug

SEQ ID NO: 722392 - RNA, 22 nt, Human
uguguuguuuuaagcugcugca

SEQ ID NO: 722393 - RNA, 22 nt, Human
ggcagugaaaaaguauguuucc

SEQ ID NO: 722394 - RNA, 22 nt, Human
cagcaggguuaagugacucacc

SEQ ID NO: 722395 - RNA, 22 nt, Human
ggccagaguugauggcaucuug

SEQ ID NO: 722396 - RNA, 19 nt, Human
ucuuggcuuugucuacugu

SEQ ID NO: 722397 - RNA, 23 nt, Human
ggccaggugcaccuuagagagcc

SEQ ID NO: 722398 - RNA, 22 nt, Human
cauugacaucaggcuuggccaa

SEQ ID NO: 722399 - RNA, 22 nt, Human
auggucacagagcuuaauuaau

SEQ ID NO: 722400 - RNA, 19 nt, Human
augggaagcggccagcgga

SEQ ID NO: 722401 - RNA, 22 nt, Human
aaaguccuuuuugccaugcaag

SEQ ID NO: 722402 - RNA, 22 nt, Human
aaagguuuugguaaggcuuuaa

SEQ ID NO: 722403 - RNA, 22 nt, Human
acaggcagagaacucagccaga

SEQ ID NO: 722404 - RNA, 22 nt, Human
uauuuaucaagguaggagaaua

SEQ ID NO: 722405 - RNA, 22 nt, Human
uucacccugagccccaccucug

SEQ ID NO: 722406 - RNA, 22 nt, Human
guccagagggucaaguuucuug

SEQ ID NO: 722407 - RNA, 22 nt, Human
ugaugaggaccuggucucugcu

SEQ ID NO: 722408 - RNA, 22 nt, Human
acauggggcccaaagagagguc

SEQ ID NO: 722409 - RNA, 21 nt, Human
ugauuucugccaaguucacua

SEQ ID NO: 722410 - RNA, 22 nt, Human
auuacaaucgagagaaacaaau

SEQ ID NO: 722411 - RNA, 22 nt, Human
aaagccauaagccuaauacuaa

SEQ ID NO: 722412 - RNA, 22 nt, Human
gcugacagagugccuggccuca

SEQ ID NO: 722413 - RNA, 22 nt, Human
gcagacagccagacugcacugg

SEQ ID NO: 722414 - RNA, 22 nt, Human
gucuacuuuugucaucauugca

SEQ ID NO: 722415 - RNA, 22 nt, Human
cacaugguggugcuugauaagc

SEQ ID NO: 722416 - RNA, 22 nt, Human
gucacacaauaguaaguggucc

SEQ ID NO: 722417 - RNA, 22 nt, Human
caguuugugcuaggcacuauuu

SEQ ID NO: 722418 - RNA, 22 nt, Human
ggcagugcaaggcagccuggau

SEQ ID NO: 722419 - RNA, 22 nt, Human
cacaguuuaugaucucagugaa

SEQ ID NO: 722420 - RNA, 22 nt, Human
uugcaucaaauauguaccacag

SEQ ID NO: 722421 - RNA, 22 nt, Human
agaagccaacagggcaggagag

SEQ ID NO: 722422 - RNA, 19 nt, Human
uuucaauggcuuagagaaa

SEQ ID NO: 722423 - RNA, 22 nt, Human
cauccugaagaagccgcacugu

SEQ ID NO: 722424 - RNA, 22 nt, Human
aguuagugugauggagguacga

SEQ ID NO: 722425 - RNA, 22 nt, Human
cuccugggcuucgaaggcuccc

SEQ ID NO: 722426 - RNA, 20 nt, Human
accugaggucccuauggucu

SEQ ID NO: 722427 - RNA, 22 nt, Human
ugccuuuucuguagcucuggaa

SEQ ID NO: 722428 - RNA, 22 nt, Human
gggaguguugagcgcccugcca

SEQ ID NO: 722429 - RNA, 22 nt, Human
ccugccagggccagaggccagc

SEQ ID NO: 722430 - RNA, 20 nt, Human
uuaucugucaaucugucuca

SEQ ID NO: 722431 - RNA, 22 nt, Human
gcucucuuucacagagguagga

SEQ ID NO: 722432 - RNA, 22 nt, Human
acccaggagagagcuauaaaau

SEQ ID NO: 722433 - RNA, 22 nt, Human
uuccgagggcucggcggccgcc

SEQ ID NO: 722434 - RNA, 22 nt, Human
ggaugggcagacaggacggcac

SEQ ID NO: 722435 - RNA, 22 nt, Human
cacacacaguuuuguauucugu

SEQ ID NO: 722436 - RNA, 22 nt, Human
aggagacccaaugccagaaaga

SEQ ID NO: 722437 - RNA, 22 nt, Human
uagagagccaguugucauaguu

SEQ ID NO: 722438 - RNA, 22 nt, Human
uuucaugaggcugcauaaggag

SEQ ID NO: 722439 - RNA, 18 nt, Human
cuugcaguguguggagaa

SEQ ID NO: 722440 - RNA, 22 nt, Human
ucaggagcagccuuggagagcg

SEQ ID NO: 722441 - RNA, 22 nt, Human
ugcaauacauacuuagacccag

SEQ ID NO: 722442 - RNA, 22 nt, Human
uggcuggaaacaggagauucag

SEQ ID NO: 722443 - RNA, 22 nt, Human
auugcaccuuggguuuugaaag

SEQ ID NO: 722444 - RNA, 22 nt, Human
caguucuggaguuucauucuuu

SEQ ID NO: 722445 - RNA, 22 nt, Human
aaagaaggaugggagaaauccu

SEQ ID NO: 722446 - RNA, 22 nt, Human
aguaaacaguaucuuuaguguc

SEQ ID NO: 722447 - RNA, 20 nt, Human
cacaggcuuacaguuuagau

SEQ ID NO: 722448 - RNA, 22 nt, Human
uacauggguagguuaagucaua

SEQ ID NO: 722449 - RNA, 22 nt, Human
aaugguuucaaacacacuaagu

SEQ ID NO: 722450 - RNA, 22 nt, Human
cugaaaauguuagugauacgaa

SEQ ID NO: 722451 - RNA, 22 nt, Human
agcaggaaucuguucuguauaa

SEQ ID NO: 722452 - RNA, 22 nt, Human
uccucggcugggccccaggcuu

SEQ ID NO: 722453 - RNA, 22 nt, Human
uuuauguacauauccacaagga

SEQ ID NO: 722454 - RNA, 22 nt, Human
ugauuacaaaagauuguuugaa

SEQ ID NO: 722455 - RNA, 22 nt, Human
ucugaagcacagcaggaagggu

SEQ ID NO: 722456 - RNA, 19 nt, Human
cucuggagaacaauagugc

SEQ ID NO: 722457 - RNA, 22 nt, Human
gaggguggguuucuugcacguc

SEQ ID NO: 722458 - RNA, 22 nt, Human
uagcucugaggccaucuccggu

SEQ ID NO: 722459 - RNA, 22 nt, Human
uucuuacauuacuuuacaugug

SEQ ID NO: 722460 - RNA, 22 nt, Human
agcagacaacccagaugaccca

SEQ ID NO: 722461 - RNA, 22 nt, Human
aucacaaucccucucucugaua

SEQ ID NO: 722462 - RNA, 22 nt, Human
gaggccagaaugagucucuggg

SEQ ID NO: 722463 - RNA, 22 nt, Human
auuuggucuccauacugguuag

SEQ ID NO: 722464 - RNA, 22 nt, Human
cugagggagaagugaucucuac

SEQ ID NO: 722465 - RNA, 22 nt, Human
aggguggaagauggcacuaucu

SEQ ID NO: 722466 - RNA, 22 nt, Human
acauuugguaacacuugagcau

SEQ ID NO: 722467 - RNA, 22 nt, Human
acagggucauuuuaugaucugu

SEQ ID NO: 722468 - RNA, 19 nt, Human
caggaaugagguaauggcu

SEQ ID NO: 722469 - RNA, 22 nt, Human
ucuaccacucaugcuacuuacu

SEQ ID NO: 722470 - RNA, 22 nt, Human
uggcaguggcgggacucagggc

SEQ ID NO: 722471 - RNA, 22 nt, Human
gaggaccacagaugagccugca

SEQ ID NO: 722472 - RNA, 22 nt, Human
ccugucucccuggcauggcuca

SEQ ID NO: 722473 - RNA, 22 nt, Human
uguccugugccaccuuccugag

SEQ ID NO: 722474 - RNA, 22 nt, Human
aggauucgggcauaaagccauu

SEQ ID NO: 722475 - RNA, 22 nt, Human
aggcauggcacugagcagcuuc

SEQ ID NO: 722476 - RNA, 22 nt, Human
cuuacauugucuuaguuuucaa

SEQ ID NO: 722477 - RNA, 22 nt, Human
ccacugcccaccccgacgucua

SEQ ID NO: 722478 - RNA, 23 nt, Human
gauacacucccugcugggcacug

SEQ ID NO: 722479 - RNA, 22 nt, Human
aggccacaggauugcacagcau

SEQ ID NO: 722480 - RNA, 17 nt, Human
ggcugcaguccaggagg

SEQ ID NO: 722481 - RNA, 22 nt, Human
ugguggaaauaaacauccaauu

SEQ ID NO: 722482 - RNA, 22 nt, Human
uuuaaacuguugauuuuaugaa

SEQ ID NO: 722483 - RNA, 22 nt, Human
uucuguucugauacuuguuucu

SEQ ID NO: 722484 - RNA, 22 nt, Human
aucuggagcaagauuaagagau

SEQ ID NO: 722485 - RNA, 22 nt, Human
auucugucagaucuuacuggau

SEQ ID NO: 722486 - RNA, 22 nt, Human
ggaagcagccugaagccaaggg

SEQ ID NO: 722487 - RNA, 22 nt, Human
gauggguggucucagacuugcc

SEQ ID NO: 722488 - RNA, 22 nt, Human
gcuguguccaggugggggugac

SEQ ID NO: 722489 - RNA, 22 nt, Human
agugggaggaaguggugauauu

SEQ ID NO: 722490 - RNA, 22 nt, Human
caguggcugguuagggacagga

SEQ ID NO: 722491 - RNA, 22 nt, Human
aauguaaaauaucuuguacuug

SEQ ID NO: 722492 - RNA, 22 nt, Human
augcacacugggauucaacugg

SEQ ID NO: 722493 - RNA, 22 nt, Human
aguauacauauauuagccuucg

SEQ ID NO: 722494 - RNA, 22 nt, Human
uuugcucuuaugaacaaggugg

SEQ ID NO: 722495 - RNA, 22 nt, Human
aaacuguuauagcagaaaggac

SEQ ID NO: 722496 - RNA, 21 nt, Human
uggagcugccacuugagcugc

SEQ ID NO: 722497 - RNA, 22 nt, Human
aaaucagaggucagcuguacca

SEQ ID NO: 722498 - RNA, 22 nt, Human
uagcagcucacagccucccauu

SEQ ID NO: 722499 - RNA, 22 nt, Human
agaguggggaagguguugagaa

SEQ ID NO: 722500 - RNA, 22 nt, Human
aagcaucuccucaucauuuggg

SEQ ID NO: 722501 - RNA, 22 nt, Human
guauuacauuuaguaauuaggc

SEQ ID NO: 722502 - RNA, 22 nt, Human
caggcccagugaucagggcucu

SEQ ID NO: 722503 - RNA, 22 nt, Human
acagucuucccuuauuccacuc

SEQ ID NO: 722504 - RNA, 22 nt, Human
aggcaguggcugagaccagggg

SEQ ID NO: 722505 - RNA, 22 nt, Human
accaggagggacccugguggcc

SEQ ID NO: 722506 - RNA, 22 nt, Human
uccugagggcauuuuggugacu

SEQ ID NO: 722507 - RNA, 22 nt, Human
uggcuaauggcauuuccugggu

SEQ ID NO: 722508 - RNA, 22 nt, Human
accugcuagaagcaaaugucug

SEQ ID NO: 722509 - RNA, 21 nt, Human
ugggaccuauuucaacuggau

SEQ ID NO: 722510 - RNA, 22 nt, Human
cuuggggcugucacucuggcau

SEQ ID NO: 722511 - RNA, 22 nt, Human
aucagaaaauacccaguguuua

SEQ ID NO: 722512 - RNA, 22 nt, Human
ugccuugcagguuuuaaauaca

SEQ ID NO: 722513 - RNA, 22 nt, Human
uaagaaacaugauuaauggcag

SEQ ID NO: 722514 - RNA, 21 nt, Human
uagcaaagccagauguauauu

SEQ ID NO: 722515 - RNA, 22 nt, Human
ucacacagguuugcaaugauuu

SEQ ID NO: 722516 - RNA, 20 nt, Human
acugggcauaccuguccugu

SEQ ID NO: 722517 - RNA, 22 nt, Human
ugucugaauucaagaaauucaa

SEQ ID NO: 722518 - RNA, 22 nt, Human
augaggccaccuucuacauuuc

SEQ ID NO: 722519 - RNA, 22 nt, Human
cuuuuguuaggagaaaacauca

SEQ ID NO: 722520 - RNA, 22 nt, Human
cacagcagccagaacauuuuug

SEQ ID NO: 722521 - RNA, 22 nt, Human
gaggcugaggguuagagaguca

SEQ ID NO: 722522 - RNA, 22 nt, Human
gcagccacccucaaggcugaau

SEQ ID NO: 722523 - RNA, 22 nt, Human
agccuggagcuugaguuaugag

SEQ ID NO: 722524 - RNA, 21 nt, Human
agaggucauugggcugguucu

SEQ ID NO: 722525 - RNA, 22 nt, Human
uggcuucuagcaguguugauuu

SEQ ID NO: 722526 - RNA, 22 nt, Human
cacuauuuccuggauuuugacg

SEQ ID NO: 722527 - RNA, 22 nt, Human
gggagucugggcuagacuccuu

SEQ ID NO: 722528 - RNA, 20 nt, Human
ccagauggucccugugaaaa

SEQ ID NO: 722529 - RNA, 22 nt, Human
agggcuuuaaugauuauuuucu

SEQ ID NO: 722530 - RNA, 22 nt, Human
caggauggucucgaucuccuga

SEQ ID NO: 722531 - RNA, 22 nt, Human
cagggagcagccccuagaagua

SEQ ID NO: 722532 - RNA, 22 nt, Human
cugggaggauacacaagaucag

SEQ ID NO: 722533 - RNA, 22 nt, Human
aauucauccaugaacaauucca

SEQ ID NO: 722534 - RNA, 22 nt, Human
ugcauuaagugucugcauaugg

SEQ ID NO: 722535 - RNA, 22 nt, Human
ccugggaagucagccaaggacg

SEQ ID NO: 722536 - RNA, 22 nt, Human
ccaggcagcaaauuuucugaau

SEQ ID NO: 722537 - RNA, 22 nt, Human
cuuggaggaaaggcagggagac

SEQ ID NO: 722538 - RNA, 22 nt, Human
ggcugugcgggcagccguggga

SEQ ID NO: 722539 - RNA, 22 nt, Human
gagacacaauuuccccauccua

SEQ ID NO: 722540 - RNA, 22 nt, Human
agcauuuccgcccucuucugcc

SEQ ID NO: 722541 - RNA, 22 nt, Human
uggacccccucaaggcagagcu

SEQ ID NO: 722542 - RNA, 22 nt, Human
aggucuggagugggaucugaga

SEQ ID NO: 722543 - RNA, 19 nt, Human
aggcuucuacccuguccag

SEQ ID NO: 722544 - RNA, 22 nt, Human
uuauuuccucucuaauagggua

SEQ ID NO: 722545 - RNA, 22 nt, Human
accaugcaucaaagcuaauaua

SEQ ID NO: 722546 - RNA, 22 nt, Human
agcagccacacgccuccuucuc

SEQ ID NO: 722547 - RNA, 22 nt, Human
guaaacaccuguuaaauucaga

SEQ ID NO: 722548 - RNA, 22 nt, Human
cgcaccacugaauuccagccug

SEQ ID NO: 722549 - RNA, 22 nt, Human
ucccauguuagguguuucuguu

SEQ ID NO: 722550 - RNA, 22 nt, Human
agccagugcagcuggaaauuca

SEQ ID NO: 722551 - RNA, 22 nt, Human
cagaccaucuugaagcaaacug

SEQ ID NO: 722552 - RNA, 22 nt, Human
gguaggggaagacaagugaaaa

SEQ ID NO: 722553 - RNA, 22 nt, Human
gaggccugggagccuguccucc

SEQ ID NO: 722554 - RNA, 22 nt, Human
gaaauguuguccugucucuuga

SEQ ID NO: 722555 - RNA, 22 nt, Human
ugugucagagguagagauggca

SEQ ID NO: 722556 - RNA, 16 nt, Human
agacucagugcacuuu

SEQ ID NO: 722557 - RNA, 14 nt, Human
gcaggcggaucacu

SEQ ID NO: 722558 - RNA, 22 nt, Human
ugaaguuuuacauccucuccaa

SEQ ID NO: 722559 - RNA, 22 nt, Human
ucuucccccgugcuccagugca

SEQ ID NO: 722560 - RNA, 22 nt, Human
acuggcuguggccacggcugcu

SEQ ID NO: 722561 - RNA, 22 nt, Human
augcuucccucacauauccugg

SEQ ID NO: 722562 - RNA, 22 nt, Human
guuauucuauuaaugugauugu

SEQ ID NO: 722563 - RNA, 22 nt, Human
uguuuuaaagccauugccuuuc

SEQ ID NO: 722564 - RNA, 22 nt, Human
cugagacacggagaggcugugu

SEQ ID NO: 722565 - RNA, 22 nt, Human
ugcuuucagccagugucuggau

SEQ ID NO: 722566 - RNA, 22 nt, Human
agcuccagguagugccuuaucg

SEQ ID NO: 722567 - RNA, 22 nt, Human
uacugaaaaagaauccagaccu

SEQ ID NO: 722568 - RNA, 22 nt, Human
uaacacugugguguucuuuguc

SEQ ID NO: 722569 - RNA, 22 nt, Human
aaagugcauuguuuguguuccu

SEQ ID NO: 722570 - RNA, 22 nt, Human
auguagcagaagauguuuuccu

SEQ ID NO: 722571 - RNA, 23 nt, Human
cugaggucugcaauucuaguagu

SEQ ID NO: 722572 - RNA, 22 nt, Human
aaagcucacaguaauacaaggc

SEQ ID NO: 722573 - RNA, 22 nt, Human
cuagagggauguuaggauagca

SEQ ID NO: 722574 - RNA, 22 nt, Human
cuuguccccagcagguugguuu

SEQ ID NO: 722575 - RNA, 22 nt, Human
caccuguuguuuauucaucucu

SEQ ID NO: 722576 - RNA, 22 nt, Human
ucugcagacacuggggucugga

SEQ ID NO: 722577 - RNA, 22 nt, Human
agcuccaggugcaagucauggu

SEQ ID NO: 722578 - RNA, 23 nt, Human
uaguuauuuucucuguaauuugc

SEQ ID NO: 722579 - RNA, 22 nt, Human
aaacuucaguaggagccaaccu

SEQ ID NO: 722580 - RNA, 22 nt, Human
gcugcagagaugggugcccuuu

SEQ ID NO: 722581 - RNA, 22 nt, Human
uuuaauuaggaaaugggcaggg

SEQ ID NO: 722582 - RNA, 22 nt, Human
uuauuugguugcugacuuggaa

SEQ ID NO: 722583 - RNA, 22 nt, Human
gcuauguuagacauucucauuu

SEQ ID NO: 722584 - RNA, 22 nt, Human
guauuugucuuguuggucucca

SEQ ID NO: 722585 - RNA, 22 nt, Human
agagaccaagggaauagucuca

SEQ ID NO: 722586 - RNA, 22 nt, Human
ggaggggaggauuaaugacaaa

SEQ ID NO: 722587 - RNA, 22 nt, Human
aauguuuuauagcucaagcaau

SEQ ID NO: 722588 - RNA, 22 nt, Human
gggcugagacgauggggucuuc

SEQ ID NO: 722589 - RNA, 22 nt, Human
cgcugauaaacgucacguuccc

SEQ ID NO: 722590 - RNA, 22 nt, Human
uagcuucccugcuggaucauaa

SEQ ID NO: 722591 - RNA, 22 nt, Human
ggucagguggcuucuguccucu

SEQ ID NO: 722592 - RNA, 22 nt, Human
uagccaggcugcagcugauccg

SEQ ID NO: 722593 - RNA, 22 nt, Human
caaaguaugaaccaguuucucu

SEQ ID NO: 722594 - RNA, 22 nt, Human
agcugaugccauguggaacagu

SEQ ID NO: 722595 - RNA, 22 nt, Human
acuggacuccccaagggccagg

SEQ ID NO: 722596 - RNA, 22 nt, Human
uuuccaaaguugccauaagcuu

SEQ ID NO: 722597 - RNA, 22 nt, Human
gaggagaggggcucccaagagc

SEQ ID NO: 722598 - RNA, 20 nt, Human
uucucuggauagccagaugu

SEQ ID NO: 722599 - RNA, 22 nt, Human
acugcugaccucaggucauccu

SEQ ID NO: 722600 - RNA, 22 nt, Human
cuggaguuagaguagacacuga

SEQ ID NO: 722601 - RNA, 22 nt, Human
ucucaguuuccucauauguaaa

SEQ ID NO: 722602 - RNA, 22 nt, Human
uaaagcacauaucuuacaauaa

SEQ ID NO: 722603 - RNA, 22 nt, Human
augaggccuaucuuggcagagg

SEQ ID NO: 722604 - RNA, 22 nt, Human
ucuuuaaaguuggagcuugcaa

SEQ ID NO: 722605 - RNA, 22 nt, Human
uaaagugaaggucauaaugauu

SEQ ID NO: 722606 - RNA, 22 nt, Human
uugccuauuguucuuacauguu

SEQ ID NO: 722607 - RNA, 22 nt, Human
gcagggacgcagcacucuccgu

SEQ ID NO: 722608 - RNA, 22 nt, Human
uauggcaauauguaucaagauc

SEQ ID NO: 722609 - RNA, 22 nt, Human
ucuauuacuuaccacuaauuca

SEQ ID NO: 722610 - RNA, 22 nt, Human
ccugagaggcccucucacuguc

SEQ ID NO: 722611 - RNA, 22 nt, Human
uacacagugaguccucucugcc

SEQ ID NO: 722612 - RNA, 21 nt, Human
acacugcuguagcauauuggg

SEQ ID NO: 722613 - RNA, 22 nt, Human
ugggcaagcaggagggccucag

SEQ ID NO: 722614 - RNA, 22 nt, Human
gauggugcaauuaucgugcaug

SEQ ID NO: 722615 - RNA, 22 nt, Human
ccagcccuguuuaugugucacu

SEQ ID NO: 722616 - RNA, 22 nt, Human
aaguucaaggcucuagaguucc

SEQ ID NO: 722617 - RNA, 22 nt, Human
uggaaggcgcagugaugaugcu

SEQ ID NO: 722618 - RNA, 22 nt, Human
acaggagugaaucuggcacuua

SEQ ID NO: 722619 - RNA, 22 nt, Human
auaauuuaaauuaguaugugau

SEQ ID NO: 722620 - RNA, 22 nt, Human
uuguacauuuguucaguucuga

SEQ ID NO: 722621 - RNA, 22 nt, Human
ucaccuguauuaauacagaacu

SEQ ID NO: 722622 - RNA, 22 nt, Human
uucacagccucugccccaggca

SEQ ID NO: 722623 - RNA, 22 nt, Human
augcaacaccccuauggaugga

SEQ ID NO: 722624 - RNA, 22 nt, Human
auggagugggccaauuuuagug

SEQ ID NO: 722625 - RNA, 22 nt, Human
aagagagaccaugggggacagg

SEQ ID NO: 722626 - RNA, 21 nt, Human
auucugagucuuggggucuca

SEQ ID NO: 722627 - RNA, 22 nt, Human
aguguccucaggcuuuguuccu

SEQ ID NO: 722628 - RNA, 22 nt, Human
guuuccugggccccaacccaga

SEQ ID NO: 722629 - RNA, 22 nt, Human
uugcugaagugaagguauguuu

SEQ ID NO: 722630 - RNA, 22 nt, Human
acuuagcagaguugaauguacu

SEQ ID NO: 722631 - RNA, 22 nt, Human
ugucugccauuagcccagucca

SEQ ID NO: 722632 - RNA, 22 nt, Human
cucuccacuguccuuugcuggu

SEQ ID NO: 722633 - RNA, 22 nt, Human
cuugcaggauuuugcugcugua

SEQ ID NO: 722634 - RNA, 22 nt, Human
uaacugauauugaaaaacauca

SEQ ID NO: 722635 - RNA, 22 nt, Human
gauguacaaugucacuaugacc

SEQ ID NO: 722636 - RNA, 22 nt, Human
auagugucagaaaaucauaaga

SEQ ID NO: 722637 - RNA, 22 nt, Human
acuguggcgucaggaagaaauu

SEQ ID NO: 722638 - RNA, 22 nt, Human
caggcaggagccagggauucca

SEQ ID NO: 722639 - RNA, 20 nt, Human
uccuccaaccagcugcuaau

SEQ ID NO: 722640 - RNA, 18 nt, Human
uucagagucuggugagga

SEQ ID NO: 722641 - RNA, 22 nt, Human
gugugcguuccuaguaaacgug

SEQ ID NO: 722642 - RNA, 20 nt, Human
gcaacuagggagacacagcu

SEQ ID NO: 722643 - RNA, 17 nt, Human
uggcuucaggcugagca

SEQ ID NO: 722644 - RNA, 22 nt, Human
uagucucuggagacucuagggg

SEQ ID NO: 722645 - RNA, 23 nt, Human
aaagacucuccagagggaaguag

SEQ ID NO: 722646 - RNA, 15 nt, Human
ucccugggagauggu

SEQ ID NO: 722647 - RNA, 22 nt, Human
aaccaacauaggaaugcagaga

SEQ ID NO: 722648 - RNA, 22 nt, Human
aguucuuuucuagauucuggau

SEQ ID NO: 722649 - RNA, 22 nt, Human
gcagagcagggauuuugccaua

SEQ ID NO: 722650 - RNA, 22 nt, Human
agccuggcacugccccauccau

SEQ ID NO: 722651 - RNA, 22 nt, Human
cuugccugccacuacagcugaa

SEQ ID NO: 722652 - RNA, 22 nt, Human
ucugaaagcauuacaguuuauu

SEQ ID NO: 722653 - RNA, 22 nt, Human
ucuggguggcugccaaucugcc

SEQ ID NO: 722654 - RNA, 15 nt, Human
ggaggccaggcugug

SEQ ID NO: 722655 - RNA, 22 nt, Human
gcucucugccauaugaggauac

SEQ ID NO: 722656 - RNA, 22 nt, Human
ucaccaaggcauuuucacagca

SEQ ID NO: 722657 - RNA, 22 nt, Human
ggcccuguccuggcugucuccg

SEQ ID NO: 722658 - RNA, 22 nt, Human
ccaugcucuggggaggucaagc

SEQ ID NO: 722659 - RNA, 22 nt, Human
auucacacuguauacacaggau

SEQ ID NO: 722660 - RNA, 22 nt, Human
caauucaauggcaaaguauugu

SEQ ID NO: 722661 - RNA, 22 nt, Human
gcacuuuguggauuguauuucc

SEQ ID NO: 722662 - RNA, 23 nt, Human
ugaaugauggugcuccucaucuu

SEQ ID NO: 722663 - RNA, 22 nt, Human
ucacagcuguuuuguccauuaa

SEQ ID NO: 722664 - RNA, 22 nt, Human
auucagaagcuauucuuaguuc

SEQ ID NO: 722665 - RNA, 22 nt, Human
cuugccuucagugucccuuugc

SEQ ID NO: 722666 - RNA, 22 nt, Human
ucagcuguagguauggaugucc

SEQ ID NO: 722667 - RNA, 22 nt, Human
gucccuggggguuuaggacuca

SEQ ID NO: 722668 - RNA, 22 nt, Human
caugaaauugcuccuuuggugc

SEQ ID NO: 722669 - RNA, 22 nt, Human
aacacaaagaagcugcaggauc

SEQ ID NO: 722670 - RNA, 22 nt, Human
aaugcauuagcuacauaugucu

SEQ ID NO: 722671 - RNA, 22 nt, Human
ggagaccuuaaggugcuuccua

SEQ ID NO: 722672 - RNA, 22 nt, Human
auuguaauuuuagagaaagugg

SEQ ID NO: 722673 - RNA, 22 nt, Human
aucuggaguagaaaaaucgcuu

SEQ ID NO: 722674 - RNA, 22 nt, Human
uagaacaugugaaaauauagcc

SEQ ID NO: 722675 - RNA, 22 nt, Human
gggaaggcaggccucuguugga

SEQ ID NO: 722676 - RNA, 22 nt, Human
ggggcagagucuggacuguugu

SEQ ID NO: 722677 - RNA, 22 nt, Human
gcccugggauuggguggaggcu

SEQ ID NO: 722678 - RNA, 22 nt, Human
gacaguuuagguucaaaucuca

SEQ ID NO: 722679 - RNA, 22 nt, Human
ucugguaauaggcaauagcuug

SEQ ID NO: 722680 - RNA, 22 nt, Human
uuuguacaggugcaggcauuug

SEQ ID NO: 722681 - RNA, 22 nt, Human
ucagaaccagcccagcagauga

SEQ ID NO: 722682 - RNA, 22 nt, Human
uggaaaaucaggggacauugau

SEQ ID NO: 722683 - RNA, 22 nt, Human
uagacagugagcuaugaguggu

SEQ ID NO: 722684 - RNA, 22 nt, Human
cucugcuucugagauggaagcu

SEQ ID NO: 722685 - RNA, 21 nt, Human
uguaacaaguucccuagguga

SEQ ID NO: 722686 - RNA, 19 nt, Human
cuuccuggaggagagccuc

SEQ ID NO: 722687 - RNA, 22 nt, Human
aagucaauuaguaaacuuggaa

SEQ ID NO: 722688 - RNA, 22 nt, Human
ucagggaagagagaucuccuag

SEQ ID NO: 722689 - RNA, 22 nt, Human
caggaaaaggagacuuuagcac

SEQ ID NO: 722690 - RNA, 19 nt, Human
ucccaggaaccuuuuauuu

SEQ ID NO: 722691 - RNA, 22 nt, Human
aaguccagugcuuuagauucca

SEQ ID NO: 722692 - RNA, 22 nt, Human
ccugggugaugugcugcccucg

SEQ ID NO: 722693 - RNA, 22 nt, Human
uuagaaaucaccucugaagauc

SEQ ID NO: 722694 - RNA, 22 nt, Human
caggccacacggcggcucccug

SEQ ID NO: 722695 - RNA, 22 nt, Human
cagcugcaggagaaacagaggc

SEQ ID NO: 722696 - RNA, 22 nt, Human
uccagccuuucuacucacugag

SEQ ID NO: 722697 - RNA, 23 nt, Human
cagggccaggcagcagcugucac

SEQ ID NO: 722698 - RNA, 21 nt, Human
caguuauucuugaugugugug

SEQ ID NO: 722699 - RNA, 22 nt, Human
cugagccauaagggaggcuggg

SEQ ID NO: 722700 - RNA, 21 nt, Human
cuggccuucaacugauuggau

SEQ ID NO: 722701 - RNA, 22 nt, Human
uuggggaguuaaugccaaagau

SEQ ID NO: 722702 - RNA, 20 nt, Human
aggggccuggaacaggccuu

SEQ ID NO: 722703 - RNA, 22 nt, Human
aaaauagccucacauaauugcu

SEQ ID NO: 722704 - RNA, 22 nt, Human
agauaucaccucuaggcuggug

SEQ ID NO: 722705 - RNA, 22 nt, Human
uuacaucaugcuuaucccuuuc

SEQ ID NO: 722706 - RNA, 16 nt, Human
ugggcagaugagaaga

SEQ ID NO: 722707 - RNA, 23 nt, Human
ugugacagggucauugaaaaggg

SEQ ID NO: 722708 - RNA, 22 nt, Human
gcaccuggcugcccagguggag

SEQ ID NO: 722709 - RNA, 22 nt, Human
auggaaaucagguucauccaag

SEQ ID NO: 722710 - RNA, 22 nt, Human
ugacagagcugggauuugaagc

SEQ ID NO: 722711 - RNA, 22 nt, Human
cauggcccucuucuggagcaau

SEQ ID NO: 722712 - RNA, 22 nt, Human
ggaggcggggaaggcaucccau

SEQ ID NO: 722713 - RNA, 22 nt, Human
uguguauuucuggaacagacua

SEQ ID NO: 722714 - RNA, 22 nt, Human
auucuucauguugaagcuguca

SEQ ID NO: 722715 - RNA, 20 nt, Human
uguacacaguacuuuacaau

SEQ ID NO: 722716 - RNA, 22 nt, Human
aggagcugucagagugccagag

SEQ ID NO: 722717 - RNA, 22 nt, Human
caggcuuuuucugcuguccucu

SEQ ID NO: 722718 - RNA, 22 nt, Human
uacaguaaccuuauuugucauu

SEQ ID NO: 722719 - RNA, 22 nt, Human
auccuuggcagcucagaccuac

SEQ ID NO: 722720 - RNA, 22 nt, Human
auucaguuaguagauuugguca

SEQ ID NO: 722721 - RNA, 22 nt, Human
aggcuguguccucauuuuauau

SEQ ID NO: 722722 - RNA, 21 nt, Human
ucucguuguauggucuugggg

SEQ ID NO: 722723 - RNA, 22 nt, Human
gagcuucagagaccacuuaacu

SEQ ID NO: 722724 - RNA, 19 nt, Human
gcccucaggcagcuccauc

SEQ ID NO: 722725 - RNA, 22 nt, Human
cugaggccagagugggccucuu

SEQ ID NO: 722726 - RNA, 22 nt, Human
ugggcuccagcaccugugcucu

SEQ ID NO: 722727 - RNA, 19 nt, Human
aggcacaauucugagaagc

SEQ ID NO: 722728 - RNA, 22 nt, Human
gcguguuugcccagugaguggc

SEQ ID NO: 722729 - RNA, 22 nt, Human
aguacauauaguaauuuagcca

SEQ ID NO: 722730 - RNA, 22 nt, Human
cugacucccugauucuggguuu

SEQ ID NO: 722731 - RNA, 22 nt, Human
auagugugacugaggaguugaa

SEQ ID NO: 722732 - RNA, 22 nt, Human
aaauaauuauagcgagucuauc

SEQ ID NO: 722733 - RNA, 22 nt, Human
uucuggcaugagagaugggggu

SEQ ID NO: 722734 - RNA, 22 nt, Human
uuagacuagaagcuuccacuuu

SEQ ID NO: 722735 - RNA, 17 nt, Human
ccuguuguugccuuugc

SEQ ID NO: 722736 - RNA, 22 nt, Human
gugcaaauuccacuggaaagcu

SEQ ID NO: 722737 - RNA, 22 nt, Human
ugagacgaagucuugcucuguu

SEQ ID NO: 722738 - RNA, 22 nt, Human
auugucuucuggucuuaucuuu

SEQ ID NO: 722739 - RNA, 22 nt, Human
cuucacauugggcuugauauga

SEQ ID NO: 722740 - RNA, 22 nt, Human
caaauagaacucacagacaaga

SEQ ID NO: 722741 - RNA, 22 nt, Human
accugcagccacuucucuccuu

SEQ ID NO: 722742 - RNA, 22 nt, Human
uugucuaaugagcuccacuuca

SEQ ID NO: 722743 - RNA, 22 nt, Human
ggaagaugagaaguggggcucc

SEQ ID NO: 722744 - RNA, 22 nt, Human
agucagcagccuggccaggaga

SEQ ID NO: 722745 - RNA, 22 nt, Human
agguaucaacagcagagucuga

SEQ ID NO: 722746 - RNA, 22 nt, Human
ugaaccuuguuccugcccuccu

SEQ ID NO: 722747 - RNA, 22 nt, Human
aaucagaaauugagggucuggu

SEQ ID NO: 722748 - RNA, 22 nt, Human
aucagaaaggugggcaagcaga

SEQ ID NO: 722749 - RNA, 17 nt, Human
agcugaaauugcugaag

SEQ ID NO: 722750 - RNA, 22 nt, Human
uggcuccaaaucaacugcuguu

SEQ ID NO: 722751 - RNA, 22 nt, Human
ccugggcaggccggacgcuggg

SEQ ID NO: 722752 - RNA, 22 nt, Human
aggcucaggucucaggucuggc

SEQ ID NO: 722753 - RNA, 22 nt, Human
gaagccaagccagcugauggag

SEQ ID NO: 722754 - RNA, 22 nt, Human
ugacagaacuuuuucacaucuc

SEQ ID NO: 722755 - RNA, 22 nt, Human
gcauccagguagagcuugcggg

SEQ ID NO: 722756 - RNA, 22 nt, Human
augcaguuuuaaaucauuucag

SEQ ID NO: 722757 - RNA, 22 nt, Human
acuccagacacagacacuauga

SEQ ID NO: 722758 - RNA, 21 nt, Human
caggccccaggccuggggugc

SEQ ID NO: 722759 - RNA, 22 nt, Human
agguuggccucagggaggcucu

SEQ ID NO: 722760 - RNA, 22 nt, Human
agggccucugacgcccccagcc

SEQ ID NO: 722761 - RNA, 22 nt, Human
agaggguugaaccuauaaacua

SEQ ID NO: 722762 - RNA, 22 nt, Human
agagggcuucccuaggagugag

SEQ ID NO: 722763 - RNA, 23 nt, Human
ggacccuguggagggugagaguc

SEQ ID NO: 722764 - RNA, 22 nt, Human
cagcccagcagggucuggcccu

SEQ ID NO: 722765 - RNA, 22 nt, Human
uuauuaagugcguacuguaugc

SEQ ID NO: 722766 - RNA, 22 nt, Human
agaggcucuuugagcugggaga

SEQ ID NO: 722767 - RNA, 22 nt, Human
acagucuggcagguguugaaag

SEQ ID NO: 722768 - RNA, 17 nt, Human
gggcuggauggccaugg

SEQ ID NO: 722769 - RNA, 22 nt, Human
uuucagacauuaagugauggga

SEQ ID NO: 722770 - RNA, 21 nt, Human
cugauaauuguuaaauuauuu

SEQ ID NO: 722771 - RNA, 22 nt, Human
cugaggccugggggcguggacg

SEQ ID NO: 722772 - RNA, 22 nt, Human
uagcaaauacaugauguaauuu

SEQ ID NO: 722773 - RNA, 22 nt, Human
uggcucagauaauucaaggggc

SEQ ID NO: 722774 - RNA, 22 nt, Human
gcaacaggcaguuugcucaugu

SEQ ID NO: 722775 - RNA, 17 nt, Human
cgagggcuugcuggcuc

SEQ ID NO: 722776 - RNA, 22 nt, Human
gagagcccuacaaggcguuuug

SEQ ID NO: 722777 - RNA, 22 nt, Human
ccccagagaaagucagcagcau

SEQ ID NO: 722778 - RNA, 22 nt, Human
ggcccugggaugcucagcagug

SEQ ID NO: 722779 - RNA, 22 nt, Human
uuugacaaaggaaaaaugcaca

SEQ ID NO: 722780 - RNA, 22 nt, Human
gaggcucccuuuagguccagau

SEQ ID NO: 722781 - RNA, 22 nt, Human
augaagaaacuguucugggugg

SEQ ID NO: 722782 - RNA, 22 nt, Human
ucaauaacuuuguuuagcauug

SEQ ID NO: 722783 - RNA, 22 nt, Human
agcugggcuuggccaggucgcu

SEQ ID NO: 722784 - RNA, 22 nt, Human
cagcugcaggagcugagcacuu

SEQ ID NO: 722785 - RNA, 22 nt, Human
ucuggcuccacaccucacugca

SEQ ID NO: 722786 - RNA, 22 nt, Human
uaauugcuauuuaaugugguga

SEQ ID NO: 722787 - RNA, 22 nt, Human
cauucucuacacuccugcccug

SEQ ID NO: 722788 - RNA, 22 nt, Human
caugaaaaauuuacuguuaaca

SEQ ID NO: 722789 - RNA, 22 nt, Human
ucagagaaaauggaaacuuuua

SEQ ID NO: 722790 - RNA, 19 nt, Human
ucccugaguuccagcccag

SEQ ID NO: 722791 - RNA, 22 nt, Human
uucucucaguuaaacuuuguga

SEQ ID NO: 722792 - RNA, 22 nt, Human
aaccucuuugugaaugucauga

SEQ ID NO: 722793 - RNA, 22 nt, Human
ggaaggucgagcugcaucuggc

SEQ ID NO: 722794 - RNA, 22 nt, Human
cccaggagagaggggauaaagc

SEQ ID NO: 722795 - RNA, 22 nt, Human
cccaggaagggaugccaaggaa

SEQ ID NO: 722796 - RNA, 22 nt, Human
ucacuggauucucuuuuguucc

SEQ ID NO: 722797 - RNA, 18 nt, Human
aggccugggaagcugagg

SEQ ID NO: 722798 - RNA, 22 nt, Human
ugggagcagccaacauggccuu

SEQ ID NO: 722799 - RNA, 22 nt, Human
gaguaaaaguuggauuacaaag

SEQ ID NO: 722800 - RNA, 22 nt, Human
acagcagaggaaaagucugaua

SEQ ID NO: 722801 - RNA, 22 nt, Human
gccuggcugccggccuuggcaa

SEQ ID NO: 722802 - RNA, 22 nt, Human
ugcuggguguuccgcacuugac

SEQ ID NO: 722803 - RNA, 22 nt, Human
gacacuuugggacucagcccua

SEQ ID NO: 722804 - RNA, 22 nt, Human
ugaggcagggagaguggauaug

SEQ ID NO: 722805 - RNA, 22 nt, Human
cagcagguuaacagaggcuggu

SEQ ID NO: 722806 - RNA, 22 nt, Human
uaauugcuuguaaagcccugaa

SEQ ID NO: 722807 - RNA, 22 nt, Human
aaucagaaucaguugacacagc

SEQ ID NO: 722808 - RNA, 22 nt, Human
ccugccugcuuucugcuuugca

SEQ ID NO: 722809 - RNA, 22 nt, Human
aaagaugucacaagaugugaug

SEQ ID NO: 722810 - RNA, 22 nt, Human
uggguccaguguccuggcuaug

SEQ ID NO: 722811 - RNA, 22 nt, Human
uuauuccagguacuugguuucu

SEQ ID NO: 722812 - RNA, 22 nt, Human
ucuucugugaucuauguguuuu

SEQ ID NO: 722813 - RNA, 22 nt, Human
aagagggagggcaaaggcacug

SEQ ID NO: 722814 - RNA, 23 nt, Human
cagaccuggcagucauccucaac

SEQ ID NO: 722815 - RNA, 17 nt, Human
acacaucuuggcuuugc

SEQ ID NO: 722816 - RNA, 22 nt, Human
auggcaguagaaugggggaaaa

SEQ ID NO: 722817 - RNA, 22 nt, Human
uccagcugcaaggggcacagcu

SEQ ID NO: 722818 - RNA, 22 nt, Human
gccugcucugacauccauccca

SEQ ID NO: 722819 - RNA, 22 nt, Human
uacaauguacuuccuugcacag

SEQ ID NO: 722820 - RNA, 22 nt, Human
ucuggcugaaaggggcugugcc

SEQ ID NO: 722821 - RNA, 22 nt, Human
cugaggugaugucaaauggguu

SEQ ID NO: 722822 - RNA, 22 nt, Human
aaggcaauuggcuuguauaaga

SEQ ID NO: 722823 - RNA, 22 nt, Human
ugccuccauguuucagcaucua

SEQ ID NO: 722824 - RNA, 22 nt, Human
cuauucaacuugacuguuucac

SEQ ID NO: 722825 - RNA, 22 nt, Human
cucagccccaauucuccccauu

SEQ ID NO: 722826 - RNA, 22 nt, Human
caguccuguuccuggaguaguu

SEQ ID NO: 722827 - RNA, 22 nt, Human
cuggccucaccucagacuuacu

SEQ ID NO: 722828 - RNA, 22 nt, Human
cuaguccagucucaaaaugcua

SEQ ID NO: 722829 - RNA, 21 nt, Human
gaauaguucuguggcagcagu

SEQ ID NO: 722830 - RNA, 22 nt, Human
aggcugguaguauuuagucaca

SEQ ID NO: 722831 - RNA, 23 nt, Human
ugggccacuauagaaaucucuca

SEQ ID NO: 722832 - RNA, 22 nt, Human
cagcuguuccuggaaggagacc

SEQ ID NO: 722833 - RNA, 22 nt, Human
aagcugggagggagcccagagu

SEQ ID NO: 722834 - RNA, 22 nt, Human
aauauuuguuaguguuuuaaug

SEQ ID NO: 722835 - RNA, 21 nt, Human
uagggcucuauuuuuauuuca

SEQ ID NO: 722836 - RNA, 22 nt, Human
gaaugugggcugugaagaggag

SEQ ID NO: 722837 - RNA, 22 nt, Human
uguucuaaguguuuuguucaug

SEQ ID NO: 722838 - RNA, 22 nt, Human
aagacaggaacauagcaaaucc

SEQ ID NO: 722839 - RNA, 22 nt, Human
aaacagcucaagaaguuacucu

SEQ ID NO: 722840 - RNA, 22 nt, Human
uuuaugacccaagaagauacca

SEQ ID NO: 722841 - RNA, 22 nt, Human
caugcaguuucucuaugcguag

SEQ ID NO: 722842 - RNA, 23 nt, Human
uccucccugacuucuacagcaca

SEQ ID NO: 722843 - RNA, 22 nt, Human
ggcuccaugcuccgcuucuugu

SEQ ID NO: 722844 - RNA, 23 nt, Human
cagaaagcccuuuccccacagua

SEQ ID NO: 722845 - RNA, 22 nt, Human
aaggcuuugauuccauugcccu

SEQ ID NO: 722846 - RNA, 22 nt, Human
cuggcuguuucuccuuugucua

SEQ ID NO: 722847 - RNA, 22 nt, Human
cauuucuagggaucauaaagua

SEQ ID NO: 722848 - RNA, 22 nt, Human
gugcagaggucacaaaagugaa

SEQ ID NO: 722849 - RNA, 22 nt, Human
augaggucauccuggaguaagg

SEQ ID NO: 722850 - RNA, 22 nt, Human
aaggaauucccuuucugacaga

SEQ ID NO: 722851 - RNA, 22 nt, Human
aggcagucuaguccccaggcaa

SEQ ID NO: 722852 - RNA, 22 nt, Human
ggcugccagcacugguguagag

SEQ ID NO: 722853 - RNA, 18 nt, Human
cacaauuuacagaugaca

SEQ ID NO: 722854 - RNA, 22 nt, Human
agccggccauguggucuugugc

SEQ ID NO: 722855 - RNA, 22 nt, Human
auguguuggauauuagugggga

SEQ ID NO: 722856 - RNA, 22 nt, Human
uacaaccauagacauauacuag

SEQ ID NO: 722857 - RNA, 22 nt, Human
uaaugccgucucuacaagacuc

SEQ ID NO: 722858 - RNA, 22 nt, Human
cagaagacugcagggaagggac

SEQ ID NO: 722859 - RNA, 22 nt, Human
gaaagaaugcugggagccaucu

SEQ ID NO: 722860 - RNA, 22 nt, Human
auguacauuuuccuaauguuuu

SEQ ID NO: 722861 - RNA, 22 nt, Human
agcucugacauugauucucagc

SEQ ID NO: 722862 - RNA, 22 nt, Human
aaaugaucauguaauuucagaa

SEQ ID NO: 722863 - RNA, 22 nt, Human
cagcuggcguggagugauugca

SEQ ID NO: 722864 - RNA, 22 nt, Human
uuaggaguccagaugucuuggg

SEQ ID NO: 722865 - RNA, 22 nt, Human
accucuggacacugcauccuuc

SEQ ID NO: 722866 - RNA, 22 nt, Human
ccagagccuaagaucugauccu

SEQ ID NO: 722867 - RNA, 22 nt, Human
cacauauaccucuucuugaguu

SEQ ID NO: 722868 - RNA, 22 nt, Human
aucaggaaugaauacuuuugga

SEQ ID NO: 722869 - RNA, 22 nt, Human
aguccuggcauggaauuguccc

SEQ ID NO: 722870 - RNA, 21 nt, Human
ugcucaguaaaugcugaguga

SEQ ID NO: 722871 - RNA, 20 nt, Human
ugagaaaguagagacucagg

SEQ ID NO: 722872 - RNA, 22 nt, Human
uuggaagggauauuggcauaug

SEQ ID NO: 722873 - RNA, 23 nt, Human
caugugugacaguaucacuguuu

SEQ ID NO: 722874 - RNA, 22 nt, Human
ggcagugccacuaagcucugcu

SEQ ID NO: 722875 - RNA, 22 nt, Human
ggugucugugauggcauauaac

SEQ ID NO: 722876 - RNA, 22 nt, Human
cucugaagggagggccaagccc

SEQ ID NO: 722877 - RNA, 22 nt, Human
uuccuagggcagagccgcuggg

SEQ ID NO: 722878 - RNA, 22 nt, Human
cagugguucucaaucaggaaug

SEQ ID NO: 722879 - RNA, 22 nt, Human
uugaaaguuuauggagucugca

SEQ ID NO: 722880 - RNA, 22 nt, Human
aaggaguggggcauaucacaga

SEQ ID NO: 722881 - RNA, 22 nt, Human
caguguuugcuuaaguuauaug

SEQ ID NO: 722882 - RNA, 22 nt, Human
gcaugucaugucauguaggaau

SEQ ID NO: 722883 - RNA, 22 nt, Human
ugucuuuaagcaaacaguguuu

SEQ ID NO: 722884 - RNA, 22 nt, Human
uauacaaugaguacauucuggg

SEQ ID NO: 722885 - RNA, 22 nt, Human
guggcagggguauuccagcuga

SEQ ID NO: 722886 - RNA, 22 nt, Human
caaauacuuacugaaccugugc

SEQ ID NO: 722887 - RNA, 22 nt, Human
auuggcauacuuucuauauuca

SEQ ID NO: 722888 - RNA, 21 nt, Human
auuaacuuguuaaccuaaagu

SEQ ID NO: 722889 - RNA, 22 nt, Human
cuucuuugaaaaaggcagucag

SEQ ID NO: 722890 - RNA, 22 nt, Human
agcuuucagucucugaaggaac

SEQ ID NO: 722891 - RNA, 22 nt, Human
cccaaguuaauuuguagcugaa

SEQ ID NO: 722892 - RNA, 22 nt, Human
ccaaagucagugcucagucguc

SEQ ID NO: 722893 - RNA, 22 nt, Human
ugcuucugaacucagcaugugg

SEQ ID NO: 722894 - RNA, 22 nt, Human
acgaaggaaugugcuugagcau

SEQ ID NO: 722895 - RNA, 22 nt, Human
ggcugguggggaaagaggacca

SEQ ID NO: 722896 - RNA, 22 nt, Human
caggauagaaaggccauggagu

SEQ ID NO: 722897 - RNA, 22 nt, Human
gugagacucgccuuuguguagc

SEQ ID NO: 722898 - RNA, 19 nt, Human
ggaacucacuuagagaaac

SEQ ID NO: 722899 - RNA, 22 nt, Human
uagaaauguuagauguauugag

SEQ ID NO: 722900 - RNA, 22 nt, Human
cuuauuucagcccugggcaccc

SEQ ID NO: 722901 - RNA, 23 nt, Human
ggcugagacuacaggcgcuugcc

SEQ ID NO: 722902 - RNA, 22 nt, Human
ggagaccagaaggaagcuucga

SEQ ID NO: 722903 - RNA, 18 nt, Human
agcugcccugggcuggag

SEQ ID NO: 722904 - RNA, 22 nt, Human
gagagucuaggaaccucauaua

SEQ ID NO: 722905 - RNA, 22 nt, Human
aacacugacgacgugaacuaaa

SEQ ID NO: 722906 - RNA, 22 nt, Human
agccuucucugauucuccuagu

SEQ ID NO: 722907 - RNA, 22 nt, Human
gccuucugugcuccuggccuuu

SEQ ID NO: 722908 - RNA, 22 nt, Human
uauuucaggggguacaagaaga

SEQ ID NO: 722909 - RNA, 22 nt, Human
cuucaguuuaucccaucaucca

SEQ ID NO: 722910 - RNA, 22 nt, Human
cucuucagguuucugcucugga

SEQ ID NO: 722911 - RNA, 22 nt, Human
ucaggaaagccuagaagagaac

SEQ ID NO: 722912 - RNA, 22 nt, Human
uucuuugggcaauugcuggccc

SEQ ID NO: 722913 - RNA, 22 nt, Human
uccucugggcucccugcaacag

SEQ ID NO: 722914 - RNA, 22 nt, Human
ccuggccaaucuagggcuguua

SEQ ID NO: 722915 - RNA, 22 nt, Human
gcaaaacagucgaugccuccca

SEQ ID NO: 722916 - RNA, 22 nt, Human
cugcacagaggucggucugcca

SEQ ID NO: 722917 - RNA, 22 nt, Human
uaauacacugcuuuuuguaacu

SEQ ID NO: 722918 - RNA, 22 nt, Human
cggagggguuugaacagaggag

SEQ ID NO: 722919 - RNA, 22 nt, Human
acucugcuaucuuagcaaaagg

SEQ ID NO: 722920 - RNA, 22 nt, Human
gccuguguggaugcgccggugc

SEQ ID NO: 722921 - RNA, 22 nt, Human
gccagcuguaggugguggguug

SEQ ID NO: 722922 - RNA, 22 nt, Human
cuggcucuucuggguucugugu

SEQ ID NO: 722923 - RNA, 22 nt, Human
ccugagugcuuccagagucaug

SEQ ID NO: 722924 - RNA, 22 nt, Human
gagagggcugccuggugugagg

SEQ ID NO: 722925 - RNA, 19 nt, Human
guagggacagugguucuga

SEQ ID NO: 722926 - RNA, 22 nt, Human
agcaccaugaccuugccauuga

SEQ ID NO: 722927 - RNA, 22 nt, Human
cugggacuggguccucaggaca

SEQ ID NO: 722928 - RNA, 22 nt, Human
ucucuggaauuggcugaggcaa

SEQ ID NO: 722929 - RNA, 22 nt, Human
aaggaacacuacaaggcuggga

SEQ ID NO: 722930 - RNA, 22 nt, Human
ccagaggcuggcagccagcuga

SEQ ID NO: 722931 - RNA, 22 nt, Human
agugucugcuagguucaucaac

SEQ ID NO: 722932 - RNA, 22 nt, Human
aaacacugaaaauuuuggucau

SEQ ID NO: 722933 - RNA, 21 nt, Human
ccuucucuugcuucagcuuca

SEQ ID NO: 722934 - RNA, 22 nt, Human
gucacccugcuguuuguccauu

SEQ ID NO: 722935 - RNA, 22 nt, Human
ucccuccccacuucugagcuuu

SEQ ID NO: 722936 - RNA, 22 nt, Human
ucuaaacauuaugauaguagag

SEQ ID NO: 722937 - RNA, 22 nt, Human
cuggcugcuuguagacucgacu

SEQ ID NO: 722938 - RNA, 22 nt, Human
guuggccauuaauuggaggaca

SEQ ID NO: 722939 - RNA, 22 nt, Human
ugguccaggguguaguacagag

SEQ ID NO: 722940 - RNA, 22 nt, Human
acacucuacagagcaaucuacc

SEQ ID NO: 722941 - RNA, 19 nt, Human
agucuuucccacucgucuu

SEQ ID NO: 722942 - RNA, 22 nt, Human
ucacagaaucucugauaagucu

SEQ ID NO: 722943 - RNA, 22 nt, Human
ugaguaauaaacugucuugcuc

SEQ ID NO: 722944 - RNA, 23 nt, Human
cugaccugacccauaagcaagga

SEQ ID NO: 722945 - RNA, 22 nt, Human
agugucugagccagaauuagaa

SEQ ID NO: 722946 - RNA, 22 nt, Human
caauaaguaauaggcaucuaau

SEQ ID NO: 722947 - RNA, 22 nt, Human
uggcucaguuugggggauugaa

SEQ ID NO: 722948 - RNA, 22 nt, Human
acaacuuucuggguuaucugau

SEQ ID NO: 722949 - RNA, 22 nt, Human
gcacaccuuagaggggagcugc

SEQ ID NO: 722950 - RNA, 17 nt, Human
gaagguuucucuuaggu

SEQ ID NO: 722951 - RNA, 22 nt, Human
uuucuguuuagcauaaaguggc

SEQ ID NO: 722952 - RNA, 22 nt, Human
uuuaucuguuguacauuuaugc

SEQ ID NO: 722953 - RNA, 17 nt, Human
cacaacuggcugauuga

SEQ ID NO: 722954 - RNA, 22 nt, Human
cagagguacagccauugaagau

SEQ ID NO: 722955 - RNA, 22 nt, Human
ggauggguuccgugggcaaaug

SEQ ID NO: 722956 - RNA, 22 nt, Human
ggcuugcacacagccucaguuu

SEQ ID NO: 722957 - RNA, 22 nt, Human
caaaggcuuugcuaugaugcau

SEQ ID NO: 722958 - RNA, 22 nt, Human
aggcacaaaagcagggugacca

SEQ ID NO: 722959 - RNA, 22 nt, Human
aagcuuuaugaucucucagcua

SEQ ID NO: 722960 - RNA, 22 nt, Human
aaguuguuguugagguggguaa

SEQ ID NO: 722961 - RNA, 22 nt, Human
uguuuacauauuuggucucaga

SEQ ID NO: 722962 - RNA, 22 nt, Human
ugugagacguguuagaacagug

SEQ ID NO: 722963 - RNA, 22 nt, Human
uaaccauauuuuccauuaaguu

SEQ ID NO: 722964 - RNA, 22 nt, Human
uagauaaaagggcaaagggcau

SEQ ID NO: 722965 - RNA, 22 nt, Human
cuuugcaauagaggcacacaug

SEQ ID NO: 722966 - RNA, 18 nt, Human
gcuccugguuggaaagaa

SEQ ID NO: 722967 - RNA, 22 nt, Human
gaaacaugucugacaauuuacc

SEQ ID NO: 722968 - RNA, 22 nt, Human
accagaguaauguguggaaauu

SEQ ID NO: 722969 - RNA, 22 nt, Human
ggccacagcagaugcuucagau

SEQ ID NO: 722970 - RNA, 22 nt, Human
gcacagaagagcuuuggaauga

SEQ ID NO: 722971 - RNA, 22 nt, Human
gaucacaucuuuaugaguauuu

SEQ ID NO: 722972 - RNA, 22 nt, Human
augggcagaguggggacaggaa

SEQ ID NO: 722973 - RNA, 22 nt, Human
ugaaggcaaccucugugguccu

SEQ ID NO: 722974 - RNA, 22 nt, Human
ugcuccaucucucgugguucca

SEQ ID NO: 722975 - RNA, 22 nt, Human
ugugcagcuaguccuggacuug

SEQ ID NO: 722976 - RNA, 22 nt, Human
ucucaacaccacuugcugaaga

SEQ ID NO: 722977 - RNA, 22 nt, Human
acagucuacuaaacaucaucag

SEQ ID NO: 722978 - RNA, 22 nt, Human
acagucuuaugcauacacuauu

SEQ ID NO: 722979 - RNA, 22 nt, Human
agaggccacaccagccucccgu

SEQ ID NO: 722980 - RNA, 22 nt, Human
aaugaacauggacaaguuaaua

SEQ ID NO: 722981 - RNA, 22 nt, Human
auugguaagcaagauggcaaua

SEQ ID NO: 722982 - RNA, 22 nt, Human
auaccauaggaaaggaucagcc

SEQ ID NO: 722983 - RNA, 22 nt, Human
cccuagaacacgcagacacuga

SEQ ID NO: 722984 - RNA, 22 nt, Human
cacaguguaguuaaugugacau

SEQ ID NO: 722985 - RNA, 22 nt, Human
ugcuuuauucagucucugccau

SEQ ID NO: 722986 - RNA, 22 nt, Human
ucuuggcugucuuugaaguuag

SEQ ID NO: 722987 - RNA, 22 nt, Human
ugccugccucuggagcccaucc

SEQ ID NO: 722988 - RNA, 22 nt, Human
acagaauauugguuacuguugc

SEQ ID NO: 722989 - RNA, 22 nt, Human
gaaggaaaacagaucugccuga

SEQ ID NO: 722990 - RNA, 22 nt, Human
cuucuuaaugacagauuaaaau

SEQ ID NO: 722991 - RNA, 22 nt, Human
uguuuuuuuauauaccugaagu

SEQ ID NO: 722992 - RNA, 22 nt, Human
auaaauuuucuugcuguacuua

SEQ ID NO: 722993 - RNA, 20 nt, Human
cugggucuccuucugcuuaa

SEQ ID NO: 722994 - RNA, 22 nt, Human
cugagacaugguuugacuggca

SEQ ID NO: 722995 - RNA, 22 nt, Human
cuugaaagucagcagaguggau

SEQ ID NO: 722996 - RNA, 22 nt, Human
ggagccuugggcgcucucccau

SEQ ID NO: 722997 - RNA, 19 nt, Human
uggcucugucgaaggcaca

SEQ ID NO: 722998 - RNA, 19 nt, Human
uaccaaauugcauuauggc

SEQ ID NO: 722999 - RNA, 17 nt, Human
ggaaaagaagaguagga

SEQ ID NO: 723000 - RNA, 22 nt, Human
ugcagacagagaaaugaggccc

SEQ ID NO: 723001 - RNA, 22 nt, Human
uuccagaggagugauucagagg

SEQ ID NO: 723002 - RNA, 22 nt, Human
gaaauaagaguccaugccaggu

SEQ ID NO: 723003 - RNA, 21 nt, Human
aggguggcucugggucagaac

SEQ ID NO: 723004 - RNA, 22 nt, Human
uuggcagacuggguccugggga

SEQ ID NO: 723005 - RNA, 20 nt, Human
aaguauauguccguguacuu

SEQ ID NO: 723006 - RNA, 22 nt, Human
gccugucucuuggaacuuggua

SEQ ID NO: 723007 - RNA, 22 nt, Human
aggaagaaccuaagaaagucuc

SEQ ID NO: 723008 - RNA, 22 nt, Human
ggcaguggcauguggguagugg

SEQ ID NO: 723009 - RNA, 22 nt, Human
gggaugauggaaaagucuguua

SEQ ID NO: 723010 - RNA, 22 nt, Human
uucuauugcacacaaauaauua

SEQ ID NO: 723011 - RNA, 22 nt, Human
uuauuaugugcuagagaaugua

SEQ ID NO: 723012 - RNA, 22 nt, Human
agccccuuccaguucucagauc

SEQ ID NO: 723013 - RNA, 22 nt, Human
ccaaggcauauggcugaaacca

SEQ ID NO: 723014 - RNA, 22 nt, Human
uauucugcaugaaaauaaacag

SEQ ID NO: 723015 - RNA, 22 nt, Human
agggcagcuggaagguggcuuc

SEQ ID NO: 723016 - RNA, 16 nt, Human
gggcugggggauucug

SEQ ID NO: 723017 - RNA, 22 nt, Human
gaacaucaaggucugugucuag

SEQ ID NO: 723018 - RNA, 22 nt, Human
agcuguggggaggaggcuagca

SEQ ID NO: 723019 - RNA, 22 nt, Human
ucuuuucugccagcugagcccu

SEQ ID NO: 723020 - RNA, 22 nt, Human
ggccaugccaggcugccuggga

SEQ ID NO: 723021 - RNA, 22 nt, Human
agcugggcuggagcuccaagcg

SEQ ID NO: 723022 - RNA, 22 nt, Human
uuaagaggugaggccuuuaaga

SEQ ID NO: 723023 - RNA, 22 nt, Human
aaucuguuccugaggcaccaga

SEQ ID NO: 723024 - RNA, 22 nt, Human
aaugaaugugauuaacuucaag

SEQ ID NO: 723025 - RNA, 22 nt, Human
ucccuggacagccuugccuggg

SEQ ID NO: 723026 - RNA, 22 nt, Human
ugggaagcugcauuuuaacaag

SEQ ID NO: 723027 - RNA, 22 nt, Human
guggccuuggcuucuacccuga

SEQ ID NO: 723028 - RNA, 21 nt, Human
ccagacuugaguguauguugu

SEQ ID NO: 723029 - RNA, 22 nt, Human
uugaacuuugaaccauuccuau

SEQ ID NO: 723030 - RNA, 22 nt, Human
auggcagcauaguggcaaguua

SEQ ID NO: 723031 - RNA, 22 nt, Human
aacaggcuggccuugaagcagu

SEQ ID NO: 723032 - RNA, 22 nt, Human
cugagguuuguccauccuuggu

SEQ ID NO: 723033 - RNA, 22 nt, Human
uagggaaaagacuucacuguuu

SEQ ID NO: 723034 - RNA, 22 nt, Human
aagccagauuucacucuuaauu

SEQ ID NO: 723035 - RNA, 22 nt, Human
ucuguugcaaugugcaugguga

SEQ ID NO: 723036 - RNA, 22 nt, Human
uagcccuggagcagggaaauac

SEQ ID NO: 723037 - RNA, 22 nt, Human
uuccaggguuaauuuauauggu

SEQ ID NO: 723038 - RNA, 22 nt, Human
gcccuggggaaggugucuccaa

SEQ ID NO: 723039 - RNA, 22 nt, Human
cauacaaauguguccaggcucu

SEQ ID NO: 723040 - RNA, 22 nt, Human
uucugcuccaccacuuccagca

SEQ ID NO: 723041 - RNA, 22 nt, Human
uuggcugguaagccaaaugaaa

SEQ ID NO: 723042 - RNA, 22 nt, Human
uuuaggaagaucugaaggaaga

SEQ ID NO: 723043 - RNA, 22 nt, Human
gauacaaaauauaaauggagag

SEQ ID NO: 723044 - RNA, 22 nt, Human
aagaaauacaugguuuuugagu

SEQ ID NO: 723045 - RNA, 22 nt, Human
uucuuauucuugaaauguggga

SEQ ID NO: 723046 - RNA, 22 nt, Human
caaaauguucuggcaccuuuaa

SEQ ID NO: 723047 - RNA, 22 nt, Human
agguagcuggugcugggcuccu

SEQ ID NO: 723048 - RNA, 22 nt, Human
cccaggugcugaaggaggccgc

SEQ ID NO: 723049 - RNA, 22 nt, Human
uccacaggcugaggcccuucug

SEQ ID NO: 723050 - RNA, 22 nt, Human
acauucaaguuucugcucaugg

SEQ ID NO: 723051 - RNA, 22 nt, Human
cagugcacacaauccucugccg

SEQ ID NO: 723052 - RNA, 22 nt, Human
cagugguugucagcaacaauau

SEQ ID NO: 723053 - RNA, 22 nt, Human
acagggccagccugggaccugg

SEQ ID NO: 723054 - RNA, 22 nt, Human
agcccagggcuaauaggaacca

SEQ ID NO: 723055 - RNA, 20 nt, Human
uggccaaguauccaacugga

SEQ ID NO: 723056 - RNA, 22 nt, Human
acacaaguucuaaagauugcgc

SEQ ID NO: 723057 - RNA, 22 nt, Human
aggcucagcccaagguggagag

SEQ ID NO: 723058 - RNA, 22 nt, Human
auagugaaaaugcugucagcau

SEQ ID NO: 723059 - RNA, 22 nt, Human
agagcacagaagaauaggugcu

SEQ ID NO: 723060 - RNA, 22 nt, Human
ugaucacaagucugaagaauga

SEQ ID NO: 723061 - RNA, 22 nt, Human
gagcuguuuuuccaaacuauug

SEQ ID NO: 723062 - RNA, 17 nt, Human
uuccaguuuaguauugu

SEQ ID NO: 723063 - RNA, 22 nt, Human
cauacauauguggaugucauau

SEQ ID NO: 723064 - RNA, 22 nt, Human
uccagcuccacagccucccugu

SEQ ID NO: 723065 - RNA, 22 nt, Human
uacagaaaaacuuggaggcuuu

SEQ ID NO: 723066 - RNA, 22 nt, Human
ucuuucugaauauuugaccuca

SEQ ID NO: 723067 - RNA, 22 nt, Human
caggugcagcuggauggaagcc

SEQ ID NO: 723068 - RNA, 22 nt, Human
ccucagggucugaggagaccgu

SEQ ID NO: 723069 - RNA, 22 nt, Human
uacuuugguugaauauguaaug

SEQ ID NO: 723070 - RNA, 20 nt, Human
uagaaaucuuauaaaagacu

SEQ ID NO: 723071 - RNA, 22 nt, Human
ccagcaucccugggguuggcca

SEQ ID NO: 723072 - RNA, 22 nt, Human
agucacaugagcacuaauuagg

SEQ ID NO: 723073 - RNA, 22 nt, Human
cagucccaugagcccagaacau

SEQ ID NO: 723074 - RNA, 22 nt, Human
acauccaccacaugccaggcuc

SEQ ID NO: 723075 - RNA, 22 nt, Human
ccaaggagcucauauucuuguu

SEQ ID NO: 723076 - RNA, 22 nt, Human
ggcagggcagcgcugauuaggg

SEQ ID NO: 723077 - RNA, 22 nt, Human
uaacacaguguccucagaaaca

SEQ ID NO: 723078 - RNA, 22 nt, Human
aaaugguguuucuaaugcuaga

SEQ ID NO: 723079 - RNA, 22 nt, Human
aggugggcuuggugccaacaug

SEQ ID NO: 723080 - RNA, 22 nt, Human
aguaugaagauuauaauuuuuc

SEQ ID NO: 723081 - RNA, 22 nt, Human
auuagaaugacagaaaugaggc

SEQ ID NO: 723082 - RNA, 22 nt, Human
cauuugaucuccugaauaaaca

SEQ ID NO: 723083 - RNA, 22 nt, Human
aaaaauguuaucuacuguccga

SEQ ID NO: 723084 - RNA, 22 nt, Human
gcucugcucuugacuuaccagg

SEQ ID NO: 723085 - RNA, 19 nt, Human
ucugccucuggucaggcuc

SEQ ID NO: 723086 - RNA, 22 nt, Human
ucugggaaccauugguggggau

SEQ ID NO: 723087 - RNA, 22 nt, Human
cuucccagacgggguggcagcc

SEQ ID NO: 723088 - RNA, 22 nt, Human
gugagagaugcuuucuuaacgc

SEQ ID NO: 723089 - RNA, 22 nt, Human
aguguuuggggugauuguaacc

SEQ ID NO: 723090 - RNA, 22 nt, Human
uucccuggcaugaguguaagau

SEQ ID NO: 723091 - RNA, 22 nt, Human
ggaauugucuaguacucacggc

SEQ ID NO: 723092 - RNA, 22 nt, Human
ucgcugugaaaaccuuggacaa

SEQ ID NO: 723093 - RNA, 22 nt, Human
cugaccaggguagaggugagag

SEQ ID NO: 723094 - RNA, 22 nt, Human
gccagguguaguggccacaccu

SEQ ID NO: 723095 - RNA, 22 nt, Human
ccugagagugagggccuccuua

SEQ ID NO: 723096 - RNA, 22 nt, Human
ugggagaaacugucucucccac

SEQ ID NO: 723097 - RNA, 22 nt, Human
ucugcucacauggcuccaugca

SEQ ID NO: 723098 - RNA, 22 nt, Human
aucuuucuccauauacaucuuu

SEQ ID NO: 723099 - RNA, 22 nt, Human
acagcugcucuauaucucagcc

SEQ ID NO: 723100 - RNA, 22 nt, Human
acagggcuugugacaacuuuaa

SEQ ID NO: 723101 - RNA, 22 nt, Human
aguguguaaugccaggggcugc

SEQ ID NO: 723102 - RNA, 22 nt, Human
acaagcauaagugagaugaaua

SEQ ID NO: 723103 - RNA, 22 nt, Human
aacaugcaaagcuaugauguau

SEQ ID NO: 723104 - RNA, 22 nt, Human
gcugauuuugagaagcacaguc

SEQ ID NO: 723105 - RNA, 23 nt, Human
ugcugcccacucuuccagcccuc

SEQ ID NO: 723106 - RNA, 22 nt, Human
guuuccuguggccacagaauaa

SEQ ID NO: 723107 - RNA, 22 nt, Human
ucugaagaggcucuugauaaga

SEQ ID NO: 723108 - RNA, 22 nt, Human
auaauuaucucagacacuuguu

SEQ ID NO: 723109 - RNA, 22 nt, Human
uuucauugaacuaaagaaucug

SEQ ID NO: 723110 - RNA, 22 nt, Human
ucuggguggcuucagaggccac

SEQ ID NO: 723111 - RNA, 22 nt, Human
ucugcagagguaauuuacagau

SEQ ID NO: 723112 - RNA, 23 nt, Human
uucuuuggaauugggcugcaagg

SEQ ID NO: 723113 - RNA, 18 nt, Human
uucacaagggcuugguuu

SEQ ID NO: 723114 - RNA, 22 nt, Human
ccagcaugagacgaugaugaag

SEQ ID NO: 723115 - RNA, 22 nt, Human
aagcuguguauuacagaauauu

SEQ ID NO: 723116 - RNA, 22 nt, Human
gaaguuaugaaauuuggacagc

SEQ ID NO: 723117 - RNA, 22 nt, Human
gcaagcaauggacggugacuuu

SEQ ID NO: 723118 - RNA, 22 nt, Human
agcugcuuagaguccucaggau

SEQ ID NO: 723119 - RNA, 18 nt, Human
uacuucaacucccagggc

SEQ ID NO: 723120 - RNA, 22 nt, Human
agaccauagggaccucagguug

SEQ ID NO: 723121 - RNA, 22 nt, Human
uuucagaugugugucucugaag

SEQ ID NO: 723122 - RNA, 22 nt, Human
aagcugaauuuucuaaaagaau

SEQ ID NO: 723123 - RNA, 22 nt, Human
caagcagagguuuauguauuag

SEQ ID NO: 723124 - RNA, 22 nt, Human
ccugguguggcugucacagagg

SEQ ID NO: 723125 - RNA, 22 nt, Human
ccagugcccagucucccugguc

SEQ ID NO: 723126 - RNA, 22 nt, Human
aucagcaaguccuguuaauucu

SEQ ID NO: 723127 - RNA, 22 nt, Human
gggugccugaguuagggcagaa

SEQ ID NO: 723128 - RNA, 22 nt, Human
augugucugguuauugacaugc

SEQ ID NO: 723129 - RNA, 21 nt, Human
aacacauccagaguauuugac

SEQ ID NO: 723130 - RNA, 22 nt, Human
cacagaacauuuuuagaugcag

SEQ ID NO: 723131 - RNA, 22 nt, Human
acaaaauuuuuagacaaggcuu

SEQ ID NO: 723132 - RNA, 22 nt, Human
aacugcaaguggggcuugucau

SEQ ID NO: 723133 - RNA, 22 nt, Human
ggcagcccuguggagaggccca

SEQ ID NO: 723134 - RNA, 22 nt, Human
ugaauaauccacagucauucau

SEQ ID NO: 723135 - RNA, 22 nt, Human
auauuuguauuucgugugugua

SEQ ID NO: 723136 - RNA, 22 nt, Human
cuaucauuuuacaugguuggug

SEQ ID NO: 723137 - RNA, 22 nt, Human
gauacuuuguggaauccuggau

SEQ ID NO: 723138 - RNA, 22 nt, Human
augaccaguuuccccacugucc

SEQ ID NO: 723139 - RNA, 22 nt, Human
aagcauauauuuuauauguugu

SEQ ID NO: 723140 - RNA, 22 nt, Human
caagggggcaggaucacacuug

SEQ ID NO: 723141 - RNA, 22 nt, Human
aggggcucuaaagaucauggaa

SEQ ID NO: 723142 - RNA, 22 nt, Human
uucagggcugacaagccuauug

SEQ ID NO: 723143 - RNA, 22 nt, Human
uuuccacaauuugagcagcaga

SEQ ID NO: 723144 - RNA, 22 nt, Human
uuuuaugagugucccucugugg

SEQ ID NO: 723145 - RNA, 22 nt, Human
aaaucugguucaguaaguccuc

SEQ ID NO: 723146 - RNA, 22 nt, Human
agggcugcugcuccgggcccag

SEQ ID NO: 723147 - RNA, 22 nt, Human
uauuucuucgggauucaagcua

SEQ ID NO: 723148 - RNA, 22 nt, Human
gucucagagagcuacucucuua

SEQ ID NO: 723149 - RNA, 22 nt, Human
ugucuucacaugauaagccauu

SEQ ID NO: 723150 - RNA, 22 nt, Human
caacagagcaguugaucaggaa

SEQ ID NO: 723151 - RNA, 22 nt, Human
gccucuggcuucugcaucagug

SEQ ID NO: 723152 - RNA, 22 nt, Human
ugaaacuuauaagaauaugaau

SEQ ID NO: 723153 - RNA, 22 nt, Human
cuuuaacaguuccauucaauuu

SEQ ID NO: 723154 - RNA, 22 nt, Human
cauaugaaguucaacagagaug

SEQ ID NO: 723155 - RNA, 22 nt, Human
cuggcccuauuccaggccuucc

SEQ ID NO: 723156 - RNA, 22 nt, Human
agccaggucagcucacccugcu

SEQ ID NO: 723157 - RNA, 22 nt, Human
agcuuuuauuggcugucauuug

SEQ ID NO: 723158 - RNA, 22 nt, Human
uauacacauccuccaaagauag

SEQ ID NO: 723159 - RNA, 16 nt, Human
aucuaagaauguagag

SEQ ID NO: 723160 - RNA, 22 nt, Human
uuuaucuguagagcuucaccua

SEQ ID NO: 723161 - RNA, 22 nt, Human
uaccagccuuuuaacaugggcc

SEQ ID NO: 723162 - RNA, 22 nt, Human
agacuacauaugccacaugaag

SEQ ID NO: 723163 - RNA, 22 nt, Human
ccauggcuuuugagucucaaga

SEQ ID NO: 723164 - RNA, 23 nt, Human
cucuggagauccucugccugggu

SEQ ID NO: 723165 - RNA, 22 nt, Human
augggggccugaacaggcaaaa

SEQ ID NO: 723166 - RNA, 22 nt, Human
uuugcaaauucuugucuagccu

SEQ ID NO: 723167 - RNA, 22 nt, Human
aaaugacaauaaaaguccaugc

SEQ ID NO: 723168 - RNA, 22 nt, Human
ggucucagcaguugcuuugacu

SEQ ID NO: 723169 - RNA, 22 nt, Human
acagaaagaugauuugaaaugg

SEQ ID NO: 723170 - RNA, 19 nt, Human
uugcauuguaguuggacug

SEQ ID NO: 723171 - RNA, 22 nt, Human
gugcaauaaauaaauagauugu

SEQ ID NO: 723172 - RNA, 22 nt, Human
aagggggcggcagccaguggaa

SEQ ID NO: 723173 - RNA, 20 nt, Human
uacuucugaggcacucugaa

SEQ ID NO: 723174 - RNA, 19 nt, Human
uagaggagaagggaagugg

SEQ ID NO: 723175 - RNA, 22 nt, Human
uaagauaauccauuauaauguu

SEQ ID NO: 723176 - RNA, 22 nt, Human
gcccagaguucaaggcugcagu

SEQ ID NO: 723177 - RNA, 22 nt, Human
uccuugaagaaugauucuugga

SEQ ID NO: 723178 - RNA, 22 nt, Human
uguuuacaaggaguuuauauug

SEQ ID NO: 723179 - RNA, 21 nt, Human
gggugggaggacacagcaggc

SEQ ID NO: 723180 - RNA, 22 nt, Human
caggaacagcugaccugacaau

SEQ ID NO: 723181 - RNA, 22 nt, Human
cugccaggcagcagagggagaa

SEQ ID NO: 723182 - RNA, 22 nt, Human
gccuggcagggcccggacggca

SEQ ID NO: 723183 - RNA, 22 nt, Human
gagggugggccagauaugaggg

SEQ ID NO: 723184 - RNA, 22 nt, Human
ugcugcuagcuguauugcaaga

SEQ ID NO: 723185 - RNA, 22 nt, Human
uaaaguguggacaguaucuaua

SEQ ID NO: 723186 - RNA, 22 nt, Human
auaauaaugaaagccacugugu

SEQ ID NO: 723187 - RNA, 22 nt, Human
aaaauagauaaugccaggguca

SEQ ID NO: 723188 - RNA, 22 nt, Human
uaaaucacccaucuccuaaucu

SEQ ID NO: 723189 - RNA, 22 nt, Human
uuucuuuccauacauauugcua

SEQ ID NO: 723190 - RNA, 17 nt, Human
uaaguuauagcagaaga

SEQ ID NO: 723191 - RNA, 22 nt, Human
acuauacaccaaaauauuaagg

SEQ ID NO: 723192 - RNA, 22 nt, Human
gccuggagacaaggacaaaggg

SEQ ID NO: 723193 - RNA, 22 nt, Human
ccuguuuacaucaucaaggacu

SEQ ID NO: 723194 - RNA, 22 nt, Human
cuggcagcgcagcaugaagucg

SEQ ID NO: 723195 - RNA, 22 nt, Human
uuucugaggaauuaauacagaa

SEQ ID NO: 723196 - RNA, 22 nt, Human
caguaugauugccaguucuauc

SEQ ID NO: 723197 - RNA, 22 nt, Human
aaauugcuauaugugaauguga

SEQ ID NO: 723198 - RNA, 22 nt, Human
ucuacuuuauaaguauauaagu

SEQ ID NO: 723199 - RNA, 22 nt, Human
acucuucauacagucaucuaau

SEQ ID NO: 723200 - RNA, 22 nt, Human
acugucaaaugcaaugaacuca

SEQ ID NO: 723201 - RNA, 22 nt, Human
uucagcaagaccaccauguacc

SEQ ID NO: 723202 - RNA, 22 nt, Human
acauuucugcaucucagagcua

SEQ ID NO: 723203 - RNA, 17 nt, Human
cgggcauggagggcagg

SEQ ID NO: 723204 - RNA, 22 nt, Human
uaauugcuaauccugccuucua

SEQ ID NO: 723205 - RNA, 22 nt, Human
cagacaacuggacuaagaucac

SEQ ID NO: 723206 - RNA, 22 nt, Human
uuuaaggagcuacucaccguca

SEQ ID NO: 723207 - RNA, 22 nt, Human
aaauaugacuagaaugccaggu

SEQ ID NO: 723208 - RNA, 22 nt, Human
cuugcugucuugcauuuagagc

SEQ ID NO: 723209 - RNA, 22 nt, Human
auucaacuguaaacuuguucac

SEQ ID NO: 723210 - RNA, 22 nt, Human
ggcacaggaaucugugaagugc

SEQ ID NO: 723211 - RNA, 22 nt, Human
aucucuucccaacuccacauuc

SEQ ID NO: 723212 - RNA, 22 nt, Human
gagggggucuaugagguagagc

SEQ ID NO: 723213 - RNA, 22 nt, Human
uucugccuggcaggaggacugu

SEQ ID NO: 723214 - RNA, 22 nt, Human
agcugagacacuugagagacua

SEQ ID NO: 723215 - RNA, 22 nt, Human
cagcuguggggagcuugggcca

SEQ ID NO: 723216 - RNA, 22 nt, Human
ggagcccugcugacaugggugu

SEQ ID NO: 723217 - RNA, 22 nt, Human
cuucugggauuuuugaagacuc

SEQ ID NO: 723218 - RNA, 22 nt, Human
uugcuagcugguguaugcauug

SEQ ID NO: 723219 - RNA, 22 nt, Human
gugaggugacuagcaggugggg

SEQ ID NO: 723220 - RNA, 22 nt, Human
uuccacauuccuuacauucaua

SEQ ID NO: 723221 - RNA, 22 nt, Human
agagaaauuucccugccuucug

SEQ ID NO: 723222 - RNA, 22 nt, Human
aggcauggguagaagagaagcc

SEQ ID NO: 723223 - RNA, 22 nt, Human
cuucuaauucuuauguaagcuu

SEQ ID NO: 723224 - RNA, 19 nt, Human
cuucugugauacaucaguc

SEQ ID NO: 723225 - RNA, 22 nt, Human
cagcccacuucccagcaccuac

SEQ ID NO: 723226 - RNA, 22 nt, Human
ucaguaacccugcuguucagag

SEQ ID NO: 723227 - RNA, 22 nt, Human
uacaaaguaauguauaauaucg

SEQ ID NO: 723228 - RNA, 22 nt, Human
ugcguuuaguuucaagacacgu

SEQ ID NO: 723229 - RNA, 22 nt, Human
cagccaggcccccgagucguug

SEQ ID NO: 723230 - RNA, 22 nt, Human
uguauauguuuguauguacaca

SEQ ID NO: 723231 - RNA, 22 nt, Human
ggucggggauggccaggcuccc

SEQ ID NO: 723232 - RNA, 22 nt, Human
gacagggaaacauugaaguguc

SEQ ID NO: 723233 - RNA, 22 nt, Human
ucugggcugcugugcagugacc

SEQ ID NO: 723234 - RNA, 22 nt, Human
uggauaccugguuuuuauuuac

SEQ ID NO: 723235 - RNA, 22 nt, Human
ucuuuggcaucagggccagcua

SEQ ID NO: 723236 - RNA, 22 nt, Human
gcacagaaguaaaauacaaguc

SEQ ID NO: 723237 - RNA, 22 nt, Human
uccaggccucuagcccucucuu

SEQ ID NO: 723238 - RNA, 22 nt, Human
ccauugaauuagaaggggaagg

SEQ ID NO: 723239 - RNA, 21 nt, Human
uccucugcucucauaccacaa

SEQ ID NO: 723240 - RNA, 22 nt, Human
cauuuauuggcauguaguaggu

SEQ ID NO: 723241 - RNA, 22 nt, Human
gggcagccccagcgcguuggcu

SEQ ID NO: 723242 - RNA, 22 nt, Human
gaacuguauaggagcaguguuu

SEQ ID NO: 723243 - RNA, 22 nt, Human
uauuuugcguugagucagauuu

SEQ ID NO: 723244 - RNA, 22 nt, Human
cugguguggacuccgcgcggag

SEQ ID NO: 723245 - RNA, 22 nt, Human
cccaggaugaucgagaguggga

SEQ ID NO: 723246 - RNA, 22 nt, Human
gcagugccuugcuucucugucu

SEQ ID NO: 723247 - RNA, 22 nt, Human
gcuuuucuauaagaacuuucaa

SEQ ID NO: 723248 - RNA, 22 nt, Human
cuccuggcaggcugagugaaau

SEQ ID NO: 723249 - RNA, 22 nt, Human
aagauguuagauuauggggaca

SEQ ID NO: 723250 - RNA, 22 nt, Human
gccaggguugccaaugggggca

SEQ ID NO: 723251 - RNA, 22 nt, Human
cuggcuucccugucuuauggaa

SEQ ID NO: 723252 - RNA, 22 nt, Human
aaggccaggcagggagcuguga

SEQ ID NO: 723253 - RNA, 22 nt, Human
cggagccugcuuguugcagcug

SEQ ID NO: 723254 - RNA, 22 nt, Human
aggcaguggagaagguuuguga

SEQ ID NO: 723255 - RNA, 22 nt, Human
ugggcucauggcccagcacugg

SEQ ID NO: 723256 - RNA, 22 nt, Human
uugaaugaagggaugaccgaag

SEQ ID NO: 723257 - RNA, 22 nt, Human
aagcccagaugagaucccugga

SEQ ID NO: 723258 - RNA, 22 nt, Human
aucuaacugggcuauuuuauug

SEQ ID NO: 723259 - RNA, 23 nt, Human
auagacccaagaguaaaggcauc

SEQ ID NO: 723260 - RNA, 22 nt, Human
uggaaguugaaucucagucaug

SEQ ID NO: 723261 - RNA, 22 nt, Human
ucugccugaaccacucuuggag

SEQ ID NO: 723262 - RNA, 22 nt, Human
agccaagggucagcugcacaga

SEQ ID NO: 723263 - RNA, 22 nt, Human
ccugaggucacaacuugcuuau

SEQ ID NO: 723264 - RNA, 22 nt, Human
uugaagcacaaugucuuuuauc

SEQ ID NO: 723265 - RNA, 22 nt, Human
gcucccacugcagcccugagcc

SEQ ID NO: 723266 - RNA, 22 nt, Human
ucauugaagcccuugacaagcc

SEQ ID NO: 723267 - RNA, 22 nt, Human
gcucuggcuacuccacccuguu

SEQ ID NO: 723268 - RNA, 22 nt, Human
ucugugucguucugugcucugg

SEQ ID NO: 723269 - RNA, 22 nt, Human
ucucagcacguuguuuucauug

SEQ ID NO: 723270 - RNA, 22 nt, Human
gaaagcugugaaauagugcucu

SEQ ID NO: 723271 - RNA, 22 nt, Human
cuccuugguguaguacugagca

SEQ ID NO: 723272 - RNA, 22 nt, Human
aggucugggauugaagacauca

SEQ ID NO: 723273 - RNA, 22 nt, Human
gaucagugaacuauacugccuc

SEQ ID NO: 723274 - RNA, 23 nt, Human
agcaggauaauuuuauuaugccc

SEQ ID NO: 723275 - RNA, 22 nt, Human
aaauauuagggagaacagggac

SEQ ID NO: 723276 - RNA, 22 nt, Human
uuacacacagagcugggccugg

SEQ ID NO: 723277 - RNA, 22 nt, Human
ugagcccaggaguuggagaccg

SEQ ID NO: 723278 - RNA, 19 nt, Human
uugugagcugaagaacagg

SEQ ID NO: 723279 - RNA, 23 nt, Human
uucaugagauuaucugcaugugu

SEQ ID NO: 723280 - RNA, 23 nt, Human
agagccugaaagacuucuggcac

SEQ ID NO: 723281 - RNA, 22 nt, Human
agucaggacacagcaugaacau

SEQ ID NO: 723282 - RNA, 22 nt, Human
aacauuuauauggguucaugaa

SEQ ID NO: 723283 - RNA, 22 nt, Human
ugaggucauggcugauauuucc

SEQ ID NO: 723284 - RNA, 22 nt, Human
uggcuucuuuguagaaauugaa

SEQ ID NO: 723285 - RNA, 22 nt, Human
uuugagaagauguaauguuaag

SEQ ID NO: 723286 - RNA, 20 nt, Human
cagggacagcaguggguuuu

SEQ ID NO: 723287 - RNA, 22 nt, Human
uaggcacugggcuaggacaggu

SEQ ID NO: 723288 - RNA, 22 nt, Human
uuguacaaagauuucacagcuc

SEQ ID NO: 723289 - RNA, 22 nt, Human
ugaaauguucuggaguuucugu

SEQ ID NO: 723290 - RNA, 22 nt, Human
gcucugugaguauuggcccugg

SEQ ID NO: 723291 - RNA, 22 nt, Human
uacauacaguggaugcuuuagg

SEQ ID NO: 723292 - RNA, 21 nt, Human
ugacaguguggcauggaaggu

SEQ ID NO: 723293 - RNA, 22 nt, Human
cuccccauugugaccucaucca

SEQ ID NO: 723294 - RNA, 22 nt, Human
auuuucagcccccacucguggc

SEQ ID NO: 723295 - RNA, 22 nt, Human
ucuuuguuugccuuuaucaaga

SEQ ID NO: 723296 - RNA, 22 nt, Human
acuggcccgggagcagaggccu

SEQ ID NO: 723297 - RNA, 22 nt, Human
cuggccuguccugacccagccu

SEQ ID NO: 723298 - RNA, 22 nt, Human
ucuagguucaugggauucagug

SEQ ID NO: 723299 - RNA, 22 nt, Human
cccaggagagagacuugaaucu

SEQ ID NO: 723300 - RNA, 22 nt, Human
augauucuggugagaaugagga

SEQ ID NO: 723301 - RNA, 22 nt, Human
ccugggcugcaugauggcauuu

SEQ ID NO: 723302 - RNA, 22 nt, Human
guguuuuaucagacaaaguaua

SEQ ID NO: 723303 - RNA, 22 nt, Human
caaagaaugagugaguacauaa

SEQ ID NO: 723304 - RNA, 22 nt, Human
cagaugaaguaggugacgagca

SEQ ID NO: 723305 - RNA, 22 nt, Human
ccugccagugaagcugacgggc

SEQ ID NO: 723306 - RNA, 22 nt, Human
acucugcuguuuacucucuaua

SEQ ID NO: 723307 - RNA, 23 nt, Human
gaauucuuaaggucacuaaaguc

SEQ ID NO: 723308 - RNA, 22 nt, Human
gaaucuuuugucucgugaauaa

SEQ ID NO: 723309 - RNA, 22 nt, Human
ucucaggaauagaguggcagca

SEQ ID NO: 723310 - RNA, 22 nt, Human
ucaggcugaaucauccuagcuu

SEQ ID NO: 723311 - RNA, 22 nt, Human
gcucuggcuaguuaccucuuac

SEQ ID NO: 723312 - RNA, 22 nt, Human
ucaucugaacaugcagccugug

SEQ ID NO: 723313 - RNA, 22 nt, Human
agcugaggcucugagagggaag

SEQ ID NO: 723314 - RNA, 22 nt, Human
uucuaccagaccccagacuugu

SEQ ID NO: 723315 - RNA, 21 nt, Human
auuuuguacauagaauuuguc

SEQ ID NO: 723316 - RNA, 22 nt, Human
auguggcccagcggucaggcug

SEQ ID NO: 723317 - RNA, 22 nt, Human
guggcagggcaaugcucccucu

SEQ ID NO: 723318 - RNA, 22 nt, Human
aaaggcacaaauucagcauuuu

SEQ ID NO: 723319 - RNA, 20 nt, Human
aaguugcagagaguugucuu

SEQ ID NO: 723320 - RNA, 22 nt, Human
augcauugucaggcaauuucau

SEQ ID NO: 723321 - RNA, 22 nt, Human
aacauuucagcaccugauuccu

SEQ ID NO: 723322 - RNA, 22 nt, Human
gucugcccggccuuccuccacc

SEQ ID NO: 723323 - RNA, 22 nt, Human
auuacaguggguaaacagaauu

SEQ ID NO: 723324 - RNA, 21 nt, Human
agcucuggagcagcaaucaag

SEQ ID NO: 723325 - RNA, 22 nt, Human
ggcacagccacuuuggagaacu

SEQ ID NO: 723326 - RNA, 22 nt, Human
uaugugcaaaaugcuagacuag

SEQ ID NO: 723327 - RNA, 22 nt, Human
aggacaggauuccuugccuugc

SEQ ID NO: 723328 - RNA, 22 nt, Human
gccacaggcacuuaagggcugg

SEQ ID NO: 723329 - RNA, 22 nt, Human
ccaggaagccucagaugcugag

SEQ ID NO: 723330 - RNA, 22 nt, Human
gaggagcugagccacguccugg

SEQ ID NO: 723331 - RNA, 22 nt, Human
aggcucaguauagcuggcaagu

SEQ ID NO: 723332 - RNA, 22 nt, Human
guggccagggcccacaggauga

SEQ ID NO: 723333 - RNA, 22 nt, Human
cuucacagaugcugagagggcu

SEQ ID NO: 723334 - RNA, 22 nt, Human
cacauuuaggagguggggaagc

SEQ ID NO: 723335 - RNA, 22 nt, Human
aggaaacaguugguaaugcaua

SEQ ID NO: 723336 - RNA, 22 nt, Human
aguguguacauuuggugcaguu

SEQ ID NO: 723337 - RNA, 19 nt, Human
uggcuuccaucucucucau

SEQ ID NO: 723338 - RNA, 22 nt, Human
cacccacugagcucauguccca

SEQ ID NO: 723339 - RNA, 22 nt, Human
agagaacauauuuuguaugauu

SEQ ID NO: 723340 - RNA, 22 nt, Human
gcauugaaggacuuccauuaua

SEQ ID NO: 723341 - RNA, 22 nt, Human
ucauuuugggguuugucaucuu

SEQ ID NO: 723342 - RNA, 17 nt, Human
uucugcugucguccucu

SEQ ID NO: 723343 - RNA, 22 nt, Human
uacuguacauuccguuuguugc

SEQ ID NO: 723344 - RNA, 22 nt, Human
ugggcagacauugaguuuguuc

SEQ ID NO: 723345 - RNA, 22 nt, Human
uagaggcugggaauuauuuuca

SEQ ID NO: 723346 - RNA, 22 nt, Human
aaaacagacagccaguguagag

SEQ ID NO: 723347 - RNA, 22 nt, Human
gaauguuuuuauaaguguuaca

SEQ ID NO: 723348 - RNA, 23 nt, Human
uauguauguauguuuguauggaa

SEQ ID NO: 723349 - RNA, 22 nt, Human
guggcagagccaaggcuggagc

SEQ ID NO: 723350 - RNA, 22 nt, Human
ucucaagaucucaagauggccc

SEQ ID NO: 723351 - RNA, 22 nt, Human
augcaguuuaaggcacaauuag

SEQ ID NO: 723352 - RNA, 22 nt, Human
ccugggucacucaggcaggcgg

SEQ ID NO: 723353 - RNA, 22 nt, Human
uagcacaagcaacuacugaagu

SEQ ID NO: 723354 - RNA, 22 nt, Human
gccugggagagggauagugcag

SEQ ID NO: 723355 - RNA, 22 nt, Human
aauguguuuaguuaaugaguug

SEQ ID NO: 723356 - RNA, 22 nt, Human
ucaggccuucagaccuggcccg

SEQ ID NO: 723357 - RNA, 22 nt, Human
cuauggugauagaaaucagaau

SEQ ID NO: 723358 - RNA, 22 nt, Human
ggucugaaaauggugaccacca

SEQ ID NO: 723359 - RNA, 22 nt, Human
uggggcuaaacacgccuggccu

SEQ ID NO: 723360 - RNA, 22 nt, Human
gcccagccuccaagcuccaagg

SEQ ID NO: 723361 - RNA, 22 nt, Human
agaagccacugcucccagugag

SEQ ID NO: 723362 - RNA, 22 nt, Human
cccucugacugggccaguucug

SEQ ID NO: 723363 - RNA, 22 nt, Human
acagcucuuaggcagaaccaac

SEQ ID NO: 723364 - RNA, 23 nt, Human
gcucccugucccugcacuuaggc

SEQ ID NO: 723365 - RNA, 20 nt, Human
acacacagagacaugcgcau

SEQ ID NO: 723366 - RNA, 22 nt, Human
auacagaugagaucaggcauaa

SEQ ID NO: 723367 - RNA, 22 nt, Human
gccacuguugcuccucaggaaa

SEQ ID NO: 723368 - RNA, 22 nt, Human
ucagugcuuuugagaagcuccu

SEQ ID NO: 723369 - RNA, 22 nt, Human
uggagcaggccggaaguggcuu

SEQ ID NO: 723370 - RNA, 22 nt, Human
guccucuggugaaagcauuccc

SEQ ID NO: 723371 - RNA, 22 nt, Human
gaacauuuggcaugagaauuug

SEQ ID NO: 723372 - RNA, 22 nt, Human
cuugaauguccuguggcaaagu

SEQ ID NO: 723373 - RNA, 22 nt, Human
auuguaagagguuuggcugugu

SEQ ID NO: 723374 - RNA, 22 nt, Human
uucagcucagcacugacaagau

SEQ ID NO: 723375 - RNA, 22 nt, Human
uauugacagagggucagaagag

SEQ ID NO: 723376 - RNA, 22 nt, Human
agccaggccuuagggagaggca

SEQ ID NO: 723377 - RNA, 22 nt, Human
gugcugagcacagcugcccagg

SEQ ID NO: 723378 - RNA, 22 nt, Human
accuagcugaggagugugagug

SEQ ID NO: 723379 - RNA, 22 nt, Human
ugguuccucaagcgcuggcggc

SEQ ID NO: 723380 - RNA, 22 nt, Human
gaaguggaauuacugggucaua

SEQ ID NO: 723381 - RNA, 22 nt, Human
aggagacagaauuuaaauuugg

SEQ ID NO: 723382 - RNA, 22 nt, Human
guauauaagguaaagcgauugu

SEQ ID NO: 723383 - RNA, 22 nt, Human
aagagccagcuagugaagaggc

SEQ ID NO: 723384 - RNA, 22 nt, Human
uacauacagccaaguaugaagu

SEQ ID NO: 723385 - RNA, 22 nt, Human
augugucuagauugcuguaccg

SEQ ID NO: 723386 - RNA, 23 nt, Human
gguuuucauggcauuccuugccu

SEQ ID NO: 723387 - RNA, 20 nt, Human
ugugggccuucggcgugcuc

SEQ ID NO: 723388 - RNA, 22 nt, Human
cugucuccuccacugcauggga

SEQ ID NO: 723389 - RNA, 22 nt, Human
cuucagaagaaaagcagugugu

SEQ ID NO: 723390 - RNA, 22 nt, Human
ugccagggagcccugcugacca

SEQ ID NO: 723391 - RNA, 22 nt, Human
cacauuauucuaaagagguacu

SEQ ID NO: 723392 - RNA, 22 nt, Human
ccagguguggggaggacucaca

SEQ ID NO: 723393 - RNA, 21 nt, Human
auucagaaagggaauaaacuc

SEQ ID NO: 723394 - RNA, 22 nt, Human
agaggccagguccagaguuugu

SEQ ID NO: 723395 - RNA, 22 nt, Human
uccggacucaccugacaauggc

SEQ ID NO: 723396 - RNA, 22 nt, Human
aucagcaagacuaggggaauac

SEQ ID NO: 723397 - RNA, 22 nt, Human
uggaggaaguugcuggaaguca

SEQ ID NO: 723398 - RNA, 22 nt, Human
gugugcugagugacugucauca

SEQ ID NO: 723399 - RNA, 22 nt, Human
auauguauuuuaacguguaagg

SEQ ID NO: 723400 - RNA, 22 nt, Human
ggcuucucucccccagcuccac

SEQ ID NO: 723401 - RNA, 22 nt, Human
gcuuggaaguaggauugggaga

SEQ ID NO: 723402 - RNA, 22 nt, Human
acugaggauggauaggucauau

SEQ ID NO: 723403 - RNA, 22 nt, Human
ggguguagaaagaacccucugg

SEQ ID NO: 723404 - RNA, 22 nt, Human
aaguuguagucagaugucaguu

SEQ ID NO: 723405 - RNA, 22 nt, Human
acuccagggcuccaccccagau

SEQ ID NO: 723406 - RNA, 22 nt, Human
uauucacauuaauaagucuuca

SEQ ID NO: 723407 - RNA, 18 nt, Human
gcagcuuuugauucaccc

SEQ ID NO: 723408 - RNA, 22 nt, Human
uccucuugggaauaccuuucua

SEQ ID NO: 723409 - RNA, 22 nt, Human
ugugaagguaaggaggggcaag

SEQ ID NO: 723410 - RNA, 22 nt, Human
ugcagagauugaacaagaagga

SEQ ID NO: 723411 - RNA, 22 nt, Human
cucuggaggcagcaccagccag

SEQ ID NO: 723412 - RNA, 22 nt, Human
cacaggaaucgucacuuagcgc

SEQ ID NO: 723413 - RNA, 19 nt, Human
ucacuucuguuagcaugga

SEQ ID NO: 723414 - RNA, 22 nt, Human
gugggcagccccuucaaggcca

SEQ ID NO: 723415 - RNA, 22 nt, Human
uagacaggguggcuuagaaaca

SEQ ID NO: 723416 - RNA, 22 nt, Human
uuuccuuaaaucuguuucuagu

SEQ ID NO: 723417 - RNA, 20 nt, Human
uuuaccaacucaccaguauc

SEQ ID NO: 723418 - RNA, 22 nt, Human
ucaccucaccacccuuaugguu

SEQ ID NO: 723419 - RNA, 22 nt, Human
uuggaaggcccugccuagcagg

SEQ ID NO: 723420 - RNA, 22 nt, Human
agcaacagguuuauuaucuuau

SEQ ID NO: 723421 - RNA, 22 nt, Human
uuguuuaaugccucauacaucu

SEQ ID NO: 723422 - RNA, 22 nt, Human
uucuacagaauaaauguuuaca

SEQ ID NO: 723423 - RNA, 22 nt, Human
gagcugcuucugugugccgggu

SEQ ID NO: 723424 - RNA, 22 nt, Human
uuauauccaaaggcaaggagga

SEQ ID NO: 723425 - RNA, 22 nt, Human
uuucagaugcaauuaauuuuca

SEQ ID NO: 723426 - RNA, 22 nt, Human
agcuggaacuggguuuguugga

SEQ ID NO: 723427 - RNA, 22 nt, Human
ucugggaaggagccugagaauu

SEQ ID NO: 723428 - RNA, 22 nt, Human
ucccuggcagcuaagggugguc

SEQ ID NO: 723429 - RNA, 22 nt, Human
uagggagaggaagcaggccgcu

SEQ ID NO: 723430 - RNA, 22 nt, Human
cuggcagucugccucuucacug

SEQ ID NO: 723431 - RNA, 22 nt, Human
aaaaacuguaauuacuuuugca

SEQ ID NO: 723432 - RNA, 19 nt, Human
guugaaaguaggugagggu

SEQ ID NO: 723433 - RNA, 22 nt, Human
gaggcuaaggugccagacgaau

SEQ ID NO: 723434 - RNA, 21 nt, Human
agauccagugccauaaggccc

SEQ ID NO: 723435 - RNA, 22 nt, Human
agagcagcacguuguccccaca

SEQ ID NO: 723436 - RNA, 22 nt, Human
uggcuggaagucagaaauggga

SEQ ID NO: 723437 - RNA, 22 nt, Human
uucuaguuuucaguccaccagg

SEQ ID NO: 723438 - RNA, 22 nt, Human
cccugacccuaucagagggcca

SEQ ID NO: 723439 - RNA, 21 nt, Human
auagaacaccaggcauauaua

SEQ ID NO: 723440 - RNA, 22 nt, Human
aaauaagaaauucuucuuugca

SEQ ID NO: 723441 - RNA, 22 nt, Human
acccucccauuuccauguagca

SEQ ID NO: 723442 - RNA, 22 nt, Human
ucuguauugauucuguuaggca

SEQ ID NO: 723443 - RNA, 22 nt, Human
uaguuaggaaaguccagggagc

SEQ ID NO: 723444 - RNA, 19 nt, Human
gacauuccugacacuggcu

SEQ ID NO: 723445 - RNA, 22 nt, Human
caugcagucaauaaacaugugu

SEQ ID NO: 723446 - RNA, 22 nt, Human
aggcacagagaaguaaaguauc

SEQ ID NO: 723447 - RNA, 22 nt, Human
ucaaaauucuagggagaauggu

SEQ ID NO: 723448 - RNA, 22 nt, Human
uacaugaaccuuuaugugugau

SEQ ID NO: 723449 - RNA, 22 nt, Human
ggacacagguaaauaccacuga

SEQ ID NO: 723450 - RNA, 22 nt, Human
uauucaggucgagcuaacugcu

SEQ ID NO: 723451 - RNA, 22 nt, Human
aacagcaguggcaggagaaggc

SEQ ID NO: 723452 - RNA, 22 nt, Human
caaggccauaagagauacaaaa

SEQ ID NO: 723453 - RNA, 19 nt, Human
caugugcaugagcacagga

SEQ ID NO: 723454 - RNA, 22 nt, Human
uauaaguguaguuucaaauguu

SEQ ID NO: 723455 - RNA, 22 nt, Human
gcccagggucuacaaaaauauu

SEQ ID NO: 723456 - RNA, 22 nt, Human
aacaaugugauugaagcuagaa

SEQ ID NO: 723457 - RNA, 22 nt, Human
ggccuguccagccugccuggcu

SEQ ID NO: 723458 - RNA, 22 nt, Human
caauuaaagaagaccugccuca

SEQ ID NO: 723459 - RNA, 22 nt, Human
acucagcuaaacucagucuaug

SEQ ID NO: 723460 - RNA, 22 nt, Human
agccauccucccaccucagccu

SEQ ID NO: 723461 - RNA, 22 nt, Human
ugagaaugaggggguagaaggu

SEQ ID NO: 723462 - RNA, 22 nt, Human
caaaaagcuuagguaacaagcc

SEQ ID NO: 723463 - RNA, 22 nt, Human
uucaauucaauucuaaauauau

SEQ ID NO: 723464 - RNA, 22 nt, Human
caggaaaugaacaggaaugaac

SEQ ID NO: 723465 - RNA, 22 nt, Human
ucaugagucugcaaauuaugga

SEQ ID NO: 723466 - RNA, 22 nt, Human
gagaaaauagcauguguaguau

SEQ ID NO: 723467 - RNA, 22 nt, Human
cucagcccagcucaggucuuuc

SEQ ID NO: 723468 - RNA, 23 nt, Human
acuagaaaaugacuuucucccug

SEQ ID NO: 723469 - RNA, 22 nt, Human
acacagaggaaagugugaaggg

SEQ ID NO: 723470 - RNA, 21 nt, Human
uuacagcaauguuagcaggaa

SEQ ID NO: 723471 - RNA, 22 nt, Human
guguccuuauuucugucucuca

SEQ ID NO: 723472 - RNA, 22 nt, Human
ccagcagcccucuuccaagacu

SEQ ID NO: 723473 - RNA, 22 nt, Human
gguguccucaugauuuucuaga

SEQ ID NO: 723474 - RNA, 22 nt, Human
gugauaaaauagaaacaguggu

SEQ ID NO: 723475 - RNA, 22 nt, Human
gucucagauaacauguauucua

SEQ ID NO: 723476 - RNA, 22 nt, Human
uuccuuccgggcaccaggcacu

SEQ ID NO: 723477 - RNA, 20 nt, Human
cagcccugugaccuggcccu

SEQ ID NO: 723478 - RNA, 22 nt, Human
ggcaccagcaggcaccgaugcc

SEQ ID NO: 723479 - RNA, 22 nt, Human
uggcaacauggacaggucugcc

SEQ ID NO: 723480 - RNA, 22 nt, Human
acuguucauuuguccuguaucu

SEQ ID NO: 723481 - RNA, 22 nt, Human
aggacacagcugcucugcagag

SEQ ID NO: 723482 - RNA, 22 nt, Human
guuacaguuugggcuugauuca

SEQ ID NO: 723483 - RNA, 22 nt, Human
gcuguacaaggccucugccauc

SEQ ID NO: 723484 - RNA, 22 nt, Human
ucugcacaaaacugucgcagaa

SEQ ID NO: 723485 - RNA, 22 nt, Human
ccagccaguauauuccaaagcc

SEQ ID NO: 723486 - RNA, 22 nt, Human
gggugggauggcaggagccgcu

SEQ ID NO: 723487 - RNA, 22 nt, Human
uuacuugauguaugaugaguag

SEQ ID NO: 723488 - RNA, 22 nt, Human
uguguucugaaggagaagagug

SEQ ID NO: 723489 - RNA, 22 nt, Human
agggucugacaaugugacuuag

SEQ ID NO: 723490 - RNA, 22 nt, Human
ggacagcucugccaggagcuca

SEQ ID NO: 723491 - RNA, 22 nt, Human
acaacauuuaaggaggcacuga

SEQ ID NO: 723492 - RNA, 22 nt, Human
uccuggguagagaccugaugaa

SEQ ID NO: 723493 - RNA, 22 nt, Human
gaugggcagcacagcuggccaa

SEQ ID NO: 723494 - RNA, 21 nt, Human
ugaguuucagaggggaaggaa

SEQ ID NO: 723495 - RNA, 22 nt, Human
ucccaauuaacagguaucaggc

SEQ ID NO: 723496 - RNA, 22 nt, Human
cucauugauucagugcugcucu

SEQ ID NO: 723497 - RNA, 22 nt, Human
agauggcugauggcaggagcca

SEQ ID NO: 723498 - RNA, 22 nt, Human
gacauugacaguccuccuuaua

SEQ ID NO: 723499 - RNA, 21 nt, Human
uucucuggucaagcacacaua

SEQ ID NO: 723500 - RNA, 22 nt, Human
uguaggccuauguccagcaauu

SEQ ID NO: 723501 - RNA, 22 nt, Human
uggcugaaggaagauucuucua

SEQ ID NO: 723502 - RNA, 22 nt, Human
uggaauaacucaccaaggucau

SEQ ID NO: 723503 - RNA, 21 nt, Human
agaggcgggguuuuggaggcc

SEQ ID NO: 723504 - RNA, 22 nt, Human
ugacugugccgugccccuagga

SEQ ID NO: 723505 - RNA, 16 nt, Human
ggaggaaggcauagug

SEQ ID NO: 723506 - RNA, 22 nt, Human
ccuugcugcgugcuagcacaga

SEQ ID NO: 723507 - RNA, 22 nt, Human
aggcaaaauuacaaaguuauua

SEQ ID NO: 723508 - RNA, 22 nt, Human
aguuauauaacuaucuagaugc

SEQ ID NO: 723509 - RNA, 22 nt, Human
cagcugcacugaagcagguuug

SEQ ID NO: 723510 - RNA, 20 nt, Human
agggaacaauggacgcuguc

SEQ ID NO: 723511 - RNA, 22 nt, Human
cagagggcucaguccugcugga

SEQ ID NO: 723512 - RNA, 22 nt, Human
cugccagguuggcgcucgcucu

SEQ ID NO: 723513 - RNA, 22 nt, Human
auauaugcgcaggcacccagcu

SEQ ID NO: 723514 - RNA, 22 nt, Human
uagcaauguguguguauaaauu

SEQ ID NO: 723515 - RNA, 22 nt, Human
uuuuauauugagugagaguucc

SEQ ID NO: 723516 - RNA, 18 nt, Human
ccaaggccccugcugggg

SEQ ID NO: 723517 - RNA, 22 nt, Human
gucuuaaaaucagaggauauag

SEQ ID NO: 723518 - RNA, 22 nt, Human
aaggggugcuguuggaaaccca

SEQ ID NO: 723519 - RNA, 22 nt, Human
ucuggggaccauggcaucuaaa

SEQ ID NO: 723520 - RNA, 22 nt, Human
auccaguuuaugucauauucuu

SEQ ID NO: 723521 - RNA, 22 nt, Human
uuaguugaucauucaacauggg

SEQ ID NO: 723522 - RNA, 22 nt, Human
ugagcagagcaggcugcgcccu

SEQ ID NO: 723523 - RNA, 22 nt, Human
cagcuccccucuguggggcagu

SEQ ID NO: 723524 - RNA, 22 nt, Human
acuuucuucuuaugcauuaagg

SEQ ID NO: 723525 - RNA, 22 nt, Human
caguucucuugaucgucucuug

SEQ ID NO: 723526 - RNA, 22 nt, Human
acaucaguaauuaagucucaag

SEQ ID NO: 723527 - RNA, 22 nt, Human
cugcagagcaaguaacauccuc

SEQ ID NO: 723528 - RNA, 22 nt, Human
gcccugaacgaggggucuggag

SEQ ID NO: 723529 - RNA, 22 nt, Human
ucaccaggauuccuaucaguag

SEQ ID NO: 723530 - RNA, 22 nt, Human
uccagaccaugugagaggcgca

SEQ ID NO: 723531 - RNA, 22 nt, Human
ggugggcacccgagacuggauc

SEQ ID NO: 723532 - RNA, 22 nt, Human
gagguucaggaaaugggcaaag

SEQ ID NO: 723533 - RNA, 22 nt, Human
uccuccagcuucucuuuugggg

SEQ ID NO: 723534 - RNA, 22 nt, Human
caaacauugcuaccagagguuu

SEQ ID NO: 723535 - RNA, 22 nt, Human
uccagccacucagcagggauug

SEQ ID NO: 723536 - RNA, 22 nt, Human
acaugauuggacuccuuccccu

SEQ ID NO: 723537 - RNA, 22 nt, Human
cccaggcacucuuggucauuuu

SEQ ID NO: 723538 - RNA, 22 nt, Human
gugcucuggcuggucucccggu

SEQ ID NO: 723539 - RNA, 22 nt, Human
caggcagauuugcugcccucca

SEQ ID NO: 723540 - RNA, 22 nt, Human
aaggagaaaugguagaugugca

SEQ ID NO: 723541 - RNA, 22 nt, Human
aaauuggauuuuaaacuguugg

SEQ ID NO: 723542 - RNA, 22 nt, Human
uggaauguuuccccagccugca

SEQ ID NO: 723543 - RNA, 22 nt, Human
cuguggccagauggugccaguu

SEQ ID NO: 723544 - RNA, 22 nt, Human
cuguccucuguccucagcagga

SEQ ID NO: 723545 - RNA, 22 nt, Human
ugccacugggcaugcagauguc

SEQ ID NO: 723546 - RNA, 22 nt, Human
uccucagaugcucuuggacgcc

SEQ ID NO: 723547 - RNA, 22 nt, Human
agcucccaggcagucaugagga

SEQ ID NO: 723548 - RNA, 22 nt, Human
ccagguggacaaggcuuucaca

SEQ ID NO: 723549 - RNA, 19 nt, Human
agcagcagcuaccacuugu

SEQ ID NO: 723550 - RNA, 22 nt, Human
aaauugcuuauaaagaugaaug

SEQ ID NO: 723551 - RNA, 22 nt, Human
gacaggcuuagggagggugcuc

SEQ ID NO: 723552 - RNA, 22 nt, Human
agggcccuuacgcaggcccuuc

SEQ ID NO: 723553 - RNA, 22 nt, Human
cugucacuuaaauucaggcuga

SEQ ID NO: 723554 - RNA, 22 nt, Human
uacaagucacuuccuuucuaaa

SEQ ID NO: 723555 - RNA, 22 nt, Human
aaaucgguugguucaagguaau

SEQ ID NO: 723556 - RNA, 22 nt, Human
cuguacagaguucugaguguac

SEQ ID NO: 723557 - RNA, 16 nt, Human
acccuggguaguccug

SEQ ID NO: 723558 - RNA, 22 nt, Human
agguuagugcugaaaugacaug

SEQ ID NO: 723559 - RNA, 22 nt, Human
ccaauacacuuuauagaagaaa

SEQ ID NO: 723560 - RNA, 22 nt, Human
ggcacugcccacccucacaggg

SEQ ID NO: 723561 - RNA, 22 nt, Human
uugacaaaguuuaguaauaauc

SEQ ID NO: 723562 - RNA, 22 nt, Human
aucuugggaauuuuccaggagu

SEQ ID NO: 723563 - RNA, 19 nt, Human
ucucuggggacacuuucac

SEQ ID NO: 723564 - RNA, 22 nt, Human
ucacauuuguuccucugcacuu

SEQ ID NO: 723565 - RNA, 22 nt, Human
gucugcugcagagcauggcuuu

SEQ ID NO: 723566 - RNA, 22 nt, Human
ccaagcaugggguucaguagga

SEQ ID NO: 723567 - RNA, 22 nt, Human
agggcuccuaugccccauggac

SEQ ID NO: 723568 - RNA, 22 nt, Human
acaugauuucagggaauucuca

SEQ ID NO: 723569 - RNA, 22 nt, Human
ggcucugucaccuaugagcuga

SEQ ID NO: 723570 - RNA, 22 nt, Human
gccuggagcucuccacuugggg

SEQ ID NO: 723571 - RNA, 22 nt, Human
uucucccaucucagucuuacau

SEQ ID NO: 723572 - RNA, 18 nt, Human
cuggcuuucuuauccauc

SEQ ID NO: 723573 - RNA, 22 nt, Human
uucaugaagggugaauauaguc

SEQ ID NO: 723574 - RNA, 22 nt, Human
ucuuuauaaaagucauuauguc

SEQ ID NO: 723575 - RNA, 20 nt, Human
cacaacuguccacaugcucc

SEQ ID NO: 723576 - RNA, 22 nt, Human
gcuucuuuccuugggcuggaac

SEQ ID NO: 723577 - RNA, 22 nt, Human
gccaccaguagcuaacaacagu

SEQ ID NO: 723578 - RNA, 22 nt, Human
uccugcuuugugccucacacuu

SEQ ID NO: 723579 - RNA, 22 nt, Human
auguaucagaaauagcauuggc

SEQ ID NO: 723580 - RNA, 22 nt, Human
uugaggagcaggaugggaggcu

SEQ ID NO: 723581 - RNA, 22 nt, Human
ggcacagcacagagcacaugua

SEQ ID NO: 723582 - RNA, 22 nt, Human
agcaggcuuaugguugaaggga

SEQ ID NO: 723583 - RNA, 22 nt, Human
ccaggucuggcacuggccaguc

SEQ ID NO: 723584 - RNA, 22 nt, Human
uaguuuaggaucuuuuuugugc

SEQ ID NO: 723585 - RNA, 22 nt, Human
aggcagaaaauagucauccaaa

SEQ ID NO: 723586 - RNA, 22 nt, Human
cugaaaggaauaaggcucuuug

SEQ ID NO: 723587 - RNA, 22 nt, Human
auauucguggucaaguaaggcc

SEQ ID NO: 723588 - RNA, 22 nt, Human
uggcaggaaaaagggccagagg

SEQ ID NO: 723589 - RNA, 22 nt, Human
agcagaaauagaagucaaugau

SEQ ID NO: 723590 - RNA, 21 nt, Human
ugcucagucugucuccagcuu

SEQ ID NO: 723591 - RNA, 22 nt, Human
uuaaacauuuuugaugaucgau

SEQ ID NO: 723592 - RNA, 22 nt, Human
guuucuuuugugaucaccaacc

SEQ ID NO: 723593 - RNA, 23 nt, Human
agauccaugugggcuggaaacug

SEQ ID NO: 723594 - RNA, 19 nt, Human
cugcucagagcagcuccag

SEQ ID NO: 723595 - RNA, 22 nt, Human
acugggacuguaugugcuggac

SEQ ID NO: 723596 - RNA, 22 nt, Human
caauugcugauaugcagaagac

SEQ ID NO: 723597 - RNA, 22 nt, Human
aagcccuguccggggggaagaa

SEQ ID NO: 723598 - RNA, 22 nt, Human
cacugugcuccuuccuuagcac

SEQ ID NO: 723599 - RNA, 22 nt, Human
ugccaggccucaggagucucca

SEQ ID NO: 723600 - RNA, 22 nt, Human
uaauacuuuugccuuguauuca

SEQ ID NO: 723601 - RNA, 22 nt, Human
ucuggacuccaugcugccugga

SEQ ID NO: 723602 - RNA, 22 nt, Human
aaagauaauguuuccuuauucu

SEQ ID NO: 723603 - RNA, 22 nt, Human
ugauuuccacagucaggggugc

SEQ ID NO: 723604 - RNA, 22 nt, Human
uuaguuagagcccuauguuagg

SEQ ID NO: 723605 - RNA, 22 nt, Human
uuuuccuauaugcaaagaaugc

SEQ ID NO: 723606 - RNA, 22 nt, Human
uagucacaugaucacaggaucg

SEQ ID NO: 723607 - RNA, 21 nt, Human
ugcugccauagaccugaggga

SEQ ID NO: 723608 - RNA, 22 nt, Human
ccacagcaccugcagccaguug

SEQ ID NO: 723609 - RNA, 22 nt, Human
ucuguucuauuggucuaugugu

SEQ ID NO: 723610 - RNA, 22 nt, Human
ucuucaugaaugaaucuuugac

SEQ ID NO: 723611 - RNA, 22 nt, Human
uguacagaaauuccuacuacau

SEQ ID NO: 723612 - RNA, 22 nt, Human
acccagagcugggcuuggcaaa

SEQ ID NO: 723613 - RNA, 22 nt, Human
cagagcccagggccuacguccc

SEQ ID NO: 723614 - RNA, 22 nt, Human
agaacauuaaugcgagguauua

SEQ ID NO: 723615 - RNA, 22 nt, Human
uggcuuccacugugugcccccu

SEQ ID NO: 723616 - RNA, 22 nt, Human
caauguuuucaacugacaagua

SEQ ID NO: 723617 - RNA, 22 nt, Human
cagcuuugagaguugcauuuua

SEQ ID NO: 723618 - RNA, 21 nt, Human
gccuggcagguggaagggcuc

SEQ ID NO: 723619 - RNA, 22 nt, Human
cauuugugcuuuuauaaaauag

SEQ ID NO: 723620 - RNA, 22 nt, Human
cagugguuauacuuacuguuuc

SEQ ID NO: 723621 - RNA, 22 nt, Human
gaaguuauuuccugguguugga

SEQ ID NO: 723622 - RNA, 22 nt, Human
uuuguucauaauggcaaagaga

SEQ ID NO: 723623 - RNA, 22 nt, Human
ccuucugcuggucaucccagug

SEQ ID NO: 723624 - RNA, 22 nt, Human
gucugcccuuggccugggacuu

SEQ ID NO: 723625 - RNA, 23 nt, Human
uggagggcagaauaacagacuac

SEQ ID NO: 723626 - RNA, 22 nt, Human
gaaaucuuuucaucucauuuga

SEQ ID NO: 723627 - RNA, 22 nt, Human
agacaaauugggacauuguguu

SEQ ID NO: 723628 - RNA, 22 nt, Human
agugugaguuacaaagugugaa

SEQ ID NO: 723629 - RNA, 22 nt, Human
ggugaaguaauaccagguguac

SEQ ID NO: 723630 - RNA, 22 nt, Human
ccugggcucgcgcacuucaccc

SEQ ID NO: 723631 - RNA, 22 nt, Human
aaguguaaauucacagacuuca

SEQ ID NO: 723632 - RNA, 22 nt, Human
agaggcucuugcccuucccaca

SEQ ID NO: 723633 - RNA, 22 nt, Human
aauccaauccuacucagaaagu

SEQ ID NO: 723634 - RNA, 22 nt, Human
gugccuccuuaaauucugcacc

SEQ ID NO: 723635 - RNA, 22 nt, Human
ucagaagggaaacacaagugac

SEQ ID NO: 723636 - RNA, 22 nt, Human
accaggccuggcugggcagcca

SEQ ID NO: 723637 - RNA, 22 nt, Human
agacucaugacacuuccuauga

SEQ ID NO: 723638 - RNA, 22 nt, Human
aggcaagcccccagugaggcuc

SEQ ID NO: 723639 - RNA, 22 nt, Human
ugcauggagauauacuauuuga

SEQ ID NO: 723640 - RNA, 22 nt, Human
ggagucugacucugacccugga

SEQ ID NO: 723641 - RNA, 22 nt, Human
ucccagggcucuagagugcugg

SEQ ID NO: 723642 - RNA, 18 nt, Human
uggcaggaaaugcacuuu

SEQ ID NO: 723643 - RNA, 22 nt, Human
agauuacagaagaauaaguaga

SEQ ID NO: 723644 - RNA, 22 nt, Human
uuugaauagaggccccucagaa

SEQ ID NO: 723645 - RNA, 22 nt, Human
uuucagaguugucuucuugacc

SEQ ID NO: 723646 - RNA, 22 nt, Human
auguaacaaaugguauacaugu

SEQ ID NO: 723647 - RNA, 22 nt, Human
ugaggcagaaaauagcaguuca

SEQ ID NO: 723648 - RNA, 22 nt, Human
ccagccccgggaaccuggccgu

SEQ ID NO: 723649 - RNA, 22 nt, Human
ucugcagaaacugugacuaugu

SEQ ID NO: 723650 - RNA, 22 nt, Human
accaggcagcugggggugaugu

SEQ ID NO: 723651 - RNA, 22 nt, Human
gcaguggcccagcuugcaggcu

SEQ ID NO: 723652 - RNA, 22 nt, Human
ucacuacauuuuagacaguaaa

SEQ ID NO: 723653 - RNA, 22 nt, Human
acaugcagugaggaucuuagaa

SEQ ID NO: 723654 - RNA, 22 nt, Human
aggcuggucuguuggcauuuuu

SEQ ID NO: 723655 - RNA, 22 nt, Human
cagaggcuuugcccuggaaacc

SEQ ID NO: 723656 - RNA, 22 nt, Human
ggagggggaauucagccccagc

SEQ ID NO: 723657 - RNA, 22 nt, Human
cugcugacucuuccuggaguga

SEQ ID NO: 723658 - RNA, 22 nt, Human
aacacaguuuuccaaaauagag

SEQ ID NO: 723659 - RNA, 22 nt, Human
aucuauuuuaaauggcaguaaa

SEQ ID NO: 723660 - RNA, 22 nt, Human
aucaucuugcuuucuguuuacu

SEQ ID NO: 723661 - RNA, 22 nt, Human
aucacaggcuauguggguuuug

SEQ ID NO: 723662 - RNA, 22 nt, Human
uauauucuuucaccuucuuccu

SEQ ID NO: 723663 - RNA, 22 nt, Human
ugguggcuguaagggagagaag

SEQ ID NO: 723664 - RNA, 21 nt, Human
ugcagagauaucugaagcaga

SEQ ID NO: 723665 - RNA, 22 nt, Human
gaaauugucagugauaugauac

SEQ ID NO: 723666 - RNA, 22 nt, Human
gugucccaaucuacuuuucccu

SEQ ID NO: 723667 - RNA, 22 nt, Human
uggggaagggcacccuggagac

SEQ ID NO: 723668 - RNA, 22 nt, Human
auugucugaauccaaagcucug

SEQ ID NO: 723669 - RNA, 21 nt, Human
uggcugcaagcagcugccucc

SEQ ID NO: 723670 - RNA, 22 nt, Human
ggacauuucauaagaccauucu

SEQ ID NO: 723671 - RNA, 22 nt, Human
acauuucagcgugcaugacaug

SEQ ID NO: 723672 - RNA, 19 nt, Human
agccagaacuaguguuucu

SEQ ID NO: 723673 - RNA, 22 nt, Human
gcguccagggaaggcccagcug

SEQ ID NO: 723674 - RNA, 22 nt, Human
gcauggcagaacaccucgcccg

SEQ ID NO: 723675 - RNA, 22 nt, Human
aggccuuaccauagcuguagca

SEQ ID NO: 723676 - RNA, 22 nt, Human
gugcagcagggggaagacagug

SEQ ID NO: 723677 - RNA, 22 nt, Human
cagcaauggcaggcggagagug

SEQ ID NO: 723678 - RNA, 22 nt, Human
gcaggugggagccgcugccuga

SEQ ID NO: 723679 - RNA, 20 nt, Human
ucuuacaaucguuacaucca

SEQ ID NO: 723680 - RNA, 22 nt, Human
gggagcaguuaaaaugauuccu

SEQ ID NO: 723681 - RNA, 22 nt, Human
ccaggcucugccaggcccuuga

SEQ ID NO: 723682 - RNA, 22 nt, Human
ugaagagaagaaaauuaucuuu

SEQ ID NO: 723683 - RNA, 20 nt, Human
auccaugagagucuggauuc

SEQ ID NO: 723684 - RNA, 22 nt, Human
agacaaaggauuaaugaugaug

SEQ ID NO: 723685 - RNA, 22 nt, Human
gagccagguuugaaucucaguc

SEQ ID NO: 723686 - RNA, 22 nt, Human
ugaggucuuuuauaguguguca

SEQ ID NO: 723687 - RNA, 22 nt, Human
augauacaucuuguuuauuuca

SEQ ID NO: 723688 - RNA, 22 nt, Human
auuuccuugcaaguuucuguaa

SEQ ID NO: 723689 - RNA, 22 nt, Human
uaacacaugguuaguacacaau

SEQ ID NO: 723690 - RNA, 22 nt, Human
aucauucaucuuauugccaguc

SEQ ID NO: 723691 - RNA, 22 nt, Human
agggcugucagacugaggaggc

SEQ ID NO: 723692 - RNA, 22 nt, Human
gugugcagcagagacaggacuc

SEQ ID NO: 723693 - RNA, 22 nt, Human
caguuuaaguguguugaaggua

SEQ ID NO: 723694 - RNA, 22 nt, Human
uggaggacguguccaccaugaa

SEQ ID NO: 723695 - RNA, 19 nt, Human
agucaguucugaggaggaa

SEQ ID NO: 723696 - RNA, 22 nt, Human
ucucuaaaugauuguguacucc

SEQ ID NO: 723697 - RNA, 22 nt, Human
aggaguuauggcagaaucaaau

SEQ ID NO: 723698 - RNA, 20 nt, Human
aagcacauuucuacaauaau

SEQ ID NO: 723699 - RNA, 22 nt, Human
auguaagguucagaguauguga

SEQ ID NO: 723700 - RNA, 22 nt, Human
auaugugugccauuucagcagu

SEQ ID NO: 723701 - RNA, 22 nt, Human
gugugggaaggcuaggaugcug

SEQ ID NO: 723702 - RNA, 22 nt, Human
uuacaguauuggucacguuugu

SEQ ID NO: 723703 - RNA, 22 nt, Human
aagauguuaggguggaagggau

SEQ ID NO: 723704 - RNA, 22 nt, Human
cuggaguccugcauuugcucuu

SEQ ID NO: 723705 - RNA, 22 nt, Human
cugaaugaggaaaagagugagg

SEQ ID NO: 723706 - RNA, 22 nt, Human
cuuaagauuugcgauaccuaau

SEQ ID NO: 723707 - RNA, 22 nt, Human
gccuugaucugcuguguuugag

SEQ ID NO: 723708 - RNA, 22 nt, Human
ucauuucuguugugcaucacug

SEQ ID NO: 723709 - RNA, 22 nt, Human
cucuuuaguggugaugaugcua

SEQ ID NO: 723710 - RNA, 22 nt, Human
uuauuuguuuucugagaaguau

SEQ ID NO: 723711 - RNA, 22 nt, Human
gagauggcuugcucucacgugg

SEQ ID NO: 723712 - RNA, 22 nt, Human
aaaucaguuguuauauuaaaga

SEQ ID NO: 723713 - RNA, 22 nt, Human
aaaguuuucugccuucauuaga

SEQ ID NO: 723714 - RNA, 22 nt, Human
ggcagcaggguagccauuucuc

SEQ ID NO: 723715 - RNA, 22 nt, Human
cuuggccugcaggcagcagcgc

SEQ ID NO: 723716 - RNA, 22 nt, Human
ggcagccuugacuagugacuua

SEQ ID NO: 723717 - RNA, 22 nt, Human
aagcaccucuaugauugcuuuu

SEQ ID NO: 723718 - RNA, 22 nt, Human
gcauguguugguuuaugcaugu

SEQ ID NO: 723719 - RNA, 22 nt, Human
auggcagaccuccuggccacaa

SEQ ID NO: 723720 - RNA, 22 nt, Human
guccugguauaauuguuuaaaa

SEQ ID NO: 723721 - RNA, 22 nt, Human
ccuggggaaucuugcaggggaa

SEQ ID NO: 723722 - RNA, 22 nt, Human
acaguggcuuuugugucugcag

SEQ ID NO: 723723 - RNA, 22 nt, Human
aacauauuuggcugauauuccc

SEQ ID NO: 723724 - RNA, 22 nt, Human
uacaauagggcuuuuguuuaug

SEQ ID NO: 723725 - RNA, 22 nt, Human
uccuggagccaggacccuuccc

SEQ ID NO: 723726 - RNA, 22 nt, Human
uacacauacaccaaugugguca

SEQ ID NO: 723727 - RNA, 22 nt, Human
gucauugauuuucaguuugucc

SEQ ID NO: 723728 - RNA, 22 nt, Human
cugcaggaauucaaagugagcu

SEQ ID NO: 723729 - RNA, 22 nt, Human
gggggaggugaaugcaauaagg

SEQ ID NO: 723730 - RNA, 22 nt, Human
gcuggccugaccugaggcuggg

SEQ ID NO: 723731 - RNA, 22 nt, Human
augcagcagccccuugaggugc

SEQ ID NO: 723732 - RNA, 22 nt, Human
uaggaaauucucuugcuaaguu

SEQ ID NO: 723733 - RNA, 22 nt, Human
caugugugggacccuuagguug

SEQ ID NO: 723734 - RNA, 22 nt, Human
auggagguggaagaaugaguua

SEQ ID NO: 723735 - RNA, 18 nt, Human
ugaagacaugagguuagu

SEQ ID NO: 723736 - RNA, 22 nt, Human
ggcagccucagguuuucuuuga

SEQ ID NO: 723737 - RNA, 22 nt, Human
guucacaguguuuucuuugcau

SEQ ID NO: 723738 - RNA, 22 nt, Human
aaugaaaugaagauaugaucag

SEQ ID NO: 723739 - RNA, 22 nt, Human
cuggcccagagcucuggccuuu

SEQ ID NO: 723740 - RNA, 22 nt, Human
ccagcauccucagcucacuucu

SEQ ID NO: 723741 - RNA, 22 nt, Human
cuggccucagagggucauggug

SEQ ID NO: 723742 - RNA, 22 nt, Human
gaggaagcugcguggcauuuca

SEQ ID NO: 723743 - RNA, 22 nt, Human
acagaaagaagguguauuugag

SEQ ID NO: 723744 - RNA, 22 nt, Human
agugauuagaaaguacacuugg

SEQ ID NO: 723745 - RNA, 22 nt, Human
ggccccucuuguggcacauacg

SEQ ID NO: 723746 - RNA, 22 nt, Human
cuucaaagggucacuauuuauc

SEQ ID NO: 723747 - RNA, 22 nt, Human
uuacaguaccuguauggccacu

SEQ ID NO: 723748 - RNA, 22 nt, Human
auaauggccgggggcugaaugc

SEQ ID NO: 723749 - RNA, 22 nt, Human
uacacacugugauaaugaagca

SEQ ID NO: 723750 - RNA, 22 nt, Human
aaggcacuacgcugcuggggcg

SEQ ID NO: 723751 - RNA, 22 nt, Human
guaaaacugucuaaugguauau

SEQ ID NO: 723752 - RNA, 22 nt, Human
cggaucaugugaccuuugagug

SEQ ID NO: 723753 - RNA, 22 nt, Human
ugagcagagucgcuccagagug

SEQ ID NO: 723754 - RNA, 22 nt, Human
gugggcagauuaauuucucaau

SEQ ID NO: 723755 - RNA, 22 nt, Human
uccugcagccacugcaggcaga

SEQ ID NO: 723756 - RNA, 22 nt, Human
ugcaguuuuaucacauauauag

SEQ ID NO: 723757 - RNA, 22 nt, Human
caguguggugugcacagcuuag

SEQ ID NO: 723758 - RNA, 22 nt, Human
cuugcucacaguaccuggcuug

SEQ ID NO: 723759 - RNA, 22 nt, Human
caauuacauuuauugagcauuc

SEQ ID NO: 723760 - RNA, 22 nt, Human
uccagcagaaccagagaccugg

SEQ ID NO: 723761 - RNA, 22 nt, Human
ucauaagugguuuauaugcuug

SEQ ID NO: 723762 - RNA, 22 nt, Human
gccugagcuacuagggagucug

SEQ ID NO: 723763 - RNA, 22 nt, Human
aagauucugaaagggguggggc

SEQ ID NO: 723764 - RNA, 22 nt, Human
uuucucacccaagaguuauuuu

SEQ ID NO: 723765 - RNA, 22 nt, Human
cugcaaaaguaauugcagguuu

SEQ ID NO: 723766 - RNA, 19 nt, Human
uucuaaguuuugcuugcug

SEQ ID NO: 723767 - RNA, 22 nt, Human
acugagguuuacuugaaggaga

SEQ ID NO: 723768 - RNA, 22 nt, Human
caggacaaucucgucggguccu

SEQ ID NO: 723769 - RNA, 22 nt, Human
acaugaucuuauguagaagauc

SEQ ID NO: 723770 - RNA, 22 nt, Human
gacuuuaucuuguccuuccugc

SEQ ID NO: 723771 - RNA, 22 nt, Human
agcaucccaugacucuggagga

SEQ ID NO: 723772 - RNA, 22 nt, Human
cacagugaagcaugcagacauc

SEQ ID NO: 723773 - RNA, 23 nt, Human
uugacaguaggugguuuucauug

SEQ ID NO: 723774 - RNA, 22 nt, Human
ucugggcuggugcucaugaauu

SEQ ID NO: 723775 - RNA, 22 nt, Human
agugcagaggcugggaaaugcu

SEQ ID NO: 723776 - RNA, 22 nt, Human
aacuacaguauguccaaagaau

SEQ ID NO: 723777 - RNA, 22 nt, Human
agcaaagcuaccaauuauugag

SEQ ID NO: 723778 - RNA, 18 nt, Human
uaaauugcuucaccugag

SEQ ID NO: 723779 - RNA, 22 nt, Human
agcuuuauuugucauucacggc

SEQ ID NO: 723780 - RNA, 22 nt, Human
cuccauggggaaaugaaggugg

SEQ ID NO: 723781 - RNA, 22 nt, Human
uggaggccagagguacugggac

SEQ ID NO: 723782 - RNA, 22 nt, Human
ucauuauccuaguaucuugaau

SEQ ID NO: 723783 - RNA, 22 nt, Human
gagacugcauagauggccacaa

SEQ ID NO: 723784 - RNA, 22 nt, Human
ggcuacagcgggguggagacgg

SEQ ID NO: 723785 - RNA, 22 nt, Human
ugccaggcgauugcuaucagca

SEQ ID NO: 723786 - RNA, 22 nt, Human
gagugagggccaacauccagcu

SEQ ID NO: 723787 - RNA, 22 nt, Human
gcugcccuacccgaggcacucu

SEQ ID NO: 723788 - RNA, 22 nt, Human
ccuuuacaguaugguuguauca

SEQ ID NO: 723789 - RNA, 22 nt, Human
ugcugcauuugcaguccuuuaa

SEQ ID NO: 723790 - RNA, 22 nt, Human
ugucugaaaggcuuuuucucac

SEQ ID NO: 723791 - RNA, 22 nt, Human
uccaagaguaagaggacucuuu

SEQ ID NO: 723792 - RNA, 22 nt, Human
aagagguaaccauagcaaccac

SEQ ID NO: 723793 - RNA, 22 nt, Human
augacacccccacagcauuguu

SEQ ID NO: 723794 - RNA, 22 nt, Human
uacagagauuuauugcuaaggc

SEQ ID NO: 723795 - RNA, 22 nt, Human
uucuacauucauguauuaccuc

SEQ ID NO: 723796 - RNA, 22 nt, Human
uguuuagaggaacuggaaucag

SEQ ID NO: 723797 - RNA, 22 nt, Human
agcccugcaggaggugggagag

SEQ ID NO: 723798 - RNA, 22 nt, Human
ugaguccaucgcagggaagugg

SEQ ID NO: 723799 - RNA, 22 nt, Human
uauacuuuccugcaacuuugau

SEQ ID NO: 723800 - RNA, 22 nt, Human
gguugcaaacuccugggaucaa

SEQ ID NO: 723801 - RNA, 22 nt, Human
cugaaauuauuguuuaaucaaa

SEQ ID NO: 723802 - RNA, 22 nt, Human
gccaggcaggugucggagcccu

SEQ ID NO: 723803 - RNA, 22 nt, Human
ggucugaguggggccugagauu

SEQ ID NO: 723804 - RNA, 22 nt, Human
acaggacauggcuucugugacg

SEQ ID NO: 723805 - RNA, 22 nt, Human
ucugcagcuugcacaggcaggc

SEQ ID NO: 723806 - RNA, 22 nt, Human
agugcauucugucaucuugguu

SEQ ID NO: 723807 - RNA, 22 nt, Human
cccagcuugcaaauggguugcu

SEQ ID NO: 723808 - RNA, 22 nt, Human
aggugagguuugggagguguca

SEQ ID NO: 723809 - RNA, 22 nt, Human
auaagaggaauuacagaagagg

SEQ ID NO: 723810 - RNA, 22 nt, Human
cugugaggcggguggaguggag

SEQ ID NO: 723811 - RNA, 22 nt, Human
agugaaauccuggucaacaggu

SEQ ID NO: 723812 - RNA, 22 nt, Human
caugaaggaauuaagguaagga

SEQ ID NO: 723813 - RNA, 22 nt, Human
aaugaacaagaaagacuuugag

SEQ ID NO: 723814 - RNA, 22 nt, Human
ccucucucugcaucuggagggc

SEQ ID NO: 723815 - RNA, 22 nt, Human
uagcagcaaagcaggaucugcu

SEQ ID NO: 723816 - RNA, 22 nt, Human
uauacagauuaacagauuuaaa

SEQ ID NO: 723817 - RNA, 22 nt, Human
cugccuggcauggagaagagaa

SEQ ID NO: 723818 - RNA, 22 nt, Human
aauggcuuauguaaugcuguuu

SEQ ID NO: 723819 - RNA, 22 nt, Human
agugugcuguuuccagaagggc

SEQ ID NO: 723820 - RNA, 22 nt, Human
uauuucugaauccaaaagguca

SEQ ID NO: 723821 - RNA, 22 nt, Human
ugucuuuagaccucucuggccu

SEQ ID NO: 723822 - RNA, 22 nt, Human
cucagaaauuacaaaagggaca

SEQ ID NO: 723823 - RNA, 22 nt, Human
guguaacuuuuauucaugcucu

SEQ ID NO: 723824 - RNA, 22 nt, Human
cacaagacuuauuuguguagaa

SEQ ID NO: 723825 - RNA, 22 nt, Human
guucauaauuugaaggaauagg

SEQ ID NO: 723826 - RNA, 22 nt, Human
gcguguaugcaggucugugcag

SEQ ID NO: 723827 - RNA, 22 nt, Human
aaggcacuuuucuaaagaccuu

SEQ ID NO: 723828 - RNA, 22 nt, Human
uucagucagugacuaagcaguu

SEQ ID NO: 723829 - RNA, 22 nt, Human
cagccugacaccagcuuugggc

SEQ ID NO: 723830 - RNA, 19 nt, Human
acuuugcaugugugucuaa

SEQ ID NO: 723831 - RNA, 22 nt, Human
ugaaacugaaagguauuuauag

SEQ ID NO: 723832 - RNA, 22 nt, Human
cugggcagguauacaaaaaaug

SEQ ID NO: 723833 - RNA, 22 nt, Human
cuggaaagugcuuuucugagag

SEQ ID NO: 723834 - RNA, 22 nt, Human
aggggagcaucugugaugguua

SEQ ID NO: 723835 - RNA, 22 nt, Human
uccuuacaacuuguuauuuuuc

SEQ ID NO: 723836 - RNA, 22 nt, Human
ggacacagauaaucacacagau

SEQ ID NO: 723837 - RNA, 22 nt, Human
gucagacugcacucaaggacag

SEQ ID NO: 723838 - RNA, 22 nt, Human
aucccaugagaccacguuggcu

SEQ ID NO: 723839 - RNA, 22 nt, Human
agaaaguuuggggcugggcacg

SEQ ID NO: 723840 - RNA, 22 nt, Human
uuuccuucaucaucugagagcu

SEQ ID NO: 723841 - RNA, 22 nt, Human
ucaggacagagaucagaacuuc

SEQ ID NO: 723842 - RNA, 20 nt, Human
ugccaggcugcacgccugcc

SEQ ID NO: 723843 - RNA, 22 nt, Human
uauguucauagaaaucaugacc

SEQ ID NO: 723844 - RNA, 22 nt, Human
cuggugcccuguguggcaggag

SEQ ID NO: 723845 - RNA, 22 nt, Human
caugcuuccuccaaacuacccu

SEQ ID NO: 723846 - RNA, 22 nt, Human
uucagaaggugcagccugggcc

SEQ ID NO: 723847 - RNA, 22 nt, Human
agaggccaaagaaucuacaaga

SEQ ID NO: 723848 - RNA, 22 nt, Human
gggauaggagauugggaguguu

SEQ ID NO: 723849 - RNA, 22 nt, Human
cuuagcuucucugcaucugugu

SEQ ID NO: 723850 - RNA, 22 nt, Human
agcugcugcaaguggugcuaac

SEQ ID NO: 723851 - RNA, 22 nt, Human
ugauuuccacgugcacccaggu

SEQ ID NO: 723852 - RNA, 22 nt, Human
cugagguguggucugggaguau

SEQ ID NO: 723853 - RNA, 22 nt, Human
aaaaccuucuagacuuuauauu

SEQ ID NO: 723854 - RNA, 22 nt, Human
ucccagugagaugaaacaggua

SEQ ID NO: 723855 - RNA, 22 nt, Human
ugucagcuggagauggcauggg

SEQ ID NO: 723856 - RNA, 22 nt, Human
ucucuuucuauaugugagucuu

SEQ ID NO: 723857 - RNA, 22 nt, Human
ugaaguuucuugaaucuuggag

SEQ ID NO: 723858 - RNA, 22 nt, Human
gucaggauuugaacucaggucu

SEQ ID NO: 723859 - RNA, 22 nt, Human
aggccagaaaaagacagcucca

SEQ ID NO: 723860 - RNA, 22 nt, Human
gcuuuaaugcuucguggggcca

SEQ ID NO: 723861 - RNA, 22 nt, Human
aagaaauguagagccuaguaaa

SEQ ID NO: 723862 - RNA, 22 nt, Human
agggcgggcucaucacaugcuc

SEQ ID NO: 723863 - RNA, 22 nt, Human
uaugugcauaugcauacacaca

SEQ ID NO: 723864 - RNA, 22 nt, Human
ugaggaaacuuacaaggcagaa

SEQ ID NO: 723865 - RNA, 22 nt, Human
aacacauauuuauauaugcaca

SEQ ID NO: 723866 - RNA, 22 nt, Human
caggcccacgaggcacacagag

SEQ ID NO: 723867 - RNA, 22 nt, Human
aggcugggaaauguagucuucc

SEQ ID NO: 723868 - RNA, 22 nt, Human
ugugaaaagggcuuuguacaaa

SEQ ID NO: 723869 - RNA, 22 nt, Human
aggcuggcugaaaaacacccuu

SEQ ID NO: 723870 - RNA, 22 nt, Human
augguguagcaugugauaugac

SEQ ID NO: 723871 - RNA, 22 nt, Human
gggucuccuaauggaggaugac

SEQ ID NO: 723872 - RNA, 22 nt, Human
cuguggaguguagaugcugggu

SEQ ID NO: 723873 - RNA, 22 nt, Human
uuucagucuuauuuuguugaua

SEQ ID NO: 723874 - RNA, 22 nt, Human
aagaacaguugggaggugagcc

SEQ ID NO: 723875 - RNA, 22 nt, Human
cccagagaaccuucugugccac

SEQ ID NO: 723876 - RNA, 22 nt, Human
ccagaucccuguuugccucugg

SEQ ID NO: 723877 - RNA, 22 nt, Human
cuggacagcccucacugugugc

SEQ ID NO: 723878 - RNA, 22 nt, Human
agccucugcacuucuuacaggu

SEQ ID NO: 723879 - RNA, 22 nt, Human
uuugaugaguuuaauaacagcc

SEQ ID NO: 723880 - RNA, 22 nt, Human
gcuggcuguguuccuucugcca

SEQ ID NO: 723881 - RNA, 22 nt, Human
cucucagugccugcccuaggcu

SEQ ID NO: 723882 - RNA, 22 nt, Human
caccagcuccaccagggcaggu

SEQ ID NO: 723883 - RNA, 22 nt, Human
cugccugaguggaggucgaggg

SEQ ID NO: 723884 - RNA, 22 nt, Human
ugaaugaugaggggagaauaau

SEQ ID NO: 723885 - RNA, 20 nt, Human
cagcagccauucuaguagua

SEQ ID NO: 723886 - RNA, 22 nt, Human
acauuucuuuucaucucuauau

SEQ ID NO: 723887 - RNA, 19 nt, Human
ugcagaggguaggaaggcc

SEQ ID NO: 723888 - RNA, 22 nt, Human
caugaacaaauucuguuugagg

SEQ ID NO: 723889 - RNA, 22 nt, Human
agccaggcgcaguggcuuaugc

SEQ ID NO: 723890 - RNA, 22 nt, Human
aaacaugagcaucucuucaagc

SEQ ID NO: 723891 - RNA, 22 nt, Human
cagauggccagaggcagcugca

SEQ ID NO: 723892 - RNA, 22 nt, Human
uagcagcaauucaggugugaug

SEQ ID NO: 723893 - RNA, 22 nt, Human
aggcaccaggaucaguuagaga

SEQ ID NO: 723894 - RNA, 22 nt, Human
aggagaaaacaguguuuugccu

SEQ ID NO: 723895 - RNA, 22 nt, Human
ucauuuguacuugugugcuugu

SEQ ID NO: 723896 - RNA, 22 nt, Human
augcagaaugaguucacgaucu

SEQ ID NO: 723897 - RNA, 22 nt, Human
ggaacauucuagaguguuguga

SEQ ID NO: 723898 - RNA, 22 nt, Human
uuacaagauaacggagaaagca

SEQ ID NO: 723899 - RNA, 23 nt, Human
aagauguauuuuuaccaaauguc

SEQ ID NO: 723900 - RNA, 22 nt, Human
gaaugcaaagcucucuauguua

SEQ ID NO: 723901 - RNA, 22 nt, Human
acaggccuuggcaggcauguga

SEQ ID NO: 723902 - RNA, 22 nt, Human
gacuuuaaguaagucaaggagc

SEQ ID NO: 723903 - RNA, 22 nt, Human
gguguguguggauuagcaugcc

SEQ ID NO: 723904 - RNA, 23 nt, Human
ugggcccuggagucgccagucug

SEQ ID NO: 723905 - RNA, 22 nt, Human
agaggacagacggaaagugcca

SEQ ID NO: 723906 - RNA, 22 nt, Human
uucuagaggggagauacuagua

SEQ ID NO: 723907 - RNA, 22 nt, Human
aaucaguuguccaaaguucaca

SEQ ID NO: 723908 - RNA, 22 nt, Human
gcugugugcugggcauggcacu

SEQ ID NO: 723909 - RNA, 20 nt, Human
ggguacagauaugcagugaa

SEQ ID NO: 723910 - RNA, 22 nt, Human
aggcugugggaguugagagucu

SEQ ID NO: 723911 - RNA, 22 nt, Human
uuuauugucaaucuauucccag

SEQ ID NO: 723912 - RNA, 22 nt, Human
guuuuccuucucagccauugcc

SEQ ID NO: 723913 - RNA, 22 nt, Human
gaggcacaguguuuggucagug

SEQ ID NO: 723914 - RNA, 22 nt, Human
ggagaagggcaugguaguuuua

SEQ ID NO: 723915 - RNA, 22 nt, Human
aucauccuauugugccccaggu

SEQ ID NO: 723916 - RNA, 22 nt, Human
agcuucuuuuacagcucaugcu

SEQ ID NO: 723917 - RNA, 22 nt, Human
auugcaaagcguagacucuaaa

SEQ ID NO: 723918 - RNA, 17 nt, Human
acagugagaagucaucu

SEQ ID NO: 723919 - RNA, 22 nt, Human
ucuuccucccuacagagcucag

SEQ ID NO: 723920 - RNA, 22 nt, Human
aucucucuaugcacugaggacu

SEQ ID NO: 723921 - RNA, 22 nt, Human
ucucugggaucguuuugggcuc

SEQ ID NO: 723922 - RNA, 22 nt, Human
cagaagccuaaauagugcacca

SEQ ID NO: 723923 - RNA, 22 nt, Human
gcuggcccagugacccacagug

SEQ ID NO: 723924 - RNA, 22 nt, Human
gcagugguccaguucacaccca

SEQ ID NO: 723925 - RNA, 22 nt, Human
ucucuggcagcuugugcuguug

SEQ ID NO: 723926 - RNA, 22 nt, Human
augucuguggcaauuguugaug

SEQ ID NO: 723927 - RNA, 22 nt, Human
gaagaaggugcuacacagggca

SEQ ID NO: 723928 - RNA, 23 nt, Human
acaccugugcuguagucacuaca

SEQ ID NO: 723929 - RNA, 22 nt, Human
cuauucuagauuacaguauaaa

SEQ ID NO: 723930 - RNA, 22 nt, Human
caguagaauuauuauaaaacau

SEQ ID NO: 723931 - RNA, 22 nt, Human
gccagcaguauguccuggcagu

SEQ ID NO: 723932 - RNA, 22 nt, Human
cucucagcaggaaagcaugcaa

SEQ ID NO: 723933 - RNA, 22 nt, Human
aaaggcauuuuaauucuaaaga

SEQ ID NO: 723934 - RNA, 22 nt, Human
agcacagggcccagccuaggcc

SEQ ID NO: 723935 - RNA, 22 nt, Human
ucuguuagagagguaguucuug

SEQ ID NO: 723936 - RNA, 22 nt, Human
ucaucuaagagucuuacauuua

SEQ ID NO: 723937 - RNA, 22 nt, Human
aauaaagcaggguccuugcacu

SEQ ID NO: 723938 - RNA, 20 nt, Human
gucucagaauggauuugcau

SEQ ID NO: 723939 - RNA, 22 nt, Human
acugagcacucacuuuuguuau

SEQ ID NO: 723940 - RNA, 22 nt, Human
caauuucacuaauaauauuuac

SEQ ID NO: 723941 - RNA, 22 nt, Human
agcacagauguacuuugagggg

SEQ ID NO: 723942 - RNA, 22 nt, Human
aaaagaggagugguuuaugaca

SEQ ID NO: 723943 - RNA, 22 nt, Human
gugacaaaugcaaauugggcug

SEQ ID NO: 723944 - RNA, 22 nt, Human
uuccaggaacacucuguguccc

SEQ ID NO: 723945 - RNA, 20 nt, Human
gucaucgccggcagcaaaga

SEQ ID NO: 723946 - RNA, 22 nt, Human
aauguggggaagccauggcuga

SEQ ID NO: 723947 - RNA, 22 nt, Human
ugguggagaccucgcuaacccc

SEQ ID NO: 723948 - RNA, 22 nt, Human
aauuuguuauaacuugggcuga

SEQ ID NO: 723949 - RNA, 23 nt, Human
gcaggacaacagagugggaaggc

SEQ ID NO: 723950 - RNA, 22 nt, Human
gaaagguuuaaguaggauuugu

SEQ ID NO: 723951 - RNA, 22 nt, Human
aggcucagucccggcccgcgcc

SEQ ID NO: 723952 - RNA, 22 nt, Human
ugcauuuaguuuuaauaaagga

SEQ ID NO: 723953 - RNA, 22 nt, Human
gccagagcuucccccgagugug

SEQ ID NO: 723954 - RNA, 22 nt, Human
uuuauauauggcuggucuggau

SEQ ID NO: 723955 - RNA, 22 nt, Human
ugcuugucaggauaagcucugg

SEQ ID NO: 723956 - RNA, 22 nt, Human
acagcagggggagcuguuggac

SEQ ID NO: 723957 - RNA, 22 nt, Human
acuauuuguaaagagcaaacgg

SEQ ID NO: 723958 - RNA, 22 nt, Human
acccaggcuggagugcaguggu

SEQ ID NO: 723959 - RNA, 22 nt, Human
cugagguaccuggagcaggucc

SEQ ID NO: 723960 - RNA, 22 nt, Human
ugggccucggggaagcccgugu

SEQ ID NO: 723961 - RNA, 22 nt, Human
gaugcauugcaucgaguagcuu

SEQ ID NO: 723962 - RNA, 22 nt, Human
aagcaggcaugggaggccaucc

SEQ ID NO: 723963 - RNA, 22 nt, Human
aggaaaagugugaaguauggag

SEQ ID NO: 723964 - RNA, 22 nt, Human
cuggcaggaucuaaccagggaa

SEQ ID NO: 723965 - RNA, 22 nt, Human
gcucacaggggcagacgaguug

SEQ ID NO: 723966 - RNA, 22 nt, Human
uguucagcccucuauuaaucag

SEQ ID NO: 723967 - RNA, 22 nt, Human
uacuuuuugucucuuugaaugu

SEQ ID NO: 723968 - RNA, 22 nt, Human
ugcccaggcuccucgcagccuu

SEQ ID NO: 723969 - RNA, 22 nt, Human
gggauuacagaugugagccauu

SEQ ID NO: 723970 - RNA, 22 nt, Human
ugaguucucacccauucuucuu

SEQ ID NO: 723971 - RNA, 20 nt, Human
ugcagguguuggagaaggua

SEQ ID NO: 723972 - RNA, 23 nt, Human
ucuguacacaucagcaucuccca

SEQ ID NO: 723973 - RNA, 17 nt, Human
agcaccuguccaguccc

SEQ ID NO: 723974 - RNA, 22 nt, Human
cuuauuuacugauccacagaug

SEQ ID NO: 723975 - RNA, 22 nt, Human
uggaaggcacugggagaagacu

SEQ ID NO: 723976 - RNA, 21 nt, Human
ccuggcuccagaacuuccggu

SEQ ID NO: 723977 - RNA, 22 nt, Human
agcugaagaaaugggaagcauu

SEQ ID NO: 723978 - RNA, 22 nt, Human
cuccaggagggggauggcugua

SEQ ID NO: 723979 - RNA, 22 nt, Human
gcacaagcacgagcagcgugcg

SEQ ID NO: 723980 - RNA, 23 nt, Human
uggcuccaggagaagccagaagc

SEQ ID NO: 723981 - RNA, 22 nt, Human
gggaacacagacuugaugauga

SEQ ID NO: 723982 - RNA, 22 nt, Human
gaaaccuguccccucuuccuca

SEQ ID NO: 723983 - RNA, 22 nt, Human
gaaagggaguggacaacaggca

SEQ ID NO: 723984 - RNA, 22 nt, Human
uacaggguauagguacagauga

SEQ ID NO: 723985 - RNA, 22 nt, Human
ucucuucugaaaccugucuuua

SEQ ID NO: 723986 - RNA, 22 nt, Human
cuggggagacgaucgauguucu

SEQ ID NO: 723987 - RNA, 22 nt, Human
uaagacacaugcguacaagaua

SEQ ID NO: 723988 - RNA, 22 nt, Human
guaggcagucucucaggugauc

SEQ ID NO: 723989 - RNA, 22 nt, Human
agaaggguaguuguaagaguga

SEQ ID NO: 723990 - RNA, 22 nt, Human
ugggcagacugagcccuguccc

SEQ ID NO: 723991 - RNA, 19 nt, Human
gccugagccagccaugcaa

SEQ ID NO: 723992 - RNA, 22 nt, Human
uccuuuggcaagcucugcucuu

SEQ ID NO: 723993 - RNA, 22 nt, Human
cucugccugugucgccaccaca

SEQ ID NO: 723994 - RNA, 22 nt, Human
gcuguuucuuuggcaaacugau

SEQ ID NO: 723995 - RNA, 22 nt, Human
ugcuuccuugagcucuccaauc

SEQ ID NO: 723996 - RNA, 22 nt, Human
cagcuuuuaggacugugagaaa

SEQ ID NO: 723997 - RNA, 22 nt, Human
uuggccuuaaccucucugugcc

SEQ ID NO: 723998 - RNA, 22 nt, Human
ugcuggcuggccuggccuggac

SEQ ID NO: 723999 - RNA, 22 nt, Human
gauucuggauugucugcuugaa

SEQ ID NO: 724000 - RNA, 22 nt, Human
acaugcuaauggagaugccaag

SEQ ID NO: 724001 - RNA, 22 nt, Human
ucaggucuugagccaucaggau

SEQ ID NO: 724002 - RNA, 22 nt, Human
uguggcugcagacacuggagcc

SEQ ID NO: 724003 - RNA, 22 nt, Human
aggcuggauuuauggggacuuc

SEQ ID NO: 724004 - RNA, 22 nt, Human
caguggcuguuucuggaaggca

SEQ ID NO: 724005 - RNA, 22 nt, Human
agagacaggguuuugccauguu

SEQ ID NO: 724006 - RNA, 22 nt, Human
ugccauggaaguggccagaccu

SEQ ID NO: 724007 - RNA, 22 nt, Human
gcccucaguggauucuuauugu

SEQ ID NO: 724008 - RNA, 22 nt, Human
uauggcauuuagaaaugucaga

SEQ ID NO: 724009 - RNA, 22 nt, Human
agggcaguucagccacaggcuc

SEQ ID NO: 724010 - RNA, 22 nt, Human
ggcugucaauucauaggucaga

SEQ ID NO: 724011 - RNA, 22 nt, Human
ugcuggcaccagaaugacugca

SEQ ID NO: 724012 - RNA, 19 nt, Human
ucccaagauuucuguauca

SEQ ID NO: 724013 - RNA, 22 nt, Human
augcaucuaugacuuagacauu

SEQ ID NO: 724014 - RNA, 22 nt, Human
ucccugagggcagcucaagucc

SEQ ID NO: 724015 - RNA, 22 nt, Human
ucaguggauuggaugagaucug

SEQ ID NO: 724016 - RNA, 22 nt, Human
ugaagcuuguauuuaaauaagu

SEQ ID NO: 724017 - RNA, 22 nt, Human
ccugcagcuguaggagaaggcg

SEQ ID NO: 724018 - RNA, 22 nt, Human
gaagcccuauccucuccuggga

SEQ ID NO: 724019 - RNA, 22 nt, Human
gcccugugccagucacgcugug

SEQ ID NO: 724020 - RNA, 22 nt, Human
uuggaaagaagggcugagcaag

SEQ ID NO: 724021 - RNA, 18 nt, Human
uauauucugugcccuggu

SEQ ID NO: 724022 - RNA, 22 nt, Human
ugaggucccagggguagugugc

SEQ ID NO: 724023 - RNA, 22 nt, Human
ggugggagagcuugcuuugaug

SEQ ID NO: 724024 - RNA, 22 nt, Human
auagcaaaggacaauagucagu

SEQ ID NO: 724025 - RNA, 22 nt, Human
aacugaggccaagugaggaaag

SEQ ID NO: 724026 - RNA, 22 nt, Human
ucaauagagccuucuuucaggu

SEQ ID NO: 724027 - RNA, 22 nt, Human
uagcauuccuuguggcuucuga

SEQ ID NO: 724028 - RNA, 22 nt, Human
uuguaacaucaccaucaaaauc

SEQ ID NO: 724029 - RNA, 22 nt, Human
cagaacagaaucguguggugag

SEQ ID NO: 724030 - RNA, 22 nt, Human
aagccaggauaaaguuguuuua

SEQ ID NO: 724031 - RNA, 22 nt, Human
uuccugcaaaacuacuaguagc

SEQ ID NO: 724032 - RNA, 22 nt, Human
uugaugagaccauugccgcguc

SEQ ID NO: 724033 - RNA, 22 nt, Human
aguaguggcuuccuggagugcu

SEQ ID NO: 724034 - RNA, 22 nt, Human
ugagaauuuucaguuucacuuu

SEQ ID NO: 724035 - RNA, 22 nt, Human
ugcuuauugcuuucaagacugu

SEQ ID NO: 724036 - RNA, 22 nt, Human
gggcagcuggccagguauucug

SEQ ID NO: 724037 - RNA, 22 nt, Human
auguggcuuucugcguuuucuc

SEQ ID NO: 724038 - RNA, 22 nt, Human
ucagggcauguauguuucuuua

SEQ ID NO: 724039 - RNA, 17 nt, Human
gcucccugaggacagcu

SEQ ID NO: 724040 - RNA, 22 nt, Human
uaacuuucacaucacacugacu

SEQ ID NO: 724041 - RNA, 22 nt, Human
caacuuuagcaauguuaguaua

SEQ ID NO: 724042 - RNA, 22 nt, Human
ucagcaacuauuuaucaaauuc

SEQ ID NO: 724043 - RNA, 22 nt, Human
auaauacaugguuaaccucuuu

SEQ ID NO: 724044 - RNA, 22 nt, Human
uagauuugauguaagcauaguc

SEQ ID NO: 724045 - RNA, 22 nt, Human
agauauacacccauaucacaua

SEQ ID NO: 724046 - RNA, 22 nt, Human
uugauucugauccugucuggag

SEQ ID NO: 724047 - RNA, 22 nt, Human
auugaacuaaauaagcagucau

SEQ ID NO: 724048 - RNA, 22 nt, Human
aauccugugugacucuggggag

SEQ ID NO: 724049 - RNA, 22 nt, Human
uccguugacuuggaagcccuga

SEQ ID NO: 724050 - RNA, 22 nt, Human
acacagggcagagagcuggcuc

SEQ ID NO: 724051 - RNA, 22 nt, Human
cugggaggugaacagaaaaacu

SEQ ID NO: 724052 - RNA, 17 nt, Human
uccuggcaguccccugg

SEQ ID NO: 724053 - RNA, 22 nt, Human
aucugucuugccuugcauauuu

SEQ ID NO: 724054 - RNA, 22 nt, Human
uucccuggggaaggugaccuuu

SEQ ID NO: 724055 - RNA, 22 nt, Human
cacaguggaaguccaggauccc

SEQ ID NO: 724056 - RNA, 22 nt, Human
gcagggcuugcagcagcuagac

SEQ ID NO: 724057 - RNA, 22 nt, Human
guggcagguuauaagcaucuca

SEQ ID NO: 724058 - RNA, 22 nt, Human
ugaauaaauugagagcgaaugu

SEQ ID NO: 724059 - RNA, 22 nt, Human
ggcuuuggggugugcagagaug

SEQ ID NO: 724060 - RNA, 22 nt, Human
uaugcuuuacuuuucauuguga

SEQ ID NO: 724061 - RNA, 18 nt, Human
gcucugugaccuugagca

SEQ ID NO: 724062 - RNA, 22 nt, Human
caucccugacuucuaggugaca

SEQ ID NO: 724063 - RNA, 20 nt, Human
acgcacacgcgggggcgugc

SEQ ID NO: 724064 - RNA, 22 nt, Human
auguuacauaguccuuauuugu

SEQ ID NO: 724065 - RNA, 22 nt, Human
accaggcuugauaccaagaaau

SEQ ID NO: 724066 - RNA, 22 nt, Human
ugggucagauugagccccuggu

SEQ ID NO: 724067 - RNA, 22 nt, Human
gcaguaagauguuucccagagc

SEQ ID NO: 724068 - RNA, 22 nt, Human
ccugagcaacuucaagggccug

SEQ ID NO: 724069 - RNA, 22 nt, Human
uccugaggagaagagugcuagg

SEQ ID NO: 724070 - RNA, 22 nt, Human
uagaggugucacuuugggaagu

SEQ ID NO: 724071 - RNA, 22 nt, Human
caguucuuuguggggaguucuc

SEQ ID NO: 724072 - RNA, 22 nt, Human
uggcugagccuuuggggcuuuc

SEQ ID NO: 724073 - RNA, 22 nt, Human
uuaaggcugguccccucugcgu

SEQ ID NO: 724074 - RNA, 20 nt, Human
aagaggcuguggauccuacu

SEQ ID NO: 724075 - RNA, 22 nt, Human
uuucucauggcccuuggcuuuu

SEQ ID NO: 724076 - RNA, 22 nt, Human
ugggagcacccugaggagcuuc

SEQ ID NO: 724077 - RNA, 20 nt, Human
acccagcucugugcccuggg

SEQ ID NO: 724078 - RNA, 22 nt, Human
agcagcagucaugccuaugcuc

SEQ ID NO: 724079 - RNA, 22 nt, Human
gaaguuauuugcuaucuacuga

SEQ ID NO: 724080 - RNA, 22 nt, Human
aggcacagagaaugcccuccau

SEQ ID NO: 724081 - RNA, 22 nt, Human
uccuccagcuacuaggcaaaua

SEQ ID NO: 724082 - RNA, 22 nt, Human
ggcugcuggccagccuaggagu

SEQ ID NO: 724083 - RNA, 22 nt, Human
gaugucugugagaucaaacuaa

SEQ ID NO: 724084 - RNA, 22 nt, Human
gcaaagauauuagaauagagua

SEQ ID NO: 724085 - RNA, 22 nt, Human
aauacuaguuauuaaagcuuuu

SEQ ID NO: 724086 - RNA, 22 nt, Human
ccuuagcagggagucuguccag

SEQ ID NO: 724087 - RNA, 19 nt, Human
caucuggaugauucuccug

SEQ ID NO: 724088 - RNA, 22 nt, Human
cuuccuagcuucagagucuguu

SEQ ID NO: 724089 - RNA, 22 nt, Human
aauaaaucaauccuauugguag

SEQ ID NO: 724090 - RNA, 22 nt, Human
agacaaaugguaauuaugucua

SEQ ID NO: 724091 - RNA, 22 nt, Human
cugggauccacgggcucccaag

SEQ ID NO: 724092 - RNA, 19 nt, Human
aguaugucuaugagucuuu

SEQ ID NO: 724093 - RNA, 22 nt, Human
gaauuauagguuugcaugcuaa

SEQ ID NO: 724094 - RNA, 18 nt, Human
uaaauauauuucccccuu

SEQ ID NO: 724095 - RNA, 22 nt, Human
augguuuauuagcugcacaggc

SEQ ID NO: 724096 - RNA, 22 nt, Human
ucucaagagggaggcaaucaug

SEQ ID NO: 724097 - RNA, 22 nt, Human
ucauccauaguuugguuggacu

SEQ ID NO: 724098 - RNA, 22 nt, Human
caggaaauaaaaaguaucuucu

SEQ ID NO: 724099 - RNA, 22 nt, Human
gucuccugaggcauccauugaa

SEQ ID NO: 724100 - RNA, 22 nt, Human
uucaaguuaacucuccuuguac

SEQ ID NO: 724101 - RNA, 22 nt, Human
uccaggcauguugggaagauga

SEQ ID NO: 724102 - RNA, 22 nt, Human
ugcauucaauacaguaagaaua

SEQ ID NO: 724103 - RNA, 22 nt, Human
uagcagugcccuguggaauaag

SEQ ID NO: 724104 - RNA, 22 nt, Human
accuuuuuccaaagcuucuuac

SEQ ID NO: 724105 - RNA, 22 nt, Human
gcuaaugauagcaagauaaaca

SEQ ID NO: 724106 - RNA, 22 nt, Human
ccuucagucccauguuucucuu

SEQ ID NO: 724107 - RNA, 19 nt, Human
uccagccugcuguuucucu

SEQ ID NO: 724108 - RNA, 22 nt, Human
augauucagggaguuuucagga

SEQ ID NO: 724109 - RNA, 22 nt, Human
gcauguuuugcaacaagugacc

SEQ ID NO: 724110 - RNA, 22 nt, Human
gcuggagaacccaggaggaaga

SEQ ID NO: 724111 - RNA, 19 nt, Human
ggauucugcaguuuucaca

SEQ ID NO: 724112 - RNA, 22 nt, Human
ccaguccugccacccugucuau

SEQ ID NO: 724113 - RNA, 22 nt, Human
uuuucauuuuuguagaugcaag

SEQ ID NO: 724114 - RNA, 21 nt, Human
uagcauuuuuguauugcugaa

SEQ ID NO: 724115 - RNA, 22 nt, Human
cucccucacacccuugcccaga

SEQ ID NO: 724116 - RNA, 20 nt, Human
uccugcaguuccuaggaggg

SEQ ID NO: 724117 - RNA, 22 nt, Human
guguccugggggacuucagguu

SEQ ID NO: 724118 - RNA, 20 nt, Human
augugucugccucuguguuc

SEQ ID NO: 724119 - RNA, 22 nt, Human
auggcuuucagauggugaaaga

SEQ ID NO: 724120 - RNA, 22 nt, Human
cccagcacaggcaauuccauac

SEQ ID NO: 724121 - RNA, 22 nt, Human
ucugccuggauuccauucucca

SEQ ID NO: 724122 - RNA, 22 nt, Human
uuuguacaauuagcagaggcua

SEQ ID NO: 724123 - RNA, 22 nt, Human
augaggucaucuugaaguaggg

SEQ ID NO: 724124 - RNA, 22 nt, Human
agucauaauuauaaacaucagu

SEQ ID NO: 724125 - RNA, 22 nt, Human
aguggcuguaucagucaacccu

SEQ ID NO: 724126 - RNA, 22 nt, Human
agccagcaugaagacagaggcc

SEQ ID NO: 724127 - RNA, 22 nt, Human
cuaacuacaagcggggcauccu

SEQ ID NO: 724128 - RNA, 22 nt, Human
ugccaaaaugggcuuuauaccg

SEQ ID NO: 724129 - RNA, 22 nt, Human
uauugcuuauucuugagaguca

SEQ ID NO: 724130 - RNA, 22 nt, Human
uccagucaugguguccucacaa

SEQ ID NO: 724131 - RNA, 22 nt, Human
aauguauaaccauaggaaauuu

SEQ ID NO: 724132 - RNA, 22 nt, Human
agacagugcaagaagagcaggc

SEQ ID NO: 724133 - RNA, 22 nt, Human
uucuucaaugugcccuguuuuc

SEQ ID NO: 724134 - RNA, 22 nt, Human
ugggccacugaggguggucauu

SEQ ID NO: 724135 - RNA, 22 nt, Human
gcaccagcugcuggguucuaga

SEQ ID NO: 724136 - RNA, 22 nt, Human
gacauuuaaggcagucacuuaa

SEQ ID NO: 724137 - RNA, 20 nt, Human
gggaucaggaaaggaggcua

SEQ ID NO: 724138 - RNA, 22 nt, Human
uugauacagcagccugugaucc

SEQ ID NO: 724139 - RNA, 22 nt, Human
aacauuucauaacuugacuuuu

SEQ ID NO: 724140 - RNA, 21 nt, Human
ugagugccaccugcuggccaa

SEQ ID NO: 724141 - RNA, 22 nt, Human
uggagcugucacucagaaccaa

SEQ ID NO: 724142 - RNA, 17 nt, Human
ucuggguuuaaauccca

SEQ ID NO: 724143 - RNA, 22 nt, Human
gggcucugaaucccaggucugc

SEQ ID NO: 724144 - RNA, 22 nt, Human
ucaggcugcuuucaugcuuaga

SEQ ID NO: 724145 - RNA, 22 nt, Human
gaggcccuccagcugucagcug

SEQ ID NO: 724146 - RNA, 22 nt, Human
ggcugaugggcaugagcuguca

SEQ ID NO: 724147 - RNA, 22 nt, Human
caccccagucuaaaaccagccu

SEQ ID NO: 724148 - RNA, 22 nt, Human
cuuggaauggggcagaaaaugg

SEQ ID NO: 724149 - RNA, 22 nt, Human
cuggaaggagaaggaggcugug

SEQ ID NO: 724150 - RNA, 22 nt, Human
ucucagggccucccucuguuuc

SEQ ID NO: 724151 - RNA, 22 nt, Human
auugcagcuggucaggguaauu

SEQ ID NO: 724152 - RNA, 22 nt, Human
gaguccaggcucagaaacccgu

SEQ ID NO: 724153 - RNA, 17 nt, Human
ucucagugacugauagc

SEQ ID NO: 724154 - RNA, 22 nt, Human
guacccaggcacgccuugcuga

SEQ ID NO: 724155 - RNA, 19 nt, Human
uugaacacuuucuucaagg

SEQ ID NO: 724156 - RNA, 22 nt, Human
agcaccugcuugugacuaggga

SEQ ID NO: 724157 - RNA, 23 nt, Human
ucagaacaguucuuggugcauag

SEQ ID NO: 724158 - RNA, 22 nt, Human
cugggccaaaagaaguguucuu

SEQ ID NO: 724159 - RNA, 22 nt, Human
agcucuaaauggaauuuugccu

SEQ ID NO: 724160 - RNA, 22 nt, Human
uuggaggaggcauuggaggauu

SEQ ID NO: 724161 - RNA, 22 nt, Human
ccacuggcaguuggcuagccuu

SEQ ID NO: 724162 - RNA, 22 nt, Human
agcugcuuagagucucuucuua

SEQ ID NO: 724163 - RNA, 22 nt, Human
ugacagcauaacacuggucuug

SEQ ID NO: 724164 - RNA, 22 nt, Human
cagaaaaccugacucuagaacu

SEQ ID NO: 724165 - RNA, 22 nt, Human
ucugucugacaggguaugaacu

SEQ ID NO: 724166 - RNA, 22 nt, Human
cuuggaaagguuuuacaaagcg

SEQ ID NO: 724167 - RNA, 22 nt, Human
caguucuaauuaauaggaguaa

SEQ ID NO: 724168 - RNA, 22 nt, Human
ccaugccccaccaggacgcugc

SEQ ID NO: 724169 - RNA, 22 nt, Human
ucauccaucuuugauuucauag

SEQ ID NO: 724170 - RNA, 22 nt, Human
uuggaggcaaugggaaggaggc

SEQ ID NO: 724171 - RNA, 22 nt, Human
agcaggugaugugagucuggaa

SEQ ID NO: 724172 - RNA, 22 nt, Human
gaggcaguguugaaaaggagag

SEQ ID NO: 724173 - RNA, 22 nt, Human
auguaaauuguacugacacacg

SEQ ID NO: 724174 - RNA, 22 nt, Human
caugugguucaaguacuccaca

SEQ ID NO: 724175 - RNA, 20 nt, Human
ugcagaagaacguucugguu

SEQ ID NO: 724176 - RNA, 22 nt, Human
acagauacagggacuugguauu

SEQ ID NO: 724177 - RNA, 22 nt, Human
ucugccaucaagaugcucuggc

SEQ ID NO: 724178 - RNA, 22 nt, Human
uucacaaagcugguuccuucug

SEQ ID NO: 724179 - RNA, 22 nt, Human
auacaaaauauauacuggagac

SEQ ID NO: 724180 - RNA, 22 nt, Human
cccaguggcuuuugcccagguu

SEQ ID NO: 724181 - RNA, 22 nt, Human
agagccaggcaggcaauguuga

SEQ ID NO: 724182 - RNA, 22 nt, Human
uucucuggccugaggcgaggcc

SEQ ID NO: 724183 - RNA, 18 nt, Human
uuggcuucuuuccuuccu

SEQ ID NO: 724184 - RNA, 22 nt, Human
cagggucaggcugcuagaagcu

SEQ ID NO: 724185 - RNA, 22 nt, Human
agcagggcacuggaaggcacug

SEQ ID NO: 724186 - RNA, 22 nt, Human
auguagaggaguuucuggucug

SEQ ID NO: 724187 - RNA, 22 nt, Human
gaaaugcaaauucucucucgcu

SEQ ID NO: 724188 - RNA, 22 nt, Human
cauuacaucuuugaugcaguau

SEQ ID NO: 724189 - RNA, 22 nt, Human
uggcccagcucagggugggcgg

SEQ ID NO: 724190 - RNA, 21 nt, Human
caggaugaugggaagguggug

SEQ ID NO: 724191 - RNA, 22 nt, Human
caagccagucagcucaguagau

SEQ ID NO: 724192 - RNA, 22 nt, Human
ucaaggagacagaaagcaaugg

SEQ ID NO: 724193 - RNA, 22 nt, Human
gguggccuuucaguggaucagg

SEQ ID NO: 724194 - RNA, 22 nt, Human
ucaggguauguucuagaucuga

SEQ ID NO: 724195 - RNA, 22 nt, Human
ucucuugugguuuuguaguuga

SEQ ID NO: 724196 - RNA, 22 nt, Human
uggggugugcucagagcagggg

SEQ ID NO: 724197 - RNA, 22 nt, Human
ucugaggaaucuugacacauuu

SEQ ID NO: 724198 - RNA, 22 nt, Human
caguaaaugugauuuuucuugu

SEQ ID NO: 724199 - RNA, 22 nt, Human
augcuguggccagaguucaacu

SEQ ID NO: 724200 - RNA, 22 nt, Human
agugugucgagggaggguccag

SEQ ID NO: 724201 - RNA, 22 nt, Human
uaaggccauuauggugggcccg

SEQ ID NO: 724202 - RNA, 22 nt, Human
cccaggaaguggagguugcagu

SEQ ID NO: 724203 - RNA, 22 nt, Human
uauugauucugucccaaguuga

SEQ ID NO: 724204 - RNA, 22 nt, Human
uagccgcuuaauuauuugguga

SEQ ID NO: 724205 - RNA, 22 nt, Human
accacugguuuugcagaggcgc

SEQ ID NO: 724206 - RNA, 22 nt, Human
uccaccagcuucuucaccagcu

SEQ ID NO: 724207 - RNA, 22 nt, Human
caugcagcaggaucucauuccc

SEQ ID NO: 724208 - RNA, 22 nt, Human
gcuuuucuccuuagugucccug

SEQ ID NO: 724209 - RNA, 22 nt, Human
cugcagccuccugggguacaug

SEQ ID NO: 724210 - RNA, 22 nt, Human
uauuuagugauagaagcaagga

SEQ ID NO: 724211 - RNA, 22 nt, Human
auuuucacccugaauauauuga

SEQ ID NO: 724212 - RNA, 22 nt, Human
gaggaaccacucugagaagcca

SEQ ID NO: 724213 - RNA, 22 nt, Human
uucuauuucuuaaucuuggcug

SEQ ID NO: 724214 - RNA, 22 nt, Human
cauugaauccuuccuucagaag

SEQ ID NO: 724215 - RNA, 22 nt, Human
ugcuggggauccguaccaaccc

SEQ ID NO: 724216 - RNA, 22 nt, Human
cugggcucuucucacccuguuu

SEQ ID NO: 724217 - RNA, 22 nt, Human
ucuccagaggucccuugucucu

SEQ ID NO: 724218 - RNA, 22 nt, Human
cuaggcaguccugacgguacua

SEQ ID NO: 724219 - RNA, 21 nt, Human
gaccccagaccagcagacaca

SEQ ID NO: 724220 - RNA, 22 nt, Human
ccacagggcacaagggagguug

SEQ ID NO: 724221 - RNA, 22 nt, Human
cagcaugacagucugcagcaga

SEQ ID NO: 724222 - RNA, 22 nt, Human
uggcucaggaucuaagcagaau

SEQ ID NO: 724223 - RNA, 22 nt, Human
agcagaugagccucaugacugg

SEQ ID NO: 724224 - RNA, 22 nt, Human
gggaccugaggcccugcuccac

SEQ ID NO: 724225 - RNA, 22 nt, Human
aucauccaagcguaguucuucu

SEQ ID NO: 724226 - RNA, 22 nt, Human
gcauugaaggcauuuuaucuac

SEQ ID NO: 724227 - RNA, 22 nt, Human
uuccugcauggauugaggcuau

SEQ ID NO: 724228 - RNA, 23 nt, Human
aagauccauucaaauuauguauc

SEQ ID NO: 724229 - RNA, 22 nt, Human
ugugaagcuggauccuggagcu

SEQ ID NO: 724230 - RNA, 22 nt, Human
agaaauacaaaguacuaagaua

SEQ ID NO: 724231 - RNA, 19 nt, Human
aagcccaguguaugcucuu

SEQ ID NO: 724232 - RNA, 22 nt, Human
ugaaggccucugguacaugcca

SEQ ID NO: 724233 - RNA, 22 nt, Human
aggcuccuaucgcuuucagcaa

SEQ ID NO: 724234 - RNA, 22 nt, Human
aauugucuuuaucacaguucaa

SEQ ID NO: 724235 - RNA, 22 nt, Human
uccugacuaggagggcuaaggu

SEQ ID NO: 724236 - RNA, 22 nt, Human
cucacugacugcaagucaaguu

SEQ ID NO: 724237 - RNA, 22 nt, Human
aaauagaauuggaagcagaguu

SEQ ID NO: 724238 - RNA, 22 nt, Human
auuccacugccgaaugauacau

SEQ ID NO: 724239 - RNA, 22 nt, Human
gugcuuuacuguguugccuuua

SEQ ID NO: 724240 - RNA, 22 nt, Human
acagcagcuaaccccugggcca

SEQ ID NO: 724241 - RNA, 22 nt, Human
agcaggcaguguagagccuuca

SEQ ID NO: 724242 - RNA, 22 nt, Human
aaauauaguaaaugcauaguuc

SEQ ID NO: 724243 - RNA, 22 nt, Human
augcugccuccucuucagccgc

SEQ ID NO: 724244 - RNA, 22 nt, Human
aguuggcauuccugcauccuau

SEQ ID NO: 724245 - RNA, 22 nt, Human
uacagugcauagaggcaugaua

SEQ ID NO: 724246 - RNA, 22 nt, Human
uggagagcuauuuggaccucca

SEQ ID NO: 724247 - RNA, 21 nt, Human
aacaguucucuuugaaggugu

SEQ ID NO: 724248 - RNA, 22 nt, Human
caggcugagcucuggccugggc

SEQ ID NO: 724249 - RNA, 22 nt, Human
agcacaauauggguuuuauagu

SEQ ID NO: 724250 - RNA, 21 nt, Human
cuccugggcuaagauauagug

SEQ ID NO: 724251 - RNA, 22 nt, Human
uaggguccaagccuuauaauua

SEQ ID NO: 724252 - RNA, 22 nt, Human
augaacaugugacucagaccug

SEQ ID NO: 724253 - RNA, 22 nt, Human
agagauucugugucaaaacgaa

SEQ ID NO: 724254 - RNA, 22 nt, Human
agaggcaggaagagcugauuuu

SEQ ID NO: 724255 - RNA, 18 nt, Human
aucucccauuggccaagg

SEQ ID NO: 724256 - RNA, 22 nt, Human
aggcgcaggguuuggacccagg

SEQ ID NO: 724257 - RNA, 22 nt, Human
ucuuuguuauugcuuuaucuau

SEQ ID NO: 724258 - RNA, 22 nt, Human
ucugcaucucaggauucccuuc

SEQ ID NO: 724259 - RNA, 22 nt, Human
caggcaugcuucugucugggca

SEQ ID NO: 724260 - RNA, 22 nt, Human
aaugcauucucgguuugugugu

SEQ ID NO: 724261 - RNA, 22 nt, Human
uauggcuuugaaagggcuuuuc

SEQ ID NO: 724262 - RNA, 22 nt, Human
agucucuggacugggagauggc

SEQ ID NO: 724263 - RNA, 19 nt, Human
ugcccugcacgcuguccug

SEQ ID NO: 724264 - RNA, 22 nt, Human
guuuucuuugaaugcuucuaga

SEQ ID NO: 724265 - RNA, 22 nt, Human
cuggucccagcagagcucugag

SEQ ID NO: 724266 - RNA, 22 nt, Human
aaacauuguacauucuguagcu

SEQ ID NO: 724267 - RNA, 22 nt, Human
gcaguggggaaugcuggggaga

SEQ ID NO: 724268 - RNA, 22 nt, Human
ggcuucuugugugucaggcucu

SEQ ID NO: 724269 - RNA, 22 nt, Human
gaagaggcaauugaauaagcua

SEQ ID NO: 724270 - RNA, 22 nt, Human
cggagcugccugccaagccugc

SEQ ID NO: 724271 - RNA, 22 nt, Human
ccuggaaaacaugggaaucaca

SEQ ID NO: 724272 - RNA, 22 nt, Human
uuagaggacuguaggugggaau

SEQ ID NO: 724273 - RNA, 22 nt, Human
uggcacaugguuaaucauaauu

SEQ ID NO: 724274 - RNA, 22 nt, Human
agagcccugacggggacagaug

SEQ ID NO: 724275 - RNA, 22 nt, Human
caggguccccgggucuccugug

SEQ ID NO: 724276 - RNA, 22 nt, Human
caggcacaguuccaagcauuuu

SEQ ID NO: 724277 - RNA, 21 nt, Human
ugacugaaauagaauuuagcu

SEQ ID NO: 724278 - RNA, 22 nt, Human
ggaggcccagaaggaagcccag

SEQ ID NO: 724279 - RNA, 22 nt, Human
acagccccagcgcggcgggguc

SEQ ID NO: 724280 - RNA, 22 nt, Human
ggcuggacucugggccucucca

SEQ ID NO: 724281 - RNA, 22 nt, Human
ucugcuucacuuccccaagcuu

SEQ ID NO: 724282 - RNA, 22 nt, Human
gcuuccauguugcugcugguca

SEQ ID NO: 724283 - RNA, 22 nt, Human
uuuucauuagaaugacugagaa

SEQ ID NO: 724284 - RNA, 22 nt, Human
uuagaggaaagugacuccgaug

SEQ ID NO: 724285 - RNA, 23 nt, Human
uccaauucaauugggucaggaag

SEQ ID NO: 724286 - RNA, 22 nt, Human
aaggguccaaggcuuugcguuu

SEQ ID NO: 724287 - RNA, 22 nt, Human
aauagcaccugagguaguuugu

SEQ ID NO: 724288 - RNA, 19 nt, Human
cagagcugcuggccucguc

SEQ ID NO: 724289 - RNA, 22 nt, Human
aaucuucaacagaaugguagga

SEQ ID NO: 724290 - RNA, 22 nt, Human
cucgccugccugugucucuccc

SEQ ID NO: 724291 - RNA, 22 nt, Human
uaagcacuuuauaugcuuuauc

SEQ ID NO: 724292 - RNA, 22 nt, Human
gagagaaaugugcaguuugggc

SEQ ID NO: 724293 - RNA, 22 nt, Human
uguaacaauuucuuacuauugu

SEQ ID NO: 724294 - RNA, 17 nt, Human
gcuacugguuaccucua

SEQ ID NO: 724295 - RNA, 21 nt, Human
guuauuuuaagugagcuuugc

SEQ ID NO: 724296 - RNA, 22 nt, Human
cacugaagguaggaccaaggcu

SEQ ID NO: 724297 - RNA, 22 nt, Human
cagggcucgcugccagcuucag

SEQ ID NO: 724298 - RNA, 22 nt, Human
aaugcaaccugcugaucugaca

SEQ ID NO: 724299 - RNA, 22 nt, Human
uccuuuaugugaguuguuuccc

SEQ ID NO: 724300 - RNA, 22 nt, Human
caaagcaggcuugucaaauugc

SEQ ID NO: 724301 - RNA, 22 nt, Human
gccagaagacuggagucagcug

SEQ ID NO: 724302 - RNA, 22 nt, Human
gcaaaaguacagccggauuucu

SEQ ID NO: 724303 - RNA, 22 nt, Human
ucugaauaguauauugaaagca

SEQ ID NO: 724304 - RNA, 20 nt, Human
ugggccuguggcagaagucu

SEQ ID NO: 724305 - RNA, 22 nt, Human
caugucugccaauuuggaagga

SEQ ID NO: 724306 - RNA, 22 nt, Human
cucagggacggaggcuugcgga

SEQ ID NO: 724307 - RNA, 22 nt, Human
agccuggccacucagggccuga

SEQ ID NO: 724308 - RNA, 20 nt, Human
ugguggacuuuggcauggcu

SEQ ID NO: 724309 - RNA, 22 nt, Human
aauaauaagauacuaagggagu

SEQ ID NO: 724310 - RNA, 22 nt, Human
acuuuguugaagaauauguuag

SEQ ID NO: 724311 - RNA, 22 nt, Human
ugggguccucucacuuggaggg

SEQ ID NO: 724312 - RNA, 22 nt, Human
cgcaggcaaugcuccgcggggg

SEQ ID NO: 724313 - RNA, 22 nt, Human
gcuccaggguggaugacaauuc

SEQ ID NO: 724314 - RNA, 22 nt, Human
uaccugcagcgggaauccauua

SEQ ID NO: 724315 - RNA, 22 nt, Human
auuuggauaucacugaauacau

SEQ ID NO: 724316 - RNA, 19 nt, Human
agcagcuggagguggagug

SEQ ID NO: 724317 - RNA, 22 nt, Human
gcugggcaacgggcagaaagau

SEQ ID NO: 724318 - RNA, 23 nt, Human
ugugaaauuugaggucagugcuu

SEQ ID NO: 724319 - RNA, 22 nt, Human
agagugaaaagcuagagcagua

SEQ ID NO: 724320 - RNA, 22 nt, Human
gggacccucaacaucugcuucu

SEQ ID NO: 724321 - RNA, 22 nt, Human
aagcuuuaaggaauuuuaugga

SEQ ID NO: 724322 - RNA, 22 nt, Human
augcugugagugugccgcagag

SEQ ID NO: 724323 - RNA, 22 nt, Human
ucagcuguguaucccagggccu

SEQ ID NO: 724324 - RNA, 22 nt, Human
uuggccaaaggaaagacuacug

SEQ ID NO: 724325 - RNA, 22 nt, Human
accacuuuacagaaauggaaag

SEQ ID NO: 724326 - RNA, 18 nt, Human
ggacacagauagguacag

SEQ ID NO: 724327 - RNA, 22 nt, Human
uccauuuuagaagaaaauccac

SEQ ID NO: 724328 - RNA, 22 nt, Human
uggcugcucaagggaggaggcu

SEQ ID NO: 724329 - RNA, 19 nt, Human
ucugggagagugaaucuga

SEQ ID NO: 724330 - RNA, 22 nt, Human
ggcagcucaccucugguccagg

SEQ ID NO: 724331 - RNA, 22 nt, Human
ggccugaggcaauagucagaca

SEQ ID NO: 724332 - RNA, 22 nt, Human
agucacagguucuugggauuag

SEQ ID NO: 724333 - RNA, 22 nt, Human
uacaucucaucugugcucuccg

SEQ ID NO: 724334 - RNA, 22 nt, Human
gccagcuggagugagagugggc

SEQ ID NO: 724335 - RNA, 22 nt, Human
gguuggacacuagguaggagcg

SEQ ID NO: 724336 - RNA, 22 nt, Human
ccagagaaccaucugcuugagg

SEQ ID NO: 724337 - RNA, 21 nt, Human
aauuacagauggaauuacaga

SEQ ID NO: 724338 - RNA, 22 nt, Human
ccuucaaacuuucauuaaccag

SEQ ID NO: 724339 - RNA, 22 nt, Human
uaaaugccauucguuucauaca

SEQ ID NO: 724340 - RNA, 22 nt, Human
uugugucuaugguuugagcauc

SEQ ID NO: 724341 - RNA, 22 nt, Human
gugugccagacaugaugcuaug

SEQ ID NO: 724342 - RNA, 21 nt, Human
ugcugaugucagagaagcaag

SEQ ID NO: 724343 - RNA, 22 nt, Human
agguggcagcagccuggugaaa

SEQ ID NO: 724344 - RNA, 22 nt, Human
ggaagcugggaucucucucccg

SEQ ID NO: 724345 - RNA, 22 nt, Human
ccacuugaaucaaauucuuagg

SEQ ID NO: 724346 - RNA, 22 nt, Human
ggcugucuugggagcucccccg

SEQ ID NO: 724347 - RNA, 22 nt, Human
ggguggggcccaggaaaucuau

SEQ ID NO: 724348 - RNA, 21 nt, Human
uagagauguuugcuaaguagc

SEQ ID NO: 724349 - RNA, 22 nt, Human
gugcaggagcaggagccauguc

SEQ ID NO: 724350 - RNA, 22 nt, Human
ugacuucugggugagccagcau

SEQ ID NO: 724351 - RNA, 22 nt, Human
acucaggccccaucgcccaucu

SEQ ID NO: 724352 - RNA, 22 nt, Human
acaugugcucuugcuguacagc

SEQ ID NO: 724353 - RNA, 22 nt, Human
gccuuuggacugagguagucag

SEQ ID NO: 724354 - RNA, 22 nt, Human
acucacuuuccauucaagcacc

SEQ ID NO: 724355 - RNA, 22 nt, Human
accccagaaucuaugcuuuaca

SEQ ID NO: 724356 - RNA, 22 nt, Human
agcugcaggccucuccugggga

SEQ ID NO: 724357 - RNA, 22 nt, Human
auugccuugucagauuucuuuu

SEQ ID NO: 724358 - RNA, 22 nt, Human
aaggugucacugggacaggaaa

SEQ ID NO: 724359 - RNA, 22 nt, Human
gcuguacauuuguguacacuug

SEQ ID NO: 724360 - RNA, 22 nt, Human
ucuguaaucuuccccagcucag

SEQ ID NO: 724361 - RNA, 20 nt, Human
ccugcugugcuuuccaugga

SEQ ID NO: 724362 - RNA, 22 nt, Human
ucagacuugccuuuuuauaaaa

SEQ ID NO: 724363 - RNA, 22 nt, Human
aaaucucuggcagaaauaaacu

SEQ ID NO: 724364 - RNA, 22 nt, Human
aggggccuggcacugagcuggc

SEQ ID NO: 724365 - RNA, 22 nt, Human
aaagccauuacaaaauuucaua

SEQ ID NO: 724366 - RNA, 22 nt, Human
uucuuacuacauuugcaggcua

SEQ ID NO: 724367 - RNA, 22 nt, Human
gaaucacagaggcaaauucuga

SEQ ID NO: 724368 - RNA, 22 nt, Human
cugaaauuccauuucagccaca

SEQ ID NO: 724369 - RNA, 22 nt, Human
uucuuucagaacacaagugauu

SEQ ID NO: 724370 - RNA, 22 nt, Human
uaccugcaaaguuccuuuugcc

SEQ ID NO: 724371 - RNA, 22 nt, Human
uagaucauauuuguggagaaaa

SEQ ID NO: 724372 - RNA, 22 nt, Human
agucuggagugauuauguggga

SEQ ID NO: 724373 - RNA, 22 nt, Human
agaggcuccuucacucuggcac

SEQ ID NO: 724374 - RNA, 22 nt, Human
gcugucugggaugucacugcug

SEQ ID NO: 724375 - RNA, 22 nt, Human
uagaacaugggauagaguuuuu

SEQ ID NO: 724376 - RNA, 22 nt, Human
aggcucuuugagacuaccugga

SEQ ID NO: 724377 - RNA, 22 nt, Human
gguccagguauguggugugaau

SEQ ID NO: 724378 - RNA, 22 nt, Human
ucaggagggugacaggcccugg

SEQ ID NO: 724379 - RNA, 22 nt, Human
uccugaaauuuguuuuaauucu

SEQ ID NO: 724380 - RNA, 22 nt, Human
caggagguugguagcaguagau

SEQ ID NO: 724381 - RNA, 22 nt, Human
gaaggggguugcagucuagggu

SEQ ID NO: 724382 - RNA, 21 nt, Human
agaacugauuaaauaagcagu

SEQ ID NO: 724383 - RNA, 22 nt, Human
gcugcucucagagcucaugcug

SEQ ID NO: 724384 - RNA, 22 nt, Human
cccuuccuccucgccugucaga

SEQ ID NO: 724385 - RNA, 20 nt, Human
agaaaauguuuucagcugga

SEQ ID NO: 724386 - RNA, 22 nt, Human
uauugccugaguguuucauaau

SEQ ID NO: 724387 - RNA, 21 nt, Human
acccccacaccuccuuaguuc

SEQ ID NO: 724388 - RNA, 22 nt, Human
gugccugcugcagagucgcugu

SEQ ID NO: 724389 - RNA, 22 nt, Human
ggcacugcagguaagugcuguc

SEQ ID NO: 724390 - RNA, 22 nt, Human
ugauggaaaauaaaucuuauuc

SEQ ID NO: 724391 - RNA, 22 nt, Human
ccaaaggaugucccuguguuuu

SEQ ID NO: 724392 - RNA, 22 nt, Human
aggacacagcucuucaguaaga

SEQ ID NO: 724393 - RNA, 22 nt, Human
gccuggugugcgccgcgcagcu

SEQ ID NO: 724394 - RNA, 22 nt, Human
aaguuuguucauucauucaucc

SEQ ID NO: 724395 - RNA, 22 nt, Human
gggcccacuggcugucugaccc

SEQ ID NO: 724396 - RNA, 22 nt, Human
agggagguaggagcuucuagcu

SEQ ID NO: 724397 - RNA, 22 nt, Human
ggcgcacaaugugcagguuugu

SEQ ID NO: 724398 - RNA, 21 nt, Human
gucuuucuaccucuauguggc

SEQ ID NO: 724399 - RNA, 22 nt, Human
gcccaugguccaggaagacaga

SEQ ID NO: 724400 - RNA, 22 nt, Human
ugggagacacuggugggagcuu

SEQ ID NO: 724401 - RNA, 22 nt, Human
caugggaggucugcaaggugcu

SEQ ID NO: 724402 - RNA, 22 nt, Human
gagaggcuugugugaagaacaa

SEQ ID NO: 724403 - RNA, 22 nt, Human
gacuguguccaugugcuggauu

SEQ ID NO: 724404 - RNA, 22 nt, Human
cugagcugggcucucuugaggg

SEQ ID NO: 724405 - RNA, 22 nt, Human
aauucaaauuugaguuugugau

SEQ ID NO: 724406 - RNA, 22 nt, Human
cucugagcccgcugcagcccca

SEQ ID NO: 724407 - RNA, 22 nt, Human
ucagugucuugaccugggugug

SEQ ID NO: 724408 - RNA, 23 nt, Human
acagcaagaggaccagaugugag

SEQ ID NO: 724409 - RNA, 22 nt, Human
auuggucagaguaaauuuauuu

SEQ ID NO: 724410 - RNA, 22 nt, Human
ucagcccaguuuuaucaucugu

SEQ ID NO: 724411 - RNA, 22 nt, Human
aagagugugagguugugcuuuu

SEQ ID NO: 724412 - RNA, 22 nt, Human
agguaacuagcauuagcuucug

SEQ ID NO: 724413 - RNA, 17 nt, Human
uccagcuccucauuguu

SEQ ID NO: 724414 - RNA, 22 nt, Human
uaaaaccauaaggcuggaagga

SEQ ID NO: 724415 - RNA, 22 nt, Human
acuuguuucaacuguacucuca

SEQ ID NO: 724416 - RNA, 22 nt, Human
cauaaauuguacccauuccaac

SEQ ID NO: 724417 - RNA, 22 nt, Human
cagcagcugggaaggaggcuga

SEQ ID NO: 724418 - RNA, 22 nt, Human
ccagggcaauuauuuggagggu

SEQ ID NO: 724419 - RNA, 22 nt, Human
guguuuuauggagucauaacgu

SEQ ID NO: 724420 - RNA, 22 nt, Human
guccugagagaggcuccuugcc

SEQ ID NO: 724421 - RNA, 22 nt, Human
cccaggaagagugaguggcauu

SEQ ID NO: 724422 - RNA, 22 nt, Human
aagaguuugaccugugccaucc

SEQ ID NO: 724423 - RNA, 22 nt, Human
aaauuugauaagccauuguuac

SEQ ID NO: 724424 - RNA, 22 nt, Human
cugugccuaagaugcaugucuc

SEQ ID NO: 724425 - RNA, 22 nt, Human
ggggaggcugaugugggcaaag

SEQ ID NO: 724426 - RNA, 22 nt, Human
uuaugccuccgaaaccuggagu

SEQ ID NO: 724427 - RNA, 20 nt, Human
gcugucccaggccaaagggc

SEQ ID NO: 724428 - RNA, 22 nt, Human
uuguguguagacucagccauug

SEQ ID NO: 724429 - RNA, 22 nt, Human
cuuuggcaacacaugugggaca

SEQ ID NO: 724430 - RNA, 22 nt, Human
cacagcccccuugacacucugg

SEQ ID NO: 724431 - RNA, 22 nt, Human
acugggccagacacugauuccc

SEQ ID NO: 724432 - RNA, 22 nt, Human
ucuuuccucugagcuccuguag

SEQ ID NO: 724433 - RNA, 22 nt, Human
auaggaaugugauuuauaaaug

SEQ ID NO: 724434 - RNA, 22 nt, Human
cucuccaaguuaucaagaugaa

SEQ ID NO: 724435 - RNA, 22 nt, Human
ugcagcagcuccagguuacccu

SEQ ID NO: 724436 - RNA, 22 nt, Human
ugcauuugcuggggaugugauu

SEQ ID NO: 724437 - RNA, 22 nt, Human
acauuucagugagcuauugaag

SEQ ID NO: 724438 - RNA, 22 nt, Human
agcugaacgugcuucugcagca

SEQ ID NO: 724439 - RNA, 22 nt, Human
aagagccagugggaaagucuug

SEQ ID NO: 724440 - RNA, 20 nt, Human
uggaggcagagccagaggga

SEQ ID NO: 724441 - RNA, 22 nt, Human
uagaggugacacugagaccaua

SEQ ID NO: 724442 - RNA, 21 nt, Human
uauugcuuguaggucauccug

SEQ ID NO: 724443 - RNA, 23 nt, Human
ccugcagcugcuggggcuccacc

SEQ ID NO: 724444 - RNA, 22 nt, Human
uaaaugugagugaugcggugaa

SEQ ID NO: 724445 - RNA, 22 nt, Human
auauaggcagaaaggaaggcaa

SEQ ID NO: 724446 - RNA, 22 nt, Human
gagauacaguuggcugcaggcu

SEQ ID NO: 724447 - RNA, 22 nt, Human
aaagguuuucuaggguugaggg

SEQ ID NO: 724448 - RNA, 22 nt, Human
ugcaggaacauagguuccuugg

SEQ ID NO: 724449 - RNA, 22 nt, Human
uaaguacaaauguauacauaag

SEQ ID NO: 724450 - RNA, 22 nt, Human
ugcucaguagcagugugcugcu

SEQ ID NO: 724451 - RNA, 22 nt, Human
gagauucuauguuguugauuau

SEQ ID NO: 724452 - RNA, 22 nt, Human
accaggaaacugugcccacgac

SEQ ID NO: 724453 - RNA, 22 nt, Human
ugggcccaucauugcugugggc

SEQ ID NO: 724454 - RNA, 22 nt, Human
gaggucccccauggcugugacu

SEQ ID NO: 724455 - RNA, 23 nt, Human
acacaauagaguacuauucagcc

SEQ ID NO: 724456 - RNA, 22 nt, Human
auacaagugagaaaacugaaga

SEQ ID NO: 724457 - RNA, 22 nt, Human
cagaaccaggaacugauggaga

SEQ ID NO: 724458 - RNA, 22 nt, Human
uacauugcuuucuaauacaucu

SEQ ID NO: 724459 - RNA, 22 nt, Human
aaacagauaaugcuauaaaugg

SEQ ID NO: 724460 - RNA, 22 nt, Human
aggguauguuuuuaucuacugu

SEQ ID NO: 724461 - RNA, 22 nt, Human
gugugcagaggcaggaggugcu

SEQ ID NO: 724462 - RNA, 22 nt, Human
acaggaagaaagugcaguagau

SEQ ID NO: 724463 - RNA, 22 nt, Human
ugaggcacugggagagcacacu

SEQ ID NO: 724464 - RNA, 22 nt, Human
aacauucuacuguacugcauug

SEQ ID NO: 724465 - RNA, 22 nt, Human
ugucauuuugucucacugcuau

SEQ ID NO: 724466 - RNA, 22 nt, Human
acaucaugagagacuuaaauug

SEQ ID NO: 724467 - RNA, 20 nt, Human
gcagggcgacacgggggagg

SEQ ID NO: 724468 - RNA, 22 nt, Human
cugagguguugaugaccuaugc

SEQ ID NO: 724469 - RNA, 22 nt, Human
cgggucaccuaucaauuuugug

SEQ ID NO: 724470 - RNA, 22 nt, Human
gggcuccagcuguuugccauga

SEQ ID NO: 724471 - RNA, 22 nt, Human
acuaggaaguggcaaaacugga

SEQ ID NO: 724472 - RNA, 22 nt, Human
uuuuccuuaacagagggagaaa

SEQ ID NO: 724473 - RNA, 22 nt, Human
caggcacaagaucggcuagaua

SEQ ID NO: 724474 - RNA, 22 nt, Human
gcugcucuggcucugcaguguc

SEQ ID NO: 724475 - RNA, 22 nt, Human
gcauucauucaggcucccaggg

SEQ ID NO: 724476 - RNA, 22 nt, Human
ucagaggcuugaagcccaagcc

SEQ ID NO: 724477 - RNA, 22 nt, Human
cagcugugcugauugcucagua

SEQ ID NO: 724478 - RNA, 22 nt, Human
accaggccuagcaaguacauua

SEQ ID NO: 724479 - RNA, 21 nt, Human
cucuggagucaagagcuucca

SEQ ID NO: 724480 - RNA, 22 nt, Human
aauucuucaagugcuuuggaga

SEQ ID NO: 724481 - RNA, 22 nt, Human
gccaggcaauguguuagaagcg

SEQ ID NO: 724482 - RNA, 22 nt, Human
gcccucagaggacagcugacuu

SEQ ID NO: 724483 - RNA, 22 nt, Human
ugccaauuagagacauccaucu

SEQ ID NO: 724484 - RNA, 22 nt, Human
ugacauaauaauccaaacauac

SEQ ID NO: 724485 - RNA, 21 nt, Human
uggcucgauuuauagcauuuc

SEQ ID NO: 724486 - RNA, 22 nt, Human
cuuggggaggacgcaguguccu

SEQ ID NO: 724487 - RNA, 22 nt, Human
uggcugcugcagacagacagga

SEQ ID NO: 724488 - RNA, 22 nt, Human
auguaucacagcaauguaguca

SEQ ID NO: 724489 - RNA, 22 nt, Human
cuuuccaagaaugcagauaccu

SEQ ID NO: 724490 - RNA, 22 nt, Human
ccugaggcuugggaguuccgcc

SEQ ID NO: 724491 - RNA, 23 nt, Human
ucaaacuguuauauugccagagu

SEQ ID NO: 724492 - RNA, 22 nt, Human
uggacucaaguccaaguucacg

SEQ ID NO: 724493 - RNA, 22 nt, Human
gguaguucuucauggguuucau

SEQ ID NO: 724494 - RNA, 22 nt, Human
cacuaggcaucugugaggguag

SEQ ID NO: 724495 - RNA, 22 nt, Human
aggcugugauuccaccacucuc

SEQ ID NO: 724496 - RNA, 22 nt, Human
ucccuagaggucuucacaagau

SEQ ID NO: 724497 - RNA, 17 nt, Human
ugaggccugcaucagug

SEQ ID NO: 724498 - RNA, 22 nt, Human
auuuagugaaacccauaaagca

SEQ ID NO: 724499 - RNA, 22 nt, Human
aggcaagcauugggaacagggc

SEQ ID NO: 724500 - RNA, 22 nt, Human
guuauauaagacaaaucagagu

SEQ ID NO: 724501 - RNA, 22 nt, Human
aaugcuagugugauauguaagg

SEQ ID NO: 724502 - RNA, 22 nt, Human
uccauccauggauggaaaugug

SEQ ID NO: 724503 - RNA, 22 nt, Human
ccuuagcuggagugguggaaug

SEQ ID NO: 724504 - RNA, 22 nt, Human
cuguguuugaugagaagccacc

SEQ ID NO: 724505 - RNA, 19 nt, Human
cuuucaugugguucuucuu

SEQ ID NO: 724506 - RNA, 22 nt, Human
cugggccuugccaggggugucu

SEQ ID NO: 724507 - RNA, 22 nt, Human
ucugugguggagugggcaugag

SEQ ID NO: 724508 - RNA, 22 nt, Human
uuuacacauaaauguguagaca

SEQ ID NO: 724509 - RNA, 21 nt, Human
uuauacauauguucucugccu

SEQ ID NO: 724510 - RNA, 22 nt, Human
uuuguaaccuaaagcaccagau

SEQ ID NO: 724511 - RNA, 22 nt, Human
uguagauauagaaaaagacuga

SEQ ID NO: 724512 - RNA, 22 nt, Human
ugcuuaauagugcacugguuuc

SEQ ID NO: 724513 - RNA, 17 nt, Human
ggcuuacaggugccagc

SEQ ID NO: 724514 - RNA, 22 nt, Human
agaaggccuaacuugggggcaa

SEQ ID NO: 724515 - RNA, 22 nt, Human
gacagccucaugugcaugaacu

SEQ ID NO: 724516 - RNA, 22 nt, Human
ugcuauuaaugaggcugcauuu

SEQ ID NO: 724517 - RNA, 22 nt, Human
cuuggaggaugugcggcugccc

SEQ ID NO: 724518 - RNA, 18 nt, Human
ugugccucugcaggacgu

SEQ ID NO: 724519 - RNA, 21 nt, Human
agaugaggauacugaggccua

SEQ ID NO: 724520 - RNA, 22 nt, Human
agacaucuugcacacauauacu

SEQ ID NO: 724521 - RNA, 21 nt, Human
ugugugugcaggcacacacac

SEQ ID NO: 724522 - RNA, 18 nt, Human
aucuuaacuugauggagu

SEQ ID NO: 724523 - RNA, 22 nt, Human
uguagugugacauaggugucca

SEQ ID NO: 724524 - RNA, 22 nt, Human
uacagacaaagagcaugcggua

SEQ ID NO: 724525 - RNA, 22 nt, Human
ugcagcccaggcgucagguggu

SEQ ID NO: 724526 - RNA, 22 nt, Human
acuaggaaggcauaugggcaga
